United States Patent Application Publication US 2007/0042381 A1 - sequence listing, part 86

SEQ ID NO: 3935774 - RNA, 17 nt, Human adenovirus E
aagcgcggaaagcggcc

SEQ ID NO: 3935775 - RNA, 14 nt, Human adenovirus E
aagcgugggccugu

SEQ ID NO: 3935776 - RNA, 23 nt, Human adenovirus E
aagcugaaaguggagcugccgcc

SEQ ID NO: 3935777 - RNA, 13 nt, Human adenovirus E
aaggaggugaaga

SEQ ID NO: 3935778 - RNA, 22 nt, Human adenovirus E
aaggccauggcgaccagcgugc

SEQ ID NO: 3935779 - RNA, 13 nt, Human adenovirus E
aaguccuccccag

SEQ ID NO: 3935780 - RNA, 13 nt, Human adenovirus E
aauaacagccagg

SEQ ID NO: 3935781 - RNA, 21 nt, Human adenovirus E
aauacaccacccucucccccc

SEQ ID NO: 3935782 - RNA, 12 nt, Human adenovirus E
aauaccacagcg

SEQ ID NO: 3935783 - RNA, 21 nt, Human adenovirus E
aaucguucucuccagcaccag

SEQ ID NO: 3935784 - RNA, 18 nt, Human adenovirus E
aaugccgcggugcuccuc

SEQ ID NO: 3935785 - RNA, 20 nt, Human adenovirus E
aaugugguagucaaauacug

SEQ ID NO: 3935786 - RNA, 21 nt, Human adenovirus E
aauuccgucgaccguuaaaaa

SEQ ID NO: 3935787 - RNA, 20 nt, Human adenovirus E
acaaaaaggaagaagaaagu

SEQ ID NO: 3935788 - RNA, 14 nt, Human adenovirus E
acaaaaaugaacau

SEQ ID NO: 3935789 - RNA, 15 nt, Human adenovirus E
acaaaugccagcuga

SEQ ID NO: 3935790 - RNA, 16 nt, Human adenovirus E
acaaggcccugggcau

SEQ ID NO: 3935791 - RNA, 21 nt, Human adenovirus E
acaagucggcggacaucgccu

SEQ ID NO: 3935792 - RNA, 23 nt, Human adenovirus E
acaagucuauguuggcacagcac

SEQ ID NO: 3935793 - RNA, 17 nt, Human adenovirus E
acacaccaccacagcaa

SEQ ID NO: 3935794 - RNA, 11 nt, Human adenovirus E
acaccacccuc

SEQ ID NO: 3935795 - RNA, 12 nt, Human adenovirus E
acaccuggacca

SEQ ID NO: 3935796 - RNA, 15 nt, Human adenovirus E
acacgcccagaaacc

SEQ ID NO: 3935797 - RNA, 16 nt, Human adenovirus E
acagcaccacagggca

SEQ ID NO: 3935798 - RNA, 18 nt, Human adenovirus E
acagcacucaggcagagg

SEQ ID NO: 3935799 - RNA, 19 nt, Human adenovirus E
acagcacucaggcagagga

SEQ ID NO: 3935800 - RNA, 11 nt, Human adenovirus E
acagcagcccc

SEQ ID NO: 3935801 - RNA, 12 nt, Human adenovirus E
acagccacucuc

SEQ ID NO: 3935802 - RNA, 23 nt, Human adenovirus E
acagccgccuggacccggugccg

SEQ ID NO: 3935803 - RNA, 16 nt, Human adenovirus E
acagcugaggauuguc

SEQ ID NO: 3935804 - RNA, 21 nt, Human adenovirus E
acagggcaauccucgcacaga

SEQ ID NO: 3935805 - RNA, 17 nt, Human adenovirus E
acagucuggaggaagac

SEQ ID NO: 3935806 - RNA, 18 nt, Human adenovirus E
acagucuggaggaagacg

SEQ ID NO: 3935807 - RNA, 18 nt, Human adenovirus E
acauccccgcgcuccugg

SEQ ID NO: 3935808 - RNA, 23 nt, Human adenovirus E
acaugcagccccggaugauccug

SEQ ID NO: 3935809 - RNA, 17 nt, Human adenovirus E
accacaaaaacuacacc

SEQ ID NO: 3935810 - RNA, 19 nt, Human adenovirus E
accacagggccagcaccgc

SEQ ID NO: 3935811 - RNA, 15 nt, Human adenovirus E
accacccagaccggu

SEQ ID NO: 3935812 - RNA, 22 nt, Human adenovirus E
accacccgguuguaccuggugg

SEQ ID NO: 3935813 - RNA, 21 nt, Human adenovirus E
accacccucuccccccgcaca

SEQ ID NO: 3935814 - RNA, 14 nt, Human adenovirus E
accaccgccucgga

SEQ ID NO: 3935815 - RNA, 21 nt, Human adenovirus E
accaccggucucgaucauuga

SEQ ID NO: 3935816 - RNA, 21 nt, Human adenovirus E
accaccuggacaaaauaccac

SEQ ID NO: 3935817 - RNA, 20 nt, Human adenovirus E
accagcagaaaaccagcagc

SEQ ID NO: 3935818 - RNA, 23 nt, Human adenovirus E
accaucaucuuagcgcuagcagc

SEQ ID NO: 3935819 - RNA, 17 nt, Human adenovirus E
accauugucaaugccac

SEQ ID NO: 3935820 - RNA, 15 nt, Human adenovirus E
acccacugcugaacc

SEQ ID NO: 3935821 - RNA, 11 nt, Human adenovirus E
acccagccaga

SEQ ID NO: 3935822 - RNA, 15 nt, Human adenovirus E
accccaccacccaga

SEQ ID NO: 3935823 - RNA, 15 nt, Human adenovirus E
accccauagccagcc

SEQ ID NO: 3935824 - RNA, 22 nt, Human adenovirus E
accccauccagguguagguuuc

SEQ ID NO: 3935825 - RNA, 23 nt, Human adenovirus E
  misc_feature (12)..(12): n is a, c, g, or u
acccccagcugnugagcgagacc

SEQ ID NO: 3935826 - RNA, 17 nt, Human adenovirus E
acccgugcagccacagc

SEQ ID NO: 3935827 - RNA, 18 nt, Human adenovirus E
acccgugcagccacagcg

SEQ ID NO: 3935828 - RNA, 13 nt, Human adenovirus E
acccucgcucugg

SEQ ID NO: 3935829 - RNA, 21 nt, Human adenovirus E
accgcaacucguaccugggcu

SEQ ID NO: 3935830 - RNA, 15 nt, Human adenovirus E
accgccgcggccgcc

SEQ ID NO: 3935831 - RNA, 17 nt, Human adenovirus E
accgccucggaccuggc

SEQ ID NO: 3935832 - RNA, 13 nt, Human adenovirus E
accgcgaggccau

SEQ ID NO: 3935833 - RNA, 14 nt, Human adenovirus E
accgcggcgccgcg

SEQ ID NO: 3935834 - RNA, 20 nt, Human adenovirus E
accgcggucauaccagcagc

SEQ ID NO: 3935835 - RNA, 15 nt, Human adenovirus E
accgcucccuggccu

SEQ ID NO: 3935836 - RNA, 19 nt, Human adenovirus E
accgcucccuggccugcaa

SEQ ID NO: 3935837 - RNA, 15 nt, Human adenovirus E
accggcucucggcca

SEQ ID NO: 3935838 - RNA, 19 nt, Human adenovirus E
accgggugcuaacgagcgc

SEQ ID NO: 3935839 - RNA, 18 nt, Human adenovirus E
accggguucgacgagcgc

SEQ ID NO: 3935840 - RNA, 22 nt, Human adenovirus E
accguggagcuggagugccugc

SEQ ID NO: 3935841 - RNA, 16 nt, Human adenovirus E
accguggugcagaaca

SEQ ID NO: 3935842 - RNA, 16 nt, Human adenovirus E
accgugucaugaugca

SEQ ID NO: 3935843 - RNA, 20 nt, Human adenovirus E
  misc_feature (4)..(4): n is a, c, g, or u
accnuacuuuuuccacccgc

SEQ ID NO: 3935844 - RNA, 19 nt, Human adenovirus E
accucaauccgcguaauug

SEQ ID NO: 3935845 - RNA, 17 nt, Human adenovirus E
accucaggcacacgcac

SEQ ID NO: 3935846 - RNA, 15 nt, Human adenovirus E
accuccaccugagcg

SEQ ID NO: 3935847 - RNA, 20 nt, Human adenovirus E
accucgacccccagaccggu

SEQ ID NO: 3935848 - RNA, 13 nt, Human adenovirus E
accucgcccugcu

SEQ ID NO: 3935849 - RNA, 18 nt, Human adenovirus E
accugauaucgccuccuu

SEQ ID NO: 3935850 - RNA, 13 nt, Human adenovirus E
accugcugggcau

SEQ ID NO: 3935851 - RNA, 17 nt, Human adenovirus E
accuggcuguuccaggg

SEQ ID NO: 3935852 - RNA, 22 nt, Human adenovirus E
accuggucucguacaugggcau

SEQ ID NO: 3935853 - RNA, 21 nt, Human adenovirus E
accuugcagcaggugcugccg

SEQ ID NO: 3935854 - RNA, 15 nt, Human adenovirus E
acgaagcccugcagg

SEQ ID NO: 3935855 - RNA, 18 nt, Human adenovirus E
acgaagcccugcaggaag

SEQ ID NO: 3935856 - RNA, 16 nt, Human adenovirus E
acgaggccggccuggu

SEQ ID NO: 3935857 - RNA, 18 nt, Human adenovirus E
acgauuggacccaggcca

SEQ ID NO: 3935858 - RNA, 13 nt, Human adenovirus E
acgcacccgggcu

SEQ ID NO: 3935859 - RNA, 20 nt, Human adenovirus E
gcaagacccccaauggggug

SEQ ID NO: 3935860 - RNA, 15 nt, Human adenovirus E
gcaagacccggucac

SEQ ID NO: 3935861 - RNA, 13 nt, Human adenovirus E
gcaagagauggag

SEQ ID NO: 3935862 - RNA, 23 nt, Human adenovirus E
gcaagaucuccaacguggagcug

SEQ ID NO: 3935863 - RNA, 14 nt, Human adenovirus E
gcaagccacaguac

SEQ ID NO: 3935864 - RNA, 21 nt, Human adenovirus E
gcaagcccguggucagcgacg

SEQ ID NO: 3935865 - RNA, 18 nt, Human adenovirus E
gcaagcgguuggggggag

SEQ ID NO: 3935866 - RNA, 15 nt, Human adenovirus E
gcaaggaccugagcg

SEQ ID NO: 3935867 - RNA, 19 nt, Human adenovirus E
gcaaggaggaugcagcagc

SEQ ID NO: 3935868 - RNA, 22 nt, Human adenovirus E
gcaaguacggcgcggccagccu

SEQ ID NO: 3935869 - RNA, 21 nt, Human adenovirus E
gcaaguuccggagcagcuggg

SEQ ID NO: 3935870 - RNA, 20 nt, Human adenovirus E
gcaaucaggcagcaccgggu

SEQ ID NO: 3935871 - RNA, 23 nt, Human adenovirus E
gcacagacugaacgacaagcugg

SEQ ID NO: 3935872 - RNA, 20 nt, Human adenovirus E
gcacagggacgauccccggg

SEQ ID NO: 3935873 - RNA, 20 nt, Human adenovirus E
gcaccaguuccgccaggagg

SEQ ID NO: 3935874 - RNA, 14 nt, Human adenovirus E
gcaccgccgcugca

SEQ ID NO: 3935875 - RNA, 14 nt, Human adenovirus E
gcaccucggcccgg

SEQ ID NO: 3935876 - RNA, 14 nt, Human adenovirus E
gcaccugugggacc

SEQ ID NO: 3935877 - RNA, 20 nt, Human adenovirus E
gcacgagaagguccuggcca

SEQ ID NO: 3935878 - RNA, 23 nt, Human adenovirus E
gcacgcggccguucaugggcacc

SEQ ID NO: 3935879 - RNA, 16 nt, Human adenovirus E
gcacguggacgagcag

SEQ ID NO: 3935880 - RNA, 23 nt, Human adenovirus E
gcacguggccgcggccaaccugg

SEQ ID NO: 3935881 - RNA, 15 nt, Human adenovirus E
gcacucaacccaccc

SEQ ID NO: 3935882 - RNA, 12 nt, Human adenovirus E
gcacucaggcag

SEQ ID NO: 3935883 - RNA, 20 nt, Human adenovirus E
gcacuuccgcgcucccuggg

SEQ ID NO: 3935884 - RNA, 15 nt, Human adenovirus E
gcagaaaaaggcggg

SEQ ID NO: 3935885 - RNA, 20 nt, Human adenovirus E
gcagaccuaccaggagauca

SEQ ID NO: 3935886 - RNA, 17 nt, Human adenovirus E
gcagaggcguccgcccu

SEQ ID NO: 3935887 - RNA, 15 nt, Human adenovirus E
gcagagucaggcugg

SEQ ID NO: 3935888 - RNA, 21 nt, Human adenovirus E
gcagaucuagggccucaggag

SEQ ID NO: 3935889 - RNA, 18 nt, Human adenovirus E
gcagcagcacacaacagg

SEQ ID NO: 3935890 - RNA, 14 nt, Human adenovirus E
gcagcagcagcaga

SEQ ID NO: 3935891 - RNA, 16 nt, Human adenovirus E
gcagcagcgagcuggg

SEQ ID NO: 3935892 - RNA, 16 nt, Human adenovirus E
gcagccccccugcucc

SEQ ID NO: 3935893 - RNA, 24 nt, Human adenovirus E
gcagccccccugcucccagagcug

SEQ ID NO: 3935894 - RNA, 13 nt, Human adenovirus E
gcagcccccgcug

SEQ ID NO: 3935895 - RNA, 16 nt, Human adenovirus E
gcagcccccgcuggag

SEQ ID NO: 3935896 - RNA, 20 nt, Human adenovirus E
  misc_feature (7)..(7): n is a, c, g, or u
gcagccnuucuccacgggga

SEQ ID NO: 3935897 - RNA, 19 nt, Human adenovirus E
gcagcgacgagacucgggc

SEQ ID NO: 3935898 - RNA, 20 nt, Human adenovirus E
gcagcggggacagauguggg

SEQ ID NO: 3935899 - RNA, 20 nt, Human adenovirus E
gcagcucacuaccaauaaca

SEQ ID NO: 3935900 - RNA, 16 nt, Human adenovirus E
gcaggaccaccagcac

SEQ ID NO: 3935901 - RNA, 14 nt, Human adenovirus E
gcaggagggggcca

SEQ ID NO: 3935902 - RNA, 18 nt, Human adenovirus E
gcaggccugcgggggcaa

SEQ ID NO: 3935903 - RNA, 14 nt, Human adenovirus E
gcaggcggcgcgag

SEQ ID NO: 3935904 - RNA, 18 nt, Human adenovirus E
gcagggagagggcgcuga

SEQ ID NO: 3935905 - RNA, 19 nt, Human adenovirus E
gcaggggcggcaggggcac

SEQ ID NO: 3935906 - RNA, 20 nt, Human adenovirus E
gcaggggcggcucggggccc

SEQ ID NO: 3935907 - RNA, 22 nt, Human adenovirus E
gcagggugaugagguccacacu

SEQ ID NO: 3935908 - RNA, 13 nt, Human adenovirus E
gcaguaguacaga

SEQ ID NO: 3935909 - RNA, 17 nt, Human adenovirus E
gcagucccacugcuagu

SEQ ID NO: 3935910 - RNA, 13 nt, Human adenovirus E
gcaguggcagcgg

SEQ ID NO: 3935911 - RNA, 14 nt, Human adenovirus E
gcaucagcuggaag

SEQ ID NO: 3935912 - RNA, 12 nt, Human adenovirus E
gcaucccagcug

SEQ ID NO: 3935913 - RNA, 23 nt, Human adenovirus E
gcaucccagcuggaucaugauca

SEQ ID NO: 3935914 - RNA, 17 nt, Human adenovirus E
gcaucuccagguggccg

SEQ ID NO: 3935915 - RNA, 17 nt, Human adenovirus E
gcaucucuucagcacuc

SEQ ID NO: 3935916 - RNA, 12 nt, Human adenovirus E
gcaucuggcccg

SEQ ID NO: 3935917 - RNA, 19 nt, Human adenovirus E
gcaucuggcccggcaggcc

SEQ ID NO: 3935918 - RNA, 20 nt, Human adenovirus E
gcaugaaggggacgagcugc

SEQ ID NO: 3935919 - RNA, 23 nt, Human adenovirus E
gcaugcaauggcagaucacccug

SEQ ID NO: 3935920 - RNA, 20 nt, Human adenovirus E
gcauggucucggugacggcg

SEQ ID NO: 3935921 - RNA, 16 nt, Human adenovirus E
gcaugucccgcccgcg

SEQ ID NO: 3935922 - RNA, 19 nt, Human adenovirus E
gcauucguuacucggagcu

SEQ ID NO: 3935923 - RNA, 17 nt, Human adenovirus E
gcauucuuaagcacacc

SEQ ID NO: 3935924 - RNA, 16 nt, Human adenovirus E
gccaaggggggucuga

SEQ ID NO: 3935925 - RNA, 15 nt, Human adenovirus E
gccacaccacagcua

SEQ ID NO: 3935926 - RNA, 22 nt, Human adenovirus E
gccacaccacagcuaccuccag

SEQ ID NO: 3935927 - RNA, 18 nt, Human adenovirus E
gccacccccagcgccgcg

SEQ ID NO: 3935928 - RNA, 14 nt, Human adenovirus E
gccaccucagcuca

SEQ ID NO: 3935929 - RNA, 21 nt, Human adenovirus E
gccacggcggcggcagcggcc

SEQ ID NO: 3935930 - RNA, 23 nt, Human adenovirus E
gccacggcggcggcagcggccau

SEQ ID NO: 3935931 - RNA, 18 nt, Human adenovirus E
gccacuacccggacgagu

SEQ ID NO: 3935932 - RNA, 17 nt, Human adenovirus E
gccagaucguccagggc

SEQ ID NO: 3935933 - RNA, 15 nt, Human adenovirus E
gccagcacccagacc

SEQ ID NO: 3935934 - RNA, 21 nt, Human adenovirus E
gccagccccgauuaugcaggg

SEQ ID NO: 3935935 - RNA, 13 nt, Human adenovirus E
gccagcuccuccu

SEQ ID NO: 3935936 - RNA, 18 nt, Human adenovirus E
gccagcugcaccacgcug

SEQ ID NO: 3935937 - RNA, 15 nt, Human adenovirus E
gccaggaggacuaca

SEQ ID NO: 3935938 - RNA, 18 nt, Human adenovirus E
gccaguccagacuguauu

SEQ ID NO: 3935939 - RNA, 17 nt, Human adenovirus E
gccauaggaccaccagg

SEQ ID NO: 3935940 - RNA, 20 nt, Human adenovirus E
gccaugcggaugaagcacaa

SEQ ID NO: 3935941 - RNA, 20 nt, Human adenovirus E
gccauggcgaccagcgugcg

SEQ ID NO: 3935942 - RNA, 15 nt, Human adenovirus E
gcccacggcccucag

SEQ ID NO: 3935943 - RNA, 22 nt, Human adenovirus E
gcccagccccgccaccuccgac

SEQ ID NO: 3935944 - RNA, 20 nt, Human adenovirus E
gcccaucauguacgccagca

SEQ ID NO: 3935945 - RNA, 20 nt, Human adenovirus E
gccccaguacgcgcucagca

SEQ ID NO: 3935946 - RNA, 23 nt, Human adenovirus E
gccccccggcggcgcgugcagug

SEQ ID NO: 3935947 - RNA, 19 nt, Human adenovirus E
gccccccugcucccagagc

SEQ ID NO: 3935948 - RNA, 17 nt, Human adenovirus E
gcccccgaucccuccag

SEQ ID NO: 3935949 - RNA, 13 nt, Human adenovirus E
gcccccgcuggag

SEQ ID NO: 3935950 - RNA, 18 nt, Human adenovirus E
gcccccgcuggaggcucc

SEQ ID NO: 3935951 - RNA, 19 nt, Human adenovirus E
gcccccgcuggaggcuccu

SEQ ID NO: 3935952 - RNA, 14 nt, Human adenovirus E
gccccgccaccucc

SEQ ID NO: 3935953 - RNA, 16 nt, Human adenovirus E
gccccgccgcccagcc

SEQ ID NO: 3935954 - RNA, 14 nt, Human adenovirus E
gccccgggcccagg

SEQ ID NO: 3935955 - RNA, 18 nt, Human adenovirus E
gccccggggccaggagga

SEQ ID NO: 3935956 - RNA, 19 nt, Human adenovirus E
gccccgguucgaggccggc

SEQ ID NO: 3935957 - RNA, 22 nt, Human adenovirus E
gcccgacaugaugcaagacccg

SEQ ID NO: 3935958 - RNA, 13 nt, Human adenovirus E
gcccgaggccgcc

SEQ ID NO: 3935959 - RNA, 13 nt, Human adenovirus E
gcccgccaccugc

SEQ ID NO: 3935960 - RNA, 15 nt, Human adenovirus E
gcccgcgcuugcugg

SEQ ID NO: 3935961 - RNA, 15 nt, Human adenovirus E
gcccgcggagcacga

SEQ ID NO: 3935962 - RNA, 23 nt, Human adenovirus E
gcccggaugcaggggcggcaggg

SEQ ID NO: 3935963 - RNA, 16 nt, Human adenovirus E
gcccggcgagcgcucc

SEQ ID NO: 3935964 - RNA, 15 nt, Human adenovirus E
gcccggguccaggcc

SEQ ID NO: 3935965 - RNA, 19 nt, Human adenovirus E
gcccgugaccuugcagcag

SEQ ID NO: 3935966 - RNA, 16 nt, Human adenovirus E
gcccgugaggcgcgcg

SEQ ID NO: 3935967 - RNA, 21 nt, Human adenovirus E
gcccgugggcggcggccuggg

SEQ ID NO: 3935968 - RNA, 21 nt, Human adenovirus E
gcccuggccaccuaccacauc

SEQ ID NO: 3935969 - RNA, 14 nt, Human adenovirus E
gcccugggccagga

SEQ ID NO: 3935970 - RNA, 16 nt, Human adenovirus E
gcccugggccaggacg

SEQ ID NO: 3935971 - RNA, 15 nt, Human adenovirus E
gcccuuuucaaccug

SEQ ID NO: 3935972 - RNA, 20 nt, Human adenovirus E
gccgaacucgcgccugcugc

SEQ ID NO: 3935973 - RNA, 19 nt, Human adenovirus E
gccgaccgcgauggcucgu

SEQ ID NO: 3935974 - RNA, 16 nt, Human adenovirus E
gccgaccgcggcgccg

SEQ ID NO: 3935975 - RNA, 14 nt, Human adenovirus E
gccgcaccgcuccc

SEQ ID NO: 3935976 - RNA, 13 nt, Human adenovirus E
gccgccagcuccu

SEQ ID NO: 3935977 - RNA, 12 nt, Human adenovirus E
gccgcccaggac

SEQ ID NO: 3935978 - RNA, 16 nt, Human adenovirus E
gccgccgcaagaccac

SEQ ID NO: 3935979 - RNA, 15 nt, Human adenovirus E
gccgccggugccgcc

SEQ ID NO: 3935980 - RNA, 22 nt, Human adenovirus E
gccgcgaacgcucugcaaggag

SEQ ID NO: 3935981 - RNA, 19 nt, Human adenovirus E
gccgcgcucgacaugaccg

SEQ ID NO: 3935982 - RNA, 20 nt, Human adenovirus E
gccgcugaccuuccgcgagu

SEQ ID NO: 3935983 - RNA, 22 nt, Human adenovirus E
gccggacuacuucuuccagacc

SEQ ID NO: 3935984 - RNA, 21 nt, Human adenovirus E
gccggaucggggagaucuucc

SEQ ID NO: 3935985 - RNA, 20 nt, Human adenovirus E
gccggcgcaaacccgggagc

SEQ ID NO: 3935986 - RNA, 15 nt, Human adenovirus E
gccgguccucgagcg

SEQ ID NO: 3935987 - RNA, 21 nt, Human adenovirus E
gccguccggcauuaacuccuc

SEQ ID NO: 3935988 - RNA, 16 nt, Human adenovirus E
gccgucgccgcaccgc

SEQ ID NO: 3935989 - RNA, 23 nt, Human adenovirus E
gccgucuacucgcagcagcugcg

SEQ ID NO: 3935990 - RNA, 22 nt, Human adenovirus E
gccuacgaguugaaccucuucu

SEQ ID NO: 3935991 - RNA, 22 nt, Human adenovirus E
gccuacuuugagcugcccgagg

SEQ ID NO: 3935992 - RNA, 19 nt, Human adenovirus E
gccuccacgcgcacaucca

SEQ ID NO: 3935993 - RNA, 22 nt, Human adenovirus E
gccucgcugaacuaccagaacg

SEQ ID NO: 3935994 - RNA, 16 nt, Human adenovirus E
gccucggaccuggccg

SEQ ID NO: 3935995 - RNA, 19 nt, Human adenovirus E
gccucuaccgaggucaggg

SEQ ID NO: 3935996 - RNA, 23 nt, Human adenovirus E
gccugaugcaccugugggaccug

SEQ ID NO: 3935997 - RNA, 23 nt, Human adenovirus E
gccugcaagacagucuggaggaa

SEQ ID NO: 3935998 - RNA, 15 nt, Human adenovirus E
gccugcaucucgugc

SEQ ID NO: 3935999 - RNA, 21 nt, Human adenovirus E
gccugggguucauguugugca

SEQ ID NO: 3936000 - RNA, 21 nt, Human adenovirus E
gccuuggaggcggcggcagga

SEQ ID NO: 3936001 - RNA, 20 nt, Human adenovirus E
gcgaccaggagcugaugcau

SEQ ID NO: 3936002 - RNA, 16 nt, Human adenovirus E
gcgagacgcccaggcc

SEQ ID NO: 3936003 - RNA, 17 nt, Human adenovirus E
gcgaguccaaccuggga

SEQ ID NO: 3936004 - RNA, 19 nt, Human adenovirus E
gcgaucccauuugagcugg

SEQ ID NO: 3936005 - RNA, 23 nt, Human adenovirus E
gcgaucccugagcuccucccuca

SEQ ID NO: 3936006 - RNA, 12 nt, Human adenovirus E
gcgaugcagccc

SEQ ID NO: 3936007 - RNA, 24 nt, Human adenovirus E
gcgaugggcccgugggcggcggcc

SEQ ID NO: 3936008 - RNA, 14 nt, Human adenovirus E
gcgcaacggccugc

SEQ ID NO: 3936009 - RNA, 18 nt, Human adenovirus E
gcgcacggccagcgcgcg

SEQ ID NO: 3936010 - RNA, 16 nt, Human adenovirus E
gcgcaucgcccggcgg

SEQ ID NO: 3936011 - RNA, 13 nt, Human adenovirus E
gcgcaucuccagg

SEQ ID NO: 3936012 - RNA, 21 nt, Human adenovirus E
gcgcaucuccagguggccggg

SEQ ID NO: 3936013 - RNA, 22 nt, Human adenovirus E
gcgccagcccaauggcaccugc

SEQ ID NO: 3936014 - RNA, 13 nt, Human adenovirus E
gcgcccagcaaga

SEQ ID NO: 3936015 - RNA, 15 nt, Human adenovirus E
gcgcccucaaaggcc

SEQ ID NO: 3936016 - RNA, 16 nt, Human adenovirus E
gcgccgggcccgcgau

SEQ ID NO: 3936017 - RNA, 21 nt, Human adenovirus E
gcgcgaggaggugacccuggg

SEQ ID NO: 3936018 - RNA, 19 nt, Human adenovirus E
gcgcgaguucgccccccgg

SEQ ID NO: 3936019 - RNA, 20 nt, Human adenovirus E
  misc_feature (9)..(9): n is a, c, g, or u
gcgcgcaanuacacccccgc

SEQ ID NO: 3936020 - RNA, 22 nt, Human adenovirus E
  misc_feature (9)..(9): n is a, c, g, or u
gcgcgcaanuacacccccgccg

SEQ ID NO: 3936021 - RNA, 12 nt, Human adenovirus E
gcgcgcccagca

SEQ ID NO: 3936022 - RNA, 19 nt, Human adenovirus E
gcgcgccgggcggcagggg

SEQ ID NO: 3936023 - RNA, 20 nt, Human adenovirus E
gcgcgccgggcggcaggggc

SEQ ID NO: 3936024 - RNA, 14 nt, Human adenovirus E
gcgcgcgcugcccg

SEQ ID NO: 3936025 - RNA, 20 nt, Human adenovirus E
gcgcgggaggcagguccaga

SEQ ID NO: 3936026 - RNA, 14 nt, Human adenovirus E
gcgcgucggccagg

SEQ ID NO: 3936027 - RNA, 13 nt, Human adenovirus E
gcgcuaccugcuc

SEQ ID NO: 3936028 - RNA, 22 nt, Human adenovirus E
gcgcucgccaacgcuccacgca

SEQ ID NO: 3936029 - RNA, 22 nt, Human adenovirus E
gcgcugaacgccuuccucagca

SEQ ID NO: 3936030 - RNA, 21 nt, Human adenovirus E
gcgcugcccguucucgcucgc

SEQ ID NO: 3936031 - RNA, 22 nt, Human adenovirus E
gcgcugguggagaacaaggcca

SEQ ID NO: 3936032 - RNA, 23 nt, Human adenovirus E
gcggaauaucaaaaucucugccg

SEQ ID NO: 3936033 - RNA, 23 nt, Human adenovirus E
gcggcacccgcgcgugcagauga

SEQ ID NO: 3936034 - RNA, 23 nt, Human adenovirus E
gcggccacggcggcggcagcggc

SEQ ID NO: 3936035 - RNA, 17 nt, Human adenovirus E
gcggcgacgaggccggc

SEQ ID NO: 3936036 - RNA, 17 nt, Human adenovirus E
gcggcgaucggggcgau

SEQ ID NO: 3936037 - RNA, 17 nt, Human adenovirus E
gcggcgauguugagcug

SEQ ID NO: 3936038 - RNA, 20 nt, Human adenovirus E
gcggcgauguugagcugcac

SEQ ID NO: 3936039 - RNA, 13 nt, Human adenovirus E
gcggcgcggagcc

SEQ ID NO: 3936040 - RNA, 20 nt, Human adenovirus E
gcgggagaagaacuucccca

SEQ ID NO: 3936041 - RNA, 14 nt, Human adenovirus E
gcgggcgcagcagc

SEQ ID NO: 3936042 - RNA, 13 nt, Human adenovirus E
gcggucccagagc

SEQ ID NO: 3936043 - RNA, 13 nt, Human adenovirus E
gcguaggccuggg

SEQ ID NO: 3936044 - RNA, 18 nt, Human adenovirus E
gcguccagcgcagccagg

SEQ ID NO: 3936045 - RNA, 16 nt, Human adenovirus E
gcgucgccggcggcgc

SEQ ID NO: 3936046 - RNA, 21 nt, Human adenovirus E
gcgugcacgaagcccugcagg

SEQ ID NO: 3936047 - RNA, 15 nt, Human adenovirus E
gcgugcaggccccgg

SEQ ID NO: 3936048 - RNA, 23 nt, Human adenovirus E
gcgugcaggccccggucggggac

SEQ ID NO: 3936049 - RNA, 15 nt, Human adenovirus E
gcgugccccagggca

SEQ ID NO: 3936050 - RNA, 22 nt, Human adenovirus E
gcguggcccgcuacaacagcac

SEQ ID NO: 3936051 - RNA, 14 nt, Human adenovirus E
gcguguggcagcag

SEQ ID NO: 3936052 - RNA, 17 nt, Human adenovirus E
gcuaguaccaaugagca

SEQ ID NO: 3936053 - RNA, 23 nt, Human adenovirus E
gcucaccacuacuaucucuuccu

SEQ ID NO: 3936054 - RNA, 12 nt, Human adenovirus E
gcucacccgcag

SEQ ID NO: 3936055 - RNA, 18 nt, Human adenovirus E
gcucagcaccgaggagga

SEQ ID NO: 3936056 - RNA, 16 nt, Human adenovirus E
gcuccagcuccagugu

SEQ ID NO: 3936057 - RNA, 20 nt, Human adenovirus E
gcucccggcggcgcucugac

SEQ ID NO: 3936058 - RNA, 13 nt, Human adenovirus E
gcuccgcgcugcc

SEQ ID NO: 3936059 - RNA, 21 nt, Human adenovirus E
gcuccggaauccugcccgcca

SEQ ID NO: 3936060 - RNA, 18 nt, Human adenovirus E
gcuccuagucgaagaccc

SEQ ID NO: 3936061 - RNA, 13 nt, Human adenovirus E
gcuccucccucag

SEQ ID NO: 3936062 - RNA, 12 nt, Human adenovirus E
gcucgccacauc

SEQ ID NO: 3936063 - RNA, 18 nt, Human adenovirus E
gcucgcgguggggcggcc

SEQ ID NO: 3936064 - RNA, 22 nt, Human adenovirus E
gcucgcgguggggcggccagcu

SEQ ID NO: 3936065 - RNA, 12 nt, Human adenovirus E
gcucuccacguc

SEQ ID NO: 3936066 - RNA, 22 nt, Human adenovirus E
gcugaacgccuuccucagcacc

SEQ ID NO: 3936067 - RNA, 16 nt, Human adenovirus E
gcugcaaccucugcac

SEQ ID NO: 3936068 - RNA, 17 nt, Human adenovirus E
gcugcaaccucugcacg

SEQ ID NO: 3936069 - RNA, 14 nt, Human adenovirus E
gcugcagagccagc

SEQ ID NO: 3936070 - RNA, 20 nt, Human adenovirus E
gcugcgcaacggccugcccg

SEQ ID NO: 3936071 - RNA, 20 nt, Human adenovirus E
gcugcggcgcggccuggacc

SEQ ID NO: 3936072 - RNA, 14 nt, Human adenovirus E
gcugcugcucaggg

SEQ ID NO: 3936073 - RNA, 14 nt, Human adenovirus E
gcugcugcugcugg

SEQ ID NO: 3936074 - RNA, 23 nt, Human adenovirus E
gcuggaagacguaugcgcaggag

SEQ ID NO: 3936075 - RNA, 18 nt, Human adenovirus E
gcuggaccacggcaaccc

SEQ ID NO: 3936076 - RNA, 16 nt, Human adenovirus E
gcuggcagagccccuu

SEQ ID NO: 3936077 - RNA, 17 nt, Human adenovirus E
gcuggcagagccccuuc

SEQ ID NO: 3936078 - RNA, 18 nt, Human adenovirus E
gcuggcuccuggaccugg

SEQ ID NO: 3936079 - RNA, 15 nt, Human adenovirus E
gcugggucugcgacc

SEQ ID NO: 3936080 - RNA, 14 nt, Human adenovirus E
gcuguagcagaacc

SEQ ID NO: 3936081 - RNA, 20 nt, Human adenovirus E
gcuguagcauagucugccug

SEQ ID NO: 3936082 - RNA, 13 nt, Human adenovirus E
gcuguccacgagc

SEQ ID NO: 3936083 - RNA, 21 nt, Human adenovirus E
gcuuaaaaccuauggcagcaa

SEQ ID NO: 3936084 - RNA, 14 nt, Human adenovirus E
gcuucacgcucgcc

SEQ ID NO: 3936085 - RNA, 16 nt, Human adenovirus E
gcuuccguggcggugc

SEQ ID NO: 3936086 - RNA, 13 nt, Human adenovirus E
gcuugcaggccug

SEQ ID NO: 3936087 - RNA, 22 nt, Human adenovirus E
gcuuggcgacgagcucggcggu

SEQ ID NO: 3936088 - RNA, 14 nt, Human adenovirus E
gcuuucggacauuu

SEQ ID NO: 3936089 - RNA, 15 nt, Human adenovirus E
ggaacuacagcaggc

SEQ ID NO: 3936090 - RNA, 16 nt, Human adenovirus E
ggaagaacaggaagaa

SEQ ID NO: 3936091 - RNA, 14 nt, Human adenovirus E
ggaaggugauuggc

SEQ ID NO: 3936092 - RNA, 18 nt, Human adenovirus E
ggaaugccgcggugcucc

SEQ ID NO: 3936093 - RNA, 15 nt, Human adenovirus E
ggacagcacucaggc

SEQ ID NO: 3936094 - RNA, 18 nt, Human adenovirus E
ggacaggguaucgcaauc

SEQ ID NO: 3936095 - RNA, 15 nt, Human adenovirus E
ugcccuucucgcuga

SEQ ID NO: 3936096 - RNA, 19 nt, Human adenovirus E
ugcccuucucgcugaacag

SEQ ID NO: 3936097 - RNA, 18 nt, Human adenovirus E
ugccgaccgcggcgccgc

SEQ ID NO: 3936098 - RNA, 19 nt, Human adenovirus E
ugccgaccgcggcgccgcg

SEQ ID NO: 3936099 - RNA, 18 nt, Human adenovirus E
ugccgcagccgguggggc

SEQ ID NO: 3936100 - RNA, 16 nt, Human adenovirus E
ugccgccgccgcuccg

SEQ ID NO: 3936101 - RNA, 16 nt, Human adenovirus E
ugccgcgguccuccuc

SEQ ID NO: 3936102 - RNA, 17 nt, Human adenovirus E
ugccgcgguccuccucg

SEQ ID NO: 3936103 - RNA, 18 nt, Human adenovirus E
ugccugaacgccugcugg

SEQ ID NO: 3936104 - RNA, 22 nt, Human adenovirus E
ugccuucaccaccugcaucugc

SEQ ID NO: 3936105 - RNA, 19 nt, Human adenovirus E
ugccuuggcaguacaguua

SEQ ID NO: 3936106 - RNA, 21 nt, Human adenovirus E
ugcgaccugacggagucuucc

SEQ ID NO: 3936107 - RNA, 15 nt, Human adenovirus E
ugcgaguuggaggag

SEQ ID NO: 3936108 - RNA, 22 nt, Human adenovirus E
ugcgaucucggucaugaacugc

SEQ ID NO: 3936109 - RNA, 12 nt, Human adenovirus E
ugcgcagggcca

SEQ ID NO: 3936110 - RNA, 15 nt, Human adenovirus E
ugcgcagggccaggc

SEQ ID NO: 3936111 - RNA, 15 nt, Human adenovirus E
ugcgcgucggccagg

SEQ ID NO: 3936112 - RNA, 12 nt, Human adenovirus E
ugcgcuccugga

SEQ ID NO: 3936113 - RNA, 19 nt, Human adenovirus E
ugcggcgggcgcagcagcg

SEQ ID NO: 3936114 - RNA, 21 nt, Human adenovirus E
ugcgggcggcgcugcagagcc

SEQ ID NO: 3936115 - RNA, 13 nt, Human adenovirus E
ugcguacaaaaug

SEQ ID NO: 3936116 - RNA, 16 nt, Human adenovirus E
ugcgucaucacccagg

SEQ ID NO: 3936117 - RNA, 22 nt, Human adenovirus E
ugcgucaucacccagggggcga

SEQ ID NO: 3936118 - RNA, 17 nt, Human adenovirus E
ugcuaacgagcgccccu

SEQ ID NO: 3936119 - RNA, 13 nt, Human adenovirus E
ugcuagucagcgg

SEQ ID NO: 3936120 - RNA, 15 nt, Human adenovirus E
ugcucuuugccuuca

SEQ ID NO: 3936121 - RNA, 22 nt, Human adenovirus E
ugcucuuugccuucaccaccug

SEQ ID NO: 3936122 - RNA, 23 nt, Human adenovirus E
ugcugaaaaagggccgcgggguc

SEQ ID NO: 3936123 - RNA, 17 nt, Human adenovirus E
ugcugcccgacggccau

SEQ ID NO: 3936124 - RNA, 17 nt, Human adenovirus E
ugcugcucgagcgccca

SEQ ID NO: 3936125 - RNA, 21 nt, Human adenovirus E
ugcugggcauucgcaagaggc

SEQ ID NO: 3936126 - RNA, 23 nt, Human adenovirus E
ugcuguaguggugugcauguuga

SEQ ID NO: 3936127 - RNA, 20 nt, Human adenovirus E
ugcuuucgugguauugcuau

SEQ ID NO: 3936128 - RNA, 16 nt, Human adenovirus E
uggaacaaacucugaa

SEQ ID NO: 3936129 - RNA, 22 nt, Human adenovirus E
uggaagacguaugcgcaggagc

SEQ ID NO: 3936130 - RNA, 15 nt, Human adenovirus E
uggaagagggcgagg

SEQ ID NO: 3936131 - RNA, 12 nt, Human adenovirus E
uggaccucggcc

SEQ ID NO: 3936132 - RNA, 20 nt, Human adenovirus E
uggacuucaccgagagccgc

SEQ ID NO: 3936133 - RNA, 17 nt, Human adenovirus E
uggagaacaaggccauc

SEQ ID NO: 3936134 - RNA, 13 nt, Human adenovirus E
uggagccauagca

SEQ ID NO: 3936135 - RNA, 17 nt, Human adenovirus E
uggagcgcguggcccgc

SEQ ID NO: 3936136 - RNA, 17 nt, Human adenovirus E
uggaggagcucagccgc

SEQ ID NO: 3936137 - RNA, 17 nt, Human adenovirus E
uggaucagguuuaggac

SEQ ID NO: 3936138 - RNA, 21 nt, Human adenovirus E
uggcaauggaggacccaccgc

SEQ ID NO: 3936139 - RNA, 19 nt, Human adenovirus E
uggcaccucucgcccccgc

SEQ ID NO: 3936140 - RNA, 15 nt, Human adenovirus E
uggcacgacaggcag

SEQ ID NO: 3936141 - RNA, 16 nt, Human adenovirus E
uggcacgacaggcagc

SEQ ID NO: 3936142 - RNA, 16 nt, Human adenovirus E
uggcagacgggcaugg

SEQ ID NO: 3936143 - RNA, 15 nt, Human adenovirus E
uggcagcccagccgc

SEQ ID NO: 3936144 - RNA, 19 nt, Human adenovirus E
uggcauuguuuuuugcaau

SEQ ID NO: 3936145 - RNA, 20 nt, Human adenovirus E
uggcauuuuugaugugggcc

SEQ ID NO: 3936146 - RNA, 15 nt, Human adenovirus E
uggccaacuaccugg

SEQ ID NO: 3936147 - RNA, 23 nt, Human adenovirus E
uggccaccucgccgcgcaggggc

SEQ ID NO: 3936148 - RNA, 15 nt, Human adenovirus E
uggccagcugcacca

SEQ ID NO: 3936149 - RNA, 21 nt, Human adenovirus E
uggccaucgugaacgcgcugg

SEQ ID NO: 3936150 - RNA, 20 nt, Human adenovirus E
uggccugcaacccccagcug

SEQ ID NO: 3936151 - RNA, 18 nt, Human adenovirus E
uggcgauggagcgcaugg

SEQ ID NO: 3936152 - RNA, 15 nt, Human adenovirus E
uggcgcgugaagacc

SEQ ID NO: 3936153 - RNA, 12 nt, Human adenovirus E
uggcuggcagag

SEQ ID NO: 3936154 - RNA, 20 nt, Human adenovirus E
ugggcacgcacccgggcuug

SEQ ID NO: 3936155 - RNA, 13 nt, Human adenovirus E
ugggcaugagccc

SEQ ID NO: 3936156 - RNA, 21 nt, Human adenovirus E
ugggcauucgcaagaggcagc

SEQ ID NO: 3936157 - RNA, 15 nt, Human adenovirus E
ugggcccuucgccuc

SEQ ID NO: 3936158 - RNA, 16 nt, Human adenovirus E
ugggccgguccucgag

SEQ ID NO: 3936159 - RNA, 14 nt, Human adenovirus E
ugggccugaugcac

SEQ ID NO: 3936160 - RNA, 16 nt, Human adenovirus E
ugggcguguggcagca

SEQ ID NO: 3936161 - RNA, 21 nt, Human adenovirus E
uggggcgcccucaaaggccgc

SEQ ID NO: 3936162 - RNA, 21 nt, Human adenovirus E
uggggcgugcaggccccgguc

SEQ ID NO: 3936163 - RNA, 15 nt, Human adenovirus E
ugggguagcagcgcc

SEQ ID NO: 3936164 - RNA, 15 nt, Human adenovirus E
ugguaguugagggag

SEQ ID NO: 3936165 - RNA, 13 nt, Human adenovirus E
uggugcaggagcg

SEQ ID NO: 3936166 - RNA, 15 nt, Human adenovirus E
ugguggccaccucgc

SEQ ID NO: 3936167 - RNA, 21 nt, Human adenovirus E
ugguggucaugcugacgagcc

SEQ ID NO: 3936168 - RNA, 23 nt, Human adenovirus E
ugguggucccgugcaggcaccgc

SEQ ID NO: 3936169 - RNA, 17 nt, Human adenovirus E
ugguucaccugcagcag

SEQ ID NO: 3936170 - RNA, 13 nt, Human adenovirus E
uguacagcaacaa

SEQ ID NO: 3936171 - RNA, 14 nt, Human adenovirus E
uguaucccacccug

SEQ ID NO: 3936172 - RNA, 14 nt, Human adenovirus E
ugucaaccacugcg

SEQ ID NO: 3936173 - RNA, 13 nt, Human adenovirus E
ugucaugaugcag

SEQ ID NO: 3936174 - RNA, 22 nt, Human adenovirus E
uguccacccgcucucugcucaa

SEQ ID NO: 3936175 - RNA, 18 nt, Human adenovirus E
uguccagcuggcgggcgg

SEQ ID NO: 3936176 - RNA, 15 nt, Human adenovirus E
uguggaccucggccu

SEQ ID NO: 3936177 - RNA, 15 nt, Human adenovirus E
ugugggacgaugagg

SEQ ID NO: 3936178 - RNA, 20 nt, Human adenovirus E
uguuccacgguggcuuccag

SEQ ID NO: 3936179 - RNA, 18 nt, Human adenovirus E
uuacaaguuucuccacca

SEQ ID NO: 3936180 - RNA, 17 nt, Human adenovirus E
uuaccacuaugcagcuc

SEQ ID NO: 3936181 - RNA, 13 nt, Human adenovirus E
uuaccgagcagca

SEQ ID NO: 3936182 - RNA, 13 nt, Human adenovirus E
uuauuguugcugu

SEQ ID NO: 3936183 - RNA, 21 nt, Human adenovirus E
uucacccccacggaggccagc

SEQ ID NO: 3936184 - RNA, 19 nt, Human adenovirus E
uucagggaggcgcugcuga

SEQ ID NO: 3936185 - RNA, 19 nt, Human adenovirus E
uuccacgguggcuuccagc

SEQ ID NO: 3936186 - RNA, 13 nt, Human adenovirus E
uuccucaaaugcu

SEQ ID NO: 3936187 - RNA, 18 nt, Human adenovirus E
uuccucgggaaaacucau

SEQ ID NO: 3936188 - RNA, 12 nt, Human adenovirus E
uucgaccccguc

SEQ ID NO: 3936189 - RNA, 23 nt, Human adenovirus E
uucgccuccuacgugcucuuugc

SEQ ID NO: 3936190 - RNA, 13 nt, Human adenovirus E
uucuccggcuccc

SEQ ID NO: 3936191 - RNA, 13 nt, Human adenovirus E
uucugcuguuagu

SEQ ID NO: 3936192 - RNA, 21 nt, Human adenovirus E
uucuggccugcacccucaucu

SEQ ID NO: 3936193 - RNA, 15 nt, Human adenovirus E
uucuuccuccuccac

SEQ ID NO: 3936194 - RNA, 13 nt, Human adenovirus E
uugcuugcugcua

SEQ ID NO: 3936195 - RNA, 20 nt, Human adenovirus E
uugucaaugccaccucagcu

SEQ ID NO: 3936196 - RNA, 16 nt, Human adenovirus E
uuuaaugaaucagaug

SEQ ID NO: 3936197 - RNA, 21 nt, Human adenovirus E
uuuccuccacccucccaggac

SEQ ID NO: 3936198 - RNA, 23 nt, Human adenovirus E
uuucgcggguugggacggcugcg

SEQ ID NO: 3936199 - RNA, 19 nt, Human adenovirus E
uuucuagaaacgaggagga

SEQ ID NO: 3936200 - RNA, 11 nt, Human adenovirus E
ggaccacugcc

SEQ ID NO: 3936201 - RNA, 18 nt, Human adenovirus E
ggacccggacgugcagcc

SEQ ID NO: 3936202 - RNA, 19 nt, Human adenovirus E
ggacccgguagaggugggc

SEQ ID NO: 3936203 - RNA, 23 nt, Human adenovirus E
ggacccuacguagaagaggugga

SEQ ID NO: 3936204 - RNA, 21 nt, Human adenovirus E
ggaccgaaagagggugcugag

SEQ ID NO: 3936205 - RNA, 13 nt, Human adenovirus E
ggaccgaggggga

SEQ ID NO: 3936206 - RNA, 19 nt, Human adenovirus E
ggaccuggccaaccaggcc

SEQ ID NO: 3936207 - RNA, 13 nt, Human adenovirus E
ggacgaggagggc

SEQ ID NO: 3936208 - RNA, 21 nt, Human adenovirus E
ggacggcugcgggaguauggc

SEQ ID NO: 3936209 - RNA, 13 nt, Human adenovirus E
ggacguccagagc

SEQ ID NO: 3936210 - RNA, 13 nt, Human adenovirus E
ggacuugccgcag

SEQ ID NO: 3936211 - RNA, 13 nt, Human adenovirus E
ggagacgcgcggc

SEQ ID NO: 3936212 - RNA, 19 nt, Human adenovirus E
ggagccuuguugcgcaggg

SEQ ID NO: 3936213 - RNA, 17 nt, Human adenovirus E
ggagcggcgaggagccc

SEQ ID NO: 3936214 - RNA, 14 nt, Human adenovirus E
ggagcuccuggagc

SEQ ID NO: 3936215 - RNA, 18 nt, Human adenovirus E
ggagcugaccaaccuggu

SEQ ID NO: 3936216 - RNA, 14 nt, Human adenovirus E
ggagcuguccaggg

SEQ ID NO: 3936217 - RNA, 14 nt, Human adenovirus E
ggaggaagacuggg

SEQ ID NO: 3936218 - RNA, 14 nt, Human adenovirus E
ggaggaugcagcag

SEQ ID NO: 3936219 - RNA, 17 nt, Human adenovirus E
ggaggaugcagcagcug

SEQ ID NO: 3936220 - RNA, 18 nt, Human adenovirus E
ggaggauguccaagcgca

SEQ ID NO: 3936221 - RNA, 18 nt, Human adenovirus E
ggaggauuuggaggaaga

SEQ ID NO: 3936222 - RNA, 12 nt, Human adenovirus E
ggaggcagagga

SEQ ID NO: 3936223 - RNA, 15 nt, Human adenovirus E
ggaggccagcaccca

SEQ ID NO: 3936224 - RNA, 14 nt, Human adenovirus E
ggaggggcggaaca

SEQ ID NO: 3936225 - RNA, 20 nt, Human adenovirus E
ggaguacuucaaaaugaaga

SEQ ID NO: 3936226 - RNA, 14 nt, Human adenovirus E
ggagugaugaagau

SEQ ID NO: 3936227 - RNA, 13 nt, Human adenovirus E
ggaguuccuccac

SEQ ID NO: 3936228 - RNA, 21 nt, Human adenovirus E
ggaucgcuguccacgagcgcc

SEQ ID NO: 3936229 - RNA, 12 nt, Human adenovirus E
ggaucuggaggg

SEQ ID NO: 3936230 - RNA, 16 nt, Human adenovirus E
ggauggcuggcagagc

SEQ ID NO: 3936231 - RNA, 23 nt, Human adenovirus E
ggauuccgcggcuaacgagggcg

SEQ ID NO: 3936232 - RNA, 18 nt, Human adenovirus E
ggcaccucucgcccccgc

SEQ ID NO: 3936233 - RNA, 14 nt, Human adenovirus E
ggcaccugcgagcc

SEQ ID NO: 3936234 - RNA, 13 nt, Human adenovirus E
ggcaccuggagcg

SEQ ID NO: 3936235 - RNA, 17 nt, Human adenovirus E
ggcacgacaggcagcgg

SEQ ID NO: 3936236 - RNA, 12 nt, Human adenovirus E
ggcagaggagga

SEQ ID NO: 3936237 - RNA, 20 nt, Human adenovirus E
ggcagcagugucuggaggag

SEQ ID NO: 3936238 - RNA, 24 nt, Human adenovirus E
ggcagcagugucuggaggagcaga

SEQ ID NO: 3936239 - RNA, 12 nt, Human adenovirus E
ggcagcgccgcc

SEQ ID NO: 3936240 - RNA, 14 nt, Human adenovirus E
ggcagcggggacag

SEQ ID NO: 3936241 - RNA, 19 nt, Human adenovirus E
ggcagguccagaccucggc

SEQ ID NO: 3936242 - RNA, 16 nt, Human adenovirus E
ggcaucuugcacgaga

SEQ ID NO: 3936243 - RNA, 18 nt, Human adenovirus E
ggccaaagucuaaaaaua

SEQ ID NO: 3936244 - RNA, 16 nt, Human adenovirus E
ggccaacgccagucca

SEQ ID NO: 3936245 - RNA, 15 nt, Human adenovirus E
ggccaacuaccuggc

SEQ ID NO: 3936246 - RNA, 19 nt, Human adenovirus E
ggccacccccagcgccgcg

SEQ ID NO: 3936247 - RNA, 13 nt, Human adenovirus E
ggccaccucgccg

SEQ ID NO: 3936248 - RNA, 18 nt, Human adenovirus E
ggccagcacccagaccau

SEQ ID NO: 3936249 - RNA, 22 nt, Human adenovirus E
ggccagcugcaccacgcugcgc

SEQ ID NO: 3936250 - RNA, 20 nt, Human adenovirus E
ggccaggcgcacguggacga

SEQ ID NO: 3936251 - RNA, 16 nt, Human adenovirus E
ggccauccuggaggcc

SEQ ID NO: 3936252 - RNA, 16 nt, Human adenovirus E
ggcccugcggugguga

SEQ ID NO: 3936253 - RNA, 17 nt, Human adenovirus E
ggccgaaguccagcuga

SEQ ID NO: 3936254 - RNA, 15 nt, Human adenovirus E
ggccgaucccugcuu

SEQ ID NO: 3936255 - RNA, 22 nt, Human adenovirus E
ggccgcgaacgcucugcaagga

SEQ ID NO: 3936256 - RNA, 17 nt, Human adenovirus E
ggccgcgagggugcugc

SEQ ID NO: 3936257 - RNA, 14 nt, Human adenovirus E
ggccgcggccaacc

SEQ ID NO: 3936258 - RNA, 14 nt, Human adenovirus E
ggccggccggauuc

SEQ ID NO: 3936259 - RNA, 19 nt, Human adenovirus E
ggccgucuacucgcagcag

SEQ ID NO: 3936260 - RNA, 14 nt, Human adenovirus E
ggccguggcccagc

SEQ ID NO: 3936261 - RNA, 20 nt, Human adenovirus E
ggccuaguugcgggugggcu

SEQ ID NO: 3936262 - RNA, 20 nt, Human adenovirus E
ggccucgacucccaccugcu

SEQ ID NO: 3936263 - RNA, 16 nt, Human adenovirus E
ggccugcaacccccag

SEQ ID NO: 3936264 - RNA, 11 nt, Human adenovirus E
ggccugcaaga

SEQ ID NO: 3936265 - RNA, 16 nt, Human adenovirus E
ggcgacgagcucggcg

SEQ ID NO: 3936266 - RNA, 16 nt, Human adenovirus E
ggcgacgaggccggcc

SEQ ID NO: 3936267 - RNA, 19 nt, Human adenovirus E
ggcgacgaggccggccugg

SEQ ID NO: 3936268 - RNA, 17 nt, Human adenovirus E
ggcgacgggcucucgcc

SEQ ID NO: 3936269 - RNA, 15 nt, Human adenovirus E
ggcgacuaccuccac

SEQ ID NO: 3936270 - RNA, 19 nt, Human adenovirus E
ggcgagaucgagggcgagc

SEQ ID NO: 3936271 - RNA, 20 nt, Human adenovirus E
ggcgagcgcuccggcaccgc

SEQ ID NO: 3936272 - RNA, 13 nt, Human adenovirus E
ggcgagcucgacg

SEQ ID NO: 3936273 - RNA, 18 nt, Human adenovirus E
ggcgaggggcuggcgcgc

SEQ ID NO: 3936274 - RNA, 22 nt, Human adenovirus E
ggcgaggggcuggcgcgccugg

SEQ ID NO: 3936275 - RNA, 15 nt, Human adenovirus E
ggcgagggggagcgc

SEQ ID NO: 3936276 - RNA, 14 nt, Human adenovirus E
ggcgagguugagcu

SEQ ID NO: 3936277 - RNA, 14 nt, Human adenovirus E
ggcgaguaccugga

SEQ ID NO: 3936278 - RNA, 15 nt, Human adenovirus E
ggcgaugcagccccc

SEQ ID NO: 3936279 - RNA, 17 nt, Human adenovirus E
ggcgauguugagcugca

SEQ ID NO: 3936280 - RNA, 19 nt, Human adenovirus E
ggcgauguugagcugcacg

SEQ ID NO: 3936281 - RNA, 22 nt, Human adenovirus E
ggcgcacguggacgagcagacc

SEQ ID NO: 3936282 - RNA, 14 nt, Human adenovirus E
ggcgcagggcaugg

SEQ ID NO: 3936283 - RNA, 20 nt, Human adenovirus E
ggcgcagggcaugguguugc

SEQ ID NO: 3936284 - RNA, 23 nt, Human adenovirus E
ggcgcccugcgcgucggccaggu

SEQ ID NO: 3936285 - RNA, 16 nt, Human adenovirus E
ggcgcgagcugagcga

SEQ ID NO: 3936286 - RNA, 16 nt, Human adenovirus E
ggcgcggaggaaggaa

SEQ ID NO: 3936287 - RNA, 14 nt, Human adenovirus E
ggcgcggccuggac

SEQ ID NO: 3936288 - RNA, 19 nt, Human adenovirus E
ggcgcucuccccccaggga

SEQ ID NO: 3936289 - RNA, 19 nt, Human adenovirus E
ggcggauggcuggcagagc

SEQ ID NO: 3936290 - RNA, 17 nt, Human adenovirus E
ggcggcgcacgggcaga

SEQ ID NO: 3936291 - RNA, 18 nt, Human adenovirus E
ggcggcgcugcagagcca

SEQ ID NO: 3936292 - RNA, 21 nt, Human adenovirus E
ggcggcgcugcagagccagcc

SEQ ID NO: 3936293 - RNA, 13 nt, Human adenovirus E
ggcggcggcagcg

SEQ ID NO: 3936294 - RNA, 12 nt, Human adenovirus E
ggcggcggccug

SEQ ID NO: 3936295 - RNA, 11 nt, Human adenovirus E
ggcggcggcgc

SEQ ID NO: 3936296 - RNA, 13 nt, Human adenovirus E
ggcggcggcgcgc

SEQ ID NO: 3936297 - RNA, 13 nt, Human adenovirus E
ggcggcuggggcg

SEQ ID NO: 3936298 - RNA, 14 nt, Human adenovirus E
ggcggcuggggcga

SEQ ID NO: 3936299 - RNA, 16 nt, Human adenovirus E
ggcgggcgcagcagcg

SEQ ID NO: 3936300 - RNA, 13 nt, Human adenovirus E
ggcggugcaggcc

SEQ ID NO: 3936301 - RNA, 18 nt, Human adenovirus E
ggcggugcccgaggccgc

SEQ ID NO: 3936302 - RNA, 21 nt, Human adenovirus E
ggcguccgcgccgcagugggc

SEQ ID NO: 3936303 - RNA, 16 nt, Human adenovirus E
ggcgucgucgccggag

SEQ ID NO: 3936304 - RNA, 20 nt, Human adenovirus E
ggcgugccccagggcauggg

SEQ ID NO: 3936305 - RNA, 15 nt, Human adenovirus E
ggcguguggcagcag

SEQ ID NO: 3936306 - RNA, 19 nt, Human adenovirus E
ggcuccuagucgaagaccc

SEQ ID NO: 3936307 - RNA, 22 nt, Human adenovirus E
ggcucgacuccguggccuggag

SEQ ID NO: 3936308 - RNA, 14 nt, Human adenovirus E
ggcuggucgggguc

SEQ ID NO: 3936309 - RNA, 19 nt, Human adenovirus E
ggcuucaggcgccagcgcc

SEQ ID NO: 3936310 - RNA, 15 nt, Human adenovirus E
ggcuucccccaggau

SEQ ID NO: 3936311 - RNA, 23 nt, Human adenovirus E
ggcuucccccaggaugccccgag

SEQ ID NO: 3936312 - RNA, 19 nt, Human adenovirus E
ggcuucgacaccuggacca

SEQ ID NO: 3936313 - RNA, 12 nt, Human adenovirus E
ggcuugcagacc

SEQ ID NO: 3936314 - RNA, 13 nt, Human adenovirus E
ggcuugcagaccg

SEQ ID NO: 3936315 - RNA, 13 nt, Human adenovirus E
gggacagaggagg

SEQ ID NO: 3936316 - RNA, 22 nt, Human adenovirus E
gggcaacaucuccuucacccgg

SEQ ID NO: 3936317 - RNA, 18 nt, Human adenovirus E
gggcaauccucgcacaga

SEQ ID NO: 3936318 - RNA, 12 nt, Human adenovirus E
gggcaggcgcug

SEQ ID NO: 3936319 - RNA, 15 nt, Human adenovirus E
gggcagggagagggc

SEQ ID NO: 3936320 - RNA, 22 nt, Human adenovirus E
gggcaugaccucggcacucagg

SEQ ID NO: 3936321 - RNA, 21 nt, Human adenovirus E
gggccauguucagggcggcca

SEQ ID NO: 3936322 - RNA, 22 nt, Human adenovirus E
gggccauguucagggcggccag

SEQ ID NO: 3936323 - RNA, 18 nt, Human adenovirus E
gggcccagguuggugcga

SEQ ID NO: 3936324 - RNA, 20 nt, Human adenovirus E
gggccgcuggcuccuggacc

SEQ ID NO: 3936325 - RNA, 22 nt, Human adenovirus E
gggccugcucgagugccacugc

SEQ ID NO: 3936326 - RNA, 13 nt, Human adenovirus E
gggccuggccgcc

SEQ ID NO: 3936327 - RNA, 14 nt, Human adenovirus E
gggccuggccgccg

SEQ ID NO: 3936328 - RNA, 20 nt, Human adenovirus E
gggcgccgagcuccugcccg

SEQ ID NO: 3936329 - RNA, 13 nt, Human adenovirus E
gggcggcaggggc

SEQ ID NO: 3936330 - RNA, 20 nt, Human adenovirus E
gggcgugcagaccguggaca

SEQ ID NO: 3936331 - RNA, 14 nt, Human adenovirus E
gggcgugccccagg

SEQ ID NO: 3936332 - RNA, 17 nt, Human adenovirus E
gggcgugcgcuccugga

SEQ ID NO: 3936333 - RNA, 18 nt, Human adenovirus E
gggcuaccgaggaagaaa

SEQ ID NO: 3936334 - RNA, 18 nt, Human adenovirus E
gggcugcuagucagcggc

SEQ ID NO: 3936335 - RNA, 21 nt, Human adenovirus E
ggggccacgagccggggcagc

SEQ ID NO: 3936336 - RNA, 12 nt, Human adenovirus E
ggggccaggagg

SEQ ID NO: 3936337 - RNA, 17 nt, Human adenovirus E
ggggcccggaugcaggg

SEQ ID NO: 3936338 - RNA, 23 nt, Human adenovirus E
ggggccgggaccgagggggagag

SEQ ID NO: 3936339 - RNA, 12 nt, Human adenovirus E
ggggcgggggag

SEQ ID NO: 3936340 - RNA, 20 nt, Human adenovirus E
gggggccacgagccggggca

SEQ ID NO: 3936341 - RNA, 16 nt, Human adenovirus E
gggggcguaguucccc

SEQ ID NO: 3936342 - RNA, 15 nt, Human adenovirus E
ggguccaggccagca

SEQ ID NO: 3936343 - RNA, 13 nt, Human adenovirus E
gggucccggccgg

SEQ ID NO: 3936344 - RNA, 15 nt, Human adenovirus E
gggugcgcgacgccg

SEQ ID NO: 3936345 - RNA, 23 nt, Human adenovirus E
ggguggucuccgucacggugaag

SEQ ID NO: 3936346 - RNA, 17 nt, Human adenovirus E
gguaaauccaagccagc

SEQ ID NO: 3936347 - RNA, 23 nt, Human adenovirus E
gguagcuccauugcagggccucg

SEQ ID NO: 3936348 - RNA, 22 nt, Human adenovirus E
ggucagaaaagacgaucuuuuu

SEQ ID NO: 3936349 - RNA, 22 nt, Human adenovirus E
ggucagcgacgagcagcuggcc

SEQ ID NO: 3936350 - RNA, 16 nt, Human adenovirus E
gguccaggccagcacg

SEQ ID NO: 3936351 - RNA, 14 nt, Human adenovirus E
ggucccggccgggg

SEQ ID NO: 3936352 - RNA, 14 nt, Human adenovirus E
gguccgcaaaugca

SEQ ID NO: 3936353 - RNA, 13 nt, Human adenovirus E
gguccgguccuuc

SEQ ID NO: 3936354 - RNA, 18 nt, Human adenovirus E
gguccucgagcggugugc

SEQ ID NO: 3936355 - RNA, 23 nt, Human adenovirus E
ggucgagcgcgagcaaggacaga

SEQ ID NO: 3936356 - RNA, 21 nt, Human adenovirus E
ggucgaguuggaaggcgacaa

SEQ ID NO: 3936357 - RNA, 23 nt, Human adenovirus E
ggucucgcacuccacgagccagg

SEQ ID NO: 3936358 - RNA, 18 nt, Human adenovirus E
ggugaccguggagcugga

SEQ ID NO: 3936359 - RNA, 21 nt, Human adenovirus E
ggugauacgguucucgagaug

SEQ ID NO: 3936360 - RNA, 15 nt, Human adenovirus E
ggugauccuccacca

SEQ ID NO: 3936361 - RNA, 19 nt, Human adenovirus E
ccaccgcgaguccaaccug

SEQ ID NO: 3936362 - RNA, 20 nt, Human adenovirus E
ccaccgcgaguccaaccugg

SEQ ID NO: 3936363 - RNA, 20 nt, Human adenovirus E
ccacgagccggggcagcgcc

SEQ ID NO: 3936364 - RNA, 19 nt, Human adenovirus E
ccacgccuuacauguggag

SEQ ID NO: 3936365 - RNA, 17 nt, Human adenovirus E
ccacgcgcacauccaga

SEQ ID NO: 3936366 - RNA, 20 nt, Human adenovirus E
ccacgcggggcgggagcugc

SEQ ID NO: 3936367 - RNA, 23 nt, Human adenovirus E
ccacgcggggcgggagcugcggc

SEQ ID NO: 3936368 - RNA, 15 nt, Human adenovirus E
ccacggaggccagca

SEQ ID NO: 3936369 - RNA, 17 nt, Human adenovirus E
ccacggaggccagcacc

SEQ ID NO: 3936370 - RNA, 13 nt, Human adenovirus E
ccacggccagggc

SEQ ID NO: 3936371 - RNA, 19 nt, Human adenovirus E
ccacggcccucagcaucag

SEQ ID NO: 3936372 - RNA, 22 nt, Human adenovirus E
ccacguacaugaucuccuuggg

SEQ ID NO: 3936373 - RNA, 15 nt, Human adenovirus E
ccacuacagcagcag

SEQ ID NO: 3936374 - RNA, 15 nt, Human adenovirus E
ccacuacuaucucuu

SEQ ID NO: 3936375 - RNA, 14 nt, Human adenovirus E
ccacucucucagac

SEQ ID NO: 3936376 - RNA, 14 nt, Human adenovirus E
ccacuggcucccgc

SEQ ID NO: 3936377 - RNA, 14 nt, Human adenovirus E
ccagaacgaccaca

SEQ ID NO: 3936378 - RNA, 18 nt, Human adenovirus E
ccagaacgaccacagcaa

SEQ ID NO: 3936379 - RNA, 16 nt, Human adenovirus E
ccagacgcgcggcuuc

SEQ ID NO: 3936380 - RNA, 21 nt, Human adenovirus E
ccagauccucagguaaaucaa

SEQ ID NO: 3936381 - RNA, 20 nt, Human adenovirus E
ccagcaaagccuccacgcgc

SEQ ID NO: 3936382 - RNA, 20 nt, Human adenovirus E
ccagcaccauggaggugcag

SEQ ID NO: 3936383 - RNA, 15 nt, Human adenovirus E
ccagcacccagacca

SEQ ID NO: 3936384 - RNA, 19 nt, Human adenovirus E
ccagcagaaaaccagcagc

SEQ ID NO: 3936385 - RNA, 17 nt, Human adenovirus E
ccagccccgccaccucc

SEQ ID NO: 3936386 - RNA, 20 nt, Human adenovirus E
ccagcgaaggguaugcuuuc

SEQ ID NO: 3936387 - RNA, 17 nt, Human adenovirus E
ccagcgccggcaggacc

SEQ ID NO: 3936388 - RNA, 19 nt, Human adenovirus E
ccagcggcgaggaggaugu

SEQ ID NO: 3936389 - RNA, 18 nt, Human adenovirus E
ccagcugaaaaccaucau

SEQ ID NO: 3936390 - RNA, 13 nt, Human adenovirus E
ccagcuggccuug

SEQ ID NO: 3936391 - RNA, 17 nt, Human adenovirus E
ccaggacuacuccaccc

SEQ ID NO: 3936392 - RNA, 19 nt, Human adenovirus E
ccaggccgaaguccagcug

SEQ ID NO: 3936393 - RNA, 17 nt, Human adenovirus E
ccaggcggucccagagc

SEQ ID NO: 3936394 - RNA, 12 nt, Human adenovirus E
ccagggcauggg

SEQ ID NO: 3936395 - RNA, 12 nt, Human adenovirus E
ccaggugguggc

SEQ ID NO: 3936396 - RNA, 15 nt, Human adenovirus E
ccauacuccaccucc

SEQ ID NO: 3936397 - RNA, 17 nt, Human adenovirus E
ccauagcuuaccgagca

SEQ ID NO: 3936398 - RNA, 22 nt, Human adenovirus E
ccauaguucaacacgcuccagc

SEQ ID NO: 3936399 - RNA, 21 nt, Human adenovirus E
ccaucgugcagaaccccacca

SEQ ID NO: 3936400 - RNA, 15 nt, Human adenovirus E
ccaucuccgcuccgg

SEQ ID NO: 3936401 - RNA, 14 nt, Human adenovirus E
ccauggaggugcag

SEQ ID NO: 3936402 - RNA, 19 nt, Human adenovirus E
ccaugguggcgcagcugac

SEQ ID NO: 3936403 - RNA, 20 nt, Human adenovirus E
ccaugguggcgcagcugacc

SEQ ID NO: 3936404 - RNA, 20 nt, Human adenovirus E
ccauggugggcacgcacccg

SEQ ID NO: 3936405 - RNA, 20 nt, Human adenovirus E
ccauguuuucugccaacacc

SEQ ID NO: 3936406 - RNA, 16 nt, Human adenovirus E
cccaacuacgcgcugc

SEQ ID NO: 3936407 - RNA, 16 nt, Human adenovirus E
cccaauggcaccugcg

SEQ ID NO: 3936408 - RNA, 15 nt, Human adenovirus E
cccaauugcaagcca

SEQ ID NO: 3936409 - RNA, 16 nt, Human adenovirus E
cccacauuacacagac

SEQ ID NO: 3936410 - RNA, 13 nt, Human adenovirus E
cccacgcuacguc

SEQ ID NO: 3936411 - RNA, 13 nt, Human adenovirus E
cccacggccgcca

SEQ ID NO: 3936412 - RNA, 20 nt, Human adenovirus E
cccagaccggugaggagcuc

SEQ ID NO: 3936413 - RNA, 17 nt, Human adenovirus E
cccagaucaucggcacc

SEQ ID NO: 3936414 - RNA, 22 nt, Human adenovirus E
cccagcaagauguacggaggcg

SEQ ID NO: 3936415 - RNA, 16 nt, Human adenovirus E
cccagccccgccaccu

SEQ ID NO: 3936416 - RNA, 18 nt, Human adenovirus E
cccagccccgccaccucc

SEQ ID NO: 3936417 - RNA, 12 nt, Human adenovirus E
cccaggacaugg

SEQ ID NO: 3936418 - RNA, 21 nt, Human adenovirus E
cccagguuggugcgacugggc

SEQ ID NO: 3936419 - RNA, 16 nt, Human adenovirus E
cccaucaucgccgcgg

SEQ ID NO: 3936420 - RNA, 21 nt, Human adenovirus E
  misc_feature (6)..(6): n is a, c, g, or u
cccaunuagcagucccacugc

SEQ ID NO: 3936421 - RNA, 18 nt, Human adenovirus E
ccccacggaggccagcac

SEQ ID NO: 3936422 - RNA, 13 nt, Human adenovirus E
ccccauagccagc

SEQ ID NO: 3936423 - RNA, 18 nt, Human adenovirus E
  misc_feature (7)..(7): n is a, c, g, or u
ccccaunuagcaguccca

SEQ ID NO: 3936424 - RNA, 18 nt, Human adenovirus E
ccccgcagcagucgcugc

SEQ ID NO: 3936425 - RNA, 18 nt, Human adenovirus E
ccccggcggcgcgugcag

SEQ ID NO: 3936426 - RNA, 20 nt, Human adenovirus E
  misc_feature (9)..(9): n is a, c, g, or u
ccccgggcnugggcgugcag

SEQ ID NO: 3936427 - RNA, 16 nt, Human adenovirus E
ccccggggccaggagg

SEQ ID NO: 3936428 - RNA, 12 nt, Human adenovirus E
ccccgugccagc

SEQ ID NO: 3936429 - RNA, 14 nt, Human adenovirus E
ccccucagcgugga

SEQ ID NO: 3936430 - RNA, 19 nt, Human adenovirus E
ccccucagcguggaggagc

SEQ ID NO: 3936431 - RNA, 13 nt, Human adenovirus E
ccccuccacagcc

SEQ ID NO: 3936432 - RNA, 15 nt, Human adenovirus E
ccccuucacggacag

SEQ ID NO: 3936433 - RNA, 16 nt, Human adenovirus E
cccgaggcccuggcca

SEQ ID NO: 3936434 - RNA, 23 nt, Human adenovirus E
cccgauuaugcagggugaugagg

SEQ ID NO: 3936435 - RNA, 22 nt, Human adenovirus E
cccgcagaagcaagcuccagcu

SEQ ID NO: 3936436 - RNA, 22 nt, Human adenovirus E
cccgccucguuccagacgcggc

SEQ ID NO: 3936437 - RNA, 20 nt, Human adenovirus E
cccgcgaugcgggcggcgcu

SEQ ID NO: 3936438 - RNA, 18 nt, Human adenovirus E
cccgcgccgacgcccuuu

SEQ ID NO: 3936439 - RNA, 12 nt, Human adenovirus E
cccgcgcggggc

SEQ ID NO: 3936440 - RNA, 17 nt, Human adenovirus E
cccgcguucugcgcgcg

SEQ ID NO: 3936441 - RNA, 23 nt, Human adenovirus E
cccgcuguguugguggaaaauaa

SEQ ID NO: 3936442 - RNA, 21 nt, Human adenovirus E
cccggucccccacccaguccc

SEQ ID NO: 3936443 - RNA, 19 nt, Human adenovirus E
cccggugcugacggcuccc

SEQ ID NO: 3936444 - RNA, 16 nt, Human adenovirus E
cagccccaggccaacc

SEQ ID NO: 3936445 - RNA, 17 nt, Human adenovirus E
cagcccccgcuggaggc

SEQ ID NO: 3936446 - RNA, 16 nt, Human adenovirus E
cagcccccuccacagc

SEQ ID NO: 3936447 - RNA, 19 nt, Human adenovirus E
cagccccgauuaugcaggg

SEQ ID NO: 3936448 - RNA, 14 nt, Human adenovirus E
cagcccuuccagga

SEQ ID NO: 3936449 - RNA, 16 nt, Human adenovirus E
cagccgaaacucaucg

SEQ ID NO: 3936450 - RNA, 13 nt, Human adenovirus E
cagccugcaagac

SEQ ID NO: 3936451 - RNA, 21 nt, Human adenovirus E
cagccugcaagacagucugga

SEQ ID NO: 3936452 - RNA, 16 nt, Human adenovirus E
cagccugcugaugccc

SEQ ID NO: 3936453 - RNA, 20 nt, Human adenovirus E
cagcgaguggcgcggcugcu

SEQ ID NO: 3936454 - RNA, 14 nt, Human adenovirus E
cagcgccccgcauc

SEQ ID NO: 3936455 - RNA, 19 nt, Human adenovirus E
cagcgcgcacccggugcac

SEQ ID NO: 3936456 - RNA, 15 nt, Human adenovirus E
cagcgcgcgcugccc

SEQ ID NO: 3936457 - RNA, 21 nt, Human adenovirus E
cagcggcggagcggcaucucg

SEQ ID NO: 3936458 - RNA, 14 nt, Human adenovirus E
cagcggcggcagca

SEQ ID NO: 3936459 - RNA, 15 nt, Human adenovirus E
cagcgggcccugacc

SEQ ID NO: 3936460 - RNA, 20 nt, Human adenovirus E
cagcgguguccggggcugcu

SEQ ID NO: 3936461 - RNA, 15 nt, Human adenovirus E
cagcguggaggagcu

SEQ ID NO: 3936462 - RNA, 23 nt, Human adenovirus E
cagcugaggauuguccucggugg

SEQ ID NO: 3936463 - RNA, 14 nt, Human adenovirus E
cagcugauggugcc

SEQ ID NO: 3936464 - RNA, 15 nt, Human adenovirus E
cagcugcaccacgcu

SEQ ID NO: 3936465 - RNA, 15 nt, Human adenovirus E
cagcuggcgggcggc

SEQ ID NO: 3936466 - RNA, 21 nt, Human adenovirus E
cagcugggacuugccgcagcc

SEQ ID NO: 3936467 - RNA, 23 nt, Human adenovirus E
cagcuguuccugguggugcagca

SEQ ID NO: 3936468 - RNA, 20 nt, Human adenovirus E
cagcuuggcgacgagcucgg

SEQ ID NO: 3936469 - RNA, 16 nt, Human adenovirus E
caggaaauuccccagc

SEQ ID NO: 3936470 - RNA, 20 nt, Human adenovirus E
caggaaggugauuggcuugu

SEQ ID NO: 3936471 - RNA, 20 nt, Human adenovirus E
caggacagcgaaccccgcag

SEQ ID NO: 3936472 - RNA, 22 nt, Human adenovirus E
caggacauggaauacaccaccc

SEQ ID NO: 3936473 - RNA, 22 nt, Human adenovirus E
caggacccggagacgcgcggcc

SEQ ID NO: 3936474 - RNA, 22 nt, Human adenovirus E
caggacccuacguagaagaggu

SEQ ID NO: 3936475 - RNA, 20 nt, Human adenovirus E
caggacgacccgggcaaccu

SEQ ID NO: 3936476 - RNA, 22 nt, Human adenovirus E
caggagaugcaauugaaagcaa

SEQ ID NO: 3936477 - RNA, 21 nt, Human adenovirus E
caggaggcgcucuccccccag

SEQ ID NO: 3936478 - RNA, 16 nt, Human adenovirus E
caggagggggccaccc

SEQ ID NO: 3936479 - RNA, 13 nt, Human adenovirus E
caggaggucgggg

SEQ ID NO: 3936480 - RNA, 13 nt, Human adenovirus E
caggaugagcuga

SEQ ID NO: 3936481 - RNA, 21 nt, Human adenovirus E
caggaugcaccgugcggugag

SEQ ID NO: 3936482 - RNA, 22 nt, Human adenovirus E
caggccgagacgaugggcaggc

SEQ ID NO: 3936483 - RNA, 23 nt, Human adenovirus E
caggccgucuacucgcagcagcu

SEQ ID NO: 3936484 - RNA, 16 nt, Human adenovirus E
caggcgccagcgccgg

SEQ ID NO: 3936485 - RNA, 17 nt, Human adenovirus E
caggcgccagcgccggc

SEQ ID NO: 3936486 - RNA, 16 nt, Human adenovirus E
caggcgggacagagga

SEQ ID NO: 3936487 - RNA, 18 nt, Human adenovirus E
caggcggucccagagcuc

SEQ ID NO: 3936488 - RNA, 14 nt, Human adenovirus E
cagggacucccuca

SEQ ID NO: 3936489 - RNA, 22 nt, Human adenovirus E
cagggccagcaccgccccgccc

SEQ ID NO: 3936490 - RNA, 16 nt, Human adenovirus E
cagggccaggcgcacg

SEQ ID NO: 3936491 - RNA, 12 nt, Human adenovirus E
cagggcccggcc

SEQ ID NO: 3936492 - RNA, 13 nt, Human adenovirus E
cagggccuguggg

SEQ ID NO: 3936493 - RNA, 21 nt, Human adenovirus E
cagggccuguggggcgugcag

SEQ ID NO: 3936494 - RNA, 14 nt, Human adenovirus E
caggggcggcaggg

SEQ ID NO: 3936495 - RNA, 17 nt, Human adenovirus E
cagggggaucagcauca

SEQ ID NO: 3936496 - RNA, 22 nt, Human adenovirus E
caggguaucgcaaucaggcagc

SEQ ID NO: 3936497 - RNA, 15 nt, Human adenovirus E
cagguguccagcugg

SEQ ID NO: 3936498 - RNA, 18 nt, Human adenovirus E
cagucucaaguccagcaa

SEQ ID NO: 3936499 - RNA, 14 nt, Human adenovirus E
cagucucuggagcg

SEQ ID NO: 3936500 - RNA, 23 nt, Human adenovirus E
cagugcgcuuuucacaagaagag

SEQ ID NO: 3936501 - RNA, 19 nt, Human adenovirus E
caguggcagcggccgaggc

SEQ ID NO: 3936502 - RNA, 20 nt, Human adenovirus E
cauacgugcccaagcagaac

SEQ ID NO: 3936503 - RNA, 14 nt, Human adenovirus E
cauaggaccaccag

SEQ ID NO: 3936504 - RNA, 20 nt, Human adenovirus E
caucaagcagguggccccgg

SEQ ID NO: 3936505 - RNA, 19 nt, Human adenovirus E
caucaauuuuucgucccug

SEQ ID NO: 3936506 - RNA, 12 nt, Human adenovirus E
caucacaccuuc

SEQ ID NO: 3936507 - RNA, 20 nt, Human adenovirus E
caucaggccccgcagcaguc

SEQ ID NO: 3936508 - RNA, 14 nt, Human adenovirus E
caucaucugggccu

SEQ ID NO: 3936509 - RNA, 18 nt, Human adenovirus E
caucaucugggccugguc

SEQ ID NO: 3936510 - RNA, 19 nt, Human adenovirus E
caucaugguggucaggguc

SEQ ID NO: 3936511 - RNA, 17 nt, Human adenovirus E
cauccccgcgcuccugg

SEQ ID NO: 3936512 - RNA, 18 nt, Human adenovirus E
caucccguacugcggcag

SEQ ID NO: 3936513 - RNA, 15 nt, Human adenovirus E
cauccgcgcccaccg

SEQ ID NO: 3936514 - RNA, 21 nt, Human adenovirus E
cauccgcggcgacgaggccgg

SEQ ID NO: 3936515 - RNA, 17 nt, Human adenovirus E
cauccucgaacgcuccg

SEQ ID NO: 3936516 - RNA, 19 nt, Human adenovirus E
cauccugcguuacgugcag

SEQ ID NO: 3936517 - RNA, 18 nt, Human adenovirus E
caucgacagcgugguggc

SEQ ID NO: 3936518 - RNA, 17 nt, Human adenovirus E
caucgauggugaagaug

SEQ ID NO: 3936519 - RNA, 19 nt, Human adenovirus E
caucgcuauucgccccaga

SEQ ID NO: 3936520 - RNA, 15 nt, Human adenovirus E
caucgcuuacagccu

SEQ ID NO: 3936521 - RNA, 14 nt, Human adenovirus E
caucggcaccagcc

SEQ ID NO: 3936522 - RNA, 15 nt, Human adenovirus E
caucgucaaggaugc

SEQ ID NO: 3936523 - RNA, 22 nt, Human adenovirus E
caucgucaaggaugcgcugcuc

SEQ ID NO: 3936524 - RNA, 14 nt, Human adenovirus E
caucgucuccugcu

SEQ ID NO: 3936525 - RNA, 14 nt, Human adenovirus E
caucguugaagagg

SEQ ID NO: 3936526 - RNA, 13 nt, Human adenovirus E
caucuccgaggac

SEQ ID NO: 3936527 - RNA, 19 nt, Human adenovirus E
caucucuucagcacucuca

SEQ ID NO: 3936528 - RNA, 14 nt, Human adenovirus E
caucuggcccggca

SEQ ID NO: 3936529 - RNA, 18 nt, Human adenovirus E
caugaauuggcucagcgc

SEQ ID NO: 3936530 - RNA, 20 nt, Human adenovirus E
caugaccaucgaccugauga

SEQ ID NO: 3936531 - RNA, 19 nt, Human adenovirus E
caugacggcgacuaccucc

SEQ ID NO: 3936532 - RNA, 18 nt, Human adenovirus E
caugagcucgugucuccg

SEQ ID NO: 3936533 - RNA, 16 nt, Human adenovirus E
caugauccagcggcgg

SEQ ID NO: 3936534 - RNA, 14 nt, Human adenovirus E
caugcaucccagcu

SEQ ID NO: 3936535 - RNA, 21 nt, Human adenovirus E
cauggaccaggugcucaucaa

SEQ ID NO: 3936536 - RNA, 15 nt, Human adenovirus E
cauggcgaccagcgu

SEQ ID NO: 3936537 - RNA, 13 nt, Human adenovirus E
cauggcgcugacg

SEQ ID NO: 3936538 - RNA, 23 nt, Human adenovirus E
caugguguacuaugccuucugcu

SEQ ID NO: 3936539 - RNA, 20 nt, Human adenovirus E
cauguggcgguucaccaccu

SEQ ID NO: 3936540 - RNA, 24 nt, Human adenovirus E
  misc_feature (13)..(13): n is a, c, g, or u
cauguuacacucnugcaccauccc

SEQ ID NO: 3936541 - RNA, 15 nt, Human adenovirus E
cauuaccacacagac

SEQ ID NO: 3936542 - RNA, 23 nt, Human adenovirus E
cauucuacacuaaaaaaauacug

SEQ ID NO: 3936543 - RNA, 16 nt, Human adenovirus E
cauucuuaagcacacc

SEQ ID NO: 3936544 - RNA, 15 nt, Human adenovirus E
cauugucaaugccac

SEQ ID NO: 3936545 - RNA, 14 nt, Human adenovirus E
cauuuuugccaugc

SEQ ID NO: 3936546 - RNA, 17 nt, Human adenovirus E
ccaaacuaaccuccacc

SEQ ID NO: 3936547 - RNA, 13 nt, Human adenovirus E
ccaaauccaugau

SEQ ID NO: 3936548 - RNA, 18 nt, Human adenovirus E
ccaacaaaugccagcuga

SEQ ID NO: 3936549 - RNA, 22 nt, Human adenovirus E
ccaaccaggccgugcagcggca

SEQ ID NO: 3936550 - RNA, 21 nt, Human adenovirus E
  misc_feature (7)..(7): n is a, c, g, or u
ccaaccnuacuuuuuccaccc

SEQ ID NO: 3936551 - RNA, 13 nt, Human adenovirus E
ccaagaaugaaca

SEQ ID NO: 3936552 - RNA, 17 nt, Human adenovirus E
ccaagaccccauagcca

SEQ ID NO: 3936553 - RNA, 14 nt, Human adenovirus E
ccaagcgccagccc

SEQ ID NO: 3936554 - RNA, 14 nt, Human adenovirus E
ccacacacacagau

SEQ ID NO: 3936555 - RNA, 13 nt, Human adenovirus E
ccacaccacagcu

SEQ ID NO: 3936556 - RNA, 16 nt, Human adenovirus E
ccacagccggcgcuuc

SEQ ID NO: 3936557 - RNA, 16 nt, Human adenovirus E
ccacagcgacccaugc

SEQ ID NO: 3936558 - RNA, 15 nt, Human adenovirus E
ccacauuacacagac

SEQ ID NO: 3936559 - RNA, 16 nt, Human adenovirus E
ccaccacccccaguac

SEQ ID NO: 3936560 - RNA, 18 nt, Human adenovirus E
ccaccaugcagcugaugg

SEQ ID NO: 3936561 - RNA, 12 nt, Human adenovirus E
ccacccagaccg

SEQ ID NO: 3936562 - RNA, 20 nt, Human adenovirus E
ccacccccagcgccgcgcuc

SEQ ID NO: 3936563 - RNA, 17 nt, Human adenovirus E
agcuuugacaguacagg

SEQ ID NO: 3936564 - RNA, 20 nt, Human adenovirus E
aggacccggagacgcgcggc

SEQ ID NO: 3936565 - RNA, 23 nt, Human adenovirus E
aggacgacccgggcaaccuggaa

SEQ ID NO: 3936566 - RNA, 23 nt, Human adenovirus E
aggacgcgcucaucaagcaucug

SEQ ID NO: 3936567 - RNA, 16 nt, Human adenovirus E
aggacguccagagcgc

SEQ ID NO: 3936568 - RNA, 23 nt, Human adenovirus E
aggacuacuccacccgcaugaau

SEQ ID NO: 3936569 - RNA, 22 nt, Human adenovirus E
aggacuccgccgacgacagcag

SEQ ID NO: 3936570 - RNA, 13 nt, Human adenovirus E
aggagaaggagga

SEQ ID NO: 3936571 - RNA, 13 nt, Human adenovirus E
aggagauggagga

SEQ ID NO: 3936572 - RNA, 12 nt, Human adenovirus E
aggagcgcgggc

SEQ ID NO: 3936573 - RNA, 14 nt, Human adenovirus E
aggagcuccuggag

SEQ ID NO: 3936574 - RNA, 17 nt, Human adenovirus E
aggagcuuggcgaugga

SEQ ID NO: 3936575 - RNA, 14 nt, Human adenovirus E
aggaggagcuggca

SEQ ID NO: 3936576 - RNA, 13 nt, Human adenovirus E
aggaggaugcagc

SEQ ID NO: 3936577 - RNA, 14 nt, Human adenovirus E
aggagggcaagccc

SEQ ID NO: 3936578 - RNA, 13 nt, Human adenovirus E
aggaucuggaggg

SEQ ID NO: 3936579 - RNA, 15 nt, Human adenovirus E
aggaugcagcagcug

SEQ ID NO: 3936580 - RNA, 13 nt, Human adenovirus E
aggcagaggagga

SEQ ID NO: 3936581 - RNA, 19 nt, Human adenovirus E
aggcagaggaggacagccu

SEQ ID NO: 3936582 - RNA, 13 nt, Human adenovirus E
aggccgaucccug

SEQ ID NO: 3936583 - RNA, 16 nt, Human adenovirus E
aggccggagcugucca

SEQ ID NO: 3936584 - RNA, 15 nt, Human adenovirus E
aggccggccuggugu

SEQ ID NO: 3936585 - RNA, 14 nt, Human adenovirus E
aggccguggcccag

SEQ ID NO: 3936586 - RNA, 16 nt, Human adenovirus E
aggccucucagcgcca

SEQ ID NO: 3936587 - RNA, 15 nt, Human adenovirus E
aggcgcugguagagg

SEQ ID NO: 3936588 - RNA, 16 nt, Human adenovirus E
aggcggcggcaggacc

SEQ ID NO: 3936589 - RNA, 18 nt, Human adenovirus E
aggcgggacagaggaggg

SEQ ID NO: 3936590 - RNA, 20 nt, Human adenovirus E
aggcguccgcgccgcagugg

SEQ ID NO: 3936591 - RNA, 18 nt, Human adenovirus E
aggcuccuuacgugcccc

SEQ ID NO: 3936592 - RNA, 19 nt, Human adenovirus E
aggcuccuuacgugccccc

SEQ ID NO: 3936593 - RNA, 15 nt, Human adenovirus E
aggcugggcucgagc

SEQ ID NO: 3936594 - RNA, 20 nt, Human adenovirus E
agggaacguguacugggugc

SEQ ID NO: 3936595 - RNA, 16 nt, Human adenovirus E
agggcaggcgcugagg

SEQ ID NO: 3936596 - RNA, 13 nt, Human adenovirus E
agggccgcuggcu

SEQ ID NO: 3936597 - RNA, 17 nt, Human adenovirus E
agggcgaaagugucccu

SEQ ID NO: 3936598 - RNA, 21 nt, Human adenovirus E
agggcgagaucgagggcgagc

SEQ ID NO: 3936599 - RNA, 16 nt, Human adenovirus E
agggcgaggggcuggc

SEQ ID NO: 3936600 - RNA, 20 nt, Human adenovirus E
agggcguuggagaggagcuu

SEQ ID NO: 3936601 - RNA, 22 nt, Human adenovirus E
agggggcgaggagccccgggcc

SEQ ID NO: 3936602 - RNA, 15 nt, Human adenovirus E
aggguauaaagcggc

SEQ ID NO: 3936603 - RNA, 21 nt, Human adenovirus E
agggucccgugccccuggggu

SEQ ID NO: 3936604 - RNA, 19 nt, Human adenovirus E
agggugccggacuggggga

SEQ ID NO: 3936605 - RNA, 15 nt, Human adenovirus E
aggucaaccaaccuc

SEQ ID NO: 3936606 - RNA, 17 nt, Human adenovirus E
aggugacccugggccug

SEQ ID NO: 3936607 - RNA, 21 nt, Human adenovirus E
aggugacccugggccugaugc

SEQ ID NO: 3936608 - RNA, 21 nt, Human adenovirus E
aggugcaaccggugcugagac

SEQ ID NO: 3936609 - RNA, 14 nt, Human adenovirus E
agguggacgaggag

SEQ ID NO: 3936610 - RNA, 16 nt, Human adenovirus E
agguguccagcuggcg

SEQ ID NO: 3936611 - RNA, 21 nt, Human adenovirus E
aguacaggagccauaauggcu

SEQ ID NO: 3936612 - RNA, 17 nt, Human adenovirus E
aguacggcgcggccagc

SEQ ID NO: 3936613 - RNA, 15 nt, Human adenovirus E
agucauagcaggggc

SEQ ID NO: 3936614 - RNA, 17 nt, Human adenovirus E
agucucaaguccagcaa

SEQ ID NO: 3936615 - RNA, 13 nt, Human adenovirus E
agucucuggagcg

SEQ ID NO: 3936616 - RNA, 19 nt, Human adenovirus E
agugcgucucgggacccug

SEQ ID NO: 3936617 - RNA, 16 nt, Human adenovirus E
agugucuggaggagca

SEQ ID NO: 3936618 - RNA, 21 nt, Human adenovirus E
aguuagcugaucuguagaaaa

SEQ ID NO: 3936619 - RNA, 18 nt, Human adenovirus E
aguuccuccacuuccucu

SEQ ID NO: 3936620 - RNA, 20 nt, Human adenovirus E
aguucguaguugagcgccuc

SEQ ID NO: 3936621 - RNA, 17 nt, Human adenovirus E
aguugcaagggcccagc

SEQ ID NO: 3936622 - RNA, 21 nt, Human adenovirus E
aguugcagggcgcccagcagg

SEQ ID NO: 3936623 - RNA, 17 nt, Human adenovirus E
aguuucuugagcuccuc

SEQ ID NO: 3936624 - RNA, 16 nt, Human adenovirus E
auaacaaaaaaaauga

SEQ ID NO: 3936625 - RNA, 21 nt, Human adenovirus E
auaacaagacucggaacaaua

SEQ ID NO: 3936626 - RNA, 17 nt, Human adenovirus E
auaacagccaggucaaa

SEQ ID NO: 3936627 - RNA, 21 nt, Human adenovirus E
auaauuuucauuuuuccagcc

SEQ ID NO: 3936628 - RNA, 15 nt, Human adenovirus E
aucacacacgcccag

SEQ ID NO: 3936629 - RNA, 20 nt, Human adenovirus E
aucacccuagugagcugcgg

SEQ ID NO: 3936630 - RNA, 13 nt, Human adenovirus E
aucaucugggccu

SEQ ID NO: 3936631 - RNA, 13 nt, Human adenovirus E
auccacagcggcg

SEQ ID NO: 3936632 - RNA, 16 nt, Human adenovirus E
auccacggccagggcg

SEQ ID NO: 3936633 - RNA, 22 nt, Human adenovirus E
aucccaacaaaugccagcugag

SEQ ID NO: 3936634 - RNA, 15 nt, Human adenovirus E
aucccagcuggauca

SEQ ID NO: 3936635 - RNA, 23 nt, Human adenovirus E
aucccgauauugucuugcugccc

SEQ ID NO: 3936636 - RNA, 22 nt, Human adenovirus E
auccugcccgccaccugcuccg

SEQ ID NO: 3936637 - RNA, 21 nt, Human adenovirus E
aucgcaaucaggcagcaccgg

SEQ ID NO: 3936638 - RNA, 12 nt, Human adenovirus E
aucgcagugcag

SEQ ID NO: 3936639 - RNA, 11 nt, Human adenovirus E
aucggccaggc

SEQ ID NO: 3936640 - RNA, 16 nt, Human adenovirus E
aucguggugcaggagc

SEQ ID NO: 3936641 - RNA, 18 nt, Human adenovirus E
aucguggugcaggagcgc

SEQ ID NO: 3936642 - RNA, 15 nt, Human adenovirus E
aucuaguaugaugag

SEQ ID NO: 3936643 - RNA, 16 nt, Human adenovirus E
aucucccgccugaacc

SEQ ID NO: 3936644 - RNA, 18 nt, Human adenovirus E
aucucgaaucaggcugga

SEQ ID NO: 3936645 - RNA, 14 nt, Human adenovirus E
aucugcaccucaca

SEQ ID NO: 3936646 - RNA, 18 nt, Human adenovirus E
augaauacacccccggaa

SEQ ID NO: 3936647 - RNA, 12 nt, Human adenovirus E
augaccugggcg

SEQ ID NO: 3936648 - RNA, 14 nt, Human adenovirus E
augagcaccacagc

SEQ ID NO: 3936649 - RNA, 23 nt, Human adenovirus E
augagguccacacugguggccac

SEQ ID NO: 3936650 - RNA, 14 nt, Human adenovirus E
augaugcccacggc

SEQ ID NO: 3936651 - RNA, 14 nt, Human adenovirus E
augauuccuagaca

SEQ ID NO: 3936652 - RNA, 13 nt, Human adenovirus E
augcaagacccgg

SEQ ID NO: 3936653 - RNA, 18 nt, Human adenovirus E
augcaagagauggaggaa

SEQ ID NO: 3936654 - RNA, 18 nt, Human adenovirus E
augcaauucugacaauga

SEQ ID NO: 3936655 - RNA, 22 nt, Human adenovirus E
augcaccugugggaccugcugg

SEQ ID NO: 3936656 - RNA, 14 nt, Human adenovirus E
augcacgugcugca

SEQ ID NO: 3936657 - RNA, 19 nt, Human adenovirus E
augcaggggcggcaggggc

SEQ ID NO: 3936658 - RNA, 18 nt, Human adenovirus E
augccaacccuucccacc

SEQ ID NO: 3936659 - RNA, 23 nt, Human adenovirus E
augcuccaggucaucgcgccuga

SEQ ID NO: 3936660 - RNA, 13 nt, Human adenovirus E
auggaggugcaga

SEQ ID NO: 3936661 - RNA, 13 nt, Human adenovirus E
auggcaccucucg

SEQ ID NO: 3936662 - RNA, 19 nt, Human adenovirus E
auggcaccucucgcccccg

SEQ ID NO: 3936663 - RNA, 18 nt, Human adenovirus E
auggcgagggggagcgcg

SEQ ID NO: 3936664 - RNA, 22 nt, Human adenovirus E
auggcggcggcggcgaugcagc

SEQ ID NO: 3936665 - RNA, 16 nt, Human adenovirus E
augguggcgcagcuga

SEQ ID NO: 3936666 - RNA, 21 nt, Human adenovirus E
augucauacuugagcuguccc

SEQ ID NO: 3936667 - RNA, 20 nt, Human adenovirus E
augucucuucgggggcagag

SEQ ID NO: 3936668 - RNA, 21 nt, Human adenovirus E
augugacgcccgcggagcacg

SEQ ID NO: 3936669 - RNA, 15 nt, Human adenovirus E
auguucagggcggcc

SEQ ID NO: 3936670 - RNA, 14 nt, Human adenovirus E
auuacacagacaac

SEQ ID NO: 3936671 - RNA, 15 nt, Human adenovirus E
auuaccucugcucua

SEQ ID NO: 3936672 - RNA, 23 nt, Human adenovirus E
auuagggcaagccacaguacaga

SEQ ID NO: 3936673 - RNA, 15 nt, Human adenovirus E
auucccacggagccc

SEQ ID NO: 3936674 - RNA, 15 nt, Human adenovirus E
auucggggaagacgu

SEQ ID NO: 3936675 - RNA, 20 nt, Human adenovirus E
auuguaaaacagccacucuc

SEQ ID NO: 3936676 - RNA, 14 nt, Human adenovirus E
caaaaccauauccc

SEQ ID NO: 3936677 - RNA, 20 nt, Human adenovirus E
caaaaccauaucccagggca

SEQ ID NO: 3936678 - RNA, 14 nt, Human adenovirus E
caaacuuccuccac

SEQ ID NO: 3936679 - RNA, 22 nt, Human adenovirus E
caacaaaagaaaaauccuccag

SEQ ID NO: 3936680 - RNA, 13 nt, Human adenovirus E
caacaaaugccag

SEQ ID NO: 3936681 - RNA, 19 nt, Human adenovirus E
caacaugguagcccaucau

SEQ ID NO: 3936682 - RNA, 16 nt, Human adenovirus E
caaccaaacuaaccuc

SEQ ID NO: 3936683 - RNA, 16 nt, Human adenovirus E
caaccacgugcgcacc

SEQ ID NO: 3936684 - RNA, 22 nt, Human adenovirus E
caaccacgugcgcacccugauc

SEQ ID NO: 3936685 - RNA, 15 nt, Human adenovirus E
caacccuucccaccc

SEQ ID NO: 3936686 - RNA, 13 nt, Human adenovirus E
caacccuuccucc

SEQ ID NO: 3936687 - RNA, 15 nt, Human adenovirus E
caaccucaggcacac

SEQ ID NO: 3936688 - RNA, 18 nt, Human adenovirus E
caaccucgccaucugccc

SEQ ID NO: 3936689 - RNA, 12 nt, Human adenovirus E
caacgccauccu

SEQ ID NO: 3936690 - RNA, 23 nt, Human adenovirus E
caacgcgcggcuggcggugcuca

SEQ ID NO: 3936691 - RNA, 19 nt, Human adenovirus E
caacgcgcugcuggagcgc

SEQ ID NO: 3936692 - RNA, 24 nt, Human adenovirus E
caacgugcagaccaaccuggaccg

SEQ ID NO: 3936693 - RNA, 17 nt, Human adenovirus E
caacuccuccuccagaa

SEQ ID NO: 3936694 - RNA, 14 nt, Human adenovirus E
caacuucucggugc

SEQ ID NO: 3936695 - RNA, 14 nt, Human adenovirus E
caagaacagccaga

SEQ ID NO: 3936696 - RNA, 18 nt, Human adenovirus E
caagaacagccagagcag

SEQ ID NO: 3936697 - RNA, 18 nt, Human adenovirus E
caagaaguaccucaccug

SEQ ID NO: 3936698 - RNA, 21 nt, Human adenovirus E
caagaaugaacacuguauccc

SEQ ID NO: 3936699 - RNA, 16 nt, Human adenovirus E
caagagauggaggaau

SEQ ID NO: 3936700 - RNA, 19 nt, Human adenovirus E
caagagucagagaaaggcu

SEQ ID NO: 3936701 - RNA, 20 nt, Human adenovirus E
caagaguuccaggcgguccc

SEQ ID NO: 3936702 - RNA, 16 nt, Human adenovirus E
caagccacaguacaga

SEQ ID NO: 3936703 - RNA, 14 nt, Human adenovirus E
caagcccaucauug

SEQ ID NO: 3936704 - RNA, 14 nt, Human adenovirus E
caagcgccgcagca

SEQ ID NO: 3936705 - RNA, 20 nt, Human adenovirus E
caaggacagacccuucugac

SEQ ID NO: 3936706 - RNA, 15 nt, Human adenovirus E
caaguuucuccacca

SEQ ID NO: 3936707 - RNA, 20 nt, Human adenovirus E
caauaucacgaaaucauaug

SEQ ID NO: 3936708 - RNA, 19 nt, Human adenovirus E
caaugccaccucagcucaa

SEQ ID NO: 3936709 - RNA, 20 nt, Human adenovirus E
caauggaggacccaccgcuc

SEQ ID NO: 3936710 - RNA, 16 nt, Human adenovirus E
caaugguacugaucug

SEQ ID NO: 3936711 - RNA, 12 nt, Human adenovirus E
cacaagaagaga

SEQ ID NO: 3936712 - RNA, 13 nt, Human adenovirus E
cacacacacagau

SEQ ID NO: 3936713 - RNA, 17 nt, Human adenovirus E
cacacagacaacccaca

SEQ ID NO: 3936714 - RNA, 21 nt, Human adenovirus E
cacaccaacaugcccaacgug

SEQ ID NO: 3936715 - RNA, 15 nt, Human adenovirus E
cacaccaccacagca

SEQ ID NO: 3936716 - RNA, 16 nt, Human adenovirus E
cacaccuuccaccuga

SEQ ID NO: 3936717 - RNA, 13 nt, Human adenovirus E
cacacgcccagca

SEQ ID NO: 3936718 - RNA, 16 nt, Human adenovirus E
cacagaaccaccaggu

SEQ ID NO: 3936719 - RNA, 13 nt, Human adenovirus E
cacagcacaggca

SEQ ID NO: 3936720 - RNA, 23 nt, Human adenovirus E
cacagccuugaacaucugaaugc

SEQ ID NO: 3936721 - RNA, 16 nt, Human adenovirus E
cacagcggcggcagca

SEQ ID NO: 3936722 - RNA, 12 nt, Human adenovirus E
cacaggcagcaa

SEQ ID NO: 3936723 - RNA, 14 nt, Human adenovirus E
cacaggcagcaaag

SEQ ID NO: 3936724 - RNA, 14 nt, Human adenovirus E
cacaugucccccuc

SEQ ID NO: 3936725 - RNA, 22 nt, Human adenovirus E
caccaacgugcagaccaaccug

SEQ ID NO: 3936726 - RNA, 16 nt, Human adenovirus E
caccaacuucaucagc

SEQ ID NO: 3936727 - RNA, 16 nt, Human adenovirus E
caccaagaacagccag

SEQ ID NO: 3936728 - RNA, 21 nt, Human adenovirus E
caccacagcgcccuggucgag

SEQ ID NO: 3936729 - RNA, 13 nt, Human adenovirus E
caccaccacagca

SEQ ID NO: 3936730 - RNA, 13 nt, Human adenovirus E
caccaccgccucg

SEQ ID NO: 3936731 - RNA, 13 nt, Human adenovirus E
caccacuacagcc

SEQ ID NO: 3936732 - RNA, 14 nt, Human adenovirus E
caccacucgccgcu

SEQ ID NO: 3936733 - RNA, 16 nt, Human adenovirus E
cacccagaccaucaac

SEQ ID NO: 3936734 - RNA, 15 nt, Human adenovirus E
cacccgcgcgugcag

SEQ ID NO: 3936735 - RNA, 22 nt, Human adenovirus E
caccgcaacaacagcccccucc

SEQ ID NO: 3936736 - RNA, 23 nt, Human adenovirus E
caccgccccgcccgccaugcagc

SEQ ID NO: 3936737 - RNA, 20 nt, Human adenovirus E
caccgccgacgagaagcagc

SEQ ID NO: 3936738 - RNA, 17 nt, Human adenovirus E
caccgcucccuggccug

SEQ ID NO: 3936739 - RNA, 13 nt, Human adenovirus E
caccguggugcag

SEQ ID NO: 3936740 - RNA, 12 nt, Human adenovirus E
caccucacagcu

SEQ ID NO: 3936741 - RNA, 17 nt, Human adenovirus E
caccucugacccugccg

SEQ ID NO: 3936742 - RNA, 19 nt, Human adenovirus E
caccuggacaaaauaccac

SEQ ID NO: 3936743 - RNA, 20 nt, Human adenovirus E
cacgaagcccugcaggaagc

SEQ ID NO: 3936744 - RNA, 21 nt, Human adenovirus E
cacgagaaccgccuggggcag

SEQ ID NO: 3936745 - RNA, 13 nt, Human adenovirus E
cacgagccggggc

SEQ ID NO: 3936746 - RNA, 19 nt, Human adenovirus E
cacgaggaggagcuggcag

SEQ ID NO: 3936747 - RNA, 15 nt, Human adenovirus E
cacgcccagcacacg

SEQ ID NO: 3936748 - RNA, 22 nt, Human adenovirus E
cacgccucgucaggccguccug

SEQ ID NO: 3936749 - RNA, 12 nt, Human adenovirus E
cacgcgcccgcg

SEQ ID NO: 3936750 - RNA, 12 nt, Human adenovirus E
cacgcuccagcc

SEQ ID NO: 3936751 - RNA, 17 nt, Human adenovirus E
cacgcucgccagcaccg

SEQ ID NO: 3936752 - RNA, 16 nt, Human adenovirus E
cacgcugcgcccccag

SEQ ID NO: 3936753 - RNA, 17 nt, Human adenovirus E
cacggcguacgagcaga

SEQ ID NO: 3936754 - RNA, 18 nt, Human adenovirus E
cacgggacgcagggccau

SEQ ID NO: 3936755 - RNA, 23 nt, Human adenovirus E
cacggguucgugcgccaggccug

SEQ ID NO: 3936756 - RNA, 21 nt, Human adenovirus E
cacgugagccgcgcccugggc

SEQ ID NO: 3936757 - RNA, 22 nt, Human adenovirus E
cacucaggcagaggaggacagc

SEQ ID NO: 3936758 - RNA, 24 nt, Human adenovirus E
cacucuuaaagaguagcccgcgcc

SEQ ID NO: 3936759 - RNA, 16 nt, Human adenovirus E
cacugacguaaaggcc

SEQ ID NO: 3936760 - RNA, 16 nt, Human adenovirus E
cacugccgccgcuucc

SEQ ID NO: 3936761 - RNA, 18 nt, Human adenovirus E
cacugucgagagccacac

SEQ ID NO: 3936762 - RNA, 21 nt, Human adenovirus E
cacuuacuaaguguugaauuu

SEQ ID NO: 3936763 - RNA, 14 nt, Human adenovirus E
cagaaagcacagac

SEQ ID NO: 3936764 - RNA, 14 nt, Human adenovirus E
cagaaaucccgcca

SEQ ID NO: 3936765 - RNA, 23 nt, Human adenovirus E
cagaacaaugacuucacccccac

SEQ ID NO: 3936766 - RNA, 14 nt, Human adenovirus E
cagaaccugaaaga

SEQ ID NO: 3936767 - RNA, 19 nt, Human adenovirus E
cagaacggggugcuggaga

SEQ ID NO: 3936768 - RNA, 11 nt, Human adenovirus E
cagaaguuuca

SEQ ID NO: 3936769 - RNA, 13 nt, Human adenovirus E
cagaaguuucaug

SEQ ID NO: 3936770 - RNA, 23 nt, Human adenovirus E
cagacaacccacauuacacagac

SEQ ID NO: 3936771 - RNA, 13 nt, Human adenovirus E
cagacccacugcu

SEQ ID NO: 3936772 - RNA, 23 nt, Human adenovirus E
cagacccacugcugaaccucuau

SEQ ID NO: 3936773 - RNA, 17 nt, Human adenovirus E
cagacccagccagauga

SEQ ID NO: 3936774 - RNA, 22 nt, Human adenovirus E
cagaccgguaagaaggagcggc

SEQ ID NO: 3936775 - RNA, 18 nt, Human adenovirus E
cagaccggugaggagcuc

SEQ ID NO: 3936776 - RNA, 17 nt, Human adenovirus E
cagaccgugaaggagga

SEQ ID NO: 3936777 - RNA, 23 nt, Human adenovirus E
cagacgcgcggcuucaggcgcca

SEQ ID NO: 3936778 - RNA, 17 nt, Human adenovirus E
cagagacaggagcggcg

SEQ ID NO: 3936779 - RNA, 22 nt, Human adenovirus E
cagagcaucguggugcaggagc

SEQ ID NO: 3936780 - RNA, 17 nt, Human adenovirus E
cagagcgcccuccaccg

SEQ ID NO: 3936781 - RNA, 19 nt, Human adenovirus E
cagagcgcccuccaccggc

SEQ ID NO: 3936782 - RNA, 22 nt, Human adenovirus E
cagagcuggaaguccgugcgcu

SEQ ID NO: 3936783 - RNA, 16 nt, Human adenovirus E
cagaggaggacagccu

SEQ ID NO: 3936784 - RNA, 16 nt, Human adenovirus E
cagaggaggaggugga

SEQ ID NO: 3936785 - RNA, 21 nt, Human adenovirus E
cagagucgggggcaggagcag

SEQ ID NO: 3936786 - RNA, 16 nt, Human adenovirus E
cagaucccgccugggg

SEQ ID NO: 3936787 - RNA, 15 nt, Human adenovirus E
cagauccucguccgc

SEQ ID NO: 3936788 - RNA, 22 nt, Human adenovirus E
cagaugcgcccccaccacccuc

SEQ ID NO: 3936789 - RNA, 15 nt, Human adenovirus E
cagcaaagcccccga

SEQ ID NO: 3936790 - RNA, 20 nt, Human adenovirus E
cagcaaagccuccacgcgca

SEQ ID NO: 3936791 - RNA, 14 nt, Human adenovirus E
cagcaagccgcuga

SEQ ID NO: 3936792 - RNA, 16 nt, Human adenovirus E
cagcaagcgguugggg

SEQ ID NO: 3936793 - RNA, 21 nt, Human adenovirus E
cagcaaggcguggaacagcac

SEQ ID NO: 3936794 - RNA, 14 nt, Human adenovirus E
cagcaauaacugua

SEQ ID NO: 3936795 - RNA, 18 nt, Human adenovirus E
cagcaccacagggcaggc

SEQ ID NO: 3936796 - RNA, 20 nt, Human adenovirus E
  misc_feature (10)..(10): n is a, c, g, or u
cagcacgaangaggccacgu

SEQ ID NO: 3936797 - RNA, 12 nt, Human adenovirus E
cagcacucucaa

SEQ ID NO: 3936798 - RNA, 21 nt, Human adenovirus E
cagcacuggaacaccaucagg

SEQ ID NO: 3936799 - RNA, 16 nt, Human adenovirus E
cagcagaagcgugggc

SEQ ID NO: 3936800 - RNA, 20 nt, Human adenovirus E
cagcagagguugccagcucg

SEQ ID NO: 3936801 - RNA, 20 nt, Human adenovirus E
cagcagcacacaacaggcgc

SEQ ID NO: 3936802 - RNA, 15 nt, Human adenovirus E
cagcagccccaggcc

SEQ ID NO: 3936803 - RNA, 14 nt, Human adenovirus E
cagcagcgagcugg

SEQ ID NO: 3936804 - RNA, 13 nt, Human adenovirus E
cagcagcugaagc

SEQ ID NO: 3936805 - RNA, 14 nt, Human adenovirus E
cagcaggcggcgcg

SEQ ID NO: 3936806 - RNA, 14 nt, Human adenovirus E
cagcaggugcugcc

SEQ ID NO: 3936807 - RNA, 15 nt, Human adenovirus E
cagcaggugcugccg

SEQ ID NO: 3936808 - RNA, 15 nt, Human adenovirus E
cagcagucaggcaga

SEQ ID NO: 3936809 - RNA, 16 nt, Human adenovirus E
cagcagucaggcagag

SEQ ID NO: 3936810 - RNA, 20 nt, Human adenovirus E
cagcagucaggcagaggagg

SEQ ID NO: 3936811 - RNA, 21 nt, Human adenovirus E
cagcaguuugggcagcggggu

SEQ ID NO: 3936812 - RNA, 23 nt, Human adenovirus E
cagcaugaaggggacgagcugcu

SEQ ID NO: 3936813 - RNA, 19 nt, Human adenovirus E
cagcaugaugcccacggcc

SEQ ID NO: 3936814 - RNA, 17 nt, Human adenovirus E
cagccacucucucagac

SEQ ID NO: 3936815 - RNA, 15 nt, Human adenovirus E
cagccagagcaggaa

SEQ ID NO: 3936816 - RNA, 15 nt, Human adenovirus E
cagccccaggccaac

SEQ ID NO: 3936817 - RNA, 22 nt, Human adenovirus E
cacugccgcugcaaccucugca

SEQ ID NO: 3936818 - RNA, 13 nt, Human adenovirus E
cacuuccucuucu

SEQ ID NO: 3936819 - RNA, 15 nt, Human adenovirus E
cagaacacgcugccc

SEQ ID NO: 3936820 - RNA, 16 nt, Human adenovirus E
cagaccagucgccagg

SEQ ID NO: 3936821 - RNA, 18 nt, Human adenovirus E
cagaccgguaagaaggag

SEQ ID NO: 3936822 - RNA, 18 nt, Human adenovirus E
cagaccgugaaccugagc

SEQ ID NO: 3936823 - RNA, 23 nt, Human adenovirus E
cagaccgugaaccugagccaggc

SEQ ID NO: 3936824 - RNA, 21 nt, Human adenovirus E
cagaccgugaaggaggagagc

SEQ ID NO: 3936825 - RNA, 18 nt, Human adenovirus E
cagaccgugcagcagauc

SEQ ID NO: 3936826 - RNA, 15 nt, Human adenovirus E
cagagaaugagcaga

SEQ ID NO: 3936827 - RNA, 19 nt, Human adenovirus E
cagagcucggugaugugcu

SEQ ID NO: 3936828 - RNA, 21 nt, Human adenovirus E
cagagcucggugaugugcucu

SEQ ID NO: 3936829 - RNA, 11 nt, Human adenovirus E
cagaggaggag

SEQ ID NO: 3936830 - RNA, 17 nt, Human adenovirus E
cagagucaggcugggcu

SEQ ID NO: 3936831 - RNA, 19 nt, Human adenovirus E
cagagucgggggcaggagc

SEQ ID NO: 3936832 - RNA, 16 nt, Human adenovirus E
cagaguuuggaagagc

SEQ ID NO: 3936833 - RNA, 17 nt, Human adenovirus E
cagaucuagggccucag

SEQ ID NO: 3936834 - RNA, 16 nt, Human adenovirus E
cagcaaagccuccacg

SEQ ID NO: 3936835 - RNA, 21 nt, Human adenovirus E
cagcaagccgcugacggcgca

SEQ ID NO: 3936836 - RNA, 16 nt, Human adenovirus E
cagcaccaacgugcag

SEQ ID NO: 3936837 - RNA, 14 nt, Human adenovirus E
cagcaccaggcagg

SEQ ID NO: 3936838 - RNA, 14 nt, Human adenovirus E
cagcacccagacca

SEQ ID NO: 3936839 - RNA, 16 nt, Human adenovirus E
cagcacucaggcagag

SEQ ID NO: 3936840 - RNA, 21 nt, Human adenovirus E
cagcacucucaacuccucggg

SEQ ID NO: 3936841 - RNA, 18 nt, Human adenovirus E
cagcagaaaaagaccagc

SEQ ID NO: 3936842 - RNA, 19 nt, Human adenovirus E
cagcagaaaaccagcagcu

SEQ ID NO: 3936843 - RNA, 21 nt, Human adenovirus E
cagcagcagaaaaagaccagc

SEQ ID NO: 3936844 - RNA, 14 nt, Human adenovirus E
cagcagcagcagaa

SEQ ID NO: 3936845 - RNA, 14 nt, Human adenovirus E
cagcagccccaggc

SEQ ID NO: 3936846 - RNA, 21 nt, Human adenovirus E
  misc_feature (9)..(9): n is a, c, g, or u
cagcagccnuucuccacgggg

SEQ ID NO: 3936847 - RNA, 18 nt, Human adenovirus E
cagcagcgagcugggcag

SEQ ID NO: 3936848 - RNA, 21 nt, Human adenovirus E
cagcaggcggcgcgagcugag

SEQ ID NO: 3936849 - RNA, 22 nt, Human adenovirus E
cagcaggugcugccgaccgcgg

SEQ ID NO: 3936850 - RNA, 17 nt, Human adenovirus E
cagcagguggacugagg

SEQ ID NO: 3936851 - RNA, 23 nt, Human adenovirus E
cagcaguauccggggaguccagc

SEQ ID NO: 3936852 - RNA, 15 nt, Human adenovirus E
cagcaucaaccgcaa

SEQ ID NO: 3936853 - RNA, 12 nt, Human adenovirus E
cagcaucaucug

SEQ ID NO: 3936854 - RNA, 19 nt, Human adenovirus E
cagcaucaucugggccugg

SEQ ID NO: 3936855 - RNA, 21 nt, Human adenovirus E
cagcaucaucugggccugguc

SEQ ID NO: 3936856 - RNA, 21 nt, Human adenovirus E
cagccacuugaacucggggau

SEQ ID NO: 3936857 - RNA, 22 nt, Human adenovirus E
cagccagagcaggaagcagaga

SEQ ID NO: 3936858 - RNA, 20 nt, Human adenovirus E
cagcccaauggcaccugcga

SEQ ID NO: 3936859 - RNA, 21 nt, Human adenovirus E
cagccccgauuaugcagggug

SEQ ID NO: 3936860 - RNA, 14 nt, Human adenovirus E
cagccgcggccagg

SEQ ID NO: 3936861 - RNA, 22 nt, Human adenovirus E
cagccggcgcuucugcccccgc

SEQ ID NO: 3936862 - RNA, 18 nt, Human adenovirus E
cagcgaaccccgcagaac

SEQ ID NO: 3936863 - RNA, 21 nt, Human adenovirus E
cagcgacgagacucgggccgc

SEQ ID NO: 3936864 - RNA, 14 nt, Human adenovirus E
cagcgcagccaggg

SEQ ID NO: 3936865 - RNA, 23 nt, Human adenovirus E
cagcgccccgcauccccaaauuc

SEQ ID NO: 3936866 - RNA, 17 nt, Human adenovirus E
cagcgcccugcgccuga

SEQ ID NO: 3936867 - RNA, 12 nt, Human adenovirus E
cagcgccgggcc

SEQ ID NO: 3936868 - RNA, 23 nt, Human adenovirus E
cagcgcgcgucguuguuggccag

SEQ ID NO: 3936869 - RNA, 21 nt, Human adenovirus E
cagcggcauugucggugugcu

SEQ ID NO: 3936870 - RNA, 19 nt, Human adenovirus E
cagcggccaucgccagcau

SEQ ID NO: 3936871 - RNA, 18 nt, Human adenovirus E
cagcggcgagggccugcu

SEQ ID NO: 3936872 - RNA, 15 nt, Human adenovirus E
cagcggcggcagcag

SEQ ID NO: 3936873 - RNA, 17 nt, Human adenovirus E
cagcggcggcagcaggu

SEQ ID NO: 3936874 - RNA, 21 nt, Human adenovirus E
cagcgggcccugaccggggcc

SEQ ID NO: 3936875 - RNA, 19 nt, Human adenovirus E
cagcguccgauccuggucg

SEQ ID NO: 3936876 - RNA, 21 nt, Human adenovirus E
cagcguccgauccuggucgag

SEQ ID NO: 3936877 - RNA, 20 nt, Human adenovirus E
cagcguggaggagcucagcc

SEQ ID NO: 3936878 - RNA, 21 nt, Human adenovirus E
cagcguguucuccccccgacc

SEQ ID NO: 3936879 - RNA, 18 nt, Human adenovirus E
cagcuaccuccagugccu

SEQ ID NO: 3936880 - RNA, 23 nt, Human adenovirus E
cagcucaacgacgaaguggugag

SEQ ID NO: 3936881 - RNA, 18 nt, Human adenovirus E
cagcuccuccucggccug

SEQ ID NO: 3936882 - RNA, 15 nt, Human adenovirus E
cagcugauggugccc

SEQ ID NO: 3936883 - RNA, 22 nt, Human adenovirus E
cagcugcgcgccuucaccucgc

SEQ ID NO: 3936884 - RNA, 18 nt, Human adenovirus E
caggaaauuccccagccc

SEQ ID NO: 3936885 - RNA, 19 nt, Human adenovirus E
caggaaauuccccagccca

SEQ ID NO: 3936886 - RNA, 21 nt, Human adenovirus E
caggacccuacguagaagagg

SEQ ID NO: 3936887 - RNA, 19 nt, Human adenovirus E
caggacgacccgggcaacc

SEQ ID NO: 3936888 - RNA, 14 nt, Human adenovirus E
caggagcacaggga

SEQ ID NO: 3936889 - RNA, 16 nt, Human adenovirus E
caggagcacagggacg

SEQ ID NO: 3936890 - RNA, 21 nt, Human adenovirus E
caggagcgcgggcugccgcug

SEQ ID NO: 3936891 - RNA, 15 nt, Human adenovirus E
caggagcugaugcau

SEQ ID NO: 3936892 - RNA, 21 nt, Human adenovirus E
caggagggggccacccccagc

SEQ ID NO: 3936893 - RNA, 20 nt, Human adenovirus E
caggaugcaccgugcgguga

SEQ ID NO: 3936894 - RNA, 22 nt, Human adenovirus E
caggcacacgcacuaccaccac

SEQ ID NO: 3936895 - RNA, 22 nt, Human adenovirus E
caggcacggguucgugcgccag

SEQ ID NO: 3936896 - RNA, 12 nt, Human adenovirus E
caggcagcgggg

SEQ ID NO: 3936897 - RNA, 12 nt, Human adenovirus E
caggccagcacg

SEQ ID NO: 3936898 - RNA, 18 nt, Human adenovirus E
caggccaugcaacgcauc

SEQ ID NO: 3936899 - RNA, 18 nt, Human adenovirus E
caggccccggucggggac

SEQ ID NO: 3936900 - RNA, 17 nt, Human adenovirus E
caggccgaaguccagcu

SEQ ID NO: 3936901 - RNA, 22 nt, Human adenovirus E
caggccgucuacucgcagcagc

SEQ ID NO: 3936902 - RNA, 15 nt, Human adenovirus E
caggccgugcagcgg

SEQ ID NO: 3936903 - RNA, 22 nt, Human adenovirus E
caggcgauggcggcggcggcga

SEQ ID NO: 3936904 - RNA, 22 nt, Human adenovirus E
caggcgcacgggacgcagggcc

SEQ ID NO: 3936905 - RNA, 14 nt, Human adenovirus E
caggcggcaguggu

SEQ ID NO: 3936906 - RNA, 22 nt, Human adenovirus E
caggcuggagccgcagcuaacg

SEQ ID NO: 3936907 - RNA, 18 nt, Human adenovirus E
cagggacgauccccgggc

SEQ ID NO: 3936908 - RNA, 15 nt, Human adenovirus E
cagggacucccucag

SEQ ID NO: 3936909 - RNA, 17 nt, Human adenovirus E
cagggaggcgcugcuga

SEQ ID NO: 3936910 - RNA, 19 nt, Human adenovirus E
cagggauacaaguccuggc

SEQ ID NO: 3936911 - RNA, 14 nt, Human adenovirus E
cagggccagcaccg

SEQ ID NO: 3936912 - RNA, 15 nt, Human adenovirus E
caggggcgcagggca

SEQ ID NO: 3936913 - RNA, 15 nt, Human adenovirus E
caggggcggcagggg

SEQ ID NO: 3936914 - RNA, 18 nt, Human adenovirus E
cagggggccacgagccgg

SEQ ID NO: 3936915 - RNA, 19 nt, Human adenovirus E
caggggguccagcaugacc

SEQ ID NO: 3936916 - RNA, 20 nt, Human adenovirus E
cagggucucaaagcuccgcu

SEQ ID NO: 3936917 - RNA, 14 nt, Human adenovirus E
cagggugaugaggu

SEQ ID NO: 3936918 - RNA, 20 nt, Human adenovirus E
cagguacacauacaaagccu

SEQ ID NO: 3936919 - RNA, 19 nt, Human adenovirus E
caggucaucgcgccugaga

SEQ ID NO: 3936920 - RNA, 14 nt, Human adenovirus E
cagguggcagaugc

SEQ ID NO: 3936921 - RNA, 22 nt, Human adenovirus E
cagguggcagaugcggcgguac

SEQ ID NO: 3936922 - RNA, 16 nt, Human adenovirus E
caguacgugcaacaca

SEQ ID NO: 3936923 - RNA, 15 nt, Human adenovirus E
caguauccgcagcag

SEQ ID NO: 3936924 - RNA, 16 nt, Human adenovirus E
caguauccgcagcagc

SEQ ID NO: 3936925 - RNA, 17 nt, Human adenovirus E
caguauccgcagcagcg

SEQ ID NO: 3936926 - RNA, 20 nt, Human adenovirus E
cagucauagcaggggcgcag

SEQ ID NO: 3936927 - RNA, 21 nt, Human adenovirus E
caguccauaguucaacacgcu

SEQ ID NO: 3936928 - RNA, 13 nt, Human adenovirus E
cagucccacugcu

SEQ ID NO: 3936929 - RNA, 14 nt, Human adenovirus E
cagucccccgagga

SEQ ID NO: 3936930 - RNA, 20 nt, Human adenovirus E
cagucgccagggcuugcaga

SEQ ID NO: 3936931 - RNA, 16 nt, Human adenovirus E
cagucucaaguccagc

SEQ ID NO: 3936932 - RNA, 22 nt, Human adenovirus E
cagucucaaguccagcaaagcg

SEQ ID NO: 3936933 - RNA, 12 nt, Human adenovirus E
cagucuggagga

SEQ ID NO: 3936934 - RNA, 19 nt, Human adenovirus E
cguggaggagcucagccgc

SEQ ID NO: 3936935 - RNA, 14 nt, Human adenovirus E
cguggccuggaggc

SEQ ID NO: 3936936 - RNA, 15 nt, Human adenovirus E
cgugguccuggugac

SEQ ID NO: 3936937 - RNA, 20 nt, Human adenovirus E
cgugguggcggacgcgcgcc

SEQ ID NO: 3936938 - RNA, 14 nt, Human adenovirus E
cguguucucccccc

SEQ ID NO: 3936939 - RNA, 19 nt, Human adenovirus E
cguuacgugcagcagaagc

SEQ ID NO: 3936940 - RNA, 16 nt, Human adenovirus E
cguuacucggagcugg

SEQ ID NO: 3936941 - RNA, 17 nt, Human adenovirus E
cguuacucggagcuggc

SEQ ID NO: 3936942 - RNA, 21 nt, Human adenovirus E
cguuacugucguugucggauc

SEQ ID NO: 3936943 - RNA, 12 nt, Human adenovirus E
cguucucuccag

SEQ ID NO: 3936944 - RNA, 12 nt, Human adenovirus E
cguugggcaggg

SEQ ID NO: 3936945 - RNA, 12 nt, Human adenovirus E
cuaacacuuugc

SEQ ID NO: 3936946 - RNA, 13 nt, Human adenovirus E
cuaccgcagcugg

SEQ ID NO: 3936947 - RNA, 20 nt, Human adenovirus E
cuaccgucaccuccacagcc

SEQ ID NO: 3936948 - RNA, 17 nt, Human adenovirus E
cuaccugauaucgccuc

SEQ ID NO: 3936949 - RNA, 14 nt, Human adenovirus E
cuacgucguggugg

SEQ ID NO: 3936950 - RNA, 21 nt, Human adenovirus E
cuacgucuacaaggcccuggg

SEQ ID NO: 3936951 - RNA, 15 nt, Human adenovirus E
cuacuggucgcugcc

SEQ ID NO: 3936952 - RNA, 23 nt, Human adenovirus E
cuacuuccaagaagaggcagcag

SEQ ID NO: 3936953 - RNA, 13 nt, Human adenovirus E
cuacuuccuccuc

SEQ ID NO: 3936954 - RNA, 14 nt, Human adenovirus E
cuagaacagucagc

SEQ ID NO: 3936955 - RNA, 16 nt, Human adenovirus E
cuagccgccuccaccc

SEQ ID NO: 3936956 - RNA, 18 nt, Human adenovirus E
cuaggacguccagagcgc

SEQ ID NO: 3936957 - RNA, 23 nt, Human adenovirus E
cuaguugcgggugggcuuuuggu

SEQ ID NO: 3936958 - RNA, 16 nt, Human adenovirus E
cuaucauuaccucugc

SEQ ID NO: 3936959 - RNA, 21 nt, Human adenovirus E
cuaugaggccgagccacagcg

SEQ ID NO: 3936960 - RNA, 21 nt, Human adenovirus E
cuaugccaucuuccagcagag

SEQ ID NO: 3936961 - RNA, 22 nt, Human adenovirus E
cuaugugacgcccgcggagcac

SEQ ID NO: 3936962 - RNA, 16 nt, Human adenovirus E
cuauguuggcacagca

SEQ ID NO: 3936963 - RNA, 17 nt, Human adenovirus E
cuauguuggcacagcac

SEQ ID NO: 3936964 - RNA, 19 nt, Human adenovirus E
cuauguuggcacagcacag

SEQ ID NO: 3936965 - RNA, 20 nt, Human adenovirus E
cuauguuggcacagcacagg

SEQ ID NO: 3936966 - RNA, 19 nt, Human adenovirus E
cucaacccaccccacccag

SEQ ID NO: 3936967 - RNA, 21 nt, Human adenovirus E
cucaaccccggcuucccccag

SEQ ID NO: 3936968 - RNA, 16 nt, Human adenovirus E
cucaaguccagcaaag

SEQ ID NO: 3936969 - RNA, 15 nt, Human adenovirus E
cucacagaucugcau

SEQ ID NO: 3936970 - RNA, 20 nt, Human adenovirus E
cucacaugaccgccuucgcg

SEQ ID NO: 3936971 - RNA, 15 nt, Human adenovirus E
cucaccaaggccaug

SEQ ID NO: 3936972 - RNA, 16 nt, Human adenovirus E
cucaccaaggccaugg

SEQ ID NO: 3936973 - RNA, 13 nt, Human adenovirus E
cucaccgccacgc

SEQ ID NO: 3936974 - RNA, 19 nt, Human adenovirus E
cucagcaaccugcugggca

SEQ ID NO: 3936975 - RNA, 19 nt, Human adenovirus E
cucagcacccagcccgcca

SEQ ID NO: 3936976 - RNA, 13 nt, Human adenovirus E
cucagcaccgagg

SEQ ID NO: 3936977 - RNA, 23 nt, Human adenovirus E
cucagcguggaggagcucagccg

SEQ ID NO: 3936978 - RNA, 20 nt, Human adenovirus E
cucaggcacacgcacuacca

SEQ ID NO: 3936979 - RNA, 18 nt, Human adenovirus E
cucaggcugacgcugcgc

SEQ ID NO: 3936980 - RNA, 23 nt, Human adenovirus E
cucaggggguccggguccaggga

SEQ ID NO: 3936981 - RNA, 23 nt, Human adenovirus E
cucaucaagcaucuggcccggca

SEQ ID NO: 3936982 - RNA, 20 nt, Human adenovirus E
cuccaagucugugccacccu

SEQ ID NO: 3936983 - RNA, 15 nt, Human adenovirus E
cuccacccucccagg

SEQ ID NO: 3936984 - RNA, 11 nt, Human adenovirus E
cuccagcacca

SEQ ID NO: 3936985 - RNA, 17 nt, Human adenovirus E
cuccaguucguggagga

SEQ ID NO: 3936986 - RNA, 13 nt, Human adenovirus E
cucccagagcugg

SEQ ID NO: 3936987 - RNA, 23 nt, Human adenovirus E
cucccggaggaggggggccaccu

SEQ ID NO: 3936988 - RNA, 16 nt, Human adenovirus E
cucccucggugaagaa

SEQ ID NO: 3936989 - RNA, 20 nt, Human adenovirus E
cuccgaggucaaccaaccuc

SEQ ID NO: 3936990 - RNA, 22 nt, Human adenovirus E
cuccgccgacgacagcagcgug

SEQ ID NO: 3936991 - RNA, 17 nt, Human adenovirus E
cuccgcggccggccauu

SEQ ID NO: 3936992 - RNA, 13 nt, Human adenovirus E
cuccgcuggguga

SEQ ID NO: 3936993 - RNA, 14 nt, Human adenovirus E
cuccggaauccugc

SEQ ID NO: 3936994 - RNA, 17 nt, Human adenovirus E
cuccggaauccugcccg

SEQ ID NO: 3936995 - RNA, 15 nt, Human adenovirus E
cuccuagggaggaac

SEQ ID NO: 3936996 - RNA, 17 nt, Human adenovirus E
cuccuccaagucugugc

SEQ ID NO: 3936997 - RNA, 15 nt, Human adenovirus E
cuccucccucagcaa

SEQ ID NO: 3936998 - RNA, 12 nt, Human adenovirus E
cuccuccuccag

SEQ ID NO: 3936999 - RNA, 20 nt, Human adenovirus E
cuccuucagcgcgcgcugcc

SEQ ID NO: 3937000 - RNA, 15 nt, Human adenovirus E
cucgaaggcgggcau

SEQ ID NO: 3937001 - RNA, 20 nt, Human adenovirus E
cucgaaucaggcuggagccg

SEQ ID NO: 3937002 - RNA, 14 nt, Human adenovirus E
cucgagcgcccagu

SEQ ID NO: 3937003 - RNA, 16 nt, Human adenovirus E
cucgaucuccuccucu

SEQ ID NO: 3937004 - RNA, 19 nt, Human adenovirus E
cucgcaacgcugcacggga

SEQ ID NO: 3937005 - RNA, 17 nt, Human adenovirus E
cucgcagcagcugcgcg

SEQ ID NO: 3937006 - RNA, 21 nt, Human adenovirus E
cucgccaucugcccccaccgc

SEQ ID NO: 3937007 - RNA, 19 nt, Human adenovirus E
cucgcugaacuaccagaac

SEQ ID NO: 3937008 - RNA, 21 nt, Human adenovirus E
cucggacuucgugccgcugac

SEQ ID NO: 3937009 - RNA, 12 nt, Human adenovirus E
cucggagcuggc

SEQ ID NO: 3937010 - RNA, 14 nt, Human adenovirus E
cucggccauccugg

SEQ ID NO: 3937011 - RNA, 15 nt, Human adenovirus E
cucggccauccugga

SEQ ID NO: 3937012 - RNA, 16 nt, Human adenovirus E
cucggccauccuggag

SEQ ID NO: 3937013 - RNA, 18 nt, Human adenovirus E
cucguccacauccaggaa

SEQ ID NO: 3937014 - RNA, 22 nt, Human adenovirus E
cucugcucaauauauagcccag

SEQ ID NO: 3937015 - RNA, 15 nt, Human adenovirus E
cucuguccccggugc

SEQ ID NO: 3937016 - RNA, 13 nt, Human adenovirus E
cucuuccucuucu

SEQ ID NO: 3937017 - RNA, 17 nt, Human adenovirus E
cucuucgggggcagagg

SEQ ID NO: 3937018 - RNA, 15 nt, Human adenovirus E
cucuucuacuuccuc

SEQ ID NO: 3937019 - RNA, 18 nt, Human adenovirus E
cucuucuacuuccuccuc

SEQ ID NO: 3937020 - RNA, 15 nt, Human adenovirus E
cucuucuuccuccuc

SEQ ID NO: 3937021 - RNA, 14 nt, Human adenovirus E
cucuugcaggacag

SEQ ID NO: 3937022 - RNA, 20 nt, Human adenovirus E
cucuuugccuucaccaccug

SEQ ID NO: 3937023 - RNA, 13 nt, Human adenovirus E
cugaaaacaccac

SEQ ID NO: 3937024 - RNA, 13 nt, Human adenovirus E
cugaaacacaaaa

SEQ ID NO: 3937025 - RNA, 16 nt, Human adenovirus E
cugaaaguggagcugc

SEQ ID NO: 3937026 - RNA, 20 nt, Human adenovirus E
cugaacaguauccgcagcag

SEQ ID NO: 3937027 - RNA, 21 nt, Human adenovirus E
cugaagcccacggccgccagc

SEQ ID NO: 3937028 - RNA, 23 nt, Human adenovirus E
cugaaucuaauacuaccacccac

SEQ ID NO: 3937029 - RNA, 22 nt, Human adenovirus E
cugaccaccguggugcagaaca

SEQ ID NO: 3937030 - RNA, 21 nt, Human adenovirus E
cugacuaacucagguguccag

SEQ ID NO: 3937031 - RNA, 20 nt, Human adenovirus E
cugagcauucacaugcucau

SEQ ID NO: 3937032 - RNA, 15 nt, Human adenovirus E
cugagcgaccaggag

SEQ ID NO: 3937033 - RNA, 18 nt, Human adenovirus E
cugagcgggggggaggac

SEQ ID NO: 3937034 - RNA, 13 nt, Human adenovirus E
cugagggacgagg

SEQ ID NO: 3937035 - RNA, 14 nt, Human adenovirus E
cugaguuugggcaa

SEQ ID NO: 3937036 - RNA, 15 nt, Human adenovirus E
cugaucacaucgacc

SEQ ID NO: 3937037 - RNA, 15 nt, Human adenovirus E
cugauggccacgggc

SEQ ID NO: 3937038 - RNA, 17 nt, Human adenovirus E
cugcaaccaccccugcc

SEQ ID NO: 3937039 - RNA, 13 nt, Human adenovirus E
cugcaacccccag

SEQ ID NO: 3937040 - RNA, 13 nt, Human adenovirus E
cugcaagcuccug

SEQ ID NO: 3937041 - RNA, 14 nt, Human adenovirus E
cugcacaccacccu

SEQ ID NO: 3937042 - RNA, 14 nt, Human adenovirus E
cugcacaggcagca

SEQ ID NO: 3937043 - RNA, 22 nt, Human adenovirus E
cugcaccacgcugcgcccccag

SEQ ID NO: 3937044 - RNA, 14 nt, Human adenovirus E
cugcagagccagcc

SEQ ID NO: 3937045 - RNA, 16 nt, Human adenovirus E
cugcagcgggcccuga

SEQ ID NO: 3937046 - RNA, 15 nt, Human adenovirus E
cugccacaccuggca

SEQ ID NO: 3937047 - RNA, 20 nt, Human adenovirus E
cugccaccaauuggaggaau

SEQ ID NO: 3937048 - RNA, 20 nt, Human adenovirus E
cugcccccgccccagcagca

SEQ ID NO: 3937049 - RNA, 21 nt, Human adenovirus E
cugcccccgccccagcagcaa

SEQ ID NO: 3937050 - RNA, 13 nt, Human adenovirus E
cugccgcccgugg

SEQ ID NO: 3937051 - RNA, 14 nt, Human adenovirus E
cugccgcccgugga

SEQ ID NO: 3937052 - RNA, 16 nt, Human adenovirus E
cugccgcccuggugcg

SEQ ID NO: 3937053 - RNA, 22 nt, Human adenovirus E
uacuggggguauaggcagggag

SEQ ID NO: 3937054 - RNA, 12 nt, Human adenovirus E
uacuuccuccuc

SEQ ID NO: 3937055 - RNA, 15 nt, Human adenovirus E
uagaaugaccacaac

SEQ ID NO: 3937056 - RNA, 17 nt, Human adenovirus E
uagaaugaccacaacca

SEQ ID NO: 3937057 - RNA, 17 nt, Human adenovirus E
uagacagauggaagaca

SEQ ID NO: 3937058 - RNA, 14 nt, Human adenovirus E
uagagccucgggaa

SEQ ID NO: 3937059 - RNA, 16 nt, Human adenovirus E
uagaguuuggaagcag

SEQ ID NO: 3937060 - RNA, 17 nt, Human adenovirus E
uagcacucaacccaccc

SEQ ID NO: 3937061 - RNA, 22 nt, Human adenovirus E
uagccccguccucuucccacuc

SEQ ID NO: 3937062 - RNA, 20 nt, Human adenovirus E
uagcuuaccgagcagcagca

SEQ ID NO: 3937063 - RNA, 15 nt, Human adenovirus E
uaggaccaccaggaa

SEQ ID NO: 3937064 - RNA, 13 nt, Human adenovirus E
uagucaaauacug

SEQ ID NO: 3937065 - RNA, 15 nt, Human adenovirus E
uaguggugugcaugu

SEQ ID NO: 3937066 - RNA, 21 nt, Human adenovirus E
uaguucaacacgcuccagccg

SEQ ID NO: 3937067 - RNA, 16 nt, Human adenovirus E
uaguuuauacauguga

SEQ ID NO: 3937068 - RNA, 21 nt, Human adenovirus E
uaugauugaaaaccaucacag

SEQ ID NO: 3937069 - RNA, 13 nt, Human adenovirus E
uauuuuuccucca

SEQ ID NO: 3937070 - RNA, 16 nt, Human adenovirus E
uauuuuuccuccaccc

SEQ ID NO: 3937071 - RNA, 12 nt, Human adenovirus E
ucaaaaucucug

SEQ ID NO: 3937072 - RNA, 20 nt, Human adenovirus E
ucaaauacucgcagaaaaug

SEQ ID NO: 3937073 - RNA, 21 nt, Human adenovirus E
ucaacaauagcacucaaccca

SEQ ID NO: 3937074 - RNA, 15 nt, Human adenovirus E
ucaacagccgccugg

SEQ ID NO: 3937075 - RNA, 14 nt, Human adenovirus E
ucaacuccuccucc

SEQ ID NO: 3937076 - RNA, 13 nt, Human adenovirus E
ucaacuccucggg

SEQ ID NO: 3937077 - RNA, 15 nt, Human adenovirus E
ucaagcaucuggccc

SEQ ID NO: 3937078 - RNA, 14 nt, Human adenovirus E
ucaaggacaaagug

SEQ ID NO: 3937079 - RNA, 20 nt, Human adenovirus E
ucaaggaugcgcugcucgac

SEQ ID NO: 3937080 - RNA, 17 nt, Human adenovirus E
ucaaguggugcccccuc

SEQ ID NO: 3937081 - RNA, 20 nt, Human adenovirus E
ucaaguggugcccccuccag

SEQ ID NO: 3937082 - RNA, 22 nt, Human adenovirus E
ucaaguuucugugucugaaccc

SEQ ID NO: 3937083 - RNA, 19 nt, Human adenovirus E
ucacaugcucaucgcuauu

SEQ ID NO: 3937084 - RNA, 15 nt, Human adenovirus E
ucaccaccucccggu

SEQ ID NO: 3937085 - RNA, 19 nt, Human adenovirus E
ucaccaccugcaucugcug

SEQ ID NO: 3937086 - RNA, 17 nt, Human adenovirus E
ucaccgagagccgccuc

SEQ ID NO: 3937087 - RNA, 16 nt, Human adenovirus E
ucaccgccccgcucag

SEQ ID NO: 3937088 - RNA, 15 nt, Human adenovirus E
ucacggcguacgagc

SEQ ID NO: 3937089 - RNA, 19 nt, Human adenovirus E
ucagacccacugcugaacc

SEQ ID NO: 3937090 - RNA, 22 nt, Human adenovirus E
ucagcacucucaacuccucggg

SEQ ID NO: 3937091 - RNA, 19 nt, Human adenovirus E
ucagcaucaucugggccug

SEQ ID NO: 3937092 - RNA, 19 nt, Human adenovirus E
ucagcaugaugcccacggc

SEQ ID NO: 3937093 - RNA, 15 nt, Human adenovirus E
ucagccagcguccga

SEQ ID NO: 3937094 - RNA, 16 nt, Human adenovirus E
ucagcgcacucucgag

SEQ ID NO: 3937095 - RNA, 16 nt, Human adenovirus E
ucagcgccccgcaucc

SEQ ID NO: 3937096 - RNA, 12 nt, Human adenovirus E
ucaggcugggcu

SEQ ID NO: 3937097 - RNA, 18 nt, Human adenovirus E
ucagggaggcgcugcuga

SEQ ID NO: 3937098 - RNA, 15 nt, Human adenovirus E
ucagguguccagcug

SEQ ID NO: 3937099 - RNA, 16 nt, Human adenovirus E
ucaguuuuuccaacaa

SEQ ID NO: 3937100 - RNA, 19 nt, Human adenovirus E
ucaucaaguuucaaugugg

SEQ ID NO: 3937101 - RNA, 17 nt, Human adenovirus E
ucauccucgaacgcucc

SEQ ID NO: 3937102 - RNA, 14 nt, Human adenovirus E
ucaugaccagcaug

SEQ ID NO: 3937103 - RNA, 11 nt, Human adenovirus E
ucaugaugcag

SEQ ID NO: 3937104 - RNA, 13 nt, Human adenovirus E
ucaugcccgccuc

SEQ ID NO: 3937105 - RNA, 17 nt, Human adenovirus E
ucauguacgccagcaac

SEQ ID NO: 3937106 - RNA, 16 nt, Human adenovirus E
  misc_feature (7)..(7): n is a, c, g, or u
ucauuanuccagcaga

SEQ ID NO: 3937107 - RNA, 20 nt, Human adenovirus E
ucauugccgucauucaugga

SEQ ID NO: 3937108 - RNA, 21 nt, Human adenovirus E
ucauuuccggguucccacgcu

SEQ ID NO: 3937109 - RNA, 14 nt, Human adenovirus E
ucauuuuuccagcc

SEQ ID NO: 3937110 - RNA, 16 nt, Human adenovirus E
uccaagaccccauagc

SEQ ID NO: 3937111 - RNA, 17 nt, Human adenovirus E
uccacgagcgccagcug

SEQ ID NO: 3937112 - RNA, 22 nt, Human adenovirus E
uccacgguggcuuccagcaaag

SEQ ID NO: 3937113 - RNA, 20 nt, Human adenovirus E
uccacugucgagagccacac

SEQ ID NO: 3937114 - RNA, 16 nt, Human adenovirus E
uccagaaaaagccaca

SEQ ID NO: 3937115 - RNA, 15 nt, Human adenovirus E
uccagcaccaggcag

SEQ ID NO: 3937116 - RNA, 23 nt, Human adenovirus E
uccagcggcggagcggcaucucg

SEQ ID NO: 3937117 - RNA, 18 nt, Human adenovirus E
uccagggacucccucagc

SEQ ID NO: 3937118 - RNA, 17 nt, Human adenovirus E
uccaucgcuuacagccu

SEQ ID NO: 3937119 - RNA, 16 nt, Human adenovirus E
ucccaagaucuucgag

SEQ ID NO: 3937120 - RNA, 23 nt, Human adenovirus E
ucccaagaucuucgagggucugg

SEQ ID NO: 3937121 - RNA, 11 nt, Human adenovirus E
ucccacugcua

SEQ ID NO: 3937122 - RNA, 21 nt, Human adenovirus E
uccccaaauucaaacaccuca

SEQ ID NO: 3937123 - RNA, 20 nt, Human adenovirus E
  misc_feature (7)..(7): n is a, c, g, or u
uccccgnuacuaacaaccaa

SEQ ID NO: 3937124 - RNA, 17 nt, Human adenovirus E
uccccucuucccagcuc

SEQ ID NO: 3937125 - RNA, 23 nt, Human adenovirus E
ucccggaggaggggggccaccuc

SEQ ID NO: 3937126 - RNA, 18 nt, Human adenovirus E
ucccgguaccacaucacc

SEQ ID NO: 3937127 - RNA, 17 nt, Human adenovirus E
ucccucguacgagagcg

SEQ ID NO: 3937128 - RNA, 21 nt, Human adenovirus E
ucccugagcuccucccucagc

SEQ ID NO: 3937129 - RNA, 18 nt, Human adenovirus E
ucccuggccugcaacccc

SEQ ID NO: 3937130 - RNA, 20 nt, Human adenovirus E
uccgcugggugacaaagagc

SEQ ID NO: 3937131 - RNA, 23 nt, Human adenovirus E
uccggaauccugcccgccaccug

SEQ ID NO: 3937132 - RNA, 16 nt, Human adenovirus E
uccggcaccgcuucca

SEQ ID NO: 3937133 - RNA, 14 nt, Human adenovirus E
uccggccgcgaggg

SEQ ID NO: 3937134 - RNA, 15 nt, Human adenovirus E
uccgggccggacuac

SEQ ID NO: 3937135 - RNA, 15 nt, Human adenovirus E
uccgggucucggcau

SEQ ID NO: 3937136 - RNA, 20 nt, Human adenovirus E
uccgucaagcugcugcucag

SEQ ID NO: 3937137 - RNA, 16 nt, Human adenovirus E
uccguggcggugcagg

SEQ ID NO: 3937138 - RNA, 19 nt, Human adenovirus E
uccuaggccuuuuaauuuu

SEQ ID NO: 3937139 - RNA, 14 nt, Human adenovirus E
uccuccacccuccc

SEQ ID NO: 3937140 - RNA, 16 nt, Human adenovirus E
uccucccucagcaaua

SEQ ID NO: 3937141 - RNA, 11 nt, Human adenovirus E
uccuccuccac

SEQ ID NO: 3937142 - RNA, 17 nt, Human adenovirus E
uccuccucguagaggaa

SEQ ID NO: 3937143 - RNA, 16 nt, Human adenovirus E
uccugaauccccacug

SEQ ID NO: 3937144 - RNA, 14 nt, Human adenovirus E
uccugcacaggcag

SEQ ID NO: 3937145 - RNA, 16 nt, Human adenovirus E
uccugcacaggcagca

SEQ ID NO: 3937146 - RNA, 17 nt, Human adenovirus E
uccugcacaggcagcaa

SEQ ID NO: 3937147 - RNA, 21 nt, Human adenovirus E
uccugcccgcgcugaucccca

SEQ ID NO: 3937148 - RNA, 16 nt, Human adenovirus E
ucgaaggcgggcauga

SEQ ID NO: 3937149 - RNA, 18 nt, Human adenovirus E
ucgacgccaucagcgagu

SEQ ID NO: 3937150 - RNA, 21 nt, Human adenovirus E
ucgagcuugguggcgaaggag

SEQ ID NO: 3937151 - RNA, 19 nt, Human adenovirus E
ucgaggagaaccugcacua

SEQ ID NO: 3937152 - RNA, 22 nt, Human adenovirus E
ucgagggggaacccguccugau

SEQ ID NO: 3937153 - RNA, 17 nt, Human adenovirus E
ucgauggugaagaugcc

SEQ ID NO: 3937154 - RNA, 19 nt, Human adenovirus E
ucgcacuccacgagccagg

SEQ ID NO: 3937155 - RNA, 16 nt, Human adenovirus E
ucgcagaaaaugaugc

SEQ ID NO: 3937156 - RNA, 17 nt, Human adenovirus E
ucgcaucaggccccgca

SEQ ID NO: 3937157 - RNA, 20 nt, Human adenovirus E
ucgccaaccucgccaucugc

SEQ ID NO: 3937158 - RNA, 23 nt, Human adenovirus E
ucgccgcaccgccgcugcaacca

SEQ ID NO: 3937159 - RNA, 12 nt, Human adenovirus E
ucgcgcaccacc

SEQ ID NO: 3937160 - RNA, 16 nt, Human adenovirus E
ucgcgcacggccagcg

SEQ ID NO: 3937161 - RNA, 17 nt, Human adenovirus E
ucgcgguggggcggcca

SEQ ID NO: 3937162 - RNA, 21 nt, Human adenovirus E
ucgcgguggggcggccagcug

SEQ ID NO: 3937163 - RNA, 15 nt, Human adenovirus E
ucgcuguccacgagc

SEQ ID NO: 3937164 - RNA, 19 nt, Human adenovirus E
ucgcuguccacgagcgcca

SEQ ID NO: 3937165 - RNA, 17 nt, Human adenovirus E
ucggcaccagccaacug

SEQ ID NO: 3937166 - RNA, 13 nt, Human adenovirus E
ucggcgggggaga

SEQ ID NO: 3937167 - RNA, 14 nt, Human adenovirus E
ucggcguuggccau

SEQ ID NO: 3937168 - RNA, 19 nt, Human adenovirus E
ucgugcagaaccccaccag

SEQ ID NO: 3937169 - RNA, 18 nt, Human adenovirus E
ucguucucuccagcacca

SEQ ID NO: 3937170 - RNA, 17 nt, Human adenovirus E
ucguuguuggccagcug

SEQ ID NO: 3937171 - RNA, 16 nt, Human adenovirus E
ucuaaccuguccaccc

SEQ ID NO: 3937172 - RNA, 14 nt, Human adenovirus E
cgcggcgacgaggc

SEQ ID NO: 3937173 - RNA, 13 nt, Human adenovirus E
cgcggcggugccc

SEQ ID NO: 3937174 - RNA, 13 nt, Human adenovirus E
cgcgguaccuggc

SEQ ID NO: 3937175 - RNA, 15 nt, Human adenovirus E
cgcgucgcccaucuc

SEQ ID NO: 3937176 - RNA, 19 nt, Human adenovirus E
cgcgugcacgaagcccugc

SEQ ID NO: 3937177 - RNA, 16 nt, Human adenovirus E
cgcuacaacagcacca

SEQ ID NO: 3937178 - RNA, 16 nt, Human adenovirus E
cgcucagcaccgagga

SEQ ID NO: 3937179 - RNA, 16 nt, Human adenovirus E
cgcucccuggccugca

SEQ ID NO: 3937180 - RNA, 14 nt, Human adenovirus E
cgcucccuggggcg

SEQ ID NO: 3937181 - RNA, 18 nt, Human adenovirus E
cgcuccggaauccugccc

SEQ ID NO: 3937182 - RNA, 22 nt, Human adenovirus E
cgcucgcgguggggcggccagc

SEQ ID NO: 3937183 - RNA, 23 nt, Human adenovirus E
cgcucgcgguggggcggccagcu

SEQ ID NO: 3937184 - RNA, 17 nt, Human adenovirus E
cgcucguagggacugag

SEQ ID NO: 3937185 - RNA, 13 nt, Human adenovirus E
cgcugcagagcca

SEQ ID NO: 3937186 - RNA, 20 nt, Human adenovirus E
cgcugcgcaacggccugccc

SEQ ID NO: 3937187 - RNA, 13 nt, Human adenovirus E
cgcuguccacgag

SEQ ID NO: 3937188 - RNA, 13 nt, Human adenovirus E
cgcuguccuggcu

SEQ ID NO: 3937189 - RNA, 23 nt, Human adenovirus E
cggaauccugcccgccaccugcu

SEQ ID NO: 3937190 - RNA, 13 nt, Human adenovirus E
cggacgagcugac

SEQ ID NO: 3937191 - RNA, 20 nt, Human adenovirus E
cggacgauuggacccaggcc

SEQ ID NO: 3937192 - RNA, 21 nt, Human adenovirus E
cggacgauuggacccaggcca

SEQ ID NO: 3937193 - RNA, 13 nt, Human adenovirus E
cggacgugcagcc

SEQ ID NO: 3937194 - RNA, 13 nt, Human adenovirus E
cggacuuccgugu

SEQ ID NO: 3937195 - RNA, 13 nt, Human adenovirus E
cggagacccugcg

SEQ ID NO: 3937196 - RNA, 22 nt, Human adenovirus E
cggagaguguaccgccgcggcc

SEQ ID NO: 3937197 - RNA, 22 nt, Human adenovirus E
cggagaugccuuucaagagccc

SEQ ID NO: 3937198 - RNA, 15 nt, Human adenovirus E
cggagauguuggaga

SEQ ID NO: 3937199 - RNA, 21 nt, Human adenovirus E
cggagauguuggagauggcga

SEQ ID NO: 3937200 - RNA, 12 nt, Human adenovirus E
cggagcacgagg

SEQ ID NO: 3937201 - RNA, 22 nt, Human adenovirus E
cggagcacgaggaggagcuggc

SEQ ID NO: 3937202 - RNA, 15 nt, Human adenovirus E
cggaggccagcaccc

SEQ ID NO: 3937203 - RNA, 21 nt, Human adenovirus E
cggaggccagcacccagacca

SEQ ID NO: 3937204 - RNA, 17 nt, Human adenovirus E
cggaucucgcucagguc

SEQ ID NO: 3937205 - RNA, 14 nt, Human adenovirus E
cggauggcuggcag

SEQ ID NO: 3937206 - RNA, 13 nt, Human adenovirus E
cggcacucagguu

SEQ ID NO: 3937207 - RNA, 15 nt, Human adenovirus E
cggcaggccaccauc

SEQ ID NO: 3937208 - RNA, 12 nt, Human adenovirus E
cggcccucagca

SEQ ID NO: 3937209 - RNA, 12 nt, Human adenovirus E
cggccgccguga

SEQ ID NO: 3937210 - RNA, 23 nt, Human adenovirus E
cggccgccgugagcggggcugga

SEQ ID NO: 3937211 - RNA, 18 nt, Human adenovirus E
cggccggauuccgcggcu

SEQ ID NO: 3937212 - RNA, 22 nt, Human adenovirus E
cggccggauuccgcggcuaacg

SEQ ID NO: 3937213 - RNA, 14 nt, Human adenovirus E
cggccucggugcac

SEQ ID NO: 3937214 - RNA, 22 nt, Human adenovirus E
cggccugcgucaucacccaggg

SEQ ID NO: 3937215 - RNA, 22 nt, Human adenovirus E
cggcgaaguugaaaaacuggga

SEQ ID NO: 3937216 - RNA, 13 nt, Human adenovirus E
cggcgacgaggcc

SEQ ID NO: 3937217 - RNA, 13 nt, Human adenovirus E
cggcgaggagccc

SEQ ID NO: 3937218 - RNA, 16 nt, Human adenovirus E
cggcgcaaacccggga

SEQ ID NO: 3937219 - RNA, 21 nt, Human adenovirus E
cggcgcaaacccgggagcuga

SEQ ID NO: 3937220 - RNA, 22 nt, Human adenovirus E
cggcgcagcuguuccugguggu

SEQ ID NO: 3937221 - RNA, 14 nt, Human adenovirus E
cggcgcccgccuac

SEQ ID NO: 3937222 - RNA, 19 nt, Human adenovirus E
cggcgcgccaucagcaagc

SEQ ID NO: 3937223 - RNA, 20 nt, Human adenovirus E
cggcgcgcuccacgguggcc

SEQ ID NO: 3937224 - RNA, 13 nt, Human adenovirus E
cggcgcggccagc

SEQ ID NO: 3937225 - RNA, 12 nt, Human adenovirus E
cggcggcagcag

SEQ ID NO: 3937226 - RNA, 16 nt, Human adenovirus E
cggcgggcgcagcagc

SEQ ID NO: 3937227 - RNA, 17 nt, Human adenovirus E
cggcggugcccgaggcc

SEQ ID NO: 3937228 - RNA, 22 nt, Human adenovirus E
cggcuggugauccggggcagaa

SEQ ID NO: 3937229 - RNA, 13 nt, Human adenovirus E
cgggagcugagga

SEQ ID NO: 3937230 - RNA, 16 nt, Human adenovirus E
cgggagcugcggcgcg

SEQ ID NO: 3937231 - RNA, 13 nt, Human adenovirus E
cgggcacucccgc

SEQ ID NO: 3937232 - RNA, 16 nt, Human adenovirus E
cgggcacucccgcauc

SEQ ID NO: 3937233 - RNA, 13 nt, Human adenovirus E
cgggcacuuccgc

SEQ ID NO: 3937234 - RNA, 22 nt, Human adenovirus E
cgggcaugggcguguggcagca

SEQ ID NO: 3937235 - RNA, 20 nt, Human adenovirus E
cgggccgcgaacgcucugca

SEQ ID NO: 3937236 - RNA, 13 nt, Human adenovirus E
cgggcggcagggg

SEQ ID NO: 3937237 - RNA, 17 nt, Human adenovirus E
  misc_feature (6)..(6): n is a, c, g, or u
cgggcnugggcgugcag

SEQ ID NO: 3937238 - RNA, 17 nt, Human adenovirus E
cggggccgggaccgagg

SEQ ID NO: 3937239 - RNA, 20 nt, Human adenovirus E
cggggcuguggaccucggcc

SEQ ID NO: 3937240 - RNA, 22 nt, Human adenovirus E
cgggggcguaggcguccgcgcc

SEQ ID NO: 3937241 - RNA, 18 nt, Human adenovirus E
cggggugucggggaagga

SEQ ID NO: 3937242 - RNA, 20 nt, Human adenovirus E
cggguccaccuuuuccaggg

SEQ ID NO: 3937243 - RNA, 21 nt, Human adenovirus E
cgggugaaugacauccgcgcc

SEQ ID NO: 3937244 - RNA, 18 nt, Human adenovirus E
cgggugauggucucccgc

SEQ ID NO: 3937245 - RNA, 18 nt, Human adenovirus E
cggguucgugcgccaggc

SEQ ID NO: 3937246 - RNA, 23 nt, Human adenovirus E
cggguucgugcgccaggccugca

SEQ ID NO: 3937247 - RNA, 16 nt, Human adenovirus E
cggucaacuccuccuc

SEQ ID NO: 3937248 - RNA, 12 nt, Human adenovirus E
cggucagggaga

SEQ ID NO: 3937249 - RNA, 15 nt, Human adenovirus E
cggucagggagauga

SEQ ID NO: 3937250 - RNA, 13 nt, Human adenovirus E
cggucccccaccc

SEQ ID NO: 3937251 - RNA, 12 nt, Human adenovirus E
cgguccuccucg

SEQ ID NO: 3937252 - RNA, 14 nt, Human adenovirus E
cggucggggaccgc

SEQ ID NO: 3937253 - RNA, 18 nt, Human adenovirus E
cggucguuguccaccagc

SEQ ID NO: 3937254 - RNA, 18 nt, Human adenovirus E
cggugcacccgugcagcc

SEQ ID NO: 3937255 - RNA, 15 nt, Human adenovirus E
cggugcgcugguggc

SEQ ID NO: 3937256 - RNA, 20 nt, Human adenovirus E
cggugcgcugguggcggugu

SEQ ID NO: 3937257 - RNA, 16 nt, Human adenovirus E
cgguggggcggccagc

SEQ ID NO: 3937258 - RNA, 23 nt, Human adenovirus E
cggugugcgcgugcccgugcgca

SEQ ID NO: 3937259 - RNA, 16 nt, Human adenovirus E
cgguuguaccuggugg

SEQ ID NO: 3937260 - RNA, 19 nt, Human adenovirus E
cguaccagauccucaggua

SEQ ID NO: 3937261 - RNA, 23 nt, Human adenovirus E
cguacgagagcgugaugcagcag

SEQ ID NO: 3937262 - RNA, 17 nt, Human adenovirus E
cguacugcggcagaugc

SEQ ID NO: 3937263 - RNA, 19 nt, Human adenovirus E
cguacuugcuguagcagaa

SEQ ID NO: 3937264 - RNA, 14 nt, Human adenovirus E
cguaggccugggcg

SEQ ID NO: 3937265 - RNA, 12 nt, Human adenovirus E
cguaggugagcu

SEQ ID NO: 3937266 - RNA, 19 nt, Human adenovirus E
cguaugcgcaggagcacag

SEQ ID NO: 3937267 - RNA, 15 nt, Human adenovirus E
cgucaucgacagcgu

SEQ ID NO: 3937268 - RNA, 21 nt, Human adenovirus E
cguccgcccuugcgcgagcag

SEQ ID NO: 3937269 - RNA, 14 nt, Human adenovirus E
cguccgcgccgcag

SEQ ID NO: 3937270 - RNA, 19 nt, Human adenovirus E
cgucgccggcggcgcacgg

SEQ ID NO: 3937271 - RNA, 15 nt, Human adenovirus E
cgucggccaugggca

SEQ ID NO: 3937272 - RNA, 19 nt, Human adenovirus E
cgucuaccucuaccucugc

SEQ ID NO: 3937273 - RNA, 22 nt, Human adenovirus E
cgucuccugcuugcaggccugc

SEQ ID NO: 3937274 - RNA, 23 nt, Human adenovirus E
cgucuggugcggcgggcgcagca

SEQ ID NO: 3937275 - RNA, 23 nt, Human adenovirus E
cgugagccgcgcccugggccagg

SEQ ID NO: 3937276 - RNA, 17 nt, Human adenovirus E
cgugagcggggcuggac

SEQ ID NO: 3937277 - RNA, 16 nt, Human adenovirus E
cgugaggcgcgcgcag

SEQ ID NO: 3937278 - RNA, 15 nt, Human adenovirus E
cgugcacgcagcagc

SEQ ID NO: 3937279 - RNA, 19 nt, Human adenovirus E
cgugcagaccaaccuggac

SEQ ID NO: 3937280 - RNA, 15 nt, Human adenovirus E
cgugcagcagaucua

SEQ ID NO: 3937281 - RNA, 17 nt, Human adenovirus E
cgugcagcggcagauca

SEQ ID NO: 3937282 - RNA, 21 nt, Human adenovirus E
cgugcaggcaccgcagcuugc

SEQ ID NO: 3937283 - RNA, 15 nt, Human adenovirus E
cgugcccaagcagaa

SEQ ID NO: 3937284 - RNA, 21 nt, Human adenovirus E
cgugccccccaagcgccagcc

SEQ ID NO: 3937285 - RNA, 16 nt, Human adenovirus E
cgugccccggggccag

SEQ ID NO: 3937286 - RNA, 14 nt, Human adenovirus E
cgugcgcuccugga

SEQ ID NO: 3937287 - RNA, 14 nt, Human adenovirus E
cgugcguacccgga

SEQ ID NO: 3937288 - RNA, 14 nt, Human adenovirus E
cgugcucgggggug

SEQ ID NO: 3937289 - RNA, 20 nt, Human adenovirus E
cgugcucuuugccuucacca

SEQ ID NO: 3937290 - RNA, 17 nt, Human adenovirus E
cguggaggagcucagcc

SEQ ID NO: 3937291 - RNA, 15 nt, Human adenovirus E
guccagaaaaagcca

SEQ ID NO: 3937292 - RNA, 17 nt, Human adenovirus E
guccagcgcagccaggg

SEQ ID NO: 3937293 - RNA, 11 nt, Human adenovirus E
guccaggccag

SEQ ID NO: 3937294 - RNA, 12 nt, Human adenovirus E
guccaggccagc

SEQ ID NO: 3937295 - RNA, 12 nt, Human adenovirus E
gucccacugcua

SEQ ID NO: 3937296 - RNA, 14 nt, Human adenovirus E
gucccccacccagu

SEQ ID NO: 3937297 - RNA, 16 nt, Human adenovirus E
gucccugcucguccuc

SEQ ID NO: 3937298 - RNA, 13 nt, Human adenovirus E
gucccuggcuccg

SEQ ID NO: 3937299 - RNA, 18 nt, Human adenovirus E
guccgcccgcccgcgccc

SEQ ID NO: 3937300 - RNA, 17 nt, Human adenovirus E
guccggguccagggacu

SEQ ID NO: 3937301 - RNA, 20 nt, Human adenovirus E
gucgagcgcgagcaaggaca

SEQ ID NO: 3937302 - RNA, 14 nt, Human adenovirus E
gucgcagggggcca

SEQ ID NO: 3937303 - RNA, 17 nt, Human adenovirus E
gucgcagggggccacga

SEQ ID NO: 3937304 - RNA, 14 nt, Human adenovirus E
gucgccgcaccgcc

SEQ ID NO: 3937305 - RNA, 16 nt, Human adenovirus E
gucgggggggucggca

SEQ ID NO: 3937306 - RNA, 12 nt, Human adenovirus E
gucuccaugagc

SEQ ID NO: 3937307 - RNA, 16 nt, Human adenovirus E
gucucgccgcgccggc

SEQ ID NO: 3937308 - RNA, 20 nt, Human adenovirus E
gucucuucgggggcagaggc

SEQ ID NO: 3937309 - RNA, 22 nt, Human adenovirus E
gucuggaggaagacgaggagga

SEQ ID NO: 3937310 - RNA, 15 nt, Human adenovirus E
gucuggaggagcaga

SEQ ID NO: 3937311 - RNA, 19 nt, Human adenovirus E
gucuggcccgugaggcgcg

SEQ ID NO: 3937312 - RNA, 16 nt, Human adenovirus E
gucuggugcggcgggc

SEQ ID NO: 3937313 - RNA, 15 nt, Human adenovirus E
gucugugccacccuc

SEQ ID NO: 3937314 - RNA, 18 nt, Human adenovirus E
gugaagaccgcguaguug

SEQ ID NO: 3937315 - RNA, 18 nt, Human adenovirus E
gugaccuugcagcaggug

SEQ ID NO: 3937316 - RNA, 22 nt, Human adenovirus E
gugacgcaguagaaggugcggg

SEQ ID NO: 3937317 - RNA, 19 nt, Human adenovirus E
gugagcggggcuggacaga

SEQ ID NO: 3937318 - RNA, 18 nt, Human adenovirus E
gugauccggggcagaagc

SEQ ID NO: 3937319 - RNA, 21 nt, Human adenovirus E
gugcaaccggugcugagaccc

SEQ ID NO: 3937320 - RNA, 22 nt, Human adenovirus E
gugcacgaagcccugcaggaag

SEQ ID NO: 3937321 - RNA, 18 nt, Human adenovirus E
gugcagcagaagcguggg

SEQ ID NO: 3937322 - RNA, 16 nt, Human adenovirus E
gugcagccacagcgcg

SEQ ID NO: 3937323 - RNA, 13 nt, Human adenovirus E
gugccccagggca

SEQ ID NO: 3937324 - RNA, 14 nt, Human adenovirus E
gugccccagggcau

SEQ ID NO: 3937325 - RNA, 20 nt, Human adenovirus E
gugcccccgcgguaccuggc

SEQ ID NO: 3937326 - RNA, 16 nt, Human adenovirus E
gugccccggggccagg

SEQ ID NO: 3937327 - RNA, 17 nt, Human adenovirus E
gugccucuuccaugguu

SEQ ID NO: 3937328 - RNA, 14 nt, Human adenovirus E
gugcgagggggcga

SEQ ID NO: 3937329 - RNA, 15 nt, Human adenovirus E
gugcgcgccgggcug

SEQ ID NO: 3937330 - RNA, 17 nt, Human adenovirus E
gugcgcuucaggcucau

SEQ ID NO: 3937331 - RNA, 19 nt, Human adenovirus E
gugcucgcaacgcugcacg

SEQ ID NO: 3937332 - RNA, 17 nt, Human adenovirus E
gugcucggggguggugu

SEQ ID NO: 3937333 - RNA, 17 nt, Human adenovirus E
gugcuguguugcugguu

SEQ ID NO: 3937334 - RNA, 14 nt, Human adenovirus E
guggaccucggccu

SEQ ID NO: 3937335 - RNA, 23 nt, Human adenovirus E
guggaccuggccaaccaggccgu

SEQ ID NO: 3937336 - RNA, 14 nt, Human adenovirus E
guggagcuaccagc

SEQ ID NO: 3937337 - RNA, 15 nt, Human adenovirus E
guggagcuaccagcc

SEQ ID NO: 3937338 - RNA, 17 nt, Human adenovirus E
guggcacgacaggcagc

SEQ ID NO: 3937339 - RNA, 22 nt, Human adenovirus E
guggcagcggccgaggcggcug

SEQ ID NO: 3937340 - RNA, 21 nt, Human adenovirus E
guggccagaucguccagggca

SEQ ID NO: 3937341 - RNA, 12 nt, Human adenovirus E
guggccuggagg

SEQ ID NO: 3937342 - RNA, 13 nt, Human adenovirus E
guggcgcagcuga

SEQ ID NO: 3937343 - RNA, 18 nt, Human adenovirus E
guggcggugcaggccucu

SEQ ID NO: 3937344 - RNA, 23 nt, Human adenovirus E
guggcucugccuuggcaguacag

SEQ ID NO: 3937345 - RNA, 21 nt, Human adenovirus E
gugggcuuggauguugaggua

SEQ ID NO: 3937346 - RNA, 20 nt, Human adenovirus E
guggucagcgacgagcagcu

SEQ ID NO: 3937347 - RNA, 21 nt, Human adenovirus E
guggucagcgacgagcagcug

SEQ ID NO: 3937348 - RNA, 17 nt, Human adenovirus E
guggucagcucgucggg

SEQ ID NO: 3937349 - RNA, 23 nt, Human adenovirus E
gugguccuggugaccguggagcu

SEQ ID NO: 3937350 - RNA, 15 nt, Human adenovirus E
guggucggccuggcc

SEQ ID NO: 3937351 - RNA, 18 nt, Human adenovirus E
guggugcccccuccagaa

SEQ ID NO: 3937352 - RNA, 21 nt, Human adenovirus E
gugguggcgggggagggggcc

SEQ ID NO: 3937353 - RNA, 20 nt, Human adenovirus E
  misc_feature (6)..(6): n is a, c, g, or u
guguangccacgugaccggg

SEQ ID NO: 3937354 - RNA, 17 nt, Human adenovirus E
gugucccagcggcgagg

SEQ ID NO: 3937355 - RNA, 17 nt, Human adenovirus E
gugucccugaccaugac

SEQ ID NO: 3937356 - RNA, 18 nt, Human adenovirus E
guguccggggcugcuagu

SEQ ID NO: 3937357 - RNA, 19 nt, Human adenovirus E
gugugccgcgguccuccuc

SEQ ID NO: 3937358 - RNA, 13 nt, Human adenovirus E
guguugaugaugc

SEQ ID NO: 3937359 - RNA, 22 nt, Human adenovirus E
guuacaccugcccuggagauga

SEQ ID NO: 3937360 - RNA, 14 nt, Human adenovirus E
guuacgugcagcag

SEQ ID NO: 3937361 - RNA, 13 nt, Human adenovirus E
guucaacagucca

SEQ ID NO: 3937362 - RNA, 21 nt, Human adenovirus E
guuccacgguggcuuccagca

SEQ ID NO: 3937363 - RNA, 14 nt, Human adenovirus E
guuccggagcagcu

SEQ ID NO: 3937364 - RNA, 17 nt, Human adenovirus E
guucgugcccgaggacu

SEQ ID NO: 3937365 - RNA, 19 nt, Human adenovirus E
guugaaaaacugggaguug

SEQ ID NO: 3937366 - RNA, 17 nt, Human adenovirus E
guugcaagggcccagcg

SEQ ID NO: 3937367 - RNA, 14 nt, Human adenovirus E
guuggccagcugca

SEQ ID NO: 3937368 - RNA, 14 nt, Human adenovirus E
guugugguccuggg

SEQ ID NO: 3937369 - RNA, 15 nt, Human adenovirus E
guuucaauguggauc

SEQ ID NO: 3937370 - RNA, 14 nt, Human adenovirus E
guuuccacagcucg

SEQ ID NO: 3937371 - RNA, 21 nt, Human adenovirus E
guuuccacaucguaggugagg

SEQ ID NO: 3937372 - RNA, 15 nt, Human adenovirus E
uaaaauuaacaauua

SEQ ID NO: 3937373 - RNA, 21 nt, Human adenovirus E
uaaagauggaaaauuauccuu

SEQ ID NO: 3937374 - RNA, 19 nt, Human adenovirus E
  misc_feature (10)..(10): n is a, c, g, or u
uaaaucagcnuaccaccac

SEQ ID NO: 3937375 - RNA, 21 nt, Human adenovirus E
  misc_feature (10)..(10): n is a, c, g, or u
uaaaucagcnuaccaccacua

SEQ ID NO: 3937376 - RNA, 14 nt, Human adenovirus E
uaaauuuuugcuuu

SEQ ID NO: 3937377 - RNA, 15 nt, Human adenovirus E
uaacauuuuugccau

SEQ ID NO: 3937378 - RNA, 12 nt, Human adenovirus E
uaacuggacaga

SEQ ID NO: 3937379 - RNA, 18 nt, Human adenovirus E
uaagaaaaucaacaaaag

SEQ ID NO: 3937380 - RNA, 14 nt, Human adenovirus E
uaaguguugaauuu

SEQ ID NO: 3937381 - RNA, 14 nt, Human adenovirus E
uaaucacacacgcc

SEQ ID NO: 3937382 - RNA, 20 nt, Human adenovirus E
uaaucuuaccauugucaaug

SEQ ID NO: 3937383 - RNA, 15 nt, Human adenovirus E
uacacagacaaccac

SEQ ID NO: 3937384 - RNA, 23 nt, Human adenovirus E
uacaccaacuucaucagcgcccu

SEQ ID NO: 3937385 - RNA, 12 nt, Human adenovirus E
uacaccacccuc

SEQ ID NO: 3937386 - RNA, 17 nt, Human adenovirus E
uacagaaagcacagacu

SEQ ID NO: 3937387 - RNA, 17 nt, Human adenovirus E
uaccaccacuacagccu

SEQ ID NO: 3937388 - RNA, 22 nt, Human adenovirus E
uaccaccacuacagccuaggcc

SEQ ID NO: 3937389 - RNA, 12 nt, Human adenovirus E
uaccacccacac

SEQ ID NO: 3937390 - RNA, 19 nt, Human adenovirus E
uaccaggaaauuccccagc

SEQ ID NO: 3937391 - RNA, 16 nt, Human adenovirus E
uaccaguccgggccgg

SEQ ID NO: 3937392 - RNA, 17 nt, Human adenovirus E
uaccccaccaugcagcu

SEQ ID NO: 3937393 - RNA, 18 nt, Human adenovirus E
uaccccuacacaugauca

SEQ ID NO: 3937394 - RNA, 16 nt, Human adenovirus E
uaccccuacgaugcag

SEQ ID NO: 3937395 - RNA, 16 nt, Human adenovirus E
uacccggaggguccuc

SEQ ID NO: 3937396 - RNA, 14 nt, Human adenovirus E
uacccguggaucau

SEQ ID NO: 3937397 - RNA, 16 nt, Human adenovirus E
uacccuucucccaggc

SEQ ID NO: 3937398 - RNA, 20 nt, Human adenovirus E
uaccgcccagaucccgccug

SEQ ID NO: 3937399 - RNA, 16 nt, Human adenovirus E
uaccuagccuacaacu

SEQ ID NO: 3937400 - RNA, 18 nt, Human adenovirus E
uaccuccagugccuucuc

SEQ ID NO: 3937401 - RNA, 12 nt, Human adenovirus E
uaccucuucagg

SEQ ID NO: 3937402 - RNA, 18 nt, Human adenovirus E
uacgauaccacccgguug

SEQ ID NO: 3937403 - RNA, 22 nt, Human adenovirus E
uacgauauguggccccccacga

SEQ ID NO: 3937404 - RNA, 19 nt, Human adenovirus E
uacgcccgcgccaagagcc

SEQ ID NO: 3937405 - RNA, 19 nt, Human adenovirus E
uacgcgcugcauccuucca

SEQ ID NO: 3937406 - RNA, 17 nt, Human adenovirus E
uacuaaaaauaauauag

SEQ ID NO: 3937407 - RNA, 16 nt, Human adenovirus E
uacucacaccacacac

SEQ ID NO: 3937408 - RNA, 21 nt, Human adenovirus E
uacucgcagaaaaugaugcaa

SEQ ID NO: 3937409 - RNA, 19 nt, Human adenovirus E
uacucuuucauauccucuc

SEQ ID NO: 3937410 - RNA, 17 nt, Human adenovirus E
ucuacguuuugaugcaa

SEQ ID NO: 3937411 - RNA, 15 nt, Human adenovirus E
ucuacuuccuccuca

SEQ ID NO: 3937412 - RNA, 16 nt, Human adenovirus E
ucuaugcaauucugac

SEQ ID NO: 3937413 - RNA, 22 nt, Human adenovirus E
ucuaugccaucuuccagcagag

SEQ ID NO: 3937414 - RNA, 18 nt, Human adenovirus E
ucucagaccgugcagcag

SEQ ID NO: 3937415 - RNA, 18 nt, Human adenovirus E
ucuccggcucccccggcc

SEQ ID NO: 3937416 - RNA, 23 nt, Human adenovirus E
ucuccugccaccaauuggaggaa

SEQ ID NO: 3937417 - RNA, 13 nt, Human adenovirus E
ucucgauccagca

SEQ ID NO: 3937418 - RNA, 15 nt, Human adenovirus E
ucucgauccagcaga

SEQ ID NO: 3937419 - RNA, 12 nt, Human adenovirus E
ucucgccgccgc

SEQ ID NO: 3937420 - RNA, 17 nt, Human adenovirus E
ucugaaccugcccccca

SEQ ID NO: 3937421 - RNA, 18 nt, Human adenovirus E
ucugcaagcuccugcaga

SEQ ID NO: 3937422 - RNA, 14 nt, Human adenovirus E
ucugcccccgcccc

SEQ ID NO: 3937423 - RNA, 20 nt, Human adenovirus E
ucugcccccgccccagcagc

SEQ ID NO: 3937424 - RNA, 12 nt, Human adenovirus E
ucuggaggagca

SEQ ID NO: 3937425 - RNA, 12 nt, Human adenovirus E
ucugugccaccc

SEQ ID NO: 3937426 - RNA, 13 nt, Human adenovirus E
ucuguugagcugg

SEQ ID NO: 3937427 - RNA, 12 nt, Human adenovirus E
ucuuccagacca

SEQ ID NO: 3937428 - RNA, 15 nt, Human adenovirus E
ucuucuuccuccucc

SEQ ID NO: 3937429 - RNA, 22 nt, Human adenovirus E
ucuugcgggguuucuucuuggg

SEQ ID NO: 3937430 - RNA, 17 nt, Human adenovirus E
ucuuucauauccucucc

SEQ ID NO: 3937431 - RNA, 16 nt, Human adenovirus E
ugaaaacaccaccugg

SEQ ID NO: 3937432 - RNA, 13 nt, Human adenovirus E
ugaaacccuccgg

SEQ ID NO: 3937433 - RNA, 19 nt, Human adenovirus E
ugaacacuguaucccaccc

SEQ ID NO: 3937434 - RNA, 20 nt, Human adenovirus E
ugaacaguauccgcagcagc

SEQ ID NO: 3937435 - RNA, 21 nt, Human adenovirus E
ugaacgccugcugggccuugg

SEQ ID NO: 3937436 - RNA, 20 nt, Human adenovirus E
ugaacucggggaucagcagu

SEQ ID NO: 3937437 - RNA, 21 nt, Human adenovirus E
ugaagcacaaaauucucaggu

SEQ ID NO: 3937438 - RNA, 17 nt, Human adenovirus E
ugaaggggacgagcugc

SEQ ID NO: 3937439 - RNA, 17 nt, Human adenovirus E
ugaccaccguggugcag

SEQ ID NO: 3937440 - RNA, 19 nt, Human adenovirus E
ugaccccgaugaccggcug

SEQ ID NO: 3937441 - RNA, 13 nt, Human adenovirus E
ugaccggcugcag

SEQ ID NO: 3937442 - RNA, 16 nt, Human adenovirus E
ugaccuugcagcaggu

SEQ ID NO: 3937443 - RNA, 19 nt, Human adenovirus E
ugacgccgaacucgcgccu

SEQ ID NO: 3937444 - RNA, 15 nt, Human adenovirus E
ugacguccugcagga

SEQ ID NO: 3937445 - RNA, 18 nt, Human adenovirus E
ugagaaaagcaaggagga

SEQ ID NO: 3937446 - RNA, 17 nt, Human adenovirus E
ugagacccggcaccacc

SEQ ID NO: 3937447 - RNA, 20 nt, Human adenovirus E
cugccgcgccaaccgcaccc

SEQ ID NO: 3937448 - RNA, 17 nt, Human adenovirus E
cugccguccucccggag

SEQ ID NO: 3937449 - RNA, 12 nt, Human adenovirus E
cugcgcccggag

SEQ ID NO: 3937450 - RNA, 15 nt, Human adenovirus E
cugcggcguggagca

SEQ ID NO: 3937451 - RNA, 23 nt, Human adenovirus E
cugcgggguggacuucaccgaga

SEQ ID NO: 3937452 - RNA, 13 nt, Human adenovirus E
cugcucaggcucc

SEQ ID NO: 3937453 - RNA, 18 nt, Human adenovirus E
cugcucgagugccacugc

SEQ ID NO: 3937454 - RNA, 16 nt, Human adenovirus E
cugcugcugcuggugg

SEQ ID NO: 3937455 - RNA, 17 nt, Human adenovirus E
cugcugcugcugguggc

SEQ ID NO: 3937456 - RNA, 23 nt, Human adenovirus E
cugcuggaggccaucgugcagaa

SEQ ID NO: 3937457 - RNA, 20 nt, Human adenovirus E
cugcuguuagugcucccccg

SEQ ID NO: 3937458 - RNA, 17 nt, Human adenovirus E
cuggaagaagcagaaga

SEQ ID NO: 3937459 - RNA, 15 nt, Human adenovirus E
cuggacgcugcucac

SEQ ID NO: 3937460 - RNA, 16 nt, Human adenovirus E
cuggaggccguggugc

SEQ ID NO: 3937461 - RNA, 14 nt, Human adenovirus E
cuggaucugacgcc

SEQ ID NO: 3937462 - RNA, 14 nt, Human adenovirus E
cuggcagcccagcc

SEQ ID NO: 3937463 - RNA, 14 nt, Human adenovirus E
cuggccaaccaggc

SEQ ID NO: 3937464 - RNA, 16 nt, Human adenovirus E
cuggcccggcaggcca

SEQ ID NO: 3937465 - RNA, 14 nt, Human adenovirus E
cuggcgugagcgac

SEQ ID NO: 3937466 - RNA, 23 nt, Human adenovirus E
cuggcuguuccagggcuccccga

SEQ ID NO: 3937467 - RNA, 16 nt, Human adenovirus E
cugggaccccgugacc

SEQ ID NO: 3937468 - RNA, 16 nt, Human adenovirus E
cugggaguugcgcgcc

SEQ ID NO: 3937469 - RNA, 19 nt, Human adenovirus E
cugggucccggcgcccgcc

SEQ ID NO: 3937470 - RNA, 14 nt, Human adenovirus E
cugguacuuggcca

SEQ ID NO: 3937471 - RNA, 17 nt, Human adenovirus E
cugguacuuggccagcc

SEQ ID NO: 3937472 - RNA, 20 nt, Human adenovirus E
cuggugaacauucugcagag

SEQ ID NO: 3937473 - RNA, 17 nt, Human adenovirus E
cugguggacaagaugag

SEQ ID NO: 3937474 - RNA, 18 nt, Human adenovirus E
cugguggcgguguugcuu

SEQ ID NO: 3937475 - RNA, 13 nt, Human adenovirus E
cuguaccgcgagg

SEQ ID NO: 3937476 - RNA, 23 nt, Human adenovirus E
cuguccgagaagcuggcggccau

SEQ ID NO: 3937477 - RNA, 16 nt, Human adenovirus E
cugucgagagccacac

SEQ ID NO: 3937478 - RNA, 21 nt, Human adenovirus E
cugugccacccucgcucuggu

SEQ ID NO: 3937479 - RNA, 22 nt, Human adenovirus E
cuguuccugguggugcagcaua

SEQ ID NO: 3937480 - RNA, 15 nt, Human adenovirus E
cuguugaugugaugg

SEQ ID NO: 3937481 - RNA, 22 nt, Human adenovirus E
cuuaaaaccuauggcagcaagg

SEQ ID NO: 3937482 - RNA, 20 nt, Human adenovirus E
cuuagcuuugacaguacagg

SEQ ID NO: 3937483 - RNA, 16 nt, Human adenovirus E
cuucaacaaguacugc

SEQ ID NO: 3937484 - RNA, 14 nt, Human adenovirus E
cuucaauuggagca

SEQ ID NO: 3937485 - RNA, 22 nt, Human adenovirus E
cuucacccccacggaggccagc

SEQ ID NO: 3937486 - RNA, 23 nt, Human adenovirus E
cuucacccccacggaggccagca

SEQ ID NO: 3937487 - RNA, 23 nt, Human adenovirus E
cuucacggacagcggcagcauca

SEQ ID NO: 3937488 - RNA, 23 nt, Human adenovirus E
cuucaggcgccagcgccggcagg

SEQ ID NO: 3937489 - RNA, 17 nt, Human adenovirus E
cuucccaccccacucug

SEQ ID NO: 3937490 - RNA, 17 nt, Human adenovirus E
cuucuacuuccuccuca

SEQ ID NO: 3937491 - RNA, 23 nt, Human adenovirus E
cuucugcccccgccccagcagca

SEQ ID NO: 3937492 - RNA, 21 nt, Human adenovirus E
cuugaacucggggaucagcag

SEQ ID NO: 3937493 - RNA, 14 nt, Human adenovirus E
cuugcaggccugcg

SEQ ID NO: 3937494 - RNA, 13 nt, Human adenovirus E
cuugcauuucaau

SEQ ID NO: 3937495 - RNA, 20 nt, Human adenovirus E
cuugcccuucucgcugaaca

SEQ ID NO: 3937496 - RNA, 11 nt, Human adenovirus E
cuugcugcuau

SEQ ID NO: 3937497 - RNA, 16 nt, Human adenovirus E
cuugcuguagcagaac

SEQ ID NO: 3937498 - RNA, 19 nt, Human adenovirus E
cuuggaggcggcggcagga

SEQ ID NO: 3937499 - RNA, 16 nt, Human adenovirus E
cuugggcggcagcggc

SEQ ID NO: 3937500 - RNA, 21 nt, Human adenovirus E
cuuucauguuacacaugcauc

SEQ ID NO: 3937501 - RNA, 14 nt, Human adenovirus E
cuuugaggaggaga

SEQ ID NO: 3937502 - RNA, 22 nt, Human adenovirus E
cuuuuggucuccacguuccaca

SEQ ID NO: 3937503 - RNA, 13 nt, Human adenovirus E
gaaaaucgcccag

SEQ ID NO: 3937504 - RNA, 23 nt, Human adenovirus E
gaaagcaaguuccggagcagcug

SEQ ID NO: 3937505 - RNA, 20 nt, Human adenovirus E
gaaagccccgcaaaaucaag

SEQ ID NO: 3937506 - RNA, 13 nt, Human adenovirus E
gaaaguggagcug

SEQ ID NO: 3937507 - RNA, 18 nt, Human adenovirus E
gaacacgcugcccacgua

SEQ ID NO: 3937508 - RNA, 17 nt, Human adenovirus E
gaacagcagucaggcag

SEQ ID NO: 3937509 - RNA, 13 nt, Human adenovirus E
gaacagccagagc

SEQ ID NO: 3937510 - RNA, 22 nt, Human adenovirus E
gaacccguccugaucugcacgg

SEQ ID NO: 3937511 - RNA, 16 nt, Human adenovirus E
gaaccugagccaggcu

SEQ ID NO: 3937512 - RNA, 16 nt, Human adenovirus E
gaacgagccggcgcaa

SEQ ID NO: 3937513 - RNA, 18 nt, Human adenovirus E
gaacgccugcugggccuu

SEQ ID NO: 3937514 - RNA, 16 nt, Human adenovirus E
gaacugguugacggcc

SEQ ID NO: 3937515 - RNA, 16 nt, Human adenovirus E
gaacuuuuugcugacc

SEQ ID NO: 3937516 - RNA, 21 nt, Human adenovirus E
gaagacgaaggcgcgcaggcc

SEQ ID NO: 3937517 - RNA, 16 nt, Human adenovirus E
gaagaugccgggcagg

SEQ ID NO: 3937518 - RNA, 17 nt, Human adenovirus E
gaagaugccgggcagga

SEQ ID NO: 3937519 - RNA, 18 nt, Human adenovirus E
gaagcaguaguacagaaa

SEQ ID NO: 3937520 - RNA, 12 nt, Human adenovirus E
ggggcggccagc

SEQ ID NO: 3937521 - RNA, 17 nt, Human adenovirus E
ggggcggcucggggccc

SEQ ID NO: 3937522 - RNA, 14 nt, Human adenovirus E
ggggcgugcaggcc

SEQ ID NO: 3937523 - RNA, 23 nt, Human adenovirus E
gggggacaaagguacccucgauc

SEQ ID NO: 3937524 - RNA, 21 nt, Human adenovirus E
gggggccacccccagcgccgc

SEQ ID NO: 3937525 - RNA, 23 nt, Human adenovirus E
gggggccacgagccggggcagcg

SEQ ID NO: 3937526 - RNA, 22 nt, Human adenovirus E
gggggugcgcucccggcggcgc

SEQ ID NO: 3937527 - RNA, 22 nt, Human adenovirus E
gggucgcugagcccgugcugcu

SEQ ID NO: 3937528 - RNA, 14 nt, Human adenovirus E
gggugacgcaguag

SEQ ID NO: 3937529 - RNA, 14 nt, Human adenovirus E
gggugaugaggucc

SEQ ID NO: 3937530 - RNA, 23 nt, Human adenovirus E
gguaaaucguucucuccagcacc

SEQ ID NO: 3937531 - RNA, 21 nt, Human adenovirus E
gguagcuccauugcagggccu

SEQ ID NO: 3937532 - RNA, 12 nt, Human adenovirus E
ggucgaggagaa

SEQ ID NO: 3937533 - RNA, 18 nt, Human adenovirus E
ggucgcccgucucucagc

SEQ ID NO: 3937534 - RNA, 19 nt, Human adenovirus E
ggucuaaggaaucuucucu

SEQ ID NO: 3937535 - RNA, 21 nt, Human adenovirus E
ggucucaaagcuccgcuugcc

SEQ ID NO: 3937536 - RNA, 18 nt, Human adenovirus E
ggucucccgcaagacccc

SEQ ID NO: 3937537 - RNA, 19 nt, Human adenovirus E
ggucucgaucauugagcac

SEQ ID NO: 3937538 - RNA, 13 nt, Human adenovirus E
ggucugccuuccc

SEQ ID NO: 3937539 - RNA, 16 nt, Human adenovirus E
ggugacccugggccug

SEQ ID NO: 3937540 - RNA, 19 nt, Human adenovirus E
ggugaccguggagcuggag

SEQ ID NO: 3937541 - RNA, 14 nt, Human adenovirus E
ggugaggaagagcc

SEQ ID NO: 3937542 - RNA, 17 nt, Human adenovirus E
ggugauggucucccgca

SEQ ID NO: 3937543 - RNA, 16 nt, Human adenovirus E
ggugcacuuggggaau

SEQ ID NO: 3937544 - RNA, 23 nt, Human adenovirus E
ggugcagacggaucccuggaugc

SEQ ID NO: 3937545 - RNA, 22 nt, Human adenovirus E
ggugcaggagcgcgggcugccg

SEQ ID NO: 3937546 - RNA, 15 nt, Human adenovirus E
ggugcgacugggcuu

SEQ ID NO: 3937547 - RNA, 18 nt, Human adenovirus E
ggugcgaggaugcgagcc

SEQ ID NO: 3937548 - RNA, 17 nt, Human adenovirus E
gguggaauuugagcugc

SEQ ID NO: 3937549 - RNA, 20 nt, Human adenovirus E
gguggacuucaccgagagcc

SEQ ID NO: 3937550 - RNA, 13 nt, Human adenovirus E
gguggugcagcau

SEQ ID NO: 3937551 - RNA, 18 nt, Human adenovirus E
gguucauguugugcagga

SEQ ID NO: 3937552 - RNA, 23 nt, Human adenovirus E
gguuccaccgcgaguccaaccug

SEQ ID NO: 3937553 - RNA, 17 nt, Human adenovirus E
gguucucuaauuccuca

SEQ ID NO: 3937554 - RNA, 18 nt, Human adenovirus E
guaaacgccgguggcacg

SEQ ID NO: 3937555 - RNA, 16 nt, Human adenovirus E
guaagcagugcucagg

SEQ ID NO: 3937556 - RNA, 12 nt, Human adenovirus E
guaagccccaca

SEQ ID NO: 3937557 - RNA, 21 nt, Human adenovirus E
guacaacgcgcugcuggagcg

SEQ ID NO: 3937558 - RNA, 17 nt, Human adenovirus E
guaccaguccgggccgg

SEQ ID NO: 3937559 - RNA, 19 nt, Human adenovirus E
guaccccaccaugcagcug

SEQ ID NO: 3937560 - RNA, 17 nt, Human adenovirus E
guacccucgaucccggg

SEQ ID NO: 3937561 - RNA, 22 nt, Human adenovirus E
guacgagagcgugaugcagcag

SEQ ID NO: 3937562 - RNA, 14 nt, Human adenovirus E
guacgagcagaccg

SEQ ID NO: 3937563 - RNA, 22 nt, Human adenovirus E
guacucuuucauauccucuccg

SEQ ID NO: 3937564 - RNA, 20 nt, Human adenovirus E
guacugcggcagaugcgccc

SEQ ID NO: 3937565 - RNA, 21 nt, Human adenovirus E
guacugcggcagaugcgcccc

SEQ ID NO: 3937566 - RNA, 17 nt, Human adenovirus E
guacuuaguggugcugu

SEQ ID NO: 3937567 - RNA, 19 nt, Human adenovirus E
guacuugaucuccaccgcg

SEQ ID NO: 3937568 - RNA, 13 nt, Human adenovirus E
guacuuggccagc

SEQ ID NO: 3937569 - RNA, 14 nt, Human adenovirus E
guaggccugggcgg

SEQ ID NO: 3937570 - RNA, 14 nt, Human adenovirus E
guauccggugcacu

SEQ ID NO: 3937571 - RNA, 18 nt, Human adenovirus E
guaucguugacggcggcc

SEQ ID NO: 3937572 - RNA, 16 nt, Human adenovirus E
guaugcgaucucgguc

SEQ ID NO: 3937573 - RNA, 15 nt, Human adenovirus E
guaugcgcaggagca

SEQ ID NO: 3937574 - RNA, 23 nt, Human adenovirus E
guauggcaccagacgaugggcgu

SEQ ID NO: 3937575 - RNA, 18 nt, Human adenovirus E
guauugcuauuuuggauc

SEQ ID NO: 3937576 - RNA, 15 nt, Human adenovirus E
gucacccgccccgcc

SEQ ID NO: 3937577 - RNA, 16 nt, Human adenovirus E
gucacccgccccgccc

SEQ ID NO: 3937578 - RNA, 18 nt, Human adenovirus E
gucaccuccacagccccu

SEQ ID NO: 3937579 - RNA, 16 nt, Human adenovirus E
guccaccugcggggcg

SEQ ID NO: 3937580 - RNA, 17 nt, Human adenovirus E
guccacgagcgccagcu

SEQ ID NO: 3937581 - RNA, 18 nt, Human adenovirus E
uaucgccuccuuggaaga

SEQ ID NO: 3937582 - RNA, 22 nt, Human adenovirus E
uaugauugaaaaccaucacaga

SEQ ID NO: 3937583 - RNA, 18 nt, Human adenovirus E
uaugcagggugaugaggu

SEQ ID NO: 3937584 - RNA, 12 nt, Human adenovirus E
uauucuggagca

SEQ ID NO: 3937585 - RNA, 20 nt, Human adenovirus E
uauuuuuccuccacccuccc

SEQ ID NO: 3937586 - RNA, 14 nt, Human adenovirus E
ucaaacgcccaaaa

SEQ ID NO: 3937587 - RNA, 13 nt, Human adenovirus E
ucaaauuccuccu

SEQ ID NO: 3937588 - RNA, 23 nt, Human adenovirus E
ucaacaaaagaaaaauccuccag

SEQ ID NO: 3937589 - RNA, 19 nt, Human adenovirus E
ucaacaauagcacucaacc

SEQ ID NO: 3937590 - RNA, 17 nt, Human adenovirus E
ucaacacgcuccagccg

SEQ ID NO: 3937591 - RNA, 16 nt, Human adenovirus E
ucaacuccuccuccag

SEQ ID NO: 3937592 - RNA, 19 nt, Human adenovirus E
ucaacuucucggugcugag

SEQ ID NO: 3937593 - RNA, 22 nt, Human adenovirus E
ucaagcgcgcgucgcccaucuc

SEQ ID NO: 3937594 - RNA, 16 nt, Human adenovirus E
ucaagggucuguggac

SEQ ID NO: 3937595 - RNA, 13 nt, Human adenovirus E
ucaaugccaccuc

SEQ ID NO: 3937596 - RNA, 17 nt, Human adenovirus E
ucacacacgcccagcac

SEQ ID NO: 3937597 - RNA, 15 nt, Human adenovirus E
ucacaccacacacac

SEQ ID NO: 3937598 - RNA, 23 nt, Human adenovirus E
ucacagaucugcaucucccaggc

SEQ ID NO: 3937599 - RNA, 19 nt, Human adenovirus E
ucacagcucaacagcugag

SEQ ID NO: 3937600 - RNA, 16 nt, Human adenovirus E
ucacaugaccgccuuc

SEQ ID NO: 3937601 - RNA, 14 nt, Human adenovirus E
ucaccaaggccaug

SEQ ID NO: 3937602 - RNA, 14 nt, Human adenovirus E
ucaccaccucccgg

SEQ ID NO: 3937603 - RNA, 19 nt, Human adenovirus E
ucaccccggggcuguggac

SEQ ID NO: 3937604 - RNA, 13 nt, Human adenovirus E
ucacccugcucau

SEQ ID NO: 3937605 - RNA, 23 nt, Human adenovirus E
ucaccgagcccgagggccgcugg

SEQ ID NO: 3937606 - RNA, 17 nt, Human adenovirus E
ucaccuccacagccccu

SEQ ID NO: 3937607 - RNA, 17 nt, Human adenovirus E
ucacgggacccugccgc

SEQ ID NO: 3937608 - RNA, 15 nt, Human adenovirus E
ucacggugaaggggu

SEQ ID NO: 3937609 - RNA, 19 nt, Human adenovirus E
ucagacaugcaucccagcu

SEQ ID NO: 3937610 - RNA, 19 nt, Human adenovirus E
ucagagcgagccagucucg

SEQ ID NO: 3937611 - RNA, 13 nt, Human adenovirus E
ucagcacccagcc

SEQ ID NO: 3937612 - RNA, 15 nt, Human adenovirus E
ucagcaucaucuggg

SEQ ID NO: 3937613 - RNA, 17 nt, Human adenovirus E
ucagccaaucagcgccc

SEQ ID NO: 3937614 - RNA, 18 nt, Human adenovirus E
ucagccaucgccaaccuc

SEQ ID NO: 3937615 - RNA, 14 nt, Human adenovirus E
ucagcgccccgcau

SEQ ID NO: 3937616 - RNA, 15 nt, Human adenovirus E
ucagcgccccgcauc

SEQ ID NO: 3937617 - RNA, 21 nt, Human adenovirus E
ucagcggcucgacuccguggc

SEQ ID NO: 3937618 - RNA, 14 nt, Human adenovirus E
ucaggaugagcuga

SEQ ID NO: 3937619 - RNA, 17 nt, Human adenovirus E
ucaggcagaggaggagg

SEQ ID NO: 3937620 - RNA, 12 nt, Human adenovirus E
ucaggcagcacc

SEQ ID NO: 3937621 - RNA, 22 nt, Human adenovirus E
ucaggcgccagcgccggcagga

SEQ ID NO: 3937622 - RNA, 11 nt, Human adenovirus E
ucaguugcagg

SEQ ID NO: 3937623 - RNA, 22 nt, Human adenovirus E
ucauaguugugguccuggguga

SEQ ID NO: 3937624 - RNA, 19 nt, Human adenovirus E
gaaagagggugcugaggga

SEQ ID NO: 3937625 - RNA, 18 nt, Human adenovirus E
gaacacuguaucccaccc

SEQ ID NO: 3937626 - RNA, 13 nt, Human adenovirus E
gaacaggaagaac

SEQ ID NO: 3937627 - RNA, 17 nt, Human adenovirus E
gaacaugcagccccgga

SEQ ID NO: 3937628 - RNA, 13 nt, Human adenovirus E
gaaccccaccagc

SEQ ID NO: 3937629 - RNA, 17 nt, Human adenovirus E
gaaccgccuggggcaga

SEQ ID NO: 3937630 - RNA, 17 nt, Human adenovirus E
gaacgaccacagcaacu

SEQ ID NO: 3937631 - RNA, 21 nt, Human adenovirus E
gaacgccuuccucagcaccca

SEQ ID NO: 3937632 - RNA, 22 nt, Human adenovirus E
gaacgcuccggaauccugcccg

SEQ ID NO: 3937633 - RNA, 20 nt, Human adenovirus E
gaacucaagggucuguggac

SEQ ID NO: 3937634 - RNA, 18 nt, Human adenovirus E
gaacugguugacggccuu

SEQ ID NO: 3937635 - RNA, 17 nt, Human adenovirus E
gaacuugcagggccugu

SEQ ID NO: 3937636 - RNA, 21 nt, Human adenovirus E
gaagaacucaagggucugugg

SEQ ID NO: 3937637 - RNA, 18 nt, Human adenovirus E
gaagaccccggcgcaagu

SEQ ID NO: 3937638 - RNA, 18 nt, Human adenovirus E
gaagacgaaggcgcgcag

SEQ ID NO: 3937639 - RNA, 17 nt, Human adenovirus E
gaagacguaugcgcagg

SEQ ID NO: 3937640 - RNA, 13 nt, Human adenovirus E
gaagaggcagcag

SEQ ID NO: 3937641 - RNA, 17 nt, Human adenovirus E
gaagaucgcggagaugg

SEQ ID NO: 3937642 - RNA, 22 nt, Human adenovirus E
gaagcccacggccgccagcucc

SEQ ID NO: 3937643 - RNA, 20 nt, Human adenovirus E
gaagccuuuagacagcagcc

SEQ ID NO: 3937644 - RNA, 16 nt, Human adenovirus E
gaaggaaggcagcgac

SEQ ID NO: 3937645 - RNA, 16 nt, Human adenovirus E
gaaguaccucaccugg

SEQ ID NO: 3937646 - RNA, 16 nt, Human adenovirus E
gaagucugcccgcagg

SEQ ID NO: 3937647 - RNA, 21 nt, Human adenovirus E
gaagugggcguggggcagucc

SEQ ID NO: 3937648 - RNA, 15 nt, Human adenovirus E
gaauacaccacccuc

SEQ ID NO: 3937649 - RNA, 12 nt, Human adenovirus E
gaauacaccccc

SEQ ID NO: 3937650 - RNA, 15 nt, Human adenovirus E
gaauacacccccgga

SEQ ID NO: 3937651 - RNA, 20 nt, Human adenovirus E
gaauaucaaaaucucugccg

SEQ ID NO: 3937652 - RNA, 19 nt, Human adenovirus E
gaauaucaccgagcccgag

SEQ ID NO: 3937653 - RNA, 18 nt, Human adenovirus E
gaauccccacuggcuccc

SEQ ID NO: 3937654 - RNA, 19 nt, Human adenovirus E
gaaucuuuauuugauuuuu

SEQ ID NO: 3937655 - RNA, 20 nt, Human adenovirus E
gacaaaaaucagacccacug

SEQ ID NO: 3937656 - RNA, 15 nt, Human adenovirus E
gacacaccaccacag

SEQ ID NO: 3937657 - RNA, 21 nt, Human adenovirus E
gacacuaggaacuucaggcug

SEQ ID NO: 3937658 - RNA, 22 nt, Human adenovirus E
gacagcagcguguucucccccc

SEQ ID NO: 3937659 - RNA, 17 nt, Human adenovirus E
gaccaccguggugcaga

SEQ ID NO: 3937660 - RNA, 20 nt, Human adenovirus E
gaccaccguggugcagaaca

SEQ ID NO: 3937661 - RNA, 18 nt, Human adenovirus E
gaccagcaugaaggggac

SEQ ID NO: 3937662 - RNA, 21 nt, Human adenovirus E
gacccagaucaucggcaccuu

SEQ ID NO: 3937663 - RNA, 20 nt, Human adenovirus E
gacccagccagaugaugcaa

SEQ ID NO: 3937664 - RNA, 18 nt, Human adenovirus E
gacccggacgugcagccc

SEQ ID NO: 3937665 - RNA, 19 nt, Human adenovirus E
gacccggagacgcgcggcc

SEQ ID NO: 3937666 - RNA, 14 nt, Human adenovirus E
gacccugcgcaagg

SEQ ID NO: 3937667 - RNA, 23 nt, Human adenovirus E
gaccgacgcccguccucggcgcu

SEQ ID NO: 3937668 - RNA, 16 nt, Human adenovirus E
gaccgagcuccagcuc

SEQ ID NO: 3937669 - RNA, 13 nt, Human adenovirus E
gaccgugcagcag

SEQ ID NO: 3937670 - RNA, 13 nt, Human adenovirus E
gacgacagcagcg

SEQ ID NO: 3937671 - RNA, 22 nt, Human adenovirus E
gacgacccgggcaaccuggaag

SEQ ID NO: 3937672 - RNA, 14 nt, Human adenovirus E
gacgagcgcucgcg

SEQ ID NO: 3937673 - RNA, 16 nt, Human adenovirus E
gacgagcugcuugccg

SEQ ID NO: 3937674 - RNA, 22 nt, Human adenovirus E
gacgaggauuucgaggcggacg

SEQ ID NO: 3937675 - RNA, 12 nt, Human adenovirus E
gacgcagggcca

SEQ ID NO: 3937676 - RNA, 22 nt, Human adenovirus E
gacgcaguagaaggugcggggg

SEQ ID NO: 3937677 - RNA, 22 nt, Human adenovirus E
gacgcccaggccgaaguccagc

SEQ ID NO: 3937678 - RNA, 22 nt, Human adenovirus E
gacgcccucgggaucgcgggcg

SEQ ID NO: 3937679 - RNA, 14 nt, Human adenovirus E
gacgcgcggccacg

SEQ ID NO: 3937680 - RNA, 12 nt, Human adenovirus E
gacgcuccuggu

SEQ ID NO: 3937681 - RNA, 22 nt, Human adenovirus E
gacgcugcgcaacggccugccc

SEQ ID NO: 3937682 - RNA, 21 nt, Human adenovirus E
gacggcccuugacguggggca

SEQ ID NO: 3937683 - RNA, 20 nt, Human adenovirus E
gacggccuuguaggcgcagc

SEQ ID NO: 3937684 - RNA, 19 nt, Human adenovirus E
gacggcgcagcuguuccug

SEQ ID NO: 3937685 - RNA, 20 nt, Human adenovirus E
gacggcgcgcccguccucgc

SEQ ID NO: 3937686 - RNA, 18 nt, Human adenovirus E
gacggucaacuccuccuc

SEQ ID NO: 3937687 - RNA, 14 nt, Human adenovirus E
gacguccugcagga

SEQ ID NO: 3937688 - RNA, 15 nt, Human adenovirus E
gacguuacugucguu

SEQ ID NO: 3937689 - RNA, 20 nt, Human adenovirus E
gacuacuucuuccagaccag

SEQ ID NO: 3937690 - RNA, 12 nt, Human adenovirus E
gacucccaccug

SEQ ID NO: 3937691 - RNA, 14 nt, Human adenovirus E
gacucccucagcau

SEQ ID NO: 3937692 - RNA, 16 nt, Human adenovirus E
gagaacagcagucagg

SEQ ID NO: 3937693 - RNA, 24 nt, Human adenovirus E
gagaaggaacucuucgcgguccuu

SEQ ID NO: 3937694 - RNA, 16 nt, Human adenovirus E
gagacacacuuggaaa

SEQ ID NO: 3937695 - RNA, 23 nt, Human adenovirus E
gagacgcgcggccacggcggcgg

SEQ ID NO: 3937696 - RNA, 23 nt, Human adenovirus E
gagacugauggccacgggcagcc

SEQ ID NO: 3937697 - RNA, 18 nt, Human adenovirus E
uggaauuugagcugcccg

SEQ ID NO: 3937698 - RNA, 14 nt, Human adenovirus E
uggacaaaauacca

SEQ ID NO: 3937699 - RNA, 17 nt, Human adenovirus E
uggacaagaugagccgc

SEQ ID NO: 3937700 - RNA, 23 nt, Human adenovirus E
  misc_feature (9)..(9): n is a, c, g, or u
uggacaucnagauucccacggag

SEQ ID NO: 3937701 - RNA, 14 nt, Human adenovirus E
uggacccaggccau

SEQ ID NO: 3937702 - RNA, 15 nt, Human adenovirus E
uggacccaggccaug

SEQ ID NO: 3937703 - RNA, 20 nt, Human adenovirus E
uggaccuggugaacauucug

SEQ ID NO: 3937704 - RNA, 19 nt, Human adenovirus E
uggacucugacgcuccugg

SEQ ID NO: 3937705 - RNA, 20 nt, Human adenovirus E
uggacucugacgcuccuggu

SEQ ID NO: 3937706 - RNA, 22 nt, Human adenovirus E
uggagcagucucuggagcgggc

SEQ ID NO: 3937707 - RNA, 19 nt, Human adenovirus E
uggagcgacaucggcacca

SEQ ID NO: 3937708 - RNA, 22 nt, Human adenovirus E
uggagcuaccagccccagaugg

SEQ ID NO: 3937709 - RNA, 15 nt, Human adenovirus E
uggaggaagacgagg

SEQ ID NO: 3937710 - RNA, 13 nt, Human adenovirus E
uggaggaagacug

SEQ ID NO: 3937711 - RNA, 15 nt, Human adenovirus E
uggaggaagacuggg

SEQ ID NO: 3937712 - RNA, 20 nt, Human adenovirus E
uggaggaagacugggacagc

SEQ ID NO: 3937713 - RNA, 14 nt, Human adenovirus E
uggaggagcucagc

SEQ ID NO: 3937714 - RNA, 19 nt, Human adenovirus E
uggaggaguucacucccuc

SEQ ID NO: 3937715 - RNA, 17 nt, Human adenovirus E
uggaggcggcggcagga

SEQ ID NO: 3937716 - RNA, 23 nt, Human adenovirus E
uggaggcuaagcgaacggguugg

SEQ ID NO: 3937717 - RNA, 18 nt, Human adenovirus E
uggaggcuccuuacgugc

SEQ ID NO: 3937718 - RNA, 17 nt, Human adenovirus E
uggagugccugcgccgc

SEQ ID NO: 3937719 - RNA, 19 nt, Human adenovirus E
uggcaccagacgaugggcg

SEQ ID NO: 3937720 - RNA, 14 nt, Human adenovirus E
uggcacgacaggca

SEQ ID NO: 3937721 - RNA, 15 nt, Human adenovirus E
uggcagaucacccug

SEQ ID NO: 3937722 - RNA, 21 nt, Human adenovirus E
uggcagcagugucuggaggag

SEQ ID NO: 3937723 - RNA, 20 nt, Human adenovirus E
uggcaguuacaccugcccug

SEQ ID NO: 3937724 - RNA, 19 nt, Human adenovirus E
uggcaugcgaguuggagga

SEQ ID NO: 3937725 - RNA, 14 nt, Human adenovirus E
uggccaaccaggcc

SEQ ID NO: 3937726 - RNA, 18 nt, Human adenovirus E
uggccagaucguccaggg

SEQ ID NO: 3937727 - RNA, 15 nt, Human adenovirus E
uggcccgcgggcagg

SEQ ID NO: 3937728 - RNA, 19 nt, Human adenovirus E
uggcccgguggcugggucc

SEQ ID NO: 3937729 - RNA, 17 nt, Human adenovirus E
uggccgugguccuggug

SEQ ID NO: 3937730 - RNA, 13 nt, Human adenovirus E
cucuugcaggaca

SEQ ID NO: 3937731 - RNA, 15 nt, Human adenovirus E
cugaaaacaccaccu

SEQ ID NO: 3937732 - RNA, 17 nt, Human adenovirus E
cugaaaacaccaccugg

SEQ ID NO: 3937733 - RNA, 17 nt, Human adenovirus E
cugaaacacaaaauaaa

SEQ ID NO: 3937734 - RNA, 17 nt, Human adenovirus E
cugaaaguggagcugcc

SEQ ID NO: 3937735 - RNA, 21 nt, Human adenovirus E
cugaacaguauccgcagcagc

SEQ ID NO: 3937736 - RNA, 22 nt, Human adenovirus E
cugaacgccuuccucagcaccc

SEQ ID NO: 3937737 - RNA, 15 nt, Human adenovirus E
cugaacgggggcgcc

SEQ ID NO: 3937738 - RNA, 16 nt, Human adenovirus E
cugaauaucaccgagc

SEQ ID NO: 3937739 - RNA, 12 nt, Human adenovirus E
cugacccugagc

SEQ ID NO: 3937740 - RNA, 13 nt, Human adenovirus E
cugacccugagcg

SEQ ID NO: 3937741 - RNA, 16 nt, Human adenovirus E
cugaccggggccggga

SEQ ID NO: 3937742 - RNA, 19 nt, Human adenovirus E
cugacgccagacgccgcac

SEQ ID NO: 3937743 - RNA, 14 nt, Human adenovirus E
cugacgcuccuggu

SEQ ID NO: 3937744 - RNA, 16 nt, Human adenovirus E
cugacgcuccuggucc

SEQ ID NO: 3937745 - RNA, 23 nt, Human adenovirus E
cugacgcugcgcaacggccugcc

SEQ ID NO: 3937746 - RNA, 20 nt, Human adenovirus E
cugacggagucuuccaacuc

SEQ ID NO: 3937747 - RNA, 15 nt, Human adenovirus E
cugacggcgcagcug

SEQ ID NO: 3937748 - RNA, 20 nt, Human adenovirus E
cugacguaaaggccaaaguc

SEQ ID NO: 3937749 - RNA, 19 nt, Human adenovirus E
cugagacccggcaccaccg

SEQ ID NO: 3937750 - RNA, 22 nt, Human adenovirus E
cugagcauucacaugcucaucg

SEQ ID NO: 3937751 - RNA, 16 nt, Human adenovirus E
cugagcgaccaggagc

SEQ ID NO: 3937752 - RNA, 17 nt, Human adenovirus E
cugagcgggggggagga

SEQ ID NO: 3937753 - RNA, 16 nt, Human adenovirus E
cugaucuguagaaaaa

SEQ ID NO: 3937754 - RNA, 16 nt, Human adenovirus E
cugaugcaccuguggg

SEQ ID NO: 3937755 - RNA, 16 nt, Human adenovirus E
cugauggccacgggca

SEQ ID NO: 3937756 - RNA, 16 nt, Human adenovirus E
cugauggugaccgagg

SEQ ID NO: 3937757 - RNA, 15 nt, Human adenovirus E
cugcaacccccagcu

SEQ ID NO: 3937758 - RNA, 20 nt, Human adenovirus E
cugcaagacagucuggagga

SEQ ID NO: 3937759 - RNA, 16 nt, Human adenovirus E
cugcaaggagaaggag

SEQ ID NO: 3937760 - RNA, 19 nt, Human adenovirus E
cugcacaccacccugcgcg

SEQ ID NO: 3937761 - RNA, 13 nt, Human adenovirus E
cugcaccucacag

SEQ ID NO: 3937762 - RNA, 14 nt, Human adenovirus E
cugcacgccgcacc

SEQ ID NO: 3937763 - RNA, 17 nt, Human adenovirus E
cugcacgccgcaccgcu

SEQ ID NO: 3937764 - RNA, 17 nt, Human adenovirus E
cugcacuggcagcccag

SEQ ID NO: 3937765 - RNA, 13 nt, Human adenovirus E
cugcagagccagc

SEQ ID NO: 3937766 - RNA, 20 nt, Human adenovirus E
cugcaguacgugcaacacag

SEQ ID NO: 3937767 - RNA, 23 nt, Human adenovirus E
cugcaguacgugcaacacagaac

SEQ ID NO: 3937768 - RNA, 18 nt, Human adenovirus E
cugccaucacaccuucca

SEQ ID NO: 3937769 - RNA, 14 nt, Human adenovirus E
cugcccgacggcca

SEQ ID NO: 3937770 - RNA, 15 nt, Human adenovirus E
cugcccgcaggcggg

SEQ ID NO: 3937771 - RNA, 16 nt, Human adenovirus E
cugcccgccaccugcu

SEQ ID NO: 3937772 - RNA, 16 nt, Human adenovirus E
cugcccggcugcgggg

SEQ ID NO: 3937773 - RNA, 12 nt, Human adenovirus E
cugcccuggaga

SEQ ID NO: 3937774 - RNA, 22 nt, Human adenovirus E
cugccgcaagaucucuugcacg

SEQ ID NO: 3937775 - RNA, 17 nt, Human adenovirus E
cugccgcugcgcagcag

SEQ ID NO: 3937776 - RNA, 16 nt, Human adenovirus E
cugccuuggcaguaca

SEQ ID NO: 3937777 - RNA, 15 nt, Human adenovirus E
cugcgcaacggccug

SEQ ID NO: 3937778 - RNA, 22 nt, Human adenovirus E
cugcgccgcuucuucgccgacg

SEQ ID NO: 3937779 - RNA, 13 nt, Human adenovirus E
cugcgccugaugg

SEQ ID NO: 3937780 - RNA, 19 nt, Human adenovirus E
cugcgcgcgcccagcaaga

SEQ ID NO: 3937781 - RNA, 15 nt, Human adenovirus E
cugcgcggggaggcc

SEQ ID NO: 3937782 - RNA, 13 nt, Human adenovirus E
cugcggcgcggcc

SEQ ID NO: 3937783 - RNA, 22 nt, Human adenovirus E
cugcucaauauauagcccagau

SEQ ID NO: 3937784 - RNA, 13 nt, Human adenovirus E
cugcucccagagc

SEQ ID NO: 3937785 - RNA, 16 nt, Human adenovirus E
cugcuccgcgcugccc

SEQ ID NO: 3937786 - RNA, 21 nt, Human adenovirus E
cugcuccgcgcugcccucgga

SEQ ID NO: 3937787 - RNA, 22 nt, Human adenovirus E
cugcucgggcaucagcuggaag

SEQ ID NO: 3937788 - RNA, 11 nt, Human adenovirus E
cugcugaaccu

SEQ ID NO: 3937789 - RNA, 14 nt, Human adenovirus E
cugcuggaggccau

SEQ ID NO: 3937790 - RNA, 14 nt, Human adenovirus E
cugcugguggcccc

SEQ ID NO: 3937791 - RNA, 22 nt, Human adenovirus E
cugcuucggaucuucagccagc

SEQ ID NO: 3937792 - RNA, 21 nt, Human adenovirus E
cuggaagacguaugcgcagga

SEQ ID NO: 3937793 - RNA, 19 nt, Human adenovirus E
cuggacaaaauaccaccuc

SEQ ID NO: 3937794 - RNA, 13 nt, Human adenovirus E
cuggaccugguga

SEQ ID NO: 3937795 - RNA, 20 nt, Human adenovirus E
cuggacgcugcucaccaccu

SEQ ID NO: 3937796 - RNA, 21 nt, Human adenovirus E
cuggaggccaucgugcagaac

SEQ ID NO: 3937797 - RNA, 17 nt, Human adenovirus E
cuggaggccguggugcc

SEQ ID NO: 3937798 - RNA, 17 nt, Human adenovirus E
cuggagugccugcgccg

SEQ ID NO: 3937799 - RNA, 17 nt, Human adenovirus E
cuggaucuuugugcgca

SEQ ID NO: 3937800 - RNA, 16 nt, Human adenovirus E
cuggccaucgugaacg

SEQ ID NO: 3937801 - RNA, 19 nt, Human adenovirus E
cuggccguguugcucuacu

SEQ ID NO: 3937802 - RNA, 20 nt, Human adenovirus E
cuggccugcacccucaucuc

SEQ ID NO: 3937803 - RNA, 22 nt, Human adenovirus E
cuggcgccuacggaggggcgga

SEQ ID NO: 3937804 - RNA, 15 nt, Human adenovirus E
cugggacagcacuca

SEQ ID NO: 3937805 - RNA, 22 nt, Human adenovirus E
cugggacagcacucaggcagag

SEQ ID NO: 3937806 - RNA, 23 nt, Human adenovirus E
cugggcauucgcaagaggcagcc

SEQ ID NO: 3937807 - RNA, 11 nt, Human adenovirus E
cugggccagga

SEQ ID NO: 3937808 - RNA, 22 nt, Human adenovirus E
cugggccaggacgacccgggca

SEQ ID NO: 3937809 - RNA, 18 nt, Human adenovirus E
cugguacugcaggccccg

SEQ ID NO: 3937810 - RNA, 16 nt, Human adenovirus E
cugguacuuggccagc

SEQ ID NO: 3937811 - RNA, 22 nt, Human adenovirus E
cuggugaacauucugcagagca

SEQ ID NO: 3937812 - RNA, 23 nt, Human adenovirus E
cugguguacaacgcgcugcugga

SEQ ID NO: 3937813 - RNA, 17 nt, Human adenovirus E
cuguaccgcgaggccau

SEQ ID NO: 3937814 - RNA, 18 nt, Human adenovirus E
cugucaaauacucgcaga

SEQ ID NO: 3937815 - RNA, 17 nt, Human adenovirus E
cugugggaccugcugga

SEQ ID NO: 3937816 - RNA, 18 nt, Human adenovirus E
cugugggaccugcuggag

SEQ ID NO: 3937817 - RNA, 12 nt, Human adenovirus E
cuuaccuuuggu

SEQ ID NO: 3937818 - RNA, 15 nt, Human adenovirus E
cuuacggcaagcgca

SEQ ID NO: 3937819 - RNA, 18 nt, Human adenovirus E
cuuagcuuugacaguaca

SEQ ID NO: 3937820 - RNA, 16 nt, Human adenovirus E
cuucaaaaugaagauc

SEQ ID NO: 3937821 - RNA, 14 nt, Human adenovirus E
cuuccagcaaagcc

SEQ ID NO: 3937822 - RNA, 16 nt, Human adenovirus E
cuuccaucauccccac

SEQ ID NO: 3937823 - RNA, 16 nt, Human adenovirus E
cuucccaccccacucu

SEQ ID NO: 3937824 - RNA, 18 nt, Human adenovirus E
cuucccagcucugguacu

SEQ ID NO: 3937825 - RNA, 15 nt, Human adenovirus E
cuucccauggugggc

SEQ ID NO: 3937826 - RNA, 22 nt, Human adenovirus E
cuuccgcgucaguugcagggcg

SEQ ID NO: 3937827 - RNA, 17 nt, Human adenovirus E
cuuccucagcacccagc

SEQ ID NO: 3937828 - RNA, 17 nt, Human adenovirus E
cuucucgcgcuucugcu

SEQ ID NO: 3937829 - RNA, 14 nt, Human adenovirus E
cuugcagguccaag

SEQ ID NO: 3937830 - RNA, 23 nt, Human adenovirus E
cuugcgcaaguucgugcccgagg

SEQ ID NO: 3937831 - RNA, 12 nt, Human adenovirus E
cuugggcggcug

SEQ ID NO: 3937832 - RNA, 15 nt, Human adenovirus E
cuuuagacagcagcc

SEQ ID NO: 3937833 - RNA, 19 nt, Human adenovirus E
cuuucauuuuugcgcacau

SEQ ID NO: 3937834 - RNA, 18 nt, Human adenovirus E
cuuugugcccgcccaggu

SEQ ID NO: 3937835 - RNA, 13 nt, Human adenovirus E
gaaaaagccacag

SEQ ID NO: 3937836 - RNA, 12 nt, Human adenovirus E
gaaaauggcaug

SEQ ID NO: 3937837 - RNA, 13 nt, Human adenovirus E
gaaagccuggugg

SEQ ID NO: 3937838 - RNA, 15 nt, Human adenovirus E
gaaaucgcaguuggg

SEQ ID NO: 3937839 - RNA, 17 nt, Human adenovirus E
gaaauuguaaaacagcc

SEQ ID NO: 3937840 - RNA, 18 nt, Human adenovirus E
gaacaccaucagggccgg

SEQ ID NO: 3937841 - RNA, 15 nt, Human adenovirus E
gaacacgcugcccac

SEQ ID NO: 3937842 - RNA, 19 nt, Human adenovirus E
gaacagccagagcaggaag

SEQ ID NO: 3937843 - RNA, 13 nt, Human adenovirus E
gaaccccaccacc

SEQ ID NO: 3937844 - RNA, 15 nt, Human adenovirus E
gaaccccaccaccca

SEQ ID NO: 3937845 - RNA, 20 nt, Human adenovirus E
gaaccccgcagaacagggca

SEQ ID NO: 3937846 - RNA, 22 nt, Human adenovirus E
gaaccugaaagagcucugcaag

SEQ ID NO: 3937847 - RNA, 13 nt, Human adenovirus E
gccccaggccaac

SEQ ID NO: 3937848 - RNA, 13 nt, Human adenovirus E
gcccccaccgccg

SEQ ID NO: 3937849 - RNA, 22 nt, Human adenovirus E
gcccccgaucccuccagguaca

SEQ ID NO: 3937850 - RNA, 15 nt, Human adenovirus E
gcccccgccccagca

SEQ ID NO: 3937851 - RNA, 16 nt, Human adenovirus E
gcccccgccccagcag

SEQ ID NO: 3937852 - RNA, 22 nt, Human adenovirus E
gcccccgcgguaccuggcgccu

SEQ ID NO: 3937853 - RNA, 15 nt, Human adenovirus E
gcccccgcuggaggc

SEQ ID NO: 3937854 - RNA, 17 nt, Human adenovirus E
gccccggggccaggagg

SEQ ID NO: 3937855 - RNA, 20 nt, Human adenovirus E
gccccucagcguggaggagc

SEQ ID NO: 3937856 - RNA, 22 nt, Human adenovirus E
gccccucagcguggaggagcuc

SEQ ID NO: 3937857 - RNA, 22 nt, Human adenovirus E
gcccgaggagaugcgcgcggcc

SEQ ID NO: 3937858 - RNA, 16 nt, Human adenovirus E
gcccgagggccgcugg

SEQ ID NO: 3937859 - RNA, 19 nt, Human adenovirus E
gcccgcgcuugcugggcga

SEQ ID NO: 3937860 - RNA, 15 nt, Human adenovirus E
gcccggcaggccacc

SEQ ID NO: 3937861 - RNA, 16 nt, Human adenovirus E
gcccggcaggccacca

SEQ ID NO: 3937862 - RNA, 12 nt, Human adenovirus E
gcccggcugcgg

SEQ ID NO: 3937863 - RNA, 15 nt, Human adenovirus E
gcccgguggcugggu

SEQ ID NO: 3937864 - RNA, 16 nt, Human adenovirus E
gcccgguuccacgcgg

SEQ ID NO: 3937865 - RNA, 19 nt, Human adenovirus E
gcccgguuccacgcggggc

SEQ ID NO: 3937866 - RNA, 11 nt, Human adenovirus E
gcccugcagga

SEQ ID NO: 3937867 - RNA, 13 nt, Human adenovirus E
gcccuggccaccu

SEQ ID NO: 3937868 - RNA, 23 nt, Human adenovirus E
gcccugggcauagucgcgccgcg

SEQ ID NO: 3937869 - RNA, 15 nt, Human adenovirus E
gcccuugcgcgagca

SEQ ID NO: 3937870 - RNA, 18 nt, Human adenovirus E
gcccuuuucaaccugggu

SEQ ID NO: 3937871 - RNA, 19 nt, Human adenovirus E
gccgaacucgcgccugcug

SEQ ID NO: 3937872 - RNA, 22 nt, Human adenovirus E
gccgcaagaccaccacucgccg

SEQ ID NO: 3937873 - RNA, 22 nt, Human adenovirus E
gccgcaccgcucccuggccugc

SEQ ID NO: 3937874 - RNA, 14 nt, Human adenovirus E
gccgcccagccccg

SEQ ID NO: 3937875 - RNA, 14 nt, Human adenovirus E
gccgccccucucag

SEQ ID NO: 3937876 - RNA, 15 nt, Human adenovirus E
gccgccccucucagu

SEQ ID NO: 3937877 - RNA, 16 nt, Human adenovirus E
gccgccgggccuugga

SEQ ID NO: 3937878 - RNA, 19 nt, Human adenovirus E
gccgccggugccgcccagg

SEQ ID NO: 3937879 - RNA, 16 nt, Human adenovirus E
gccgcgcccugggcca

SEQ ID NO: 3937880 - RNA, 21 nt, Human adenovirus E
gccgcgugcggucgcgcacca

SEQ ID NO: 3937881 - RNA, 21 nt, Human adenovirus E
gccgcuccgucaagcugcugc

SEQ ID NO: 3937882 - RNA, 17 nt, Human adenovirus E
gccgcugcaaccacccc

SEQ ID NO: 3937883 - RNA, 18 nt, Human adenovirus E
gccggcggcggcgcaucg

SEQ ID NO: 3937884 - RNA, 18 nt, Human adenovirus E
gccgggaccgagggggag

SEQ ID NO: 3937885 - RNA, 19 nt, Human adenovirus E
gccgggccuuggaggcggc

SEQ ID NO: 3937886 - RNA, 14 nt, Human adenovirus E
gccguccucccgga

SEQ ID NO: 3937887 - RNA, 15 nt, Human adenovirus E
gccguuccgcaccga

SEQ ID NO: 3937888 - RNA, 23 nt, Human adenovirus E
gccguugauguuguggcccacga

SEQ ID NO: 3937889 - RNA, 17 nt, Human adenovirus E
gccuaggccacaauaca

SEQ ID NO: 3937890 - RNA, 21 nt, Human adenovirus E
gccucggugcacccgugcagc

SEQ ID NO: 3937891 - RNA, 20 nt, Human adenovirus E
gccucuguuaaauuuuugcu

SEQ ID NO: 3937892 - RNA, 14 nt, Human adenovirus E
gccugauggcucug

SEQ ID NO: 3937893 - RNA, 22 nt, Human adenovirus E
gccugcaagaucuccaacgugg

SEQ ID NO: 3937894 - RNA, 22 nt, Human adenovirus E
gccugcucgagugccacugccg

SEQ ID NO: 3937895 - RNA, 17 nt, Human adenovirus E
gccuucaauuggagcag

SEQ ID NO: 3937896 - RNA, 15 nt, Human adenovirus E
gccuucaccaccugc

SEQ ID NO: 3937897 - RNA, 15 nt, Human adenovirus E
gccuuggaggcggcg

SEQ ID NO: 3937898 - RNA, 20 nt, Human adenovirus E
gccuuguaggcgcagcagcc

SEQ ID NO: 3937899 - RNA, 15 nt, Human adenovirus E
gccuuucaagagccc

SEQ ID NO: 3937900 - RNA, 20 nt, Human adenovirus E
gcgacacggucauguggaug

SEQ ID NO: 3937901 - RNA, 16 nt, Human adenovirus E
gcgaccagcgugcguu

SEQ ID NO: 3937902 - RNA, 18 nt, Human adenovirus E
gcgacuaccuccaccuga

SEQ ID NO: 3937903 - RNA, 21 nt, Human adenovirus E
gcgagcagaaggggggcaggg

SEQ ID NO: 3937904 - RNA, 15 nt, Human adenovirus E
gcgagggccugcucg

SEQ ID NO: 3937905 - RNA, 16 nt, Human adenovirus E
gcgagggggagcgcga

SEQ ID NO: 3937906 - RNA, 14 nt, Human adenovirus E
gcgagggggcgagg

SEQ ID NO: 3937907 - RNA, 21 nt, Human adenovirus E
gcgaucccauuugagcuggag

SEQ ID NO: 3937908 - RNA, 13 nt, Human adenovirus E
gcgcacggccagc

SEQ ID NO: 3937909 - RNA, 20 nt, Human adenovirus E
gcgcagagcgcccuccaccg

SEQ ID NO: 3937910 - RNA, 17 nt, Human adenovirus E
gcgccacccugugucgu

SEQ ID NO: 3937911 - RNA, 16 nt, Human adenovirus E
gcgccagcgccggcag

SEQ ID NO: 3937912 - RNA, 22 nt, Human adenovirus E
gcgcccaccauuaccaccguca

SEQ ID NO: 3937913 - RNA, 13 nt, Human adenovirus E
gcgcccggagaaa

SEQ ID NO: 3937914 - RNA, 13 nt, Human adenovirus E
gcgcccuccaccg

SEQ ID NO: 3937915 - RNA, 14 nt, Human adenovirus E
gcgccgggcggcag

SEQ ID NO: 3937916 - RNA, 18 nt, Human adenovirus E
gcgccgggcggcaggggc

SEQ ID NO: 3937917 - RNA, 12 nt, Human adenovirus E
gcgccucaggcu

SEQ ID NO: 3937918 - RNA, 22 nt, Human adenovirus E
gcgcgagcagaaggggggcagg

SEQ ID NO: 3937919 - RNA, 14 nt, Human adenovirus E
gcgcgccaucagca

SEQ ID NO: 3937920 - RNA, 18 nt, Human adenovirus E
gcgcgccgggcggcaggg

SEQ ID NO: 3937921 - RNA, 12 nt, Human adenovirus E
gcgcgcugcccg

SEQ ID NO: 3937922 - RNA, 17 nt, Human adenovirus E
gcgcggaccugcacugg

SEQ ID NO: 3937923 - RNA, 20 nt, Human adenovirus E
gcgcggccacggcggcggca

SEQ ID NO: 3937924 - RNA, 17 nt, Human adenovirus E
gcgcgguaggcccugga

SEQ ID NO: 3937925 - RNA, 12 nt, Human adenovirus E
gcgcgugccccc

SEQ ID NO: 3937926 - RNA, 13 nt, Human adenovirus E
gcgcuaccacccg

SEQ ID NO: 3937927 - RNA, 14 nt, Human adenovirus E
gcgcuccuggaugu

SEQ ID NO: 3937928 - RNA, 16 nt, Human adenovirus E
gcgcucgcucacccgc

SEQ ID NO: 3937929 - RNA, 22 nt, Human adenovirus E
gcgcuucugcccccgccccagc

SEQ ID NO: 3937930 - RNA, 12 nt, Human adenovirus E
gcgcuucugcug

SEQ ID NO: 3937931 - RNA, 23 nt, Human adenovirus E
gcggaacugguacuuggccagcc

SEQ ID NO: 3937932 - RNA, 15 nt, Human adenovirus E
gcggacgcgcgccgg

SEQ ID NO: 3937933 - RNA, 17 nt, Human adenovirus E
gcggaucucgcucaggu

SEQ ID NO: 3937934 - RNA, 16 nt, Human adenovirus E
gcggaugcuggcgcgc

SEQ ID NO: 3937935 - RNA, 16 nt, Human adenovirus E
gcggauggcuggcaga

SEQ ID NO: 3937936 - RNA, 23 nt, Human adenovirus E
gcggcagcggccaucgccagcau

SEQ ID NO: 3937937 - RNA, 20 nt, Human adenovirus E
gcggccggcgcgcuccacgg

SEQ ID NO: 3937938 - RNA, 23 nt, Human adenovirus E
gcggccguucaugggcaccugga

SEQ ID NO: 3937939 - RNA, 14 nt, Human adenovirus E
gcggccuggaccga

SEQ ID NO: 3937940 - RNA, 16 nt, Human adenovirus E
gcggccuugcgcaggg

SEQ ID NO: 3937941 - RNA, 21 nt, Human adenovirus E
gcggcgaacgagccggcgcaa

SEQ ID NO: 3937942 - RNA, 17 nt, Human adenovirus E
gcggcggagcggcaucu

SEQ ID NO: 3937943 - RNA, 15 nt, Human adenovirus E
gcggcugcucaggcu

SEQ ID NO: 3937944 - RNA, 13 nt, Human adenovirus E
gcgggaggcaggu

SEQ ID NO: 3937945 - RNA, 18 nt, Human adenovirus E
gcgggguuucuucuuggg

SEQ ID NO: 3937946 - RNA, 14 nt, Human adenovirus E
gcggugccucuucc

SEQ ID NO: 3937947 - RNA, 17 nt, Human adenovirus E
gcggugcguuccagcau

SEQ ID NO: 3937948 - RNA, 21 nt, Human adenovirus E
gcguagagcuugggggcgagg

SEQ ID NO: 3937949 - RNA, 20 nt, Human adenovirus E
gcguaggagucuugcagcuu

SEQ ID NO: 3937950 - RNA, 21 nt, Human adenovirus E
gcgucgcagggggccacgagc

SEQ ID NO: 3937951 - RNA, 19 nt, Human adenovirus E
gcgucucgagauccacggg

SEQ ID NO: 3937952 - RNA, 20 nt, Human adenovirus E
gcgucucgggacccugccau

SEQ ID NO: 3937953 - RNA, 14 nt, Human adenovirus E
gcgugaugcagcag

SEQ ID NO: 3937954 - RNA, 18 nt, Human adenovirus E
gcgugcacgaagcccugc

SEQ ID NO: 3937955 - RNA, 21 nt, Human adenovirus E
gcgugccccccaagcgccagc

SEQ ID NO: 3937956 - RNA, 22 nt, Human adenovirus E
gcgugccccccaagcgccagcc

SEQ ID NO: 3937957 - RNA, 15 nt, Human adenovirus E
gcgugcgcuccugga

SEQ ID NO: 3937958 - RNA, 22 nt, Human adenovirus E
gcuaagcgaacggguugggcug

SEQ ID NO: 3937959 - RNA, 12 nt, Human adenovirus E
gcuaccagcccc

SEQ ID NO: 3937960 - RNA, 20 nt, Human adenovirus E
gcuaccgccaaaaaucagac

SEQ ID NO: 3937961 - RNA, 21 nt, Human adenovirus E
gcuaccugcugcgccuggcca

SEQ ID NO: 3937962 - RNA, 23 nt, Human adenovirus E
gcucaaccccggcuucccccagg

SEQ ID NO: 3937963 - RNA, 17 nt, Human adenovirus E
cgucgcagggggccacg

SEQ ID NO: 3937964 - RNA, 16 nt, Human adenovirus E
cgucgccgcaccgccg

SEQ ID NO: 3937965 - RNA, 20 nt, Human adenovirus E
cgucuaccccuacgaugcag

SEQ ID NO: 3937966 - RNA, 15 nt, Human adenovirus E
cgugaaccugagcca

SEQ ID NO: 3937967 - RNA, 15 nt, Human adenovirus E
cgugaccgagcuggu

SEQ ID NO: 3937968 - RNA, 20 nt, Human adenovirus E
cgugagguaaauccaagcca

SEQ ID NO: 3937969 - RNA, 19 nt, Human adenovirus E
cgugaucgaggacgucagc

SEQ ID NO: 3937970 - RNA, 17 nt, Human adenovirus E
cgugcagaaccccacca

SEQ ID NO: 3937971 - RNA, 19 nt, Human adenovirus E
cgugcagaaccccaccagc

SEQ ID NO: 3937972 - RNA, 19 nt, Human adenovirus E
cgugcagcagaagcguggg

SEQ ID NO: 3937973 - RNA, 14 nt, Human adenovirus E
cgugcagccacagc

SEQ ID NO: 3937974 - RNA, 22 nt, Human adenovirus E
cgugcauguucucgcgcaccag

SEQ ID NO: 3937975 - RNA, 13 nt, Human adenovirus E
cgugccccagggc

SEQ ID NO: 3937976 - RNA, 19 nt, Human adenovirus E
cgugccccagggcauggga

SEQ ID NO: 3937977 - RNA, 23 nt, Human adenovirus E
cguggaacagcaccacagggcag

SEQ ID NO: 3937978 - RNA, 17 nt, Human adenovirus E
cguggaggauuuggagg

SEQ ID NO: 3937979 - RNA, 23 nt, Human adenovirus E
cguggcccgcuacaacagcacca

SEQ ID NO: 3937980 - RNA, 15 nt, Human adenovirus E
cguggccgcggccaa

SEQ ID NO: 3937981 - RNA, 21 nt, Human adenovirus E
cguggcucugccuuggcagua

SEQ ID NO: 3937982 - RNA, 13 nt, Human adenovirus E
cguggucagcgac

SEQ ID NO: 3937983 - RNA, 15 nt, Human adenovirus E
cguggucuucuccau

SEQ ID NO: 3937984 - RNA, 15 nt, Human adenovirus E
cguggugcaggagcg

SEQ ID NO: 3937985 - RNA, 19 nt, Human adenovirus E
cgugucaugaugcaguugc

SEQ ID NO: 3937986 - RNA, 13 nt, Human adenovirus E
cguguggcagcag

SEQ ID NO: 3937987 - RNA, 14 nt, Human adenovirus E
cguguggcagcagu

SEQ ID NO: 3937988 - RNA, 18 nt, Human adenovirus E
cguucagggaggcgcugc

SEQ ID NO: 3937989 - RNA, 20 nt, Human adenovirus E
cguucucuccagcaccaggc

SEQ ID NO: 3937990 - RNA, 15 nt, Human adenovirus E
cguugcggugugccc

SEQ ID NO: 3937991 - RNA, 13 nt, Human adenovirus E
cguugggcaggga

SEQ ID NO: 3937992 - RNA, 20 nt, Human adenovirus E
cuaaaccccauuacuggcac

SEQ ID NO: 3937993 - RNA, 22 nt, Human adenovirus E
cuaacaaccaaacuaaccucca

SEQ ID NO: 3937994 - RNA, 17 nt, Human adenovirus E
cuacaaggcccugggca

SEQ ID NO: 3937995 - RNA, 18 nt, Human adenovirus E
cuacagccuaggccacaa

SEQ ID NO: 3937996 - RNA, 20 nt, Human adenovirus E
cuaccaauaacauuuuugcc

SEQ ID NO: 3937997 - RNA, 19 nt, Human adenovirus E
cuaccagccccagaugggc

SEQ ID NO: 3937998 - RNA, 18 nt, Human adenovirus E
cuaccgucaccuccacag

SEQ ID NO: 3937999 - RNA, 15 nt, Human adenovirus E
cuaccuauaccuccc

SEQ ID NO: 3938000 - RNA, 17 nt, Human adenovirus E
cuaccucgacccccaga

SEQ ID NO: 3938001 - RNA, 13 nt, Human adenovirus E
cuaccucugccac

SEQ ID NO: 3938002 - RNA, 16 nt, Human adenovirus E
cuaccuggccuaccac

SEQ ID NO: 3938003 - RNA, 13 nt, Human adenovirus E
cuacucgcagcag

SEQ ID NO: 3938004 - RNA, 21 nt, Human adenovirus E
cuacugaauuuuuguccacug

SEQ ID NO: 3938005 - RNA, 12 nt, Human adenovirus E
cuacuuccuccu

SEQ ID NO: 3938006 - RNA, 23 nt, Human adenovirus E
cuagaacagucagcgcucaccgc

SEQ ID NO: 3938007 - RNA, 12 nt, Human adenovirus E
cuaguccccaga

SEQ ID NO: 3938008 - RNA, 19 nt, Human adenovirus E
cuaguugcgggugggcuuu

SEQ ID NO: 3938009 - RNA, 20 nt, Human adenovirus E
cuauaccucccuugcuguuc

SEQ ID NO: 3938010 - RNA, 22 nt, Human adenovirus E
cuaugagaaaagcaaggaggau

SEQ ID NO: 3938011 - RNA, 20 nt, Human adenovirus E
cuaugaggccgagccacagc

SEQ ID NO: 3938012 - RNA, 13 nt, Human adenovirus E
cuaugcagcucac

SEQ ID NO: 3938013 - RNA, 14 nt, Human adenovirus E
cuaugccuucugcu

SEQ ID NO: 3938014 - RNA, 16 nt, Human adenovirus E
cuaugccuucugcuac

SEQ ID NO: 3938015 - RNA, 20 nt, Human adenovirus E
cucaaugguacugaugacag

SEQ ID NO: 3938016 - RNA, 19 nt, Human adenovirus E
cucagcgccgggcccgcga

SEQ ID NO: 3938017 - RNA, 17 nt, Human adenovirus E
cucagcguggaggagcu

SEQ ID NO: 3938018 - RNA, 15 nt, Human adenovirus E
cucagcucaaaaugg

SEQ ID NO: 3938019 - RNA, 15 nt, Human adenovirus E
cucaggcagaggagg

SEQ ID NO: 3938020 - RNA, 16 nt, Human adenovirus E
cucaggcagaggagga

SEQ ID NO: 3938021 - RNA, 14 nt, Human adenovirus E
cucagggcccggcc

SEQ ID NO: 3938022 - RNA, 18 nt, Human adenovirus E
cucagguguccagcuggc

SEQ ID NO: 3938023 - RNA, 19 nt, Human adenovirus E
cucagucucaaguccagca

SEQ ID NO: 3938024 - RNA, 19 nt, Human adenovirus E
cucaucuccuuugugauuu

SEQ ID NO: 3938025 - RNA, 22 nt, Human adenovirus E
cuccaauugccugaacgccugc

SEQ ID NO: 3938026 - RNA, 15 nt, Human adenovirus E
cuccacagccccuac

SEQ ID NO: 3938027 - RNA, 13 nt, Human adenovirus E
cuccacgcgcaca

SEQ ID NO: 3938028 - RNA, 17 nt, Human adenovirus E
cuccacgucgagguccu

SEQ ID NO: 3938029 - RNA, 17 nt, Human adenovirus E
cuccagaagacggauga

SEQ ID NO: 3938030 - RNA, 14 nt, Human adenovirus E
cuccagcaccaggc

SEQ ID NO: 3938031 - RNA, 15 nt, Human adenovirus E
cuccagcuccagugu

SEQ ID NO: 3938032 - RNA, 15 nt, Human adenovirus E
cuccaguguaagccc

SEQ ID NO: 3938033 - RNA, 21 nt, Human adenovirus E
ggugauccuccaccagagaag

SEQ ID NO: 3938034 - RNA, 16 nt, Human adenovirus E
ggugcccgaggccgcc

SEQ ID NO: 3938035 - RNA, 19 nt, Human adenovirus E
ggugcccgaggccgccagu

SEQ ID NO: 3938036 - RNA, 15 nt, Human adenovirus E
ggugccgcccaggac

SEQ ID NO: 3938037 - RNA, 17 nt, Human adenovirus E
gguggggcggccagcug

SEQ ID NO: 3938038 - RNA, 14 nt, Human adenovirus E
gguggucaugcuga

SEQ ID NO: 3938039 - RNA, 13 nt, Human adenovirus E
gguguccagcugg

SEQ ID NO: 3938040 - RNA, 15 nt, Human adenovirus E
ggugucggggaagga

SEQ ID NO: 3938041 - RNA, 13 nt, Human adenovirus E
gguguugcuuucg

SEQ ID NO: 3938042 - RNA, 22 nt, Human adenovirus E
gguguugcuuucgauuguggga

SEQ ID NO: 3938043 - RNA, 19 nt, Human adenovirus E
gguuagaguuuggaagcag

SEQ ID NO: 3938044 - RNA, 18 nt, Human adenovirus E
gguuguugaugaccuggg

SEQ ID NO: 3938045 - RNA, 16 nt, Human adenovirus E
guaacuguuguugauc

SEQ ID NO: 3938046 - RNA, 20 nt, Human adenovirus E
guaauuggcccgccgcccug

SEQ ID NO: 3938047 - RNA, 22 nt, Human adenovirus E
guacacauacaaagccucagcg

SEQ ID NO: 3938048 - RNA, 19 nt, Human adenovirus E
guacaggagccauaauggc

SEQ ID NO: 3938049 - RNA, 18 nt, Human adenovirus E
guacagguggcagaugcg

SEQ ID NO: 3938050 - RNA, 24 nt, Human adenovirus E
guacccucgaucccgggggcguag

SEQ ID NO: 3938051 - RNA, 18 nt, Human adenovirus E
guacuaugccuucugcua

SEQ ID NO: 3938052 - RNA, 24 nt, Human adenovirus E
guacucgcgcgccacgcacuucca

SEQ ID NO: 3938053 - RNA, 14 nt, Human adenovirus E
guacugcggcagau

SEQ ID NO: 3938054 - RNA, 16 nt, Human adenovirus E
guagaagagguggacg

SEQ ID NO: 3938055 - RNA, 21 nt, Human adenovirus E
guagaccacgacgcccucggg

SEQ ID NO: 3938056 - RNA, 13 nt, Human adenovirus E
guagagguaguug

SEQ ID NO: 3938057 - RNA, 16 nt, Human adenovirus E
guagcaauugaccaug

SEQ ID NO: 3938058 - RNA, 19 nt, Human adenovirus E
guagggacugaggggcgug

SEQ ID NO: 3938059 - RNA, 17 nt, Human adenovirus E
guagguauucccucucg

SEQ ID NO: 3938060 - RNA, 13 nt, Human adenovirus E
guaucccacccug

SEQ ID NO: 3938061 - RNA, 21 nt, Human adenovirus E
guauccgcagcagcgagcugg

SEQ ID NO: 3938062 - RNA, 13 nt, Human adenovirus E
gucaacaauagca

SEQ ID NO: 3938063 - RNA, 13 nt, Human adenovirus E
gucaaccacugcg

SEQ ID NO: 3938064 - RNA, 15 nt, Human adenovirus E
gucaccaccaagaac

SEQ ID NO: 3938065 - RNA, 13 nt, Human adenovirus E
gucaggccguccu

SEQ ID NO: 3938066 - RNA, 20 nt, Human adenovirus E
gucauagcaggggcgcaggg

SEQ ID NO: 3938067 - RNA, 23 nt, Human adenovirus E
gucauagcaggggcgcagggcau

SEQ ID NO: 3938068 - RNA, 22 nt, Human adenovirus E
guccagagauccacggccaggg

SEQ ID NO: 3938069 - RNA, 21 nt, Human adenovirus E
guccagcuggcgggcggcgcc

SEQ ID NO: 3938070 - RNA, 13 nt, Human adenovirus E
guccaggccagca

SEQ ID NO: 3938071 - RNA, 22 nt, Human adenovirus E
guccagggacucccucagcaug

SEQ ID NO: 3938072 - RNA, 22 nt, Human adenovirus E
gucccaugguggcgcagcugac

SEQ ID NO: 3938073 - RNA, 24 nt, Human adenovirus E
gucccaugguggcgcagcugaccu

SEQ ID NO: 3938074 - RNA, 21 nt, Human adenovirus E
gucccccguugggcagggaga

SEQ ID NO: 3938075 - RNA, 13 nt, Human adenovirus E
guccgggcgcugc

SEQ ID NO: 3938076 - RNA, 17 nt, Human adenovirus E
guccggguggaugauga

SEQ ID NO: 3938077 - RNA, 14 nt, Human adenovirus E
guccguguccccgu

SEQ ID NO: 3938078 - RNA, 16 nt, Human adenovirus E
guccucgcuguccugg

SEQ ID NO: 3938079 - RNA, 14 nt, Human adenovirus E
guccuggcgggggc

SEQ ID NO: 3938080 - RNA, 12 nt, Human adenovirus E
guccuuccaggg

SEQ ID NO: 3938081 - RNA, 17 nt, Human adenovirus E
gucgagggucuccugga

SEQ ID NO: 3938082 - RNA, 19 nt, Human adenovirus E
gucgcagggggccacgagc

SEQ ID NO: 3938083 - RNA, 17 nt, Human adenovirus E
gucgcccagcgccucca

SEQ ID NO: 3938084 - RNA, 20 nt, Human adenovirus E
gucgcccaucuccgaggacg

SEQ ID NO: 3938085 - RNA, 23 nt, Human adenovirus E
gucguuggagaugcggcccauga

SEQ ID NO: 3938086 - RNA, 19 nt, Human adenovirus E
gucuaccucuaccucugcc

SEQ ID NO: 3938087 - RNA, 21 nt, Human adenovirus E
gucuauguuggcacagcacag

SEQ ID NO: 3938088 - RNA, 15 nt, Human adenovirus E
gucuccaugagcucg

SEQ ID NO: 3938089 - RNA, 18 nt, Human adenovirus E
gucucgcacuccacgagc

SEQ ID NO: 3938090 - RNA, 17 nt, Human adenovirus E
gucucuucgggggcaga

SEQ ID NO: 3938091 - RNA, 14 nt, Human adenovirus E
gucugcagcgggcc

SEQ ID NO: 3938092 - RNA, 22 nt, Human adenovirus E
gucugcccgcaggcgggacaga

SEQ ID NO: 3938093 - RNA, 19 nt, Human adenovirus E
gucuucgcggugcccgagg

SEQ ID NO: 3938094 - RNA, 19 nt, Human adenovirus E
gugaagaagaccccgcagg

SEQ ID NO: 3938095 - RNA, 20 nt, Human adenovirus E
gugacacacucaaaaaaaua

SEQ ID NO: 3938096 - RNA, 12 nt, Human adenovirus E
gugacccugggc

SEQ ID NO: 3938097 - RNA, 17 nt, Human adenovirus E
gugaccgagcuggucau

SEQ ID NO: 3938098 - RNA, 22 nt, Human adenovirus E
gugagccgcgcccugggccagg

SEQ ID NO: 3938099 - RNA, 14 nt, Human adenovirus E
gugagcggggcugg

SEQ ID NO: 3938100 - RNA, 20 nt, Human adenovirus E
gugaggucaucauaggccau

SEQ ID NO: 3938101 - RNA, 16 nt, Human adenovirus E
gugcacccgugcagcc

SEQ ID NO: 3938102 - RNA, 11 nt, Human adenovirus E
gugcagaccaa

SEQ ID NO: 3938103 - RNA, 15 nt, Human adenovirus E
gugcagaccaaccug

SEQ ID NO: 3938104 - RNA, 22 nt, Human adenovirus E
gugcagcagaagcgugggccug

SEQ ID NO: 3938105 - RNA, 13 nt, Human adenovirus E
gugcagcccgagg

SEQ ID NO: 3938106 - RNA, 17 nt, Human adenovirus E
gugcaguggcgcgggcg

SEQ ID NO: 3938107 - RNA, 13 nt, Human adenovirus E
gugcauguugauc

SEQ ID NO: 3938108 - RNA, 12 nt, Human adenovirus E
gugccccagagc

SEQ ID NO: 3938109 - RNA, 21 nt, Human adenovirus E
gugccccgguucgaggccggc

SEQ ID NO: 3938110 - RNA, 12 nt, Human adenovirus E
guugcgcagggc

SEQ ID NO: 3938111 - RNA, 16 nt, Human adenovirus E
guugcgcagggccagg

SEQ ID NO: 3938112 - RNA, 17 nt, Human adenovirus E
guugcgcagggccaggc

SEQ ID NO: 3938113 - RNA, 12 nt, Human adenovirus E
guugggcaggga

SEQ ID NO: 3938114 - RNA, 12 nt, Human adenovirus E
guuguaccuggu

SEQ ID NO: 3938115 - RNA, 13 nt, Human adenovirus E
guuguugauuuua

SEQ ID NO: 3938116 - RNA, 19 nt, Human adenovirus E
guuguuggccagcugcacc

SEQ ID NO: 3938117 - RNA, 14 nt, Human adenovirus E
uaaacucacuuugu

SEQ ID NO: 3938118 - RNA, 12 nt, Human adenovirus E
uaaaggccaaag

SEQ ID NO: 3938119 - RNA, 21 nt, Human adenovirus E
uaacauuuuugccaugcguca

SEQ ID NO: 3938120 - RNA, 23 nt, Human adenovirus E
uaaccgccccgccgcccagcccc

SEQ ID NO: 3938121 - RNA, 12 nt, Human adenovirus E
uaaccuccacca

SEQ ID NO: 3938122 - RNA, 20 nt, Human adenovirus E
uaacucagguguccagcugg

SEQ ID NO: 3938123 - RNA, 16 nt, Human adenovirus E
uacaacgcgcugcugg

SEQ ID NO: 3938124 - RNA, 15 nt, Human adenovirus E
uacaccacccucucc

SEQ ID NO: 3938125 - RNA, 14 nt, Human adenovirus E
uacagcaacaaguu

SEQ ID NO: 3938126 - RNA, 14 nt, Human adenovirus E
uacaggagccauaa

SEQ ID NO: 3938127 - RNA, 15 nt, Human adenovirus E
uacagguggcagaug

SEQ ID NO: 3938128 - RNA, 14 nt, Human adenovirus E
uacauuaaaucagc

SEQ ID NO: 3938129 - RNA, 12 nt, Human adenovirus E
uaccaaugagca

SEQ ID NO: 3938130 - RNA, 17 nt, Human adenovirus E
uaccacaucacccucug

SEQ ID NO: 3938131 - RNA, 18 nt, Human adenovirus E
uaccagaacgaccacagc

SEQ ID NO: 3938132 - RNA, 21 nt, Human adenovirus E
uaccaggagaucacccacgug

SEQ ID NO: 3938133 - RNA, 21 nt, Human adenovirus E
uaccauugucaaugccaccuc

SEQ ID NO: 3938134 - RNA, 13 nt, Human adenovirus E
uacccgguggugg

SEQ ID NO: 3938135 - RNA, 15 nt, Human adenovirus E
uacccuucucccagg

SEQ ID NO: 3938136 - RNA, 15 nt, Human adenovirus E
uaccgagcagcagca

SEQ ID NO: 3938137 - RNA, 22 nt, Human adenovirus E
uaccggacaagauaaacaccgc

SEQ ID NO: 3938138 - RNA, 18 nt, Human adenovirus E
uaccgucaccuccacagc

SEQ ID NO: 3938139 - RNA, 13 nt, Human adenovirus E
uaccuccaccuga

SEQ ID NO: 3938140 - RNA, 18 nt, Human adenovirus E
uaccucgacccccagacc

SEQ ID NO: 3938141 - RNA, 21 nt, Human adenovirus E
uaccucugcucuaugcaauuc

SEQ ID NO: 3938142 - RNA, 13 nt, Human adenovirus E
uaccuuuggaagu

SEQ ID NO: 3938143 - RNA, 18 nt, Human adenovirus E
uacgaguugaaccucuuc

SEQ ID NO: 3938144 - RNA, 18 nt, Human adenovirus E
uacgcgcacuuccucaaa

SEQ ID NO: 3938145 - RNA, 15 nt, Human adenovirus E
uacgugcaacacaga

SEQ ID NO: 3938146 - RNA, 18 nt, Human adenovirus E
uacuaacaaccaaacuaa

SEQ ID NO: 3938147 - RNA, 14 nt, Human adenovirus E
uacucgcagcagcu

SEQ ID NO: 3938148 - RNA, 16 nt, Human adenovirus E
uacucgcagcagcugc

SEQ ID NO: 3938149 - RNA, 15 nt, Human adenovirus E
uacuucaaaaugaag

SEQ ID NO: 3938150 - RNA, 22 nt, Human adenovirus E
uacuuccaagaagaggcagcag

SEQ ID NO: 3938151 - RNA, 22 nt, Human adenovirus E
uacuuccgcgagacgcccaggc

SEQ ID NO: 3938152 - RNA, 12 nt, Human adenovirus E
uagacagcagcc

SEQ ID NO: 3938153 - RNA, 14 nt, Human adenovirus E
uagcccagaucuac

SEQ ID NO: 3938154 - RNA, 15 nt, Human adenovirus E
uagcgguccaucagc

SEQ ID NO: 3938155 - RNA, 14 nt, Human adenovirus E
uaggagcuccugga

SEQ ID NO: 3938156 - RNA, 23 nt, Human adenovirus E
uaggagcuccuggagcgaggcga

SEQ ID NO: 3938157 - RNA, 21 nt, Human adenovirus E
uaguugugguccugggugagg

SEQ ID NO: 3938158 - RNA, 14 nt, Human adenovirus E
uauccgcagcagcg

SEQ ID NO: 3938159 - RNA, 22 nt, Human adenovirus E
uaugcaauucugacaaugagga

SEQ ID NO: 3938160 - RNA, 20 nt, Human adenovirus E
ucaaccacugcgacaacgac

SEQ ID NO: 3938161 - RNA, 21 nt, Human adenovirus E
ucaaccccggcuucccccagg

SEQ ID NO: 3938162 - RNA, 18 nt, Human adenovirus E
ucaagcccagcaccagca

SEQ ID NO: 3938163 - RNA, 20 nt, Human adenovirus E
ucaaugucauuuucauacac

SEQ ID NO: 3938164 - RNA, 15 nt, Human adenovirus E
ucacaccuuccaccu

SEQ ID NO: 3938165 - RNA, 17 nt, Human adenovirus E
ucacaccuuccaccuga

SEQ ID NO: 3938166 - RNA, 21 nt, Human adenovirus E
ucaccaaacugucaaauacuc

SEQ ID NO: 3938167 - RNA, 17 nt, Human adenovirus E
ucaccagcuggccuugg

SEQ ID NO: 3938168 - RNA, 16 nt, Human adenovirus E
ucaccuccacagcccc

SEQ ID NO: 3938169 - RNA, 15 nt, Human adenovirus E
ucaccugcagcagau

SEQ ID NO: 3938170 - RNA, 14 nt, Human adenovirus E
ucaccuuccgcucc

SEQ ID NO: 3938171 - RNA, 19 nt, Human adenovirus E
ucacuuuguggacaacacc

SEQ ID NO: 3938172 - RNA, 20 nt, Human adenovirus E
ucacuuuguggacaacaccu

SEQ ID NO: 3938173 - RNA, 15 nt, Human adenovirus E
ucagacccacugcug

SEQ ID NO: 3938174 - RNA, 16 nt, Human adenovirus E
ucagcaucagucgucu

SEQ ID NO: 3938175 - RNA, 18 nt, Human adenovirus E
ucagcaucaucugggccu

SEQ ID NO: 3938176 - RNA, 22 nt, Human adenovirus E
ucagcgacgagcagcuggcccg

SEQ ID NO: 3938177 - RNA, 18 nt, Human adenovirus E
ucagcggcgagggccugc

SEQ ID NO: 3938178 - RNA, 12 nt, Human adenovirus E
ucagcuggaagu

SEQ ID NO: 3938179 - RNA, 15 nt, Human adenovirus E
ucagggccgggugcu

SEQ ID NO: 3938180 - RNA, 20 nt, Human adenovirus E
ucaggucggucuccacgcgg

SEQ ID NO: 3938181 - RNA, 17 nt, Human adenovirus E
ucaucaugagcaaagag

SEQ ID NO: 3938182 - RNA, 23 nt, Human adenovirus E
ucaucuuagcgcuagcagccgcg

SEQ ID NO: 3938183 - RNA, 20 nt, Human adenovirus E
ucaugaacugcucgaucucc

SEQ ID NO: 3938184 - RNA, 23 nt, Human adenovirus E
ucaugagcgcggucauggaccag

SEQ ID NO: 3938185 - RNA, 12 nt, Human adenovirus E
uccaacguggag

SEQ ID NO: 3938186 - RNA, 17 nt, Human adenovirus E
uccaagaagaggcagca

SEQ ID NO: 3938187 - RNA, 21 nt, Human adenovirus E
uccaagaagaggcagcagcag

SEQ ID NO: 3938188 - RNA, 18 nt, Human adenovirus E
uccaagucugugccaccc

SEQ ID NO: 3938189 - RNA, 23 nt, Human adenovirus E
uccaccagcggguccaccuuuuc

SEQ ID NO: 3938190 - RNA, 13 nt, Human adenovirus E
uccacgagccagg

SEQ ID NO: 3938191 - RNA, 15 nt, Human adenovirus E
uccacggccagggcg

SEQ ID NO: 3938192 - RNA, 14 nt, Human adenovirus E
uccacuuccucuuc

SEQ ID NO: 3938193 - RNA, 19 nt, Human adenovirus E
uccagagauccacggccag

SEQ ID NO: 3938194 - RNA, 20 nt, Human adenovirus E
uccagagauccacggccagg

SEQ ID NO: 3938195 - RNA, 16 nt, Human adenovirus E
uccagccgaaacucau

SEQ ID NO: 3938196 - RNA, 15 nt, Human adenovirus E
cgacaugcccgaccc

SEQ ID NO: 3938197 - RNA, 12 nt, Human adenovirus E
cgaccacagcaa

SEQ ID NO: 3938198 - RNA, 14 nt, Human adenovirus E
cgaccacagcaacu

SEQ ID NO: 3938199 - RNA, 13 nt, Human adenovirus E
cgacccgcaaccc

SEQ ID NO: 3938200 - RNA, 23 nt, Human adenovirus E
cgaccgccgcggccgccgugagc

SEQ ID NO: 3938201 - RNA, 17 nt, Human adenovirus E
cgacgagaagcagcagc

SEQ ID NO: 3938202 - RNA, 15 nt, Human adenovirus E
cgacuaccuccaccu

SEQ ID NO: 3938203 - RNA, 19 nt, Human adenovirus E
cgacuccguggccuggagg

SEQ ID NO: 3938204 - RNA, 20 nt, Human adenovirus E
cgacugcgucuaccucuacc

SEQ ID NO: 3938205 - RNA, 15 nt, Human adenovirus E
cgagacgcccaggcc

SEQ ID NO: 3938206 - RNA, 15 nt, Human adenovirus E
cgagagccgccucag

SEQ ID NO: 3938207 - RNA, 20 nt, Human adenovirus E
cgagcagaaggggggcaggg

SEQ ID NO: 3938208 - RNA, 19 nt, Human adenovirus E
cgagcagaccuaccaggag

SEQ ID NO: 3938209 - RNA, 13 nt, Human adenovirus E
cgagccaggugag

SEQ ID NO: 3938210 - RNA, 18 nt, Human adenovirus E
cgagcccgagggccgcug

SEQ ID NO: 3938211 - RNA, 24 nt, Human adenovirus E
cgagcgccccuuguggaagaagga

SEQ ID NO: 3938212 - RNA, 18 nt, Human adenovirus E
cgagcgcuccggcaccgc

SEQ ID NO: 3938213 - RNA, 21 nt, Human adenovirus E
cgaggagccccgggcccaggu

SEQ ID NO: 3938214 - RNA, 18 nt, Human adenovirus E
cgaggaggagcuggcagu

SEQ ID NO: 3938215 - RNA, 20 nt, Human adenovirus E
cgaggaggagcuggcagugc

SEQ ID NO: 3938216 - RNA, 15 nt, Human adenovirus E
cgaggaggaggcaga

SEQ ID NO: 3938217 - RNA, 15 nt, Human adenovirus E
cgaggccggccuggu

SEQ ID NO: 3938218 - RNA, 17 nt, Human adenovirus E
cgaggccggccuggugu

SEQ ID NO: 3938219 - RNA, 15 nt, Human adenovirus E
cgaggccguggccca

SEQ ID NO: 3938220 - RNA, 17 nt, Human adenovirus E
cgaggcggacgagcuga

SEQ ID NO: 3938221 - RNA, 16 nt, Human adenovirus E
cgagggcguggcugcc

SEQ ID NO: 3938222 - RNA, 17 nt, Human adenovirus E
cgagggggcgaggagcc

SEQ ID NO: 3938223 - RNA, 17 nt, Human adenovirus E
cgaggguucagccgcca

SEQ ID NO: 3938224 - RNA, 13 nt, Human adenovirus E
cgaggugccccuc

SEQ ID NO: 3938225 - RNA, 15 nt, Human adenovirus E
cgaggugccccucag

SEQ ID NO: 3938226 - RNA, 23 nt, Human adenovirus E
cgagguguaccaguccgggccgg

SEQ ID NO: 3938227 - RNA, 21 nt, Human adenovirus E
cgaguugcaagggcccagcga

SEQ ID NO: 3938228 - RNA, 20 nt, Human adenovirus E
cgaguuugcuuacggcaagc

SEQ ID NO: 3938229 - RNA, 17 nt, Human adenovirus E
cgauaaacucacuuugu

SEQ ID NO: 3938230 - RNA, 18 nt, Human adenovirus E
cgauuaugcagggugaug

SEQ ID NO: 3938231 - RNA, 19 nt, Human adenovirus E
cgauucccgaaccccacca

SEQ ID NO: 3938232 - RNA, 15 nt, Human adenovirus E
cgauuggacccaggc

SEQ ID NO: 3938233 - RNA, 22 nt, Human adenovirus E
cgcaagccgguauacaagccca

SEQ ID NO: 3938234 - RNA, 14 nt, Human adenovirus E
cgcaccugccccua

SEQ ID NO: 3938235 - RNA, 14 nt, Human adenovirus E
cgcagaacagggca

SEQ ID NO: 3938236 - RNA, 12 nt, Human adenovirus E
cgcagcagcgca

SEQ ID NO: 3938237 - RNA, 15 nt, Human adenovirus E
cgcagcagcgcaugc

SEQ ID NO: 3938238 - RNA, 15 nt, Human adenovirus E
cgcagccccccugcu

SEQ ID NO: 3938239 - RNA, 23 nt, Human adenovirus E
cgcagcuugcccucggccucggu

SEQ ID NO: 3938240 - RNA, 14 nt, Human adenovirus E
cgcagggaggugug

SEQ ID NO: 3938241 - RNA, 13 nt, Human adenovirus E
cgcagggccaggc

SEQ ID NO: 3938242 - RNA, 19 nt, Human adenovirus E
cgcaugaccaccugggcga

SEQ ID NO: 3938243 - RNA, 19 nt, Human adenovirus E
cgccaaccucgccaucugc

SEQ ID NO: 3938244 - RNA, 23 nt, Human adenovirus E
cgccaacgugccccggggccagg

SEQ ID NO: 3938245 - RNA, 11 nt, Human adenovirus E
cgccaccacca

SEQ ID NO: 3938246 - RNA, 21 nt, Human adenovirus E
cgccaccugcuccgcgcugcc

SEQ ID NO: 3938247 - RNA, 17 nt, Human adenovirus E
cgccagacgccgcaccu

SEQ ID NO: 3938248 - RNA, 14 nt, Human adenovirus E
cgccagcuccuccu

SEQ ID NO: 3938249 - RNA, 13 nt, Human adenovirus E
cgccaggccugca

SEQ ID NO: 3938250 - RNA, 15 nt, Human adenovirus E
cgcccaaggccgagc

SEQ ID NO: 3938251 - RNA, 19 nt, Human adenovirus E
cgcccagccccgccaccuc

SEQ ID NO: 3938252 - RNA, 22 nt, Human adenovirus E
cgcccugcgcgucggccaggua

SEQ ID NO: 3938253 - RNA, 15 nt, Human adenovirus E
cgcccugggccagga

SEQ ID NO: 3938254 - RNA, 20 nt, Human adenovirus E
cgccgacgagaagcagcagc

SEQ ID NO: 3938255 - RNA, 24 nt, Human adenovirus E
cgccgacgcggagacccugcgcaa

SEQ ID NO: 3938256 - RNA, 22 nt, Human adenovirus E
cgccgaggcucucuucaacaag

SEQ ID NO: 3938257 - RNA, 20 nt, Human adenovirus E
cgccgcaccgcucccuggcc

SEQ ID NO: 3938258 - RNA, 14 nt, Human adenovirus E
cgccgcccagcccc

SEQ ID NO: 3938259 - RNA, 22 nt, Human adenovirus E
cgccguagaaggcuggcgggga

SEQ ID NO: 3938260 - RNA, 12 nt, Human adenovirus E
cgccucaggcug

SEQ ID NO: 3938261 - RNA, 19 nt, Human adenovirus E
cgcgagacgcccaggccga

SEQ ID NO: 3938262 - RNA, 18 nt, Human adenovirus E
cgcgagcgguuccaccgc

SEQ ID NO: 3938263 - RNA, 21 nt, Human adenovirus E
cgcgagcugagcgaccaggag

SEQ ID NO: 3938264 - RNA, 22 nt, Human adenovirus E
cgcgaggaggugacccugggcc

SEQ ID NO: 3938265 - RNA, 17 nt, Human adenovirus E
cgcgagugccccccgcc

SEQ ID NO: 3938266 - RNA, 12 nt, Human adenovirus E
cgcgcaccaccg

SEQ ID NO: 3938267 - RNA, 22 nt, Human adenovirus E
cgcgcaccaguuccgccaggag

SEQ ID NO: 3938268 - RNA, 20 nt, Human adenovirus E
cgcgcaucuccagguggccg

SEQ ID NO: 3938269 - RNA, 13 nt, Human adenovirus E
cgcgcccugggcc

SEQ ID NO: 3938270 - RNA, 22 nt, Human adenovirus E
cgcgcgccgggcggcaggggcg

SEQ ID NO: 3938271 - RNA, 17 nt, Human adenovirus E
cgcgcggcuggcggugc

SEQ ID NO: 3938272 - RNA, 12 nt, Human adenovirus E
cgcgcucaucaa

SEQ ID NO: 3938273 - RNA, 16 nt, Human adenovirus E
cgcggagcacgaggag

SEQ ID NO: 3938274 - RNA, 15 nt, Human adenovirus E
cgcggaggaaggaag

SEQ ID NO: 3938275 - RNA, 24 nt, Human adenovirus E
cgcggccagggggucgcucucguc

SEQ ID NO: 3938276 - RNA, 21 nt, Human adenovirus E
cgcggccgccgugagcggggc

SEQ ID NO: 3938277 - RNA, 20 nt, Human adenovirus E
cgcggccguucaugggcacc

SEQ ID NO: 3938278 - RNA, 16 nt, Human adenovirus E
cgcgguaccuggcgcc

SEQ ID NO: 3938279 - RNA, 17 nt, Human adenovirus E
cgcgguggggcggccag

SEQ ID NO: 3938280 - RNA, 18 nt, Human adenovirus E
cgcucccuggggcgcccu

SEQ ID NO: 3938281 - RNA, 21 nt, Human adenovirus E
cgcuccgucaagcugcugcuc

SEQ ID NO: 3938282 - RNA, 14 nt, Human adenovirus E
cgcucgccacaucc

SEQ ID NO: 3938283 - RNA, 15 nt, Human adenovirus E
cgcugcccucggacu

SEQ ID NO: 3938284 - RNA, 22 nt, Human adenovirus E
cgcuggcuccuggaccugguga

SEQ ID NO: 3938285 - RNA, 15 nt, Human adenovirus E
cgcugguggcggugu

SEQ ID NO: 3938286 - RNA, 21 nt, Human adenovirus E
cgcuguccacgagcgccagcu

SEQ ID NO: 3938287 - RNA, 13 nt, Human adenovirus E
cgcuuacagccug

SEQ ID NO: 3938288 - RNA, 17 nt, Human adenovirus E
cggaaccacagggccag

SEQ ID NO: 3938289 - RNA, 23 nt, Human adenovirus E
cggaauaucaaaaucucugccgc

SEQ ID NO: 3938290 - RNA, 17 nt, Human adenovirus E
cggacgauuggacccag

SEQ ID NO: 3938291 - RNA, 18 nt, Human adenovirus E
cggagaaaacuggcguga

SEQ ID NO: 3938292 - RNA, 16 nt, Human adenovirus E
cggagcacgaggagga

SEQ ID NO: 3938293 - RNA, 21 nt, Human adenovirus E
cggaggcgacgggcucucgcc

SEQ ID NO: 3938294 - RNA, 12 nt, Human adenovirus E
cggaggugagcu

SEQ ID NO: 3938295 - RNA, 12 nt, Human adenovirus E
cggaugaagcac

SEQ ID NO: 3938296 - RNA, 13 nt, Human adenovirus E
cggcacucuccag

SEQ ID NO: 3938297 - RNA, 18 nt, Human adenovirus E
cggcagaucaacagccgc

SEQ ID NO: 3938298 - RNA, 14 nt, Human adenovirus E
cggcagaugcgccc

SEQ ID NO: 3938299 - RNA, 20 nt, Human adenovirus E
cggcauggcccgcgggcagg

SEQ ID NO: 3938300 - RNA, 15 nt, Human adenovirus E
cggccagccugcuga

SEQ ID NO: 3938301 - RNA, 23 nt, Human adenovirus E
cggccagcugaaaaccaucaugc

SEQ ID NO: 3938302 - RNA, 15 nt, Human adenovirus E
cggccauccuggagg

SEQ ID NO: 3938303 - RNA, 18 nt, Human adenovirus E
  misc_feature (8)..(8): n is a, c, g, or u
cggccgancgccugggcg

SEQ ID NO: 3938304 - RNA, 13 nt, Human adenovirus E
cggccgcgcaccu

SEQ ID NO: 3938305 - RNA, 17 nt, Human adenovirus E
cggccggcgcgcuccac

SEQ ID NO: 3938306 - RNA, 20 nt, Human adenovirus E
cggccgucccagacaugcaa

SEQ ID NO: 3938307 - RNA, 16 nt, Human adenovirus E
cggccuugcgcaggga

SEQ ID NO: 3938308 - RNA, 13 nt, Human adenovirus E
cggcgacuaccuc

SEQ ID NO: 3938309 - RNA, 15 nt, Human adenovirus E
cggcgaugcagcccc

SEQ ID NO: 3938310 - RNA, 13 nt, Human adenovirus E
cggcgcgagcuga

SEQ ID NO: 3938311 - RNA, 14 nt, Human adenovirus E
cggcgcgagcugag

SEQ ID NO: 3938312 - RNA, 14 nt, Human adenovirus E
cggcgcggccagcc

SEQ ID NO: 3938313 - RNA, 14 nt, Human adenovirus E
ucgacucccaccug

SEQ ID NO: 3938314 - RNA, 17 nt, Human adenovirus E
ucgagagccacaccaca

SEQ ID NO: 3938315 - RNA, 21 nt, Human adenovirus E
ucgagggucugggcagcgacg

SEQ ID NO: 3938316 - RNA, 21 nt, Human adenovirus E
ucgcaagaggcagcccuucca

SEQ ID NO: 3938317 - RNA, 18 nt, Human adenovirus E
ucgcaucaggccccgcag

SEQ ID NO: 3938318 - RNA, 15 nt, Human adenovirus E
ucgccgcgcaggggc

SEQ ID NO: 3938319 - RNA, 15 nt, Human adenovirus E
ucgccuugugcaugg

SEQ ID NO: 3938320 - RNA, 15 nt, Human adenovirus E
ucgcgcacggccagc

SEQ ID NO: 3938321 - RNA, 13 nt, Human adenovirus E
ucgcgccugcugc

SEQ ID NO: 3938322 - RNA, 12 nt, Human adenovirus E
ucgcgcuucugc

SEQ ID NO: 3938323 - RNA, 14 nt, Human adenovirus E
ucgcugccgccgcc

SEQ ID NO: 3938324 - RNA, 17 nt, Human adenovirus E
ucggagagcgaagacga

SEQ ID NO: 3938325 - RNA, 14 nt, Human adenovirus E
ucggcgcgagcggg

SEQ ID NO: 3938326 - RNA, 14 nt, Human adenovirus E
ucguaggugagcuc

SEQ ID NO: 3938327 - RNA, 15 nt, Human adenovirus E
ucguccagggcagcu

SEQ ID NO: 3938328 - RNA, 12 nt, Human adenovirus E
ucgugcgagggg

SEQ ID NO: 3938329 - RNA, 17 nt, Human adenovirus E
ucgugcgccaggccugc

SEQ ID NO: 3938330 - RNA, 19 nt, Human adenovirus E
ucguggcgccugcaucucg

SEQ ID NO: 3938331 - RNA, 16 nt, Human adenovirus E
ucgugguauugcuauu

SEQ ID NO: 3938332 - RNA, 17 nt, Human adenovirus E
ucuaauacuaccaccca

SEQ ID NO: 3938333 - RNA, 18 nt, Human adenovirus E
ucuacaaggcccugggca

SEQ ID NO: 3938334 - RNA, 14 nt, Human adenovirus E
ucuacuucaacccc

SEQ ID NO: 3938335 - RNA, 19 nt, Human adenovirus E
ucuacuucaaccccuucuc

SEQ ID NO: 3938336 - RNA, 23 nt, Human adenovirus E
ucuaucucccgccugaaccugac

SEQ ID NO: 3938337 - RNA, 21 nt, Human adenovirus E
ucucaguuuuuccaacaacac

SEQ ID NO: 3938338 - RNA, 15 nt, Human adenovirus E
ucucaucaaguuuca

SEQ ID NO: 3938339 - RNA, 21 nt, Human adenovirus E
ucuccaccauuaaauauacug

SEQ ID NO: 3938340 - RNA, 12 nt, Human adenovirus E
ucuccgaaauuu

SEQ ID NO: 3938341 - RNA, 15 nt, Human adenovirus E
ucucuaauuccucaa

SEQ ID NO: 3938342 - RNA, 18 nt, Human adenovirus E
ucugacgccucuggguga

SEQ ID NO: 3938343 - RNA, 14 nt, Human adenovirus E
ucugcaaggagaag

SEQ ID NO: 3938344 - RNA, 20 nt, Human adenovirus E
ucugcaaggagaaggaggag

SEQ ID NO: 3938345 - RNA, 18 nt, Human adenovirus E
ucugccacaccuggcaga

SEQ ID NO: 3938346 - RNA, 15 nt, Human adenovirus E
ucuggagcaggcggc

SEQ ID NO: 3938347 - RNA, 23 nt, Human adenovirus E
ucuggaggaagacgaggaggagg

SEQ ID NO: 3938348 - RNA, 14 nt, Human adenovirus E
ucugggugaaggcc

SEQ ID NO: 3938349 - RNA, 13 nt, Human adenovirus E
ucuucccacuccc

SEQ ID NO: 3938350 - RNA, 11 nt, Human adenovirus E
ucuuccuccuc

SEQ ID NO: 3938351 - RNA, 16 nt, Human adenovirus E
ucuuccucuucuuggu

SEQ ID NO: 3938352 - RNA, 19 nt, Human adenovirus E
ucuucgagggucugggcag

SEQ ID NO: 3938353 - RNA, 18 nt, Human adenovirus E
ucuucuacuuccuccuca

SEQ ID NO: 3938354 - RNA, 15 nt, Human adenovirus E
ugaaacccuccgggc

SEQ ID NO: 3938355 - RNA, 21 nt, Human adenovirus E
ugaacaguauccgcagcagcg

SEQ ID NO: 3938356 - RNA, 15 nt, Human adenovirus E
ugaagauggagccau

SEQ ID NO: 3938357 - RNA, 21 nt, Human adenovirus E
ugaaggaggagagcaacuucc

SEQ ID NO: 3938358 - RNA, 17 nt, Human adenovirus E
ugaccggggccgggacc

SEQ ID NO: 3938359 - RNA, 13 nt, Human adenovirus E
ugaccucgucggg

SEQ ID NO: 3938360 - RNA, 12 nt, Human adenovirus E
ugaccugggcua

SEQ ID NO: 3938361 - RNA, 14 nt, Human adenovirus E
ugaccuugcagcag

SEQ ID NO: 3938362 - RNA, 23 nt, Human adenovirus E
ugacggccuuguaggcgcagcag

SEQ ID NO: 3938363 - RNA, 15 nt, Human adenovirus E
ugacggcggccugcc

SEQ ID NO: 3938364 - RNA, 18 nt, Human adenovirus E
ugagacgcugcggaguca

SEQ ID NO: 3938365 - RNA, 22 nt, Human adenovirus E
ugagcaaagagauucccacgcc

SEQ ID NO: 3938366 - RNA, 11 nt, Human adenovirus E
ugagcaccaca

SEQ ID NO: 3938367 - RNA, 15 nt, Human adenovirus E
ugagccgcuggaaga

SEQ ID NO: 3938368 - RNA, 16 nt, Human adenovirus E
ugagcgaccaggagcu

SEQ ID NO: 3938369 - RNA, 18 nt, Human adenovirus E
ugagcggcccugccaacc

SEQ ID NO: 3938370 - RNA, 17 nt, Human adenovirus E
ugagcuccucccucagc

SEQ ID NO: 3938371 - RNA, 15 nt, Human adenovirus E
ugagcugcgagaagg

SEQ ID NO: 3938372 - RNA, 22 nt, Human adenovirus E
ugaggacuccgccgacgacagc

SEQ ID NO: 3938373 - RNA, 23 nt, Human adenovirus E
ugagggcgaaagugucccugacc

SEQ ID NO: 3938374 - RNA, 13 nt, Human adenovirus E
ugagguggacgag

SEQ ID NO: 3938375 - RNA, 17 nt, Human adenovirus E
ugaguccgucggccaug

SEQ ID NO: 3938376 - RNA, 16 nt, Human adenovirus E
ugauaucuuccagaua

SEQ ID NO: 3938377 - RNA, 23 nt, Human adenovirus E
ugaucacuauucuuaucugccuc

SEQ ID NO: 3938378 - RNA, 19 nt, Human adenovirus E
ugaucgaggacgucagcgg

SEQ ID NO: 3938379 - RNA, 15 nt, Human adenovirus E
ugaugacagcaacag

SEQ ID NO: 3938380 - RNA, 13 nt, Human adenovirus E
ugaugcagcaggc

SEQ ID NO: 3938381 - RNA, 15 nt, Human adenovirus E
ugaugcccacggccc

SEQ ID NO: 3938382 - RNA, 13 nt, Human adenovirus E
ugauucaacaguu

SEQ ID NO: 3938383 - RNA, 16 nt, Human adenovirus E
ugcaaacuuccuccac

SEQ ID NO: 3938384 - RNA, 17 nt, Human adenovirus E
ugcaagacuccgaggag

SEQ ID NO: 3938385 - RNA, 16 nt, Human adenovirus E
ugcaagaguuccaggc

SEQ ID NO: 3938386 - RNA, 20 nt, Human adenovirus E
ugcaagcgccgcagcagugg

SEQ ID NO: 3938387 - RNA, 17 nt, Human adenovirus E
ugcacgagaaccgccug

SEQ ID NO: 3938388 - RNA, 22 nt, Human adenovirus E
ugcacgccgcaccgcucccugg

SEQ ID NO: 3938389 - RNA, 19 nt, Human adenovirus E
ugcacgguaagagccuagc

SEQ ID NO: 3938390 - RNA, 15 nt, Human adenovirus E
ugcacgugcugcacg

SEQ ID NO: 3938391 - RNA, 21 nt, Human adenovirus E
ugcagaacaaugacuucaccc

SEQ ID NO: 3938392 - RNA, 19 nt, Human adenovirus E
ugcagaaccccaccagcaa

SEQ ID NO: 3938393 - RNA, 15 nt, Human adenovirus E
ugcagcacuggaaca

SEQ ID NO: 3938394 - RNA, 19 nt, Human adenovirus E
ugcaggaccacaugcuugg

SEQ ID NO: 3938395 - RNA, 14 nt, Human adenovirus E
ugcaggagggggcc

SEQ ID NO: 3938396 - RNA, 17 nt, Human adenovirus E
ugcaggccugcgggggc

SEQ ID NO: 3938397 - RNA, 13 nt, Human adenovirus E
ugcaggucugccu

SEQ ID NO: 3938398 - RNA, 14 nt, Human adenovirus E
ugcaucccagcugg

SEQ ID NO: 3938399 - RNA, 17 nt, Human adenovirus E
ugcaucucuucagcacu

SEQ ID NO: 3938400 - RNA, 17 nt, Human adenovirus E
ugcaugccaacccuucc

SEQ ID NO: 3938401 - RNA, 19 nt, Human adenovirus E
ugcauguucauuuuugcuu

SEQ ID NO: 3938402 - RNA, 23 nt, Human adenovirus E
ugcccauauuagacuaugaggcc

SEQ ID NO: 3938403 - RNA, 15 nt, Human adenovirus E
ugccccagggcaugg

SEQ ID NO: 3938404 - RNA, 14 nt, Human adenovirus E
ugccccccgccgcu

SEQ ID NO: 3938405 - RNA, 13 nt, Human adenovirus E
ugcccccuccaga

SEQ ID NO: 3938406 - RNA, 16 nt, Human adenovirus E
ugccccggggccagga

SEQ ID NO: 3938407 - RNA, 14 nt, Human adenovirus E
ccaugcgcgcggcg

SEQ ID NO: 3938408 - RNA, 21 nt, Human adenovirus E
ccauguucagggcggccagac

SEQ ID NO: 3938409 - RNA, 12 nt, Human adenovirus E
ccauuacuggca

SEQ ID NO: 3938410 - RNA, 17 nt, Human adenovirus E
cccaacccgcgccucaa

SEQ ID NO: 3938411 - RNA, 17 nt, Human adenovirus E
cccacauuacacagaca

SEQ ID NO: 3938412 - RNA, 14 nt, Human adenovirus E
cccacccugcaugc

SEQ ID NO: 3938413 - RNA, 16 nt, Human adenovirus E
cccacggagcccaugg

SEQ ID NO: 3938414 - RNA, 17 nt, Human adenovirus E
cccacggaggccagcac

SEQ ID NO: 3938415 - RNA, 20 nt, Human adenovirus E
cccacggcccucagcaucag

SEQ ID NO: 3938416 - RNA, 22 nt, Human adenovirus E
cccagaaaccggugacacacuc

SEQ ID NO: 3938417 - RNA, 23 nt, Human adenovirus E
cccagagcgagguguaccagucc

SEQ ID NO: 3938418 - RNA, 21 nt, Human adenovirus E
cccagcagcaacuuccagcca

SEQ ID NO: 3938419 - RNA, 17 nt, Human adenovirus E
cccagccccgccaccuc

SEQ ID NO: 3938420 - RNA, 17 nt, Human adenovirus E
cccaggacuacuccacc

SEQ ID NO: 3938421 - RNA, 21 nt, Human adenovirus E
cccaggccgaaguccagcuga

SEQ ID NO: 3938422 - RNA, 16 nt, Human adenovirus E
gaagcccugcaggaag

SEQ ID NO: 3938423 - RNA, 14 nt, Human adenovirus E
gaagcgugggccug

SEQ ID NO: 3938424 - RNA, 17 nt, Human adenovirus E
gaaggauagcaagaaca

SEQ ID NO: 3938425 - RNA, 15 nt, Human adenovirus E
gaaggugcggggguc

SEQ ID NO: 3938426 - RNA, 14 nt, Human adenovirus E
gaagguggacccgg

SEQ ID NO: 3938427 - RNA, 21 nt, Human adenovirus E
gaagucguuggagaugcggcc

SEQ ID NO: 3938428 - RNA, 17 nt, Human adenovirus E
gaaucaggcuggagccg

SEQ ID NO: 3938429 - RNA, 18 nt, Human adenovirus E
gaaucgaguacaauaaca

SEQ ID NO: 3938430 - RNA, 16 nt, Human adenovirus E
gaaugagcagagucag

SEQ ID NO: 3938431 - RNA, 15 nt, Human adenovirus E
gacagcacucaggca

SEQ ID NO: 3938432 - RNA, 19 nt, Human adenovirus E
gacagcacucaggcagagg

SEQ ID NO: 3938433 - RNA, 20 nt, Human adenovirus E
gacagcacucaggcagagga

SEQ ID NO: 3938434 - RNA, 19 nt, Human adenovirus E
gacagcgaaccccgcagaa

SEQ ID NO: 3938435 - RNA, 19 nt, Human adenovirus E
gacagcgugguggcggacg

SEQ ID NO: 3938436 - RNA, 19 nt, Human adenovirus E
gacagcugccguccucccg

SEQ ID NO: 3938437 - RNA, 19 nt, Human adenovirus E
gacaggagcggcgaggagc

SEQ ID NO: 3938438 - RNA, 15 nt, Human adenovirus E
gacaucggcgugaag

SEQ ID NO: 3938439 - RNA, 20 nt, Human adenovirus E
  misc_feature (7)..(7): n is a, c, g, or u
gacaucnagauucccacgga

SEQ ID NO: 3938440 - RNA, 18 nt, Human adenovirus E
gacaugcaucccagcugg

SEQ ID NO: 3938441 - RNA, 16 nt, Human adenovirus E
gaccacagcaacuucc

SEQ ID NO: 3938442 - RNA, 16 nt, Human adenovirus E
gaccagucgccagggc

SEQ ID NO: 3938443 - RNA, 12 nt, Human adenovirus E
gacccacugcug

SEQ ID NO: 3938444 - RNA, 12 nt, Human adenovirus E
gacccaggccau

SEQ ID NO: 3938445 - RNA, 21 nt, Human adenovirus E
gacccggacgugcagcccgag

SEQ ID NO: 3938446 - RNA, 13 nt, Human adenovirus E
gacccugggccug

SEQ ID NO: 3938447 - RNA, 17 nt, Human adenovirus E
gaccgacgugcgcgagg

SEQ ID NO: 3938448 - RNA, 13 nt, Human adenovirus E
gaccgagcuccag

SEQ ID NO: 3938449 - RNA, 17 nt, Human adenovirus E
gaccgagggggagagcu

SEQ ID NO: 3938450 - RNA, 15 nt, Human adenovirus E
gaccgaggugcccca

SEQ ID NO: 3938451 - RNA, 20 nt, Human adenovirus E
gaccgaggugccccagagcg

SEQ ID NO: 3938452 - RNA, 19 nt, Human adenovirus E
gaccgcggcgccgcgccgg

SEQ ID NO: 3938453 - RNA, 16 nt, Human adenovirus E
gaccgggggucccggc

SEQ ID NO: 3938454 - RNA, 20 nt, Human adenovirus E
gaccgggugcuaacgagcgc

SEQ ID NO: 3938455 - RNA, 16 nt, Human adenovirus E
gaccggugaggagcuc

SEQ ID NO: 3938456 - RNA, 13 nt, Human adenovirus E
gaccguggagcug

SEQ ID NO: 3938457 - RNA, 14 nt, Human adenovirus E
gaccugcacuggca

SEQ ID NO: 3938458 - RNA, 14 nt, Human adenovirus E
gaccugcuggaggc

SEQ ID NO: 3938459 - RNA, 15 nt, Human adenovirus E
gacgagcccgcgcgg

SEQ ID NO: 3938460 - RNA, 23 nt, Human adenovirus E
gacgauccccgggcgucgcaggg

SEQ ID NO: 3938461 - RNA, 15 nt, Human adenovirus E
gacgccaucagcgag

SEQ ID NO: 3938462 - RNA, 19 nt, Human adenovirus E
gacgccgccaccggugugc

SEQ ID NO: 3938463 - RNA, 22 nt, Human adenovirus E
gacgccuuugugcccgcccagg

SEQ ID NO: 3938464 - RNA, 13 nt, Human adenovirus E
gacgcucgcgagg

SEQ ID NO: 3938465 - RNA, 19 nt, Human adenovirus E
gacgcugcgcaacggccug

SEQ ID NO: 3938466 - RNA, 15 nt, Human adenovirus E
gacgcugcucaccac

SEQ ID NO: 3938467 - RNA, 19 nt, Human adenovirus E
gacggccuuguaggcgcag

SEQ ID NO: 3938468 - RNA, 16 nt, Human adenovirus E
gcauucacaugcucau

SEQ ID NO: 3938469 - RNA, 21 nt, Human adenovirus E
gcauucgcaagaggcagcccu

SEQ ID NO: 3938470 - RNA, 19 nt, Human adenovirus E
gccaaccucgccaucugcc

SEQ ID NO: 3938471 - RNA, 20 nt, Human adenovirus E
gccaacuaccuggccuacca

SEQ ID NO: 3938472 - RNA, 20 nt, Human adenovirus E
gccaacugaacgggggcgcc

SEQ ID NO: 3938473 - RNA, 18 nt, Human adenovirus E
gccacaauacaugcccau

SEQ ID NO: 3938474 - RNA, 14 nt, Human adenovirus E
gccacaccacagcu

SEQ ID NO: 3938475 - RNA, 16 nt, Human adenovirus E
gccacagaaguuucau

SEQ ID NO: 3938476 - RNA, 18 nt, Human adenovirus E
gccacagcgacccaugcu

SEQ ID NO: 3938477 - RNA, 13 nt, Human adenovirus E
gccacaguacaga

SEQ ID NO: 3938478 - RNA, 21 nt, Human adenovirus E
gccaccuccugaucccgcgau

SEQ ID NO: 3938479 - RNA, 18 nt, Human adenovirus E
gccaccucgccgcgcagg

SEQ ID NO: 3938480 - RNA, 16 nt, Human adenovirus E
gccacgaccgccgcgg

SEQ ID NO: 3938481 - RNA, 18 nt, Human adenovirus E
gccagaucguccagggca

SEQ ID NO: 3938482 - RNA, 16 nt, Human adenovirus E
gccagcacccagacca

SEQ ID NO: 3938483 - RNA, 21 nt, Human adenovirus E
gccagcaugucccgcccgcgg

SEQ ID NO: 3938484 - RNA, 21 nt, Human adenovirus E
gccagcgccggcaggacccgg

SEQ ID NO: 3938485 - RNA, 23 nt, Human adenovirus E
gccagcugaguuuucagcccgau

SEQ ID NO: 3938486 - RNA, 10 nt, Human adenovirus E
gccaggcgca

SEQ ID NO: 3938487 - RNA, 14 nt, Human adenovirus E
gccagggcuugcag

SEQ ID NO: 3938488 - RNA, 14 nt, Human adenovirus E
gccaggugaggucg

SEQ ID NO: 3938489 - RNA, 20 nt, Human adenovirus E
gccaggugaggucgggcugg

SEQ ID NO: 3938490 - RNA, 13 nt, Human adenovirus E
gccauccuggagg

SEQ ID NO: 3938491 - RNA, 13 nt, Human adenovirus E
gccaucggcuccu

SEQ ID NO: 3938492 - RNA, 16 nt, Human adenovirus E
gccaucgugcagaacc

SEQ ID NO: 3938493 - RNA, 19 nt, Human adenovirus E
gccaucuuccagcagaguc

SEQ ID NO: 3938494 - RNA, 20 nt, Human adenovirus E
gccauuggugauggacaugc

SEQ ID NO: 3938495 - RNA, 20 nt, Human adenovirus E
gcccaacccgcgccucaacu

SEQ ID NO: 3938496 - RNA, 22 nt, Human adenovirus E
gcccaacuacgcgcugcauccu

SEQ ID NO: 3938497 - RNA, 15 nt, Human adenovirus E
gcccagcaccagcac

SEQ ID NO: 3938498 - RNA, 18 nt, Human adenovirus E
gcccagccccgccaccuc

SEQ ID NO: 3938499 - RNA, 21 nt, Human adenovirus E
gcccaggccgaaguccagcug

SEQ ID NO: 3938500 - RNA, 18 nt, Human adenovirus E
gcccagguuuuccaugca

SEQ ID NO: 3938501 - RNA, 22 nt, Human adenovirus E
gcccaugaucaagcccagcacc

SEQ ID NO: 3938502 - RNA, 23 nt, Human adenovirus E
gccccgcagcagucgcugccgcc

SEQ ID NO: 3938503 - RNA, 13 nt, Human adenovirus E
gccccuuguggaa

SEQ ID NO: 3938504 - RNA, 14 nt, Human adenovirus E
gcccgcaggcggga

SEQ ID NO: 3938505 - RNA, 20 nt, Human adenovirus E
gcccgccaacgugccccggg

SEQ ID NO: 3938506 - RNA, 18 nt, Human adenovirus E
gcccgcgcuugcugggcg

SEQ ID NO: 3938507 - RNA, 13 nt, Human adenovirus E
gcccggcgagcgc

SEQ ID NO: 3938508 - RNA, 16 nt, Human adenovirus E
gcccggcgcgacuaca

SEQ ID NO: 3938509 - RNA, 15 nt, Human adenovirus E
gcccggcggcaccgg

SEQ ID NO: 3938510 - RNA, 16 nt, Human adenovirus E
gcccggguccaggcca

SEQ ID NO: 3938511 - RNA, 20 nt, Human adenovirus E
gcccgguuccacgcggggcg

SEQ ID NO: 3938512 - RNA, 17 nt, Human adenovirus E
gcccguggucagcgacg

SEQ ID NO: 3938513 - RNA, 20 nt, Human adenovirus E
gcccugcgcgucggccaggu

SEQ ID NO: 3938514 - RNA, 23 nt, Human adenovirus E
gcccugcgcgucggccagguagc

SEQ ID NO: 3938515 - RNA, 22 nt, Human adenovirus E
gcccuucgcccuagccgccucc

SEQ ID NO: 3938516 - RNA, 18 nt, Human adenovirus E
gccgagacgaugggcagg

SEQ ID NO: 3938517 - RNA, 19 nt, Human adenovirus E
gccgagacgaugggcaggc

SEQ ID NO: 3938518 - RNA, 23 nt, Human adenovirus E
gccgagacggucaacuccuccuc

SEQ ID NO: 3938519 - RNA, 22 nt, Human adenovirus E
gccgcagcaguggcagcggccg

SEQ ID NO: 3938520 - RNA, 18 nt, Human adenovirus E
gccgccgcaagaccacca

SEQ ID NO: 3938521 - RNA, 13 nt, Human adenovirus E
ugagcaccacagc

SEQ ID NO: 3938522 - RNA, 16 nt, Human adenovirus E
ugagcaccacagcgcc

SEQ ID NO: 3938523 - RNA, 12 nt, Human adenovirus E
ugagcgccagca

SEQ ID NO: 3938524 - RNA, 16 nt, Human adenovirus E
ugagcuccucccucag

SEQ ID NO: 3938525 - RNA, 12 nt, Human adenovirus E
ugagcucuucgc

SEQ ID NO: 3938526 - RNA, 12 nt, Human adenovirus E
ugagggacgagg

SEQ ID NO: 3938527 - RNA, 14 nt, Human adenovirus E
ugauauucuggagc

SEQ ID NO: 3938528 - RNA, 17 nt, Human adenovirus E
ugaucaccagcuggccu

SEQ ID NO: 3938529 - RNA, 18 nt, Human adenovirus E
ugauccccaucaucgccg

SEQ ID NO: 3938530 - RNA, 17 nt, Human adenovirus E
ugaucccgcgaugcggg

SEQ ID NO: 3938531 - RNA, 13 nt, Human adenovirus E
ugauccuccacca

SEQ ID NO: 3938532 - RNA, 13 nt, Human adenovirus E
ugaugcaggaggg

SEQ ID NO: 3938533 - RNA, 23 nt, Human adenovirus E
ugauggccgugguccuggugacc

SEQ ID NO: 3938534 - RNA, 14 nt, Human adenovirus E
ugauggcgggacgc

SEQ ID NO: 3938535 - RNA, 14 nt, Human adenovirus E
ugcaagacuccgag

SEQ ID NO: 3938536 - RNA, 17 nt, Human adenovirus E
ugcaagaguuccaggcg

SEQ ID NO: 3938537 - RNA, 21 nt, Human adenovirus E
ugcaagcggugcguuccagca

SEQ ID NO: 3938538 - RNA, 22 nt, Human adenovirus E
ugcaagcggugcguuccagcau

SEQ ID NO: 3938539 - RNA, 23 nt, Human adenovirus E
ugcaccgugcggugagcgccagc

SEQ ID NO: 3938540 - RNA, 12 nt, Human adenovirus E
ugcaccuguggg

SEQ ID NO: 3938541 - RNA, 20 nt, Human adenovirus E
ugcacgagaaccgccugggg

SEQ ID NO: 3938542 - RNA, 14 nt, Human adenovirus E
ugcacuggcagccc

SEQ ID NO: 3938543 - RNA, 18 nt, Human adenovirus E
ugcagaccaaccuggacc

SEQ ID NO: 3938544 - RNA, 21 nt, Human adenovirus E
ugcagacggaucccuggaugc

SEQ ID NO: 3938545 - RNA, 16 nt, Human adenovirus E
ugcagaggcgcuggua

SEQ ID NO: 3938546 - RNA, 12 nt, Human adenovirus E
ugcagcagcuga

SEQ ID NO: 3938547 - RNA, 19 nt, Human adenovirus E
ugcagcccccgcuggaggc

SEQ ID NO: 3938548 - RNA, 21 nt, Human adenovirus E
ugcagcgaagagaccccgggu

SEQ ID NO: 3938549 - RNA, 21 nt, Human adenovirus E
ugcagcggcagaucaacagcc

SEQ ID NO: 3938550 - RNA, 24 nt, Human adenovirus E
ugcagcugauggugcccaagcgcc

SEQ ID NO: 3938551 - RNA, 21 nt, Human adenovirus E
ugcaggccccggucggggacc

SEQ ID NO: 3938552 - RNA, 21 nt, Human adenovirus E
ugcaggccugcgggggcaaca

SEQ ID NO: 3938553 - RNA, 20 nt, Human adenovirus E
ugcagggccucgugcucggg

SEQ ID NO: 3938554 - RNA, 12 nt, Human adenovirus E
ugcagggccugu

SEQ ID NO: 3938555 - RNA, 15 nt, Human adenovirus E
ugcagggugaugagg

SEQ ID NO: 3938556 - RNA, 18 nt, Human adenovirus E
ugcaucgggcggccgcca

SEQ ID NO: 3938557 - RNA, 14 nt, Human adenovirus E
ugcaucucuucagc

SEQ ID NO: 3938558 - RNA, 24 nt, Human adenovirus E
ugcauguucauuuuugcuugcugc

SEQ ID NO: 3938559 - RNA, 23 nt, Human adenovirus E
  misc_feature (9)..(9): n is a, c, g, or u
ugccaaccnuacuuuuuccaccc

SEQ ID NO: 3938560 - RNA, 18 nt, Human adenovirus E
ugccacaccuggcagacg

SEQ ID NO: 3938561 - RNA, 17 nt, Human adenovirus E
ugcccacggcccucagc

SEQ ID NO: 3938562 - RNA, 14 nt, Human adenovirus E
ugcccgccaccugc

SEQ ID NO: 3938563 - RNA, 12 nt, Human adenovirus E
ugcccucggccu

SEQ ID NO: 3938564 - RNA, 13 nt, Human adenovirus E
ugccgcccaggac

SEQ ID NO: 3938565 - RNA, 21 nt, Human adenovirus E
ugccgcccaggacuacuccac

SEQ ID NO: 3938566 - RNA, 15 nt, Human adenovirus E
ugccgcugcaaccuc

SEQ ID NO: 3938567 - RNA, 17 nt, Human adenovirus E
ugccgggcaggaggucg

SEQ ID NO: 3938568 - RNA, 15 nt, Human adenovirus E
ugcgcgccgagacgg

SEQ ID NO: 3938569 - RNA, 15 nt, Human adenovirus E
ugcgcgccgggcugg

SEQ ID NO: 3938570 - RNA, 18 nt, Human adenovirus E
ugcggaaccacagggcca

SEQ ID NO: 3938571 - RNA, 19 nt, Human adenovirus E
ugcggaacugguacuuggc

SEQ ID NO: 3938572 - RNA, 22 nt, Human adenovirus E
ugcggaacugguacuuggccag

SEQ ID NO: 3938573 - RNA, 16 nt, Human adenovirus E
ugcggcgcggccugga

SEQ ID NO: 3938574 - RNA, 16 nt, Human adenovirus E
ugcggcgggcgcagca

SEQ ID NO: 3938575 - RNA, 22 nt, Human adenovirus E
ugcgggcggcgcugcagagcca

SEQ ID NO: 3938576 - RNA, 18 nt, Human adenovirus E
ugcggugugccccgguuc

SEQ ID NO: 3938577 - RNA, 13 nt, Human adenovirus E
ugcguacccggag

SEQ ID NO: 3938578 - RNA, 23 nt, Human adenovirus E
ugcuaacgagcgccccuugugga

SEQ ID NO: 3938579 - RNA, 22 nt, Human adenovirus E
ugcuaccugcugcgccuggcca

SEQ ID NO: 3938580 - RNA, 19 nt, Human adenovirus E
ugcuagugaaggucagcgg

SEQ ID NO: 3938581 - RNA, 18 nt, Human adenovirus E
ugcuauuuuggaucugac

SEQ ID NO: 3938582 - RNA, 21 nt, Human adenovirus E
ugcucagucucaaguccagca

SEQ ID NO: 3938583 - RNA, 15 nt, Human adenovirus E
ugcucaugcaucucu

SEQ ID NO: 3938584 - RNA, 19 nt, Human adenovirus E
ugcuccugguucaccugca

SEQ ID NO: 3938585 - RNA, 21 nt, Human adenovirus E
ugcucgagugccacugccgcu

SEQ ID NO: 3938586 - RNA, 17 nt, Human adenovirus E
ugcucgaucuccuccuc

SEQ ID NO: 3938587 - RNA, 17 nt, Human adenovirus E
ugcucgcaacgcugcac

SEQ ID NO: 3938588 - RNA, 20 nt, Human adenovirus E
ugcucuacuacaucuucugc

SEQ ID NO: 3938589 - RNA, 19 nt, Human adenovirus E
ugcugaaaacaccaccugg

SEQ ID NO: 3938590 - RNA, 23 nt, Human adenovirus E
ugcuguagcauagucugccugcu

SEQ ID NO: 3938591 - RNA, 22 nt, Human adenovirus E
ugcuugcauuucaaucccaaca

SEQ ID NO: 3938592 - RNA, 12 nt, Human adenovirus E
ugcuugcugcua

SEQ ID NO: 3938593 - RNA, 15 nt, Human adenovirus E
uggaaacgcagaccg

SEQ ID NO: 3938594 - RNA, 16 nt, Human adenovirus E
uggaagaagcagccgc

SEQ ID NO: 3938595 - RNA, 17 nt, Human adenovirus E
uggaagaagcagccgcc

SEQ ID NO: 3938596 - RNA, 13 nt, Human adenovirus E
uggaagagcggcg

SEQ ID NO: 3938597 - RNA, 22 nt, Human adenovirus E
uggaaggcgacaacgcgcggcu

SEQ ID NO: 3938598 - RNA, 20 nt, Human adenovirus E
uggaauuuuaucaaguuucu

SEQ ID NO: 3938599 - RNA, 18 nt, Human adenovirus E
uggacaaaauaccaccuc

SEQ ID NO: 3938600 - RNA, 15 nt, Human adenovirus E
uggacaacaccugau

SEQ ID NO: 3938601 - RNA, 18 nt, Human adenovirus E
uggacaagaugagccgcu

SEQ ID NO: 3938602 - RNA, 22 nt, Human adenovirus E
uggacagaaaaucgcccaggca

SEQ ID NO: 3938603 - RNA, 18 nt, Human adenovirus E
uggaccacugccgccgcu

SEQ ID NO: 3938604 - RNA, 20 nt, Human adenovirus E
uggacccggacgugcagccc

SEQ ID NO: 3938605 - RNA, 17 nt, Human adenovirus E
uggaccucgauuccucg

SEQ ID NO: 3938606 - RNA, 22 nt, Human adenovirus E
uggaccuggccaaccaggccgu

SEQ ID NO: 3938607 - RNA, 19 nt, Human adenovirus E
uggaugcucuauacgggca

SEQ ID NO: 3938608 - RNA, 21 nt, Human adenovirus E
uggcacgacaggcagcgggga

SEQ ID NO: 3938609 - RNA, 20 nt, Human adenovirus E
uggcacuaaucacacauuga

SEQ ID NO: 3938610 - RNA, 18 nt, Human adenovirus E
uggcagaucacccugcuc

SEQ ID NO: 3938611 - RNA, 19 nt, Human adenovirus E
uggcaucggcacucuccag

SEQ ID NO: 3938612 - RNA, 22 nt, Human adenovirus E
uggccagaucguccagggcagc

SEQ ID NO: 3938613 - RNA, 17 nt, Human adenovirus E
uggcccgugaggcgcgc

SEQ ID NO: 3938614 - RNA, 22 nt, Human adenovirus E
uggcgauguuaccgcccagauc

SEQ ID NO: 3938615 - RNA, 19 nt, Human adenovirus E
uggcgcggcugcucaggcu

SEQ ID NO: 3938616 - RNA, 18 nt, Human adenovirus E
uggcggccaucaacuucu

SEQ ID NO: 3938617 - RNA, 20 nt, Human adenovirus E
uggcggcgauguugagcugc

SEQ ID NO: 3938618 - RNA, 16 nt, Human adenovirus E
uggcgggcggcgccac

SEQ ID NO: 3938619 - RNA, 21 nt, Human adenovirus E
ugggaaugcgcgugcacgaag

SEQ ID NO: 3938620 - RNA, 22 nt, Human adenovirus E
ugggacgauguggacagcagcg

SEQ ID NO: 3938621 - RNA, 14 nt, Human adenovirus E
ugggcagggagagg

SEQ ID NO: 3938622 - RNA, 15 nt, Human adenovirus E
ugggcguguggcagc

SEQ ID NO: 3938623 - RNA, 20 nt, Human adenovirus E
uggggcaguuucuugagcuc

SEQ ID NO: 3938624 - RNA, 16 nt, Human adenovirus E
uggggcgugcaggccc

SEQ ID NO: 3938625 - RNA, 16 nt, Human adenovirus E
ugggucugcgaccuga

SEQ ID NO: 3938626 - RNA, 21 nt, Human adenovirus E
uggucagcgacgagcagcugg

SEQ ID NO: 3938627 - RNA, 22 nt, Human adenovirus E
uggucagggucuuguugcuagu

SEQ ID NO: 3938628 - RNA, 19 nt, Human adenovirus E
ugguccuggugaccgugga

SEQ ID NO: 3938629 - RNA, 22 nt, Human adenovirus E
uggucuccacguuccacacagu

SEQ ID NO: 3938630 - RNA, 18 nt, Human adenovirus E
ugguggcgcgcaccucgc

SEQ ID NO: 3938631 - RNA, 13 nt, Human adenovirus E
uggugggcgccga

SEQ ID NO: 3938632 - RNA, 14 nt, Human adenovirus E
uguaaaacagccac

SEQ ID NO: 3938633 - RNA, 21 nt, Human adenovirus E
uguaccccaccaugcagcuga

SEQ ID NO: 3938634 - RNA, 15 nt, Human adenovirus E
uguaggcgcagcagc

SEQ ID NO: 3938635 - RNA, 17 nt, Human adenovirus E
ugucauacuugagcugu

SEQ ID NO: 3938636 - RNA, 22 nt, Human adenovirus E
uguccaaaaagcgcguccgggu

SEQ ID NO: 3938637 - RNA, 15 nt, Human adenovirus E
ugucgcaucaggccc

SEQ ID NO: 3938638 - RNA, 14 nt, Human adenovirus E
ugucuugcugcccg

SEQ ID NO: 3938639 - RNA, 14 nt, Human adenovirus E
uguggacagcagcg

SEQ ID NO: 3938640 - RNA, 19 nt, Human adenovirus E
ugugggaccugcuggaggc

SEQ ID NO: 3938641 - RNA, 12 nt, Human adenovirus E
uguucaacaguc

SEQ ID NO: 3938642 - RNA, 23 nt, Human adenovirus E
uguuccacgguggcuuccagcaa

SEQ ID NO: 3938643 - RNA, 14 nt, Human adenovirus E
uguuccugaugcag

SEQ ID NO: 3938644 - RNA, 14 nt, Human adenovirus E
uguuggccagcugc

SEQ ID NO: 3938645 - RNA, 15 nt, Human adenovirus E
uuaacgcgcacaaaa

SEQ ID NO: 3938646 - RNA, 19 nt, Human adenovirus E
uuacaaaguaacuguuguu

SEQ ID NO: 3938647 - RNA, 15 nt, Human adenovirus E
uuacuccccuccugc

SEQ ID NO: 3938648 - RNA, 17 nt, Human adenovirus E
uuagcgcucuaguuuuu

SEQ ID NO: 3938649 - RNA, 23 nt, Human adenovirus E
uucaccaccugcaucugcugcug

SEQ ID NO: 3938650 - RNA, 19 nt, Human adenovirus E
uucacccggcgcuaccugc

SEQ ID NO: 3938651 - RNA, 15 nt, Human adenovirus E
uucaccugcagcaga

SEQ ID NO: 3938652 - RNA, 14 nt, Human adenovirus E
uucagagacaggag

SEQ ID NO: 3938653 - RNA, 21 nt, Human adenovirus E
uucagcgcacucucgaggacg

SEQ ID NO: 3938654 - RNA, 21 nt, Human adenovirus E
uucauauccucuccgaaauuu

SEQ ID NO: 3938655 - RNA, 20 nt, Human adenovirus E
uuccacgguggcuuccagca

SEQ ID NO: 3938656 - RNA, 19 nt, Human adenovirus E
uuccagggcgcgcgggagg

SEQ ID NO: 3938657 - RNA, 23 nt, Human adenovirus E
uucgugcgccaggccugcaagau

SEQ ID NO: 3938658 - RNA, 20 nt, Human adenovirus E
uucuuaucugccuccuccaa

SEQ ID NO: 3938659 - RNA, 13 nt, Human adenovirus E
uugaacaugcagc

SEQ ID NO: 3938660 - RNA, 11 nt, Human adenovirus E
uugcaagcgcc

SEQ ID NO: 3938661 - RNA, 23 nt, Human adenovirus E
uugccugaacgccugcugggccu

SEQ ID NO: 3938662 - RNA, 14 nt, Human adenovirus E
uugcgcacaugugc

SEQ ID NO: 3938663 - RNA, 16 nt, Human adenovirus E
uuggcgauggagcgca

SEQ ID NO: 3938664 - RNA, 15 nt, Human adenovirus E
uugucggaucaaauu

SEQ ID NO: 3938665 - RNA, 23 nt, Human adenovirus E
uuuccagggcgcgcgggaggucc

SEQ ID NO: 3938666 - RNA, 18 nt, Human adenovirus E
uuugauacugauggaaac

SEQ ID NO: 3938667 - RNA, 23 nt, Human adenovirus E
uuuuacaguauggugauugaacu

SEQ ID NO: 3938668 - RNA, 17 nt, Human adenovirus E
uuuucauuuuuccagcc

SEQ ID NO: 3938669 - RNA, 12 nt, Human adenovirus E
uuuuuccuccac

SEQ ID NO: 3938670 - RNA, 20 nt, Human adenovirus E
aaccgccccgccgcccagcc

SEQ ID NO: 3938671 - RNA, 13 nt, Human adenovirus E
aacgccauccuga

SEQ ID NO: 3938672 - RNA, 12 nt, Human adenovirus E
aacgcccaaaac

SEQ ID NO: 3938673 - RNA, 14 nt, Human adenovirus E
aacgcgcacaaaaa

SEQ ID NO: 3938674 - RNA, 18 nt, Human adenovirus E
aacgcucgguguugaaau

SEQ ID NO: 3938675 - RNA, 19 nt, Human adenovirus E
aacgugcagaccaaccugg

SEQ ID NO: 3938676 - RNA, 20 nt, Human adenovirus E
aacgugccccggggccagga

SEQ ID NO: 3938677 - RNA, 19 nt, Human adenovirus E
aacucagguguccagcugg

SEQ ID NO: 3938678 - RNA, 14 nt, Human adenovirus E
aacucguaccuggg

SEQ ID NO: 3938679 - RNA, 17 nt, Human adenovirus E
aacuggugcuugaaguc

SEQ ID NO: 3938680 - RNA, 15 nt, Human adenovirus E
aacugucaaauacuc

SEQ ID NO: 3938681 - RNA, 16 nt, Human adenovirus E
aacuugcagggccugu

SEQ ID NO: 3938682 - RNA, 11 nt, Human adenovirus E
aagaagcagcc

SEQ ID NO: 3938683 - RNA, 13 nt, Human adenovirus E
aagacgaggagga

SEQ ID NO: 3938684 - RNA, 14 nt, Human adenovirus E
aagacgugcuggag

SEQ ID NO: 3938685 - RNA, 21 nt, Human adenovirus E
aagagaaggccgaucccugcu

SEQ ID NO: 3938686 - RNA, 21 nt, Human adenovirus E
aagagcagaacuuccagcaga

SEQ ID NO: 3938687 - RNA, 18 nt, Human adenovirus E
aagagccuuucggugcga

SEQ ID NO: 3938688 - RNA, 18 nt, Human adenovirus E
aagaugccgggcaggagg

SEQ ID NO: 3938689 - RNA, 13 nt, Human adenovirus E
aagauggagccau

SEQ ID NO: 3938690 - RNA, 21 nt, Human adenovirus E
aagauggagccauagcaacca

SEQ ID NO: 3938691 - RNA, 14 nt, Human adenovirus E
aagauguugaagug

SEQ ID NO: 3938692 - RNA, 23 nt, Human adenovirus E
aagcccacggccgccagcuccuc

SEQ ID NO: 3938693 - RNA, 18 nt, Human adenovirus E
aagcgcccgaggaagcaa

SEQ ID NO: 3938694 - RNA, 21 nt, Human adenovirus E
aagguccagaaaaagccacag

SEQ ID NO: 3938695 - RNA, 22 nt, Human adenovirus E
aaguagcugauggaaguggcca

SEQ ID NO: 3938696 - RNA, 14 nt, Human adenovirus E
aaguccagcaaagc

SEQ ID NO: 3938697 - RNA, 15 nt, Human adenovirus E
aaguccagcaaagcg

SEQ ID NO: 3938698 - RNA, 21 nt, Human adenovirus E
aaguggaaaccuaaaccccau

SEQ ID NO: 3938699 - RNA, 20 nt, Human adenovirus E
aauaauacuuucauuuuugc

SEQ ID NO: 3938700 - RNA, 14 nt, Human adenovirus E
aaucaggcagcacc

SEQ ID NO: 3938701 - RNA, 15 nt, Human adenovirus E
aaucaucauguuaca

SEQ ID NO: 3938702 - RNA, 12 nt, Human adenovirus E
aauccuccaggu

SEQ ID NO: 3938703 - RNA, 19 nt, Human adenovirus E
aaugagcagagucaggcug

SEQ ID NO: 3938704 - RNA, 16 nt, Human adenovirus E
aaugauucgacaagau

SEQ ID NO: 3938705 - RNA, 17 nt, Human adenovirus E
aaugcaaauuccaagaa

SEQ ID NO: 3938706 - RNA, 16 nt, Human adenovirus E
aaugcuaccgccaaaa

SEQ ID NO: 3938707 - RNA, 15 nt, Human adenovirus E
aaugucauuuucaua

SEQ ID NO: 3938708 - RNA, 13 nt, Human adenovirus E
aauucaaggaaga

SEQ ID NO: 3938709 - RNA, 21 nt, Human adenovirus E
aauugucgcuaugauugaaaa

SEQ ID NO: 3938710 - RNA, 14 nt, Human adenovirus E
aauuuuuagccaua

SEQ ID NO: 3938711 - RNA, 15 nt, Human adenovirus E
acaaagccucagcgu

SEQ ID NO: 3938712 - RNA, 17 nt, Human adenovirus E
acaagaugagccgcugg

SEQ ID NO: 3938713 - RNA, 14 nt, Human adenovirus E
acacaacaggcgca

SEQ ID NO: 3938714 - RNA, 18 nt, Human adenovirus E
acaccuggaccacugccg

SEQ ID NO: 3938715 - RNA, 13 nt, Human adenovirus E
acaccuuccaccu

SEQ ID NO: 3938716 - RNA, 20 nt, Human adenovirus E
acacgggguugcagcacugg

SEQ ID NO: 3938717 - RNA, 12 nt, Human adenovirus E
acacugguggcc

SEQ ID NO: 3938718 - RNA, 16 nt, Human adenovirus E
acacugguggccaccu

SEQ ID NO: 3938719 - RNA, 18 nt, Human adenovirus E
acacuguaucccacccug

SEQ ID NO: 3938720 - RNA, 22 nt, Human adenovirus E
acagaguuaugaucaccagcug

SEQ ID NO: 3938721 - RNA, 18 nt, Human adenovirus E
acagcaccaacgugcaga

SEQ ID NO: 3938722 - RNA, 20 nt, Human adenovirus E
acagcaccaacgugcagacc

SEQ ID NO: 3938723 - RNA, 20 nt, Human adenovirus E
acagcacucaggcagaggag

SEQ ID NO: 3938724 - RNA, 17 nt, Human adenovirus E
acagcagcagagguugc

SEQ ID NO: 3938725 - RNA, 21 nt, Human adenovirus E
acagcagucaggcagaggagg

SEQ ID NO: 3938726 - RNA, 16 nt, Human adenovirus E
acagccacucucucag

SEQ ID NO: 3938727 - RNA, 19 nt, Human adenovirus E
acagcgaaccccgcagaac

SEQ ID NO: 3938728 - RNA, 22 nt, Human adenovirus E
acagcugccguccucccggagg

SEQ ID NO: 3938729 - RNA, 14 nt, Human adenovirus E
acaggcagcaaagc

SEQ ID NO: 3938730 - RNA, 15 nt, Human adenovirus E
acagggcaauccucg

SEQ ID NO: 3938731 - RNA, 12 nt, Human adenovirus E
acaguacagaua

SEQ ID NO: 3938732 - RNA, 22 nt, Human adenovirus E
acaucacccucugguugaacau

SEQ ID NO: 3938733 - RNA, 12 nt, Human adenovirus E
acaugcagcccc

SEQ ID NO: 3938734 - RNA, 23 nt, Human adenovirus E
acauggaauacaccacccucucc

SEQ ID NO: 3938735 - RNA, 23 nt, Human adenovirus E
acauucuacacuaaaaaaauacu

SEQ ID NO: 3938736 - RNA, 20 nt, Human adenovirus E
accaacgccauccugaaucc

SEQ ID NO: 3938737 - RNA, 19 nt, Human adenovirus E
accacagcaaccucaggca

SEQ ID NO: 3938738 - RNA, 18 nt, Human adenovirus E
accacagcaacuuccuga

SEQ ID NO: 3938739 - RNA, 17 nt, Human adenovirus E
accacagggccagcacc

SEQ ID NO: 3938740 - RNA, 16 nt, Human adenovirus E
accaccacuacagccu

SEQ ID NO: 3938741 - RNA, 18 nt, Human adenovirus E
accacccucuccccccgc

SEQ ID NO: 3938742 - RNA, 21 nt, Human adenovirus E
accaccucccgguaccacauc

SEQ ID NO: 3938743 - RNA, 20 nt, Human adenovirus E
accaccugcaucugcugcug

SEQ ID NO: 3938744 - RNA, 18 nt, Human adenovirus E
accacgugcgcacccuga

SEQ ID NO: 3938745 - RNA, 13 nt, Human adenovirus E
accacuacagccu

SEQ ID NO: 3938746 - RNA, 22 nt, Human adenovirus E
accagccccagaugggccuggc

SEQ ID NO: 3938747 - RNA, 22 nt, Human adenovirus E
accaggaaauuccccagcccac

SEQ ID NO: 3938748 - RNA, 15 nt, Human adenovirus E
accaguccgggccgg

SEQ ID NO: 3938749 - RNA, 16 nt, Human adenovirus E
accaugcagcugaugg

SEQ ID NO: 3938750 - RNA, 13 nt, Human adenovirus E
accaugcuagccu

SEQ ID NO: 3938751 - RNA, 14 nt, Human adenovirus E
accaugcuagccug

SEQ ID NO: 3938752 - RNA, 16 nt, Human adenovirus E
accauggaggugcaga

SEQ ID NO: 3938753 - RNA, 16 nt, Human adenovirus E
acccaacauacuuuua

SEQ ID NO: 3938754 - RNA, 21 nt, Human adenovirus E
acccagaccgguaagaaggag

SEQ ID NO: 3938755 - RNA, 22 nt, Human adenovirus E
acccagcccgccaacgugcccc

SEQ ID NO: 3938756 - RNA, 17 nt, Human adenovirus E
accccaccacccagacc

SEQ ID NO: 3938757 - RNA, 16 nt, Human adenovirus E
accccaccaugcagcu

SEQ ID NO: 3938758 - RNA, 17 nt, Human adenovirus E
acccccgccgcggcgcc

SEQ ID NO: 3938759 - RNA, 21 nt, Human adenovirus E
acccgcagaagcaagcuccag

SEQ ID NO: 3938760 - RNA, 24 nt, Human adenovirus E
acccgcguucugcgcgcgggaguu

SEQ ID NO: 3938761 - RNA, 15 nt, Human adenovirus E
acccggacgugcagc

SEQ ID NO: 3938762 - RNA, 15 nt, Human adenovirus E
acccggcucugaacc

SEQ ID NO: 3938763 - RNA, 20 nt, Human adenovirus E
acccggugauaucuuccaga

SEQ ID NO: 3938764 - RNA, 22 nt, Human adenovirus E
acccgguggaucuuuuccagga

SEQ ID NO: 3938765 - RNA, 22 nt, Human adenovirus E
acccucuccccccgcacagccu

SEQ ID NO: 3938766 - RNA, 18 nt, Human adenovirus E
acccugggccugaugcac

SEQ ID NO: 3938767 - RNA, 20 nt, Human adenovirus E
acccugugucgucaccgccc

SEQ ID NO: 3938768 - RNA, 12 nt, Human adenovirus E
accgagcuccag

SEQ ID NO: 3938769 - RNA, 16 nt, Human adenovirus E
accgcacccgcgccga

SEQ ID NO: 3938770 - RNA, 18 nt, Human adenovirus E
accgccgacgagaagcag

SEQ ID NO: 3938771 - RNA, 18 nt, Human adenovirus E
accgccuaccgcagcugg

SEQ ID NO: 3938772 - RNA, 18 nt, Human adenovirus E
accgcgccauugguggcg

SEQ ID NO: 3938773 - RNA, 21 nt, Human adenovirus E
accgcucccuggccugcaacc

SEQ ID NO: 3938774 - RNA, 21 nt, Human adenovirus E
accggcucucggccauccugg

SEQ ID NO: 3938775 - RNA, 19 nt, Human adenovirus E
accgggugauccuccacca

SEQ ID NO: 3938776 - RNA, 15 nt, Human adenovirus E
accggugaggagcuc

SEQ ID NO: 3938777 - RNA, 23 nt, Human adenovirus E
accgugcggugagcgccagcagg

SEQ ID NO: 3938778 - RNA, 11 nt, Human adenovirus E
accguggagcu

SEQ ID NO: 3938779 - RNA, 14 nt, Human adenovirus E
accguggugcagaa

SEQ ID NO: 3938780 - RNA, 21 nt, Human adenovirus E
accucaggcacacgcacuacc

SEQ ID NO: 3938781 - RNA, 18 nt, Human adenovirus E
accucccgguaccacauc

SEQ ID NO: 3938782 - RNA, 17 nt, Human adenovirus E
accucgauuccucggga

SEQ ID NO: 3938783 - RNA, 17 nt, Human adenovirus E
accugaaagagcucugc

SEQ ID NO: 3938784 - RNA, 15 nt, Human adenovirus E
accugacacaccacc

SEQ ID NO: 3938785 - RNA, 20 nt, Human adenovirus E
accugcagcagauugacaag

SEQ ID NO: 3938786 - RNA, 14 nt, Human adenovirus E
ccacuacagccuag

SEQ ID NO: 3938787 - RNA, 19 nt, Human adenovirus E
ccacugccgcugcaaccuc

SEQ ID NO: 3938788 - RNA, 23 nt, Human adenovirus E
ccacuuagcauuaccacacagac

SEQ ID NO: 3938789 - RNA, 17 nt, Human adenovirus E
ccacuugaacucgggga

SEQ ID NO: 3938790 - RNA, 16 nt, Human adenovirus E
ccagaaaaagccacag

SEQ ID NO: 3938791 - RNA, 17 nt, Human adenovirus E
ccagaacacgcugccca

SEQ ID NO: 3938792 - RNA, 22 nt, Human adenovirus E
ccagacaugcaagagauggagg

SEQ ID NO: 3938793 - RNA, 21 nt, Human adenovirus E
ccagaguuuggaagagcggcg

SEQ ID NO: 3938794 - RNA, 12 nt, Human adenovirus E
ccagauccucag

SEQ ID NO: 3938795 - RNA, 15 nt, Human adenovirus E
ccagaugggccuggc

SEQ ID NO: 3938796 - RNA, 23 nt, Human adenovirus E
ccagcaccaggcaggccacgggg

SEQ ID NO: 3938797 - RNA, 23 nt, Human adenovirus E
ccagcagcuagaaaauccacagc

SEQ ID NO: 3938798 - RNA, 20 nt, Human adenovirus E
ccagcaugucccgcccgcgg

SEQ ID NO: 3938799 - RNA, 20 nt, Human adenovirus E
ccagccccgauuaugcaggg

SEQ ID NO: 3938800 - RNA, 19 nt, Human adenovirus E
ccagccccgccaccuccga

SEQ ID NO: 3938801 - RNA, 21 nt, Human adenovirus E
ccagcccgccaacgugccccg

SEQ ID NO: 3938802 - RNA, 13 nt, Human adenovirus E
ccagcgcgugacc

SEQ ID NO: 3938803 - RNA, 20 nt, Human adenovirus E
ccagcugacuaacucaggug

SEQ ID NO: 3938804 - RNA, 12 nt, Human adenovirus E
ccagcugcacca

SEQ ID NO: 3938805 - RNA, 19 nt, Human adenovirus E
ccagcugcaccacgcugcg

SEQ ID NO: 3938806 - RNA, 22 nt, Human adenovirus E
ccagcugcaccacgcugcgccc

SEQ ID NO: 3938807 - RNA, 20 nt, Human adenovirus E
ccaggaaauuccccagccca

SEQ ID NO: 3938808 - RNA, 21 nt, Human adenovirus E
ccaggccgaaguccagcugac

SEQ ID NO: 3938809 - RNA, 14 nt, Human adenovirus E
ccaggcggucccag

SEQ ID NO: 3938810 - RNA, 20 nt, Human adenovirus E
ccagggacucccucagcaug

SEQ ID NO: 3938811 - RNA, 15 nt, Human adenovirus E
ccagucucauugccg

SEQ ID NO: 3938812 - RNA, 22 nt, Human adenovirus E
ccagugagcauugccaaaugca

SEQ ID NO: 3938813 - RNA, 20 nt, Human adenovirus E
ccaguucauugacuggaucu

SEQ ID NO: 3938814 - RNA, 15 nt, Human adenovirus E
ccauagccagccgac

SEQ ID NO: 3938815 - RNA, 14 nt, Human adenovirus E
ccauaucccagggc

SEQ ID NO: 3938816 - RNA, 12 nt, Human adenovirus E
ccaucacagaga

SEQ ID NO: 3938817 - RNA, 18 nt, Human adenovirus E
ccauccgcggcgacgagg

SEQ ID NO: 3938818 - RNA, 20 nt, Human adenovirus E
ccaucgagauugaccugggc

SEQ ID NO: 3938819 - RNA, 17 nt, Human adenovirus E
ccaucugcccccaccgc

SEQ ID NO: 3938820 - RNA, 15 nt, Human adenovirus E
ccauggcuugcaggg

SEQ ID NO: 3938821 - RNA, 20 nt, Human adenovirus E
cccaagcagaaccuguucag

SEQ ID NO: 3938822 - RNA, 20 nt, Human adenovirus E
  misc_feature (8)..(8): n is a, c, g, or u
cccaagcnugcaccaacccu

SEQ ID NO: 3938823 - RNA, 17 nt, Human adenovirus E
cccaauuuaaaagcuua

SEQ ID NO: 3938824 - RNA, 23 nt, Human adenovirus E
cccaccacaauuacucacaccac

SEQ ID NO: 3938825 - RNA, 16 nt, Human adenovirus E
cccacggaggccagca

SEQ ID NO: 3938826 - RNA, 18 nt, Human adenovirus E
cccagaguuuggaagagc

SEQ ID NO: 3938827 - RNA, 19 nt, Human adenovirus E
cccagcagcaacuuccagc

SEQ ID NO: 3938828 - RNA, 12 nt, Human adenovirus E
cccagcccacga

SEQ ID NO: 3938829 - RNA, 11 nt, Human adenovirus E
cccagcggcga

SEQ ID NO: 3938830 - RNA, 17 nt, Human adenovirus E
cccagcggcgaggagga

SEQ ID NO: 3938831 - RNA, 21 nt, Human adenovirus E
cccagcucugguacugcaggc

SEQ ID NO: 3938832 - RNA, 23 nt, Human adenovirus E
cccaggacauggaauacaccacc

SEQ ID NO: 3938833 - RNA, 23 nt, Human adenovirus E
cccaggccgaaguccagcugacu

SEQ ID NO: 3938834 - RNA, 19 nt, Human adenovirus E
cccaguacgcgcucagcac

SEQ ID NO: 3938835 - RNA, 14 nt, Human adenovirus E
cccauacuccaccu

SEQ ID NO: 3938836 - RNA, 15 nt, Human adenovirus E
cccauacuccaccuc

SEQ ID NO: 3938837 - RNA, 13 nt, Human adenovirus E
cccauagccagcc

SEQ ID NO: 3938838 - RNA, 19 nt, Human adenovirus E
cccaucauguacgccagca

SEQ ID NO: 3938839 - RNA, 22 nt, Human adenovirus E
cccauggaaacgcagaccgagc

SEQ ID NO: 3938840 - RNA, 14 nt, Human adenovirus E
ccccaagcgccagc

SEQ ID NO: 3938841 - RNA, 14 nt, Human adenovirus E
ccccaccaugcagc

SEQ ID NO: 3938842 - RNA, 13 nt, Human adenovirus E
ccccacccaguga

SEQ ID NO: 3938843 - RNA, 16 nt, Human adenovirus E
ccccacggaggccagc

SEQ ID NO: 3938844 - RNA, 22 nt, Human adenovirus E
  misc_feature (7)..(7): n is a, c, g, or u
ccccaunuagcagucccacugc

SEQ ID NO: 3938845 - RNA, 19 nt, Human adenovirus E
cccccggcggcgcgugcag

SEQ ID NO: 3938846 - RNA, 19 nt, Human adenovirus E
cccccgggaguuccuccac

SEQ ID NO: 3938847 - RNA, 17 nt, Human adenovirus E
ccccgaucccuccaggu

SEQ ID NO: 3938848 - RNA, 16 nt, Human adenovirus E
ccccgccaugcgcgcg

SEQ ID NO: 3938849 - RNA, 13 nt, Human adenovirus E
ccccgcgcgcgcg

SEQ ID NO: 3938850 - RNA, 23 nt, Human adenovirus E
ccccggagaguuucaugaccagc

SEQ ID NO: 3938851 - RNA, 22 nt, Human adenovirus E
ccccuggggugugaccaccguc

SEQ ID NO: 3938852 - RNA, 12 nt, Human adenovirus E
cccgcagcaguc

SEQ ID NO: 3938853 - RNA, 18 nt, Human adenovirus E
cccgccaaauaaucacac

SEQ ID NO: 3938854 - RNA, 22 nt, Human adenovirus E
cccgccaaauaaucacacacgc

SEQ ID NO: 3938855 - RNA, 13 nt, Human adenovirus E
cccgccaccugcu

SEQ ID NO: 3938856 - RNA, 15 nt, Human adenovirus E
cccgcgaugcgggcg

SEQ ID NO: 3938857 - RNA, 13 nt, Human adenovirus E
cccgcgcgugcag

SEQ ID NO: 3938858 - RNA, 20 nt, Human adenovirus E
cccggaugcaggggcggcag

SEQ ID NO: 3938859 - RNA, 16 nt, Human adenovirus E
cccggcgcuaccugcu

SEQ ID NO: 3938860 - RNA, 17 nt, Human adenovirus E
cccggcggcgcgugcag

SEQ ID NO: 3938861 - RNA, 20 nt, Human adenovirus E
cccggcggcgcgugcagugg

SEQ ID NO: 3938862 - RNA, 24 nt, Human adenovirus E
cccggcgucgugcacgcagcagcg

SEQ ID NO: 3938863 - RNA, 14 nt, Human adenovirus E
cccgggcaaccugg

SEQ ID NO: 3938864 - RNA, 20 nt, Human adenovirus E
cccgggcaaccuggaagcca

SEQ ID NO: 3938865 - RNA, 15 nt, Human adenovirus E
cccggggcuguggac

SEQ ID NO: 3938866 - RNA, 16 nt, Human adenovirus E
cccgguaccacaucac

SEQ ID NO: 3938867 - RNA, 20 nt, Human adenovirus E
cccgguggugggcgccgagc

SEQ ID NO: 3938868 - RNA, 14 nt, Human adenovirus E
cccguaucgggcgc

SEQ ID NO: 3938869 - RNA, 20 nt, Human adenovirus E
cccguccucuucccacuccc

SEQ ID NO: 3938870 - RNA, 12 nt, Human adenovirus E
cccgugcagcca

SEQ ID NO: 3938871 - RNA, 13 nt, Human adenovirus E
cccgugcaggcac

SEQ ID NO: 3938872 - RNA, 17 nt, Human adenovirus E
cccguucucgcucgcca

SEQ ID NO: 3938873 - RNA, 19 nt, Human adenovirus E
cccugagcgacgaucuggg

SEQ ID NO: 3938874 - RNA, 15 nt, Human adenovirus E
cccugccgcccuggu

SEQ ID NO: 3938875 - RNA, 14 nt, Human adenovirus E
cccugcgccugaug

SEQ ID NO: 3938876 - RNA, 21 nt, Human adenovirus E
cccugcgcggggaggcccggc

SEQ ID NO: 3938877 - RNA, 16 nt, Human adenovirus E
cccuucucccaggccg

SEQ ID NO: 3938878 - RNA, 22 nt, Human adenovirus E
cccuucuccggcucccccggcc

SEQ ID NO: 3938879 - RNA, 18 nt, Human adenovirus E
ccgaaagagggugcugag

SEQ ID NO: 3938880 - RNA, 14 nt, Human adenovirus E
ccgaauaccacagc

SEQ ID NO: 3938881 - RNA, 18 nt, Human adenovirus E
ccgaccccgucaccacca

SEQ ID NO: 3938882 - RNA, 17 nt, Human adenovirus E
ccgagacgaugggcagg

SEQ ID NO: 3938883 - RNA, 12 nt, Human adenovirus E
ccgagcagcagc

SEQ ID NO: 3938884 - RNA, 16 nt, Human adenovirus E
ccgaggacgagggcau

SEQ ID NO: 3938885 - RNA, 20 nt, Human adenovirus E
ccgaggagaugcgcgcggcc

SEQ ID NO: 3938886 - RNA, 21 nt, Human adenovirus E
ccgaggagggcaagcccgugg

SEQ ID NO: 3938887 - RNA, 17 nt, Human adenovirus E
ccgagucgcggaugaag

SEQ ID NO: 3938888 - RNA, 17 nt, Human adenovirus E
ccgcaacaacagccccc

SEQ ID NO: 3938889 - RNA, 14 nt, Human adenovirus E
ccgcagcagcgagc

SEQ ID NO: 3938890 - RNA, 19 nt, Human adenovirus E
ccgcagcagcgagcugggc

SEQ ID NO: 3938891 - RNA, 21 nt, Human adenovirus E
ccgcagcagcgagcugggcag

SEQ ID NO: 3938892 - RNA, 21 nt, Human adenovirus E
ccgcagcaguggcagcggccg

SEQ ID NO: 3938893 - RNA, 12 nt, Human adenovirus E
cgagcgccucag

SEQ ID NO: 3938894 - RNA, 14 nt, Human adenovirus E
cgagcgggagaaga

SEQ ID NO: 3938895 - RNA, 15 nt, Human adenovirus E
cgagcuccagcucca

SEQ ID NO: 3938896 - RNA, 16 nt, Human adenovirus E
cgagcuccagcuccag

SEQ ID NO: 3938897 - RNA, 18 nt, Human adenovirus E
cgagcugagcgaccagga

SEQ ID NO: 3938898 - RNA, 20 nt, Human adenovirus E
cgagcuugguggcgaaggag

SEQ ID NO: 3938899 - RNA, 18 nt, Human adenovirus E
cgaggaagaaaaccgcgc

SEQ ID NO: 3938900 - RNA, 19 nt, Human adenovirus E
cgaggacgagggcaugcaa

SEQ ID NO: 3938901 - RNA, 14 nt, Human adenovirus E
cgaggaggaggcag

SEQ ID NO: 3938902 - RNA, 19 nt, Human adenovirus E
cgaggaggaggcagaggag

SEQ ID NO: 3938903 - RNA, 23 nt, Human adenovirus E
cgaggaucuguaccccaccaugc

SEQ ID NO: 3938904 - RNA, 16 nt, Human adenovirus E
cgaggccacgcggcgg

SEQ ID NO: 3938905 - RNA, 12 nt, Human adenovirus E
cgagggccgcug

SEQ ID NO: 3938906 - RNA, 21 nt, Human adenovirus E
cgagggccgcuggcuccugga

SEQ ID NO: 3938907 - RNA, 12 nt, Human adenovirus E
cgagggccugcu

SEQ ID NO: 3938908 - RNA, 22 nt, Human adenovirus E
cgagggccugcucgagugccac

SEQ ID NO: 3938909 - RNA, 18 nt, Human adenovirus E
cgagggucugggcagcga

SEQ ID NO: 3938910 - RNA, 15 nt, Human adenovirus E
cgagggugcugccgc

SEQ ID NO: 3938911 - RNA, 19 nt, Human adenovirus E
cgagggugcugccgcggcg

SEQ ID NO: 3938912 - RNA, 14 nt, Human adenovirus E
cgaguacaauaaca

SEQ ID NO: 3938913 - RNA, 19 nt, Human adenovirus E
cgagugccacugccgcugc

SEQ ID NO: 3938914 - RNA, 23 nt, Human adenovirus E
cgaguugaaccucuucucgccgc

SEQ ID NO: 3938915 - RNA, 18 nt, Human adenovirus E
agaucguccagggcagcu

SEQ ID NO: 3938916 - RNA, 17 nt, Human adenovirus E
agaucucuugcacgucc

SEQ ID NO: 3938917 - RNA, 17 nt, Human adenovirus E
agaugagccgcuggaag

SEQ ID NO: 3938918 - RNA, 19 nt, Human adenovirus E
agaugagccgcuggaagac

SEQ ID NO: 3938919 - RNA, 15 nt, Human adenovirus E
agaugcaauugaaag

SEQ ID NO: 3938920 - RNA, 22 nt, Human adenovirus E
agaugccuuucaagagccccuc

SEQ ID NO: 3938921 - RNA, 22 nt, Human adenovirus E
agauggggguuggcgcggagga

SEQ ID NO: 3938922 - RNA, 20 nt, Human adenovirus E
agcaacuacccggugguggg

SEQ ID NO: 3938923 - RNA, 21 nt, Human adenovirus E
agcaaggaggaugcagcagcu

SEQ ID NO: 3938924 - RNA, 15 nt, Human adenovirus E
agcacacagcucaac

SEQ ID NO: 3938925 - RNA, 14 nt, Human adenovirus E
agcaccacagcgcc

SEQ ID NO: 3938926 - RNA, 16 nt, Human adenovirus E
agcacccagcccgcca

SEQ ID NO: 3938927 - RNA, 23 nt, Human adenovirus E
agcacccccgccaugcgcgcggc

SEQ ID NO: 3938928 - RNA, 13 nt, Human adenovirus E
agcaccgccccgc

SEQ ID NO: 3938929 - RNA, 17 nt, Human adenovirus E
cgaguuggaggagaugg

SEQ ID NO: 3938930 - RNA, 15 nt, Human adenovirus E
cgauacgggugaugg

SEQ ID NO: 3938931 - RNA, 14 nt, Human adenovirus E
cgaucccugagcuc

SEQ ID NO: 3938932 - RNA, 20 nt, Human adenovirus E
cgauguaggugggguagcag

SEQ ID NO: 3938933 - RNA, 15 nt, Human adenovirus E
cgauguggacagcag

SEQ ID NO: 3938934 - RNA, 20 nt, Human adenovirus E
cgcaacucguaccugggcua

SEQ ID NO: 3938935 - RNA, 13 nt, Human adenovirus E
cgcaaucaccuca

SEQ ID NO: 3938936 - RNA, 15 nt, Human adenovirus E
cgcacguggacgagc

SEQ ID NO: 3938937 - RNA, 21 nt, Human adenovirus E
cgcagagcgcccuccaccggc

SEQ ID NO: 3938938 - RNA, 16 nt, Human adenovirus E
cgcagcagcgagcugg

SEQ ID NO: 3938939 - RNA, 18 nt, Human adenovirus E
cgcagccccgcucgggug

SEQ ID NO: 3938940 - RNA, 17 nt, Human adenovirus E
cgcaggccggagcuguc

SEQ ID NO: 3938941 - RNA, 23 nt, Human adenovirus E
cgcaugcggaucucgcucagguc

SEQ ID NO: 3938942 - RNA, 16 nt, Human adenovirus E
cgcauggucucgguga

SEQ ID NO: 3938943 - RNA, 14 nt, Human adenovirus E
cgccaccugcuccg

SEQ ID NO: 3938944 - RNA, 18 nt, Human adenovirus E
cgccagcuccuccucggc

SEQ ID NO: 3938945 - RNA, 14 nt, Human adenovirus E
cgccagcuuugcag

SEQ ID NO: 3938946 - RNA, 13 nt, Human adenovirus E
cgccaguccagac

SEQ ID NO: 3938947 - RNA, 15 nt, Human adenovirus E
cgccaguccagacug

SEQ ID NO: 3938948 - RNA, 14 nt, Human adenovirus E
cgcccaagaaugaa

SEQ ID NO: 3938949 - RNA, 12 nt, Human adenovirus E
cgcccagcaaga

SEQ ID NO: 3938950 - RNA, 14 nt, Human adenovirus E
cgcccugcgccuga

SEQ ID NO: 3938951 - RNA, 15 nt, Human adenovirus E
cgccgcaccgcuccc

SEQ ID NO: 3938952 - RNA, 17 nt, Human adenovirus E
cgccgggccuuggaggc

SEQ ID NO: 3938953 - RNA, 19 nt, Human adenovirus E
cgccguugucaaccacugc

SEQ ID NO: 3938954 - RNA, 18 nt, Human adenovirus E
cgccuccuuggaagaggu

SEQ ID NO: 3938955 - RNA, 17 nt, Human adenovirus E
cgccugcaucucgugcu

SEQ ID NO: 3938956 - RNA, 19 nt, Human adenovirus E
cgccugcugggccuuggcu

SEQ ID NO: 3938957 - RNA, 16 nt, Human adenovirus E
cgcgacggugucgagc

SEQ ID NO: 3938958 - RNA, 19 nt, Human adenovirus E
cgcgacggugucgagccug

SEQ ID NO: 3938959 - RNA, 22 nt, Human adenovirus E
cgcgacuuggcggauggcuggc

SEQ ID NO: 3938960 - RNA, 17 nt, Human adenovirus E
cgcgagacgcccaggcc

SEQ ID NO: 3938961 - RNA, 13 nt, Human adenovirus E
cgcgagcaaggac

SEQ ID NO: 3938962 - RNA, 18 nt, Human adenovirus E
cgcgaggaggugacccug

SEQ ID NO: 3938963 - RNA, 19 nt, Human adenovirus E
cgcgaggccaucggccagg

SEQ ID NO: 3938964 - RNA, 23 nt, Human adenovirus E
cgcgaggccaucggccaggcgca

SEQ ID NO: 3938965 - RNA, 12 nt, Human adenovirus E
cgcgccaucagc

SEQ ID NO: 3938966 - RNA, 17 nt, Human adenovirus E
cgcgcccgcccagucgc

SEQ ID NO: 3938967 - RNA, 15 nt, Human adenovirus E
cgcgcccugggccag

SEQ ID NO: 3938968 - RNA, 19 nt, Human adenovirus E
cgcgccgcagugggcgcag

SEQ ID NO: 3938969 - RNA, 23 nt, Human adenovirus E
cgcgccugcugcugcugcuggug

SEQ ID NO: 3938970 - RNA, 11 nt, Human adenovirus E
cgcgccugggg

SEQ ID NO: 3938971 - RNA, 14 nt, Human adenovirus E
cgcgcgcacguggc

SEQ ID NO: 3938972 - RNA, 15 nt, Human adenovirus E
cgcgcggccacggcg

SEQ ID NO: 3938973 - RNA, 13 nt, Human adenovirus E
cgcgcggcccggu

SEQ ID NO: 3938974 - RNA, 23 nt, Human adenovirus E
cgcgcugguggagaacaaggcca

SEQ ID NO: 3938975 - RNA, 16 nt, Human adenovirus E
cgcgcuugcugggcga

SEQ ID NO: 3938976 - RNA, 22 nt, Human adenovirus E
cgcgcuugcugggcgaagagga

SEQ ID NO: 3938977 - RNA, 22 nt, Human adenovirus E
cgcggcgaacgagccggcgcaa

SEQ ID NO: 3938978 - RNA, 20 nt, Human adenovirus E
cgcggcuguagaccacgacg

SEQ ID NO: 3938979 - RNA, 14 nt, Human adenovirus E
cgcgguccuccucg

SEQ ID NO: 3938980 - RNA, 18 nt, Human adenovirus E
cgcgguggggcggccagc

SEQ ID NO: 3938981 - RNA, 17 nt, Human adenovirus E
cgcguaguugcagaggc

SEQ ID NO: 3938982 - RNA, 21 nt, Human adenovirus E
cgcgucggugaugcucuccac

SEQ ID NO: 3938983 - RNA, 18 nt, Human adenovirus E
cgcgucguuguuggccag

SEQ ID NO: 3938984 - RNA, 15 nt, Human adenovirus E
cgcgugaagaccgcg

SEQ ID NO: 3938985 - RNA, 12 nt, Human adenovirus E
cgcucagcaccg

SEQ ID NO: 3938986 - RNA, 19 nt, Human adenovirus E
cgcucaucaagcaucuggc

SEQ ID NO: 3938987 - RNA, 13 nt, Human adenovirus E
cgcucccuggccu

SEQ ID NO: 3938988 - RNA, 12 nt, Human adenovirus E
cgcucccugggg

SEQ ID NO: 3938989 - RNA, 15 nt, Human adenovirus E
cgcuccggcaccgcu

SEQ ID NO: 3938990 - RNA, 22 nt, Human adenovirus E
cgcucugguggccaacgccagu

SEQ ID NO: 3938991 - RNA, 18 nt, Human adenovirus E
cgcugagcccgugcugcu

SEQ ID NO: 3938992 - RNA, 17 nt, Human adenovirus E
cgcugcagagccagccg

SEQ ID NO: 3938993 - RNA, 15 nt, Human adenovirus E
cgcugcgcccccagc

SEQ ID NO: 3938994 - RNA, 17 nt, Human adenovirus E
cgcugcgcccccagcgg

SEQ ID NO: 3938995 - RNA, 17 nt, Human adenovirus E
cgcugcucgaccgcacc

SEQ ID NO: 3938996 - RNA, 16 nt, Human adenovirus E
cgcuggcuccuggacc

SEQ ID NO: 3938997 - RNA, 14 nt, Human adenovirus E
cgcuguccggccgc

SEQ ID NO: 3938998 - RNA, 17 nt, Human adenovirus E
cgcuguggagccacugc

SEQ ID NO: 3938999 - RNA, 20 nt, Human adenovirus E
cgcuguugagacccgagcgg

SEQ ID NO: 3939000 - RNA, 14 nt, Human adenovirus E
cggaaagguugggg

SEQ ID NO: 3939001 - RNA, 17 nt, Human adenovirus E
cggaacaauacucucgc

SEQ ID NO: 3939002 - RNA, 23 nt, Human adenovirus E
cggaacugguacuuggccagcca

SEQ ID NO: 3939003 - RNA, 12 nt, Human adenovirus E
cggaaggugcaa

SEQ ID NO: 3939004 - RNA, 19 nt, Human adenovirus E
cggagauggcaccucucgc

SEQ ID NO: 3939005 - RNA, 22 nt, Human adenovirus E
cggagcacccccgccaugcgcg

SEQ ID NO: 3939006 - RNA, 17 nt, Human adenovirus E
cggagcacgaggaggag

SEQ ID NO: 3939007 - RNA, 20 nt, Human adenovirus E
cggagcacgaggaggagcug

SEQ ID NO: 3939008 - RNA, 22 nt, Human adenovirus E
cggagccuuguugcgcagggcc

SEQ ID NO: 3939009 - RNA, 18 nt, Human adenovirus E
cggagcuguccagggucc

SEQ ID NO: 3939010 - RNA, 13 nt, Human adenovirus E
cggaggccagcac

SEQ ID NO: 3939011 - RNA, 16 nt, Human adenovirus E
cggaucuucagccagc

SEQ ID NO: 3939012 - RNA, 12 nt, Human adenovirus E
cggaugaagugg

SEQ ID NO: 3939013 - RNA, 13 nt, Human adenovirus E
cggcaccaccgug

SEQ ID NO: 3939014 - RNA, 22 nt, Human adenovirus E
cggcagaacggggugcuggaga

SEQ ID NO: 3939015 - RNA, 20 nt, Human adenovirus E
cggcagaugcgcccccacca

SEQ ID NO: 3939016 - RNA, 21 nt, Human adenovirus E
cggcagaugcgcccccaccac

SEQ ID NO: 3939017 - RNA, 13 nt, Human adenovirus E
cggcaggccacca

SEQ ID NO: 3939018 - RNA, 13 nt, Human adenovirus F
aaaaaaagaauua

SEQ ID NO: 3939019 - RNA, 17 nt, Human adenovirus F
aaaaacuuacaaucauu

SEQ ID NO: 3939020 - RNA, 21 nt, Human adenovirus F
aaaaaucuaccacagaaaugu

SEQ ID NO: 3939021 - RNA, 17 nt, Human adenovirus F
aaaacaaaacaaacucc

SEQ ID NO: 3939022 - RNA, 12 nt, Human adenovirus F
aaaaccaaauca

SEQ ID NO: 3939023 - RNA, 13 nt, Human adenovirus F
aaaaccgccacau

SEQ ID NO: 3939024 - RNA, 21 nt, Human adenovirus F
aaaacguaccaaccggagccu

SEQ ID NO: 3939025 - RNA, 18 nt, Human adenovirus F
aaaacuuggcagcaacau

SEQ ID NO: 3939026 - RNA, 20 nt, Human adenovirus F
aaaagcucgcgcacagcuuc

SEQ ID NO: 3939027 - RNA, 22 nt, Human adenovirus F
aaaaucacuguuuuuaacuauu

SEQ ID NO: 3939028 - RNA, 24 nt, Human adenovirus F
aaaaucguagguuuaaauuacacu

SEQ ID NO: 3939029 - RNA, 14 nt, Human adenovirus F
aaacaacaaaauca

SEQ ID NO: 3939030 - RNA, 13 nt, Human adenovirus F
aaacacaaacaua

SEQ ID NO: 3939031 - RNA, 14 nt, Human adenovirus F
aaacagugccacau

SEQ ID NO: 3939032 - RNA, 19 nt, Human adenovirus F
aaaccccgaucccgaaucu

SEQ ID NO: 3939033 - RNA, 12 nt, Human adenovirus F
aaaccgccacau

SEQ ID NO: 3939034 - RNA, 22 nt, Human adenovirus F
aaaccgccgacccaggcaacau

SEQ ID NO: 3939035 - RNA, 13 nt, Human adenovirus F
aaaccuguucuaa

SEQ ID NO: 3939036 - RNA, 14 nt, Human adenovirus F
aaagacacaauugg

SEQ ID NO: 3939037 - RNA, 14 nt, Human adenovirus F
aaagacagcaagga

SEQ ID NO: 3939038 - RNA, 15 nt, Human adenovirus F
aaagacagcaaggaa

SEQ ID NO: 3939039 - RNA, 18 nt, Human adenovirus F
aaagacccauuuccaagc

SEQ ID NO: 3939040 - RNA, 16 nt, Human adenovirus F
aaagagcguguuccca

SEQ ID NO: 3939041 - RNA, 21 nt, Human adenovirus F
aaagcagugggacgaggagga

SEQ ID NO: 3939042 - RNA, 14 nt, Human adenovirus F
aaagccaacuccaa

SEQ ID NO: 3939043 - RNA, 15 nt, Human adenovirus F
aaagcgggggcgucc

SEQ ID NO: 3939044 - RNA, 21 nt, Human adenovirus F
aaagcugugagcgccagccgc

SEQ ID NO: 3939045 - RNA, 20 nt, Human adenovirus F
aaaguagcucuuccaagcug

SEQ ID NO: 3939046 - RNA, 12 nt, Human adenovirus F
aaaguccuggcc

SEQ ID NO: 3939047 - RNA, 19 nt, Human adenovirus F
aaaguccuggccaacugcc

SEQ ID NO: 3939048 - RNA, 17 nt, Human adenovirus F
aaauacagucaagcucu

SEQ ID NO: 3939049 - RNA, 23 nt, Human adenovirus F
aaaucgugcccguggaaaaagac

SEQ ID NO: 3939050 - RNA, 15 nt, Human adenovirus F
aaaucuucaaacauu

SEQ ID NO: 3939051 - RNA, 19 nt, Human adenovirus F
aaaucuuccucccaaagua

SEQ ID NO: 3939052 - RNA, 14 nt, Human adenovirus F
aaaugccuaccucu

SEQ ID NO: 3939053 - RNA, 18 nt, Human adenovirus F
aaauuacagccaagucaa

SEQ ID NO: 3939054 - RNA, 21 nt, Human adenovirus F
aaauucaugcaugcagacuuu

SEQ ID NO: 3939055 - RNA, 13 nt, Human adenovirus F
aacaaggccugga

SEQ ID NO: 3939056 - RNA, 12 nt, Human adenovirus F
aacacaaacaua

SEQ ID NO: 3939057 - RNA, 21 nt, Human adenovirus F
aacacaauauuuauacacucc

SEQ ID NO: 3939058 - RNA, 14 nt, Human adenovirus F
aacagccccagcug

SEQ ID NO: 3939059 - RNA, 15 nt, Human adenovirus F
aacagcuccucagcc

SEQ ID NO: 3939060 - RNA, 22 nt, Human adenovirus F
aacagggacacgagcugucaua

SEQ ID NO: 3939061 - RNA, 17 nt, Human adenovirus F
aacaguaacaacuccuu

SEQ ID NO: 3939062 - RNA, 22 nt, Human adenovirus F
aacauagcaaaagcauuuuccu

SEQ ID NO: 3939063 - RNA, 20 nt, Human adenovirus F
aaccacgcccaugcagccau

SEQ ID NO: 3939064 - RNA, 22 nt, Human adenovirus F
aacccaugagccgccagguggu

SEQ ID NO: 3939065 - RNA, 18 nt, Human adenovirus F
aaccccuuugugcccucc

SEQ ID NO: 3939066 - RNA, 18 nt, Human adenovirus F
aacccugaggaggaggcc

SEQ ID NO: 3939067 - RNA, 13 nt, Human adenovirus F
aaccuugaggaau

SEQ ID NO: 3939068 - RNA, 22 nt, Human adenovirus F
aacgagaucggcaccagccagc

SEQ ID NO: 3939069 - RNA, 16 nt, Human adenovirus F
cccccggcggcgggug

SEQ ID NO: 3939070 - RNA, 18 nt, Human adenovirus F
ccccgcgacgucagcuga

SEQ ID NO: 3939071 - RNA, 18 nt, Human adenovirus F
ccccggcggcgggugcag

SEQ ID NO: 3939072 - RNA, 23 nt, Human adenovirus F
ccccggcggcgggugcaguggcg

SEQ ID NO: 3939073 - RNA, 24 nt, Human adenovirus F
ccccgggaguuuuagcacucaagu

SEQ ID NO: 3939074 - RNA, 13 nt, Human adenovirus F
ccccuaccagccg

SEQ ID NO: 3939075 - RNA, 20 nt, Human adenovirus F
ccccuuacaaacaguaacaa

SEQ ID NO: 3939076 - RNA, 14 nt, Human adenovirus F
cccgacagaggccg

SEQ ID NO: 3939077 - RNA, 15 nt, Human adenovirus F
cccgcaacggcgcag

SEQ ID NO: 3939078 - RNA, 22 nt, Human adenovirus F
cccgcaaucccgaagccuucag

SEQ ID NO: 3939079 - RNA, 16 nt, Human adenovirus F
cccggguccuacaccu

SEQ ID NO: 3939080 - RNA, 15 nt, Human adenovirus F
cccgucacucuccgc

SEQ ID NO: 3939081 - RNA, 10 nt, Human adenovirus F
cccuaccacc

SEQ ID NO: 3939082 - RNA, 19 nt, Human adenovirus F
cccuauucgggcacugcau

SEQ ID NO: 3939083 - RNA, 17 nt, Human adenovirus F
cccucagacgacugggc

SEQ ID NO: 3939084 - RNA, 13 nt, Human adenovirus F
cccucagagcugc

SEQ ID NO: 3939085 - RNA, 22 nt, Human adenovirus F
cccucuccgugcaaaacaauuc

SEQ ID NO: 3939086 - RNA, 18 nt, Human adenovirus F
cccugaccgaccuggggc

SEQ ID NO: 3939087 - RNA, 16 nt, Human adenovirus F
cccuggaauuuuugcu

SEQ ID NO: 3939088 - RNA, 18 nt, Human adenovirus F
cccugucguugccagccg

SEQ ID NO: 3939089 - RNA, 21 nt, Human adenovirus F
cccuuacgaacacuacaaucc

SEQ ID NO: 3939090 - RNA, 22 nt, Human adenovirus F
cccuuggaaauuugcugacagc

SEQ ID NO: 3939091 - RNA, 15 nt, Human adenovirus F
cccuuuuccagcaac

SEQ ID NO: 3939092 - RNA, 21 nt, Human adenovirus F
ccgaagccuucaggcagcagc

SEQ ID NO: 3939093 - RNA, 13 nt, Human adenovirus F
ccgacaacaaaaa

SEQ ID NO: 3939094 - RNA, 23 nt, Human adenovirus F
ccgacagaggccgguacccagac

SEQ ID NO: 3939095 - RNA, 22 nt, Human adenovirus F
ccgacauguuugucuuuaaaaa

SEQ ID NO: 3939096 - RNA, 16 nt, Human adenovirus F
ccgagcagcugcguac

SEQ ID NO: 3939097 - RNA, 16 nt, Human adenovirus F
ccgaggcacuguucaa

SEQ ID NO: 3939098 - RNA, 21 nt, Human adenovirus F
ccgagugacacgucaccgcca

SEQ ID NO: 3939099 - RNA, 16 nt, Human adenovirus F
ccgcacuggaugccac

SEQ ID NO: 3939100 - RNA, 15 nt, Human adenovirus F
ccgcagucucccacc

SEQ ID NO: 3939101 - RNA, 19 nt, Human adenovirus F
ccgccacaugaacacuucc

SEQ ID NO: 3939102 - RNA, 23 nt, Human adenovirus F
ccgccaugacugccgcucgggcg

SEQ ID NO: 3939103 - RNA, 15 nt, Human adenovirus F
ccgccccugccaccg

SEQ ID NO: 3939104 - RNA, 12 nt, Human adenovirus F
ccgcccgccucu

SEQ ID NO: 3939105 - RNA, 14 nt, Human adenovirus F
ccgcccgcuccgac

SEQ ID NO: 3939106 - RNA, 19 nt, Human adenovirus F
ccgccgucgucgcucuguc

SEQ ID NO: 3939107 - RNA, 12 nt, Human adenovirus F
ccgcgaaugccc

SEQ ID NO: 3939108 - RNA, 17 nt, Human adenovirus F
ccgcggacgucaagccc

SEQ ID NO: 3939109 - RNA, 21 nt, Human adenovirus F
ccgcggcggcuauugccagca

SEQ ID NO: 3939110 - RNA, 20 nt, Human adenovirus F
ccgcggucaacagcuggaac

SEQ ID NO: 3939111 - RNA, 14 nt, Human adenovirus F
ccgcgucugcugcu

SEQ ID NO: 3939112 - RNA, 20 nt, Human adenovirus F
ccgcgucugcugcugccucu

SEQ ID NO: 3939113 - RNA, 21 nt, Human adenovirus F
ccgcugucguuaguggaggca

SEQ ID NO: 3939114 - RNA, 17 nt, Human adenovirus F
ccgcuuggaggagcugu

SEQ ID NO: 3939115 - RNA, 21 nt, Human adenovirus F
ccgcuugggggcgccaucccc

SEQ ID NO: 3939116 - RNA, 18 nt, Human adenovirus F
ccggagaggggaggaagu

SEQ ID NO: 3939117 - RNA, 16 nt, Human adenovirus F
ccggagccggcggugg

SEQ ID NO: 3939118 - RNA, 22 nt, Human adenovirus F
ccggaggcagugguggaugggg

SEQ ID NO: 3939119 - RNA, 14 nt, Human adenovirus F
ccggcacugaugcc

SEQ ID NO: 3939120 - RNA, 20 nt, Human adenovirus F
ccggcggcgggugcaguggc

SEQ ID NO: 3939121 - RNA, 22 nt, Human adenovirus F
ccggcggcgggugcaguggcgg

SEQ ID NO: 3939122 - RNA, 17 nt, Human adenovirus F
ccggcuucggugacaaa

SEQ ID NO: 3939123 - RNA, 21 nt, Human adenovirus F
ccggugcuauuaaaauggaac

SEQ ID NO: 3939124 - RNA, 22 nt, Human adenovirus F
ccguccccagcgcccuggauac

SEQ ID NO: 3939125 - RNA, 17 nt, Human adenovirus F
ccgucggaccugccccu

SEQ ID NO: 3939126 - RNA, 21 nt, Human adenovirus F
ccgucuagccaacuauuuggc

SEQ ID NO: 3939127 - RNA, 14 nt, Human adenovirus F
ccgucuccaucgcc

SEQ ID NO: 3939128 - RNA, 22 nt, Human adenovirus F
ccgugcaaaacaauucucucuc

SEQ ID NO: 3939129 - RNA, 19 nt, Human adenovirus F
ccguucggagccaaccucc

SEQ ID NO: 3939130 - RNA, 13 nt, Human adenovirus F
ccuacucuuacaa

SEQ ID NO: 3939131 - RNA, 21 nt, Human adenovirus F
ccuaggaucccaaguggcccu

SEQ ID NO: 3939132 - RNA, 21 nt, Human adenovirus F
ccuaucacuaaaaccaacaaa

SEQ ID NO: 3939133 - RNA, 15 nt, Human adenovirus F
ccucaaggaaugcac

SEQ ID NO: 3939134 - RNA, 15 nt, Human adenovirus F
ccuccagcacugccg

SEQ ID NO: 3939135 - RNA, 12 nt, Human adenovirus F
ccuccgacccca

SEQ ID NO: 3939136 - RNA, 21 nt, Human adenovirus F
ccuccgacgcuugcuggaguu

SEQ ID NO: 3939137 - RNA, 22 nt, Human adenovirus F
ccuccucgcugucuggaaccac

SEQ ID NO: 3939138 - RNA, 19 nt, Human adenovirus F
ccucguuguuuuccucuga

SEQ ID NO: 3939139 - RNA, 11 nt, Human adenovirus F
ccucugacggg

SEQ ID NO: 3939140 - RNA, 19 nt, Human adenovirus F
ccucuucuccugcuugucu

SEQ ID NO: 3939141 - RNA, 22 nt, Human adenovirus F
ccugagaucguuucuuuagaag

SEQ ID NO: 3939142 - RNA, 17 nt, Human adenovirus F
ccugaucccgaagaggg

SEQ ID NO: 3939143 - RNA, 16 nt, Human adenovirus F
ccugcaaagccaaccu

SEQ ID NO: 3939144 - RNA, 14 nt, Human adenovirus F
ccugcaagaucucc

SEQ ID NO: 3939145 - RNA, 17 nt, Human adenovirus F
ccugcaauggcagccca

SEQ ID NO: 3939146 - RNA, 16 nt, Human adenovirus F
ccugcacgcucuugcu

SEQ ID NO: 3939147 - RNA, 19 nt, Human adenovirus F
ccugccgcugcgcagcagu

SEQ ID NO: 3939148 - RNA, 19 nt, Human adenovirus F
ccugcggauuaagaaccac

SEQ ID NO: 3939149 - RNA, 17 nt, Human adenovirus F
ccugcuccugcccgggu

SEQ ID NO: 3939150 - RNA, 22 nt, Human adenovirus F
ccuggcaacaucggcaccccuc

SEQ ID NO: 3939151 - RNA, 13 nt, Human adenovirus F
ccuggcagcugga

SEQ ID NO: 3939152 - RNA, 14 nt, Human adenovirus F
ccuggccaacugcc

SEQ ID NO: 3939153 - RNA, 18 nt, Human adenovirus F
ccugggaugcagguagga

SEQ ID NO: 3939154 - RNA, 14 nt, Human adenovirus F
ccugggcuggaugc

SEQ ID NO: 3939155 - RNA, 22 nt, Human adenovirus F
ccugggguagggugucugccag

SEQ ID NO: 3939156 - RNA, 23 nt, Human adenovirus F
ccugggguagggugucugccaga

SEQ ID NO: 3939157 - RNA, 19 nt, Human adenovirus F
ccuguaccaccgcaaacaa

SEQ ID NO: 3939158 - RNA, 19 nt, Human adenovirus F
ccugucgccccugccaacu

SEQ ID NO: 3939159 - RNA, 13 nt, Human adenovirus F
ccuuacaaacagu

SEQ ID NO: 3939160 - RNA, 20 nt, Human adenovirus F
ccuuagaacuaccuccaccc

SEQ ID NO: 3939161 - RNA, 16 nt, Human adenovirus F
ccuucaggcagcagcc

SEQ ID NO: 3939162 - RNA, 11 nt, Human adenovirus F
ccuuccacuuu

SEQ ID NO: 3939163 - RNA, 16 nt, Human adenovirus F
ccuugcaaaaccaaau

SEQ ID NO: 3939164 - RNA, 22 nt, Human adenovirus F
ccuuggccaccacgggaguugc

SEQ ID NO: 3939165 - RNA, 14 nt, Human adenovirus F
ccuuuugcaucuca

SEQ ID NO: 3939166 - RNA, 19 nt, Human adenovirus F
ccuuuugcaucucaaagcu

SEQ ID NO: 3939167 - RNA, 18 nt, Human adenovirus F
cgaaccaaugcguucccg

SEQ ID NO: 3939168 - RNA, 15 nt, Human adenovirus F
cgaacuuucucucuu

SEQ ID NO: 3939169 - RNA, 18 nt, Human adenovirus F
cgaagccuucaggcagca

SEQ ID NO: 3939170 - RNA, 20 nt, Human adenovirus F
cgaauucguggccccuacca

SEQ ID NO: 3939171 - RNA, 20 nt, Human adenovirus F
cgacgacgcggcgguugagg

SEQ ID NO: 3939172 - RNA, 22 nt, Human adenovirus F
cgacgcuguaugcuauuuucca

SEQ ID NO: 3939173 - RNA, 12 nt, Human adenovirus F
cgagcgccucaa

SEQ ID NO: 3939174 - RNA, 20 nt, Human adenovirus F
cgaggcuuuccgcgaggcca

SEQ ID NO: 3939175 - RNA, 18 nt, Human adenovirus F
cgaggggcuggcccgcuu

SEQ ID NO: 3939176 - RNA, 13 nt, Human adenovirus F
cgauaacauuacu

SEQ ID NO: 3939177 - RNA, 12 nt, Human adenovirus F
cgauggagccag

SEQ ID NO: 3939178 - RNA, 17 nt, Human adenovirus F
cgcacuucaagaaacac

SEQ ID NO: 3939179 - RNA, 16 nt, Human adenovirus F
cgcagaaacaugccac

SEQ ID NO: 3939180 - RNA, 16 nt, Human adenovirus F
cgcagccugagcugcc

SEQ ID NO: 3939181 - RNA, 14 nt, Human adenovirus F
cgcagcgggcagga

SEQ ID NO: 3939182 - RNA, 22 nt, Human adenovirus F
cgcagcugcuuguaucacagaa

SEQ ID NO: 3939183 - RNA, 16 nt, Human adenovirus F
cgcaggagcucagaaa

SEQ ID NO: 3939184 - RNA, 22 nt, Human adenovirus F
cgcagguuuuacgcggggcagg

SEQ ID NO: 3939185 - RNA, 16 nt, Human adenovirus F
cgcauaacccuggaau

SEQ ID NO: 3939186 - RNA, 13 nt, Human adenovirus F
cgcaugccuccag

SEQ ID NO: 3939187 - RNA, 16 nt, Human adenovirus F
cgccaacuccgcccac

SEQ ID NO: 3939188 - RNA, 20 nt, Human adenovirus F
cgccaauuuuucggggguca

SEQ ID NO: 3939189 - RNA, 16 nt, Human adenovirus F
cgccagccuccggugg

SEQ ID NO: 3939190 - RNA, 14 nt, Human adenovirus F
cgccagcuggcaaa

SEQ ID NO: 3939191 - RNA, 21 nt, Human adenovirus F
cgccauugccacccgccagga

SEQ ID NO: 3939192 - RNA, 13 nt, Human adenovirus F
cgccccugugagu

SEQ ID NO: 3939193 - RNA, 19 nt, Human adenovirus F
cagacuuugucagccaaag

SEQ ID NO: 3939194 - RNA, 17 nt, Human adenovirus F
cagauggaaacugucag

SEQ ID NO: 3939195 - RNA, 17 nt, Human adenovirus F
cagauggagagcuggga

SEQ ID NO: 3939196 - RNA, 21 nt, Human adenovirus F
cagcaacuacccuguaguggg

SEQ ID NO: 3939197 - RNA, 15 nt, Human adenovirus F
cagcagcagcagcgg

SEQ ID NO: 3939198 - RNA, 23 nt, Human adenovirus F
cagcagguuaaagccaacuccaa

SEQ ID NO: 3939199 - RNA, 15 nt, Human adenovirus F
cagccaagucaaaaa

SEQ ID NO: 3939200 - RNA, 16 nt, Human adenovirus F
cagccaaugggcucca

SEQ ID NO: 3939201 - RNA, 17 nt, Human adenovirus F
cagccaaugggcuccag

SEQ ID NO: 3939202 - RNA, 17 nt, Human adenovirus F
cagcccaacaccaccau

SEQ ID NO: 3939203 - RNA, 17 nt, Human adenovirus F
cagccccaggccaaccg

SEQ ID NO: 3939204 - RNA, 16 nt, Human adenovirus F
cagccgcaccgcggcg

SEQ ID NO: 3939205 - RNA, 19 nt, Human adenovirus F
cagccgccgucgcgagcuu

SEQ ID NO: 3939206 - RNA, 20 nt, Human adenovirus F
cagccguccacgcucccgga

SEQ ID NO: 3939207 - RNA, 16 nt, Human adenovirus F
cagccuagacgaggag

SEQ ID NO: 3939208 - RNA, 21 nt, Human adenovirus F
cagccugagcugccagaggcc

SEQ ID NO: 3939209 - RNA, 19 nt, Human adenovirus F
cagccugcgucgggcucua

SEQ ID NO: 3939210 - RNA, 23 nt, Human adenovirus F
cagcgaguacuucaccaaugcca

SEQ ID NO: 3939211 - RNA, 20 nt, Human adenovirus F
cagcgcccgggcccuggagg

SEQ ID NO: 3939212 - RNA, 19 nt, Human adenovirus F
cagcgggaagagaggcagc

SEQ ID NO: 3939213 - RNA, 22 nt, Human adenovirus F
cagcgggaagagaggcagcccc

SEQ ID NO: 3939214 - RNA, 22 nt, Human adenovirus F
cagcgucagguuugacagcauu

SEQ ID NO: 3939215 - RNA, 17 nt, Human adenovirus F
cagcucaacgcaguggu

SEQ ID NO: 3939216 - RNA, 14 nt, Human adenovirus F
cagcuccucagccc

SEQ ID NO: 3939217 - RNA, 14 nt, Human adenovirus F
cagcugaagacaca

SEQ ID NO: 3939218 - RNA, 13 nt, Human adenovirus F
caggaagcagcuc

SEQ ID NO: 3939219 - RNA, 21 nt, Human adenovirus F
caggagcagcgggaagagagg

SEQ ID NO: 3939220 - RNA, 16 nt, Human adenovirus F
caggagcccgaagaga

SEQ ID NO: 3939221 - RNA, 21 nt, Human adenovirus F
caggagcccgaagagaugagg

SEQ ID NO: 3939222 - RNA, 15 nt, Human adenovirus F
caggagcugcgggcc

SEQ ID NO: 3939223 - RNA, 21 nt, Human adenovirus F
caggaucccucagagcugcaa

SEQ ID NO: 3939224 - RNA, 13 nt, Human adenovirus F
caggcacaccuuc

SEQ ID NO: 3939225 - RNA, 18 nt, Human adenovirus F
caggcagcagccccaggc

SEQ ID NO: 3939226 - RNA, 21 nt, Human adenovirus F
caggccgcccuaaccucuacc

SEQ ID NO: 3939227 - RNA, 12 nt, Human adenovirus F
caggccgcggcg

SEQ ID NO: 3939228 - RNA, 21 nt, Human adenovirus F
caggcguuuaaaaacuugcaa

SEQ ID NO: 3939229 - RNA, 14 nt, Human adenovirus F
caggcuacugggga

SEQ ID NO: 3939230 - RNA, 11 nt, Human adenovirus F
cagggcacagu

SEQ ID NO: 3939231 - RNA, 22 nt, Human adenovirus F
caggguuuuugagcaugaaacu

SEQ ID NO: 3939232 - RNA, 15 nt, Human adenovirus F
cagguauaaguauua

SEQ ID NO: 3939233 - RNA, 16 nt, Human adenovirus F
cagguccagaccucaa

SEQ ID NO: 3939234 - RNA, 18 nt, Human adenovirus F
cagguuaaagccaacucc

SEQ ID NO: 3939235 - RNA, 15 nt, Human adenovirus F
cagguuugacagcau

SEQ ID NO: 3939236 - RNA, 16 nt, Human adenovirus F
caguccuucugccacg

SEQ ID NO: 3939237 - RNA, 22 nt, Human adenovirus F
cagucggugggcguccagugga

SEQ ID NO: 3939238 - RNA, 15 nt, Human adenovirus F
cagucugccaacacu

SEQ ID NO: 3939239 - RNA, 13 nt, Human adenovirus F
caguggccgcacu

SEQ ID NO: 3939240 - RNA, 17 nt, Human adenovirus F
caguggccgcacucagc

SEQ ID NO: 3939241 - RNA, 13 nt, Human adenovirus F
cagugggacgagg

SEQ ID NO: 3939242 - RNA, 16 nt, Human adenovirus F
cagugguggacuuaca

SEQ ID NO: 3939243 - RNA, 22 nt, Human adenovirus F
caguguauccccgaaacaaaac

SEQ ID NO: 3939244 - RNA, 14 nt, Human adenovirus F
caguuaccaaggcg

SEQ ID NO: 3939245 - RNA, 16 nt, Human adenovirus F
cauaaccuugaggaau

SEQ ID NO: 3939246 - RNA, 13 nt, Human adenovirus F
cauagcuggaggg

SEQ ID NO: 3939247 - RNA, 17 nt, Human adenovirus F
cauaguugcucccaaag

SEQ ID NO: 3939248 - RNA, 14 nt, Human adenovirus F
cauccgccuccacc

SEQ ID NO: 3939249 - RNA, 15 nt, Human adenovirus F
caucuaucuuuuccu

SEQ ID NO: 3939250 - RNA, 19 nt, Human adenovirus F
caucucaaagcuggagcuc

SEQ ID NO: 3939251 - RNA, 22 nt, Human adenovirus F
caucuucaccucuguuugcugc

SEQ ID NO: 3939252 - RNA, 14 nt, Human adenovirus F
caugcaacuuggaa

SEQ ID NO: 3939253 - RNA, 18 nt, Human adenovirus F
caugcgccgagcggcugc

SEQ ID NO: 3939254 - RNA, 16 nt, Human adenovirus F
caugcgcuccaacacu

SEQ ID NO: 3939255 - RNA, 18 nt, Human adenovirus F
caugcgcuccaacacuau

SEQ ID NO: 3939256 - RNA, 15 nt, Human adenovirus F
caugcuuagccucgg

SEQ ID NO: 3939257 - RNA, 16 nt, Human adenovirus F
cauggcgggcaguggc

SEQ ID NO: 3939258 - RNA, 17 nt, Human adenovirus F
cauggcgggcaguggcc

SEQ ID NO: 3939259 - RNA, 13 nt, Human adenovirus F
cauggcucagccc

SEQ ID NO: 3939260 - RNA, 21 nt, Human adenovirus F
cauggugguagaaggucaggc

SEQ ID NO: 3939261 - RNA, 17 nt, Human adenovirus F
cauguucacugaaagcc

SEQ ID NO: 3939262 - RNA, 20 nt, Human adenovirus F
cauuaagucauuugguaaca

SEQ ID NO: 3939263 - RNA, 22 nt, Human adenovirus F
cauuacuuuacccgacaacaaa

SEQ ID NO: 3939264 - RNA, 12 nt, Human adenovirus F
cauuauugcacu

SEQ ID NO: 3939265 - RNA, 21 nt, Human adenovirus F
cauuccauuuauuacaccccc

SEQ ID NO: 3939266 - RNA, 13 nt, Human adenovirus F
cauuggcuggagg

SEQ ID NO: 3939267 - RNA, 15 nt, Human adenovirus F
cauugggcugaugca

SEQ ID NO: 3939268 - RNA, 19 nt, Human adenovirus F
cauugggcugaugcauuug

SEQ ID NO: 3939269 - RNA, 21 nt, Human adenovirus F
cauuguguccugcaacaaaaa

SEQ ID NO: 3939270 - RNA, 22 nt, Human adenovirus F
cauuugguaacaaggccuggaa

SEQ ID NO: 3939271 - RNA, 14 nt, Human adenovirus F
ccaaaacuuucaac

SEQ ID NO: 3939272 - RNA, 16 nt, Human adenovirus F
ccaaaauggcucugcu

SEQ ID NO: 3939273 - RNA, 23 nt, Human adenovirus F
ccaaacggcguucuagccaacac

SEQ ID NO: 3939274 - RNA, 20 nt, Human adenovirus F
ccaaagagcuugaacauaac

SEQ ID NO: 3939275 - RNA, 23 nt, Human adenovirus F
ccaaagagcuugaacauaacacc

SEQ ID NO: 3939276 - RNA, 18 nt, Human adenovirus F
ccaaaucaaucagcggcu

SEQ ID NO: 3939277 - RNA, 20 nt, Human adenovirus F
ccaaauuacgucauugacau

SEQ ID NO: 3939278 - RNA, 18 nt, Human adenovirus F
ccaacagccccagcuggu

SEQ ID NO: 3939279 - RNA, 17 nt, Human adenovirus F
ccaaccaagaaauacaa

SEQ ID NO: 3939280 - RNA, 17 nt, Human adenovirus F
ccaacggcuugcaagaa

SEQ ID NO: 3939281 - RNA, 13 nt, Human adenovirus F
ccaacuauuuggg

SEQ ID NO: 3939282 - RNA, 17 nt, Human adenovirus F
ccaagaaauacaaaggc

SEQ ID NO: 3939283 - RNA, 21 nt, Human adenovirus F
ccaagccucauugagcgaguc

SEQ ID NO: 3939284 - RNA, 22 nt, Human adenovirus F
ccaagccuuaauuucugagggg

SEQ ID NO: 3939285 - RNA, 20 nt, Human adenovirus F
ccaaggcguaaagacugaca

SEQ ID NO: 3939286 - RNA, 16 nt, Human adenovirus F
ccaagugccccagaaa

SEQ ID NO: 3939287 - RNA, 14 nt, Human adenovirus F
ccaauaccagcaaa

SEQ ID NO: 3939288 - RNA, 20 nt, Human adenovirus F
ccacauaagaagccagccaa

SEQ ID NO: 3939289 - RNA, 14 nt, Human adenovirus F
ccaccaaauuaaau

SEQ ID NO: 3939290 - RNA, 16 nt, Human adenovirus F
ccaccaagcuccucau

SEQ ID NO: 3939291 - RNA, 21 nt, Human adenovirus F
ccaccagccggaggagugggc

SEQ ID NO: 3939292 - RNA, 16 nt, Human adenovirus F
ggaagaugaguuuaaa

SEQ ID NO: 3939293 - RNA, 21 nt, Human adenovirus F
ggaaucccgcgagccccccuc

SEQ ID NO: 3939294 - RNA, 18 nt, Human adenovirus F
ggacagcuaugacccaga

SEQ ID NO: 3939295 - RNA, 20 nt, Human adenovirus F
ggaccuuacuuucugggcac

SEQ ID NO: 3939296 - RNA, 15 nt, Human adenovirus F
ggacguggaggaaga

SEQ ID NO: 3939297 - RNA, 13 nt, Human adenovirus F
ggacuuggcagaa

SEQ ID NO: 3939298 - RNA, 15 nt, Human adenovirus F
ggagcagauggagag

SEQ ID NO: 3939299 - RNA, 21 nt, Human adenovirus F
ggaggagauggugggccgcug

SEQ ID NO: 3939300 - RNA, 15 nt, Human adenovirus F
ggaggaggaggagaa

SEQ ID NO: 3939301 - RNA, 13 nt, Human adenovirus F
ggaggcagcagag

SEQ ID NO: 3939302 - RNA, 13 nt, Human adenovirus F
ggaggccauccug

SEQ ID NO: 3939303 - RNA, 23 nt, Human adenovirus F
ggaggccauccuggaccuggaag

SEQ ID NO: 3939304 - RNA, 11 nt, Human adenovirus F
ggagucacugc

SEQ ID NO: 3939305 - RNA, 14 nt, Human adenovirus F
ggagugccgccggu

SEQ ID NO: 3939306 - RNA, 13 nt, Human adenovirus F
ggaguuggaggag

SEQ ID NO: 3939307 - RNA, 15 nt, Human adenovirus F
ggauccauagagggc

SEQ ID NO: 3939308 - RNA, 23 nt, Human adenovirus F
ggaucccagcguugagccggaag

SEQ ID NO: 3939309 - RNA, 13 nt, Human adenovirus F
ggaucuggaggaa

SEQ ID NO: 3939310 - RNA, 16 nt, Human adenovirus F
ggaucuuaagcugcag

SEQ ID NO: 3939311 - RNA, 18 nt, Human adenovirus F
ggaugcaugcgaggggaa

SEQ ID NO: 3939312 - RNA, 12 nt, Human adenovirus F
ggaugguggcaa

SEQ ID NO: 3939313 - RNA, 21 nt, Human adenovirus F
ggauucuaagggaggcagcag

SEQ ID NO: 3939314 - RNA, 23 nt, Human adenovirus F
ggcaauguugccaccgagaucac

SEQ ID NO: 3939315 - RNA, 17 nt, Human adenovirus F
ggcacagaauccucaga

SEQ ID NO: 3939316 - RNA, 22 nt, Human adenovirus F
ggcaccuuuuaccugaaccaca

SEQ ID NO: 3939317 - RNA, 21 nt, Human adenovirus F
ggcagaacguucuucacugca

SEQ ID NO: 3939318 - RNA, 19 nt, Human adenovirus F
ggcaggaaagccacgcucg

SEQ ID NO: 3939319 - RNA, 15 nt, Human adenovirus F
ggcaguggccgccga

SEQ ID NO: 3939320 - RNA, 22 nt, Human adenovirus F
ggcauuaaaaacuuuggguccu

SEQ ID NO: 3939321 - RNA, 22 nt, Human adenovirus F
ggcauuaaugggcaaaggggga

SEQ ID NO: 3939322 - RNA, 21 nt, Human adenovirus F
ggccaacugccaccuccaccg

SEQ ID NO: 3939323 - RNA, 18 nt, Human adenovirus F
ggccauccuggaccugga

SEQ ID NO: 3939324 - RNA, 18 nt, Human adenovirus F
ggccaucggccaugguca

SEQ ID NO: 3939325 - RNA, 14 nt, Human adenovirus F
ggcccugccgcgga

SEQ ID NO: 3939326 - RNA, 13 nt, Human adenovirus F
ggccuguuuuuga

SEQ ID NO: 3939327 - RNA, 18 nt, Human adenovirus F
ggccuugggaugcagccu

SEQ ID NO: 3939328 - RNA, 13 nt, Human adenovirus F
ggcgaauaaaagg

SEQ ID NO: 3939329 - RNA, 15 nt, Human adenovirus F
ggcgcauucccuuuu

SEQ ID NO: 3939330 - RNA, 13 nt, Human adenovirus F
ggcgccggacggg

SEQ ID NO: 3939331 - RNA, 17 nt, Human adenovirus F
ggcgcuugccaggguuc

SEQ ID NO: 3939332 - RNA, 16 nt, Human adenovirus F
ggcggaugguggcaag

SEQ ID NO: 3939333 - RNA, 22 nt, Human adenovirus F
ggcggccauggaucgcauccug

SEQ ID NO: 3939334 - RNA, 13 nt, Human adenovirus F
ggcggcccugcaa

SEQ ID NO: 3939335 - RNA, 13 nt, Human adenovirus F
ggcgguugagguc

SEQ ID NO: 3939336 - RNA, 20 nt, Human adenovirus F
ggcguggccuccguggccuu

SEQ ID NO: 3939337 - RNA, 20 nt, Human adenovirus F
ggcgugggaguuggaggaga

SEQ ID NO: 3939338 - RNA, 23 nt, Human adenovirus F
ggcguguacaccaacgaggccuu

SEQ ID NO: 3939339 - RNA, 14 nt, Human adenovirus F
ggcuacccccgccc

SEQ ID NO: 3939340 - RNA, 17 nt, Human adenovirus F
ggcuacccccgcccgcc

SEQ ID NO: 3939341 - RNA, 15 nt, Human adenovirus F
ggcugcuucugccag

SEQ ID NO: 3939342 - RNA, 16 nt, Human adenovirus F
ggcugcuucugccagu

SEQ ID NO: 3939343 - RNA, 13 nt, Human adenovirus F
ggcuucugccaga

SEQ ID NO: 3939344 - RNA, 17 nt, Human adenovirus F
ggcuugcauaaaagcuu

SEQ ID NO: 3939345 - RNA, 13 nt, Human adenovirus F
gggaauggagcug

SEQ ID NO: 3939346 - RNA, 12 nt, Human adenovirus F
gggaccagcugu

SEQ ID NO: 3939347 - RNA, 13 nt, Human adenovirus F
gggauggguaagu

SEQ ID NO: 3939348 - RNA, 22 nt, Human adenovirus F
gggauucuaagggaggcagcag

SEQ ID NO: 3939349 - RNA, 16 nt, Human adenovirus F
gggcaggaggacuaug

SEQ ID NO: 3939350 - RNA, 23 nt, Human adenovirus F
gggcauuaaugggcaaaggggga

SEQ ID NO: 3939351 - RNA, 19 nt, Human adenovirus F
gggcccugaccgaccuggg

SEQ ID NO: 3939352 - RNA, 13 nt, Human adenovirus F
gggccuggugcag

SEQ ID NO: 3939353 - RNA, 12 nt, Human adenovirus F
gggcgcgguggu

SEQ ID NO: 3939354 - RNA, 16 nt, Human adenovirus F
gggcggcgguaacaag

SEQ ID NO: 3939355 - RNA, 18 nt, Human adenovirus F
gggcucauugguccagca

SEQ ID NO: 3939356 - RNA, 15 nt, Human adenovirus F
ggggcggaccugcaa

SEQ ID NO: 3939357 - RNA, 22 nt, Human adenovirus F
ggguaacuuuuaugaaugugag

SEQ ID NO: 3939358 - RNA, 14 nt, Human adenovirus F
cgcccgccucccaa

SEQ ID NO: 3939359 - RNA, 12 nt, Human adenovirus F
cgcccugaaagu

SEQ ID NO: 3939360 - RNA, 18 nt, Human adenovirus F
cgccgcaccgcgcccguc

SEQ ID NO: 3939361 - RNA, 12 nt, Human adenovirus F
cgccgccccugg

SEQ ID NO: 3939362 - RNA, 17 nt, Human adenovirus F
cgccgccccuggccugu

SEQ ID NO: 3939363 - RNA, 22 nt, Human adenovirus F
cgccguggcuggcgggcaaagc

SEQ ID NO: 3939364 - RNA, 13 nt, Human adenovirus F
cgccuccaacaca

SEQ ID NO: 3939365 - RNA, 22 nt, Human adenovirus F
cgccuccaacacagccgccgcu

SEQ ID NO: 3939366 - RNA, 14 nt, Human adenovirus F
cgcgcccguccucc

SEQ ID NO: 3939367 - RNA, 12 nt, Human adenovirus F
cgcgcgggcagg

SEQ ID NO: 3939368 - RNA, 22 nt, Human adenovirus F
cgcggaagaagaugaggaggac

SEQ ID NO: 3939369 - RNA, 18 nt, Human adenovirus F
cgcggcggcuauugccag

SEQ ID NO: 3939370 - RNA, 23 nt, Human adenovirus F
cgcggggcaggagcugcgggccg

SEQ ID NO: 3939371 - RNA, 14 nt, Human adenovirus F
cgcggucggcacgc

SEQ ID NO: 3939372 - RNA, 18 nt, Human adenovirus F
cgcgugcuuagacccggc

SEQ ID NO: 3939373 - RNA, 15 nt, Human adenovirus F
cgcuagaccaacaaa

SEQ ID NO: 3939374 - RNA, 15 nt, Human adenovirus F
cgcuaucaggaagca

SEQ ID NO: 3939375 - RNA, 17 nt, Human adenovirus F
cgcuaucaggaagcagc

SEQ ID NO: 3939376 - RNA, 16 nt, Human adenovirus F
cgcuccagguggggcg

SEQ ID NO: 3939377 - RNA, 20 nt, Human adenovirus F
cgcuggcuuuuggaccuggu

SEQ ID NO: 3939378 - RNA, 14 nt, Human adenovirus F
cgcuguacugugca

SEQ ID NO: 3939379 - RNA, 21 nt, Human adenovirus F
cgcugugaguuuugagggugg

SEQ ID NO: 3939380 - RNA, 20 nt, Human adenovirus F
cgcuguggacgacagccagc

SEQ ID NO: 3939381 - RNA, 22 nt, Human adenovirus F
cgcuuucaguuggagcagccug

SEQ ID NO: 3939382 - RNA, 22 nt, Human adenovirus F
cggaacaaccuucaaacccagc

SEQ ID NO: 3939383 - RNA, 18 nt, Human adenovirus F
cggaagccgaaguccaaa

SEQ ID NO: 3939384 - RNA, 21 nt, Human adenovirus F
cggaaguuaaagugcgcccca

SEQ ID NO: 3939385 - RNA, 15 nt, Human adenovirus F
cggaccuuuuacugu

SEQ ID NO: 3939386 - RNA, 21 nt, Human adenovirus F
cggacgugagagaggcggugg

SEQ ID NO: 3939387 - RNA, 20 nt, Human adenovirus F
cggacucggaaccugaaaga

SEQ ID NO: 3939388 - RNA, 17 nt, Human adenovirus F
cggacuuggcgugcaga

SEQ ID NO: 3939389 - RNA, 16 nt, Human adenovirus F
cggaguaccugagccc

SEQ ID NO: 3939390 - RNA, 19 nt, Human adenovirus F
cggcaaaugcucugcaaaa

SEQ ID NO: 3939391 - RNA, 15 nt, Human adenovirus F
cggcaccagccagcu

SEQ ID NO: 3939392 - RNA, 12 nt, Human adenovirus F
cggcggccauga

SEQ ID NO: 3939393 - RNA, 14 nt, Human adenovirus F
cggcgggaagagga

SEQ ID NO: 3939394 - RNA, 24 nt, Human adenovirus F
cggcguaguugcguagacgcugga

SEQ ID NO: 3939395 - RNA, 19 nt, Human adenovirus F
cggcguucuagccaacacc

SEQ ID NO: 3939396 - RNA, 20 nt, Human adenovirus F
cggcuccugugcagcgcgcu

SEQ ID NO: 3939397 - RNA, 17 nt, Human adenovirus F
cggcuggggcagaacgu

SEQ ID NO: 3939398 - RNA, 24 nt, Human adenovirus F
cgggaagcaaccgcacaugccagc

SEQ ID NO: 3939399 - RNA, 22 nt, Human adenovirus F
cgggcacugcauacaacucccu

SEQ ID NO: 3939400 - RNA, 14 nt, Human adenovirus F
cgggcagccgguca

SEQ ID NO: 3939401 - RNA, 23 nt, Human adenovirus F
cgggcccgucgucaggccgcccg

SEQ ID NO: 3939402 - RNA, 12 nt, Human adenovirus F
cgggccuggugc

SEQ ID NO: 3939403 - RNA, 16 nt, Human adenovirus F
cggguuuaccuggugg

SEQ ID NO: 3939404 - RNA, 21 nt, Human adenovirus F
cggguuuuggacauggccagc

SEQ ID NO: 3939405 - RNA, 22 nt, Human adenovirus F
cgguacaagauuugacgaaaga

SEQ ID NO: 3939406 - RNA, 21 nt, Human adenovirus F
cgguauagccggugcacuugg

SEQ ID NO: 3939407 - RNA, 16 nt, Human adenovirus F
cgguugugcaguguua

SEQ ID NO: 3939408 - RNA, 16 nt, Human adenovirus F
cguaccaagccugacu

SEQ ID NO: 3939409 - RNA, 16 nt, Human adenovirus F
cguagcacucccucuu

SEQ ID NO: 3939410 - RNA, 14 nt, Human adenovirus F
cgucaacuccucuu

SEQ ID NO: 3939411 - RNA, 16 nt, Human adenovirus F
cgucacuuccgccgca

SEQ ID NO: 3939412 - RNA, 21 nt, Human adenovirus F
cgucacuuccgccgcaccgcg

SEQ ID NO: 3939413 - RNA, 17 nt, Human adenovirus F
cgucaugcucuggggug

SEQ ID NO: 3939414 - RNA, 18 nt, Human adenovirus F
cgucggcucuggacauga

SEQ ID NO: 3939415 - RNA, 13 nt, Human adenovirus F
cgugaccgagcag

SEQ ID NO: 3939416 - RNA, 20 nt, Human adenovirus F
cgugagagaggcgguggcgc

SEQ ID NO: 3939417 - RNA, 16 nt, Human adenovirus F
cguggcauggcagcag

SEQ ID NO: 3939418 - RNA, 22 nt, Human adenovirus F
cguggccuugcaagcagcucgc

SEQ ID NO: 3939419 - RNA, 16 nt, Human adenovirus F
cguggcucaauguaac

SEQ ID NO: 3939420 - RNA, 21 nt, Human adenovirus F
cguguagccuuuaacugcgca

SEQ ID NO: 3939421 - RNA, 19 nt, Human adenovirus F
cguuaguggaggcagcuuc

SEQ ID NO: 3939422 - RNA, 16 nt, Human adenovirus F
cguucgacggcggugg

SEQ ID NO: 3939423 - RNA, 20 nt, Human adenovirus F
cguucucuccccacagccgu

SEQ ID NO: 3939424 - RNA, 19 nt, Human adenovirus F
cguugcacgcucugcaucu

SEQ ID NO: 3939425 - RNA, 18 nt, Human adenovirus F
cguuuccucgauuuccau

SEQ ID NO: 3939426 - RNA, 19 nt, Human adenovirus F
cuaaaaaaacuccacccaa

SEQ ID NO: 3939427 - RNA, 13 nt, Human adenovirus F
cuaaaacaaacca

SEQ ID NO: 3939428 - RNA, 20 nt, Human adenovirus F
cuaagggaggcagcagagga

SEQ ID NO: 3939429 - RNA, 16 nt, Human adenovirus F
cuaaugcacagccugc

SEQ ID NO: 3939430 - RNA, 18 nt, Human adenovirus F
cuacaauuccacuggcaa

SEQ ID NO: 3939431 - RNA, 15 nt, Human adenovirus F
cuacggaggaagagg

SEQ ID NO: 3939432 - RNA, 16 nt, Human adenovirus F
cuacguccgcgacugc

SEQ ID NO: 3939433 - RNA, 22 nt, Human adenovirus F
cuacgugcacaaagcucugggc

SEQ ID NO: 3939434 - RNA, 19 nt, Human adenovirus F
cuagaccaacaaacgaaaa

SEQ ID NO: 3939435 - RNA, 15 nt, Human adenovirus F
cuagacgaggaggac

SEQ ID NO: 3939436 - RNA, 16 nt, Human adenovirus F
cuagccaacacccugu

SEQ ID NO: 3939437 - RNA, 24 nt, Human adenovirus F
cuagccaacuauuuggcccaccac

SEQ ID NO: 3939438 - RNA, 20 nt, Human adenovirus F
cuagggugugaaggcaaagg

SEQ ID NO: 3939439 - RNA, 17 nt, Human adenovirus F
cuauauaggacaaaaaa

SEQ ID NO: 3939440 - RNA, 19 nt, Human adenovirus F
cuaucccgccccugccacc

SEQ ID NO: 3939441 - RNA, 20 nt, Human adenovirus F
cuaucccgccccugccaccg

SEQ ID NO: 3939442 - RNA, 17 nt, Human adenovirus F
cuaugacaccuccucaa

SEQ ID NO: 3939443 - RNA, 16 nt, Human adenovirus F
cuauuaaugcaaacaa

SEQ ID NO: 3939444 - RNA, 14 nt, Human adenovirus F
cucaaacaacaaaa

SEQ ID NO: 3939445 - RNA, 12 nt, Human adenovirus F
cucaagcggguu

SEQ ID NO: 3939446 - RNA, 13 nt, Human adenovirus F
cucaccuggcaaa

SEQ ID NO: 3939447 - RNA, 20 nt, Human adenovirus F
cucagccugaaauacacuga

SEQ ID NO: 3939448 - RNA, 18 nt, Human adenovirus F
cucagggucgauggagcc

SEQ ID NO: 3939449 - RNA, 19 nt, Human adenovirus F
cucaucuucaccucuguuu

SEQ ID NO: 3939450 - RNA, 16 nt, Human adenovirus F
cucaugagcugggaga

SEQ ID NO: 3939451 - RNA, 15 nt, Human adenovirus F
cucauucgcacggcg

SEQ ID NO: 3939452 - RNA, 17 nt, Human adenovirus F
cucauuuucuuauguaa

SEQ ID NO: 3939453 - RNA, 18 nt, Human adenovirus F
cuccaaaggucagaaaaa

SEQ ID NO: 3939454 - RNA, 17 nt, Human adenovirus F
cucccaacaaccuaccc

SEQ ID NO: 3939455 - RNA, 15 nt, Human adenovirus F
ccuuacgucagcuac

SEQ ID NO: 3939456 - RNA, 19 nt, Human adenovirus F
ccuucacuccucgccaggc

SEQ ID NO: 3939457 - RNA, 18 nt, Human adenovirus F
ccuucaggcagcagcccc

SEQ ID NO: 3939458 - RNA, 17 nt, Human adenovirus F
ccuucgccgcagucucc

SEQ ID NO: 3939459 - RNA, 16 nt, Human adenovirus F
ccuugcaagcagcucg

SEQ ID NO: 3939460 - RNA, 23 nt, Human adenovirus F
ccuuugacaaucagggaaauuua

SEQ ID NO: 3939461 - RNA, 21 nt, Human adenovirus F
ccuuuucacccacccaccgcu

SEQ ID NO: 3939462 - RNA, 20 nt, Human adenovirus F
cgaaaaaugaugauggcagc

SEQ ID NO: 3939463 - RNA, 23 nt, Human adenovirus F
cgaaacuuccaacccaugagccg

SEQ ID NO: 3939464 - RNA, 22 nt, Human adenovirus F
cgaacacgcugccaacaaaugu

SEQ ID NO: 3939465 - RNA, 20 nt, Human adenovirus F
cgaagccuucaggcagcagc

SEQ ID NO: 3939466 - RNA, 19 nt, Human adenovirus F
cgaagcuagcauaaaagaa

SEQ ID NO: 3939467 - RNA, 13 nt, Human adenovirus F
cgaaugcccccca

SEQ ID NO: 3939468 - RNA, 16 nt, Human adenovirus F
cgaaugcccuuucaaa

SEQ ID NO: 3939469 - RNA, 21 nt, Human adenovirus F
cgaauugcagcccaccaugca

SEQ ID NO: 3939470 - RNA, 15 nt, Human adenovirus F
cgacagccaggcaga

SEQ ID NO: 3939471 - RNA, 15 nt, Human adenovirus F
cgaccucccaaaguc

SEQ ID NO: 3939472 - RNA, 15 nt, Human adenovirus F
cgaccugaaaaccau

SEQ ID NO: 3939473 - RNA, 16 nt, Human adenovirus F
cgacgcuuggcaccgc

SEQ ID NO: 3939474 - RNA, 18 nt, Human adenovirus F
cgacugggcggcggccau

SEQ ID NO: 3939475 - RNA, 18 nt, Human adenovirus F
cgagccaccaucuccagc

SEQ ID NO: 3939476 - RNA, 14 nt, Human adenovirus F
cgagcgccaucccc

SEQ ID NO: 3939477 - RNA, 22 nt, Human adenovirus F
cgaggacggcaaggaaccagug

SEQ ID NO: 3939478 - RNA, 23 nt, Human adenovirus F
cgaggagguagaaguggaggaaa

SEQ ID NO: 3939479 - RNA, 22 nt, Human adenovirus F
cgaggccaaacccccguuccca

SEQ ID NO: 3939480 - RNA, 19 nt, Human adenovirus F
cgaggccuuucacccagac

SEQ ID NO: 3939481 - RNA, 23 nt, Human adenovirus F
cgaggcuuuccgcgaggccaugc

SEQ ID NO: 3939482 - RNA, 13 nt, Human adenovirus F
cgcaacacaucca

SEQ ID NO: 3939483 - RNA, 13 nt, Human adenovirus F
cgcacccuggugg

SEQ ID NO: 3939484 - RNA, 15 nt, Human adenovirus F
cgcacuggaugccac

SEQ ID NO: 3939485 - RNA, 18 nt, Human adenovirus F
cgcagcagauccuucccg

SEQ ID NO: 3939486 - RNA, 18 nt, Human adenovirus F
cgcagccugagcugccag

SEQ ID NO: 3939487 - RNA, 14 nt, Human adenovirus F
cgcagcgacugacg

SEQ ID NO: 3939488 - RNA, 13 nt, Human adenovirus F
cgcagcuguuuuu

SEQ ID NO: 3939489 - RNA, 16 nt, Human adenovirus F
cgcaugccuccagcac

SEQ ID NO: 3939490 - RNA, 18 nt, Human adenovirus F
cgcaugccuccagcacug

SEQ ID NO: 3939491 - RNA, 17 nt, Human adenovirus F
cgcauuaccauuaguaa

SEQ ID NO: 3939492 - RNA, 15 nt, Human adenovirus F
cgccaguccaccgcg

SEQ ID NO: 3939493 - RNA, 13 nt, Human adenovirus F
cgccauagcugga

SEQ ID NO: 3939494 - RNA, 13 nt, Human adenovirus F
cgccauaggcgca

SEQ ID NO: 3939495 - RNA, 15 nt, Human adenovirus F
cgccaucaugagucu

SEQ ID NO: 3939496 - RNA, 16 nt, Human adenovirus F
cgccguaggagaggca

SEQ ID NO: 3939497 - RNA, 16 nt, Human adenovirus F
cgccucaugagcuggg

SEQ ID NO: 3939498 - RNA, 11 nt, Human adenovirus F
cgccuccacca

SEQ ID NO: 3939499 - RNA, 13 nt, Human adenovirus F
cgccuccaccacc

SEQ ID NO: 3939500 - RNA, 13 nt, Human adenovirus F
cgccuccuggugg

SEQ ID NO: 3939501 - RNA, 10 nt, Human adenovirus F
cgccuggaga

SEQ ID NO: 3939502 - RNA, 18 nt, Human adenovirus F
cgccuuaguugguaccaa

SEQ ID NO: 3939503 - RNA, 14 nt, Human adenovirus F
cgcgacagagcacc

SEQ ID NO: 3939504 - RNA, 14 nt, Human adenovirus F
cgcgcaaccagugg

SEQ ID NO: 3939505 - RNA, 23 nt, Human adenovirus F
cgcgcaacggcaaucccagcaga

SEQ ID NO: 3939506 - RNA, 14 nt, Human adenovirus F
cgcgcaccucuugu

SEQ ID NO: 3939507 - RNA, 15 nt, Human adenovirus F
cgcgcacgacgggga

SEQ ID NO: 3939508 - RNA, 18 nt, Human adenovirus F
cgcggacauuaccgcgcc

SEQ ID NO: 3939509 - RNA, 13 nt, Human adenovirus F
cgcgucugcugcu

SEQ ID NO: 3939510 - RNA, 15 nt, Human adenovirus F
cgcgucugcugcugc

SEQ ID NO: 3939511 - RNA, 16 nt, Human adenovirus F
cgcuaugugcagcagu

SEQ ID NO: 3939512 - RNA, 18 nt, Human adenovirus F
cgcucaccgcccagggaa

SEQ ID NO: 3939513 - RNA, 16 nt, Human adenovirus F
cgcugaccagcagcag

SEQ ID NO: 3939514 - RNA, 21 nt, Human adenovirus F
cgcugagugacgaucuggggg

SEQ ID NO: 3939515 - RNA, 17 nt, Human adenovirus F
cgcugccuuugcaauau

SEQ ID NO: 3939516 - RNA, 12 nt, Human adenovirus F
cgcuggcuccgc

SEQ ID NO: 3939517 - RNA, 15 nt, Human adenovirus F
cgcuggcuccgcggc

SEQ ID NO: 3939518 - RNA, 13 nt, Human adenovirus F
cgcugggagaaaa

SEQ ID NO: 3939519 - RNA, 23 nt, Human adenovirus F
cgcugucguuaguggaggcagcu

SEQ ID NO: 3939520 - RNA, 16 nt, Human adenovirus F
cggaaacaaaaaacuu

SEQ ID NO: 3939521 - RNA, 14 nt, Human adenovirus F
cggaaccugaaaga

SEQ ID NO: 3939522 - RNA, 15 nt, Human adenovirus F
cggaaggaaacgcug

SEQ ID NO: 3939523 - RNA, 18 nt, Human adenovirus F
cggaagggcggaacagca

SEQ ID NO: 3939524 - RNA, 13 nt, Human adenovirus F
cggagccaaccuc

SEQ ID NO: 3939525 - RNA, 15 nt, Human adenovirus F
cggagccggcggugg

SEQ ID NO: 3939526 - RNA, 16 nt, Human adenovirus F
cggcacgggcgcacgu

SEQ ID NO: 3939527 - RNA, 20 nt, Human adenovirus F
cggcauuaacggcguggugg

SEQ ID NO: 3939528 - RNA, 23 nt, Human adenovirus F
cggcgaugaaacuugauuuccau

SEQ ID NO: 3939529 - RNA, 14 nt, Human adenovirus F
cggcgccggacggg

SEQ ID NO: 3939530 - RNA, 13 nt, Human adenovirus F
cggcgccuccaac

SEQ ID NO: 3939531 - RNA, 22 nt, Human adenovirus F
cggcgugguggauauagccaac

SEQ ID NO: 3939532 - RNA, 23 nt, Human adenovirus F
cggcucuggacaugacggcacgu

SEQ ID NO: 3939533 - RNA, 22 nt, Human adenovirus F
cggcugcuucugccagugcagg

SEQ ID NO: 3939534 - RNA, 16 nt, Human adenovirus F
cggcuggggcagaacg

SEQ ID NO: 3939535 - RNA, 18 nt, Human adenovirus F
cgggaagaauacuaaaac

SEQ ID NO: 3939536 - RNA, 16 nt, Human adenovirus F
cgggcaguggccgccg

SEQ ID NO: 3939537 - RNA, 15 nt, Human adenovirus F
cggggcaggagcugc

SEQ ID NO: 3939538 - RNA, 12 nt, Human adenovirus F
cggggugggaaa

SEQ ID NO: 3939539 - RNA, 14 nt, Human adenovirus F
cgggucgcagcagg

SEQ ID NO: 3939540 - RNA, 18 nt, Human adenovirus F
cggguuagaaguaaccaa

SEQ ID NO: 3939541 - RNA, 18 nt, Human adenovirus F
cggguuuuauggcaccgc

SEQ ID NO: 3939542 - RNA, 22 nt, Human adenovirus F
cgguacuaaggcgggcacaaag

SEQ ID NO: 3939543 - RNA, 20 nt, Human adenovirus F
cgguggauaccgcugcagcu

SEQ ID NO: 3939544 - RNA, 16 nt, Human adenovirus F
cgguggcaacccugag

SEQ ID NO: 3939545 - RNA, 22 nt, Human adenovirus F
cgguggcaacccugaggaggag

SEQ ID NO: 3939546 - RNA, 16 nt, Human adenovirus F
cgguggcggacggguc

SEQ ID NO: 3939547 - RNA, 21 nt, Human adenovirus F
cgguuguuuuccaccaggggg

SEQ ID NO: 3939548 - RNA, 15 nt, Human adenovirus F
cgguuucaaacaugu

SEQ ID NO: 3939549 - RNA, 16 nt, Human adenovirus F
cguacaaguugcaaag

SEQ ID NO: 3939550 - RNA, 21 nt, Human adenovirus F
cguagacgcuggaagagguag

SEQ ID NO: 3939551 - RNA, 20 nt, Human adenovirus F
cguagagcucagcaaucuga

SEQ ID NO: 3939552 - RNA, 19 nt, Human adenovirus F
cguagaguuugggagccag

SEQ ID NO: 3939553 - RNA, 22 nt, Human adenovirus F
cguagguuuaaauuacacuaag

SEQ ID NO: 3939554 - RNA, 22 nt, Human adenovirus F
cgucaacuccucuugcaggagc

SEQ ID NO: 3939555 - RNA, 21 nt, Human adenovirus F
cgucaggccgcccgucaggcc

SEQ ID NO: 3939556 - RNA, 14 nt, Human adenovirus F
cgucauccgccucc

SEQ ID NO: 3939557 - RNA, 12 nt, Human adenovirus F
cgucccuggagu

SEQ ID NO: 3939558 - RNA, 20 nt, Human adenovirus F
cgucgcgaacucuggacguc

SEQ ID NO: 3939559 - RNA, 18 nt, Human adenovirus F
cgucuacccuuacgaaca

SEQ ID NO: 3939560 - RNA, 19 nt, Human adenovirus F
cgucugagccuuuguuccu

SEQ ID NO: 3939561 - RNA, 17 nt, Human adenovirus F
cgugaccgagcagcugc

SEQ ID NO: 3939562 - RNA, 17 nt, Human adenovirus F
cguggaaaaacuuggaa

SEQ ID NO: 3939563 - RNA, 21 nt, Human adenovirus F
cguggagccgacuucaagccc

SEQ ID NO: 3939564 - RNA, 21 nt, Human adenovirus F
cgugggaaggggccagcaagc

SEQ ID NO: 3939565 - RNA, 13 nt, Human adenovirus F
cgugguaaaaggg

SEQ ID NO: 3939566 - RNA, 14 nt, Human adenovirus F
cguucagccacucc

SEQ ID NO: 3939567 - RNA, 13 nt, Human adenovirus F
cguuguggacuuc

SEQ ID NO: 3939568 - RNA, 22 nt, Human adenovirus F
cguuguggagucacugcuaccu

SEQ ID NO: 3939569 - RNA, 16 nt, Human adenovirus F
cuaaaaacggagcuca

SEQ ID NO: 3939570 - RNA, 13 nt, Human adenovirus F
cuaaccacuacca

SEQ ID NO: 3939571 - RNA, 16 nt, Human adenovirus F
cuaacuggcagagcac

SEQ ID NO: 3939572 - RNA, 21 nt, Human adenovirus F
gcaaggguaaugucuuuccag

SEQ ID NO: 3939573 - RNA, 21 nt, Human adenovirus F
gcaaguuucgcaaaagcuggg

SEQ ID NO: 3939574 - RNA, 13 nt, Human adenovirus F
gcaauggcucugu

SEQ ID NO: 3939575 - RNA, 15 nt, Human adenovirus F
gcaccagccagcuca

SEQ ID NO: 3939576 - RNA, 16 nt, Human adenovirus F
gcaccagccagcucaa

SEQ ID NO: 3939577 - RNA, 18 nt, Human adenovirus F
gcaccauuguacgagaag

SEQ ID NO: 3939578 - RNA, 11 nt, Human adenovirus F
gcaccuucagu

SEQ ID NO: 3939579 - RNA, 13 nt, Human adenovirus F
gcacguuugacaa

SEQ ID NO: 3939580 - RNA, 19 nt, Human adenovirus F
gcacugguaaaccagcaca

SEQ ID NO: 3939581 - RNA, 17 nt, Human adenovirus F
gcagaaacaugccaccc

SEQ ID NO: 3939582 - RNA, 23 nt, Human adenovirus F
gcagagcccauugauccccaaca

SEQ ID NO: 3939583 - RNA, 18 nt, Human adenovirus F
gcagcagccccaggccaa

SEQ ID NO: 3939584 - RNA, 20 nt, Human adenovirus F
gcagccugagcugccagagg

SEQ ID NO: 3939585 - RNA, 16 nt, Human adenovirus F
gcagcgcacgcuggag

SEQ ID NO: 3939586 - RNA, 20 nt, Human adenovirus F
gcagcgccacucgggaaaga

SEQ ID NO: 3939587 - RNA, 20 nt, Human adenovirus F
gcagcgggaagagaggcagc

SEQ ID NO: 3939588 - RNA, 14 nt, Human adenovirus F
gcagcgggcaggag

SEQ ID NO: 3939589 - RNA, 21 nt, Human adenovirus F
gcagcguguccuuuggcgcga

SEQ ID NO: 3939590 - RNA, 19 nt, Human adenovirus F
gcagcucgcaaacaauaaa

SEQ ID NO: 3939591 - RNA, 19 nt, Human adenovirus F
gcagggugcgauugaaaua

SEQ ID NO: 3939592 - RNA, 21 nt, Human adenovirus F
gcagguaggaccacuggaggg

SEQ ID NO: 3939593 - RNA, 15 nt, Human adenovirus F
gcaguaucaguggag

SEQ ID NO: 3939594 - RNA, 13 nt, Human adenovirus F
gcaguccacuuaa

SEQ ID NO: 3939595 - RNA, 22 nt, Human adenovirus F
gcaguccacuuaacagcuccuc

SEQ ID NO: 3939596 - RNA, 15 nt, Human adenovirus F
gcagugguggauggg

SEQ ID NO: 3939597 - RNA, 21 nt, Human adenovirus F
gcagugucaauagcauacaga

SEQ ID NO: 3939598 - RNA, 22 nt, Human adenovirus F
gcaguguuauaagguccacacu

SEQ ID NO: 3939599 - RNA, 19 nt, Human adenovirus F
gcauaaaagaagcacagga

SEQ ID NO: 3939600 - RNA, 23 nt, Human adenovirus F
gcauaaaguugcgggugauuuug

SEQ ID NO: 3939601 - RNA, 23 nt, Human adenovirus F
gcauacguuacucggagcuggcg

SEQ ID NO: 3939602 - RNA, 16 nt, Human adenovirus F
gcauccaccagccgca

SEQ ID NO: 3939603 - RNA, 23 nt, Human adenovirus F
gcauccucccaacaaccuaccca

SEQ ID NO: 3939604 - RNA, 16 nt, Human adenovirus F
gcaugccuccagcacu

SEQ ID NO: 3939605 - RNA, 20 nt, Human adenovirus F
gcaugccuccagcacugccg

SEQ ID NO: 3939606 - RNA, 14 nt, Human adenovirus F
gcauggcucagccc

SEQ ID NO: 3939607 - RNA, 16 nt, Human adenovirus F
gcauguacggcggcgc

SEQ ID NO: 3939608 - RNA, 21 nt, Human adenovirus F
gcauuaggccgucccugggau

SEQ ID NO: 3939609 - RNA, 14 nt, Human adenovirus F
gccaacuauuuggc

SEQ ID NO: 3939610 - RNA, 19 nt, Human adenovirus F
gccaaugggcuccagcgag

SEQ ID NO: 3939611 - RNA, 13 nt, Human adenovirus F
gccagaaaaaacc

SEQ ID NO: 3939612 - RNA, 21 nt, Human adenovirus F
gccagaaaaaacccuuaacaa

SEQ ID NO: 3939613 - RNA, 13 nt, Human adenovirus F
gccagacgcaggu

SEQ ID NO: 3939614 - RNA, 20 nt, Human adenovirus F
gccagcauggcucagccccg

SEQ ID NO: 3939615 - RNA, 18 nt, Human adenovirus F
gccagccuccgguggcuc

SEQ ID NO: 3939616 - RNA, 18 nt, Human adenovirus F
gccauucuuaacccgcac

SEQ ID NO: 3939617 - RNA, 14 nt, Human adenovirus F
gccauuuuggaagc

SEQ ID NO: 3939618 - RNA, 15 nt, Human adenovirus F
gccccccaauccaaa

SEQ ID NO: 3939619 - RNA, 17 nt, Human adenovirus F
gccccgcccacugaccg

SEQ ID NO: 3939620 - RNA, 23 nt, Human adenovirus F
gcccgaccuguauacgggaagga

SEQ ID NO: 3939621 - RNA, 12 nt, Human adenovirus F
gcccgggcacau

SEQ ID NO: 3939622 - RNA, 17 nt, Human adenovirus F
gcccgggcacaucagaa

SEQ ID NO: 3939623 - RNA, 14 nt, Human adenovirus F
gcccgggcccugga

SEQ ID NO: 3939624 - RNA, 19 nt, Human adenovirus F
gcccgggccuggugcaguu

SEQ ID NO: 3939625 - RNA, 23 nt, Human adenovirus F
gcccuccuuugcgcgaacagagu

SEQ ID NO: 3939626 - RNA, 13 nt, Human adenovirus F
gcccuggccugga

SEQ ID NO: 3939627 - RNA, 18 nt, Human adenovirus F
gccgccaggugguagaca

SEQ ID NO: 3939628 - RNA, 23 nt, Human adenovirus F
gccgccaugacugccgcucgggc

SEQ ID NO: 3939629 - RNA, 15 nt, Human adenovirus F
gccgcccgucaggcc

SEQ ID NO: 3939630 - RNA, 18 nt, Human adenovirus F
gccggcaacgcugcaggc

SEQ ID NO: 3939631 - RNA, 17 nt, Human adenovirus F
gccggugauggcguacg

SEQ ID NO: 3939632 - RNA, 14 nt, Human adenovirus F
gccguggacgcacg

SEQ ID NO: 3939633 - RNA, 22 nt, Human adenovirus F
gccuacaacuacggagaugcag

SEQ ID NO: 3939634 - RNA, 17 nt, Human adenovirus F
gccucagggucaacugg

SEQ ID NO: 3939635 - RNA, 15 nt, Human adenovirus F
gccuccaacacagcc

SEQ ID NO: 3939636 - RNA, 21 nt, Human adenovirus F
gccucuacugcucguggcaug

SEQ ID NO: 3939637 - RNA, 17 nt, Human adenovirus F
gccugagcugccagagg

SEQ ID NO: 3939638 - RNA, 20 nt, Human adenovirus F
gccuguggaguggcauuaaa

SEQ ID NO: 3939639 - RNA, 19 nt, Human adenovirus F
gccuugcaaaaccaaauca

SEQ ID NO: 3939640 - RNA, 18 nt, Human adenovirus F
gccuugggaugcagccuu

SEQ ID NO: 3939641 - RNA, 23 nt, Human adenovirus F
gccuuguaugggcagcauccuuu

SEQ ID NO: 3939642 - RNA, 21 nt, Human adenovirus F
gccuuucacccucgucgcccu

SEQ ID NO: 3939643 - RNA, 21 nt, Human adenovirus F
gccuuuugcaucucaaagcug

SEQ ID NO: 3939644 - RNA, 15 nt, Human adenovirus F
gcgaaauugggcugc

SEQ ID NO: 3939645 - RNA, 14 nt, Human adenovirus F
gcgaaugcccccca

SEQ ID NO: 3939646 - RNA, 13 nt, Human adenovirus F
gcgaaugcccuuu

SEQ ID NO: 3939647 - RNA, 13 nt, Human adenovirus F
gcgcaccucuugu

SEQ ID NO: 3939648 - RNA, 15 nt, Human adenovirus F
gcgccucaauuuuua

SEQ ID NO: 3939649 - RNA, 16 nt, Human adenovirus F
gcgcgaacagaguggg

SEQ ID NO: 3939650 - RNA, 21 nt, Human adenovirus F
gcgcgaacagagugggggcaa

SEQ ID NO: 3939651 - RNA, 17 nt, Human adenovirus F
gcgcgacagagcaccau

SEQ ID NO: 3939652 - RNA, 19 nt, Human adenovirus F
gcgcgcucgucgggaagca

SEQ ID NO: 3939653 - RNA, 20 nt, Human adenovirus F
gcgcggaagaagaugaggag

SEQ ID NO: 3939654 - RNA, 14 nt, Human adenovirus F
gcgcuugccagggu

SEQ ID NO: 3939655 - RNA, 14 nt, Human adenovirus F
gcggagccugaggg

SEQ ID NO: 3939656 - RNA, 17 nt, Human adenovirus F
gcggcaaugcuuuugau

SEQ ID NO: 3939657 - RNA, 24 nt, Human adenovirus F
gcgggcaggagcccgaagagauga

SEQ ID NO: 3939658 - RNA, 14 nt, Human adenovirus F
gcggggcaggagcu

SEQ ID NO: 3939659 - RNA, 15 nt, Human adenovirus F
gcggggcaggagcug

SEQ ID NO: 3939660 - RNA, 18 nt, Human adenovirus F
gcggguuaaaaagcgaga

SEQ ID NO: 3939661 - RNA, 22 nt, Human adenovirus F
gcgguugcggccacgcgagaga

SEQ ID NO: 3939662 - RNA, 18 nt, Human adenovirus F
gcguagaguuugggagcc

SEQ ID NO: 3939663 - RNA, 15 nt, Human adenovirus F
gcgucgcuggcuccg

SEQ ID NO: 3939664 - RNA, 16 nt, Human adenovirus F
gcgucggcgccacacu

SEQ ID NO: 3939665 - RNA, 20 nt, Human adenovirus F
gcgugcuuagacccggcacu

SEQ ID NO: 3939666 - RNA, 20 nt, Human adenovirus F
gcguggccuccguggccuug

SEQ ID NO: 3939667 - RNA, 22 nt, Human adenovirus F
gcguuacgcgcaacgcaagaga

SEQ ID NO: 3939668 - RNA, 14 nt, Human adenovirus F
gcuaaccugugcag

SEQ ID NO: 3939669 - RNA, 15 nt, Human adenovirus F
gcuaacuuguggaga

SEQ ID NO: 3939670 - RNA, 14 nt, Human adenovirus F
gcuaauuuuucacc

SEQ ID NO: 3939671 - RNA, 23 nt, Human adenovirus F
gcuacucaacagaaaccucuucc

SEQ ID NO: 3939672 - RNA, 17 nt, Human adenovirus F
gcuagaaugucacugcc

SEQ ID NO: 3939673 - RNA, 22 nt, Human adenovirus F
gcuaucaggaagcagcucaggu

SEQ ID NO: 3939674 - RNA, 16 nt, Human adenovirus F
gcuauugccagcaugg

SEQ ID NO: 3939675 - RNA, 13 nt, Human adenovirus F
gcucauccugcug

SEQ ID NO: 3939676 - RNA, 13 nt, Human adenovirus F
gcuccuggcgagc

SEQ ID NO: 3939677 - RNA, 15 nt, Human adenovirus F
gcucgcuacauccau

SEQ ID NO: 3939678 - RNA, 20 nt, Human adenovirus F
gcucuaacgggcaccggcac

SEQ ID NO: 3939679 - RNA, 22 nt, Human adenovirus F
gcucugaacacuuuugccaaag

SEQ ID NO: 3939680 - RNA, 17 nt, Human adenovirus F
gcucugcaucucuugaa

SEQ ID NO: 3939681 - RNA, 12 nt, Human adenovirus F
gcucugcuuaac

SEQ ID NO: 3939682 - RNA, 21 nt, Human adenovirus F
gcucugguagaaagcaaagcc

SEQ ID NO: 3939683 - RNA, 13 nt, Human adenovirus F
gcucuucuuccuc

SEQ ID NO: 3939684 - RNA, 18 nt, Human adenovirus F
gcugacccuucccaacgc

SEQ ID NO: 3939685 - RNA, 14 nt, Human adenovirus F
gcugacggccggcc

SEQ ID NO: 3939686 - RNA, 18 nt, Human adenovirus F
gcugaugcauuuguggga

SEQ ID NO: 3939687 - RNA, 22 nt, Human adenovirus F
gcugccagaggccguagcccgu

SEQ ID NO: 3939688 - RNA, 12 nt, Human adenovirus F
uagcauaaaaga

SEQ ID NO: 3939689 - RNA, 22 nt, Human adenovirus F
uagcauaaaggggaccagcugu

SEQ ID NO: 3939690 - RNA, 16 nt, Human adenovirus F
uaggcuuuaacaacac

SEQ ID NO: 3939691 - RNA, 19 nt, Human adenovirus F
uagugaaacaugaggagga

SEQ ID NO: 3939692 - RNA, 22 nt, Human adenovirus F
uaucacuaaaaccaacaaaauc

SEQ ID NO: 3939693 - RNA, 18 nt, Human adenovirus F
uaucccgcgcuaaaucuu

SEQ ID NO: 3939694 - RNA, 17 nt, Human adenovirus F
uaugcagacaagacaug

SEQ ID NO: 3939695 - RNA, 14 nt, Human adenovirus F
uaugccaacuuuuu

SEQ ID NO: 3939696 - RNA, 11 nt, Human adenovirus F
uauggaggagg

SEQ ID NO: 3939697 - RNA, 13 nt, Human adenovirus F
uaugucugccaaa

SEQ ID NO: 3939698 - RNA, 15 nt, Human adenovirus F
uauuuuaaaaugguu

SEQ ID NO: 3939699 - RNA, 19 nt, Human adenovirus F
ucaaaaucuucaaacauua

SEQ ID NO: 3939700 - RNA, 16 nt, Human adenovirus F
ucaaacaaccagcgcu

SEQ ID NO: 3939701 - RNA, 18 nt, Human adenovirus F
ucaaagacgccgccuugc

SEQ ID NO: 3939702 - RNA, 16 nt, Human adenovirus F
ucaaccaacuaacacu

SEQ ID NO: 3939703 - RNA, 14 nt, Human adenovirus F
ucaacucagaauug

SEQ ID NO: 3939704 - RNA, 14 nt, Human adenovirus F
ucaacuccucuugc

SEQ ID NO: 3939705 - RNA, 16 nt, Human adenovirus F
ucaagaaacacaaaca

SEQ ID NO: 3939706 - RNA, 19 nt, Human adenovirus F
ucaagaaacacaaacauag

SEQ ID NO: 3939707 - RNA, 20 nt, Human adenovirus F
ucaagggauugacgcagcaa

SEQ ID NO: 3939708 - RNA, 20 nt, Human adenovirus F
ucaauagcauacagaagacc

SEQ ID NO: 3939709 - RNA, 14 nt, Human adenovirus F
ucacccaaagccaa

SEQ ID NO: 3939710 - RNA, 12 nt, Human adenovirus F
ucacccacccac

SEQ ID NO: 3939711 - RNA, 12 nt, Human adenovirus F
ucaccuacaacc

SEQ ID NO: 3939712 - RNA, 18 nt, Human adenovirus F
ucaccuacucuggcuccg

SEQ ID NO: 3939713 - RNA, 18 nt, Human adenovirus F
ucacgcuguaccaggagg

SEQ ID NO: 3939714 - RNA, 14 nt, Human adenovirus F
ucacugaaagccag

SEQ ID NO: 3939715 - RNA, 15 nt, Human adenovirus F
ucacugaaagccagc

SEQ ID NO: 3939716 - RNA, 17 nt, Human adenovirus F
ucacugcuaccuccucc

SEQ ID NO: 3939717 - RNA, 23 nt, Human adenovirus F
ucagaaaccccaccguggcuccc

SEQ ID NO: 3939718 - RNA, 20 nt, Human adenovirus F
ucagacggccguaccaagcc

SEQ ID NO: 3939719 - RNA, 23 nt, Human adenovirus F
ucagacggccguaccaagccuga

SEQ ID NO: 3939720 - RNA, 15 nt, Human adenovirus F
ucagcaugagcaagc

SEQ ID NO: 3939721 - RNA, 16 nt, Human adenovirus F
ucagccacuccugcag

SEQ ID NO: 3939722 - RNA, 18 nt, Human adenovirus F
ucauccaaguuuuuacaa

SEQ ID NO: 3939723 - RNA, 12 nt, Human adenovirus F
ucauccgccucc

SEQ ID NO: 3939724 - RNA, 23 nt, Human adenovirus F
ucauuaucauauuggcucguuuc

SEQ ID NO: 3939725 - RNA, 15 nt, Human adenovirus F
uccaagugccccaga

SEQ ID NO: 3939726 - RNA, 13 nt, Human adenovirus F
uccaccagccgca

SEQ ID NO: 3939727 - RNA, 19 nt, Human adenovirus F
uccacguaccagaaagcua

SEQ ID NO: 3939728 - RNA, 12 nt, Human adenovirus F
uccagccucaaa

SEQ ID NO: 3939729 - RNA, 14 nt, Human adenovirus F
uccauaaugauggc

SEQ ID NO: 3939730 - RNA, 20 nt, Human adenovirus F
uccaugccuuucucccaggc

SEQ ID NO: 3939731 - RNA, 14 nt, Human adenovirus F
ucccaaaaaaagaa

SEQ ID NO: 3939732 - RNA, 14 nt, Human adenovirus F
ucccaacacuuuca

SEQ ID NO: 3939733 - RNA, 15 nt, Human adenovirus F
ucccagcagaaacua

SEQ ID NO: 3939734 - RNA, 14 nt, Human adenovirus F
ucccaggcguggcc

SEQ ID NO: 3939735 - RNA, 18 nt, Human adenovirus F
ucccgccccugccaccgc

SEQ ID NO: 3939736 - RNA, 19 nt, Human adenovirus F
uccgcagacgaacacaaua

SEQ ID NO: 3939737 - RNA, 16 nt, Human adenovirus F
uccgccauugccaccc

SEQ ID NO: 3939738 - RNA, 12 nt, Human adenovirus F
uccgcccgcucc

SEQ ID NO: 3939739 - RNA, 16 nt, Human adenovirus F
uccuaacgccacuuuu

SEQ ID NO: 3939740 - RNA, 14 nt, Human adenovirus F
uccuauuacagccc

SEQ ID NO: 3939741 - RNA, 23 nt, Human adenovirus F
uccucgauuuccauaaacuccuc

SEQ ID NO: 3939742 - RNA, 17 nt, Human adenovirus F
uccuucacaaaguccug

SEQ ID NO: 3939743 - RNA, 15 nt, Human adenovirus F
ucgaaggcugccggc

SEQ ID NO: 3939744 - RNA, 15 nt, Human adenovirus F
ucgauggagccagcg

SEQ ID NO: 3939745 - RNA, 17 nt, Human adenovirus F
ucgcaaacaauaaaaga

SEQ ID NO: 3939746 - RNA, 19 nt, Human adenovirus F
ucgcaagguaagcuaagga

SEQ ID NO: 3939747 - RNA, 15 nt, Human adenovirus F
ucgcauccuggcccu

SEQ ID NO: 3939748 - RNA, 23 nt, Human adenovirus F
ucgccagcgacaaggcaccaucu

SEQ ID NO: 3939749 - RNA, 16 nt, Human adenovirus F
ucgccaguccaccgcg

SEQ ID NO: 3939750 - RNA, 15 nt, Human adenovirus F
ucgccgcgcaggggc

SEQ ID NO: 3939751 - RNA, 15 nt, Human adenovirus F
ucgccuaacaucacc

SEQ ID NO: 3939752 - RNA, 17 nt, Human adenovirus F
ucgcgaaauugggcugc

SEQ ID NO: 3939753 - RNA, 14 nt, Human adenovirus F
ucgcuccagguggg

SEQ ID NO: 3939754 - RNA, 19 nt, Human adenovirus F
ucgcuccagguggggcggc

SEQ ID NO: 3939755 - RNA, 21 nt, Human adenovirus F
ucgggcccgucgucaggccgc

SEQ ID NO: 3939756 - RNA, 17 nt, Human adenovirus F
ucgucgcccucuucugc

SEQ ID NO: 3939757 - RNA, 23 nt, Human adenovirus F
ucgugcccguggaaaaagacagc

SEQ ID NO: 3939758 - RNA, 16 nt, Human adenovirus F
ucuaaugccuuaacau

SEQ ID NO: 3939759 - RNA, 23 nt, Human adenovirus F
ucuagauaauaacuuucuuacac

SEQ ID NO: 3939760 - RNA, 14 nt, Human adenovirus F
ucucaucuucaccu

SEQ ID NO: 3939761 - RNA, 22 nt, Human adenovirus F
ucuccugcacgucgccagaguu

SEQ ID NO: 3939762 - RNA, 19 nt, Human adenovirus F
ucugauaauguguguuuuu

SEQ ID NO: 3939763 - RNA, 15 nt, Human adenovirus F
ucugaucucuuacau

SEQ ID NO: 3939764 - RNA, 20 nt, Human adenovirus F
ucugcaaaaacaaauacagu

SEQ ID NO: 3939765 - RNA, 20 nt, Human adenovirus F
ucugcagcagcgcccgccuc

SEQ ID NO: 3939766 - RNA, 20 nt, Human adenovirus F
ucugccaccagccggaggag

SEQ ID NO: 3939767 - RNA, 20 nt, Human adenovirus F
ucugccaucgcugaccagca

SEQ ID NO: 3939768 - RNA, 23 nt, Human adenovirus F
ucuggaaucagcaucuuaggaag

SEQ ID NO: 3939769 - RNA, 22 nt, Human adenovirus F
ucuguaacaccgagcuucuuag

SEQ ID NO: 3939770 - RNA, 16 nt, Human adenovirus F
ucuuaaguuauacagu

SEQ ID NO: 3939771 - RNA, 17 nt, Human adenovirus F
ucuucgcccugaaaguc

SEQ ID NO: 3939772 - RNA, 12 nt, Human adenovirus F
ucuuucuuacaa

SEQ ID NO: 3939773 - RNA, 13 nt, Human adenovirus F
ucuuugccaccuu

SEQ ID NO: 3939774 - RNA, 21 nt, Human adenovirus F
ugaaaaccauuuugcgcacca

SEQ ID NO: 3939775 - RNA, 18 nt, Human adenovirus F
ugaaaagaaccagaauug

SEQ ID NO: 3939776 - RNA, 18 nt, Human adenovirus F
ugaaaucacaguugggac

SEQ ID NO: 3939777 - RNA, 10 nt, Human adenovirus F
ugaaauuaau

SEQ ID NO: 3939778 - RNA, 12 nt, Human adenovirus F
ugaaccacgcug

SEQ ID NO: 3939779 - RNA, 22 nt, Human adenovirus F
ugaacccgguguacaccaccuc

SEQ ID NO: 3939780 - RNA, 16 nt, Human adenovirus F
ugaaccggaaaaccaa

SEQ ID NO: 3939781 - RNA, 22 nt, Human adenovirus F
ugaacguacucuuuugccacgc

SEQ ID NO: 3939782 - RNA, 11 nt, Human adenovirus F
ugaagaccaau

SEQ ID NO: 3939783 - RNA, 22 nt, Human adenovirus F
ugaagccauucuucucuucggc

SEQ ID NO: 3939784 - RNA, 15 nt, Human adenovirus F
ugaaguuucacacuu

SEQ ID NO: 3939785 - RNA, 16 nt, Human adenovirus F
ugacaacggacgugag

SEQ ID NO: 3939786 - RNA, 19 nt, Human adenovirus F
ugacacgggcacucuucgc

SEQ ID NO: 3939787 - RNA, 20 nt, Human adenovirus F
ugacacgucaccgccaagag

SEQ ID NO: 3939788 - RNA, 15 nt, Human adenovirus F
ugaccaaggacuggu

SEQ ID NO: 3939789 - RNA, 17 nt, Human adenovirus F
ugacgaagacauucuug

SEQ ID NO: 3939790 - RNA, 14 nt, Human adenovirus F
ugacgugccugagg

SEQ ID NO: 3939791 - RNA, 17 nt, Human adenovirus F
ugacgugccugagggcg

SEQ ID NO: 3939792 - RNA, 22 nt, Human adenovirus F
ugagcuuggauuaggaagggca

SEQ ID NO: 3939793 - RNA, 13 nt, Human adenovirus F
ugaggacgagccc

SEQ ID NO: 3939794 - RNA, 14 nt, Human adenovirus F
ugauccacuuacaa

SEQ ID NO: 3939795 - RNA, 14 nt, Human adenovirus F
ugaugcaccucuug

SEQ ID NO: 3939796 - RNA, 15 nt, Human adenovirus F
ugcaaagcucccaaa

SEQ ID NO: 3939797 - RNA, 14 nt, Human adenovirus F
ugcaauggcagccc

SEQ ID NO: 3939798 - RNA, 18 nt, Human adenovirus F
ugcacugccaucugcagc

SEQ ID NO: 3939799 - RNA, 16 nt, Human adenovirus F
ugcacuuaacuguucu

SEQ ID NO: 3939800 - RNA, 23 nt, Human adenovirus F
ugcagcagcgcccgccucccaaa

SEQ ID NO: 3939801 - RNA, 12 nt, Human adenovirus F
ugcagcccacca

SEQ ID NO: 3939802 - RNA, 21 nt, Human adenovirus F
ugcagcccaccaugcaacuca

SEQ ID NO: 3939803 - RNA, 14 nt, Human adenovirus F
ugcagcgguaucug

SEQ ID NO: 3939804 - RNA, 22 nt, Human adenovirus F
ugcaguucgcccgugccaccga

SEQ ID NO: 3939805 - RNA, 13 nt, Human adenovirus F
cccuucccgacau

SEQ ID NO: 3939806 - RNA, 14 nt, Human adenovirus F
ccgaaguccaaaug

SEQ ID NO: 3939807 - RNA, 17 nt, Human adenovirus F
ccgacuacuuacuccca

SEQ ID NO: 3939808 - RNA, 16 nt, Human adenovirus F
gaugucauaaacguaa

SEQ ID NO: 3939809 - RNA, 21 nt, Human adenovirus F
gauguccuuaaggaggaggcu

SEQ ID NO: 3939810 - RNA, 14 nt, Human adenovirus F
gauuuggaagauga

SEQ ID NO: 3939811 - RNA, 18 nt, Human adenovirus F
gauuuuucuucuccuggc

SEQ ID NO: 3939812 - RNA, 22 nt, Human adenovirus F
gcaaaaaaacgaaaccgagaau

SEQ ID NO: 3939813 - RNA, 17 nt, Human adenovirus F
gcaaacaacgaacuuuc

SEQ ID NO: 3939814 - RNA, 15 nt, Human adenovirus F
gcaaacaauaaaaga

SEQ ID NO: 3939815 - RNA, 21 nt, Human adenovirus F
gcaaacgagaggaccacuuaa

SEQ ID NO: 3939816 - RNA, 22 nt, Human adenovirus F
gcaaacggugaacgaggagcgc

SEQ ID NO: 3939817 - RNA, 19 nt, Human adenovirus F
acggcggaugguggcaagg

SEQ ID NO: 3939818 - RNA, 17 nt, Human adenovirus F
acgggcggcaaaugcuc

SEQ ID NO: 3939819 - RNA, 21 nt, Human adenovirus F
acgggcggcaaaugcucugca

SEQ ID NO: 3939820 - RNA, 14 nt, Human adenovirus F
acgggcuggcuucc

SEQ ID NO: 3939821 - RNA, 15 nt, Human adenovirus F
acguacucuuuugcc

SEQ ID NO: 3939822 - RNA, 17 nt, Human adenovirus F
acgucauccgccuccac

SEQ ID NO: 3939823 - RNA, 18 nt, Human adenovirus F
acgucccaucauuuccac

SEQ ID NO: 3939824 - RNA, 19 nt, Human adenovirus F
acgugggacgacagccagg

SEQ ID NO: 3939825 - RNA, 19 nt, Human adenovirus F
acguucgucguuuccccaa

SEQ ID NO: 3939826 - RNA, 22 nt, Human adenovirus F
acuaagccucucgcucugcaaa

SEQ ID NO: 3939827 - RNA, 14 nt, Human adenovirus F
acuaaugcacagcc

SEQ ID NO: 3939828 - RNA, 18 nt, Human adenovirus F
acuaugccuuccgucaug

SEQ ID NO: 3939829 - RNA, 17 nt, Human adenovirus F
acucauccauaaugaug

SEQ ID NO: 3939830 - RNA, 14 nt, Human adenovirus F
acuccucuuccucc

SEQ ID NO: 3939831 - RNA, 12 nt, Human adenovirus F
acuccucuugca

SEQ ID NO: 3939832 - RNA, 18 nt, Human adenovirus F
acucggagcuggcgccuc

SEQ ID NO: 3939833 - RNA, 17 nt, Human adenovirus F
acucuuuauuuuucuga

SEQ ID NO: 3939834 - RNA, 12 nt, Human adenovirus F
acugaccccauu

SEQ ID NO: 3939835 - RNA, 15 nt, Human adenovirus F
acugauccacuuaca

SEQ ID NO: 3939836 - RNA, 21 nt, Human adenovirus F
acugcauacaacucccuggcc

SEQ ID NO: 3939837 - RNA, 15 nt, Human adenovirus F
acugccacugaaacc

SEQ ID NO: 3939838 - RNA, 15 nt, Human adenovirus F
acugcggacuaccua

SEQ ID NO: 3939839 - RNA, 17 nt, Human adenovirus F
acugcuaaagggaacug

SEQ ID NO: 3939840 - RNA, 21 nt, Human adenovirus F
acugcuaaagggaacugccag

SEQ ID NO: 3939841 - RNA, 14 nt, Human adenovirus F
acugcuaccuccuc

SEQ ID NO: 3939842 - RNA, 20 nt, Human adenovirus F
acugcuagaaugucacugcc

SEQ ID NO: 3939843 - RNA, 16 nt, Human adenovirus F
acuggaguaacacaau

SEQ ID NO: 3939844 - RNA, 21 nt, Human adenovirus F
acugggugcgagaugcgucgg

SEQ ID NO: 3939845 - RNA, 13 nt, Human adenovirus F
acugguaaaccag

SEQ ID NO: 3939846 - RNA, 15 nt, Human adenovirus F
acugucaggcucuga

SEQ ID NO: 3939847 - RNA, 21 nt, Human adenovirus F
acuguuaauauacguaaaugu

SEQ ID NO: 3939848 - RNA, 16 nt, Human adenovirus F
acuucaccaaugccau

SEQ ID NO: 3939849 - RNA, 16 nt, Human adenovirus F
acuucauugguuugau

SEQ ID NO: 3939850 - RNA, 15 nt, Human adenovirus F
acuuccagcuguugg

SEQ ID NO: 3939851 - RNA, 17 nt, Human adenovirus F
acuuccagcuguuggag

SEQ ID NO: 3939852 - RNA, 15 nt, Human adenovirus F
acuuggggaauuugu

SEQ ID NO: 3939853 - RNA, 18 nt, Human adenovirus F
acuuuaaacaagcaaaga

SEQ ID NO: 3939854 - RNA, 15 nt, Human adenovirus F
acuuucuccacgucc

SEQ ID NO: 3939855 - RNA, 23 nt, Human adenovirus F
acuuuuuuuguggccauuuucca

SEQ ID NO: 3939856 - RNA, 15 nt, Human adenovirus F
agaaaacgaaaacuu

SEQ ID NO: 3939857 - RNA, 22 nt, Human adenovirus F
agaaaccccaccguggcuccca

SEQ ID NO: 3939858 - RNA, 23 nt, Human adenovirus F
agaaaccccaccguggcucccac

SEQ ID NO: 3939859 - RNA, 19 nt, Human adenovirus F
agaaacuacaaaagcagug

SEQ ID NO: 3939860 - RNA, 19 nt, Human adenovirus F
agaaauuuagauuuuucuu

SEQ ID NO: 3939861 - RNA, 15 nt, Human adenovirus F
agaacaaaacacacu

SEQ ID NO: 3939862 - RNA, 19 nt, Human adenovirus F
agaaccuugcuacggagga

SEQ ID NO: 3939863 - RNA, 20 nt, Human adenovirus F
agaacguguugguagagcug

SEQ ID NO: 3939864 - RNA, 23 nt, Human adenovirus F
agaagaugcccuguccguggugu

SEQ ID NO: 3939865 - RNA, 19 nt, Human adenovirus F
agaaguggaggaaaaacua

SEQ ID NO: 3939866 - RNA, 15 nt, Human adenovirus F
agaauacuaaaacaa

SEQ ID NO: 3939867 - RNA, 18 nt, Human adenovirus F
agaauuuaugccuagcuc

SEQ ID NO: 3939868 - RNA, 13 nt, Human adenovirus F
agacaaaacacua

SEQ ID NO: 3939869 - RNA, 17 nt, Human adenovirus F
agacacauuggcuggag

SEQ ID NO: 3939870 - RNA, 13 nt, Human adenovirus F
agaccaacaaacg

SEQ ID NO: 3939871 - RNA, 14 nt, Human adenovirus F
agacccauuuccaa

SEQ ID NO: 3939872 - RNA, 14 nt, Human adenovirus F
agagcuaaggagga

SEQ ID NO: 3939873 - RNA, 19 nt, Human adenovirus F
agaggaacguauuuugcgc

SEQ ID NO: 3939874 - RNA, 17 nt, Human adenovirus F
agaggcgguggcgcagc

SEQ ID NO: 3939875 - RNA, 23 nt, Human adenovirus F
agagugagguguaccaguccggg

SEQ ID NO: 3939876 - RNA, 13 nt, Human adenovirus F
agaguuugggagc

SEQ ID NO: 3939877 - RNA, 16 nt, Human adenovirus F
agaugcgauuuuccaa

SEQ ID NO: 3939878 - RNA, 23 nt, Human adenovirus F
agaugcgccucaugagcugggag

SEQ ID NO: 3939879 - RNA, 18 nt, Human adenovirus F
agaugcguccgacggcgc

SEQ ID NO: 3939880 - RNA, 23 nt, Human adenovirus F
agauggaaaacgagggggaggac

SEQ ID NO: 3939881 - RNA, 22 nt, Human adenovirus F
agauggcgugggaguuggagga

SEQ ID NO: 3939882 - RNA, 17 nt, Human adenovirus F
agauuuuggacuguaca

SEQ ID NO: 3939883 - RNA, 21 nt, Human adenovirus F
agauuuuucuucuccuggccg

SEQ ID NO: 3939884 - RNA, 19 nt, Human adenovirus F
agcaagccgcugacggcgc

SEQ ID NO: 3939885 - RNA, 19 nt, Human adenovirus F
agcaccaccugcccuuccu

SEQ ID NO: 3939886 - RNA, 14 nt, Human adenovirus F
agcacugcggugga

SEQ ID NO: 3939887 - RNA, 13 nt, Human adenovirus F
agcagagcucugc

SEQ ID NO: 3939888 - RNA, 17 nt, Human adenovirus F
agcagauggagagcugg

SEQ ID NO: 3939889 - RNA, 15 nt, Human adenovirus F
agcaggccgcccaac

SEQ ID NO: 3939890 - RNA, 20 nt, Human adenovirus F
agcagggugcgauugaaaua

SEQ ID NO: 3939891 - RNA, 14 nt, Human adenovirus F
agcauaauaacucu

SEQ ID NO: 3939892 - RNA, 21 nt, Human adenovirus F
agcauugugguacaggagcgc

SEQ ID NO: 3939893 - RNA, 22 nt, Human adenovirus F
agccaaaucgcgcaaccagugg

SEQ ID NO: 3939894 - RNA, 15 nt, Human adenovirus F
agccaacuauuuggc

SEQ ID NO: 3939895 - RNA, 12 nt, Human adenovirus F
agccaaugggcu

SEQ ID NO: 3939896 - RNA, 17 nt, Human adenovirus F
agccacaauaagcagcu

SEQ ID NO: 3939897 - RNA, 13 nt, Human adenovirus F
agccacuccugca

SEQ ID NO: 3939898 - RNA, 17 nt, Human adenovirus F
agccacuccugcagucc

SEQ ID NO: 3939899 - RNA, 21 nt, Human adenovirus F
agccagcucaacgggggcgcu

SEQ ID NO: 3939900 - RNA, 23 nt, Human adenovirus F
agccaguggacaaaccaaaacaa

SEQ ID NO: 3939901 - RNA, 16 nt, Human adenovirus F
agcccauaaaagcaau

SEQ ID NO: 3939902 - RNA, 17 nt, Human adenovirus F
agcccggguccaggcua

SEQ ID NO: 3939903 - RNA, 19 nt, Human adenovirus F
agccgacuucaagcccaau

SEQ ID NO: 3939904 - RNA, 17 nt, Human adenovirus F
agccgaugcccaacgcu

SEQ ID NO: 3939905 - RNA, 12 nt, Human adenovirus F
agccgccagccu

SEQ ID NO: 3939906 - RNA, 16 nt, Human adenovirus F
agccgcugacggcgca

SEQ ID NO: 3939907 - RNA, 16 nt, Human adenovirus F
agccggaggagugggc

SEQ ID NO: 3939908 - RNA, 16 nt, Human adenovirus F
agccucucgcucugca

SEQ ID NO: 3939909 - RNA, 15 nt, Human adenovirus F
agccugaaacgccgc

SEQ ID NO: 3939910 - RNA, 16 nt, Human adenovirus F
agccugaagcccgcaa

SEQ ID NO: 3939911 - RNA, 12 nt, Human adenovirus F
agccuguggagu

SEQ ID NO: 3939912 - RNA, 12 nt, Human adenovirus F
agccuuuaacug

SEQ ID NO: 3939913 - RNA, 18 nt, Human adenovirus F
agcgagcaggaguugguc

SEQ ID NO: 3939914 - RNA, 14 nt, Human adenovirus F
agcgcagcaccgca

SEQ ID NO: 3939915 - RNA, 17 nt, Human adenovirus F
agcggaauaaguccggc

SEQ ID NO: 3939916 - RNA, 19 nt, Human adenovirus F
agcggcacgucggcgugga

SEQ ID NO: 3939917 - RNA, 18 nt, Human adenovirus F
agcgggaacgcuuuaugc

SEQ ID NO: 3939918 - RNA, 19 nt, Human adenovirus F
agcguacgguugcccgcca

SEQ ID NO: 3939919 - RNA, 13 nt, Human adenovirus F
agcguaggagcua

SEQ ID NO: 3939920 - RNA, 12 nt, Human adenovirus F
cagccaguggga

SEQ ID NO: 3939921 - RNA, 18 nt, Human adenovirus F
cagccccaggccaaccgc

SEQ ID NO: 3939922 - RNA, 14 nt, Human adenovirus F
cagccgugaagcca

SEQ ID NO: 3939923 - RNA, 19 nt, Human adenovirus F
cagccgugaagccaaaucg

SEQ ID NO: 3939924 - RNA, 15 nt, Human adenovirus F
cagccuagacgagga

SEQ ID NO: 3939925 - RNA, 18 nt, Human adenovirus F
cagccugagcugccagag

SEQ ID NO: 3939926 - RNA, 16 nt, Human adenovirus F
cagcgacggaacgugg

SEQ ID NO: 3939927 - RNA, 19 nt, Human adenovirus F
cagcgcccgccucccaaag

SEQ ID NO: 3939928 - RNA, 18 nt, Human adenovirus F
cagcgcgugaccaucacu

SEQ ID NO: 3939929 - RNA, 12 nt, Human adenovirus F
cagcgggcacag

SEQ ID NO: 3939930 - RNA, 17 nt, Human adenovirus F
cagcguagcacucccuc

SEQ ID NO: 3939931 - RNA, 17 nt, Human adenovirus F
cagcguugagccggaag

SEQ ID NO: 3939932 - RNA, 22 nt, Human adenovirus F
cagcuaacucucuuacauuggc

SEQ ID NO: 3939933 - RNA, 16 nt, Human adenovirus F
cagcucaacgggggcg

SEQ ID NO: 3939934 - RNA, 20 nt, Human adenovirus F
cagcucacgucuucuacaca

SEQ ID NO: 3939935 - RNA, 22 nt, Human adenovirus F
cagcucgcaaacaauaaaagaa

SEQ ID NO: 3939936 - RNA, 17 nt, Human adenovirus F
cagcugaacccacccuc

SEQ ID NO: 3939937 - RNA, 18 nt, Human adenovirus F
cagcugcuaaccugugca

SEQ ID NO: 3939938 - RNA, 17 nt, Human adenovirus F
cagcuggagcuucucag

SEQ ID NO: 3939939 - RNA, 18 nt, Human adenovirus F
cagcugguaagcagccua

SEQ ID NO: 3939940 - RNA, 21 nt, Human adenovirus F
cagcuucucgaggccaaaccc

SEQ ID NO: 3939941 - RNA, 17 nt, Human adenovirus F
caggagacggguaaggg

SEQ ID NO: 3939942 - RNA, 19 nt, Human adenovirus F
caggagcagcgggaagaga

SEQ ID NO: 3939943 - RNA, 22 nt, Human adenovirus F
caggagcgcagucuaagccugg

SEQ ID NO: 3939944 - RNA, 23 nt, Human adenovirus F
caggaggcuauuggccagacgca

SEQ ID NO: 3939945 - RNA, 15 nt, Human adenovirus F
caggcagcagggugc

SEQ ID NO: 3939946 - RNA, 20 nt, Human adenovirus F
caggccaaccuagaccgacu

SEQ ID NO: 3939947 - RNA, 15 nt, Human adenovirus F
caggcucugagagug

SEQ ID NO: 3939948 - RNA, 19 nt, Human adenovirus F
cagggaucgcagcgggcag

SEQ ID NO: 3939949 - RNA, 21 nt, Human adenovirus F
cagggcgcuaacugugcaucu

SEQ ID NO: 3939950 - RNA, 20 nt, Human adenovirus F
cagguaggaccacuggaggg

SEQ ID NO: 3939951 - RNA, 14 nt, Human adenovirus F
caggucaaaugcuc

SEQ ID NO: 3939952 - RNA, 17 nt, Human adenovirus F
caggucguaaugaggac

SEQ ID NO: 3939953 - RNA, 21 nt, Human adenovirus F
cagguguacuggucccuuccc

SEQ ID NO: 3939954 - RNA, 16 nt, Human adenovirus F
caguaccgcuccauca

SEQ ID NO: 3939955 - RNA, 20 nt, Human adenovirus F
caguaggacgucagaacggc

SEQ ID NO: 3939956 - RNA, 16 nt, Human adenovirus F
cagugcaggaagagga

SEQ ID NO: 3939957 - RNA, 22 nt, Human adenovirus F
cagugcuuggaagagcaaaacc

SEQ ID NO: 3939958 - RNA, 23 nt, Human adenovirus F
caguggaauuggaaugccugcag

SEQ ID NO: 3939959 - RNA, 23 nt, Human adenovirus F
cagugggaccguaaaugacccca

SEQ ID NO: 3939960 - RNA, 15 nt, Human adenovirus F
cagugggacgaggag

SEQ ID NO: 3939961 - RNA, 14 nt, Human adenovirus F
caguucgcccgugc

SEQ ID NO: 3939962 - RNA, 14 nt, Human adenovirus F
caguuggagcagcc

SEQ ID NO: 3939963 - RNA, 21 nt, Human adenovirus F
caguuggagcagccuguggag

SEQ ID NO: 3939964 - RNA, 15 nt, Human adenovirus F
caguuuggcaaugga

SEQ ID NO: 3939965 - RNA, 22 nt, Human adenovirus F
cauaacuaaaaaaacuccaccc

SEQ ID NO: 3939966 - RNA, 15 nt, Human adenovirus F
cauagcugucucacc

SEQ ID NO: 3939967 - RNA, 20 nt, Human adenovirus F
cauauacuuuaaacaagcaa

SEQ ID NO: 3939968 - RNA, 16 nt, Human adenovirus F
caucaggggcucagga

SEQ ID NO: 3939969 - RNA, 18 nt, Human adenovirus F
cauccccgccgccccugg

SEQ ID NO: 3939970 - RNA, 18 nt, Human adenovirus F
cauccgccauugccaccc

SEQ ID NO: 3939971 - RNA, 19 nt, Human adenovirus F
caucugcagcauugccacu

SEQ ID NO: 3939972 - RNA, 17 nt, Human adenovirus F
caucuucuucugcaucc

SEQ ID NO: 3939973 - RNA, 14 nt, Human adenovirus F
caugaacacuuccg

SEQ ID NO: 3939974 - RNA, 23 nt, Human adenovirus F
caugaccaaaccuauugguucca

SEQ ID NO: 3939975 - RNA, 14 nt, Human adenovirus F
caugagcugggaga

SEQ ID NO: 3939976 - RNA, 13 nt, Human adenovirus F
caugaggaggaaa

SEQ ID NO: 3939977 - RNA, 20 nt, Human adenovirus F
caugagucuguuuggugggc

SEQ ID NO: 3939978 - RNA, 21 nt, Human adenovirus F
caugccacccaagggaaacaa

SEQ ID NO: 3939979 - RNA, 20 nt, Human adenovirus F
caugcccgagccggagaggg

SEQ ID NO: 3939980 - RNA, 22 nt, Human adenovirus F
caugcugcuguuuuuacuuugc

SEQ ID NO: 3939981 - RNA, 14 nt, Human adenovirus F
caugcuuagccucg

SEQ ID NO: 3939982 - RNA, 17 nt, Human adenovirus F
cauggcagcagauuuug

SEQ ID NO: 3939983 - RNA, 15 nt, Human adenovirus F
cauguacacuauggu

SEQ ID NO: 3939984 - RNA, 12 nt, Human adenovirus F
cauuaaaaacuu

SEQ ID NO: 3939985 - RNA, 21 nt, Human adenovirus F
cauuaauaguggcacagcaaa

SEQ ID NO: 3939986 - RNA, 22 nt, Human adenovirus F
cauuacuucacguuacuuaggc

SEQ ID NO: 3939987 - RNA, 22 nt, Human adenovirus F
cauucugagacaaaagcccggg

SEQ ID NO: 3939988 - RNA, 18 nt, Human adenovirus F
cauugguccagcaaaggc

SEQ ID NO: 3939989 - RNA, 18 nt, Human adenovirus F
cauuuaugcccaacagua

SEQ ID NO: 3939990 - RNA, 17 nt, Human adenovirus F
ccaaaacuuucaacaaa

SEQ ID NO: 3939991 - RNA, 21 nt, Human adenovirus F
ccaaagcagagcucugcaaaa

SEQ ID NO: 3939992 - RNA, 18 nt, Human adenovirus F
ccaaaguaucuugcaaaa

SEQ ID NO: 3939993 - RNA, 22 nt, Human adenovirus F
ccaaagucccccuuacagccug

SEQ ID NO: 3939994 - RNA, 19 nt, Human adenovirus F
ccaaaucaaucagcggcug

SEQ ID NO: 3939995 - RNA, 21 nt, Human adenovirus F
ccaacgggcggcaaacuuucu

SEQ ID NO: 3939996 - RNA, 18 nt, Human adenovirus F
ccaacgugcaggccaacc

SEQ ID NO: 3939997 - RNA, 18 nt, Human adenovirus F
ccaaucguagcaggguuu

SEQ ID NO: 3939998 - RNA, 13 nt, Human adenovirus F
ccacaacaacaaa

SEQ ID NO: 3939999 - RNA, 17 nt, Human adenovirus F
ccacaccugggaaaacc

SEQ ID NO: 3940000 - RNA, 17 nt, Human adenovirus F
ccacaguccuucugcca

SEQ ID NO: 3940001 - RNA, 18 nt, Human adenovirus F
ccaccgccgcaccacuga

SEQ ID NO: 3940002 - RNA, 19 nt, Human adenovirus F
ccaccuuggaagcaaugcu

SEQ ID NO: 3940003 - RNA, 20 nt, Human adenovirus F
ccacggaugugaccuguggg

SEQ ID NO: 3940004 - RNA, 16 nt, Human adenovirus F
ccacuuaccagagcca

SEQ ID NO: 3940005 - RNA, 18 nt, Human adenovirus F
ccagaguaacuuuugcca

SEQ ID NO: 3940006 - RNA, 16 nt, Human adenovirus F
ccagcauggcucagcc

SEQ ID NO: 3940007 - RNA, 21 nt, Human adenovirus F
ccagccccgguugugcagugu

SEQ ID NO: 3940008 - RNA, 19 nt, Human adenovirus F
ccagccuccgguggcucug

SEQ ID NO: 3940009 - RNA, 15 nt, Human adenovirus F
ccagcgcccgggccc

SEQ ID NO: 3940010 - RNA, 15 nt, Human adenovirus F
ccaguccgggccaga

SEQ ID NO: 3940011 - RNA, 16 nt, Human adenovirus F
ccaguccgggccagac

SEQ ID NO: 3940012 - RNA, 20 nt, Human adenovirus F
ccagucgcaugaauuggcuu

SEQ ID NO: 3940013 - RNA, 17 nt, Human adenovirus F
ccaguggccgcacucag

SEQ ID NO: 3940014 - RNA, 20 nt, Human adenovirus F
ccauauuauuuaaauaaaac

SEQ ID NO: 3940015 - RNA, 20 nt, Human adenovirus F
ccauccaucacgccaacgcc

SEQ ID NO: 3940016 - RNA, 18 nt, Human adenovirus F
ccaugcgccgagcggcug

SEQ ID NO: 3940017 - RNA, 11 nt, Human adenovirus F
ccauggagcua

SEQ ID NO: 3940018 - RNA, 10 nt, Human adenovirus F
ccauuuccaa

SEQ ID NO: 3940019 - RNA, 23 nt, Human adenovirus F
cccaacuauuugggaggggagga

SEQ ID NO: 3940020 - RNA, 23 nt, Human adenovirus F
cccaaguaaucgguaccuuugag

SEQ ID NO: 3940021 - RNA, 21 nt, Human adenovirus F
cccaccgaguuccugcgcugc

SEQ ID NO: 3940022 - RNA, 22 nt, Human adenovirus F
cccaccggcuccugugcagcgc

SEQ ID NO: 3940023 - RNA, 23 nt, Human adenovirus F
cccacgccuuacauguggagcua

SEQ ID NO: 3940024 - RNA, 15 nt, Human adenovirus F
cccagauuuccuggu

SEQ ID NO: 3940025 - RNA, 18 nt, Human adenovirus F
cccagcacuuggauuaca

SEQ ID NO: 3940026 - RNA, 12 nt, Human adenovirus F
cccagccgcacu

SEQ ID NO: 3940027 - RNA, 15 nt, Human adenovirus F
cccagcugguaagca

SEQ ID NO: 3940028 - RNA, 22 nt, Human adenovirus F
cccagcugugguuaaauuuaau

SEQ ID NO: 3940029 - RNA, 17 nt, Human adenovirus F
cccaggaucccucagag

SEQ ID NO: 3940030 - RNA, 19 nt, Human adenovirus F
cccaucaucgccgccgcca

SEQ ID NO: 3940031 - RNA, 14 nt, Human adenovirus F
auuaaguugggagg

SEQ ID NO: 3940032 - RNA, 23 nt, Human adenovirus F
auuaauaaagcuuaccuuaaauu

SEQ ID NO: 3940033 - RNA, 14 nt, Human adenovirus F
auuaauuacagcau

SEQ ID NO: 3940034 - RNA, 17 nt, Human adenovirus F
auuacauggcaauggcu

SEQ ID NO: 3940035 - RNA, 21 nt, Human adenovirus F
auuacuccagucgcaugaauu

SEQ ID NO: 3940036 - RNA, 14 nt, Human adenovirus F
auuaugagcaaaga

SEQ ID NO: 3940037 - RNA, 17 nt, Human adenovirus F
auucccuuuuccagcaa

SEQ ID NO: 3940038 - RNA, 13 nt, Human adenovirus F
auucugaagagga

SEQ ID NO: 3940039 - RNA, 19 nt, Human adenovirus F
auucuucaguugaaccacg

SEQ ID NO: 3940040 - RNA, 11 nt, Human adenovirus F
auugacgccga

SEQ ID NO: 3940041 - RNA, 13 nt, Human adenovirus F
auugccacccgcc

SEQ ID NO: 3940042 - RNA, 15 nt, Human adenovirus F
auuggucaaaaacuc

SEQ ID NO: 3940043 - RNA, 17 nt, Human adenovirus F
auugugguacaggagcg

SEQ ID NO: 3940044 - RNA, 20 nt, Human adenovirus F
auuuaauggcacaguguuug

SEQ ID NO: 3940045 - RNA, 17 nt, Human adenovirus F
auuuaugcccaacagua

SEQ ID NO: 3940046 - RNA, 15 nt, Human adenovirus F
auuuauuucuuuugc

SEQ ID NO: 3940047 - RNA, 16 nt, Human adenovirus F
auuucacgcaaagucg

SEQ ID NO: 3940048 - RNA, 15 nt, Human adenovirus F
auuuggagggcggca

SEQ ID NO: 3940049 - RNA, 20 nt, Human adenovirus F
auuugguaacaaggccugga

SEQ ID NO: 3940050 - RNA, 23 nt, Human adenovirus F
auuugguaacaaggccuggaaca

SEQ ID NO: 3940051 - RNA, 19 nt, Human adenovirus F
auuuggucagaaaauacaa

SEQ ID NO: 3940052 - RNA, 19 nt, Human adenovirus F
auuuuaauuuucaaucuug

SEQ ID NO: 3940053 - RNA, 16 nt, Human adenovirus F
auuuuccaugcacuca

SEQ ID NO: 3940054 - RNA, 17 nt, Human adenovirus F
caaaaacucugugaagu

SEQ ID NO: 3940055 - RNA, 22 nt, Human adenovirus F
caaacauuaaacgucaaugcca

SEQ ID NO: 3940056 - RNA, 18 nt, Human adenovirus F
caaacauuaagcugcaau

SEQ ID NO: 3940057 - RNA, 15 nt, Human adenovirus F
caaacccagccgcac

SEQ ID NO: 3940058 - RNA, 20 nt, Human adenovirus F
caaagcacacagaacaaaac

SEQ ID NO: 3940059 - RNA, 21 nt, Human adenovirus F
caaaucucgccuaacaucacc

SEQ ID NO: 3940060 - RNA, 16 nt, Human adenovirus F
caacaaaaauacauau

SEQ ID NO: 3940061 - RNA, 22 nt, Human adenovirus F
caacaaaaucaggaacuguuca

SEQ ID NO: 3940062 - RNA, 13 nt, Human adenovirus F
caacaaccuaccc

SEQ ID NO: 3940063 - RNA, 14 nt, Human adenovirus F
caacccgaccuaaa

SEQ ID NO: 3940064 - RNA, 23 nt, Human adenovirus F
caacccugaggaggaggccaucc

SEQ ID NO: 3940065 - RNA, 17 nt, Human adenovirus F
caaccgcacaugccagc

SEQ ID NO: 3940066 - RNA, 12 nt, Human adenovirus F
caacgcaguggu

SEQ ID NO: 3940067 - RNA, 16 nt, Human adenovirus F
caacgcagugguggac

SEQ ID NO: 3940068 - RNA, 17 nt, Human adenovirus F
caacuuuugcaccaggg

SEQ ID NO: 3940069 - RNA, 23 nt, Human adenovirus F
caagcccaauccucaagacuugg

SEQ ID NO: 3940070 - RNA, 18 nt, Human adenovirus F
caagcccauucugccagu

SEQ ID NO: 3940071 - RNA, 18 nt, Human adenovirus F
caagcggguuaaaaagcg

SEQ ID NO: 3940072 - RNA, 14 nt, Human adenovirus F
caagcuucucagcu

SEQ ID NO: 3940073 - RNA, 16 nt, Human adenovirus F
caaggaaugcacacag

SEQ ID NO: 3940074 - RNA, 21 nt, Human adenovirus F
caaggaugaggcgggacugau

SEQ ID NO: 3940075 - RNA, 19 nt, Human adenovirus F
caaggcguaaagacugaca

SEQ ID NO: 3940076 - RNA, 22 nt, Human adenovirus F
caaguauacauuugaacagcug

SEQ ID NO: 3940077 - RNA, 19 nt, Human adenovirus F
caagugucccacugcaacu

SEQ ID NO: 3940078 - RNA, 18 nt, Human adenovirus F
caauagcauacagaagac

SEQ ID NO: 3940079 - RNA, 15 nt, Human adenovirus F
caaucccagcagaaa

SEQ ID NO: 3940080 - RNA, 16 nt, Human adenovirus F
caauccuaacaaaaac

SEQ ID NO: 3940081 - RNA, 17 nt, Human adenovirus F
caaucgaccuaauuaca

SEQ ID NO: 3940082 - RNA, 20 nt, Human adenovirus F
caaucucuucguccuggagu

SEQ ID NO: 3940083 - RNA, 18 nt, Human adenovirus F
caauggaacgcaguguuu

SEQ ID NO: 3940084 - RNA, 13 nt, Human adenovirus F
caauggcagccca

SEQ ID NO: 3940085 - RNA, 18 nt, Human adenovirus F
caauggcagcccagcgcc

SEQ ID NO: 3940086 - RNA, 16 nt, Human adenovirus F
caauuccacuggcaac

SEQ ID NO: 3940087 - RNA, 15 nt, Human adenovirus F
caauucucucuccuu

SEQ ID NO: 3940088 - RNA, 13 nt, Human adenovirus F
cacaaaaacucca

SEQ ID NO: 3940089 - RNA, 21 nt, Human adenovirus F
cacaaagcugugagcgccagc

SEQ ID NO: 3940090 - RNA, 16 nt, Human adenovirus F
cacaaaguccuggcca

SEQ ID NO: 3940091 - RNA, 23 nt, Human adenovirus F
cacaaaguccuggccaacugcca

SEQ ID NO: 3940092 - RNA, 13 nt, Human adenovirus F
cacaauaagcagc

SEQ ID NO: 3940093 - RNA, 13 nt, Human adenovirus F
cacacaucacugu

SEQ ID NO: 3940094 - RNA, 13 nt, Human adenovirus F
cacagaucacgga

SEQ ID NO: 3940095 - RNA, 13 nt, Human adenovirus F
cacaggaagaggg

SEQ ID NO: 3940096 - RNA, 18 nt, Human adenovirus F
cacaggagauccguggag

SEQ ID NO: 3940097 - RNA, 20 nt, Human adenovirus F
cacaguguuugcuucuacca

SEQ ID NO: 3940098 - RNA, 18 nt, Human adenovirus F
cacauaagaagccagcca

SEQ ID NO: 3940099 - RNA, 17 nt, Human adenovirus F
cacauaucgucacuucc

SEQ ID NO: 3940100 - RNA, 23 nt, Human adenovirus F
cacauaucgucacuuccgccgca

SEQ ID NO: 3940101 - RNA, 16 nt, Human adenovirus F
cacauccagggcacag

SEQ ID NO: 3940102 - RNA, 18 nt, Human adenovirus F
cacauuggcuggaggcuu

SEQ ID NO: 3940103 - RNA, 22 nt, Human adenovirus F
caccaacgugcaggccaaccua

SEQ ID NO: 3940104 - RNA, 14 nt, Human adenovirus F
caccaacugcucuu

SEQ ID NO: 3940105 - RNA, 18 nt, Human adenovirus F
caccaauaugcccaacau

SEQ ID NO: 3940106 - RNA, 20 nt, Human adenovirus F
caccacauaagaagccagcc

SEQ ID NO: 3940107 - RNA, 13 nt, Human adenovirus F
caccagaugaugu

SEQ ID NO: 3940108 - RNA, 22 nt, Human adenovirus F
caccagcgugagucgggcucuu

SEQ ID NO: 3940109 - RNA, 22 nt, Human adenovirus F
caccaggucguaaugaggacau

SEQ ID NO: 3940110 - RNA, 20 nt, Human adenovirus F
caccaguagcuuggaagcca

SEQ ID NO: 3940111 - RNA, 15 nt, Human adenovirus F
cacccaaagccaaau

SEQ ID NO: 3940112 - RNA, 17 nt, Human adenovirus F
caccccuagucccuccu

SEQ ID NO: 3940113 - RNA, 23 nt, Human adenovirus F
caccccucuccgugcaaaacaau

SEQ ID NO: 3940114 - RNA, 13 nt, Human adenovirus F
cacccgcagcugc

SEQ ID NO: 3940115 - RNA, 19 nt, Human adenovirus F
cacccuauggaccaccgcg

SEQ ID NO: 3940116 - RNA, 22 nt, Human adenovirus F
caccgcaaugcuggucugcgcu

SEQ ID NO: 3940117 - RNA, 19 nt, Human adenovirus F
caccgccaagagcgccgcu

SEQ ID NO: 3940118 - RNA, 21 nt, Human adenovirus F
caccguuccgcccaugccggc

SEQ ID NO: 3940119 - RNA, 14 nt, Human adenovirus F
caccuacucuggcu

SEQ ID NO: 3940120 - RNA, 16 nt, Human adenovirus F
caccuacucuggcucc

SEQ ID NO: 3940121 - RNA, 23 nt, Human adenovirus F
caccuacuuugacauccgcggcg

SEQ ID NO: 3940122 - RNA, 13 nt, Human adenovirus F
caccuccucaacu

SEQ ID NO: 3940123 - RNA, 14 nt, Human adenovirus F
caccucgcucacau

SEQ ID NO: 3940124 - RNA, 16 nt, Human adenovirus F
caccuuacaccacccc

SEQ ID NO: 3940125 - RNA, 20 nt, Human adenovirus F
caccuuguguuuaagccaga

SEQ ID NO: 3940126 - RNA, 16 nt, Human adenovirus F
cacgcugacccuuccc

SEQ ID NO: 3940127 - RNA, 17 nt, Human adenovirus F
cacgcuguaccaggagg

SEQ ID NO: 3940128 - RNA, 17 nt, Human adenovirus F
cacggggucuauuugga

SEQ ID NO: 3940129 - RNA, 16 nt, Human adenovirus F
cacggguucucgccuc

SEQ ID NO: 3940130 - RNA, 22 nt, Human adenovirus F
cacgucauccgccuccacccuu

SEQ ID NO: 3940131 - RNA, 15 nt, Human adenovirus F
cacuccucgccaggc

SEQ ID NO: 3940132 - RNA, 13 nt, Human adenovirus F
cacugauccacuu

SEQ ID NO: 3940133 - RNA, 22 nt, Human adenovirus F
cacugauccacuuacaaccaaa

SEQ ID NO: 3940134 - RNA, 21 nt, Human adenovirus F
cacugccguugcaaccucugc

SEQ ID NO: 3940135 - RNA, 14 nt, Human adenovirus F
cacuuacaaccaaa

SEQ ID NO: 3940136 - RNA, 15 nt, Human adenovirus F
cacuuacaaccaaaa

SEQ ID NO: 3940137 - RNA, 23 nt, Human adenovirus F
cacuuuacuuaaacccacagcua

SEQ ID NO: 3940138 - RNA, 14 nt, Human adenovirus F
cacuuugccagagg

SEQ ID NO: 3940139 - RNA, 19 nt, Human adenovirus F
cagacgaacacaauauuua

SEQ ID NO: 3940140 - RNA, 17 nt, Human adenovirus F
cagacgucucaagcaac

SEQ ID NO: 3940141 - RNA, 18 nt, Human adenovirus F
cagagccauagcaacagc

SEQ ID NO: 3940142 - RNA, 23 nt, Human adenovirus F
cagaggaaguuucagacgaggag

SEQ ID NO: 3940143 - RNA, 19 nt, Human adenovirus F
cagaggccgguacccagac

SEQ ID NO: 3940144 - RNA, 18 nt, Human adenovirus F
cagauccuucccgugaca

SEQ ID NO: 3940145 - RNA, 16 nt, Human adenovirus F
cagcaggccgcuccca

SEQ ID NO: 3940146 - RNA, 17 nt, Human adenovirus F
cagcaguccgucagcuu

SEQ ID NO: 3940147 - RNA, 19 nt, Human adenovirus F
cagcaguccgucagcuugu

SEQ ID NO: 3940148 - RNA, 21 nt, Human adenovirus F
cagcaguuuugguuacagugg

SEQ ID NO: 3940149 - RNA, 15 nt, Human adenovirus F
agcgucagguuugac

SEQ ID NO: 3940150 - RNA, 14 nt, Human adenovirus F
agcgugagucgggc

SEQ ID NO: 3940151 - RNA, 14 nt, Human adenovirus F
agcuaucagccgca

SEQ ID NO: 3940152 - RNA, 18 nt, Human adenovirus F
agcucccuauauaggaca

SEQ ID NO: 3940153 - RNA, 20 nt, Human adenovirus F
agcuccucagcccguggaga

SEQ ID NO: 3940154 - RNA, 17 nt, Human adenovirus F
agcucuucaucccagcc

SEQ ID NO: 3940155 - RNA, 19 nt, Human adenovirus F
agcugcuaaccugugcaga

SEQ ID NO: 3940156 - RNA, 18 nt, Human adenovirus F
agcugggacagcggaggc

SEQ ID NO: 3940157 - RNA, 14 nt, Human adenovirus F
agcuucccaacacu

SEQ ID NO: 3940158 - RNA, 15 nt, Human adenovirus F
agcuugcccuuggaa

SEQ ID NO: 3940159 - RNA, 20 nt, Human adenovirus F
aggagcagauggagagcugg

SEQ ID NO: 3940160 - RNA, 21 nt, Human adenovirus F
aggagcugucucagcaguugc

SEQ ID NO: 3940161 - RNA, 17 nt, Human adenovirus F
aggaggaggagaaccug

SEQ ID NO: 3940162 - RNA, 13 nt, Human adenovirus F
aggaggaggccau

SEQ ID NO: 3940163 - RNA, 13 nt, Human adenovirus F
aggaggcggagga

SEQ ID NO: 3940164 - RNA, 15 nt, Human adenovirus F
aggagguacuccucg

SEQ ID NO: 3940165 - RNA, 16 nt, Human adenovirus F
aggauacaacguggcu

SEQ ID NO: 3940166 - RNA, 16 nt, Human adenovirus F
aggauccauagagggc

SEQ ID NO: 3940167 - RNA, 18 nt, Human adenovirus F
aggaucccucagagcugc

SEQ ID NO: 3940168 - RNA, 19 nt, Human adenovirus F
aggauuuacacaacgauuc

SEQ ID NO: 3940169 - RNA, 12 nt, Human adenovirus F
aggcaaagcaac

SEQ ID NO: 3940170 - RNA, 16 nt, Human adenovirus F
aggcagcagccccagg

SEQ ID NO: 3940171 - RNA, 14 nt, Human adenovirus F
aggccagucggcag

SEQ ID NO: 3940172 - RNA, 17 nt, Human adenovirus F
aggccauccuggaccug

SEQ ID NO: 3940173 - RNA, 19 nt, Human adenovirus F
aggccauccuggaccugga

SEQ ID NO: 3940174 - RNA, 16 nt, Human adenovirus F
aggcgauagucggugc

SEQ ID NO: 3940175 - RNA, 14 nt, Human adenovirus F
aggcggaaaccaag

SEQ ID NO: 3940176 - RNA, 20 nt, Human adenovirus F
aggcguggaaaaacuuggaa

SEQ ID NO: 3940177 - RNA, 14 nt, Human adenovirus F
agggaaggcgugga

SEQ ID NO: 3940178 - RNA, 17 nt, Human adenovirus F
agggaggcagcagagga

SEQ ID NO: 3940179 - RNA, 23 nt, Human adenovirus F
agggaucgcagcgggcaggagcc

SEQ ID NO: 3940180 - RNA, 18 nt, Human adenovirus F
agggcaaaaugggcuugc

SEQ ID NO: 3940181 - RNA, 17 nt, Human adenovirus F
agggcaacguucagcca

SEQ ID NO: 3940182 - RNA, 22 nt, Human adenovirus F
agggcaacguucagccacuccu

SEQ ID NO: 3940183 - RNA, 22 nt, Human adenovirus F
agggggaggacuuuuuaaagga

SEQ ID NO: 3940184 - RNA, 18 nt, Human adenovirus F
agggugcccgacuggggu

SEQ ID NO: 3940185 - RNA, 14 nt, Human adenovirus F
agggugugaaggca

SEQ ID NO: 3940186 - RNA, 18 nt, Human adenovirus F
agggugugaaggcaaagg

SEQ ID NO: 3940187 - RNA, 21 nt, Human adenovirus F
agguacagcccaacaccacca

SEQ ID NO: 3940188 - RNA, 14 nt, Human adenovirus F
agguccacacuggu

SEQ ID NO: 3940189 - RNA, 18 nt, Human adenovirus F
agguccgaccgcuggggu

SEQ ID NO: 3940190 - RNA, 17 nt, Human adenovirus F
aggucguaaugaggaca

SEQ ID NO: 3940191 - RNA, 23 nt, Human adenovirus F
aggugaugcugcugaugaggaaa

SEQ ID NO: 3940192 - RNA, 14 nt, Human adenovirus F
agguggggcggcga

SEQ ID NO: 3940193 - RNA, 19 nt, Human adenovirus F
agguucguugucgccccug

SEQ ID NO: 3940194 - RNA, 15 nt, Human adenovirus F
agguuuccaaaucau

SEQ ID NO: 3940195 - RNA, 19 nt, Human adenovirus F
aguagcucuuccaagcugc

SEQ ID NO: 3940196 - RNA, 15 nt, Human adenovirus F
agucauccaaaucau

SEQ ID NO: 3940197 - RNA, 21 nt, Human adenovirus F
aguccaaagcagagcucugca

SEQ ID NO: 3940198 - RNA, 13 nt, Human adenovirus F
aguccacaaaaac

SEQ ID NO: 3940199 - RNA, 17 nt, Human adenovirus F
agucccccuuacagccu

SEQ ID NO: 3940200 - RNA, 19 nt, Human adenovirus F
aguccuggccaacugccac

SEQ ID NO: 3940201 - RNA, 12 nt, Human adenovirus F
agucgaggaggu

SEQ ID NO: 3940202 - RNA, 14 nt, Human adenovirus F
agucuaagccuggc

SEQ ID NO: 3940203 - RNA, 18 nt, Human adenovirus F
agugacacgucaccgcca

SEQ ID NO: 3940204 - RNA, 14 nt, Human adenovirus F
agugcaggaagagg

SEQ ID NO: 3940205 - RNA, 17 nt, Human adenovirus F
agugccgccggugaugg

SEQ ID NO: 3940206 - RNA, 19 nt, Human adenovirus F
agugcggauuugggaacug

SEQ ID NO: 3940207 - RNA, 15 nt, Human adenovirus F
agugcuggccgggca

SEQ ID NO: 3940208 - RNA, 16 nt, Human adenovirus F
agugucgcgcaccaua

SEQ ID NO: 3940209 - RNA, 18 nt, Human adenovirus F
aguuagcucugaacacuu

SEQ ID NO: 3940210 - RNA, 14 nt, Human adenovirus F
aguuccucuucucu

SEQ ID NO: 3940211 - RNA, 17 nt, Human adenovirus F
aguugagcgugguggca

SEQ ID NO: 3940212 - RNA, 14 nt, Human adenovirus F
aguugguagcagug

SEQ ID NO: 3940213 - RNA, 17 nt, Human adenovirus F
auaaaauauuguuauuu

SEQ ID NO: 3940214 - RNA, 23 nt, Human adenovirus F
auaacgcuuuaucuguaaaacuu

SEQ ID NO: 3940215 - RNA, 21 nt, Human adenovirus F
auaacuuucuuacacuagcca

SEQ ID NO: 3940216 - RNA, 11 nt, Human adenovirus F
auaagcugggu

SEQ ID NO: 3940217 - RNA, 12 nt, Human adenovirus F
auacacucccuu

SEQ ID NO: 3940218 - RNA, 16 nt, Human adenovirus F
auaccgcugcagcugc

SEQ ID NO: 3940219 - RNA, 20 nt, Human adenovirus F
auacuucuccauguggaacc

SEQ ID NO: 3940220 - RNA, 22 nt, Human adenovirus F
auacuuuuucccaaaaaaagaa

SEQ ID NO: 3940221 - RNA, 15 nt, Human adenovirus F
auagccaaccaggcc

SEQ ID NO: 3940222 - RNA, 20 nt, Human adenovirus F
auagccggugcacuugggga

SEQ ID NO: 3940223 - RNA, 21 nt, Human adenovirus F
auaggcauuaggccgucccug

SEQ ID NO: 3940224 - RNA, 15 nt, Human adenovirus F
auauuggcuaccagg

SEQ ID NO: 3940225 - RNA, 18 nt, Human adenovirus F
aucacccaaagccaaauu

SEQ ID NO: 3940226 - RNA, 17 nt, Human adenovirus F
aucacgcccaccaaauu

SEQ ID NO: 3940227 - RNA, 16 nt, Human adenovirus F
aucaggaacuguucaa

SEQ ID NO: 3940228 - RNA, 19 nt, Human adenovirus F
aucauguccaccugagggg

SEQ ID NO: 3940229 - RNA, 17 nt, Human adenovirus F
auccagcaacucugaac

SEQ ID NO: 3940230 - RNA, 18 nt, Human adenovirus F
auccaucacgccaacgcc

SEQ ID NO: 3940231 - RNA, 21 nt, Human adenovirus F
aucccaaguggcccuuaaugc

SEQ ID NO: 3940232 - RNA, 16 nt, Human adenovirus F
auccccgccgccccug

SEQ ID NO: 3940233 - RNA, 23 nt, Human adenovirus F
auccgccuccacccuuucccacc

SEQ ID NO: 3940234 - RNA, 13 nt, Human adenovirus F
auccguggagccg

SEQ ID NO: 3940235 - RNA, 19 nt, Human adenovirus F
auccuccuucacaaagucc

SEQ ID NO: 3940236 - RNA, 23 nt, Human adenovirus F
auccuucccgugacagaaaucaa

SEQ ID NO: 3940237 - RNA, 15 nt, Human adenovirus F
aucgacguucucucc

SEQ ID NO: 3940238 - RNA, 19 nt, Human adenovirus F
aucgaggccgucuaccugc

SEQ ID NO: 3940239 - RNA, 23 nt, Human adenovirus F
aucgcuggacuuuacaaaaagag

SEQ ID NO: 3940240 - RNA, 15 nt, Human adenovirus F
aucggcaccagccag

SEQ ID NO: 3940241 - RNA, 16 nt, Human adenovirus F
aucucauucgcacggc

SEQ ID NO: 3940242 - RNA, 17 nt, Human adenovirus F
aucucauucgcacggcg

SEQ ID NO: 3940243 - RNA, 22 nt, Human adenovirus F
aucuccugcacgucgccagagu

SEQ ID NO: 3940244 - RNA, 23 nt, Human adenovirus F
aucuucaaacauuaagcugcaau

SEQ ID NO: 3940245 - RNA, 19 nt, Human adenovirus F
augagggauucuaagggag

SEQ ID NO: 3940246 - RNA, 19 nt, Human adenovirus F
augcaacuuggaagggaag

SEQ ID NO: 3940247 - RNA, 21 nt, Human adenovirus F
augcagcgcugccuuugcaau

SEQ ID NO: 3940248 - RNA, 14 nt, Human adenovirus F
augccuacaugaac

SEQ ID NO: 3940249 - RNA, 12 nt, Human adenovirus F
augccuagcucu

SEQ ID NO: 3940250 - RNA, 19 nt, Human adenovirus F
augcuacacaacaaaucau

SEQ ID NO: 3940251 - RNA, 15 nt, Human adenovirus F
augcuuuaccccaua

SEQ ID NO: 3940252 - RNA, 14 nt, Human adenovirus F
auggaacuaacugg

SEQ ID NO: 3940253 - RNA, 21 nt, Human adenovirus F
auggcagcccagcgcccgggc

SEQ ID NO: 3940254 - RNA, 15 nt, Human adenovirus F
auggcccgaccugua

SEQ ID NO: 3940255 - RNA, 16 nt, Human adenovirus F
augggcaccuggaacg

SEQ ID NO: 3940256 - RNA, 22 nt, Human adenovirus F
auggggguaccaacuugcaaaa

SEQ ID NO: 3940257 - RNA, 16 nt, Human adenovirus F
auggguuacuuucggc

SEQ ID NO: 3940258 - RNA, 18 nt, Human adenovirus F
augguaaaaaugccaggc

SEQ ID NO: 3940259 - RNA, 23 nt, Human adenovirus F
augguucuuucuccccaucgccg

SEQ ID NO: 3940260 - RNA, 13 nt, Human adenovirus F
auguaaaguucua

SEQ ID NO: 3940261 - RNA, 23 nt, Human adenovirus F
auguaacgccccccgaggacggc

SEQ ID NO: 3940262 - RNA, 17 nt, Human adenovirus F
auguccaccugaggggc

SEQ ID NO: 3940263 - RNA, 23 nt, Human adenovirus F
augugccgcgcgggcaggaggac

SEQ ID NO: 3940264 - RNA, 13 nt, Human adenovirus F
augugcucgcaaa

SEQ ID NO: 3940265 - RNA, 20 nt, Human adenovirus F
augugucuccgcugggagaa

SEQ ID NO: 3940266 - RNA, 20 nt, Human adenovirus F
auguguguuuuuuacugcua

SEQ ID NO: 3940267 - RNA, 14 nt, Human adenovirus F
auguuauugacauu

SEQ ID NO: 3940268 - RNA, 14 nt, Human adenovirus F
guucgccuggagag

SEQ ID NO: 3940269 - RNA, 12 nt, Human adenovirus F
guucggagccaa

SEQ ID NO: 3940270 - RNA, 15 nt, Human adenovirus F
guucguugucgcccc

SEQ ID NO: 3940271 - RNA, 15 nt, Human adenovirus F
guucuccguguccug

SEQ ID NO: 3940272 - RNA, 16 nt, Human adenovirus F
guugcauuauggccau

SEQ ID NO: 3940273 - RNA, 18 nt, Human adenovirus F
guugcccgccagcuggca

SEQ ID NO: 3940274 - RNA, 21 nt, Human adenovirus F
guugcguagacgcuggaagag

SEQ ID NO: 3940275 - RNA, 17 nt, Human adenovirus F
guuggcuucugccagaa

SEQ ID NO: 3940276 - RNA, 13 nt, Human adenovirus F
guugggagggaug

SEQ ID NO: 3940277 - RNA, 16 nt, Human adenovirus F
guuuguggguauauaa

SEQ ID NO: 3940278 - RNA, 14 nt, Human adenovirus F
guuuuaauggaaac

SEQ ID NO: 3940279 - RNA, 18 nt, Human adenovirus F
uaaaaacaaccaacuuca

SEQ ID NO: 3940280 - RNA, 14 nt, Human adenovirus F
uaaaaucaacauua

SEQ ID NO: 3940281 - RNA, 22 nt, Human adenovirus F
uaaacuccucuuccuccacagc

SEQ ID NO: 3940282 - RNA, 22 nt, Human adenovirus F
uaaagcucaaaaaggcacuuua

SEQ ID NO: 3940283 - RNA, 20 nt, Human adenovirus F
uaaagguguuaacgcugagu

SEQ ID NO: 3940284 - RNA, 19 nt, Human adenovirus F
uaacacaggucaaaugcuc

SEQ ID NO: 3940285 - RNA, 14 nt, Human adenovirus F
uaacagcuccucag

SEQ ID NO: 3940286 - RNA, 16 nt, Human adenovirus F
uaaccacuaccacccu

SEQ ID NO: 3940287 - RNA, 14 nt, Human adenovirus F
uaacccgccuuuuc

SEQ ID NO: 3940288 - RNA, 18 nt, Human adenovirus F
uaacccucaaacacugcg

SEQ ID NO: 3940289 - RNA, 18 nt, Human adenovirus F
uaacccuggaauuuuugc

SEQ ID NO: 3940290 - RNA, 12 nt, Human adenovirus F
uaacgccccccg

SEQ ID NO: 3940291 - RNA, 21 nt, Human adenovirus F
uaacggugaagcuucccaaca

SEQ ID NO: 3940292 - RNA, 14 nt, Human adenovirus F
uaacucucuuacau

SEQ ID NO: 3940293 - RNA, 14 nt, Human adenovirus F
uaacuuucuuacac

SEQ ID NO: 3940294 - RNA, 14 nt, Human adenovirus F
uaacuuuugccaca

SEQ ID NO: 3940295 - RNA, 17 nt, Human adenovirus F
uaagcagcuugaagaac

SEQ ID NO: 3940296 - RNA, 13 nt, Human adenovirus F
uaagcugcagcca

SEQ ID NO: 3940297 - RNA, 20 nt, Human adenovirus F
uaauggagcuauuacuuuag

SEQ ID NO: 3940298 - RNA, 18 nt, Human adenovirus F
uaauuccauaacuaaaaa

SEQ ID NO: 3940299 - RNA, 17 nt, Human adenovirus F
uacaaacaguaacaacu

SEQ ID NO: 3940300 - RNA, 19 nt, Human adenovirus F
uacaagcuauucagcaggc

SEQ ID NO: 3940301 - RNA, 14 nt, Human adenovirus F
uacacaacaaauca

SEQ ID NO: 3940302 - RNA, 14 nt, Human adenovirus F
uacacaccaaacuc

SEQ ID NO: 3940303 - RNA, 16 nt, Human adenovirus F
uacagcccccaccgcc

SEQ ID NO: 3940304 - RNA, 16 nt, Human adenovirus F
uaccaaagacaaaauc

SEQ ID NO: 3940305 - RNA, 19 nt, Human adenovirus F
uaccaaagacaaaaucacu

SEQ ID NO: 3940306 - RNA, 21 nt, Human adenovirus F
uaccaaagacaaaaucacugu

SEQ ID NO: 3940307 - RNA, 17 nt, Human adenovirus F
uaccaaucacggcuucc

SEQ ID NO: 3940308 - RNA, 17 nt, Human adenovirus F
uaccacagaaaugucca

SEQ ID NO: 3940309 - RNA, 16 nt, Human adenovirus F
uaccaccccagcacuu

SEQ ID NO: 3940310 - RNA, 18 nt, Human adenovirus F
uaccagaguaacuuuugc

SEQ ID NO: 3940311 - RNA, 23 nt, Human adenovirus F
uaccaggaggcuauuggccagac

SEQ ID NO: 3940312 - RNA, 21 nt, Human adenovirus F
uacgacuccacguaggcucuc

SEQ ID NO: 3940313 - RNA, 14 nt, Human adenovirus F
uacgcccaggagca

SEQ ID NO: 3940314 - RNA, 20 nt, Human adenovirus F
uacgccgaggguccuccucc

SEQ ID NO: 3940315 - RNA, 17 nt, Human adenovirus F
uacgccuccaccaccuu

SEQ ID NO: 3940316 - RNA, 20 nt, Human adenovirus F
uacggcggcgccaaacggcg

SEQ ID NO: 3940317 - RNA, 14 nt, Human adenovirus F
uacguaccgccuca

SEQ ID NO: 3940318 - RNA, 22 nt, Human adenovirus F
uacugggacagcaggccgcucc

SEQ ID NO: 3940319 - RNA, 13 nt, Human adenovirus F
uacuuuaaacaag

SEQ ID NO: 3940320 - RNA, 14 nt, Human adenovirus F
uagccaaccaggcc

SEQ ID NO: 3940321 - RNA, 22 nt, Human adenovirus F
uagccaacuauuuggcccacca

SEQ ID NO: 3940322 - RNA, 22 nt, Human adenovirus F
uagcuacuuucaucuuaacucu

SEQ ID NO: 3940323 - RNA, 23 nt, Human adenovirus F
uagcucuaaauaugucacagccu

SEQ ID NO: 3940324 - RNA, 18 nt, Human adenovirus F
uaggacgucagaacggcg

SEQ ID NO: 3940325 - RNA, 20 nt, Human adenovirus F
uagggcguagaguuugggag

SEQ ID NO: 3940326 - RNA, 17 nt, Human adenovirus F
uaggugacaaagaggcg

SEQ ID NO: 3940327 - RNA, 22 nt, Human adenovirus F
uagguggggccccugaggcagc

SEQ ID NO: 3940328 - RNA, 14 nt, Human adenovirus F
uaguaacuuucaaa

SEQ ID NO: 3940329 - RNA, 20 nt, Human adenovirus F
uaguuuaaggagaugcaacu

SEQ ID NO: 3940330 - RNA, 11 nt, Human adenovirus F
uauaagcaggu

SEQ ID NO: 3940331 - RNA, 21 nt, Human adenovirus F
uauaagcagguagaaugguuu

SEQ ID NO: 3940332 - RNA, 20 nt, Human adenovirus F
uauaaguauuacaaaugccu

SEQ ID NO: 3940333 - RNA, 17 nt, Human adenovirus F
uauacaccucccuuucc

SEQ ID NO: 3940334 - RNA, 20 nt, Human adenovirus F
uauaccauuaagaagacugu

SEQ ID NO: 3940335 - RNA, 15 nt, Human adenovirus F
uaucaggaagcagcu

SEQ ID NO: 3940336 - RNA, 20 nt, Human adenovirus F
uauccauuaaagcucaaaaa

SEQ ID NO: 3940337 - RNA, 23 nt, Human adenovirus F
uaugagcggaguaacacaaacau

SEQ ID NO: 3940338 - RNA, 12 nt, Human adenovirus F
uaugaugaguca

SEQ ID NO: 3940339 - RNA, 14 nt, Human adenovirus F
uaugggcagcaucc

SEQ ID NO: 3940340 - RNA, 16 nt, Human adenovirus F
uauuaaugcccacacc

SEQ ID NO: 3940341 - RNA, 19 nt, Human adenovirus F
uauuacaaaugccucccuu

SEQ ID NO: 3940342 - RNA, 22 nt, Human adenovirus F
uauucggcuugcauaaaagcuu

SEQ ID NO: 3940343 - RNA, 18 nt, Human adenovirus F
uauugcuuuauugccacc

SEQ ID NO: 3940344 - RNA, 21 nt, Human adenovirus F
uauugcuuuauugccaccgca

SEQ ID NO: 3940345 - RNA, 20 nt, Human adenovirus F
uauuuguauaaucuuaaaac

SEQ ID NO: 3940346 - RNA, 14 nt, Human adenovirus F
uauuuucaacuuua

SEQ ID NO: 3940347 - RNA, 18 nt, Human adenovirus F
ucaaaaaggcacuuuacu

SEQ ID NO: 3940348 - RNA, 22 nt, Human adenovirus F
ucaaaaguguuuauuuauuucu

SEQ ID NO: 3940349 - RNA, 22 nt, Human adenovirus F
ucaaaauugcagcgguaucugc

SEQ ID NO: 3940350 - RNA, 22 nt, Human adenovirus F
ucaaccaacuaacacugcgauu

SEQ ID NO: 3940351 - RNA, 21 nt, Human adenovirus F
ucaaccuucaagcccuacacc

SEQ ID NO: 3940352 - RNA, 13 nt, Human adenovirus F
ucaacgcaguggu

SEQ ID NO: 3940353 - RNA, 19 nt, Human adenovirus F
ucaagaaccaacgcauucc

SEQ ID NO: 3940354 - RNA, 22 nt, Human adenovirus F
ucaagcccuacaccaaugcaaa

SEQ ID NO: 3940355 - RNA, 15 nt, Human adenovirus F
ucaaggaaacaacag

SEQ ID NO: 3940356 - RNA, 19 nt, Human adenovirus F
ucaaucagcggcuggaaaa

SEQ ID NO: 3940357 - RNA, 20 nt, Human adenovirus F
ucacaccucuccccaccgcu

SEQ ID NO: 3940358 - RNA, 16 nt, Human adenovirus F
ucacccacccaccgcu

SEQ ID NO: 3940359 - RNA, 18 nt, Human adenovirus F
ucaccuuacaccaccccu

SEQ ID NO: 3940360 - RNA, 14 nt, Human adenovirus F
ucacgaccucccaa

SEQ ID NO: 3940361 - RNA, 15 nt, Human adenovirus F
ucacucucagcugcu

SEQ ID NO: 3940362 - RNA, 11 nt, Human adenovirus F
ucacuguuuuu

SEQ ID NO: 3940363 - RNA, 15 nt, Human adenovirus F
ucacuuugccagagg

SEQ ID NO: 3940364 - RNA, 14 nt, Human adenovirus F
ucagaccacaacaa

SEQ ID NO: 3940365 - RNA, 21 nt, Human adenovirus F
ucagagcucuucaucccagcc

SEQ ID NO: 3940366 - RNA, 15 nt, Human adenovirus F
ucagagcugcaagag

SEQ ID NO: 3940367 - RNA, 18 nt, Human adenovirus F
ucagcgcgcuucgccucc

SEQ ID NO: 3940368 - RNA, 16 nt, Human adenovirus F
ucagcucuaagacugu

SEQ ID NO: 3940369 - RNA, 16 nt, Human adenovirus F
ucagcugaacccaccc

SEQ ID NO: 3940370 - RNA, 18 nt, Human adenovirus F
ucagggucgauggagcca

SEQ ID NO: 3940371 - RNA, 21 nt, Human adenovirus F
ucaggugaugcuacacaacaa

SEQ ID NO: 3940372 - RNA, 22 nt, Human adenovirus F
ucagucuuucaacgacuaccuc

SEQ ID NO: 3940373 - RNA, 16 nt, Human adenovirus F
ucaugcugcuguuuuu

SEQ ID NO: 3940374 - RNA, 14 nt, Human adenovirus F
uccaaaccaaauaa

SEQ ID NO: 3940375 - RNA, 20 nt, Human adenovirus F
uccaaaggucagaaaaaccg

SEQ ID NO: 3940376 - RNA, 23 nt, Human adenovirus F
uccaaaucucgccuaacaucacc

SEQ ID NO: 3940377 - RNA, 20 nt, Human adenovirus F
uccaagacccgguacaggug

SEQ ID NO: 3940378 - RNA, 13 nt, Human adenovirus F
uccaccugagggg

SEQ ID NO: 3940379 - RNA, 15 nt, Human adenovirus F
uccacuuacaaccaa

SEQ ID NO: 3940380 - RNA, 24 nt, Human adenovirus F
uccagcaaaggcgcccuccuuugc

SEQ ID NO: 3940381 - RNA, 16 nt, Human adenovirus F
uccagggaguccagga

SEQ ID NO: 3940382 - RNA, 23 nt, Human adenovirus F
uccagguggggcggcgaccugaa

SEQ ID NO: 3940383 - RNA, 22 nt, Human adenovirus F
uccagugcaggaagaggaggag

SEQ ID NO: 3940384 - RNA, 13 nt, Human adenovirus F
uccaguggagcaa

SEQ ID NO: 3940385 - RNA, 13 nt, Human adenovirus F
uccauaacuaaaa

SEQ ID NO: 3940386 - RNA, 18 nt, Human adenovirus F
ggcccaguugagggaagc

SEQ ID NO: 3940387 - RNA, 16 nt, Human adenovirus F
ggccccugaggcagcg

SEQ ID NO: 3940388 - RNA, 12 nt, Human adenovirus F
ggcccuggaggc

SEQ ID NO: 3940389 - RNA, 15 nt, Human adenovirus F
ggcccuggccuggaa

SEQ ID NO: 3940390 - RNA, 23 nt, Human adenovirus F
ggccgcgaccggaucuggaggaa

SEQ ID NO: 3940391 - RNA, 18 nt, Human adenovirus F
ggccgcuacgugccuuuu

SEQ ID NO: 3940392 - RNA, 12 nt, Human adenovirus F
ggccgguaacgc

SEQ ID NO: 3940393 - RNA, 22 nt, Human adenovirus F
ggccguuuaugggcaccuggaa

SEQ ID NO: 3940394 - RNA, 11 nt, Human adenovirus F
ggccugcaaga

SEQ ID NO: 3940395 - RNA, 15 nt, Human adenovirus F
ggccuggcagcugga

SEQ ID NO: 3940396 - RNA, 19 nt, Human adenovirus F
ggccuuguaugggcagcau

SEQ ID NO: 3940397 - RNA, 24 nt, Human adenovirus F
ggcgaaaaaugaugauggcagcag

SEQ ID NO: 3940398 - RNA, 18 nt, Human adenovirus F
ggcgauggggccuuggga

SEQ ID NO: 3940399 - RNA, 18 nt, Human adenovirus F
ggcgcaaucccaggcgug

SEQ ID NO: 3940400 - RNA, 15 nt, Human adenovirus F
ggcgcacggccccca

SEQ ID NO: 3940401 - RNA, 17 nt, Human adenovirus F
ggcgccggcgggaagag

SEQ ID NO: 3940402 - RNA, 16 nt, Human adenovirus F
ggcgcuugccaggguu

SEQ ID NO: 3940403 - RNA, 20 nt, Human adenovirus F
ggcgcuuucaguuggagcag

SEQ ID NO: 3940404 - RNA, 23 nt, Human adenovirus F
ggcggaggagcagauggagagcu

SEQ ID NO: 3940405 - RNA, 16 nt, Human adenovirus F
ggcggcgggugcagug

SEQ ID NO: 3940406 - RNA, 21 nt, Human adenovirus F
ggcgggcguccggaggcagug

SEQ ID NO: 3940407 - RNA, 18 nt, Human adenovirus F
ggcgucaugcucuggggu

SEQ ID NO: 3940408 - RNA, 23 nt, Human adenovirus F
ggcguugauaugaugaaaguaga

SEQ ID NO: 3940409 - RNA, 13 nt, Human adenovirus F
ggcuaauggccag

SEQ ID NO: 3940410 - RNA, 19 nt, Human adenovirus F
ggcuccgacgcuuggcacc

SEQ ID NO: 3940411 - RNA, 13 nt, Human adenovirus F
ggcucuggacaug

SEQ ID NO: 3940412 - RNA, 13 nt, Human adenovirus F
ggcucuuggucag

SEQ ID NO: 3940413 - RNA, 14 nt, Human adenovirus F
ggcuuauuggcaug

SEQ ID NO: 3940414 - RNA, 16 nt, Human adenovirus F
ggcuuuuggaccuggu

SEQ ID NO: 3940415 - RNA, 19 nt, Human adenovirus F
gggaacuguccagggaguc

SEQ ID NO: 3940416 - RNA, 11 nt, Human adenovirus F
gggagccagga

SEQ ID NO: 3940417 - RNA, 23 nt, Human adenovirus F
gggagccaggaagacggacucug

SEQ ID NO: 3940418 - RNA, 22 nt, Human adenovirus F
gggaugcagguaggaccacugg

SEQ ID NO: 3940419 - RNA, 11 nt, Human adenovirus F
gggcaaaacau

SEQ ID NO: 3940420 - RNA, 19 nt, Human adenovirus F
gggcaacguucagccacuc

SEQ ID NO: 3940421 - RNA, 22 nt, Human adenovirus F
gggccagacuacuuuuuccaaa

SEQ ID NO: 3940422 - RNA, 12 nt, Human adenovirus F
gggccggccugg

SEQ ID NO: 3940423 - RNA, 23 nt, Human adenovirus F
gggcguagaguuugggagccagg

SEQ ID NO: 3940424 - RNA, 17 nt, Human adenovirus F
gggcuuauuggcaugag

SEQ ID NO: 3940425 - RNA, 17 nt, Human adenovirus F
ggggcccguucuggacu

SEQ ID NO: 3940426 - RNA, 18 nt, Human adenovirus F
gggggcauuaaugggcaa

SEQ ID NO: 3940427 - RNA, 19 nt, Human adenovirus F
gggucuauuuggaccccca

SEQ ID NO: 3940428 - RNA, 20 nt, Human adenovirus F
ggguguacguuuguugcaug

SEQ ID NO: 3940429 - RNA, 19 nt, Human adenovirus F
gguaaaaaugccaggcagc

SEQ ID NO: 3940430 - RNA, 21 nt, Human adenovirus F
gguaaaaaugccaggcagcag

SEQ ID NO: 3940431 - RNA, 22 nt, Human adenovirus F
gguacucucgaaacuuuuugcc

SEQ ID NO: 3940432 - RNA, 17 nt, Human adenovirus F
ggucacucucagcugcu

SEQ ID NO: 3940433 - RNA, 13 nt, Human adenovirus F
ggucauugggcuu

SEQ ID NO: 3940434 - RNA, 16 nt, Human adenovirus F
ggugaaaugaauuugu

SEQ ID NO: 3940435 - RNA, 17 nt, Human adenovirus F
ggugacgguaaaggggc

SEQ ID NO: 3940436 - RNA, 18 nt, Human adenovirus F
ggugauaucauuaaaaag

SEQ ID NO: 3940437 - RNA, 23 nt, Human adenovirus F
gguggaccccauggaugagccca

SEQ ID NO: 3940438 - RNA, 13 nt, Human adenovirus F
ggugugaaggcaa

SEQ ID NO: 3940439 - RNA, 11 nt, Human adenovirus F
gguuaaacaag

SEQ ID NO: 3940440 - RNA, 16 nt, Human adenovirus F
gguuaauaagcugggu

SEQ ID NO: 3940441 - RNA, 21 nt, Human adenovirus F
gguucgaguucacuuugccag

SEQ ID NO: 3940442 - RNA, 17 nt, Human adenovirus F
gguugcccgccagcugg

SEQ ID NO: 3940443 - RNA, 13 nt, Human adenovirus F
gguuuaaacuuuu

SEQ ID NO: 3940444 - RNA, 14 nt, Human adenovirus F
guaaacugauuuga

SEQ ID NO: 3940445 - RNA, 15 nt, Human adenovirus F
guaaagcgagccaaa

SEQ ID NO: 3940446 - RNA, 19 nt, Human adenovirus F
guaacacaggucaaaugcu

SEQ ID NO: 3940447 - RNA, 16 nt, Human adenovirus F
guaacagaacaauaaa

SEQ ID NO: 3940448 - RNA, 14 nt, Human adenovirus F
guaacugagccuga

SEQ ID NO: 3940449 - RNA, 11 nt, Human adenovirus F
guacacuggcu

SEQ ID NO: 3940450 - RNA, 18 nt, Human adenovirus F
guacgagaaaucggagag

SEQ ID NO: 3940451 - RNA, 16 nt, Human adenovirus F
guagggauugaguggg

SEQ ID NO: 3940452 - RNA, 19 nt, Human adenovirus F
guaguuuugcuccagggua

SEQ ID NO: 3940453 - RNA, 14 nt, Human adenovirus F
gucacucuccgccg

SEQ ID NO: 3940454 - RNA, 20 nt, Human adenovirus F
gucagcaagacaccaguagc

SEQ ID NO: 3940455 - RNA, 20 nt, Human adenovirus F
gucagcuaacucucuuacau

SEQ ID NO: 3940456 - RNA, 14 nt, Human adenovirus F
gucagguuugacag

SEQ ID NO: 3940457 - RNA, 22 nt, Human adenovirus F
gucauacauuucgugggaaggg

SEQ ID NO: 3940458 - RNA, 19 nt, Human adenovirus F
gucauccgccuccacccuu

SEQ ID NO: 3940459 - RNA, 16 nt, Human adenovirus F
guccaggaaggccucg

SEQ ID NO: 3940460 - RNA, 17 nt, Human adenovirus F
gucccuggaguuugggg

SEQ ID NO: 3940461 - RNA, 16 nt, Human adenovirus F
guccgacggcgccucc

SEQ ID NO: 3940462 - RNA, 16 nt, Human adenovirus F
gucgcauaacccugga

SEQ ID NO: 3940463 - RNA, 23 nt, Human adenovirus F
gucgccccugugaguguggagcu

SEQ ID NO: 3940464 - RNA, 17 nt, Human adenovirus F
gucgcgaacucuggacg

SEQ ID NO: 3940465 - RNA, 20 nt, Human adenovirus F
gucgcguaacccgccgugga

SEQ ID NO: 3940466 - RNA, 15 nt, Human adenovirus F
gucgcuggcuccgcg

SEQ ID NO: 3940467 - RNA, 13 nt, Human adenovirus F
gucguaacaaaua

SEQ ID NO: 3940468 - RNA, 17 nt, Human adenovirus F
gucguuaguggaggcag

SEQ ID NO: 3940469 - RNA, 16 nt, Human adenovirus F
gucucagcaguugcaa

SEQ ID NO: 3940470 - RNA, 12 nt, Human adenovirus F
gucucccaccuu

SEQ ID NO: 3940471 - RNA, 15 nt, Human adenovirus F
gucugccagagggug

SEQ ID NO: 3940472 - RNA, 13 nt, Human adenovirus F
gucugcguacuga

SEQ ID NO: 3940473 - RNA, 14 nt, Human adenovirus F
gucugguuaaacaa

SEQ ID NO: 3940474 - RNA, 19 nt, Human adenovirus F
gucuuacauaucgcuugcc

SEQ ID NO: 3940475 - RNA, 20 nt, Human adenovirus F
gucuuccuucacuccucgcc

SEQ ID NO: 3940476 - RNA, 15 nt, Human adenovirus F
gugaccgagcagcug

SEQ ID NO: 3940477 - RNA, 17 nt, Human adenovirus F
gugaccgagcagcugcg

SEQ ID NO: 3940478 - RNA, 21 nt, Human adenovirus F
gugaccugugggucgcagcag

SEQ ID NO: 3940479 - RNA, 14 nt, Human adenovirus F
gugagguaugauga

SEQ ID NO: 3940480 - RNA, 17 nt, Human adenovirus F
gugaguugguagcagug

SEQ ID NO: 3940481 - RNA, 18 nt, Human adenovirus F
gugauaucauuaaaaagg

SEQ ID NO: 3940482 - RNA, 13 nt, Human adenovirus F
gugcaacacagcc

SEQ ID NO: 3940483 - RNA, 13 nt, Human adenovirus F
gugcaggaagagg

SEQ ID NO: 3940484 - RNA, 17 nt, Human adenovirus F
gugcauuggcacaggaa

SEQ ID NO: 3940485 - RNA, 20 nt, Human adenovirus F
gugcccauagacaaggaggu

SEQ ID NO: 3940486 - RNA, 16 nt, Human adenovirus F
guggaaagcaaguuuc

SEQ ID NO: 3940487 - RNA, 18 nt, Human adenovirus F
guggacgacagccagcug

SEQ ID NO: 3940488 - RNA, 14 nt, Human adenovirus F
guggagaaccuugc

SEQ ID NO: 3940489 - RNA, 18 nt, Human adenovirus F
guggauaccgcugcagcu

SEQ ID NO: 3940490 - RNA, 19 nt, Human adenovirus F
guggauaccgcugcagcug

SEQ ID NO: 3940491 - RNA, 15 nt, Human adenovirus F
guggauggggaagga

SEQ ID NO: 3940492 - RNA, 15 nt, Human adenovirus F
guggcggaggugccc

SEQ ID NO: 3940493 - RNA, 16 nt, Human adenovirus F
guggcucugcagcagc

SEQ ID NO: 3940494 - RNA, 19 nt, Human adenovirus F
guggcucugcagcagcgcc

SEQ ID NO: 3940495 - RNA, 14 nt, Human adenovirus F
guggcugcaagguc

SEQ ID NO: 3940496 - RNA, 16 nt, Human adenovirus F
guguaccgcaacgacc

SEQ ID NO: 3940497 - RNA, 16 nt, Human adenovirus F
guguaccugucgccca

SEQ ID NO: 3940498 - RNA, 21 nt, Human adenovirus F
guguuaucacccaaagccaaa

SEQ ID NO: 3940499 - RNA, 23 nt, Human adenovirus F
guuaaagugcgccccauuaaaga

SEQ ID NO: 3940500 - RNA, 21 nt, Human adenovirus F
guuacaguggaauuggaaugc

SEQ ID NO: 3940501 - RNA, 20 nt, Human adenovirus F
guucacugaaagccagccgu

SEQ ID NO: 3940502 - RNA, 18 nt, Human adenovirus F
guuccucauacaaaugcu

SEQ ID NO: 3940503 - RNA, 18 nt, Human adenovirus F
guuccucuucucugucuu

SEQ ID NO: 3940504 - RNA, 15 nt, Human adenovirus F
guuccuuccgagaaa

SEQ ID NO: 3940505 - RNA, 15 nt, Human adenovirus F
gacaguggcgcgcuc

SEQ ID NO: 3940506 - RNA, 21 nt, Human adenovirus F
gacaugggggcggaccugcaa

SEQ ID NO: 3940507 - RNA, 20 nt, Human adenovirus F
gaccacgucgccaacagugu

SEQ ID NO: 3940508 - RNA, 21 nt, Human adenovirus F
gaccauuaccaccgucaguga

SEQ ID NO: 3940509 - RNA, 15 nt, Human adenovirus F
gaccccauggacaac

SEQ ID NO: 3940510 - RNA, 21 nt, Human adenovirus F
gaccgacuacuuacucccaac

SEQ ID NO: 3940511 - RNA, 20 nt, Human adenovirus F
gaccugcaauggcagcccag

SEQ ID NO: 3940512 - RNA, 14 nt, Human adenovirus F
gaccuggaagaggg

SEQ ID NO: 3940513 - RNA, 20 nt, Human adenovirus F
gaccugugggucgcagcagg

SEQ ID NO: 3940514 - RNA, 18 nt, Human adenovirus F
gacgacagccaggcagag

SEQ ID NO: 3940515 - RNA, 17 nt, Human adenovirus F
gacggcgguggcggacg

SEQ ID NO: 3940516 - RNA, 13 nt, Human adenovirus F
gacgugcgguggg

SEQ ID NO: 3940517 - RNA, 14 nt, Human adenovirus F
gacguuaaccuagg

SEQ ID NO: 3940518 - RNA, 14 nt, Human adenovirus F
gacuaaacacccgc

SEQ ID NO: 3940519 - RNA, 16 nt, Human adenovirus F
gacuaugucagcuuua

SEQ ID NO: 3940520 - RNA, 22 nt, Human adenovirus F
gacuccgcugacgguggaggaa

SEQ ID NO: 3940521 - RNA, 13 nt, Human adenovirus F
gacucuggugaau

SEQ ID NO: 3940522 - RNA, 19 nt, Human adenovirus F
gacuugccgguuucgcauu

SEQ ID NO: 3940523 - RNA, 12 nt, Human adenovirus F
gagacaaaagcc

SEQ ID NO: 3940524 - RNA, 12 nt, Human adenovirus F
gagagccgagug

SEQ ID NO: 3940525 - RNA, 14 nt, Human adenovirus F
gagcagccugugga

SEQ ID NO: 3940526 - RNA, 17 nt, Human adenovirus F
gagcaguuuggcaaugg

SEQ ID NO: 3940527 - RNA, 22 nt, Human adenovirus F
gagcaguuuggcaauggaacgc

SEQ ID NO: 3940528 - RNA, 17 nt, Human adenovirus F
gagcaugaaacuggaag

SEQ ID NO: 3940529 - RNA, 20 nt, Human adenovirus F
gagcauugugguacaggagc

SEQ ID NO: 3940530 - RNA, 17 nt, Human adenovirus F
gagcccugaucagccag

SEQ ID NO: 3940531 - RNA, 18 nt, Human adenovirus F
gagcgcaauuagcgggcg

SEQ ID NO: 3940532 - RNA, 12 nt, Human adenovirus F
gagcgccauccc

SEQ ID NO: 3940533 - RNA, 23 nt, Human adenovirus F
gagcgguccgucacgcgggccuu

SEQ ID NO: 3940534 - RNA, 13 nt, Human adenovirus F
gagcuaaggagga

SEQ ID NO: 3940535 - RNA, 13 nt, Human adenovirus F
gagcuauuacuuu

SEQ ID NO: 3940536 - RNA, 22 nt, Human adenovirus F
gagcuauuacuuuagcacuaga

SEQ ID NO: 3940537 - RNA, 19 nt, Human adenovirus F
gagcuauuuaaagugguga

SEQ ID NO: 3940538 - RNA, 13 nt, Human adenovirus F
gagcugggacagc

SEQ ID NO: 3940539 - RNA, 22 nt, Human adenovirus F
gagcuuggauuaggaagggcaa

SEQ ID NO: 3940540 - RNA, 14 nt, Human adenovirus F
gaggacgagcccug

SEQ ID NO: 3940541 - RNA, 17 nt, Human adenovirus F
gaggagaaccugagggc

SEQ ID NO: 3940542 - RNA, 18 nt, Human adenovirus F
gaggagcgcaacuuucag

SEQ ID NO: 3940543 - RNA, 21 nt, Human adenovirus F
gaggagcugucucagcaguug

SEQ ID NO: 3940544 - RNA, 14 nt, Human adenovirus F
gaggaggagaaccu

SEQ ID NO: 3940545 - RNA, 22 nt, Human adenovirus F
gaggaucuuaagcugcagccag

SEQ ID NO: 3940546 - RNA, 13 nt, Human adenovirus F
gaggccauccugg

SEQ ID NO: 3940547 - RNA, 13 nt, Human adenovirus F
gaggcgggacuga

SEQ ID NO: 3940548 - RNA, 18 nt, Human adenovirus F
gagggaaaacaaagacga

SEQ ID NO: 3940549 - RNA, 18 nt, Human adenovirus F
gaguguggagcuaaucau

SEQ ID NO: 3940550 - RNA, 17 nt, Human adenovirus F
gaguuggcuucugccag

SEQ ID NO: 3940551 - RNA, 15 nt, Human adenovirus F
gauaccgcugcagcu

SEQ ID NO: 3940552 - RNA, 20 nt, Human adenovirus F
gauauagccaaccaggccuu

SEQ ID NO: 3940553 - RNA, 12 nt, Human adenovirus F
gaucagaaauuu

SEQ ID NO: 3940554 - RNA, 15 nt, Human adenovirus F
gaucauguccaccug

SEQ ID NO: 3940555 - RNA, 17 nt, Human adenovirus F
gauccagugcaggaaga

SEQ ID NO: 3940556 - RNA, 20 nt, Human adenovirus F
gaucccucagagcugcaaga

SEQ ID NO: 3940557 - RNA, 14 nt, Human adenovirus F
gaugauggcagcag

SEQ ID NO: 3940558 - RNA, 13 nt, Human adenovirus F
gauguuuuccaag

SEQ ID NO: 3940559 - RNA, 21 nt, Human adenovirus F
gauucgccauaaugcgggcuc

SEQ ID NO: 3940560 - RNA, 19 nt, Human adenovirus F
gauucuucugugacaaaau

SEQ ID NO: 3940561 - RNA, 23 nt, Human adenovirus F
gauuugccggcaacgcugcaggc

SEQ ID NO: 3940562 - RNA, 18 nt, Human adenovirus F
gauuuguaguggagggau

SEQ ID NO: 3940563 - RNA, 18 nt, Human adenovirus F
gauuuucuuugccaccuu

SEQ ID NO: 3940564 - RNA, 16 nt, Human adenovirus F
gcaaacaauaaaagaa

SEQ ID NO: 3940565 - RNA, 13 nt, Human adenovirus F
gcaaagccauccg

SEQ ID NO: 3940566 - RNA, 21 nt, Human adenovirus F
gcaacaucggcaccccucucc

SEQ ID NO: 3940567 - RNA, 16 nt, Human adenovirus F
gcaaccagugggcucc

SEQ ID NO: 3940568 - RNA, 18 nt, Human adenovirus F
gcaaccauguucacugaa

SEQ ID NO: 3940569 - RNA, 18 nt, Human adenovirus F
gcaacgcugcaggcgcuc

SEQ ID NO: 3940570 - RNA, 14 nt, Human adenovirus F
gcaacguucagcca

SEQ ID NO: 3940571 - RNA, 16 nt, Human adenovirus F
gcaacucgcaggccag

SEQ ID NO: 3940572 - RNA, 16 nt, Human adenovirus F
gcaaguucaaagaaga

SEQ ID NO: 3940573 - RNA, 18 nt, Human adenovirus F
gcaaguuucgcaaaagcu

SEQ ID NO: 3940574 - RNA, 16 nt, Human adenovirus F
gcaaucugaucucuua

SEQ ID NO: 3940575 - RNA, 15 nt, Human adenovirus F
gcacacagaacaaaa

SEQ ID NO: 3940576 - RNA, 18 nt, Human adenovirus F
gcacaggagauccgugga

SEQ ID NO: 3940577 - RNA, 21 nt, Human adenovirus F
gcacaguaaucaaggguuuca

SEQ ID NO: 3940578 - RNA, 16 nt, Human adenovirus F
gcaccgcgcccguccu

SEQ ID NO: 3940579 - RNA, 16 nt, Human adenovirus F
gcaccgcgcggcggcc

SEQ ID NO: 3940580 - RNA, 16 nt, Human adenovirus F
gcacgugucggcggcc

SEQ ID NO: 3940581 - RNA, 20 nt, Human adenovirus F
gcacugcgguggaggccaug

SEQ ID NO: 3940582 - RNA, 19 nt, Human adenovirus F
gcacuuagagugucaguuu

SEQ ID NO: 3940583 - RNA, 19 nt, Human adenovirus F
gcacuucaagaaacacaaa

SEQ ID NO: 3940584 - RNA, 22 nt, Human adenovirus F
gcacuucaagaaacacaaacau

SEQ ID NO: 3940585 - RNA, 17 nt, Human adenovirus F
gcagaacguucuucacu

SEQ ID NO: 3940586 - RNA, 21 nt, Human adenovirus F
gcagagcucugcaaaaacaaa

SEQ ID NO: 3940587 - RNA, 21 nt, Human adenovirus F
gcagagcuugggcccugggcu

SEQ ID NO: 3940588 - RNA, 18 nt, Human adenovirus F
gcagccgugaagccaaau

SEQ ID NO: 3940589 - RNA, 21 nt, Human adenovirus F
gcagccguugcucucuccgga

SEQ ID NO: 3940590 - RNA, 19 nt, Human adenovirus F
gcagccugagcugccagag

SEQ ID NO: 3940591 - RNA, 21 nt, Human adenovirus F
gcagcgcccgccucccaaagu

SEQ ID NO: 3940592 - RNA, 16 nt, Human adenovirus F
gcaggccgcucccaau

SEQ ID NO: 3940593 - RNA, 23 nt, Human adenovirus F
gcagguaggaccacuggagggcg

SEQ ID NO: 3940594 - RNA, 17 nt, Human adenovirus F
gcagucuaagccuggcc

SEQ ID NO: 3940595 - RNA, 16 nt, Human adenovirus F
gcagucucgguaacga

SEQ ID NO: 3940596 - RNA, 14 nt, Human adenovirus F
gcagugggacgagg

SEQ ID NO: 3940597 - RNA, 16 nt, Human adenovirus F
gcaguguuauaagguc

SEQ ID NO: 3940598 - RNA, 18 nt, Human adenovirus F
gcauacguuacucggagc

SEQ ID NO: 3940599 - RNA, 19 nt, Human adenovirus F
gcauaguugcucccaaagu

SEQ ID NO: 3940600 - RNA, 13 nt, Human adenovirus F
gcaucucaaagcu

SEQ ID NO: 3940601 - RNA, 17 nt, Human adenovirus F
gcaucucaaagcuggag

SEQ ID NO: 3940602 - RNA, 19 nt, Human adenovirus F
gcaucucuugaaugaggug

SEQ ID NO: 3940603 - RNA, 18 nt, Human adenovirus F
gcauggcgcuaaaggugu

SEQ ID NO: 3940604 - RNA, 12 nt, Human adenovirus F
gccaaagugcaa

SEQ ID NO: 3940605 - RNA, 18 nt, Human adenovirus F
gccaacagccccagcugg

SEQ ID NO: 3940606 - RNA, 14 nt, Human adenovirus F
gccacaauuuacaa

SEQ ID NO: 3940607 - RNA, 23 nt, Human adenovirus F
gccacacugugcacacacgguuu

SEQ ID NO: 3940608 - RNA, 15 nt, Human adenovirus F
gccacgcaggagcuc

SEQ ID NO: 3940609 - RNA, 17 nt, Human adenovirus F
gccacguccaccgugga

SEQ ID NO: 3940610 - RNA, 22 nt, Human adenovirus F
gccagacuacuuuuuccaaacu

SEQ ID NO: 3940611 - RNA, 22 nt, Human adenovirus F
gccagacuuugucagccaaagu

SEQ ID NO: 3940612 - RNA, 17 nt, Human adenovirus F
gccagcauggcucagcc

SEQ ID NO: 3940613 - RNA, 19 nt, Human adenovirus F
gccagcauggcucagcccc

SEQ ID NO: 3940614 - RNA, 21 nt, Human adenovirus F
gccagccguaggugggacacc

SEQ ID NO: 3940615 - RNA, 19 nt, Human adenovirus F
gccagcgacaaggcaccau

SEQ ID NO: 3940616 - RNA, 21 nt, Human adenovirus F
gccagcuaaugugccgcgcgg

SEQ ID NO: 3940617 - RNA, 13 nt, Human adenovirus F
gccagcuggcaaa

SEQ ID NO: 3940618 - RNA, 15 nt, Human adenovirus F
gccaggcggcgauga

SEQ ID NO: 3940619 - RNA, 11 nt, Human adenovirus F
gccagugcagg

SEQ ID NO: 3940620 - RNA, 14 nt, Human adenovirus F
gccaucugcagcau

SEQ ID NO: 3940621 - RNA, 19 nt, Human adenovirus F
gccauggaaacgcagccug

SEQ ID NO: 3940622 - RNA, 20 nt, Human adenovirus F
gccauggugguagaagguca

SEQ ID NO: 3940623 - RNA, 13 nt, Human adenovirus F
gccauugccaccc

SEQ ID NO: 3940624 - RNA, 15 nt, Human adenovirus F
gcccaccaaauuaaa

SEQ ID NO: 3940625 - RNA, 15 nt, Human adenovirus F
gcccaccacucugau

SEQ ID NO: 3940626 - RNA, 16 nt, Human adenovirus F
gcccauaucugacaac

SEQ ID NO: 3940627 - RNA, 22 nt, Human adenovirus F
gccccuuggugaagguauuaac

SEQ ID NO: 3940628 - RNA, 13 nt, Human adenovirus F
gcccgccagcugg

SEQ ID NO: 3940629 - RNA, 19 nt, Human adenovirus F
gcccgcuugggggcgccau

SEQ ID NO: 3940630 - RNA, 19 nt, Human adenovirus F
gcccggacuuggcgugcag

SEQ ID NO: 3940631 - RNA, 21 nt, Human adenovirus F
gcccgugcgguugcggccacg

SEQ ID NO: 3940632 - RNA, 15 nt, Human adenovirus F
gcccugaucagccag

SEQ ID NO: 3940633 - RNA, 16 nt, Human adenovirus F
gcccuggaggcggcug

SEQ ID NO: 3940634 - RNA, 17 nt, Human adenovirus F
gccgcacucgcuccacc

SEQ ID NO: 3940635 - RNA, 15 nt, Human adenovirus F
gccgccgcucaaggc

SEQ ID NO: 3940636 - RNA, 23 nt, Human adenovirus F
gccgcggacgucaagcccgacau

SEQ ID NO: 3940637 - RNA, 13 nt, Human adenovirus F
gccgcggcggcua

SEQ ID NO: 3940638 - RNA, 20 nt, Human adenovirus F
gccggcucuaggcauaaagu

SEQ ID NO: 3940639 - RNA, 17 nt, Human adenovirus F
gccgggacaacgaggcu

SEQ ID NO: 3940640 - RNA, 15 nt, Human adenovirus F
gccguccacgcuccc

SEQ ID NO: 3940641 - RNA, 23 nt, Human adenovirus F
gccguggcuggcgggcaaagcua

SEQ ID NO: 3940642 - RNA, 18 nt, Human adenovirus F
gccguugcucucuccgga

SEQ ID NO: 3940643 - RNA, 15 nt, Human adenovirus F
gccuccagcacugcc

SEQ ID NO: 3940644 - RNA, 13 nt, Human adenovirus F
gccucccuuugcc

SEQ ID NO: 3940645 - RNA, 15 nt, Human adenovirus F
gccuccgguggcucu

SEQ ID NO: 3940646 - RNA, 24 nt, Human adenovirus F
gccuccuguguuacgccagagagc

SEQ ID NO: 3940647 - RNA, 17 nt, Human adenovirus F
gccucgcgugcucaagc

SEQ ID NO: 3940648 - RNA, 15 nt, Human adenovirus F
gccugacucuuacaa

SEQ ID NO: 3940649 - RNA, 14 nt, Human adenovirus F
gccuucaggcagca

SEQ ID NO: 3940650 - RNA, 17 nt, Human adenovirus F
gccuuguaugggcagca

SEQ ID NO: 3940651 - RNA, 18 nt, Human adenovirus F
gccuuguaugggcagcau

SEQ ID NO: 3940652 - RNA, 19 nt, Human adenovirus F
gccuuguaugggcagcauc

SEQ ID NO: 3940653 - RNA, 14 nt, Human adenovirus F
gcgagcagagccca

SEQ ID NO: 3940654 - RNA, 15 nt, Human adenovirus F
gcgagcuuagcgacc

SEQ ID NO: 3940655 - RNA, 15 nt, Human adenovirus F
gcgcaacgcaagaga

SEQ ID NO: 3940656 - RNA, 24 nt, Human adenovirus F
gcgcaacggcaaucccagcagaaa

SEQ ID NO: 3940657 - RNA, 18 nt, Human adenovirus F
gcgcacgugucggcggcc

SEQ ID NO: 3940658 - RNA, 19 nt, Human adenovirus F
gcgcacugguaaaccagca

SEQ ID NO: 3940659 - RNA, 19 nt, Human adenovirus F
gcgcagcaccgcacagaaa

SEQ ID NO: 3940660 - RNA, 14 nt, Human adenovirus F
gcgcgaacugggcu

SEQ ID NO: 3940661 - RNA, 17 nt, Human adenovirus F
gcgcuucgccuccuggu

SEQ ID NO: 3940662 - RNA, 15 nt, Human adenovirus F
gcgcuuugcgcaggc

SEQ ID NO: 3940663 - RNA, 22 nt, Human adenovirus F
gcggaaaccaagggcucugccu

SEQ ID NO: 3940664 - RNA, 19 nt, Human adenovirus F
gcggaagaagaugaggagg

SEQ ID NO: 3940665 - RNA, 13 nt, Human adenovirus F
gcggcggccauga

SEQ ID NO: 3940666 - RNA, 18 nt, Human adenovirus F
gcgggaagagaggcagcc

SEQ ID NO: 3940667 - RNA, 20 nt, Human adenovirus F
gcgggaagagaggcagcccc

SEQ ID NO: 3940668 - RNA, 20 nt, Human adenovirus F
gcgguggcaacccugaggag

SEQ ID NO: 3940669 - RNA, 17 nt, Human adenovirus F
gcgguggucacucucag

SEQ ID NO: 3940670 - RNA, 21 nt, Human adenovirus F
gcguagcaccccaauguaagu

SEQ ID NO: 3940671 - RNA, 17 nt, Human adenovirus F
gcgucaugcucuggggu

SEQ ID NO: 3940672 - RNA, 18 nt, Human adenovirus F
gcgucgcguaacccgccg

SEQ ID NO: 3940673 - RNA, 17 nt, Human adenovirus F
gcgucgcuggcuccgcg

SEQ ID NO: 3940674 - RNA, 22 nt, Human adenovirus F
gcguggccuccguggccuugca

SEQ ID NO: 3940675 - RNA, 20 nt, Human adenovirus F
gcuaaacaugagcuuacuuu

SEQ ID NO: 3940676 - RNA, 20 nt, Human adenovirus F
gcuaaaggaccaaaacuuuc

SEQ ID NO: 3940677 - RNA, 14 nt, Human adenovirus F
gcuaaaucuuccuc

SEQ ID NO: 3940678 - RNA, 20 nt, Human adenovirus F
gcuaaccugugcagauggaa

SEQ ID NO: 3940679 - RNA, 17 nt, Human adenovirus F
gcuaaggacgguggcau

SEQ ID NO: 3940680 - RNA, 18 nt, Human adenovirus F
gcuaaggacgguggcaug

SEQ ID NO: 3940681 - RNA, 16 nt, Human adenovirus F
gcuacacgcggcccgu

SEQ ID NO: 3940682 - RNA, 19 nt, Human adenovirus F
gcuaccguucuaugcuccu

SEQ ID NO: 3940683 - RNA, 17 nt, Human adenovirus F
gcuacuacuuuaacucu

SEQ ID NO: 3940684 - RNA, 20 nt, Human adenovirus F
gcuacuuaucacaucuuuuu

SEQ ID NO: 3940685 - RNA, 22 nt, Human adenovirus F
gcuagaaaaccgcgccauagcu

SEQ ID NO: 3940686 - RNA, 18 nt, Human adenovirus F
gcuagaaugucacugccg

SEQ ID NO: 3940687 - RNA, 16 nt, Human adenovirus F
gcuagaccaacaaacg

SEQ ID NO: 3940688 - RNA, 14 nt, Human adenovirus F
gcuagcauaaaaga

SEQ ID NO: 3940689 - RNA, 21 nt, Human adenovirus F
gcuaggcucuucuuccucguu

SEQ ID NO: 3940690 - RNA, 14 nt, Human adenovirus F
gcuaugugcagcag

SEQ ID NO: 3940691 - RNA, 20 nt, Human adenovirus F
gcucauccaaguuuuuacaa

SEQ ID NO: 3940692 - RNA, 16 nt, Human adenovirus F
gcucaucugcggccuc

SEQ ID NO: 3940693 - RNA, 19 nt, Human adenovirus F
gcucaucugcggccucagg

SEQ ID NO: 3940694 - RNA, 22 nt, Human adenovirus F
gcuccuuuaacgcccgcugagc

SEQ ID NO: 3940695 - RNA, 19 nt, Human adenovirus F
gcucgcaaacaauaaaaga

SEQ ID NO: 3940696 - RNA, 15 nt, Human adenovirus F
gcucgucgggaagca

SEQ ID NO: 3940697 - RNA, 20 nt, Human adenovirus F
gcucugcagcagcgcccgcc

SEQ ID NO: 3940698 - RNA, 14 nt, Human adenovirus F
gcucugccugcgga

SEQ ID NO: 3940699 - RNA, 15 nt, Human adenovirus F
gcucuguccgccgcc

SEQ ID NO: 3940700 - RNA, 14 nt, Human adenovirus F
gcucuuccaagcug

SEQ ID NO: 3940701 - RNA, 20 nt, Human adenovirus F
gcugagugacgaucuggggg

SEQ ID NO: 3940702 - RNA, 14 nt, Human adenovirus F
gcugcagccagacu

SEQ ID NO: 3940703 - RNA, 12 nt, Human adenovirus F
gcugcagcugcu

SEQ ID NO: 3940704 - RNA, 14 nt, Human adenovirus F
gcugcaggcgcucc

SEQ ID NO: 3940705 - RNA, 14 nt, Human adenovirus F
gcugccaacaaaug

SEQ ID NO: 3940706 - RNA, 21 nt, Human adenovirus F
gcugcguucgacggcgguggc

SEQ ID NO: 3940707 - RNA, 20 nt, Human adenovirus F
gcugcugccucuacugcucg

SEQ ID NO: 3940708 - RNA, 18 nt, Human adenovirus F
gcuggaacucaaaguaaa

SEQ ID NO: 3940709 - RNA, 14 nt, Human adenovirus F
gcuggaggcccuug

SEQ ID NO: 3940710 - RNA, 22 nt, Human adenovirus F
gcuggagggcaaaaugggcuug

SEQ ID NO: 3940711 - RNA, 17 nt, Human adenovirus F
gcuggcccuggccugga

SEQ ID NO: 3940712 - RNA, 16 nt, Human adenovirus F
gcuggcgggcaaagcu

SEQ ID NO: 3940713 - RNA, 21 nt, Human adenovirus F
gcuggggaauggagcuguggu

SEQ ID NO: 3940714 - RNA, 13 nt, Human adenovirus F
gcuguaccaggag

SEQ ID NO: 3940715 - RNA, 15 nt, Human adenovirus F
gcuguaccaggaggc

SEQ ID NO: 3940716 - RNA, 14 nt, Human adenovirus F
gcuguacugugcau

SEQ ID NO: 3940717 - RNA, 23 nt, Human adenovirus F
gcuguacugugcauuugggagcu

SEQ ID NO: 3940718 - RNA, 16 nt, Human adenovirus F
gcuuaguauuaacacu

SEQ ID NO: 3940719 - RNA, 15 nt, Human adenovirus F
gcuucgccuccuggu

SEQ ID NO: 3940720 - RNA, 21 nt, Human adenovirus F
ggaaaaccuacgcccaggagc

SEQ ID NO: 3940721 - RNA, 12 nt, Human adenovirus F
ggaacuguucaa

SEQ ID NO: 3940722 - RNA, 21 nt, Human adenovirus F
ggaagaauacuaaaacaaacc

SEQ ID NO: 3940723 - RNA, 16 nt, Human adenovirus F
ggaagacgagcucccc

SEQ ID NO: 3940724 - RNA, 20 nt, Human adenovirus F
ggacaaagagaaagauggaa

SEQ ID NO: 3940725 - RNA, 13 nt, Human adenovirus F
ggacaagcucccu

SEQ ID NO: 3940726 - RNA, 14 nt, Human adenovirus F
ggacauggccagca

SEQ ID NO: 3940727 - RNA, 14 nt, Human adenovirus F
ggaccacuggaggg

SEQ ID NO: 3940728 - RNA, 15 nt, Human adenovirus F
ggaccacuggagggc

SEQ ID NO: 3940729 - RNA, 16 nt, Human adenovirus F
ggaccacuggagggcg

SEQ ID NO: 3940730 - RNA, 22 nt, Human adenovirus F
ggaccuagaggacguggaggaa

SEQ ID NO: 3940731 - RNA, 14 nt, Human adenovirus F
ggacgggaucagag

SEQ ID NO: 3940732 - RNA, 12 nt, Human adenovirus F
ggacgggcagcc

SEQ ID NO: 3940733 - RNA, 13 nt, Human adenovirus F
ggacgguggcaug

SEQ ID NO: 3940734 - RNA, 18 nt, Human adenovirus F
ggacucgucuccugcaag

SEQ ID NO: 3940735 - RNA, 15 nt, Human adenovirus F
ggagauccguggagc

SEQ ID NO: 3940736 - RNA, 20 nt, Human adenovirus F
ggagcagauggagagcuggg

SEQ ID NO: 3940737 - RNA, 15 nt, Human adenovirus F
ggagccggcgguggc

SEQ ID NO: 3940738 - RNA, 19 nt, Human adenovirus F
ggagccucaaguggggcag

SEQ ID NO: 3940739 - RNA, 23 nt, Human adenovirus F
ggagggacaagcuuaccccgcca

SEQ ID NO: 3940740 - RNA, 18 nt, Human adenovirus F
ggaguaccugagcccggg

SEQ ID NO: 3940741 - RNA, 12 nt, Human adenovirus F
ggagucacugcu

SEQ ID NO: 3940742 - RNA, 13 nt, Human adenovirus F
ggagucccugcac

SEQ ID NO: 3940743 - RNA, 22 nt, Human adenovirus F
ggauaaacugagcguaggauuc

SEQ ID NO: 3940744 - RNA, 14 nt, Human adenovirus F
ggaucaauggagcg

SEQ ID NO: 3940745 - RNA, 13 nt, Human adenovirus F
ggaucauguccac

SEQ ID NO: 3940746 - RNA, 24 nt, Human adenovirus F
ggauccagugcaggaagaggagga

SEQ ID NO: 3940747 - RNA, 19 nt, Human adenovirus F
ggaucccucagagcugcaa

SEQ ID NO: 3940748 - RNA, 14 nt, Human adenovirus F
ggaugauggaggga

SEQ ID NO: 3940749 - RNA, 21 nt, Human adenovirus F
ggauuugccgcagccaguggg

SEQ ID NO: 3940750 - RNA, 18 nt, Human adenovirus F
ggauuuugaguuagcucu

SEQ ID NO: 3940751 - RNA, 15 nt, Human adenovirus F
ggcaaaugcucugca

SEQ ID NO: 3940752 - RNA, 18 nt, Human adenovirus F
ggcaauggcucuguggag

SEQ ID NO: 3940753 - RNA, 16 nt, Human adenovirus F
ggcaccagccagcuca

SEQ ID NO: 3940754 - RNA, 13 nt, Human adenovirus F
ggcacccccccug

SEQ ID NO: 3940755 - RNA, 14 nt, Human adenovirus F
ggcaccggcacuga

SEQ ID NO: 3940756 - RNA, 18 nt, Human adenovirus F
ggcacggcucgcggccgu

SEQ ID NO: 3940757 - RNA, 19 nt, Human adenovirus F
ggcagcagugcuuggaaga

SEQ ID NO: 3940758 - RNA, 20 nt, Human adenovirus F
ggcagcagugcuuggaagag

SEQ ID NO: 3940759 - RNA, 12 nt, Human adenovirus F
ggcaggagcccg

SEQ ID NO: 3940760 - RNA, 19 nt, Human adenovirus F
ggcaggagcugcgggccgg

SEQ ID NO: 3940761 - RNA, 14 nt, Human adenovirus F
ggcaugagggauuc

SEQ ID NO: 3940762 - RNA, 17 nt, Human adenovirus F
ggcauguacggcggcgc

SEQ ID NO: 3940763 - RNA, 12 nt, Human adenovirus F
ggccaaccuaga

SEQ ID NO: 3940764 - RNA, 11 nt, Human adenovirus F
ggccaccgccg

SEQ ID NO: 3940765 - RNA, 15 nt, Human adenovirus F
ggccaugcgccgagc

SEQ ID NO: 3940766 - RNA, 19 nt, Human adenovirus F
ggccauggucauuuuuuca

SEQ ID NO: 3940767 - RNA, 18 nt, Human adenovirus F
acccaacuauuugggagg

SEQ ID NO: 3940768 - RNA, 16 nt, Human adenovirus F
accccaccguggcucc

SEQ ID NO: 3940769 - RNA, 20 nt, Human adenovirus F
accccgccccgaccacaguc

SEQ ID NO: 3940770 - RNA, 16 nt, Human adenovirus F
accccgucuaccccua

SEQ ID NO: 3940771 - RNA, 19 nt, Human adenovirus F
accccuaugacaccuccuc

SEQ ID NO: 3940772 - RNA, 16 nt, Human adenovirus F
acccgaccuaaacucu

SEQ ID NO: 3940773 - RNA, 19 nt, Human adenovirus F
acccgguacaggugggcuu

SEQ ID NO: 3940774 - RNA, 15 nt, Human adenovirus F
acccguucggagcca

SEQ ID NO: 3940775 - RNA, 18 nt, Human adenovirus F
accgacuacuuacuccca

SEQ ID NO: 3940776 - RNA, 14 nt, Human adenovirus F
accgcugcagcugc

SEQ ID NO: 3940777 - RNA, 19 nt, Human adenovirus F
accgcugcagcugcugccg

SEQ ID NO: 3940778 - RNA, 18 nt, Human adenovirus F
accggaguaugccuugca

SEQ ID NO: 3940779 - RNA, 21 nt, Human adenovirus F
accgguuuuguaccaccuugg

SEQ ID NO: 3940780 - RNA, 16 nt, Human adenovirus F
accguuaaucucccuc

SEQ ID NO: 3940781 - RNA, 21 nt, Human adenovirus F
accguucuaugcuccugggua

SEQ ID NO: 3940782 - RNA, 12 nt, Human adenovirus F
accucugcaccc

SEQ ID NO: 3940783 - RNA, 19 nt, Human adenovirus F
accugcaauggcagcccag

SEQ ID NO: 3940784 - RNA, 19 nt, Human adenovirus F
accuguauacgggaaggaa

SEQ ID NO: 3940785 - RNA, 17 nt, Human adenovirus F
accuuacaccaccccua

SEQ ID NO: 3940786 - RNA, 19 nt, Human adenovirus F
accuuuuuacccugaccca

SEQ ID NO: 3940787 - RNA, 19 nt, Human adenovirus F
acgaacacgcugccaacaa

SEQ ID NO: 3940788 - RNA, 18 nt, Human adenovirus F
acgacaaucagaccacaa

SEQ ID NO: 3940789 - RNA, 16 nt, Human adenovirus F
acgacggggauacugc

SEQ ID NO: 3940790 - RNA, 23 nt, Human adenovirus F
acgauaacgcuuuaucuguaaaa

SEQ ID NO: 3940791 - RNA, 22 nt, Human adenovirus F
acgaucgcuccagguggggcgg

SEQ ID NO: 3940792 - RNA, 19 nt, Human adenovirus F
acgcauguaaauuuugcac

SEQ ID NO: 3940793 - RNA, 14 nt, Human adenovirus F
acgccaagccugaa

SEQ ID NO: 3940794 - RNA, 13 nt, Human adenovirus F
acgcccaggagca

SEQ ID NO: 3940795 - RNA, 21 nt, Human adenovirus F
acgccucggaguaccugagcc

SEQ ID NO: 3940796 - RNA, 18 nt, Human adenovirus F
acgccuuacauguggagc

SEQ ID NO: 3940797 - RNA, 18 nt, Human adenovirus F
acgcggggcaggagcugc

SEQ ID NO: 3940798 - RNA, 16 nt, Human adenovirus F
acgcuagaccaacaaa

SEQ ID NO: 3940799 - RNA, 20 nt, Human adenovirus F
acgcugagugacgaucuggg

SEQ ID NO: 3940800 - RNA, 17 nt, Human adenovirus F
acgcuguaccaggaggc

SEQ ID NO: 3940801 - RNA, 22 nt, Human adenovirus F
acggagaugcagagaaaggagu

SEQ ID NO: 3940802 - RNA, 14 nt, Human adenovirus F
acggauuuuugugg

SEQ ID NO: 3940803 - RNA, 17 nt, Human adenovirus F
acggcaaucccagcaga

SEQ ID NO: 3940804 - RNA, 16 nt, Human adenovirus F
acggcccccaucucug

SEQ ID NO: 3940805 - RNA, 16 nt, Human adenovirus F
acgggaugugccaacg

SEQ ID NO: 3940806 - RNA, 23 nt, Human adenovirus F
acgggcggcaaaugcucugcaaa

SEQ ID NO: 3940807 - RNA, 19 nt, Human adenovirus F
acgugaccgagcagcugcg

SEQ ID NO: 3940808 - RNA, 17 nt, Human adenovirus F
acgugcacaaagcucug

SEQ ID NO: 3940809 - RNA, 23 nt, Human adenovirus F
acgugcggugggagugccgccgg

SEQ ID NO: 3940810 - RNA, 17 nt, Human adenovirus F
acgugugugugagggca

SEQ ID NO: 3940811 - RNA, 15 nt, Human adenovirus F
acguucuucacugca

SEQ ID NO: 3940812 - RNA, 18 nt, Human adenovirus F
acuaaaaaaacuccaccc

SEQ ID NO: 3940813 - RNA, 22 nt, Human adenovirus F
acuaaggcuggcacacgcacuu

SEQ ID NO: 3940814 - RNA, 17 nt, Human adenovirus F
acuaucccgccccugcc

SEQ ID NO: 3940815 - RNA, 18 nt, Human adenovirus F
acuaucccgccccugcca

SEQ ID NO: 3940816 - RNA, 21 nt, Human adenovirus F
acuccauuauuuuuauuuuga

SEQ ID NO: 3940817 - RNA, 13 nt, Human adenovirus F
acucucagcugcu

SEQ ID NO: 3940818 - RNA, 19 nt, Human adenovirus F
acucucccuuuccagcaua

SEQ ID NO: 3940819 - RNA, 23 nt, Human adenovirus F
acucucuuacauuggccaccgcc

SEQ ID NO: 3940820 - RNA, 23 nt, Human adenovirus F
acucugaagaugucugaccaacu

SEQ ID NO: 3940821 - RNA, 19 nt, Human adenovirus F
acucuuacaaagugcgcuu

SEQ ID NO: 3940822 - RNA, 14 nt, Human adenovirus F
acucuuacaccucc

SEQ ID NO: 3940823 - RNA, 19 nt, Human adenovirus F
acugaccccauuacuacca

SEQ ID NO: 3940824 - RNA, 16 nt, Human adenovirus F
acugacuuccuggucc

SEQ ID NO: 3940825 - RNA, 18 nt, Human adenovirus F
acugauguaacagcuuug

SEQ ID NO: 3940826 - RNA, 14 nt, Human adenovirus F
acugcauacaacuc

SEQ ID NO: 3940827 - RNA, 19 nt, Human adenovirus F
acugccguugcaaccucug

SEQ ID NO: 3940828 - RNA, 21 nt, Human adenovirus F
acugcuagaaugucacugccg

SEQ ID NO: 3940829 - RNA, 16 nt, Human adenovirus F
acuggagggcgucaug

SEQ ID NO: 3940830 - RNA, 19 nt, Human adenovirus F
acuguuucuccuccccuua

SEQ ID NO: 3940831 - RNA, 15 nt, Human adenovirus F
acuucuucagcucua

SEQ ID NO: 3940832 - RNA, 16 nt, Human adenovirus F
acuuggaagggaaggc

SEQ ID NO: 3940833 - RNA, 14 nt, Human adenovirus F
agaaaaaacccuua

SEQ ID NO: 3940834 - RNA, 22 nt, Human adenovirus F
agaaaauccucagugucuugcc

SEQ ID NO: 3940835 - RNA, 17 nt, Human adenovirus F
agaacaaaacacacucc

SEQ ID NO: 3940836 - RNA, 21 nt, Human adenovirus F
agaacguguugguagagcugg

SEQ ID NO: 3940837 - RNA, 19 nt, Human adenovirus F
agaacuggaguaacacaau

SEQ ID NO: 3940838 - RNA, 21 nt, Human adenovirus F
agaacugggaguugcgcgccg

SEQ ID NO: 3940839 - RNA, 12 nt, Human adenovirus F
agaauaauacag

SEQ ID NO: 3940840 - RNA, 14 nt, Human adenovirus F
agaauguaacucuc

SEQ ID NO: 3940841 - RNA, 13 nt, Human adenovirus F
agaaugucacugc

SEQ ID NO: 3940842 - RNA, 11 nt, Human adenovirus F
agacaauccua

SEQ ID NO: 3940843 - RNA, 13 nt, Human adenovirus F
agacagcaaggaa

SEQ ID NO: 3940844 - RNA, 18 nt, Human adenovirus F
agacauucuugagcaggc

SEQ ID NO: 3940845 - RNA, 18 nt, Human adenovirus F
agaccacaacaacaaacg

SEQ ID NO: 3940846 - RNA, 23 nt, Human adenovirus F
agaccacgucgccaacaguguuu

SEQ ID NO: 3940847 - RNA, 22 nt, Human adenovirus F
agaccucauccgccauugccac

SEQ ID NO: 3940848 - RNA, 19 nt, Human adenovirus F
agacgacugggcggcggcc

SEQ ID NO: 3940849 - RNA, 16 nt, Human adenovirus F
agacgacuucaacccc

SEQ ID NO: 3940850 - RNA, 21 nt, Human adenovirus F
agacgaggaggcggaggagca

SEQ ID NO: 3940851 - RNA, 24 nt, Human adenovirus F
agacgugugugugagggcaaaagu

SEQ ID NO: 3940852 - RNA, 17 nt, Human adenovirus F
agacguuaaagcuggcu

SEQ ID NO: 3940853 - RNA, 13 nt, Human adenovirus F
agacuaaaaacua

SEQ ID NO: 3940854 - RNA, 20 nt, Human adenovirus F
agagccgcggucaacagcug

SEQ ID NO: 3940855 - RNA, 12 nt, Human adenovirus F
agagcuggaggg

SEQ ID NO: 3940856 - RNA, 19 nt, Human adenovirus F
agagcuugggcccugggcu

SEQ ID NO: 3940857 - RNA, 14 nt, Human adenovirus F
agaggaaaaggagg

SEQ ID NO: 3940858 - RNA, 17 nt, Human adenovirus F
agaggaggugaugcugc

SEQ ID NO: 3940859 - RNA, 17 nt, Human adenovirus F
agagggaaguugagaaa

SEQ ID NO: 3940860 - RNA, 15 nt, Human adenovirus F
agagucgucgcaggc

SEQ ID NO: 3940861 - RNA, 15 nt, Human adenovirus F
agaucacaccucucc

SEQ ID NO: 3940862 - RNA, 16 nt, Human adenovirus F
agaugacuucaacccc

SEQ ID NO: 3940863 - RNA, 22 nt, Human adenovirus F
agaugcguccgacggcgccucc

SEQ ID NO: 3940864 - RNA, 21 nt, Human adenovirus F
agauggugggccgcugaaaga

SEQ ID NO: 3940865 - RNA, 18 nt, Human adenovirus F
agauucaagggccagagc

SEQ ID NO: 3940866 - RNA, 16 nt, Human adenovirus F
agauuccaccaaaggu

SEQ ID NO: 3940867 - RNA, 23 nt, Human adenovirus F
agcaaaaauguuaucgggguggg

SEQ ID NO: 3940868 - RNA, 13 nt, Human adenovirus F
agcaaaaccucca

SEQ ID NO: 3940869 - RNA, 12 nt, Human adenovirus F
agcaaacagugc

SEQ ID NO: 3940870 - RNA, 18 nt, Human adenovirus F
agcaaccgcacaugccag

SEQ ID NO: 3940871 - RNA, 18 nt, Human adenovirus F
agcaaguuucgcaaaagc

SEQ ID NO: 3940872 - RNA, 20 nt, Human adenovirus F
agcacaggcggaccuuuuac

SEQ ID NO: 3940873 - RNA, 23 nt, Human adenovirus F
agcaccaacgugcaggccaaccu

SEQ ID NO: 3940874 - RNA, 20 nt, Human adenovirus F
agcacuagaugcagcgcugc

SEQ ID NO: 3940875 - RNA, 20 nt, Human adenovirus F
agcagaaacuacaaaagcag

SEQ ID NO: 3940876 - RNA, 21 nt, Human adenovirus F
agcagccuaagcgcgcacgac

SEQ ID NO: 3940877 - RNA, 18 nt, Human adenovirus F
agcagcuuauccuugcuc

SEQ ID NO: 3940878 - RNA, 15 nt, Human adenovirus F
agcagugggcaaagg

SEQ ID NO: 3940879 - RNA, 21 nt, Human adenovirus F
agcauaauaacucuggcuuug

SEQ ID NO: 3940880 - RNA, 13 nt, Human adenovirus F
agccaaccaggcc

SEQ ID NO: 3940881 - RNA, 13 nt, Human adenovirus F
agccaaugggcuc

SEQ ID NO: 3940882 - RNA, 18 nt, Human adenovirus F
agccacaauaagcagcuu

SEQ ID NO: 3940883 - RNA, 18 nt, Human adenovirus F
agcccagcgcccgggccc

SEQ ID NO: 3940884 - RNA, 20 nt, Human adenovirus F
agcccauucugccaguuggg

SEQ ID NO: 3940885 - RNA, 16 nt, Human adenovirus F
ccauuuggucuaucuc

SEQ ID NO: 3940886 - RNA, 22 nt, Human adenovirus F
cccaauccucaagacuuggaaa

SEQ ID NO: 3940887 - RNA, 17 nt, Human adenovirus F
cccaccgcccccacugu

SEQ ID NO: 3940888 - RNA, 22 nt, Human adenovirus F
cccaccguuguggagucacugc

SEQ ID NO: 3940889 - RNA, 17 nt, Human adenovirus F
cccacuguuucuccucc

SEQ ID NO: 3940890 - RNA, 13 nt, Human adenovirus F
cccacuuaaugcu

SEQ ID NO: 3940891 - RNA, 20 nt, Human adenovirus F
cccagaccaucaauuuugac

SEQ ID NO: 3940892 - RNA, 18 nt, Human adenovirus F
cccagcgcccgggcccug

SEQ ID NO: 3940893 - RNA, 19 nt, Human adenovirus F
cccagguuuaauacaguga

SEQ ID NO: 3940894 - RNA, 14 nt, Human adenovirus F
cccaugagccgcca

SEQ ID NO: 3940895 - RNA, 12 nt, Human adenovirus F
cccaugcagcca

SEQ ID NO: 3940896 - RNA, 12 nt, Human adenovirus F
cccauucugcca

SEQ ID NO: 3940897 - RNA, 20 nt, Human adenovirus F
ccccaccguggcucccaccc

SEQ ID NO: 3940898 - RNA, 17 nt, Human adenovirus F
ccccacuguugccgugg

SEQ ID NO: 3940899 - RNA, 20 nt, Human adenovirus F
ccccagcugguaagcagccu

SEQ ID NO: 3940900 - RNA, 15 nt, Human adenovirus F
cccccaucucugugc

SEQ ID NO: 3940901 - RNA, 20 nt, Human adenovirus F
cccccggcggcgggugcagu

SEQ ID NO: 3940902 - RNA, 20 nt, Human adenovirus F
cccccguuugcuuccuccaa

SEQ ID NO: 3940903 - RNA, 14 nt, Human adenovirus F
ccccggcguacgac

SEQ ID NO: 3940904 - RNA, 14 nt, Human adenovirus F
ccccugccaccgca

SEQ ID NO: 3940905 - RNA, 19 nt, Human adenovirus F
cccgaagccuucaggcagc

SEQ ID NO: 3940906 - RNA, 13 nt, Human adenovirus F
cccgaggacggca

SEQ ID NO: 3940907 - RNA, 14 nt, Human adenovirus F
cccgcccgccgccc

SEQ ID NO: 3940908 - RNA, 16 nt, Human adenovirus F
cccgguacaggugggc

SEQ ID NO: 3940909 - RNA, 15 nt, Human adenovirus F
cccguuugcuuccuc

SEQ ID NO: 3940910 - RNA, 17 nt, Human adenovirus F
cccuccccccuuccacu

SEQ ID NO: 3940911 - RNA, 18 nt, Human adenovirus F
cccucgucgcccucuucu

SEQ ID NO: 3940912 - RNA, 14 nt, Human adenovirus F
cccugaucagccag

SEQ ID NO: 3940913 - RNA, 13 nt, Human adenovirus F
cccuggccuggaa

SEQ ID NO: 3940914 - RNA, 20 nt, Human adenovirus F
cccuuacgaacacuacaauc

SEQ ID NO: 3940915 - RNA, 13 nt, Human adenovirus F
cccuuuccagcau

SEQ ID NO: 3940916 - RNA, 18 nt, Human adenovirus F
ccgaccauuaccaccguc

SEQ ID NO: 3940917 - RNA, 13 nt, Human adenovirus F
ccgagcggcugcu

SEQ ID NO: 3940918 - RNA, 11 nt, Human adenovirus F
ccgagggcuuc

SEQ ID NO: 3940919 - RNA, 13 nt, Human adenovirus F
ccgagguauccag

SEQ ID NO: 3940920 - RNA, 18 nt, Human adenovirus F
ccgagguauccagcucaa

SEQ ID NO: 3940921 - RNA, 20 nt, Human adenovirus F
ccgcaaaugggccuggcagc

SEQ ID NO: 3940922 - RNA, 13 nt, Human adenovirus F
ccgcacuggaugc

SEQ ID NO: 3940923 - RNA, 19 nt, Human adenovirus F
ccgcagacgaacacaauau

SEQ ID NO: 3940924 - RNA, 21 nt, Human adenovirus F
ccgcagcugcuuguaucacag

SEQ ID NO: 3940925 - RNA, 14 nt, Human adenovirus F
ccgccccugccacc

SEQ ID NO: 3940926 - RNA, 18 nt, Human adenovirus F
ccgccguuucucgcccca

SEQ ID NO: 3940927 - RNA, 23 nt, Human adenovirus F
ccgcgaacuaaugcacagccugc

SEQ ID NO: 3940928 - RNA, 18 nt, Human adenovirus F
ccgcggucaacagcugga

SEQ ID NO: 3940929 - RNA, 12 nt, Human adenovirus F
ccggaaaaccaa

SEQ ID NO: 3940930 - RNA, 18 nt, Human adenovirus F
ccggacgggcagccgguc

SEQ ID NO: 3940931 - RNA, 17 nt, Human adenovirus F
ccggagagcgguccguc

SEQ ID NO: 3940932 - RNA, 16 nt, Human adenovirus F
ccggaucuggaggaaa

SEQ ID NO: 3940933 - RNA, 15 nt, Human adenovirus F
ccggccuggacccuu

SEQ ID NO: 3940934 - RNA, 13 nt, Human adenovirus F
ccggguccaggcu

SEQ ID NO: 3940935 - RNA, 14 nt, Human adenovirus F
ccgguacagguggg

SEQ ID NO: 3940936 - RNA, 18 nt, Human adenovirus F
ccgucacucuccgccgcc

SEQ ID NO: 3940937 - RNA, 15 nt, Human adenovirus F
ccgucccugggaugc

SEQ ID NO: 3940938 - RNA, 18 nt, Human adenovirus F
ccgucuccuaacgccacu

SEQ ID NO: 3940939 - RNA, 19 nt, Human adenovirus F
ccguuggaauuuuccugcg

SEQ ID NO: 3940940 - RNA, 20 nt, Human adenovirus F
ccguuucucgccccaccgcc

SEQ ID NO: 3940941 - RNA, 16 nt, Human adenovirus F
ccuaaggacuucaccu

SEQ ID NO: 3940942 - RNA, 16 nt, Human adenovirus F
ccuacaccaaugcaaa

SEQ ID NO: 3940943 - RNA, 15 nt, Human adenovirus F
ccuacggaagggcgg

SEQ ID NO: 3940944 - RNA, 15 nt, Human adenovirus F
ccuacggcaagcgcg

SEQ ID NO: 3940945 - RNA, 15 nt, Human adenovirus F
ccuacgugcacaaag

SEQ ID NO: 3940946 - RNA, 22 nt, Human adenovirus F
ccuagcugcuuuaaucgcugga

SEQ ID NO: 3940947 - RNA, 13 nt, Human adenovirus F
ccuagguccgacc

SEQ ID NO: 3940948 - RNA, 20 nt, Human adenovirus F
ccuaguaaaggcgaaaagcg

SEQ ID NO: 3940949 - RNA, 14 nt, Human adenovirus F
ccuaugacaccucc

SEQ ID NO: 3940950 - RNA, 18 nt, Human adenovirus F
ccucagacgacugggcgg

SEQ ID NO: 3940951 - RNA, 20 nt, Human adenovirus F
ccucagggucaacugggucg

SEQ ID NO: 3940952 - RNA, 19 nt, Human adenovirus F
ccucauacaaaugcucagu

SEQ ID NO: 3940953 - RNA, 12 nt, Human adenovirus F
ccuccaauuuga

SEQ ID NO: 3940954 - RNA, 23 nt, Human adenovirus F
ccuccgguggcucugcagcagcg

SEQ ID NO: 3940955 - RNA, 20 nt, Human adenovirus F
ccuccguggccuugcaagca

SEQ ID NO: 3940956 - RNA, 12 nt, Human adenovirus F
ccucgcuccggc

SEQ ID NO: 3940957 - RNA, 23 nt, Human adenovirus F
ccucggcuacaguuucgcgcacc

SEQ ID NO: 3940958 - RNA, 14 nt, Human adenovirus F
ccucguuaagccac

SEQ ID NO: 3940959 - RNA, 23 nt, Human adenovirus F
ccucuacuauuaccgucaucucu

SEQ ID NO: 3940960 - RNA, 12 nt, Human adenovirus F
ccucuacugcuc

SEQ ID NO: 3940961 - RNA, 13 nt, Human adenovirus F
ccucugacggggg

SEQ ID NO: 3940962 - RNA, 20 nt, Human adenovirus F
ccucuguuugcugcacugcc

SEQ ID NO: 3940963 - RNA, 13 nt, Human adenovirus F
ccucuucugcacc

SEQ ID NO: 3940964 - RNA, 15 nt, Human adenovirus F
ccugaaacgccgccg

SEQ ID NO: 3940965 - RNA, 13 nt, Human adenovirus F
ccugaaauacacu

SEQ ID NO: 3940966 - RNA, 14 nt, Human adenovirus F
ccugagcugccaga

SEQ ID NO: 3940967 - RNA, 18 nt, Human adenovirus F
ccugaggaggaggccauc

SEQ ID NO: 3940968 - RNA, 15 nt, Human adenovirus F
ccugcaaagccaacc

SEQ ID NO: 3940969 - RNA, 14 nt, Human adenovirus F
ccuggaguuugggg

SEQ ID NO: 3940970 - RNA, 22 nt, Human adenovirus F
ccuggccguacgguuucugggc

SEQ ID NO: 3940971 - RNA, 17 nt, Human adenovirus F
ccuguacuugccugacu

SEQ ID NO: 3940972 - RNA, 20 nt, Human adenovirus F
ccugucaugaaaguuccucu

SEQ ID NO: 3940973 - RNA, 17 nt, Human adenovirus F
ccugugcagcgcgcucc

SEQ ID NO: 3940974 - RNA, 20 nt, Human adenovirus F
ccuguuacuauuaaugcaaa

SEQ ID NO: 3940975 - RNA, 16 nt, Human adenovirus F
ccuguucuaaaaccaa

SEQ ID NO: 3940976 - RNA, 14 nt, Human adenovirus F
ccuuaaggaggagg

SEQ ID NO: 3940977 - RNA, 12 nt, Human adenovirus F
ccuuacagccug

SEQ ID NO: 3940978 - RNA, 14 nt, Human adenovirus F
ccuugcaaaaccaa

SEQ ID NO: 3940979 - RNA, 21 nt, Human adenovirus F
ccuugcuacggaggaagaggg

SEQ ID NO: 3940980 - RNA, 17 nt, Human adenovirus F
cgaaaaccggcuggggc

SEQ ID NO: 3940981 - RNA, 21 nt, Human adenovirus F
cgaagacuaucacgcccacca

SEQ ID NO: 3940982 - RNA, 21 nt, Human adenovirus F
cgacaaagcacacagaacaaa

SEQ ID NO: 3940983 - RNA, 14 nt, Human adenovirus F
cgacaccacccggg

SEQ ID NO: 3940984 - RNA, 14 nt, Human adenovirus F
cgacagccagcugu

SEQ ID NO: 3940985 - RNA, 23 nt, Human adenovirus F
cgacgagcuugcucgcuggcuag

SEQ ID NO: 3940986 - RNA, 21 nt, Human adenovirus F
cgagaucacgucugggguuca

SEQ ID NO: 3940987 - RNA, 16 nt, Human adenovirus F
cgagaucggcaccagc

SEQ ID NO: 3940988 - RNA, 21 nt, Human adenovirus F
cgagcaaacggugaacgagga

SEQ ID NO: 3940989 - RNA, 11 nt, Human adenovirus F
cgagccacagg

SEQ ID NO: 3940990 - RNA, 20 nt, Human adenovirus F
cgagcuuuuacugggacagc

SEQ ID NO: 3940991 - RNA, 22 nt, Human adenovirus F
cgaggaaagcuuccagccaauc

SEQ ID NO: 3940992 - RNA, 14 nt, Human adenovirus F
cgaggggcuggccc

SEQ ID NO: 3940993 - RNA, 16 nt, Human adenovirus F
cgaucgcuccaggugg

SEQ ID NO: 3940994 - RNA, 18 nt, Human adenovirus F
cgaugaugccgcaauggu

SEQ ID NO: 3940995 - RNA, 17 nt, Human adenovirus F
cgauggagccagcguca

SEQ ID NO: 3940996 - RNA, 14 nt, Human adenovirus F
cgcaaaagcuggga

SEQ ID NO: 3940997 - RNA, 22 nt, Human adenovirus F
cgcaaggaugaggcgggacuga

SEQ ID NO: 3940998 - RNA, 23 nt, Human adenovirus F
cgcaauggucuuacaugcacauc

SEQ ID NO: 3940999 - RNA, 14 nt, Human adenovirus F
cgcacgcuggagga

SEQ ID NO: 3941000 - RNA, 19 nt, Human adenovirus F
cgcacugguaaaccagcac

SEQ ID NO: 3941001 - RNA, 13 nt, Human adenovirus F
cgcagcgggcagg

SEQ ID NO: 3941002 - RNA, 19 nt, Human adenovirus F
cgcagcgggcaggagcccg

SEQ ID NO: 3941003 - RNA, 20 nt, Human adenovirus F
cgcagcguugcacgcucugc

SEQ ID NO: 3941004 - RNA, 18 nt, Human adenovirus F
cgccaucccccgagcgcc

SEQ ID NO: 3941005 - RNA, 19 nt, Human adenovirus F
cgcccaccaaauuaaauuu

SEQ ID NO: 3941006 - RNA, 21 nt, Human adenovirus F
cgcccucuucugcaccugcac

SEQ ID NO: 3941007 - RNA, 16 nt, Human adenovirus F
cgccgcucaaggcgca

SEQ ID NO: 3941008 - RNA, 15 nt, Human adenovirus F
cgccggacgggcagc

SEQ ID NO: 3941009 - RNA, 22 nt, Human adenovirus F
cgccggcauguacggcggcgcc

SEQ ID NO: 3941010 - RNA, 16 nt, Human adenovirus F
cgccgucggaccugcc

SEQ ID NO: 3941011 - RNA, 18 nt, Human adenovirus F
cgccguuucucgccccac

SEQ ID NO: 3941012 - RNA, 15 nt, Human adenovirus F
cgcgaggagguggcc

SEQ ID NO: 3941013 - RNA, 21 nt, Human adenovirus F
cgcgcaacuuuugcaccaggg

SEQ ID NO: 3941014 - RNA, 11 nt, Human adenovirus F
cgcgccaaccg

SEQ ID NO: 3941015 - RNA, 16 nt, Human adenovirus F
cgcggaagaagaugag

SEQ ID NO: 3941016 - RNA, 12 nt, Human adenovirus F
cgcggggcagga

SEQ ID NO: 3941017 - RNA, 19 nt, Human adenovirus F
cgcuaucaggaagcagcuc

SEQ ID NO: 3941018 - RNA, 17 nt, Human adenovirus F
cgcuaugugcagcaguc

SEQ ID NO: 3941019 - RNA, 13 nt, Human adenovirus F
cgcugcaggcgcu

SEQ ID NO: 3941020 - RNA, 23 nt, Human adenovirus F
cgcugccguuuuuucagauggcu

SEQ ID NO: 3941021 - RNA, 16 nt, Human adenovirus F
cgcuggcuccgcggca

SEQ ID NO: 3941022 - RNA, 17 nt, Human adenovirus F
cgcuucgccuccuggug

SEQ ID NO: 3941023 - RNA, 21 nt, Human adenovirus F
cgcuuggaggagcugucucag

SEQ ID NO: 3941024 - RNA, 11 nt, Human adenovirus F
cggaccugcaa

SEQ ID NO: 3941025 - RNA, 17 nt, Human adenovirus F
cggacgggucgcagcag

SEQ ID NO: 3941026 - RNA, 14 nt, Human adenovirus F
cggagaggggagga

SEQ ID NO: 3941027 - RNA, 20 nt, Human adenovirus F
cggcaaugcuuuugauggug

SEQ ID NO: 3941028 - RNA, 18 nt, Human adenovirus F
cggcaucggaacccucca

SEQ ID NO: 3941029 - RNA, 21 nt, Human adenovirus F
cggcccugcaaagccaaccuu

SEQ ID NO: 3941030 - RNA, 21 nt, Human adenovirus F
cggccuacugccgccaugacu

SEQ ID NO: 3941031 - RNA, 20 nt, Human adenovirus F
cggccuuguaugggcagcau

SEQ ID NO: 3941032 - RNA, 12 nt, Human adenovirus F
cggcgcagcaga

SEQ ID NO: 3941033 - RNA, 18 nt, Human adenovirus F
cggcggccauggaucgca

SEQ ID NO: 3941034 - RNA, 15 nt, Human adenovirus F
cggcgggaagaggac

SEQ ID NO: 3941035 - RNA, 19 nt, Human adenovirus F
cggcguacacuggcuggcc

SEQ ID NO: 3941036 - RNA, 21 nt, Human adenovirus F
cgggcgcacgugucggcggcc

SEQ ID NO: 3941037 - RNA, 15 nt, Human adenovirus F
cgggcggcgccagac

SEQ ID NO: 3941038 - RNA, 19 nt, Human adenovirus F
cggggcuaacuggcagagc

SEQ ID NO: 3941039 - RNA, 15 nt, Human adenovirus F
cgggucgcagcaggu

SEQ ID NO: 3941040 - RNA, 16 nt, Human adenovirus F
cgggucgcagcaggug

SEQ ID NO: 3941041 - RNA, 14 nt, Human adenovirus F
cgggugcaguggcg

SEQ ID NO: 3941042 - RNA, 15 nt, Human adenovirus F
cgguaacgaccucag

SEQ ID NO: 3941043 - RNA, 21 nt, Human adenovirus F
cggugcgaagccgucccccuc

SEQ ID NO: 3941044 - RNA, 23 nt, Human adenovirus F
cggugcguuuuuuugagcuugga

SEQ ID NO: 3941045 - RNA, 16 nt, Human adenovirus F
cgguggcucugcagca

SEQ ID NO: 3941046 - RNA, 18 nt, Human adenovirus F
cgguggcucugcagcagc

SEQ ID NO: 3941047 - RNA, 17 nt, Human adenovirus F
cgguggucuccagaccc

SEQ ID NO: 3941048 - RNA, 21 nt, Human adenovirus F
cguagaguuugggagccagga

SEQ ID NO: 3941049 - RNA, 21 nt, Human adenovirus F
cguagggauugagugggaagc

SEQ ID NO: 3941050 - RNA, 13 nt, Human adenovirus F
cguaggugacaaa

SEQ ID NO: 3941051 - RNA, 18 nt, Human adenovirus F
cguauucacaaagcugug

SEQ ID NO: 3941052 - RNA, 21 nt, Human adenovirus F
cgucaaugccaauaccagcaa

SEQ ID NO: 3941053 - RNA, 18 nt, Human adenovirus F
cgucccaucauuuccaca

SEQ ID NO: 3941054 - RNA, 21 nt, Human adenovirus F
cgucgguggauaccgcugcag

SEQ ID NO: 3941055 - RNA, 23 nt, Human adenovirus F
cgucgguggauaccgcugcagcu

SEQ ID NO: 3941056 - RNA, 23 nt, Human adenovirus F
cgucuaccccuaugacaccuccu

SEQ ID NO: 3941057 - RNA, 21 nt, Human adenovirus F
cgucuuugcggugccugaagc

SEQ ID NO: 3941058 - RNA, 16 nt, Human adenovirus F
cgugcgcacccuggug

SEQ ID NO: 3941059 - RNA, 20 nt, Human adenovirus F
cgugcgcacccugguggcgc

SEQ ID NO: 3941060 - RNA, 20 nt, Human adenovirus F
cguggaaaaacuuggaaacc

SEQ ID NO: 3941061 - RNA, 22 nt, Human adenovirus F
cguggauuccugggguagggug

SEQ ID NO: 3941062 - RNA, 14 nt, Human adenovirus F
cguggcugcaaggu

SEQ ID NO: 3941063 - RNA, 17 nt, Human adenovirus F
cgugggaaggggccagc

SEQ ID NO: 3941064 - RNA, 17 nt, Human adenovirus F
cgugucaccugcaguuc

SEQ ID NO: 3941065 - RNA, 18 nt, Human adenovirus F
cgugugccauuguuaaca

SEQ ID NO: 3941066 - RNA, 16 nt, Human adenovirus F
cguucuaugcuccugg

SEQ ID NO: 3941067 - RNA, 12 nt, Human adenovirus F
cguucuggacuc

SEQ ID NO: 3941068 - RNA, 15 nt, Human adenovirus F
cguugucgccccugu

SEQ ID NO: 3941069 - RNA, 13 nt, Human adenovirus F
cguugugcgcauc

SEQ ID NO: 3941070 - RNA, 14 nt, Human adenovirus F
cguuguggacuucc

SEQ ID NO: 3941071 - RNA, 14 nt, Human adenovirus F
cguuuaaaaacuug

SEQ ID NO: 3941072 - RNA, 14 nt, Human adenovirus F
cuaaagggaacugc

SEQ ID NO: 3941073 - RNA, 17 nt, Human adenovirus F
cuaaaucuuccucccaa

SEQ ID NO: 3941074 - RNA, 13 nt, Human adenovirus F
cuaacaaaaacuu

SEQ ID NO: 3941075 - RNA, 21 nt, Human adenovirus F
cuaaccguuaaucucccuccc

SEQ ID NO: 3941076 - RNA, 22 nt, Human adenovirus F
cuaaggacgguggcaugaggga

SEQ ID NO: 3941077 - RNA, 16 nt, Human adenovirus F
cuaagggaggcagcag

SEQ ID NO: 3941078 - RNA, 18 nt, Human adenovirus F
cuaagugugacauuacuu

SEQ ID NO: 3941079 - RNA, 17 nt, Human adenovirus F
cuaaugccuuaacauuu

SEQ ID NO: 3941080 - RNA, 14 nt, Human adenovirus F
cuaauuuuucacca

SEQ ID NO: 3941081 - RNA, 15 nt, Human adenovirus F
cuacaaaagcagugg

SEQ ID NO: 3941082 - RNA, 15 nt, Human adenovirus F
cuacaagauuccacc

SEQ ID NO: 3941083 - RNA, 16 nt, Human adenovirus F
cuacauccauuuccac

SEQ ID NO: 3941084 - RNA, 22 nt, Human adenovirus F
cuaccacuaccccuaccacccu

SEQ ID NO: 3941085 - RNA, 13 nt, Human adenovirus F
cuaccgcagcugg

SEQ ID NO: 3941086 - RNA, 22 nt, Human adenovirus F
cuaccgccuuuggagguggcac

SEQ ID NO: 3941087 - RNA, 19 nt, Human adenovirus F
cuaccucugcgcugcaaac

SEQ ID NO: 3941088 - RNA, 22 nt, Human adenovirus F
cuacguucgucaggccugcaag

SEQ ID NO: 3941089 - RNA, 13 nt, Human adenovirus F
cuacucuggcucc

SEQ ID NO: 3941090 - RNA, 18 nt, Human adenovirus F
cuagaaugucacugccgu

SEQ ID NO: 3941091 - RNA, 19 nt, Human adenovirus F
cuagaggacguggaggaag

SEQ ID NO: 3941092 - RNA, 11 nt, Human adenovirus F
cuagcaaacag

SEQ ID NO: 3941093 - RNA, 16 nt, Human adenovirus F
cuagcaaacagugcca

SEQ ID NO: 3941094 - RNA, 15 nt, Human adenovirus F
cuagcauaaagggga

SEQ ID NO: 3941095 - RNA, 22 nt, Human adenovirus F
cuagcauaaaggggaccagcug

SEQ ID NO: 3941096 - RNA, 11 nt, Human adenovirus F
cuagcugcuuu

SEQ ID NO: 3941097 - RNA, 11 nt, Human adenovirus F
cuaguacgagc

SEQ ID NO: 3941098 - RNA, 14 nt, Human adenovirus F
cuagucccuccucc

SEQ ID NO: 3941099 - RNA, 21 nt, Human adenovirus F
cuaguuuuaguaaaaugcaac

SEQ ID NO: 3941100 - RNA, 15 nt, Human adenovirus F
cuaucccgccccugc

SEQ ID NO: 3941101 - RNA, 19 nt, Human adenovirus F
cuaucccguguuugacaac

SEQ ID NO: 3941102 - RNA, 17 nt, Human adenovirus F
cuaucuagauaauaacu

SEQ ID NO: 3941103 - RNA, 12 nt, Human adenovirus F
cuaucuuuuccu

SEQ ID NO: 3941104 - RNA, 17 nt, Human adenovirus F
cuaugaggacgagcccu

SEQ ID NO: 3941105 - RNA, 21 nt, Human adenovirus F
cuauuacagguauaaagguug

SEQ ID NO: 3941106 - RNA, 14 nt, Human adenovirus F
cuauugccagcaug

SEQ ID NO: 3941107 - RNA, 12 nt, Human adenovirus F
cuauuuaaagug

SEQ ID NO: 3941108 - RNA, 16 nt, Human adenovirus F
cuauuuaaagugguga

SEQ ID NO: 3941109 - RNA, 22 nt, Human adenovirus F
cuauuucuuugucuaacuaaaa

SEQ ID NO: 3941110 - RNA, 22 nt, Human adenovirus F
cuauuugggaggggaggacgac

SEQ ID NO: 3941111 - RNA, 18 nt, Human adenovirus F
cucaaacacugcgcaaag

SEQ ID NO: 3941112 - RNA, 14 nt, Human adenovirus F
cucaaguacacuga

SEQ ID NO: 3941113 - RNA, 21 nt, Human adenovirus F
cucagcuuauucgccagucca

SEQ ID NO: 3941114 - RNA, 17 nt, Human adenovirus F
cucaggaaccaccaccg

SEQ ID NO: 3941115 - RNA, 19 nt, Human adenovirus F
cucaucugucgcaggguua

SEQ ID NO: 3941116 - RNA, 15 nt, Human adenovirus F
cuccaacacagccgc

SEQ ID NO: 3941117 - RNA, 20 nt, Human adenovirus F
cuccauguggaaccaggcag

SEQ ID NO: 3941118 - RNA, 12 nt, Human adenovirus F
cuccauuauuuu

SEQ ID NO: 3941119 - RNA, 15 nt, Human adenovirus F
cucccaaagugcugu

SEQ ID NO: 3941120 - RNA, 16 nt, Human adenovirus F
cuccgucuagccaacu

SEQ ID NO: 3941121 - RNA, 20 nt, Human adenovirus F
cuccucaacucccagcauuc

SEQ ID NO: 3941122 - RNA, 20 nt, Human adenovirus F
cucgacucgggugcuccuuu

SEQ ID NO: 3941123 - RNA, 16 nt, Human adenovirus F
cucgagguguaacauc

SEQ ID NO: 3941124 - RNA, 15 nt, Human adenovirus F
cucggaccauucuga

SEQ ID NO: 3941125 - RNA, 14 nt, Human adenovirus F
cucggguauggugg

SEQ ID NO: 3941126 - RNA, 17 nt, Human adenovirus F
cucgucguggcauguuu

SEQ ID NO: 3941127 - RNA, 20 nt, Human adenovirus F
cucuagcggcgacggacugc

SEQ ID NO: 3941128 - RNA, 16 nt, Human adenovirus F
cucuccccaccgcugc

SEQ ID NO: 3941129 - RNA, 12 nt, Human adenovirus F
cucucuccggag

SEQ ID NO: 3941130 - RNA, 17 nt, Human adenovirus F
cucugaucuuauggaag

SEQ ID NO: 3941131 - RNA, 13 nt, Human adenovirus F
cucugcagcagcg

SEQ ID NO: 3941132 - RNA, 20 nt, Human adenovirus F
cucuuacauuggccaccgcc

SEQ ID NO: 3941133 - RNA, 17 nt, Human adenovirus F
cugaacaauaaaaucau

SEQ ID NO: 3941134 - RNA, 13 nt, Human adenovirus F
cugaacacuuuug

SEQ ID NO: 3941135 - RNA, 23 nt, Human adenovirus F
cugaaugugucuccgcugggaga

SEQ ID NO: 3941136 - RNA, 15 nt, Human adenovirus F
cugacaguaagcaac

SEQ ID NO: 3941137 - RNA, 13 nt, Human adenovirus F
cugacccuuccca

SEQ ID NO: 3941138 - RNA, 16 nt, Human adenovirus F
cugacgggggaggcac

SEQ ID NO: 3941139 - RNA, 21 nt, Human adenovirus F
cugacgggggaggcacaccuu

SEQ ID NO: 3941140 - RNA, 17 nt, Human adenovirus F
cugagcugccagaggcc

SEQ ID NO: 3941141 - RNA, 15 nt, Human adenovirus F
cugagggccggccug

SEQ ID NO: 3941142 - RNA, 23 nt, Human adenovirus F
cugauccguaauggaaaugaaac

SEQ ID NO: 3941143 - RNA, 19 nt, Human adenovirus F
cugcaacaaaaaaaaaaua

SEQ ID NO: 3941144 - RNA, 22 nt, Human adenovirus F
cugcaccccucaucgcucacug

SEQ ID NO: 3941145 - RNA, 19 nt, Human adenovirus F
cugccaacucgacaacccu

SEQ ID NO: 3941146 - RNA, 17 nt, Human adenovirus F
cugccaccgcaaccaug

SEQ ID NO: 3941147 - RNA, 20 nt, Human adenovirus F
cugccagaacuuccagcugu

SEQ ID NO: 3941148 - RNA, 21 nt, Human adenovirus F
cugccaucgcugaccagcagc

SEQ ID NO: 3941149 - RNA, 17 nt, Human adenovirus F
cugccgcugcgcagcag

SEQ ID NO: 3941150 - RNA, 21 nt, Human adenovirus F
cugcgcaaagucgaggagucc

SEQ ID NO: 3941151 - RNA, 15 nt, Human adenovirus F
cugcgguggaggcca

SEQ ID NO: 3941152 - RNA, 23 nt, Human adenovirus F
cugcuaaagggaacugccagugu

SEQ ID NO: 3941153 - RNA, 19 nt, Human adenovirus F
cugcuacucaacagaaacc

SEQ ID NO: 3941154 - RNA, 23 nt, Human adenovirus F
cuggaacgagaucggcaccagcc

SEQ ID NO: 3941155 - RNA, 20 nt, Human adenovirus F
cuggaggcccuugugccuga

SEQ ID NO: 3941156 - RNA, 23 nt, Human adenovirus F
cuggauacuggcaagagccaccu

SEQ ID NO: 3941157 - RNA, 16 nt, Human adenovirus F
cuggcagcuggagcuu

SEQ ID NO: 3941158 - RNA, 13 nt, Human adenovirus F
cuggcccgcuugg

SEQ ID NO: 3941159 - RNA, 21 nt, Human adenovirus F
cuggccgacaagguggcggcc

SEQ ID NO: 3941160 - RNA, 22 nt, Human adenovirus F
cuggccuuuugaacgaccugca

SEQ ID NO: 3941161 - RNA, 18 nt, Human adenovirus F
cuggcuccgcggcacggc

SEQ ID NO: 3941162 - RNA, 20 nt, Human adenovirus F
cugggacagccuagacgagg

SEQ ID NO: 3941163 - RNA, 17 nt, Human adenovirus F
cugggcggcggccaugg

SEQ ID NO: 3941164 - RNA, 22 nt, Human adenovirus F
cugggcuggaugcauccuccca

SEQ ID NO: 3941165 - RNA, 18 nt, Human adenovirus F
cugggcuuauuggcauga

SEQ ID NO: 3941166 - RNA, 18 nt, Human adenovirus F
cuggggaauggagcugug

SEQ ID NO: 3941167 - RNA, 21 nt, Human adenovirus F
cugggguucauguugugcaga

SEQ ID NO: 3941168 - RNA, 19 nt, Human adenovirus F
cugguaaaccagcacacag

SEQ ID NO: 3941169 - RNA, 14 nt, Human adenovirus F
cuggucccuucccg

SEQ ID NO: 3941170 - RNA, 14 nt, Human adenovirus F
cugugagcgccagc

SEQ ID NO: 3941171 - RNA, 23 nt, Human adenovirus F
cugugaguuuugaggguggggug

SEQ ID NO: 3941172 - RNA, 13 nt, Human adenovirus F
cuguggagaaccu

SEQ ID NO: 3941173 - RNA, 13 nt, Human adenovirus F
cuguuacuauuaa

SEQ ID NO: 3941174 - RNA, 12 nt, Human adenovirus F
cuuaacagcauu

SEQ ID NO: 3941175 - RNA, 19 nt, Human adenovirus F
cuuaacucugaagaugucu

SEQ ID NO: 3941176 - RNA, 15 nt, Human adenovirus F
cuuacaaacaguaac

SEQ ID NO: 3941177 - RNA, 21 nt, Human adenovirus F
cuuaccgcgacaaagcacaca

SEQ ID NO: 3941178 - RNA, 14 nt, Human adenovirus F
cuuauacaccuccc

SEQ ID NO: 3941179 - RNA, 15 nt, Human adenovirus F
cuuaugcgcuguacu

SEQ ID NO: 3941180 - RNA, 20 nt, Human adenovirus F
cuuaugcgcuguacugugca

SEQ ID NO: 3941181 - RNA, 15 nt, Human adenovirus F
cuucaccaaugccau

SEQ ID NO: 3941182 - RNA, 11 nt, Human adenovirus F
cuucagcacuu

SEQ ID NO: 3941183 - RNA, 23 nt, Human adenovirus F
cuucaggcagcagccccaggcca

SEQ ID NO: 3941184 - RNA, 15 nt, Human adenovirus F
cuucaguugaaccac

SEQ ID NO: 3941185 - RNA, 14 nt, Human adenovirus F
cuuccaacccauga

SEQ ID NO: 3941186 - RNA, 13 nt, Human adenovirus F
cuuccuucacucc

SEQ ID NO: 3941187 - RNA, 18 nt, Human adenovirus F
cuucgaagugaugcaccu

SEQ ID NO: 3941188 - RNA, 15 nt, Human adenovirus F
cuucuaucugcaaaa

SEQ ID NO: 3941189 - RNA, 16 nt, Human adenovirus F
cuucuauugcacuuaa

SEQ ID NO: 3941190 - RNA, 19 nt, Human adenovirus F
cuucugugccugucaugaa

SEQ ID NO: 3941191 - RNA, 21 nt, Human adenovirus F
cuugaggagguguuggagaac

SEQ ID NO: 3941192 - RNA, 22 nt, Human adenovirus F
cuugcauaaaagcuucuaucug

SEQ ID NO: 3941193 - RNA, 15 nt, Human adenovirus F
cuugccacuggccuu

SEQ ID NO: 3941194 - RNA, 23 nt, Human adenovirus F
cuugccaggguucucuucaggcu

SEQ ID NO: 3941195 - RNA, 20 nt, Human adenovirus F
cuugcgcaacuucuuuuugg

SEQ ID NO: 3941196 - RNA, 16 nt, Human adenovirus F
cuugcucggugcagcc

SEQ ID NO: 3941197 - RNA, 20 nt, Human adenovirus F
cuuggaaucauccaccuggc

SEQ ID NO: 3941198 - RNA, 19 nt, Human adenovirus F
cuugggaggauuuugaguu

SEQ ID NO: 3941199 - RNA, 22 nt, Human adenovirus F
cuuuaaaaauagaaaacgaaaa

SEQ ID NO: 3941200 - RNA, 22 nt, Human adenovirus F
cuuuaacaacacaggagcuuua

SEQ ID NO: 3941201 - RNA, 12 nt, Human adenovirus F
cuuuacaaaaag

SEQ ID NO: 3941202 - RNA, 11 nt, Human adenovirus F
cuuuacaauua

SEQ ID NO: 3941203 - RNA, 14 nt, Human adenovirus F
cuuuaccccgacag

SEQ ID NO: 3941204 - RNA, 18 nt, Human adenovirus F
cuuuacccgacaacaaaa

SEQ ID NO: 3941205 - RNA, 15 nt, Human adenovirus F
cuuuaugacuauggu

SEQ ID NO: 3941206 - RNA, 14 nt, Human adenovirus F
cuuucaacaaaaag

SEQ ID NO: 3941207 - RNA, 19 nt, Human adenovirus F
cuuucaccgccuuggccag

SEQ ID NO: 3941208 - RNA, 16 nt, Human adenovirus F
cuuucaguuggagcag

SEQ ID NO: 3941209 - RNA, 17 nt, Human adenovirus F
cuuucccccuguaccac

SEQ ID NO: 3941210 - RNA, 15 nt, Human adenovirus F
cuuugccgucaaaag

SEQ ID NO: 3941211 - RNA, 20 nt, Human adenovirus F
cuuuugccacacuaaaguuu

SEQ ID NO: 3941212 - RNA, 15 nt, Human adenovirus F
cuuuuucccaaaaaa

SEQ ID NO: 3941213 - RNA, 17 nt, Human adenovirus F
gaaaaaaaauuuuccca

SEQ ID NO: 3941214 - RNA, 22 nt, Human adenovirus F
gaaaaacgggcggcaaaugcuc

SEQ ID NO: 3941215 - RNA, 13 nt, Human adenovirus F
gaaaaagacagca

SEQ ID NO: 3941216 - RNA, 17 nt, Human adenovirus F
gaaaacucaaacaacaa

SEQ ID NO: 3941217 - RNA, 18 nt, Human adenovirus F
gaaaaguacgaagcuagc

SEQ ID NO: 3941218 - RNA, 19 nt, Human adenovirus F
gaaaauagccgccagccuc

SEQ ID NO: 3941219 - RNA, 16 nt, Human adenovirus F
gaaaauccucaguguc

SEQ ID NO: 3941220 - RNA, 16 nt, Human adenovirus F
gaaacaaaagucaaau

SEQ ID NO: 3941221 - RNA, 19 nt, Human adenovirus F
gaaaccccuuugugcccuc

SEQ ID NO: 3941222 - RNA, 17 nt, Human adenovirus F
gaaaccuuaaccacccc

SEQ ID NO: 3941223 - RNA, 14 nt, Human adenovirus F
gaacaauaaaauau

SEQ ID NO: 3941224 - RNA, 15 nt, Human adenovirus F
gaaccaggcagugga

SEQ ID NO: 3941225 - RNA, 17 nt, Human adenovirus F
gaacccaacuauuuggg

SEQ ID NO: 3941226 - RNA, 21 nt, Human adenovirus F
gaacgaccauaguaacuuuca

SEQ ID NO: 3941227 - RNA, 21 nt, Human adenovirus F
gaacgaggagcgcaacuuuca

SEQ ID NO: 3941228 - RNA, 18 nt, Human adenovirus F
gaacgugaccgagcagcu

SEQ ID NO: 3941229 - RNA, 14 nt, Human adenovirus F
gaacguuuugacau

SEQ ID NO: 3941230 - RNA, 14 nt, Human adenovirus F
gaacuugaagccau

SEQ ID NO: 3941231 - RNA, 16 nt, Human adenovirus F
gaagagacccagguuu

SEQ ID NO: 3941232 - RNA, 17 nt, Human adenovirus F
gaagaggguacuagcag

SEQ ID NO: 3941233 - RNA, 12 nt, Human adenovirus F
gaagcaaucaac

SEQ ID NO: 3941234 - RNA, 22 nt, Human adenovirus F
gaagccaaaucgcgcaaccagu

SEQ ID NO: 3941235 - RNA, 15 nt, Human adenovirus F
gaagccuucaggcag

SEQ ID NO: 3941236 - RNA, 17 nt, Human adenovirus F
gaagccuucaggcagca

SEQ ID NO: 3941237 - RNA, 18 nt, Human adenovirus F
gaagcuugcccuuggaaa

SEQ ID NO: 3941238 - RNA, 17 nt, Human adenovirus F
gaaggaaacgcugugag

SEQ ID NO: 3941239 - RNA, 20 nt, Human adenovirus F
gaagguugacuugcaggaga

SEQ ID NO: 3941240 - RNA, 21 nt, Human adenovirus F
gaaucuaaccacuaccacccu

SEQ ID NO: 3941241 - RNA, 12 nt, Human adenovirus F
gaauuuuugcuu

SEQ ID NO: 3941242 - RNA, 14 nt, Human adenovirus F
gacaaaaucacugu

SEQ ID NO: 3941243 - RNA, 16 nt, Human adenovirus F
aaaaaggcuaaucauu

SEQ ID NO: 3941244 - RNA, 16 nt, Human adenovirus F
aaaaagguucugaagu

SEQ ID NO: 3941245 - RNA, 24 nt, Human adenovirus F
aaaacaaaccacgcccaugcagcc

SEQ ID NO: 3941246 - RNA, 14 nt, Human adenovirus F
aaaacuugcaagga

SEQ ID NO: 3941247 - RNA, 13 nt, Human adenovirus F
aaaauaacucacu

SEQ ID NO: 3941248 - RNA, 18 nt, Human adenovirus F
aaacacugcgcaaagucg

SEQ ID NO: 3941249 - RNA, 14 nt, Human adenovirus F
aaacaugaggagga

SEQ ID NO: 3941250 - RNA, 11 nt, Human adenovirus F
aaaccaaauca

SEQ ID NO: 3941251 - RNA, 21 nt, Human adenovirus F
aaacccguucggagccaaccu

SEQ ID NO: 3941252 - RNA, 21 nt, Human adenovirus F
aaaccgcgccauagcuggagg

SEQ ID NO: 3941253 - RNA, 19 nt, Human adenovirus F
aaaccuacgcccaggagca

SEQ ID NO: 3941254 - RNA, 14 nt, Human adenovirus F
aaaccuggcaacau

SEQ ID NO: 3941255 - RNA, 13 nt, Human adenovirus F
aaacgcugugagu

SEQ ID NO: 3941256 - RNA, 19 nt, Human adenovirus F
aaacgucccaucauuucca

SEQ ID NO: 3941257 - RNA, 21 nt, Human adenovirus F
aaacuaucccguguuugacaa

SEQ ID NO: 3941258 - RNA, 17 nt, Human adenovirus F
aaacuggaagauguccu

SEQ ID NO: 3941259 - RNA, 21 nt, Human adenovirus F
aaacuggcgccauguaauuca

SEQ ID NO: 3941260 - RNA, 15 nt, Human adenovirus F
aaagaagcacaggag

SEQ ID NO: 3941261 - RNA, 16 nt, Human adenovirus F
aaagacguuaaagcug

SEQ ID NO: 3941262 - RNA, 21 nt, Human adenovirus F
aaagagaguucaacagaauca

SEQ ID NO: 3941263 - RNA, 20 nt, Human adenovirus F
aaagcagugggacgaggagg

SEQ ID NO: 3941264 - RNA, 17 nt, Human adenovirus F
aaagcgagccaaagugc

SEQ ID NO: 3941265 - RNA, 16 nt, Human adenovirus F
aaagcuggagcucaca

SEQ ID NO: 3941266 - RNA, 21 nt, Human adenovirus F
aaaggaggucaagccaagcug

SEQ ID NO: 3941267 - RNA, 17 nt, Human adenovirus F
aaaggcgaaaagcggcc

SEQ ID NO: 3941268 - RNA, 16 nt, Human adenovirus F
aaaguagcucuuccaa

SEQ ID NO: 3941269 - RNA, 13 nt, Human adenovirus F
aaaguccagcgcg

SEQ ID NO: 3941270 - RNA, 14 nt, Human adenovirus F
aaagucggccaagu

SEQ ID NO: 3941271 - RNA, 23 nt, Human adenovirus F
aaagugcaagucacgaagaucac

SEQ ID NO: 3941272 - RNA, 14 nt, Human adenovirus F
aaaugacuaacucc

SEQ ID NO: 3941273 - RNA, 17 nt, Human adenovirus F
aaauguucacacucuaa

SEQ ID NO: 3941274 - RNA, 20 nt, Human adenovirus F
aaauuaauugcacuaacucc

SEQ ID NO: 3941275 - RNA, 17 nt, Human adenovirus F
aaauuacagccaaguca

SEQ ID NO: 3941276 - RNA, 21 nt, Human adenovirus F
aaauuuauucccgaagacuau

SEQ ID NO: 3941277 - RNA, 13 nt, Human adenovirus F
aacaaauacaguc

SEQ ID NO: 3941278 - RNA, 12 nt, Human adenovirus F
aacacaaacacg

SEQ ID NO: 3941279 - RNA, 11 nt, Human adenovirus F
aacacaggcgu

SEQ ID NO: 3941280 - RNA, 20 nt, Human adenovirus F
aacacgcugccaacaaaugu

SEQ ID NO: 3941281 - RNA, 18 nt, Human adenovirus F
aacacugcgauuagaaaa

SEQ ID NO: 3941282 - RNA, 21 nt, Human adenovirus F
aacagcagguuaaagccaacu

SEQ ID NO: 3941283 - RNA, 23 nt, Human adenovirus F
aacagcagguuaaagccaacucc

SEQ ID NO: 3941284 - RNA, 16 nt, Human adenovirus F
aacaguuaccaaggcg

SEQ ID NO: 3941285 - RNA, 20 nt, Human adenovirus F
aacaugcuguacgccaacuc

SEQ ID NO: 3941286 - RNA, 21 nt, Human adenovirus F
aaccuugaguuuaaugucucg

SEQ ID NO: 3941287 - RNA, 12 nt, Human adenovirus F
aacgagcaggcc

SEQ ID NO: 3941288 - RNA, 17 nt, Human adenovirus F
aacggcgugcuggaaag

SEQ ID NO: 3941289 - RNA, 20 nt, Human adenovirus F
aacgggguggaaagccuggu

SEQ ID NO: 3941290 - RNA, 22 nt, Human adenovirus F
aacguacucuuuugccacgcag

SEQ ID NO: 3941291 - RNA, 16 nt, Human adenovirus F
aacgucaacuccucuu

SEQ ID NO: 3941292 - RNA, 15 nt, Human adenovirus F
aacgucaaugccaau

SEQ ID NO: 3941293 - RNA, 20 nt, Human adenovirus F
aacgugaccgagcagcugcg

SEQ ID NO: 3941294 - RNA, 22 nt, Human adenovirus F
aacuccaaccaagaaauacaaa

SEQ ID NO: 3941295 - RNA, 22 nt, Human adenovirus F
aacuccgacauguuugucuuua

SEQ ID NO: 3941296 - RNA, 13 nt, Human adenovirus F
aacuuuacaaaau

SEQ ID NO: 3941297 - RNA, 14 nt, Human adenovirus F
aacuuuacaaaaug

SEQ ID NO: 3941298 - RNA, 18 nt, Human adenovirus F
aacuuuuugcccaccgcc

SEQ ID NO: 3941299 - RNA, 21 nt, Human adenovirus F
aagaaauccacuuaccagagc

SEQ ID NO: 3941300 - RNA, 24 nt, Human adenovirus F
aagaagcacaggagauccguggag

SEQ ID NO: 3941301 - RNA, 15 nt, Human adenovirus F
aagacaaaaucacug

SEQ ID NO: 3941302 - RNA, 15 nt, Human adenovirus F
aagacaucaauuuug

SEQ ID NO: 3941303 - RNA, 17 nt, Human adenovirus F
aagaccaacugcagcgc

SEQ ID NO: 3941304 - RNA, 20 nt, Human adenovirus F
aagagcaaaaccuccaggag

SEQ ID NO: 3941305 - RNA, 21 nt, Human adenovirus F
aagaguuuuuacaacgagcag

SEQ ID NO: 3941306 - RNA, 21 nt, Human adenovirus F
aagaugacuucaaccccgucu

SEQ ID NO: 3941307 - RNA, 16 nt, Human adenovirus F
aagaugcgauuuucca

SEQ ID NO: 3941308 - RNA, 23 nt, Human adenovirus F
aagcaaucaaccaacuaacacug

SEQ ID NO: 3941309 - RNA, 16 nt, Human adenovirus F
aagcccggguccaggc

SEQ ID NO: 3941310 - RNA, 16 nt, Human adenovirus F
aagccuucaggcagca

SEQ ID NO: 3941311 - RNA, 19 nt, Human adenovirus F
aagcgcggccgcuacggag

SEQ ID NO: 3941312 - RNA, 19 nt, Human adenovirus F
aagcugcggaaaugcuuua

SEQ ID NO: 3941313 - RNA, 18 nt, Human adenovirus F
aagcuggguggaaagcaa

SEQ ID NO: 3941314 - RNA, 18 nt, Human adenovirus F
aagcuucuuguacucaaa

SEQ ID NO: 3941315 - RNA, 19 nt, Human adenovirus F
aagcuucuuguacucaaau

SEQ ID NO: 3941316 - RNA, 16 nt, Human adenovirus F
aaggaauguggggcgu

SEQ ID NO: 3941317 - RNA, 14 nt, Human adenovirus F
aagggcucugccug

SEQ ID NO: 3941318 - RNA, 16 nt, Human adenovirus F
aagguaaucaggagaa

SEQ ID NO: 3941319 - RNA, 19 nt, Human adenovirus F
aagguauuaacaaaucgau

SEQ ID NO: 3941320 - RNA, 15 nt, Human adenovirus F
aagucguggacgggc

SEQ ID NO: 3941321 - RNA, 23 nt, Human adenovirus F
aagugucccacugcaacucgcag

SEQ ID NO: 3941322 - RNA, 13 nt, Human adenovirus F
aaguuauacagug

SEQ ID NO: 3941323 - RNA, 13 nt, Human adenovirus F
aauauccuucaga

SEQ ID NO: 3941324 - RNA, 13 nt, Human adenovirus F
aauauuggcuacc

SEQ ID NO: 3941325 - RNA, 19 nt, Human adenovirus F
aaucacgaccucccaaagu

SEQ ID NO: 3941326 - RNA, 23 nt, Human adenovirus F
aaucagggcgugcaagugggcuc

SEQ ID NO: 3941327 - RNA, 12 nt, Human adenovirus F
aaucccagcaga

SEQ ID NO: 3941328 - RNA, 14 nt, Human adenovirus F
aaugcgggcucuga

SEQ ID NO: 3941329 - RNA, 21 nt, Human adenovirus F
aaugcuagcccgaacauaguc

SEQ ID NO: 3941330 - RNA, 19 nt, Human adenovirus F
aaugcuggucugcgcuacc

SEQ ID NO: 3941331 - RNA, 11 nt, Human adenovirus F
aauggcucugc

SEQ ID NO: 3941332 - RNA, 15 nt, Human adenovirus F
aaugguaccacgcag

SEQ ID NO: 3941333 - RNA, 13 nt, Human adenovirus F
aauuccacuggca

SEQ ID NO: 3941334 - RNA, 18 nt, Human adenovirus F
aauuguaacugagccuga

SEQ ID NO: 3941335 - RNA, 17 nt, Human adenovirus F
acaaaauggguuacuuu

SEQ ID NO: 3941336 - RNA, 20 nt, Human adenovirus F
acaaacacgcauguaaauuu

SEQ ID NO: 3941337 - RNA, 22 nt, Human adenovirus F
acaaaucgauuaaguugggagg

SEQ ID NO: 3941338 - RNA, 17 nt, Human adenovirus F
acaacccgucuucccuc

SEQ ID NO: 3941339 - RNA, 21 nt, Human adenovirus F
acaagcaaagacagagcuuua

SEQ ID NO: 3941340 - RNA, 11 nt, Human adenovirus F
acaagggcuuc

SEQ ID NO: 3941341 - RNA, 18 nt, Human adenovirus F
acaauccuaacaaaaacu

SEQ ID NO: 3941342 - RNA, 19 nt, Human adenovirus F
acaauuaaaggucuuaaag

SEQ ID NO: 3941343 - RNA, 22 nt, Human adenovirus F
acacaaacauagcaaaagcauu

SEQ ID NO: 3941344 - RNA, 16 nt, Human adenovirus F
acacaaugcaaaaugu

SEQ ID NO: 3941345 - RNA, 20 nt, Human adenovirus F
acacauccauuaaaauuucu

SEQ ID NO: 3941346 - RNA, 23 nt, Human adenovirus F
acaccaccccuagucccuccucc

SEQ ID NO: 3941347 - RNA, 16 nt, Human adenovirus F
acaccaguagcuugga

SEQ ID NO: 3941348 - RNA, 13 nt, Human adenovirus F
acaccccccgccu

SEQ ID NO: 3941349 - RNA, 15 nt, Human adenovirus F
acaccgcuuccaccu

SEQ ID NO: 3941350 - RNA, 20 nt, Human adenovirus F
acacgcauguaaauuuugca

SEQ ID NO: 3941351 - RNA, 12 nt, Human adenovirus F
acacgcugccaa

SEQ ID NO: 3941352 - RNA, 14 nt, Human adenovirus F
acacucccuuugcc

SEQ ID NO: 3941353 - RNA, 21 nt, Human adenovirus F
acacuggcuggcccuggccug

SEQ ID NO: 3941354 - RNA, 16 nt, Human adenovirus F
acacuuuugccaaagu

SEQ ID NO: 3941355 - RNA, 17 nt, Human adenovirus F
acagaugucauaaacgu

SEQ ID NO: 3941356 - RNA, 17 nt, Human adenovirus F
acagcagguuaaagcca

SEQ ID NO: 3941357 - RNA, 18 nt, Human adenovirus F
acagccuagacgaggagg

SEQ ID NO: 3941358 - RNA, 18 nt, Human adenovirus F
acagcguagcacucccuc

SEQ ID NO: 3941359 - RNA, 12 nt, Human adenovirus F
acaggagcgcag

SEQ ID NO: 3941360 - RNA, 20 nt, Human adenovirus F
acaucaggggcucaggaacc

SEQ ID NO: 3941361 - RNA, 14 nt, Human adenovirus F
acaugaacacuucc

SEQ ID NO: 3941362 - RNA, 15 nt, Human adenovirus F
acaugcgcuccaaca

SEQ ID NO: 3941363 - RNA, 23 nt, Human adenovirus F
acauuggcuggaggcuugggagg

SEQ ID NO: 3941364 - RNA, 15 nt, Human adenovirus F
acauuucgugggaag

SEQ ID NO: 3941365 - RNA, 16 nt, Human adenovirus F
accaaaggugguucug

SEQ ID NO: 3941366 - RNA, 19 nt, Human adenovirus F
accaaucacgaccucccaa

SEQ ID NO: 3941367 - RNA, 21 nt, Human adenovirus F
accaccucuucuucuuccucc

SEQ ID NO: 3941368 - RNA, 14 nt, Human adenovirus F
accacgcugcgccc

SEQ ID NO: 3941369 - RNA, 14 nt, Human adenovirus F
accacggugguaca

SEQ ID NO: 3941370 - RNA, 19 nt, Human adenovirus F
accacucaauuaaccuugc

SEQ ID NO: 3941371 - RNA, 14 nt, Human adenovirus F
accacuucgggaga

SEQ ID NO: 3941372 - RNA, 21 nt, Human adenovirus F
accagcacacagggauacugg

SEQ ID NO: 3941373 - RNA, 17 nt, Human adenovirus F
accaguccgggccagac

SEQ ID NO: 3941374 - RNA, 18 nt, Human adenovirus F
accaucuuucaaaaaacc

SEQ ID NO: 3941375 - RNA, 19 nt, Human adenovirus F
ugggaacuguccagggagu

SEQ ID NO: 3941376 - RNA, 14 nt, Human adenovirus F
ugggacagccuaga

SEQ ID NO: 3941377 - RNA, 16 nt, Human adenovirus F
ugggacagcggaggca

SEQ ID NO: 3941378 - RNA, 15 nt, Human adenovirus F
ugggacgaggaggag

SEQ ID NO: 3941379 - RNA, 15 nt, Human adenovirus F
ugggauuacaaauuu

SEQ ID NO: 3941380 - RNA, 14 nt, Human adenovirus F
ugggcaaaggggga

SEQ ID NO: 3941381 - RNA, 19 nt, Human adenovirus F
ugggcacguuugacaaacg

SEQ ID NO: 3941382 - RNA, 16 nt, Human adenovirus F
ugggcauaacuucagc

SEQ ID NO: 3941383 - RNA, 20 nt, Human adenovirus F
ugggcauaacuucagcacuu

SEQ ID NO: 3941384 - RNA, 18 nt, Human adenovirus F
ugggcauaguugcuccca

SEQ ID NO: 3941385 - RNA, 23 nt, Human adenovirus F
ugggcauaguugcucccaaagug

SEQ ID NO: 3941386 - RNA, 18 nt, Human adenovirus F
ugggcucagacuccaaca

SEQ ID NO: 3941387 - RNA, 19 nt, Human adenovirus F
uggggggaaccggcgccgc

SEQ ID NO: 3941388 - RNA, 20 nt, Human adenovirus F
uggguguauaaaagggggcg

SEQ ID NO: 3941389 - RNA, 13 nt, Human adenovirus F
ugguacaggagcg

SEQ ID NO: 3941390 - RNA, 13 nt, Human adenovirus F
ugguagcaguguc

SEQ ID NO: 3941391 - RNA, 11 nt, Human adenovirus F
ugguuggaaaa

SEQ ID NO: 3941392 - RNA, 18 nt, Human adenovirus F
uguacguuuguugcaugu

SEQ ID NO: 3941393 - RNA, 21 nt, Human adenovirus F
uguacuacaauuccacuggca

SEQ ID NO: 3941394 - RNA, 14 nt, Human adenovirus F
uguacucaaaugua

SEQ ID NO: 3941395 - RNA, 18 nt, Human adenovirus F
uguacucaaauguagccc

SEQ ID NO: 3941396 - RNA, 14 nt, Human adenovirus F
uguaguugauaguu

SEQ ID NO: 3941397 - RNA, 14 nt, Human adenovirus F
ugucaggcucugag

SEQ ID NO: 3941398 - RNA, 21 nt, Human adenovirus F
uguccauauuauuuaaauaaa

SEQ ID NO: 3941399 - RNA, 14 nt, Human adenovirus F
uguccgccgccgcu

SEQ ID NO: 3941400 - RNA, 22 nt, Human adenovirus F
ugucugccaauuaucuacgccu

SEQ ID NO: 3941401 - RNA, 20 nt, Human adenovirus F
ugucuuaccaguuaaugcuu

SEQ ID NO: 3941402 - RNA, 12 nt, Human adenovirus F
ugugacaaaauc

SEQ ID NO: 3941403 - RNA, 19 nt, Human adenovirus F
uguggaaucccgcgagccc

SEQ ID NO: 3941404 - RNA, 20 nt, Human adenovirus F
uguggggcgugcgagccccc

SEQ ID NO: 3941405 - RNA, 21 nt, Human adenovirus F
uguguuuuuuacugcuaaagg

SEQ ID NO: 3941406 - RNA, 24 nt, Human adenovirus F
uguucaccuuuuuacccugaccca

SEQ ID NO: 3941407 - RNA, 21 nt, Human adenovirus F
uguucacugaaagccagccgu

SEQ ID NO: 3941408 - RNA, 14 nt, Human adenovirus F
uguuucacauaucg

SEQ ID NO: 3941409 - RNA, 18 nt, Human adenovirus F
uguuuugggucaaaaacc

SEQ ID NO: 3941410 - RNA, 15 nt, Human adenovirus F
uuaaccauggagcua

SEQ ID NO: 3941411 - RNA, 18 nt, Human adenovirus F
uuaaguauucaccaccuu

SEQ ID NO: 3941412 - RNA, 18 nt, Human adenovirus F
uuaaugggcaaaggggga

SEQ ID NO: 3941413 - RNA, 12 nt, Human adenovirus F
uuacaaaaagag

SEQ ID NO: 3941414 - RNA, 17 nt, Human adenovirus F
uuacaaccaaaaacggg

SEQ ID NO: 3941415 - RNA, 18 nt, Human adenovirus F
uuaccccgacagaggccg

SEQ ID NO: 3941416 - RNA, 13 nt, Human adenovirus F
uuacgucagcuac

SEQ ID NO: 3941417 - RNA, 17 nt, Human adenovirus F
uuagcgcacugguaaac

SEQ ID NO: 3941418 - RNA, 15 nt, Human adenovirus F
uuauacaccucccuu

SEQ ID NO: 3941419 - RNA, 15 nt, Human adenovirus F
uuauauuuuaauuuu

SEQ ID NO: 3941420 - RNA, 20 nt, Human adenovirus F
uucaacggaauuguaacuga

SEQ ID NO: 3941421 - RNA, 18 nt, Human adenovirus F
uucagccacuccugcagu

SEQ ID NO: 3941422 - RNA, 22 nt, Human adenovirus F
uucccacuguuucuccuccccu

SEQ ID NO: 3941423 - RNA, 15 nt, Human adenovirus F
uuccuauuacagccc

SEQ ID NO: 3941424 - RNA, 15 nt, Human adenovirus F
uucgccuggagaggc

SEQ ID NO: 3941425 - RNA, 15 nt, Human adenovirus F
uucgcgcaacuuuug

SEQ ID NO: 3941426 - RNA, 15 nt, Human adenovirus F
uucuccugcuugucu

SEQ ID NO: 3941427 - RNA, 22 nt, Human adenovirus F
uucuggacucgucuccugcaag

SEQ ID NO: 3941428 - RNA, 13 nt, Human adenovirus F
uucuuugccaccu

SEQ ID NO: 3941429 - RNA, 16 nt, Human adenovirus F
uugaagaacugggagu

SEQ ID NO: 3941430 - RNA, 12 nt, Human adenovirus F
uugacuugcagg

SEQ ID NO: 3941431 - RNA, 17 nt, Human adenovirus F
uugcgcuaugugcagca

SEQ ID NO: 3941432 - RNA, 16 nt, Human adenovirus F
uugcggugccugaagc

SEQ ID NO: 3941433 - RNA, 17 nt, Human adenovirus F
uugcuacggaggaagag

SEQ ID NO: 3941434 - RNA, 17 nt, Human adenovirus F
uugcucggcgaaaacuc

SEQ ID NO: 3941435 - RNA, 14 nt, Human adenovirus F
uugcugacagcugg

SEQ ID NO: 3941436 - RNA, 17 nt, Human adenovirus F
uuggagcagccugugga

SEQ ID NO: 3941437 - RNA, 17 nt, Human adenovirus F
uuggcagcaacauaacu

SEQ ID NO: 3941438 - RNA, 21 nt, Human adenovirus F
uuggcuggaggcuugggagga

SEQ ID NO: 3941439 - RNA, 17 nt, Human adenovirus F
uugguaacaaggccugg

SEQ ID NO: 3941440 - RNA, 11 nt, Human adenovirus F
uugucugucug

SEQ ID NO: 3941441 - RNA, 12 nt, Human adenovirus F
uugucuguuuuu

SEQ ID NO: 3941442 - RNA, 16 nt, Human adenovirus F
uugugggucugggagu

SEQ ID NO: 3941443 - RNA, 19 nt, Human adenovirus F
uuuaagaaacgaacacgcu

SEQ ID NO: 3941444 - RNA, 14 nt, Human adenovirus F
uuuaauggaaacug

SEQ ID NO: 3941445 - RNA, 20 nt, Human adenovirus F
uuuaauggcacaguguuugc

SEQ ID NO: 3941446 - RNA, 21 nt, Human adenovirus F
uuuaucuguaaaacuucccuu

SEQ ID NO: 3941447 - RNA, 11 nt, Human adenovirus F
uuuccagcaga

SEQ ID NO: 3941448 - RNA, 23 nt, Human adenovirus F
uuuccagcauaauaacucuggcu

SEQ ID NO: 3941449 - RNA, 22 nt, Human adenovirus F
uuugaacagcugaagacacauu

SEQ ID NO: 3941450 - RNA, 12 nt, Human adenovirus F
uuugacagcauu

SEQ ID NO: 3941451 - RNA, 21 nt, Human adenovirus F
uuugcgcaggcgaauaaaagg

SEQ ID NO: 3941452 - RNA, 14 nt, Human adenovirus F
gcauccauaaaggu

SEQ ID NO: 3941453 - RNA, 14 nt, Human adenovirus F
gcaucuaucuuuuc

SEQ ID NO: 3941454 - RNA, 18 nt, Human adenovirus F
gcaucucuugaaugaggu

SEQ ID NO: 3941455 - RNA, 21 nt, Human adenovirus F
gcauguuuucuccauaccaga

SEQ ID NO: 3941456 - RNA, 11 nt, Human adenovirus F
gccaacucgac

SEQ ID NO: 3941457 - RNA, 17 nt, Human adenovirus F
gccaccagccggaggag

SEQ ID NO: 3941458 - RNA, 18 nt, Human adenovirus F
gccaccagccggaggagu

SEQ ID NO: 3941459 - RNA, 16 nt, Human adenovirus F
gccacccaagggaaac

SEQ ID NO: 3941460 - RNA, 13 nt, Human adenovirus F
gccaccuccaccg

SEQ ID NO: 3941461 - RNA, 19 nt, Human adenovirus F
gccaggcguacuuaacgcu

SEQ ID NO: 3941462 - RNA, 18 nt, Human adenovirus F
gccaggguucucuucagg

SEQ ID NO: 3941463 - RNA, 20 nt, Human adenovirus F
gccaucuucccgcaaaagcg

SEQ ID NO: 3941464 - RNA, 14 nt, Human adenovirus F
gccauucuucucuu

SEQ ID NO: 3941465 - RNA, 20 nt, Human adenovirus F
gccauuuaccaauagcagca

SEQ ID NO: 3941466 - RNA, 16 nt, Human adenovirus F
gcccacugaccggcac

SEQ ID NO: 3941467 - RNA, 21 nt, Human adenovirus F
gcccaggagcagcgggaagag

SEQ ID NO: 3941468 - RNA, 12 nt, Human adenovirus F
gccccaccgccc

SEQ ID NO: 3941469 - RNA, 21 nt, Human adenovirus F
gcccccaaaggugcucccaau

SEQ ID NO: 3941470 - RNA, 17 nt, Human adenovirus F
gccccgguugugcagug

SEQ ID NO: 3941471 - RNA, 11 nt, Human adenovirus F
gccccuggccu

SEQ ID NO: 3941472 - RNA, 14 nt, Human adenovirus F
gccccuuggugaag

SEQ ID NO: 3941473 - RNA, 21 nt, Human adenovirus F
gcccgcugagcguucucgcuc

SEQ ID NO: 3941474 - RNA, 15 nt, Human adenovirus F
gcccggguccaggcu

SEQ ID NO: 3941475 - RNA, 20 nt, Human adenovirus F
gcccguggaaaaagacagca

SEQ ID NO: 3941476 - RNA, 21 nt, Human adenovirus F
gcccuuaaguauucaccaccu

SEQ ID NO: 3941477 - RNA, 17 nt, Human adenovirus F
gccgagcuuuuacuggg

SEQ ID NO: 3941478 - RNA, 21 nt, Human adenovirus F
gccgccccuggccuguuuuug

SEQ ID NO: 3941479 - RNA, 16 nt, Human adenovirus F
gccgccgugccagaaa

SEQ ID NO: 3941480 - RNA, 20 nt, Human adenovirus F
gccgcgccaaccguacacgc

SEQ ID NO: 3941481 - RNA, 21 nt, Human adenovirus F
gccgcugucguuaguggaggc

SEQ ID NO: 3941482 - RNA, 22 nt, Human adenovirus F
gccggagaggggaggaaguagg

SEQ ID NO: 3941483 - RNA, 23 nt, Human adenovirus F
gccgucguacaaguugcaaagcu

SEQ ID NO: 3941484 - RNA, 21 nt, Human adenovirus F
gccuaagugugacauuacuuc

SEQ ID NO: 3941485 - RNA, 19 nt, Human adenovirus F
gccuacggcaagcgcggcc

SEQ ID NO: 3941486 - RNA, 15 nt, Human adenovirus F
gccucaaguggggca

SEQ ID NO: 3941487 - RNA, 19 nt, Human adenovirus F
gccucaaguggggcagacg

SEQ ID NO: 3941488 - RNA, 11 nt, Human adenovirus F
gccucccuuug

SEQ ID NO: 3941489 - RNA, 13 nt, Human adenovirus F
gccuccugguggc

SEQ ID NO: 3941490 - RNA, 14 nt, Human adenovirus F
gccugagggcgacg

SEQ ID NO: 3941491 - RNA, 13 nt, Human adenovirus F
gccuucaggcagc

SEQ ID NO: 3941492 - RNA, 16 nt, Human adenovirus F
gccuugcaagcagcuc

SEQ ID NO: 3941493 - RNA, 18 nt, Human adenovirus F
gcgagcccccguggggga

SEQ ID NO: 3941494 - RNA, 22 nt, Human adenovirus F
gcgaguuugacgugccugaggg

SEQ ID NO: 3941495 - RNA, 16 nt, Human adenovirus F
gcgauccggcacuuga

SEQ ID NO: 3941496 - RNA, 19 nt, Human adenovirus F
gcgcaacuuuugcaccagg

SEQ ID NO: 3941497 - RNA, 15 nt, Human adenovirus F
gcgcacccugguggc

SEQ ID NO: 3941498 - RNA, 22 nt, Human adenovirus F
gcgcacggcccccaucucugug

SEQ ID NO: 3941499 - RNA, 21 nt, Human adenovirus F
gcgcagcaguaucaguggagu

SEQ ID NO: 3941500 - RNA, 17 nt, Human adenovirus F
gcgccacucgggaaaga

SEQ ID NO: 3941501 - RNA, 15 nt, Human adenovirus F
gcgccauagcuggag

SEQ ID NO: 3941502 - RNA, 17 nt, Human adenovirus F
gcgccauagcuggaggg

SEQ ID NO: 3941503 - RNA, 16 nt, Human adenovirus F
gcgccgagcggcugcu

SEQ ID NO: 3941504 - RNA, 19 nt, Human adenovirus F
gcgcgcuucgccuccuggu

SEQ ID NO: 3941505 - RNA, 13 nt, Human adenovirus F
gcgcggcggccau

SEQ ID NO: 3941506 - RNA, 13 nt, Human adenovirus F
gcgcgggcaggag

SEQ ID NO: 3941507 - RNA, 15 nt, Human adenovirus F
gcgcugcuacucaac

SEQ ID NO: 3941508 - RNA, 21 nt, Human adenovirus F
gcggaaaccaagggcucugcc

SEQ ID NO: 3941509 - RNA, 14 nt, Human adenovirus F
gcggacccgucucc

SEQ ID NO: 3941510 - RNA, 17 nt, Human adenovirus F
gcggaggugccccagag

SEQ ID NO: 3941511 - RNA, 19 nt, Human adenovirus F
gcggaggugccccagagug

SEQ ID NO: 3941512 - RNA, 15 nt, Human adenovirus F
gcggaguaacacaaa

SEQ ID NO: 3941513 - RNA, 17 nt, Human adenovirus F
gcggaugguggcaagga

SEQ ID NO: 3941514 - RNA, 23 nt, Human adenovirus F
gcggaugguggcaaggagaguga

SEQ ID NO: 3941515 - RNA, 17 nt, Human adenovirus F
gcggccguuuaugggca

SEQ ID NO: 3941516 - RNA, 14 nt, Human adenovirus F
gcggcggccaugga

SEQ ID NO: 3941517 - RNA, 13 nt, Human adenovirus F
gcgggaagagagg

SEQ ID NO: 3941518 - RNA, 12 nt, Human adenovirus F
gcgggaagagga

SEQ ID NO: 3941519 - RNA, 13 nt, Human adenovirus F
gcgggcaggagcc

SEQ ID NO: 3941520 - RNA, 14 nt, Human adenovirus F
gcgggcggcgccag

SEQ ID NO: 3941521 - RNA, 16 nt, Human adenovirus F
gcgggcucugauaaug

SEQ ID NO: 3941522 - RNA, 16 nt, Human adenovirus F
ugaaauuaauugcacu

SEQ ID NO: 3941523 - RNA, 20 nt, Human adenovirus F
ugaaccggaaaaccaacgcu

SEQ ID NO: 3941524 - RNA, 19 nt, Human adenovirus F
ugaaguuaccaaagacaaa

SEQ ID NO: 3941525 - RNA, 19 nt, Human adenovirus F
ugacaaacgcuuuccgggu

SEQ ID NO: 3941526 - RNA, 17 nt, Human adenovirus F
ugacacgcgcaacuucc

SEQ ID NO: 3941527 - RNA, 17 nt, Human adenovirus F
ugacacgggcacucuuc

SEQ ID NO: 3941528 - RNA, 17 nt, Human adenovirus F
ugaccaucacugacgcc

SEQ ID NO: 3941529 - RNA, 11 nt, Human adenovirus F
ugaccuguggg

SEQ ID NO: 3941530 - RNA, 22 nt, Human adenovirus F
ugaccugugggucgcagcaggu

SEQ ID NO: 3941531 - RNA, 18 nt, Human adenovirus F
ugaccuuagaacuaccuc

SEQ ID NO: 3941532 - RNA, 16 nt, Human adenovirus F
ugagaauuauugaaaa

SEQ ID NO: 3941533 - RNA, 22 nt, Human adenovirus F
ugagcaaagacauucccacgcc

SEQ ID NO: 3941534 - RNA, 15 nt, Human adenovirus F
ugagcgccagccgcc

SEQ ID NO: 3941535 - RNA, 18 nt, Human adenovirus F
ugagugggguaacuuuua

SEQ ID NO: 3941536 - RNA, 19 nt, Human adenovirus F
ugaucuuauggaagacucu

SEQ ID NO: 3941537 - RNA, 20 nt, Human adenovirus F
ugaugaagcgugguaaaagg

SEQ ID NO: 3941538 - RNA, 12 nt, Human adenovirus F
ugauggcagcag

SEQ ID NO: 3941539 - RNA, 15 nt, Human adenovirus F
ugauguaacagcuuu

SEQ ID NO: 3941540 - RNA, 15 nt, Human adenovirus F
ugauuucauuuacca

SEQ ID NO: 3941541 - RNA, 12 nt, Human adenovirus F
ugauuuggaaga

SEQ ID NO: 3941542 - RNA, 19 nt, Human adenovirus F
ugauuuucuuugccaccuu

SEQ ID NO: 3941543 - RNA, 22 nt, Human adenovirus F
ugcaaaucuauuucuuugucua

SEQ ID NO: 3941544 - RNA, 14 nt, Human adenovirus F
ugcaacuuggaagg

SEQ ID NO: 3941545 - RNA, 20 nt, Human adenovirus F
ugcaauggcagcccagcgcc

SEQ ID NO: 3941546 - RNA, 14 nt, Human adenovirus F
ugcacacagacucc

SEQ ID NO: 3941547 - RNA, 21 nt, Human adenovirus F
ugcaccgcgcggcggccauga

SEQ ID NO: 3941548 - RNA, 22 nt, Human adenovirus F
ugcacuuuuggccuuugucugu

SEQ ID NO: 3941549 - RNA, 22 nt, Human adenovirus F
ugcagacaagacauggaagaca

SEQ ID NO: 3941550 - RNA, 23 nt, Human adenovirus F
ugcagagcuugggcccugggcuu

SEQ ID NO: 3941551 - RNA, 15 nt, Human adenovirus F
ugcagcgcacgcugg

SEQ ID NO: 3941552 - RNA, 13 nt, Human adenovirus F
ugcagcugcugcc

SEQ ID NO: 3941553 - RNA, 17 nt, Human adenovirus F
ugcaucuaucuuuuccu

SEQ ID NO: 3941554 - RNA, 18 nt, Human adenovirus F
ugccaauuaucuacgccu

SEQ ID NO: 3941555 - RNA, 19 nt, Human adenovirus F
ugccacccaagggaaacaa

SEQ ID NO: 3941556 - RNA, 16 nt, Human adenovirus F
ugccacucgaaaccaa

SEQ ID NO: 3941557 - RNA, 21 nt, Human adenovirus F
ugccaggcggcgaugaaacuu

SEQ ID NO: 3941558 - RNA, 14 nt, Human adenovirus F
ugcccgccagcugg

SEQ ID NO: 3941559 - RNA, 13 nt, Human adenovirus F
ugccggcccccac

SEQ ID NO: 3941560 - RNA, 15 nt, Human adenovirus F
ugccggcucuaggca

SEQ ID NO: 3941561 - RNA, 15 nt, Human adenovirus F
ugccuccagcacugc

SEQ ID NO: 3941562 - RNA, 16 nt, Human adenovirus F
ugccugacucuuacaa

SEQ ID NO: 3941563 - RNA, 17 nt, Human adenovirus F
ugcgagaugcgucgggc

SEQ ID NO: 3941564 - RNA, 21 nt, Human adenovirus F
ugcgcaccaauaugcccaaca

SEQ ID NO: 3941565 - RNA, 22 nt, Human adenovirus F
ugcgccgagcggcugcuucugc

SEQ ID NO: 3941566 - RNA, 18 nt, Human adenovirus F
ugcgcuguacugugcauu

SEQ ID NO: 3941567 - RNA, 16 nt, Human adenovirus F
ugcguggauuccuggg

SEQ ID NO: 3941568 - RNA, 11 nt, Human adenovirus F
ugcuaccuggu

SEQ ID NO: 3941569 - RNA, 23 nt, Human adenovirus F
ugcuacucaacagaaaccucuuc

SEQ ID NO: 3941570 - RNA, 15 nt, Human adenovirus F
ugcuccugcccgggu

SEQ ID NO: 3941571 - RNA, 17 nt, Human adenovirus F
ugcuccuggcgagccca

SEQ ID NO: 3941572 - RNA, 15 nt, Human adenovirus F
ugcucggugcagccg

SEQ ID NO: 3941573 - RNA, 17 nt, Human adenovirus F
ugcugaauauugcggag

SEQ ID NO: 3941574 - RNA, 21 nt, Human adenovirus F
uggaagagggcgaggggcugg

SEQ ID NO: 3941575 - RNA, 13 nt, Human adenovirus F
uggaccuggaaga

SEQ ID NO: 3941576 - RNA, 18 nt, Human adenovirus F
uggagaucuuucuucaga

SEQ ID NO: 3941577 - RNA, 16 nt, Human adenovirus F
uggagcagccugugga

SEQ ID NO: 3941578 - RNA, 14 nt, Human adenovirus F
uggagccgacuuca

SEQ ID NO: 3941579 - RNA, 22 nt, Human adenovirus F
uggauccagugcaggaagagga

SEQ ID NO: 3941580 - RNA, 16 nt, Human adenovirus F
uggcaacaugggagug

SEQ ID NO: 3941581 - RNA, 16 nt, Human adenovirus F
uggcacagcaaacaca

SEQ ID NO: 3941582 - RNA, 19 nt, Human adenovirus F
uggcacaguguuugcuucu

SEQ ID NO: 3941583 - RNA, 17 nt, Human adenovirus F
uggcccaccacucugau

SEQ ID NO: 3941584 - RNA, 22 nt, Human adenovirus F
uggccgacaagguggcggccau

SEQ ID NO: 3941585 - RNA, 21 nt, Human adenovirus F
uggccgcacucagcgaaccca

SEQ ID NO: 3941586 - RNA, 22 nt, Human adenovirus F
uggccugaauuuuuagguuggc

SEQ ID NO: 3941587 - RNA, 18 nt, Human adenovirus F
uggcgccggcgggaagag

SEQ ID NO: 3941588 - RNA, 18 nt, Human adenovirus F
uggcggcuaacuugugga

SEQ ID NO: 3941589 - RNA, 14 nt, Human adenovirus F
uggcucuguggaga

SEQ ID NO: 3941590 - RNA, 16 nt, Human adenovirus F
ugggaacuguccaggg

SEQ ID NO: 3941591 - RNA, 17 nt, Human adenovirus F
gacaaagcacacagaac

SEQ ID NO: 3941592 - RNA, 23 nt, Human adenovirus F
gacaaccggguuuuggacauggc

SEQ ID NO: 3941593 - RNA, 20 nt, Human adenovirus F
gacaacggacgugagagagg

SEQ ID NO: 3941594 - RNA, 17 nt, Human adenovirus F
gacaagguggcggccau

SEQ ID NO: 3941595 - RNA, 12 nt, Human adenovirus F
gacagcaggccg

SEQ ID NO: 3941596 - RNA, 21 nt, Human adenovirus F
gacagggcgcuaacugugcau

SEQ ID NO: 3941597 - RNA, 19 nt, Human adenovirus F
gacaugggggcggaccugc

SEQ ID NO: 3941598 - RNA, 20 nt, Human adenovirus F
gacauguuugucuuuaaaaa

SEQ ID NO: 3941599 - RNA, 17 nt, Human adenovirus F
gaccacaacaacaaacg

SEQ ID NO: 3941600 - RNA, 18 nt, Human adenovirus F
gaccacuggagggcguca

SEQ ID NO: 3941601 - RNA, 14 nt, Human adenovirus F
gaccauauccauua

SEQ ID NO: 3941602 - RNA, 15 nt, Human adenovirus F
gaccccauggaugag

SEQ ID NO: 3941603 - RNA, 15 nt, Human adenovirus F
gaccccguuugcccg

SEQ ID NO: 3941604 - RNA, 18 nt, Human adenovirus F
gaccgcuagggcgcgcuc

SEQ ID NO: 3941605 - RNA, 15 nt, Human adenovirus F
gaccggcgcugggac

SEQ ID NO: 3941606 - RNA, 20 nt, Human adenovirus F
gaccucauccgccauugcca

SEQ ID NO: 3941607 - RNA, 21 nt, Human adenovirus F
gaccugcaauggcagcccagc

SEQ ID NO: 3941608 - RNA, 16 nt, Human adenovirus F
gacgacugggcggcgg

SEQ ID NO: 3941609 - RNA, 23 nt, Human adenovirus F
gacgacugggcggcggccaugga

SEQ ID NO: 3941610 - RNA, 11 nt, Human adenovirus F
gacgagcccug

SEQ ID NO: 3941611 - RNA, 22 nt, Human adenovirus F
gacggaggcaaaacuggaacgc

SEQ ID NO: 3941612 - RNA, 21 nt, Human adenovirus F
gacggggcccguucuggacuc

SEQ ID NO: 3941613 - RNA, 19 nt, Human adenovirus F
gacgugugugugagggcaa

SEQ ID NO: 3941614 - RNA, 18 nt, Human adenovirus F
gacguuaagguaaagcca

SEQ ID NO: 3941615 - RNA, 19 nt, Human adenovirus F
gacuccgugguagccgaug

SEQ ID NO: 3941616 - RNA, 15 nt, Human adenovirus F
gacugggcggcggcc

SEQ ID NO: 3941617 - RNA, 19 nt, Human adenovirus F
gacugggcggcggccaugg

SEQ ID NO: 3941618 - RNA, 14 nt, Human adenovirus F
gacuuccugguccu

SEQ ID NO: 3941619 - RNA, 23 nt, Human adenovirus F
gagacccagguuuaauacaguga

SEQ ID NO: 3941620 - RNA, 15 nt, Human adenovirus F
gagaggcgguggcgc

SEQ ID NO: 3941621 - RNA, 13 nt, Human adenovirus F
gagaguugggggu

SEQ ID NO: 3941622 - RNA, 17 nt, Human adenovirus F
gagaucacgucuggggu

SEQ ID NO: 3941623 - RNA, 13 nt, Human adenovirus F
gagauuuguagug

SEQ ID NO: 3941624 - RNA, 20 nt, Human adenovirus F
gagcaagccgcugacggcgc

SEQ ID NO: 3941625 - RNA, 15 nt, Human adenovirus F
gagcaaguggagcaa

SEQ ID NO: 3941626 - RNA, 13 nt, Human adenovirus F
gagcagauggaga

SEQ ID NO: 3941627 - RNA, 23 nt, Human adenovirus F
gagcagcgggaagagaggcagcc

SEQ ID NO: 3941628 - RNA, 13 nt, Human adenovirus F
gagcagcugcgua

SEQ ID NO: 3941629 - RNA, 21 nt, Human adenovirus F
gagcaugaaacuggaagaugu

SEQ ID NO: 3941630 - RNA, 22 nt, Human adenovirus F
gagcccugaucagccagguggu

SEQ ID NO: 3941631 - RNA, 21 nt, Human adenovirus F
gagcgguccgucacgcgggcc

SEQ ID NO: 3941632 - RNA, 21 nt, Human adenovirus F
gagcucaggguguuuuggguc

SEQ ID NO: 3941633 - RNA, 17 nt, Human adenovirus F
gaggaggccauccugga

SEQ ID NO: 3941634 - RNA, 15 nt, Human adenovirus F
gaggauuaaggguaa

SEQ ID NO: 3941635 - RNA, 20 nt, Human adenovirus F
gaggcagcuucucgaggcca

SEQ ID NO: 3941636 - RNA, 14 nt, Human adenovirus F
gaggccauccugga

SEQ ID NO: 3941637 - RNA, 17 nt, Human adenovirus F
gaggccgucuaccugcg

SEQ ID NO: 3941638 - RNA, 18 nt, Human adenovirus F
gaggccuuucacccagac

SEQ ID NO: 3941639 - RNA, 18 nt, Human adenovirus F
gaggcgauuugggaggga

SEQ ID NO: 3941640 - RNA, 19 nt, Human adenovirus F
gaggguacuagcagugggc

SEQ ID NO: 3941641 - RNA, 20 nt, Human adenovirus F
gaggguacuagcagugggca

SEQ ID NO: 3941642 - RNA, 18 nt, Human adenovirus F
gaggugccccagagugag

SEQ ID NO: 3941643 - RNA, 14 nt, Human adenovirus F
gaguaugccuugca

SEQ ID NO: 3941644 - RNA, 15 nt, Human adenovirus F
gaguuguggagugag

SEQ ID NO: 3941645 - RNA, 19 nt, Human adenovirus F
gauaacgguuguuuuccac

SEQ ID NO: 3941646 - RNA, 16 nt, Human adenovirus F
gauaccgcugcagcug

SEQ ID NO: 3941647 - RNA, 20 nt, Human adenovirus F
gauaccuacuucagccuggg

SEQ ID NO: 3941648 - RNA, 18 nt, Human adenovirus F
gauacugcuccuggcgag

SEQ ID NO: 3941649 - RNA, 19 nt, Human adenovirus F
gauacuggauacuggcaag

SEQ ID NO: 3941650 - RNA, 19 nt, Human adenovirus F
gauacuggcaagagccacc

SEQ ID NO: 3941651 - RNA, 20 nt, Human adenovirus F
gauauuuguaaaagcgggcg

SEQ ID NO: 3941652 - RNA, 24 nt, Human adenovirus F
gaucagguucccgugucaccugca

SEQ ID NO: 3941653 - RNA, 17 nt, Human adenovirus F
gaucccgacucacugga

SEQ ID NO: 3941654 - RNA, 17 nt, Human adenovirus F
gaugaugucgugucugc

SEQ ID NO: 3941655 - RNA, 22 nt, Human adenovirus F
gaugcagguaggaccacuggag

SEQ ID NO: 3941656 - RNA, 22 nt, Human adenovirus F
gaugcaugcgaggggaaaucag

SEQ ID NO: 3941657 - RNA, 22 nt, Human adenovirus F
gaugcgccucaugagcugggag

SEQ ID NO: 3941658 - RNA, 19 nt, Human adenovirus F
gaugcugcugaugaggaaa

SEQ ID NO: 3941659 - RNA, 21 nt, Human adenovirus F
gauggaaacugucaggcucug

SEQ ID NO: 3941660 - RNA, 16 nt, Human adenovirus F
gauggacuaucugcac

SEQ ID NO: 3941661 - RNA, 15 nt, Human adenovirus F
gauggcgauggggcc

SEQ ID NO: 3941662 - RNA, 17 nt, Human adenovirus F
gauggcgugggaguugg

SEQ ID NO: 3941663 - RNA, 20 nt, Human adenovirus F
gauggggguucgccuggaga

SEQ ID NO: 3941664 - RNA, 16 nt, Human adenovirus F
gaugguggcaaggaga

SEQ ID NO: 3941665 - RNA, 12 nt, Human adenovirus F
gaugugccaacg

SEQ ID NO: 3941666 - RNA, 13 nt, Human adenovirus F
gauuaagaaccac

SEQ ID NO: 3941667 - RNA, 14 nt, Human adenovirus F
gauucaagggccag

SEQ ID NO: 3941668 - RNA, 19 nt, Human adenovirus F
gauugugcaacacagccgg

SEQ ID NO: 3941669 - RNA, 18 nt, Human adenovirus F
gauuucauuuaccacccc

SEQ ID NO: 3941670 - RNA, 21 nt, Human adenovirus F
gauuuugaguuagcucugaac

SEQ ID NO: 3941671 - RNA, 16 nt, Human adenovirus F
gcaaacagugccacau

SEQ ID NO: 3941672 - RNA, 19 nt, Human adenovirus F
gcaaagggggggcauuaau

SEQ ID NO: 3941673 - RNA, 16 nt, Human adenovirus F
gcaaaucuauuucuuu

SEQ ID NO: 3941674 - RNA, 10 nt, Human adenovirus F
gcaaaugcuc

SEQ ID NO: 3941675 - RNA, 17 nt, Human adenovirus F
gcaacauaacuuuacaa

SEQ ID NO: 3941676 - RNA, 18 nt, Human adenovirus F
gcaaccccacgccaagcc

SEQ ID NO: 3941677 - RNA, 15 nt, Human adenovirus F
gcaacgcaagagacg

SEQ ID NO: 3941678 - RNA, 17 nt, Human adenovirus F
gcaacgcugcaggcgcu

SEQ ID NO: 3941679 - RNA, 18 nt, Human adenovirus F
gcaacugccaucuucccg

SEQ ID NO: 3941680 - RNA, 15 nt, Human adenovirus F
gcaagcgcggccgcu

SEQ ID NO: 3941681 - RNA, 17 nt, Human adenovirus F
gcaaucccagcagaaac

SEQ ID NO: 3941682 - RNA, 15 nt, Human adenovirus F
gcaauggucuuacau

SEQ ID NO: 3941683 - RNA, 15 nt, Human adenovirus F
gcaauguugccaccg

SEQ ID NO: 3941684 - RNA, 15 nt, Human adenovirus F
gcacacgcacuucaa

SEQ ID NO: 3941685 - RNA, 17 nt, Human adenovirus F
gcaccagccagcucaac

SEQ ID NO: 3941686 - RNA, 22 nt, Human adenovirus F
gcacgcucuugcugugggugga

SEQ ID NO: 3941687 - RNA, 21 nt, Human adenovirus F
gcacggcccccaucucugugc

SEQ ID NO: 3941688 - RNA, 21 nt, Human adenovirus F
gcacuuggggaauuugucaug

SEQ ID NO: 3941689 - RNA, 16 nt, Human adenovirus F
gcagacaagacaugga

SEQ ID NO: 3941690 - RNA, 15 nt, Human adenovirus F
gcagacgaacacaau

SEQ ID NO: 3941691 - RNA, 20 nt, Human adenovirus F
gcagcagauccuucccguga

SEQ ID NO: 3941692 - RNA, 16 nt, Human adenovirus F
gcagcaguaucagugg

SEQ ID NO: 3941693 - RNA, 17 nt, Human adenovirus F
gcagcaguccgucagcu

SEQ ID NO: 3941694 - RNA, 23 nt, Human adenovirus F
gcagccuguggaguggcauuaaa

SEQ ID NO: 3941695 - RNA, 15 nt, Human adenovirus F
gcagcgcccgccucc

SEQ ID NO: 3941696 - RNA, 14 nt, Human adenovirus F
gcagcgggaagaga

SEQ ID NO: 3941697 - RNA, 13 nt, Human adenovirus F
gcagcgggcagga

SEQ ID NO: 3941698 - RNA, 15 nt, Human adenovirus F
gcagcgggcaggagc

SEQ ID NO: 3941699 - RNA, 16 nt, Human adenovirus F
gcagcgggcaggagcc

SEQ ID NO: 3941700 - RNA, 13 nt, Human adenovirus F
gcagcuggagcuu

SEQ ID NO: 3941701 - RNA, 17 nt, Human adenovirus F
gcagcuugaagaacugg

SEQ ID NO: 3941702 - RNA, 16 nt, Human adenovirus F
gcaggacuuggcagaa

SEQ ID NO: 3941703 - RNA, 23 nt, Human adenovirus F
gcaggccagucggcaggcuuccu

SEQ ID NO: 3941704 - RNA, 18 nt, Human adenovirus F
gcaggguuauacucugga

SEQ ID NO: 3941705 - RNA, 18 nt, Human adenovirus F
gcaggguuuuugagcaug

SEQ ID NO: 3941706 - RNA, 19 nt, Human adenovirus F
gcagguaggaccacuggag

SEQ ID NO: 3941707 - RNA, 22 nt, Human adenovirus F
gcagguuuuacgcggggcagga

SEQ ID NO: 3941708 - RNA, 17 nt, Human adenovirus F
gcauaaaagcuucuauc

SEQ ID NO: 3941709 - RNA, 17 nt, Human adenovirus F
guggauauagccaacca

SEQ ID NO: 3941710 - RNA, 23 nt, Human adenovirus F
guggauggggguucgccuggaga

SEQ ID NO: 3941711 - RNA, 16 nt, Human adenovirus F
guggccaacgccaggc

SEQ ID NO: 3941712 - RNA, 15 nt, Human adenovirus F
gugggcguccagugg

SEQ ID NO: 3941713 - RNA, 21 nt, Human adenovirus F
gugggcugauuuggaagauga

SEQ ID NO: 3941714 - RNA, 15 nt, Human adenovirus F
guggucacucucagc

SEQ ID NO: 3941715 - RNA, 23 nt, Human adenovirus F
guggucuaagggaacuucucccc

SEQ ID NO: 3941716 - RNA, 23 nt, Human adenovirus F
gugucaauagcauacagaagacc

SEQ ID NO: 3941717 - RNA, 13 nt, Human adenovirus F
guguuuagcccau

SEQ ID NO: 3941718 - RNA, 17 nt, Human adenovirus F
guuacaaaaugaguggc

SEQ ID NO: 3941719 - RNA, 16 nt, Human adenovirus F
guuaucacccaaagcc

SEQ ID NO: 3941720 - RNA, 18 nt, Human adenovirus F
guucaaaaccucuuacaa

SEQ ID NO: 3941721 - RNA, 18 nt, Human adenovirus F
guucgucaggccugcaag

SEQ ID NO: 3941722 - RNA, 20 nt, Human adenovirus F
guucucgcucgcuacaucca

SEQ ID NO: 3941723 - RNA, 22 nt, Human adenovirus F
guucucgcucgcuacauccauu

SEQ ID NO: 3941724 - RNA, 15 nt, Human adenovirus F
guugacuugcaggag

SEQ ID NO: 3941725 - RNA, 20 nt, Human adenovirus F
guuggacuaccucagcgauc

SEQ ID NO: 3941726 - RNA, 16 nt, Human adenovirus F
guuggcggcccugcaa

SEQ ID NO: 3941727 - RNA, 15 nt, Human adenovirus F
guuugggagccagga

SEQ ID NO: 3941728 - RNA, 14 nt, Human adenovirus F
uaaaaaaaagggaa

SEQ ID NO: 3941729 - RNA, 13 nt, Human adenovirus F
uaaaaacaaccaa

SEQ ID NO: 3941730 - RNA, 14 nt, Human adenovirus F
uaaaaaucuccugc

SEQ ID NO: 3941731 - RNA, 19 nt, Human adenovirus F
uaaaaaugccaggcagcag

SEQ ID NO: 3941732 - RNA, 17 nt, Human adenovirus F
uaaaacuuuauggaugu

SEQ ID NO: 3941733 - RNA, 20 nt, Human adenovirus F
uaaaccaauuugcuaacacu

SEQ ID NO: 3941734 - RNA, 11 nt, Human adenovirus F
uaaacucugag

SEQ ID NO: 3941735 - RNA, 18 nt, Human adenovirus F
uaaagcauaacaugauuu

SEQ ID NO: 3941736 - RNA, 17 nt, Human adenovirus F
uaaagggaacugccagu

SEQ ID NO: 3941737 - RNA, 15 nt, Human adenovirus F
uaaccaacucguuca

SEQ ID NO: 3941738 - RNA, 14 nt, Human adenovirus F
uaaccaccaccgca

SEQ ID NO: 3941739 - RNA, 14 nt, Human adenovirus F
uaaccacuaccacc

SEQ ID NO: 3941740 - RNA, 17 nt, Human adenovirus F
uaaccacuaccacccuc

SEQ ID NO: 3941741 - RNA, 13 nt, Human adenovirus F
uaaccucuacccc

SEQ ID NO: 3941742 - RNA, 23 nt, Human adenovirus F
uaaccuguaugccaacuuuuucc

SEQ ID NO: 3941743 - RNA, 14 nt, Human adenovirus F
uaaccuucgcugcu

SEQ ID NO: 3941744 - RNA, 15 nt, Human adenovirus F
uaacucucuuacauu

SEQ ID NO: 3941745 - RNA, 22 nt, Human adenovirus F
uaagaccguuuucguuccacac

SEQ ID NO: 3941746 - RNA, 14 nt, Human adenovirus F
uaagcaacaaccag

SEQ ID NO: 3941747 - RNA, 19 nt, Human adenovirus F
uaaggacgguggcaugagg

SEQ ID NO: 3941748 - RNA, 15 nt, Human adenovirus F
uaagggaggcagcag

SEQ ID NO: 3941749 - RNA, 16 nt, Human adenovirus F
uaagguaaagccacaa

SEQ ID NO: 3941750 - RNA, 18 nt, Human adenovirus F
uaauaacuuucuuacacu

SEQ ID NO: 3941751 - RNA, 18 nt, Human adenovirus F
uaaucucccuccccccuu

SEQ ID NO: 3941752 - RNA, 15 nt, Human adenovirus F
uaaugcccacaccug

SEQ ID NO: 3941753 - RNA, 15 nt, Human adenovirus F
uacauccauuuccac

SEQ ID NO: 3941754 - RNA, 14 nt, Human adenovirus F
uacauguggagcua

SEQ ID NO: 3941755 - RNA, 16 nt, Human adenovirus F
uacauuggccaccgcc

SEQ ID NO: 3941756 - RNA, 14 nt, Human adenovirus F
uaccacagaaaugu

SEQ ID NO: 3941757 - RNA, 17 nt, Human adenovirus F
uaccagaaagcuacaag

SEQ ID NO: 3941758 - RNA, 21 nt, Human adenovirus F
uacccagcugugguuaaauuu

SEQ ID NO: 3941759 - RNA, 16 nt, Human adenovirus F
uaccccgacagaggcc

SEQ ID NO: 3941760 - RNA, 21 nt, Human adenovirus F
uacccuccguuuacuucaacc

SEQ ID NO: 3941761 - RNA, 14 nt, Human adenovirus F
uacggaggaagagg

SEQ ID NO: 3941762 - RNA, 14 nt, Human adenovirus F
uacuaaaacaaacc

SEQ ID NO: 3941763 - RNA, 15 nt, Human adenovirus F
uacuaaaacaaacca

SEQ ID NO: 3941764 - RNA, 16 nt, Human adenovirus F
uacugcuaaagggaac

SEQ ID NO: 3941765 - RNA, 18 nt, Human adenovirus F
uacuucuuaauaaagaca

SEQ ID NO: 3941766 - RNA, 16 nt, Human adenovirus F
uacuuuuacagaauuc

SEQ ID NO: 3941767 - RNA, 13 nt, Human adenovirus F
uagaaguaaccaa

SEQ ID NO: 3941768 - RNA, 13 nt, Human adenovirus F
uagcaaacagugc

SEQ ID NO: 3941769 - RNA, 17 nt, Human adenovirus F
uagccaguggacaaacc

SEQ ID NO: 3941770 - RNA, 22 nt, Human adenovirus F
uagcccuguacuugccugacuc

SEQ ID NO: 3941771 - RNA, 17 nt, Human adenovirus F
uaggcuuuaacaacaca

SEQ ID NO: 3941772 - RNA, 18 nt, Human adenovirus F
uagggugucugccagagg

SEQ ID NO: 3941773 - RNA, 22 nt, Human adenovirus F
uagucauacauuucgugggaag

SEQ ID NO: 3941774 - RNA, 18 nt, Human adenovirus F
uagugcguccgcccgcuc

SEQ ID NO: 3941775 - RNA, 15 nt, Human adenovirus F
uauaaaaacaaccaa

SEQ ID NO: 3941776 - RNA, 17 nt, Human adenovirus F
uauaaguauuacaaaug

SEQ ID NO: 3941777 - RNA, 15 nt, Human adenovirus F
uauacacucccuuug

SEQ ID NO: 3941778 - RNA, 22 nt, Human adenovirus F
uauccuugcucggcgaaaacuc

SEQ ID NO: 3941779 - RNA, 21 nt, Human adenovirus F
uaucuacgccuccaccaccuu

SEQ ID NO: 3941780 - RNA, 16 nt, Human adenovirus F
uaucuugcaaaacuuu

SEQ ID NO: 3941781 - RNA, 22 nt, Human adenovirus F
uaugaugaaaguagaagucucu

SEQ ID NO: 3941782 - RNA, 17 nt, Human adenovirus F
uaugcgcguugaaaggu

SEQ ID NO: 3941783 - RNA, 17 nt, Human adenovirus F
uaugcuauuuuccagca

SEQ ID NO: 3941784 - RNA, 12 nt, Human adenovirus F
uauggaggagga

SEQ ID NO: 3941785 - RNA, 13 nt, Human adenovirus F
uauggaggaggau

SEQ ID NO: 3941786 - RNA, 12 nt, Human adenovirus F
uaugggcagcau

SEQ ID NO: 3941787 - RNA, 22 nt, Human adenovirus F
uaugugcuggggaauggagcug

SEQ ID NO: 3941788 - RNA, 22 nt, Human adenovirus F
uauuaccgucaucucuacagcc

SEQ ID NO: 3941789 - RNA, 13 nt, Human adenovirus F
uauucaccaccuu

SEQ ID NO: 3941790 - RNA, 18 nt, Human adenovirus F
uauucaccaccuuuaaaa

SEQ ID NO: 3941791 - RNA, 22 nt, Human adenovirus F
uauuccuccggcucuauaaaaa

SEQ ID NO: 3941792 - RNA, 20 nt, Human adenovirus F
ucaaaaagguuuccaaauca

SEQ ID NO: 3941793 - RNA, 16 nt, Human adenovirus F
ucaaaaguccacaaaa

SEQ ID NO: 3941794 - RNA, 17 nt, Human adenovirus F
ucaaacaacaaaaucag

SEQ ID NO: 3941795 - RNA, 16 nt, Human adenovirus F
ucaaacacugcgcaaa

SEQ ID NO: 3941796 - RNA, 18 nt, Human adenovirus F
ucaaauacauaggcauua

SEQ ID NO: 3941797 - RNA, 15 nt, Human adenovirus F
ucaaaugcuccggga

SEQ ID NO: 3941798 - RNA, 21 nt, Human adenovirus F
ucaacgcggggcaccuucagc

SEQ ID NO: 3941799 - RNA, 17 nt, Human adenovirus F
ucaacuccucuugcagg

SEQ ID NO: 3941800 - RNA, 14 nt, Human adenovirus F
ucaagaaauuguga

SEQ ID NO: 3941801 - RNA, 19 nt, Human adenovirus F
ucaaguuuuuccagcagca

SEQ ID NO: 3941802 - RNA, 22 nt, Human adenovirus F
ucaaucagcggcuggaaaauag

SEQ ID NO: 3941803 - RNA, 22 nt, Human adenovirus F
ucacaaagcugugagcgccagc

SEQ ID NO: 3941804 - RNA, 20 nt, Human adenovirus F
ucacauaucgucacuuccgc

SEQ ID NO: 3941805 - RNA, 15 nt, Human adenovirus F
ucacauccaagugcc

SEQ ID NO: 3941806 - RNA, 14 nt, Human adenovirus F
ucacccgcagcugc

SEQ ID NO: 3941807 - RNA, 15 nt, Human adenovirus F
ucacccgcagcugcu

SEQ ID NO: 3941808 - RNA, 21 nt, Human adenovirus F
ucaccgccuuggccagcagcc

SEQ ID NO: 3941809 - RNA, 15 nt, Human adenovirus F
ucacgaccucccaaa

SEQ ID NO: 3941810 - RNA, 19 nt, Human adenovirus F
ucacugccguugcaaccuc

SEQ ID NO: 3941811 - RNA, 13 nt, Human adenovirus F
ucacuuccgccgc

SEQ ID NO: 3941812 - RNA, 14 nt, Human adenovirus F
ucacuuugccagag

SEQ ID NO: 3941813 - RNA, 23 nt, Human adenovirus F
ucagaaccuccgacgcuugcugg

SEQ ID NO: 3941814 - RNA, 22 nt, Human adenovirus F
ucagcuugagagcaagagugcg

SEQ ID NO: 3941815 - RNA, 13 nt, Human adenovirus F
ucaggaacuguuc

SEQ ID NO: 3941816 - RNA, 18 nt, Human adenovirus F
ucaggagguacuccucgc

SEQ ID NO: 3941817 - RNA, 15 nt, Human adenovirus F
ucaggcagcagcccc

SEQ ID NO: 3941818 - RNA, 16 nt, Human adenovirus F
ucaggcagcagcccca

SEQ ID NO: 3941819 - RNA, 20 nt, Human adenovirus F
ucagggucgauggagccagc

SEQ ID NO: 3941820 - RNA, 21 nt, Human adenovirus F
ucagugaaaacguucccgccc

SEQ ID NO: 3941821 - RNA, 22 nt, Human adenovirus F
ucauccauaaugauggcgaugg

SEQ ID NO: 3941822 - RNA, 21 nt, Human adenovirus F
ucaucgaagccguugauguua

SEQ ID NO: 3941823 - RNA, 14 nt, Human adenovirus F
ucaucgccgccgcc

SEQ ID NO: 3941824 - RNA, 14 nt, Human adenovirus F
ucaugcaugcagac

SEQ ID NO: 3941825 - RNA, 18 nt, Human adenovirus F
ucauuuaccaccccagca

SEQ ID NO: 3941826 - RNA, 18 nt, Human adenovirus F
uccacccgugcccaccgu

SEQ ID NO: 3941827 - RNA, 16 nt, Human adenovirus F
uccacguaccagaaag

SEQ ID NO: 3941828 - RNA, 21 nt, Human adenovirus F
uccagcguucaaaaccucuua

SEQ ID NO: 3941829 - RNA, 23 nt, Human adenovirus F
uccaggaaaucaccagcgugagu

SEQ ID NO: 3941830 - RNA, 21 nt, Human adenovirus F
uccaguaaucuucggcaggaa

SEQ ID NO: 3941831 - RNA, 13 nt, Human adenovirus F
uccauagagggcg

SEQ ID NO: 3941832 - RNA, 20 nt, Human adenovirus F
uccauguggaaccaggcagu

SEQ ID NO: 3941833 - RNA, 17 nt, Human adenovirus F
ucccaacaacggggugg

SEQ ID NO: 3941834 - RNA, 22 nt, Human adenovirus F
ucccaacgcgcguuaccacccu

SEQ ID NO: 3941835 - RNA, 21 nt, Human adenovirus F
ucccacuguuucuccuccccu

SEQ ID NO: 3941836 - RNA, 17 nt, Human adenovirus F
ucccagucugccaucgc

SEQ ID NO: 3941837 - RNA, 18 nt, Human adenovirus F
ucccccuguaccaccgca

SEQ ID NO: 3941838 - RNA, 16 nt, Human adenovirus F
uccccgaaacaaaacc

SEQ ID NO: 3941839 - RNA, 22 nt, Human adenovirus F
ucccgccccccacuagcgcccc

SEQ ID NO: 3941840 - RNA, 20 nt, Human adenovirus F
ucccugcacuaugccuuccg

SEQ ID NO: 3941841 - RNA, 21 nt, Human adenovirus F
ucccuucccgacaugaugcaa

SEQ ID NO: 3941842 - RNA, 16 nt, Human adenovirus F
ucccuuucccccugua

SEQ ID NO: 3941843 - RNA, 14 nt, Human adenovirus F
uccgaccccacacg

SEQ ID NO: 3941844 - RNA, 13 nt, Human adenovirus F
uccgcaaggauga

SEQ ID NO: 3941845 - RNA, 14 nt, Human adenovirus F
uccgccauugccac

SEQ ID NO: 3941846 - RNA, 18 nt, Human adenovirus F
uccgcccaugccggcucc

SEQ ID NO: 3941847 - RNA, 12 nt, Human adenovirus F
uccggaggcagu

SEQ ID NO: 3941848 - RNA, 17 nt, Human adenovirus F
uccggguuuuauggcac

SEQ ID NO: 3941849 - RNA, 18 nt, Human adenovirus F
uccucgcugucuggaacc

SEQ ID NO: 3941850 - RNA, 23 nt, Human adenovirus F
uccugaaugugucuccgcuggga

SEQ ID NO: 3941851 - RNA, 19 nt, Human adenovirus F
uccuguguuacgccagaga

SEQ ID NO: 3941852 - RNA, 18 nt, Human adenovirus F
ucgaggaaagcuuccagc

SEQ ID NO: 3941853 - RNA, 18 nt, Human adenovirus F
ucgcaaacaaagaaguac

SEQ ID NO: 3941854 - RNA, 16 nt, Human adenovirus F
ucgccaucaugagucu

SEQ ID NO: 3941855 - RNA, 20 nt, Human adenovirus F
ucgcggggcuaacuggcaga

SEQ ID NO: 3941856 - RNA, 17 nt, Human adenovirus F
ucgcucuguccgccgcc

SEQ ID NO: 3941857 - RNA, 12 nt, Human adenovirus F
ucgcuggcuccg

SEQ ID NO: 3941858 - RNA, 23 nt, Human adenovirus F
ucggacucggaaccugaaagaga

SEQ ID NO: 3941859 - RNA, 16 nt, Human adenovirus F
ucggcaccagccagcu

SEQ ID NO: 3941860 - RNA, 16 nt, Human adenovirus F
ucggcacgcuccuugg

SEQ ID NO: 3941861 - RNA, 12 nt, Human adenovirus F
ucgggcgcgggu

SEQ ID NO: 3941862 - RNA, 12 nt, Human adenovirus F
ucgucacuuccg

SEQ ID NO: 3941863 - RNA, 15 nt, Human adenovirus F
ucuaagggaggcagc

SEQ ID NO: 3941864 - RNA, 23 nt, Human adenovirus F
ucuccauaccagaguaacuuuug

SEQ ID NO: 3941865 - RNA, 15 nt, Human adenovirus F
ucuccccacagccgu

SEQ ID NO: 3941866 - RNA, 20 nt, Human adenovirus F
ucuccuccccuuacaaacag

SEQ ID NO: 3941867 - RNA, 15 nt, Human adenovirus F
ucucgccccaccgcc

SEQ ID NO: 3941868 - RNA, 17 nt, Human adenovirus F
ucucgccccaccgcccc

SEQ ID NO: 3941869 - RNA, 18 nt, Human adenovirus F
ucucgccguaggagaggc

SEQ ID NO: 3941870 - RNA, 19 nt, Human adenovirus F
ucucggccgguaacgccac

SEQ ID NO: 3941871 - RNA, 18 nt, Human adenovirus F
ucugaccaacuagaaauc

SEQ ID NO: 3941872 - RNA, 17 nt, Human adenovirus F
ucuggaaucagcaucuu

SEQ ID NO: 3941873 - RNA, 22 nt, Human adenovirus F
ucuuaacucugaagaugucuga

SEQ ID NO: 3941874 - RNA, 15 nt, Human adenovirus F
ucuuacauuggccac

SEQ ID NO: 3941875 - RNA, 14 nt, Human adenovirus F
ucuucaucccagcc

SEQ ID NO: 3941876 - RNA, 12 nt, Human adenovirus F
ucuucuccuggc

SEQ ID NO: 3941877 - RNA, 20 nt, Human adenovirus F
uggaagagcaaaaccuccag

SEQ ID NO: 3941878 - RNA, 18 nt, Human adenovirus F
uggaagugcuaggcucuu

SEQ ID NO: 3941879 - RNA, 18 nt, Human adenovirus F
uggaaugccugcagcgcu

SEQ ID NO: 3941880 - RNA, 16 nt, Human adenovirus F
uggaauuuuugcuucu

SEQ ID NO: 3941881 - RNA, 17 nt, Human adenovirus F
uggacgacagccagcug

SEQ ID NO: 3941882 - RNA, 14 nt, Human adenovirus F
uggagcagccugug

SEQ ID NO: 3941883 - RNA, 21 nt, Human adenovirus F
uggaggaagaaaccaucgcca

SEQ ID NO: 3941884 - RNA, 13 nt, Human adenovirus F
uggaggcggcugg

SEQ ID NO: 3941885 - RNA, 20 nt, Human adenovirus F
uggaguuggcuucugccaga

SEQ ID NO: 3941886 - RNA, 23 nt, Human adenovirus F
uggcaacccugaggaggaggcca

SEQ ID NO: 3941887 - RNA, 23 nt, Human adenovirus F
uggcagcccagcgcccgggcccu

SEQ ID NO: 3941888 - RNA, 18 nt, Human adenovirus F
uggcauggcagcagauuu

SEQ ID NO: 3941889 - RNA, 14 nt, Human adenovirus F
uggccaacugccac

SEQ ID NO: 3941890 - RNA, 16 nt, Human adenovirus F
uggccaacugccaccu

SEQ ID NO: 3941891 - RNA, 13 nt, Human adenovirus F
uggccauuuucca

SEQ ID NO: 3941892 - RNA, 14 nt, Human adenovirus F
uggccugccgccca

SEQ ID NO: 3941893 - RNA, 18 nt, Human adenovirus F
uggcgcauucccuuuucc

SEQ ID NO: 3941894 - RNA, 19 nt, Human adenovirus F
uggcgccggcgggaagagg

SEQ ID NO: 3941895 - RNA, 20 nt, Human adenovirus F
uggcgccggcgggaagagga

SEQ ID NO: 3941896 - RNA, 18 nt, Human adenovirus F
uggcuacuuaucacaucu

SEQ ID NO: 3941897 - RNA, 20 nt, Human adenovirus F
uggcuggaggcuugggagga

SEQ ID NO: 3941898 - RNA, 14 nt, Human adenovirus F
uggcuuuacacauu

SEQ ID NO: 3941899 - RNA, 21 nt, Human adenovirus F
ugggaaggggccagcaagcug

SEQ ID NO: 3941900 - RNA, 19 nt, Human adenovirus F
ugggaggaagugacggggc

SEQ ID NO: 3941901 - RNA, 14 nt, Human adenovirus F
ugggagugcuggcc

SEQ ID NO: 3941902 - RNA, 21 nt, Human adenovirus F
ugggauuugccgcagccagug

SEQ ID NO: 3941903 - RNA, 17 nt, Human adenovirus F
uggggccuacggaaggg

SEQ ID NO: 3941904 - RNA, 22 nt, Human adenovirus F
ugggggcccugaccgaccuggg

SEQ ID NO: 3941905 - RNA, 17 nt, Human adenovirus F
ugggggcgccauccccc

SEQ ID NO: 3941906 - RNA, 22 nt, Human adenovirus F
uggggguucgccuggagaggcg

SEQ ID NO: 3941907 - RNA, 18 nt, Human adenovirus F
uggguaagugcagaggcg

SEQ ID NO: 3941908 - RNA, 13 nt, Human adenovirus F
ugguaagcagccu

SEQ ID NO: 3941909 - RNA, 19 nt, Human adenovirus F
uggugaguugguagcagug

SEQ ID NO: 3941910 - RNA, 22 nt, Human adenovirus F
uguacaaagucauccaaaucau

SEQ ID NO: 3941911 - RNA, 15 nt, Human adenovirus F
uguacaccaccucuu

SEQ ID NO: 3941912 - RNA, 22 nt, Human adenovirus F
uguaccgccaaaaaagcagccu

SEQ ID NO: 3941913 - RNA, 15 nt, Human adenovirus F
uguacgagaagcccu

SEQ ID NO: 3941914 - RNA, 16 nt, Human adenovirus F
uguacugugcauuugg

SEQ ID NO: 3941915 - RNA, 18 nt, Human adenovirus F
ugucaggcucugagagug

SEQ ID NO: 3941916 - RNA, 19 nt, Human adenovirus F
ugucaugcaacuuggaagg

SEQ ID NO: 3941917 - RNA, 23 nt, Human adenovirus F
ugucaugcaacuuggaagggaag

SEQ ID NO: 3941918 - RNA, 12 nt, Human adenovirus F
ugucgccccugu

SEQ ID NO: 3941919 - RNA, 19 nt, Human adenovirus F
ugucuucccgccuugcuga

SEQ ID NO: 3941920 - RNA, 18 nt, Human adenovirus F
ugugcaauguucaguucu

SEQ ID NO: 3941921 - RNA, 19 nt, Human adenovirus F
uguuaucggggugggaaac

SEQ ID NO: 3941922 - RNA, 14 nt, Human adenovirus F
uguucgggugagua

SEQ ID NO: 3941923 - RNA, 13 nt, Human adenovirus F
uguuggcggcccu

SEQ ID NO: 3941924 - RNA, 18 nt, Human adenovirus F
uguuguagucugccaacg

SEQ ID NO: 3941925 - RNA, 20 nt, Human adenovirus F
uguuucuccuccccuuacaa

SEQ ID NO: 3941926 - RNA, 15 nt, Human adenovirus F
uuaaaaacuugcaag

SEQ ID NO: 3941927 - RNA, 16 nt, Human adenovirus F
uuaaguuauacaguga

SEQ ID NO: 3941928 - RNA, 20 nt, Human adenovirus F
uuaaugcuuuucugagcaca

SEQ ID NO: 3941929 - RNA, 10 nt, Human adenovirus F
uuacaaacag

SEQ ID NO: 3941930 - RNA, 16 nt, Human adenovirus F
uuaccgcgacaaagca

SEQ ID NO: 3941931 - RNA, 16 nt, Human adenovirus F
uuaccgucaucucuac

SEQ ID NO: 3941932 - RNA, 18 nt, Human adenovirus F
uuagcaguaggacgucag

SEQ ID NO: 3941933 - RNA, 11 nt, Human adenovirus F
uuagcucugaa

SEQ ID NO: 3941934 - RNA, 14 nt, Human adenovirus F
uuagguuggcaaug

SEQ ID NO: 3941935 - RNA, 14 nt, Human adenovirus F
uuauacacucccuu

SEQ ID NO: 3941936 - RNA, 13 nt, Human adenovirus F
uuaucuguaaaac

SEQ ID NO: 3941937 - RNA, 13 nt, Human adenovirus F
uucaaggaaacaa

SEQ ID NO: 3941938 - RNA, 23 nt, Human adenovirus F
uucacccacccaccgcuguauuu

SEQ ID NO: 3941939 - RNA, 17 nt, Human adenovirus F
uucaccgccuuggccag

SEQ ID NO: 3941940 - RNA, 17 nt, Human adenovirus F
uuccagcagcaccaccu

SEQ ID NO: 3941941 - RNA, 23 nt, Human adenovirus F
uuccagcagcaccaccugcccuu

SEQ ID NO: 3941942 - RNA, 23 nt, Human adenovirus F
uucccaaaaaaagaauuacuuuu

SEQ ID NO: 3941943 - RNA, 14 nt, Human adenovirus F
uucccacuguuucu

SEQ ID NO: 3941944 - RNA, 17 nt, Human adenovirus F
uuccucauacaaaugcu

SEQ ID NO: 3941945 - RNA, 15 nt, Human adenovirus F
uuccucccaacuuuc

SEQ ID NO: 3941946 - RNA, 15 nt, Human adenovirus F
uucucaccuggcaaa

SEQ ID NO: 3941947 - RNA, 16 nt, Human adenovirus F
uucucaccuggcaaac

SEQ ID NO: 3941948 - RNA, 20 nt, Human adenovirus F
uucucccaggcggaaaccaa

SEQ ID NO: 3941949 - RNA, 18 nt, Human adenovirus F
uucuccuccccuuacaaa

SEQ ID NO: 3941950 - RNA, 17 nt, Human adenovirus F
uucuccugcuugucugu

SEQ ID NO: 3941951 - RNA, 19 nt, Human adenovirus F
uucugacaugcugguuuuc

SEQ ID NO: 3941952 - RNA, 17 nt, Human adenovirus F
uugaagacgacuucaac

SEQ ID NO: 3941953 - RNA, 17 nt, Human adenovirus F
uugacauuccuccgccu

SEQ ID NO: 3941954 - RNA, 22 nt, Human adenovirus F
uugacccgcuuggaggagcugu

SEQ ID NO: 3941955 - RNA, 15 nt, Human adenovirus F
uugaggguacgcugu

SEQ ID NO: 3941956 - RNA, 17 nt, Human adenovirus F
uugauuuucugccacca

SEQ ID NO: 3941957 - RNA, 15 nt, Human adenovirus F
uugcaagauaugucu

SEQ ID NO: 3941958 - RNA, 20 nt, Human adenovirus F
uugcacgcucugcaucucuu

SEQ ID NO: 3941959 - RNA, 22 nt, Human adenovirus F
uugcaugcccgagccggagagg

SEQ ID NO: 3941960 - RNA, 23 nt, Human adenovirus F
uugcaugcccgagccggagaggg

SEQ ID NO: 3941961 - RNA, 18 nt, Human adenovirus F
uugccggcaacgcugcag

SEQ ID NO: 3941962 - RNA, 18 nt, Human adenovirus F
uugccuucuuuucugcuc

SEQ ID NO: 3941963 - RNA, 20 nt, Human adenovirus F
uugcgcaggcgaauaaaagg

SEQ ID NO: 3941964 - RNA, 13 nt, Human adenovirus F
uugcuacauaacu

SEQ ID NO: 3941965 - RNA, 16 nt, Human adenovirus F
uugcugcacugccauc

SEQ ID NO: 3941966 - RNA, 20 nt, Human adenovirus F
uuggaaaucgugcccgugga

SEQ ID NO: 3941967 - RNA, 21 nt, Human adenovirus F
uuggauccagugcaggaagag

SEQ ID NO: 3941968 - RNA, 17 nt, Human adenovirus F
uuguacaaagucaucca

SEQ ID NO: 3941969 - RNA, 16 nt, Human adenovirus F
uuguagucugccaacg

SEQ ID NO: 3941970 - RNA, 21 nt, Human adenovirus F
uuguuguuuuuuguagaugca

SEQ ID NO: 3941971 - RNA, 15 nt, Human adenovirus F
uuuaaaacuuuaugg

SEQ ID NO: 3941972 - RNA, 12 nt, Human adenovirus F
uuuaaacuuuuu

SEQ ID NO: 3941973 - RNA, 23 nt, Human adenovirus F
uuuaauauugcuuuauugccacc

SEQ ID NO: 3941974 - RNA, 19 nt, Human adenovirus F
uuuaauggaaacugaugcu

SEQ ID NO: 3941975 - RNA, 21 nt, Human adenovirus F
uuuaauugaaauuaauugcac

SEQ ID NO: 3941976 - RNA, 23 nt, Human adenovirus F
uuuaccaccccagcacuuggauu

SEQ ID NO: 3941977 - RNA, 13 nt, Human adenovirus F
uuuaugaaucacu

SEQ ID NO: 3941978 - RNA, 21 nt, Human adenovirus F
uuucacguaguaucucauccc

SEQ ID NO: 3941979 - RNA, 12 nt, Human adenovirus F
uuuccaccaggg

SEQ ID NO: 3941980 - RNA, 23 nt, Human adenovirus F
uuuccagcagcaccaccugcccu

SEQ ID NO: 3941981 - RNA, 18 nt, Human adenovirus F
uuucuuaccucguguuuc

SEQ ID NO: 3941982 - RNA, 20 nt, Human adenovirus F
uuugccacacuaaaguuuua

SEQ ID NO: 3941983 - RNA, 15 nt, Human adenovirus F
uuugccuucuuuucu

SEQ ID NO: 3941984 - RNA, 17 nt, Human adenovirus F
uuuggccugaauuuuua

SEQ ID NO: 3941985 - RNA, 15 nt, Human adenovirus F
uuuggcucaacuuua

SEQ ID NO: 3941986 - RNA, 14 nt, Human adenovirus F
uuugggagccagga

SEQ ID NO: 3941987 - RNA, 15 nt, Human adenovirus F
uuuugcaaacuauuc

SEQ ID NO: 3941988 - RNA, 14 nt, Human adenovirus F
uuuuuaugaaacac

SEQ ID NO: 3941989 - RNA, 15 nt, Human adenovirus F
uuuuuaugaaucacu

SEQ ID NO: 3941990 - RNA, 20 nt, Human adenovirus F
cucccuccccccuuccacuu

SEQ ID NO: 3941991 - RNA, 21 nt, Human adenovirus F
cuccgauuuugucccccucug

SEQ ID NO: 3941992 - RNA, 16 nt, Human adenovirus F
cuccugcaguccacuu

SEQ ID NO: 3941993 - RNA, 18 nt, Human adenovirus F
cucgagguguaacauccc

SEQ ID NO: 3941994 - RNA, 23 nt, Human adenovirus F
cucgauuuccauaaacuccucuu

SEQ ID NO: 3941995 - RNA, 19 nt, Human adenovirus F
cucgcuggcuagguaccca

SEQ ID NO: 3941996 - RNA, 18 nt, Human adenovirus F
cucggaguaccugagccc

SEQ ID NO: 3941997 - RNA, 20 nt, Human adenovirus F
cucgucauaggccauuuuga

SEQ ID NO: 3941998 - RNA, 19 nt, Human adenovirus F
cucguuguuuuccucugac

SEQ ID NO: 3941999 - RNA, 23 nt, Human adenovirus F
cucucagcugcuaaccugugcag

SEQ ID NO: 3942000 - RNA, 13 nt, Human adenovirus F
cucugaggacgga

SEQ ID NO: 3942001 - RNA, 18 nt, Human adenovirus F
cucugucuuauccuccuu

SEQ ID NO: 3942002 - RNA, 16 nt, Human adenovirus F
cucuguggagaaccuu

SEQ ID NO: 3942003 - RNA, 23 nt, Human adenovirus F
cucuguuugcugcacugccaucu

SEQ ID NO: 3942004 - RNA, 13 nt, Human adenovirus F
cucuuacaccucc

SEQ ID NO: 3942005 - RNA, 15 nt, Human adenovirus F
cucuucguccuggag

SEQ ID NO: 3942006 - RNA, 15 nt, Human adenovirus F
cucuuggucagcaag

SEQ ID NO: 3942007 - RNA, 15 nt, Human adenovirus F
cugaaauacacugau

SEQ ID NO: 3942008 - RNA, 15 nt, Human adenovirus F
cugaaguucagaaca

SEQ ID NO: 3942009 - RNA, 19 nt, Human adenovirus F
cugaaugcauguacacuau

SEQ ID NO: 3942010 - RNA, 16 nt, Human adenovirus F
cugacgguggaggaau

SEQ ID NO: 3942011 - RNA, 22 nt, Human adenovirus F
cugagccugaucccgaagaggg

SEQ ID NO: 3942012 - RNA, 16 nt, Human adenovirus F
cugaggaggaggccau

SEQ ID NO: 3942013 - RNA, 13 nt, Human adenovirus F
cugaucagccagg

SEQ ID NO: 3942014 - RNA, 16 nt, Human adenovirus F
cugauccacuuacaac

SEQ ID NO: 3942015 - RNA, 18 nt, Human adenovirus F
cugcaauggcagcccagc

SEQ ID NO: 3942016 - RNA, 14 nt, Human adenovirus F
cugcacuaugccuu

SEQ ID NO: 3942017 - RNA, 13 nt, Human adenovirus F
cugccacugaaac

SEQ ID NO: 3942018 - RNA, 13 nt, Human adenovirus F
cugccagagggug

SEQ ID NO: 3942019 - RNA, 13 nt, Human adenovirus F
cugccagugcagg

SEQ ID NO: 3942020 - RNA, 13 nt, Human adenovirus F
cugccaguugggg

SEQ ID NO: 3942021 - RNA, 14 nt, Human adenovirus F
cugcccuuccuccc

SEQ ID NO: 3942022 - RNA, 15 nt, Human adenovirus F
cugcccuuccuccca

SEQ ID NO: 3942023 - RNA, 21 nt, Human adenovirus F
cugccguugcaaccucugcac

SEQ ID NO: 3942024 - RNA, 12 nt, Human adenovirus F
cugcgcccccac

SEQ ID NO: 3942025 - RNA, 13 nt, Human adenovirus F
cugcgggaggaau

SEQ ID NO: 3942026 - RNA, 15 nt, Human adenovirus F
cugcuagaaugucac

SEQ ID NO: 3942027 - RNA, 19 nt, Human adenovirus F
cuggaacaguaacacaggu

SEQ ID NO: 3942028 - RNA, 21 nt, Human adenovirus F
cuggaacgagaucggcaccag

SEQ ID NO: 3942029 - RNA, 19 nt, Human adenovirus F
cuggacucgucuccugcaa

SEQ ID NO: 3942030 - RNA, 20 nt, Human adenovirus F
cuggaggcuugggaggauuu

SEQ ID NO: 3942031 - RNA, 16 nt, Human adenovirus F
cuggaguuggcuucug

SEQ ID NO: 3942032 - RNA, 21 nt, Human adenovirus F
cuggaguuggcuucugccaga

SEQ ID NO: 3942033 - RNA, 17 nt, Human adenovirus F
cuggauuacauggcaau

SEQ ID NO: 3942034 - RNA, 12 nt, Human adenovirus F
cuggcagcagug

SEQ ID NO: 3942035 - RNA, 13 nt, Human adenovirus F
cuggcagcuggag

SEQ ID NO: 3942036 - RNA, 18 nt, Human adenovirus F
cuggccaacugccaccuc

SEQ ID NO: 3942037 - RNA, 17 nt, Human adenovirus F
cuggccuuuugaacgac

SEQ ID NO: 3942038 - RNA, 13 nt, Human adenovirus F
cugggacagccua

SEQ ID NO: 3942039 - RNA, 21 nt, Human adenovirus F
cugggcuggaugcauccuccc

SEQ ID NO: 3942040 - RNA, 13 nt, Human adenovirus F
cugggcuugcuuu

SEQ ID NO: 3942041 - RNA, 23 nt, Human adenovirus F
cuggucaaucucuucguccugga

SEQ ID NO: 3942042 - RNA, 14 nt, Human adenovirus F
cugguggacaacaa

SEQ ID NO: 3942043 - RNA, 12 nt, Human adenovirus F
cugguuaaacaa

SEQ ID NO: 3942044 - RNA, 23 nt, Human adenovirus F
cugguuaaacaagcugaacuuug

SEQ ID NO: 3942045 - RNA, 15 nt, Human adenovirus F
cugucaggcucugag

SEQ ID NO: 3942046 - RNA, 18 nt, Human adenovirus F
cugucauacgcaggcaca

SEQ ID NO: 3942047 - RNA, 20 nt, Human adenovirus F
cugucauacgcaggcacacc

SEQ ID NO: 3942048 - RNA, 13 nt, Human adenovirus F
cuguccagggagu

SEQ ID NO: 3942049 - RNA, 15 nt, Human adenovirus F
cugucuagccgcacg

SEQ ID NO: 3942050 - RNA, 11 nt, Human adenovirus F
cugucuggaac

SEQ ID NO: 3942051 - RNA, 14 nt, Human adenovirus F
cugucugugucucc

SEQ ID NO: 3942052 - RNA, 16 nt, Human adenovirus F
cugugagcuggccugg

SEQ ID NO: 3942053 - RNA, 15 nt, Human adenovirus F
cugugccugucauga

SEQ ID NO: 3942054 - RNA, 22 nt, Human adenovirus F
cuguguuaucacccaaagccaa

SEQ ID NO: 3942055 - RNA, 21 nt, Human adenovirus F
cuuaacccucccgcuaauacu

SEQ ID NO: 3942056 - RNA, 19 nt, Human adenovirus F
cuuaauaccccgucacucu

SEQ ID NO: 3942057 - RNA, 14 nt, Human adenovirus F
cuuacaaacaguaa

SEQ ID NO: 3942058 - RNA, 22 nt, Human adenovirus F
cuuacauaucgcuugccacugg

SEQ ID NO: 3942059 - RNA, 13 nt, Human adenovirus F
cuuaccagagcca

SEQ ID NO: 3942060 - RNA, 15 nt, Human adenovirus F
cuucacuccucgcca

SEQ ID NO: 3942061 - RNA, 21 nt, Human adenovirus F
cuuccaagcgguccauugccu

SEQ ID NO: 3942062 - RNA, 19 nt, Human adenovirus F
cuuccuccaacggcuugca

SEQ ID NO: 3942063 - RNA, 17 nt, Human adenovirus F
cuuccucccccgagaga

SEQ ID NO: 3942064 - RNA, 20 nt, Human adenovirus F
cuucucuucggccuccacau

SEQ ID NO: 3942065 - RNA, 11 nt, Human adenovirus F
cuucugccagu

SEQ ID NO: 3942066 - RNA, 18 nt, Human adenovirus F
cuugcugacuuaucucau

SEQ ID NO: 3942067 - RNA, 14 nt, Human adenovirus F
cuugcuggaccaaa

SEQ ID NO: 3942068 - RNA, 19 nt, Human adenovirus F
cuuggaaaucgugcccgug

SEQ ID NO: 3942069 - RNA, 18 nt, Human adenovirus F
cuuggaaucauccaccug

SEQ ID NO: 3942070 - RNA, 15 nt, Human adenovirus F
cuugggaggauuuug

SEQ ID NO: 3942071 - RNA, 21 nt, Human adenovirus F
cuugucgcagaaucuccugca

SEQ ID NO: 3942072 - RNA, 16 nt, Human adenovirus F
cuuuauugccaccgca

SEQ ID NO: 3942073 - RNA, 16 nt, Human adenovirus F
cuuuccgcgaggccau

SEQ ID NO: 3942074 - RNA, 11 nt, Human adenovirus F
cuuucuuacac

SEQ ID NO: 3942075 - RNA, 17 nt, Human adenovirus F
cuuugucagccaaagua

SEQ ID NO: 3942076 - RNA, 19 nt, Human adenovirus F
cuuuuauugauucaaaaaa

SEQ ID NO: 3942077 - RNA, 19 nt, Human adenovirus F
cuuuugcaccagggcggcg

SEQ ID NO: 3942078 - RNA, 18 nt, Human adenovirus F
gaaaaaccgccacaugaa

SEQ ID NO: 3942079 - RNA, 18 nt, Human adenovirus F
gaaaaccggcuggggcag

SEQ ID NO: 3942080 - RNA, 19 nt, Human adenovirus F
gaaacugaugcuuuuucuc

SEQ ID NO: 3942081 - RNA, 14 nt, Human adenovirus F
gaaagcgugaugga

SEQ ID NO: 3942082 - RNA, 13 nt, Human adenovirus F
gaaaggaguaaag

SEQ ID NO: 3942083 - RNA, 15 nt, Human adenovirus F
gaacacaauauuuau

SEQ ID NO: 3942084 - RNA, 14 nt, Human adenovirus F
gaacauuaauccaa

SEQ ID NO: 3942085 - RNA, 20 nt, Human adenovirus F
gaacauuggggcgcgguggu

SEQ ID NO: 3942086 - RNA, 16 nt, Human adenovirus F
gaaccaggcaguggac

SEQ ID NO: 3942087 - RNA, 17 nt, Human adenovirus F
gaacggcgugcuggaaa

SEQ ID NO: 3942088 - RNA, 19 nt, Human adenovirus F
gaacucaaaguaaaaaacc

SEQ ID NO: 3942089 - RNA, 19 nt, Human adenovirus F
gaagaccgauaguacggcc

SEQ ID NO: 3942090 - RNA, 15 nt, Human adenovirus F
gaagagcugcuggag

SEQ ID NO: 3942091 - RNA, 23 nt, Human adenovirus F
gaagcacauagcgcgacagagca

SEQ ID NO: 3942092 - RNA, 17 nt, Human adenovirus F
gaagcaggguugcuaga

SEQ ID NO: 3942093 - RNA, 22 nt, Human adenovirus F
gaagccacgcugaacuuuuugc

SEQ ID NO: 3942094 - RNA, 22 nt, Human adenovirus F
gaaggggccagcaagcugccgc

SEQ ID NO: 3942095 - RNA, 16 nt, Human adenovirus F
gaagguugacuugcag

SEQ ID NO: 3942096 - RNA, 17 nt, Human adenovirus F
gaagguugacuugcagg

SEQ ID NO: 3942097 - RNA, 23 nt, Human adenovirus F
gaagugcuaggcucuucuuccuc

SEQ ID NO: 3942098 - RNA, 19 nt, Human adenovirus F
gaaguucagaacauggcuc

SEQ ID NO: 3942099 - RNA, 12 nt, Human adenovirus F
gaaucauuucca

SEQ ID NO: 3942100 - RNA, 22 nt, Human adenovirus F
gaaucccgcuauguuggcggcc

SEQ ID NO: 3942101 - RNA, 13 nt, Human adenovirus F
gaaucgcuggaaa

SEQ ID NO: 3942102 - RNA, 13 nt, Human adenovirus F
gacaaaacacuaa

SEQ ID NO: 3942103 - RNA, 15 nt, Human adenovirus F
gacagcaaggaaaga

SEQ ID NO: 3942104 - RNA, 15 nt, Human adenovirus F
gacagccaggcagag

SEQ ID NO: 3942105 - RNA, 13 nt, Human adenovirus F
gacagucugccaa

SEQ ID NO: 3942106 - RNA, 15 nt, Human adenovirus F
gacagucugccaaca

SEQ ID NO: 3942107 - RNA, 21 nt, Human adenovirus F
uccauccaucacgccaacgcc

SEQ ID NO: 3942108 - RNA, 18 nt, Human adenovirus F
ucccaaagucccccuuac

SEQ ID NO: 3942109 - RNA, 11 nt, Human adenovirus F
ucccaaagucg

SEQ ID NO: 3942110 - RNA, 18 nt, Human adenovirus F
ucccaacaaccuacccag

SEQ ID NO: 3942111 - RNA, 16 nt, Human adenovirus F
ucccagcagaaacuac

SEQ ID NO: 3942112 - RNA, 15 nt, Human adenovirus F
ucccagucugccauc

SEQ ID NO: 3942113 - RNA, 18 nt, Human adenovirus F
ucccaucaucgccgccgc

SEQ ID NO: 3942114 - RNA, 19 nt, Human adenovirus F
uccccagcgcccuggauac

SEQ ID NO: 3942115 - RNA, 17 nt, Human adenovirus F
ucccucagagcugcaag

SEQ ID NO: 3942116 - RNA, 18 nt, Human adenovirus F
ucccuggcccccaaaggu

SEQ ID NO: 3942117 - RNA, 20 nt, Human adenovirus F
ucccugggaugcagguagga

SEQ ID NO: 3942118 - RNA, 19 nt, Human adenovirus F
ucccugucguugccagccg

SEQ ID NO: 3942119 - RNA, 15 nt, Human adenovirus F
uccgccauugccacc

SEQ ID NO: 3942120 - RNA, 14 nt, Human adenovirus F
uccgcccgcuccga

SEQ ID NO: 3942121 - RNA, 17 nt, Human adenovirus F
uccgcugggagaaaacc

SEQ ID NO: 3942122 - RNA, 21 nt, Human adenovirus F
uccuagccaguggacaaacca

SEQ ID NO: 3942123 - RNA, 14 nt, Human adenovirus F
uccucccaacuuuc

SEQ ID NO: 3942124 - RNA, 18 nt, Human adenovirus F
uccucugacgggggaggc

SEQ ID NO: 3942125 - RNA, 13 nt, Human adenovirus F
uccuggaccugga

SEQ ID NO: 3942126 - RNA, 18 nt, Human adenovirus F
uccuggccaacugccacc

SEQ ID NO: 3942127 - RNA, 20 nt, Human adenovirus F
uccuggccaacugccaccuc

SEQ ID NO: 3942128 - RNA, 14 nt, Human adenovirus F
uccuggcgagccca

SEQ ID NO: 3942129 - RNA, 14 nt, Human adenovirus F
uccuucugccacgc

SEQ ID NO: 3942130 - RNA, 19 nt, Human adenovirus F
ucgaagguugacuugcagg

SEQ ID NO: 3942131 - RNA, 23 nt, Human adenovirus F
ucgaccgcgaggaaaccgccuac

SEQ ID NO: 3942132 - RNA, 15 nt, Human adenovirus F
ucgacuccucuguga

SEQ ID NO: 3942133 - RNA, 22 nt, Human adenovirus F
ucgagguguaacaucccucacu

SEQ ID NO: 3942134 - RNA, 16 nt, Human adenovirus F
ucgcaacguccucuac

SEQ ID NO: 3942135 - RNA, 24 nt, Human adenovirus F
ucgcacuccacuaaccaggcgagc

SEQ ID NO: 3942136 - RNA, 20 nt, Human adenovirus F
ucgccccugugaguguggag

SEQ ID NO: 3942137 - RNA, 14 nt, Human adenovirus F
ucgccgcagucucc

SEQ ID NO: 3942138 - RNA, 20 nt, Human adenovirus F
ucgcggccguuuaugggcac

SEQ ID NO: 3942139 - RNA, 18 nt, Human adenovirus F
ucgcucacccgcagcugc

SEQ ID NO: 3942140 - RNA, 18 nt, Human adenovirus F
ucggaaccugaaagagag

SEQ ID NO: 3942141 - RNA, 12 nt, Human adenovirus F
ucggcacgcucc

SEQ ID NO: 3942142 - RNA, 15 nt, Human adenovirus F
ucggccuacugccgc

SEQ ID NO: 3942143 - RNA, 21 nt, Human adenovirus F
ucgggaaagacaguggcgcgc

SEQ ID NO: 3942144 - RNA, 23 nt, Human adenovirus F
ucggguugccguccccagcgccc

SEQ ID NO: 3942145 - RNA, 12 nt, Human adenovirus F
ucguacuucugu

SEQ ID NO: 3942146 - RNA, 16 nt, Human adenovirus F
ucguagggauugagug

SEQ ID NO: 3942147 - RNA, 13 nt, Human adenovirus F
ucguuggcgccgg

SEQ ID NO: 3942148 - RNA, 22 nt, Human adenovirus F
ucuacaacgagauaaacagugg

SEQ ID NO: 3942149 - RNA, 19 nt, Human adenovirus F
ucuaccacuucuauugcac

SEQ ID NO: 3942150 - RNA, 20 nt, Human adenovirus F
ucuauagagcuaaggaggag

SEQ ID NO: 3942151 - RNA, 14 nt, Human adenovirus F
ucuccuaacgccac

SEQ ID NO: 3942152 - RNA, 16 nt, Human adenovirus F
ucucgguaacgaccuc

SEQ ID NO: 3942153 - RNA, 23 nt, Human adenovirus F
ucucguuuaauccgugcgcugcc

SEQ ID NO: 3942154 - RNA, 21 nt, Human adenovirus F
ucugauggaguuguggaguga

SEQ ID NO: 3942155 - RNA, 17 nt, Human adenovirus F
ucugcagcauugccacu

SEQ ID NO: 3942156 - RNA, 22 nt, Human adenovirus F
ucugccaauuaucuacgccucc

SEQ ID NO: 3942157 - RNA, 22 nt, Human adenovirus F
ucuuacaaagugcgcuuuacgc

SEQ ID NO: 3942158 - RNA, 13 nt, Human adenovirus F
ucuuacaauuuga

SEQ ID NO: 3942159 - RNA, 20 nt, Human adenovirus F
ucuuaccgcgacaaagcaca

SEQ ID NO: 3942160 - RNA, 19 nt, Human adenovirus F
ucuucaaacauuaagcugc

SEQ ID NO: 3942161 - RNA, 20 nt, Human adenovirus F
ucuucaaucguuuuccugag

SEQ ID NO: 3942162 - RNA, 16 nt, Human adenovirus F
ucuugcaaagacggcg

SEQ ID NO: 3942163 - RNA, 21 nt, Human adenovirus F
ugaacgugaccgagcagcugc

SEQ ID NO: 3942164 - RNA, 14 nt, Human adenovirus F
ugaacguugcauua

SEQ ID NO: 3942165 - RNA, 23 nt, Human adenovirus F
ugaagaccaaucacgaccuccca

SEQ ID NO: 3942166 - RNA, 15 nt, Human adenovirus F
ugaagcuaaccuguu

SEQ ID NO: 3942167 - RNA, 16 nt, Human adenovirus F
ugaauaauucccaaau

SEQ ID NO: 3942168 - RNA, 20 nt, Human adenovirus F
ugaauauugcggagccugag

SEQ ID NO: 3942169 - RNA, 14 nt, Human adenovirus F
ugacaaacaagcug

SEQ ID NO: 3942170 - RNA, 23 nt, Human adenovirus F
ugacagcauuaaccuguaugcca

SEQ ID NO: 3942171 - RNA, 16 nt, Human adenovirus F
ugaccgagcagcugcg

SEQ ID NO: 3942172 - RNA, 22 nt, Human adenovirus F
ugacgaacuuacuagucuuagc

SEQ ID NO: 3942173 - RNA, 13 nt, Human adenovirus F
ugacgugccugag

SEQ ID NO: 3942174 - RNA, 22 nt, Human adenovirus F
ugacuacgaauccagcgaugag

SEQ ID NO: 3942175 - RNA, 12 nt, Human adenovirus F
ugacucuuacaa

SEQ ID NO: 3942176 - RNA, 21 nt, Human adenovirus F
ugagcggaguaacacaaacau

SEQ ID NO: 3942177 - RNA, 18 nt, Human adenovirus F
ugaggcagcgacagggcg

SEQ ID NO: 3942178 - RNA, 15 nt, Human adenovirus F
ugaguuagcucugaa

SEQ ID NO: 3942179 - RNA, 15 nt, Human adenovirus F
ugauaugaugaaagu

SEQ ID NO: 3942180 - RNA, 15 nt, Human adenovirus F
ugaugauggcagcag

SEQ ID NO: 3942181 - RNA, 20 nt, Human adenovirus F
ugaugcuacacaacaaauca

SEQ ID NO: 3942182 - RNA, 18 nt, Human adenovirus F
ugaugcugcugaugagga

SEQ ID NO: 3942183 - RNA, 19 nt, Human adenovirus F
ugauuuccauuggugaguu

SEQ ID NO: 3942184 - RNA, 19 nt, Human adenovirus F
ugcaaacaacgaacuuucu

SEQ ID NO: 3942185 - RNA, 15 nt, Human adenovirus F
ugcaauauaaaaaca

SEQ ID NO: 3942186 - RNA, 19 nt, Human adenovirus F
ugcaauauaaaaacaacca

SEQ ID NO: 3942187 - RNA, 18 nt, Human adenovirus F
ugcaccgcgcggcggcca

SEQ ID NO: 3942188 - RNA, 17 nt, Human adenovirus F
ugcacuaacuccaaaua

SEQ ID NO: 3942189 - RNA, 14 nt, Human adenovirus F
ugcacugagcagcu

SEQ ID NO: 3942190 - RNA, 23 nt, Human adenovirus F
ugcagaggcguacaugccacaga

SEQ ID NO: 3942191 - RNA, 20 nt, Human adenovirus F
ugcagcauugccacuuuuuu

SEQ ID NO: 3942192 - RNA, 18 nt, Human adenovirus F
ugcaggaagaggaggagg

SEQ ID NO: 3942193 - RNA, 18 nt, Human adenovirus F
ugcauccucccaacaacc

SEQ ID NO: 3942194 - RNA, 18 nt, Human adenovirus F
ugccacccgcgcaacaca

SEQ ID NO: 3942195 - RNA, 20 nt, Human adenovirus F
ugccaccgcaaaaaaaucaa

SEQ ID NO: 3942196 - RNA, 16 nt, Human adenovirus F
ugccagaacuuccagc

SEQ ID NO: 3942197 - RNA, 12 nt, Human adenovirus F
ugccagugcagg

SEQ ID NO: 3942198 - RNA, 16 nt, Human adenovirus F
ugccaucugcagcauu

SEQ ID NO: 3942199 - RNA, 20 nt, Human adenovirus F
ugccaucugcagcauugcca

SEQ ID NO: 3942200 - RNA, 18 nt, Human adenovirus F
ugccauuguuaacacggc

SEQ ID NO: 3942201 - RNA, 16 nt, Human adenovirus F
ugcccaacaguacagu

SEQ ID NO: 3942202 - RNA, 17 nt, Human adenovirus F
ugcccaccguuccgccc

SEQ ID NO: 3942203 - RNA, 16 nt, Human adenovirus F
ugcccauuauugcacu

SEQ ID NO: 3942204 - RNA, 15 nt, Human adenovirus F
ugccgagcuuuuacu

SEQ ID NO: 3942205 - RNA, 19 nt, Human adenovirus F
ugccgguuucgcauucccg

SEQ ID NO: 3942206 - RNA, 16 nt, Human adenovirus F
ugccuaccucugacaa

SEQ ID NO: 3942207 - RNA, 17 nt, Human adenovirus F
ugccuccagcacugccg

SEQ ID NO: 3942208 - RNA, 15 nt, Human adenovirus F
ugccugaagcacugg

SEQ ID NO: 3942209 - RNA, 21 nt, Human adenovirus F
ugcgcaacuucuuuuugggag

SEQ ID NO: 3942210 - RNA, 22 nt, Human adenovirus F
ugcgcagcaguaucaguggagu

SEQ ID NO: 3942211 - RNA, 23 nt, Human adenovirus F
ugcgcgguaagaacccagcaugu

SEQ ID NO: 3942212 - RNA, 22 nt, Human adenovirus F
ugcgcuguacugugcauuuggg

SEQ ID NO: 3942213 - RNA, 20 nt, Human adenovirus F
ugcguggguguauaaaaggg

SEQ ID NO: 3942214 - RNA, 12 nt, Human adenovirus F
ugcuaaacauga

SEQ ID NO: 3942215 - RNA, 13 nt, Human adenovirus F
ugcuaaagggaac

SEQ ID NO: 3942216 - RNA, 15 nt, Human adenovirus F
ugcuacacaacaaau

SEQ ID NO: 3942217 - RNA, 18 nt, Human adenovirus F
ugcuacacaacaaaucau

SEQ ID NO: 3942218 - RNA, 22 nt, Human adenovirus F
ugcuacacaacaaaucaucucu

SEQ ID NO: 3942219 - RNA, 17 nt, Human adenovirus F
ugcuacggaggaagagg

SEQ ID NO: 3942220 - RNA, 16 nt, Human adenovirus F
ugcucggugcagccgu

SEQ ID NO: 3942221 - RNA, 12 nt, Human adenovirus F
ugcucugcaaaa

SEQ ID NO: 3942222 - RNA, 13 nt, Human adenovirus F
ugcugacagcugg

SEQ ID NO: 3942223 - RNA, 16 nt, Human adenovirus F
uggaaaacgaggggga

SEQ ID NO: 3942224 - RNA, 19 nt, Human adenovirus F
uggaaacugucaggcucug

SEQ ID NO: 3942225 - RNA, 23 nt, Human adenovirus F
cuugcaggagccgaauugccucg

SEQ ID NO: 3942226 - RNA, 17 nt, Human adenovirus F
cuugcgcaacuucuuuu

SEQ ID NO: 3942227 - RNA, 21 nt, Human adenovirus F
cuugcuuuuucacgacggggu

SEQ ID NO: 3942228 - RNA, 14 nt, Human adenovirus F
cuugucguaaccaa

SEQ ID NO: 3942229 - RNA, 16 nt, Human adenovirus F
cuuucaucuuaacucu

SEQ ID NO: 3942230 - RNA, 22 nt, Human adenovirus F
cuuugcgcgaacagaguggggg

SEQ ID NO: 3942231 - RNA, 14 nt, Human adenovirus F
cuuuugcaccaggg

SEQ ID NO: 3942232 - RNA, 15 nt, Human adenovirus F
cuuuuugggaggaag

SEQ ID NO: 3942233 - RNA, 17 nt, Human adenovirus F
gaaaaccauuuugcgca

SEQ ID NO: 3942234 - RNA, 20 nt, Human adenovirus F
gaaaaccuacgcccaggagc

SEQ ID NO: 3942235 - RNA, 17 nt, Human adenovirus F
gaaacacacaucacugu

SEQ ID NO: 3942236 - RNA, 14 nt, Human adenovirus F
gaaacgaacacgcu

SEQ ID NO: 3942237 - RNA, 19 nt, Human adenovirus F
gaaacugucaggcucugag

SEQ ID NO: 3942238 - RNA, 15 nt, Human adenovirus F
gaaaucacaguuggg

SEQ ID NO: 3942239 - RNA, 17 nt, Human adenovirus F
gaaaucggagagggaag

SEQ ID NO: 3942240 - RNA, 14 nt, Human adenovirus F
gaaauugaaguagg

SEQ ID NO: 3942241 - RNA, 19 nt, Human adenovirus F
gaaauugaaguaggcgguc

SEQ ID NO: 3942242 - RNA, 21 nt, Human adenovirus F
gaacacgcugccaacaaaugu

SEQ ID NO: 3942243 - RNA, 18 nt, Human adenovirus F
gaacagaccuuccaggaa

SEQ ID NO: 3942244 - RNA, 20 nt, Human adenovirus F
gaaccacugauguaacagcu

SEQ ID NO: 3942245 - RNA, 18 nt, Human adenovirus F
gaaccaggcaguggacag

SEQ ID NO: 3942246 - RNA, 22 nt, Human adenovirus F
gaaccuccgacgcuugcuggag

SEQ ID NO: 3942247 - RNA, 22 nt, Human adenovirus F
gaacguguugguagagcuggag

SEQ ID NO: 3942248 - RNA, 16 nt, Human adenovirus F
gaacugggcugcggac

SEQ ID NO: 3942249 - RNA, 15 nt, Human adenovirus F
gaagaagaugcccug

SEQ ID NO: 3942250 - RNA, 18 nt, Human adenovirus F
gaagacauucuugagcag

SEQ ID NO: 3942251 - RNA, 21 nt, Human adenovirus F
gaagccacgcugaacuuuuug

SEQ ID NO: 3942252 - RNA, 17 nt, Human adenovirus F
gaagcuagcauaaaaga

SEQ ID NO: 3942253 - RNA, 22 nt, Human adenovirus F
gaaggauacaacguggcucaau

SEQ ID NO: 3942254 - RNA, 22 nt, Human adenovirus F
gaaggguauaggcuugugcggc

SEQ ID NO: 3942255 - RNA, 18 nt, Human adenovirus F
gaaucuuacuuugacaug

SEQ ID NO: 3942256 - RNA, 15 nt, Human adenovirus F
gaaugcccuuucaaa

SEQ ID NO: 3942257 - RNA, 19 nt, Human adenovirus F
gaauguaacucucccuuuc

SEQ ID NO: 3942258 - RNA, 15 nt, Human adenovirus F
gaauguggugggguc

SEQ ID NO: 3942259 - RNA, 18 nt, Human adenovirus F
gaaugugucuccgcuggg

SEQ ID NO: 3942260 - RNA, 13 nt, Human adenovirus F
gacaaagaggcgu

SEQ ID NO: 3942261 - RNA, 13 nt, Human adenovirus F
gacaagacaugga

SEQ ID NO: 3942262 - RNA, 16 nt, Human adenovirus F
gacaagacauggaaga

SEQ ID NO: 3942263 - RNA, 23 nt, Human adenovirus F
gacaccacccggguuuaccuggu

SEQ ID NO: 3942264 - RNA, 14 nt, Human adenovirus F
gacagcaaggaaag

SEQ ID NO: 3942265 - RNA, 17 nt, Human adenovirus F
gacagcaaggaaagaag

SEQ ID NO: 3942266 - RNA, 14 nt, Human adenovirus F
gacaggcuguaguu

SEQ ID NO: 3942267 - RNA, 15 nt, Human adenovirus F
gacaggucgcagcga

SEQ ID NO: 3942268 - RNA, 21 nt, Human adenovirus F
gacaguaagcaacaaccagcu

SEQ ID NO: 3942269 - RNA, 18 nt, Human adenovirus F
gacauucuugagcaggcc

SEQ ID NO: 3942270 - RNA, 12 nt, Human adenovirus F
gaccaucacuga

SEQ ID NO: 3942271 - RNA, 22 nt, Human adenovirus F
gaccauucugagacaaaagccc

SEQ ID NO: 3942272 - RNA, 16 nt, Human adenovirus F
gacccauuuccaagca

SEQ ID NO: 3942273 - RNA, 20 nt, Human adenovirus F
gaccucccaaagucccccuu

SEQ ID NO: 3942274 - RNA, 22 nt, Human adenovirus F
gaccuuccaggaaaucaccagc

SEQ ID NO: 3942275 - RNA, 17 nt, Human adenovirus F
gacgaagacauucuuga

SEQ ID NO: 3942276 - RNA, 13 nt, Human adenovirus F
gacgacagccagg

SEQ ID NO: 3942277 - RNA, 15 nt, Human adenovirus F
gacgcgaggaugaga

SEQ ID NO: 3942278 - RNA, 17 nt, Human adenovirus F
gacggcaaggaaccagu

SEQ ID NO: 3942279 - RNA, 19 nt, Human adenovirus F
gacggccguaccaagccug

SEQ ID NO: 3942280 - RNA, 22 nt, Human adenovirus F
gacucggaaccugaaagagagu

SEQ ID NO: 3942281 - RNA, 19 nt, Human adenovirus F
gacucguaccuuggucauc

SEQ ID NO: 3942282 - RNA, 22 nt, Human adenovirus F
gacuuuaccccgacagaggccg

SEQ ID NO: 3942283 - RNA, 17 nt, Human adenovirus F
gagacugccaagccuca

SEQ ID NO: 3942284 - RNA, 17 nt, Human adenovirus F
gagaggcgguggcgcag

SEQ ID NO: 3942285 - RNA, 16 nt, Human adenovirus F
gagauccguggagccg

SEQ ID NO: 3942286 - RNA, 22 nt, Human adenovirus F
gagcaagcgcaaguucaaagaa

SEQ ID NO: 3942287 - RNA, 16 nt, Human adenovirus F
gagcaaguggagcaag

SEQ ID NO: 3942288 - RNA, 13 nt, Human adenovirus F
gagcagccugugg

SEQ ID NO: 3942289 - RNA, 15 nt, Human adenovirus F
gagcagccuguggag

SEQ ID NO: 3942290 - RNA, 14 nt, Human adenovirus F
gagcgugguggcaa

SEQ ID NO: 3942291 - RNA, 23 nt, Human adenovirus F
gagcuagugaaacaugaggagga

SEQ ID NO: 3942292 - RNA, 21 nt, Human adenovirus F
gagcucugcaaaaacaaauac

SEQ ID NO: 3942293 - RNA, 11 nt, Human adenovirus F
gagcuggccug

SEQ ID NO: 3942294 - RNA, 13 nt, Human adenovirus F
gagcuggccuggu

SEQ ID NO: 3942295 - RNA, 16 nt, Human adenovirus F
gaggaacguauuuugc

SEQ ID NO: 3942296 - RNA, 9 nt, Human adenovirus F
gaggaggag

SEQ ID NO: 3942297 - RNA, 16 nt, Human adenovirus F
gaggagucccugcacu

SEQ ID NO: 3942298 - RNA, 17 nt, Human adenovirus F
gaggcacaccuuugggc

SEQ ID NO: 3942299 - RNA, 14 nt, Human adenovirus F
gaggcagcagagga

SEQ ID NO: 3942300 - RNA, 16 nt, Human adenovirus F
gaggccguagcccgug

SEQ ID NO: 3942301 - RNA, 15 nt, Human adenovirus F
gaggcgauuugggag

SEQ ID NO: 3942302 - RNA, 23 nt, Human adenovirus F
gagggauucuaagggaggcagca

SEQ ID NO: 3942303 - RNA, 16 nt, Human adenovirus F
gaggguacuagcagug

SEQ ID NO: 3942304 - RNA, 17 nt, Human adenovirus F
gaggguacuagcagugg

SEQ ID NO: 3942305 - RNA, 23 nt, Human adenovirus F
gagguguuggagaacaugaaagu

SEQ ID NO: 3942306 - RNA, 17 nt, Human adenovirus F
gaguaacuuuugccaca

SEQ ID NO: 3942307 - RNA, 14 nt, Human adenovirus F
gagucuggcagcag

SEQ ID NO: 3942308 - RNA, 15 nt, Human adenovirus F
gagucuggcagcagu

SEQ ID NO: 3942309 - RNA, 18 nt, Human adenovirus F
gaguucuugcugacggcc

SEQ ID NO: 3942310 - RNA, 21 nt, Human adenovirus F
gaguuuaaugucucgucgcca

SEQ ID NO: 3942311 - RNA, 16 nt, Human adenovirus F
gaguuuguacccuccg

SEQ ID NO: 3942312 - RNA, 17 nt, Human adenovirus F
gaguuugugcgguccuu

SEQ ID NO: 3942313 - RNA, 18 nt, Human adenovirus F
gauaccgcugcagcugcu

SEQ ID NO: 3942314 - RNA, 18 nt, Human adenovirus F
gauacuuaaaaucagagu

SEQ ID NO: 3942315 - RNA, 12 nt, Human adenovirus F
gaucagcgggca

SEQ ID NO: 3942316 - RNA, 22 nt, Human adenovirus F
gaucaggccuccaauuugacaa

SEQ ID NO: 3942317 - RNA, 23 nt, Human adenovirus F
gaucgccaacagccccagcuggu

SEQ ID NO: 3942318 - RNA, 18 nt, Human adenovirus F
gaucggcaccagccagcu

SEQ ID NO: 3942319 - RNA, 19 nt, Human adenovirus F
gaucuuaagcugcagccag

SEQ ID NO: 3942320 - RNA, 18 nt, Human adenovirus F
gaugaaaguagaagucuc

SEQ ID NO: 3942321 - RNA, 22 nt, Human adenovirus F
gaugaaucgcuggaaaaccuac

SEQ ID NO: 3942322 - RNA, 15 nt, Human adenovirus F
gaugcugcugaugag

SEQ ID NO: 3942323 - RNA, 24 nt, Human adenovirus F
gauggagagcugggacagccuaga

SEQ ID NO: 3942324 - RNA, 14 nt, Human adenovirus F
gauguuuuccaaga

SEQ ID NO: 3942325 - RNA, 21 nt, Human adenovirus F
gauuccugggguagggugucu

SEQ ID NO: 3942326 - RNA, 23 nt, Human adenovirus F
gauuccugggguagggugucugc

SEQ ID NO: 3942327 - RNA, 23 nt, Human adenovirus F
gauucgccauaaugcgggcucug

SEQ ID NO: 3942328 - RNA, 20 nt, Human adenovirus F
gauucuaagggaggcagcag

SEQ ID NO: 3942329 - RNA, 14 nt, Human adenovirus F
gauucuccaaagca

SEQ ID NO: 3942330 - RNA, 17 nt, Human adenovirus F
gauuuacaaaacccccu

SEQ ID NO: 3942331 - RNA, 18 nt, Human adenovirus F
gcaaaaugugcagcaaaa

SEQ ID NO: 3942332 - RNA, 17 nt, Human adenovirus F
gcaaacggugaacgagg

SEQ ID NO: 3942333 - RNA, 17 nt, Human adenovirus F
gcaaacgucaacuccuc

SEQ ID NO: 3942334 - RNA, 13 nt, Human adenovirus F
gcaaccagugggc

SEQ ID NO: 3942335 - RNA, 15 nt, Human adenovirus F
gcaacccugaggagg

SEQ ID NO: 3942336 - RNA, 21 nt, Human adenovirus F
gcaacucauggugccaaagcg

SEQ ID NO: 3942337 - RNA, 16 nt, Human adenovirus F
gcaagccgcugacggc

SEQ ID NO: 3942338 - RNA, 18 nt, Human adenovirus F
gcaagcuucucagcucaa

SEQ ID NO: 3942339 - RNA, 15 nt, Human adenovirus F
gcaaggaaccagugg

SEQ ID NO: 3942340 - RNA, 16 nt, Human adenovirus F
gcaaggaauguggggc

SEQ ID NO: 3942341 - RNA, 21 nt, Human adenovirus F
guacggaccaccagaugaugu

SEQ ID NO: 3942342 - RNA, 17 nt, Human adenovirus F
guacguaccgccucaga

SEQ ID NO: 3942343 - RNA, 18 nt, Human adenovirus F
guacucaaacgcaccauu

SEQ ID NO: 3942344 - RNA, 23 nt, Human adenovirus F
guagcauuuuaacaugagaucau

SEQ ID NO: 3942345 - RNA, 13 nt, Human adenovirus F
guagcguguugga

SEQ ID NO: 3942346 - RNA, 16 nt, Human adenovirus F
guagcucuuccaagcu

SEQ ID NO: 3942347 - RNA, 17 nt, Human adenovirus F
guagcucuuccaagcug

SEQ ID NO: 3942348 - RNA, 17 nt, Human adenovirus F
guaggugacaaagaggc

SEQ ID NO: 3942349 - RNA, 14 nt, Human adenovirus F
guaugaagcuaacc

SEQ ID NO: 3942350 - RNA, 19 nt, Human adenovirus F
guaugguaacuccucuucu

SEQ ID NO: 3942351 - RNA, 16 nt, Human adenovirus F
gucaaaaaagaugcga

SEQ ID NO: 3942352 - RNA, 16 nt, Human adenovirus F
gucacucucagcugcu

SEQ ID NO: 3942353 - RNA, 21 nt, Human adenovirus F
gucagcuacaagauuccacca

SEQ ID NO: 3942354 - RNA, 18 nt, Human adenovirus F
gucauauacuuuaaacaa

SEQ ID NO: 3942355 - RNA, 18 nt, Human adenovirus F
gucaucucuacagccccu

SEQ ID NO: 3942356 - RNA, 14 nt, Human adenovirus F
guccaccugagggg

SEQ ID NO: 3942357 - RNA, 21 nt, Human adenovirus F
guccaggcuaaaacaaaggag

SEQ ID NO: 3942358 - RNA, 17 nt, Human adenovirus F
gucccugggaugcaggu

SEQ ID NO: 3942359 - RNA, 20 nt, Human adenovirus F
guccuggccaacugccaccu

SEQ ID NO: 3942360 - RNA, 15 nt, Human adenovirus F
guccugucgccccug

SEQ ID NO: 3942361 - RNA, 22 nt, Human adenovirus F
gucgcaggguuauacucuggau

SEQ ID NO: 3942362 - RNA, 19 nt, Human adenovirus F
gucgccaucaugagucugu

SEQ ID NO: 3942363 - RNA, 18 nt, Human adenovirus F
gucggcgucgaugguaaa

SEQ ID NO: 3942364 - RNA, 18 nt, Human adenovirus F
gucgggcgugcgggugcc

SEQ ID NO: 3942365 - RNA, 21 nt, Human adenovirus F
gucguacaaguugcaaagcuc

SEQ ID NO: 3942366 - RNA, 15 nt, Human adenovirus F
gucguugccagccgg

SEQ ID NO: 3942367 - RNA, 21 nt, Human adenovirus F
gucuuauccuccuucacaaag

SEQ ID NO: 3942368 - RNA, 18 nt, Human adenovirus F
gugacaaacaagcugucu

SEQ ID NO: 3942369 - RNA, 22 nt, Human adenovirus F
gugacagaaaucaagcggggcg

SEQ ID NO: 3942370 - RNA, 14 nt, Human adenovirus F
gugaccgagcagcu

SEQ ID NO: 3942371 - RNA, 15 nt, Human adenovirus F
gugagauuuguagug

SEQ ID NO: 3942372 - RNA, 15 nt, Human adenovirus F
gugaguguggagcua

SEQ ID NO: 3942373 - RNA, 16 nt, Human adenovirus F
gugcagauggaaacug

SEQ ID NO: 3942374 - RNA, 12 nt, Human adenovirus F
gugcaggucggg

SEQ ID NO: 3942375 - RNA, 16 nt, Human adenovirus F
gugcaguggcggggac

SEQ ID NO: 3942376 - RNA, 20 nt, Human adenovirus F
gugccgagcuuuuacuggga

SEQ ID NO: 3942377 - RNA, 18 nt, Human adenovirus F
gugccgcgcgggcaggag

SEQ ID NO: 3942378 - RNA, 16 nt, Human adenovirus F
gugccguucgcagaaa

SEQ ID NO: 3942379 - RNA, 19 nt, Human adenovirus F
gugccuaugugcuggggaa

SEQ ID NO: 3942380 - RNA, 15 nt, Human adenovirus F
gugccugagggcgac

SEQ ID NO: 3942381 - RNA, 23 nt, Human adenovirus F
gugcucgcaaacaaagaaguaca

SEQ ID NO: 3942382 - RNA, 14 nt, Human adenovirus F
gugcuuccagccuc

SEQ ID NO: 3942383 - RNA, 14 nt, Human adenovirus F
gugcuuggaagagc

SEQ ID NO: 3942384 - RNA, 18 nt, Human adenovirus F
guggaaaaacuuggaaac

SEQ ID NO: 3942385 - RNA, 17 nt, Human adenovirus F
guggaaagccugguaga

SEQ ID NO: 3942386 - RNA, 22 nt, Human adenovirus F
guggaaccaggcaguggacagc

SEQ ID NO: 3942387 - RNA, 16 nt, Human adenovirus F
guggaggguuaauaag

SEQ ID NO: 3942388 - RNA, 23 nt, Human adenovirus F
guggauaccgcugcagcugcugc

SEQ ID NO: 3942389 - RNA, 22 nt, Human adenovirus F
guggcaacccugaggaggaggc

SEQ ID NO: 3942390 - RNA, 22 nt, Human adenovirus F
guggcacagcaaacacaaacac

SEQ ID NO: 3942391 - RNA, 22 nt, Human adenovirus F
gugguggccaacgccaggcguu

SEQ ID NO: 3942392 - RNA, 12 nt, Human adenovirus F
guguauaaaagg

SEQ ID NO: 3942393 - RNA, 14 nt, Human adenovirus F
gugucaguuuccac

SEQ ID NO: 3942394 - RNA, 13 nt, Human adenovirus F
guguccgaaagca

SEQ ID NO: 3942395 - RNA, 13 nt, Human adenovirus F
guguuuauuucuu

SEQ ID NO: 3942396 - RNA, 21 nt, Human adenovirus F
guuaauaagcuggguggaaag

SEQ ID NO: 3942397 - RNA, 13 nt, Human adenovirus F
guuaaucccuuua

SEQ ID NO: 3942398 - RNA, 22 nt, Human adenovirus F
guuagguacuauaacaauuaaa

SEQ ID NO: 3942399 - RNA, 19 nt, Human adenovirus F
guuaugccccacaauguaa

SEQ ID NO: 3942400 - RNA, 18 nt, Human adenovirus F
guugaggguuucggcagc

SEQ ID NO: 3942401 - RNA, 17 nt, Human adenovirus F
guugauguuaugcccca

SEQ ID NO: 3942402 - RNA, 22 nt, Human adenovirus F
guugcauguuggaaaggggugg

SEQ ID NO: 3942403 - RNA, 15 nt, Human adenovirus F
guugcucucuccgga

SEQ ID NO: 3942404 - RNA, 22 nt, Human adenovirus F
guuggaggagauggugggccgc

SEQ ID NO: 3942405 - RNA, 21 nt, Human adenovirus F
guugugcaguguuauaagguc

SEQ ID NO: 3942406 - RNA, 16 nt, Human adenovirus F
guuuaaggagaugcaa

SEQ ID NO: 3942407 - RNA, 14 nt, Human adenovirus F
guuuaccaaaggcu

SEQ ID NO: 3942408 - RNA, 12 nt, Human adenovirus F
guuuccacaaac

SEQ ID NO: 3942409 - RNA, 17 nt, Human adenovirus F
guuuccucgauuuccau

SEQ ID NO: 3942410 - RNA, 19 nt, Human adenovirus F
guuucgcacuccacuaacc

SEQ ID NO: 3942411 - RNA, 23 nt, Human adenovirus F
guuucgcacuccacuaaccaggc

SEQ ID NO: 3942412 - RNA, 20 nt, Human adenovirus F
uaaaaacaaccaacuucaac

SEQ ID NO: 3942413 - RNA, 17 nt, Human adenovirus F
uaaaaacuugcaaggaa

SEQ ID NO: 3942414 - RNA, 19 nt, Human adenovirus F
uaaaaaggauuuugccggc

SEQ ID NO: 3942415 - RNA, 18 nt, Human adenovirus F
uaaagcuuaccuuaaauu

SEQ ID NO: 3942416 - RNA, 13 nt, Human adenovirus F
uaaauaaaacauc

SEQ ID NO: 3942417 - RNA, 16 nt, Human adenovirus F
uaacaacacaggagcu

SEQ ID NO: 3942418 - RNA, 20 nt, Human adenovirus F
uaacacugccuaccgcagcu

SEQ ID NO: 3942419 - RNA, 23 nt, Human adenovirus F
uaacacugcgauuagaaaacggg

SEQ ID NO: 3942420 - RNA, 20 nt, Human adenovirus F
uaaccaacggaggaaaacuc

SEQ ID NO: 3942421 - RNA, 22 nt, Human adenovirus F
uaacgcuucagagcucuucauc

SEQ ID NO: 3942422 - RNA, 17 nt, Human adenovirus F
uaagcgagcagagccca

SEQ ID NO: 3942423 - RNA, 17 nt, Human adenovirus F
uaaggaggaggcuaaug

SEQ ID NO: 3942424 - RNA, 18 nt, Human adenovirus F
uaagggccgaugccaggc

SEQ ID NO: 3942425 - RNA, 22 nt, Human adenovirus F
uaaugcgggcucugauaaugug

SEQ ID NO: 3942426 - RNA, 14 nt, Human adenovirus F
uaauuucugagggg

SEQ ID NO: 3942427 - RNA, 18 nt, Human adenovirus F
uacaaaugcucagucacu

SEQ ID NO: 3942428 - RNA, 19 nt, Human adenovirus F
uacaaggacaggauguacu

SEQ ID NO: 3942429 - RNA, 15 nt, Human adenovirus F
uacaccaacgaggcc

SEQ ID NO: 3942430 - RNA, 12 nt, Human adenovirus F
uacacuaagccu

SEQ ID NO: 3942431 - RNA, 14 nt, Human adenovirus F
uacagcccaacacc

SEQ ID NO: 3942432 - RNA, 12 nt, Human adenovirus F
uacauuggccac

SEQ ID NO: 3942433 - RNA, 16 nt, Human adenovirus F
uaccacuaccccuacc

SEQ ID NO: 3942434 - RNA, 15 nt, Human adenovirus F
uaccagagccauagc

SEQ ID NO: 3942435 - RNA, 16 nt, Human adenovirus F
uaccauuaagaagacu

SEQ ID NO: 3942436 - RNA, 16 nt, Human adenovirus F
uaccccuaccacccua

SEQ ID NO: 3942437 - RNA, 21 nt, Human adenovirus F
uacccuuacgaacacuacaau

SEQ ID NO: 3942438 - RNA, 20 nt, Human adenovirus F
uaccgcgcccccuggggggc

SEQ ID NO: 3942439 - RNA, 20 nt, Human adenovirus F
uaccgucaucucuacagccc

SEQ ID NO: 3942440 - RNA, 13 nt, Human adenovirus F
uaccugcuaccuc

SEQ ID NO: 3942441 - RNA, 16 nt, Human adenovirus F
uacgaacacuacaauc

SEQ ID NO: 3942442 - RNA, 12 nt, Human adenovirus F
uacgagcaggcu

SEQ ID NO: 3942443 - RNA, 17 nt, Human adenovirus F
uacgcccaggagcagcg

SEQ ID NO: 3942444 - RNA, 21 nt, Human adenovirus F
uacggaccaccagaugauguc

SEQ ID NO: 3942445 - RNA, 18 nt, Human adenovirus F
uacgugucuugcaaagac

SEQ ID NO: 3942446 - RNA, 18 nt, Human adenovirus F
uacucauuaaaauucacc

SEQ ID NO: 3942447 - RNA, 18 nt, Human adenovirus F
uacucggagcuggcgccu

SEQ ID NO: 3942448 - RNA, 15 nt, Human adenovirus F
uacucuuucuuacaa

SEQ ID NO: 3942449 - RNA, 19 nt, Human adenovirus F
uacuggcaagagccaccuu

SEQ ID NO: 3942450 - RNA, 16 nt, Human adenovirus F
uacuucuucagcucua

SEQ ID NO: 3942451 - RNA, 23 nt, Human adenovirus F
uagaaggcuacucauuaaaauuc

SEQ ID NO: 3942452 - RNA, 13 nt, Human adenovirus F
uagacgaggagga

SEQ ID NO: 3942453 - RNA, 15 nt, Human adenovirus F
uagagacugccaagc

SEQ ID NO: 3942454 - RNA, 20 nt, Human adenovirus F
uagaguaaaaaaaagggaag

SEQ ID NO: 3942455 - RNA, 21 nt, Human adenovirus F
uagcaccaacgugcaggccaa

SEQ ID NO: 3942456 - RNA, 19 nt, Human adenovirus F
uagcacuagaugcagcgcu

SEQ ID NO: 3942457 - RNA, 16 nt, Human adenovirus F
aaaaacuugcaaggaa

SEQ ID NO: 3942458 - RNA, 21 nt, Human adenovirus F
aaaaauuacagccaagucaaa

SEQ ID NO: 3942459 - RNA, 20 nt, Human adenovirus F
aaaaccuguucuaaaaccaa

SEQ ID NO: 3942460 - RNA, 14 nt, Human adenovirus F
aaaacucaacguua

SEQ ID NO: 3942461 - RNA, 17 nt, Human adenovirus F
aaaagacccauuuccaa

SEQ ID NO: 3942462 - RNA, 14 nt, Human adenovirus F
aaaagucaaaagug

SEQ ID NO: 3942463 - RNA, 17 nt, Human adenovirus F
aaaagucaaaugucugu

SEQ ID NO: 3942464 - RNA, 16 nt, Human adenovirus F
aaaaguccacaaaaac

SEQ ID NO: 3942465 - RNA, 19 nt, Human adenovirus F
aaaaguccacaaaaacucc

SEQ ID NO: 3942466 - RNA, 21 nt, Human adenovirus F
aaaaguccacaaaaacuccaa

SEQ ID NO: 3942467 - RNA, 21 nt, Human adenovirus F
aaaagugaaccggaaaaccaa

SEQ ID NO: 3942468 - RNA, 19 nt, Human adenovirus F
aaaaucuaccacagaaaug

SEQ ID NO: 3942469 - RNA, 16 nt, Human adenovirus F
aaaaugccaggcagca

SEQ ID NO: 3942470 - RNA, 12 nt, Human adenovirus F
aaacaaaaaacu

SEQ ID NO: 3942471 - RNA, 14 nt, Human adenovirus F
aaacacacaucacu

SEQ ID NO: 3942472 - RNA, 12 nt, Human adenovirus F
aaacacugcgca

SEQ ID NO: 3942473 - RNA, 19 nt, Human adenovirus F
aaacagcagguuaaagcca

SEQ ID NO: 3942474 - RNA, 18 nt, Human adenovirus F
aaaccuguucuaaaacca

SEQ ID NO: 3942475 - RNA, 11 nt, Human adenovirus F
aaacuggaaga

SEQ ID NO: 3942476 - RNA, 16 nt, Human adenovirus F
aaacuguaaaccuaac

SEQ ID NO: 3942477 - RNA, 21 nt, Human adenovirus F
aaacugucaggcucugagagu

SEQ ID NO: 3942478 - RNA, 17 nt, Human adenovirus F
aaacuucccuuugacaa

SEQ ID NO: 3942479 - RNA, 15 nt, Human adenovirus F
aaacuugauuuccau

SEQ ID NO: 3942480 - RNA, 22 nt, Human adenovirus F
aaacuuuauggauguuuuccaa

SEQ ID NO: 3942481 - RNA, 13 nt, Human adenovirus F
aaacuuucuccac

SEQ ID NO: 3942482 - RNA, 22 nt, Human adenovirus F
aaagaaauccacuuaccagagc

SEQ ID NO: 3942483 - RNA, 19 nt, Human adenovirus F
aaagaaccagaauugaaga

SEQ ID NO: 3942484 - RNA, 22 nt, Human adenovirus F
aaagcaaguuucgcaaaagcug

SEQ ID NO: 3942485 - RNA, 15 nt, Human adenovirus F
aaagggggcgugucc

SEQ ID NO: 3942486 - RNA, 14 nt, Human adenovirus F
aaaggggugguggg

SEQ ID NO: 3942487 - RNA, 21 nt, Human adenovirus F
aaaguagcucuuccaagcugc

SEQ ID NO: 3942488 - RNA, 19 nt, Human adenovirus F
aaaucaaggccaaaguuca

SEQ ID NO: 3942489 - RNA, 18 nt, Human adenovirus F
aaauccuucgagcaagcc

SEQ ID NO: 3942490 - RNA, 24 nt, Human adenovirus F
aaaucuucaaacauuaagcugcaa

SEQ ID NO: 3942491 - RNA, 18 nt, Human adenovirus F
aaauguagcccuguacuu

SEQ ID NO: 3942492 - RNA, 12 nt, Human adenovirus F
aaauucuggaau

SEQ ID NO: 3942493 - RNA, 20 nt, Human adenovirus F
aaauuugcugacagcuggga

SEQ ID NO: 3942494 - RNA, 20 nt, Human adenovirus F
aacaaaaaaaaaauauuaau

SEQ ID NO: 3942495 - RNA, 23 nt, Human adenovirus F
aacaacgggguggaaagccuggu

SEQ ID NO: 3942496 - RNA, 17 nt, Human adenovirus F
aacacaaugcaaaaugu

SEQ ID NO: 3942497 - RNA, 22 nt, Human adenovirus F
aacacagguucuuugcuggcaa

SEQ ID NO: 3942498 - RNA, 14 nt, Human adenovirus F
aacaccgcuuccac

SEQ ID NO: 3942499 - RNA, 18 nt, Human adenovirus F
aacacugccuaccgcagc

SEQ ID NO: 3942500 - RNA, 20 nt, Human adenovirus F
aacagccuuuguaacaacug

SEQ ID NO: 3942501 - RNA, 17 nt, Human adenovirus F
aacaucggcaccccucu

SEQ ID NO: 3942502 - RNA, 12 nt, Human adenovirus F
aacauuuaugcc

SEQ ID NO: 3942503 - RNA, 15 nt, Human adenovirus F
aaccaagggcucugc

SEQ ID NO: 3942504 - RNA, 14 nt, Human adenovirus F
aaccaggcagugga

SEQ ID NO: 3942505 - RNA, 19 nt, Human adenovirus F
aaccaggccuugcaaaacc

SEQ ID NO: 3942506 - RNA, 12 nt, Human adenovirus F
aaccauggagcu

SEQ ID NO: 3942507 - RNA, 19 nt, Human adenovirus F
aacccacagcuagcuuuau

SEQ ID NO: 3942508 - RNA, 23 nt, Human adenovirus F
aacccaugagccgccagguggua

SEQ ID NO: 3942509 - RNA, 16 nt, Human adenovirus F
aaccccacgccaagcc

SEQ ID NO: 3942510 - RNA, 12 nt, Human adenovirus F
aaccggcggcgu

SEQ ID NO: 3942511 - RNA, 21 nt, Human adenovirus F
aaccggcggcguacacuggcu

SEQ ID NO: 3942512 - RNA, 19 nt, Human adenovirus F
aaccggucguaacaaauac

SEQ ID NO: 3942513 - RNA, 23 nt, Human adenovirus F
aaccuauugguuccauggcccga

SEQ ID NO: 3942514 - RNA, 17 nt, Human adenovirus F
aacgagggggaggacuu

SEQ ID NO: 3942515 - RNA, 18 nt, Human adenovirus F
aacgcccgcuagcucuau

SEQ ID NO: 3942516 - RNA, 21 nt, Human adenovirus F
aacgggcggcaaaugcucugc

SEQ ID NO: 3942517 - RNA, 19 nt, Human adenovirus F
aacgguuguuuuccaccag

SEQ ID NO: 3942518 - RNA, 22 nt, Human adenovirus F
aacguucuucacugcaccuugc

SEQ ID NO: 3942519 - RNA, 18 nt, Human adenovirus F
aacucaaacaacaaaauc

SEQ ID NO: 3942520 - RNA, 22 nt, Human adenovirus F
aacucgcaggccagucggcagg

SEQ ID NO: 3942521 - RNA, 14 nt, Human adenovirus F
aacucucuuacauu

SEQ ID NO: 3942522 - RNA, 13 nt, Human adenovirus F
aacuucuaccauu

SEQ ID NO: 3942523 - RNA, 16 nt, Human adenovirus F
aacuuucuccacgucc

SEQ ID NO: 3942524 - RNA, 14 nt, Human adenovirus F
aacuuucuuacacu

SEQ ID NO: 3942525 - RNA, 15 nt, Human adenovirus F
aacuuuuuuaccacu

SEQ ID NO: 3942526 - RNA, 15 nt, Human adenovirus F
agucaaaaguguuua

SEQ ID NO: 3942527 - RNA, 12 nt, Human adenovirus F
agucaagcucuc

SEQ ID NO: 3942528 - RNA, 19 nt, Human adenovirus F
agucacuacaauauuggcu

SEQ ID NO: 3942529 - RNA, 19 nt, Human adenovirus F
aguccacuuaacagcuccu

SEQ ID NO: 3942530 - RNA, 17 nt, Human adenovirus F
aguccucauucuucuca

SEQ ID NO: 3942531 - RNA, 18 nt, Human adenovirus F
agucuguuuggugggcug

SEQ ID NO: 3942532 - RNA, 18 nt, Human adenovirus F
agugcaggaagaggagga

SEQ ID NO: 3942533 - RNA, 22 nt, Human adenovirus F
agugccgagcuuuuacugggac

SEQ ID NO: 3942534 - RNA, 18 nt, Human adenovirus F
agugcguaagaccucauc

SEQ ID NO: 3942535 - RNA, 18 nt, Human adenovirus F
agugcugucuagccgcac

SEQ ID NO: 3942536 - RNA, 12 nt, Human adenovirus F
aguggccgccga

SEQ ID NO: 3942537 - RNA, 23 nt, Human adenovirus F
aguggggguggaauuacugccag

SEQ ID NO: 3942538 - RNA, 12 nt, Human adenovirus F
aguguggagcua

SEQ ID NO: 3942539 - RNA, 19 nt, Human adenovirus F
aguucgcgguucaggaggu

SEQ ID NO: 3942540 - RNA, 22 nt, Human adenovirus F
aguucuugcugacggccggcca

SEQ ID NO: 3942541 - RNA, 21 nt, Human adenovirus F
aguugcaagauaugucugcca

SEQ ID NO: 3942542 - RNA, 17 nt, Human adenovirus F
auaaaggggaccagcug

SEQ ID NO: 3942543 - RNA, 20 nt, Human adenovirus F
auaacggacgcauuaccauu

SEQ ID NO: 3942544 - RNA, 19 nt, Human adenovirus F
auaauacagacgucucaag

SEQ ID NO: 3942545 - RNA, 12 nt, Human adenovirus F
auacccagcugu

SEQ ID NO: 3942546 - RNA, 17 nt, Human adenovirus F
auaccgcugcagcugcu

SEQ ID NO: 3942547 - RNA, 19 nt, Human adenovirus F
auacgggagggacaagcuu

SEQ ID NO: 3942548 - RNA, 20 nt, Human adenovirus F
auacuuuaaacaagcaaaga

SEQ ID NO: 3942549 - RNA, 20 nt, Human adenovirus F
auagcaccaacgugcaggcc

SEQ ID NO: 3942550 - RNA, 14 nt, Human adenovirus F
auagcuggagggca

SEQ ID NO: 3942551 - RNA, 21 nt, Human adenovirus F
auagcugugucagcuaacucu

SEQ ID NO: 3942552 - RNA, 15 nt, Human adenovirus F
auauacguaaaugug

SEQ ID NO: 3942553 - RNA, 23 nt, Human adenovirus F
auaugucacagccuguuacuauu

SEQ ID NO: 3942554 - RNA, 14 nt, Human adenovirus F
aucacccaaagcca

SEQ ID NO: 3942555 - RNA, 21 nt, Human adenovirus F
aucacuaaaaccaacaaaauc

SEQ ID NO: 3942556 - RNA, 23 nt, Human adenovirus F
aucacuccguucgcucacccgca

SEQ ID NO: 3942557 - RNA, 19 nt, Human adenovirus F
aucaugcuucugacaugcu

SEQ ID NO: 3942558 - RNA, 17 nt, Human adenovirus F
auccaaucguagcaggg

SEQ ID NO: 3942559 - RNA, 18 nt, Human adenovirus F
auccagggcacaguaauc

SEQ ID NO: 3942560 - RNA, 18 nt, Human adenovirus F
auccagugcaggaagagg

SEQ ID NO: 3942561 - RNA, 15 nt, Human adenovirus F
auccccaacaacccg

SEQ ID NO: 3942562 - RNA, 22 nt, Human adenovirus F
auccccgccgccccuggccugu

SEQ ID NO: 3942563 - RNA, 22 nt, Human adenovirus F
aucccgcgcuaaaucuuccucc

SEQ ID NO: 3942564 - RNA, 15 nt, Human adenovirus F
auccuuccaguaauc

SEQ ID NO: 3942565 - RNA, 16 nt, Human adenovirus F
aucgacguucucuccc

SEQ ID NO: 3942566 - RNA, 19 nt, Human adenovirus F
aucgcagcgggcaggagcc

SEQ ID NO: 3942567 - RNA, 17 nt, Human adenovirus F
aucgcucacuggucugu

SEQ ID NO: 3942568 - RNA, 23 nt, Human adenovirus F
aucgcuugccacuggccuuuuga

SEQ ID NO: 3942569 - RNA, 16 nt, Human adenovirus F
aucguaccauguggcg

SEQ ID NO: 3942570 - RNA, 15 nt, Human adenovirus F
aucuaucccuugauu

SEQ ID NO: 3942571 - RNA, 15 nt, Human adenovirus F
aucucccuccccccu

SEQ ID NO: 3942572 - RNA, 16 nt, Human adenovirus F
aucugcaaaaaagccg

SEQ ID NO: 3942573 - RNA, 22 nt, Human adenovirus F
augaauuggcuuagugccggcc

SEQ ID NO: 3942574 - RNA, 15 nt, Human adenovirus F
augcaacuuggaagg

SEQ ID NO: 3942575 - RNA, 20 nt, Human adenovirus F
augcaacuuggaagggaagg

SEQ ID NO: 3942576 - RNA, 17 nt, Human adenovirus F
augccuccagcacugcc

SEQ ID NO: 3942577 - RNA, 18 nt, Human adenovirus F
augccuccagcacugccg

SEQ ID NO: 3942578 - RNA, 16 nt, Human adenovirus F
augccuuacuggagcg

SEQ ID NO: 3942579 - RNA, 12 nt, Human adenovirus F
augcucugcaaa

SEQ ID NO: 3942580 - RNA, 16 nt, Human adenovirus F
auggaaacgcagccug

SEQ ID NO: 3942581 - RNA, 14 nt, Human adenovirus F
auggaaacugucag

SEQ ID NO: 3942582 - RNA, 13 nt, Human adenovirus F
auggaacuaacug

SEQ ID NO: 3942583 - RNA, 22 nt, Human adenovirus F
auggcagcagauuuuggacugu

SEQ ID NO: 3942584 - RNA, 20 nt, Human adenovirus F
auggggccuugggaugcagc

SEQ ID NO: 3942585 - RNA, 18 nt, Human adenovirus F
auggguaagugcagaggc

SEQ ID NO: 3942586 - RNA, 22 nt, Human adenovirus F
augguaaaaaugccaggcagca

SEQ ID NO: 3942587 - RNA, 23 nt, Human adenovirus F
auggucauuuuuucaagggauug

SEQ ID NO: 3942588 - RNA, 14 nt, Human adenovirus F
auggugguagaagg

SEQ ID NO: 3942589 - RNA, 22 nt, Human adenovirus F
auguacuacaauuccacuggca

SEQ ID NO: 3942590 - RNA, 17 nt, Human adenovirus F
auguccuuaaggaggag

SEQ ID NO: 3942591 - RNA, 17 nt, Human adenovirus F
augugcagcaaaaacuc

SEQ ID NO: 3942592 - RNA, 20 nt, Human adenovirus F
augugccgcgcgggcaggag

SEQ ID NO: 3942593 - RNA, 18 nt, Human adenovirus F
augugcuggggaauggag

SEQ ID NO: 3942594 - RNA, 15 nt, Human adenovirus F
auguggaaccaggca

SEQ ID NO: 3942595 - RNA, 17 nt, Human adenovirus F
auuaacauuaggcucaa

SEQ ID NO: 3942596 - RNA, 13 nt, Human adenovirus F
auuacagguauaa

SEQ ID NO: 3942597 - RNA, 18 nt, Human adenovirus F
auuagguggcucuaaguu

SEQ ID NO: 3942598 - RNA, 21 nt, Human adenovirus F
auuauccguuggaauuuuccu

SEQ ID NO: 3942599 - RNA, 21 nt, Human adenovirus F
auucugauggaguuguggagu

SEQ ID NO: 3942600 - RNA, 21 nt, Human adenovirus F
auugccucccugaacuaccag

SEQ ID NO: 3942601 - RNA, 16 nt, Human adenovirus F
auuguaaacgcucugg

SEQ ID NO: 3942602 - RNA, 15 nt, Human adenovirus F
auuguguccugcaac

SEQ ID NO: 3942603 - RNA, 18 nt, Human adenovirus F
auuuauaccauuaagaag

SEQ ID NO: 3942604 - RNA, 16 nt, Human adenovirus F
auuucaccuacucugg

SEQ ID NO: 3942605 - RNA, 14 nt, Human adenovirus F
auuucgugggaagg

SEQ ID NO: 3942606 - RNA, 21 nt, Human adenovirus F
auuucuuugucuaacuaaaaa

SEQ ID NO: 3942607 - RNA, 16 nt, Human adenovirus F
auuucuuuuaaaaaaa

SEQ ID NO: 3942608 - RNA, 20 nt, Human adenovirus F
auuuggaagaugaguuuaaa

SEQ ID NO: 3942609 - RNA, 14 nt, Human adenovirus F
auuuguuuagaaaa

SEQ ID NO: 3942610 - RNA, 20 nt, Human adenovirus F
auuuugacgaucgcuccagg

SEQ ID NO: 3942611 - RNA, 16 nt, Human adenovirus F
caaaacaauucucucu

SEQ ID NO: 3942612 - RNA, 23 nt, Human adenovirus F
caaaacaugcuguacgccaacuc

SEQ ID NO: 3942613 - RNA, 19 nt, Human adenovirus F
caaaagcccggguccaggc

SEQ ID NO: 3942614 - RNA, 19 nt, Human adenovirus F
caaaaguccacaaaaacuc

SEQ ID NO: 3942615 - RNA, 15 nt, Human adenovirus F
caaaaugaguggcuu

SEQ ID NO: 3942616 - RNA, 15 nt, Human adenovirus F
caaaaugugcagcaa

SEQ ID NO: 3942617 - RNA, 21 nt, Human adenovirus F
caaacaacgaacuuucucucu

SEQ ID NO: 3942618 - RNA, 14 nt, Human adenovirus F
caaacauagcaaaa

SEQ ID NO: 3942619 - RNA, 21 nt, Human adenovirus F
caaagacgaauugcagcccac

SEQ ID NO: 3942620 - RNA, 12 nt, Human adenovirus F
caaagccaaccu

SEQ ID NO: 3942621 - RNA, 14 nt, Human adenovirus F
caaauaauuuuccg

SEQ ID NO: 3942622 - RNA, 18 nt, Human adenovirus F
caaaucgcgcaaccagug

SEQ ID NO: 3942623 - RNA, 15 nt, Human adenovirus F
caacaaaaucaggaa

SEQ ID NO: 3942624 - RNA, 22 nt, Human adenovirus F
caacaagaaggugcuuccagcc

SEQ ID NO: 3942625 - RNA, 22 nt, Human adenovirus F
caaccaggccuugcaaaaccaa

SEQ ID NO: 3942626 - RNA, 19 nt, Human adenovirus F
caaccuacccagauuuccu

SEQ ID NO: 3942627 - RNA, 18 nt, Human adenovirus F
caacggacgugagagagg

SEQ ID NO: 3942628 - RNA, 12 nt, Human adenovirus F
caacucugaggu

SEQ ID NO: 3942629 - RNA, 17 nt, Human adenovirus F
caacugcagcgcacgcu

SEQ ID NO: 3942630 - RNA, 17 nt, Human adenovirus F
caacugccaccuccacc

SEQ ID NO: 3942631 - RNA, 23 nt, Human adenovirus F
caagacccgguacaggugggcuu

SEQ ID NO: 3942632 - RNA, 15 nt, Human adenovirus F
caagcacauccaggg

SEQ ID NO: 3942633 - RNA, 17 nt, Human adenovirus F
caagcgcaaguucaaag

SEQ ID NO: 3942634 - RNA, 17 nt, Human adenovirus F
caagcgguccauugccu

SEQ ID NO: 3942635 - RNA, 12 nt, Human adenovirus F
caauacuacaaa

SEQ ID NO: 3942636 - RNA, 13 nt, Human adenovirus F
caauagcagcacc

SEQ ID NO: 3942637 - RNA, 15 nt, Human adenovirus F
caauagcagcaccau

SEQ ID NO: 3942638 - RNA, 22 nt, Human adenovirus F
caaucagggcgugcaagugggc

SEQ ID NO: 3942639 - RNA, 14 nt, Human adenovirus F
caaucccagcagaa

SEQ ID NO: 3942640 - RNA, 19 nt, Human adenovirus F
caaugguaccacgcaggcg

SEQ ID NO: 3942641 - RNA, 19 nt, Human adenovirus F
caauuuugcgucgcuggcu

SEQ ID NO: 3942642 - RNA, 23 nt, Human adenovirus F
ccaagcaagcccauucugccagu

SEQ ID NO: 3942643 - RNA, 17 nt, Human adenovirus F
ccaauccuagccagugg

SEQ ID NO: 3942644 - RNA, 16 nt, Human adenovirus F
ccaaucguagcagggu

SEQ ID NO: 3942645 - RNA, 20 nt, Human adenovirus F
ccacaaaugucuuguggcug

SEQ ID NO: 3942646 - RNA, 16 nt, Human adenovirus F
ccacaauaagcagcuu

SEQ ID NO: 3942647 - RNA, 15 nt, Human adenovirus F
ccacaaucuucaucu

SEQ ID NO: 3942648 - RNA, 20 nt, Human adenovirus F
ccacacuuuuaaaaaggugu

SEQ ID NO: 3942649 - RNA, 16 nt, Human adenovirus F
ccaccacgggaguugc

SEQ ID NO: 3942650 - RNA, 18 nt, Human adenovirus F
ccaccgguuuuguaccac

SEQ ID NO: 3942651 - RNA, 15 nt, Human adenovirus F
ccaccguggcuccca

SEQ ID NO: 3942652 - RNA, 22 nt, Human adenovirus F
ccaccuugauacggauugucuu

SEQ ID NO: 3942653 - RNA, 18 nt, Human adenovirus F
ccacgauguaaccacaga

SEQ ID NO: 3942654 - RNA, 16 nt, Human adenovirus F
ccacgucccuccccgu

SEQ ID NO: 3942655 - RNA, 15 nt, Human adenovirus F
ccacuccugcaauac

SEQ ID NO: 3942656 - RNA, 14 nt, Human adenovirus F
ccacucgaaaccaa

SEQ ID NO: 3942657 - RNA, 16 nt, Human adenovirus F
ccacugccacugaaac

SEQ ID NO: 3942658 - RNA, 15 nt, Human adenovirus F
ccacuugugcaaugu

SEQ ID NO: 3942659 - RNA, 11 nt, Human adenovirus F
ccagaccccau

SEQ ID NO: 3942660 - RNA, 23 nt, Human adenovirus F
ccagacuccgaaaccuuaaccac

SEQ ID NO: 3942661 - RNA, 16 nt, Human adenovirus F
ccagaugucaacggca

SEQ ID NO: 3942662 - RNA, 14 nt, Human adenovirus F
ccagcauggcucag

SEQ ID NO: 3942663 - RNA, 14 nt, Human adenovirus F
ccagccggaggagu

SEQ ID NO: 3942664 - RNA, 22 nt, Human adenovirus F
ccagcgcccgggcccuggaggc

SEQ ID NO: 3942665 - RNA, 23 nt, Human adenovirus F
ccagcguucaaaaccucuuacaa

SEQ ID NO: 3942666 - RNA, 11 nt, Human adenovirus F
ccaggcagcag

SEQ ID NO: 3942667 - RNA, 22 nt, Human adenovirus F
ccaggcguacguaccgccucag

SEQ ID NO: 3942668 - RNA, 23 nt, Human adenovirus F
ccaggugguagacacuaccaccu

SEQ ID NO: 3942669 - RNA, 16 nt, Human adenovirus F
ccaguagcuuggaagc

SEQ ID NO: 3942670 - RNA, 17 nt, Human adenovirus F
ccagucggcaggcuucc

SEQ ID NO: 3942671 - RNA, 16 nt, Human adenovirus F
ccagugcaggaagagg

SEQ ID NO: 3942672 - RNA, 20 nt, Human adenovirus F
ccauagcaacagcguccguc

SEQ ID NO: 3942673 - RNA, 17 nt, Human adenovirus F
ccauaguaacuuucaaa

SEQ ID NO: 3942674 - RNA, 17 nt, Human adenovirus F
ccauauuauuuaaauaa

SEQ ID NO: 3942675 - RNA, 23 nt, Human adenovirus F
ccaucaugagucuguuugguggg

SEQ ID NO: 3942676 - RNA, 21 nt, Human adenovirus F
ccauccuggaccuggaagagg

SEQ ID NO: 3942677 - RNA, 22 nt, Human adenovirus F
ccauuaaaaaucuccugcuccu

SEQ ID NO: 3942678 - RNA, 17 nt, Human adenovirus F
ccauuggcaauguguuu

SEQ ID NO: 3942679 - RNA, 17 nt, Human adenovirus F
cccaccgaguuccugcg

SEQ ID NO: 3942680 - RNA, 22 nt, Human adenovirus F
cccaccgaguuccugcgcugcu

SEQ ID NO: 3942681 - RNA, 22 nt, Human adenovirus F
cccaccuuguguuuaagccaga

SEQ ID NO: 3942682 - RNA, 17 nt, Human adenovirus F
cccacuguugccguggc

SEQ ID NO: 3942683 - RNA, 17 nt, Human adenovirus F
cccagcgcccgggcccu

SEQ ID NO: 3942684 - RNA, 21 nt, Human adenovirus F
cccaggagcagcgggaagaga

SEQ ID NO: 3942685 - RNA, 17 nt, Human adenovirus F
cccauagacaaggaggu

SEQ ID NO: 3942686 - RNA, 18 nt, Human adenovirus F
cccccguuugcuuccucc

SEQ ID NO: 3942687 - RNA, 19 nt, Human adenovirus F
ccccggcggcgggugcagu

SEQ ID NO: 3942688 - RNA, 16 nt, Human adenovirus F
ccccuguaccaccgca

SEQ ID NO: 3942689 - RNA, 20 nt, Human adenovirus F
ccccugugaguguggagcua

SEQ ID NO: 3942690 - RNA, 14 nt, Human adenovirus F
cccgauacccaccu

SEQ ID NO: 3942691 - RNA, 17 nt, Human adenovirus F
cccgcaacggcgcagca

SEQ ID NO: 3942692 - RNA, 18 nt, Human adenovirus F
cccggacuuggcgugcag

SEQ ID NO: 3942693 - RNA, 17 nt, Human adenovirus F
cccggcggcgggugcag

SEQ ID NO: 3942694 - RNA, 16 nt, Human adenovirus F
cccguaaaaaggaggg

SEQ ID NO: 3942695 - RNA, 23 nt, Human adenovirus F
cccguaaccaaguuggugaugcc

SEQ ID NO: 3942696 - RNA, 16 nt, Human adenovirus F
cccguagucucagacg

SEQ ID NO: 3942697 - RNA, 23 nt, Human adenovirus F
cccugaggaggaggccauccugg

SEQ ID NO: 3942698 - RNA, 15 nt, Human adenovirus F
cccugaucagccagg

SEQ ID NO: 3942699 - RNA, 14 nt, Human adenovirus F
cccuggccuggaac

SEQ ID NO: 3942700 - RNA, 16 nt, Human adenovirus F
cccugucguugccagc

SEQ ID NO: 3942701 - RNA, 14 nt, Human adenovirus F
cccugugagugugg

SEQ ID NO: 3942702 - RNA, 17 nt, Human adenovirus F
cccuuuuccagcaacuu

SEQ ID NO: 3942703 - RNA, 21 nt, Human adenovirus F
ccgacgcgcuuugcgcaggcg

SEQ ID NO: 3942704 - RNA, 12 nt, Human adenovirus F
ccgagcagcugc

SEQ ID NO: 3942705 - RNA, 19 nt, Human adenovirus F
ccgagccaccaucuccagc

SEQ ID NO: 3942706 - RNA, 21 nt, Human adenovirus F
ccgagcggcugcuucugccag

SEQ ID NO: 3942707 - RNA, 22 nt, Human adenovirus F
ccgagcggcugcuucugccagu

SEQ ID NO: 3942708 - RNA, 22 nt, Human adenovirus F
ccgagcuuuuacugggacagca

SEQ ID NO: 3942709 - RNA, 21 nt, Human adenovirus F
ccgaucacuccguucgcucac

SEQ ID NO: 3942710 - RNA, 23 nt, Human adenovirus F
ccgcaaccauguucacugaaagc

SEQ ID NO: 3942711 - RNA, 16 nt, Human adenovirus F
ccgcaaugcuggucug

SEQ ID NO: 3942712 - RNA, 20 nt, Human adenovirus F
ccgcacucgcuccacccgcc

SEQ ID NO: 3942713 - RNA, 17 nt, Human adenovirus F
ccgccaugacugccgcu

SEQ ID NO: 3942714 - RNA, 19 nt, Human adenovirus F
ccgccaugacugccgcucg

SEQ ID NO: 3942715 - RNA, 19 nt, Human adenovirus F
ccgccgcucaaggcgcacg

SEQ ID NO: 3942716 - RNA, 23 nt, Human adenovirus F
ccgccuagguccgaccgcugggg

SEQ ID NO: 3942717 - RNA, 16 nt, Human adenovirus F
ccgcgacugcaucuau

SEQ ID NO: 3942718 - RNA, 12 nt, Human adenovirus F
ccgcgcgggcag

SEQ ID NO: 3942719 - RNA, 21 nt, Human adenovirus F
ccgcgcuaaaucuuccuccca

SEQ ID NO: 3942720 - RNA, 16 nt, Human adenovirus F
ccgcuccaucaagccc

SEQ ID NO: 3942721 - RNA, 13 nt, Human adenovirus F
ccgcugaaagacg

SEQ ID NO: 3942722 - RNA, 22 nt, Human adenovirus F
ccggcggcguacacuggcuggc

SEQ ID NO: 3942723 - RNA, 17 nt, Human adenovirus F
ccggggcaauaucucau

SEQ ID NO: 3942724 - RNA, 22 nt, Human adenovirus F
ccggguugggcgcuugccaggg

SEQ ID NO: 3942725 - RNA, 22 nt, Human adenovirus F
ccgucguacaaguugcaaagcu

SEQ ID NO: 3942726 - RNA, 12 nt, Human adenovirus F
ccgucgucaggc

SEQ ID NO: 3942727 - RNA, 22 nt, Human adenovirus F
ccgucuucccucuugggcagga

SEQ ID NO: 3942728 - RNA, 22 nt, Human adenovirus F
ccguggagccgacuucaagccc

SEQ ID NO: 3942729 - RNA, 21 nt, Human adenovirus F
ccguggcuggcgggcaaagcu

SEQ ID NO: 3942730 - RNA, 21 nt, Human adenovirus F
ccguucccacuguuucuccuc

SEQ ID NO: 3942731 - RNA, 13 nt, Human adenovirus F
ccuaacacaggcg

SEQ ID NO: 3942732 - RNA, 19 nt, Human adenovirus F
ccuaacggcaccugcgaaa

SEQ ID NO: 3942733 - RNA, 19 nt, Human adenovirus F
ccuacccacgaaaaggugu

SEQ ID NO: 3942734 - RNA, 15 nt, Human adenovirus F
ccuacccagauuucc

SEQ ID NO: 3942735 - RNA, 23 nt, Human adenovirus F
ccuaucacuaaaaccaacaaaau

SEQ ID NO: 3942736 - RNA, 14 nt, Human adenovirus F
ccuaugugcugggg

SEQ ID NO: 3942737 - RNA, 15 nt, Human adenovirus F
ccuaugugcugggga

SEQ ID NO: 3942738 - RNA, 23 nt, Human adenovirus F
ccucagccugaaauacacugauc

SEQ ID NO: 3942739 - RNA, 14 nt, Human adenovirus F
ccuccaccaccuuc

SEQ ID NO: 3942740 - RNA, 13 nt, Human adenovirus F
ccuccagcacugc

SEQ ID NO: 3942741 - RNA, 17 nt, Human adenovirus F
ccucccuuugcccccca

SEQ ID NO: 3942742 - RNA, 20 nt, Human adenovirus F
ccucgagugcguaagaccuc

SEQ ID NO: 3942743 - RNA, 13 nt, Human adenovirus F
ccucuuacaauuu

SEQ ID NO: 3942744 - RNA, 12 nt, Human adenovirus F
ccugaaaaccau

SEQ ID NO: 3942745 - RNA, 18 nt, Human adenovirus F
ccugaccgaccuggggca

SEQ ID NO: 3942746 - RNA, 13 nt, Human adenovirus F
ccugagcccgggc

SEQ ID NO: 3942747 - RNA, 18 nt, Human adenovirus F
ccugagcccgggccuggu

SEQ ID NO: 3942748 - RNA, 12 nt, Human adenovirus F
ccugaggaggag

SEQ ID NO: 3942749 - RNA, 20 nt, Human adenovirus F
ccugagggccggccuggacc

SEQ ID NO: 3942750 - RNA, 19 nt, Human adenovirus F
ccugcaauggcagcccagc

SEQ ID NO: 3942751 - RNA, 17 nt, Human adenovirus F
ccugcccuuccucccaa

SEQ ID NO: 3942752 - RNA, 12 nt, Human adenovirus F
ccuggaagaggg

SEQ ID NO: 3942753 - RNA, 15 nt, Human adenovirus F
ccuggaccuggaaga

SEQ ID NO: 3942754 - RNA, 18 nt, Human adenovirus F
ccuggcccccaaaggugc

SEQ ID NO: 3942755 - RNA, 14 nt, Human adenovirus F
ccuggccuggaacc

SEQ ID NO: 3942756 - RNA, 18 nt, Human adenovirus F
ccuguuacuauuaaugca

SEQ ID NO: 3942757 - RNA, 18 nt, Human adenovirus F
ccuguucuaaaaccaaac

SEQ ID NO: 3942758 - RNA, 11 nt, Human adenovirus F
caggagcugcg

SEQ ID NO: 3942759 - RNA, 16 nt, Human adenovirus F
caggaucccucagagc

SEQ ID NO: 3942760 - RNA, 14 nt, Human adenovirus F
caggcacaccuuca

SEQ ID NO: 3942761 - RNA, 20 nt, Human adenovirus F
caggcagcagccccaggcca

SEQ ID NO: 3942762 - RNA, 17 nt, Human adenovirus F
caggccgcccuaaccuc

SEQ ID NO: 3942763 - RNA, 13 nt, Human adenovirus F
caggccgcggcgg

SEQ ID NO: 3942764 - RNA, 22 nt, Human adenovirus F
caggccuccaauuugacaauaa

SEQ ID NO: 3942765 - RNA, 22 nt, Human adenovirus F
caggcggaaaccaagggcucug

SEQ ID NO: 3942766 - RNA, 20 nt, Human adenovirus F
caggcguggccuccguggcc

SEQ ID NO: 3942767 - RNA, 22 nt, Human adenovirus F
cagggcgugcaagugggcucag

SEQ ID NO: 3942768 - RNA, 18 nt, Human adenovirus F
caggguuugcaaacugua

SEQ ID NO: 3942769 - RNA, 23 nt, Human adenovirus F
caggguuuuugagcaugaaacug

SEQ ID NO: 3942770 - RNA, 15 nt, Human adenovirus F
cagguguacuggucc

SEQ ID NO: 3942771 - RNA, 16 nt, Human adenovirus F
caguaagcaacaacca

SEQ ID NO: 3942772 - RNA, 19 nt, Human adenovirus F
caguaccgcuccaucaagc

SEQ ID NO: 3942773 - RNA, 18 nt, Human adenovirus F
cagucgcagcgcaucacc

SEQ ID NO: 3942774 - RNA, 19 nt, Human adenovirus F
cagucucgguaacgaccuc

SEQ ID NO: 3942775 - RNA, 20 nt, Human adenovirus F
cagugaaaacguucccgccc

SEQ ID NO: 3942776 - RNA, 13 nt, Human adenovirus F
caguggagcaagg

SEQ ID NO: 3942777 - RNA, 12 nt, Human adenovirus F
caguuggagcag

SEQ ID NO: 3942778 - RNA, 14 nt, Human adenovirus F
cauaagaagccagc

SEQ ID NO: 3942779 - RNA, 15 nt, Human adenovirus F
cauacccgccaacgc

SEQ ID NO: 3942780 - RNA, 14 nt, Human adenovirus F
cauaggccauuuug

SEQ ID NO: 3942781 - RNA, 16 nt, Human adenovirus F
cauauacuuuaaacaa

SEQ ID NO: 3942782 - RNA, 20 nt, Human adenovirus F
caucaugcuucugacaugcu

SEQ ID NO: 3942783 - RNA, 14 nt, Human adenovirus F
cauccauccaucac

SEQ ID NO: 3942784 - RNA, 14 nt, Human adenovirus F
caucucuacagccc

SEQ ID NO: 3942785 - RNA, 15 nt, Human adenovirus F
caucugcggccucag

SEQ ID NO: 3942786 - RNA, 14 nt, Human adenovirus F
caucuuucaaaaaa

SEQ ID NO: 3942787 - RNA, 13 nt, Human adenovirus F
caugacugccgcu

SEQ ID NO: 3942788 - RNA, 22 nt, Human adenovirus F
caugagaucauaguugaggguu

SEQ ID NO: 3942789 - RNA, 17 nt, Human adenovirus F
caugcacaucgccgggc

SEQ ID NO: 3942790 - RNA, 13 nt, Human adenovirus F
caugccuccagca

SEQ ID NO: 3942791 - RNA, 17 nt, Human adenovirus F
cauggaucgcauccugg

SEQ ID NO: 3942792 - RNA, 16 nt, Human adenovirus F
cauggcaauggcucug

SEQ ID NO: 3942793 - RNA, 16 nt, Human adenovirus F
cauguauuuuuacagc

SEQ ID NO: 3942794 - RNA, 14 nt, Human adenovirus F
cauuauugcacuuu

SEQ ID NO: 3942795 - RNA, 19 nt, Human adenovirus F
cauuccauuuauuacaccc

SEQ ID NO: 3942796 - RNA, 18 nt, Human adenovirus F
cauuguuuugcuaccugg

SEQ ID NO: 3942797 - RNA, 19 nt, Human adenovirus F
cauuuaccaccccagcacu

SEQ ID NO: 3942798 - RNA, 20 nt, Human adenovirus F
cauuuaugcccaacaguaca

SEQ ID NO: 3942799 - RNA, 15 nt, Human adenovirus F
cauuucgugggaagg

SEQ ID NO: 3942800 - RNA, 18 nt, Human adenovirus F
cauuucuccgcgacggcg

SEQ ID NO: 3942801 - RNA, 18 nt, Human adenovirus F
ccaaaaaagcagccuaac

SEQ ID NO: 3942802 - RNA, 16 nt, Human adenovirus F
ccaaaaacggggcuuu

SEQ ID NO: 3942803 - RNA, 20 nt, Human adenovirus F
ccaaaaggucaggugcagaa

SEQ ID NO: 3942804 - RNA, 15 nt, Human adenovirus F
ccaaagcagagcucu

SEQ ID NO: 3942805 - RNA, 15 nt, Human adenovirus F
ccaaaggugcuccca

SEQ ID NO: 3942806 - RNA, 23 nt, Human adenovirus F
ccaaaucaaucagcggcuggaaa

SEQ ID NO: 3942807 - RNA, 15 nt, Human adenovirus F
ccaacgugcaggcca

SEQ ID NO: 3942808 - RNA, 18 nt, Human adenovirus F
ccaagcugcggaaaugcu

SEQ ID NO: 3942809 - RNA, 20 nt, Human adenovirus F
ccaagucaaaaaagaugcga

SEQ ID NO: 3942810 - RNA, 18 nt, Human adenovirus F
ccacaaaagcuuucacuu

SEQ ID NO: 3942811 - RNA, 19 nt, Human adenovirus F
ccacccuauggaccaccgc

SEQ ID NO: 3942812 - RNA, 20 nt, Human adenovirus F
ccacccuauggaccaccgcg

SEQ ID NO: 3942813 - RNA, 14 nt, Human adenovirus F
ccaccguggcuccc

SEQ ID NO: 3942814 - RNA, 21 nt, Human adenovirus F
ccacgcaggcgagaguugggg

SEQ ID NO: 3942815 - RNA, 14 nt, Human adenovirus F
ccacguaccagaaa

SEQ ID NO: 3942816 - RNA, 15 nt, Human adenovirus F
ccacucgggaaagac

SEQ ID NO: 3942817 - RNA, 17 nt, Human adenovirus F
ccacugacaguaagcaa

SEQ ID NO: 3942818 - RNA, 17 nt, Human adenovirus F
ccacuucuauugcacuu

SEQ ID NO: 3942819 - RNA, 23 nt, Human adenovirus F
ccagcauaauaacucuggcuuug

SEQ ID NO: 3942820 - RNA, 18 nt, Human adenovirus F
ccagccggaggagugggc

SEQ ID NO: 3942821 - RNA, 16 nt, Human adenovirus F
ccagcgcccgggcccu

SEQ ID NO: 3942822 - RNA, 18 nt, Human adenovirus F
ccagcugguaagcagccu

SEQ ID NO: 3942823 - RNA, 20 nt, Human adenovirus F
ccagcugguaagcagccuaa

SEQ ID NO: 3942824 - RNA, 22 nt, Human adenovirus F
ccagcuguuuaccaaaggcucc

SEQ ID NO: 3942825 - RNA, 13 nt, Human adenovirus F
ccaggcagcaggg

SEQ ID NO: 3942826 - RNA, 14 nt, Human adenovirus F
ccaggcagcagggu

SEQ ID NO: 3942827 - RNA, 18 nt, Human adenovirus F
ccauauccauuaaagcuc

SEQ ID NO: 3942828 - RNA, 17 nt, Human adenovirus F
ccaucaucgccgccgcc

SEQ ID NO: 3942829 - RNA, 13 nt, Human adenovirus F
ccaucauuuccac

SEQ ID NO: 3942830 - RNA, 14 nt, Human adenovirus F
ccaucgccagcgac

SEQ ID NO: 3942831 - RNA, 20 nt, Human adenovirus F
ccaucgugcgcgaacugggc

SEQ ID NO: 3942832 - RNA, 16 nt, Human adenovirus F
ccaucuuucaaaaaac

SEQ ID NO: 3942833 - RNA, 16 nt, Human adenovirus F
ccauggaaacgcagcc

SEQ ID NO: 3942834 - RNA, 22 nt, Human adenovirus F
ccauguggaaccaggcagugga

SEQ ID NO: 3942835 - RNA, 14 nt, Human adenovirus F
ccauuauugcacuu

SEQ ID NO: 3942836 - RNA, 22 nt, Human adenovirus F
ccauucuuauuucgcccgacaa

SEQ ID NO: 3942837 - RNA, 18 nt, Human adenovirus F
cccaacacuuucaccgcc

SEQ ID NO: 3942838 - RNA, 13 nt, Human adenovirus F
cccaacucugagg

SEQ ID NO: 3942839 - RNA, 13 nt, Human adenovirus F
cccaaguggcccu

SEQ ID NO: 3942840 - RNA, 23 nt, Human adenovirus F
cccacaaaagcuuucacuuuaau

SEQ ID NO: 3942841 - RNA, 21 nt, Human adenovirus F
cccacgauguaaccacagaca

SEQ ID NO: 3942842 - RNA, 15 nt, Human adenovirus F
cccacgccaagccug

SEQ ID NO: 3942843 - RNA, 14 nt, Human adenovirus F
cccagcugguaagc

SEQ ID NO: 3942844 - RNA, 15 nt, Human adenovirus F
cccaggaucccucag

SEQ ID NO: 3942845 - RNA, 15 nt, Human adenovirus F
cccaggcggaaacca

SEQ ID NO: 3942846 - RNA, 13 nt, Human adenovirus F
cccauacccgcca

SEQ ID NO: 3942847 - RNA, 12 nt, Human adenovirus F
ccccaccguggc

SEQ ID NO: 3942848 - RNA, 14 nt, Human adenovirus F
ccccagcgcccugg

SEQ ID NO: 3942849 - RNA, 17 nt, Human adenovirus F
ccccagcgcccuggaua

SEQ ID NO: 3942850 - RNA, 19 nt, Human adenovirus F
cccccaccggcuccugugc

SEQ ID NO: 3942851 - RNA, 21 nt, Human adenovirus F
cccccaccggcuccugugcag

SEQ ID NO: 3942852 - RNA, 17 nt, Human adenovirus F
cccccacuagcgccccu

SEQ ID NO: 3942853 - RNA, 20 nt, Human adenovirus F
ccccgugggggaccgagcca

SEQ ID NO: 3942854 - RNA, 15 nt, Human adenovirus F
cccgcacuggaugcc

SEQ ID NO: 3942855 - RNA, 12 nt, Human adenovirus F
cccgccagcugg

SEQ ID NO: 3942856 - RNA, 15 nt, Human adenovirus F
cccgcccgccucuac

SEQ ID NO: 3942857 - RNA, 20 nt, Human adenovirus F
cccgcuauguuggcggcccu

SEQ ID NO: 3942858 - RNA, 20 nt, Human adenovirus F
cccggcggcgggugcagugg

SEQ ID NO: 3942859 - RNA, 14 nt, Human adenovirus F
cccgugucaccugc

SEQ ID NO: 3942860 - RNA, 12 nt, Human adenovirus F
cccuaacauggc

SEQ ID NO: 3942861 - RNA, 13 nt, Human adenovirus F
cccuagucccucc

SEQ ID NO: 3942862 - RNA, 21 nt, Human adenovirus F
cccucaaacacugcgcaaagu

SEQ ID NO: 3942863 - RNA, 18 nt, Human adenovirus F
cccucagacgacugggcg

SEQ ID NO: 3942864 - RNA, 21 nt, Human adenovirus F
cccucgcccuauuccuccggc

SEQ ID NO: 3942865 - RNA, 18 nt, Human adenovirus F
cccugaggaggaggccau

SEQ ID NO: 3942866 - RNA, 18 nt, Human adenovirus F
cccugccgcugcgcagca

SEQ ID NO: 3942867 - RNA, 13 nt, Human adenovirus F
cccuggccuguuu

SEQ ID NO: 3942868 - RNA, 19 nt, Human adenovirus F
cccuuaaguauucaccacc

SEQ ID NO: 3942869 - RNA, 14 nt, Human adenovirus F
cagcgggaagagag

SEQ ID NO: 3942870 - RNA, 14 nt, Human adenovirus F
cagcgggcaggagc

SEQ ID NO: 3942871 - RNA, 21 nt, Human adenovirus F
cagcgugagucgggcucuugg

SEQ ID NO: 3942872 - RNA, 13 nt, Human adenovirus F
cagcuggcaaacc

SEQ ID NO: 3942873 - RNA, 19 nt, Human adenovirus F
cagcuuauucgccagucca

SEQ ID NO: 3942874 - RNA, 17 nt, Human adenovirus F
caggaagcagcucaggu

SEQ ID NO: 3942875 - RNA, 17 nt, Human adenovirus F
caggagcagcgggaaga

SEQ ID NO: 3942876 - RNA, 17 nt, Human adenovirus F
caggagccgaauugccu

SEQ ID NO: 3942877 - RNA, 19 nt, Human adenovirus F
gcaaagcucccaaaagguc

SEQ ID NO: 3942878 - RNA, 16 nt, Human adenovirus F
gcaacguucagccacu

SEQ ID NO: 3942879 - RNA, 14 nt, Human adenovirus F
gcaacucgcaggcc

SEQ ID NO: 3942880 - RNA, 19 nt, Human adenovirus F
gcaagauaugucugccaaa

SEQ ID NO: 3942881 - RNA, 23 nt, Human adenovirus F
gcaagcccauucugccaguuggg

SEQ ID NO: 3942882 - RNA, 20 nt, Human adenovirus F
gcaagccgcugacggcgcag

SEQ ID NO: 3942883 - RNA, 21 nt, Human adenovirus F
gcaagcgcaaguucaaagaag

SEQ ID NO: 3942884 - RNA, 14 nt, Human adenovirus F
gcaaggaaccagug

SEQ ID NO: 3942885 - RNA, 17 nt, Human adenovirus F
gcacaagugccgagcuu

SEQ ID NO: 3942886 - RNA, 19 nt, Human adenovirus F
gcacacgcacuucaagaaa

SEQ ID NO: 3942887 - RNA, 13 nt, Human adenovirus F
gcacagcaaacac

SEQ ID NO: 3942888 - RNA, 15 nt, Human adenovirus F
gcacagcaaacacaa

SEQ ID NO: 3942889 - RNA, 22 nt, Human adenovirus F
gcacagccugcgucgggcucua

SEQ ID NO: 3942890 - RNA, 17 nt, Human adenovirus F
gcaccaauaugcccaac

SEQ ID NO: 3942891 - RNA, 16 nt, Human adenovirus F
gcaccuacuuugacau

SEQ ID NO: 3942892 - RNA, 15 nt, Human adenovirus F
gcaccugcacgcucu

SEQ ID NO: 3942893 - RNA, 13 nt, Human adenovirus F
gcacgggcgcacg

SEQ ID NO: 3942894 - RNA, 19 nt, Human adenovirus F
gcacucgcuccacccgccg

SEQ ID NO: 3942895 - RNA, 15 nt, Human adenovirus F
gcacugguaaaccag

SEQ ID NO: 3942896 - RNA, 17 nt, Human adenovirus F
gcagacgcaauggaaca

SEQ ID NO: 3942897 - RNA, 22 nt, Human adenovirus F
gcagaggaaguuucagacgagg

SEQ ID NO: 3942898 - RNA, 13 nt, Human adenovirus F
gcagaggagguga

SEQ ID NO: 3942899 - RNA, 19 nt, Human adenovirus F
gcagaggaggugaugcugc

SEQ ID NO: 3942900 - RNA, 16 nt, Human adenovirus F
gcagcaacauaacuuu

SEQ ID NO: 3942901 - RNA, 20 nt, Human adenovirus F
gcagcaccaccugcccuucc

SEQ ID NO: 3942902 - RNA, 13 nt, Human adenovirus F
gcagcaguccguc

SEQ ID NO: 3942903 - RNA, 22 nt, Human adenovirus F
gcagccugagcugccagaggcc

SEQ ID NO: 3942904 - RNA, 16 nt, Human adenovirus F
gcagccuguggagugg

SEQ ID NO: 3942905 - RNA, 20 nt, Human adenovirus F
gcagcgacagggcgcuaacu

SEQ ID NO: 3942906 - RNA, 14 nt, Human adenovirus F
gcagcgcccgccuc

SEQ ID NO: 3942907 - RNA, 14 nt, Human adenovirus F
gcagcugcguacgg

SEQ ID NO: 3942908 - RNA, 18 nt, Human adenovirus F
gcaguccacuuaacagcu

SEQ ID NO: 3942909 - RNA, 20 nt, Human adenovirus F
gcagugggacgaggaggaga

SEQ ID NO: 3942910 - RNA, 15 nt, Human adenovirus F
gcaguguuauaaggu

SEQ ID NO: 3942911 - RNA, 17 nt, Human adenovirus F
gcaguucauuuaaaaga

SEQ ID NO: 3942912 - RNA, 20 nt, Human adenovirus F
gcauaaaggggaccagcugu

SEQ ID NO: 3942913 - RNA, 16 nt, Human adenovirus F
gcauaacccuggaauu

SEQ ID NO: 3942914 - RNA, 16 nt, Human adenovirus F
gcauaacuucagcacu

SEQ ID NO: 3942915 - RNA, 19 nt, Human adenovirus F
gcauacguuacucggagcu

SEQ ID NO: 3942916 - RNA, 18 nt, Human adenovirus F
gcauacuguuucacauau

SEQ ID NO: 3942917 - RNA, 15 nt, Human adenovirus F
gcauauaagcucugu

SEQ ID NO: 3942918 - RNA, 16 nt, Human adenovirus F
gcaucggaacccucca

SEQ ID NO: 3942919 - RNA, 18 nt, Human adenovirus F
gcaugccacaauuuacaa

SEQ ID NO: 3942920 - RNA, 17 nt, Human adenovirus F
gcaugcccgagccggag

SEQ ID NO: 3942921 - RNA, 21 nt, Human adenovirus F
gcaugcccgagccggagaggg

SEQ ID NO: 3942922 - RNA, 15 nt, Human adenovirus F
gcauggcagcagauu

SEQ ID NO: 3942923 - RNA, 20 nt, Human adenovirus F
gccaacuccaaccaagaaau

SEQ ID NO: 3942924 - RNA, 23 nt, Human adenovirus F
gccaauuaucuacgccuccacca

SEQ ID NO: 3942925 - RNA, 23 nt, Human adenovirus F
gccacacuaaaguuuuaauggaa

SEQ ID NO: 3942926 - RNA, 19 nt, Human adenovirus F
gccacagguccagaccuca

SEQ ID NO: 3942927 - RNA, 14 nt, Human adenovirus F
gccaccgcaaccau

SEQ ID NO: 3942928 - RNA, 13 nt, Human adenovirus F
gccagagggcaac

SEQ ID NO: 3942929 - RNA, 17 nt, Human adenovirus F
gccagccaaugggcucc

SEQ ID NO: 3942930 - RNA, 24 nt, Human adenovirus F
gccagccaaugggcuccagcgagc

SEQ ID NO: 3942931 - RNA, 12 nt, Human adenovirus F
gccaggcagagg

SEQ ID NO: 3942932 - RNA, 22 nt, Human adenovirus F
gccaguuggggauuggcggcua

SEQ ID NO: 3942933 - RNA, 16 nt, Human adenovirus F
gccauagcuggagggc

SEQ ID NO: 3942934 - RNA, 17 nt, Human adenovirus F
gccaucgacguucucuc

SEQ ID NO: 3942935 - RNA, 17 nt, Human adenovirus F
gccaucgcugaccagca

SEQ ID NO: 3942936 - RNA, 19 nt, Human adenovirus F
gccaucgcugaccagcagc

SEQ ID NO: 3942937 - RNA, 23 nt, Human adenovirus F
gccaugcugaauauugcggagcc

SEQ ID NO: 3942938 - RNA, 22 nt, Human adenovirus F
gccauggaaacgcagccugagc

SEQ ID NO: 3942939 - RNA, 19 nt, Human adenovirus F
gccauggaucgcauccugg

SEQ ID NO: 3942940 - RNA, 14 nt, Human adenovirus F
gcccaggagcagcg

SEQ ID NO: 3942941 - RNA, 14 nt, Human adenovirus F
gccccccggcggcg

SEQ ID NO: 3942942 - RNA, 19 nt, Human adenovirus F
gccccgguugugcaguguu

SEQ ID NO: 3942943 - RNA, 15 nt, Human adenovirus F
gccccuaccagccgu

SEQ ID NO: 3942944 - RNA, 12 nt, Human adenovirus F
gccccugccaac

SEQ ID NO: 3942945 - RNA, 19 nt, Human adenovirus F
gccccugugaguguggagc

SEQ ID NO: 3942946 - RNA, 22 nt, Human adenovirus F
gcccguccuccgaccccacacg

SEQ ID NO: 3942947 - RNA, 18 nt, Human adenovirus F
gcccgucgucaggccgcc

SEQ ID NO: 3942948 - RNA, 14 nt, Human adenovirus F
gcccgugccaccga

SEQ ID NO: 3942949 - RNA, 20 nt, Human adenovirus F
gcccucuucugcaccugcac

SEQ ID NO: 3942950 - RNA, 16 nt, Human adenovirus F
gcccugaucagccagg

SEQ ID NO: 3942951 - RNA, 14 nt, Human adenovirus F
gcccuggccuggaa

SEQ ID NO: 3942952 - RNA, 23 nt, Human adenovirus F
gcccuuucaaaaagguuuccaaa

SEQ ID NO: 3942953 - RNA, 19 nt, Human adenovirus F
gccgcaccgcgcccguccu

SEQ ID NO: 3942954 - RNA, 22 nt, Human adenovirus F
gccgcacucgcuccacccgccg

SEQ ID NO: 3942955 - RNA, 23 nt, Human adenovirus F
gccgcccuaaccucuaccccgcg

SEQ ID NO: 3942956 - RNA, 18 nt, Human adenovirus F
gccgcugacggcgcagcu

SEQ ID NO: 3942957 - RNA, 15 nt, Human adenovirus F
gccggacgggcagcc

SEQ ID NO: 3942958 - RNA, 15 nt, Human adenovirus F
gccggcgggaagagg

SEQ ID NO: 3942959 - RNA, 17 nt, Human adenovirus F
gccgucccugggaugca

SEQ ID NO: 3942960 - RNA, 22 nt, Human adenovirus F
gccguugcucucuccggagccg

SEQ ID NO: 3942961 - RNA, 19 nt, Human adenovirus F
gccguuuaugggcaccugg

SEQ ID NO: 3942962 - RNA, 14 nt, Human adenovirus F
gccuacucuuacaa

SEQ ID NO: 3942963 - RNA, 18 nt, Human adenovirus F
gccucaugagcugggaga

SEQ ID NO: 3942964 - RNA, 21 nt, Human adenovirus F
gccucaugagcugggagaaag

SEQ ID NO: 3942965 - RNA, 17 nt, Human adenovirus F
gccuccguguuuuuuga

SEQ ID NO: 3942966 - RNA, 21 nt, Human adenovirus F
gccucuguuguagucugccaa

SEQ ID NO: 3942967 - RNA, 20 nt, Human adenovirus F
gccugaucccgaagagggua

SEQ ID NO: 3942968 - RNA, 15 nt, Human adenovirus F
gccuugcaagcagcu

SEQ ID NO: 3942969 - RNA, 18 nt, Human adenovirus F
gccuuuuauuaaccgccu

SEQ ID NO: 3942970 - RNA, 13 nt, Human adenovirus F
gcgaacagagugg

SEQ ID NO: 3942971 - RNA, 13 nt, Human adenovirus F
gcgcaaugcagag

SEQ ID NO: 3942972 - RNA, 12 nt, Human adenovirus F
gcgccccugcag

SEQ ID NO: 3942973 - RNA, 22 nt, Human adenovirus F
gcgcccgggcccuggaggcggc

SEQ ID NO: 3942974 - RNA, 16 nt, Human adenovirus F
gcgcgaacugggcugc

SEQ ID NO: 3942975 - RNA, 20 nt, Human adenovirus F
gcgcugcuacucaacagaaa

SEQ ID NO: 3942976 - RNA, 20 nt, Human adenovirus F
gcgcuuuuuuuaggcgccaa

SEQ ID NO: 3942977 - RNA, 23 nt, Human adenovirus F
gcggaccugcaauggcagcccag

SEQ ID NO: 3942978 - RNA, 19 nt, Human adenovirus F
gcggacgggucgcagcagg

SEQ ID NO: 3942979 - RNA, 16 nt, Human adenovirus F
gcggcaaaagcuugag

SEQ ID NO: 3942980 - RNA, 23 nt, Human adenovirus F
gcggcugguuauguuggcgcgga

SEQ ID NO: 3942981 - RNA, 11 nt, Human adenovirus F
gcgggcucuga

SEQ ID NO: 3942982 - RNA, 21 nt, Human adenovirus F
gcggggcaccuucagcuugag

SEQ ID NO: 3942983 - RNA, 16 nt, Human adenovirus F
gcggggcuaacuggca

SEQ ID NO: 3942984 - RNA, 22 nt, Human adenovirus F
gcguagcaccccaauguaaguu

SEQ ID NO: 3942985 - RNA, 19 nt, Human adenovirus F
gcgucaggaauuucuuuua

SEQ ID NO: 3942986 - RNA, 17 nt, Human adenovirus F
gcgugcaagugggcuca

SEQ ID NO: 3942987 - RNA, 20 nt, Human adenovirus F
gcgugcccaucauacagcag

SEQ ID NO: 3942988 - RNA, 21 nt, Human adenovirus F
gcguucgacgcgaggaugaga

SEQ ID NO: 3942989 - RNA, 14 nt, Human adenovirus F
gcguugcacgcucu

SEQ ID NO: 3942990 - RNA, 19 nt, Human adenovirus F
gcuaaagggaacugccagu

SEQ ID NO: 3942991 - RNA, 23 nt, Human adenovirus F
gcuaauacuucuuaauaaagaca

SEQ ID NO: 3942992 - RNA, 20 nt, Human adenovirus F
gcuaauuuuucaccaaaggu

SEQ ID NO: 3942993 - RNA, 16 nt, Human adenovirus F
gcuacggaggaagagg

SEQ ID NO: 3942994 - RNA, 15 nt, Human adenovirus F
gcuagcauaaaagaa

SEQ ID NO: 3942995 - RNA, 22 nt, Human adenovirus F
agcuacuuucaucuuaacucug

SEQ ID NO: 3942996 - RNA, 16 nt, Human adenovirus F
agcugcugccgcgucu

SEQ ID NO: 3942997 - RNA, 12 nt, Human adenovirus F
agcuggccuggu

SEQ ID NO: 3942998 - RNA, 23 nt, Human adenovirus F
agcugucuuaccaguuaaugcuu

SEQ ID NO: 3942999 - RNA, 17 nt, Human adenovirus F
agcuguuuaccaaaggc

SEQ ID NO: 3943000 - RNA, 14 nt, Human adenovirus F
agcuucucagcuca

SEQ ID NO: 3943001 - RNA, 22 nt, Human adenovirus F
agcuuuauuuccuuugucaugu

SEQ ID NO: 3943002 - RNA, 15 nt, Human adenovirus F
aggaaacgcugugag

SEQ ID NO: 3943003 - RNA, 20 nt, Human adenovirus F
aggaagaaaccaucgccagc

SEQ ID NO: 3943004 - RNA, 15 nt, Human adenovirus F
aggaagggcaaaggu

SEQ ID NO: 3943005 - RNA, 18 nt, Human adenovirus F
aggacagucugccaacac

SEQ ID NO: 3943006 - RNA, 18 nt, Human adenovirus F
aggacgucgggccaugcg

SEQ ID NO: 3943007 - RNA, 14 nt, Human adenovirus F
aggacguggaggaa

SEQ ID NO: 3943008 - RNA, 17 nt, Human adenovirus F
aggacuucaccuacaac

SEQ ID NO: 3943009 - RNA, 19 nt, Human adenovirus F
aggagcagauggagagcug

SEQ ID NO: 3943010 - RNA, 17 nt, Human adenovirus F
aggagcagcgggaagag

SEQ ID NO: 3943011 - RNA, 18 nt, Human adenovirus F
aggaggcuaauggccaga

SEQ ID NO: 3943012 - RNA, 18 nt, Human adenovirus F
aggaguuuguacccuccg

SEQ ID NO: 3943013 - RNA, 16 nt, Human adenovirus F
aggcaaaacuggaacg

SEQ ID NO: 3943014 - RNA, 14 nt, Human adenovirus F
aggcagcagggugc

SEQ ID NO: 3943015 - RNA, 19 nt, Human adenovirus F
aggcauuaggccgucccug

SEQ ID NO: 3943016 - RNA, 21 nt, Human adenovirus F
aggccagucggcaggcuuccu

SEQ ID NO: 3943017 - RNA, 20 nt, Human adenovirus F
aggccauccuggaccuggaa

SEQ ID NO: 3943018 - RNA, 12 nt, Human adenovirus F
aggccgcuccca

SEQ ID NO: 3943019 - RNA, 13 nt, Human adenovirus F
aggccuggaacag

SEQ ID NO: 3943020 - RNA, 21 nt, Human adenovirus F
aggcgagaaaauauggaggag

SEQ ID NO: 3943021 - RNA, 16 nt, Human adenovirus F
aggcgcaaucccaggc

SEQ ID NO: 3943022 - RNA, 16 nt, Human adenovirus F
aggcucucaaaaaacg

SEQ ID NO: 3943023 - RNA, 16 nt, Human adenovirus F
aggcucuucuuccucg

SEQ ID NO: 3943024 - RNA, 23 nt, Human adenovirus F
agggcacaguaaucaaggguuuc

SEQ ID NO: 3943025 - RNA, 14 nt, Human adenovirus F
agggccggccugga

SEQ ID NO: 3943026 - RNA, 18 nt, Human adenovirus F
agggcgucaugcucuggg

SEQ ID NO: 3943027 - RNA, 19 nt, Human adenovirus F
agggcgugcaagugggcuc

SEQ ID NO: 3943028 - RNA, 20 nt, Human adenovirus F
aggguaaggggcggagccua

SEQ ID NO: 3943029 - RNA, 15 nt, Human adenovirus F
aggguacuagcagug

SEQ ID NO: 3943030 - RNA, 22 nt, Human adenovirus F
agggucgauggagccagcguca

SEQ ID NO: 3943031 - RNA, 15 nt, Human adenovirus F
aggguguacguuugu

SEQ ID NO: 3943032 - RNA, 14 nt, Human adenovirus F
agggugucugccag

SEQ ID NO: 3943033 - RNA, 14 nt, Human adenovirus F
agguggaccccaug

SEQ ID NO: 3943034 - RNA, 16 nt, Human adenovirus F
agguuacucagcaauc

SEQ ID NO: 3943035 - RNA, 15 nt, Human adenovirus F
agguugacuugcagg

SEQ ID NO: 3943036 - RNA, 23 nt, Human adenovirus F
agguuugacagcauuaaccugua

SEQ ID NO: 3943037 - RNA, 14 nt, Human adenovirus F
aguaaaaagccuga

SEQ ID NO: 3943038 - RNA, 22 nt, Human adenovirus F
aguagguggggccccugaggca

SEQ ID NO: 3943039 - RNA, 16 nt, Human adenovirus F
aguauuacaaaugccu

SEQ ID NO: 3943040 - RNA, 12 nt, Human adenovirus F
agucaaaugucu

SEQ ID NO: 3943041 - RNA, 20 nt, Human adenovirus F
agucaaaugucuguaaagaa

SEQ ID NO: 3943042 - RNA, 18 nt, Human adenovirus F
aguccaaaugacuaacuc

SEQ ID NO: 3943043 - RNA, 12 nt, Human adenovirus F
agucugccaacg

SEQ ID NO: 3943044 - RNA, 15 nt, Human adenovirus F
agucuguuugguggg

SEQ ID NO: 3943045 - RNA, 19 nt, Human adenovirus F
agucuguuuggugggcuga

SEQ ID NO: 3943046 - RNA, 12 nt, Human adenovirus F
agugagcucuuc

SEQ ID NO: 3943047 - RNA, 15 nt, Human adenovirus F
agugaugcaccucuu

SEQ ID NO: 3943048 - RNA, 20 nt, Human adenovirus F
aguggaacuuccggaaggau

SEQ ID NO: 3943049 - RNA, 19 nt, Human adenovirus F
aguggacaaaccaaaacaa

SEQ ID NO: 3943050 - RNA, 18 nt, Human adenovirus F
aguggaguucagcgcgug

SEQ ID NO: 3943051 - RNA, 19 nt, Human adenovirus F
aguggcuucacggaaggaa

SEQ ID NO: 3943052 - RNA, 19 nt, Human adenovirus F
aguuaaccuugaguuuaau

SEQ ID NO: 3943053 - RNA, 15 nt, Human adenovirus F
aguuuaaaaacggug

SEQ ID NO: 3943054 - RNA, 16 nt, Human adenovirus F
aguuuuaauggaaacu

SEQ ID NO: 3943055 - RNA, 21 nt, Human adenovirus F
auaaaagcuucuaucugcaaa

SEQ ID NO: 3943056 - RNA, 15 nt, Human adenovirus F
auaagaagccagcca

SEQ ID NO: 3943057 - RNA, 15 nt, Human adenovirus F
auaaucuuaaaacug

SEQ ID NO: 3943058 - RNA, 19 nt, Human adenovirus F
auacagucaagcucuccac

SEQ ID NO: 3943059 - RNA, 13 nt, Human adenovirus F
auacgggaaggaa

SEQ ID NO: 3943060 - RNA, 20 nt, Human adenovirus F
auacgggguuagcgcacugg

SEQ ID NO: 3943061 - RNA, 15 nt, Human adenovirus F
auacguaaaugugcc

SEQ ID NO: 3943062 - RNA, 19 nt, Human adenovirus F
auacguuacucggagcugg

SEQ ID NO: 3943063 - RNA, 14 nt, Human adenovirus F
auacguuagagugg

SEQ ID NO: 3943064 - RNA, 13 nt, Human adenovirus F
auacugcuccugg

SEQ ID NO: 3943065 - RNA, 19 nt, Human adenovirus F
auagcaaaagcauuuuccu

SEQ ID NO: 3943066 - RNA, 18 nt, Human adenovirus F
auaggcauuaggccgucc

SEQ ID NO: 3943067 - RNA, 15 nt, Human adenovirus F
auauaggacaaaaaa

SEQ ID NO: 3943068 - RNA, 17 nt, Human adenovirus F
auaugucugccaaaaug

SEQ ID NO: 3943069 - RNA, 20 nt, Human adenovirus F
auauuauuuaaauaaaacau

SEQ ID NO: 3943070 - RNA, 14 nt, Human adenovirus F
aucacuguuaaugg

SEQ ID NO: 3943071 - RNA, 14 nt, Human adenovirus F
aucaucgccgccgc

SEQ ID NO: 3943072 - RNA, 24 nt, Human adenovirus F
aucauuuuaaaccaauuugcuaac

SEQ ID NO: 3943073 - RNA, 16 nt, Human adenovirus F
auccagcaacucugaa

SEQ ID NO: 3943074 - RNA, 13 nt, Human adenovirus F
aucccccgagcgc

SEQ ID NO: 3943075 - RNA, 16 nt, Human adenovirus F
aucccgcgcuaaaucu

SEQ ID NO: 3943076 - RNA, 19 nt, Human adenovirus F
auccucaagacuuggaaau

SEQ ID NO: 3943077 - RNA, 17 nt, Human adenovirus F
auccucagugucuugcc

SEQ ID NO: 3943078 - RNA, 23 nt, Human adenovirus F
auccuucagagcauugugguaca

SEQ ID NO: 3943079 - RNA, 15 nt, Human adenovirus F
aucgacgggcagugc

SEQ ID NO: 3943080 - RNA, 15 nt, Human adenovirus F
aucgccaacagcccc

SEQ ID NO: 3943081 - RNA, 16 nt, Human adenovirus F
aucgcugaccagcagc

SEQ ID NO: 3943082 - RNA, 19 nt, Human adenovirus F
aucgcuguggacgacagcc

SEQ ID NO: 3943083 - RNA, 16 nt, Human adenovirus F
aucggcaccagccagc

SEQ ID NO: 3943084 - RNA, 20 nt, Human adenovirus F
aucgugcgcgaacugggcug

SEQ ID NO: 3943085 - RNA, 17 nt, Human adenovirus F
aucuauuucuuugucua

SEQ ID NO: 3943086 - RNA, 16 nt, Human adenovirus F
aucuuaagcugcagcc

SEQ ID NO: 3943087 - RNA, 19 nt, Human adenovirus F
aucuuaagcugcagccaga

SEQ ID NO: 3943088 - RNA, 23 nt, Human adenovirus F
aucuugcaaaacuuucgcuccuu

SEQ ID NO: 3943089 - RNA, 17 nt, Human adenovirus F
augagacgugcgguggg

SEQ ID NO: 3943090 - RNA, 16 nt, Human adenovirus F
augagcugggagaaag

SEQ ID NO: 3943091 - RNA, 17 nt, Human adenovirus F
augagguuuacgcugac

SEQ ID NO: 3943092 - RNA, 18 nt, Human adenovirus F
augauguaacccaacagg

SEQ ID NO: 3943093 - RNA, 18 nt, Human adenovirus F
augcaacuuggaagggaa

SEQ ID NO: 3943094 - RNA, 20 nt, Human adenovirus F
augcagccauguuauggguc

SEQ ID NO: 3943095 - RNA, 16 nt, Human adenovirus F
augcaugcgaggggaa

SEQ ID NO: 3943096 - RNA, 15 nt, Human adenovirus F
augccucccuuugcc

SEQ ID NO: 3943097 - RNA, 11 nt, Human adenovirus F
augccugcagc

SEQ ID NO: 3943098 - RNA, 18 nt, Human adenovirus F
augccuuaacauuuaugc

SEQ ID NO: 3943099 - RNA, 13 nt, Human adenovirus F
augcgauuuucca

SEQ ID NO: 3943100 - RNA, 15 nt, Human adenovirus F
augcgcuccaacacu

SEQ ID NO: 3943101 - RNA, 20 nt, Human adenovirus F
augcgucgggcgugcgggug

SEQ ID NO: 3943102 - RNA, 13 nt, Human adenovirus F
augcuauuuucca

SEQ ID NO: 3943103 - RNA, 15 nt, Human adenovirus F
augcuggucugcgcu

SEQ ID NO: 3943104 - RNA, 18 nt, Human adenovirus F
augcuguagaauuuaugc

SEQ ID NO: 3943105 - RNA, 22 nt, Human adenovirus F
auggaaacugucaggcucugag

SEQ ID NO: 3943106 - RNA, 22 nt, Human adenovirus F
auggagcuauuuaaagugguga

SEQ ID NO: 3943107 - RNA, 23 nt, Human adenovirus F
auggcaauggcucuguggagaac

SEQ ID NO: 3943108 - RNA, 13 nt, Human adenovirus F
augggcaccugga

SEQ ID NO: 3943109 - RNA, 15 nt, Human adenovirus F
auggugguagaaggu

SEQ ID NO: 3943110 - RNA, 18 nt, Human adenovirus F
augguugaaaaagaucag

SEQ ID NO: 3943111 - RNA, 15 nt, Human adenovirus F
auguaaccacagaca

SEQ ID NO: 3943112 - RNA, 19 nt, Human adenovirus F
augugucuccgcugggaga

SEQ ID NO: 3943113 - RNA, 15 nt, Human adenovirus F
auuaccgucaucucu

SEQ ID NO: 3943114 - RNA, 17 nt, Human adenovirus F
auuacgucauugacauu

SEQ ID NO: 3943115 - RNA, 18 nt, Human adenovirus F
auucagggaucgcagcgg

SEQ ID NO: 3943116 - RNA, 24 nt, Human adenovirus F
auuccugggguagggugucugcca

SEQ ID NO: 3943117 - RNA, 19 nt, Human adenovirus F
auucuugagcaggccgccc

SEQ ID NO: 3943118 - RNA, 14 nt, Human adenovirus F
auuggcaugagugg

SEQ ID NO: 3943119 - RNA, 14 nt, Human adenovirus F
auuggucaaaaacu

SEQ ID NO: 3943120 - RNA, 22 nt, Human adenovirus F
auuuaaaguggugagguaugau

SEQ ID NO: 3943121 - RNA, 23 nt, Human adenovirus F
auuuaauggcacaguguuugcuu

SEQ ID NO: 3943122 - RNA, 15 nt, Human adenovirus F
auuucaccuacucug

SEQ ID NO: 3943123 - RNA, 18 nt, Human adenovirus F
auuucaccuacucuggcu

SEQ ID NO: 3943124 - RNA, 18 nt, Human adenovirus F
auuugugggacuuuaugg

SEQ ID NO: 3943125 - RNA, 17 nt, Human adenovirus F
auuuugcgucgcuggcu

SEQ ID NO: 3943126 - RNA, 17 nt, Human adenovirus F
caaaaacggggcuuuaa

SEQ ID NO: 3943127 - RNA, 18 nt, Human adenovirus F
caaaacuuucaacaaaaa

SEQ ID NO: 3943128 - RNA, 13 nt, Human adenovirus F
caaacaacugcaa

SEQ ID NO: 3943129 - RNA, 23 nt, Human adenovirus F
caaacaugugaccguguagccuu

SEQ ID NO: 3943130 - RNA, 14 nt, Human adenovirus F
caaacauugcaaaa

SEQ ID NO: 3943131 - RNA, 13 nt, Human adenovirus F
caaagaagagcug

SEQ ID NO: 3943132 - RNA, 17 nt, Human adenovirus F
caaaguccuggccaacu

SEQ ID NO: 3943133 - RNA, 21 nt, Human adenovirus F
caaagugcugucuagccgcac

SEQ ID NO: 3943134 - RNA, 15 nt, Human adenovirus F
caaaugcucugcaaa

SEQ ID NO: 3943135 - RNA, 21 nt, Human adenovirus F
caaaugucuuguggcugguga

SEQ ID NO: 3943136 - RNA, 14 nt, Human adenovirus F
caacacaggagcuu

SEQ ID NO: 3943137 - RNA, 12 nt, Human adenovirus F
caaccauguuca

SEQ ID NO: 3943138 - RNA, 15 nt, Human adenovirus F
caacccgucuucccu

SEQ ID NO: 3943139 - RNA, 14 nt, Human adenovirus F
caaccuucaagccc

SEQ ID NO: 3943140 - RNA, 11 nt, Human adenovirus F
caacgccaggc

SEQ ID NO: 3943141 - RNA, 14 nt, Human adenovirus F
caacggcaauccca

SEQ ID NO: 3943142 - RNA, 18 nt, Human adenovirus F
caacucauggugccaaag

SEQ ID NO: 3943143 - RNA, 13 nt, Human adenovirus F
caacuccucuugc

SEQ ID NO: 3943144 - RNA, 18 nt, Human adenovirus F
caacugccaccuccaccg

SEQ ID NO: 3943145 - RNA, 13 nt, Human adenovirus F
caagaaacacaaa

SEQ ID NO: 3943146 - RNA, 15 nt, Human adenovirus F
caagaaauacaaagg

SEQ ID NO: 3943147 - RNA, 21 nt, Human adenovirus F
caagaaggugcuuccagccuc

SEQ ID NO: 3943148 - RNA, 13 nt, Human adenovirus F
caagagccaccuu

SEQ ID NO: 3943149 - RNA, 22 nt, Human adenovirus F
caagauaugucugccaaaaugg

SEQ ID NO: 3943150 - RNA, 19 nt, Human adenovirus F
caagcccaauccucaagac

SEQ ID NO: 3943151 - RNA, 19 nt, Human adenovirus F
caaggacagucugccaaca

SEQ ID NO: 3943152 - RNA, 18 nt, Human adenovirus F
caaggcguaaagacugac

SEQ ID NO: 3943153 - RNA, 14 nt, Human adenovirus F
caaguacacugacc

SEQ ID NO: 3943154 - RNA, 23 nt, Human adenovirus F
caaguagggagugauggugggga

SEQ ID NO: 3943155 - RNA, 14 nt, Human adenovirus F
caaguuggugaugc

SEQ ID NO: 3943156 - RNA, 22 nt, Human adenovirus F
caauaagcagcuugaagaacug

SEQ ID NO: 3943157 - RNA, 20 nt, Human adenovirus F
caauauaaugacaaugucca

SEQ ID NO: 3943158 - RNA, 21 nt, Human adenovirus F
caaucagaccacaacaacaaa

SEQ ID NO: 3943159 - RNA, 18 nt, Human adenovirus F
caaucagcggcuggaaaa

SEQ ID NO: 3943160 - RNA, 15 nt, Human adenovirus F
caauccuaacaaaaa

SEQ ID NO: 3943161 - RNA, 14 nt, Human adenovirus F
caauggaacauuaa

SEQ ID NO: 3943162 - RNA, 15 nt, Human adenovirus F
caauuugcuaacacu

SEQ ID NO: 3943163 - RNA, 21 nt, Human adenovirus F
caauuuugcaaacuauucugg

SEQ ID NO: 3943164 - RNA, 20 nt, Human adenovirus F
cacaccucuccccaccgcug

SEQ ID NO: 3943165 - RNA, 23 nt, Human adenovirus F
cacacgucauccgccuccacccu

SEQ ID NO: 3943166 - RNA, 14 nt, Human adenovirus F
cacauugccagcua

SEQ ID NO: 3943167 - RNA, 17 nt, Human adenovirus F
caccaacgugcaggcca

SEQ ID NO: 3943168 - RNA, 21 nt, Human adenovirus F
caccaacgugcaggccaaccu

SEQ ID NO: 3943169 - RNA, 19 nt, Human adenovirus F
caccacauaagaagccagc

SEQ ID NO: 3943170 - RNA, 13 nt, Human adenovirus F
caccagccagcuc

SEQ ID NO: 3943171 - RNA, 20 nt, Human adenovirus F
caccagccgcaccgcggcgu

SEQ ID NO: 3943172 - RNA, 19 nt, Human adenovirus F
caccaggucguaaugagga

SEQ ID NO: 3943173 - RNA, 18 nt, Human adenovirus F
cacccucagacgacuggg

SEQ ID NO: 3943174 - RNA, 15 nt, Human adenovirus F
cacccuuucccaccc

SEQ ID NO: 3943175 - RNA, 24 nt, Human adenovirus F
caccgcccccacuguugccguggc

SEQ ID NO: 3943176 - RNA, 21 nt, Human adenovirus F
caccgccgcaccacugacagu

SEQ ID NO: 3943177 - RNA, 17 nt, Human adenovirus F
caccgcgcccguccucc

SEQ ID NO: 3943178 - RNA, 17 nt, Human adenovirus F
caccgcgcggcggccau

SEQ ID NO: 3943179 - RNA, 22 nt, Human adenovirus F
caccguuagcacugcgguggag

SEQ ID NO: 3943180 - RNA, 17 nt, Human adenovirus F
caccguucccacuguuu

SEQ ID NO: 3943181 - RNA, 16 nt, Human adenovirus F
caccguuguggaguca

SEQ ID NO: 3943182 - RNA, 19 nt, Human adenovirus F
caccucuguuugcugcacu

SEQ ID NO: 3943183 - RNA, 15 nt, Human adenovirus F
caccugcccuuccuc

SEQ ID NO: 3943184 - RNA, 21 nt, Human adenovirus F
caccugcccuuccucccaacu

SEQ ID NO: 3943185 - RNA, 23 nt, Human adenovirus F
caccuucagugucgucuacaacg

SEQ ID NO: 3943186 - RNA, 17 nt, Human adenovirus F
cacgcugacccuuccca

SEQ ID NO: 3943187 - RNA, 17 nt, Human adenovirus F
cacggaacccugccgcu

SEQ ID NO: 3943188 - RNA, 19 nt, Human adenovirus F
cacgguauagccggugcac

SEQ ID NO: 3943189 - RNA, 21 nt, Human adenovirus F
cacuaaccaggcgagcucagg

SEQ ID NO: 3943190 - RNA, 13 nt, Human adenovirus F
cacuaccacccuc

SEQ ID NO: 3943191 - RNA, 17 nt, Human adenovirus F
cacuaccccuaccaccc

SEQ ID NO: 3943192 - RNA, 17 nt, Human adenovirus F
cacuagcgccccugcag

SEQ ID NO: 3943193 - RNA, 12 nt, Human adenovirus F
cacuccugcagu

SEQ ID NO: 3943194 - RNA, 17 nt, Human adenovirus F
cacucuccgccgccgcu

SEQ ID NO: 3943195 - RNA, 22 nt, Human adenovirus F
cacugacuuccugguccugacu

SEQ ID NO: 3943196 - RNA, 23 nt, Human adenovirus F
cacugauguaacagcuuuggaag

SEQ ID NO: 3943197 - RNA, 21 nt, Human adenovirus F
cacugcauacaacucccuggc

SEQ ID NO: 3943198 - RNA, 17 nt, Human adenovirus F
cacugccuaccgcagcu

SEQ ID NO: 3943199 - RNA, 15 nt, Human adenovirus F
cacugcuaccuccuc

SEQ ID NO: 3943200 - RNA, 13 nt, Human adenovirus F
cacuggaugccac

SEQ ID NO: 3943201 - RNA, 15 nt, Human adenovirus F
cacuggcuggcccug

SEQ ID NO: 3943202 - RNA, 15 nt, Human adenovirus F
cacuuaccagagcca

SEQ ID NO: 3943203 - RNA, 15 nt, Human adenovirus F
cacuucuauugcacu

SEQ ID NO: 3943204 - RNA, 17 nt, Human adenovirus F
cagaaacaugccaccca

SEQ ID NO: 3943205 - RNA, 16 nt, Human adenovirus F
cagaagugaagaccaa

SEQ ID NO: 3943206 - RNA, 15 nt, Human adenovirus F
cagaccccauggaca

SEQ ID NO: 3943207 - RNA, 22 nt, Human adenovirus F
cagacggccguaccaagccuga

SEQ ID NO: 3943208 - RNA, 17 nt, Human adenovirus F
cagacuccgcugacggu

SEQ ID NO: 3943209 - RNA, 23 nt, Human adenovirus F
cagacucgagguguaacaucccu

SEQ ID NO: 3943210 - RNA, 20 nt, Human adenovirus F
cagagcucugcaaaaacaaa

SEQ ID NO: 3943211 - RNA, 22 nt, Human adenovirus F
cagaggaaguuucagacgagga

SEQ ID NO: 3943212 - RNA, 22 nt, Human adenovirus F
cagaucacggaacccugccgcu

SEQ ID NO: 3943213 - RNA, 13 nt, Human adenovirus F
cagcaaacacaaa

SEQ ID NO: 3943214 - RNA, 22 nt, Human adenovirus F
cagcaccgcacagaaagcucau

SEQ ID NO: 3943215 - RNA, 16 nt, Human adenovirus F
cagcagauccuucccg

SEQ ID NO: 3943216 - RNA, 16 nt, Human adenovirus F
cagcagccccaggcca

SEQ ID NO: 3943217 - RNA, 22 nt, Human adenovirus F
cagcaggugaaucccgcuaugu

SEQ ID NO: 3943218 - RNA, 18 nt, Human adenovirus F
cagcaguaucaguggagu

SEQ ID NO: 3943219 - RNA, 15 nt, Human adenovirus F
cagcaguccgucagc

SEQ ID NO: 3943220 - RNA, 19 nt, Human adenovirus F
cagcauaauaacucuggcu

SEQ ID NO: 3943221 - RNA, 17 nt, Human adenovirus F
cagcaugagcaagcgca

SEQ ID NO: 3943222 - RNA, 22 nt, Human adenovirus F
cagccaaugggcuccagcgagc

SEQ ID NO: 3943223 - RNA, 18 nt, Human adenovirus F
cagccauguuauggguca

SEQ ID NO: 3943224 - RNA, 16 nt, Human adenovirus F
cagcccagcgcccggg

SEQ ID NO: 3943225 - RNA, 15 nt, Human adenovirus F
cagccggaggagugg

SEQ ID NO: 3943226 - RNA, 20 nt, Human adenovirus F
cagccuccgguggcucugca

SEQ ID NO: 3943227 - RNA, 19 nt, Human adenovirus F
cagccugagcugccagagg

SEQ ID NO: 3943228 - RNA, 20 nt, Human adenovirus F
cagccugagcugccagaggc

SEQ ID NO: 3943229 - RNA, 13 nt, Human adenovirus F
cagcgcccgccuc

SEQ ID NO: 3943230 - RNA, 21 nt, Human adenovirus F
cagcgcccgggcccuggaggc

SEQ ID NO: 3943231 - RNA, 15 nt, Human adenovirus F
cagcgcgcuccauca

SEQ ID NO: 3943232 - RNA, 13 nt, Human adenovirus F
aacugcuccaucu

SEQ ID NO: 3943233 - RNA, 13 nt, Human adenovirus F
aacuuuguuauga

SEQ ID NO: 3943234 - RNA, 17 nt, Human adenovirus F
aagaagagcugcuggag

SEQ ID NO: 3943235 - RNA, 13 nt, Human adenovirus F
aagaagcacagga

SEQ ID NO: 3943236 - RNA, 13 nt, Human adenovirus F
aagaagugugugu

SEQ ID NO: 3943237 - RNA, 22 nt, Human adenovirus F
aagaaguuacaaucuccuagag

SEQ ID NO: 3943238 - RNA, 21 nt, Human adenovirus F
aagaauacuaaaacaaaccac

SEQ ID NO: 3943239 - RNA, 21 nt, Human adenovirus F
aagcaauauugucgcaugccu

SEQ ID NO: 3943240 - RNA, 16 nt, Human adenovirus F
aagccugacucagaaa

SEQ ID NO: 3943241 - RNA, 17 nt, Human adenovirus F
aagcuacaaggacagga

SEQ ID NO: 3943242 - RNA, 21 nt, Human adenovirus F
aagcuucuuguacucaaaugu

SEQ ID NO: 3943243 - RNA, 21 nt, Human adenovirus F
aaggaggaggcuaauggccag

SEQ ID NO: 3943244 - RNA, 21 nt, Human adenovirus F
aaggauuuugccggcucuagg

SEQ ID NO: 3943245 - RNA, 12 nt, Human adenovirus F
aaggcgaaaagc

SEQ ID NO: 3943246 - RNA, 20 nt, Human adenovirus F
aaggucagaaaaaccgccac

SEQ ID NO: 3943247 - RNA, 20 nt, Human adenovirus F
aagguugacuugcaggagac

SEQ ID NO: 3943248 - RNA, 21 nt, Human adenovirus F
aagucauuugguaacaaggcc

SEQ ID NO: 3943249 - RNA, 15 nt, Human adenovirus F
aaguccuggccaacu

SEQ ID NO: 3943250 - RNA, 21 nt, Human adenovirus F
aagugcagaggcguacaugcc

SEQ ID NO: 3943251 - RNA, 16 nt, Human adenovirus F
aaguggaucccagcgu

SEQ ID NO: 3943252 - RNA, 13 nt, Human adenovirus F
aaguuacaaaaug

SEQ ID NO: 3943253 - RNA, 13 nt, Human adenovirus F
aaguuucgggcgc

SEQ ID NO: 3943254 - RNA, 13 nt, Human adenovirus F
aauaaagcuuacc

SEQ ID NO: 3943255 - RNA, 12 nt, Human adenovirus F
aauaagcugggu

SEQ ID NO: 3943256 - RNA, 20 nt, Human adenovirus F
aauaauuuuccgcuugccac

SEQ ID NO: 3943257 - RNA, 15 nt, Human adenovirus F
aauagauagcuuuua

SEQ ID NO: 3943258 - RNA, 13 nt, Human adenovirus F
aauauuaaugccc

SEQ ID NO: 3943259 - RNA, 15 nt, Human adenovirus F
aaucaaggccaaagu

SEQ ID NO: 3943260 - RNA, 21 nt, Human adenovirus F
aaucacgaccucccaaagucc

SEQ ID NO: 3943261 - RNA, 13 nt, Human adenovirus F
aaucaggagaaaa

SEQ ID NO: 3943262 - RNA, 18 nt, Human adenovirus F
aaucagggcgugcaagug

SEQ ID NO: 3943263 - RNA, 18 nt, Human adenovirus F
aaucccgaagccuucagg

SEQ ID NO: 3943264 - RNA, 18 nt, Human adenovirus F
aaucuaccacagaaaugu

SEQ ID NO: 3943265 - RNA, 19 nt, Human adenovirus F
aaucucuucguccuggagu

SEQ ID NO: 3943266 - RNA, 14 nt, Human adenovirus F
aaucuucaaacauu

SEQ ID NO: 3943267 - RNA, 17 nt, Human adenovirus F
aaucuuccucccaaagu

SEQ ID NO: 3943268 - RNA, 22 nt, Human adenovirus F
aaugccuaccucugacaaacac

SEQ ID NO: 3943269 - RNA, 17 nt, Human adenovirus F
aaugcuccgggauaagc

SEQ ID NO: 3943270 - RNA, 22 nt, Human adenovirus F
aaugcuccgggauaagcuaaag

SEQ ID NO: 3943271 - RNA, 16 nt, Human adenovirus F
aauggagcuguggugc

SEQ ID NO: 3943272 - RNA, 16 nt, Human adenovirus F
aauggcagcccagcgc

SEQ ID NO: 3943273 - RNA, 24 nt, Human adenovirus F
aauguaacaugaccaaggacuggu

SEQ ID NO: 3943274 - RNA, 14 nt, Human adenovirus F
aauguaacucuccc

SEQ ID NO: 3943275 - RNA, 13 nt, Human adenovirus F
aauucugaagagg

SEQ ID NO: 3943276 - RNA, 19 nt, Human adenovirus F
aauuuaugccuagcucuaa

SEQ ID NO: 3943277 - RNA, 20 nt, Human adenovirus F
aauuuugcgucgcuggcucc

SEQ ID NO: 3943278 - RNA, 15 nt, Human adenovirus F
aauuuuucgaggaaa

SEQ ID NO: 3943279 - RNA, 13 nt, Human adenovirus F
acaaaaacuccaa

SEQ ID NO: 3943280 - RNA, 14 nt, Human adenovirus F
acaaaauaaugacu

SEQ ID NO: 3943281 - RNA, 19 nt, Human adenovirus F
acaaagucauccaaaucau

SEQ ID NO: 3943282 - RNA, 19 nt, Human adenovirus F
acaacacaggagcuuuaca

SEQ ID NO: 3943283 - RNA, 23 nt, Human adenovirus F
acaaccagcuuaguauuaacacu

SEQ ID NO: 3943284 - RNA, 17 nt, Human adenovirus F
acaacguggcucaaugu

SEQ ID NO: 3943285 - RNA, 22 nt, Human adenovirus F
acaacguggcucaauguaacau

SEQ ID NO: 3943286 - RNA, 12 nt, Human adenovirus F
acaacuacggag

SEQ ID NO: 3943287 - RNA, 20 nt, Human adenovirus F
acaaggacagucugccaaca

SEQ ID NO: 3943288 - RNA, 12 nt, Human adenovirus F
acaaggccugga

SEQ ID NO: 3943289 - RNA, 17 nt, Human adenovirus F
acaaucgcgauguguuu

SEQ ID NO: 3943290 - RNA, 21 nt, Human adenovirus F
acacagaacaaaacacacucc

SEQ ID NO: 3943291 - RNA, 14 nt, Human adenovirus F
acaccggugggcuu

SEQ ID NO: 3943292 - RNA, 16 nt, Human adenovirus F
acaccggugggcuugu

SEQ ID NO: 3943293 - RNA, 18 nt, Human adenovirus F
acaccugggaaaaccugu

SEQ ID NO: 3943294 - RNA, 21 nt, Human adenovirus F
acacuaugguaaaaacccugu

SEQ ID NO: 3943295 - RNA, 15 nt, Human adenovirus F
acacuuucaccgccu

SEQ ID NO: 3943296 - RNA, 22 nt, Human adenovirus F
acagaccgcaggacuuggcaga

SEQ ID NO: 3943297 - RNA, 14 nt, Human adenovirus F
acagagcuuuauga

SEQ ID NO: 3943298 - RNA, 22 nt, Human adenovirus F
acagccuguuacuauuaaugca

SEQ ID NO: 3943299 - RNA, 14 nt, Human adenovirus F
acaggugggcuugg

SEQ ID NO: 3943300 - RNA, 22 nt, Human adenovirus F
acaguggaauuggaaugccugc

SEQ ID NO: 3943301 - RNA, 15 nt, Human adenovirus F
acauaacuuuacaaa

SEQ ID NO: 3943302 - RNA, 16 nt, Human adenovirus F
acauaucgucacuucc

SEQ ID NO: 3943303 - RNA, 18 nt, Human adenovirus F
acaucaauuuugcgucgc

SEQ ID NO: 3943304 - RNA, 22 nt, Human adenovirus F
acaugggggcggaccugcaaug

SEQ ID NO: 3943305 - RNA, 17 nt, Human adenovirus F
acauguuugucuuuaaa

SEQ ID NO: 3943306 - RNA, 15 nt, Human adenovirus F
accaaacagguauaa

SEQ ID NO: 3943307 - RNA, 18 nt, Human adenovirus F
accaaagagcuugaacau

SEQ ID NO: 3943308 - RNA, 12 nt, Human adenovirus F
accaaagguggu

SEQ ID NO: 3943309 - RNA, 22 nt, Human adenovirus F
accaacgaggccuuucacccag

SEQ ID NO: 3943310 - RNA, 15 nt, Human adenovirus F
accacccccaacucu

SEQ ID NO: 3943311 - RNA, 18 nt, Human adenovirus F
accaccccuagucccucc

SEQ ID NO: 3943312 - RNA, 19 nt, Human adenovirus F
accaccccuagucccuccu

SEQ ID NO: 3943313 - RNA, 14 nt, Human adenovirus F
accacccuagcauu

SEQ ID NO: 3943314 - RNA, 15 nt, Human adenovirus F
accaccgcaaacaac

SEQ ID NO: 3943315 - RNA, 13 nt, Human adenovirus F
accaggccuugca

SEQ ID NO: 3943316 - RNA, 16 nt, Human adenovirus F
accaguccgggccaga

SEQ ID NO: 3943317 - RNA, 12 nt, Human adenovirus F
accagugggcuc

SEQ ID NO: 3943318 - RNA, 22 nt, Human adenovirus F
accccacgccaagccugaagcc

SEQ ID NO: 3943319 - RNA, 15 nt, Human adenovirus F
accccgucacucucc

SEQ ID NO: 3943320 - RNA, 17 nt, Human adenovirus F
accccuaugacaccucc

SEQ ID NO: 3943321 - RNA, 14 nt, Human adenovirus F
accccuuugugccc

SEQ ID NO: 3943322 - RNA, 13 nt, Human adenovirus F
acccucaaacacu

SEQ ID NO: 3943323 - RNA, 18 nt, Human adenovirus F
acccucaaacacugcgca

SEQ ID NO: 3943324 - RNA, 19 nt, Human adenovirus F
acccuccaguuuguggagg

SEQ ID NO: 3943325 - RNA, 14 nt, Human adenovirus F
accgccaaaaaagc

SEQ ID NO: 3943326 - RNA, 19 nt, Human adenovirus F
accgccaaaaaagcagccu

SEQ ID NO: 3943327 - RNA, 13 nt, Human adenovirus F
accgccaauuuuu

SEQ ID NO: 3943328 - RNA, 19 nt, Human adenovirus F
accgccuuggccagcagcc

SEQ ID NO: 3943329 - RNA, 23 nt, Human adenovirus F
accgcggcuugucgcagaaucuc

SEQ ID NO: 3943330 - RNA, 23 nt, Human adenovirus F
accgcuaauuuuucaccaaaggu

SEQ ID NO: 3943331 - RNA, 12 nt, Human adenovirus F
accucccaaagu

SEQ ID NO: 3943332 - RNA, 18 nt, Human adenovirus F
accuccgacgcuugcugg

SEQ ID NO: 3943333 - RNA, 12 nt, Human adenovirus F
accucugcgcug

SEQ ID NO: 3943334 - RNA, 17 nt, Human adenovirus F
accucuucuucuuccuc

SEQ ID NO: 3943335 - RNA, 20 nt, Human adenovirus F
accugaaaaccauuuugcgc

SEQ ID NO: 3943336 - RNA, 15 nt, Human adenovirus F
accugaaccacacuu

SEQ ID NO: 3943337 - RNA, 22 nt, Human adenovirus F
accuuaaccacccccaacucug

SEQ ID NO: 3943338 - RNA, 21 nt, Human adenovirus F
accuucaagcccuacaccaau

SEQ ID NO: 3943339 - RNA, 22 nt, Human adenovirus F
acgaagcuagcauaaaagaagc

SEQ ID NO: 3943340 - RNA, 17 nt, Human adenovirus F
acgacgagcuugcucgc

SEQ ID NO: 3943341 - RNA, 20 nt, Human adenovirus F
acgagaucggcaccagccag

SEQ ID NO: 3943342 - RNA, 15 nt, Human adenovirus F
acgagcuugcucgcu

SEQ ID NO: 3943343 - RNA, 21 nt, Human adenovirus F
acgccaagccugaagcccgca

SEQ ID NO: 3943344 - RNA, 16 nt, Human adenovirus F
acgccacuuuuuauga

SEQ ID NO: 3943345 - RNA, 20 nt, Human adenovirus F
acgccuuacauguggagcua

SEQ ID NO: 3943346 - RNA, 16 nt, Human adenovirus F
acgcuguaccaggagg

SEQ ID NO: 3943347 - RNA, 14 nt, Human adenovirus F
acggaaacaaaaaa

SEQ ID NO: 3943348 - RNA, 17 nt, Human adenovirus F
acggaaggaaacgcugu

SEQ ID NO: 3943349 - RNA, 21 nt, Human adenovirus F
acggaagggcggaacagcaua

SEQ ID NO: 3943350 - RNA, 17 nt, Human adenovirus F
acggcaaggaaccagug

SEQ ID NO: 3943351 - RNA, 19 nt, Human adenovirus F
acggccguaccaagccuga

SEQ ID NO: 3943352 - RNA, 16 nt, Human adenovirus F
acggcgcagcagaucc

SEQ ID NO: 3943353 - RNA, 16 nt, Human adenovirus F
acggcguucuagccaa

SEQ ID NO: 3943354 - RNA, 15 nt, Human adenovirus F
acgggagggacaagc

SEQ ID NO: 3943355 - RNA, 15 nt, Human adenovirus F
acggguucucgccuc

SEQ ID NO: 3943356 - RNA, 23 nt, Human adenovirus F
acgguugcccgccagcuggcaaa

SEQ ID NO: 3943357 - RNA, 15 nt, Human adenovirus F
acguaaccuuguauu

SEQ ID NO: 3943358 - RNA, 21 nt, Human adenovirus F
acguaccaaccggagccucaa

SEQ ID NO: 3943359 - RNA, 24 nt, Human adenovirus F
acguaccagaaagcuacaaggaca

SEQ ID NO: 3943360 - RNA, 19 nt, Human adenovirus F
acgugagagaggcgguggc

SEQ ID NO: 3943361 - RNA, 23 nt, Human adenovirus F
acgugagagaggcgguggcgcag

SEQ ID NO: 3943362 - RNA, 19 nt, Human adenovirus F
acguggucauugggcuugu

SEQ ID NO: 3943363 - RNA, 17 nt, Human adenovirus F
acguuugacaaacgcuu

SEQ ID NO: 3943364 - RNA, 20 nt, Human adenovirus F
acuaaacauugauaaaaaug

SEQ ID NO: 3943365 - RNA, 12 nt, Human adenovirus F
acuagcgccccu

SEQ ID NO: 3943366 - RNA, 22 nt, Human adenovirus F
acucauuuuuucaagaaauugu

SEQ ID NO: 3943367 - RNA, 21 nt, Human adenovirus F
acuccucugugagcuggccug

SEQ ID NO: 3943368 - RNA, 23 nt, Human adenovirus F
acuccuuggguuuagccacaucc

SEQ ID NO: 3943369 - RNA, 18 nt, Human adenovirus F
acuccuuuggacaagcuc

SEQ ID NO: 3943370 - RNA, 21 nt, Human adenovirus F
acucgcagcguugcacgcucu

SEQ ID NO: 3943371 - RNA, 15 nt, Human adenovirus F
acucuuacaaaauaa

SEQ ID NO: 3943372 - RNA, 13 nt, Human adenovirus F
acucuugcuggac

SEQ ID NO: 3943373 - RNA, 14 nt, Human adenovirus F
acugaaagccagcc

SEQ ID NO: 3943374 - RNA, 13 nt, Human adenovirus F
acugccaccucca

SEQ ID NO: 3943375 - RNA, 19 nt, Human adenovirus F
acugcgucgucggcucugg

SEQ ID NO: 3943376 - RNA, 22 nt, Human adenovirus F
acugcuaaagggaacugccagu

SEQ ID NO: 3943377 - RNA, 17 nt, Human adenovirus F
acugcuaccuccuccgu

SEQ ID NO: 3943378 - RNA, 18 nt, Human adenovirus F
acugcuagaaugucacug

SEQ ID NO: 3943379 - RNA, 13 nt, Human adenovirus F
acuggccgcgucu

SEQ ID NO: 3943380 - RNA, 17 nt, Human adenovirus F
acuggcuggcccuggcc

SEQ ID NO: 3943381 - RNA, 19 nt, Human adenovirus F
acuggcuggcccuggccug

SEQ ID NO: 3943382 - RNA, 20 nt, Human adenovirus F
acuggcuggcccuggccugg

SEQ ID NO: 3943383 - RNA, 17 nt, Human adenovirus F
acugucaggcucugaga

SEQ ID NO: 3943384 - RNA, 17 nt, Human adenovirus F
acuguugccguggcuac

SEQ ID NO: 3943385 - RNA, 16 nt, Human adenovirus F
acuuaaacccacagcu

SEQ ID NO: 3943386 - RNA, 14 nt, Human adenovirus F
acuucagccugggg

SEQ ID NO: 3943387 - RNA, 15 nt, Human adenovirus F
acuucagccugggga

SEQ ID NO: 3943388 - RNA, 14 nt, Human adenovirus F
acuucuuaauaaag

SEQ ID NO: 3943389 - RNA, 20 nt, Human adenovirus F
acuuuugagguggaccccau

SEQ ID NO: 3943390 - RNA, 12 nt, Human adenovirus F
acuuuuucccca

SEQ ID NO: 3943391 - RNA, 12 nt, Human adenovirus F
agaacaaaacac

SEQ ID NO: 3943392 - RNA, 20 nt, Human adenovirus F
agaaccguaccugcuaccuc

SEQ ID NO: 3943393 - RNA, 23 nt, Human adenovirus F
agaacuuccagcuguuggagaau

SEQ ID NO: 3943394 - RNA, 22 nt, Human adenovirus F
agacauucuugagcaggccgcc

SEQ ID NO: 3943395 - RNA, 13 nt, Human adenovirus F
agaccucaccucg

SEQ ID NO: 3943396 - RNA, 14 nt, Human adenovirus F
agaccuuccaggaa

SEQ ID NO: 3943397 - RNA, 16 nt, Human adenovirus F
agacgacugggcggcg

SEQ ID NO: 3943398 - RNA, 20 nt, Human adenovirus F
agacgcucaccgcccaggga

SEQ ID NO: 3943399 - RNA, 23 nt, Human adenovirus F
agacuccgcugacgguggaggaa

SEQ ID NO: 3943400 - RNA, 19 nt, Human adenovirus F
agacuuugucagccaaagu

SEQ ID NO: 3943401 - RNA, 21 nt, Human adenovirus F
agagcauugugguacaggagc

SEQ ID NO: 3943402 - RNA, 23 nt, Human adenovirus F
agagccgcggucaacagcuggaa

SEQ ID NO: 3943403 - RNA, 15 nt, Human adenovirus F
agagcuaaggaggag

SEQ ID NO: 3943404 - RNA, 23 nt, Human adenovirus F
agaggcguucgacgcgaggauga

SEQ ID NO: 3943405 - RNA, 21 nt, Human adenovirus F
agaguaaaaaaaagggaaguu

SEQ ID NO: 3943406 - RNA, 15 nt, Human adenovirus F
agauccguggagccg

SEQ ID NO: 3943407 - RNA, 12 nt, Human adenovirus F
agaugaggagga

SEQ ID NO: 3943408 - RNA, 14 nt, Human adenovirus F
agaugcccuguccg

SEQ ID NO: 3943409 - RNA, 13 nt, Human adenovirus F
agauuugacgaaa

SEQ ID NO: 3943410 - RNA, 14 nt, Human adenovirus F
agauuuuggacugu

SEQ ID NO: 3943411 - RNA, 23 nt, Human adenovirus F
agcaagcccauucugccaguugg

SEQ ID NO: 3943412 - RNA, 20 nt, Human adenovirus F
agcaccaacgugcaggccaa

SEQ ID NO: 3943413 - RNA, 18 nt, Human adenovirus F
agcagccccaggccaacc

SEQ ID NO: 3943414 - RNA, 15 nt, Human adenovirus F
agcauaauaacucug

SEQ ID NO: 3943415 - RNA, 22 nt, Human adenovirus F
agcauuuauaaucaugcaauag

SEQ ID NO: 3943416 - RNA, 16 nt, Human adenovirus F
agccacauccgcuccu

SEQ ID NO: 3943417 - RNA, 17 nt, Human adenovirus F
agccagccaaugggcuc

SEQ ID NO: 3943418 - RNA, 16 nt, Human adenovirus F
agccauccgcaaggau

SEQ ID NO: 3943419 - RNA, 15 nt, Human adenovirus F
agcccaacaccacca

SEQ ID NO: 3943420 - RNA, 13 nt, Human adenovirus F
agccccaggccaa

SEQ ID NO: 3943421 - RNA, 14 nt, Human adenovirus F
agccccaggccaac

SEQ ID NO: 3943422 - RNA, 22 nt, Human adenovirus F
agccccccucguacgagcaggc

SEQ ID NO: 3943423 - RNA, 16 nt, Human adenovirus F
agcccgcaacggcgca

SEQ ID NO: 3943424 - RNA, 17 nt, Human adenovirus F
agcccgcaacggcgcag

SEQ ID NO: 3943425 - RNA, 14 nt, Human adenovirus F
agcccgggccuggu

SEQ ID NO: 3943426 - RNA, 16 nt, Human adenovirus F
agccgaugcccaacgc

SEQ ID NO: 3943427 - RNA, 14 nt, Human adenovirus F
agccgccagccucc

SEQ ID NO: 3943428 - RNA, 19 nt, Human adenovirus F
agccgcggucaacagcugg

SEQ ID NO: 3943429 - RNA, 22 nt, Human adenovirus F
agccguccacgcucccggaaau

SEQ ID NO: 3943430 - RNA, 15 nt, Human adenovirus F
agccgugaagccaaa

SEQ ID NO: 3943431 - RNA, 20 nt, Human adenovirus F
agccugagcugccagaggcc

SEQ ID NO: 3943432 - RNA, 23 nt, Human adenovirus F
agccuguguuaucacccaaagcc

SEQ ID NO: 3943433 - RNA, 18 nt, Human adenovirus F
agccuuuguuccuuccga

SEQ ID NO: 3943434 - RNA, 17 nt, Human adenovirus F
agcgacaaggcaccauc

SEQ ID NO: 3943435 - RNA, 19 nt, Human adenovirus F
agcgcagucuaagccuggc

SEQ ID NO: 3943436 - RNA, 17 nt, Human adenovirus F
agcgcccgggcccugga

SEQ ID NO: 3943437 - RNA, 23 nt, Human adenovirus F
agcgccgcuugcaagauggccac

SEQ ID NO: 3943438 - RNA, 22 nt, Human adenovirus F
agcgcgcuauaauagcaccaac

SEQ ID NO: 3943439 - RNA, 18 nt, Human adenovirus F
agcgugguaaaagggugc

SEQ ID NO: 3943440 - RNA, 13 nt, Human adenovirus F
agcguguucccaa

SEQ ID NO: 3943441 - RNA, 15 nt, Human adenovirus F
gcucagccccgccgg

SEQ ID NO: 3943442 - RNA, 21 nt, Human adenovirus F
gcucaggaaccaccaccgaaa

SEQ ID NO: 3943443 - RNA, 14 nt, Human adenovirus F
gcucaucugcggcc

SEQ ID NO: 3943444 - RNA, 23 nt, Human adenovirus F
gcuccggguugggcgcuugccag

SEQ ID NO: 3943445 - RNA, 15 nt, Human adenovirus F
gcuccuggguaacgg

SEQ ID NO: 3943446 - RNA, 18 nt, Human adenovirus F
gcuccuuuguacucgagc

SEQ ID NO: 3943447 - RNA, 13 nt, Human adenovirus F
gcucgcuggcuag

SEQ ID NO: 3943448 - RNA, 15 nt, Human adenovirus F
gcucgucguggcaug

SEQ ID NO: 3943449 - RNA, 23 nt, Human adenovirus F
gcucugguagaaagcaaagccau

SEQ ID NO: 3943450 - RNA, 22 nt, Human adenovirus F
gcugacgaagacauucuugagc

SEQ ID NO: 3943451 - RNA, 20 nt, Human adenovirus F
gcugagcguucucgcucgcu

SEQ ID NO: 3943452 - RNA, 16 nt, Human adenovirus F
gcugcagccagacucc

SEQ ID NO: 3943453 - RNA, 14 nt, Human adenovirus F
gcuggaccaaagca

SEQ ID NO: 3943454 - RNA, 17 nt, Human adenovirus F
gcuggggaauggagcug

SEQ ID NO: 3943455 - RNA, 14 nt, Human adenovirus F
gcuguaccaggagg

SEQ ID NO: 3943456 - RNA, 21 nt, Human adenovirus F
gcugucguuaguggaggcagc

SEQ ID NO: 3943457 - RNA, 20 nt, Human adenovirus F
gcugucucaccuacuaccac

SEQ ID NO: 3943458 - RNA, 22 nt, Human adenovirus F
gcuguggugcgguuucaaacau

SEQ ID NO: 3943459 - RNA, 18 nt, Human adenovirus F
gcugugucagcuaacucu

SEQ ID NO: 3943460 - RNA, 18 nt, Human adenovirus F
gcuuacucuuucuuacaa

SEQ ID NO: 3943461 - RNA, 20 nt, Human adenovirus F
gcuuaucccgcgcuaaaucu

SEQ ID NO: 3943462 - RNA, 15 nt, Human adenovirus F
gcuuccggcauuaac

SEQ ID NO: 3943463 - RNA, 14 nt, Human adenovirus F
gcuuggaggagcug

SEQ ID NO: 3943464 - RNA, 13 nt, Human adenovirus F
gcuugggaggauu

SEQ ID NO: 3943465 - RNA, 18 nt, Human adenovirus F
gcuugggggcgccauccc

SEQ ID NO: 3943466 - RNA, 16 nt, Human adenovirus F
gcuuucaguuggagca

SEQ ID NO: 3943467 - RNA, 13 nt, Human adenovirus F
ggaaacugaugcu

SEQ ID NO: 3943468 - RNA, 17 nt, Human adenovirus F
ggaaagacaguggcgcg

SEQ ID NO: 3943469 - RNA, 15 nt, Human adenovirus F
ggaaaucagaugcau

SEQ ID NO: 3943470 - RNA, 19 nt, Human adenovirus F
ggaagccccacggcauggg

SEQ ID NO: 3943471 - RNA, 12 nt, Human adenovirus F
ggaagggaaggc

SEQ ID NO: 3943472 - RNA, 14 nt, Human adenovirus F
ggaauggagcugug

SEQ ID NO: 3943473 - RNA, 20 nt, Human adenovirus F
ggacacggggucuauuugga

SEQ ID NO: 3943474 - RNA, 15 nt, Human adenovirus F
ggacagcaggccgcu

SEQ ID NO: 3943475 - RNA, 21 nt, Human adenovirus F
ggacagccuagacgaggagga

SEQ ID NO: 3943476 - RNA, 22 nt, Human adenovirus F
ggaccccauggaugagcccaca

SEQ ID NO: 3943477 - RNA, 20 nt, Human adenovirus F
ggacccuucaacggaauugu

SEQ ID NO: 3943478 - RNA, 14 nt, Human adenovirus F
ggaccuuggccacc

SEQ ID NO: 3943479 - RNA, 21 nt, Human adenovirus F
ggacgccgaggcacuguucaa

SEQ ID NO: 3943480 - RNA, 23 nt, Human adenovirus F
ggagagcgguccgucacgcgggc

SEQ ID NO: 3943481 - RNA, 14 nt, Human adenovirus F
ggagcagcgggaag

SEQ ID NO: 3943482 - RNA, 18 nt, Human adenovirus F
ggagcucgucguggcaug

SEQ ID NO: 3943483 - RNA, 20 nt, Human adenovirus F
ggaggaaguagguggggccc

SEQ ID NO: 3943484 - RNA, 22 nt, Human adenovirus F
ggaggauuuugaguuagcucug

SEQ ID NO: 3943485 - RNA, 15 nt, Human adenovirus F
ggaggcagcagagga

SEQ ID NO: 3943486 - RNA, 22 nt, Human adenovirus F
ggaggcagugguggaugggggu

SEQ ID NO: 3943487 - RNA, 19 nt, Human adenovirus F
ggaggccauccuggaccug

SEQ ID NO: 3943488 - RNA, 19 nt, Human adenovirus F
ggaggugccccagagugag

SEQ ID NO: 3943489 - RNA, 13 nt, Human adenovirus F
ggagugccgccgg

SEQ ID NO: 3943490 - RNA, 20 nt, Human adenovirus F
ggagugccgccggugauggc

SEQ ID NO: 3943491 - RNA, 21 nt, Human adenovirus F
ggaguucuccguguccugcgc

SEQ ID NO: 3943492 - RNA, 17 nt, Human adenovirus F
ggaguuggaggagaugg

SEQ ID NO: 3943493 - RNA, 18 nt, Human adenovirus F
ggaguuggcuucugccag

SEQ ID NO: 3943494 - RNA, 21 nt, Human adenovirus F
ggaucccucagagcugcaaga

SEQ ID NO: 3943495 - RNA, 15 nt, Human adenovirus F
ggcaacguucagcca

SEQ ID NO: 3943496 - RNA, 20 nt, Human adenovirus F
ggcacaguaaucaaggguuu

SEQ ID NO: 3943497 - RNA, 13 nt, Human adenovirus F
ggcaccagccagc

SEQ ID NO: 3943498 - RNA, 14 nt, Human adenovirus F
ggcaccagccagcu

SEQ ID NO: 3943499 - RNA, 20 nt, Human adenovirus F
ggcacuugaacauucuugcg

SEQ ID NO: 3943500 - RNA, 13 nt, Human adenovirus F
ggcagcagggugc

SEQ ID NO: 3943501 - RNA, 16 nt, Human adenovirus F
ggcagcgacagggcgc

SEQ ID NO: 3943502 - RNA, 22 nt, Human adenovirus F
ggcaggcuuccuuaacaagggc

SEQ ID NO: 3943503 - RNA, 13 nt, Human adenovirus F
ggcauguuuucuc

SEQ ID NO: 3943504 - RNA, 15 nt, Human adenovirus F
ggccauccuggaccu

SEQ ID NO: 3943505 - RNA, 13 nt, Human adenovirus F
ggcccuagaccac

SEQ ID NO: 3943506 - RNA, 14 nt, Human adenovirus F
ggcccugcaaagcc

SEQ ID NO: 3943507 - RNA, 21 nt, Human adenovirus F
ggccgcggcggcuauugccag

SEQ ID NO: 3943508 - RNA, 17 nt, Human adenovirus F
ggccguaccaagccuga

SEQ ID NO: 3943509 - RNA, 17 nt, Human adenovirus F
ggccguuuaugggcacc

SEQ ID NO: 3943510 - RNA, 22 nt, Human adenovirus F
ggccuacggaagggcggaacag

SEQ ID NO: 3943511 - RNA, 13 nt, Human adenovirus F
ggccugguaacga

SEQ ID NO: 3943512 - RNA, 18 nt, Human adenovirus F
ggccuguuuuugagcaca

SEQ ID NO: 3943513 - RNA, 23 nt, Human adenovirus F
ggcgacgacggauuuuuguggga

SEQ ID NO: 3943514 - RNA, 18 nt, Human adenovirus F
ggcgaggggcuggcccgc

SEQ ID NO: 3943515 - RNA, 14 nt, Human adenovirus F
ggcgcaaucuucgc

SEQ ID NO: 3943516 - RNA, 21 nt, Human adenovirus F
ggcgcagcguccgcacgguuu

SEQ ID NO: 3943517 - RNA, 21 nt, Human adenovirus F
ggcgcuuucaguuggagcagc

SEQ ID NO: 3943518 - RNA, 14 nt, Human adenovirus F
ggcggaggagcaga

SEQ ID NO: 3943519 - RNA, 16 nt, Human adenovirus F
ggcggcaacauuccug

SEQ ID NO: 3943520 - RNA, 18 nt, Human adenovirus F
ggcggcccugcaaagcca

SEQ ID NO: 3943521 - RNA, 19 nt, Human adenovirus F
ggcggcgaccugaaaacca

SEQ ID NO: 3943522 - RNA, 22 nt, Human adenovirus F
ggcggggacguaaaguccagcg

SEQ ID NO: 3943523 - RNA, 18 nt, Human adenovirus F
ggcucaauguaacaugac

SEQ ID NO: 3943524 - RNA, 17 nt, Human adenovirus F
ggcucagccccgccggg

SEQ ID NO: 3943525 - RNA, 22 nt, Human adenovirus F
ggcuccgacgcuuggcaccgcc

SEQ ID NO: 3943526 - RNA, 23 nt, Human adenovirus F
ggcuccgacgcuuggcaccgccg

SEQ ID NO: 3943527 - RNA, 21 nt, Human adenovirus F
ggcucugcagcagcgcccgcc

SEQ ID NO: 3943528 - RNA, 20 nt, Human adenovirus F
ggcuugugcggcuuuucgca

SEQ ID NO: 3943529 - RNA, 21 nt, Human adenovirus F
gggaacugccaguguaaagca

SEQ ID NO: 3943530 - RNA, 12 nt, Human adenovirus F
gggaggcagcag

SEQ ID NO: 3943531 - RNA, 17 nt, Human adenovirus F
gggaguaaaaagccuga

SEQ ID NO: 3943532 - RNA, 21 nt, Human adenovirus F
gggauaagcuaaaggaccaaa

SEQ ID NO: 3943533 - RNA, 15 nt, Human adenovirus F
gggcaaaaugggcuu

SEQ ID NO: 3943534 - RNA, 19 nt, Human adenovirus F
gggcaagcuucucagcuca

SEQ ID NO: 3943535 - RNA, 20 nt, Human adenovirus F
gggcaucgucauucuucagu

SEQ ID NO: 3943536 - RNA, 23 nt, Human adenovirus F
gggccccugaggcagcgacaggg

SEQ ID NO: 3943537 - RNA, 12 nt, Human adenovirus F
gggcggaccugc

SEQ ID NO: 3943538 - RNA, 13 nt, Human adenovirus F
gggcggcggccau

SEQ ID NO: 3943539 - RNA, 20 nt, Human adenovirus F
ggggcccugaccgaccuggg

SEQ ID NO: 3943540 - RNA, 19 nt, Human adenovirus F
ggggcguguccgggcucuu

SEQ ID NO: 3943541 - RNA, 14 nt, Human adenovirus F
gggguggaaagccu

SEQ ID NO: 3943542 - RNA, 22 nt, Human adenovirus F
ggguagaguaaaaaaaagggaa

SEQ ID NO: 3943543 - RNA, 18 nt, Human adenovirus F
gggugucugccagagggu

SEQ ID NO: 3943544 - RNA, 17 nt, Human adenovirus F
ggguuucacgcaccagg

SEQ ID NO: 3943545 - RNA, 16 nt, Human adenovirus F
gguaggaacuugaagc

SEQ ID NO: 3943546 - RNA, 17 nt, Human adenovirus F
gguagggugucugccag

SEQ ID NO: 3943547 - RNA, 19 nt, Human adenovirus F
gguauaggcuugugcggcu

SEQ ID NO: 3943548 - RNA, 14 nt, Human adenovirus F
ggucaacagcugga

SEQ ID NO: 3943549 - RNA, 20 nt, Human adenovirus F
ggucaaucucuucguccugg

SEQ ID NO: 3943550 - RNA, 21 nt, Human adenovirus F
ggucagcaagacaccaguagc

SEQ ID NO: 3943551 - RNA, 14 nt, Human adenovirus F
ggucggcacgcucc

SEQ ID NO: 3943552 - RNA, 17 nt, Human adenovirus F
ggucuuagguugcuugc

SEQ ID NO: 3943553 - RNA, 17 nt, Human adenovirus F
ggugacccuaacauggc

SEQ ID NO: 3943554 - RNA, 19 nt, Human adenovirus F
ggugcagccgugaagccaa

SEQ ID NO: 3943555 - RNA, 16 nt, Human adenovirus F
ggugcaguggcgggga

SEQ ID NO: 3943556 - RNA, 19 nt, Human adenovirus F
ggugccugaagcacuggcu

SEQ ID NO: 3943557 - RNA, 16 nt, Human adenovirus F
ggugccuucaccuggg

SEQ ID NO: 3943558 - RNA, 14 nt, Human adenovirus F
ggugcgguuucaaa

SEQ ID NO: 3943559 - RNA, 23 nt, Human adenovirus F
agccccuacgaaacguuuggaga

SEQ ID NO: 3943560 - RNA, 13 nt, Human adenovirus F
agccgccagccuc

SEQ ID NO: 3943561 - RNA, 9 nt, Human adenovirus F
agccgccgc

SEQ ID NO: 3943562 - RNA, 14 nt, Human adenovirus F
agccuucaggcagc

SEQ ID NO: 3943563 - RNA, 19 nt, Human adenovirus F
agccuucaggcagcagccc

SEQ ID NO: 3943564 - RNA, 15 nt, Human adenovirus F
agcgcccgggcccug

SEQ ID NO: 3943565 - RNA, 19 nt, Human adenovirus F
agcgcgacagagcaccauu

SEQ ID NO: 3943566 - RNA, 17 nt, Human adenovirus F
agcgcugccuuugcaau

SEQ ID NO: 3943567 - RNA, 12 nt, Human adenovirus F
agcggcuggaaa

SEQ ID NO: 3943568 - RNA, 14 nt, Human adenovirus F
agcgggcaggagcc

SEQ ID NO: 3943569 - RNA, 23 nt, Human adenovirus F
agcgucuuacauaucgcuugcca

SEQ ID NO: 3943570 - RNA, 19 nt, Human adenovirus F
agcuacguugcgauacugc

SEQ ID NO: 3943571 - RNA, 20 nt, Human adenovirus F
agcuagugaaacaugaggag

SEQ ID NO: 3943572 - RNA, 21 nt, Human adenovirus F
agcucuaaauaugucacagcc

SEQ ID NO: 3943573 - RNA, 13 nt, Human adenovirus F
agcucugaacacu

SEQ ID NO: 3943574 - RNA, 20 nt, Human adenovirus F
agcugcugccgcgucugcug

SEQ ID NO: 3943575 - RNA, 13 nt, Human adenovirus F
agcuggagggcaa

SEQ ID NO: 3943576 - RNA, 22 nt, Human adenovirus F
agcugugagcgccagccgccgu

SEQ ID NO: 3943577 - RNA, 21 nt, Human adenovirus F
agcugugguuaaauuuaaugg

SEQ ID NO: 3943578 - RNA, 20 nt, Human adenovirus F
agcugugucagcuaacucuc

SEQ ID NO: 3943579 - RNA, 16 nt, Human adenovirus F
agcuucuaucugcaaa

SEQ ID NO: 3943580 - RNA, 13 nt, Human adenovirus F
agcuugaggaggu

SEQ ID NO: 3943581 - RNA, 14 nt, Human adenovirus F
agcuuggaagccac

SEQ ID NO: 3943582 - RNA, 13 nt, Human adenovirus F
agcuuuaaacccu

SEQ ID NO: 3943583 - RNA, 23 nt, Human adenovirus F
agcuuuuacugggacagcaggcc

SEQ ID NO: 3943584 - RNA, 12 nt, Human adenovirus F
aggaagcagcuc

SEQ ID NO: 3943585 - RNA, 16 nt, Human adenovirus F
aggaaugcacacagac

SEQ ID NO: 3943586 - RNA, 9 nt, Human adenovirus F
aggacacgg

SEQ ID NO: 3943587 - RNA, 22 nt, Human adenovirus F
aggacagucugccaacacuaac

SEQ ID NO: 3943588 - RNA, 19 nt, Human adenovirus F
aggacgguggcaugaggga

SEQ ID NO: 3943589 - RNA, 18 nt, Human adenovirus F
aggagaggcauggcgggc

SEQ ID NO: 3943590 - RNA, 20 nt, Human adenovirus F
aggagcugucucagcaguug

SEQ ID NO: 3943591 - RNA, 16 nt, Human adenovirus F
aggaggccauccugga

SEQ ID NO: 3943592 - RNA, 17 nt, Human adenovirus F
aggaggcuauuggccag

SEQ ID NO: 3943593 - RNA, 18 nt, Human adenovirus F
aggaggcuauuggccaga

SEQ ID NO: 3943594 - RNA, 22 nt, Human adenovirus F
aggauccauagagggcguugga

SEQ ID NO: 3943595 - RNA, 20 nt, Human adenovirus F
aggcagcuucucgaggccaa

SEQ ID NO: 3943596 - RNA, 20 nt, Human adenovirus F
aggcauaaaguugcggguga

SEQ ID NO: 3943597 - RNA, 17 nt, Human adenovirus F
aggcccuugugccugaa

SEQ ID NO: 3943598 - RNA, 19 nt, Human adenovirus F
aggcccuugugccugaaau

SEQ ID NO: 3943599 - RNA, 19 nt, Human adenovirus F
aggccgcccuaaccucuac

SEQ ID NO: 3943600 - RNA, 14 nt, Human adenovirus F
aggccgcggcggcu

SEQ ID NO: 3943601 - RNA, 14 nt, Human adenovirus F
aggcgagcucaggg

SEQ ID NO: 3943602 - RNA, 19 nt, Human adenovirus F
aggcuuuccgcgaggccau

SEQ ID NO: 3943603 - RNA, 20 nt, Human adenovirus F
agggauacuagcaaacagug

SEQ ID NO: 3943604 - RNA, 16 nt, Human adenovirus F
agggaucgcagcgggc

SEQ ID NO: 3943605 - RNA, 21 nt, Human adenovirus F
agggcgcgcucguagggauug

SEQ ID NO: 3943606 - RNA, 19 nt, Human adenovirus F
agggcggaacagcauacgu

SEQ ID NO: 3943607 - RNA, 22 nt, Human adenovirus F
aggggaaaucagaugcauuuug

SEQ ID NO: 3943608 - RNA, 13 nt, Human adenovirus F
aggggcggagccu

SEQ ID NO: 3943609 - RNA, 19 nt, Human adenovirus F
agggugugaaggcaaaggu

SEQ ID NO: 3943610 - RNA, 14 nt, Human adenovirus F
aggguuucggcagc

SEQ ID NO: 3943611 - RNA, 22 nt, Human adenovirus F
agguaaucaggagaaaaaagac

SEQ ID NO: 3943612 - RNA, 20 nt, Human adenovirus F
agguagccccuuggugaagg

SEQ ID NO: 3943613 - RNA, 13 nt, Human adenovirus F
aggucaaaugcuc

SEQ ID NO: 3943614 - RNA, 22 nt, Human adenovirus F
aggucguaaugaggacauugcu

SEQ ID NO: 3943615 - RNA, 13 nt, Human adenovirus F
agguggggcggcg

SEQ ID NO: 3943616 - RNA, 12 nt, Human adenovirus F
agguuuccaaau

SEQ ID NO: 3943617 - RNA, 17 nt, Human adenovirus F
aguaaaaaaaagggaag

SEQ ID NO: 3943618 - RNA, 15 nt, Human adenovirus F
aguaaucccugucuc

SEQ ID NO: 3943619 - RNA, 21 nt, Human adenovirus F
aguacucuucgcgguuugcug

SEQ ID NO: 3943620 - RNA, 19 nt, Human adenovirus F
aguaucagaauguaacucu

SEQ ID NO: 3943621 - RNA, 18 nt, Human adenovirus F
aguauuacaaaugccucc

SEQ ID NO: 3943622 - RNA, 20 nt, Human adenovirus F
aguccaaagcagagcucugc

SEQ ID NO: 3943623 - RNA, 23 nt, Human adenovirus F
aguccaaagcagagcucugcaaa

SEQ ID NO: 3943624 - RNA, 14 nt, Human adenovirus F
aguccuucugccac

SEQ ID NO: 3943625 - RNA, 21 nt, Human adenovirus F
agucgcaagguaagcuaagga

SEQ ID NO: 3943626 - RNA, 15 nt, Human adenovirus F
agucggcaggcuucc

SEQ ID NO: 3943627 - RNA, 21 nt, Human adenovirus F
agucggccaaguagcauuuua

SEQ ID NO: 3943628 - RNA, 15 nt, Human adenovirus F
agucgucgcaggcgc

SEQ ID NO: 3943629 - RNA, 23 nt, Human adenovirus F
agugaugguggggaguucuugcu

SEQ ID NO: 3943630 - RNA, 17 nt, Human adenovirus F
agugcacugagcagcuu

SEQ ID NO: 3943631 - RNA, 13 nt, Human adenovirus F
agugcaggaagag

SEQ ID NO: 3943632 - RNA, 23 nt, Human adenovirus F
aguggagggauuuaauggcacag

SEQ ID NO: 3943633 - RNA, 15 nt, Human adenovirus F
aguguaccaauccug

SEQ ID NO: 3943634 - RNA, 20 nt, Human adenovirus F
aguucacuuugccagagggc

SEQ ID NO: 3943635 - RNA, 20 nt, Human adenovirus F
aguucuacgugucuugcaaa

SEQ ID NO: 3943636 - RNA, 16 nt, Human adenovirus F
aguucuugcugacggc

SEQ ID NO: 3943637 - RNA, 17 nt, Human adenovirus F
aguuggagcagccugug

SEQ ID NO: 3943638 - RNA, 21 nt, Human adenovirus F
aguugugcuuugcccuccgau

SEQ ID NO: 3943639 - RNA, 16 nt, Human adenovirus F
aguuuaaaaacgguga

SEQ ID NO: 3943640 - RNA, 17 nt, Human adenovirus F
aguuugguagcaaagga

SEQ ID NO: 3943641 - RNA, 15 nt, Human adenovirus F
aguuuuaagguauau

SEQ ID NO: 3943642 - RNA, 12 nt, Human adenovirus F
auaaacuccucu

SEQ ID NO: 3943643 - RNA, 21 nt, Human adenovirus F
auaagcuaaaggaccaaaacu

SEQ ID NO: 3943644 - RNA, 23 nt, Human adenovirus F
auaauuuccgcuaguuuaauauu

SEQ ID NO: 3943645 - RNA, 11 nt, Human adenovirus F
auagccaacca

SEQ ID NO: 3943646 - RNA, 19 nt, Human adenovirus F
auauaaaaacaaccaacuu

SEQ ID NO: 3943647 - RNA, 12 nt, Human adenovirus F
auauccaaaucc

SEQ ID NO: 3943648 - RNA, 17 nt, Human adenovirus F
auaugaugaaaguagaa

SEQ ID NO: 3943649 - RNA, 22 nt, Human adenovirus F
auauuuauacacucccuuugcc

SEQ ID NO: 3943650 - RNA, 22 nt, Human adenovirus F
auauuucaccuacucuggcucc

SEQ ID NO: 3943651 - RNA, 13 nt, Human adenovirus F
aucacccaaagcc

SEQ ID NO: 3943652 - RNA, 16 nt, Human adenovirus F
aucaguuguuugucaa

SEQ ID NO: 3943653 - RNA, 15 nt, Human adenovirus F
aucauauuagguuau

SEQ ID NO: 3943654 - RNA, 20 nt, Human adenovirus F
aucauuuccacaaaugucuu

SEQ ID NO: 3943655 - RNA, 22 nt, Human adenovirus F
auccaaaucucgccuaacauca

SEQ ID NO: 3943656 - RNA, 21 nt, Human adenovirus F
auccauuaaaauuucuuguaa

SEQ ID NO: 3943657 - RNA, 12 nt, Human adenovirus F
aucccagccucg

SEQ ID NO: 3943658 - RNA, 17 nt, Human adenovirus F
aucccaugaccaaaccu

SEQ ID NO: 3943659 - RNA, 21 nt, Human adenovirus F
auccccuauugcgaccggccc

SEQ ID NO: 3943660 - RNA, 17 nt, Human adenovirus F
auccuccuucacaaagu

SEQ ID NO: 3943661 - RNA, 20 nt, Human adenovirus F
aucgccgggcaggacgccuc

SEQ ID NO: 3943662 - RNA, 15 nt, Human adenovirus F
aucucugugcgucgc

SEQ ID NO: 3943663 - RNA, 17 nt, Human adenovirus F
aucuuaagcugcagcca

SEQ ID NO: 3943664 - RNA, 12 nt, Human adenovirus F
aucuucaaacau

SEQ ID NO: 3943665 - RNA, 21 nt, Human adenovirus F
aucuugcaaaacuuucgcucc

SEQ ID NO: 3943666 - RNA, 16 nt, Human adenovirus F
aucuugguccagguuu

SEQ ID NO: 3943667 - RNA, 14 nt, Human adenovirus F
augagcugggagaa

SEQ ID NO: 3943668 - RNA, 20 nt, Human adenovirus F
augagcuuacuuuaaaacuu

SEQ ID NO: 3943669 - RNA, 18 nt, Human adenovirus F
augauuuguggcgguggu

SEQ ID NO: 3943670 - RNA, 20 nt, Human adenovirus F
augcacagccugcgucgggc

SEQ ID NO: 3943671 - RNA, 17 nt, Human adenovirus F
augcacaucgccgggca

SEQ ID NO: 3943672 - RNA, 14 nt, Human adenovirus F
augcagacaagaca

SEQ ID NO: 3943673 - RNA, 21 nt, Human adenovirus F
augccacccaagggaaacaag

SEQ ID NO: 3943674 - RNA, 11 nt, Human adenovirus F
augcccacacc

SEQ ID NO: 3943675 - RNA, 22 nt, Human adenovirus F
augccuaccucugacaaacacg

SEQ ID NO: 3943676 - RNA, 16 nt, Human adenovirus F
augccuccagcacugc

SEQ ID NO: 3943677 - RNA, 16 nt, Human adenovirus F
augcgccgagcggcug

SEQ ID NO: 3943678 - RNA, 20 nt, Human adenovirus F
augcuuuuacguuuaaaugg

SEQ ID NO: 3943679 - RNA, 12 nt, Human adenovirus F
auggaguugugg

SEQ ID NO: 3943680 - RNA, 18 nt, Human adenovirus F
auggcaccgcauaagcug

SEQ ID NO: 3943681 - RNA, 20 nt, Human adenovirus F
augggagugcuggccgggca

SEQ ID NO: 3943682 - RNA, 17 nt, Human adenovirus F
augggccuggcagcugg

SEQ ID NO: 3943683 - RNA, 12 nt, Human adenovirus F
auggggaaggau

SEQ ID NO: 3943684 - RNA, 17 nt, Human adenovirus F
augggggcggaccugca

SEQ ID NO: 3943685 - RNA, 23 nt, Human adenovirus F
augguaaaaaugccaggcagcag

SEQ ID NO: 3943686 - RNA, 19 nt, Human adenovirus F
augguaacuccucuucucc

SEQ ID NO: 3943687 - RNA, 16 nt, Human adenovirus F
augguggcaaggagag

SEQ ID NO: 3943688 - RNA, 19 nt, Human adenovirus F
auguaaaguucuaaaaagc

SEQ ID NO: 3943689 - RNA, 21 nt, Human adenovirus F
auguccccauaaacguucaaa

SEQ ID NO: 3943690 - RNA, 15 nt, Human adenovirus F
augugccgcgcgggc

SEQ ID NO: 3943691 - RNA, 15 nt, Human adenovirus F
augugcuggggaaug

SEQ ID NO: 3943692 - RNA, 20 nt, Human adenovirus F
auguggaaccaggcagugga

SEQ ID NO: 3943693 - RNA, 22 nt, Human adenovirus F
auguucgacuccucugugagcu

SEQ ID NO: 3943694 - RNA, 19 nt, Human adenovirus F
auuaaacgucaaugccaau

SEQ ID NO: 3943695 - RNA, 20 nt, Human adenovirus F
auuacauugguuuuagggac

SEQ ID NO: 3943696 - RNA, 12 nt, Human adenovirus F
auuacugccagu

SEQ ID NO: 3943697 - RNA, 17 nt, Human adenovirus F
auuaggaagggcaaagg

SEQ ID NO: 3943698 - RNA, 18 nt, Human adenovirus F
auuaguuguacaaaguca

SEQ ID NO: 3943699 - RNA, 19 nt, Human adenovirus F
auucccaaauaauuuuccg

SEQ ID NO: 3943700 - RNA, 13 nt, Human adenovirus F
auucuccaaagca

SEQ ID NO: 3943701 - RNA, 13 nt, Human adenovirus F
auucucucuccuu

SEQ ID NO: 3943702 - RNA, 13 nt, Human adenovirus F
auugagugggaag

SEQ ID NO: 3943703 - RNA, 22 nt, Human adenovirus F
auugcagcgguaucugcgugga

SEQ ID NO: 3943704 - RNA, 19 nt, Human adenovirus F
auugccucguagaagucaa

SEQ ID NO: 3943705 - RNA, 19 nt, Human adenovirus F
auuuccauaaacuccucuu

SEQ ID NO: 3943706 - RNA, 22 nt, Human adenovirus F
auuucuuguaaacuggcgccau

SEQ ID NO: 3943707 - RNA, 14 nt, Human adenovirus F
auuuuaaaaugguu

SEQ ID NO: 3943708 - RNA, 11 nt, Human adenovirus F
auuuucugcca

SEQ ID NO: 3943709 - RNA, 17 nt, Human adenovirus F
caaaaaaagaauuacuu

SEQ ID NO: 3943710 - RNA, 17 nt, Human adenovirus F
caaaaaaaucaaggcca

SEQ ID NO: 3943711 - RNA, 15 nt, Human adenovirus F
caaaacaaacuccuu

SEQ ID NO: 3943712 - RNA, 12 nt, Human adenovirus F
caaaacacuaaa

SEQ ID NO: 3943713 - RNA, 23 nt, Human adenovirus F
caaaacuuucgcuccuuuguacu

SEQ ID NO: 3943714 - RNA, 12 nt, Human adenovirus F
caaaaugagugg

SEQ ID NO: 3943715 - RNA, 22 nt, Human adenovirus F
caaaaugugcagcaaaaacucc

SEQ ID NO: 3943716 - RNA, 13 nt, Human adenovirus F
caaacaacaaaau

SEQ ID NO: 3943717 - RNA, 13 nt, Human adenovirus F
caaacacaaacac

SEQ ID NO: 3943718 - RNA, 16 nt, Human adenovirus F
caaacgcaccauugaa

SEQ ID NO: 3943719 - RNA, 20 nt, Human adenovirus F
caaacggcguucuagccaac

SEQ ID NO: 3943720 - RNA, 15 nt, Human adenovirus F
caaagacaaaaucac

SEQ ID NO: 3943721 - RNA, 17 nt, Human adenovirus F
caaagcggcaaaagcuu

SEQ ID NO: 3943722 - RNA, 18 nt, Human adenovirus F
caaagcugugagcgccag

SEQ ID NO: 3943723 - RNA, 13 nt, Human adenovirus F
caaaguaaaaaac

SEQ ID NO: 3943724 - RNA, 15 nt, Human adenovirus F
caaaucgacgguuuc

SEQ ID NO: 3943725 - RNA, 22 nt, Human adenovirus F
caacagggacacgagcugucau

SEQ ID NO: 3943726 - RNA, 19 nt, Human adenovirus F
caacaugggagugcuggcc

SEQ ID NO: 3943727 - RNA, 23 nt, Human adenovirus F
caaccagcgcucuacaauauaau

SEQ ID NO: 3943728 - RNA, 13 nt, Human adenovirus F
caaccaggccuug

SEQ ID NO: 3943729 - RNA, 22 nt, Human adenovirus F
caaccccacgccaagccugaag

SEQ ID NO: 3943730 - RNA, 19 nt, Human adenovirus F
caaccuucaaacccagccg

SEQ ID NO: 3943731 - RNA, 14 nt, Human adenovirus F
caacgcugcaggcg

SEQ ID NO: 3943732 - RNA, 17 nt, Human adenovirus F
caacggcaaucccagca

SEQ ID NO: 3943733 - RNA, 13 nt, Human adenovirus F
caacgugcaggcc

SEQ ID NO: 3943734 - RNA, 20 nt, Human adenovirus F
caacucgacaacccuuaccu

SEQ ID NO: 3943735 - RNA, 21 nt, Human adenovirus F
caacucguucaguggcgcgcu

SEQ ID NO: 3943736 - RNA, 23 nt, Human adenovirus F
caagaucuccaacguagagcuca

SEQ ID NO: 3943737 - RNA, 20 nt, Human adenovirus F
caagcaaagacagagcuuua

SEQ ID NO: 3943738 - RNA, 21 nt, Human adenovirus F
caagcaaagacagagcuuuau

SEQ ID NO: 3943739 - RNA, 14 nt, Human adenovirus F
caagcuaaaugcca

SEQ ID NO: 3943740 - RNA, 17 nt, Human adenovirus F
caaggaaugcacacaga

SEQ ID NO: 3943741 - RNA, 20 nt, Human adenovirus F
caaggaaugcacacagacuc

SEQ ID NO: 3943742 - RNA, 13 nt, Human adenovirus F
caaggccuggaac

SEQ ID NO: 3943743 - RNA, 20 nt, Human adenovirus F
caagggaaacaagcauccca

SEQ ID NO: 3943744 - RNA, 12 nt, Human adenovirus F
caagggcuuccu

SEQ ID NO: 3943745 - RNA, 15 nt, Human adenovirus F
caagguggcggccau

SEQ ID NO: 3943746 - RNA, 21 nt, Human adenovirus F
caaguucaaagaagagcugcu

SEQ ID NO: 3943747 - RNA, 23 nt, Human adenovirus F
caaguuucgggcgcgggugaugg

SEQ ID NO: 3943748 - RNA, 17 nt, Human adenovirus F
caaguuuuuccagcagc

SEQ ID NO: 3943749 - RNA, 19 nt, Human adenovirus F
caauaagcagcuugaagaa

SEQ ID NO: 3943750 - RNA, 15 nt, Human adenovirus F
caauauaaaaacaac

SEQ ID NO: 3943751 - RNA, 21 nt, Human adenovirus F
caaucagcggcuggaaaauag

SEQ ID NO: 3943752 - RNA, 21 nt, Human adenovirus F
caauccugaaugcauguacac

SEQ ID NO: 3943753 - RNA, 14 nt, Human adenovirus F
caauggcagcccag

SEQ ID NO: 3943754 - RNA, 19 nt, Human adenovirus F
caauggcagcccagcgccc

SEQ ID NO: 3943755 - RNA, 19 nt, Human adenovirus F
caaugggcuccagcgagca

SEQ ID NO: 3943756 - RNA, 16 nt, Human adenovirus F
caauuggggcacaccg

SEQ ID NO: 3943757 - RNA, 16 nt, Human adenovirus F
caauuugcuaacacua

SEQ ID NO: 3943758 - RNA, 16 nt, Human adenovirus F
cacaauauuuauacac

SEQ ID NO: 3943759 - RNA, 17 nt, Human adenovirus F
cacacgucauccgccuc

SEQ ID NO: 3943760 - RNA, 13 nt, Human adenovirus F
cacacuccgcaga

SEQ ID NO: 3943761 - RNA, 15 nt, Human adenovirus F
cacagccgccgcucc

SEQ ID NO: 3943762 - RNA, 17 nt, Human adenovirus F
cacauaagaagccagcc

SEQ ID NO: 3943763 - RNA, 17 nt, Human adenovirus F
cacauccagggcacagu

SEQ ID NO: 3943764 - RNA, 13 nt, Human adenovirus F
cacaugaacacuu

SEQ ID NO: 3943765 - RNA, 15 nt, Human adenovirus F
caccacguaaaaggu

SEQ ID NO: 3943766 - RNA, 20 nt, Human adenovirus F
caccauugaaguuucacacu

SEQ ID NO: 3943767 - RNA, 15 nt, Human adenovirus F
caccauuguacgaga

SEQ ID NO: 3943768 - RNA, 16 nt, Human adenovirus F
caccccuagucccucc

SEQ ID NO: 3943769 - RNA, 19 nt, Human adenovirus F
caccgcgcggcggccauga

SEQ ID NO: 3943770 - RNA, 23 nt, Human adenovirus F
caccguucccacuguuucuccuc

SEQ ID NO: 3943771 - RNA, 20 nt, Human adenovirus F
caccguuguggagucacugc

SEQ ID NO: 3943772 - RNA, 22 nt, Human adenovirus F
caccguuguggagucacugcua

SEQ ID NO: 3943773 - RNA, 24 nt, Human adenovirus F
caccuacacggaguaucagaaugu

SEQ ID NO: 3943774 - RNA, 18 nt, Human adenovirus F
caccuacucuggcuccgu

SEQ ID NO: 3943775 - RNA, 21 nt, Human adenovirus F
caccucuguuugcugcacugc

SEQ ID NO: 3943776 - RNA, 18 nt, Human adenovirus F
caccucuucuucuuccuc

SEQ ID NO: 3943777 - RNA, 23 nt, Human adenovirus F
caccucuuguucgaaggcugccg

SEQ ID NO: 3943778 - RNA, 16 nt, Human adenovirus F
caccuugcaaggggag

SEQ ID NO: 3943779 - RNA, 18 nt, Human adenovirus F
cacgcgcucgacaugacu

SEQ ID NO: 3943780 - RNA, 14 nt, Human adenovirus F
cacgcucugcaucu

SEQ ID NO: 3943781 - RNA, 23 nt, Human adenovirus F
cacguuacuuaggcauacaggcu

SEQ ID NO: 3943782 - RNA, 15 nt, Human adenovirus F
cacuaccacccuccu

SEQ ID NO: 3943783 - RNA, 19 nt, Human adenovirus F
cacuagcgccccugcagcc

SEQ ID NO: 3943784 - RNA, 21 nt, Human adenovirus F
cacucgggaaagacaguggcg

SEQ ID NO: 3943785 - RNA, 13 nt, Human adenovirus F
cacugacaguaag

SEQ ID NO: 3943786 - RNA, 15 nt, Human adenovirus F
cacugaccggcaccu

SEQ ID NO: 3943787 - RNA, 16 nt, Human adenovirus F
cacugcaccuugcaag

SEQ ID NO: 3943788 - RNA, 13 nt, Human adenovirus F
cacugcgguggag

SEQ ID NO: 3943789 - RNA, 14 nt, Human adenovirus F
cacuuaccagagcc

SEQ ID NO: 3943790 - RNA, 16 nt, Human adenovirus F
cacuuuacuuaaaccc

SEQ ID NO: 3943791 - RNA, 13 nt, Human adenovirus F
cagaaaacacauu

SEQ ID NO: 3943792 - RNA, 11 nt, Human adenovirus F
cagaacauggc

SEQ ID NO: 3943793 - RNA, 13 nt, Human adenovirus F
cagaauguaacuc

SEQ ID NO: 3943794 - RNA, 13 nt, Human adenovirus F
cagacgcaaugga

SEQ ID NO: 3943795 - RNA, 19 nt, Human adenovirus F
cagacggccguaccaagcc

SEQ ID NO: 3943796 - RNA, 13 nt, Human adenovirus F
acgacuaccucug

SEQ ID NO: 3943797 - RNA, 23 nt, Human adenovirus F
acgacuucaaccccgucuacccc

SEQ ID NO: 3943798 - RNA, 20 nt, Human adenovirus F
acgagcaggcuuugaaagag

SEQ ID NO: 3943799 - RNA, 23 nt, Human adenovirus F
acgagcccugaucagccaggugg

SEQ ID NO: 3943800 - RNA, 19 nt, Human adenovirus F
acgagcuugcucgcuggcu

SEQ ID NO: 3943801 - RNA, 18 nt, Human adenovirus F
acgagguagugagcucuu

SEQ ID NO: 3943802 - RNA, 17 nt, Human adenovirus F
acgaucgcuccaggugg

SEQ ID NO: 3943803 - RNA, 16 nt, Human adenovirus F
acgcaagcgaaugccc

SEQ ID NO: 3943804 - RNA, 22 nt, Human adenovirus F
acgcaccaggucguaaugagga

SEQ ID NO: 3943805 - RNA, 18 nt, Human adenovirus F
acgccgaggcacuguuca

SEQ ID NO: 3943806 - RNA, 16 nt, Human adenovirus F
acgcgcucgacaugac

SEQ ID NO: 3943807 - RNA, 23 nt, Human adenovirus F
acgcugccaacaaauguucgcaa

SEQ ID NO: 3943808 - RNA, 12 nt, Human adenovirus F
acggacaacccg

SEQ ID NO: 3943809 - RNA, 13 nt, Human adenovirus F
acggaggaagagg

SEQ ID NO: 3943810 - RNA, 20 nt, Human adenovirus F
acggcaaucccagcagaaac

SEQ ID NO: 3943811 - RNA, 13 nt, Human adenovirus F
acggcaccugcga

SEQ ID NO: 3943812 - RNA, 19 nt, Human adenovirus F
aacgauucuucugugacaa

SEQ ID NO: 3943813 - RNA, 20 nt, Human adenovirus F
aacgccccgcgagccacagg

SEQ ID NO: 3943814 - RNA, 16 nt, Human adenovirus F
aacgcccgcuagcucu

SEQ ID NO: 3943815 - RNA, 14 nt, Human adenovirus F
aacggaaacaaaaa

SEQ ID NO: 3943816 - RNA, 18 nt, Human adenovirus F
aacggacgcauuaccauu

SEQ ID NO: 3943817 - RNA, 18 nt, Human adenovirus F
aacggcggaugguggcaa

SEQ ID NO: 3943818 - RNA, 20 nt, Human adenovirus F
aacggcgugguggauauagc

SEQ ID NO: 3943819 - RNA, 13 nt, Human adenovirus F
aacguucaaacag

SEQ ID NO: 3943820 - RNA, 14 nt, Human adenovirus F
aacuacaaaagcag

SEQ ID NO: 3943821 - RNA, 16 nt, Human adenovirus F
aacuaccgccuuugga

SEQ ID NO: 3943822 - RNA, 18 nt, Human adenovirus F
aacuaccucgccgcgcag

SEQ ID NO: 3943823 - RNA, 17 nt, Human adenovirus F
aacucaaacaacaaaau

SEQ ID NO: 3943824 - RNA, 22 nt, Human adenovirus F
aacuccuuggguuuagccacau

SEQ ID NO: 3943825 - RNA, 11 nt, Human adenovirus F
aacucugaaga

SEQ ID NO: 3943826 - RNA, 18 nt, Human adenovirus F
aacucugaagaugucuga

SEQ ID NO: 3943827 - RNA, 13 nt, Human adenovirus F
aacugccaccucc

SEQ ID NO: 3943828 - RNA, 15 nt, Human adenovirus F
aacuggucucagaau

SEQ ID NO: 3943829 - RNA, 16 nt, Human adenovirus F
aacuguucuugucgua

SEQ ID NO: 3943830 - RNA, 13 nt, Human adenovirus F
aacuuuuugccca

SEQ ID NO: 3943831 - RNA, 20 nt, Human adenovirus F
aagacauucuugagcaggcc

SEQ ID NO: 3943832 - RNA, 23 nt, Human adenovirus F
aagacguuaagguaaagccacaa

SEQ ID NO: 3943833 - RNA, 22 nt, Human adenovirus F
aagacuaucacgcccaccaaau

SEQ ID NO: 3943834 - RNA, 15 nt, Human adenovirus F
aagagaaucuaacca

SEQ ID NO: 3943835 - RNA, 14 nt, Human adenovirus F
aagagccaccuugu

SEQ ID NO: 3943836 - RNA, 17 nt, Human adenovirus F
aagaucacaccucuccc

SEQ ID NO: 3943837 - RNA, 16 nt, Human adenovirus F
aagauuccaccaaagg

SEQ ID NO: 3943838 - RNA, 15 nt, Human adenovirus F
aagauuuuugaaggu

SEQ ID NO: 3943839 - RNA, 16 nt, Human adenovirus F
aagcagagcucugcaa

SEQ ID NO: 3943840 - RNA, 19 nt, Human adenovirus F
aagccuucaggcagcagcc

SEQ ID NO: 3943841 - RNA, 14 nt, Human adenovirus F
aagcgagcagagcc

SEQ ID NO: 3943842 - RNA, 21 nt, Human adenovirus F
aagcgggcgcaauacucgcag

SEQ ID NO: 3943843 - RNA, 20 nt, Human adenovirus F
aagcgguugcgguacucucg

SEQ ID NO: 3943844 - RNA, 22 nt, Human adenovirus F
aagcugugagcgccagccgccg

SEQ ID NO: 3943845 - RNA, 14 nt, Human adenovirus F
aaggacagucugcc

SEQ ID NO: 3943846 - RNA, 15 nt, Human adenovirus F
aaguccacaaaaacu

SEQ ID NO: 3943847 - RNA, 23 nt, Human adenovirus F
aagugaaccggaaaaccaacgcu

SEQ ID NO: 3943848 - RNA, 18 nt, Human adenovirus F
aagugaagaccaacugca

SEQ ID NO: 3943849 - RNA, 15 nt, Human adenovirus F
aagugggcucagacu

SEQ ID NO: 3943850 - RNA, 19 nt, Human adenovirus F
aaguguuuauuuauuucuu

SEQ ID NO: 3943851 - RNA, 22 nt, Human adenovirus F
aaguucaacaucaaccagugca

SEQ ID NO: 3943852 - RNA, 15 nt, Human adenovirus F
aauaccccgucacuc

SEQ ID NO: 3943853 - RNA, 17 nt, Human adenovirus F
aauauugcggagccuga

SEQ ID NO: 3943854 - RNA, 19 nt, Human adenovirus F
aaucaaccaacuaacacug

SEQ ID NO: 3943855 - RNA, 16 nt, Human adenovirus F
aaucagaugcauuuug

SEQ ID NO: 3943856 - RNA, 22 nt, Human adenovirus F
aaucagaugcauuuuggccuga

SEQ ID NO: 3943857 - RNA, 17 nt, Human adenovirus F
aaucaggaacuguucaa

SEQ ID NO: 3943858 - RNA, 13 nt, Human adenovirus F
aaucgcuggaaaa

SEQ ID NO: 3943859 - RNA, 18 nt, Human adenovirus F
aaucgguaccuuugagau

SEQ ID NO: 3943860 - RNA, 13 nt, Human adenovirus F
aaucuucggcagg

SEQ ID NO: 3943861 - RNA, 17 nt, Human adenovirus F
aaucuugaauaauuccc

SEQ ID NO: 3943862 - RNA, 17 nt, Human adenovirus F
aaugccaggcagcaggg

SEQ ID NO: 3943863 - RNA, 13 nt, Human adenovirus F
aauggaaacugau

SEQ ID NO: 3943864 - RNA, 12 nt, Human adenovirus F
aaugggcaaagg

SEQ ID NO: 3943865 - RNA, 20 nt, Human adenovirus F
aauguaacaugaccaaggac

SEQ ID NO: 3943866 - RNA, 23 nt, Human adenovirus F
aauguagcccuguacuugccuga

SEQ ID NO: 3943867 - RNA, 17 nt, Human adenovirus F
aaugugcagcaaaaacu

SEQ ID NO: 3943868 - RNA, 16 nt, Human adenovirus F
aauucguggccccuac

SEQ ID NO: 3943869 - RNA, 22 nt, Human adenovirus F
aauugauuuucugccaccagcc

SEQ ID NO: 3943870 - RNA, 13 nt, Human adenovirus F
aauuuagcucuaa

SEQ ID NO: 3943871 - RNA, 13 nt, Human adenovirus F
acaaaaacuuaca

SEQ ID NO: 3943872 - RNA, 15 nt, Human adenovirus F
acaaaagcaguggga

SEQ ID NO: 3943873 - RNA, 22 nt, Human adenovirus F
acaaaggaggcgauuugggagg

SEQ ID NO: 3943874 - RNA, 18 nt, Human adenovirus F
acaaagucauccaaauca

SEQ ID NO: 3943875 - RNA, 12 nt, Human adenovirus F
acaacaaaucau

SEQ ID NO: 3943876 - RNA, 13 nt, Human adenovirus F
acaacaacgggca

SEQ ID NO: 3943877 - RNA, 13 nt, Human adenovirus F
acaaggccuggaa

SEQ ID NO: 3943878 - RNA, 14 nt, Human adenovirus F
acaauaagcagcuu

SEQ ID NO: 3943879 - RNA, 19 nt, Human adenovirus F
acaaucagggaaauuuacu

SEQ ID NO: 3943880 - RNA, 18 nt, Human adenovirus F
acaccgucuccaucgccg

SEQ ID NO: 3943881 - RNA, 17 nt, Human adenovirus F
acacgaaaaccggcugg

SEQ ID NO: 3943882 - RNA, 18 nt, Human adenovirus F
acacggggucuauuugga

SEQ ID NO: 3943883 - RNA, 17 nt, Human adenovirus F
acacuaaaguuuuaaug

SEQ ID NO: 3943884 - RNA, 22 nt, Human adenovirus F
acacuccgcagacgaacacaau

SEQ ID NO: 3943885 - RNA, 16 nt, Human adenovirus F
acacugccuaccgcag

SEQ ID NO: 3943886 - RNA, 15 nt, Human adenovirus F
acacuuuuuugcaag

SEQ ID NO: 3943887 - RNA, 15 nt, Human adenovirus F
acagccccagcuggu

SEQ ID NO: 3943888 - RNA, 15 nt, Human adenovirus F
acagucaagcucucc

SEQ ID NO: 3943889 - RNA, 21 nt, Human adenovirus F
acauagcaaaagcauuuuccu

SEQ ID NO: 3943890 - RNA, 13 nt, Human adenovirus F
acauccauuucca

SEQ ID NO: 3943891 - RNA, 13 nt, Human adenovirus F
acaugagcuuacu

SEQ ID NO: 3943892 - RNA, 13 nt, Human adenovirus F
acaugauucucca

SEQ ID NO: 3943893 - RNA, 12 nt, Human adenovirus F
acaugccacaga

SEQ ID NO: 3943894 - RNA, 18 nt, Human adenovirus F
acaugcugguuuucuuua

SEQ ID NO: 3943895 - RNA, 22 nt, Human adenovirus F
acaugcuuaugcgcuguacugu

SEQ ID NO: 3943896 - RNA, 16 nt, Human adenovirus F
acaugcuuuucccauu

SEQ ID NO: 3943897 - RNA, 14 nt, Human adenovirus F
acauggccagcacc

SEQ ID NO: 3943898 - RNA, 19 nt, Human adenovirus F
accaaaacaaaacaaacuc

SEQ ID NO: 3943899 - RNA, 20 nt, Human adenovirus F
accaauaugcccaacaucaa

SEQ ID NO: 3943900 - RNA, 16 nt, Human adenovirus F
accaaucuaucccuug

SEQ ID NO: 3943901 - RNA, 13 nt, Human adenovirus F
accaauuugcuaa

SEQ ID NO: 3943902 - RNA, 22 nt, Human adenovirus F
accacccggguuuaccuggugg

SEQ ID NO: 3943903 - RNA, 17 nt, Human adenovirus F
accaccugcccuuccuc

SEQ ID NO: 3943904 - RNA, 16 nt, Human adenovirus F
accacuaccacccucc

SEQ ID NO: 3943905 - RNA, 22 nt, Human adenovirus F
accacugauguaacagcuuugg

SEQ ID NO: 3943906 - RNA, 17 nt, Human adenovirus F
accauuaagaagacugu

SEQ ID NO: 3943907 - RNA, 19 nt, Human adenovirus F
accauuguacgagaagccc

SEQ ID NO: 3943908 - RNA, 15 nt, Human adenovirus F
acccaacuauuuggg

SEQ ID NO: 3943909 - RNA, 19 nt, Human adenovirus F
acccagguuuaauacagug

SEQ ID NO: 3943910 - RNA, 23 nt, Human adenovirus F
acccccguucccagucugccauc

SEQ ID NO: 3943911 - RNA, 15 nt, Human adenovirus F
accccgacagaggcc

SEQ ID NO: 3943912 - RNA, 17 nt, Human adenovirus F
accccgucacucuccgc

SEQ ID NO: 3943913 - RNA, 17 nt, Human adenovirus F
acccgcacuggaugcca

SEQ ID NO: 3943914 - RNA, 23 nt, Human adenovirus F
acccuucaacggaauuguaacug

SEQ ID NO: 3943915 - RNA, 18 nt, Human adenovirus F
accgcuguauuuugcuac

SEQ ID NO: 3943916 - RNA, 16 nt, Human adenovirus F
accggcuccugugcag

SEQ ID NO: 3943917 - RNA, 20 nt, Human adenovirus F
accgucaucucuacagcccc

SEQ ID NO: 3943918 - RNA, 22 nt, Human adenovirus F
accguucccacuguuucuccuc

SEQ ID NO: 3943919 - RNA, 20 nt, Human adenovirus F
accuacuaccacuaccccua

SEQ ID NO: 3943920 - RNA, 20 nt, Human adenovirus F
accuccgacgcuugcuggag

SEQ ID NO: 3943921 - RNA, 21 nt, Human adenovirus F
accucugacaaacacgcuccc

SEQ ID NO: 3943922 - RNA, 20 nt, Human adenovirus F
accucuucuucuuccuccuc

SEQ ID NO: 3943923 - RNA, 13 nt, Human adenovirus F
accugcacgcucu

SEQ ID NO: 3943924 - RNA, 21 nt, Human adenovirus F
accugcacgcucuugcugugg

SEQ ID NO: 3943925 - RNA, 18 nt, Human adenovirus F
accugcaguucauuuaaa

SEQ ID NO: 3943926 - RNA, 20 nt, Human adenovirus F
accugcaguucauuuaaaag

SEQ ID NO: 3943927 - RNA, 12 nt, Human adenovirus F
accugccccuac

SEQ ID NO: 3943928 - RNA, 17 nt, Human adenovirus F
accuggggccuacggaa

SEQ ID NO: 3943929 - RNA, 16 nt, Human adenovirus F
accuuauacaccuccc

SEQ ID NO: 3943930 - RNA, 19 nt, Human adenovirus F
acgacggggauacugcucc

SEQ ID NO: 3943931 - RNA, 18 nt, Human adenovirus F
gguggaauuacugccagu

SEQ ID NO: 3943932 - RNA, 13 nt, Human adenovirus F
gguggcaaggaga

SEQ ID NO: 3943933 - RNA, 21 nt, Human adenovirus F
gguggggccccugaggcagcg

SEQ ID NO: 3943934 - RNA, 18 nt, Human adenovirus F
ggugugaaggcaaagguc

SEQ ID NO: 3943935 - RNA, 22 nt, Human adenovirus F
gguuacucagcaauccggccca

SEQ ID NO: 3943936 - RNA, 17 nt, Human adenovirus F
gguuucggguggagggu

SEQ ID NO: 3943937 - RNA, 15 nt, Human adenovirus F
gguuugccagacuuu

SEQ ID NO: 3943938 - RNA, 17 nt, Human adenovirus F
guaacagcuuuggaagu

SEQ ID NO: 3943939 - RNA, 13 nt, Human adenovirus F
guaagcuaaggac

SEQ ID NO: 3943940 - RNA, 12 nt, Human adenovirus F
guaccaggaggc

SEQ ID NO: 3943941 - RNA, 21 nt, Human adenovirus F
guacgaagcuagcauaaaaga

SEQ ID NO: 3943942 - RNA, 19 nt, Human adenovirus F
guacggaccaccagaugau

SEQ ID NO: 3943943 - RNA, 14 nt, Human adenovirus F
guagacgcuggaag

SEQ ID NO: 3943944 - RNA, 20 nt, Human adenovirus F
guagagacugccaagccuca

SEQ ID NO: 3943945 - RNA, 15 nt, Human adenovirus F
guagaguuugggagc

SEQ ID NO: 3943946 - RNA, 17 nt, Human adenovirus F
guagcaccccaauguaa

SEQ ID NO: 3943947 - RNA, 15 nt, Human adenovirus F
guagccccuugguga

SEQ ID NO: 3943948 - RNA, 19 nt, Human adenovirus F
guagccgaugcccaacgcu

SEQ ID NO: 3943949 - RNA, 17 nt, Human adenovirus F
guagcguguuggacuug

SEQ ID NO: 3943950 - RNA, 13 nt, Human adenovirus F
guagcuuggaagc

SEQ ID NO: 3943951 - RNA, 20 nt, Human adenovirus F
guagggauugagugggaagc

SEQ ID NO: 3943952 - RNA, 18 nt, Human adenovirus F
guagggugucugccagag

SEQ ID NO: 3943953 - RNA, 18 nt, Human adenovirus F
guaguccucauucuucuc

SEQ ID NO: 3943954 - RNA, 18 nt, Human adenovirus F
guaguuuugcuccagggu

SEQ ID NO: 3943955 - RNA, 20 nt, Human adenovirus F
guauaaguauuacaaaugcc

SEQ ID NO: 3943956 - RNA, 16 nt, Human adenovirus F
guaucagaauguaacu

SEQ ID NO: 3943957 - RNA, 11 nt, Human adenovirus F
guaugggcagc

SEQ ID NO: 3943958 - RNA, 12 nt, Human adenovirus F
guaugggcagca

SEQ ID NO: 3943959 - RNA, 19 nt, Human adenovirus F
gucaaucucuucguccugg

SEQ ID NO: 3943960 - RNA, 22 nt, Human adenovirus F
gucaaucucuucguccuggagu

SEQ ID NO: 3943961 - RNA, 17 nt, Human adenovirus F
gucacagccuguuacua

SEQ ID NO: 3943962 - RNA, 15 nt, Human adenovirus F
gucaccgccaagagc

SEQ ID NO: 3943963 - RNA, 23 nt, Human adenovirus F
gucacuacaauauuggcuaccag

SEQ ID NO: 3943964 - RNA, 21 nt, Human adenovirus F
gucagaacggcgugcuggaaa

SEQ ID NO: 3943965 - RNA, 18 nt, Human adenovirus F
gucaggccgcccgucagg

SEQ ID NO: 3943966 - RNA, 19 nt, Human adenovirus F
gucaggccugcaagaucuc

SEQ ID NO: 3943967 - RNA, 19 nt, Human adenovirus F
gucauacgcuagaccaaca

SEQ ID NO: 3943968 - RNA, 23 nt, Human adenovirus F
gucauauacuuuaaacaagcaaa

SEQ ID NO: 3943969 - RNA, 20 nt, Human adenovirus F
gucccuccccguuaccuggg

SEQ ID NO: 3943970 - RNA, 21 nt, Human adenovirus F
guccuggccaacugccaccuc

SEQ ID NO: 3943971 - RNA, 21 nt, Human adenovirus F
guccugucgccccugccaacu

SEQ ID NO: 3943972 - RNA, 17 nt, Human adenovirus F
guccuuugccccccggc

SEQ ID NO: 3943973 - RNA, 14 nt, Human adenovirus F
gucgcagaaucucc

SEQ ID NO: 3943974 - RNA, 19 nt, Human adenovirus F
gucgccagaguugucuugg

SEQ ID NO: 3943975 - RNA, 20 nt, Human adenovirus F
gucgggccaugcgccgagcg

SEQ ID NO: 3943976 - RNA, 13 nt, Human adenovirus F
gucgucgcaggcg

SEQ ID NO: 3943977 - RNA, 15 nt, Human adenovirus F
gucgucggcucugga

SEQ ID NO: 3943978 - RNA, 20 nt, Human adenovirus F
gucguggcauguuuucucca

SEQ ID NO: 3943979 - RNA, 14 nt, Human adenovirus F
gucguugccagccg

SEQ ID NO: 3943980 - RNA, 16 nt, Human adenovirus F
gucuccagaccccaug

SEQ ID NO: 3943981 - RNA, 11 nt, Human adenovirus F
gucugccaaaa

SEQ ID NO: 3943982 - RNA, 13 nt, Human adenovirus F
gucugcugcugcc

SEQ ID NO: 3943983 - RNA, 21 nt, Human adenovirus F
gucugggaguaaaaagccuga

SEQ ID NO: 3943984 - RNA, 15 nt, Human adenovirus F
gucuuuuuugucugg

SEQ ID NO: 3943985 - RNA, 14 nt, Human adenovirus F
gugacaaagaggcg

SEQ ID NO: 3943986 - RNA, 16 nt, Human adenovirus F
gugaguuuugagggug

SEQ ID NO: 3943987 - RNA, 20 nt, Human adenovirus F
gugcagauggaaacugucag

SEQ ID NO: 3943988 - RNA, 24 nt, Human adenovirus F
gugccguucgcagaaacaugccac

SEQ ID NO: 3943989 - RNA, 14 nt, Human adenovirus F
gugccugaagcacu

SEQ ID NO: 3943990 - RNA, 18 nt, Human adenovirus F
gugcgcgaacugggcugc

SEQ ID NO: 3943991 - RNA, 23 nt, Human adenovirus F
gugcggauuugggaacuguccag

SEQ ID NO: 3943992 - RNA, 17 nt, Human adenovirus F
gugcuccugaagcacau

SEQ ID NO: 3943993 - RNA, 22 nt, Human adenovirus F
gugcuggggaauggagcugugg

SEQ ID NO: 3943994 - RNA, 13 nt, Human adenovirus F
gugcuuggaagag

SEQ ID NO: 3943995 - RNA, 16 nt, Human adenovirus F
guggacgacagccagc

SEQ ID NO: 3943996 - RNA, 12 nt, Human adenovirus F
guggaggcagcu

SEQ ID NO: 3943997 - RNA, 20 nt, Human adenovirus F
guggauaccgcugcagcugc

SEQ ID NO: 3943998 - RNA, 15 nt, Human adenovirus F
guggcaaggagagug

SEQ ID NO: 3943999 - RNA, 15 nt, Human adenovirus F
guggcauggcagcag

SEQ ID NO: 3944000 - RNA, 19 nt, Human adenovirus F
gugggccgcugaaagacgu

SEQ ID NO: 3944001 - RNA, 19 nt, Human adenovirus F
guggggccccugaggcagc

SEQ ID NO: 3944002 - RNA, 17 nt, Human adenovirus F
gugguacaggagcgcag

SEQ ID NO: 3944003 - RNA, 17 nt, Human adenovirus F
gugucuccgcugggaga

SEQ ID NO: 3944004 - RNA, 12 nt, Human adenovirus F
gugucugccaga

SEQ ID NO: 3944005 - RNA, 21 nt, Human adenovirus F
guguugacccgcuuggaggag

SEQ ID NO: 3944006 - RNA, 21 nt, Human adenovirus F
guguuucacguaguaucucau

SEQ ID NO: 3944007 - RNA, 23 nt, Human adenovirus F
guuaaaaagcgagaaaaaaaaga

SEQ ID NO: 3944008 - RNA, 22 nt, Human adenovirus F
guuaacaugauucuccaaagca

SEQ ID NO: 3944009 - RNA, 17 nt, Human adenovirus F
guucacuuugccagagg

SEQ ID NO: 3944010 - RNA, 21 nt, Human adenovirus F
guuccauggcccgaccuguau

SEQ ID NO: 3944011 - RNA, 16 nt, Human adenovirus F
guucgccuggagaggc

SEQ ID NO: 3944012 - RNA, 22 nt, Human adenovirus F
guucuucacugcaccuugcaag

SEQ ID NO: 3944013 - RNA, 15 nt, Human adenovirus F
guuggagcagccugu

SEQ ID NO: 3944014 - RNA, 11 nt, Human adenovirus F
guuggaggaga

SEQ ID NO: 3944015 - RNA, 17 nt, Human adenovirus F
guuggugaugcccggcg

SEQ ID NO: 3944016 - RNA, 12 nt, Human adenovirus F
guuucuccuccc

SEQ ID NO: 3944017 - RNA, 14 nt, Human adenovirus F
uaaaaaugccaggc

SEQ ID NO: 3944018 - RNA, 15 nt, Human adenovirus F
uaaaaauggagaucu

SEQ ID NO: 3944019 - RNA, 13 nt, Human adenovirus F
uaaacccacagcu

SEQ ID NO: 3944020 - RNA, 22 nt, Human adenovirus F
uaaagacguuaagguaaagcca

SEQ ID NO: 3944021 - RNA, 19 nt, Human adenovirus F
uaaagcauaacaugauuug

SEQ ID NO: 3944022 - RNA, 13 nt, Human adenovirus F
uaaaggaccaaaa

SEQ ID NO: 3944023 - RNA, 17 nt, Human adenovirus F
uaaaucuuccucccaaa

SEQ ID NO: 3944024 - RNA, 20 nt, Human adenovirus F
uaaauggaauucgugccacu

SEQ ID NO: 3944025 - RNA, 20 nt, Human adenovirus F
uaaccacccccaacucugag

SEQ ID NO: 3944026 - RNA, 14 nt, Human adenovirus F
uaacuaaaaacgga

SEQ ID NO: 3944027 - RNA, 15 nt, Human adenovirus F
uaacucucccuuucc

SEQ ID NO: 3944028 - RNA, 13 nt, Human adenovirus F
uaacugagccuga

SEQ ID NO: 3944029 - RNA, 23 nt, Human adenovirus F
uaagcgggggaaauuuaaaccug

SEQ ID NO: 3944030 - RNA, 21 nt, Human adenovirus F
uaagcgucggcgccacacugu

SEQ ID NO: 3944031 - RNA, 21 nt, Human adenovirus F
uaagcuggguggaaagcaagu

SEQ ID NO: 3944032 - RNA, 18 nt, Human adenovirus F
uaagggaggcagcagagg

SEQ ID NO: 3944033 - RNA, 14 nt, Human adenovirus F
uaauccaaugcaaa

SEQ ID NO: 3944034 - RNA, 22 nt, Human adenovirus F
uacaaaugucuaauggagcuau

SEQ ID NO: 3944035 - RNA, 15 nt, Human adenovirus F
uacaacgagcaggcc

SEQ ID NO: 3944036 - RNA, 18 nt, Human adenovirus F
uacaauauuggcuaccag

SEQ ID NO: 3944037 - RNA, 18 nt, Human adenovirus F
uacaauccccuugacauu

SEQ ID NO: 3944038 - RNA, 21 nt, Human adenovirus F
uacacugauccacuuacaacc

SEQ ID NO: 3944039 - RNA, 12 nt, Human adenovirus F
uacagccccuac

SEQ ID NO: 3944040 - RNA, 21 nt, Human adenovirus F
uaccaccguugaugacgucau

SEQ ID NO: 3944041 - RNA, 19 nt, Human adenovirus F
uacgagaaaucggagaggg

SEQ ID NO: 3944042 - RNA, 13 nt, Human adenovirus F
uacgcccaggagc

SEQ ID NO: 3944043 - RNA, 17 nt, Human adenovirus F
uacgcggggcaggagcu

SEQ ID NO: 3944044 - RNA, 14 nt, Human adenovirus F
uacgugccuuuuca

SEQ ID NO: 3944045 - RNA, 16 nt, Human adenovirus F
uacgugccuuuucaca

SEQ ID NO: 3944046 - RNA, 22 nt, Human adenovirus F
uacuaccacuaccccuaccacc

SEQ ID NO: 3944047 - RNA, 17 nt, Human adenovirus F
uacuauuaaugcaaaca

SEQ ID NO: 3944048 - RNA, 13 nt, Human adenovirus F
uacucuggcuccg

SEQ ID NO: 3944049 - RNA, 15 nt, Human adenovirus F
uacugcuaaagggaa

SEQ ID NO: 3944050 - RNA, 20 nt, Human adenovirus F
aaaaaccgccacaugaacac

SEQ ID NO: 3944051 - RNA, 14 nt, Human adenovirus F
aaaaagagaaucua

SEQ ID NO: 3944052 - RNA, 17 nt, Human adenovirus F
aaaaccuacgcccagga

SEQ ID NO: 3944053 - RNA, 21 nt, Human adenovirus F
aaaacgucccaucauuuccac

SEQ ID NO: 3944054 - RNA, 19 nt, Human adenovirus F
aaaacguucccgcccucac

SEQ ID NO: 3944055 - RNA, 18 nt, Human adenovirus F
aaaaugugcagcaaaaac

SEQ ID NO: 3944056 - RNA, 15 nt, Human adenovirus F
aaacaagcaaagaca

SEQ ID NO: 3944057 - RNA, 20 nt, Human adenovirus F
aaacagcagguuaaagccaa

SEQ ID NO: 3944058 - RNA, 17 nt, Human adenovirus F
aaacaguaacaacuccu

SEQ ID NO: 3944059 - RNA, 14 nt, Human adenovirus F
aaacccagccgcac

SEQ ID NO: 3944060 - RNA, 21 nt, Human adenovirus F
aaacgagccagauuugaagau

SEQ ID NO: 3944061 - RNA, 17 nt, Human adenovirus F
aaacgcaccauugaagu

SEQ ID NO: 3944062 - RNA, 14 nt, Human adenovirus F
aaacggugaaauga

SEQ ID NO: 3944063 - RNA, 21 nt, Human adenovirus F
aaacuaucccgccccugccac

SEQ ID NO: 3944064 - RNA, 20 nt, Human adenovirus F
aaacuccuuuggacaagcuc

SEQ ID NO: 3944065 - RNA, 23 nt, Human adenovirus F
aaagcaaagccauccgcaaggau

SEQ ID NO: 3944066 - RNA, 17 nt, Human adenovirus F
aaagccauccgcaagga

SEQ ID NO: 3944067 - RNA, 13 nt, Human adenovirus F
aaagcgagccaaa

SEQ ID NO: 3944068 - RNA, 21 nt, Human adenovirus F
aaaguucaacaucaaccagug

SEQ ID NO: 3944069 - RNA, 18 nt, Human adenovirus F
aaauaauaauuuagcucu

SEQ ID NO: 3944070 - RNA, 22 nt, Human adenovirus F
aaauagagccgaucccagagcu

SEQ ID NO: 3944071 - RNA, 16 nt, Human adenovirus F
aaauagccgccagccu

SEQ ID NO: 3944072 - RNA, 21 nt, Human adenovirus F
aaaucacuguuuuuaacuauu

SEQ ID NO: 3944073 - RNA, 18 nt, Human adenovirus F
aaaucguagguuuaaauu

SEQ ID NO: 3944074 - RNA, 19 nt, Human adenovirus F
aaaucuaccacagaaaugu

SEQ ID NO: 3944075 - RNA, 14 nt, Human adenovirus F
aaaugccucccuuu

SEQ ID NO: 3944076 - RNA, 20 nt, Human adenovirus F
aaaugcucugcaaaaaaacg

SEQ ID NO: 3944077 - RNA, 14 nt, Human adenovirus F
aaauuaauugcacu

SEQ ID NO: 3944078 - RNA, 22 nt, Human adenovirus F
aacaaccuucaaacccagccgc

SEQ ID NO: 3944079 - RNA, 18 nt, Human adenovirus F
aacaacgaaauuuccauu

SEQ ID NO: 3944080 - RNA, 21 nt, Human adenovirus F
aacaagaaggugcuuccagcc

SEQ ID NO: 3944081 - RNA, 15 nt, Human adenovirus F
aacaauaaaaucauu

SEQ ID NO: 3944082 - RNA, 13 nt, Human adenovirus F
aacacaaugcaaa

SEQ ID NO: 3944083 - RNA, 22 nt, Human adenovirus F
aacacggagcugucuuaccagu

SEQ ID NO: 3944084 - RNA, 15 nt, Human adenovirus F
aacagauuuaccagu

SEQ ID NO: 3944085 - RNA, 18 nt, Human adenovirus F
aacagcauugugggucug

SEQ ID NO: 3944086 - RNA, 18 nt, Human adenovirus F
aacagcguagcacucccu

SEQ ID NO: 3944087 - RNA, 19 nt, Human adenovirus F
aacaucccucacuaccauu

SEQ ID NO: 3944088 - RNA, 22 nt, Human adenovirus F
aaccagcuuaguauuaacacug

SEQ ID NO: 3944089 - RNA, 22 nt, Human adenovirus F
aaccggcggcguacacuggcug

SEQ ID NO: 3944090 - RNA, 19 nt, Human adenovirus F
aaccgggaaaaccuuuuca

SEQ ID NO: 3944091 - RNA, 14 nt, Human adenovirus F
aaccuauugguucc

SEQ ID NO: 3944092 - RNA, 15 nt, Human adenovirus F
aacgaaaaaggaggu

SEQ ID NO: 3944093 - RNA, 16 nt, Human adenovirus F
aacgaaaaaggagguc

SEQ ID NO: 3944094 - RNA, 20 nt, Human adenovirus F
aacggcggaugguggcaagg

SEQ ID NO: 3944095 - RNA, 14 nt, Human adenovirus F
aacuaacaaugccg

SEQ ID NO: 3944096 - RNA, 22 nt, Human adenovirus F
aacuaccgccuuuggagguggc

SEQ ID NO: 3944097 - RNA, 20 nt, Human adenovirus F
aacuccucuuccuccacagc

SEQ ID NO: 3944098 - RNA, 12 nt, Human adenovirus F
aacuccuuugga

SEQ ID NO: 3944099 - RNA, 15 nt, Human adenovirus F
aacucuuacaccucc

SEQ ID NO: 3944100 - RNA, 16 nt, Human adenovirus F
aacucuuuauuuuucu

SEQ ID NO: 3944101 - RNA, 13 nt, Human adenovirus F
ccgagagaugcau

SEQ ID NO: 3944102 - RNA, 19 nt, Human adenovirus F
ccgagcuucuuagcgaaac

SEQ ID NO: 3944103 - RNA, 23 nt, Human adenovirus F
ccgcaaaugggccuggcagcugg

SEQ ID NO: 3944104 - RNA, 18 nt, Human adenovirus F
ccgcaaccauguucacug

SEQ ID NO: 3944105 - RNA, 20 nt, Human adenovirus F
ccgcauacuguuucacauau

SEQ ID NO: 3944106 - RNA, 22 nt, Human adenovirus F
ccgccagccuccgguggcucug

SEQ ID NO: 3944107 - RNA, 16 nt, Human adenovirus F
ccgccguggacgcacg

SEQ ID NO: 3944108 - RNA, 20 nt, Human adenovirus F
ccgccuuuucucaucacuga

SEQ ID NO: 3944109 - RNA, 16 nt, Human adenovirus F
ccgcgaacuaaugcac

SEQ ID NO: 3944110 - RNA, 13 nt, Human adenovirus F
ccgcgcgggcagg

SEQ ID NO: 3944111 - RNA, 18 nt, Human adenovirus F
ccgcgcuaaaucuuccuc

SEQ ID NO: 3944112 - RNA, 13 nt, Human adenovirus F
ccgcgucugcugc

SEQ ID NO: 3944113 - RNA, 13 nt, Human adenovirus F
ccgcugcagcugc

SEQ ID NO: 3944114 - RNA, 14 nt, Human adenovirus F
ccgcugcagcugcu

SEQ ID NO: 3944115 - RNA, 16 nt, Human adenovirus F
ccggcauguacggcgg

SEQ ID NO: 3944116 - RNA, 22 nt, Human adenovirus F
ccggcauuaacggcguggugga

SEQ ID NO: 3944117 - RNA, 22 nt, Human adenovirus F
ccggcuggggacuuugcuccgc

SEQ ID NO: 3944118 - RNA, 15 nt, Human adenovirus F
ccgggccagacuacu

SEQ ID NO: 3944119 - RNA, 17 nt, Human adenovirus F
ccggguuuaccuggugg

SEQ ID NO: 3944120 - RNA, 19 nt, Human adenovirus F
ccgucaucucuacagcccc

SEQ ID NO: 3944121 - RNA, 14 nt, Human adenovirus F
ccguccccagcgcc

SEQ ID NO: 3944122 - RNA, 22 nt, Human adenovirus F
ccgugauugauagugugguggc

SEQ ID NO: 3944123 - RNA, 15 nt, Human adenovirus F
ccguuaaucucccuc

SEQ ID NO: 3944124 - RNA, 23 nt, Human adenovirus F
ccguuaaucucccuccccccuuc

SEQ ID NO: 3944125 - RNA, 15 nt, Human adenovirus F
ccguuaccuggggcc

SEQ ID NO: 3944126 - RNA, 15 nt, Human adenovirus F
ccguucuaugcuccu

SEQ ID NO: 3944127 - RNA, 15 nt, Human adenovirus F
ccuacucuggcuccg

SEQ ID NO: 3944128 - RNA, 13 nt, Human adenovirus F
ccuacugccgcca

SEQ ID NO: 3944129 - RNA, 16 nt, Human adenovirus F
ccuagacgaggaggac

SEQ ID NO: 3944130 - RNA, 23 nt, Human adenovirus F
ccuagccaguggacaaaccaaaa

SEQ ID NO: 3944131 - RNA, 20 nt, Human adenovirus F
ccuccaguuuguggaggagu

SEQ ID NO: 3944132 - RNA, 16 nt, Human adenovirus F
ccucgcugucuggaac

SEQ ID NO: 3944133 - RNA, 17 nt, Human adenovirus F
ccucuacgucaccuuac

SEQ ID NO: 3944134 - RNA, 20 nt, Human adenovirus F
ccucugugagcuggccuggu

SEQ ID NO: 3944135 - RNA, 18 nt, Human adenovirus F
ccucuugggcaggagugc

SEQ ID NO: 3944136 - RNA, 21 nt, Human adenovirus F
ccugacuauuuuaugcagaca

SEQ ID NO: 3944137 - RNA, 18 nt, Human adenovirus F
ccugcaauggcagcccag

SEQ ID NO: 3944138 - RNA, 17 nt, Human adenovirus F
ccugcagcgcuucuuug

SEQ ID NO: 3944139 - RNA, 22 nt, Human adenovirus F
ccugcggauuaagaaccacuga

SEQ ID NO: 3944140 - RNA, 21 nt, Human adenovirus F
ccugcuugucugucugccaau

SEQ ID NO: 3944141 - RNA, 20 nt, Human adenovirus F
ccuggaagagggcgaggggc

SEQ ID NO: 3944142 - RNA, 18 nt, Human adenovirus F
ccuggccaacugccaccu

SEQ ID NO: 3944143 - RNA, 14 nt, Human adenovirus F
ccugucgccccugc

SEQ ID NO: 3944144 - RNA, 17 nt, Human adenovirus F
ccuucagcuugagagca

SEQ ID NO: 3944145 - RNA, 16 nt, Human adenovirus F
ccuugcaaggggaggc

SEQ ID NO: 3944146 - RNA, 18 nt, Human adenovirus F
ccuuuaaccaccaccgca

SEQ ID NO: 3944147 - RNA, 22 nt, Human adenovirus F
ccuuuaauuaaaguuauucuga

SEQ ID NO: 3944148 - RNA, 16 nt, Human adenovirus F
ccuuuuugggauuaca

SEQ ID NO: 3944149 - RNA, 21 nt, Human adenovirus F
cgaaaaaggaggucaagccaa

SEQ ID NO: 3944150 - RNA, 15 nt, Human adenovirus F
cgaaacuuccaaccc

SEQ ID NO: 3944151 - RNA, 20 nt, Human adenovirus F
cgaccuuuucuaggguguga

SEQ ID NO: 3944152 - RNA, 19 nt, Human adenovirus F
cgacggaacguggaggaaa

SEQ ID NO: 3944153 - RNA, 13 nt, Human adenovirus F
cgagaaaaacaga

SEQ ID NO: 3944154 - RNA, 14 nt, Human adenovirus F
cgagaggaccacuu

SEQ ID NO: 3944155 - RNA, 15 nt, Human adenovirus F
cgagauaaacagugg

SEQ ID NO: 3944156 - RNA, 15 nt, Human adenovirus F
cgagaucggcaccag

SEQ ID NO: 3944157 - RNA, 15 nt, Human adenovirus F
cgagccaaagugcaa

SEQ ID NO: 3944158 - RNA, 22 nt, Human adenovirus F
cgagccacagguccagaccuca

SEQ ID NO: 3944159 - RNA, 14 nt, Human adenovirus F
cgagccggagaggg

SEQ ID NO: 3944160 - RNA, 22 nt, Human adenovirus F
cgagcuuuuacugggacagcag

SEQ ID NO: 3944161 - RNA, 15 nt, Human adenovirus F
cgaggggcuggcccg

SEQ ID NO: 3944162 - RNA, 21 nt, Human adenovirus F
cgaguucacuuugccagaggg

SEQ ID NO: 3944163 - RNA, 20 nt, Human adenovirus F
cgaguuccugcgcugcuacu

SEQ ID NO: 3944164 - RNA, 13 nt, Human adenovirus F
cgauacugcaaac

SEQ ID NO: 3944165 - RNA, 12 nt, Human adenovirus F
cgauuuuguccc

SEQ ID NO: 3944166 - RNA, 22 nt, Human adenovirus F
cgauuuugucccccucugcuac

SEQ ID NO: 3944167 - RNA, 16 nt, Human adenovirus F
cgcaacggcgcagcag

SEQ ID NO: 3944168 - RNA, 20 nt, Human adenovirus F
cgcaacuucuuuuugggagg

SEQ ID NO: 3944169 - RNA, 13 nt, Human adenovirus F
cgcagcagauccu

SEQ ID NO: 3944170 - RNA, 20 nt, Human adenovirus F
cgcagcaguaucaguggagu

SEQ ID NO: 3944171 - RNA, 15 nt, Human adenovirus F
cgcagccugagcugc

SEQ ID NO: 3944172 - RNA, 15 nt, Human adenovirus F
cgcagcgggaacgcu

SEQ ID NO: 3944173 - RNA, 17 nt, Human adenovirus F
cgcaggacuuggcagaa

SEQ ID NO: 3944174 - RNA, 20 nt, Human adenovirus F
cgcaucaccacuugugcaau

SEQ ID NO: 3944175 - RNA, 13 nt, Human adenovirus F
cgccaugacugcc

SEQ ID NO: 3944176 - RNA, 22 nt, Human adenovirus F
cgcccaaacucaucugucgcag

SEQ ID NO: 3944177 - RNA, 22 nt, Human adenovirus F
cgcccaggagcagcgggaagag

SEQ ID NO: 3944178 - RNA, 14 nt, Human adenovirus F
cgccccuaucacua

SEQ ID NO: 3944179 - RNA, 16 nt, Human adenovirus F
cgccgaggcacuguuc

SEQ ID NO: 3944180 - RNA, 15 nt, Human adenovirus F
cgccgccccuggccu

SEQ ID NO: 3944181 - RNA, 16 nt, Human adenovirus F
cgccgccccuggccug

SEQ ID NO: 3944182 - RNA, 17 nt, Human adenovirus F
cgccggcgggaagagga

SEQ ID NO: 3944183 - RNA, 17 nt, Human adenovirus F
cgccuuuucucaucacu

SEQ ID NO: 3944184 - RNA, 22 nt, Human adenovirus F
cgcgaacuaaugcacagccugc

SEQ ID NO: 3944185 - RNA, 18 nt, Human adenovirus F
cgcgaggaaaccgccuac

SEQ ID NO: 3944186 - RNA, 13 nt, Human adenovirus F
cgcgcgggcagga

SEQ ID NO: 3944187 - RNA, 21 nt, Human adenovirus F
cgcgcuucgccuccugguggc

SEQ ID NO: 3944188 - RNA, 16 nt, Human adenovirus F
cgcggacgucaagccc

SEQ ID NO: 3944189 - RNA, 14 nt, Human adenovirus F
cgcuaugugcagca

SEQ ID NO: 3944190 - RNA, 18 nt, Human adenovirus F
cgcucccaaucgaccuaa

SEQ ID NO: 3944191 - RNA, 15 nt, Human adenovirus F
cgcugaccagcagca

SEQ ID NO: 3944192 - RNA, 20 nt, Human adenovirus F
cgcugcgcuucgugcccguc

SEQ ID NO: 3944193 - RNA, 15 nt, Human adenovirus F
cgcuguacugugcau

SEQ ID NO: 3944194 - RNA, 21 nt, Human adenovirus F
cgcuugccacccgcgcaacac

SEQ ID NO: 3944195 - RNA, 17 nt, Human adenovirus F
cggaacccugccgcugc

SEQ ID NO: 3944196 - RNA, 23 nt, Human adenovirus F
cggaacccugccgcugcgcagca

SEQ ID NO: 3944197 - RNA, 22 nt, Human adenovirus F
cggaccugccccuacgugcaca

SEQ ID NO: 3944198 - RNA, 14 nt, Human adenovirus F
cggagacgagcugc

SEQ ID NO: 3944199 - RNA, 21 nt, Human adenovirus F
cggaggcaaaacuggaacgcg

SEQ ID NO: 3944200 - RNA, 17 nt, Human adenovirus F
cggaguaccugagcccg

SEQ ID NO: 3944201 - RNA, 13 nt, Human adenovirus F
cggcaaggaacca

SEQ ID NO: 3944202 - RNA, 21 nt, Human adenovirus F
cggcacgcuccuuggcgguga

SEQ ID NO: 3944203 - RNA, 18 nt, Human adenovirus F
cggccaaguagcauuuua

SEQ ID NO: 3944204 - RNA, 20 nt, Human adenovirus F
cggcggaugguggcaaggag

SEQ ID NO: 3944205 - RNA, 13 nt, Human adenovirus F
cggcgggaagagg

SEQ ID NO: 3944206 - RNA, 17 nt, Human adenovirus F
cggcgggugcaguggcg

SEQ ID NO: 3944207 - RNA, 22 nt, Human adenovirus F
cggcuggaaaauagccgccagc

SEQ ID NO: 3944208 - RNA, 19 nt, Human adenovirus F
cgggaagagaggcagcccc

SEQ ID NO: 3944209 - RNA, 13 nt, Human adenovirus F
cgggcaccggcac

SEQ ID NO: 3944210 - RNA, 14 nt, Human adenovirus F
cgggcaggagcccg

SEQ ID NO: 3944211 - RNA, 20 nt, Human adenovirus F
cgggcgguacuaaggcgggc

SEQ ID NO: 3944212 - RNA, 17 nt, Human adenovirus F
cgggcucuuggucagca

SEQ ID NO: 3944213 - RNA, 18 nt, Human adenovirus F
cggggcuaacuggcagag

SEQ ID NO: 3944214 - RNA, 20 nt, Human adenovirus F
cggguuuuauggcaccgcau

SEQ ID NO: 3944215 - RNA, 22 nt, Human adenovirus F
cgguggcggacgggucgcagca

SEQ ID NO: 3944216 - RNA, 22 nt, Human adenovirus F
cgguggcucugcagcagcgccc

SEQ ID NO: 3944217 - RNA, 14 nt, Human adenovirus F
cgguuccucgcaac

SEQ ID NO: 3944218 - RNA, 17 nt, Human adenovirus F
cgguuuggauccagugc

SEQ ID NO: 3944219 - RNA, 12 nt, Human adenovirus F
cguacacuggcu

SEQ ID NO: 3944220 - RNA, 11 nt, Human adenovirus F
cguagcagggu

SEQ ID NO: 3944221 - RNA, 17 nt, Human adenovirus F
cgucacuuccgccgcac

SEQ ID NO: 3944222 - RNA, 24 nt, Human adenovirus F
cgucagaacggcgugcuggaaagc

SEQ ID NO: 3944223 - RNA, 20 nt, Human adenovirus F
cgucagaauguggugggguc

SEQ ID NO: 3944224 - RNA, 15 nt, Human adenovirus F
cgucauccgccucca

SEQ ID NO: 3944225 - RNA, 18 nt, Human adenovirus F
cguccaguggagcaaggg

SEQ ID NO: 3944226 - RNA, 18 nt, Human adenovirus F
cgugcgcacccugguggc

SEQ ID NO: 3944227 - RNA, 15 nt, Human adenovirus F
cgugcuccugaagca

SEQ ID NO: 3944228 - RNA, 20 nt, Human adenovirus F
cguggccuugcaagcagcuc

SEQ ID NO: 3944229 - RNA, 23 nt, Human adenovirus F
cguguccgggcucuucaucacuu

SEQ ID NO: 3944230 - RNA, 13 nt, Human adenovirus F
cguuaggcuuuaa

SEQ ID NO: 3944231 - RNA, 21 nt, Human adenovirus F
cguucccgcccucacagauca

SEQ ID NO: 3944232 - RNA, 21 nt, Human adenovirus F
cguucccguaaaaaggagggc

SEQ ID NO: 3944233 - RNA, 16 nt, Human adenovirus F
cguucucuccccacag

SEQ ID NO: 3944234 - RNA, 17 nt, Human adenovirus F
cguuggagagcaguuug

SEQ ID NO: 3944235 - RNA, 20 nt, Human adenovirus F
cguuuaugggcaccuggaac

SEQ ID NO: 3944236 - RNA, 13 nt, Human adenovirus F
cuaaaaccaacaa

SEQ ID NO: 3944237 - RNA, 13 nt, Human adenovirus F
cuaaacucugagg

SEQ ID NO: 3944238 - RNA, 23 nt, Human adenovirus F
cuaaggacgguggcaugagggau

SEQ ID NO: 3944239 - RNA, 18 nt, Human adenovirus F
cuaaggacuucaccuaca

SEQ ID NO: 3944240 - RNA, 19 nt, Human adenovirus F
cuacaaaaggcgcacaaga

SEQ ID NO: 3944241 - RNA, 14 nt, Human adenovirus F
cuacccuucugugc

SEQ ID NO: 3944242 - RNA, 18 nt, Human adenovirus F
cuaccgcgaaugcccccc

SEQ ID NO: 3944243 - RNA, 13 nt, Human adenovirus F
cuacgccuccacc

SEQ ID NO: 3944244 - RNA, 17 nt, Human adenovirus F
cuagaaugucacugccg

SEQ ID NO: 3944245 - RNA, 16 nt, Human adenovirus F
cuagaccaacaaacga

SEQ ID NO: 3944246 - RNA, 16 nt, Human adenovirus F
cuagauaauaacuuuc

SEQ ID NO: 3944247 - RNA, 16 nt, Human adenovirus F
cuagccaacuauuugg

SEQ ID NO: 3944248 - RNA, 14 nt, Human adenovirus F
cuagcgugcccauu

SEQ ID NO: 3944249 - RNA, 22 nt, Human adenovirus F
cuaguagguuuucagguggggg

SEQ ID NO: 3944250 - RNA, 17 nt, Human adenovirus F
cuaguuuaauauugcuu

SEQ ID NO: 3944251 - RNA, 15 nt, Human adenovirus F
cuauaauagcaccaa

SEQ ID NO: 3944252 - RNA, 18 nt, Human adenovirus F
cuaucacuaaaaccaaca

SEQ ID NO: 3944253 - RNA, 12 nt, Human adenovirus F
cuaucugcaaaa

SEQ ID NO: 3944254 - RNA, 14 nt, Human adenovirus F
cuaucugcaaaaaa

SEQ ID NO: 3944255 - RNA, 16 nt, Human adenovirus F
cuauuacagcccccac

SEQ ID NO: 3944256 - RNA, 23 nt, Human adenovirus F
cuauuauccguuggaauuuuccu

SEQ ID NO: 3944257 - RNA, 20 nt, Human adenovirus F
cuauucugggacgcucuuau

SEQ ID NO: 3944258 - RNA, 23 nt, Human adenovirus F
cuauuugggaggggaggacgacg

SEQ ID NO: 3944259 - RNA, 14 nt, Human adenovirus F
cucaacuuuaacua

SEQ ID NO: 3944260 - RNA, 22 nt, Human adenovirus F
cucacagaucacggaacccugc

SEQ ID NO: 3944261 - RNA, 18 nt, Human adenovirus F
cucacccgcagcugcuug

SEQ ID NO: 3944262 - RNA, 22 nt, Human adenovirus F
cucagcgaacccaacuauuugg

SEQ ID NO: 3944263 - RNA, 18 nt, Human adenovirus F
cucaggauuacuccaguc

SEQ ID NO: 3944264 - RNA, 13 nt, Human adenovirus F
cucaucacugacu

SEQ ID NO: 3944265 - RNA, 12 nt, Human adenovirus F
cucauccaaauc

SEQ ID NO: 3944266 - RNA, 21 nt, Human adenovirus F
cuccaacguagagcucagcaa

SEQ ID NO: 3944267 - RNA, 12 nt, Human adenovirus F
cuccacccuuuc

SEQ ID NO: 3944268 - RNA, 16 nt, Human adenovirus F
cuccaggguaagcucg

SEQ ID NO: 3944269 - RNA, 18 nt, Human adenovirus F
cuccaguuuguggaggag

SEQ ID NO: 3944270 - RNA, 18 nt, Human adenovirus F
cuccauguggaaccaggc

SEQ ID NO: 3944271 - RNA, 17 nt, Human adenovirus F
cucccaauccuagccag

SEQ ID NO: 3944272 - RNA, 13 nt, Human adenovirus F
cucccauucauug

SEQ ID NO: 3944273 - RNA, 17 nt, Human adenovirus F
cucccugaacuaccaga

SEQ ID NO: 3944274 - RNA, 14 nt, Human adenovirus F
cucccuuuccagca

SEQ ID NO: 3944275 - RNA, 23 nt, Human adenovirus F
cuccgauuuugucccccucugcu

SEQ ID NO: 3944276 - RNA, 17 nt, Human adenovirus F
cuccuaacgccacuuuu

SEQ ID NO: 3944277 - RNA, 18 nt, Human adenovirus F
cuccucguuaagccacgu

SEQ ID NO: 3944278 - RNA, 17 nt, Human adenovirus F
cucgcccuauuccuccg

SEQ ID NO: 3944279 - RNA, 21 nt, Human adenovirus F
cucgcggccguuuaugggcac

SEQ ID NO: 3944280 - RNA, 23 nt, Human adenovirus F
cucuacgucaccuuacaccaccc

SEQ ID NO: 3944281 - RNA, 16 nt, Human adenovirus F
cucuauacgacaccac

SEQ ID NO: 3944282 - RNA, 14 nt, Human adenovirus F
cucugaacacuuuu

SEQ ID NO: 3944283 - RNA, 16 nt, Human adenovirus F
cucugcagcagcgccc

SEQ ID NO: 3944284 - RNA, 23 nt, Human adenovirus F
cucugugagcuggccugguaacg

SEQ ID NO: 3944285 - RNA, 17 nt, Human adenovirus F
cucuuaccuacacuuuu

SEQ ID NO: 3944286 - RNA, 18 nt, Human adenovirus F
cucuucaucccagccucg

SEQ ID NO: 3944287 - RNA, 15 nt, Human adenovirus F
cucuuccaagcugcg

SEQ ID NO: 3944288 - RNA, 12 nt, Human adenovirus F
cucuugcaggag

SEQ ID NO: 3944289 - RNA, 14 nt, Human adenovirus F
cucuuggacuagua

SEQ ID NO: 3944290 - RNA, 13 nt, Human adenovirus F
cucuugggcagga

SEQ ID NO: 3944291 - RNA, 22 nt, Human adenovirus F
cugaacccgguguacaccaccu

SEQ ID NO: 3944292 - RNA, 13 nt, Human adenovirus F
cugaacuuuuugc

SEQ ID NO: 3944293 - RNA, 15 nt, Human adenovirus F
cugaagacacauugg

SEQ ID NO: 3944294 - RNA, 11 nt, Human adenovirus F
cugaagaggaa

SEQ ID NO: 3944295 - RNA, 15 nt, Human adenovirus F
cugaagaggaacgua

SEQ ID NO: 3944296 - RNA, 23 nt, Human adenovirus F
cugaagcccgcaacggcgcagca

SEQ ID NO: 3944297 - RNA, 13 nt, Human adenovirus F
cugacagcuggga

SEQ ID NO: 3944298 - RNA, 15 nt, Human adenovirus F
cugaccagcagcagc

SEQ ID NO: 3944299 - RNA, 18 nt, Human adenovirus F
cugaccccauuacuacca

SEQ ID NO: 3944300 - RNA, 16 nt, Human adenovirus F
cugaccgaccuggggc

SEQ ID NO: 3944301 - RNA, 21 nt, Human adenovirus F
cugaccgaccuggggcaaaac

SEQ ID NO: 3944302 - RNA, 14 nt, Human adenovirus F
cugacgaagacauu

SEQ ID NO: 3944303 - RNA, 16 nt, Human adenovirus F
cugacggcgcagcugu

SEQ ID NO: 3944304 - RNA, 15 nt, Human adenovirus F
cugacuuccuggucc

SEQ ID NO: 3944305 - RNA, 20 nt, Human adenovirus F
cugagggccggccuggaccc

SEQ ID NO: 3944306 - RNA, 14 nt, Human adenovirus F
cugauuugagggua

SEQ ID NO: 3944307 - RNA, 20 nt, Human adenovirus F
cugcaaaaaagccgucugag

SEQ ID NO: 3944308 - RNA, 15 nt, Human adenovirus F
cugcacgcucuugcu

SEQ ID NO: 3944309 - RNA, 14 nt, Human adenovirus F
cugcagcauugcca

SEQ ID NO: 3944310 - RNA, 22 nt, Human adenovirus F
cugcagcgcacgcuggaggacg

SEQ ID NO: 3944311 - RNA, 13 nt, Human adenovirus F
cugcccuuccucc

SEQ ID NO: 3944312 - RNA, 15 nt, Human adenovirus F
cugccguugcaaccu

SEQ ID NO: 3944313 - RNA, 16 nt, Human adenovirus F
cugcuaaccugugcag

SEQ ID NO: 3944314 - RNA, 14 nt, Human adenovirus F
cugcuccuggcgag

SEQ ID NO: 3944315 - RNA, 12 nt, Human adenovirus F
cuggaaccacuu

SEQ ID NO: 3944316 - RNA, 17 nt, Human adenovirus F
cuggagggcgucaugcu

SEQ ID NO: 3944317 - RNA, 18 nt, Human adenovirus F
cuggauacuggcaagagc

SEQ ID NO: 3944318 - RNA, 20 nt, Human adenovirus F
cuggccaacugccaccucca

SEQ ID NO: 3944319 - RNA, 12 nt, Human adenovirus F
cugggacagccu

SEQ ID NO: 3944320 - RNA, 22 nt, Human adenovirus F
cugggacagcggaggcauuuua

SEQ ID NO: 3944321 - RNA, 13 nt, Human adenovirus F
cugggcggcggcc

SEQ ID NO: 3944322 - RNA, 16 nt, Human adenovirus F
cuggggaauggagcug

SEQ ID NO: 3944323 - RNA, 17 nt, Human adenovirus F
cuggggaauggagcugu

SEQ ID NO: 3944324 - RNA, 20 nt, Human adenovirus F
cugguuuccuauuacagccc

SEQ ID NO: 3944325 - RNA, 20 nt, Human adenovirus F
cuguaguauuuacucccgga

SEQ ID NO: 3944326 - RNA, 16 nt, Human adenovirus F
cugucaggcucugaga

SEQ ID NO: 3944327 - RNA, 19 nt, Human adenovirus F
cugucaggcucugagagug

SEQ ID NO: 3944328 - RNA, 21 nt, Human adenovirus F
cuguggacgacagccagcugu

SEQ ID NO: 3944329 - RNA, 21 nt, Human adenovirus F
cuguuccaacggugugccucu

SEQ ID NO: 3944330 - RNA, 17 nt, Human adenovirus F
cuguucuaaaaccaaac

SEQ ID NO: 3944331 - RNA, 14 nt, Human adenovirus F
cuuaaaggagcacu

SEQ ID NO: 3944332 - RNA, 15 nt, Human adenovirus F
cuuaauaaagacaca

SEQ ID NO: 3944333 - RNA, 14 nt, Human adenovirus F
cuuaccagagccau

SEQ ID NO: 3944334 - RNA, 20 nt, Human adenovirus F
cuuaggaagggggccaucga

SEQ ID NO: 3944335 - RNA, 21 nt, Human adenovirus F
cuuauuggcaugaguggggua

SEQ ID NO: 3944336 - RNA, 19 nt, Human adenovirus F
cuucaagcccuacaccaau

SEQ ID NO: 3944337 - RNA, 11 nt, Human adenovirus F
cuucagccugg

SEQ ID NO: 3944338 - RNA, 22 nt, Human adenovirus F
cuucaucacuuucuuccgcauc

SEQ ID NO: 3944339 - RNA, 15 nt, Human adenovirus F
cuuccucccaaagua

SEQ ID NO: 3944340 - RNA, 15 nt, Human adenovirus F
cuucgcccugaaagu

SEQ ID NO: 3944341 - RNA, 21 nt, Human adenovirus F
cuucgccgcagucucccaccu

SEQ ID NO: 3944342 - RNA, 23 nt, Human adenovirus F
cuucggcaggaaagccacgcucg

SEQ ID NO: 3944343 - RNA, 16 nt, Human adenovirus F
cuucgggagacggagg

SEQ ID NO: 3944344 - RNA, 14 nt, Human adenovirus F
cuucucgaggccaa

SEQ ID NO: 3944345 - RNA, 19 nt, Human adenovirus F
cuucuuaauaaagacacaa

SEQ ID NO: 3944346 - RNA, 20 nt, Human adenovirus F
cuugccacccgcgcaacaca

SEQ ID NO: 3944347 - RNA, 18 nt, Human adenovirus F
cuugcucggugcagccgu

SEQ ID NO: 3944348 - RNA, 13 nt, Human adenovirus F
cuugcugacuuau

SEQ ID NO: 3944349 - RNA, 10 nt, Human adenovirus F
cuugggcagg

SEQ ID NO: 3944350 - RNA, 15 nt, Human adenovirus F
cuuguccgcggggag

SEQ ID NO: 3944351 - RNA, 17 nt, Human adenovirus F
cuuguucgaaggcugcc

SEQ ID NO: 3944352 - RNA, 21 nt, Human adenovirus F
cuuuaacaacacaggagcuuu

SEQ ID NO: 3944353 - RNA, 12 nt, Human adenovirus F
cuuuaucuguaa

SEQ ID NO: 3944354 - RNA, 14 nt, Human adenovirus F
cuuuauugccaccg

SEQ ID NO: 3944355 - RNA, 21 nt, Human adenovirus F
cuuuauugccaccgcaaaaaa

SEQ ID NO: 3944356 - RNA, 21 nt, Human adenovirus F
cuuuauuuccuuugucaugua

SEQ ID NO: 3944357 - RNA, 12 nt, Human adenovirus F
cuuucuuacaac

SEQ ID NO: 3944358 - RNA, 15 nt, Human adenovirus F
cuuuugaugguggcu

SEQ ID NO: 3944359 - RNA, 15 nt, Human adenovirus F
gaaaaauuacagcca

SEQ ID NO: 3944360 - RNA, 12 nt, Human adenovirus F
gaaaaccccgcc

SEQ ID NO: 3944361 - RNA, 17 nt, Human adenovirus F
gaaaaccuacgcccagg

SEQ ID NO: 3944362 - RNA, 14 nt, Human adenovirus F
gaaacgagccagau

SEQ ID NO: 3944363 - RNA, 13 nt, Human adenovirus F
gaaacgcugugag

SEQ ID NO: 3944364 - RNA, 19 nt, Human adenovirus F
gaaaguagcucuuccaagc

SEQ ID NO: 3944365 - RNA, 13 nt, Human adenovirus F
gaaauugauuuuc

SEQ ID NO: 3944366 - RNA, 19 nt, Human adenovirus F
gaaauugugaucagaaauu

SEQ ID NO: 3944367 - RNA, 20 nt, Human adenovirus F
gaaauuugcugacagcuggg

SEQ ID NO: 3944368 - RNA, 16 nt, Human adenovirus F
gaacacuuuugccaaa

SEQ ID NO: 3944369 - RNA, 24 nt, Human adenovirus F
gaaccacuucgggagacggaggca

SEQ ID NO: 3944370 - RNA, 19 nt, Human adenovirus F
gaacccaacuauuugggag

SEQ ID NO: 3944371 - RNA, 14 nt, Human adenovirus F
gaaccggcgccgcu

SEQ ID NO: 3944372 - RNA, 21 nt, Human adenovirus F
gaagaacuggaguaacacaau

SEQ ID NO: 3944373 - RNA, 17 nt, Human adenovirus F
gaagagaggcagccccg

SEQ ID NO: 3944374 - RNA, 15 nt, Human adenovirus F
gaagagcaaaaccuc

SEQ ID NO: 3944375 - RNA, 19 nt, Human adenovirus F
gaagaugaggaggacuaug

SEQ ID NO: 3944376 - RNA, 14 nt, Human adenovirus F
gaagcacaggagau

SEQ ID NO: 3944377 - RNA, 23 nt, Human adenovirus F
gaaggcguggaaaaacuuggaaa

SEQ ID NO: 3944378 - RNA, 13 nt, Human adenovirus F
gaaucauuuccag

SEQ ID NO: 3944379 - RNA, 23 nt, Human adenovirus F
gaaucuaaccacuaccacccucc

SEQ ID NO: 3944380 - RNA, 13 nt, Human adenovirus F
gaaucuccugcac

SEQ ID NO: 3944381 - RNA, 18 nt, Human adenovirus F
gaauggagcuguggugcg

SEQ ID NO: 3944382 - RNA, 20 nt, Human adenovirus F
gaauuuggggcaucacucau

SEQ ID NO: 3944383 - RNA, 23 nt, Human adenovirus F
gaauuuguuauacaaguauacau

SEQ ID NO: 3944384 - RNA, 22 nt, Human adenovirus F
gacaacgaggcuuuccgcgagg

SEQ ID NO: 3944385 - RNA, 15 nt, Human adenovirus F
gacaagguggcggcc

SEQ ID NO: 3944386 - RNA, 13 nt, Human adenovirus F
gacagccagcugu

SEQ ID NO: 3944387 - RNA, 15 nt, Human adenovirus F
gacagcugggacagc

SEQ ID NO: 3944388 - RNA, 19 nt, Human adenovirus F
gacagucugccaacacuaa

SEQ ID NO: 3944389 - RNA, 13 nt, Human adenovirus F
gacauuguuuugc

SEQ ID NO: 3944390 - RNA, 20 nt, Human adenovirus F
gacauuguuuugcuaccugg

SEQ ID NO: 3944391 - RNA, 15 nt, Human adenovirus F
gaccgagcagcugcg

SEQ ID NO: 3944392 - RNA, 19 nt, Human adenovirus F
gaccguauucacaaagcug

SEQ ID NO: 3944393 - RNA, 17 nt, Human adenovirus F
gaccuaaacucugagga

SEQ ID NO: 3944394 - RNA, 23 nt, Human adenovirus F
gaccucagggucgauggagccag

SEQ ID NO: 3944395 - RNA, 17 nt, Human adenovirus F
gacgaauugcagcccac

SEQ ID NO: 3944396 - RNA, 14 nt, Human adenovirus F
gacgcuggaagagg

SEQ ID NO: 3944397 - RNA, 18 nt, Human adenovirus F
gacgcuugcuggaguugg

SEQ ID NO: 3944398 - RNA, 17 nt, Human adenovirus F
gacggcuuuggcuguac

SEQ ID NO: 3944399 - RNA, 23 nt, Human adenovirus F
gacgugccugagggcgacgacgg

SEQ ID NO: 3944400 - RNA, 14 nt, Human adenovirus F
gacgugugugugag

SEQ ID NO: 3944401 - RNA, 17 nt, Human adenovirus F
gacugggcggcggccau

SEQ ID NO: 3944402 - RNA, 20 nt, Human adenovirus F
gacuuuaccccgacagaggc

SEQ ID NO: 3944403 - RNA, 17 nt, Human adenovirus F
gacuuugcuccgccggc

SEQ ID NO: 3944404 - RNA, 18 nt, Human adenovirus F
gagacgugcggugggagu

SEQ ID NO: 3944405 - RNA, 22 nt, Human adenovirus F
gagaguugggacucuugcugga

SEQ ID NO: 3944406 - RNA, 22 nt, Human adenovirus F
gagaugcgccucaugagcuggg

SEQ ID NO: 3944407 - RNA, 23 nt, Human adenovirus F
gagauucaagggccagagcaaca

SEQ ID NO: 3944408 - RNA, 22 nt, Human adenovirus F
gagcaaacggugaacgaggagc

SEQ ID NO: 3944409 - RNA, 20 nt, Human adenovirus F
gagcagcgggaagagaggca

SEQ ID NO: 3944410 - RNA, 15 nt, Human adenovirus F
gagccacagguccag

SEQ ID NO: 3944411 - RNA, 20 nt, Human adenovirus F
gagcccccgugggggaccga

SEQ ID NO: 3944412 - RNA, 15 nt, Human adenovirus F
gagcccgggccuggu

SEQ ID NO: 3944413 - RNA, 14 nt, Human adenovirus F
gagccgccaggugg

SEQ ID NO: 3944414 - RNA, 15 nt, Human adenovirus F
gagcugggacagccu

SEQ ID NO: 3944415 - RNA, 16 nt, Human adenovirus F
gagcuuuuacugggac

SEQ ID NO: 3944416 - RNA, 14 nt, Human adenovirus F
gaggaggaggccau

SEQ ID NO: 3944417 - RNA, 14 nt, Human adenovirus F
gaggaggccauccu

SEQ ID NO: 3944418 - RNA, 20 nt, Human adenovirus F
gaggcauuuuagggcguaga

SEQ ID NO: 3944419 - RNA, 19 nt, Human adenovirus F
gaggccauccuggaccugg

SEQ ID NO: 3944420 - RNA, 20 nt, Human adenovirus F
gaggccgguacccagaccau

SEQ ID NO: 3944421 - RNA, 15 nt, Human adenovirus F
gaggcggaggagcag

SEQ ID NO: 3944422 - RNA, 16 nt, Human adenovirus F
gaggcuauuggccaga

SEQ ID NO: 3944423 - RNA, 19 nt, Human adenovirus F
gaggcuuuccgcgaggcca

SEQ ID NO: 3944424 - RNA, 21 nt, Human adenovirus F
gaggcuuuccgcgaggccaug

SEQ ID NO: 3944425 - RNA, 15 nt, Human adenovirus F
gagggcguuggagag

SEQ ID NO: 3944426 - RNA, 11 nt, Human adenovirus F
gagggcuucca

SEQ ID NO: 3944427 - RNA, 22 nt, Human adenovirus F
gagguguaccaguccgggccag

SEQ ID NO: 3944428 - RNA, 13 nt, Human adenovirus F
gaguuaaccuuga

SEQ ID NO: 3944429 - RNA, 19 nt, Human adenovirus F
gaguugucuugguaggcaa

SEQ ID NO: 3944430 - RNA, 21 nt, Human adenovirus F
gauaccgcugcagcugcugcc

SEQ ID NO: 3944431 - RNA, 23 nt, Human adenovirus F
gauauagccaaccaggccuugca

SEQ ID NO: 3944432 - RNA, 14 nt, Human adenovirus F
gaucagccaggugg

SEQ ID NO: 3944433 - RNA, 15 nt, Human adenovirus F
gauccauagagggcg

SEQ ID NO: 3944434 - RNA, 14 nt, Human adenovirus F
gaucguagacaacu

SEQ ID NO: 3944435 - RNA, 19 nt, Human adenovirus F
gaugaaacuugauuuccau

SEQ ID NO: 3944436 - RNA, 15 nt, Human adenovirus F
gaugauggagggaac

SEQ ID NO: 3944437 - RNA, 20 nt, Human adenovirus F
gaugaugucgugucugcgua

SEQ ID NO: 3944438 - RNA, 22 nt, Human adenovirus F
gaugcauuugugggacuuuaug

SEQ ID NO: 3944439 - RNA, 20 nt, Human adenovirus F
gaugcgccucaugagcuggg

SEQ ID NO: 3944440 - RNA, 11 nt, Human adenovirus F
gauggaguugu

SEQ ID NO: 3944441 - RNA, 11 nt, Human adenovirus F
gauggcagcag

SEQ ID NO: 3944442 - RNA, 16 nt, Human adenovirus F
gauggcgauggggccu

SEQ ID NO: 3944443 - RNA, 23 nt, Human adenovirus F
gaugguaaaaaugccaggcagca

SEQ ID NO: 3944444 - RNA, 14 nt, Human adenovirus F
gaugguggcaagga

SEQ ID NO: 3944445 - RNA, 22 nt, Human adenovirus F
uuggaagggaaggcguggaaaa

SEQ ID NO: 3944446 - RNA, 16 nt, Human adenovirus F
uuggaaugccugcagc

SEQ ID NO: 3944447 - RNA, 21 nt, Human adenovirus F
uuggagagcaguuuggcaaug

SEQ ID NO: 3944448 - RNA, 14 nt, Human adenovirus F
uugggggccuuuug

SEQ ID NO: 3944449 - RNA, 19 nt, Human adenovirus F
uuggucaaaaacucuguga

SEQ ID NO: 3944450 - RNA, 12 nt, Human adenovirus F
uuguaccaccuu

SEQ ID NO: 3944451 - RNA, 22 nt, Human adenovirus F
uugugaucagaaauuuagauuu

SEQ ID NO: 3944452 - RNA, 23 nt, Human adenovirus F
uuuaaaacuuuauggauguuuuc

SEQ ID NO: 3944453 - RNA, 14 nt, Human adenovirus F
uuuaaccuuaaaau

SEQ ID NO: 3944454 - RNA, 11 nt, Human adenovirus F
uuuaauacagu

SEQ ID NO: 3944455 - RNA, 16 nt, Human adenovirus F
uuuaugcccaacagua

SEQ ID NO: 3944456 - RNA, 19 nt, Human adenovirus F
uuucaccgccuuggccagc

SEQ ID NO: 3944457 - RNA, 22 nt, Human adenovirus F
uuucacguaguaucucaucccc

SEQ ID NO: 3944458 - RNA, 18 nt, Human adenovirus F
uuuccaugcacucaucca

SEQ ID NO: 3944459 - RNA, 12 nt, Human adenovirus F
uuucccagaguu

SEQ ID NO: 3944460 - RNA, 23 nt, Human adenovirus F
uuugcaucucaaagcuggagcuc

SEQ ID NO: 3944461 - RNA, 16 nt, Human adenovirus F
uuuggacccccaaacc

SEQ ID NO: 3944462 - RNA, 20 nt, Human adenovirus F
uuugguaacaaggccuggaa

SEQ ID NO: 3944463 - RNA, 20 nt, Human adenovirus F
uuuuacgcggggcaggagcu

SEQ ID NO: 3944464 - RNA, 12 nt, Human adenovirus F
uuuuaugaagac

SEQ ID NO: 3944465 - RNA, 21 nt, Human adenovirus F
uuuucagguggggggucggcg

SEQ ID NO: 3944466 - RNA, 16 nt, Human adenovirus F
uuuuccagcaacuuua

SEQ ID NO: 3944467 - RNA, 20 nt, Human adenovirus F
uuuugaugaagcgugguaaa

SEQ ID NO: 3944468 - RNA, 18 nt, Human adenovirus F
uuuuugagcaugaaacug

SEQ ID NO: 3944469 - RNA, 17 nt, Human adenovirus F
uacuggauacuggcaag

SEQ ID NO: 3944470 - RNA, 23 nt, Human adenovirus F
uacuucuucagcucuaagacugu

SEQ ID NO: 3944471 - RNA, 22 nt, Human adenovirus F
uagaaaacgaaaacuuaacccu

SEQ ID NO: 3944472 - RNA, 13 nt, Human adenovirus F
uagccaaccaggc

SEQ ID NO: 3944473 - RNA, 14 nt, Human adenovirus F
uagcucugaacacu

SEQ ID NO: 3944474 - RNA, 15 nt, Human adenovirus F
uagcucuuccaagcu

SEQ ID NO: 3944475 - RNA, 13 nt, Human adenovirus F
uagcuggagggca

SEQ ID NO: 3944476 - RNA, 15 nt, Human adenovirus F
uaggaccacuggagg

SEQ ID NO: 3944477 - RNA, 14 nt, Human adenovirus F
uaggcauacaggcu

SEQ ID NO: 3944478 - RNA, 16 nt, Human adenovirus F
uagggugucugccaga

SEQ ID NO: 3944479 - RNA, 14 nt, Human adenovirus F
uaucacgcccacca

SEQ ID NO: 3944480 - RNA, 18 nt, Human adenovirus F
uaucccgccccugccacc

SEQ ID NO: 3944481 - RNA, 12 nt, Human adenovirus F
uaucuugcaaaa

SEQ ID NO: 3944482 - RNA, 15 nt, Human adenovirus F
uaugggagucuggca

SEQ ID NO: 3944483 - RNA, 23 nt, Human adenovirus F
uauguuagcgaaaacggaaacaa

SEQ ID NO: 3944484 - RNA, 12 nt, Human adenovirus F
uauuacaaaugc

SEQ ID NO: 3944485 - RNA, 22 nt, Human adenovirus F
uauuucuuugucuaacuaaaaa

SEQ ID NO: 3944486 - RNA, 19 nt, Human adenovirus F
uauuuguauaaucuuaaaa

SEQ ID NO: 3944487 - RNA, 20 nt, Human adenovirus F
ucaaacaaccagcgcucuac

SEQ ID NO: 3944488 - RNA, 13 nt, Human adenovirus F
ucaaacaggaaga

SEQ ID NO: 3944489 - RNA, 17 nt, Human adenovirus F
ucaagcccgacauuaag

SEQ ID NO: 3944490 - RNA, 16 nt, Human adenovirus F
ucaaguuugguagcaa

SEQ ID NO: 3944491 - RNA, 13 nt, Human adenovirus F
ucaaucagcggcu

SEQ ID NO: 3944492 - RNA, 16 nt, Human adenovirus F
ucacaacaccgcuucc

SEQ ID NO: 3944493 - RNA, 19 nt, Human adenovirus F
ucacaacaccgcuuccacc

SEQ ID NO: 3944494 - RNA, 14 nt, Human adenovirus F
ucaccuacuaccac

SEQ ID NO: 3944495 - RNA, 14 nt, Human adenovirus F
ucaccuacucuggc

SEQ ID NO: 3944496 - RNA, 17 nt, Human adenovirus F
ucacggaacccugccgc

SEQ ID NO: 3944497 - RNA, 18 nt, Human adenovirus F
ucacucuccgccgccgcu

SEQ ID NO: 3944498 - RNA, 18 nt, Human adenovirus F
ucacugacgcccgccguc

SEQ ID NO: 3944499 - RNA, 18 nt, Human adenovirus F
ucacuuugccagagggca

SEQ ID NO: 3944500 - RNA, 19 nt, Human adenovirus F
ucagaucagcgggcacaga

SEQ ID NO: 3944501 - RNA, 18 nt, Human adenovirus F
ucagcgcgugaccaucac

SEQ ID NO: 3944502 - RNA, 12 nt, Human adenovirus F
ucaggcagcagc

SEQ ID NO: 3944503 - RNA, 13 nt, Human adenovirus F
ucaggguguuuug

SEQ ID NO: 3944504 - RNA, 14 nt, Human adenovirus F
ucauacaaaugcuc

SEQ ID NO: 3944505 - RNA, 19 nt, Human adenovirus F
ucauggcguggaagacgag

SEQ ID NO: 3944506 - RNA, 23 nt, Human adenovirus F
ucaugucccaccacauuggccac

SEQ ID NO: 3944507 - RNA, 19 nt, Human adenovirus F
uccaaaggucagaaaaacc

SEQ ID NO: 3944508 - RNA, 19 nt, Human adenovirus F
uccaaaucauugcauauaa

SEQ ID NO: 3944509 - RNA, 24 nt, Human adenovirus F
uccaaauuuuuaugaaacacacau

SEQ ID NO: 3944510 - RNA, 16 nt, Human adenovirus F
uccaagcgucuuacau

SEQ ID NO: 3944511 - RNA, 13 nt, Human adenovirus F
uccacaaaaacuc

SEQ ID NO: 3944512 - RNA, 14 nt, Human adenovirus F
uccacgcucccgga

SEQ ID NO: 3944513 - RNA, 16 nt, Human adenovirus F
uccagcaacuuuaugu

SEQ ID NO: 3944514 - RNA, 20 nt, Human adenovirus F
uccagcauaauaacucuggc

SEQ ID NO: 3944515 - RNA, 22 nt, Human adenovirus F
uccaggcuaaaacaaaggaggc

SEQ ID NO: 3944516 - RNA, 21 nt, Human adenovirus F
uccagugcaggaagaggagga

SEQ ID NO: 3944517 - RNA, 18 nt, Human adenovirus F
uccauaaacuccucuucc

SEQ ID NO: 3944518 - RNA, 22 nt, Human adenovirus F
uccauaccagaguaacuuuugc

SEQ ID NO: 3944519 - RNA, 23 nt, Human adenovirus F
uccaucgccggaucgccaacagc

SEQ ID NO: 3944520 - RNA, 23 nt, Human adenovirus F
ucccaaagucccccuuacagccu

SEQ ID NO: 3944521 - RNA, 14 nt, Human adenovirus F
ucccaaagugcugu

SEQ ID NO: 3944522 - RNA, 14 nt, Human adenovirus F
ucccaggcggaaac

SEQ ID NO: 3944523 - RNA, 21 nt, Human adenovirus F
ucccgaagccuucaggcagca

SEQ ID NO: 3944524 - RNA, 15 nt, Human adenovirus F
ucccgccccugccac

SEQ ID NO: 3944525 - RNA, 19 nt, Human adenovirus F
ucccgccccugccaccgca

SEQ ID NO: 3944526 - RNA, 15 nt, Human adenovirus F
ucccgcccucacaga

SEQ ID NO: 3944527 - RNA, 16 nt, Human adenovirus F
uccgaaacuuccaacc

SEQ ID NO: 3944528 - RNA, 18 nt, Human adenovirus F
uccgaccauuaccaccgu

SEQ ID NO: 3944529 - RNA, 14 nt, Human adenovirus F
uccgccuccacccu

SEQ ID NO: 3944530 - RNA, 23 nt, Human adenovirus F
uccggguugggcgcuugccaggg

SEQ ID NO: 3944531 - RNA, 12 nt, Human adenovirus F
uccucccaaagu

SEQ ID NO: 3944532 - RNA, 17 nt, Human adenovirus F
uccuccuucacaaaguc

SEQ ID NO: 3944533 - RNA, 16 nt, Human adenovirus F
uccucguuguuuuccu

SEQ ID NO: 3944534 - RNA, 17 nt, Human adenovirus F
uccugacuauuuuaugc

SEQ ID NO: 3944535 - RNA, 21 nt, Human adenovirus F
uccuggcgagcccauaaaagc

SEQ ID NO: 3944536 - RNA, 20 nt, Human adenovirus F
uccugucgccccugccaacu

SEQ ID NO: 3944537 - RNA, 21 nt, Human adenovirus F
uccuuaacaagggcuuccucc

SEQ ID NO: 3944538 - RNA, 13 nt, Human adenovirus F
uccuuaaggagga

SEQ ID NO: 3944539 - RNA, 21 nt, Human adenovirus F
uccuuauucucaccuggcaaa

SEQ ID NO: 3944540 - RNA, 11 nt, Human adenovirus F
ucgauuuccau

SEQ ID NO: 3944541 - RNA, 20 nt, Human adenovirus F
ucgcaaacaaagaaguacau

SEQ ID NO: 3944542 - RNA, 19 nt, Human adenovirus F
ucgcagaaacaugccaccc

SEQ ID NO: 3944543 - RNA, 16 nt, Human adenovirus F
ucgcagaaucuccugc

SEQ ID NO: 3944544 - RNA, 14 nt, Human adenovirus F
ucgcagcgggcagg

SEQ ID NO: 3944545 - RNA, 15 nt, Human adenovirus F
ucgcaugccuccagc

SEQ ID NO: 3944546 - RNA, 20 nt, Human adenovirus F
ucgccaacagccccagcugg

SEQ ID NO: 3944547 - RNA, 16 nt, Human adenovirus F
ucgccccugugagugu

SEQ ID NO: 3944548 - RNA, 23 nt, Human adenovirus F
ucgcgcaacggcaaucccagcag

SEQ ID NO: 3944549 - RNA, 16 nt, Human adenovirus F
ucgcucuguccgccgc

SEQ ID NO: 3944550 - RNA, 19 nt, Human adenovirus F
ucggagccaaccuccgaaa

SEQ ID NO: 3944551 - RNA, 14 nt, Human adenovirus F
ucggcaccagccag

SEQ ID NO: 3944552 - RNA, 14 nt, Human adenovirus F
ucgugucugcguac

SEQ ID NO: 3944553 - RNA, 21 nt, Human adenovirus F
ucuaagggaacuucuccccuu

SEQ ID NO: 3944554 - RNA, 20 nt, Human adenovirus F
ucuaagggaggcagcagagg

SEQ ID NO: 3944555 - RNA, 13 nt, Human adenovirus F
ucuaccacagaaa

SEQ ID NO: 3944556 - RNA, 15 nt, Human adenovirus F
ucuaggcauaaaguu

SEQ ID NO: 3944557 - RNA, 16 nt, Human adenovirus F
ucuauggcccugccgc

SEQ ID NO: 3944558 - RNA, 17 nt, Human adenovirus F
ucucagcaguugcaaga

SEQ ID NO: 3944559 - RNA, 12 nt, Human adenovirus F
ucugacaaacac

SEQ ID NO: 3944560 - RNA, 14 nt, Human adenovirus F
ucugagaguguuuc

SEQ ID NO: 3944561 - RNA, 18 nt, Human adenovirus F
ucugagcacauugccagc

SEQ ID NO: 3944562 - RNA, 19 nt, Human adenovirus F
ucugcaccugcacgcucuu

SEQ ID NO: 3944563 - RNA, 21 nt, Human adenovirus F
ucugcaucucuugaaugaggu

SEQ ID NO: 3944564 - RNA, 17 nt, Human adenovirus F
ucugcuuaacccucccg

SEQ ID NO: 3944565 - RNA, 15 nt, Human adenovirus F
ucuguccgccgccgc

SEQ ID NO: 3944566 - RNA, 18 nt, Human adenovirus F
ucuuaaguuauacaguga

SEQ ID NO: 3944567 - RNA, 13 nt, Human adenovirus F
ucuuauggaagac

SEQ ID NO: 3944568 - RNA, 22 nt, Human adenovirus F
ucuuccaccgguccuagaccug

SEQ ID NO: 3944569 - RNA, 21 nt, Human adenovirus F
ucuucggcaggaaagccacgc

SEQ ID NO: 3944570 - RNA, 15 nt, Human adenovirus F
ucuugagcaggccgc

SEQ ID NO: 3944571 - RNA, 15 nt, Human adenovirus F
ucuugucguaaccaa

SEQ ID NO: 3944572 - RNA, 13 nt, Human adenovirus F
ucuuuacccagac

SEQ ID NO: 3944573 - RNA, 11 nt, Human adenovirus F
ucuuugccacc

SEQ ID NO: 3944574 - RNA, 21 nt, Human adenovirus F
ucuuugggguccggguuugau

SEQ ID NO: 3944575 - RNA, 13 nt, Human adenovirus F
ugaacccacccuc

SEQ ID NO: 3944576 - RNA, 17 nt, Human adenovirus F
ugaagcccgcaacggcg

SEQ ID NO: 3944577 - RNA, 15 nt, Human adenovirus F
ugacaaacaagcugu

SEQ ID NO: 3944578 - RNA, 16 nt, Human adenovirus F
ugacauuccuccgccu

SEQ ID NO: 3944579 - RNA, 18 nt, Human adenovirus F
ugacccacaaucuucauc

SEQ ID NO: 3944580 - RNA, 19 nt, Human adenovirus F
ugaccccaaugacaggcug

SEQ ID NO: 3944581 - RNA, 15 nt, Human adenovirus F
ugaccgagcagcugc

SEQ ID NO: 3944582 - RNA, 15 nt, Human adenovirus F
ugaccggcgcuggga

SEQ ID NO: 3944583 - RNA, 17 nt, Human adenovirus F
ugacggagucuuucagc

SEQ ID NO: 3944584 - RNA, 14 nt, Human adenovirus F
ugacggcgcagcug

SEQ ID NO: 3944585 - RNA, 16 nt, Human adenovirus F
ugacgguaaaggggcg

SEQ ID NO: 3944586 - RNA, 23 nt, Human adenovirus F
ugacuucaaccccgucuacccuu

SEQ ID NO: 3944587 - RNA, 23 nt, Human adenovirus F
ugacuuuaccccgacagaggccg

SEQ ID NO: 3944588 - RNA, 23 nt, Human adenovirus F
ugagauuuguaguggagggauuu

SEQ ID NO: 3944589 - RNA, 18 nt, Human adenovirus F
ugagcaaagacauuccca

SEQ ID NO: 3944590 - RNA, 18 nt, Human adenovirus F
ugagcaagcgcaaguuca

SEQ ID NO: 3944591 - RNA, 18 nt, Human adenovirus F
ugagcaggccgcccaaca

SEQ ID NO: 3944592 - RNA, 17 nt, Human adenovirus F
ugaggauuuggagggcg

SEQ ID NO: 3944593 - RNA, 15 nt, Human adenovirus F
ugagggucgcuggcu

SEQ ID NO: 3944594 - RNA, 21 nt, Human adenovirus F
ugaguugguagcagugucaau

SEQ ID NO: 3944595 - RNA, 17 nt, Human adenovirus F
ugaucccgaagagggua

SEQ ID NO: 3944596 - RNA, 20 nt, Human adenovirus F
ugaucccgaagaggguacua

SEQ ID NO: 3944597 - RNA, 22 nt, Human adenovirus F
ugaugccgcaauggucuuacau

SEQ ID NO: 3944598 - RNA, 19 nt, Human adenovirus F
ugauucuccaaagcagucu

SEQ ID NO: 3944599 - RNA, 16 nt, Human adenovirus F
ugcaaaacaauucucu

SEQ ID NO: 3944600 - RNA, 20 nt, Human adenovirus F
ugcaaaaugugcagcaaaaa

SEQ ID NO: 3944601 - RNA, 20 nt, Human adenovirus F
ugcaaacgagaggaccacuu

SEQ ID NO: 3944602 - RNA, 17 nt, Human adenovirus F
ugcacacaugcuuuucc

SEQ ID NO: 3944603 - RNA, 21 nt, Human adenovirus F
ugcaguccacuuaacagcucc

SEQ ID NO: 3944604 - RNA, 16 nt, Human adenovirus F
ugcauacaacucccug

SEQ ID NO: 3944605 - RNA, 13 nt, Human adenovirus F
ugcauguuggaaa

SEQ ID NO: 3944606 - RNA, 15 nt, Human adenovirus F
ugcauuauggccaug

SEQ ID NO: 3944607 - RNA, 14 nt, Human adenovirus F
ugcauuuuggccug

SEQ ID NO: 3944608 - RNA, 16 nt, Human adenovirus F
ugccaaaguggcucuu

SEQ ID NO: 3944609 - RNA, 13 nt, Human adenovirus F
ugccaacaaaugu

SEQ ID NO: 3944610 - RNA, 18 nt, Human adenovirus F
ugccaccgcaaccauguu

SEQ ID NO: 3944611 - RNA, 22 nt, Human adenovirus F
ugccagaacuuccagcuguugg

SEQ ID NO: 3944612 - RNA, 13 nt, Human adenovirus F
ugccaggcagcag

SEQ ID NO: 3944613 - RNA, 18 nt, Human adenovirus F
ugccauacgggagggaca

SEQ ID NO: 3944614 - RNA, 16 nt, Human adenovirus F
ugcccaccguuccgcc

SEQ ID NO: 3944615 - RNA, 23 nt, Human adenovirus F
ugccccccggcggcgggugcagu

SEQ ID NO: 3944616 - RNA, 21 nt, Human adenovirus F
ugcccgccagcuggcaaaccu

SEQ ID NO: 3944617 - RNA, 19 nt, Human adenovirus F
ugccgcaauggucuuacau

SEQ ID NO: 3944618 - RNA, 20 nt, Human adenovirus F
ugccgcgcgggcaggaggac

SEQ ID NO: 3944619 - RNA, 15 nt, Human adenovirus F
ugccgcggacgucaa

SEQ ID NO: 3944620 - RNA, 14 nt, Human adenovirus F
ugccuccagcacug

SEQ ID NO: 3944621 - RNA, 22 nt, Human adenovirus F
ugccuccguguuuuuugaugcg

SEQ ID NO: 3944622 - RNA, 23 nt, Human adenovirus F
ugccuuaacauuuaugcccaaca

SEQ ID NO: 3944623 - RNA, 20 nt, Human adenovirus F
ugccuuggaaucauccaccu

SEQ ID NO: 3944624 - RNA, 20 nt, Human adenovirus F
ugccuuuucacauccaagug

SEQ ID NO: 3944625 - RNA, 14 nt, Human adenovirus F
ugcggagccugagg

SEQ ID NO: 3944626 - RNA, 19 nt, Human adenovirus F
ugcggugccugaagcacug

SEQ ID NO: 3944627 - RNA, 14 nt, Human adenovirus F
ugcuaacccucaaa

SEQ ID NO: 3944628 - RNA, 17 nt, Human adenovirus F
ugcucccaaagugcugu

SEQ ID NO: 3944629 - RNA, 22 nt, Human adenovirus F
ugcugaauauugcggagccuga

SEQ ID NO: 3944630 - RNA, 14 nt, Human adenovirus F
ugcuuagacccggc

SEQ ID NO: 3944631 - RNA, 13 nt, Human adenovirus F
uggaaagccuggu

SEQ ID NO: 3944632 - RNA, 19 nt, Human adenovirus F
uggaacgagaucggcacca

SEQ ID NO: 3944633 - RNA, 14 nt, Human adenovirus F
uggaacgcaguguu

SEQ ID NO: 3944634 - RNA, 14 nt, Human adenovirus F
uggaaucagcaucu

SEQ ID NO: 3944635 - RNA, 16 nt, Human adenovirus F
uggaauuacugccagu

SEQ ID NO: 3944636 - RNA, 14 nt, Human adenovirus F
uggacauggccagc

SEQ ID NO: 3944637 - RNA, 18 nt, Human adenovirus F
uggaccuggaagagggcg

SEQ ID NO: 3944638 - RNA, 22 nt, Human adenovirus F
uggaggagauggugggccgcug

SEQ ID NO: 3944639 - RNA, 13 nt, Human adenovirus F
uggaggagcuguc

SEQ ID NO: 3944640 - RNA, 11 nt, Human adenovirus F
uggaggcagcu

SEQ ID NO: 3944641 - RNA, 19 nt, Human adenovirus F
uggaggcuugggaggauuu

SEQ ID NO: 3944642 - RNA, 14 nt, Human adenovirus F
uggaguuguggagu

SEQ ID NO: 3944643 - RNA, 14 nt, Human adenovirus F
uggauacuggcaag

SEQ ID NO: 3944644 - RNA, 13 nt, Human adenovirus F
uggaugagcccac

SEQ ID NO: 3944645 - RNA, 16 nt, Human adenovirus F
uggaugcauccuccca

SEQ ID NO: 3944646 - RNA, 16 nt, Human adenovirus F
uggauguuuuccaaga

SEQ ID NO: 3944647 - RNA, 18 nt, Human adenovirus F
uggcaacccugaggagga

SEQ ID NO: 3944648 - RNA, 21 nt, Human adenovirus F
uggcaaugugcucgcaaacaa

SEQ ID NO: 3944649 - RNA, 13 nt, Human adenovirus F
uggcacagcucac

SEQ ID NO: 3944650 - RNA, 22 nt, Human adenovirus F
uggccuuuugaacgaccugcac

SEQ ID NO: 3944651 - RNA, 22 nt, Human adenovirus F
uggcgcauucccuuuuccagca

SEQ ID NO: 3944652 - RNA, 19 nt, Human adenovirus F
uggcgguggucacucucag

SEQ ID NO: 3944653 - RNA, 17 nt, Human adenovirus F
uggcuuuuggaccuggu

SEQ ID NO: 3944654 - RNA, 22 nt, Human adenovirus F
ugggaaggggccagcaagcugc

SEQ ID NO: 3944655 - RNA, 14 nt, Human adenovirus F
ugggacagcaggcc

SEQ ID NO: 3944656 - RNA, 14 nt, Human adenovirus F
ugggacgacagcca

SEQ ID NO: 3944657 - RNA, 18 nt, Human adenovirus F
ugggaggggaggacgacg

SEQ ID NO: 3944658 - RNA, 17 nt, Human adenovirus F
ugggagucuggcagcag

SEQ ID NO: 3944659 - RNA, 17 nt, Human adenovirus F
ugggaguugcgcgccgc

SEQ ID NO: 3944660 - RNA, 14 nt, Human adenovirus F
ugggcguccagugg

SEQ ID NO: 3944661 - RNA, 16 nt, Human adenovirus F
uggggcggcgaccuga

SEQ ID NO: 3944662 - RNA, 20 nt, Human adenovirus F
uggugaauaagcgucggcgc

SEQ ID NO: 3944663 - RNA, 14 nt, Human adenovirus F
ugguggggaguucu

SEQ ID NO: 3944664 - RNA, 22 nt, Human adenovirus F
uguaacaucccucacuaccauu

SEQ ID NO: 3944665 - RNA, 21 nt, Human adenovirus F
uguaacucucccuuuccagca

SEQ ID NO: 3944666 - RNA, 21 nt, Human adenovirus F
uguacaaagucauccaaauca

SEQ ID NO: 3944667 - RNA, 13 nt, Human adenovirus F
ugucaacggcaca

SEQ ID NO: 3944668 - RNA, 17 nt, Human adenovirus F
ugucguugccagccggu

SEQ ID NO: 3944669 - RNA, 20 nt, Human adenovirus F
ugucugccaaaauggcucug

SEQ ID NO: 3944670 - RNA, 15 nt, Human adenovirus F
ugugagcuggccugg

SEQ ID NO: 3944671 - RNA, 14 nt, Human adenovirus F
ugugaguguggagc

SEQ ID NO: 3944672 - RNA, 21 nt, Human adenovirus F
ugugccauuguuaacacggcg

SEQ ID NO: 3944673 - RNA, 21 nt, Human adenovirus F
uguggacgacagccagcuguu

SEQ ID NO: 3944674 - RNA, 18 nt, Human adenovirus F
uguggggcgugcgagccc

SEQ ID NO: 3944675 - RNA, 17 nt, Human adenovirus F
uguuaucacccaaagcc

SEQ ID NO: 3944676 - RNA, 19 nt, Human adenovirus F
uuacaaaaagagaaucuaa

SEQ ID NO: 3944677 - RNA, 19 nt, Human adenovirus F
uuaccacugccacugaaac

SEQ ID NO: 3944678 - RNA, 17 nt, Human adenovirus F
uuacgcggggcaggagc

SEQ ID NO: 3944679 - RNA, 14 nt, Human adenovirus F
uuagcgaaaacgga

SEQ ID NO: 3944680 - RNA, 14 nt, Human adenovirus F
uuagcucugaacac

SEQ ID NO: 3944681 - RNA, 17 nt, Human adenovirus F
uuaggccaucggccaug

SEQ ID NO: 3944682 - RNA, 12 nt, Human adenovirus F
uuauugccaccg

SEQ ID NO: 3944683 - RNA, 19 nt, Human adenovirus F
uuauuguucaaggaaacaa

SEQ ID NO: 3944684 - RNA, 15 nt, Human adenovirus F
uucaaagaagagcug

SEQ ID NO: 3944685 - RNA, 15 nt, Human adenovirus F
uucaagcccuacacc

SEQ ID NO: 3944686 - RNA, 20 nt, Human adenovirus F
uucaccuuuuuacccugacc

SEQ ID NO: 3944687 - RNA, 12 nt, Human adenovirus F
uucacugaaagc

SEQ ID NO: 3944688 - RNA, 23 nt, Human adenovirus F
uucagacgaggaggcggaggagc

SEQ ID NO: 3944689 - RNA, 13 nt, Human adenovirus F
uuccacuggcaac

SEQ ID NO: 3944690 - RNA, 20 nt, Human adenovirus F
uucccgguccauacuugugc

SEQ ID NO: 3944691 - RNA, 15 nt, Human adenovirus F
uuccucuucucuguc

SEQ ID NO: 3944692 - RNA, 16 nt, Human adenovirus F
uucgcauuucuuuuuu

SEQ ID NO: 3944693 - RNA, 17 nt, Human adenovirus F
uucgcccggacacuauu

SEQ ID NO: 3944694 - RNA, 19 nt, Human adenovirus F
uucgucaggccugcaagau

SEQ ID NO: 3944695 - RNA, 16 nt, Human adenovirus F
uucugagucuaccacu

SEQ ID NO: 3944696 - RNA, 22 nt, Human adenovirus F
uucuguuauggaucaagugcuu

SEQ ID NO: 3944697 - RNA, 16 nt, Human adenovirus F
uucuuuuugggaggaa

SEQ ID NO: 3944698 - RNA, 17 nt, Human adenovirus F
uugauauuuaucugccc

SEQ ID NO: 3944699 - RNA, 14 nt, Human adenovirus F
uugcaaaaccaaau

SEQ ID NO: 3944700 - RNA, 22 nt, Human adenovirus F
uugcacuuaacuguucuugucg

SEQ ID NO: 3944701 - RNA, 17 nt, Human adenovirus F
uugcaugguguguuuuu

SEQ ID NO: 3944702 - RNA, 15 nt, Human adenovirus F
uugccgcagccagug

SEQ ID NO: 3944703 - RNA, 15 nt, Human adenovirus F
uugcgcgaacagagu

SEQ ID NO: 3944704 - RNA, 17 nt, Human adenovirus F
uugcgucgcuggcuccg

SEQ ID NO: 3944705 - RNA, 22 nt, Human adenovirus F
uugcuauugaaaauaacucacu

SEQ ID NO: 3944706 - RNA, 16 nt, Human adenovirus F
uugcucucuccggagc

SEQ ID NO: 3944707 - RNA, 14 nt, Human adenovirus F
aagacaccaguagc

SEQ ID NO: 3944708 - RNA, 21 nt, Human adenovirus F
aagacgacuucaaccccgucu

SEQ ID NO: 3944709 - RNA, 14 nt, Human adenovirus F
aagagaaagaugga

SEQ ID NO: 3944710 - RNA, 13 nt, Human adenovirus F
aagaucagguucc

SEQ ID NO: 3944711 - RNA, 16 nt, Human adenovirus F
aagauggcgugggagu

SEQ ID NO: 3944712 - RNA, 19 nt, Human adenovirus F
aagccacaauaagcagcuu

SEQ ID NO: 3944713 - RNA, 17 nt, Human adenovirus F
aagccucucgcucugca

SEQ ID NO: 3944714 - RNA, 20 nt, Human adenovirus F
aagcuacaaggacaggaugu

SEQ ID NO: 3944715 - RNA, 19 nt, Human adenovirus F
aagcucgcgcacagcuucg

SEQ ID NO: 3944716 - RNA, 22 nt, Human adenovirus F
aagcucgucauaggccauuuug

SEQ ID NO: 3944717 - RNA, 13 nt, Human adenovirus F
aagcugccccguc

SEQ ID NO: 3944718 - RNA, 21 nt, Human adenovirus F
aagcugggauuugccgcagcc

SEQ ID NO: 3944719 - RNA, 22 nt, Human adenovirus F
aagcuucuaucugcaaaaaagc

SEQ ID NO: 3944720 - RNA, 16 nt, Human adenovirus F
aaggacgguggcauga

SEQ ID NO: 3944721 - RNA, 17 nt, Human adenovirus F
aaggcccauaccaaaga

SEQ ID NO: 3944722 - RNA, 22 nt, Human adenovirus F
aaggcuggcacacgcacuucaa

SEQ ID NO: 3944723 - RNA, 11 nt, Human adenovirus F
aagggcaaagg

SEQ ID NO: 3944724 - RNA, 17 nt, Human adenovirus F
aaggggcgcgcuccggg

SEQ ID NO: 3944725 - RNA, 19 nt, Human adenovirus F
aaggugggcauaacuucag

SEQ ID NO: 3944726 - RNA, 22 nt, Human adenovirus F
aaguauacauuugaacagcuga

SEQ ID NO: 3944727 - RNA, 15 nt, Human adenovirus F
aaguauuacaaaugc

SEQ ID NO: 3944728 - RNA, 16 nt, Human adenovirus F
aagucauccaaaucau

SEQ ID NO: 3944729 - RNA, 20 nt, Human adenovirus F
aaguccacaaaaacuccaaa

SEQ ID NO: 3944730 - RNA, 13 nt, Human adenovirus F
aaguuaccaaaga

SEQ ID NO: 3944731 - RNA, 15 nt, Human adenovirus F
aaguuaccaaagaca

SEQ ID NO: 3944732 - RNA, 20 nt, Human adenovirus F
aaguuaccaaagacaaaauc

SEQ ID NO: 3944733 - RNA, 12 nt, Human adenovirus F
aauacaauuuuu

SEQ ID NO: 3944734 - RNA, 15 nt, Human adenovirus F
aauagacgccccacu

SEQ ID NO: 3944735 - RNA, 20 nt, Human adenovirus F
aauauuuauacacucccuuu

SEQ ID NO: 3944736 - RNA, 17 nt, Human adenovirus F
aaucagcggcuggaaaa

SEQ ID NO: 3944737 - RNA, 12 nt, Human adenovirus F
aaucauuuccag

SEQ ID NO: 3944738 - RNA, 12 nt, Human adenovirus F
aauccuuuuugg

SEQ ID NO: 3944739 - RNA, 22 nt, Human adenovirus F
aaucuuacuuugacaugggggc

SEQ ID NO: 3944740 - RNA, 18 nt, Human adenovirus F
aaugcaaacaacgaacuu

SEQ ID NO: 3944741 - RNA, 15 nt, Human adenovirus F
aaugcagagcuuggg

SEQ ID NO: 3944742 - RNA, 16 nt, Human adenovirus F
aaugcagagcuugggc

SEQ ID NO: 3944743 - RNA, 20 nt, Human adenovirus F
aauggaacauuaauccaaug

SEQ ID NO: 3944744 - RNA, 15 nt, Human adenovirus F
aauggaaccaagcua

SEQ ID NO: 3944745 - RNA, 19 nt, Human adenovirus F
aaugugucuccgcugggag

SEQ ID NO: 3944746 - RNA, 20 nt, Human adenovirus F
aauguuaucggggugggaaa

SEQ ID NO: 3944747 - RNA, 20 nt, Human adenovirus F
aauuaaccuugcauggugug

SEQ ID NO: 3944748 - RNA, 20 nt, Human adenovirus F
aauugauuuucugccaccag

SEQ ID NO: 3944749 - RNA, 18 nt, Human adenovirus F
aauugccucggcuacagu

SEQ ID NO: 3944750 - RNA, 21 nt, Human adenovirus F
acaaaacccccuaugugccca

SEQ ID NO: 3944751 - RNA, 13 nt, Human adenovirus F
acaaaagcuuuca

SEQ ID NO: 3944752 - RNA, 18 nt, Human adenovirus F
acaaaguccuggccaacu

SEQ ID NO: 3944753 - RNA, 14 nt, Human adenovirus F
acaaaugccucccu

SEQ ID NO: 3944754 - RNA, 12 nt, Human adenovirus F
acaaccagcgcu

SEQ ID NO: 3944755 - RNA, 20 nt, Human adenovirus F
acaacgaagggauacuagca

SEQ ID NO: 3944756 - RNA, 20 nt, Human adenovirus F
acacaauugguuggaaaagu

SEQ ID NO: 3944757 - RNA, 14 nt, Human adenovirus F
acacaggagcuuua

SEQ ID NO: 3944758 - RNA, 17 nt, Human adenovirus F
acaccuccucaacuccc

SEQ ID NO: 3944759 - RNA, 20 nt, Human adenovirus F
acacuaugguaaaaacccug

SEQ ID NO: 3944760 - RNA, 22 nt, Human adenovirus F
acagaauucuaaccguuaaucu

SEQ ID NO: 3944761 - RNA, 17 nt, Human adenovirus F
acagccaagucaaaaaa

SEQ ID NO: 3944762 - RNA, 14 nt, Human adenovirus F
acagccaggcagag

SEQ ID NO: 3944763 - RNA, 19 nt, Human adenovirus F
acagcgaagauguuaacuu

SEQ ID NO: 3944764 - RNA, 17 nt, Human adenovirus F
acagcguagcacucccu

SEQ ID NO: 3944765 - RNA, 22 nt, Human adenovirus F
acagcuaugacccagacgugag

SEQ ID NO: 3944766 - RNA, 15 nt, Human adenovirus F
acagcuccucagccc

SEQ ID NO: 3944767 - RNA, 16 nt, Human adenovirus F
acagcugaagacacau

SEQ ID NO: 3944768 - RNA, 10 nt, Human adenovirus F
acagcuggga

SEQ ID NO: 3944769 - RNA, 22 nt, Human adenovirus F
acagcuucguacuucuguuuua

SEQ ID NO: 3944770 - RNA, 17 nt, Human adenovirus F
acaguccuucugccacg

SEQ ID NO: 3944771 - RNA, 17 nt, Human adenovirus F
acaguuucgcgcaccuc

SEQ ID NO: 3944772 - RNA, 19 nt, Human adenovirus F
acaucaauuuugcgucgcu

SEQ ID NO: 3944773 - RNA, 14 nt, Human adenovirus F
acauccauuuccac

SEQ ID NO: 3944774 - RNA, 16 nt, Human adenovirus F
acauuaugagcaaaga

SEQ ID NO: 3944775 - RNA, 21 nt, Human adenovirus F
acauuguguccugcaacaaaa

SEQ ID NO: 3944776 - RNA, 15 nt, Human adenovirus F
accaaauucugcuag

SEQ ID NO: 3944777 - RNA, 16 nt, Human adenovirus F
accaaggacugguucc

SEQ ID NO: 3944778 - RNA, 14 nt, Human adenovirus F
accaagggcucugc

SEQ ID NO: 3944779 - RNA, 16 nt, Human adenovirus F
accaagggcucugccu

SEQ ID NO: 3944780 - RNA, 14 nt, Human adenovirus F
accacgcaggcgag

SEQ ID NO: 3944781 - RNA, 13 nt, Human adenovirus F
accacgcugcgcc

SEQ ID NO: 3944782 - RNA, 14 nt, Human adenovirus F
accagccgcaccgc

SEQ ID NO: 3944783 - RNA, 23 nt, Human adenovirus F
accaggaggcuauuggccagacg

SEQ ID NO: 3944784 - RNA, 20 nt, Human adenovirus F
accaggccuugcaaaaccaa

SEQ ID NO: 3944785 - RNA, 16 nt, Human adenovirus F
accagugggcucccau

SEQ ID NO: 3944786 - RNA, 12 nt, Human adenovirus F
accauggagcua

SEQ ID NO: 3944787 - RNA, 21 nt, Human adenovirus F
accauguggcgcauucccuuu

SEQ ID NO: 3944788 - RNA, 18 nt, Human adenovirus F
accccuaugacaccuccu

SEQ ID NO: 3944789 - RNA, 15 nt, Human adenovirus F
acccgccgucgucgc

SEQ ID NO: 3944790 - RNA, 15 nt, Human adenovirus F
acccuaguuguggaa

SEQ ID NO: 3944791 - RNA, 15 nt, Human adenovirus F
accgcugcagcugcu

SEQ ID NO: 3944792 - RNA, 12 nt, Human adenovirus F
accggcgccgcu

SEQ ID NO: 3944793 - RNA, 19 nt, Human adenovirus F
accggguuuuggacauggc

SEQ ID NO: 3944794 - RNA, 19 nt, Human adenovirus F
accguaccugcuaccucuu

SEQ ID NO: 3944795 - RNA, 19 nt, Human adenovirus F
accguuguggagucacugc

SEQ ID NO: 3944796 - RNA, 16 nt, Human adenovirus F
accuacgcccaggagc

SEQ ID NO: 3944797 - RNA, 21 nt, Human adenovirus F
accuccaccggcccaccgagu

SEQ ID NO: 3944798 - RNA, 20 nt, Human adenovirus F
accuccgggaguccucagcc

SEQ ID NO: 3944799 - RNA, 16 nt, Human adenovirus F
accuccucaacuccca

SEQ ID NO: 3944800 - RNA, 20 nt, Human adenovirus F
accucgccgcgcaggggcuc

SEQ ID NO: 3944801 - RNA, 19 nt, Human adenovirus F
accucugacaaacacgcuc

SEQ ID NO: 3944802 - RNA, 18 nt, Human adenovirus F
accucugcaccccucauc

SEQ ID NO: 3944803 - RNA, 23 nt, Human adenovirus F
accucugcgcugcaaacaugcuu

SEQ ID NO: 3944804 - RNA, 18 nt, Human adenovirus F
accucuucuucuuccucc

SEQ ID NO: 3944805 - RNA, 13 nt, Human adenovirus F
accugaaaaccau

SEQ ID NO: 3944806 - RNA, 19 nt, Human adenovirus F
accugagggccggccugga

SEQ ID NO: 3944807 - RNA, 19 nt, Human adenovirus F
accugucgcggucguuuaa

SEQ ID NO: 3944808 - RNA, 20 nt, Human adenovirus F
accugugggucgcagcaggu

SEQ ID NO: 3944809 - RNA, 18 nt, Human adenovirus F
accuuagaacuaccucca

SEQ ID NO: 3944810 - RNA, 20 nt, Human adenovirus F
accuucaaacccagccgcac

SEQ ID NO: 3944811 - RNA, 15 nt, Human adenovirus F
accuuggcucgacuc

SEQ ID NO: 3944812 - RNA, 16 nt, Human adenovirus F
accuuguauuuguaua

SEQ ID NO: 3944813 - RNA, 20 nt, Human adenovirus F
acgacugggcggcggccaug

SEQ ID NO: 3944814 - RNA, 10 nt, Human adenovirus F
acgagcugcc

SEQ ID NO: 3944815 - RNA, 12 nt, Human adenovirus F
acgcacgcugac

SEQ ID NO: 3944816 - RNA, 12 nt, Human adenovirus F
acgcccaggagc

SEQ ID NO: 3944817 - RNA, 17 nt, Human adenovirus F
acgcccaugcagccaug

SEQ ID NO: 3944818 - RNA, 22 nt, Human adenovirus F
acgcgauccggcacuugaacau

SEQ ID NO: 3944819 - RNA, 14 nt, Human adenovirus F
acgcggggcaggag

SEQ ID NO: 3944820 - RNA, 12 nt, Human adenovirus F
acgcuguuccaa

SEQ ID NO: 3944821 - RNA, 16 nt, Human adenovirus F
acgcuucagagcucuu

SEQ ID NO: 3944822 - RNA, 21 nt, Human adenovirus F
acggaauuguaacugagccug

SEQ ID NO: 3944823 - RNA, 21 nt, Human adenovirus F
acggccguaccaagccugacu

SEQ ID NO: 3944824 - RNA, 21 nt, Human adenovirus F
acggccuuguaugggcagcau

SEQ ID NO: 3944825 - RNA, 14 nt, Human adenovirus F
acggcgugcuggaa

SEQ ID NO: 3944826 - RNA, 18 nt, Human adenovirus F
acggugaacgaggagcgc

SEQ ID NO: 3944827 - RNA, 14 nt, Human adenovirus F
acgucaacuccucu

SEQ ID NO: 3944828 - RNA, 19 nt, Human adenovirus F
acgucauccgccuccaccc

SEQ ID NO: 3944829 - RNA, 22 nt, Human adenovirus F
acgucccuccccguuaccuggg

SEQ ID NO: 3944830 - RNA, 15 nt, Human adenovirus F
acgugcaggccaacc

SEQ ID NO: 3944831 - RNA, 12 nt, Human adenovirus F
acguucucuccc

SEQ ID NO: 3944832 - RNA, 21 nt, Human adenovirus F
acguugcauuauggccauggu

SEQ ID NO: 3944833 - RNA, 20 nt, Human adenovirus F
acuaaggcgggcacaaagga

SEQ ID NO: 3944834 - RNA, 18 nt, Human adenovirus F
acuacaauauuggcuacc

SEQ ID NO: 3944835 - RNA, 15 nt, Human adenovirus F
acuaccucugcgcug

SEQ ID NO: 3944836 - RNA, 14 nt, Human adenovirus F
acuagcauaaaggg

SEQ ID NO: 3944837 - RNA, 20 nt, Human adenovirus F
acuaucccguguuugacaac

SEQ ID NO: 3944838 - RNA, 15 nt, Human adenovirus F
acucccuggccccca

SEQ ID NO: 3944839 - RNA, 12 nt, Human adenovirus F
acugaaagccag

SEQ ID NO: 3944840 - RNA, 15 nt, Human adenovirus F
acugacgcugcgcuu

SEQ ID NO: 3944841 - RNA, 19 nt, Human adenovirus F
acugacuuccugguccuga

SEQ ID NO: 3944842 - RNA, 13 nt, Human adenovirus F
acugauccacuua

SEQ ID NO: 3944843 - RNA, 12 nt, Human adenovirus F
acugccaccucc

SEQ ID NO: 3944844 - RNA, 21 nt, Human adenovirus F
acugcuacuacuuuaacucuu

SEQ ID NO: 3944845 - RNA, 17 nt, Human adenovirus F
acuggaguaacacaaug

SEQ ID NO: 3944846 - RNA, 21 nt, Human adenovirus F
acuggcuggcccuggccugga

SEQ ID NO: 3944847 - RNA, 17 nt, Human adenovirus F
acugugcauuugggagc

SEQ ID NO: 3944848 - RNA, 22 nt, Human adenovirus F
acuucacggcaggguuugcaaa

SEQ ID NO: 3944849 - RNA, 16 nt, Human adenovirus F
acuucuccauguggaa

SEQ ID NO: 3944850 - RNA, 21 nt, Human adenovirus F
acuucuuaauaaagacacaau

SEQ ID NO: 3944851 - RNA, 22 nt, Human adenovirus F
acuuuugccacacuaaaguuuu

SEQ ID NO: 3944852 - RNA, 13 nt, Human adenovirus F
acuuuuuugcaag

SEQ ID NO: 3944853 - RNA, 14 nt, Human adenovirus F
agaaaccaucgcca

SEQ ID NO: 3944854 - RNA, 15 nt, Human adenovirus F
agaaagauggaaaac

SEQ ID NO: 3944855 - RNA, 17 nt, Human adenovirus F
agaaauagggcccggac

SEQ ID NO: 3944856 - RNA, 18 nt, Human adenovirus F
agaaauugauuuucugcc

SEQ ID NO: 3944857 - RNA, 20 nt, Human adenovirus F
agaacuggaguaacacaaug

SEQ ID NO: 3944858 - RNA, 12 nt, Human adenovirus F
agaauuuaugcc

SEQ ID NO: 3944859 - RNA, 22 nt, Human adenovirus F
agacauuguuuugcuaccuggu

SEQ ID NO: 3944860 - RNA, 15 nt, Human adenovirus F
agaccaucaauuuug

SEQ ID NO: 3944861 - RNA, 17 nt, Human adenovirus F
agacccgguacaggugg

SEQ ID NO: 3944862 - RNA, 23 nt, Human adenovirus F
agaccucaacgcggggcaccuuc

SEQ ID NO: 3944863 - RNA, 16 nt, Human adenovirus F
agaccuuccaggaaau

SEQ ID NO: 3944864 - RNA, 12 nt, Human adenovirus F
agacgaggaggc

SEQ ID NO: 3944865 - RNA, 15 nt, Human adenovirus F
agacuuugucagcca

SEQ ID NO: 3944866 - RNA, 14 nt, Human adenovirus F
agagcacccucuac

SEQ ID NO: 3944867 - RNA, 18 nt, Human adenovirus F
agaggguacuagcagugg

SEQ ID NO: 3944868 - RNA, 18 nt, Human adenovirus F
agaguuugggagccagga

SEQ ID NO: 3944869 - RNA, 22 nt, Human adenovirus F
agaguuuuuacaacgagcaggc

SEQ ID NO: 3944870 - RNA, 15 nt, Human adenovirus F
agauaugucugccaa

SEQ ID NO: 3944871 - RNA, 15 nt, Human adenovirus F
agauccgggcuaugu

SEQ ID NO: 3944872 - RNA, 15 nt, Human adenovirus F
agauggaaacuguca

SEQ ID NO: 3944873 - RNA, 21 nt, Human adenovirus F
agauguccuuaaggaggaggc

SEQ ID NO: 3944874 - RNA, 22 nt, Human adenovirus F
agcaagccgcugacggcgcagc

SEQ ID NO: 3944875 - RNA, 14 nt, Human adenovirus F
agcagcagcagcgg

SEQ ID NO: 3944876 - RNA, 21 nt, Human adenovirus F
agcaguuuugguuacagugga

SEQ ID NO: 3944877 - RNA, 22 nt, Human adenovirus F
agcauaaaagaagcacaggaga

SEQ ID NO: 3944878 - RNA, 21 nt, Human adenovirus F
agcauaaaggggaccagcugu

SEQ ID NO: 3944879 - RNA, 23 nt, Human adenovirus F
agcaucuuaggaagggggccauc

SEQ ID NO: 3944880 - RNA, 17 nt, Human adenovirus F
agcaugaaacuggaaga

SEQ ID NO: 3944881 - RNA, 17 nt, Human adenovirus F
agcaugcuuagccucgg

SEQ ID NO: 3944882 - RNA, 17 nt, Human adenovirus F
agcauuaaccuguaugc

SEQ ID NO: 3944883 - RNA, 12 nt, Human adenovirus F
agccaaccuccg

SEQ ID NO: 3944884 - RNA, 20 nt, Human adenovirus F
agcccauaucugacaacccg

SEQ ID NO: 3944885 - RNA, 22 nt, Human adenovirus F
agcccccgugggggaccgagcc

SEQ ID NO: 3944886 - RNA, 22 nt, Human adenovirus F
agcccgcaacggcgcagcagau

SEQ ID NO: 3944887 - RNA, 21 nt, Human adenovirus F
agcccucaaggaaugcacaca

SEQ ID NO: 3944888 - RNA, 20 nt, Human adenovirus F
agccgaucccagagcucggu

SEQ ID NO: 3944889 - RNA, 17 nt, Human adenovirus F
agccuccgguggcucug

SEQ ID NO: 3944890 - RNA, 19 nt, Human adenovirus F
agccuccgguggcucugca

SEQ ID NO: 3944891 - RNA, 16 nt, Human adenovirus F
agccugaaauacacug

SEQ ID NO: 3944892 - RNA, 18 nt, Human adenovirus F
agccuguguuaucaccca

SEQ ID NO: 3944893 - RNA, 16 nt, Human adenovirus F
agcggccgcgaccgga

SEQ ID NO: 3944894 - RNA, 18 nt, Human adenovirus F
agcggcuuaugcaaacau

SEQ ID NO: 3944895 - RNA, 12 nt, Human adenovirus F
agcgggcacaga

SEQ ID NO: 3944896 - RNA, 12 nt, Human adenovirus F
agcgggcaggag

SEQ ID NO: 3944897 - RNA, 19 nt, Human adenovirus F
agcgucggcgccacacugu

SEQ ID NO: 3944898 - RNA, 15 nt, Human adenovirus F
agcuagcauaaaaga

SEQ ID NO: 3944899 - RNA, 19 nt, Human adenovirus F
agcucaacgcaguggugga

SEQ ID NO: 3944900 - RNA, 20 nt, Human adenovirus F
agcucgcaaacaauaaaaga

SEQ ID NO: 3944901 - RNA, 21 nt, Human adenovirus F
agcucuuccaagcugcggaaa

SEQ ID NO: 3944902 - RNA, 11 nt, Human adenovirus F
agcugcuggag

SEQ ID NO: 3944903 - RNA, 15 nt, Human adenovirus F
agcugguaagcagcc

SEQ ID NO: 3944904 - RNA, 21 nt, Human adenovirus F
agcuuacuuuaaaacuuggca

SEQ ID NO: 3944905 - RNA, 22 nt, Human adenovirus F
aggacgccucggaguaccugag

SEQ ID NO: 3944906 - RNA, 16 nt, Human adenovirus F
aggacucacgccaggc

SEQ ID NO: 3944907 - RNA, 13 nt, Human adenovirus F
aggagacguggga

SEQ ID NO: 3944908 - RNA, 13 nt, Human adenovirus F
aggagcagaugga

SEQ ID NO: 3944909 - RNA, 18 nt, Human adenovirus F
aggagcagcgggaagaga

SEQ ID NO: 3944910 - RNA, 14 nt, Human adenovirus F
aggagcugucucag

SEQ ID NO: 3944911 - RNA, 16 nt, Human adenovirus F
aggaggaccuagagga

SEQ ID NO: 3944912 - RNA, 14 nt, Human adenovirus F
aggagucccugcac

SEQ ID NO: 3944913 - RNA, 23 nt, Human adenovirus F
aggagugcgucagaauguggugg

SEQ ID NO: 3944914 - RNA, 17 nt, Human adenovirus F
aggaucccucagagcug

SEQ ID NO: 3944915 - RNA, 12 nt, Human adenovirus F
aggcagcagggu

SEQ ID NO: 3944916 - RNA, 12 nt, Human adenovirus F
aggcaguggugg

SEQ ID NO: 3944917 - RNA, 13 nt, Human adenovirus F
aggcaguggugga

SEQ ID NO: 3944918 - RNA, 22 nt, Human adenovirus F
aggccauggaaacgcagccuga

SEQ ID NO: 3944919 - RNA, 22 nt, Human adenovirus F
aggccgagguauccagcucaac

SEQ ID NO: 3944920 - RNA, 21 nt, Human adenovirus F
agggaucgcagcgggcaggag

SEQ ID NO: 3944921 - RNA, 22 nt, Human adenovirus F
agggauucuaagggaggcagca

SEQ ID NO: 3944922 - RNA, 17 nt, Human adenovirus F
agggauugagugggaag

SEQ ID NO: 3944923 - RNA, 20 nt, Human adenovirus F
agggcaaaagugucgcgcac

SEQ ID NO: 3944924 - RNA, 17 nt, Human adenovirus F
agggcgucaugcucugg

SEQ ID NO: 3944925 - RNA, 17 nt, Human adenovirus F
agggcucugccugcgga

SEQ ID NO: 3944926 - RNA, 15 nt, Human adenovirus F
aggguaaugucuuuc

SEQ ID NO: 3944927 - RNA, 15 nt, Human adenovirus F
agggucgcaggguuc

SEQ ID NO: 3944928 - RNA, 21 nt, Human adenovirus F
aggguguacguuuguugcaug

SEQ ID NO: 3944929 - RNA, 17 nt, Human adenovirus F
agguagaaguggaggaa

SEQ ID NO: 3944930 - RNA, 11 nt, Human adenovirus F
agguagaaugg

SEQ ID NO: 3944931 - RNA, 23 nt, Human adenovirus F
agguaguccucauucuucucaua

SEQ ID NO: 3944932 - RNA, 15 nt, Human adenovirus F
aggucaucuucuucu

SEQ ID NO: 3944933 - RNA, 17 nt, Human adenovirus F
agguggccauugggcug

SEQ ID NO: 3944934 - RNA, 13 nt, Human adenovirus F
agguuaaagccaa

SEQ ID NO: 3944935 - RNA, 18 nt, Human adenovirus F
agguuacucagcaauccg

SEQ ID NO: 3944936 - RNA, 21 nt, Human adenovirus F
agguuuuacgcggggcaggag

SEQ ID NO: 3944937 - RNA, 14 nt, Human adenovirus F
aguaacacaaacau

SEQ ID NO: 3944938 - RNA, 15 nt, Human adenovirus F
aguaacuuuugccac

SEQ ID NO: 3944939 - RNA, 21 nt, Human adenovirus F
aguauacauuugaacagcuga

SEQ ID NO: 3944940 - RNA, 13 nt, Human adenovirus F
cacaacaaaucau

SEQ ID NO: 3944941 - RNA, 15 nt, Human adenovirus F
cacaauuuacaauuu

SEQ ID NO: 3944942 - RNA, 14 nt, Human adenovirus F
cacagaacaaaaca

SEQ ID NO: 3944943 - RNA, 10 nt, Human adenovirus F
cacaggaaga

SEQ ID NO: 3944944 - RNA, 14 nt, Human adenovirus F
cacaggucaaaugc

SEQ ID NO: 3944945 - RNA, 13 nt, Human adenovirus F
cacaucacuguua

SEQ ID NO: 3944946 - RNA, 18 nt, Human adenovirus F
cacauccaagugccccag

SEQ ID NO: 3944947 - RNA, 17 nt, Human adenovirus F
cacaugaacacuuccgc

SEQ ID NO: 3944948 - RNA, 14 nt, Human adenovirus F
caccaaaggugguu

SEQ ID NO: 3944949 - RNA, 19 nt, Human adenovirus F
caccaauaugcccaacauc

SEQ ID NO: 3944950 - RNA, 15 nt, Human adenovirus F
caccaccgaaauaaa

SEQ ID NO: 3944951 - RNA, 19 nt, Human adenovirus F
caccagccagcucaacggg

SEQ ID NO: 3944952 - RNA, 17 nt, Human adenovirus F
cacccccaacucugagg

SEQ ID NO: 3944953 - RNA, 15 nt, Human adenovirus F
caccccucuccgugc

SEQ ID NO: 3944954 - RNA, 21 nt, Human adenovirus F
cacccggguuuaccuggugga

SEQ ID NO: 3944955 - RNA, 18 nt, Human adenovirus F
caccgcaaugcuggucug

SEQ ID NO: 3944956 - RNA, 16 nt, Human adenovirus F
caccgcauaagcuggc

SEQ ID NO: 3944957 - RNA, 24 nt, Human adenovirus F
cacgcaagucagcaacuacccugu

SEQ ID NO: 3944958 - RNA, 23 nt, Human adenovirus F
cacguacgagaaaucggagaggg

SEQ ID NO: 3944959 - RNA, 14 nt, Human adenovirus F
cacucgcuccaccc

SEQ ID NO: 3944960 - RNA, 16 nt, Human adenovirus F
cacucuuaacagcauu

SEQ ID NO: 3944961 - RNA, 13 nt, Human adenovirus F
cacugacuuccug

SEQ ID NO: 3944962 - RNA, 20 nt, Human adenovirus F
cacugccguugcaaccucug

SEQ ID NO: 3944963 - RNA, 15 nt, Human adenovirus F
cacugcgguggaggc

SEQ ID NO: 3944964 - RNA, 16 nt, Human adenovirus F
cagaaacaugccaccc

SEQ ID NO: 3944965 - RNA, 20 nt, Human adenovirus F
cagaaacuacaaaagcagug

SEQ ID NO: 3944966 - RNA, 14 nt, Human adenovirus F
cagaacaaaacaca

SEQ ID NO: 3944967 - RNA, 21 nt, Human adenovirus F
cagaacguucuucacugcacc

SEQ ID NO: 3944968 - RNA, 13 nt, Human adenovirus F
cagaauguggugg

SEQ ID NO: 3944969 - RNA, 15 nt, Human adenovirus F
cagauggaaacuguc

SEQ ID NO: 3944970 - RNA, 20 nt, Human adenovirus F
cagauugccuccguguuuuu

SEQ ID NO: 3944971 - RNA, 11 nt, Human adenovirus F
cagcaagcugc

SEQ ID NO: 3944972 - RNA, 16 nt, Human adenovirus F
cagcaccaccugcccu

SEQ ID NO: 3944973 - RNA, 13 nt, Human adenovirus F
cagcaccauuagc

SEQ ID NO: 3944974 - RNA, 14 nt, Human adenovirus F
cagcaccgcacaga

SEQ ID NO: 3944975 - RNA, 22 nt, Human adenovirus F
cagcagguuaaagccaacucca

SEQ ID NO: 3944976 - RNA, 21 nt, Human adenovirus F
cagcagugcuuggaagagcaa

SEQ ID NO: 3944977 - RNA, 16 nt, Human adenovirus F
cagccccaggccaacc

SEQ ID NO: 3944978 - RNA, 21 nt, Human adenovirus F
cagccccaggccaaccgcuuu

SEQ ID NO: 3944979 - RNA, 14 nt, Human adenovirus F
cagcccccaccgcc

SEQ ID NO: 3944980 - RNA, 18 nt, Human adenovirus F
cagccgguccccgucagc

SEQ ID NO: 3944981 - RNA, 20 nt, Human adenovirus F
cagccuaacggcaccugcga

SEQ ID NO: 3944982 - RNA, 14 nt, Human adenovirus F
cagcgacagggcgc

SEQ ID NO: 3944983 - RNA, 21 nt, Human adenovirus F
cagcgcccgccucccaaaguc

SEQ ID NO: 3944984 - RNA, 19 nt, Human adenovirus F
cagcgcccuggauacauac

SEQ ID NO: 3944985 - RNA, 22 nt, Human adenovirus F
cagcgcgcuucgccuccuggug

SEQ ID NO: 3944986 - RNA, 21 nt, Human adenovirus F
cagcgggaagagaggcagccc

SEQ ID NO: 3944987 - RNA, 13 nt, Human adenovirus F
cagcgggcacaga

SEQ ID NO: 3944988 - RNA, 17 nt, Human adenovirus F
cagcgguaucugcgugg

SEQ ID NO: 3944989 - RNA, 19 nt, Human adenovirus F
cagcuacaagauuccacca

SEQ ID NO: 3944990 - RNA, 17 nt, Human adenovirus F
cagcugcguacggacca

SEQ ID NO: 3944991 - RNA, 21 nt, Human adenovirus F
cagcugguaagcagccuaagc

SEQ ID NO: 3944992 - RNA, 13 nt, Human adenovirus F
caggaaggccucg

SEQ ID NO: 3944993 - RNA, 14 nt, Human adenovirus F
caggacuuggcaga

SEQ ID NO: 3944994 - RNA, 20 nt, Human adenovirus F
caggaggacuaugucagcuu

SEQ ID NO: 3944995 - RNA, 13 nt, Human adenovirus F
caggaucccucag

SEQ ID NO: 3944996 - RNA, 14 nt, Human adenovirus F
caggaucccucaga

SEQ ID NO: 3944997 - RNA, 16 nt, Human adenovirus F
caggauucgcccgcca

SEQ ID NO: 3944998 - RNA, 16 nt, Human adenovirus F
caggcagcagccccag

SEQ ID NO: 3944999 - RNA, 15 nt, Human adenovirus F
caggcaguggacagc

SEQ ID NO: 3945000 - RNA, 15 nt, Human adenovirus F
caggccuugcaaaac

SEQ ID NO: 3945001 - RNA, 21 nt, Human adenovirus F
caggccuugcaaaaccaaauc

SEQ ID NO: 3945002 - RNA, 19 nt, Human adenovirus F
caggcgcuccacgucccuc

SEQ ID NO: 3945003 - RNA, 16 nt, Human adenovirus F
cagggucgauggagcc

SEQ ID NO: 3945004 - RNA, 22 nt, Human adenovirus F
caggucgggcccgucgucaggc

SEQ ID NO: 3945005 - RNA, 20 nt, Human adenovirus F
cagguucccgugucaccugc

SEQ ID NO: 3945006 - RNA, 23 nt, Human adenovirus F
cagguucccgugucaccugcagu

SEQ ID NO: 3945007 - RNA, 17 nt, Human adenovirus F
caguaccgcuccaucaa

SEQ ID NO: 3945008 - RNA, 15 nt, Human adenovirus F
cagucaagcucucca

SEQ ID NO: 3945009 - RNA, 23 nt, Human adenovirus F
cagucggugggcguccaguggag

SEQ ID NO: 3945010 - RNA, 17 nt, Human adenovirus F
cagugcuuggaagagca

SEQ ID NO: 3945011 - RNA, 18 nt, Human adenovirus F
caguggacaaaccaaaac

SEQ ID NO: 3945012 - RNA, 20 nt, Human adenovirus F
caguguaaagcauaacauga

SEQ ID NO: 3945013 - RNA, 20 nt, Human adenovirus F
caguuggagcagccugugga

SEQ ID NO: 3945014 - RNA, 22 nt, Human adenovirus F
cauaacaccuauguuaggcuuu

SEQ ID NO: 3945015 - RNA, 19 nt, Human adenovirus F
cauaacuaaaaaaacucca

SEQ ID NO: 3945016 - RNA, 17 nt, Human adenovirus F
cauaacugaacaauaaa

SEQ ID NO: 3945017 - RNA, 18 nt, Human adenovirus F
cauaaugcgggcucugau

SEQ ID NO: 3945018 - RNA, 21 nt, Human adenovirus F
cauaaugcgggcucugauaau

SEQ ID NO: 3945019 - RNA, 19 nt, Human adenovirus F
cauacgcuagaccaacaaa

SEQ ID NO: 3945020 - RNA, 20 nt, Human adenovirus F
cauauaagcucugucaguuc

SEQ ID NO: 3945021 - RNA, 21 nt, Human adenovirus F
cauauuucaccuacucuggcu

SEQ ID NO: 3945022 - RNA, 22 nt, Human adenovirus F
caucaauuuugcgucgcuggcu

SEQ ID NO: 3945023 - RNA, 14 nt, Human adenovirus F
cauccuggaccugg

SEQ ID NO: 3945024 - RNA, 19 nt, Human adenovirus F
caucgcugaccagcagcag

SEQ ID NO: 3945025 - RNA, 23 nt, Human adenovirus F
caucguaguuuugcuccagggua

SEQ ID NO: 3945026 - RNA, 21 nt, Human adenovirus F
caucgugcgcgaacugggcug

SEQ ID NO: 3945027 - RNA, 22 nt, Human adenovirus F
caucugcagcauugccacuuuu

SEQ ID NO: 3945028 - RNA, 14 nt, Human adenovirus F
caucuucaccucug

SEQ ID NO: 3945029 - RNA, 15 nt, Human adenovirus F
caugaaacuggaaga

SEQ ID NO: 3945030 - RNA, 18 nt, Human adenovirus F
caugaaaguuccucuucu

SEQ ID NO: 3945031 - RNA, 23 nt, Human adenovirus F
caugagucuguuuggugggcuga

SEQ ID NO: 3945032 - RNA, 17 nt, Human adenovirus F
caugcccgagccggaga

SEQ ID NO: 3945033 - RNA, 16 nt, Human adenovirus F
caugccuuucucccag

SEQ ID NO: 3945034 - RNA, 14 nt, Human adenovirus F
caugcgcuccaaca

SEQ ID NO: 3945035 - RNA, 23 nt, Human adenovirus F
cauuaaaaaucuccugcuccugc

SEQ ID NO: 3945036 - RNA, 19 nt, Human adenovirus F
cauuaagguuacucagcaa

SEQ ID NO: 3945037 - RNA, 20 nt, Human adenovirus F
cauuaauaguggcacagcaa

SEQ ID NO: 3945038 - RNA, 21 nt, Human adenovirus F
cauuaggccgucccugggaug

SEQ ID NO: 3945039 - RNA, 17 nt, Human adenovirus F
cauucccuuuuccagca

SEQ ID NO: 3945040 - RNA, 17 nt, Human adenovirus F
cauucuuaacccgcacu

SEQ ID NO: 3945041 - RNA, 14 nt, Human adenovirus F
cauugccucccuga

SEQ ID NO: 3945042 - RNA, 14 nt, Human adenovirus F
cauuggcuggaggc

SEQ ID NO: 3945043 - RNA, 22 nt, Human adenovirus F
cauuguguccugcaacaaaaaa

SEQ ID NO: 3945044 - RNA, 12 nt, Human adenovirus F
ccaaaacaaaac

SEQ ID NO: 3945045 - RNA, 17 nt, Human adenovirus F
ccaaaacaaaacaaacu

SEQ ID NO: 3945046 - RNA, 11 nt, Human adenovirus F
ccaaaccaaau

SEQ ID NO: 3945047 - RNA, 15 nt, Human adenovirus F
ccaaacuucacggca

SEQ ID NO: 3945048 - RNA, 21 nt, Human adenovirus F
ccaaagacaaaaucacuguuu

SEQ ID NO: 3945049 - RNA, 18 nt, Human adenovirus F
ccaaagguacacaccaaa

SEQ ID NO: 3945050 - RNA, 17 nt, Human adenovirus F
ccaacagccccagcugg

SEQ ID NO: 3945051 - RNA, 13 nt, Human adenovirus F
ccaacgcuacuag

SEQ ID NO: 3945052 - RNA, 18 nt, Human adenovirus F
ccaacggcuugcaagaaa

SEQ ID NO: 3945053 - RNA, 15 nt, Human adenovirus F
ccaacugcagcgcac

SEQ ID NO: 3945054 - RNA, 21 nt, Human adenovirus F
ccaacugcagcgcacgcugga

SEQ ID NO: 3945055 - RNA, 15 nt, Human adenovirus F
ccaacugccaccucc

SEQ ID NO: 3945056 - RNA, 20 nt, Human adenovirus F
uucgcucacccgcagcugcu

SEQ ID NO: 3945057 - RNA, 18 nt, Human adenovirus F
uucggcuugcauaaaagc

SEQ ID NO: 3945058 - RNA, 20 nt, Human adenovirus F
uucggugacaaacaagcugu

SEQ ID NO: 3945059 - RNA, 15 nt, Human adenovirus F
uucuucacugcaccu

SEQ ID NO: 3945060 - RNA, 17 nt, Human adenovirus F
uugaacagcugaagaca

SEQ ID NO: 3945061 - RNA, 17 nt, Human adenovirus F
uugaagaugacuucaac

SEQ ID NO: 3945062 - RNA, 19 nt, Human adenovirus F
uugauuuucuuugccaccu

SEQ ID NO: 3945063 - RNA, 19 nt, Human adenovirus F
uugcacgcucugcaucucu

SEQ ID NO: 3945064 - RNA, 16 nt, Human adenovirus F
uugcacuuaacuguuc

SEQ ID NO: 3945065 - RNA, 14 nt, Human adenovirus F
uugcaucucaaagc

SEQ ID NO: 3945066 - RNA, 20 nt, Human adenovirus F
uugcccgccagcuggcaaac

SEQ ID NO: 3945067 - RNA, 14 nt, Human adenovirus F
uugccuucuuuucu

SEQ ID NO: 3945068 - RNA, 23 nt, Human adenovirus F
uugcgguacucucgaaacuuuuu

SEQ ID NO: 3945069 - RNA, 19 nt, Human adenovirus F
uugcuucuuugaauuuggg

SEQ ID NO: 3945070 - RNA, 23 nt, Human adenovirus F
uuggaaaucgugcccguggaaaa

SEQ ID NO: 3945071 - RNA, 15 nt, Human adenovirus F
uuggagaacaugaaa

SEQ ID NO: 3945072 - RNA, 21 nt, Human adenovirus F
uuggcaauguguuugccaugg

SEQ ID NO: 3945073 - RNA, 13 nt, Human adenovirus F
uuggccuuugucu

SEQ ID NO: 3945074 - RNA, 23 nt, Human adenovirus F
uugggacucuugcuggaccaaag

SEQ ID NO: 3945075 - RNA, 13 nt, Human adenovirus F
uuggggaauuugu

SEQ ID NO: 3945076 - RNA, 19 nt, Human adenovirus F
uuggggaauuugucaugca

SEQ ID NO: 3945077 - RNA, 18 nt, Human adenovirus F
uugugguacaggagcgca

SEQ ID NO: 3945078 - RNA, 14 nt, Human adenovirus F
uuuaauacagugac

SEQ ID NO: 3945079 - RNA, 20 nt, Human adenovirus F
uuuacugcuaaagggaacug

SEQ ID NO: 3945080 - RNA, 12 nt, Human adenovirus F
uuuacuuaaaaa

SEQ ID NO: 3945081 - RNA, 21 nt, Human adenovirus F
uuucagggcaacguucagcca

SEQ ID NO: 3945082 - RNA, 21 nt, Human adenovirus F
uuucauuuaccaccccagcac

SEQ ID NO: 3945083 - RNA, 13 nt, Human adenovirus F
uuuccccauggcu

SEQ ID NO: 3945084 - RNA, 13 nt, Human adenovirus F
uuucuccuccccu

SEQ ID NO: 3945085 - RNA, 14 nt, Human adenovirus F
uuucuccuccccuu

SEQ ID NO: 3945086 - RNA, 18 nt, Human adenovirus F
uuucuuacacuagccauu

SEQ ID NO: 3945087 - RNA, 18 nt, Human adenovirus F
uuugccacacuaaaguuu

SEQ ID NO: 3945088 - RNA, 16 nt, Human adenovirus F
uuuggaagaugaguuu

SEQ ID NO: 3945089 - RNA, 16 nt, Human adenovirus F
uuuguaacaacuguac

SEQ ID NO: 3945090 - RNA, 16 nt, Human adenovirus F
ggguauuugauuuaac

SEQ ID NO: 3945091 - RNA, 13 nt, Human adenovirus F
gggugucugccag

SEQ ID NO: 3945092 - RNA, 15 nt, Human adenovirus F
gguacaggugggcuu

SEQ ID NO: 3945093 - RNA, 22 nt, Human adenovirus F
ggucccuucuggaccuggggcg

SEQ ID NO: 3945094 - RNA, 18 nt, Human adenovirus F
gguccgaccgcugggguu

SEQ ID NO: 3945095 - RNA, 14 nt, Human adenovirus F
ggucuuacaugcac

SEQ ID NO: 3945096 - RNA, 13 nt, Human adenovirus F
ggugaaggugaga

SEQ ID NO: 3945097 - RNA, 19 nt, Human adenovirus F
ggugggcguccaguggagc

SEQ ID NO: 3945098 - RNA, 21 nt, Human adenovirus F
gguggucacucucagcugcua

SEQ ID NO: 3945099 - RNA, 17 nt, Human adenovirus F
gguguauaaaagggggc

SEQ ID NO: 3945100 - RNA, 16 nt, Human adenovirus F
gguguguuuuuucaaa

SEQ ID NO: 3945101 - RNA, 22 nt, Human adenovirus F
gguguugacccgcuuggaggag

SEQ ID NO: 3945102 - RNA, 19 nt, Human adenovirus F
gguuaagagaagaagaugc

SEQ ID NO: 3945103 - RNA, 13 nt, Human adenovirus F
gguuccaccaagc

SEQ ID NO: 3945104 - RNA, 23 nt, Human adenovirus F
gguucugaaguucagaacauggc

SEQ ID NO: 3945105 - RNA, 14 nt, Human adenovirus F
gguuuuugagcaug

SEQ ID NO: 3945106 - RNA, 17 nt, Human adenovirus F
guaagguaaucaggaga

SEQ ID NO: 3945107 - RNA, 18 nt, Human adenovirus F
guaaugucuuuccagggu

SEQ ID NO: 3945108 - RNA, 18 nt, Human adenovirus F
guacacgcggugacggcc

SEQ ID NO: 3945109 - RNA, 18 nt, Human adenovirus F
guaccgccaaaaaagcag

SEQ ID NO: 3945110 - RNA, 17 nt, Human adenovirus F
guacgaacucagucugc

SEQ ID NO: 3945111 - RNA, 22 nt, Human adenovirus F
guacggaccaccagaugauguc

SEQ ID NO: 3945112 - RNA, 17 nt, Human adenovirus F
guacgguuucugggcuu

SEQ ID NO: 3945113 - RNA, 19 nt, Human adenovirus F
guagacgcuggaagaggua

SEQ ID NO: 3945114 - RNA, 16 nt, Human adenovirus F
guaggaccacuggagg

SEQ ID NO: 3945115 - RNA, 13 nt, Human adenovirus F
guaggcaaucucc

SEQ ID NO: 3945116 - RNA, 21 nt, Human adenovirus F
guaguugagcgugguggcaau

SEQ ID NO: 3945117 - RNA, 16 nt, Human adenovirus F
guauaguccagcguuc

SEQ ID NO: 3945118 - RNA, 18 nt, Human adenovirus F
guaugguaacuccucuuc

SEQ ID NO: 3945119 - RNA, 20 nt, Human adenovirus F
guaugguaacuccucuucuc

SEQ ID NO: 3945120 - RNA, 20 nt, Human adenovirus F
guauuaacacuggcagaggc

SEQ ID NO: 3945121 - RNA, 19 nt, Human adenovirus F
gucacucuccgccgccgcu

SEQ ID NO: 3945122 - RNA, 13 nt, Human adenovirus F
gucagaauguggu

SEQ ID NO: 3945123 - RNA, 22 nt, Human adenovirus F
gucagcaacuacccuguagugg

SEQ ID NO: 3945124 - RNA, 15 nt, Human adenovirus F
guccccgucagcaug

SEQ ID NO: 3945125 - RNA, 22 nt, Human adenovirus F
guccuggccaacugccaccucc

SEQ ID NO: 3945126 - RNA, 16 nt, Human adenovirus F
gucgagcuagugaaac

SEQ ID NO: 3945127 - RNA, 20 nt, Human adenovirus F
gucgcuggcuuuuggaccug

SEQ ID NO: 3945128 - RNA, 20 nt, Human adenovirus F
gucugccaaaauggcucugc

SEQ ID NO: 3945129 - RNA, 13 nt, Human adenovirus F
gucuggaaccacu

SEQ ID NO: 3945130 - RNA, 21 nt, Human adenovirus F
gucugggguucauguugugca

SEQ ID NO: 3945131 - RNA, 13 nt, Human adenovirus F
gucugucugccaa

SEQ ID NO: 3945132 - RNA, 13 nt, Human adenovirus F
gugacacccucag

SEQ ID NO: 3945133 - RNA, 21 nt, Human adenovirus F
gugagucgggcucuuggucag

SEQ ID NO: 3945134 - RNA, 14 nt, Human adenovirus F
gugcacuuggggaa

SEQ ID NO: 3945135 - RNA, 14 nt, Human adenovirus F
gugcagacggugga

SEQ ID NO: 3945136 - RNA, 24 nt, Human adenovirus F
gugccgagcuuuuacugggacagc

SEQ ID NO: 3945137 - RNA, 20 nt, Human adenovirus F
gugccgcgcgggcaggagga

SEQ ID NO: 3945138 - RNA, 13 nt, Human adenovirus F
gugccucuguccu

SEQ ID NO: 3945139 - RNA, 20 nt, Human adenovirus F
gugcggcuuuucgcagagac

SEQ ID NO: 3945140 - RNA, 13 nt, Human adenovirus F
gugcuggggaaug

SEQ ID NO: 3945141 - RNA, 22 nt, Human adenovirus F
gugcuuauuaagcgagcagagc

SEQ ID NO: 3945142 - RNA, 23 nt, Human adenovirus F
guggaguuuuacuagacuaaaaa

SEQ ID NO: 3945143 - RNA, 18 nt, Human adenovirus F
gcggggcgucaagaggga

SEQ ID NO: 3945144 - RNA, 19 nt, Human adenovirus F
gcgggggcgucccuggagu

SEQ ID NO: 3945145 - RNA, 18 nt, Human adenovirus F
gcgguaagaacccagcau

SEQ ID NO: 3945146 - RNA, 17 nt, Human adenovirus F
gcggugauauuaagaug

SEQ ID NO: 3945147 - RNA, 13 nt, Human adenovirus F
gcguaacccgccg

SEQ ID NO: 3945148 - RNA, 23 nt, Human adenovirus F
gcgucagguuugacagcauuaac

SEQ ID NO: 3945149 - RNA, 15 nt, Human adenovirus F
gcguccaguggagca

SEQ ID NO: 3945150 - RNA, 17 nt, Human adenovirus F
gcguccgcccgcuccga

SEQ ID NO: 3945151 - RNA, 21 nt, Human adenovirus F
gcgucucgguuaagagaagaa

SEQ ID NO: 3945152 - RNA, 19 nt, Human adenovirus F
gcguucaaaaccucuuaca

SEQ ID NO: 3945153 - RNA, 21 nt, Human adenovirus F
gcuaaaucuuccucccaaagu

SEQ ID NO: 3945154 - RNA, 15 nt, Human adenovirus F
gcuacacaacaaauc

SEQ ID NO: 3945155 - RNA, 22 nt, Human adenovirus F
gcuacaguuucgcgcaccucuu

SEQ ID NO: 3945156 - RNA, 23 nt, Human adenovirus F
gcuaccguucuaugcuccugggu

SEQ ID NO: 3945157 - RNA, 16 nt, Human adenovirus F
gcuagcauaaaagaag

SEQ ID NO: 3945158 - RNA, 13 nt, Human adenovirus F
gcuaucagccgca

SEQ ID NO: 3945159 - RNA, 22 nt, Human adenovirus F
gcuauuaaaauggaaccaagcu

SEQ ID NO: 3945160 - RNA, 21 nt, Human adenovirus F
gcucaacuuuaacuaauguaa

SEQ ID NO: 3945161 - RNA, 14 nt, Human adenovirus F
gcucaaggcgcacg

SEQ ID NO: 3945162 - RNA, 17 nt, Human adenovirus F
gcucacccgcagcugcu

SEQ ID NO: 3945163 - RNA, 16 nt, Human adenovirus F
gcucauugguccagca

SEQ ID NO: 3945164 - RNA, 16 nt, Human adenovirus F
gcucgcgcacagcuuc

SEQ ID NO: 3945165 - RNA, 18 nt, Human adenovirus F
gcucuggacaugacggca

SEQ ID NO: 3945166 - RNA, 12 nt, Human adenovirus F
gcucuguggaga

SEQ ID NO: 3945167 - RNA, 15 nt, Human adenovirus F
gcucuuccaagcugc

SEQ ID NO: 3945168 - RNA, 13 nt, Human adenovirus F
gcugaagacacau

SEQ ID NO: 3945169 - RNA, 20 nt, Human adenovirus F
gcugaauauugcggagccug

SEQ ID NO: 3945170 - RNA, 13 nt, Human adenovirus F
gcugacagcuggg

SEQ ID NO: 3945171 - RNA, 16 nt, Human adenovirus F
gcugacagcugggaca

SEQ ID NO: 3945172 - RNA, 15 nt, Human adenovirus F
gcugcaaucuugaau

SEQ ID NO: 3945173 - RNA, 12 nt, Human adenovirus F
gcugcagccaga

SEQ ID NO: 3945174 - RNA, 18 nt, Human adenovirus F
gcuggcuuuuggaccugg

SEQ ID NO: 3945175 - RNA, 16 nt, Human adenovirus F
gcuggggaauggagcu

SEQ ID NO: 3945176 - RNA, 12 nt, Human adenovirus F
gcuggugugaaa

SEQ ID NO: 3945177 - RNA, 14 nt, Human adenovirus F
gcuguacuccauua

SEQ ID NO: 3945178 - RNA, 17 nt, Human adenovirus F
gcuguacugugcauuug

SEQ ID NO: 3945179 - RNA, 17 nt, Human adenovirus F
gcugugguuaaauuuaa

SEQ ID NO: 3945180 - RNA, 17 nt, Human adenovirus F
gcuguuuaccaaaggcu

SEQ ID NO: 3945181 - RNA, 18 nt, Human adenovirus F
gcuuccaccuuggaagca

SEQ ID NO: 3945182 - RNA, 16 nt, Human adenovirus F
gcuugcccuuggaaau

SEQ ID NO: 3945183 - RNA, 15 nt, Human adenovirus F
gcuuggauuaggaag

SEQ ID NO: 3945184 - RNA, 23 nt, Human adenovirus F
gcuuuaacaacacaggagcuuua

SEQ ID NO: 3945185 - RNA, 22 nt, Human adenovirus F
gcuuucaguuggagcagccugu

SEQ ID NO: 3945186 - RNA, 19 nt, Human adenovirus F
ggaaaccaagggcucugcc

SEQ ID NO: 3945187 - RNA, 19 nt, Human adenovirus F
ggaaacugucaggcucuga

SEQ ID NO: 3945188 - RNA, 19 nt, Human adenovirus F
ggaaauuuacucaacugug

SEQ ID NO: 3945189 - RNA, 21 nt, Human adenovirus F
ggaaccaggcaguggacagcu

SEQ ID NO: 3945190 - RNA, 17 nt, Human adenovirus F
ggaacgcgauccggcac

SEQ ID NO: 3945191 - RNA, 17 nt, Human adenovirus F
ggaacuuccggaaggau

SEQ ID NO: 3945192 - RNA, 19 nt, Human adenovirus F
ccaccgccgcaccacugac

SEQ ID NO: 3945193 - RNA, 19 nt, Human adenovirus F
ccacgucgccaacaguguu

SEQ ID NO: 3945194 - RNA, 20 nt, Human adenovirus F
ccacuguuucuccuccccuu

SEQ ID NO: 3945195 - RNA, 21 nt, Human adenovirus F
ccagacuacuuuuuccaaacu

SEQ ID NO: 3945196 - RNA, 19 nt, Human adenovirus F
ccagacuuugucagccaaa

SEQ ID NO: 3945197 - RNA, 14 nt, Human adenovirus F
ccagcaaaggcgcc

SEQ ID NO: 3945198 - RNA, 13 nt, Human adenovirus F
ccagcaagcugcc

SEQ ID NO: 3945199 - RNA, 12 nt, Human adenovirus F
ccagcacugccg

SEQ ID NO: 3945200 - RNA, 18 nt, Human adenovirus F
ccagcagcaccaccugcc

SEQ ID NO: 3945201 - RNA, 14 nt, Human adenovirus F
ccagccgcacucgc

SEQ ID NO: 3945202 - RNA, 21 nt, Human adenovirus F
ccagcgucagguuugacagca

SEQ ID NO: 3945203 - RNA, 16 nt, Human adenovirus F
ccaggcgagcucaggg

SEQ ID NO: 3945204 - RNA, 16 nt, Human adenovirus F
ccaggcguggccuccg

SEQ ID NO: 3945205 - RNA, 20 nt, Human adenovirus F
ccaggcguggccuccguggc

SEQ ID NO: 3945206 - RNA, 15 nt, Human adenovirus F
ccagggucgcagggu

SEQ ID NO: 3945207 - RNA, 19 nt, Human adenovirus F
ccaguagcuuggaagccac

SEQ ID NO: 3945208 - RNA, 20 nt, Human adenovirus F
ccaucugcagcauugccacu

SEQ ID NO: 3945209 - RNA, 15 nt, Human adenovirus F
ccaugccggcuccga

SEQ ID NO: 3945210 - RNA, 22 nt, Human adenovirus F
ccauggaucgcauccuggcccu

SEQ ID NO: 3945211 - RNA, 14 nt, Human adenovirus F
cuaauggccagagg

SEQ ID NO: 3945212 - RNA, 20 nt, Human adenovirus F
cuacaauccccuugacauuc

SEQ ID NO: 3945213 - RNA, 13 nt, Human adenovirus F
cuacaccaaugca

SEQ ID NO: 3945214 - RNA, 23 nt, Human adenovirus F
cuacaccccccgccuuacauuga

SEQ ID NO: 3945215 - RNA, 12 nt, Human adenovirus F
cuacauaacuga

SEQ ID NO: 3945216 - RNA, 16 nt, Human adenovirus F
cuacccuucugugccu

SEQ ID NO: 3945217 - RNA, 20 nt, Human adenovirus F
cuaccguucuaugcuccugg

SEQ ID NO: 3945218 - RNA, 14 nt, Human adenovirus F
cuacgcccaggagc

SEQ ID NO: 3945219 - RNA, 18 nt, Human adenovirus F
cuacgccuccaccaccuu

SEQ ID NO: 3945220 - RNA, 12 nt, Human adenovirus F
cuacgucaccuu

SEQ ID NO: 3945221 - RNA, 21 nt, Human adenovirus F
cuacguugcgauacugcaaac

SEQ ID NO: 3945222 - RNA, 14 nt, Human adenovirus F
cuacucuggcuccg

SEQ ID NO: 3945223 - RNA, 17 nt, Human adenovirus F
cuacugccgccaugacu

SEQ ID NO: 3945224 - RNA, 18 nt, Human adenovirus F
cuacuucagccuggggaa

SEQ ID NO: 3945225 - RNA, 23 nt, Human adenovirus F
cuagcauaaaggggaccagcugu

SEQ ID NO: 3945226 - RNA, 19 nt, Human adenovirus F
cuagcgccccugcagccgu

SEQ ID NO: 3945227 - RNA, 21 nt, Human adenovirus F
cuagggugugaaggcaaaggu

SEQ ID NO: 3945228 - RNA, 21 nt, Human adenovirus F
cuagugaaacaugaggaggaa

SEQ ID NO: 3945229 - RNA, 18 nt, Human adenovirus F
cuaucaggaagcagcuca

SEQ ID NO: 3945230 - RNA, 15 nt, Human adenovirus F
cuaugaguggaacuu

SEQ ID NO: 3945231 - RNA, 16 nt, Human adenovirus F
cuauguuaggcuuuau

SEQ ID NO: 3945232 - RNA, 11 nt, Human adenovirus F
cuauugccagc

SEQ ID NO: 3945233 - RNA, 13 nt, Human adenovirus F
cucaacugugccu

SEQ ID NO: 3945234 - RNA, 21 nt, Human adenovirus F
cucacguguuagguacuauaa

SEQ ID NO: 3945235 - RNA, 14 nt, Human adenovirus F
cucagacgacgagc

SEQ ID NO: 3945236 - RNA, 16 nt, Human adenovirus F
cucagacuccaacaau

SEQ ID NO: 3945237 - RNA, 22 nt, Human adenovirus F
cucagggucgauggagccagcg

SEQ ID NO: 3945238 - RNA, 15 nt, Human adenovirus F
cucauccgccauugc

SEQ ID NO: 3945239 - RNA, 17 nt, Human adenovirus F
cucauccgccauugcca

SEQ ID NO: 3945240 - RNA, 13 nt, Human adenovirus F
cucauuuuucccg

SEQ ID NO: 3945241 - RNA, 14 nt, Human adenovirus F
cuccaacguagagc

SEQ ID NO: 3945242 - RNA, 19 nt, Human adenovirus F
cuccaauuugacaauaacg

SEQ ID NO: 3945243 - RNA, 21 nt, Human adenovirus F
cuccacaugauacuuuuccau

SEQ ID NO: 3945244 - RNA, 13 nt, Human adenovirus F
cucccacccacga

SEQ ID NO: 3945245 - RNA, 13 nt, Human adenovirus F
cucccuuuccccc

SEQ ID NO: 3945246 - RNA, 14 nt, Human adenovirus F
cuccgccggcaugu

SEQ ID NO: 3945247 - RNA, 18 nt, Human adenovirus F
cuccucaacucccagcau

SEQ ID NO: 3945248 - RNA, 13 nt, Human adenovirus F
cuccugcaauacu

SEQ ID NO: 3945249 - RNA, 17 nt, Human adenovirus F
cucgcugucuggaacca

SEQ ID NO: 3945250 - RNA, 15 nt, Human adenovirus F
cucgggcgcuccugg

SEQ ID NO: 3945251 - RNA, 22 nt, Human adenovirus F
cucggguagcgguuggugcugc

SEQ ID NO: 3945252 - RNA, 17 nt, Human adenovirus F
cucguuguuuuccucug

SEQ ID NO: 3945253 - RNA, 19 nt, Human adenovirus F
cucuguuugcugcacugcc

SEQ ID NO: 3945254 - RNA, 20 nt, Human adenovirus F
cucuuauuguucaaggaaac

SEQ ID NO: 3945255 - RNA, 16 nt, Human adenovirus F
cucuuucuuacaacgc

SEQ ID NO: 3945256 - RNA, 20 nt, Human adenovirus F
cucuuuuugaaucauuucca

SEQ ID NO: 3945257 - RNA, 21 nt, Human adenovirus F
cugaauuuuuagguuggcaau

SEQ ID NO: 3945258 - RNA, 13 nt, Human adenovirus F
cugacaauggaac

SEQ ID NO: 3945259 - RNA, 16 nt, Human adenovirus F
cugacaguaagcaaca

SEQ ID NO: 3945260 - RNA, 17 nt, Human adenovirus F
cugaccgaccuggggca

SEQ ID NO: 3945261 - RNA, 18 nt, Human adenovirus F
cugaccgaccuggggcaa

SEQ ID NO: 3945262 - RNA, 12 nt, Human adenovirus F
cugacuuccugg

SEQ ID NO: 3945263 - RNA, 14 nt, Human adenovirus F
cugagccugauccc

SEQ ID NO: 3945264 - RNA, 23 nt, Human adenovirus F
cugaggaggaggccauccuggac

SEQ ID NO: 3945265 - RNA, 16 nt, Human adenovirus F
cugauaauguguguuu

SEQ ID NO: 3945266 - RNA, 18 nt, Human adenovirus F
cugauccacuuacaacca

SEQ ID NO: 3945267 - RNA, 23 nt, Human adenovirus F
cugcacugccaucugcagcauug

SEQ ID NO: 3945268 - RNA, 17 nt, Human adenovirus F
cugccaaaauggcucug

SEQ ID NO: 3945269 - RNA, 19 nt, Human adenovirus F
cugccaaaauggcucugcu

SEQ ID NO: 3945270 - RNA, 13 nt, Human adenovirus F
cugccagaggccg

SEQ ID NO: 3945271 - RNA, 18 nt, Human adenovirus F
cugccguugcaaccucug

SEQ ID NO: 3945272 - RNA, 20 nt, Human adenovirus F
cugccuaugccgccgugcca

SEQ ID NO: 3945273 - RNA, 20 nt, Human adenovirus F
cugcggauuaagaaccacug

SEQ ID NO: 3945274 - RNA, 18 nt, Human adenovirus F
cugcggcaaugcuuuuga

SEQ ID NO: 3945275 - RNA, 21 nt, Human adenovirus F
cuggaagauguccuuaaggag

SEQ ID NO: 3945276 - RNA, 16 nt, Human adenovirus F
cuggaccuggaagagg

SEQ ID NO: 3945277 - RNA, 20 nt, Human adenovirus F
cuggacgucuuuugacgagc

SEQ ID NO: 3945278 - RNA, 20 nt, Human adenovirus F
cuggacucgucuccugcaag

SEQ ID NO: 3945279 - RNA, 17 nt, Human adenovirus F
cuggaggacgccgaggc

SEQ ID NO: 3945280 - RNA, 20 nt, Human adenovirus F
cuggagggcgucaugcucug

SEQ ID NO: 3945281 - RNA, 19 nt, Human adenovirus F
cuggaguuggcuucugcca

SEQ ID NO: 3945282 - RNA, 20 nt, Human adenovirus F
cuggauacuggcaagagcca

SEQ ID NO: 3945283 - RNA, 16 nt, Human adenovirus F
cuggccaacugccacc

SEQ ID NO: 3945284 - RNA, 19 nt, Human adenovirus F
cuggccaacugccaccucc

SEQ ID NO: 3945285 - RNA, 20 nt, Human adenovirus F
cuggcccuaaccacccgcaa

SEQ ID NO: 3945286 - RNA, 22 nt, Human adenovirus F
cuggccguacgguuucugggcu

SEQ ID NO: 3945287 - RNA, 18 nt, Human adenovirus F
cuggcguuaccaggaaac

SEQ ID NO: 3945288 - RNA, 13 nt, Human adenovirus F
cuggcuggcccug

SEQ ID NO: 3945289 - RNA, 14 nt, Human adenovirus F
cuggcuggcccugg

SEQ ID NO: 3945290 - RNA, 18 nt, Human adenovirus F
cuggcuuccggcauuaac

SEQ ID NO: 3945291 - RNA, 21 nt, Human adenovirus F
cugggauuugccgcagccagu

SEQ ID NO: 3945292 - RNA, 22 nt, Human adenovirus F
cugggauuugccgcagccagug

SEQ ID NO: 3945293 - RNA, 22 nt, Human adenovirus F
cugggguagggugucugccaga

SEQ ID NO: 3945294 - RNA, 22 nt, Human adenovirus F
cuguaagcgggggaaauuuaaa

SEQ ID NO: 3945295 - RNA, 13 nt, Human adenovirus F
cuguacugugcau

SEQ ID NO: 3945296 - RNA, 15 nt, Human adenovirus F
cuguacugugcauuu

SEQ ID NO: 3945297 - RNA, 17 nt, Human adenovirus F
cuguacugugcauuugg

SEQ ID NO: 3945298 - RNA, 22 nt, Human adenovirus F
cuguaguugauaguuuaaggag

SEQ ID NO: 3945299 - RNA, 20 nt, Human adenovirus F
cuguauuuugcuacauaacu

SEQ ID NO: 3945300 - RNA, 13 nt, Human adenovirus F
cugucgccccugc

SEQ ID NO: 3945301 - RNA, 20 nt, Human adenovirus F
cugucguuaguggaggcagc

SEQ ID NO: 3945302 - RNA, 17 nt, Human adenovirus F
cugugcagauggaaacu

SEQ ID NO: 3945303 - RNA, 23 nt, Human adenovirus F
cuguguuacgccagagagccgag

SEQ ID NO: 3945304 - RNA, 14 nt, Human adenovirus F
cuguucuaaaacca

SEQ ID NO: 3945305 - RNA, 16 nt, Human adenovirus F
cuuaacccuaagcaca

SEQ ID NO: 3945306 - RNA, 17 nt, Human adenovirus F
cuuaaguuauacaguga

SEQ ID NO: 3945307 - RNA, 16 nt, Human adenovirus F
cuuaauucuucaugua

SEQ ID NO: 3945308 - RNA, 16 nt, Human adenovirus F
cuuacaugggcauucu

SEQ ID NO: 3945309 - RNA, 15 nt, Human adenovirus F
cuuacuuucugggca

SEQ ID NO: 3945310 - RNA, 20 nt, Human adenovirus F
cuuauuucgcccgacaacaa

SEQ ID NO: 3945311 - RNA, 22 nt, Human adenovirus F
cuucaaacggcggaugguggca

SEQ ID NO: 3945312 - RNA, 19 nt, Human adenovirus F
cuucacaaaguccuggcca

SEQ ID NO: 3945313 - RNA, 18 nt, Human adenovirus F
cuucaccuuaucccauga

SEQ ID NO: 3945314 - RNA, 10 nt, Human adenovirus F
cuuccaaauu

SEQ ID NO: 3945315 - RNA, 23 nt, Human adenovirus F
cuuccaagcgguccauugccucg

SEQ ID NO: 3945316 - RNA, 24 nt, Human adenovirus F
cuucccuuugacaaucagggaaau

SEQ ID NO: 3945317 - RNA, 22 nt, Human adenovirus F
cuuccgacggguuacaggaaaa

SEQ ID NO: 3945318 - RNA, 20 nt, Human adenovirus F
cuuccggaaggauguuaaca

SEQ ID NO: 3945319 - RNA, 23 nt, Human adenovirus F
cuuccucguuguuuuccucugac

SEQ ID NO: 3945320 - RNA, 19 nt, Human adenovirus F
cuucgcccggacacuauuu

SEQ ID NO: 3945321 - RNA, 12 nt, Human adenovirus F
cuucgcugcuuu

SEQ ID NO: 3945322 - RNA, 19 nt, Human adenovirus F
cuucgggagacggaggcaa

SEQ ID NO: 3945323 - RNA, 11 nt, Human adenovirus F
cuucugccaga

SEQ ID NO: 3945324 - RNA, 22 nt, Human adenovirus F
cuugcaaaacuuucgcuccuuu

SEQ ID NO: 3945325 - RNA, 15 nt, Human adenovirus F
cuugcaagcagcucg

SEQ ID NO: 3945326 - RNA, 21 nt, Human adenovirus F
cuugcaggagccgaauugccu

SEQ ID NO: 3945327 - RNA, 15 nt, Human adenovirus F
gcugcgcccccaccg

SEQ ID NO: 3945328 - RNA, 14 nt, Human adenovirus F
gcuggcccuggccu

SEQ ID NO: 3945329 - RNA, 17 nt, Human adenovirus F
gcuggccgugggcgaca

SEQ ID NO: 3945330 - RNA, 17 nt, Human adenovirus F
gcuggcuuuuggaccug

SEQ ID NO: 3945331 - RNA, 13 nt, Human adenovirus F
gcuguagaauuua

SEQ ID NO: 3945332 - RNA, 23 nt, Human adenovirus F
gcuguaguugauaguuuaaggag

SEQ ID NO: 3945333 - RNA, 21 nt, Human adenovirus F
gcugucucaccuacuaccacu

SEQ ID NO: 3945334 - RNA, 20 nt, Human adenovirus F
gcuguuguugauagcgccau

SEQ ID NO: 3945335 - RNA, 14 nt, Human adenovirus F
gcuuacacccgcgg

SEQ ID NO: 3945336 - RNA, 15 nt, Human adenovirus F
gcuucagagcucuuc

SEQ ID NO: 3945337 - RNA, 18 nt, Human adenovirus F
gcuuccuuaacaagggcu

SEQ ID NO: 3945338 - RNA, 23 nt, Human adenovirus F
gcuucucagcucaacgcaguggu

SEQ ID NO: 3945339 - RNA, 11 nt, Human adenovirus F
gcuucugccag

SEQ ID NO: 3945340 - RNA, 17 nt, Human adenovirus F
gcuuuccgcgaggccau

SEQ ID NO: 3945341 - RNA, 19 nt, Human adenovirus F
gcuuuccgcgaggccaugc

SEQ ID NO: 3945342 - RNA, 19 nt, Human adenovirus F
gcuuuccucuuaaugggca

SEQ ID NO: 3945343 - RNA, 22 nt, Human adenovirus F
ggaaacugucaggcucugagag

SEQ ID NO: 3945344 - RNA, 14 nt, Human adenovirus F
ggaaaucagaugca

SEQ ID NO: 3945345 - RNA, 14 nt, Human adenovirus F
ggaagcagcucagg

SEQ ID NO: 3945346 - RNA, 21 nt, Human adenovirus F
ggaauguggggcgugcgagcc

SEQ ID NO: 3945347 - RNA, 15 nt, Human adenovirus F
ggacagcuaugaccc

SEQ ID NO: 3945348 - RNA, 13 nt, Human adenovirus F
ggacgacagccag

SEQ ID NO: 3945349 - RNA, 17 nt, Human adenovirus F
ggacggcaaggaaccag

SEQ ID NO: 3945350 - RNA, 12 nt, Human adenovirus F
ggacggcgccaa

SEQ ID NO: 3945351 - RNA, 23 nt, Human adenovirus F
ggacgucagaacggcgugcugga

SEQ ID NO: 3945352 - RNA, 17 nt, Human adenovirus F
ggacucgucuccugcaa

SEQ ID NO: 3945353 - RNA, 15 nt, Human adenovirus F
ggacuuugcuccgcc

SEQ ID NO: 3945354 - RNA, 20 nt, Human adenovirus F
ggagaggcgguagcggcacg

SEQ ID NO: 3945355 - RNA, 22 nt, Human adenovirus F
ggagccggcgguggcaacccug

SEQ ID NO: 3945356 - RNA, 15 nt, Human adenovirus F
ggaggaagagggucu

SEQ ID NO: 3945357 - RNA, 19 nt, Human adenovirus F
ggaggcgauuugggaggga

SEQ ID NO: 3945358 - RNA, 23 nt, Human adenovirus F
ggaggcuauuggccagacgcagg

SEQ ID NO: 3945359 - RNA, 13 nt, Human adenovirus F
ggagggauuuaau

SEQ ID NO: 3945360 - RNA, 16 nt, Human adenovirus F
ggagggcaaaaugggc

SEQ ID NO: 3945361 - RNA, 16 nt, Human adenovirus F
ggagguagaaguggag

SEQ ID NO: 3945362 - RNA, 18 nt, Human adenovirus F
ggaggucaagccaagcug

SEQ ID NO: 3945363 - RNA, 15 nt, Human adenovirus F
ggagucuggcagcag

SEQ ID NO: 3945364 - RNA, 17 nt, Human adenovirus F
ggagucuuucagcuugg

SEQ ID NO: 3945365 - RNA, 21 nt, Human adenovirus F
ggaguggcauuaaaaacuuug

SEQ ID NO: 3945366 - RNA, 19 nt, Human adenovirus F
ggauaccgcugcagcugcu

SEQ ID NO: 3945367 - RNA, 18 nt, Human adenovirus F
ggauccagugcaggaaga

SEQ ID NO: 3945368 - RNA, 21 nt, Human adenovirus F
ggaucgcagcgggcaggagcc

SEQ ID NO: 3945369 - RNA, 16 nt, Human adenovirus F
ggaucgucgguggaua

SEQ ID NO: 3945370 - RNA, 15 nt, Human adenovirus F
ggauguacuccuuuu

SEQ ID NO: 3945371 - RNA, 15 nt, Human adenovirus F
ggcaauaggcacaga

SEQ ID NO: 3945372 - RNA, 18 nt, Human adenovirus F
ggcacaccuuugggcucc

SEQ ID NO: 3945373 - RNA, 19 nt, Human adenovirus F
ggcacaguaaucaaggguu

SEQ ID NO: 3945374 - RNA, 23 nt, Human adenovirus F
ggcagcccagcgcccgggcccug

SEQ ID NO: 3945375 - RNA, 16 nt, Human adenovirus F
ggcaggagcccgaaga

SEQ ID NO: 3945376 - RNA, 19 nt, Human adenovirus F
ggcaucacucauuuuuuca

SEQ ID NO: 3945377 - RNA, 12 nt, Human adenovirus F
ggcauggcagca

SEQ ID NO: 3945378 - RNA, 17 nt, Human adenovirus F
ggcauggcgggcagugg

SEQ ID NO: 3945379 - RNA, 16 nt, Human adenovirus F
ggcauguacggcggcg

SEQ ID NO: 3945380 - RNA, 23 nt, Human adenovirus F
ggccauggaaacgcagccugagc

SEQ ID NO: 3945381 - RNA, 16 nt, Human adenovirus F
ggcccuaaccacccgc

SEQ ID NO: 3945382 - RNA, 21 nt, Human adenovirus F
ggcccugggcuuauuggcaug

SEQ ID NO: 3945383 - RNA, 19 nt, Human adenovirus F
ggccgaugccaggcggcga

SEQ ID NO: 3945384 - RNA, 15 nt, Human adenovirus F
ggccuuucacccaga

SEQ ID NO: 3945385 - RNA, 20 nt, Human adenovirus F
ggcgagaaaauauggaggag

SEQ ID NO: 3945386 - RNA, 22 nt, Human adenovirus F
ggcgagaaaauauggaggagga

SEQ ID NO: 3945387 - RNA, 17 nt, Human adenovirus F
ggcgaggggcuggcccg

SEQ ID NO: 3945388 - RNA, 15 nt, Human adenovirus F
ggcgcagcgggaacg

SEQ ID NO: 3945389 - RNA, 15 nt, Human adenovirus F
ggcgccggacgggca

SEQ ID NO: 3945390 - RNA, 15 nt, Human adenovirus F
ggcgccggcgggaag

SEQ ID NO: 3945391 - RNA, 14 nt, Human adenovirus F
ggcgcugggacggg

SEQ ID NO: 3945392 - RNA, 19 nt, Human adenovirus F
ggcggacauugccucccug

SEQ ID NO: 3945393 - RNA, 17 nt, Human adenovirus F
ggcggaggugccccaga

SEQ ID NO: 3945394 - RNA, 15 nt, Human adenovirus F
ggcggaugguggcaa

SEQ ID NO: 3945395 - RNA, 18 nt, Human adenovirus F
ggcggaugguggcaagga

SEQ ID NO: 3945396 - RNA, 18 nt, Human adenovirus F
ggcggauuuuugcccgcg

SEQ ID NO: 3945397 - RNA, 14 nt, Human adenovirus F
ggcggcugguuaug

SEQ ID NO: 3945398 - RNA, 17 nt, Human adenovirus F
ggcgguacuaaggcggg

SEQ ID NO: 3945399 - RNA, 14 nt, Human adenovirus F
ggcgguggcgcagc

SEQ ID NO: 3945400 - RNA, 21 nt, Human adenovirus F
ggcuaugaguugugcuuugcc

SEQ ID NO: 3945401 - RNA, 14 nt, Human adenovirus F
ggcucagccccgcc

SEQ ID NO: 3945402 - RNA, 15 nt, Human adenovirus F
ggcugaccggcgcug

SEQ ID NO: 3945403 - RNA, 20 nt, Human adenovirus F
ggcugaugcauuugugggac

SEQ ID NO: 3945404 - RNA, 15 nt, Human adenovirus F
ggcuuccuuaacaag

SEQ ID NO: 3945405 - RNA, 19 nt, Human adenovirus F
ggcuucggugacaaacaag

SEQ ID NO: 3945406 - RNA, 22 nt, Human adenovirus F
ggcuugucgcagaaucuccugc

SEQ ID NO: 3945407 - RNA, 21 nt, Human adenovirus F
gggaaaucagaugcauuuugg

SEQ ID NO: 3945408 - RNA, 22 nt, Human adenovirus F
gggaaggauacaacguggcuca

SEQ ID NO: 3945409 - RNA, 15 nt, Human adenovirus F
gggagggaugcaugc

SEQ ID NO: 3945410 - RNA, 16 nt, Human adenovirus F
gggauucuaagggagg

SEQ ID NO: 3945411 - RNA, 16 nt, Human adenovirus F
gggcacaguaaucaag

SEQ ID NO: 3945412 - RNA, 22 nt, Human adenovirus F
gggcuggcccgcuugggggcgc

SEQ ID NO: 3945413 - RNA, 13 nt, Human adenovirus F
ggggaauggagcu

SEQ ID NO: 3945414 - RNA, 13 nt, Human adenovirus F
ggggaccagcugu

SEQ ID NO: 3945415 - RNA, 15 nt, Human adenovirus F
ggggauuggcggcua

SEQ ID NO: 3945416 - RNA, 23 nt, Human adenovirus F
ggggcgcuuucaguuggagcagc

SEQ ID NO: 3945417 - RNA, 19 nt, Human adenovirus F
gggggcccugaccgaccug

SEQ ID NO: 3945418 - RNA, 14 nt, Human adenovirus F
gggucuauuuggac

SEQ ID NO: 3945419 - RNA, 19 nt, Human adenovirus F
gggugcuacgcgccgaaga

SEQ ID NO: 3945420 - RNA, 13 nt, Human adenovirus F
ggguuuaccuggu

SEQ ID NO: 3945421 - RNA, 17 nt, Human adenovirus F
gguaagugcagaggcgu

SEQ ID NO: 3945422 - RNA, 20 nt, Human adenovirus F
gguaaugucuuuccaggguc

SEQ ID NO: 3945423 - RNA, 16 nt, Human adenovirus F
gguacaggugggcuug

SEQ ID NO: 3945424 - RNA, 16 nt, Human adenovirus F
gguagaaguggaggaa

SEQ ID NO: 3945425 - RNA, 15 nt, Human adenovirus F
gguagugagcucuuc

SEQ ID NO: 3945426 - RNA, 14 nt, Human adenovirus F
gguccagcaaaggc

SEQ ID NO: 3945427 - RNA, 22 nt, Human adenovirus F
gguccauacuugugcauuggca

SEQ ID NO: 3945428 - RNA, 23 nt, Human adenovirus F
gguccuuugccccccggcggcgg

SEQ ID NO: 3945429 - RNA, 13 nt, Human adenovirus F
ggucgcaggguuc

SEQ ID NO: 3945430 - RNA, 14 nt, Human adenovirus F
ggucguaaugagga

SEQ ID NO: 3945431 - RNA, 17 nt, Human adenovirus F
ggucguccugucgcccc

SEQ ID NO: 3945432 - RNA, 22 nt, Human adenovirus F
gguggaccccauggaugagccc

SEQ ID NO: 3945433 - RNA, 20 nt, Human adenovirus F
gguggauaccgcugcagcug

SEQ ID NO: 3945434 - RNA, 23 nt, Human adenovirus F
gguggauaccgcugcagcugcug

SEQ ID NO: 3945435 - RNA, 18 nt, Human adenovirus F
gguggcgcgcgaggaggu

SEQ ID NO: 3945436 - RNA, 22 nt, Human adenovirus F
ggugggcugauuuggaagauga

SEQ ID NO: 3945437 - RNA, 15 nt, Human adenovirus F
gguucucuucaggcu

SEQ ID NO: 3945438 - RNA, 19 nt, Human adenovirus F
gguuguaaagcgagccaaa

SEQ ID NO: 3945439 - RNA, 14 nt, Human adenovirus F
gguuuagccacauc

SEQ ID NO: 3945440 - RNA, 14 nt, Human adenovirus F
guaagugcagaggc

SEQ ID NO: 3945441 - RNA, 11 nt, Human adenovirus F
guaccaggagg

SEQ ID NO: 3945442 - RNA, 19 nt, Human adenovirus F
guaccaguccgggccagac

SEQ ID NO: 3945443 - RNA, 19 nt, Human adenovirus F
ugcauuuuggccugaauuu

SEQ ID NO: 3945444 - RNA, 22 nt, Human adenovirus F
ugccaaagcggcaaaagcuuga

SEQ ID NO: 3945445 - RNA, 21 nt, Human adenovirus F
ugccaucgcugaccagcagca

SEQ ID NO: 3945446 - RNA, 19 nt, Human adenovirus F
ugccgccaugacugccgcu

SEQ ID NO: 3945447 - RNA, 15 nt, Human adenovirus F
ugccgcgcgggcagg

SEQ ID NO: 3945448 - RNA, 16 nt, Human adenovirus F
ugccgcgcgggcagga

SEQ ID NO: 3945449 - RNA, 13 nt, Human adenovirus F
ugccuccagcacu

SEQ ID NO: 3945450 - RNA, 16 nt, Human adenovirus F
ugccucguagaaguca

SEQ ID NO: 3945451 - RNA, 22 nt, Human adenovirus F
ugccucuacugcucguggcaug

SEQ ID NO: 3945452 - RNA, 13 nt, Human adenovirus F
ugccugcagcgcu

SEQ ID NO: 3945453 - RNA, 16 nt, Human adenovirus F
ugccuuucucccaggc

SEQ ID NO: 3945454 - RNA, 15 nt, Human adenovirus F
ugcgaccggcccgga

SEQ ID NO: 3945455 - RNA, 15 nt, Human adenovirus F
ugcgcacccuggugg

SEQ ID NO: 3945456 - RNA, 14 nt, Human adenovirus F
ugcgccccauuaaa

SEQ ID NO: 3945457 - RNA, 13 nt, Human adenovirus F
ugcgggcucugau

SEQ ID NO: 3945458 - RNA, 15 nt, Human adenovirus F
ugcgucgcuggcucc

SEQ ID NO: 3945459 - RNA, 22 nt, Human adenovirus F
ugcguucccguaaaaaggaggg

SEQ ID NO: 3945460 - RNA, 20 nt, Human adenovirus F
ugcuacggaggaagaggguc

SEQ ID NO: 3945461 - RNA, 22 nt, Human adenovirus F
ugcuacuacuuuaacucuuaca

SEQ ID NO: 3945462 - RNA, 17 nt, Human adenovirus F
ugcuauugaaaauaacu

SEQ ID NO: 3945463 - RNA, 15 nt, Human adenovirus F
ugcuccugaagcaca

SEQ ID NO: 3945464 - RNA, 22 nt, Human adenovirus F
ugcucgcaaacaaagaaguaca

SEQ ID NO: 3945465 - RNA, 14 nt, Human adenovirus F
ugcucguggcaugg

SEQ ID NO: 3945466 - RNA, 18 nt, Human adenovirus F
ugcucuuuuugaaucauu

SEQ ID NO: 3945467 - RNA, 14 nt, Human adenovirus F
ugcugcacugccau

SEQ ID NO: 3945468 - RNA, 17 nt, Human adenovirus F
ugcugccucuacugcuc

SEQ ID NO: 3945469 - RNA, 18 nt, Human adenovirus F
ugcuguacgccaacuccg

SEQ ID NO: 3945470 - RNA, 22 nt, Human adenovirus F
ugcuuaucccgcgcuaaaucuu

SEQ ID NO: 3945471 - RNA, 18 nt, Human adenovirus F
ugcuucugccagugcagg

SEQ ID NO: 3945472 - RNA, 12 nt, Human adenovirus F
ugcuuuuucacg

SEQ ID NO: 3945473 - RNA, 20 nt, Human adenovirus F
uggaacauuaauccaaugca

SEQ ID NO: 3945474 - RNA, 22 nt, Human adenovirus F
uggaagagggcgaggggcuggc

SEQ ID NO: 3945475 - RNA, 22 nt, Human adenovirus F
uggaagagguaguugagcgugg

SEQ ID NO: 3945476 - RNA, 13 nt, Human adenovirus F
uggacauggccag

SEQ ID NO: 3945477 - RNA, 15 nt, Human adenovirus F
uggaccuggaagagg

SEQ ID NO: 3945478 - RNA, 14 nt, Human adenovirus F
uggacgggcuggcu

SEQ ID NO: 3945479 - RNA, 16 nt, Human adenovirus F
uggagccgacuucaag

SEQ ID NO: 3945480 - RNA, 22 nt, Human adenovirus F
uggaggaaacccuaguugugga

SEQ ID NO: 3945481 - RNA, 20 nt, Human adenovirus F
uggaggagauggugggccgc

SEQ ID NO: 3945482 - RNA, 18 nt, Human adenovirus F
uggaggaggaucuuaagc

SEQ ID NO: 3945483 - RNA, 21 nt, Human adenovirus F
uggagggcggcaacauuccug

SEQ ID NO: 3945484 - RNA, 16 nt, Human adenovirus F
uggagggcgucaugcu

SEQ ID NO: 3945485 - RNA, 22 nt, Human adenovirus F
uggauaccgcugcagcugcugc

SEQ ID NO: 3945486 - RNA, 18 nt, Human adenovirus F
uggcaucucgauccaaca

SEQ ID NO: 3945487 - RNA, 21 nt, Human adenovirus F
uggcaugagggauucuaaggg

SEQ ID NO: 3945488 - RNA, 15 nt, Human adenovirus F
uggcccaccacucug

SEQ ID NO: 3945489 - RNA, 13 nt, Human adenovirus F
uggccccuaccag

SEQ ID NO: 3945490 - RNA, 17 nt, Human adenovirus F
uggccccuaccagccgu

SEQ ID NO: 3945491 - RNA, 15 nt, Human adenovirus F
uggcccuggccugga

SEQ ID NO: 3945492 - RNA, 16 nt, Human adenovirus F
uggcgcgcgaggaggu

SEQ ID NO: 3945493 - RNA, 19 nt, Human adenovirus F
uggcggcccugcaaagcca

SEQ ID NO: 3945494 - RNA, 15 nt, Human adenovirus F
uggcgggcaguggcc

SEQ ID NO: 3945495 - RNA, 14 nt, Human adenovirus F
uggcucagccccgc

SEQ ID NO: 3945496 - RNA, 16 nt, Human adenovirus F
uggcucugcagcagcg

SEQ ID NO: 3945497 - RNA, 14 nt, Human adenovirus F
ugggacgaggagga

SEQ ID NO: 3945498 - RNA, 15 nt, Human adenovirus F
ugggauggguaagug

SEQ ID NO: 3945499 - RNA, 22 nt, Human adenovirus F
ugggauuugccgcagccagugg

SEQ ID NO: 3945500 - RNA, 17 nt, Human adenovirus F
ugggcguccaguggagc

SEQ ID NO: 3945501 - RNA, 22 nt, Human adenovirus F
ugggcguguuuguggguauaua

SEQ ID NO: 3945502 - RNA, 20 nt, Human adenovirus F
uggggcagaacguucuucac

SEQ ID NO: 3945503 - RNA, 20 nt, Human adenovirus F
uggggcgcgguggucuccag

SEQ ID NO: 3945504 - RNA, 15 nt, Human adenovirus F
ugggucgcagcaggu

SEQ ID NO: 3945505 - RNA, 22 nt, Human adenovirus F
ugguccugacuauuuuaugcag

SEQ ID NO: 3945506 - RNA, 21 nt, Human adenovirus F
ugguuccucauacaaaugcuc

SEQ ID NO: 3945507 - RNA, 22 nt, Human adenovirus F
ugguuuuuuucgcggucggcac

SEQ ID NO: 3945508 - RNA, 17 nt, Human adenovirus F
uguaccaguccgggcca

SEQ ID NO: 3945509 - RNA, 21 nt, Human adenovirus F
uguagccuuuaacugcgcaau

SEQ ID NO: 3945510 - RNA, 14 nt, Human adenovirus F
uguaugggcagcau

SEQ ID NO: 3945511 - RNA, 20 nt, Human adenovirus F
uguauuuguauaaucuuaaa

SEQ ID NO: 3945512 - RNA, 20 nt, Human adenovirus F
ugucacugccguugcaaccu

SEQ ID NO: 3945513 - RNA, 13 nt, Human adenovirus F
uguccuuaaggag

SEQ ID NO: 3945514 - RNA, 19 nt, Human adenovirus F
ugucgguuacuucuucagc

SEQ ID NO: 3945515 - RNA, 21 nt, Human adenovirus F
ugucgucgacgacggcgccgg

SEQ ID NO: 3945516 - RNA, 12 nt, Human adenovirus F
ugugagauuugu

SEQ ID NO: 3945517 - RNA, 17 nt, Human adenovirus F
ugugagcgccagccgcc

SEQ ID NO: 3945518 - RNA, 20 nt, Human adenovirus F
ugugcaacacagccgggaca

SEQ ID NO: 3945519 - RNA, 17 nt, Human adenovirus F
ugugcagauggaaacug

SEQ ID NO: 3945520 - RNA, 16 nt, Human adenovirus F
ugugcagcaaaaacuc

SEQ ID NO: 3945521 - RNA, 21 nt, Human adenovirus F
ugugcccauagacaaggaggu

SEQ ID NO: 3945522 - RNA, 21 nt, Human adenovirus F
ugugccgcgcgggcaggagga

SEQ ID NO: 3945523 - RNA, 15 nt, Human adenovirus F
uguuacgccagagag

SEQ ID NO: 3945524 - RNA, 21 nt, Human adenovirus F
uguucaaggaaacaacagccu

SEQ ID NO: 3945525 - RNA, 17 nt, Human adenovirus F
uguugcauguuggaaag

SEQ ID NO: 3945526 - RNA, 13 nt, Human adenovirus F
uguuuaagccaga

SEQ ID NO: 3945527 - RNA, 13 nt, Human adenovirus F
uguuuuccucuga

SEQ ID NO: 3945528 - RNA, 14 nt, Human adenovirus F
uuaaaccaauuugc

SEQ ID NO: 3945529 - RNA, 20 nt, Human adenovirus F
uuaacacuggcagaggcuua

SEQ ID NO: 3945530 - RNA, 18 nt, Human adenovirus F
uuaacagcuccucagccc

SEQ ID NO: 3945531 - RNA, 21 nt, Human adenovirus F
uuaaccacccccaacucugag

SEQ ID NO: 3945532 - RNA, 14 nt, Human adenovirus F
uuaaccuuaaaauu

SEQ ID NO: 3945533 - RNA, 20 nt, Human adenovirus F
uuaauauccuucagagcauu

SEQ ID NO: 3945534 - RNA, 19 nt, Human adenovirus F
uuaaucucccuccccccuu

SEQ ID NO: 3945535 - RNA, 14 nt, Human adenovirus F
uuacagcccccacc

SEQ ID NO: 3945536 - RNA, 20 nt, Human adenovirus F
uuacauugguuuuagggaca

SEQ ID NO: 3945537 - RNA, 16 nt, Human adenovirus F
uuacauuguucgcugc

SEQ ID NO: 3945538 - RNA, 23 nt, Human adenovirus F
uuagaaguaaccaacggaggaaa

SEQ ID NO: 3945539 - RNA, 14 nt, Human adenovirus F
uuagauguggaaaa

SEQ ID NO: 3945540 - RNA, 22 nt, Human adenovirus F
uuagcacugcgguggaggccau

SEQ ID NO: 3945541 - RNA, 22 nt, Human adenovirus F
uuagcccguuuugcauuuuugg

SEQ ID NO: 3945542 - RNA, 14 nt, Human adenovirus F
uuauaaucaugcaa

SEQ ID NO: 3945543 - RNA, 17 nt, Human adenovirus F
uuaucccaugaccaaac

SEQ ID NO: 3945544 - RNA, 23 nt, Human adenovirus F
uuaugaaacacacaucacuguua

SEQ ID NO: 3945545 - RNA, 16 nt, Human adenovirus F
uucaaacccagccgca

SEQ ID NO: 3945546 - RNA, 23 nt, Human adenovirus F
uucaaagacgccgccuugcaugc

SEQ ID NO: 3945547 - RNA, 22 nt, Human adenovirus F
uucacaaaauggacgaagacug

SEQ ID NO: 3945548 - RNA, 22 nt, Human adenovirus F
uucagacgaggaggcggaggag

SEQ ID NO: 3945549 - RNA, 15 nt, Human adenovirus F
uucaugcaugcagac

SEQ ID NO: 3945550 - RNA, 14 nt, Human adenovirus F
uuccaaacuucacg

SEQ ID NO: 3945551 - RNA, 18 nt, Human adenovirus F
uuccaccaacugcucuuu

SEQ ID NO: 3945552 - RNA, 18 nt, Human adenovirus F
uuccagcagcaccaccug

SEQ ID NO: 3945553 - RNA, 14 nt, Human adenovirus F
uuccagcauaauaa

SEQ ID NO: 3945554 - RNA, 19 nt, Human adenovirus F
uucccgugucaccugcagu

SEQ ID NO: 3945555 - RNA, 22 nt, Human adenovirus F
uucccugucguugccagccggu

SEQ ID NO: 3945556 - RNA, 15 nt, Human adenovirus F
uuccugcgcugcuac

SEQ ID NO: 3945557 - RNA, 20 nt, Human adenovirus F
uucgcagaaacaugccaccc

SEQ ID NO: 3945558 - RNA, 13 nt, Human adenovirus F
uucgcccggacac

SEQ ID NO: 3945559 - RNA, 21 nt, Human coronavirus 229E
uggaaaagacagccuaaugau

SEQ ID NO: 3945560 - RNA, 21 nt, Human coronavirus 229E
uggcucuagguuuguucacau

SEQ ID NO: 3945561 - RNA, 15 nt, Human coronavirus 229E
uggucgcagugccau

SEQ ID NO: 3945562 - RNA, 18 nt, Human coronavirus 229E
uguaaaacuauugaagac

SEQ ID NO: 3945563 - RNA, 23 nt, Human coronavirus 229E
uguaaccacacuuugcuaugcaa

SEQ ID NO: 3945564 - RNA, 19 nt, Human coronavirus 229E
uguaauagaacaguuuaug

SEQ ID NO: 3945565 - RNA, 19 nt, Human coronavirus 229E
uguaauuuugcuuggaaga

SEQ ID NO: 3945566 - RNA, 11 nt, Human coronavirus 229E
uguauuuugcu

SEQ ID NO: 3945567 - RNA, 14 nt, Human coronavirus 229E
ugucugcuguuaau

SEQ ID NO: 3945568 - RNA, 19 nt, Human coronavirus 229E
ugugucugcuguuaaucaa

SEQ ID NO: 3945569 - RNA, 16 nt, Human coronavirus 229E
uguuaaugaugcuauu

SEQ ID NO: 3945570 - RNA, 12 nt, Human coronavirus 229E
uguuacuucugg

SEQ ID NO: 3945571 - RNA, 22 nt, Human coronavirus 229E
uguuaguuccuuuaugaauguu

SEQ ID NO: 3945572 - RNA, 18 nt, Human coronavirus 229E
uguuauuaacagacugag

SEQ ID NO: 3945573 - RNA, 21 nt, Human coronavirus 229E
uguuuaucagcaagcuguugu

SEQ ID NO: 3945574 - RNA, 21 nt, Human coronavirus 229E
uguuuaucauaaacauacguu

SEQ ID NO: 3945575 - RNA, 19 nt, Human coronavirus 229E
uguuuuaugguuugaagau

SEQ ID NO: 3945576 - RNA, 14 nt, Human coronavirus 229E
uuaauuacacuguu

SEQ ID NO: 3945577 - RNA, 14 nt, Human coronavirus 229E
uuacucuguuugca

SEQ ID NO: 3945578 - RNA, 17 nt, Human coronavirus 229E
uuauucagaaaauguau

SEQ ID NO: 3945579 - RNA, 15 nt, Human coronavirus 229E
uuauugcuuuguaaa

SEQ ID NO: 3945580 - RNA, 17 nt, Human coronavirus 229E
uucaaaaacguuucaga

SEQ ID NO: 3945581 - RNA, 21 nt, Human coronavirus 229E
uucaaccacguaauguuucau

SEQ ID NO: 3945582 - RNA, 18 nt, Human coronavirus 229E
uucacuagagaaaugcaa

SEQ ID NO: 3945583 - RNA, 12 nt, Human coronavirus 229E
aaaacgaaagau

SEQ ID NO: 3945584 - RNA, 15 nt, Human coronavirus 229E
aaacuucugccaaga

SEQ ID NO: 3945585 - RNA, 19 nt, Human coronavirus 229E
aaagcucccaaaugguguu

SEQ ID NO: 3945586 - RNA, 15 nt, Human coronavirus 229E
aaaugcaaaagccac

SEQ ID NO: 3945587 - RNA, 16 nt, Human coronavirus 229E
aaauguauuugcuguu

SEQ ID NO: 3945588 - RNA, 13 nt, Human coronavirus 229E
aacaaggcaacuc

SEQ ID NO: 3945589 - RNA, 15 nt, Human coronavirus 229E
aacaggcauuacugu

SEQ ID NO: 3945590 - RNA, 14 nt, Human coronavirus 229E
aacauacguuuauu

SEQ ID NO: 3945591 - RNA, 19 nt, Human coronavirus 229E
aaccacguaauguuucaua

SEQ ID NO: 3945592 - RNA, 13 nt, Human coronavirus 229E
aaccucuauugcu

SEQ ID NO: 3945593 - RNA, 19 nt, Human coronavirus 229E
aacuaauuaagcuuuguuu

SEQ ID NO: 3945594 - RNA, 19 nt, Human coronavirus 229E
aagacaaaaauaagcuuau

SEQ ID NO: 3945595 - RNA, 21 nt, Human coronavirus 229E
aagccacgguggaaaagacag

SEQ ID NO: 3945596 - RNA, 23 nt, Human coronavirus 229E
aagcuuuguuucacuugccauau

SEQ ID NO: 3945597 - RNA, 14 nt, Human coronavirus 229E
aagugcuuuaacug

SEQ ID NO: 3945598 - RNA, 13 nt, Human coronavirus 229E
aauaacuuuguua

SEQ ID NO: 3945599 - RNA, 20 nt, Human coronavirus 229E
aauauaauuuauugcaacuc

SEQ ID NO: 3945600 - RNA, 12 nt, Human coronavirus 229E
aaucaaaagcuc

SEQ ID NO: 3945601 - RNA, 20 nt, Human coronavirus 229E
aaucagaguccugcuucuuc

SEQ ID NO: 3945602 - RNA, 14 nt, Human coronavirus 229E
aaugcaaaagccac

SEQ ID NO: 3945603 - RNA, 14 nt, Human coronavirus 229E
aaugcaaucacugu

SEQ ID NO: 3945604 - RNA, 14 nt, Human coronavirus 229E
aauggaagagccag

SEQ ID NO: 3945605 - RNA, 13 nt, Human coronavirus 229E
aaugguaagccag

SEQ ID NO: 3945606 - RNA, 19 nt, Human coronavirus 229E
aauguauucguuucucaua

SEQ ID NO: 3945607 - RNA, 16 nt, Human coronavirus 229E
aaugucaaaugacaau

SEQ ID NO: 3945608 - RNA, 14 nt, Human coronavirus 229E
aaugucacacaaug

SEQ ID NO: 3945609 - RNA, 13 nt, Human coronavirus 229E
aauugcuguucaa

SEQ ID NO: 3945610 - RNA, 17 nt, Human coronavirus 229E
aauugguggaauugcuu

SEQ ID NO: 3945611 - RNA, 13 nt, Human coronavirus 229E
acagcuuggcacu

SEQ ID NO: 3945612 - RNA, 19 nt, Human coronavirus 229E
acaguuuugggcaauuuuu

SEQ ID NO: 3945613 - RNA, 13 nt, Human coronavirus 229E
acauagauuggcu

SEQ ID NO: 3945614 - RNA, 14 nt, Human coronavirus 229E
acaugggauuucau

SEQ ID NO: 3945615 - RNA, 22 nt, Human coronavirus 229E
accagugcgugaugaaguuucu

SEQ ID NO: 3945616 - RNA, 14 nt, Human coronavirus 229E
acccauuugaagaa

SEQ ID NO: 3945617 - RNA, 19 nt, Human coronavirus 229E
accccauaaagaugcaaaa

SEQ ID NO: 3945618 - RNA, 18 nt, Human coronavirus 229E
accguggcagagcugcuc

SEQ ID NO: 3945619 - RNA, 22 nt, Human coronavirus 229E
accuaucguaguugauugcucc

SEQ ID NO: 3945620 - RNA, 14 nt, Human coronavirus 229E
accugcaacugcug

SEQ ID NO: 3945621 - RNA, 19 nt, Human coronavirus 229E
acgaucagagcugcuuuua

SEQ ID NO: 3945622 - RNA, 15 nt, Human coronavirus 229E
acgcuguuuuaacuu

SEQ ID NO: 3945623 - RNA, 18 nt, Human coronavirus 229E
acgugaaagauggcacug

SEQ ID NO: 3945624 - RNA, 18 nt, Human coronavirus 229E
acuaguuacucuguuugc

SEQ ID NO: 3945625 - RNA, 21 nt, Human coronavirus 229E
acucauuacaaaugugcugga

SEQ ID NO: 3945626 - RNA, 14 nt, Human coronavirus 229E
acucuguuugcaac

SEQ ID NO: 3945627 - RNA, 15 nt, Human coronavirus 229E
acugcacuuaacaag

SEQ ID NO: 3945628 - RNA, 16 nt, Human coronavirus 229E
acugguagauuggcug

SEQ ID NO: 3945629 - RNA, 15 nt, Human coronavirus 229E
acuguuguugaagaa

SEQ ID NO: 3945630 - RNA, 13 nt, Human coronavirus 229E
acuuauaauugca

SEQ ID NO: 3945631 - RNA, 18 nt, Human coronavirus 229E
acuucugccaagagucuu

SEQ ID NO: 3945632 - RNA, 18 nt, Human coronavirus 229E
acuugugucugcuguuaa

SEQ ID NO: 3945633 - RNA, 15 nt, Human coronavirus 229E
acuuucacuacuaga

SEQ ID NO: 3945634 - RNA, 13 nt, Human coronavirus 229E
agaacaguuuaug

SEQ ID NO: 3945635 - RNA, 21 nt, Human coronavirus 229E
agaauucaacccaucucaaac

SEQ ID NO: 3945636 - RNA, 22 nt, Human coronavirus 229E
agaguccugcuucuucucaaac

SEQ ID NO: 3945637 - RNA, 21 nt, Human coronavirus 229E
agagucgcggucguggugaau

SEQ ID NO: 3945638 - RNA, 16 nt, Human coronavirus 229E
agaucagcuuguuguu

SEQ ID NO: 3945639 - RNA, 21 nt, Human coronavirus 229E
agauugcuucauuuuuucuaa

SEQ ID NO: 3945640 - RNA, 15 nt, Human coronavirus 229E
agcacccuugaaaau

SEQ ID NO: 3945641 - RNA, 21 nt, Human coronavirus 229E
agcaugaaaugcaaaagccac

SEQ ID NO: 3945642 - RNA, 11 nt, Human coronavirus 229E
agccuuuguug

SEQ ID NO: 3945643 - RNA, 21 nt, Human coronavirus 229E
agccuuuguugcuuaauugcu

SEQ ID NO: 3945644 - RNA, 15 nt, Human coronavirus 229E
agcguggucuggguu

SEQ ID NO: 3945645 - RNA, 14 nt, Human coronavirus 229E
agcuccaacaggca

SEQ ID NO: 3945646 - RNA, 16 nt, Human coronavirus 229E
agcuuaauuacacugu

SEQ ID NO: 3945647 - RNA, 21 nt, Human coronavirus 229E
agcuuauaggcuauuggaaug

SEQ ID NO: 3945648 - RNA, 16 nt, Human coronavirus 229E
aggcucauuguauguu

SEQ ID NO: 3945649 - RNA, 16 nt, Human coronavirus 229E
aggugaacgcuaguau

SEQ ID NO: 3945650 - RNA, 15 nt, Human coronavirus 229E
aguaaaacacgguga

SEQ ID NO: 3945651 - RNA, 23 nt, Human coronavirus 229E
aguaaagguauaagaaauuugcu

SEQ ID NO: 3945652 - RNA, 16 nt, Human coronavirus 229E
agucaggcaacacugu

SEQ ID NO: 3945653 - RNA, 16 nt, Human coronavirus 229E
aguccugcuucuucuc

SEQ ID NO: 3945654 - RNA, 17 nt, Human coronavirus 229E
aguggcuaauugggcuu

SEQ ID NO: 3945655 - RNA, 20 nt, Human coronavirus 229E
aguuaaaugcauucacuaga

SEQ ID NO: 3945656 - RNA, 22 nt, Human coronavirus 229E
aguuaaaugcauucacuagaga

SEQ ID NO: 3945657 - RNA, 16 nt, Human coronavirus 229E
aguugcuacugcacuu

SEQ ID NO: 3945658 - RNA, 16 nt, Human coronavirus 229E
aguuggaauuuugcuu

SEQ ID NO: 3945659 - RNA, 23 nt, Human coronavirus 229E
aguuucuauugaaacugacauaa

SEQ ID NO: 3945660 - RNA, 16 nt, Human coronavirus 229E
aguuuguuauuucacg

SEQ ID NO: 3945661 - RNA, 15 nt, Human coronavirus 229E
gcacugcuggcucua

SEQ ID NO: 3945662 - RNA, 13 nt, Human coronavirus 229E
gcagguguugugg

SEQ ID NO: 3945663 - RNA, 18 nt, Human coronavirus 229E
gcaguauacuucugcuug

SEQ ID NO: 3945664 - RNA, 15 nt, Human coronavirus 229E
gcaucuuuuaacaaa

SEQ ID NO: 3945665 - RNA, 18 nt, Human coronavirus 229E
gccaaauuacacuguucc

SEQ ID NO: 3945666 - RNA, 19 nt, Human coronavirus 229E
gccacucguacuugcuuug

SEQ ID NO: 3945667 - RNA, 20 nt, Human coronavirus 229E
gccacucguacuugcuuugu

SEQ ID NO: 3945668 - RNA, 23 nt, Human coronavirus 229E
gccacuguguuguuugaaauuca

SEQ ID NO: 3945669 - RNA, 15 nt, Human coronavirus 229E
gccgagcacuacuau

SEQ ID NO: 3945670 - RNA, 17 nt, Human coronavirus 229E
gcuaucgcuauuucacu

SEQ ID NO: 3945671 - RNA, 15 nt, Human coronavirus 229E
gcuccugaggggcuu

SEQ ID NO: 3945672 - RNA, 17 nt, Human coronavirus 229E
gcucuagguuuguucac

SEQ ID NO: 3945673 - RNA, 14 nt, Human coronavirus 229E
gcugacuuggcuug

SEQ ID NO: 3945674 - RNA, 17 nt, Human coronavirus 229E
ggaugaucaugcuuugg

SEQ ID NO: 3945675 - RNA, 13 nt, Human coronavirus 229E
ggcaguguauguu

SEQ ID NO: 3945676 - RNA, 20 nt, Human coronavirus 229E
ggcaguugcugcggcucuua

SEQ ID NO: 3945677 - RNA, 14 nt, Human coronavirus 229E
guccaauggcacuu

SEQ ID NO: 3945678 - RNA, 16 nt, Human coronavirus 229E
guccugcuucuucuca

SEQ ID NO: 3945679 - RNA, 16 nt, Human coronavirus 229E
gucuuuccauugcuga

SEQ ID NO: 3945680 - RNA, 20 nt, Human coronavirus 229E
guggccaaugguguuaaagc

SEQ ID NO: 3945681 - RNA, 21 nt, Human coronavirus 229E
guuacaaauugccaaauuaca

SEQ ID NO: 3945682 - RNA, 15 nt, Human coronavirus 229E
guuacaaccucaauu

SEQ ID NO: 3945683 - RNA, 17 nt, Human coronavirus 229E
guuauugauuucuaaac

SEQ ID NO: 3945684 - RNA, 23 nt, Human coronavirus 229E
guucaaccacguaauguuucaua

SEQ ID NO: 3945685 - RNA, 14 nt, Human coronavirus 229E
guucuuucuuuuau

SEQ ID NO: 3945686 - RNA, 14 nt, Human coronavirus 229E
guugagcuaccugu

SEQ ID NO: 3945687 - RNA, 21 nt, Human coronavirus 229E
guugagcuaccugugucuauu

SEQ ID NO: 3945688 - RNA, 16 nt, Human coronavirus 229E
guuguguauuuugcuu

SEQ ID NO: 3945689 - RNA, 17 nt, Human coronavirus 229E
guuguucuacugguugc

SEQ ID NO: 3945690 - RNA, 16 nt, Human coronavirus 229E
guuuguucacauugca

SEQ ID NO: 3945691 - RNA, 16 nt, Human coronavirus 229E
uaaauuauguugcauu

SEQ ID NO: 3945692 - RNA, 17 nt, Human coronavirus 229E
uaaccacacuuugcuau

SEQ ID NO: 3945693 - RNA, 22 nt, Human coronavirus 229E
uaaccuucuggguuuuaaagau

SEQ ID NO: 3945694 - RNA, 21 nt, Human coronavirus 229E
uaacuaauaccucaucuguug

SEQ ID NO: 3945695 - RNA, 13 nt, Human coronavirus 229E
uaaugaugcuauu

SEQ ID NO: 3945696 - RNA, 17 nt, Human coronavirus 229E
uaaugugucacaaaccu

SEQ ID NO: 3945697 - RNA, 11 nt, Human coronavirus 229E
uaauguuguag

SEQ ID NO: 3945698 - RNA, 21 nt, Human coronavirus 229E
uacgcaacuuugauugcugua

SEQ ID NO: 3945699 - RNA, 19 nt, Human coronavirus 229E
uacuacugguuuugucuau

SEQ ID NO: 3945700 - RNA, 20 nt, Human coronavirus 229E
uacuaucaacccauucaaca

SEQ ID NO: 3945701 - RNA, 17 nt, Human coronavirus 229E
uacuauguuacugaacc

SEQ ID NO: 3945702 - RNA, 20 nt, Human coronavirus 229E
uacuggcgucccacaaccug

SEQ ID NO: 3945703 - RNA, 16 nt, Human coronavirus 229E
uacugguguuaaugau

SEQ ID NO: 3945704 - RNA, 12 nt, Human coronavirus 229E
uacuucugcuug

SEQ ID NO: 3945705 - RNA, 14 nt, Human coronavirus 229E
uagaagacauacuu

SEQ ID NO: 3945706 - RNA, 19 nt, Human coronavirus 229E
uagaugaauacauugcuuu

SEQ ID NO: 3945707 - RNA, 20 nt, Human coronavirus 229E
uaguuacggcuuuucuaaug

SEQ ID NO: 3945708 - RNA, 16 nt, Human coronavirus 229E
uauauugauguuaaua

SEQ ID NO: 3945709 - RNA, 20 nt, Human coronavirus 229E
uauccugcugguguuaauau

SEQ ID NO: 3945710 - RNA, 22 nt, Human coronavirus 229E
uauugugucgcuaccuguuuau

SEQ ID NO: 3945711 - RNA, 13 nt, Human coronavirus 229E
ucaaauugaaaau

SEQ ID NO: 3945712 - RNA, 23 nt, Human coronavirus 229E
ucaacaaggcaacucauugaacc

SEQ ID NO: 3945713 - RNA, 12 nt, Human coronavirus 229E
ucaacagcugcu

SEQ ID NO: 3945714 - RNA, 23 nt, Human coronavirus 229E
ucaauauuauaauggcauuaugg

SEQ ID NO: 3945715 - RNA, 16 nt, Human coronavirus 229E
ucaaugucacuacugc

SEQ ID NO: 3945716 - RNA, 14 nt, Human coronavirus 229E
ucaauuuugaagaa

SEQ ID NO: 3945717 - RNA, 19 nt, Human coronavirus 229E
ucacauuguuuccaaagag

SEQ ID NO: 3945718 - RNA, 15 nt, Human coronavirus 229E
ucaccugcaacugcu

SEQ ID NO: 3945719 - RNA, 13 nt, Human coronavirus 229E
ucacgacagguua

SEQ ID NO: 3945720 - RNA, 14 nt, Human coronavirus 229E
ucagagcugcuuuu

SEQ ID NO: 3945721 - RNA, 19 nt, Human coronavirus 229E
ucaguuuggacacuauaaa

SEQ ID NO: 3945722 - RNA, 19 nt, Human coronavirus 229E
ucauaaacauacguuuauu

SEQ ID NO: 3945723 - RNA, 22 nt, Human coronavirus 229E
ucauugaaccauuuaacuucuc

SEQ ID NO: 3945724 - RNA, 17 nt, Human coronavirus 229E
uccaagacgugaaagau

SEQ ID NO: 3945725 - RNA, 21 nt, Human coronavirus 229E
uccacacuuggguaaguuucu

SEQ ID NO: 3945726 - RNA, 20 nt, Human coronavirus 229E
uccagacagcuugcacaaca

SEQ ID NO: 3945727 - RNA, 15 nt, Human coronavirus 229E
ucgugcucaucuuug

SEQ ID NO: 3945728 - RNA, 22 nt, Human coronavirus 229E
ucguggugaauccaaaccucaa

SEQ ID NO: 3945729 - RNA, 23 nt, Human coronavirus 229E
ucuacaagacaugggauuucauu

SEQ ID NO: 3945730 - RNA, 16 nt, Human coronavirus 229E
ucuuauacacaauggu

SEQ ID NO: 3945731 - RNA, 20 nt, Human coronavirus 229E
ugaaacugacauaauugaug

SEQ ID NO: 3945732 - RNA, 13 nt, Human coronavirus 229E
ugaauacaugaca

SEQ ID NO: 3945733 - RNA, 19 nt, Human coronavirus 229E
ugaccacaacuuuggaagu

SEQ ID NO: 3945734 - RNA, 18 nt, Human coronavirus 229E
ugagcaacaugacagaaa

SEQ ID NO: 3945735 - RNA, 20 nt, Human coronavirus 229E
ugaucaacaaguagauaggc

SEQ ID NO: 3945736 - RNA, 22 nt, Human coronavirus 229E
ugaucaugcuuugguuguuaau

SEQ ID NO: 3945737 - RNA, 22 nt, Human coronavirus 229E
ugauggugcuaaaacugaaccu

SEQ ID NO: 3945738 - RNA, 15 nt, Human coronavirus 229E
ugauuucuaaacuaa

SEQ ID NO: 3945739 - RNA, 16 nt, Human coronavirus 229E
ugcaacugcugaacca

SEQ ID NO: 3945740 - RNA, 21 nt, Human coronavirus 229E
ugcaacuugugucugcuguua

SEQ ID NO: 3945741 - RNA, 17 nt, Human coronavirus 229E
ugcaaugucacauuugu

SEQ ID NO: 3945742 - RNA, 17 nt, Human coronavirus 229E
ugcacagacgcuguuuu

SEQ ID NO: 3945743 - RNA, 19 nt, Human coronavirus 229E
ugcagaaaccacugauuuu

SEQ ID NO: 3945744 - RNA, 19 nt, Human coronavirus 229E
ugcauaugccuuguugcau

SEQ ID NO: 3945745 - RNA, 17 nt, Human coronavirus 229E
ugccaaauuacacuguu

SEQ ID NO: 3945746 - RNA, 19 nt, Human coronavirus 229E
ugcccaaagaccauccaca

SEQ ID NO: 3945747 - RNA, 22 nt, Human coronavirus 229E
ugcuaauauaauuuauugcaac

SEQ ID NO: 3945748 - RNA, 15 nt, Human coronavirus 229E
ugcuauguugucuga

SEQ ID NO: 3945749 - RNA, 20 nt, Human coronavirus 229E
ugcuauguugucugaaaauu

SEQ ID NO: 3945750 - RNA, 22 nt, Human coronavirus 229E
ugcucuuuacaaagaaggcaau

SEQ ID NO: 3945751 - RNA, 15 nt, Human coronavirus 229E
ugcuguaauuuugcu

SEQ ID NO: 3945752 - RNA, 16 nt, Human coronavirus 229E
ugcuguaauuuugcuu

SEQ ID NO: 3945753 - RNA, 13 nt, Human coronavirus 229E
ugcuuaauugcuu

SEQ ID NO: 3945754 - RNA, 12 nt, Human coronavirus 229E
uggaauuuugcu

SEQ ID NO: 3945755 - RNA, 16 nt, Human coronavirus 229E
uggcacuuauaauugc

SEQ ID NO: 3945756 - RNA, 17 nt, Human coronavirus 229E
uggcguuugugcagaug

SEQ ID NO: 3945757 - RNA, 16 nt, Human coronavirus 229E
uggugacuacaaccuu

SEQ ID NO: 3945758 - RNA, 17 nt, Human coronavirus 229E
uggugcuuauagugaua

SEQ ID NO: 3945759 - RNA, 14 nt, Human coronavirus 229E
ugguuuuuauucua

SEQ ID NO: 3945760 - RNA, 20 nt, Human coronavirus 229E
uguaauuuugcuuggaagau

SEQ ID NO: 3945761 - RNA, 15 nt, Human coronavirus 229E
uguauguuuuucgcu

SEQ ID NO: 3945762 - RNA, 12 nt, Human coronavirus 229E
uguauuuugcuu

SEQ ID NO: 3945763 - RNA, 19 nt, Human coronavirus 229E
ugucacauuuguuaacauu

SEQ ID NO: 3945764 - RNA, 14 nt, Human coronavirus 229E
ugucgcuaccuguu

SEQ ID NO: 3945765 - RNA, 15 nt, Human coronavirus 229E
ugugacaucuaaugu

SEQ ID NO: 3945766 - RNA, 21 nt, Human coronavirus 229E
uguugauggugcuaaaacuga

SEQ ID NO: 3945767 - RNA, 22 nt, Human coronavirus 229E
uguugauggugcuaaaacugaa

SEQ ID NO: 3945768 - RNA, 22 nt, Human coronavirus 229E
uguugguagguggagugcuagu

SEQ ID NO: 3945769 - RNA, 13 nt, Human coronavirus 229E
uguuguugaagaa

SEQ ID NO: 3945770 - RNA, 14 nt, Human coronavirus 229E
uguuguugaagaac

SEQ ID NO: 3945771 - RNA, 22 nt, Human coronavirus 229E
aaaauaaggcucugaaaccauu

SEQ ID NO: 3945772 - RNA, 16 nt, Human coronavirus 229E
aaaauucuugcugcau

SEQ ID NO: 3945773 - RNA, 13 nt, Human coronavirus 229E
aaacucugauuga

SEQ ID NO: 3945774 - RNA, 23 nt, Human coronavirus 229E
aaacuucaccugcaacugcugaa

SEQ ID NO: 3945775 - RNA, 17 nt, Human coronavirus 229E
aaauugcccuuuuucuu

SEQ ID NO: 3945776 - RNA, 15 nt, Human coronavirus 229E
aaccagacuauuuug

SEQ ID NO: 3945777 - RNA, 20 nt, Human coronavirus 229E
aacgaaagauugcuucauuu

SEQ ID NO: 3945778 - RNA, 18 nt, Human coronavirus 229E
aagaauucagaaccagag

SEQ ID NO: 3945779 - RNA, 14 nt, Human coronavirus 229E
aagacgugaaagau

SEQ ID NO: 3945780 - RNA, 15 nt, Human coronavirus 229E
aagcccuacaaacag

SEQ ID NO: 3945781 - RNA, 22 nt, Human coronavirus 229E
aaguguugguuucuugaaaaua

SEQ ID NO: 3945782 - RNA, 22 nt, Human coronavirus 229E
aaugagccucuuuguuguguau

SEQ ID NO: 3945783 - RNA, 15 nt, Human coronavirus 229E
aauuacacuguucaa

SEQ ID NO: 3945784 - RNA, 20 nt, Human coronavirus 229E
aauuagcacccuugaaaaua

SEQ ID NO: 3945785 - RNA, 11 nt, Human coronavirus 229E
aauugaaaauu

SEQ ID NO: 3945786 - RNA, 14 nt, Human coronavirus 229E
aauuuauugcaacu

SEQ ID NO: 3945787 - RNA, 18 nt, Human coronavirus 229E
acaauguuuuggccccag

SEQ ID NO: 3945788 - RNA, 19 nt, Human coronavirus 229E
acacaaugguaagccagug

SEQ ID NO: 3945789 - RNA, 12 nt, Human coronavirus 229E
acacccagcugu

SEQ ID NO: 3945790 - RNA, 22 nt, Human coronavirus 229E
acacuaaugagccucuuuguug

SEQ ID NO: 3945791 - RNA, 19 nt, Human coronavirus 229E
acacuggccaauuuuaaug

SEQ ID NO: 3945792 - RNA, 23 nt, Human coronavirus 229E
acacuguggucuugacuuucacu

SEQ ID NO: 3945793 - RNA, 18 nt, Human coronavirus 229E
acacuuggguaaguuucu

SEQ ID NO: 3945794 - RNA, 14 nt, Human coronavirus 229E
accacacuuugcua

SEQ ID NO: 3945795 - RNA, 16 nt, Human coronavirus 229E
accauauucauuguua

SEQ ID NO: 3945796 - RNA, 15 nt, Human coronavirus 229E
accuaaucuugcucu

SEQ ID NO: 3945797 - RNA, 20 nt, Human coronavirus 229E
accuaccugaauacaugaca

SEQ ID NO: 3945798 - RNA, 22 nt, Human coronavirus 229E
accuaucuaguuaguaacugcu

SEQ ID NO: 3945799 - RNA, 16 nt, Human coronavirus 229E
acgaaagauugcuuca

SEQ ID NO: 3945800 - RNA, 18 nt, Human coronavirus 229E
acgacagguuauccaaga

SEQ ID NO: 3945801 - RNA, 14 nt, Human coronavirus 229E
acgacguugaaaag

SEQ ID NO: 3945802 - RNA, 13 nt, Human coronavirus 229E
acguaauguuuca

SEQ ID NO: 3945803 - RNA, 15 nt, Human coronavirus 229E
acucuguuugcaacg

SEQ ID NO: 3945804 - RNA, 19 nt, Human coronavirus 229E
acugaaguucgugcuucca

SEQ ID NO: 3945805 - RNA, 13 nt, Human coronavirus 229E
acugcugaaccag

SEQ ID NO: 3945806 - RNA, 14 nt, Human coronavirus 229E
acugguguuaauga

SEQ ID NO: 3945807 - RNA, 17 nt, Human coronavirus 229E
acugugaccuugcugag

SEQ ID NO: 3945808 - RNA, 22 nt, Human coronavirus 229E
acuucugcuuguaaaacuauug

SEQ ID NO: 3945809 - RNA, 16 nt, Human coronavirus 229E
acuuuagguaauguag

SEQ ID NO: 3945810 - RNA, 21 nt, Human coronavirus 229E
acuuugauugcuguaauuuug

SEQ ID NO: 3945811 - RNA, 19 nt, Human coronavirus 229E
acuuugcauucaauaauug

SEQ ID NO: 3945812 - RNA, 15 nt, Human coronavirus 229E
agaaaccacugauuu

SEQ ID NO: 3945813 - RNA, 22 nt, Human coronavirus 229E
agaaauuugcuacuauguuacu

SEQ ID NO: 3945814 - RNA, 23 nt, Human coronavirus 229E
agaacugccgaaauuuuucuaug

SEQ ID NO: 3945815 - RNA, 22 nt, Human coronavirus 229E
agacagcuugcacaacaaaaag

SEQ ID NO: 3945816 - RNA, 15 nt, Human coronavirus 229E
ugguuucuugaaaau

SEQ ID NO: 3945817 - RNA, 22 nt, Human coronavirus 229E
uguauucguuucucauacauug

SEQ ID NO: 3945818 - RNA, 17 nt, Human coronavirus 229E
ugucacccauuugaaga

SEQ ID NO: 3945819 - RNA, 18 nt, Human coronavirus 229E
ugucacccauuugaagaa

SEQ ID NO: 3945820 - RNA, 13 nt, Human coronavirus 229E
ugucgcuaccugu

SEQ ID NO: 3945821 - RNA, 22 nt, Human coronavirus 229E
ugugcgcuguguugaauugcuu

SEQ ID NO: 3945822 - RNA, 17 nt, Human coronavirus 229E
ugugcuggaguaaucaa

SEQ ID NO: 3945823 - RNA, 13 nt, Human coronavirus 229E
ugugguugugcau

SEQ ID NO: 3945824 - RNA, 16 nt, Human coronavirus 229E
ugugucugcuguuaau

SEQ ID NO: 3945825 - RNA, 22 nt, Human coronavirus 229E
uguucaaauugaaaauugcaau

SEQ ID NO: 3945826 - RNA, 23 nt, Human coronavirus 229E
uguugauggugcuaaaacugaac

SEQ ID NO: 3945827 - RNA, 14 nt, Human coronavirus 229E
uguugguuucuuga

SEQ ID NO: 3945828 - RNA, 18 nt, Human coronavirus 229E
uguugguuucuugaaaau

SEQ ID NO: 3945829 - RNA, 13 nt, Human coronavirus 229E
uguuguuguucua

SEQ ID NO: 3945830 - RNA, 14 nt, Human coronavirus 229E
uguuuaaaauucua

SEQ ID NO: 3945831 - RNA, 16 nt, Human coronavirus 229E
uuaaaauucuaauccu

SEQ ID NO: 3945832 - RNA, 17 nt, Human coronavirus 229E
uuaacuucucaguugag

SEQ ID NO: 3945833 - RNA, 13 nt, Human coronavirus 229E
uuaauuaacauga

SEQ ID NO: 3945834 - RNA, 21 nt, Human coronavirus 229E
uuacgcaacuuugauugcugu

SEQ ID NO: 3945835 - RNA, 15 nt, Human coronavirus 229E
uuacucuguuugcaa

SEQ ID NO: 3945836 - RNA, 21 nt, Human coronavirus 229E
uuagacguggaaccauuuugu

SEQ ID NO: 3945837 - RNA, 23 nt, Human coronavirus 229E
uuauacacaaugguaagccagug

SEQ ID NO: 3945838 - RNA, 22 nt, Human coronavirus 229E
uuauauacccuccgacuuugca

SEQ ID NO: 3945839 - RNA, 13 nt, Human coronavirus 229E
uucacauugcaac

SEQ ID NO: 3945840 - RNA, 14 nt, Human coronavirus 229E
uucagaaccagaga

SEQ ID NO: 3945841 - RNA, 13 nt, Human coronavirus 229E
uuccaauuggacc

SEQ ID NO: 3945842 - RNA, 13 nt, Human coronavirus 229E
uucgauauggaua

SEQ ID NO: 3945843 - RNA, 22 nt, Human coronavirus 229E
uucuaugcguccaauggcacuu

SEQ ID NO: 3945844 - RNA, 19 nt, Human coronavirus 229E
uucuguggaaauggcacuc

SEQ ID NO: 3945845 - RNA, 23 nt, Human coronavirus 229E
uugaaacugacauaauugaugaa

SEQ ID NO: 3945846 - RNA, 19 nt, Human coronavirus 229E
uugauugcuccacuuaugu

SEQ ID NO: 3945847 - RNA, 19 nt, Human coronavirus 229E
uugcaacuugugucugcug

SEQ ID NO: 3945848 - RNA, 21 nt, Human coronavirus 229E
uugcuccacuuauguuugcaa

SEQ ID NO: 3945849 - RNA, 18 nt, Human coronavirus 229E
uuggcaguguauguuuuu

SEQ ID NO: 3945850 - RNA, 15 nt, Human coronavirus 229E
uuggccacucguacu

SEQ ID NO: 3945851 - RNA, 20 nt, Human coronavirus 229E
uugggcaauuuuuauugcuu

SEQ ID NO: 3945852 - RNA, 15 nt, Human coronavirus 229E
uuguucacauugcaa

SEQ ID NO: 3945853 - RNA, 17 nt, Human coronavirus 229E
uuguucacauugcaacu

SEQ ID NO: 3945854 - RNA, 15 nt, Human coronavirus 229E
uuuaaaauucuaauc

SEQ ID NO: 3945855 - RNA, 13 nt, Human coronavirus 229E
uuugcuuguugau

SEQ ID NO: 3945856 - RNA, 18 nt, Human coronavirus 229E
uuuguuuaaaacaucuua

SEQ ID NO: 3945857 - RNA, 20 nt, Human coronavirus 229E
uuuuccauacagcuuggcac

SEQ ID NO: 3945858 - RNA, 17 nt, Human coronavirus 229E
uuuuguucuuucuuuua

SEQ ID NO: 3945859 - RNA, 18 nt, Human coronavirus 229E
uuuuucuccacacugucu

SEQ ID NO: 3945860 - RNA, 22 nt, Human coronavirus 229E
caauaauuaaacuaauuaagcu

SEQ ID NO: 3945861 - RNA, 18 nt, Human coronavirus 229E
caaugaaacuacgucugc

SEQ ID NO: 3945862 - RNA, 16 nt, Human coronavirus 229E
caauguuuuggcccca

SEQ ID NO: 3945863 - RNA, 12 nt, Human coronavirus 229E
caauuugcugag

SEQ ID NO: 3945864 - RNA, 20 nt, Human coronavirus 229E
cacaaaccucuauugcuaau

SEQ ID NO: 3945865 - RNA, 14 nt, Human coronavirus 229E
cacccaagcugcau

SEQ ID NO: 3945866 - RNA, 16 nt, Human coronavirus 229E
caccguggcagagcug

SEQ ID NO: 3945867 - RNA, 17 nt, Human coronavirus 229E
cacuacuagagugacug

SEQ ID NO: 3945868 - RNA, 21 nt, Human coronavirus 229E
cagacuacaaaaagugcacua

SEQ ID NO: 3945869 - RNA, 21 nt, Human coronavirus 229E
cagagaccuugaccacaacuu

SEQ ID NO: 3945870 - RNA, 16 nt, Human coronavirus 229E
cagagauaccacacuu

SEQ ID NO: 3945871 - RNA, 23 nt, Human coronavirus 229E
cagauguuagugagaugcucacu

SEQ ID NO: 3945872 - RNA, 14 nt, Human coronavirus 229E
caggcauuacugug

SEQ ID NO: 3945873 - RNA, 15 nt, Human coronavirus 229E
caggugaugcucaca

SEQ ID NO: 3945874 - RNA, 15 nt, Human coronavirus 229E
cagugcgugaugaag

SEQ ID NO: 3945875 - RNA, 14 nt, Human coronavirus 229E
cauaauugaugaag

SEQ ID NO: 3945876 - RNA, 16 nt, Human coronavirus 229E
cauacguuuauugugu

SEQ ID NO: 3945877 - RNA, 13 nt, Human coronavirus 229E
caugaaaugcaaa

SEQ ID NO: 3945878 - RNA, 22 nt, Human coronavirus 229E
caugaaggcaguugcugcggcu

SEQ ID NO: 3945879 - RNA, 15 nt, Human coronavirus 229E
caugaucccuugcuu

SEQ ID NO: 3945880 - RNA, 16 nt, Human coronavirus 229E
cauuguuuccaaagag

SEQ ID NO: 3945881 - RNA, 18 nt, Human coronavirus 229E
cauuucagucgugcucau

SEQ ID NO: 3945882 - RNA, 22 nt, Human coronavirus 229E
ccagaguauauugauguuaaua

SEQ ID NO: 3945883 - RNA, 21 nt, Human coronavirus 229E
ccauggcagauuuuguucaaa

SEQ ID NO: 3945884 - RNA, 17 nt, Human coronavirus 229E
ccugagguuaaugcaau

SEQ ID NO: 3945885 - RNA, 23 nt, Human coronavirus 229E
cgaaaacggguacuccuaagccu

SEQ ID NO: 3945886 - RNA, 20 nt, Human coronavirus 229E
cgucacagcuaauuugucua

SEQ ID NO: 3945887 - RNA, 21 nt, Human coronavirus 229E
cgugaugaaguuucuauugaa

SEQ ID NO: 3945888 - RNA, 16 nt, Human coronavirus 229E
cguggcagagcugcuc

SEQ ID NO: 3945889 - RNA, 21 nt, Human coronavirus 229E
cuaacgacuuguacguugcuc

SEQ ID NO: 3945890 - RNA, 13 nt, Human coronavirus 229E
cuaauguuguaga

SEQ ID NO: 3945891 - RNA, 22 nt, Human coronavirus 229E
cuagaauucaacccaucucaaa

SEQ ID NO: 3945892 - RNA, 15 nt, Human coronavirus 229E
cuagagaaaugcaac

SEQ ID NO: 3945893 - RNA, 23 nt, Human coronavirus 229E
cuaguauaacucauuacaaaugu

SEQ ID NO: 3945894 - RNA, 17 nt, Human coronavirus 229E
cuauaauugcuguucaa

SEQ ID NO: 3945895 - RNA, 18 nt, Human coronavirus 229E
cuauaauugcuguucaac

SEQ ID NO: 3945896 - RNA, 18 nt, Human coronavirus 229E
cuaugcguccaauggcac

SEQ ID NO: 3945897 - RNA, 17 nt, Human coronavirus 229E
cuauuacacaaacuuca

SEQ ID NO: 3945898 - RNA, 18 nt, Human coronavirus 229E
cucaaucucggaauccuu

SEQ ID NO: 3945899 - RNA, 20 nt, Human coronavirus 229E
cucaauuguuaaugcugcuc

SEQ ID NO: 3945900 - RNA, 15 nt, Human coronavirus 229E
cucagccuuucuaga

SEQ ID NO: 3945901 - RNA, 11 nt, Human coronavirus 229E
cucgcucugag

SEQ ID NO: 3945902 - RNA, 15 nt, Human coronavirus 229E
cucguacuugcuuug

SEQ ID NO: 3945903 - RNA, 12 nt, Human coronavirus 229E
cucguucucaga

SEQ ID NO: 3945904 - RNA, 15 nt, Human coronavirus 229E
cucuagguuuguuca

SEQ ID NO: 3945905 - RNA, 18 nt, Human coronavirus 229E
cucuagguuuguucacau

SEQ ID NO: 3945906 - RNA, 17 nt, Human coronavirus 229E
cugcaacugcugaacca

SEQ ID NO: 3945907 - RNA, 15 nt, Human coronavirus 229E
cugcuuugaauguau

SEQ ID NO: 3945908 - RNA, 14 nt, Human coronavirus 229E
cuggcucuacaaga

SEQ ID NO: 3945909 - RNA, 17 nt, Human coronavirus 229E
cugguagauuggcugcu

SEQ ID NO: 3945910 - RNA, 18 nt, Human coronavirus 229E
cugguugcuguggcuucu

SEQ ID NO: 3945911 - RNA, 14 nt, Human coronavirus 229E
cugugaccuugcug

SEQ ID NO: 3945912 - RNA, 16 nt, Human coronavirus 229E
cugugaccuugcugag

SEQ ID NO: 3945913 - RNA, 15 nt, Human coronavirus 229E
cuguggaaauggcac

SEQ ID NO: 3945914 - RNA, 14 nt, Human coronavirus 229E
cuuaacaagaucca

SEQ ID NO: 3945915 - RNA, 18 nt, Human coronavirus 229E
cuuagacguggaaccauu

SEQ ID NO: 3945916 - RNA, 13 nt, Human coronavirus 229E
cuuauaauugcac

SEQ ID NO: 3945917 - RNA, 21 nt, Human coronavirus 229E
cuucaguuuggacacuauaaa

SEQ ID NO: 3945918 - RNA, 19 nt, Human coronavirus 229E
cuugcgguuuacuacuggu

SEQ ID NO: 3945919 - RNA, 14 nt, Human coronavirus 229E
cuugcuuugucaau

SEQ ID NO: 3945920 - RNA, 14 nt, Human coronavirus 229E
cuuggcacaggacc

SEQ ID NO: 3945921 - RNA, 18 nt, Human coronavirus 229E
cuuggcacugcuggcucu

SEQ ID NO: 3945922 - RNA, 20 nt, Human coronavirus 229E
cuuguacuguggcuucuuug

SEQ ID NO: 3945923 - RNA, 15 nt, Human coronavirus 229E
cuuguugauagugaa

SEQ ID NO: 3945924 - RNA, 17 nt, Human coronavirus 229E
cuuuacugguguuaaug

SEQ ID NO: 3945925 - RNA, 20 nt, Human coronavirus 229E
gaaaacgaaagauugcuuca

SEQ ID NO: 3945926 - RNA, 16 nt, Human coronavirus 229E
gaaaauuuuacuaguu

SEQ ID NO: 3945927 - RNA, 15 nt, Human coronavirus 229E
gaaaguuagugcuga

SEQ ID NO: 3945928 - RNA, 23 nt, Human coronavirus 229E
gacagaaaacgaaagauugcuuc

SEQ ID NO: 3945929 - RNA, 19 nt, Human coronavirus 229E
gacgugaaagauggcacug

SEQ ID NO: 3945930 - RNA, 11 nt, Human coronavirus 229E
gacuuggcacu

SEQ ID NO: 3945931 - RNA, 21 nt, Human coronavirus 229E
gauugcuguaauuuugcuugg

SEQ ID NO: 3945932 - RNA, 19 nt, Human coronavirus 229E
gauuuuuccauacagcuug

SEQ ID NO: 3945933 - RNA, 17 nt, Human coronavirus 229E
gcaaacaguuucagacu

SEQ ID NO: 3945934 - RNA, 17 nt, Human coronavirus 229E
gcaacucuguuauuaac

SEQ ID NO: 3945935 - RNA, 22 nt, Human coronavirus 229E
gcaagaauucagaaccagagau

SEQ ID NO: 3945936 - RNA, 22 nt, Human coronavirus 229E
gcaguguauguuuuucgcuaaa

SEQ ID NO: 3945937 - RNA, 12 nt, Human coronavirus 229E
gcauauugcugg

SEQ ID NO: 3945938 - RNA, 11 nt, Human coronavirus 229E
gccauugcugu

SEQ ID NO: 3945939 - RNA, 20 nt, Human coronavirus 229E
gcuaucucuagcucuauuca

SEQ ID NO: 3945940 - RNA, 14 nt, Human coronavirus 229E
gcucucccaugagc

SEQ ID NO: 3945941 - RNA, 21 nt, Human coronavirus 229E
gcugcaagaauuaaguuacaa

SEQ ID NO: 3945942 - RNA, 16 nt, Human coronavirus 229E
gcuguugauggugcua

SEQ ID NO: 3945943 - RNA, 13 nt, Human coronavirus 229E
ggacuuggcacug

SEQ ID NO: 3945944 - RNA, 20 nt, Human coronavirus 229E
ggaugacaucaugaaggcag

SEQ ID NO: 3945945 - RNA, 16 nt, Human coronavirus 229E
ggcacucacauuuucu

SEQ ID NO: 3945946 - RNA, 13 nt, Human coronavirus 229E
ggcagagcugcuc

SEQ ID NO: 3945947 - RNA, 14 nt, Human coronavirus 229E
gguaaguuucuuga

SEQ ID NO: 3945948 - RNA, 19 nt, Human coronavirus 229E
gguacgaucagagcugcuu

SEQ ID NO: 3945949 - RNA, 12 nt, Human coronavirus 229E
ggugaaugugua

SEQ ID NO: 3945950 - RNA, 21 nt, Human coronavirus 229E
gguucuauaauugcuguucaa

SEQ ID NO: 3945951 - RNA, 19 nt, Human coronavirus 229E
guacccaucaacaagaaag

SEQ ID NO: 3945952 - RNA, 18 nt, Human coronavirus 229E
guagaugaauacauugcu

SEQ ID NO: 3945953 - RNA, 22 nt, Human coronavirus 229E
guauacuuguuuugugaacacc

SEQ ID NO: 3945954 - RNA, 15 nt, Human coronavirus 229E
gucaaucuuugacac

SEQ ID NO: 3945955 - RNA, 17 nt, Human coronavirus 229E
gucacacaauguuuugg

SEQ ID NO: 3945956 - RNA, 16 nt, Human coronavirus 229E
gucuugcucguucuca

SEQ ID NO: 3945957 - RNA, 17 nt, Human coronavirus 229E
gugccauugcuguauug

SEQ ID NO: 3945958 - RNA, 18 nt, Human coronavirus 229E
gugcuuccagacagcuug

SEQ ID NO: 3945959 - RNA, 16 nt, Human coronavirus 229E
gugcuuuaacuguuau

SEQ ID NO: 3945960 - RNA, 16 nt, Human coronavirus 229E
guguugggacagacau

SEQ ID NO: 3945961 - RNA, 18 nt, Human coronavirus 229E
guuaauaacuuuguuaaa

SEQ ID NO: 3945962 - RNA, 21 nt, Human coronavirus 229E
guuauucagaaaauguauuug

SEQ ID NO: 3945963 - RNA, 20 nt, Human coronavirus 229E
guuauuucacgcacaggaca

SEQ ID NO: 3945964 - RNA, 15 nt, Human coronavirus 229E
guucagguucauaac

SEQ ID NO: 3945965 - RNA, 22 nt, Human coronavirus 229E
guuuucagccuuuguugcuuaa

SEQ ID NO: 3945966 - RNA, 13 nt, Human coronavirus 229E
guuuuucgcuaaa

SEQ ID NO: 3945967 - RNA, 12 nt, Human coronavirus 229E
uaaaacugaacc

SEQ ID NO: 3945968 - RNA, 21 nt, Human coronavirus 229E
uaacucauuacaaaugugcug

SEQ ID NO: 3945969 - RNA, 23 nt, Human coronavirus 229E
uaagcuaguggaugaucaugcuu

SEQ ID NO: 3945970 - RNA, 14 nt, Human coronavirus 229E
uaauauuacacugg

SEQ ID NO: 3945971 - RNA, 21 nt, Human coronavirus 229E
uaauugggccuuuguugcauu

SEQ ID NO: 3945972 - RNA, 19 nt, Human coronavirus 229E
uaauugguggaauugcuuu

SEQ ID NO: 3945973 - RNA, 16 nt, Human coronavirus 229E
uaauugguuccuucua

SEQ ID NO: 3945974 - RNA, 16 nt, Human coronavirus 229E
uaauuucaaugucacu

SEQ ID NO: 3945975 - RNA, 23 nt, Human coronavirus 229E
uacaaauugccaaauuacacugu

SEQ ID NO: 3945976 - RNA, 22 nt, Human coronavirus 229E
uacacuggccaauuuuaaugaa

SEQ ID NO: 3945977 - RNA, 11 nt, Human coronavirus 229E
uacacuguucc

SEQ ID NO: 3945978 - RNA, 22 nt, Human coronavirus 229E
uaccauggcagauuuuguucaa

SEQ ID NO: 3945979 - RNA, 14 nt, Human coronavirus 229E
uacuuuuuagcaaa

SEQ ID NO: 3945980 - RNA, 14 nt, Human coronavirus 229E
uagaugccuuuacu

SEQ ID NO: 3945981 - RNA, 18 nt, Human coronavirus 229E
uagauuggcugcuuugaa

SEQ ID NO: 3945982 - RNA, 13 nt, Human coronavirus 229E
uagguuuugacaa

SEQ ID NO: 3945983 - RNA, 19 nt, Human coronavirus 229E
uaguauaacucauuacaaa

SEQ ID NO: 3945984 - RNA, 19 nt, Human coronavirus 229E
uaguuuuggugacuacaac

SEQ ID NO: 3945985 - RNA, 17 nt, Human coronavirus 229E
uauaagaaauuugcuac

SEQ ID NO: 3945986 - RNA, 11 nt, Human coronavirus 229E
uauaauuuaua

SEQ ID NO: 3945987 - RNA, 15 nt, Human coronavirus 229E
uauacuucugcuugu

SEQ ID NO: 3945988 - RNA, 22 nt, Human coronavirus 229E
uauccaagacgugaaagauggc

SEQ ID NO: 3945989 - RNA, 13 nt, Human coronavirus 229E
uauguugucugaa

SEQ ID NO: 3945990 - RNA, 13 nt, Human coronavirus 229E
uauugaaacugac

SEQ ID NO: 3945991 - RNA, 16 nt, Human coronavirus 229E
ucaaaaacguuucaga

SEQ ID NO: 3945992 - RNA, 17 nt, Human coronavirus 229E
ucacacuucacuaccaa

SEQ ID NO: 3945993 - RNA, 13 nt, Human coronavirus 229E
ucagguguucagg

SEQ ID NO: 3945994 - RNA, 18 nt, Human coronavirus 229E
ucgauauggauacacaaa

SEQ ID NO: 3945995 - RNA, 22 nt, Human coronavirus 229E
ucuaacuaauaccucaucuguu

SEQ ID NO: 3945996 - RNA, 17 nt, Human coronavirus 229E
ucuacguacgaguaaaa

SEQ ID NO: 3945997 - RNA, 16 nt, Human coronavirus 229E
ucuaguuaguaacugc

SEQ ID NO: 3945998 - RNA, 12 nt, Human coronavirus 229E
ucuauaauugcu

SEQ ID NO: 3945999 - RNA, 16 nt, Human coronavirus 229E
ucuugcugcaucuuuu

SEQ ID NO: 3946000 - RNA, 22 nt, Human coronavirus 229E
ugaaauuagcacccuugaaaau

SEQ ID NO: 3946001 - RNA, 16 nt, Human coronavirus 229E
ugaauacaugacaguu

SEQ ID NO: 3946002 - RNA, 12 nt, Human coronavirus 229E
ugaauguuacau

SEQ ID NO: 3946003 - RNA, 21 nt, Human coronavirus 229E
ugacaagaaagcguuuacacu

SEQ ID NO: 3946004 - RNA, 17 nt, Human coronavirus 229E
ugacaagccucaggaaa

SEQ ID NO: 3946005 - RNA, 13 nt, Human coronavirus 229E
ugacacuauucag

SEQ ID NO: 3946006 - RNA, 13 nt, Human coronavirus 229E
ugacaucaugaag

SEQ ID NO: 3946007 - RNA, 18 nt, Human coronavirus 229E
ugaccacaacuuuggaag

SEQ ID NO: 3946008 - RNA, 16 nt, Human coronavirus 229E
ugagaugcucacuuuu

SEQ ID NO: 3946009 - RNA, 15 nt, Human coronavirus 229E
ugaguauguugcuau

SEQ ID NO: 3946010 - RNA, 23 nt, Human coronavirus 229E
ugauagugaacaaccuuggaagg

SEQ ID NO: 3946011 - RNA, 19 nt, Human coronavirus 229E
ugaugcuauuacacaaacu

SEQ ID NO: 3946012 - RNA, 21 nt, Human coronavirus 229E
ugauggugcuaaaacugaacc

SEQ ID NO: 3946013 - RNA, 17 nt, Human coronavirus 229E
ugauugcuguaauuuug

SEQ ID NO: 3946014 - RNA, 16 nt, Human coronavirus 229E
ugcaacaacauccucu

SEQ ID NO: 3946015 - RNA, 23 nt, Human coronavirus 229E
ugcaaugucacauuuguuaacau

SEQ ID NO: 3946016 - RNA, 14 nt, Human coronavirus 229E
ugcgugaugaaguu

SEQ ID NO: 3946017 - RNA, 19 nt, Human coronavirus 229E
ugcucguucucagaguucu

SEQ ID NO: 3946018 - RNA, 16 nt, Human coronavirus 229E
uggcagauuuuguuca

SEQ ID NO: 3946019 - RNA, 13 nt, Human coronavirus 229E
uggccccagagac

SEQ ID NO: 3946020 - RNA, 19 nt, Human coronavirus 229E
uggugaguauguugcuauu

SEQ ID NO: 3946021 - RNA, 17 nt, Human coronavirus 229E
aguuuuggugacuacaa

SEQ ID NO: 3946022 - RNA, 13 nt, Human coronavirus 229E
auaaccuaccuga

SEQ ID NO: 3946023 - RNA, 13 nt, Human coronavirus 229E
auaauugcuguuc

SEQ ID NO: 3946024 - RNA, 18 nt, Human coronavirus 229E
auaccucaucuguuguag

SEQ ID NO: 3946025 - RNA, 17 nt, Human coronavirus 229E
auacguugcuguuuaug

SEQ ID NO: 3946026 - RNA, 20 nt, Human coronavirus 229E
auacguuuauuguguuguac

SEQ ID NO: 3946027 - RNA, 12 nt, Human coronavirus 229E
auauaacgguga

SEQ ID NO: 3946028 - RNA, 21 nt, Human coronavirus 229E
auauaugcacauagacccuuu

SEQ ID NO: 3946029 - RNA, 22 nt, Human coronavirus 229E
aucacaccguggcagagcugcu

SEQ ID NO: 3946030 - RNA, 19 nt, Human coronavirus 229E
aucucgcauaauguuugaa

SEQ ID NO: 3946031 - RNA, 17 nt, Human coronavirus 229E
augaugcuauuacacaa

SEQ ID NO: 3946032 - RNA, 23 nt, Human coronavirus 229E
augcauucacuagagaaaugcaa

SEQ ID NO: 3946033 - RNA, 14 nt, Human coronavirus 229E
auguuacugaaccu

SEQ ID NO: 3946034 - RNA, 16 nt, Human coronavirus 229E
auguugucugaaaauu

SEQ ID NO: 3946035 - RNA, 13 nt, Human coronavirus 229E
auuacguacacau

SEQ ID NO: 3946036 - RNA, 19 nt, Human coronavirus 229E
auuacugugaccuugcuga

SEQ ID NO: 3946037 - RNA, 18 nt, Human coronavirus 229E
auuagagguuguugugaa

SEQ ID NO: 3946038 - RNA, 12 nt, Human coronavirus 229E
auuaucuuucuu

SEQ ID NO: 3946039 - RNA, 21 nt, Human coronavirus 229E
auucuaauugggccuuuguug

SEQ ID NO: 3946040 - RNA, 13 nt, Human coronavirus 229E
caaauacguugcu

SEQ ID NO: 3946041 - RNA, 17 nt, Human coronavirus 229E
caaauacguugcuguuu

SEQ ID NO: 3946042 - RNA, 21 nt, Human coronavirus 229E
caacauccucuucuuaacccu

SEQ ID NO: 3946043 - RNA, 12 nt, Human coronavirus 229E
caacuuuggaag

SEQ ID NO: 3946044 - RNA, 22 nt, Human coronavirus 229E
caagacgugaaagauggcacug

SEQ ID NO: 3946045 - RNA, 14 nt, Human coronavirus 229E
caagagucuugcuc

SEQ ID NO: 3946046 - RNA, 21 nt, Human coronavirus 229E
caagcccuacaaacaguugcu

SEQ ID NO: 3946047 - RNA, 13 nt, Human coronavirus 229E
caagugacagaaa

SEQ ID NO: 3946048 - RNA, 16 nt, Human coronavirus 229E
caaucuuugacaccug

SEQ ID NO: 3946049 - RNA, 22 nt, Human coronavirus 229E
caauggcacuuauaauugcaca

SEQ ID NO: 3946050 - RNA, 20 nt, Human coronavirus 229E
caauguuuuggccccagaga

SEQ ID NO: 3946051 - RNA, 20 nt, Human coronavirus 229E
caauuguuaaugcugcuccu

SEQ ID NO: 3946052 - RNA, 13 nt, Human coronavirus 229E
cacaggaccccau

SEQ ID NO: 3946053 - RNA, 21 nt, Human coronavirus 229E
cagaaaauguauuugcuguug

SEQ ID NO: 3946054 - RNA, 15 nt, Human coronavirus 229E
cagaguccugcuucu

SEQ ID NO: 3946055 - RNA, 16 nt, Human coronavirus 229E
cagcuugcacaacaaa

SEQ ID NO: 3946056 - RNA, 14 nt, Human coronavirus 229E
caggugaugcucac

SEQ ID NO: 3946057 - RNA, 22 nt, Human coronavirus 229E
cagucaggaugacaucaugaag

SEQ ID NO: 3946058 - RNA, 16 nt, Human coronavirus 229E
cagucauuugucuuga

SEQ ID NO: 3946059 - RNA, 15 nt, Human coronavirus 229E
caguuuauggcccca

SEQ ID NO: 3946060 - RNA, 21 nt, Human coronavirus 229E
cauaaagaugcaaaauuuaga

SEQ ID NO: 3946061 - RNA, 23 nt, Human coronavirus 229E
cauacagcuuggcacugcuggcu

SEQ ID NO: 3946062 - RNA, 20 nt, Human coronavirus 229E
cauaugccuuguugcauauu

SEQ ID NO: 3946063 - RNA, 20 nt, Human coronavirus 229E
cauugcaacuugugucugcu

SEQ ID NO: 3946064 - RNA, 17 nt, Human coronavirus 229E
cauuggacaaauguacu

SEQ ID NO: 3946065 - RNA, 21 nt, Human coronavirus 229E
cauugucacccauuugaagaa

SEQ ID NO: 3946066 - RNA, 18 nt, Human coronavirus 229E
cauuugaagaauuggaau

SEQ ID NO: 3946067 - RNA, 11 nt, Human coronavirus 229E
ccaacaaugga

SEQ ID NO: 3946068 - RNA, 17 nt, Human coronavirus 229E
ccacguaauguuucaua

SEQ ID NO: 3946069 - RNA, 17 nt, Human coronavirus 229E
ccacuuauguuugcaau

SEQ ID NO: 3946070 - RNA, 18 nt, Human coronavirus 229E
ccguggcagagcugcucu

SEQ ID NO: 3946071 - RNA, 24 nt, Human coronavirus 229E
ccuaucguaguugauugcuccacu

SEQ ID NO: 3946072 - RNA, 19 nt, Human coronavirus 229E
ccugcaacugcugaaccag

SEQ ID NO: 3946073 - RNA, 18 nt, Human coronavirus 229E
ccuuguugcauauugcug

SEQ ID NO: 3946074 - RNA, 12 nt, Human coronavirus 229E
cgaucagagcug

SEQ ID NO: 3946075 - RNA, 15 nt, Human coronavirus 229E
cgaucagagcugcuu

SEQ ID NO: 3946076 - RNA, 13 nt, Human coronavirus 229E
cgcagacuacaaa

SEQ ID NO: 3946077 - RNA, 20 nt, Human coronavirus 229E
cgcuguguugaauugcuuaa

SEQ ID NO: 3946078 - RNA, 23 nt, Human coronavirus 229E
cgucccacaaccuguugagggug

SEQ ID NO: 3946079 - RNA, 19 nt, Human coronavirus 229E
cguuuaaauuauguugcau

SEQ ID NO: 3946080 - RNA, 12 nt, Human coronavirus 229E
cguuucagaacu

SEQ ID NO: 3946081 - RNA, 22 nt, Human coronavirus 229E
cuaauaccucaucuguuguaga

SEQ ID NO: 3946082 - RNA, 17 nt, Human coronavirus 229E
cuaaugagccucuuugu

SEQ ID NO: 3946083 - RNA, 18 nt, Human coronavirus 229E
cuaccugaauacaugaca

SEQ ID NO: 3946084 - RNA, 23 nt, Human coronavirus 229E
cuaguuacucuguuugcaacggc

SEQ ID NO: 3946085 - RNA, 11 nt, Human coronavirus 229E
cuauaauugcu

SEQ ID NO: 3946086 - RNA, 16 nt, Human coronavirus 229E
cuauaauugcuguuca

SEQ ID NO: 3946087 - RNA, 17 nt, Human coronavirus 229E
cuauguuacugaaccua

SEQ ID NO: 3946088 - RNA, 15 nt, Human coronavirus 229E
cucauuguauguuuc

SEQ ID NO: 3946089 - RNA, 17 nt, Human coronavirus 229E
cuccacuuauguuugca

SEQ ID NO: 3946090 - RNA, 16 nt, Human coronavirus 229E
cucgcauaauguuuga

SEQ ID NO: 3946091 - RNA, 12 nt, Human coronavirus 229E
cucuagcucuau

SEQ ID NO: 3946092 - RNA, 14 nt, Human coronavirus 229E
cucugaguugcaaa

SEQ ID NO: 3946093 - RNA, 17 nt, Human coronavirus 229E
cugaguugcaaaccauu

SEQ ID NO: 3946094 - RNA, 19 nt, Human coronavirus 229E
cugaugcugaacgaauggc

SEQ ID NO: 3946095 - RNA, 16 nt, Human coronavirus 229E
cugauguuuuacaaga

SEQ ID NO: 3946096 - RNA, 23 nt, Human coronavirus 229E
cugcugaaccagugcgugaugaa

SEQ ID NO: 3946097 - RNA, 17 nt, Human coronavirus 229E
cugcuuguaaaacuauu

SEQ ID NO: 3946098 - RNA, 15 nt, Human coronavirus 229E
cuggacuuggcacug

SEQ ID NO: 3946099 - RNA, 14 nt, Human coronavirus 229E
cuguauuggucuca

SEQ ID NO: 3946100 - RNA, 18 nt, Human coronavirus 229E
cuguauuggucucaagca

SEQ ID NO: 3946101 - RNA, 20 nt, Human coronavirus 229E
cuguuaccuucaacuugcua

SEQ ID NO: 3946102 - RNA, 14 nt, Human coronavirus 229E
cuguuguugaagaa

SEQ ID NO: 3946103 - RNA, 15 nt, Human coronavirus 229E
cuguuucuggcuugc

SEQ ID NO: 3946104 - RNA, 15 nt, Human coronavirus 229E
cuguuuuaacuuauu

SEQ ID NO: 3946105 - RNA, 16 nt, Human coronavirus 229E
cuuaauuacacuguuc

SEQ ID NO: 3946106 - RNA, 14 nt, Human coronavirus 229E
cuugaggaguuaaa

SEQ ID NO: 3946107 - RNA, 12 nt, Human coronavirus 229E
cuugcugcaucu

SEQ ID NO: 3946108 - RNA, 22 nt, Human coronavirus 229E
cuugcuuugucaaucuuugaca

SEQ ID NO: 3946109 - RNA, 15 nt, Human coronavirus 229E
cuuggcacugcuggc

SEQ ID NO: 3946110 - RNA, 18 nt, Human coronavirus 229E
cuuguaaaacuauugaag

SEQ ID NO: 3946111 - RNA, 15 nt, Human coronavirus 229E
cuuguuacuucugga

SEQ ID NO: 3946112 - RNA, 15 nt, Human coronavirus 229E
cuuucccuaaacgag

SEQ ID NO: 3946113 - RNA, 19 nt, Human coronavirus 229E
cuuuuggcaaaguuaauaa

SEQ ID NO: 3946114 - RNA, 16 nt, Human coronavirus 229E
gaaaauaaggcucuga

SEQ ID NO: 3946115 - RNA, 22 nt, Human coronavirus 229E
gaaagcguuuacacuugcuaau

SEQ ID NO: 3946116 - RNA, 21 nt, Human coronavirus 229E
gaaccagugcgugaugaaguu

SEQ ID NO: 3946117 - RNA, 19 nt, Human coronavirus 229E
gaacugccgaaauuuuucu

SEQ ID NO: 3946118 - RNA, 19 nt, Human coronavirus 229E
gaaguuucuauugaaacug

SEQ ID NO: 3946119 - RNA, 13 nt, Human coronavirus 229E
gaauuuugcuuuu

SEQ ID NO: 3946120 - RNA, 16 nt, Human coronavirus 229E
gacacuauucaggcug

SEQ ID NO: 3946121 - RNA, 20 nt, Human coronavirus 229E
gagagauuuggcgccuuggu

SEQ ID NO: 3946122 - RNA, 18 nt, Human coronavirus 229E
gaguuauauaacggugaa

SEQ ID NO: 3946123 - RNA, 14 nt, Human coronavirus 229E
gaucccuugcuuug

SEQ ID NO: 3946124 - RNA, 15 nt, Human coronavirus 229E
gaucccuugcuuugg

SEQ ID NO: 3946125 - RNA, 15 nt, Human coronavirus 229E
gaucuauguaugaug

SEQ ID NO: 3946126 - RNA, 20 nt, Human coronavirus 229E
gaugguucuauaauugcugu

SEQ ID NO: 3946127 - RNA, 20 nt, Human coronavirus 229E
gauuguuuuaugguuugaag

SEQ ID NO: 3946128 - RNA, 13 nt, Human coronavirus 229E
gauuuuguucaaa

SEQ ID NO: 3946129 - RNA, 15 nt, Human coronavirus 229E
gcaacuugugucugc

SEQ ID NO: 3946130 - RNA, 12 nt, Human coronavirus 229E
gcaaugaaacua

SEQ ID NO: 3946131 - RNA, 17 nt, Human coronavirus 229E
uguuuuaacuuauucua

SEQ ID NO: 3946132 - RNA, 12 nt, Human coronavirus 229E
uguuuugucuga

SEQ ID NO: 3946133 - RNA, 13 nt, Human coronavirus 229E
uuaaaaaugugua

SEQ ID NO: 3946134 - RNA, 20 nt, Human coronavirus 229E
uuaacauuucucgcucugag

SEQ ID NO: 3946135 - RNA, 18 nt, Human coronavirus 229E
uuacugaaccuaggugaa

SEQ ID NO: 3946136 - RNA, 21 nt, Human coronavirus 229E
uuauauaacggugaaugugua

SEQ ID NO: 3946137 - RNA, 20 nt, Human coronavirus 229E
uuauguguugcgacaaccua

SEQ ID NO: 3946138 - RNA, 16 nt, Human coronavirus 229E
uucaaaaauugcaaac

SEQ ID NO: 3946139 - RNA, 23 nt, Human coronavirus 229E
uucaauccguugagcuaccugug

SEQ ID NO: 3946140 - RNA, 21 nt, Human coronavirus 229E
uucaauguaaccacacuuugc

SEQ ID NO: 3946141 - RNA, 15 nt, Human coronavirus 229E
uucacaaaauagcac

SEQ ID NO: 3946142 - RNA, 14 nt, Human coronavirus 229E
uucauuguuauucu

SEQ ID NO: 3946143 - RNA, 13 nt, Human coronavirus 229E
uuccaaagaguca

SEQ ID NO: 3946144 - RNA, 23 nt, Human coronavirus 229E
uucuggguuuuaaagauguuacu

SEQ ID NO: 3946145 - RNA, 13 nt, Human coronavirus 229E
uugauagugaaca

SEQ ID NO: 3946146 - RNA, 17 nt, Human coronavirus 229E
uugaugaaguaaacuaa

SEQ ID NO: 3946147 - RNA, 16 nt, Human coronavirus 229E
uugcaacucuguuauu

SEQ ID NO: 3946148 - RNA, 17 nt, Human coronavirus 229E
uugcauuuagcuuuuuu

SEQ ID NO: 3946149 - RNA, 14 nt, Human coronavirus 229E
uugcuuaauugcuu

SEQ ID NO: 3946150 - RNA, 23 nt, Human coronavirus 229E
uuucaggugaugcucacauacca

SEQ ID NO: 3946151 - RNA, 13 nt, Human coronavirus 229E
uuuccauugcuga

SEQ ID NO: 3946152 - RNA, 15 nt, Human coronavirus 229E
uuugcaucuucuauu

SEQ ID NO: 3946153 - RNA, 17 nt, Human coronavirus 229E
uuuggcguuugugcaga

SEQ ID NO: 3946154 - RNA, 16 nt, Human coronavirus 229E
uuuguaaauacuacua

SEQ ID NO: 3946155 - RNA, 17 nt, Human coronavirus 229E
uuuuauuaucuuggcac

SEQ ID NO: 3946156 - RNA, 12 nt, Human coronavirus 229E
uuuuuauugcuu

SEQ ID NO: 3946157 - RNA, 19 nt, Human coronavirus 229E
aaacaguuucagacuuuuc

SEQ ID NO: 3946158 - RNA, 20 nt, Human coronavirus 229E
aaacaucuuaugguguuguu

SEQ ID NO: 3946159 - RNA, 20 nt, Human coronavirus 229E
aaacaugccacuguguuguu

SEQ ID NO: 3946160 - RNA, 18 nt, Human coronavirus 229E
aaauacguugcuguuuau

SEQ ID NO: 3946161 - RNA, 14 nt, Human coronavirus 229E
aaauuauguugcau

SEQ ID NO: 3946162 - RNA, 12 nt, Human coronavirus 229E
uucagccuuugu

SEQ ID NO: 3946163 - RNA, 14 nt, Human coronavirus 229E
uucuaaacugaacg

SEQ ID NO: 3946164 - RNA, 17 nt, Human coronavirus 229E
uucuauugaaacugaca

SEQ ID NO: 3946165 - RNA, 13 nt, Human coronavirus 229E
uucuuuaguuguu

SEQ ID NO: 3946166 - RNA, 19 nt, Human coronavirus 229E
uugaaaagauccacauaca

SEQ ID NO: 3946167 - RNA, 19 nt, Human coronavirus 229E
uugaagacgccuuaagaaa

SEQ ID NO: 3946168 - RNA, 20 nt, Human coronavirus 229E
uugauggugcuaaaacugaa

SEQ ID NO: 3946169 - RNA, 19 nt, Human coronavirus 229E
uugccaaauuacacuguuc

SEQ ID NO: 3946170 - RNA, 12 nt, Human coronavirus 229E
uugccuguuuuu

SEQ ID NO: 3946171 - RNA, 19 nt, Human coronavirus 229E
uugucgaacaguacaacca

SEQ ID NO: 3946172 - RNA, 20 nt, Human coronavirus 229E
uuuauggccguaucaacacu

SEQ ID NO: 3946173 - RNA, 18 nt, Human coronavirus 229E
uuugcuuuuguucuuucu

SEQ ID NO: 3946174 - RNA, 18 nt, Human coronavirus 229E
aaaaauguguaccacauu

SEQ ID NO: 3946175 - RNA, 16 nt, Human coronavirus 229E
aaacaguugcuacugc

SEQ ID NO: 3946176 - RNA, 22 nt, Human coronavirus 229E
aaagauggcuacagucaaaugg

SEQ ID NO: 3946177 - RNA, 13 nt, Human coronavirus 229E
aaaugcauucacu

SEQ ID NO: 3946178 - RNA, 15 nt, Human coronavirus 229E
aaauuauguugcauu

SEQ ID NO: 3946179 - RNA, 21 nt, Human coronavirus 229E
aaauuuggcaguguauguuuu

SEQ ID NO: 3946180 - RNA, 22 nt, Human coronavirus 229E
aacucauugaaccauuuaacuu

SEQ ID NO: 3946181 - RNA, 19 nt, Human coronavirus 229E
aacuucaccugcaacugcu

SEQ ID NO: 3946182 - RNA, 14 nt, Human coronavirus 229E
aagaaauuugcuac

SEQ ID NO: 3946183 - RNA, 21 nt, Human coronavirus 229E
aagaaauuugcuacuauguua

SEQ ID NO: 3946184 - RNA, 14 nt, Human coronavirus 229E
aagaacaaaagcau

SEQ ID NO: 3946185 - RNA, 13 nt, Human coronavirus 229E
aagacagccuaau

SEQ ID NO: 3946186 - RNA, 18 nt, Human coronavirus 229E
aagacaugggauuucauu

SEQ ID NO: 3946187 - RNA, 23 nt, Human coronavirus 229E
aagcauauauuuacgcaacuuug

SEQ ID NO: 3946188 - RNA, 23 nt, Human coronavirus 229E
aagguccguaaauucacaaaaua

SEQ ID NO: 3946189 - RNA, 20 nt, Human coronavirus 229E
aaucaaucgcuuagcaaugc

SEQ ID NO: 3946190 - RNA, 15 nt, Human coronavirus 229E
aaugucaaaugacaa

SEQ ID NO: 3946191 - RNA, 15 nt, Human coronavirus 229E
aaugugucacaaacc

SEQ ID NO: 3946192 - RNA, 15 nt, Human coronavirus 229E
acagcugcuaugcug

SEQ ID NO: 3946193 - RNA, 21 nt, Human coronavirus 229E
acauaguagaugccuuuacug

SEQ ID NO: 3946194 - RNA, 14 nt, Human coronavirus 229E
acaucuaaugucac

SEQ ID NO: 3946195 - RNA, 22 nt, Human coronavirus 229E
acaucucgcauaauguuugaac

SEQ ID NO: 3946196 - RNA, 21 nt, Human coronavirus 229E
accuaucuaguuaguaacugc

SEQ ID NO: 3946197 - RNA, 13 nt, Human coronavirus 229E
accugcaacugcu

SEQ ID NO: 3946198 - RNA, 12 nt, Human coronavirus 229E
accuucuggguu

SEQ ID NO: 3946199 - RNA, 13 nt, Human coronavirus 229E
acgaucagagcug

SEQ ID NO: 3946200 - RNA, 15 nt, Human coronavirus 229E
acuaaacaugccacu

SEQ ID NO: 3946201 - RNA, 13 nt, Human coronavirus 229E
acuacaaccuuag

SEQ ID NO: 3946202 - RNA, 14 nt, Human coronavirus 229E
acuacgucugcuuu

SEQ ID NO: 3946203 - RNA, 22 nt, Human coronavirus 229E
acuaguuacucuguuugcaacg

SEQ ID NO: 3946204 - RNA, 22 nt, Human coronavirus 229E
acuauaauuuauaguagagucg

SEQ ID NO: 3946205 - RNA, 18 nt, Human coronavirus 229E
acucauuacaaaugugcu

SEQ ID NO: 3946206 - RNA, 18 nt, Human coronavirus 229E
acuccagauuguuuuaug

SEQ ID NO: 3946207 - RNA, 17 nt, Human coronavirus 229E
acucuguuauuaacaga

SEQ ID NO: 3946208 - RNA, 15 nt, Human coronavirus 229E
acugaacgaaaagau

SEQ ID NO: 3946209 - RNA, 14 nt, Human coronavirus 229E
acugguuuugucua

SEQ ID NO: 3946210 - RNA, 19 nt, Human coronavirus 229E
acuguggucuugacuuuca

SEQ ID NO: 3946211 - RNA, 18 nt, Human coronavirus 229E
acuguguuguuugaaauu

SEQ ID NO: 3946212 - RNA, 12 nt, Human coronavirus 229E
acuguuguugaa

SEQ ID NO: 3946213 - RNA, 15 nt, Human coronavirus 229E
acuucaccugcaacu

SEQ ID NO: 3946214 - RNA, 20 nt, Human coronavirus 229E
acuugacacuauucaggcug

SEQ ID NO: 3946215 - RNA, 15 nt, Human coronavirus 229E
acuuggcuugugcuc

SEQ ID NO: 3946216 - RNA, 17 nt, Human coronavirus 229E
acuuggcuugugcucaa

SEQ ID NO: 3946217 - RNA, 14 nt, Human coronavirus 229E
acuugugucugcug

SEQ ID NO: 3946218 - RNA, 14 nt, Human coronavirus 229E
acuuugauugcugu

SEQ ID NO: 3946219 - RNA, 18 nt, Human coronavirus 229E
agaauuggaauuuugguu

SEQ ID NO: 3946220 - RNA, 18 nt, Human coronavirus 229E
agacuauuuugaauuuga

SEQ ID NO: 3946221 - RNA, 22 nt, Human coronavirus 229E
agaucacaccguggcagagcug

SEQ ID NO: 3946222 - RNA, 20 nt, Human coronavirus 229E
agauugcuucauuuuuucua

SEQ ID NO: 3946223 - RNA, 23 nt, Human coronavirus 229E
agauuggcugcuuugaauguauu

SEQ ID NO: 3946224 - RNA, 18 nt, Human coronavirus 229E
agcaguauacuucugcuu

SEQ ID NO: 3946225 - RNA, 23 nt, Human coronavirus 229E
agccaacaauggaagagccaguc

SEQ ID NO: 3946226 - RNA, 17 nt, Human coronavirus 229E
agccguuaauuucaaug

SEQ ID NO: 3946227 - RNA, 14 nt, Human coronavirus 229E
agcuaauuugucua

SEQ ID NO: 3946228 - RNA, 15 nt, Human coronavirus 229E
agcuccaacaggcau

SEQ ID NO: 3946229 - RNA, 22 nt, Human coronavirus 229E
aggaugacaucaugaaggcagu

SEQ ID NO: 3946230 - RNA, 12 nt, Human coronavirus 229E
aggcaauuauua

SEQ ID NO: 3946231 - RNA, 13 nt, Human coronavirus 229E
agucaaaugggcu

SEQ ID NO: 3946232 - RNA, 18 nt, Human coronavirus 229E
agucgcggucguggugaa

SEQ ID NO: 3946233 - RNA, 19 nt, Human coronavirus 229E
agugguaguagaguggcug

SEQ ID NO: 3946234 - RNA, 15 nt, Human coronavirus 229E
auaaagaugcaaaau

SEQ ID NO: 3946235 - RNA, 18 nt, Human coronavirus 229E
auaacggugaauguguau

SEQ ID NO: 3946236 - RNA, 16 nt, Human coronavirus 229E
auaacuuuguuaaauu

SEQ ID NO: 3946237 - RNA, 19 nt, Human coronavirus 229E
auaagaaauuugcuacuau

SEQ ID NO: 3946238 - RNA, 17 nt, Human coronavirus 229E
auacuacuaguguguau

SEQ ID NO: 3946239 - RNA, 18 nt, Human coronavirus 229E
auacuauaggcucauugu

SEQ ID NO: 3946240 - RNA, 19 nt, Human coronavirus 229E
auacuccagauuguuuuau

SEQ ID NO: 3946241 - RNA, 21 nt, Human coronavirus 229E
aucaacacucguuaugugggu

SEQ ID NO: 3946242 - RNA, 22 nt, Human coronavirus 229E
aucucuagcucuauucaggcua

SEQ ID NO: 3946243 - RNA, 20 nt, Human coronavirus 229E
augcgaaaguuagugcugaa

SEQ ID NO: 3946244 - RNA, 19 nt, Human coronavirus 229E
augcucacuuuugacaaga

SEQ ID NO: 3946245 - RNA, 18 nt, Human coronavirus 229E
auggcacuuauaauugca

SEQ ID NO: 3946246 - RNA, 18 nt, Human coronavirus 229E
auguuguuguucuacugg

SEQ ID NO: 3946247 - RNA, 16 nt, Human coronavirus 229E
auuaagcuuuguuuca

SEQ ID NO: 3946248 - RNA, 16 nt, Human coronavirus 229E
auucuucaguuuggac

SEQ ID NO: 3946249 - RNA, 14 nt, Human coronavirus 229E
auugaaaauugcaa

SEQ ID NO: 3946250 - RNA, 16 nt, Human coronavirus 229E
auugcaaacucugauu

SEQ ID NO: 3946251 - RNA, 18 nt, Human coronavirus 229E
auugcuuuguaaauacua

SEQ ID NO: 3946252 - RNA, 15 nt, Human coronavirus 229E
auuggcugcuuugaa

SEQ ID NO: 3946253 - RNA, 16 nt, Human coronavirus 229E
auugguggaauugcuu

SEQ ID NO: 3946254 - RNA, 16 nt, Human coronavirus 229E
auuguuaaugcugcuc

SEQ ID NO: 3946255 - RNA, 17 nt, Human coronavirus 229E
auuguuuuaugguuuga

SEQ ID NO: 3946256 - RNA, 17 nt, Human coronavirus 229E
caaaagcucccaaaugg

SEQ ID NO: 3946257 - RNA, 22 nt, Human coronavirus 229E
caaaauuuagagagcguguuga

SEQ ID NO: 3946258 - RNA, 18 nt, Human coronavirus 229E
caaacuuguuacuucugg

SEQ ID NO: 3946259 - RNA, 23 nt, Human coronavirus 229E
caaagaucgcauugacgagccaa

SEQ ID NO: 3946260 - RNA, 18 nt, Human coronavirus 229E
caaauugaaaauugcaau

SEQ ID NO: 3946261 - RNA, 18 nt, Human coronavirus 229E
caacaauggaagagccag

SEQ ID NO: 3946262 - RNA, 16 nt, Human coronavirus 229E
caacacagauuucaaa

SEQ ID NO: 3946263 - RNA, 12 nt, Human coronavirus 229E
caacagcugcua

SEQ ID NO: 3946264 - RNA, 15 nt, Human coronavirus 229E
caagaauucagaacc

SEQ ID NO: 3946265 - RNA, 22 nt, Human coronavirus 229E
caauguaaccacacuuugcuau

SEQ ID NO: 3946266 - RNA, 16 nt, Human coronavirus 229E
cacaaugguaagccag

SEQ ID NO: 3946267 - RNA, 17 nt, Human coronavirus 229E
cacauuguuuccaaaga

SEQ ID NO: 3946268 - RNA, 13 nt, Human coronavirus 229E
cacauuuguuaac

SEQ ID NO: 3946269 - RNA, 16 nt, Human coronavirus 229E
cacauuuguuaacauu

SEQ ID NO: 3946270 - RNA, 13 nt, Human coronavirus 229E
cacuccuuguaac

SEQ ID NO: 3946271 - RNA, 17 nt, Human coronavirus 229E
cacugcuggcucuacaa

SEQ ID NO: 3946272 - RNA, 14 nt, Human coronavirus 229E
cagaaccagagaua

SEQ ID NO: 3946273 - RNA, 12 nt, Human coronavirus 229E
cagagcugcucu

SEQ ID NO: 3946274 - RNA, 15 nt, Human coronavirus 229E
cagaguucugaaaca

SEQ ID NO: 3946275 - RNA, 14 nt, Human coronavirus 229E
cagccuuuguugcu

SEQ ID NO: 3946276 - RNA, 22 nt, Human coronavirus 229E
cagucuaagcguuauggcuucu

SEQ ID NO: 3946277 - RNA, 15 nt, Human coronavirus 229E
cauauguuuuguaau

SEQ ID NO: 3946278 - RNA, 18 nt, Human coronavirus 229E
cauugacuaaguacacug

SEQ ID NO: 3946279 - RNA, 23 nt, Human coronavirus 229E
ccaagacgugaaagauggcacug

SEQ ID NO: 3946280 - RNA, 23 nt, Human coronavirus 229E
ccacugauuuuuguacuguugcg

SEQ ID NO: 3946281 - RNA, 13 nt, Human coronavirus 229E
ccacuuauguuug

SEQ ID NO: 3946282 - RNA, 16 nt, Human coronavirus 229E
ccagugaaauuagcac

SEQ ID NO: 3946283 - RNA, 15 nt, Human coronavirus 229E
cccagagaccuugac

SEQ ID NO: 3946284 - RNA, 12 nt, Human coronavirus 229E
ccuaagccuucu

SEQ ID NO: 3946285 - RNA, 21 nt, Human coronavirus 229E
ccuagugcacuagaauucaac

SEQ ID NO: 3946286 - RNA, 13 nt, Human coronavirus 229E
ccucaauuuugaa

SEQ ID NO: 3946287 - RNA, 18 nt, Human coronavirus 229E
ccugcuucuucucaaacu

SEQ ID NO: 3946288 - RNA, 13 nt, Human coronavirus 229E
cgagccaacaaug

SEQ ID NO: 3946289 - RNA, 23 nt, Human coronavirus 229E
cggagcuuaauuacacuguucaa

SEQ ID NO: 3946290 - RNA, 18 nt, Human coronavirus 229E
cuaaacaugccacugugu

SEQ ID NO: 3946291 - RNA, 12 nt, Human coronavirus 229E
cuaagccuucuc

SEQ ID NO: 3946292 - RNA, 18 nt, Human coronavirus 229E
cuacaagcccuauucaau

SEQ ID NO: 3946293 - RNA, 14 nt, Human coronavirus 229E
cuagagaaaugcaa

SEQ ID NO: 3946294 - RNA, 21 nt, Human coronavirus 229E
cuaggugaacgcuaguauaac

SEQ ID NO: 3946295 - RNA, 13 nt, Human coronavirus 229E
cuauguuacugaa

SEQ ID NO: 3946296 - RNA, 17 nt, Human coronavirus 229E
cuauuggaauguucaaa

SEQ ID NO: 3946297 - RNA, 13 nt, Human coronavirus 229E
cucaauuguuaau

SEQ ID NO: 3946298 - RNA, 14 nt, Human coronavirus 229E
cucagaguucugaa

SEQ ID NO: 3946299 - RNA, 19 nt, Human coronavirus 229E
cucagauguuuugucugau

SEQ ID NO: 3946300 - RNA, 23 nt, Human coronavirus 229E
cucauugaaccauuuaacuucuc

SEQ ID NO: 3946301 - RNA, 20 nt, Human coronavirus 229E
cucccaugagcaacaugaca

SEQ ID NO: 3946302 - RNA, 15 nt, Human coronavirus 229E
cucugaguugcaaac

SEQ ID NO: 3946303 - RNA, 16 nt, Human coronavirus 229E
cucuuauaguguuuaa

SEQ ID NO: 3946304 - RNA, 18 nt, Human coronavirus 229E
cugacucccgugcuccuu

SEQ ID NO: 3946305 - RNA, 20 nt, Human coronavirus 229E
cugcaacugcugaaccagug

SEQ ID NO: 3946306 - RNA, 17 nt, Human coronavirus 229E
cugcaucuuuuaacaaa

SEQ ID NO: 3946307 - RNA, 23 nt, Human coronavirus 229E
cugccaagagucuugcucguucu

SEQ ID NO: 3946308 - RNA, 17 nt, Human coronavirus 229E
cugcugaaccagugcgu

SEQ ID NO: 3946309 - RNA, 15 nt, Human coronavirus 229E
cugcuucuucucaaa

SEQ ID NO: 3946310 - RNA, 16 nt, Human coronavirus 229E
cuguaauuuugcuugg

SEQ ID NO: 3946311 - RNA, 21 nt, Human coronavirus 229E
cuuaagcaguauacuucugcu

SEQ ID NO: 3946312 - RNA, 19 nt, Human coronavirus 229E
cuuaauuacacuguucaaa

SEQ ID NO: 3946313 - RNA, 15 nt, Human coronavirus 229E
cuuauaguaaguacu

SEQ ID NO: 3946314 - RNA, 19 nt, Human coronavirus 229E
cuucagguaaccuucuggg

SEQ ID NO: 3946315 - RNA, 22 nt, Human coronavirus 229E
cuucauuuuuucuaaacugaac

SEQ ID NO: 3946316 - RNA, 10 nt, Human coronavirus 229E
cuuguugcau

SEQ ID NO: 3946317 - RNA, 13 nt, Human coronavirus 229E
cuuguuuugugaa

SEQ ID NO: 3946318 - RNA, 20 nt, Human coronavirus 229E
cuuuacauaggcgacagaau

SEQ ID NO: 3946319 - RNA, 14 nt, Human coronavirus 229E
cuuuauuuaaagca

SEQ ID NO: 3946320 - RNA, 17 nt, Human coronavirus 229E
gaaaaagauaaaaaguc

SEQ ID NO: 3946321 - RNA, 22 nt, Human coronavirus 229E
gaaagacaaaaauaagcuuaua

SEQ ID NO: 3946322 - RNA, 14 nt, Human coronavirus 229E
gaaaugcaaaagcc

SEQ ID NO: 3946323 - RNA, 20 nt, Human coronavirus 229E
gaacaaaagcaugaaaugca

SEQ ID NO: 3946324 - RNA, 12 nt, Human coronavirus 229E
gaacaguuuaug

SEQ ID NO: 3946325 - RNA, 14 nt, Human coronavirus 229E
gaaccuacagguua

SEQ ID NO: 3946326 - RNA, 16 nt, Human coronavirus 229E
gaagagccagucauuu

SEQ ID NO: 3946327 - RNA, 15 nt, Human coronavirus 229E
gaauacauugcuuuu

SEQ ID NO: 3946328 - RNA, 17 nt, Human coronavirus 229E
gacagaauuguuucuua

SEQ ID NO: 3946329 - RNA, 22 nt, Human coronavirus 229E
gacagguuauccaagacgugaa

SEQ ID NO: 3946330 - RNA, 23 nt, Human coronavirus 229E
gacaucaugaaggcaguugcugc

SEQ ID NO: 3946331 - RNA, 16 nt, Human coronavirus 229E
gagaggugauuguaaa

SEQ ID NO: 3946332 - RNA, 15 nt, Human coronavirus 229E
gagcaacaugacaga

SEQ ID NO: 3946333 - RNA, 17 nt, Human coronavirus 229E
gagccaacaauggaaga

SEQ ID NO: 3946334 - RNA, 20 nt, Human coronavirus 229E
gagccaacaauggaagagcc

SEQ ID NO: 3946335 - RNA, 20 nt, Human coronavirus 229E
gagccagucauuugucuuga

SEQ ID NO: 3946336 - RNA, 13 nt, Human coronavirus 229E
gaguaaucaaaga

SEQ ID NO: 3946337 - RNA, 17 nt, Human coronavirus 229E
gagucaggcaacacugu

SEQ ID NO: 3946338 - RNA, 21 nt, Human coronavirus 229E
gaucaauuccuuuacauaggc

SEQ ID NO: 3946339 - RNA, 13 nt, Human coronavirus 229E
gaugaaguuucua

SEQ ID NO: 3946340 - RNA, 17 nt, Human coronavirus 229E
gaugcaucugaaccaca

SEQ ID NO: 3946341 - RNA, 19 nt, Human coronavirus 229E
gauuggcuucagguguuca

SEQ ID NO: 3946342 - RNA, 19 nt, Human coronavirus 229E
gauuucuaaacuaaacgac

SEQ ID NO: 3946343 - RNA, 21 nt, Human coronavirus 229E
gauuuuguucaaauugaaaau

SEQ ID NO: 3946344 - RNA, 18 nt, Human coronavirus 229E
gcaaacaguuucagacuu

SEQ ID NO: 3946345 - RNA, 23 nt, Human coronavirus 229E
gcaaaguuaauaacuuuguuaaa

SEQ ID NO: 3946346 - RNA, 19 nt, Human coronavirus 229E
gcacagacgcuguuuuaac

SEQ ID NO: 3946347 - RNA, 13 nt, Human coronavirus 229E
gcauuacugugac

SEQ ID NO: 3946348 - RNA, 15 nt, Human coronavirus 229E
gccaaauuacacugu

SEQ ID NO: 3946349 - RNA, 19 nt, Human coronavirus 229E
gccuucucguaaucagagu

SEQ ID NO: 3946350 - RNA, 23 nt, Human coronavirus 229E
gcuguguugaauugcuuaagcag

SEQ ID NO: 3946351 - RNA, 19 nt, Human coronavirus 229E
gcuuaauuacacuguucaa

SEQ ID NO: 3946352 - RNA, 11 nt, Human coronavirus 229E
gcuuguugaua

SEQ ID NO: 3946353 - RNA, 20 nt, Human coronavirus 229E
ggauuucauugucuucaaug

SEQ ID NO: 3946354 - RNA, 21 nt, Human coronavirus 229E
ggccacucguacuugcuuugu

SEQ ID NO: 3946355 - RNA, 16 nt, Human coronavirus 229E
ggccuuuguugcauuu

SEQ ID NO: 3946356 - RNA, 21 nt, Human coronavirus 229E
ggcgcaagaauucagaaccag

SEQ ID NO: 3946357 - RNA, 22 nt, Human coronavirus 229E
ggguugugcguugaugguacaa

SEQ ID NO: 3946358 - RNA, 23 nt, Human coronavirus 229E
gguacgaucagagcugcuuuuaa

SEQ ID NO: 3946359 - RNA, 22 nt, Human coronavirus 229E
gguguuauucgcguuagcaaug

SEQ ID NO: 3946360 - RNA, 21 nt, Human coronavirus 229E
guaaagguuuuuccucagaug

SEQ ID NO: 3946361 - RNA, 12 nt, Human coronavirus 229E
guaaguuucuug

SEQ ID NO: 3946362 - RNA, 13 nt, Human coronavirus 229E
guauuuugcuuua

SEQ ID NO: 3946363 - RNA, 14 nt, Human coronavirus 229E
gucaacagcugcua

SEQ ID NO: 3946364 - RNA, 22 nt, Human coronavirus 229E
gucacaaaccucuauugcuaau

SEQ ID NO: 3946365 - RNA, 23 nt, Human coronavirus 229E
gucuugacuuucacuacuagagu

SEQ ID NO: 3946366 - RNA, 13 nt, Human coronavirus 229E
guggucuggguug

SEQ ID NO: 3946367 - RNA, 14 nt, Human coronavirus 229E
guguguggugcuua

SEQ ID NO: 3946368 - RNA, 13 nt, Human coronavirus 229E
guugcuguugaug

SEQ ID NO: 3946369 - RNA, 17 nt, Human coronavirus 229E
guuuaugugccauugcu

SEQ ID NO: 3946370 - RNA, 14 nt, Human coronavirus 229E
guuucagaacuaga

SEQ ID NO: 3946371 - RNA, 17 nt, Human coronavirus 229E
guuuucuacguacgagu

SEQ ID NO: 3946372 - RNA, 13 nt, Human coronavirus 229E
uaaaacugaaccu

SEQ ID NO: 3946373 - RNA, 19 nt, Human coronavirus 229E
uaaaugcauucacuagaga

SEQ ID NO: 3946374 - RNA, 22 nt, Human coronavirus 229E
uaacaagauccaggauguuguu

SEQ ID NO: 3946375 - RNA, 14 nt, Human coronavirus 229E
uaacucauuacaaa

SEQ ID NO: 3946376 - RNA, 20 nt, Human coronavirus 229E
uaacuuuguuaaauuuggca

SEQ ID NO: 3946377 - RNA, 19 nt, Human coronavirus 229E
uaauaacuuuguuaaauuu

SEQ ID NO: 3946378 - RNA, 14 nt, Human coronavirus 229E
uaaugaaacuaaag

SEQ ID NO: 3946379 - RNA, 23 nt, Human coronavirus 229E
uaaugagccucuuuguuguguau

SEQ ID NO: 3946380 - RNA, 22 nt, Human coronavirus 229E
uaauugcuuauggucuguuucu

SEQ ID NO: 3946381 - RNA, 12 nt, Human coronavirus 229E
uacaaagaaggc

SEQ ID NO: 3946382 - RNA, 17 nt, Human coronavirus 229E
uacaaccucaauuuuga

SEQ ID NO: 3946383 - RNA, 14 nt, Human coronavirus 229E
uaccugugucuauu

SEQ ID NO: 3946384 - RNA, 16 nt, Human coronavirus 229E
uacugcacuuaacaag

SEQ ID NO: 3946385 - RNA, 17 nt, Human coronavirus 229E
uacugguuuugucuauu

SEQ ID NO: 3946386 - RNA, 16 nt, Human coronavirus 229E
uagaauucaacccauc

SEQ ID NO: 3946387 - RNA, 17 nt, Human coronavirus 229E
uaguuacggcuuuucua

SEQ ID NO: 3946388 - RNA, 23 nt, Human coronavirus 229E
uaguuccuuuaugaauguuacau

SEQ ID NO: 3946389 - RNA, 20 nt, Human coronavirus 229E
uaguuguuuugcaucuucua

SEQ ID NO: 3946390 - RNA, 16 nt, Human coronavirus 229E
uaguuuuggcguuugu

SEQ ID NO: 3946391 - RNA, 20 nt, Human coronavirus 229E
uaguuuuggcguuugugcag

SEQ ID NO: 3946392 - RNA, 19 nt, Human coronavirus 229E
uauaagaaauuugcuacua

SEQ ID NO: 3946393 - RNA, 16 nt, Human coronavirus 229E
uauaguguuuaaaauu

SEQ ID NO: 3946394 - RNA, 22 nt, Human coronavirus 229E
uauauacccuccgacuuugcau

SEQ ID NO: 3946395 - RNA, 19 nt, Human coronavirus 229E
uauccugcugguguuaaua

SEQ ID NO: 3946396 - RNA, 15 nt, Human coronavirus 229E
uaugaauguuacauu

SEQ ID NO: 3946397 - RNA, 14 nt, Human coronavirus 229E
uauguuacugaacc

SEQ ID NO: 3946398 - RNA, 17 nt, Human coronavirus 229E
uauguuuuguaauagaa

SEQ ID NO: 3946399 - RNA, 20 nt, Human coronavirus 229E
uauuacaauaauuaaacuaa

SEQ ID NO: 3946400 - RNA, 12 nt, Human coronavirus 229E
uauuuaaagcaa

SEQ ID NO: 3946401 - RNA, 12 nt, Human coronavirus 229E
ucaaacuacaaa

SEQ ID NO: 3946402 - RNA, 15 nt, Human coronavirus 229E
ucaacacagauuuca

SEQ ID NO: 3946403 - RNA, 15 nt, Human coronavirus 229E
ucaacuaacgacuug

SEQ ID NO: 3946404 - RNA, 21 nt, Human coronavirus 229E
ucaagcuaucucuagcucuau

SEQ ID NO: 3946405 - RNA, 15 nt, Human coronavirus 229E
ucaauaccauuuuca

SEQ ID NO: 3946406 - RNA, 15 nt, Human coronavirus 229E
ucacauaccauuugg

SEQ ID NO: 3946407 - RNA, 15 nt, Human coronavirus 229E
ucacauugcaacuug

SEQ ID NO: 3946408 - RNA, 13 nt, Human coronavirus 229E
ucacuagagaaau

SEQ ID NO: 3946409 - RNA, 16 nt, Human coronavirus 229E
ucagcaagcuguuguu

SEQ ID NO: 3946410 - RNA, 17 nt, Human coronavirus 229E
ucauacguuacaaccuc

SEQ ID NO: 3946411 - RNA, 16 nt, Human coronavirus 229E
uccacuuauguuugca

SEQ ID NO: 3946412 - RNA, 17 nt, Human coronavirus 229E
ucgcaaacaguuucaga

SEQ ID NO: 3946413 - RNA, 22 nt, Human coronavirus 229E
ucguucucagaguucugaaaca

SEQ ID NO: 3946414 - RNA, 21 nt, Human coronavirus 229E
ucuaacaucagccguuucaau

SEQ ID NO: 3946415 - RNA, 17 nt, Human coronavirus 229E
ucuacaagcccuauuca

SEQ ID NO: 3946416 - RNA, 18 nt, Human coronavirus 229E
ucuauaauugcuguucaa

SEQ ID NO: 3946417 - RNA, 17 nt, Human coronavirus 229E
ucucugaucuauguaug

SEQ ID NO: 3946418 - RNA, 16 nt, Human coronavirus 229E
ucuucaguuuggacac

SEQ ID NO: 3946419 - RNA, 17 nt, Human coronavirus 229E
ucuugcucguucucaga

SEQ ID NO: 3946420 - RNA, 13 nt, Human coronavirus 229E
ugaaaauaaaucu

SEQ ID NO: 3946421 - RNA, 14 nt, Human coronavirus 229E
ugaagaaccugacu

SEQ ID NO: 3946422 - RNA, 18 nt, Human coronavirus 229E
ugaagaauuggaauuuug

SEQ ID NO: 3946423 - RNA, 13 nt, Human coronavirus 229E
ugacaacauaaau

SEQ ID NO: 3946424 - RNA, 19 nt, Human coronavirus 229E
ugaccagugaaauuagcac

SEQ ID NO: 3946425 - RNA, 14 nt, Human coronavirus 229E
ugagguuaaugcaa

SEQ ID NO: 3946426 - RNA, 19 nt, Human coronavirus 229E
ugaugaaguaaacuaaaca

SEQ ID NO: 3946427 - RNA, 13 nt, Human coronavirus 229E
ugaugaugugaca

SEQ ID NO: 3946428 - RNA, 17 nt, Human coronavirus 229E
ugauuacugguagauug

SEQ ID NO: 3946429 - RNA, 19 nt, Human coronavirus 229E
ugcacaacaaaaagugaau

SEQ ID NO: 3946430 - RNA, 21 nt, Human coronavirus 229E
ugcacagacgcuguuuuaacu

SEQ ID NO: 3946431 - RNA, 21 nt, Human coronavirus 229E
ugcagaugguucuauaauugc

SEQ ID NO: 3946432 - RNA, 13 nt, Human coronavirus 229E
ugcaucugaacca

SEQ ID NO: 3946433 - RNA, 16 nt, Human coronavirus 229E
ugcauucaauaauugg

SEQ ID NO: 3946434 - RNA, 16 nt, Human coronavirus 229E
ugcucguucucagagu

SEQ ID NO: 3946435 - RNA, 18 nt, Human coronavirus 229E
ugcugagcggcgugcuuu

SEQ ID NO: 3946436 - RNA, 17 nt, Human coronavirus 229E
ugcuguauuggucucaa

SEQ ID NO: 3946437 - RNA, 23 nt, Human coronavirus 229E
ugcuucauuuuuucuaaacugaa

SEQ ID NO: 3946438 - RNA, 21 nt, Human coronavirus 229E
uauucuacaagcccuauucaa

SEQ ID NO: 3946439 - RNA, 17 nt, Human coronavirus 229E
uauugcaacucuguuau

SEQ ID NO: 3946440 - RNA, 21 nt, Human coronavirus 229E
ucaaaaauugcaaacucugau

SEQ ID NO: 3946441 - RNA, 18 nt, Human coronavirus 229E
ucaaacuucugccaagag

SEQ ID NO: 3946442 - RNA, 20 nt, Human coronavirus 229E
ucaacaagcuccaacaggca

SEQ ID NO: 3946443 - RNA, 13 nt, Human coronavirus 229E
ucaacagcugcua

SEQ ID NO: 3946444 - RNA, 22 nt, Human coronavirus 229E
ucaacuucagguaaccuucugg

SEQ ID NO: 3946445 - RNA, 18 nt, Human coronavirus 229E
ucaauguaaccacacuuu

SEQ ID NO: 3946446 - RNA, 20 nt, Human coronavirus 229E
ucaauguaaccacacuuugc

SEQ ID NO: 3946447 - RNA, 16 nt, Human coronavirus 229E
ucacaagcccuacaaa

SEQ ID NO: 3946448 - RNA, 13 nt, Human coronavirus 229E
ucagaacuagaaa

SEQ ID NO: 3946449 - RNA, 14 nt, Human coronavirus 229E
ucagccuuucuaga

SEQ ID NO: 3946450 - RNA, 20 nt, Human coronavirus 229E
ucaggcuaucuaugacagac

SEQ ID NO: 3946451 - RNA, 17 nt, Human coronavirus 229E
uccaggauguuguuaau

SEQ ID NO: 3946452 - RNA, 16 nt, Human coronavirus 229E
uccugcuucuucucaa

SEQ ID NO: 3946453 - RNA, 16 nt, Human coronavirus 229E
ucgugcucaucuuugu

SEQ ID NO: 3946454 - RNA, 13 nt, Human coronavirus 229E
ucuaaacugaacg

SEQ ID NO: 3946455 - RNA, 17 nt, Human coronavirus 229E
ucuaauugggccuuugu

SEQ ID NO: 3946456 - RNA, 21 nt, Human coronavirus 229E
ucuauuagagguuguugugaa

SEQ ID NO: 3946457 - RNA, 23 nt, Human coronavirus 229E
ucucaaacuucaccugcaacugc

SEQ ID NO: 3946458 - RNA, 15 nt, Human coronavirus 229E
ucugaaaauuuuacu

SEQ ID NO: 3946459 - RNA, 16 nt, Human coronavirus 229E
ucugauugacaacaua

SEQ ID NO: 3946460 - RNA, 16 nt, Human coronavirus 229E
ucuugaggaguuaaau

SEQ ID NO: 3946461 - RNA, 15 nt, Human coronavirus 229E
ucuuuguuguguauu

SEQ ID NO: 3946462 - RNA, 15 nt, Human coronavirus 229E
ugaaauucaggcuuu

SEQ ID NO: 3946463 - RNA, 16 nt, Human coronavirus 229E
ugaacaaccuuggaag

SEQ ID NO: 3946464 - RNA, 16 nt, Human coronavirus 229E
ugaaucaacuaaacuu

SEQ ID NO: 3946465 - RNA, 14 nt, Human coronavirus 229E
ugaauguuacauug

SEQ ID NO: 3946466 - RNA, 22 nt, Human coronavirus 229E
ugacagaaaacgaaagauugcu

SEQ ID NO: 3946467 - RNA, 17 nt, Human coronavirus 229E
ugacauaauugaugaag

SEQ ID NO: 3946468 - RNA, 16 nt, Human coronavirus 229E
ugagacuuacaucaag

SEQ ID NO: 3946469 - RNA, 14 nt, Human coronavirus 229E
ugagcaacaugaca

SEQ ID NO: 3946470 - RNA, 13 nt, Human coronavirus 229E
ugagcuaccugug

SEQ ID NO: 3946471 - RNA, 16 nt, Human coronavirus 229E
ugaugaaguaaacuaa

SEQ ID NO: 3946472 - RNA, 19 nt, Human coronavirus 229E
ugauuacugguagauuggc

SEQ ID NO: 3946473 - RNA, 13 nt, Human coronavirus 229E
ugauugacaacau

SEQ ID NO: 3946474 - RNA, 13 nt, Human coronavirus 229E
ugcaaacucugau

SEQ ID NO: 3946475 - RNA, 23 nt, Human coronavirus 229E
ugcccaaagaccauccacacuug

SEQ ID NO: 3946476 - RNA, 15 nt, Human coronavirus 229E
ugcuacuauguuacu

SEQ ID NO: 3946477 - RNA, 19 nt, Human coronavirus 229E
ugcuggcucuacaagacau

SEQ ID NO: 3946478 - RNA, 12 nt, Human coronavirus 229E
ugcuuaauugcu

SEQ ID NO: 3946479 - RNA, 22 nt, Human coronavirus 229E
ugcuucauuuuuucuaaacuga

SEQ ID NO: 3946480 - RNA, 19 nt, Human coronavirus 229E
ugcuuguaaaacuauugaa

SEQ ID NO: 3946481 - RNA, 22 nt, Human coronavirus 229E
uggaacgguuucgauauggaua

SEQ ID NO: 3946482 - RNA, 14 nt, Human coronavirus 229E
uggaauguuauucu

SEQ ID NO: 3946483 - RNA, 14 nt, Human coronavirus 229E
uggccccagagacc

SEQ ID NO: 3946484 - RNA, 19 nt, Human coronavirus 229E
uggcuucuguggaaauggc

SEQ ID NO: 3946485 - RNA, 20 nt, Human coronavirus 229E
ugggcugaacacuaguuacu

SEQ ID NO: 3946486 - RNA, 19 nt, Human coronavirus 229E
ugguuggaauguuauucua

SEQ ID NO: 3946487 - RNA, 18 nt, Human coronavirus 229E
uguaacccaccagaucag

SEQ ID NO: 3946488 - RNA, 12 nt, Human coronavirus 229E
uguaccagaugg

SEQ ID NO: 3946489 - RNA, 17 nt, Human coronavirus 229E
ugucgcuaccuguuuau

SEQ ID NO: 3946490 - RNA, 20 nt, Human coronavirus 229E
ugucuauuuuaaugguacug

SEQ ID NO: 3946491 - RNA, 19 nt, Human coronavirus 229E
ugucuuguugccgacacaa

SEQ ID NO: 3946492 - RNA, 19 nt, Human coronavirus 229E
ugugcguugaugguacaaa

SEQ ID NO: 3946493 - RNA, 14 nt, Human coronavirus 229E
uguguuguacguug

SEQ ID NO: 3946494 - RNA, 18 nt, Human coronavirus 229E
uguguuuuauuguaccaa

SEQ ID NO: 3946495 - RNA, 18 nt, Human coronavirus 229E
uguuacuguuguugaaga

SEQ ID NO: 3946496 - RNA, 21 nt, Human coronavirus 229E
uguuauccugcugguguuaau

SEQ ID NO: 3946497 - RNA, 12 nt, Human coronavirus 229E
uguuggugcuau

SEQ ID NO: 3946498 - RNA, 13 nt, Human coronavirus 229E
uguugguuucuug

SEQ ID NO: 3946499 - RNA, 16 nt, Human coronavirus 229E
uguuuugcaucuucua

SEQ ID NO: 3946500 - RNA, 23 nt, Human coronavirus 229E
uguuuuucuccacacugucuugu

SEQ ID NO: 3946501 - RNA, 19 nt, Human coronavirus 229E
uuaacacgggaaauugccc

SEQ ID NO: 3946502 - RNA, 20 nt, Human coronavirus 229E
uuaacacgggaaauugcccu

SEQ ID NO: 3946503 - RNA, 11 nt, Human coronavirus 229E
uuacugugacc

SEQ ID NO: 3946504 - RNA, 13 nt, Human coronavirus 229E
uuauaauugcaca

SEQ ID NO: 3946505 - RNA, 22 nt, Human coronavirus 229E
uuauccugcugguguuaauauu

SEQ ID NO: 3946506 - RNA, 14 nt, Human coronavirus 229E
uuauucuacaagcc

SEQ ID NO: 3946507 - RNA, 21 nt, Human coronavirus 229E
uuauuguaccaacaacacuuu

SEQ ID NO: 3946508 - RNA, 23 nt, Human coronavirus 229E
uucaauguaaccacacuuugcua

SEQ ID NO: 3946509 - RNA, 17 nt, Human coronavirus 229E
uucacuagagaaaugca

SEQ ID NO: 3946510 - RNA, 15 nt, Human coronavirus 229E
uucuauaauugcugu

SEQ ID NO: 3946511 - RNA, 17 nt, Human coronavirus 229E
uucuggacuuggcacug

SEQ ID NO: 3946512 - RNA, 13 nt, Human coronavirus 229E
uugaaaagaucca

SEQ ID NO: 3946513 - RNA, 17 nt, Human coronavirus 229E
uugaagaugcuuguacu

SEQ ID NO: 3946514 - RNA, 14 nt, Human coronavirus 229E
uugauagugaacaa

SEQ ID NO: 3946515 - RNA, 16 nt, Human coronavirus 229E
uugcaaacucugauug

SEQ ID NO: 3946516 - RNA, 13 nt, Human coronavirus 229E
uugcucuuuacaa

SEQ ID NO: 3946517 - RNA, 18 nt, Human coronavirus 229E
uugcuguaauuuugcuug

SEQ ID NO: 3946518 - RNA, 18 nt, Human coronavirus 229E
uugcuuuauuuaaagcaa

SEQ ID NO: 3946519 - RNA, 23 nt, Human coronavirus 229E
uuguaacccaccagaucagcuug

SEQ ID NO: 3946520 - RNA, 23 nt, Human coronavirus 229E
uugucaaacuacaaaugggcuga

SEQ ID NO: 3946521 - RNA, 22 nt, Human coronavirus 229E
uuguugcuuaauugcuuauggu

SEQ ID NO: 3946522 - RNA, 16 nt, Human coronavirus 229E
uuguuuugugaacacc

SEQ ID NO: 3946523 - RNA, 18 nt, Human coronavirus 229E
uuuaaauuauguugcauu

SEQ ID NO: 3946524 - RNA, 20 nt, Human coronavirus 229E
uuuaauugguggaauugcuu

SEQ ID NO: 3946525 - RNA, 15 nt, Human coronavirus 229E
uuuauugcuuuguaa

SEQ ID NO: 3946526 - RNA, 14 nt, Human coronavirus 229E
uuucuauugaaacu

SEQ ID NO: 3946527 - RNA, 23 nt, Human coronavirus 229E
uuucucaacuaacgacuuguacg

SEQ ID NO: 3946528 - RNA, 24 nt, Human coronavirus 229E
uuugccuggcgucgcugaugcuga

SEQ ID NO: 3946529 - RNA, 20 nt, Human coronavirus 229E
uuugucuauaccuuccaauu

SEQ ID NO: 3946530 - RNA, 23 nt, Human coronavirus 229E
uuuuuccauacagcuuggcacug

SEQ ID NO: 3946531 - RNA, 14 nt, Human coronavirus 229E
aacaagaaagacaa

SEQ ID NO: 3946532 - RNA, 18 nt, Human coronavirus 229E
aacaucagccguuucaau

SEQ ID NO: 3946533 - RNA, 16 nt, Human coronavirus 229E
aaccacguaauguuuc

SEQ ID NO: 3946534 - RNA, 15 nt, Human coronavirus 229E
aaccauugugccaga

SEQ ID NO: 3946535 - RNA, 13 nt, Human coronavirus 229E
aaccucaauuuug

SEQ ID NO: 3946536 - RNA, 20 nt, Human coronavirus 229E
aacgaguuauugauuucuaa

SEQ ID NO: 3946537 - RNA, 14 nt, Human coronavirus 229E
aacuuauucuaguu

SEQ ID NO: 3946538 - RNA, 14 nt, Human coronavirus 229E
aagacgcugcaaga

SEQ ID NO: 3946539 - RNA, 17 nt, Human coronavirus 229E
aagcaugaaaugcaaaa

SEQ ID NO: 3946540 - RNA, 19 nt, Human coronavirus 229E
aauaaggcucugaaaccau

SEQ ID NO: 3946541 - RNA, 16 nt, Human coronavirus 229E
aauaauuaaacuaauu

SEQ ID NO: 3946542 - RNA, 17 nt, Human coronavirus 229E
aauccuuuucguuuaug

SEQ ID NO: 3946543 - RNA, 18 nt, Human coronavirus 229E
aaugaugaugugacaucu

SEQ ID NO: 3946544 - RNA, 17 nt, Human coronavirus 229E
aauguuacauuggacaa

SEQ ID NO: 3946545 - RNA, 17 nt, Human coronavirus 229E
aauugaaaauugcaaug

SEQ ID NO: 3946546 - RNA, 24 nt, Human coronavirus 229E
aauugcaaacucugauugacaaca

SEQ ID NO: 3946547 - RNA, 20 nt, Human coronavirus 229E
acaaaugugcuggaguaauc

SEQ ID NO: 3946548 - RNA, 13 nt, Human coronavirus 229E
acaauuugcugag

SEQ ID NO: 3946549 - RNA, 16 nt, Human coronavirus 229E
acacuggccaauuuua

SEQ ID NO: 3946550 - RNA, 20 nt, Human coronavirus 229E
acacuggccaauuuuaauga

SEQ ID NO: 3946551 - RNA, 22 nt, Human coronavirus 229E
acauacuuuuuagcaaacuugu

SEQ ID NO: 3946552 - RNA, 14 nt, Human coronavirus 229E
accaacaacacuuu

SEQ ID NO: 3946553 - RNA, 22 nt, Human coronavirus 229E
accacugauuuuuguacuguug

SEQ ID NO: 3946554 - RNA, 14 nt, Human coronavirus 229E
accuguuuaucaua

SEQ ID NO: 3946555 - RNA, 16 nt, Human coronavirus 229E
acgaucagagcugcuu

SEQ ID NO: 3946556 - RNA, 13 nt, Human coronavirus 229E
acgcagacuacaa

SEQ ID NO: 3946557 - RNA, 13 nt, Human coronavirus 229E
acuagagaaaugc

SEQ ID NO: 3946558 - RNA, 20 nt, Human coronavirus 229E
acugauuuuuguacuguugc

SEQ ID NO: 3946559 - RNA, 22 nt, Human coronavirus 229E
acugguagauuggcugcuuuga

SEQ ID NO: 3946560 - RNA, 14 nt, Human coronavirus 229E
acuuaaaguggcuc

SEQ ID NO: 3946561 - RNA, 17 nt, Human coronavirus 229E
acuucaaaccucagagu

SEQ ID NO: 3946562 - RNA, 14 nt, Human coronavirus 229E
acuuguuacuucug

SEQ ID NO: 3946563 - RNA, 17 nt, Human coronavirus 229E
acuuucacuacuagagu

SEQ ID NO: 3946564 - RNA, 16 nt, Human coronavirus 229E
acuuugauugcuguaa

SEQ ID NO: 3946565 - RNA, 22 nt, Human coronavirus 229E
acuuuuugggcauggaauccug

SEQ ID NO: 3946566 - RNA, 22 nt, Human coronavirus 229E
agaacugccgaaauuuuucuau

SEQ ID NO: 3946567 - RNA, 14 nt, Human coronavirus 229E
agacauacuuuuua

SEQ ID NO: 3946568 - RNA, 20 nt, Human coronavirus 229E
agacguggaaccauuuuguu

SEQ ID NO: 3946569 - RNA, 16 nt, Human coronavirus 229E
agagaaaugcaacaac

SEQ ID NO: 3946570 - RNA, 21 nt, Human coronavirus 229E
agaggugauuguaaagguuuu

SEQ ID NO: 3946571 - RNA, 18 nt, Human coronavirus 229E
agagucaggcaacacugu

SEQ ID NO: 3946572 - RNA, 18 nt, Human coronavirus 229E
agaguucugaaacaaaag

SEQ ID NO: 3946573 - RNA, 23 nt, Human coronavirus 229E
agaguucugaaacaaaagaacaa

SEQ ID NO: 3946574 - RNA, 23 nt, Human coronavirus 229E
agaucacaccguggcagagcugc

SEQ ID NO: 3946575 - RNA, 16 nt, Human coronavirus 229E
agauggcacuguuacc

SEQ ID NO: 3946576 - RNA, 20 nt, Human coronavirus 229E
agaugguuuuuauucuacaa

SEQ ID NO: 3946577 - RNA, 19 nt, Human coronavirus 229E
agauuggcugcuuugaaug

SEQ ID NO: 3946578 - RNA, 18 nt, Human coronavirus 229E
agcaaugcgaaaguuagu

SEQ ID NO: 3946579 - RNA, 21 nt, Human coronavirus 229E
agcacaggcuggguuuucuac

SEQ ID NO: 3946580 - RNA, 20 nt, Human coronavirus 229E
agcaguauacuucugcuugu

SEQ ID NO: 3946581 - RNA, 14 nt, Human coronavirus 229E
agcaugaaaugcaa

SEQ ID NO: 3946582 - RNA, 15 nt, Human coronavirus 229E
agcuuggcacugcug

SEQ ID NO: 3946583 - RNA, 19 nt, Human coronavirus 229E
aggcucauuguauguuucu

SEQ ID NO: 3946584 - RNA, 19 nt, Human coronavirus 229E
aggcuggagucugcagaug

SEQ ID NO: 3946585 - RNA, 12 nt, Human coronavirus 229E
agguuaaugcaa

SEQ ID NO: 3946586 - RNA, 18 nt, Human coronavirus 229E
agguuaaugcaaucacug

SEQ ID NO: 3946587 - RNA, 17 nt, Human coronavirus 229E
agguugaguauuuacaa

SEQ ID NO: 3946588 - RNA, 20 nt, Human coronavirus 229E
aguauauugauguuaauaag

SEQ ID NO: 3946589 - RNA, 17 nt, Human coronavirus 229E
aguuacggcuuuucuaa

SEQ ID NO: 3946590 - RNA, 23 nt, Human coronavirus 229E
aguuccuuuaugaauguuacauu

SEQ ID NO: 3946591 - RNA, 17 nt, Human coronavirus 229E
auacccuccgacuuugc

SEQ ID NO: 3946592 - RNA, 20 nt, Human coronavirus 229E
auacuuguuuugugaacacc

SEQ ID NO: 3946593 - RNA, 17 nt, Human coronavirus 229E
aucucgcauaauguuug

SEQ ID NO: 3946594 - RNA, 16 nt, Human coronavirus 229E
aucuuggcacaggacc

SEQ ID NO: 3946595 - RNA, 13 nt, Human coronavirus 229E
augacagacuuga

SEQ ID NO: 3946596 - RNA, 14 nt, Human coronavirus 229E
augauaguguuuca

SEQ ID NO: 3946597 - RNA, 23 nt, Human coronavirus 229E
augugcgcuguguugaauugcuu

SEQ ID NO: 3946598 - RNA, 22 nt, Human coronavirus 229E
auguguauacuuguuuugugaa

SEQ ID NO: 3946599 - RNA, 12 nt, Human coronavirus 229E
auguuugcaaug

SEQ ID NO: 3946600 - RNA, 15 nt, Human coronavirus 229E
auugcuuuaggaggu

SEQ ID NO: 3946601 - RNA, 13 nt, Human coronavirus 229E
auugcuuuucucu

SEQ ID NO: 3946602 - RNA, 19 nt, Human coronavirus 229E
auuuagagagcguguugaa

SEQ ID NO: 3946603 - RNA, 20 nt, Human coronavirus 229E
auuucuaaacuaaacgacaa

SEQ ID NO: 3946604 - RNA, 14 nt, Human coronavirus 229E
auuucucaacuaac

SEQ ID NO: 3946605 - RNA, 19 nt, Human coronavirus 229E
auuuggcaguguauguuuu

SEQ ID NO: 3946606 - RNA, 12 nt, Human coronavirus 229E
auuuuaaugaaa

SEQ ID NO: 3946607 - RNA, 21 nt, Human coronavirus 229E
auuuugcuuuuguucuuucuu

SEQ ID NO: 3946608 - RNA, 13 nt, Human coronavirus 229E
auuuugguuggaa

SEQ ID NO: 3946609 - RNA, 18 nt, Human coronavirus 229E
caaacaguuucagacuuu

SEQ ID NO: 3946610 - RNA, 16 nt, Human coronavirus 229E
caaauacguugcuguu

SEQ ID NO: 3946611 - RNA, 19 nt, Human coronavirus 229E
caaauugccaaauuacacu

SEQ ID NO: 3946612 - RNA, 22 nt, Human coronavirus 229E
caacuugugucugcuguuaauc

SEQ ID NO: 3946613 - RNA, 23 nt, Human coronavirus 229E
caagauccaggauguuguuaauc

SEQ ID NO: 3946614 - RNA, 15 nt, Human coronavirus 229E
caagcccuacaaaca

SEQ ID NO: 3946615 - RNA, 14 nt, Human coronavirus 229E
caaggcaacucauu

SEQ ID NO: 3946616 - RNA, 23 nt, Human coronavirus 229E
caagguaaguguugguuucuuga

SEQ ID NO: 3946617 - RNA, 15 nt, Human coronavirus 229E
caauggaagagccag

SEQ ID NO: 3946618 - RNA, 22 nt, Human coronavirus 229E
caauuauuauagaaucacaucu

SEQ ID NO: 3946619 - RNA, 17 nt, Human coronavirus 229E
caauuuuaaugaaacua

SEQ ID NO: 3946620 - RNA, 13 nt, Human coronavirus 229E
cacaauuugcuga

SEQ ID NO: 3946621 - RNA, 12 nt, Human coronavirus 229E
cacacuuugcua

SEQ ID NO: 3946622 - RNA, 15 nt, Human coronavirus 229E
cacgguggaaaagac

SEQ ID NO: 3946623 - RNA, 15 nt, Human coronavirus 229E
cacuuugcuaugcaa

SEQ ID NO: 3946624 - RNA, 20 nt, Human coronavirus 229E
cagacuacaaaaagugcacu

SEQ ID NO: 3946625 - RNA, 23 nt, Human coronavirus 229E
cagaugguucuauaauugcuguu

SEQ ID NO: 3946626 - RNA, 13 nt, Human coronavirus 229E
cagcuaucgucac

SEQ ID NO: 3946627 - RNA, 13 nt, Human coronavirus 229E
cagcuuggcacug

SEQ ID NO: 3946628 - RNA, 14 nt, Human coronavirus 229E
caguauacuucugc

SEQ ID NO: 3946629 - RNA, 15 nt, Human coronavirus 229E
cagucgugcucaucu

SEQ ID NO: 3946630 - RNA, 16 nt, Human coronavirus 229E
caguugcuacugcacu

SEQ ID NO: 3946631 - RNA, 12 nt, Human coronavirus 229E
caguuucagacu

SEQ ID NO: 3946632 - RNA, 14 nt, Human coronavirus 229E
caguuuggacacua

SEQ ID NO: 3946633 - RNA, 16 nt, Human coronavirus 229E
cauaacagucaggaug

SEQ ID NO: 3946634 - RNA, 14 nt, Human coronavirus 229E
caugaucccuugcu

SEQ ID NO: 3946635 - RNA, 21 nt, Human coronavirus 229E
ccaaauacguugcuguuuaug

SEQ ID NO: 3946636 - RNA, 20 nt, Human coronavirus 229E
ccaaugguguuaaagcuaaa

SEQ ID NO: 3946637 - RNA, 19 nt, Human coronavirus 229E
ccacaacuuuggaagugca

SEQ ID NO: 3946638 - RNA, 18 nt, Human coronavirus 229E
ccacacugucuuguugcc

SEQ ID NO: 3946639 - RNA, 22 nt, Human coronavirus 229E
cccaucucaaacuucaccugca

SEQ ID NO: 3946640 - RNA, 20 nt, Human coronavirus 229E
ccguuaauuucaaugucacu

SEQ ID NO: 3946641 - RNA, 17 nt, Human coronavirus 229E
ccuacaaacaguugcua

SEQ ID NO: 3946642 - RNA, 12 nt, Human coronavirus 229E
ccuagugcacua

SEQ ID NO: 3946643 - RNA, 20 nt, Human coronavirus 229E
ccuaucguaguugauugcuc

SEQ ID NO: 3946644 - RNA, 16 nt, Human coronavirus 229E
ccugugucuauugugu

SEQ ID NO: 3946645 - RNA, 14 nt, Human coronavirus 229E
ccuuccaauuggac

SEQ ID NO: 3946646 - RNA, 12 nt, Human coronavirus 229E
ccuuuguugcuu

SEQ ID NO: 3946647 - RNA, 16 nt, Human coronavirus 229E
cguauacacuaaugag

SEQ ID NO: 3946648 - RNA, 20 nt, Human coronavirus 229E
cgugaaagauggcacuguua

SEQ ID NO: 3946649 - RNA, 16 nt, Human coronavirus 229E
cuaaacaugccacugu

SEQ ID NO: 3946650 - RNA, 23 nt, Human coronavirus 229E
cuaaacgaguuauugauuucuaa

SEQ ID NO: 3946651 - RNA, 19 nt, Human coronavirus 229E
cuaagauguuccuuaagcu

SEQ ID NO: 3946652 - RNA, 13 nt, Human coronavirus 229E
cuaaguacacuga

SEQ ID NO: 3946653 - RNA, 14 nt, Human coronavirus 229E
cuaauuugucuaua

SEQ ID NO: 3946654 - RNA, 13 nt, Human coronavirus 229E
cuaccuguuuauc

SEQ ID NO: 3946655 - RNA, 21 nt, Human coronavirus 229E
cuacugcagaaaccacugauu

SEQ ID NO: 3946656 - RNA, 16 nt, Human coronavirus 229E
cuaugcguccaauggc

SEQ ID NO: 3946657 - RNA, 16 nt, Human coronavirus 229E
cuauguuacugaaccu

SEQ ID NO: 3946658 - RNA, 21 nt, Human coronavirus 229E
cuauugugucgcuaccuguuu

SEQ ID NO: 3946659 - RNA, 16 nt, Human coronavirus 229E
cuauuuuaaugguacu

SEQ ID NO: 3946660 - RNA, 14 nt, Human coronavirus 229E
cucaauuguuaaug

SEQ ID NO: 3946661 - RNA, 18 nt, Human coronavirus 229E
cucagauguuuugucuga

SEQ ID NO: 3946662 - RNA, 17 nt, Human coronavirus 229E
cucaggaaaaagauaaa

SEQ ID NO: 3946663 - RNA, 12 nt, Human coronavirus 229E
cuccaacaggca

SEQ ID NO: 3946664 - RNA, 20 nt, Human coronavirus 229E
cucguucucagaguucugaa

SEQ ID NO: 3946665 - RNA, 19 nt, Human coronavirus 229E
cucucccaugagcaacaug

SEQ ID NO: 3946666 - RNA, 17 nt, Human coronavirus 229E
cugaugcaucugaacca

SEQ ID NO: 3946667 - RNA, 18 nt, Human coronavirus 229E
cugaugcaucugaaccac

SEQ ID NO: 3946668 - RNA, 14 nt, Human coronavirus 229E
cugcugguguuaau

SEQ ID NO: 3946669 - RNA, 20 nt, Human coronavirus 229E
cugcuuuugugggugcacua

SEQ ID NO: 3946670 - RNA, 16 nt, Human coronavirus 229E
cuggcucuacaagaca

SEQ ID NO: 3946671 - RNA, 16 nt, Human coronavirus 229E
cuguuauccugcuggu

SEQ ID NO: 3946672 - RNA, 17 nt, Human coronavirus 229E
cuguucaaaaauugcaa

SEQ ID NO: 3946673 - RNA, 15 nt, Human coronavirus 229E
cuguuguugaagaac

SEQ ID NO: 3946674 - RNA, 14 nt, Human coronavirus 229E
cuuaauuacacugu

SEQ ID NO: 3946675 - RNA, 18 nt, Human coronavirus 229E
cuuauaggcuauuggaau

SEQ ID NO: 3946676 - RNA, 13 nt, Human coronavirus 229E
cuuauuucucaac

SEQ ID NO: 3946677 - RNA, 16 nt, Human coronavirus 229E
cuucaccugcaacugc

SEQ ID NO: 3946678 - RNA, 19 nt, Human coronavirus 229E
cuucgcaaacaguuucaga

SEQ ID NO: 3946679 - RNA, 23 nt, Human coronavirus 229E
cuucuauuagagguuguugugaa

SEQ ID NO: 3946680 - RNA, 13 nt, Human coronavirus 229E
cuucuuuggccac

SEQ ID NO: 3946681 - RNA, 20 nt, Human coronavirus 229E
cuugaaaauaaggcucugaa

SEQ ID NO: 3946682 - RNA, 17 nt, Human coronavirus 229E
cuugcuuuggcuugaca

SEQ ID NO: 3946683 - RNA, 13 nt, Human coronavirus 229E
cuuguuguuuauc

SEQ ID NO: 3946684 - RNA, 20 nt, Human coronavirus 229E
cuuuacugguguuaaugaug

SEQ ID NO: 3946685 - RNA, 22 nt, Human coronavirus 229E
cuuuguggugaguauguugcua

SEQ ID NO: 3946686 - RNA, 13 nt, Human coronavirus 229E
gaaauucaggcuu

SEQ ID NO: 3946687 - RNA, 14 nt, Human coronavirus 229E
gaaggcaguugcug

SEQ ID NO: 3946688 - RNA, 15 nt, Human coronavirus 229E
gaauuaaguuacaaa

SEQ ID NO: 3946689 - RNA, 23 nt, Human coronavirus 229E
gaauuaaguuacaaauugccaaa

SEQ ID NO: 3946690 - RNA, 11 nt, Human coronavirus 229E
gaauugcuuua

SEQ ID NO: 3946691 - RNA, 17 nt, Human coronavirus 229E
gacaagccucaggaaaa

SEQ ID NO: 3946692 - RNA, 16 nt, Human coronavirus 229E
gaccagugaaauuagc

SEQ ID NO: 3946693 - RNA, 20 nt, Human coronavirus 229E
gagcacuacuauaauuuaua

SEQ ID NO: 3946694 - RNA, 20 nt, Human coronavirus 229E
gagugacugugcccaaagac

SEQ ID NO: 3946695 - RNA, 21 nt, Human coronavirus 229E
gaucacaccguggcagagcug

SEQ ID NO: 3946696 - RNA, 19 nt, Human coronavirus 229E
gauccaggauguuguuaau

SEQ ID NO: 3946697 - RNA, 19 nt, Human coronavirus 229E
gaugcaaaauuuagagagc

SEQ ID NO: 3946698 - RNA, 22 nt, Human coronavirus 229E
gauggugcuaaaacugaaccua

SEQ ID NO: 3946699 - RNA, 17 nt, Human coronavirus 229E
gaugucauacguuacaa

SEQ ID NO: 3946700 - RNA, 19 nt, Human coronavirus 229E
gauugcuguaauuuugcuu

SEQ ID NO: 3946701 - RNA, 19 nt, Human coronavirus 229E
gcagacugauguuuuacaa

SEQ ID NO: 3946702 - RNA, 12 nt, Human coronavirus 229E
gcaucuuuuaac

SEQ ID NO: 3946703 - RNA, 19 nt, Human coronavirus 229E
gcauuacugugaccuugcu

SEQ ID NO: 3946704 - RNA, 20 nt, Human coronavirus 229E
gcauucacuagagaaaugca

SEQ ID NO: 3946705 - RNA, 16 nt, Human coronavirus 229E
gccaauuuuaaugaaa

SEQ ID NO: 3946706 - RNA, 21 nt, Human coronavirus 229E
gccacuguguuguuugaaauu

SEQ ID NO: 3946707 - RNA, 14 nt, Human coronavirus 229E
gccuauaguggcua

SEQ ID NO: 3946708 - RNA, 20 nt, Human coronavirus 229E
gccucuuuguuguguauuuu

SEQ ID NO: 3946709 - RNA, 16 nt, Human coronavirus 229E
gccuuucuagaaaggu

SEQ ID NO: 3946710 - RNA, 23 nt, Human coronavirus 229E
gcggagcuuaauuacacuguuca

SEQ ID NO: 3946711 - RNA, 20 nt, Human coronavirus 229E
gcuauuggaauguucaaaaa

SEQ ID NO: 3946712 - RNA, 19 nt, Human coronavirus 229E
gcugcuuugaauguauucg

SEQ ID NO: 3946713 - RNA, 15 nt, Human coronavirus 229E
gcuguauuggucuca

SEQ ID NO: 3946714 - RNA, 19 nt, Human coronavirus 229E
gcuuagcaaugcgaaaguu

SEQ ID NO: 3946715 - RNA, 23 nt, Human coronavirus 229E
gcuuauggucuguuucuggcuug

SEQ ID NO: 3946716 - RNA, 14 nt, Human coronavirus 229E
ggauacacaaaaaa

SEQ ID NO: 3946717 - RNA, 18 nt, Human coronavirus 229E
ggaucaauuccuuuacau

SEQ ID NO: 3946718 - RNA, 16 nt, Human coronavirus 229E
gguacgaucagagcug

SEQ ID NO: 3946719 - RNA, 12 nt, Human coronavirus 229E
gguuugaagaug

SEQ ID NO: 3946720 - RNA, 23 nt, Human coronavirus 229E
guaauguuucauaugauaguguu

SEQ ID NO: 3946721 - RNA, 18 nt, Human coronavirus 229E
guaauuuugcuuggaaga

SEQ ID NO: 3946722 - RNA, 14 nt, Human coronavirus 229E
gugcagguguugug

SEQ ID NO: 3946723 - RNA, 22 nt, Human coronavirus 229E
guuaggcgcaagaauucagaac

SEQ ID NO: 3946724 - RNA, 17 nt, Human coronavirus 229E
guugauagugaacaacc

SEQ ID NO: 3946725 - RNA, 18 nt, Human coronavirus 229E
guugcauauugcugguug

SEQ ID NO: 3946726 - RNA, 16 nt, Human coronavirus 229E
guuuacacuugcuaau

SEQ ID NO: 3946727 - RNA, 14 nt, Human coronavirus 229E
guuuaugugccauu

SEQ ID NO: 3946728 - RNA, 18 nt, Human coronavirus 229E
guuugauagucacauugu

SEQ ID NO: 3946729 - RNA, 15 nt, Human coronavirus 229E
uaaacuaaacaugcc

SEQ ID NO: 3946730 - RNA, 16 nt, Human coronavirus 229E
uaaagaccucagccuu

SEQ ID NO: 3946731 - RNA, 19 nt, Human coronavirus 229E
uaacaugaucccuugcuuu

SEQ ID NO: 3946732 - RNA, 18 nt, Human coronavirus 229E
uaaccacacuuugcuaug

SEQ ID NO: 3946733 - RNA, 12 nt, Human coronavirus 229E
uaaggcucugaa

SEQ ID NO: 3946734 - RNA, 18 nt, Human coronavirus 229E
uaaucuugcucuuuacaa

SEQ ID NO: 3946735 - RNA, 19 nt, Human coronavirus 229E
uaaucuugcucuuuacaaa

SEQ ID NO: 3946736 - RNA, 21 nt, Human coronavirus 229E
uaaugagccucuuuguugugu

SEQ ID NO: 3946737 - RNA, 17 nt, Human coronavirus 229E
uaauggcuaucgcuauu

SEQ ID NO: 3946738 - RNA, 23 nt, Human coronavirus 229E
uaauugcacagacgcuguuuuaa

SEQ ID NO: 3946739 - RNA, 14 nt, Human coronavirus 229E
uaauugcuguucaa

SEQ ID NO: 3946740 - RNA, 13 nt, Human coronavirus 229E
uaauuugucuaua

SEQ ID NO: 3946741 - RNA, 21 nt, Human coronavirus 229E
uacaaauugccaaauuacacu

SEQ ID NO: 3946742 - RNA, 19 nt, Human coronavirus 229E
uacaaccagacuauuuuga

SEQ ID NO: 3946743 - RNA, 11 nt, Human coronavirus 229E
uacacuguuca

SEQ ID NO: 3946744 - RNA, 18 nt, Human coronavirus 229E
uacuauguuacugaaccu

SEQ ID NO: 3946745 - RNA, 17 nt, Human coronavirus 229E
uagaggacguauugaua

SEQ ID NO: 3946746 - RNA, 17 nt, Human coronavirus 229E
uagcucuauucaggcua

SEQ ID NO: 3946747 - RNA, 14 nt, Human coronavirus 229E
uaguauaacucauu

SEQ ID NO: 3946748 - RNA, 21 nt, Human coronavirus 229E
uaguauaacucauuacaaaug

SEQ ID NO: 3946749 - RNA, 17 nt, Human coronavirus 229E
uagucuuauacacaaug

SEQ ID NO: 3946750 - RNA, 15 nt, Human coronavirus 229E
uagugagaugcucac

SEQ ID NO: 3946751 - RNA, 16 nt, Human coronavirus 229E
uaguuacucuguuugc

SEQ ID NO: 3946752 - RNA, 18 nt, Human coronavirus 229E
uaugcuguuugauaguca

SEQ ID NO: 3946753 - RNA, 12 nt, Human coronavirus 229E
uauguugcuauu

SEQ ID NO: 3946754 - RNA, 15 nt, Human coronavirus 229E
uauguuugcaauggu

SEQ ID NO: 3946755 - RNA, 13 nt, Human coronavirus 229E
agacugauguuuu

SEQ ID NO: 3946756 - RNA, 15 nt, Human coronavirus 229E
agaggugauuguaaa

SEQ ID NO: 3946757 - RNA, 21 nt, Human coronavirus 229E
agagugacugugcccaaagac

SEQ ID NO: 3946758 - RNA, 19 nt, Human coronavirus 229E
agaugcucacuuuugacaa

SEQ ID NO: 3946759 - RNA, 23 nt, Human coronavirus 229E
agauuguuuuaugguuugaagau

SEQ ID NO: 3946760 - RNA, 13 nt, Human coronavirus 229E
agauuuuguucaa

SEQ ID NO: 3946761 - RNA, 14 nt, Human coronavirus 229E
agcccuuugcuugu

SEQ ID NO: 3946762 - RNA, 19 nt, Human coronavirus 229E
agcgucauaccuagcuugc

SEQ ID NO: 3946763 - RNA, 15 nt, Human coronavirus 229E
agcguuuacacuugc

SEQ ID NO: 3946764 - RNA, 20 nt, Human coronavirus 229E
agcguuuacacuugcuaaug

SEQ ID NO: 3946765 - RNA, 12 nt, Human coronavirus 229E
agcuuggcacug

SEQ ID NO: 3946766 - RNA, 14 nt, Human coronavirus 229E
agcuuggcacugcu

SEQ ID NO: 3946767 - RNA, 17 nt, Human coronavirus 229E
agcuuggcacugcuggc

SEQ ID NO: 3946768 - RNA, 23 nt, Human coronavirus 229E
agcuugugccgucaacagcugcu

SEQ ID NO: 3946769 - RNA, 19 nt, Human coronavirus 229E
agguuaaugcaaucacugu

SEQ ID NO: 3946770 - RNA, 12 nt, Human coronavirus 229E
aguauaacucau

SEQ ID NO: 3946771 - RNA, 13 nt, Human coronavirus 229E
aguauaacucauu

SEQ ID NO: 3946772 - RNA, 22 nt, Human coronavirus 229E
agugaacaaccuuggaagguga

SEQ ID NO: 3946773 - RNA, 15 nt, Human coronavirus 229E
agugacagaaaccau

SEQ ID NO: 3946774 - RNA, 17 nt, Human coronavirus 229E
aguuucacgacagguua

SEQ ID NO: 3946775 - RNA, 18 nt, Human coronavirus 229E
auaauauuuaugauguau

SEQ ID NO: 3946776 - RNA, 23 nt, Human coronavirus 229E
auaauggcauuaugguuuugccu

SEQ ID NO: 3946777 - RNA, 16 nt, Human coronavirus 229E
auaccucaucuguugu

SEQ ID NO: 3946778 - RNA, 14 nt, Human coronavirus 229E
auacuucugcuugu

SEQ ID NO: 3946779 - RNA, 16 nt, Human coronavirus 229E
auauugauguuaauaa

SEQ ID NO: 3946780 - RNA, 22 nt, Human coronavirus 229E
aucagaguccugcuucuucuca

SEQ ID NO: 3946781 - RNA, 16 nt, Human coronavirus 229E
aucuuuagguuuugac

SEQ ID NO: 3946782 - RNA, 17 nt, Human coronavirus 229E
augcuauuacacaaacu

SEQ ID NO: 3946783 - RNA, 18 nt, Human coronavirus 229E
augggauuucauugucuu

SEQ ID NO: 3946784 - RNA, 19 nt, Human coronavirus 229E
augguacgaucagagcugc

SEQ ID NO: 3946785 - RNA, 14 nt, Human coronavirus 229E
auuacaaaugugcu

SEQ ID NO: 3946786 - RNA, 22 nt, Human coronavirus 229E
auucaggcacguuuaaauuaug

SEQ ID NO: 3946787 - RNA, 23 nt, Human coronavirus 229E
auucuaauugggccuuuguugca

SEQ ID NO: 3946788 - RNA, 19 nt, Human coronavirus 229E
auucuucaguuuggacacu

SEQ ID NO: 3946789 - RNA, 14 nt, Human coronavirus 229E
auuggcugcuuuga

SEQ ID NO: 3946790 - RNA, 16 nt, Human coronavirus 229E
auuuaacuucucaguu

SEQ ID NO: 3946791 - RNA, 21 nt, Human coronavirus 229E
auuuaccaaucauauaugcac

SEQ ID NO: 3946792 - RNA, 15 nt, Human coronavirus 229E
auuucuaaacuaaac

SEQ ID NO: 3946793 - RNA, 19 nt, Human coronavirus 229E
auuuugaagaaaaccuuag

SEQ ID NO: 3946794 - RNA, 20 nt, Human coronavirus 229E
caaacaguugcuacugcacu

SEQ ID NO: 3946795 - RNA, 18 nt, Human coronavirus 229E
caaagaccauccacacuu

SEQ ID NO: 3946796 - RNA, 18 nt, Human coronavirus 229E
caacuuuggaagugcagg

SEQ ID NO: 3946797 - RNA, 21 nt, Human coronavirus 229E
caagacgugaaagauggcacu

SEQ ID NO: 3946798 - RNA, 15 nt, Human coronavirus OC43 (HCoV-OC43)
aaaacuuggcaagga

SEQ ID NO: 3946799 - RNA, 22 nt, Human coronavirus OC43 (HCoV-OC43)
aaagugcagaauuuaucuggga

SEQ ID NO: 3946800 - RNA, 16 nt, Human coronavirus OC43 (HCoV-OC43)
aacucgcacccacagc

SEQ ID NO: 3946801 - RNA, 17 nt, Human coronavirus OC43 (HCoV-OC43)
aagaaugguuuuacuuu

SEQ ID NO: 3946802 - RNA, 19 nt, Human coronavirus OC43 (HCoV-OC43)
aagacaccucagaaauaua

SEQ ID NO: 3946803 - RNA, 18 nt, Human coronavirus OC43 (HCoV-OC43)
aagccccgccagaagagg

SEQ ID NO: 3946804 - RNA, 17 nt, Human coronavirus OC43 (HCoV-OC43)
aagucgcaguauguuug

SEQ ID NO: 3946805 - RNA, 18 nt, Human coronavirus OC43 (HCoV-OC43)
aauagauagagaagguua

SEQ ID NO: 3946806 - RNA, 21 nt, Human coronavirus OC43 (HCoV-OC43)
aaugguuuuacuuuagaauau

SEQ ID NO: 3946807 - RNA, 17 nt, Human coronavirus OC43 (HCoV-OC43)
aauucuaucuagacuug

SEQ ID NO: 3946808 - RNA, 22 nt, Human coronavirus OC43 (HCoV-OC43)
aauuuuacgccuuaucaugccu

SEQ ID NO: 3946809 - RNA, 20 nt, Human coronavirus OC43 (HCoV-OC43)
acaggaguuaaauguuuaug

SEQ ID NO: 3946810 - RNA, 13 nt, Human coronavirus OC43 (HCoV-OC43)
acuacuugacacu

SEQ ID NO: 3946811 - RNA, 17 nt, Human coronavirus OC43 (HCoV-OC43)
acuauuaugucaugccu

SEQ ID NO: 3946812 - RNA, 13 nt, Human coronavirus OC43 (HCoV-OC43)
agaagauggauga

SEQ ID NO: 3946813 - RNA, 18 nt, Human coronavirus OC43 (HCoV-OC43)
agaguugacugcagagga

SEQ ID NO: 3946814 - RNA, 18 nt, Human coronavirus OC43 (HCoV-OC43)
aagagccagcauguuaag

SEQ ID NO: 3946815 - RNA, 19 nt, Human coronavirus OC43 (HCoV-OC43)
aagauuagaguuggccaaa

SEQ ID NO: 3946816 - RNA, 23 nt, Human coronavirus OC43 (HCoV-OC43)
aauucuugguguuuguguuaauu

SEQ ID NO: 3946817 - RNA, 23 nt, Human coronavirus OC43 (HCoV-OC43)
acaacaagaugguaugaugaaua

SEQ ID NO: 3946818 - RNA, 14 nt, Human coronavirus OC43 (HCoV-OC43)
acagaaguaaauga

SEQ ID NO: 3946819 - RNA, 16 nt, Human coronavirus OC43 (HCoV-OC43)
acauaugaugugaaug

SEQ ID NO: 3946820 - RNA, 21 nt, Human coronavirus OC43 (HCoV-OC43)
agaauuuuggugguggagaaa

SEQ ID NO: 3946821 - RNA, 17 nt, Human coronavirus OC43 (HCoV-OC43)
agaugauuauuuugugg

SEQ ID NO: 3946822 - RNA, 14 nt, Human coronavirus OC43 (HCoV-OC43)
agcaccaguuuaua

SEQ ID NO: 3946823 - RNA, 14 nt, Human coronavirus OC43 (HCoV-OC43)
agcauacugccaaa

SEQ ID NO: 3946824 - RNA, 18 nt, Human coronavirus OC43 (HCoV-OC43)
agcuaauaguuuaaugaa

SEQ ID NO: 3946825 - RNA, 17 nt, Human coronavirus OC43 (HCoV-OC43)
agcuccuaagagugguu

SEQ ID NO: 3946826 - RNA, 17 nt, Human coronavirus OC43 (HCoV-OC43)
aggagauuuaaagugua

SEQ ID NO: 3946827 - RNA, 18 nt, Human coronavirus OC43 (HCoV-OC43)
aguuuagaaauguucaaa

SEQ ID NO: 3946828 - RNA, 19 nt, Human coronavirus OC43 (HCoV-OC43)
aguuuuacaaugauguaaa

SEQ ID NO: 3946829 - RNA, 14 nt, Human coronavirus OC43 (HCoV-OC43)
augcuugguuuaag

SEQ ID NO: 3946830 - RNA, 22 nt, Human coronavirus OC43 (HCoV-OC43)
augguauuuuuacuaucuggga

SEQ ID NO: 3946831 - RNA, 17 nt, Human coronavirus OC43 (HCoV-OC43)
auguucaaaccaggggu

SEQ ID NO: 3946832 - RNA, 22 nt, Human coronavirus OC43 (HCoV-OC43)
auuguugagaaauaauaucuaa

SEQ ID NO: 3946833 - RNA, 18 nt, Human coronavirus OC43 (HCoV-OC43)
auuuuuaggaguuuucac

SEQ ID NO: 3946834 - RNA, 15 nt, Human coronavirus OC43 (HCoV-OC43)
caacagcuuagugau

SEQ ID NO: 3946835 - RNA, 22 nt, Human coronavirus OC43 (HCoV-OC43)
caaugguuuaaaaaucaaacau

SEQ ID NO: 3946836 - RNA, 21 nt, Human coronavirus OC43 (HCoV-OC43)
cagccuuacuuuuguuaaugu

SEQ ID NO: 3946837 - RNA, 13 nt, Human coronavirus OC43 (HCoV-OC43)
cgcucuuaaugcu

SEQ ID NO: 3946838 - RNA, 15 nt, Human coronavirus OC43 (HCoV-OC43)
cuacaccagcaccag

SEQ ID NO: 3946839 - RNA, 11 nt, Human coronavirus OC43 (HCoV-OC43)
cuaucugggaa

SEQ ID NO: 3946840 - RNA, 14 nt, Human coronavirus OC43 (HCoV-OC43)
cuauuacauuuaaa

SEQ ID NO: 3946841 - RNA, 23 nt, Human coronavirus OC43 (HCoV-OC43)
cucagaaauauaagagaaugaac

SEQ ID NO: 3946842 - RNA, 19 nt, Human coronavirus OC43 (HCoV-OC43)
cucugguguaacaccugac

SEQ ID NO: 3946843 - RNA, 15 nt, Human coronavirus OC43 (HCoV-OC43)
cuuacuaaucaugau

SEQ ID NO: 3946844 - RNA, 14 nt, Human coronavirus OC43 (HCoV-OC43)
cuuguucuggcaaa

SEQ ID NO: 3946845 - RNA, 14 nt, Human coronavirus OC43 (HCoV-OC43)
gaaaaugauaauau

SEQ ID NO: 3946846 - RNA, 15 nt, Human coronavirus OC43 (HCoV-OC43)
gaagagcucaaccca

SEQ ID NO: 3946847 - RNA, 22 nt, Human coronavirus OC43 (HCoV-OC43)
gaauccugacgagccccagaag

SEQ ID NO: 3946848 - RNA, 16 nt, Human coronavirus OC43 (HCoV-OC43)
gacugccaucaaccca

SEQ ID NO: 3946849 - RNA, 14 nt, Human coronavirus OC43 (HCoV-OC43)
gagaccauaaugaa

SEQ ID NO: 3946850 - RNA, 13 nt, Human coronavirus OC43 (HCoV-OC43)
gaguuucaaccca

SEQ ID NO: 3946851 - RNA, 18 nt, Human coronavirus OC43 (HCoV-OC43)
gauacuaguuauauuaau

SEQ ID NO: 3946852 - RNA, 19 nt, Human coronavirus OC43 (HCoV-OC43)
gcagaacucgcacccacag

SEQ ID NO: 3946853 - RNA, 17 nt, Human coronavirus OC43 (HCoV-OC43)
gcaguguuuugguaaga

SEQ ID NO: 3946854 - RNA, 22 nt, Human coronavirus OC43 (HCoV-OC43)
gcguauacgcauugaauaaugu

SEQ ID NO: 3946855 - RNA, 22 nt, Human coronavirus OC43 (HCoV-OC43)
gcuaccucucagcaaccaucag

SEQ ID NO: 3946856 - RNA, 23 nt, Human coronavirus OC43 (HCoV-OC43)
gcuauaacuauagguaguacuuu

SEQ ID NO: 3946857 - RNA, 19 nt, Human coronavirus OC43 (HCoV-OC43)
gcuauuucuguucaaacau

SEQ ID NO: 3946858 - RNA, 13 nt, Human coronavirus OC43 (HCoV-OC43)
gcuuauugcuaau

SEQ ID NO: 3946859 - RNA, 18 nt, Human coronavirus OC43 (HCoV-OC43)
ggaacuagugacccacag

SEQ ID NO: 3946860 - RNA, 20 nt, Human coronavirus OC43 (HCoV-OC43)
guaaauccaaacauuaugau

SEQ ID NO: 3946861 - RNA, 14 nt, Human coronavirus OC43 (HCoV-OC43)
guaaugguaaucau

SEQ ID NO: 3946862 - RNA, 17 nt, Human coronavirus OC43 (HCoV-OC43)
uaaagcuacagguacuu

SEQ ID NO: 3946863 - RNA, 16 nt, Human coronavirus OC43 (HCoV-OC43)
uaaaggaauggaauuu

SEQ ID NO: 3946864 - RNA, 18 nt, Human coronavirus OC43 (HCoV-OC43)
uacaaucauauugcaauu

SEQ ID NO: 3946865 - RNA, 22 nt, Human coronavirus OC43 (HCoV-OC43)
uacacugguagugguuacuacu

SEQ ID NO: 3946866 - RNA, 11 nt, Human coronavirus OC43 (HCoV-OC43)
uacuguuaauu

SEQ ID NO: 3946867 - RNA, 15 nt, Human coronavirus OC43 (HCoV-OC43)
uacuuuuuaugcaua

SEQ ID NO: 3946868 - RNA, 18 nt, Human coronavirus OC43 (HCoV-OC43)
uagauaugaaaggaacaa

SEQ ID NO: 3946869 - RNA, 19 nt, Human coronavirus OC43 (HCoV-OC43)
uauggagaagguuaaugaa

SEQ ID NO: 3946870 - RNA, 21 nt, Human coronavirus OC43 (HCoV-OC43)
uaugucaugccucugacuugu

SEQ ID NO: 3946871 - RNA, 22 nt, Human coronavirus OC43 (HCoV-OC43)
uauguuaggccgauaauugagg

SEQ ID NO: 3946872 - RNA, 19 nt, Human coronavirus OC43 (HCoV-OC43)
ucacuugauuauauaaaug

SEQ ID NO: 3946873 - RNA, 16 nt, Human coronavirus OC43 (HCoV-OC43)
ucucagaauuagaaga

SEQ ID NO: 3946874 - RNA, 15 nt, Human coronavirus OC43 (HCoV-OC43)
ugagauuaaguguaa

SEQ ID NO: 3946875 - RNA, 21 nt, Human coronavirus OC43 (HCoV-OC43)
ugauuuuuauuugucagguug

SEQ ID NO: 3946876 - RNA, 15 nt, Human coronavirus OC43 (HCoV-OC43)
ugcacuguucagcag

SEQ ID NO: 3946877 - RNA, 16 nt, Human coronavirus OC43 (HCoV-OC43)
ugcuaccucucagcaa

SEQ ID NO: 3946878 - RNA, 22 nt, Human coronavirus OC43 (HCoV-OC43)
uggaguuucaacccagaaacaa

SEQ ID NO: 3946879 - RNA, 22 nt, Human coronavirus OC43 (HCoV-OC43)
uguguuaaauuauaaagguuua

SEQ ID NO: 3946880 - RNA, 19 nt, Human coronavirus OC43 (HCoV-OC43)
uguuuuauacucagguuua

SEQ ID NO: 3946881 - RNA, 13 nt, Human coronavirus OC43 (HCoV-OC43)
uuaacuauuuuca

SEQ ID NO: 3946882 - RNA, 16 nt, Human coronavirus OC43 (HCoV-OC43)
uucuggcaaaacuugg

SEQ ID NO: 3946883 - RNA, 21 nt, Human coronavirus OC43 (HCoV-OC43)
agcaaccaggcugaugucaau

SEQ ID NO: 3946884 - RNA, 22 nt, Human coronavirus OC43 (HCoV-OC43)
agcuauggagaagguuaaugaa

SEQ ID NO: 3946885 - RNA, 16 nt, Human coronavirus OC43 (HCoV-OC43)
aguguugcagugccca

SEQ ID NO: 3946886 - RNA, 17 nt, Human coronavirus OC43 (HCoV-OC43)
aguugaaaguuuugugu

SEQ ID NO: 3946887 - RNA, 17 nt, Human coronavirus OC43 (HCoV-OC43)
auaagaauggacaagga

SEQ ID NO: 3946888 - RNA, 22 nt, Human coronavirus OC43 (HCoV-OC43)
auaagaauggacaaggagaaaa

SEQ ID NO: 3946889 - RNA, 14 nt, Human coronavirus OC43 (HCoV-OC43)
auauguuuauaaug

SEQ ID NO: 3946890 - RNA, 19 nt, Human coronavirus OC43 (HCoV-OC43)
auguauaguguuggagaaa

SEQ ID NO: 3946891 - RNA, 22 nt, Human coronavirus OC43 (HCoV-OC43)
auguggauuguguauuuuguga

SEQ ID NO: 3946892 - RNA, 15 nt, Human coronavirus OC43 (HCoV-OC43)
auguuuauaauggcu

SEQ ID NO: 3946893 - RNA, 18 nt, Human coronavirus OC43 (HCoV-OC43)
auuaccacugguuuugau

SEQ ID NO: 3946894 - RNA, 22 nt, Human coronavirus OC43 (HCoV-OC43)
auuaccuggcgcagacaggagu

SEQ ID NO: 3946895 - RNA, 12 nt, Human coronavirus OC43 (HCoV-OC43)
auucguuuugaa

SEQ ID NO: 3946896 - RNA, 23 nt, Human coronavirus OC43 (HCoV-OC43)
auugcuagucuuguucuggcaaa

SEQ ID NO: 3946897 - RNA, 20 nt, Human coronavirus OC43 (HCoV-OC43)
caaugauguaaaaccaccag

SEQ ID NO: 3946898 - RNA, 13 nt, Human coronavirus OC43 (HCoV-OC43)
cagcauugcuauu

SEQ ID NO: 3946899 - RNA, 18 nt, Human coronavirus OC43 (HCoV-OC43)
cagguuuugagaccauaa

SEQ ID NO: 3946900 - RNA, 13 nt, Human coronavirus OC43 (HCoV-OC43)
caugauguuaaua

SEQ ID NO: 3946901 - RNA, 11 nt, Human coronavirus OC43 (HCoV-OC43)
ccgccagaaga

SEQ ID NO: 3946902 - RNA, 19 nt, Human coronavirus OC43 (HCoV-OC43)
ccugacgagccccagaagg

SEQ ID NO: 3946903 - RNA, 23 nt, Human coronavirus OC43 (HCoV-OC43)
cuauacugaagacaccucagaaa

SEQ ID NO: 3946904 - RNA, 13 nt, Human coronavirus OC43 (HCoV-OC43)
cugacgagcccca

SEQ ID NO: 3946905 - RNA, 15 nt, Human coronavirus OC43 (HCoV-OC43)
cugugguaaugguaa

SEQ ID NO: 3946906 - RNA, 16 nt, Human coronavirus OC43 (HCoV-OC43)
cuuacuuuuguuaaug

SEQ ID NO: 3946907 - RNA, 18 nt, Human coronavirus OC43 (HCoV-OC43)
gacauuuucaaauuguaa

SEQ ID NO: 3946908 - RNA, 17 nt, Human coronavirus OC43 (HCoV-OC43)
gacguucuuuuaaaaca

SEQ ID NO: 3946909 - RNA, 20 nt, Human coronavirus OC43 (HCoV-OC43)
gacugccaucaacccaaaag

SEQ ID NO: 3946910 - RNA, 22 nt, Human coronavirus OC43 (HCoV-OC43)
gaugucuugcugcuauaauaga

SEQ ID NO: 3946911 - RNA, 15 nt, Human coronavirus OC43 (HCoV-OC43)
gauuauauaaauguu

SEQ ID NO: 3946912 - RNA, 17 nt, Human coronavirus OC43 (HCoV-OC43)
gauucguaguugcuaua

SEQ ID NO: 3946913 - RNA, 18 nt, Human coronavirus OC43 (HCoV-OC43)
gauuuacuuuuugauaaa

SEQ ID NO: 3946914 - RNA, 13 nt, Human coronavirus OC43 (HCoV-OC43)
gcacucucuauca

SEQ ID NO: 3946915 - RNA, 20 nt, Human coronavirus OC43 (HCoV-OC43)
gcagacaagccuaaucauuu

SEQ ID NO: 3946916 - RNA, 17 nt, Human coronavirus OC43 (HCoV-OC43)
gcagguacuaauuauuu

SEQ ID NO: 3946917 - RNA, 23 nt, Human coronavirus OC43 (HCoV-OC43)
gcgcacauccagcagagccucua

SEQ ID NO: 3946918 - RNA, 13 nt, Human coronavirus OC43 (HCoV-OC43)
gcgcuuucacacu

SEQ ID NO: 3946919 - RNA, 15 nt, Human coronavirus OC43 (HCoV-OC43)
gcugcugauauuaau

SEQ ID NO: 3946920 - RNA, 21 nt, Human coronavirus OC43 (HCoV-OC43)
gcuuuaguuaaaauucaagcu

SEQ ID NO: 3946921 - RNA, 21 nt, Human coronavirus OC43 (HCoV-OC43)
gggauuauuauuauaagguug

SEQ ID NO: 3946922 - RNA, 19 nt, Human coronavirus OC43 (HCoV-OC43)
guaaccccucgcagaaaag

SEQ ID NO: 3946923 - RNA, 23 nt, Human coronavirus OC43 (HCoV-OC43)
guaacuaagcauacugccaaaga

SEQ ID NO: 3946924 - RNA, 13 nt, Human coronavirus OC43 (HCoV-OC43)
guacugauacugu

SEQ ID NO: 3946925 - RNA, 22 nt, Human coronavirus OC43 (HCoV-OC43)
guaggcaguuuuaugaguuuua

SEQ ID NO: 3946926 - RNA, 17 nt, Human coronavirus OC43 (HCoV-OC43)
gucaacugcugccacga

SEQ ID NO: 3946927 - RNA, 15 nt, Human coronavirus OC43 (HCoV-OC43)
guccccuucuauuua

SEQ ID NO: 3946928 - RNA, 22 nt, Human coronavirus OC43 (HCoV-OC43)
guuauuacccuacuucagguuc

SEQ ID NO: 3946929 - RNA, 21 nt, Human coronavirus OC43 (HCoV-OC43)
guugguguuuaugauauuaau

SEQ ID NO: 3946930 - RNA, 15 nt, Human coronavirus OC43 (HCoV-OC43)
guuucaacccagaaa

SEQ ID NO: 3946931 - RNA, 19 nt, Human coronavirus OC43 (HCoV-OC43)
guuuuauagaagauucugu

SEQ ID NO: 3946932 - RNA, 13 nt, Human coronavirus OC43 (HCoV-OC43)
uaaaguuacuauu

SEQ ID NO: 3946933 - RNA, 16 nt, Human coronavirus OC43 (HCoV-OC43)
uaagaagauggaugag

SEQ ID NO: 3946934 - RNA, 13 nt, Human coronavirus OC43 (HCoV-OC43)
uaaguuugcuaua

SEQ ID NO: 3946935 - RNA, 19 nt, Human coronavirus OC43 (HCoV-OC43)
uacuaauuauuuaacuugu

SEQ ID NO: 3946936 - RNA, 19 nt, Human coronavirus OC43 (HCoV-OC43)
uacuaguuauauuaaugau

SEQ ID NO: 3946937 - RNA, 19 nt, Human coronavirus OC43 (HCoV-OC43)
uagcuaauaguuuaaugaa

SEQ ID NO: 3946938 - RNA, 14 nt, Human coronavirus OC43 (HCoV-OC43)
uauaguguuggaga

SEQ ID NO: 3946939 - RNA, 23 nt, Human coronavirus OC43 (HCoV-OC43)
uaucaacaacaagaugguaugau

SEQ ID NO: 3946940 - RNA, 16 nt, Human coronavirus OC43 (HCoV-OC43)
uaugaggguguuaauu

SEQ ID NO: 3946941 - RNA, 19 nt, Human coronavirus OC43 (HCoV-OC43)
uauguugguguuuaugaua

SEQ ID NO: 3946942 - RNA, 13 nt, Human coronavirus OC43 (HCoV-OC43)
uauuuuguuaaug

SEQ ID NO: 3946943 - RNA, 19 nt, Human coronavirus OC43 (HCoV-OC43)
ucaacccccauaauuauuc

SEQ ID NO: 3946944 - RNA, 17 nt, Human coronavirus OC43 (HCoV-OC43)
ucaagguauaaaacuag

SEQ ID NO: 3946945 - RNA, 14 nt, Human coronavirus OC43 (HCoV-OC43)
ucguaguugcuaua

SEQ ID NO: 3946946 - RNA, 19 nt, Human coronavirus OC43 (HCoV-OC43)
ugcagaauuuaucugggaa

SEQ ID NO: 3946947 - RNA, 18 nt, Human coronavirus OC43 (HCoV-OC43)
ugcagguacuaauuauuu

SEQ ID NO: 3946948 - RNA, 22 nt, Human coronavirus OC43 (HCoV-OC43)
uguguugucaaugcuuauaaua

SEQ ID NO: 3946949 - RNA, 22 nt, Human coronavirus OC43 (HCoV-OC43)
uguuaauaguggucuuacuugu

SEQ ID NO: 3946950 - RNA, 20 nt, Human coronavirus OC43 (HCoV-OC43)
uguuucuguuagcagguuua

SEQ ID NO: 3946951 - RNA, 11 nt, Human coronavirus OC43 (HCoV-OC43)
uuaauuucaau

SEQ ID NO: 3946952 - RNA, 17 nt, Human coronavirus OC43 (HCoV-OC43)
uuacagacacugguguu

SEQ ID NO: 3946953 - RNA, 21 nt, Human coronavirus OC43 (HCoV-OC43)
uuauaagaauauggcugugua

SEQ ID NO: 3946954 - RNA, 15 nt, Human coronavirus OC43 (HCoV-OC43)
uuauuauaagguuga

SEQ ID NO: 3946955 - RNA, 15 nt, Human coronavirus OC43 (HCoV-OC43)
uucuauaguuuuuac

SEQ ID NO: 3946956 - RNA, 21 nt, Human coronavirus OC43 (HCoV-OC43)
uuggugguggagaaauguuaa

SEQ ID NO: 3946957 - RNA, 18 nt, Human coronavirus OC43 (HCoV-OC43)
uuguugaggcuuauaaua

SEQ ID NO: 3946958 - RNA, 22 nt, Human coronavirus OC43 (HCoV-OC43)
uuuaccauaguggccauuauua

SEQ ID NO: 3946959 - RNA, 23 nt, Human coronavirus OC43 (HCoV-OC43)
uuucugugguaaugguaaucaua

SEQ ID NO: 3946960 - RNA, 16 nt, Human coronavirus OC43 (HCoV-OC43)
aaaggaacaauguaug

SEQ ID NO: 3946961 - RNA, 19 nt, Human coronavirus OC43 (HCoV-OC43)
aacaagaugguaugaugaa

SEQ ID NO: 3946962 - RNA, 21 nt, Human coronavirus OC43 (HCoV-OC43)
aacaaugcacuguucagcagu

SEQ ID NO: 3946963 - RNA, 20 nt, Human coronavirus OC43 (HCoV-OC43)
aagauucuguuuuuaagccu

SEQ ID NO: 3946964 - RNA, 19 nt, Human coronavirus OC43 (HCoV-OC43)
aagccccgccagaagagga

SEQ ID NO: 3946965 - RNA, 20 nt, Human coronavirus OC43 (HCoV-OC43)
aaucaagguagauuuugugc

SEQ ID NO: 3946966 - RNA, 17 nt, Human coronavirus OC43 (HCoV-OC43)
acaaggagaaaaugaua

SEQ ID NO: 3946967 - RNA, 15 nt, Human coronavirus OC43 (HCoV-OC43)
acaggaguuaaaugu

SEQ ID NO: 3946968 - RNA, 19 nt, Human coronavirus OC43 (HCoV-OC43)
acauugguacauaugaaua

SEQ ID NO: 3946969 - RNA, 13 nt, Human coronavirus OC43 (HCoV-OC43)
accaucaggaggg

SEQ ID NO: 3946970 - RNA, 23 nt, Human coronavirus OC43 (HCoV-OC43)
acccaguaauuaguaaaugaaug

SEQ ID NO: 3946971 - RNA, 16 nt, Human coronavirus OC43 (HCoV-OC43)
acuacaccagcaccag

SEQ ID NO: 3946972 - RNA, 17 nt, Human coronavirus OC43 (HCoV-OC43)
acuacuacccugaaccu

SEQ ID NO: 3946973 - RNA, 13 nt, Human coronavirus OC43 (HCoV-OC43)
acuaugguuuaaa

SEQ ID NO: 3946974 - RNA, 14 nt, Human coronavirus OC43 (HCoV-OC43)
acuguuucaaagcu

SEQ ID NO: 3946975 - RNA, 18 nt, Human coronavirus OC43 (HCoV-OC43)
agcacuaagcuuaaagau

SEQ ID NO: 3946976 - RNA, 14 nt, Human coronavirus OC43 (HCoV-OC43)
aggagaaaaugaua

SEQ ID NO: 3946977 - RNA, 14 nt, Human coronavirus OC43 (HCoV-OC43)
aguaugucacagcg

SEQ ID NO: 3946978 - RNA, 17 nt, Human coronavirus OC43 (HCoV-OC43)
agucuuaaaucagagcu

SEQ ID NO: 3946979 - RNA, 17 nt, Human coronavirus OC43 (HCoV-OC43)
auaagcgugguuuucuu

SEQ ID NO: 3946980 - RNA, 16 nt, Human coronavirus OC43 (HCoV-OC43)
auaguguuggagaaag

SEQ ID NO: 3946981 - RNA, 13 nt, Human coronavirus OC43 (HCoV-OC43)
auauuuuugcuaa

SEQ ID NO: 3946982 - RNA, 16 nt, Human coronavirus OC43 (HCoV-OC43)
augaaguuaauuaugg

SEQ ID NO: 3946983 - RNA, 16 nt, Human coronavirus OC43 (HCoV-OC43)
auggacauuuggagac

SEQ ID NO: 3946984 - RNA, 15 nt, Human coronavirus OC43 (HCoV-OC43)
auuauuuuuaaugcu

SEQ ID NO: 3946985 - RNA, 14 nt, Human coronavirus OC43 (HCoV-OC43)
auugcaccaggagu

SEQ ID NO: 3946986 - RNA, 18 nt, Human coronavirus OC43 (HCoV-OC43)
auuuuacgccuuaucaug

SEQ ID NO: 3946987 - RNA, 23 nt, Human coronavirus OC43 (HCoV-OC43)
auuuuuauuugucagguugugac

SEQ ID NO: 3946988 - RNA, 16 nt, Human coronavirus OC43 (HCoV-OC43)
caagcuguuguuaaug

SEQ ID NO: 3946989 - RNA, 18 nt, Human coronavirus OC43 (HCoV-OC43)
cagaaccuuuuauaugau

SEQ ID NO: 3946990 - RNA, 23 nt, Human coronavirus OC43 (HCoV-OC43)
cagaauuuuggugguggagaaau

SEQ ID NO: 3946991 - RNA, 23 nt, Human coronavirus OC43 (HCoV-OC43)
cagauacuaguuauauuaaugau

SEQ ID NO: 3946992 - RNA, 14 nt, Human coronavirus OC43 (HCoV-OC43)
ccgacaagugccca

SEQ ID NO: 3946993 - RNA, 16 nt, Human coronavirus OC43 (HCoV-OC43)
cuaucagaauggaugu

SEQ ID NO: 3946994 - RNA, 23 nt, Human coronavirus OC43 (HCoV-OC43)
cucgaugaaggaguggauuguaa

SEQ ID NO: 3946995 - RNA, 17 nt, Human coronavirus OC43 (HCoV-OC43)
cugacuuguaauaguaa

SEQ ID NO: 3946996 - RNA, 14 nt, Human coronavirus OC43 (HCoV-OC43)
cugcgcuguuaauu

SEQ ID NO: 3946997 - RNA, 22 nt, Human coronavirus OC43 (HCoV-OC43)
cugguuuugaucuuaauuguua

SEQ ID NO: 3946998 - RNA, 20 nt, Human coronavirus OC43 (HCoV-OC43)
cuuaaucuucccaauugcaa

SEQ ID NO: 3946999 - RNA, 13 nt, Human coronavirus OC43 (HCoV-OC43)
gaaauauaagaga

SEQ ID NO: 3947000 - RNA, 15 nt, Human coronavirus OC43 (HCoV-OC43)
gaagagccagcaugu

SEQ ID NO: 3947001 - RNA, 19 nt, Human coronavirus OC43 (HCoV-OC43)
gaaguuaauuauggccaau

SEQ ID NO: 3947002 - RNA, 20 nt, Human coronavirus OC43 (HCoV-OC43)
gacaucagccuucuuaagaa

SEQ ID NO: 3947003 - RNA, 18 nt, Human coronavirus OC43 (HCoV-OC43)
gacugcagaggacaucag

SEQ ID NO: 3947004 - RNA, 22 nt, Human coronavirus OC43 (HCoV-OC43)
gaguccaaaaccacagcgucag

SEQ ID NO: 3947005 - RNA, 15 nt, Human coronavirus OC43 (HCoV-OC43)
gauaaguuugcuaua

SEQ ID NO: 3947006 - RNA, 21 nt, Human coronavirus OC43 (HCoV-OC43)
gaucaguccgaccaguuuaga

SEQ ID NO: 3947007 - RNA, 23 nt, Human coronavirus OC43 (HCoV-OC43)
gaugccacuaaaccucagcaagu

SEQ ID NO: 3947008 - RNA, 15 nt, Human coronavirus OC43 (HCoV-OC43)
gauggaugagcccua

SEQ ID NO: 3947009 - RNA, 23 nt, Human coronavirus OC43 (HCoV-OC43)
gcaacuuuuaaauuguguauuca

SEQ ID NO: 3947010 - RNA, 21 nt, Human coronavirus OC43 (HCoV-OC43)
gcagguguucuuacuaaucau

SEQ ID NO: 3947011 - RNA, 12 nt, Human coronavirus OC43 (HCoV-OC43)
gccuuucacgcu

SEQ ID NO: 3947012 - RNA, 13 nt, Human coronavirus OC43 (HCoV-OC43)
guauuuuugcuaa

SEQ ID NO: 3947013 - RNA, 19 nt, Human coronavirus OC43 (HCoV-OC43)
gugacagucguucagauug

SEQ ID NO: 3947014 - RNA, 23 nt, Human coronavirus OC43 (HCoV-OC43)
guguaccauuuuauuuaaauguu

SEQ ID NO: 3947015 - RNA, 19 nt, Human coronavirus OC43 (HCoV-OC43)
guguugcagugcccaaaag

SEQ ID NO: 3947016 - RNA, 12 nt, Human coronavirus OC43 (HCoV-OC43)
uaauaauuguac

SEQ ID NO: 3947017 - RNA, 23 nt, Human coronavirus OC43 (HCoV-OC43)
uaauauggaggaguuuauucaaa

SEQ ID NO: 3947018 - RNA, 17 nt, Human coronavirus OC43 (HCoV-OC43)
uaaucauauuguuaaua

SEQ ID NO: 3947019 - RNA, 16 nt, Human coronavirus OC43 (HCoV-OC43)
uagaauugauacuacu

SEQ ID NO: 3947020 - RNA, 16 nt, Human coronavirus OC43 (HCoV-OC43)
uaguaaaugaaugaag

SEQ ID NO: 3947021 - RNA, 18 nt, Human coronavirus OC43 (HCoV-OC43)
uaguagagccaauucugg

SEQ ID NO: 3947022 - RNA, 23 nt, Human coronavirus OC43 (HCoV-OC43)
uaguuuuagauguuaaaggugua

SEQ ID NO: 3947023 - RNA, 16 nt, Human coronavirus OC43 (HCoV-OC43)
uauaaucuuaacuauu

SEQ ID NO: 3947024 - RNA, 22 nt, Human coronavirus OC43 (HCoV-OC43)
uauagcaccaccuacugguguu

SEQ ID NO: 3947025 - RNA, 14 nt, Human coronavirus OC43 (HCoV-OC43)
uauaguugccauuu

SEQ ID NO: 3947026 - RNA, 20 nt, Human coronavirus OC43 (HCoV-OC43)
uauauaagcguaauuucaca

SEQ ID NO: 3947027 - RNA, 19 nt, Human coronavirus OC43 (HCoV-OC43)
uaucuagacuugaugcucu

SEQ ID NO: 3947028 - RNA, 16 nt, Human coronavirus OC43 (HCoV-OC43)
uauuuaaauacuacgu

SEQ ID NO: 3947029 - RNA, 17 nt, Human coronavirus OC43 (HCoV-OC43)
uauuuagccauuucaaa

SEQ ID NO: 3947030 - RNA, 18 nt, Human coronavirus OC43 (HCoV-OC43)
uauuuucauuuuuaucaa

SEQ ID NO: 3947031 - RNA, 19 nt, Human coronavirus OC43 (HCoV-OC43)
ucaaaagcuuauugcuaau

SEQ ID NO: 3947032 - RNA, 18 nt, Human coronavirus OC43 (HCoV-OC43)
uacugguguuuaugaauu

SEQ ID NO: 3947033 - RNA, 19 nt, Human coronavirus OC43 (HCoV-OC43)
uacuguugauguuacuaau

SEQ ID NO: 3947034 - RNA, 12 nt, Human coronavirus OC43 (HCoV-OC43)
uauugaugcugc

SEQ ID NO: 3947035 - RNA, 14 nt, Human coronavirus OC43 (HCoV-OC43)
ucaacaaauuauuu

SEQ ID NO: 3947036 - RNA, 15 nt, Human coronavirus OC43 (HCoV-OC43)
uccagcagagccucu

SEQ ID NO: 3947037 - RNA, 17 nt, Human coronavirus OC43 (HCoV-OC43)
uccugacgagccccaga

SEQ ID NO: 3947038 - RNA, 21 nt, Human coronavirus OC43 (HCoV-OC43)
ugaaugcugauuauuuguauu

SEQ ID NO: 3947039 - RNA, 19 nt, Human coronavirus OC43 (HCoV-OC43)
ugauguaaaaccaccaguc

SEQ ID NO: 3947040 - RNA, 19 nt, Human coronavirus OC43 (HCoV-OC43)
ugccacuaaaccucagcaa

SEQ ID NO: 3947041 - RNA, 14 nt, Human coronavirus OC43 (HCoV-OC43)
ugguuuguuauaua

SEQ ID NO: 3947042 - RNA, 16 nt, Human coronavirus OC43 (HCoV-OC43)
uguaauaguaagguua

SEQ ID NO: 3947043 - RNA, 13 nt, Human coronavirus OC43 (HCoV-OC43)
uguuuaauguuua

SEQ ID NO: 3947044 - RNA, 11 nt, Human coronavirus OC43 (HCoV-OC43)
uuaaaacuugg

SEQ ID NO: 3947045 - RNA, 18 nt, Human coronavirus OC43 (HCoV-OC43)
uuauggccaauuggaaga

SEQ ID NO: 3947046 - RNA, 14 nt, Human coronavirus OC43 (HCoV-OC43)
uugauguggaugac

SEQ ID NO: 3947047 - RNA, 16 nt, Human coronavirus OC43 (HCoV-OC43)
uugcuguuuauguuaa

SEQ ID NO: 3947048 - RNA, 18 nt, Human coronavirus OC43 (HCoV-OC43)
uuuaaugcuguugauugu

SEQ ID NO: 3947049 - RNA, 23 nt, Human coronavirus OC43 (HCoV-OC43)
uuuaguuggcauaggugagcacu

SEQ ID NO: 3947050 - RNA, 15 nt, Human coronavirus OC43 (HCoV-OC43)
uuuuaugaguuuuac

SEQ ID NO: 3947051 - RNA, 13 nt, Human coronavirus OC43 (HCoV-OC43)
aacauuaaugcca

SEQ ID NO: 3947052 - RNA, 23 nt, Human coronavirus OC43 (HCoV-OC43)
aagauggcguuaauuucaaugua

SEQ ID NO: 3947053 - RNA, 21 nt, Human coronavirus OC43 (HCoV-OC43)
aagcucagauagauagacuua

SEQ ID NO: 3947054 - RNA, 23 nt, Human coronavirus OC43 (HCoV-OC43)
aauaugaguccaaaaccacagcg

SEQ ID NO: 3947055 - RNA, 14 nt, Human coronavirus OC43 (HCoV-OC43)
aaugaaugaaguua

SEQ ID NO: 3947056 - RNA, 22 nt, Human coronavirus OC43 (HCoV-OC43)
aauggacaaggagaaaaugaua

SEQ ID NO: 3947057 - RNA, 14 nt, Human coronavirus OC43 (HCoV-OC43)
aauuaguaaaugaa

SEQ ID NO: 3947058 - RNA, 19 nt, Human coronavirus OC43 (HCoV-OC43)
aauugccgacaagugccca

SEQ ID NO: 3947059 - RNA, 16 nt, Human coronavirus OC43 (HCoV-OC43)
acucucuaucagaaug

SEQ ID NO: 3947060 - RNA, 23 nt, Human coronavirus OC43 (HCoV-OC43)
agagugguuauuuuguuaaugua

SEQ ID NO: 3947061 - RNA, 16 nt, Human coronavirus OC43 (HCoV-OC43)
agcauacugccaaaga

SEQ ID NO: 3947062 - RNA, 16 nt, Human coronavirus OC43 (HCoV-OC43)
agcuuggcuuaaugau

SEQ ID NO: 3947063 - RNA, 20 nt, Human coronavirus OC43 (HCoV-OC43)
aggaugguuauaauaaauua

SEQ ID NO: 3947064 - RNA, 17 nt, Human coronavirus OC43 (HCoV-OC43)
aggcccuaaucagaauu

SEQ ID NO: 3947065 - RNA, 13 nt, Human coronavirus OC43 (HCoV-OC43)
aggcugaugucaa

SEQ ID NO: 3947066 - RNA, 16 nt, Human coronavirus OC43 (HCoV-OC43)
agugagauuaagugua

SEQ ID NO: 3947067 - RNA, 23 nt, Human coronavirus OC43 (HCoV-OC43)
auacuaaagcgccguauguaaug

SEQ ID NO: 3947068 - RNA, 16 nt, Human coronavirus OC43 (HCoV-OC43)
auacuagugguuuugc

SEQ ID NO: 3947069 - RNA, 18 nt, Human coronavirus OC43 (HCoV-OC43)
auacuaguuauauuaaug

SEQ ID NO: 3947070 - RNA, 17 nt, Human coronavirus OC43 (HCoV-OC43)
auacuuggauguacacu

SEQ ID NO: 3947071 - RNA, 14 nt, Human coronavirus OC43 (HCoV-OC43)
aucaaugguuuaaa

SEQ ID NO: 3947072 - RNA, 17 nt, Human coronavirus OC43 (HCoV-OC43)
auguaaugcugaacacu

SEQ ID NO: 3947073 - RNA, 21 nt, Human coronavirus OC43 (HCoV-OC43)
auuguuauuauuuaguuuuac

SEQ ID NO: 3947074 - RNA, 22 nt, Human coronavirus OC43 (HCoV-OC43)
auuguuugggguuuuaugaauc

SEQ ID NO: 3947075 - RNA, 23 nt, Human coronavirus OC43 (HCoV-OC43)
auuucuuucugauuuuauuaaug

SEQ ID NO: 3947076 - RNA, 20 nt, Human coronavirus OC43 (HCoV-OC43)
auuugucacuugauuauaua

SEQ ID NO: 3947077 - RNA, 20 nt, Human coronavirus OC43 (HCoV-OC43)
caaaccagggguagaagagc

SEQ ID NO: 3947078 - RNA, 13 nt, Human coronavirus OC43 (HCoV-OC43)
caacaaauuauuu

SEQ ID NO: 3947079 - RNA, 15 nt, Human coronavirus OC43 (HCoV-OC43)
caacacuguuucaaa

SEQ ID NO: 3947080 - RNA, 16 nt, Human coronavirus OC43 (HCoV-OC43)
caagaugguauuauuu

SEQ ID NO: 3947081 - RNA, 22 nt, Human coronavirus OC43 (HCoV-OC43)
caaguguaauauuuuugcuaau

SEQ ID NO: 3947082 - RNA, 13 nt, Human coronavirus OC43 (HCoV-OC43)
caauucuggcaau

SEQ ID NO: 3947083 - RNA, 15 nt, Human coronavirus OC43 (HCoV-OC43)
cagaacuuuuaugau

SEQ ID NO: 3947084 - RNA, 21 nt, Human coronavirus OC43 (HCoV-OC43)
cagccuucuuaagaagaugga

SEQ ID NO: 3947085 - RNA, 20 nt, Human coronavirus OC43 (HCoV-OC43)
cgguuuuaaugucucagaau

SEQ ID NO: 3947086 - RNA, 15 nt, Human coronavirus OC43 (HCoV-OC43)
cuacugauuuacaaa

SEQ ID NO: 3947087 - RNA, 20 nt, Human coronavirus OC43 (HCoV-OC43)
cuauauugaaggcucaggaa

SEQ ID NO: 3947088 - RNA, 16 nt, Human coronavirus OC43 (HCoV-OC43)
cucuaucagaauggau

SEQ ID NO: 3947089 - RNA, 16 nt, Human coronavirus OC43 (HCoV-OC43)
cucuuccgaaccagca

SEQ ID NO: 3947090 - RNA, 23 nt, Human coronavirus OC43 (HCoV-OC43)
cuuauauggaccuuaauccuguu

SEQ ID NO: 3947091 - RNA, 20 nt, Human coronavirus OC43 (HCoV-OC43)
gaaaggaguuugaguuugua

SEQ ID NO: 3947092 - RNA, 15 nt, Human coronavirus OC43 (HCoV-OC43)
gaagguuauagcaga

SEQ ID NO: 3947093 - RNA, 22 nt, Human coronavirus OC43 (HCoV-OC43)
gaaugugucaaaagccaaucau

SEQ ID NO: 3947094 - RNA, 22 nt, Human coronavirus OC43 (HCoV-OC43)
gaccacaagcauuuuuggguug

SEQ ID NO: 3947095 - RNA, 14 nt, Human coronavirus OC43 (HCoV-OC43)
gagaaaaugauaau

SEQ ID NO: 3947096 - RNA, 12 nt, Human coronavirus OC43 (HCoV-OC43)
gcuuucaaucaa

SEQ ID NO: 3947097 - RNA, 18 nt, Human coronavirus OC43 (HCoV-OC43)
guuaauguaccauauguu

SEQ ID NO: 3947098 - RNA, 20 nt, Human coronavirus OC43 (HCoV-OC43)
guucagauuguaaucauauu

SEQ ID NO: 3947099 - RNA, 12 nt, Human coronavirus OC43 (HCoV-OC43)
guuuauucaaac

SEQ ID NO: 3947100 - RNA, 19 nt, Human coronavirus OC43 (HCoV-OC43)
guuuguaugaaauucaaau

SEQ ID NO: 3947101 - RNA, 17 nt, Human coronavirus OC43 (HCoV-OC43)
guuuuauacucagguuu

SEQ ID NO: 3947102 - RNA, 19 nt, Human coronavirus OC43 (HCoV-OC43)
uaaauuuaacuaucaauuu

SEQ ID NO: 3947103 - RNA, 19 nt, Human coronavirus OC43 (HCoV-OC43)
uaauaaagacacugguguu

SEQ ID NO: 3947104 - RNA, 16 nt, Human coronavirus OC43 (HCoV-OC43)
uacaccagcaccaguu

SEQ ID NO: 3947105 - RNA, 16 nt, Human coronavirus OC43 (HCoV-OC43)
uaccgcucuuaaugcu

SEQ ID NO: 3947106 - RNA, 20 nt, Human coronavirus OC43 (HCoV-OC43)
uacgguuuuagagacuacau

SEQ ID NO: 3947107 - RNA, 17 nt, Human coronavirus OC43 (HCoV-OC43)
ucuaucagaauggaugu

SEQ ID NO: 3947108 - RNA, 17 nt, Human coronavirus OC43 (HCoV-OC43)
ugggucgcuagcaacca

SEQ ID NO: 3947109 - RNA, 16 nt, Human coronavirus OC43 (HCoV-OC43)
uguccugcagguacua

SEQ ID NO: 3947110 - RNA, 24 nt, Human coronavirus OC43 (HCoV-OC43)
uuaaaugcaaccguucugguagua

SEQ ID NO: 3947111 - RNA, 20 nt, Human coronavirus OC43 (HCoV-OC43)
uuacccucugguaauuauuu

SEQ ID NO: 3947112 - RNA, 21 nt, Human coronavirus OC43 (HCoV-OC43)
uuacuauucuucauaugcugu

SEQ ID NO: 3947113 - RNA, 16 nt, Human coronavirus OC43 (HCoV-OC43)
uuauuuuuaaugcugu

SEQ ID NO: 3947114 - RNA, 13 nt, Human coronavirus OC43 (HCoV-OC43)
uucagguuuugag

SEQ ID NO: 3947115 - RNA, 12 nt, Human coronavirus OC43 (HCoV-OC43)
uugcagugccca

SEQ ID NO: 3947116 - RNA, 18 nt, Human coronavirus OC43 (HCoV-OC43)
uugcgauuguaauuauug

SEQ ID NO: 3947117 - RNA, 16 nt, Human coronavirus OC43 (HCoV-OC43)
uuguaugaaauucaaa

SEQ ID NO: 3947118 - RNA, 12 nt, Human coronavirus OC43 (HCoV-OC43)
uuuaaauugugu

SEQ ID NO: 3947119 - RNA, 20 nt, Human coronavirus OC43 (HCoV-OC43)
uuucuguuagcagguuuaau

SEQ ID NO: 3947120 - RNA, 14 nt, Human coronavirus OC43 [HCoV-OC43]
aaaucguucuggua

SEQ ID NO: 3947121 - RNA, 22 nt, Human coronavirus OC43 [HCoV-OC43]
aacaaguugucaguuguauuau

SEQ ID NO: 3947122 - RNA, 16 nt, Human coronavirus OC43 [HCoV-OC43]
aaccagcgucaacugc

SEQ ID NO: 3947123 - RNA, 16 nt, Human coronavirus OC43 [HCoV-OC43]
aacccaagcaaacugc

SEQ ID NO: 3947124 - RNA, 15 nt, Human coronavirus OC43 [HCoV-OC43]
aagauggaugagccc

SEQ ID NO: 3947125 - RNA, 16 nt, Human coronavirus OC43 [HCoV-OC43]
aaggaacaauguaugu

SEQ ID NO: 3947126 - RNA, 17 nt, Human coronavirus OC43 [HCoV-OC43]
aaggauguuuaugaauu

SEQ ID NO: 3947127 - RNA, 12 nt, Human coronavirus OC43 [HCoV-OC43]
aaggauuuuacg

SEQ ID NO: 3947128 - RNA, 20 nt, Human coronavirus OC43 [HCoV-OC43]
aagugaaagacuugcggaag

SEQ ID NO: 3947129 - RNA, 14 nt, Human coronavirus OC43 [HCoV-OC43]
aauggcauccucaa

SEQ ID NO: 3947130 - RNA, 22 nt, Human coronavirus OC43 [HCoV-OC43]
aaugguguuacucuuagcacua

SEQ ID NO: 3947131 - RNA, 20 nt, Human coronavirus OC43 [HCoV-OC43]
aauuguuugggguuuuauga

SEQ ID NO: 3947132 - RNA, 20 nt, Human coronavirus OC43 [HCoV-OC43]
aauuuugagccauuuacugu

SEQ ID NO: 3947133 - RNA, 17 nt, Human coronavirus OC43 [HCoV-OC43]
acaaugcccuuuaugcu

SEQ ID NO: 3947134 - RNA, 15 nt, Human coronavirus OC43 [HCoV-OC43]
acaauuggguaauuu

SEQ ID NO: 3947135 - RNA, 17 nt, Human coronavirus OC43 [HCoV-OC43]
acagcucuuuguaaauc

SEQ ID NO: 3947136 - RNA, 21 nt, Human coronavirus OC43 [HCoV-OC43]
acaguagguagugguuacugu

SEQ ID NO: 3947137 - RNA, 17 nt, Human coronavirus OC43 [HCoV-OC43]
acuaguuauauuaauga

SEQ ID NO: 3947138 - RNA, 11 nt, Human coronavirus OC43 [HCoV-OC43]
acuauaaucuu

SEQ ID NO: 3947139 - RNA, 22 nt, Human coronavirus OC43 [HCoV-OC43]
acuauagauaaguuugcuauac

SEQ ID NO: 3947140 - RNA, 22 nt, Human coronavirus OC43 [HCoV-OC43]
acuauugauugugcugcauuug

SEQ ID NO: 3947141 - RNA, 12 nt, Human coronavirus OC43 [HCoV-OC43]
acucuuguuuac

SEQ ID NO: 3947142 - RNA, 22 nt, Human coronavirus OC43 [HCoV-OC43]
acugcugaugaagcuauuaaau

SEQ ID NO: 3947143 - RNA, 16 nt, Human coronavirus OC43 [HCoV-OC43]
acuuguaauaauauug

SEQ ID NO: 3947144 - RNA, 19 nt, Human coronavirus OC43 [HCoV-OC43]
agaacucgcacccacagcu

SEQ ID NO: 3947145 - RNA, 19 nt, Human coronavirus OC43 [HCoV-OC43]
agacaggaguuaaauguuu

SEQ ID NO: 3947146 - RNA, 17 nt, Human coronavirus OC43 [HCoV-OC43]
agagcguccucuggaaa

SEQ ID NO: 3947147 - RNA, 22 nt, Human coronavirus OC43 [HCoV-OC43]
agaugguauuauuuuuaaugcu

SEQ ID NO: 3947148 - RNA, 19 nt, Human coronavirus OC43 [HCoV-OC43]
agcuccuaaaaauuucugu

SEQ ID NO: 3947149 - RNA, 21 nt, Human coronavirus OC43 [HCoV-OC43]
agcuuauugcuaaugcauuua

SEQ ID NO: 3947150 - RNA, 11 nt, Human coronavirus OC43 [HCoV-OC43]
aggguucuggc

SEQ ID NO: 3947151 - RNA, 18 nt, Human coronavirus OC43 [HCoV-OC43]
aggugguuuguaugaaau

SEQ ID NO: 3947152 - RNA, 16 nt, Human coronavirus OC43 [HCoV-OC43]
agucaauauuauuuua

SEQ ID NO: 3947153 - RNA, 18 nt, Human coronavirus OC43 [HCoV-OC43]
aguguugcagugcccaaa

SEQ ID NO: 3947154 - RNA, 12 nt, Human coronavirus OC43 [HCoV-OC43]
aguguuuuggua

SEQ ID NO: 3947155 - RNA, 16 nt, Human coronavirus OC43 [HCoV-OC43]
auaaacaaugcacugu

SEQ ID NO: 3947156 - RNA, 17 nt, Human coronavirus OC43 [HCoV-OC43]
auaaaggcuuguuuuau

SEQ ID NO: 3947157 - RNA, 18 nt, Human coronavirus OC43 [HCoV-OC43]
auaagccccgccagaaga

SEQ ID NO: 3947158 - RNA, 23 nt, Human coronavirus OC43 [HCoV-OC43]
auaaucuaaacauguuuuugaua

SEQ ID NO: 3947159 - RNA, 14 nt, Human coronavirus OC43 [HCoV-OC43]
auacaaaguauuau

SEQ ID NO: 3947160 - RNA, 18 nt, Human coronavirus OC43 [HCoV-OC43]
auacgcauugaauaaugu

SEQ ID NO: 3947161 - RNA, 16 nt, Human coronavirus OC43 [HCoV-OC43]
auagauuuggugcuau

SEQ ID NO: 3947162 - RNA, 21 nt, Human coronavirus OC43 [HCoV-OC43]
auagcuccuaagagugguuau

SEQ ID NO: 3947163 - RNA, 14 nt, Human coronavirus OC43 [HCoV-OC43]
auaguaagguuaag

SEQ ID NO: 3947164 - RNA, 15 nt, Human coronavirus OC43 [HCoV-OC43]
auauaagcguaauuu

SEQ ID NO: 3947165 - RNA, 20 nt, Human coronavirus OC43 [HCoV-OC43]
auaucuaaauuuuaaggaug

SEQ ID NO: 3947166 - RNA, 16 nt, Human coronavirus OC43 [HCoV-OC43]
aucaagaugguauuau

SEQ ID NO: 3947167 - RNA, 14 nt, Human coronavirus OC43 [HCoV-OC43]
aucauauugcaauu

SEQ ID NO: 3947168 - RNA, 14 nt, Human coronavirus OC43 [HCoV-OC43]
aucauuagugcaga

SEQ ID NO: 3947169 - RNA, 17 nt, Human coronavirus OC43 [HCoV-OC43]
auccuauuacauuuaaa

SEQ ID NO: 3947170 - RNA, 17 nt, Human coronavirus OC43 [HCoV-OC43]
augcaaaugcugaagcu

SEQ ID NO: 3947171 - RNA, 14 nt, Human coronavirus OC43 [HCoV-OC43]
augcaauucaauua

SEQ ID NO: 3947172 - RNA, 15 nt, Human coronavirus OC43 [HCoV-OC43]
augcagcauguaaau

SEQ ID NO: 3947173 - RNA, 13 nt, Human coronavirus OC43 [HCoV-OC43]
augcauaguuuua

SEQ ID NO: 3947174 - RNA, 20 nt, Human coronavirus OC43 [HCoV-OC43]
auggagaugcugguuuuacu

SEQ ID NO: 3947175 - RNA, 22 nt, Human coronavirus OC43 [HCoV-OC43]
auguaaaucacaguugguugaa

SEQ ID NO: 3947176 - RNA, 21 nt, Human coronavirus OC43 [HCoV-OC43]
auguauagugaguucccugcu

SEQ ID NO: 3947177 - RNA, 15 nt, Human coronavirus OC43 [HCoV-OC43]
augucccacugcugc

SEQ ID NO: 3947178 - RNA, 23 nt, Human coronavirus OC43 [HCoV-OC43]
auguuaaaacuuggaacuaguga

SEQ ID NO: 3947179 - RNA, 14 nt, Human coronavirus OC43 [HCoV-OC43]
auuauuuaguuuua

SEQ ID NO: 3947180 - RNA, 12 nt, Human coronavirus OC43 [HCoV-OC43]
auucugcuuuag

SEQ ID NO: 3947181 - RNA, 22 nt, Human coronavirus OC43 [HCoV-OC43]
auugggaacguaagacauuuuc

SEQ ID NO: 3947182 - RNA, 17 nt, Human coronavirus OC43 [HCoV-OC43]
auugguuuuuauuuggu

SEQ ID NO: 3947183 - RNA, 19 nt, Human coronavirus OC43 [HCoV-OC43]
auuguaaucauauuguuaa

SEQ ID NO: 3947184 - RNA, 19 nt, Human coronavirus OC43 [HCoV-OC43]
auuguggaggcaauucuug

SEQ ID NO: 3947185 - RNA, 21 nt, Human coronavirus OC43 [HCoV-OC43]
auuuugcaugauguuaauagu

SEQ ID NO: 3947186 - RNA, 23 nt, Human coronavirus OC43 [HCoV-OC43]
auuuuggugguggagaaauguua

SEQ ID NO: 3947187 - RNA, 17 nt, Human coronavirus OC43 [HCoV-OC43]
auuuuguuaauguaaau

SEQ ID NO: 3947188 - RNA, 22 nt, Human coronavirus OC43 [HCoV-OC43]
caaacugguuuucuuagcuguu

SEQ ID NO: 3947189 - RNA, 21 nt, Human coronavirus OC43 [HCoV-OC43]
caaccagcgucaacugcugcc

SEQ ID NO: 3947190 - RNA, 16 nt, Human coronavirus OC43 [HCoV-OC43]
caacuauguugguguu

SEQ ID NO: 3947191 - RNA, 19 nt, Human coronavirus OC43 [HCoV-OC43]
caaguaacuaagcauacug

SEQ ID NO: 3947192 - RNA, 22 nt, Human coronavirus OC43 [HCoV-OC43]
cacuucuagacaauauuuacuc

SEQ ID NO: 3947193 - RNA, 18 nt, Human coronavirus OC43 [HCoV-OC43]
cagaaaauuuugaauaag

SEQ ID NO: 3947194 - RNA, 17 nt, Human coronavirus OC43 [HCoV-OC43]
cagaaauauaagagaau

SEQ ID NO: 3947195 - RNA, 15 nt, Human coronavirus OC43 [HCoV-OC43]
cagauagauagacuu

SEQ ID NO: 3947196 - RNA, 16 nt, Human coronavirus OC43 [HCoV-OC43]
cagcuuauaugacugu

SEQ ID NO: 3947197 - RNA, 19 nt, Human coronavirus OC43 [HCoV-OC43]
caggaguuaaauguuuaug

SEQ ID NO: 3947198 - RNA, 13 nt, Human coronavirus OC43 [HCoV-OC43]
cagguuguuuauu

SEQ ID NO: 3947199 - RNA, 14 nt, Human coronavirus OC43 [HCoV-OC43]
caguggauacacuu

SEQ ID NO: 3947200 - RNA, 15 nt, Human coronavirus OC43 [HCoV-OC43]
caucuggugguaacc

SEQ ID NO: 3947201 - RNA, 18 nt, Human coronavirus OC43 [HCoV-OC43]
uuaaacgguuacacuguu

SEQ ID NO: 3947202 - RNA, 21 nt, Human coronavirus OC43 [HCoV-OC43]
uuaaagaucguguaauguaua

SEQ ID NO: 3947203 - RNA, 21 nt, Human coronavirus OC43 [HCoV-OC43]
uuaauuguuauuauuuaguuu

SEQ ID NO: 3947204 - RNA, 19 nt, Human coronavirus OC43 [HCoV-OC43]
uuacccucugguaauuauu

SEQ ID NO: 3947205 - RNA, 15 nt, Human coronavirus OC43 [HCoV-OC43]
uuagaguuggccaaa

SEQ ID NO: 3947206 - RNA, 14 nt, Human coronavirus OC43 [HCoV-OC43]
uucagcaguguuuu

SEQ ID NO: 3947207 - RNA, 16 nt, Human coronavirus OC43 [HCoV-OC43]
uucagcaguguuuugg

SEQ ID NO: 3947208 - RNA, 16 nt, Human coronavirus OC43 [HCoV-OC43]
uucuaaugguaaucuc

SEQ ID NO: 3947209 - RNA, 19 nt, Human coronavirus OC43 [HCoV-OC43]
uugaccuacaauuggguaa

SEQ ID NO: 3947210 - RNA, 20 nt, Human coronavirus OC43 [HCoV-OC43]
uuguccugcagguacuaauu

SEQ ID NO: 3947211 - RNA, 15 nt, Human coronavirus OC43 [HCoV-OC43]
uuguuacuaaguuuu

SEQ ID NO: 3947212 - RNA, 16 nt, Human coronavirus OC43 [HCoV-OC43]
uuuacaauuucaaauu

SEQ ID NO: 3947213 - RNA, 14 nt, Human coronavirus OC43 [HCoV-OC43]
uuucuuucugauuu

SEQ ID NO: 3947214 - RNA, 16 nt, Human coronavirus OC43 [HCoV-OC43]
uuugauacuuuuaauu

SEQ ID NO: 3947215 - RNA, 14 nt, Human coronavirus OC43 [HCoV-OC43]
uuuuaugcauauuu

SEQ ID NO: 3947216 - RNA, 16 nt, Human coronavirus OC43 [HCoV-OC43]
uuuucagauuaaauuu

SEQ ID NO: 3947217 - RNA, 11 nt, Human coronavirus OC43 [HCoV-OC43]
ugcuguugauu

SEQ ID NO: 3947218 - RNA, 12 nt, Human coronavirus OC43 [HCoV-OC43]
uggcauggacac

SEQ ID NO: 3947219 - RNA, 15 nt, Human coronavirus OC43 [HCoV-OC43]
uggccaaagugcaga

SEQ ID NO: 3947220 - RNA, 15 nt, Human coronavirus OC43 [HCoV-OC43]
uguaaucauauuguu

SEQ ID NO: 3947221 - RNA, 16 nt, Human coronavirus OC43 [HCoV-OC43]
uguacagguuguugau

SEQ ID NO: 3947222 - RNA, 19 nt, Human coronavirus OC43 [HCoV-OC43]
uguagaagaauugcaugac

SEQ ID NO: 3947223 - RNA, 19 nt, Human coronavirus OC43 [HCoV-OC43]
ugucaaccuccguacuguu

SEQ ID NO: 3947224 - RNA, 16 nt, Human coronavirus OC43 [HCoV-OC43]
ugugguaguacaacca

SEQ ID NO: 3947225 - RNA, 21 nt, Human coronavirus OC43 [HCoV-OC43]
uguguuaaauuauaaagguuu

SEQ ID NO: 3947226 - RNA, 19 nt, Human coronavirus OC43 [HCoV-OC43]
uguuaauguaccauauguu

SEQ ID NO: 3947227 - RNA, 14 nt, Human coronavirus OC43 [HCoV-OC43]
uguucuacugauuu

SEQ ID NO: 3947228 - RNA, 19 nt, Human coronavirus OC43 [HCoV-OC43]
uguugacuuuauuaccugg

SEQ ID NO: 3947229 - RNA, 14 nt, Human coronavirus OC43 [HCoV-OC43]
uguugcagugccca

SEQ ID NO: 3947230 - RNA, 20 nt, Human coronavirus OC43 [HCoV-OC43]
uuaaaacagccgauggcaac

SEQ ID NO: 3947231 - RNA, 20 nt, Human coronavirus OC43 [HCoV-OC43]
uuacuagcauacuuaguggu

SEQ ID NO: 3947232 - RNA, 17 nt, Human coronavirus OC43 [HCoV-OC43]
uuacuaggcugcaugau

SEQ ID NO: 3947233 - RNA, 15 nt, Human coronavirus OC43 [HCoV-OC43]
uuaggccaaggcauu

SEQ ID NO: 3947234 - RNA, 22 nt, Human coronavirus OC43 [HCoV-OC43]
uuaucaagaaggugguacuuuu

SEQ ID NO: 3947235 - RNA, 16 nt, Human coronavirus OC43 [HCoV-OC43]
uuaucuugguuguguu

SEQ ID NO: 3947236 - RNA, 18 nt, Human coronavirus OC43 [HCoV-OC43]
uuaugauaaauauuuugg

SEQ ID NO: 3947237 - RNA, 13 nt, Human coronavirus OC43 [HCoV-OC43]
uuauguggccccu

SEQ ID NO: 3947238 - RNA, 14 nt, Human coronavirus OC43 [HCoV-OC43]
uucgcauguaaaug

SEQ ID NO: 3947239 - RNA, 14 nt, Human coronavirus OC43 [HCoV-OC43]
uucuacugauuuac

SEQ ID NO: 3947240 - RNA, 14 nt, Human coronavirus OC43 [HCoV-OC43]
uugcgauuguaauu

SEQ ID NO: 3947241 - RNA, 12 nt, Human coronavirus OC43 [HCoV-OC43]
uugcuaaugcau

SEQ ID NO: 3947242 - RNA, 13 nt, Human coronavirus OC43 [HCoV-OC43]
uuguauuauaauu

SEQ ID NO: 3947243 - RNA, 23 nt, Human coronavirus OC43 [HCoV-OC43]
uuguauuuuuaacggcaaguuuu

SEQ ID NO: 3947244 - RNA, 21 nt, Human coronavirus OC43 [HCoV-OC43]
uugucauccuaaccuggguaa

SEQ ID NO: 3947245 - RNA, 16 nt, Human coronavirus OC43 [HCoV-OC43]
uuuauaugauucuaau

SEQ ID NO: 3947246 - RNA, 15 nt, Human coronavirus OC43 [HCoV-OC43]
uuucaaauuguaauu

SEQ ID NO: 3947247 - RNA, 20 nt, Human coronavirus OC43 [HCoV-OC43]
uuugauaaaguaaaguuauc

SEQ ID NO: 3947248 - RNA, 22 nt, Human coronavirus OC43 [HCoV-OC43]
uuugcaaucuagcauuuguuaa

SEQ ID NO: 3947249 - RNA, 12 nt, Human coronavirus OC43 [HCoV-OC43]
aauuguuauuau

SEQ ID NO: 3947250 - RNA, 21 nt, Human coronavirus OC43 [HCoV-OC43]
aauuuuucuuuggguauuaua

SEQ ID NO: 3947251 - RNA, 18 nt, Human coronavirus OC43 [HCoV-OC43]
acacaggaugguuauaau

SEQ ID NO: 3947252 - RNA, 23 nt, Human coronavirus OC43 [HCoV-OC43]
acaccucagaaauauaagagaau

SEQ ID NO: 3947253 - RNA, 21 nt, Human coronavirus OC43 [HCoV-OC43]
acacugguaaaauuuagugca

SEQ ID NO: 3947254 - RNA, 21 nt, Human coronavirus OC43 [HCoV-OC43]
acagacauaauucuugguguu

SEQ ID NO: 3947255 - RNA, 16 nt, Human coronavirus OC43 [HCoV-OC43]
acuacguuuuuaauaa

SEQ ID NO: 3947256 - RNA, 16 nt, Human coronavirus OC43 [HCoV-OC43]
acuagugacccacagu

SEQ ID NO: 3947257 - RNA, 15 nt, Human coronavirus OC43 [HCoV-OC43]
acuagugguuuugcu

SEQ ID NO: 3947258 - RNA, 15 nt, Human coronavirus OC43 [HCoV-OC43]
acucgcacccacagc

SEQ ID NO: 3947259 - RNA, 16 nt, Human coronavirus OC43 [HCoV-OC43]
acucgcacccacagcu

SEQ ID NO: 3947260 - RNA, 15 nt, Human coronavirus OC43 [HCoV-OC43]
acucucuaucagaau

SEQ ID NO: 3947261 - RNA, 11 nt, Human coronavirus OC43 [HCoV-OC43]
acuguuaauuc

SEQ ID NO: 3947262 - RNA, 23 nt, Human coronavirus OC43 [HCoV-OC43]
acuuuuuaugcauauuuuacaga

SEQ ID NO: 3947263 - RNA, 17 nt, Human coronavirus OC43 [HCoV-OC43]
agaaagaugguuuuuau

SEQ ID NO: 3947264 - RNA, 22 nt, Human coronavirus OC43 [HCoV-OC43]
agaaggugguacuuuuuaugca

SEQ ID NO: 3947265 - RNA, 17 nt, Human coronavirus OC43 [HCoV-OC43]
agaauauggcuguguau

SEQ ID NO: 3947266 - RNA, 15 nt, Human coronavirus OC43 [HCoV-OC43]
agaauggaugucuug

SEQ ID NO: 3947267 - RNA, 15 nt, Human coronavirus OC43 [HCoV-OC43]
agaaugguuuuacuu

SEQ ID NO: 3947268 - RNA, 12 nt, Human coronavirus OC43 [HCoV-OC43]
agagccagcaug

SEQ ID NO: 3947269 - RNA, 18 nt, Human coronavirus OC43 [HCoV-OC43]
agagugguuauuuuguua

SEQ ID NO: 3947270 - RNA, 20 nt, Human coronavirus OC43 [HCoV-OC43]
agaguuccuagucaugcuug

SEQ ID NO: 3947271 - RNA, 13 nt, Human coronavirus OC43 [HCoV-OC43]
agaucguguguau

SEQ ID NO: 3947272 - RNA, 13 nt, Human coronavirus OC43 [HCoV-OC43]
agcauaacuauag

SEQ ID NO: 3947273 - RNA, 21 nt, Human coronavirus OC43 [HCoV-OC43]
agccccagaaggauguuuaug

SEQ ID NO: 3947274 - RNA, 15 nt, Human coronavirus OC43 [HCoV-OC43]
agccuuacuuuuguu

SEQ ID NO: 3947275 - RNA, 16 nt, Human coronavirus OC43 [HCoV-OC43]
aggcagacucauuuac

SEQ ID NO: 3947276 - RNA, 12 nt, Human coronavirus OC43 [HCoV-OC43]
agggaagagcca

SEQ ID NO: 3947277 - RNA, 20 nt, Human coronavirus OC43 [HCoV-OC43]
agguuauagcagacuauaga

SEQ ID NO: 3947278 - RNA, 16 nt, Human coronavirus OC43 [HCoV-OC43]
aguacuuuuguaaaua

SEQ ID NO: 3947279 - RNA, 16 nt, Human coronavirus OC43 [HCoV-OC43]
agucagacagaaaauu

SEQ ID NO: 3947280 - RNA, 13 nt, Human coronavirus OC43 [HCoV-OC43]
agugacccacagu

SEQ ID NO: 3947281 - RNA, 21 nt, Human coronavirus OC43 [HCoV-OC43]
auaaagacacugguguuauuu

SEQ ID NO: 3947282 - RNA, 22 nt, Human coronavirus OC43 [HCoV-OC43]
auagaggauuuacuuuuugaua

SEQ ID NO: 3947283 - RNA, 18 nt, Human coronavirus OC43 [HCoV-OC43]
auaguguuggagaaagug

SEQ ID NO: 3947284 - RNA, 21 nt, Human coronavirus OC43 [HCoV-OC43]
auauuaauaucccugauuuac

SEQ ID NO: 3947285 - RNA, 15 nt, Human coronavirus OC43 [HCoV-OC43]
aucagaauuuuggug

SEQ ID NO: 3947286 - RNA, 15 nt, Human coronavirus OC43 [HCoV-OC43]
aucgcagauguuuac

SEQ ID NO: 3947287 - RNA, 20 nt, Human coronavirus OC43 [HCoV-OC43]
augaaaacaauucuugguuc

SEQ ID NO: 3947288 - RNA, 16 nt, Human coronavirus OC43 [HCoV-OC43]
augaggguguuaauuu

SEQ ID NO: 3947289 - RNA, 11 nt, Human coronavirus OC43 [HCoV-OC43]
augauguaaaa

SEQ ID NO: 3947290 - RNA, 20 nt, Human coronavirus OC43 [HCoV-OC43]
auggacaccgcauuguugag

SEQ ID NO: 3947291 - RNA, 14 nt, Human coronavirus OC43 [HCoV-OC43]
auuaauuaguugaa

SEQ ID NO: 3947292 - RNA, 23 nt, Human coronavirus OC43 [HCoV-OC43]
auuacucaguuucaaaagggaaa

SEQ ID NO: 3947293 - RNA, 21 nt, Human coronavirus OC43 [HCoV-OC43]
auuauuauguggauuguguau

SEQ ID NO: 3947294 - RNA, 13 nt, Human coronavirus OC43 [HCoV-OC43]
auuguaauuauug

SEQ ID NO: 3947295 - RNA, 22 nt, Human coronavirus OC43 [HCoV-OC43]
auuucaaaugagcuauuguuaa

SEQ ID NO: 3947296 - RNA, 15 nt, Human coronavirus OC43 [HCoV-OC43]
auuugggcuauuugc

SEQ ID NO: 3947297 - RNA, 15 nt, Human coronavirus OC43 [HCoV-OC43]
auuugguuuuauaga

SEQ ID NO: 3947298 - RNA, 13 nt, Human coronavirus OC43 [HCoV-OC43]
auuuuaucaauuu

SEQ ID NO: 3947299 - RNA, 17 nt, Human coronavirus OC43 [HCoV-OC43]
caaccuuccugauuuua

SEQ ID NO: 3947300 - RNA, 13 nt, Human coronavirus OC43 [HCoV-OC43]
caagugcccaagg

SEQ ID NO: 3947301 - RNA, 17 nt, Human coronavirus OC43 [HCoV-OC43]
caaugcccuuuaugcua

SEQ ID NO: 3947302 - RNA, 23 nt, Human coronavirus OC43 [HCoV-OC43]
caaugcuuauaauaguacugcua

SEQ ID NO: 3947303 - RNA, 19 nt, Human coronavirus OC43 [HCoV-OC43]
cagcgucaacugcugccac

SEQ ID NO: 3947304 - RNA, 22 nt, Human coronavirus OC43 [HCoV-OC43]
cagguguuguuuccuguuuaua

SEQ ID NO: 3947305 - RNA, 18 nt, Human coronavirus OC43 [HCoV-OC43]
caguccuugauguggaug

SEQ ID NO: 3947306 - RNA, 19 nt, Human coronavirus OC43 [HCoV-OC43]
caguguuuugguaagagag

SEQ ID NO: 3947307 - RNA, 14 nt, Human coronavirus OC43 [HCoV-OC43]
cauacucugacggu

SEQ ID NO: 3947308 - RNA, 12 nt, Human coronavirus OC43 [HCoV-OC43]
cauaugcuguug

SEQ ID NO: 3947309 - RNA, 14 nt, Human coronavirus OC43 [HCoV-OC43]
cauuaacuauuuug

SEQ ID NO: 3947310 - RNA, 19 nt, Human coronavirus OC43 [HCoV-OC43]
cauuuguuuauugguuaca

SEQ ID NO: 3947311 - RNA, 13 nt, Human coronavirus OC43 [HCoV-OC43]
ccaauucuggcaa

SEQ ID NO: 3947312 - RNA, 17 nt, Human coronavirus OC43 [HCoV-OC43]
ccacuaaaccucagcaa

SEQ ID NO: 3947313 - RNA, 19 nt, Human coronavirus OC43 [HCoV-OC43]
ccagcauugcuauuucgga

SEQ ID NO: 3947314 - RNA, 22 nt, Human coronavirus OC43 [HCoV-OC43]
cccuauacugaagacaccucag

SEQ ID NO: 3947315 - RNA, 21 nt, Human coronavirus OC43 [HCoV-OC43]
cgcgcacauccagcagagccu

SEQ ID NO: 3947316 - RNA, 21 nt, Human coronavirus OC43 [HCoV-OC43]
cgucuuaccgcucuuaaugcu

SEQ ID NO: 3947317 - RNA, 17 nt, Human coronavirus OC43 [HCoV-OC43]
cuaaucaugauguaguu

SEQ ID NO: 3947318 - RNA, 12 nt, Human coronavirus OC43 [HCoV-OC43]
cuaauguuucug

SEQ ID NO: 3947319 - RNA, 23 nt, Human coronavirus OC43 [HCoV-OC43]
cuaauuuugagccauuuacuguu

SEQ ID NO: 3947320 - RNA, 14 nt, Human coronavirus OC43 [HCoV-OC43]
cuaccucucagcaa

SEQ ID NO: 3947321 - RNA, 15 nt, Human coronavirus OC43 [HCoV-OC43]
cuauagguaguacuu

SEQ ID NO: 3947322 - RNA, 19 nt, Human coronavirus OC43 [HCoV-OC43]
cucaggaaggucugcuccu

SEQ ID NO: 3947323 - RNA, 16 nt, Human coronavirus OC43 [HCoV-OC43]
cuccugguaagcaauc

SEQ ID NO: 3947324 - RNA, 14 nt, Human coronavirus OC43 [HCoV-OC43]
cucgcacccacagc

SEQ ID NO: 3947325 - RNA, 13 nt, Human coronavirus OC43 [HCoV-OC43]
cucugguguaaca

SEQ ID NO: 3947326 - RNA, 17 nt, Human coronavirus OC43 [HCoV-OC43]
cuggaaaucguucuggu

SEQ ID NO: 3947327 - RNA, 17 nt, Human coronavirus OC43 [HCoV-OC43]
cugguaauggcauccuc

SEQ ID NO: 3947328 - RNA, 17 nt, Human coronavirus OC43 [HCoV-OC43]
cuuaauaacccugcaua

SEQ ID NO: 3947329 - RNA, 15 nt, Human coronavirus OC43 [HCoV-OC43]
cuuacuaaucaugau

SEQ ID NO: 3947330 - RNA, 20 nt, Human coronavirus OC43 [HCoV-OC43]
cuugguguuuguguuaauua

SEQ ID NO: 3947331 - RNA, 14 nt, Human coronavirus OC43 [HCoV-OC43]
cuuuuuaugcauau

SEQ ID NO: 3947332 - RNA, 19 nt, Human coronavirus OC43 [HCoV-OC43]
gaaugcugauuauuuguau

SEQ ID NO: 3947333 - RNA, 20 nt, Human coronavirus OC43 [HCoV-OC43]
gacaccgcauuguugagaaa

SEQ ID NO: 3947334 - RNA, 13 nt, Human coronavirus OC43 [HCoV-OC43]
gaccaguacggca

SEQ ID NO: 3947335 - RNA, 18 nt, Human coronavirus OC43 [HCoV-OC43]
gagccaauucuggcaaua

SEQ ID NO: 3947336 - RNA, 20 nt, Human coronavirus OC43 [HCoV-OC43]
gauuguguauuuugugaaua

SEQ ID NO: 3947337 - RNA, 15 nt, Human coronavirus OC43 [HCoV-OC43]
gcaaccaucaggagg

SEQ ID NO: 3947338 - RNA, 20 nt, Human coronavirus OC43 [HCoV-OC43]
gcaauaaaagucuuaaauca

SEQ ID NO: 3947339 - RNA, 18 nt, Human coronavirus OC43 [HCoV-OC43]
gcagacucuuguuuacaa

SEQ ID NO: 3947340 - RNA, 18 nt, Human coronavirus OC43 [HCoV-OC43]
gcagcaaaauaagaguag

SEQ ID NO: 3947341 - RNA, 19 nt, Human coronavirus OC43 [HCoV-OC43]
gcagccugaugucuuuuau

SEQ ID NO: 3947342 - RNA, 23 nt, Human coronavirus OC43 [HCoV-OC43]
gcauggacaccgcauuguugaga

SEQ ID NO: 3947343 - RNA, 16 nt, Human coronavirus OC43 [HCoV-OC43]
auagauagagaagguu

SEQ ID NO: 3947344 - RNA, 18 nt, Human coronavirus OC43 [HCoV-OC43]
auagguaguacuuuugua

SEQ ID NO: 3947345 - RNA, 22 nt, Human coronavirus OC43 [HCoV-OC43]
auaguaagguuaagaaugguuu

SEQ ID NO: 3947346 - RNA, 13 nt, Human coronavirus OC43 [HCoV-OC43]
auauaaguguugc

SEQ ID NO: 3947347 - RNA, 22 nt, Human coronavirus OC43 [HCoV-OC43]
auauagaagcuuggcuuaauga

SEQ ID NO: 3947348 - RNA, 20 nt, Human coronavirus OC43 [HCoV-OC43]
auauugacggagucuacugg

SEQ ID NO: 3947349 - RNA, 19 nt, Human coronavirus OC43 [HCoV-OC43]
aucaugauguaguuuaugc

SEQ ID NO: 3947350 - RNA, 19 nt, Human coronavirus OC43 [HCoV-OC43]
aucauuagugcagaaugcu

SEQ ID NO: 3947351 - RNA, 15 nt, Human coronavirus OC43 [HCoV-OC43]
aucuagacuugaugc

SEQ ID NO: 3947352 - RNA, 17 nt, Human coronavirus OC43 [HCoV-OC43]
augaauauuauguaaaa

SEQ ID NO: 3947353 - RNA, 20 nt, Human coronavirus OC43 [HCoV-OC43]
augaggguguuaauuuuacg

SEQ ID NO: 3947354 - RNA, 20 nt, Human coronavirus OC43 [HCoV-OC43]
augaguccaaaaccacagcg

SEQ ID NO: 3947355 - RNA, 15 nt, Human coronavirus OC43 [HCoV-OC43]
augaguuuuacaaug

SEQ ID NO: 3947356 - RNA, 12 nt, Human coronavirus OC43 [HCoV-OC43]
augauauuugga

SEQ ID NO: 3947357 - RNA, 22 nt, Human coronavirus OC43 [HCoV-OC43]
augauuauggguuauuguuguu

SEQ ID NO: 3947358 - RNA, 14 nt, Human coronavirus OC43 [HCoV-OC43]
augcauauuuuaca

SEQ ID NO: 3947359 - RNA, 21 nt, Human coronavirus OC43 [HCoV-OC43]
auggagaagguuaaugaaugu

SEQ ID NO: 3947360 - RNA, 19 nt, Human coronavirus OC43 [HCoV-OC43]
auggcacugaagggaagug

SEQ ID NO: 3947361 - RNA, 20 nt, Human coronavirus OC43 [HCoV-OC43]
augguauuauuuuuaaugcu

SEQ ID NO: 3947362 - RNA, 20 nt, Human coronavirus OC43 [HCoV-OC43]
auguggaugacguuuaggua

SEQ ID NO: 3947363 - RNA, 22 nt, Human coronavirus OC43 [HCoV-OC43]
auguuuuugauacuuuuaauuu

SEQ ID NO: 3947364 - RNA, 19 nt, Human coronavirus OC43 [HCoV-OC43]
auuaaacucagugaaaaug

SEQ ID NO: 3947365 - RNA, 18 nt, Human coronavirus OC43 [HCoV-OC43]
auuaaagaucguguaaug

SEQ ID NO: 3947366 - RNA, 19 nt, Human coronavirus OC43 [HCoV-OC43]
auuaugcagcauguaaauc

SEQ ID NO: 3947367 - RNA, 13 nt, Human coronavirus OC43 [HCoV-OC43]
auuauuuuaauaa

SEQ ID NO: 3947368 - RNA, 19 nt, Human coronavirus OC43 [HCoV-OC43]
auucaagcuguuguuaaug

SEQ ID NO: 3947369 - RNA, 16 nt, Human coronavirus OC43 [HCoV-OC43]
auuccgacuagguuuc

SEQ ID NO: 3947370 - RNA, 19 nt, Human coronavirus OC43 [HCoV-OC43]
auucuugguucucuggaau

SEQ ID NO: 3947371 - RNA, 13 nt, Human coronavirus OC43 [HCoV-OC43]
auugaugcugcua

SEQ ID NO: 3947372 - RNA, 21 nt, Human coronavirus OC43 [HCoV-OC43]
auugcguauacgcauugaaua

SEQ ID NO: 3947373 - RNA, 21 nt, Human coronavirus OC43 [HCoV-OC43]
auuuaacaaugcccuuuaugc

SEQ ID NO: 3947374 - RNA, 15 nt, Human coronavirus OC43 [HCoV-OC43]
auuuaccugcugcua

SEQ ID NO: 3947375 - RNA, 22 nt, Human coronavirus OC43 [HCoV-OC43]
auuuauucuaguuagcugcaua

SEQ ID NO: 3947376 - RNA, 19 nt, Human coronavirus OC43 [HCoV-OC43]
auuucuguccguguaaauu

SEQ ID NO: 3947377 - RNA, 21 nt, Human coronavirus OC43 [HCoV-OC43]
auuuuuaggaguuuucacuuu

SEQ ID NO: 3947378 - RNA, 12 nt, Human coronavirus OC43 [HCoV-OC43]
auuuuuguugag

SEQ ID NO: 3947379 - RNA, 19 nt, Human coronavirus OC43 [HCoV-OC43]
aaaugcaaccguucuggua

SEQ ID NO: 3947380 - RNA, 15 nt, Human coronavirus OC43 [HCoV-OC43]
aacagccgauggcaa

SEQ ID NO: 3947381 - RNA, 21 nt, Human coronavirus OC43 [HCoV-OC43]
aacuauagaauugauacuacu

SEQ ID NO: 3947382 - RNA, 16 nt, Human coronavirus OC43 [HCoV-OC43]
aaucaagguagauuuu

SEQ ID NO: 3947383 - RNA, 21 nt, Human coronavirus OC43 [HCoV-OC43]
aaucaugauguaguuuaugca

SEQ ID NO: 3947384 - RNA, 17 nt, Human coronavirus OC43 [HCoV-OC43]
aaugaaggugcugaaug

SEQ ID NO: 3947385 - RNA, 21 nt, Human coronavirus OC43 [HCoV-OC43]
aaugaugaugaugcuugguuu

SEQ ID NO: 3947386 - RNA, 12 nt, Human coronavirus OC43 [HCoV-OC43]
aaugguuauuac

SEQ ID NO: 3947387 - RNA, 20 nt, Human coronavirus OC43 [HCoV-OC43]
acaaguguaauauuuuugcu

SEQ ID NO: 3947388 - RNA, 15 nt, Human coronavirus OC43 [HCoV-OC43]
acagacacugguguu

SEQ ID NO: 3947389 - RNA, 17 nt, Human coronavirus OC43 [HCoV-OC43]
acaguuccccauucuug

SEQ ID NO: 3947390 - RNA, 14 nt, Human coronavirus OC43 [HCoV-OC43]
accaagguuauuaa

SEQ ID NO: 3947391 - RNA, 16 nt, Human coronavirus OC43 [HCoV-OC43]
accaguuauuuugcuu

SEQ ID NO: 3947392 - RNA, 23 nt, Human coronavirus OC43 [HCoV-OC43]
accaucaggagggaauguuguac

SEQ ID NO: 3947393 - RNA, 16 nt, Human coronavirus OC43 [HCoV-OC43]
acccccauaauuauuc

SEQ ID NO: 3947394 - RNA, 17 nt, Human coronavirus OC43 [HCoV-OC43]
accugcgcuguuaauua

SEQ ID NO: 3947395 - RNA, 15 nt, Human coronavirus OC43 [HCoV-OC43]
acuacaccagcacca

SEQ ID NO: 3947396 - RNA, 14 nt, Human coronavirus OC43 [HCoV-OC43]
acuuuagaauauug

SEQ ID NO: 3947397 - RNA, 15 nt, Human coronavirus OC43 [HCoV-OC43]
agaauuuugguggug

SEQ ID NO: 3947398 - RNA, 13 nt, Human coronavirus OC43 [HCoV-OC43]
agacaccucagaa

SEQ ID NO: 3947399 - RNA, 22 nt, Human coronavirus OC43 [HCoV-OC43]
agacaggaguuaaauguuuaug

SEQ ID NO: 3947400 - RNA, 22 nt, Human coronavirus OC43 [HCoV-OC43]
agagaguugacugcagaggaca

SEQ ID NO: 3947401 - RNA, 20 nt, Human coronavirus OC43 [HCoV-OC43]
agauuagaguuggccaaagu

SEQ ID NO: 3947402 - RNA, 14 nt, Human coronavirus OC43 [HCoV-OC43]
agccccgccagaag

SEQ ID NO: 3947403 - RNA, 11 nt, Human coronavirus OC43 [HCoV-OC43]
aggaugucuuu

SEQ ID NO: 3947404 - RNA, 14 nt, Human coronavirus OC43 [HCoV-OC43]
aggcugaugucaau

SEQ ID NO: 3947405 - RNA, 17 nt, Human coronavirus OC43 [HCoV-OC43]
aggucaacaaauuauuu

SEQ ID NO: 3947406 - RNA, 22 nt, Human coronavirus OC43 [HCoV-OC43]
agguguaccauuuuauuuaaau

SEQ ID NO: 3947407 - RNA, 19 nt, Human coronavirus OC43 [HCoV-OC43]
agguuuacaauuucaaauu

SEQ ID NO: 3947408 - RNA, 19 nt, Human coronavirus OC43 [HCoV-OC43]
aguagagcguccucuggaa

SEQ ID NO: 3947409 - RNA, 14 nt, Human coronavirus OC43 [HCoV-OC43]
auaaaaguguugau

SEQ ID NO: 3947410 - RNA, 23 nt, Human coronavirus OC43 [HCoV-OC43]
auaaagacacugguguuauuuau

SEQ ID NO: 3947411 - RNA, 17 nt, Human coronavirus OC43 [HCoV-OC43]
auaaguacugauacugu

SEQ ID NO: 3947412 - RNA, 21 nt, Human coronavirus OC43 [HCoV-OC43]
auaaguacugauacuguugau

SEQ ID NO: 3947413 - RNA, 21 nt, Human coronavirus OC43 [HCoV-OC43]
auacuuagugguuuguuauau

SEQ ID NO: 3947414 - RNA, 22 nt, Human coronavirus OC43 [HCoV-OC43]
caaaagccgcgugcagcaaaau

SEQ ID NO: 3947415 - RNA, 18 nt, Human coronavirus OC43 [HCoV-OC43]
caacggcuuuugcuguua

SEQ ID NO: 3947416 - RNA, 22 nt, Human coronavirus OC43 [HCoV-OC43]
caccaccuacugguguuuauga

SEQ ID NO: 3947417 - RNA, 16 nt, Human coronavirus OC43 [HCoV-OC43]
cagaaggauguuuaug

SEQ ID NO: 3947418 - RNA, 21 nt, Human coronavirus OC43 [HCoV-OC43]
cagacacugguguuguuacua

SEQ ID NO: 3947419 - RNA, 19 nt, Human coronavirus OC43 [HCoV-OC43]
cagagccucuagugcagga

SEQ ID NO: 3947420 - RNA, 12 nt, Human coronavirus OC43 [HCoV-OC43]
caggagggaaug

SEQ ID NO: 3947421 - RNA, 16 nt, Human coronavirus OC43 [HCoV-OC43]
caggaguuaaauguuu

SEQ ID NO: 3947422 - RNA, 23 nt, Human coronavirus OC43 [HCoV-OC43]
caguaauuaguaaaugaaugaag

SEQ ID NO: 3947423 - RNA, 13 nt, Human coronavirus OC43 [HCoV-OC43]
cauacugccaaag

SEQ ID NO: 3947424 - RNA, 17 nt, Human coronavirus OC43 [HCoV-OC43]
cauauugcaauuuggau

SEQ ID NO: 3947425 - RNA, 14 nt, Human coronavirus OC43 [HCoV-OC43]
cauccagcagagcc

SEQ ID NO: 3947426 - RNA, 23 nt, Human coronavirus OC43 [HCoV-OC43]
cauuaugauaaauauuuuggagu

SEQ ID NO: 3947427 - RNA, 14 nt, Human coronavirus OC43 [HCoV-OC43]
ccacuaaaccucag

SEQ ID NO: 3947428 - RNA, 13 nt, Human coronavirus OC43 [HCoV-OC43]
ccauauguuuaua

SEQ ID NO: 3947429 - RNA, 15 nt, Human coronavirus OC43 [HCoV-OC43]
ccauuauuaugugga

SEQ ID NO: 3947430 - RNA, 13 nt, Human coronavirus OC43 [HCoV-OC43]
ccauuuguuuauu

SEQ ID NO: 3947431 - RNA, 14 nt, Human coronavirus OC43 [HCoV-OC43]
cgccagaagaggag

SEQ ID NO: 3947432 - RNA, 15 nt, Human coronavirus OC43 [HCoV-OC43]
cguuuuucuuuggau

SEQ ID NO: 3947433 - RNA, 16 nt, Human coronavirus OC43 [HCoV-OC43]
cguuuuucuuuggauc

SEQ ID NO: 3947434 - RNA, 20 nt, Human coronavirus OC43 [HCoV-OC43]
cuaaguuuuuguuuaauguu

SEQ ID NO: 3947435 - RNA, 20 nt, Human coronavirus OC43 [HCoV-OC43]
cuauagauaaguuugcuaua

SEQ ID NO: 3947436 - RNA, 12 nt, Human coronavirus OC43 [HCoV-OC43]
cuaucugggaac

SEQ ID NO: 3947437 - RNA, 14 nt, Human coronavirus OC43 [HCoV-OC43]
cucagaauuagaag

SEQ ID NO: 3947438 - RNA, 22 nt, Human coronavirus OC43 [HCoV-OC43]
cucuaccccuauggcagauguc

SEQ ID NO: 3947439 - RNA, 21 nt, Human coronavirus OC43 [HCoV-OC43]
cucuuaaugcuuauguuucuc

SEQ ID NO: 3947440 - RNA, 19 nt, Human coronavirus OC43 [HCoV-OC43]
cugugauaacauuaaugcc

SEQ ID NO: 3947441 - RNA, 19 nt, Human coronavirus OC43 [HCoV-OC43]
cuucuuaagaagauggaug

SEQ ID NO: 3947442 - RNA, 16 nt, Human coronavirus OC43 [HCoV-OC43]
cuugguucucuggaau

SEQ ID NO: 3947443 - RNA, 23 nt, Human coronavirus OC43 [HCoV-OC43]
cuuguacuugccgaccacaagca

SEQ ID NO: 3947444 - RNA, 21 nt, Human coronavirus OC43 [HCoV-OC43]
cuuguuagaucuuuuugcaau

SEQ ID NO: 3947445 - RNA, 21 nt, Human coronavirus OC43 [HCoV-OC43]
cuuuggcugccaccucugcua

SEQ ID NO: 3947446 - RNA, 16 nt, Human coronavirus OC43 [HCoV-OC43]
gaaaauguugauuuua

SEQ ID NO: 3947447 - RNA, 13 nt, Human coronavirus OC43 [HCoV-OC43]
gaagcugauuuuu

SEQ ID NO: 3947448 - RNA, 16 nt, Human coronavirus OC43 [HCoV-OC43]
gacaccucagaaauau

SEQ ID NO: 3947449 - RNA, 19 nt, Human coronavirus OC43 [HCoV-OC43]
gaugcaacuaauucugcuu

SEQ ID NO: 3947450 - RNA, 12 nt, Human coronavirus OC43 [HCoV-OC43]
gauuauuauuau

SEQ ID NO: 3947451 - RNA, 18 nt, Human coronavirus OC43 [HCoV-OC43]
gauuauuuguauuuucau

SEQ ID NO: 3947452 - RNA, 19 nt, Human coronavirus OC43 [HCoV-OC43]
gcagaauuuaucugggaau

SEQ ID NO: 3947453 - RNA, 15 nt, Human coronavirus OC43 [HCoV-OC43]
gcagcauguaaauca

SEQ ID NO: 3947454 - RNA, 10 nt, Human coronavirus OC43 [HCoV-OC43]
gcagugccca

SEQ ID NO: 3947455 - RNA, 14 nt, Human coronavirus OC43 [HCoV-OC43]
gcauccucaagugg

SEQ ID NO: 3947456 - RNA, 15 nt, Human coronavirus OC43 [HCoV-OC43]
gcguaguagagccaa

SEQ ID NO: 3947457 - RNA, 13 nt, Human coronavirus OC43 [HCoV-OC43]
gcuauaacuauag

SEQ ID NO: 3947458 - RNA, 24 nt, Human coronavirus OC43 [HCoV-OC43]
gcuauuucggaauauuaaaugcaa

SEQ ID NO: 3947459 - RNA, 14 nt, Human coronavirus OC43 [HCoV-OC43]
ggaaaauguugauu

SEQ ID NO: 3947460 - RNA, 12 nt, Human coronavirus OC43 [HCoV-OC43]
ggacaaggugug

SEQ ID NO: 3947461 - RNA, 22 nt, Human coronavirus OC43 [HCoV-OC43]
ggacccaaguagcgaugaggcu

SEQ ID NO: 3947462 - RNA, 17 nt, Human coronavirus OC43 [HCoV-OC43]
ggcccuaaucagaauuu

SEQ ID NO: 3947463 - RNA, 13 nt, Human coronavirus OC43 [HCoV-OC43]
gguuucacagcau

SEQ ID NO: 3947464 - RNA, 17 nt, Human coronavirus OC43 [HCoV-OC43]
guaaaauuuagugcagc

SEQ ID NO: 3947465 - RNA, 16 nt, Human coronavirus OC43 [HCoV-OC43]
guacagguuguugauu

SEQ ID NO: 3947466 - RNA, 23 nt, Human coronavirus OC43 [HCoV-OC43]
guacugauacuguugauguuacu

SEQ ID NO: 3947467 - RNA, 18 nt, Human coronavirus OC43 [HCoV-OC43]
guaggcaguuuuaugagu

SEQ ID NO: 3947468 - RNA, 15 nt, Human coronavirus OC43 [HCoV-OC43]
guauaaaacuaggua

SEQ ID NO: 3947469 - RNA, 15 nt, Human coronavirus OC43 [HCoV-OC43]
guaugaugaauauga

SEQ ID NO: 3947470 - RNA, 22 nt, Human coronavirus OC43 [HCoV-OC43]
gugcacauauaagcgugguuuu

SEQ ID NO: 3947471 - RNA, 18 nt, Human coronavirus OC43 [HCoV-OC43]
gugcuauaagugcuucuu

SEQ ID NO: 3947472 - RNA, 15 nt, Human coronavirus OC43 [HCoV-OC43]
gugugcaaaguuaua

SEQ ID NO: 3947473 - RNA, 18 nt, Human coronavirus OC43 [HCoV-OC43]
guucagauuguaaucaua

SEQ ID NO: 3947474 - RNA, 20 nt, Human coronavirus OC43 [HCoV-OC43]
uaaauacuacguuguuucuu

SEQ ID NO: 3947475 - RNA, 22 nt, Human coronavirus OC43 [HCoV-OC43]
uaacuauagauaaguuugcuau

SEQ ID NO: 3947476 - RNA, 15 nt, Human coronavirus OC43 [HCoV-OC43]
uaauauuuuugcuaa

SEQ ID NO: 3947477 - RNA, 11 nt, Human coronavirus OC43 [HCoV-OC43]
uaaugcuguug

SEQ ID NO: 3947478 - RNA, 17 nt, Human coronavirus OC43 [HCoV-OC43]
uaaugguauuuuugcua

SEQ ID NO: 3947479 - RNA, 20 nt, Human coronavirus OC43 [HCoV-OC43]
uaauuauggccaauuggaag

SEQ ID NO: 3947480 - RNA, 22 nt, Human coronavirus OC43 [HCoV-OC43]
uaauuauuguaguuuuguuguu

SEQ ID NO: 3947481 - RNA, 18 nt, Human coronavirus OC43 [HCoV-OC43]
uacaggaaaaguuuucau

SEQ ID NO: 3947482 - RNA, 20 nt, Human coronavirus OC43 [HCoV-OC43]
uacauccuauagugugguag

SEQ ID NO: 3947483 - RNA, 16 nt, Human coronavirus OC43 [HCoV-OC43]
uacuaaguaugucaca

SEQ ID NO: 3947484 - RNA, 18 nt, Human coronavirus OC43 [HCoV-OC43]
uacugaagacaccucaga

SEQ ID NO: 3947485 - RNA, 17 nt, Human coronavirus OC43 [HCoV-OC43]
uagagcguccucuggaa

SEQ ID NO: 3947486 - RNA, 20 nt, Human coronavirus OC43 [HCoV-OC43]
uagauaugaaaggaacaaug

SEQ ID NO: 3947487 - RNA, 20 nt, Human coronavirus OC43 [HCoV-OC43]
uauaacggcgcaauuagguu

SEQ ID NO: 3947488 - RNA, 18 nt, Human coronavirus OC43 [HCoV-OC43]
uauaauaguacugcuauu

SEQ ID NO: 3947489 - RNA, 21 nt, Human coronavirus OC43 [HCoV-OC43]
uauagugaguucccugcuaua

SEQ ID NO: 3947490 - RNA, 23 nt, Human coronavirus OC43 [HCoV-OC43]
uauugcaacaacucucuaauaga

SEQ ID NO: 3947491 - RNA, 18 nt, Human coronavirus OC43 [HCoV-OC43]
ucaacaacaagaugguau

SEQ ID NO: 3947492 - RNA, 13 nt, Human coronavirus OC43 [HCoV-OC43]
ucaguuucaaaag

SEQ ID NO: 3947493 - RNA, 15 nt, Human coronavirus OC43 [HCoV-OC43]
uccugacgagcccca

SEQ ID NO: 3947494 - RNA, 20 nt, Human coronavirus OC43 [HCoV-OC43]
uccuuaccaacggcuuuugc

SEQ ID NO: 3947495 - RNA, 16 nt, Human coronavirus OC43 [HCoV-OC43]
ucgaauacaaaguauu

SEQ ID NO: 3947496 - RNA, 14 nt, Human coronavirus OC43 [HCoV-OC43]
ucuauuuauguguu

SEQ ID NO: 3947497 - RNA, 17 nt, Human coronavirus OC43 [HCoV-OC43]
ucuggcaauagaacccc

SEQ ID NO: 3947498 - RNA, 18 nt, Human coronavirus OC43 [HCoV-OC43]
ucuuaccgcucuuaaugc

SEQ ID NO: 3947499 - RNA, 17 nt, Human coronavirus OC43 [HCoV-OC43]
ugacgagccccagaagg

SEQ ID NO: 3947500 - RNA, 18 nt, Human coronavirus OC43 [HCoV-OC43]
ugacgagccccagaagga

SEQ ID NO: 3947501 - RNA, 16 nt, Human coronavirus OC43 [HCoV-OC43]
ugagccauuuacuguu

SEQ ID NO: 3947502 - RNA, 20 nt, Human coronavirus OC43 [HCoV-OC43]
ugcagaacucgcacccacag

SEQ ID NO: 3947503 - RNA, 17 nt, Human coronavirus OC43 [HCoV-OC43]
ugccaggcagucugaua

SEQ ID NO: 3947504 - RNA, 17 nt, Human coronavirus OC43 [HCoV-OC43]
gcccaagggaagagcca

SEQ ID NO: 3947505 - RNA, 15 nt, Human coronavirus OC43 [HCoV-OC43]
gcccuauacugaaga

SEQ ID NO: 3947506 - RNA, 16 nt, Human coronavirus OC43 [HCoV-OC43]
gcuaagucaaaaucaa

SEQ ID NO: 3947507 - RNA, 16 nt, Human coronavirus OC43 [HCoV-OC43]
gcuacagguacuuaua

SEQ ID NO: 3947508 - RNA, 12 nt, Human coronavirus OC43 [HCoV-OC43]
gcuauuucuguu

SEQ ID NO: 3947509 - RNA, 17 nt, Human coronavirus OC43 [HCoV-OC43]
ggaacuagugacccaca

SEQ ID NO: 3947510 - RNA, 19 nt, Human coronavirus OC43 [HCoV-OC43]
ggaauccugacgagcccca

SEQ ID NO: 3947511 - RNA, 22 nt, Human coronavirus OC43 [HCoV-OC43]
ggaugccacuaaaccucagcaa

SEQ ID NO: 3947512 - RNA, 16 nt, Human coronavirus OC43 [HCoV-OC43]
ggcucaggaaggucug

SEQ ID NO: 3947513 - RNA, 23 nt, Human coronavirus OC43 [HCoV-OC43]
guaauauggaggaguuuauucaa

SEQ ID NO: 3947514 - RNA, 18 nt, Human coronavirus OC43 [HCoV-OC43]
guaauccaaacauuauga

SEQ ID NO: 3947515 - RNA, 20 nt, Human coronavirus OC43 [HCoV-OC43]
guaauccaaacauuaugagu

SEQ ID NO: 3947516 - RNA, 16 nt, Human coronavirus OC43 [HCoV-OC43]
guagaaggacaaggug

SEQ ID NO: 3947517 - RNA, 19 nt, Human coronavirus OC43 [HCoV-OC43]
guagagcguccucuggaaa

SEQ ID NO: 3947518 - RNA, 19 nt, Human coronavirus OC43 [HCoV-OC43]
guaucgcagccuuacuuuu

SEQ ID NO: 3947519 - RNA, 15 nt, Human coronavirus OC43 [HCoV-OC43]
gucaauauuauuuua

SEQ ID NO: 3947520 - RNA, 16 nt, Human coronavirus OC43 [HCoV-OC43]
gugcugaaugagaauu

SEQ ID NO: 3947521 - RNA, 15 nt, Human coronavirus OC43 [HCoV-OC43]
guggucauaagaaug

SEQ ID NO: 3947522 - RNA, 19 nt, Human coronavirus OC43 [HCoV-OC43]
gugucaaaagccaaucauc

SEQ ID NO: 3947523 - RNA, 18 nt, Human coronavirus OC43 [HCoV-OC43]
guuacuauauugaaggcu

SEQ ID NO: 3947524 - RNA, 18 nt, Human coronavirus OC43 [HCoV-OC43]
guuaucgguuuacuaauu

SEQ ID NO: 3947525 - RNA, 15 nt, Human coronavirus OC43 [HCoV-OC43]
guucugguaauggca

SEQ ID NO: 3947526 - RNA, 13 nt, Human coronavirus OC43 [HCoV-OC43]
guucuuuuaaaac

SEQ ID NO: 3947527 - RNA, 18 nt, Human coronavirus OC43 [HCoV-OC43]
guuuagaaauguucaaac

SEQ ID NO: 3947528 - RNA, 20 nt, Human coronavirus OC43 [HCoV-OC43]
guuuuacuagcauacuuagu

SEQ ID NO: 3947529 - RNA, 16 nt, Human coronavirus OC43 [HCoV-OC43]
uaaauuucugugguaa

SEQ ID NO: 3947530 - RNA, 19 nt, Human coronavirus OC43 [HCoV-OC43]
uaauguguaucuuggccuu

SEQ ID NO: 3947531 - RNA, 18 nt, Human coronavirus OC43 [HCoV-OC43]
uacugaagcuaaggggua

SEQ ID NO: 3947532 - RNA, 11 nt, Human coronavirus OC43 [HCoV-OC43]
uagaaauguuc

SEQ ID NO: 3947533 - RNA, 15 nt, Human coronavirus OC43 [HCoV-OC43]
uagugacccacaguu

SEQ ID NO: 3947534 - RNA, 17 nt, Human coronavirus OC43 [HCoV-OC43]
uauaacuauagguagua

SEQ ID NO: 3947535 - RNA, 18 nt, Human coronavirus OC43 [HCoV-OC43]
uauaaguacugauacugu

SEQ ID NO: 3947536 - RNA, 19 nt, Human coronavirus OC43 [HCoV-OC43]
uauauugaaggcucaggaa

SEQ ID NO: 3947537 - RNA, 21 nt, Human coronavirus OC43 [HCoV-OC43]
uaucaacccccauaauuauuc

SEQ ID NO: 3947538 - RNA, 15 nt, Human coronavirus OC43 [HCoV-OC43]
uaucagguuguuuau

SEQ ID NO: 3947539 - RNA, 13 nt, Human coronavirus OC43 [HCoV-OC43]
uauuaauggacau

SEQ ID NO: 3947540 - RNA, 21 nt, Human coronavirus OC43 [HCoV-OC43]
uauucaaacaagcucuccuaa

SEQ ID NO: 3947541 - RNA, 19 nt, Human coronavirus OC43 [HCoV-OC43]
ucaagcuguuguuaaugca

SEQ ID NO: 3947542 - RNA, 17 nt, Human coronavirus OC43 [HCoV-OC43]
ucacacuauuaugucau

SEQ ID NO: 3947543 - RNA, 19 nt, Human coronavirus OC43 [HCoV-OC43]
uccugacgagccccagaag

SEQ ID NO: 3947544 - RNA, 13 nt, Human coronavirus OC43 [HCoV-OC43]
ucgcacccacagc

SEQ ID NO: 3947545 - RNA, 14 nt, Human coronavirus OC43 [HCoV-OC43]
ucuuucugauuuua

SEQ ID NO: 3947546 - RNA, 18 nt, Human coronavirus OC43 [HCoV-OC43]
ugaaugaaguuaauuaug

SEQ ID NO: 3947547 - RNA, 17 nt, Human coronavirus OC43 [HCoV-OC43]
ugccacuaaaccucagc

SEQ ID NO: 3947548 - RNA, 17 nt, Human coronavirus OC43 [HCoV-OC43]
ugcccaagggaagagcc

SEQ ID NO: 3947549 - RNA, 13 nt, Human coronavirus OC43 [HCoV-OC43]
uggagaaauguua

SEQ ID NO: 3947550 - RNA, 21 nt, Human coronavirus OC43 [HCoV-OC43]
uggcuauucuuuggcagauuu

SEQ ID NO: 3947551 - RNA, 16 nt, Human coronavirus OC43 [HCoV-OC43]
uguaauguauaguguu

SEQ ID NO: 3947552 - RNA, 17 nt, Human coronavirus OC43 [HCoV-OC43]
ugucucagaauuagaag

SEQ ID NO: 3947553 - RNA, 17 nt, Human coronavirus OC43 [HCoV-OC43]
uguguauuuaaauacua

SEQ ID NO: 3947554 - RNA, 20 nt, Human coronavirus OC43 [HCoV-OC43]
uuaacuaucaauuuccuaaa

SEQ ID NO: 3947555 - RNA, 14 nt, Human coronavirus OC43 [HCoV-OC43]
uuaacuugugauaa

SEQ ID NO: 3947556 - RNA, 17 nt, Human coronavirus OC43 [HCoV-OC43]
uuaagaugauuauuuug

SEQ ID NO: 3947557 - RNA, 15 nt, Human coronavirus OC43 [HCoV-OC43]
uuaauuauggccaau

SEQ ID NO: 3947558 - RNA, 16 nt, Human coronavirus OC43 [HCoV-OC43]
uuaauuucaauguaga

SEQ ID NO: 3947559 - RNA, 22 nt, Human coronavirus OC43 [HCoV-OC43]
uuagaccauaaucuaaacaugu

SEQ ID NO: 3947560 - RNA, 22 nt, Human coronavirus OC43 [HCoV-OC43]
uuauauggaccuuaauccuguu

SEQ ID NO: 3947561 - RNA, 22 nt, Human coronavirus OC43 [HCoV-OC43]
uuauguggauuguguauuuugu

SEQ ID NO: 3947562 - RNA, 19 nt, Human coronavirus OC43 [HCoV-OC43]
uuauguuaaguccaaaguc

SEQ ID NO: 3947563 - RNA, 14 nt, Human coronavirus OC43 [HCoV-OC43]
uucaacccagaaac

SEQ ID NO: 3947564 - RNA, 22 nt, Human coronavirus OC43 [HCoV-OC43]
uucaacuuugcgguauguguaa

SEQ ID NO: 3947565 - RNA, 22 nt, Human coronavirus OC43 [HCoV-OC43]
uugaauaagccccgccagaaga

SEQ ID NO: 3947566 - RNA, 15 nt, Human coronavirus OC43 [HCoV-OC43]
uugaauaauguguau

SEQ ID NO: 3947567 - RNA, 17 nt, Human coronavirus OC43 [HCoV-OC43]
uugcagugcccaaaagc

SEQ ID NO: 3947568 - RNA, 12 nt, Human coronavirus OC43 [HCoV-OC43]
uuguuaaugcaa

SEQ ID NO: 3947569 - RNA, 15 nt, Human coronavirus OC43 [HCoV-OC43]
uuugaguuuguagaa

SEQ ID NO: 3947570 - RNA, 12 nt, Human coronavirus OC43 [HCoV-OC43]
cauugcuauuuc

SEQ ID NO: 3947571 - RNA, 22 nt, Human coronavirus OC43 [HCoV-OC43]
ccagcaccaguuuauaucugga

SEQ ID NO: 3947572 - RNA, 20 nt, Human coronavirus OC43 [HCoV-OC43]
ccuauuaauggacauuugga

SEQ ID NO: 3947573 - RNA, 20 nt, Human coronavirus OC43 [HCoV-OC43]
cgcauugaauaauguguauc

SEQ ID NO: 3947574 - RNA, 19 nt, Human coronavirus OC43 [HCoV-OC43]
cuaagcauacugccaaaga

SEQ ID NO: 3947575 - RNA, 16 nt, Human coronavirus OC43 [HCoV-OC43]
cuaaucagaauuuugg

SEQ ID NO: 3947576 - RNA, 17 nt, Human coronavirus OC43 [HCoV-OC43]
cuauaaaaguguugaug

SEQ ID NO: 3947577 - RNA, 19 nt, Human coronavirus OC43 [HCoV-OC43]
cuauggagaagguuaauga

SEQ ID NO: 3947578 - RNA, 17 nt, Human coronavirus OC43 [HCoV-OC43]
cuauguugguguuuaug

SEQ ID NO: 3947579 - RNA, 23 nt, Human coronavirus OC43 [HCoV-OC43]
cucaguuucaaaagggaaaggag

SEQ ID NO: 3947580 - RNA, 15 nt, Human coronavirus OC43 [HCoV-OC43]
cuccuauaaguacug

SEQ ID NO: 3947581 - RNA, 19 nt, Human coronavirus OC43 [HCoV-OC43]
cucucuaucagaauggaug

SEQ ID NO: 3947582 - RNA, 19 nt, Human coronavirus OC43 [HCoV-OC43]
cugcagguacuaauuauuu

SEQ ID NO: 3947583 - RNA, 20 nt, Human coronavirus OC43 [HCoV-OC43]
cugcuauagaggauuuacuu

SEQ ID NO: 3947584 - RNA, 16 nt, Human coronavirus OC43 [HCoV-OC43]
cugggucgcuagcaac

SEQ ID NO: 3947585 - RNA, 19 nt, Human coronavirus OC43 [HCoV-OC43]
cugguacagacacaacaga

SEQ ID NO: 3947586 - RNA, 20 nt, Human coronavirus OC43 [HCoV-OC43]
cuguucgggucuugcuguua

SEQ ID NO: 3947587 - RNA, 17 nt, Human coronavirus OC43 [HCoV-OC43]
cuuccaguagaucugcu

SEQ ID NO: 3947588 - RNA, 15 nt, Human coronavirus OC43 [HCoV-OC43]
cuugcuguuaaaagu

SEQ ID NO: 3947589 - RNA, 22 nt, Human coronavirus OC43 [HCoV-OC43]
cuugguguuuguguuaauuaug

SEQ ID NO: 3947590 - RNA, 13 nt, Human coronavirus OC43 [HCoV-OC43]
gaaaaguuuucau

SEQ ID NO: 3947591 - RNA, 15 nt, Human coronavirus OC43 [HCoV-OC43]
gaaaaugauaauaua

SEQ ID NO: 3947592 - RNA, 16 nt, Human coronavirus OC43 [HCoV-OC43]
gaauggaauuuuucuu

SEQ ID NO: 3947593 - RNA, 19 nt, Human coronavirus OC43 [HCoV-OC43]
gacaagugcccaagggaag

SEQ ID NO: 3947594 - RNA, 15 nt, Human coronavirus OC43 [HCoV-OC43]
gagaaauaauaucua

SEQ ID NO: 3947595 - RNA, 16 nt, Human coronavirus OC43 [HCoV-OC43]
gagcguccucuggaaa

SEQ ID NO: 3947596 - RNA, 16 nt, Human coronavirus OC43 [HCoV-OC43]
gaggcaauucuuguac

SEQ ID NO: 3947597 - RNA, 21 nt, Human coronavirus OC43 [HCoV-OC43]
gauacagguguuguuuccugu

SEQ ID NO: 3947598 - RNA, 15 nt, Human coronavirus OC43 [HCoV-OC43]
gauacuagugguuuu

SEQ ID NO: 3947599 - RNA, 20 nt, Human coronavirus OC43 [HCoV-OC43]
gauaugaaaggaacaaugua

SEQ ID NO: 3947600 - RNA, 16 nt, Human coronavirus OC43 [HCoV-OC43]
gaugguaugaugaaua

SEQ ID NO: 3947601 - RNA, 19 nt, Human coronavirus OC43 [HCoV-OC43]
gauuauauaaauguuacau

SEQ ID NO: 3947602 - RNA, 17 nt, Human coronavirus OC43 [HCoV-OC43]
gcacaacacuguuucaa

SEQ ID NO: 3947603 - RNA, 16 nt, Human coronavirus OC43 [HCoV-OC43]
gcagugcccaaaagcc

SEQ ID NO: 3947604 - RNA, 22 nt, Human coronavirus OC43 [HCoV-OC43]
gcauucgcuaauacuguagagg

SEQ ID NO: 3947605 - RNA, 15 nt, Human coronavirus OC43 [HCoV-OC43]
gccaauucuggcaau

SEQ ID NO: 3947606 - RNA, 17 nt, Human coronavirus OC43 [HCoV-OC43]
gccuuacuuuuguuaau

SEQ ID NO: 3947607 - RNA, 17 nt, Human coronavirus OC43 [HCoV-OC43]
gcuaagggguacuggua

SEQ ID NO: 3947608 - RNA, 15 nt, Human coronavirus OC43 [HCoV-OC43]
gcuaccucucagcaa

SEQ ID NO: 3947609 - RNA, 18 nt, Human coronavirus OC43 [HCoV-OC43]
gcuagucuuguucuggca

SEQ ID NO: 3947610 - RNA, 20 nt, Human coronavirus OC43 [HCoV-OC43]
gcuagucuuguucuggcaaa

SEQ ID NO: 3947611 - RNA, 20 nt, Human coronavirus OC43 [HCoV-OC43]
gcuaugcuuguuuuacuauu

SEQ ID NO: 3947612 - RNA, 20 nt, Human coronavirus OC43 [HCoV-OC43]
gcucuccuaaaguuacuauu

SEQ ID NO: 3947613 - RNA, 18 nt, Human coronavirus OC43 [HCoV-OC43]
ggaucgcguaguagagcc

SEQ ID NO: 3947614 - RNA, 14 nt, Human coronavirus OC43 [HCoV-OC43]
ggcaucugguggua

SEQ ID NO: 3947615 - RNA, 19 nt, Human coronavirus OC43 [HCoV-OC43]
ggugcccucuccauuaaau

SEQ ID NO: 3947616 - RNA, 12 nt, Human coronavirus OC43 [HCoV-OC43]
gguucucuggaa

SEQ ID NO: 3947617 - RNA, 14 nt, Human coronavirus OC43 [HCoV-OC43]
gguucucuggaauu

SEQ ID NO: 3947618 - RNA, 19 nt, Human coronavirus OC43 [HCoV-OC43]
gguuuuaaugucucagaau

SEQ ID NO: 3947619 - RNA, 24 nt, Human coronavirus OC43 [HCoV-OC43]
guaaauaauacuuggauguacacu

SEQ ID NO: 3947620 - RNA, 19 nt, Human coronavirus OC43 [HCoV-OC43]
guaccacuuuguauuuuua

SEQ ID NO: 3947621 - RNA, 19 nt, Human coronavirus OC43 [HCoV-OC43]
guacuggcuauucuuuggc

SEQ ID NO: 3947622 - RNA, 23 nt, Human coronavirus OC43 [HCoV-OC43]
guaguacaaccacguacaaucaa

SEQ ID NO: 3947623 - RNA, 22 nt, Human coronavirus OC43 [HCoV-OC43]
guaucagguuguuuauuagaac

SEQ ID NO: 3947624 - RNA, 15 nt, Human coronavirus OC43 [HCoV-OC43]
guaugagugauuuua

SEQ ID NO: 3947625 - RNA, 17 nt, Human coronavirus OC43 [HCoV-OC43]
gucccagcuacugaagc

SEQ ID NO: 3947626 - RNA, 17 nt, Human coronavirus OC43 [HCoV-OC43]
gucugcagacucuuguu

SEQ ID NO: 3947627 - RNA, 14 nt, Human coronavirus OC43 [HCoV-OC43]
guggcauuuuuggc

SEQ ID NO: 3947628 - RNA, 18 nt, Human coronavirus OC43 [HCoV-OC43]
gugguaaugguaaucaua

SEQ ID NO: 3947629 - RNA, 22 nt, Human coronavirus OC43 [HCoV-OC43]
gugugccuauugcaccaggagu

SEQ ID NO: 3947630 - RNA, 16 nt, Human coronavirus OC43 [HCoV-OC43]
guuaaugcgacuuauu

SEQ ID NO: 3947631 - RNA, 18 nt, Human coronavirus OC43 [HCoV-OC43]
guuaaugcgacuuauuau

SEQ ID NO: 3947632 - RNA, 22 nt, Human coronavirus OC43 [HCoV-OC43]
guuaauuauggccaauuggaag

SEQ ID NO: 3947633 - RNA, 21 nt, Human coronavirus OC43 [HCoV-OC43]
guuaauuuuacgccuuaucau

SEQ ID NO: 3947634 - RNA, 22 nt, Human coronavirus OC43 [HCoV-OC43]
guuacacaccugugcacauaua

SEQ ID NO: 3947635 - RNA, 15 nt, Human coronavirus OC43 [HCoV-OC43]
guuacuauauugaag

SEQ ID NO: 3947636 - RNA, 22 nt, Human coronavirus OC43 [HCoV-OC43]
guucagcaguguuuugguaaga

SEQ ID NO: 3947637 - RNA, 19 nt, Human coronavirus OC43 [HCoV-OC43]
guuuauuagaacuggaagu

SEQ ID NO: 3947638 - RNA, 13 nt, Human coronavirus OC43 [HCoV-OC43]
guuuugagaccau

SEQ ID NO: 3947639 - RNA, 20 nt, Human coronavirus OC43 [HCoV-OC43]
uaaacauguuuuugauacuu

SEQ ID NO: 3947640 - RNA, 18 nt, Human coronavirus OC43 [HCoV-OC43]
uaaauuccuaaaggaaug

SEQ ID NO: 3947641 - RNA, 21 nt, Human coronavirus OC43 [HCoV-OC43]
uaacaaugcccuuuaugcuau

SEQ ID NO: 3947642 - RNA, 16 nt, Human coronavirus OC43 [HCoV-OC43]
uaagaauggacaagga

SEQ ID NO: 3947643 - RNA, 14 nt, Human coronavirus OC43 [HCoV-OC43]
uaauuaguugaaag

SEQ ID NO: 3947644 - RNA, 19 nt, Human coronavirus OC43 [HCoV-OC43]
uaggcagcgaauguaguaa

SEQ ID NO: 3947645 - RNA, 18 nt, Human coronavirus OC43 [HCoV-OC43]
uagguagugguuacugug

SEQ ID NO: 3947646 - RNA, 17 nt, Human coronavirus OC43 [HCoV-OC43]
uaguggcauuuuuggca

SEQ ID NO: 3947647 - RNA, 20 nt, Human coronavirus OC43 [HCoV-OC43]
uaugaguccaaaaccacagc

SEQ ID NO: 3947648 - RNA, 15 nt, Human coronavirus OC43 [HCoV-OC43]
uauuuugcaugaugu

SEQ ID NO: 3947649 - RNA, 23 nt, Human coronavirus OC43 [HCoV-OC43]
uccagcagagccucuagugcagg

SEQ ID NO: 3947650 - RNA, 20 nt, Human coronavirus OC43 [HCoV-OC43]
ucuaggcagcgaauguagua

SEQ ID NO: 3947651 - RNA, 14 nt, Human coronavirus OC43 [HCoV-OC43]
ugagccauuuacug

SEQ ID NO: 3947652 - RNA, 13 nt, Human coronavirus OC43 [HCoV-OC43]
ugagguuaaugcg

SEQ ID NO: 3947653 - RNA, 17 nt, Human coronavirus OC43 [HCoV-OC43]
ugauucguaguugcuau

SEQ ID NO: 3947654 - RNA, 14 nt, Human coronavirus OC43 [HCoV-OC43]
ugccacgaugguau

SEQ ID NO: 3947655 - RNA, 17 nt, Human coronavirus OC43 [HCoV-OC43]
ugcgauuguaauuauug

SEQ ID NO: 3947656 - RNA, 15 nt, Human coronavirus OC43 [HCoV-OC43]
ugcuuguuuuacuau

SEQ ID NO: 3947657 - RNA, 19 nt, Human coronavirus OC43 [HCoV-OC43]
uguacuucagauacuaguu

SEQ ID NO: 3947658 - RNA, 23 nt, Human coronavirus OC43 [HCoV-OC43]
uguaguuuaugcacaacacuguu

SEQ ID NO: 3947659 - RNA, 19 nt, Human coronavirus OC43 [HCoV-OC43]
uguauagauaugaaaggaa

SEQ ID NO: 3947660 - RNA, 13 nt, Human coronavirus OC43 [HCoV-OC43]
ugucucagaauua

SEQ ID NO: 3947661 - RNA, 13 nt, Human coronavirus OC43 [HCoV-OC43]
uguucuacugauu

SEQ ID NO: 3947662 - RNA, 21 nt, Human coronavirus OC43 [HCoV-OC43]
uguucuuacuaaucaugaugu

SEQ ID NO: 3947663 - RNA, 23 nt, Human coronavirus OC43 [HCoV-OC43]
aaacaaugcacuguucagcagug

SEQ ID NO: 3947664 - RNA, 14 nt, Human coronavirus OC43 [HCoV-OC43]
aaacugguuuucuu

SEQ ID NO: 3947665 - RNA, 21 nt, Human coronavirus OC43 [HCoV-OC43]
aaagcuccuaaaaauuucugu

SEQ ID NO: 3947666 - RNA, 14 nt, Human coronavirus OC43 [HCoV-OC43]
aaagugauuauugu

SEQ ID NO: 3947667 - RNA, 16 nt, Human coronavirus OC43 [HCoV-OC43]
aacagaacuuuuauga

SEQ ID NO: 3947668 - RNA, 14 nt, Human coronavirus OC43 [HCoV-OC43]
aacggcuuuugcug

SEQ ID NO: 3947669 - RNA, 15 nt, Human coronavirus OC43 [HCoV-OC43]
aacuaagcauacugc

SEQ ID NO: 3947670 - RNA, 20 nt, Human coronavirus OC43 [HCoV-OC43]
aacugcugccacgaugguau

SEQ ID NO: 3947671 - RNA, 15 nt, Human coronavirus OC43 [HCoV-OC43]
aagaaugguuuuacu

SEQ ID NO: 3947672 - RNA, 15 nt, Human coronavirus OC43 [HCoV-OC43]
aagccgcgugcagca

SEQ ID NO: 3947673 - RNA, 17 nt, Human coronavirus OC43 [HCoV-OC43]
aaggaaaauguugauuu

SEQ ID NO: 3947674 - RNA, 17 nt, Human coronavirus OC43 [HCoV-OC43]
aagucgcaguauguuug

SEQ ID NO: 3947675 - RNA, 23 nt, Human coronavirus OC43 [HCoV-OC43]
aauaugagcagccugaugucuuu

SEQ ID NO: 3947676 - RNA, 20 nt, Human coronavirus OC43 [HCoV-OC43]
aaucugccuugcugguguag

SEQ ID NO: 3947677 - RNA, 21 nt, Human coronavirus OC43 [HCoV-OC43]
aauggaauuuuucuuugggua

SEQ ID NO: 3947678 - RNA, 16 nt, Human coronavirus OC43 [HCoV-OC43]
aaugguauuuuugcua

SEQ ID NO: 3947679 - RNA, 15 nt, Human coronavirus OC43 [HCoV-OC43]
aauuauuuuuuauga

SEQ ID NO: 3947680 - RNA, 19 nt, Human coronavirus OC43 [HCoV-OC43]
aauuguaauuuuaauauga

SEQ ID NO: 3947681 - RNA, 23 nt, Human coronavirus OC43 [HCoV-OC43]
acaagcucuccuaaaguuacuau

SEQ ID NO: 3947682 - RNA, 13 nt, Human coronavirus OC43 [HCoV-OC43]
acaagugcccaag

SEQ ID NO: 3947683 - RNA, 19 nt, Human coronavirus OC43 [HCoV-OC43]
accagggguagaagagcuc

SEQ ID NO: 3947684 - RNA, 14 nt, Human coronavirus OC43 [HCoV-OC43]
acuaagcuuaaaga

SEQ ID NO: 3947685 - RNA, 23 nt, Human coronavirus OC43 [HCoV-OC43]
acuaauuuugagccauuuacugu

SEQ ID NO: 3947686 - RNA, 14 nt, Human coronavirus OC43 [HCoV-OC43]
acuaggcugcauga

SEQ ID NO: 3947687 - RNA, 18 nt, Human coronavirus OC43 [HCoV-OC43]
agaacucgcacccacagc

SEQ ID NO: 3947688 - RNA, 15 nt, Human coronavirus OC43 [HCoV-OC43]
agaagaggagcccca

SEQ ID NO: 3947689 - RNA, 17 nt, Human coronavirus OC43 [HCoV-OC43]
agaauauuggguuacac

SEQ ID NO: 3947690 - RNA, 17 nt, Human coronavirus OC43 [HCoV-OC43]
agaauuagaagaugcuu

SEQ ID NO: 3947691 - RNA, 17 nt, Human coronavirus OC43 [HCoV-OC43]
agacacugguguuauuu

SEQ ID NO: 3947692 - RNA, 17 nt, Human coronavirus OC43 [HCoV-OC43]
agagccaauucuggcaa

SEQ ID NO: 3947693 - RNA, 17 nt, Human coronavirus OC43 [HCoV-OC43]
agagugguuauuuuguu

SEQ ID NO: 3947694 - RNA, 16 nt, Human coronavirus OC43 [HCoV-OC43]
agaucuuuuugcaauc

SEQ ID NO: 3947695 - RNA, 20 nt, Human coronavirus OC43 [HCoV-OC43]
agcgccacacauuagucuua

SEQ ID NO: 3947696 - RNA, 15 nt, Human coronavirus OC43 [HCoV-OC43]
agcgccguauguaau

SEQ ID NO: 3947697 - RNA, 14 nt, Human coronavirus OC43 [HCoV-OC43]
agcgugguuuucuu

SEQ ID NO: 3947698 - RNA, 20 nt, Human coronavirus OC43 [HCoV-OC43]
agcuccuaaaaauuucuguc

SEQ ID NO: 3947699 - RNA, 19 nt, Human coronavirus OC43 [HCoV-OC43]
agcuguuguuaaugcaaau

SEQ ID NO: 3947700 - RNA, 13 nt, Human coronavirus OC43 [HCoV-OC43]
agcuuauaugacu

SEQ ID NO: 3947701 - RNA, 23 nt, Human coronavirus OC43 [HCoV-OC43]
agcuuauugcuaaugcauuuaac

SEQ ID NO: 3947702 - RNA, 20 nt, Human coronavirus OC43 [HCoV-OC43]
aggcacucucuaucagaaug

SEQ ID NO: 3947703 - RNA, 23 nt, Human coronavirus OC43 [HCoV-OC43]
aggcgaaggucaacaaauuauuu

SEQ ID NO: 3947704 - RNA, 15 nt, Human coronavirus OC43 [HCoV-OC43]
agguacuaauuauuu

SEQ ID NO: 3947705 - RNA, 16 nt, Human coronavirus OC43 [HCoV-OC43]
agucauuuaacuauag

SEQ ID NO: 3947706 - RNA, 17 nt, Human coronavirus OC43 [HCoV-OC43]
aguccaaaaccacagcg

SEQ ID NO: 3947707 - RNA, 22 nt, Human coronavirus OC43 [HCoV-OC43]
agucgcaguauguuuguuuaug

SEQ ID NO: 3947708 - RNA, 12 nt, Human coronavirus OC43 [HCoV-OC43]
aguuaaauguuu

SEQ ID NO: 3947709 - RNA, 19 nt, Human coronavirus OC43 [HCoV-OC43]
auaagaauggacaaggaga

SEQ ID NO: 3947710 - RNA, 16 nt, Human coronavirus OC43 [HCoV-OC43]
auaagaguagagaguu

SEQ ID NO: 3947711 - RNA, 17 nt, Human coronavirus OC43 [HCoV-OC43]
auaauauugaugcugcu

SEQ ID NO: 3947712 - RNA, 14 nt, Human coronavirus OC43 [HCoV-OC43]
auacagguguuguu

SEQ ID NO: 3947713 - RNA, 22 nt, Human coronavirus OC43 [HCoV-OC43]
auacgcauugaauaauguguau

SEQ ID NO: 3947714 - RNA, 22 nt, Human coronavirus OC43 [HCoV-OC43]
auacugaagacaccucagaaau

SEQ ID NO: 3947715 - RNA, 19 nt, Human coronavirus OC43 [HCoV-OC43]
auaucguaccacuuuguau

SEQ ID NO: 3947716 - RNA, 23 nt, Human coronavirus OC43 [HCoV-OC43]
aucagaauggaugucuugcugcu

SEQ ID NO: 3947717 - RNA, 18 nt, Human coronavirus OC43 [HCoV-OC43]
aucgguuuacuaauuuug

SEQ ID NO: 3947718 - RNA, 15 nt, Human coronavirus OC43 [HCoV-OC43]
augaauagguuacag

SEQ ID NO: 3947719 - RNA, 20 nt, Human coronavirus OC43 [HCoV-OC43]
augauguaaaaccaccaguc

SEQ ID NO: 3947720 - RNA, 14 nt, Human coronavirus OC43 [HCoV-OC43]
augaugugaaugcu

SEQ ID NO: 3947721 - RNA, 17 nt, Human coronavirus OC43 [HCoV-OC43]
auggcauuuggauacag

SEQ ID NO: 3947722 - RNA, 18 nt, Human coronavirus OC43 [HCoV-OC43]
augggaauucguuuugaa

SEQ ID NO: 3947723 - RNA, 16 nt, Human coronavirus OC43 [HCoV-OC43]
augguaugaugaauau

SEQ ID NO: 3947724 - RNA, 12 nt, Human coronavirus OC43 [HCoV-OC43]
auguauggcuuu

SEQ ID NO: 3947725 - RNA, 15 nt, Human coronavirus OC43 [HCoV-OC43]
auuaaacgguuacac

SEQ ID NO: 3947726 - RNA, 14 nt, Human coronavirus OC43 [HCoV-OC43]
auuaguugaaaguu

SEQ ID NO: 3947727 - RNA, 17 nt, Human coronavirus OC43 [HCoV-OC43]
auuauaauuuaccugcu

SEQ ID NO: 3947728 - RNA, 20 nt, Human coronavirus OC43 [HCoV-OC43]
auuaugauaaauauuuugga

SEQ ID NO: 3947729 - RNA, 15 nt, Human coronavirus OC43 [HCoV-OC43]
auuauuguaguuuug

SEQ ID NO: 3947730 - RNA, 18 nt, Human coronavirus OC43 [HCoV-OC43]
auucaagaaguuauugau

SEQ ID NO: 3947731 - RNA, 17 nt, Human coronavirus OC43 [HCoV-OC43]
auuguguauuuugugaa

SEQ ID NO: 3947732 - RNA, 15 nt, Human coronavirus OC43 [HCoV-OC43]
auuuuuacuaucugg

SEQ ID NO: 3947733 - RNA, 21 nt, Human coronavirus OC43 [HCoV-OC43]
auuuuuggguuggucugcaga

SEQ ID NO: 3947734 - RNA, 16 nt, Human coronavirus OC43 [HCoV-OC43]
caaaauaagaguagag

SEQ ID NO: 3947735 - RNA, 21 nt, Human coronavirus OC43 [HCoV-OC43]
caacaagaugguaugaugaau

SEQ ID NO: 3947736 - RNA, 15 nt, Human coronavirus OC43 [HCoV-OC43]
caacuaauucugcuu

SEQ ID NO: 3947737 - RNA, 15 nt, Human coronavirus OC43 [HCoV-OC43]
caacuugauguguau

SEQ ID NO: 3947738 - RNA, 21 nt, Human coronavirus OC43 [HCoV-OC43]
caagaaauucuaucuagacuu

SEQ ID NO: 3947739 - RNA, 20 nt, Human coronavirus OC43 [HCoV-OC43]
caaucauauugcaauuugga

SEQ ID NO: 3947740 - RNA, 19 nt, Human coronavirus OC43 [HCoV-OC43]
cacccaguaauuaguaaau

SEQ ID NO: 3947741 - RNA, 22 nt, Human coronavirus OC43 [HCoV-OC43]
cagaauuuaucugggaauccug

SEQ ID NO: 3947742 - RNA, 21 nt, Human coronavirus OC43 [HCoV-OC43]
caggaucgcguaguagagcca

SEQ ID NO: 3947743 - RNA, 18 nt, Human coronavirus OC43 [HCoV-OC43]
cagggguagaagagcuca

SEQ ID NO: 3947744 - RNA, 16 nt, Human coronavirus OC43 [HCoV-OC43]
caguagaucugcuaua

SEQ ID NO: 3947745 - RNA, 12 nt, Human coronavirus OC43 [HCoV-OC43]
cagugcccaaaa

SEQ ID NO: 3947746 - RNA, 22 nt, Human coronavirus OC43 [HCoV-OC43]
cauaaugaaggugcugaaugag

SEQ ID NO: 3947747 - RNA, 21 nt, Human coronavirus OC43 [HCoV-OC43]
cauuaugauaaauauuuugga

SEQ ID NO: 3947748 - RNA, 16 nt, Human coronavirus OC43 [HCoV-OC43]
cauuauuauguggauu

SEQ ID NO: 3947749 - RNA, 17 nt, Human coronavirus OC43 [HCoV-OC43]
ccaguuuagaaauguuc

SEQ ID NO: 3947750 - RNA, 21 nt, Human coronavirus OC43 [HCoV-OC43]
ccauaauuauucuuauaugga

SEQ ID NO: 3947751 - RNA, 20 nt, Human coronavirus OC43 [HCoV-OC43]
ccgccagaagaggagcccca

SEQ ID NO: 3947752 - RNA, 16 nt, Human coronavirus OC43 [HCoV-OC43]
ccuacugguguuuaug

SEQ ID NO: 3947753 - RNA, 16 nt, Human coronavirus OC43 [HCoV-OC43]
cuaaguuuuuguuuaa

SEQ ID NO: 3947754 - RNA, 13 nt, Human coronavirus OC43 [HCoV-OC43]
cuagguacuggcu

SEQ ID NO: 3947755 - RNA, 21 nt, Human coronavirus OC43 [HCoV-OC43]
cuagugguuuugcuguuuaug

SEQ ID NO: 3947756 - RNA, 17 nt, Human coronavirus OC43 [HCoV-OC43]
cuaguuagcugcauaau

SEQ ID NO: 3947757 - RNA, 20 nt, Human coronavirus OC43 [HCoV-OC43]
cuauagcggucguguuucug

SEQ ID NO: 3947758 - RNA, 11 nt, Human coronavirus OC43 [HCoV-OC43]
cucauuuacuu

SEQ ID NO: 3947759 - RNA, 15 nt, Human coronavirus OC43 [HCoV-OC43]
cucugguaauuauuu

SEQ ID NO: 3947760 - RNA, 15 nt, Human coronavirus OC43 [HCoV-OC43]
cucuuguuuacaagg

SEQ ID NO: 3947761 - RNA, 17 nt, Human coronavirus OC43 [HCoV-OC43]
cugaaaagaaagauggu

SEQ ID NO: 3947762 - RNA, 15 nt, Human coronavirus OC43 [HCoV-OC43]
cugauacuguugaug

SEQ ID NO: 3947763 - RNA, 21 nt, Human coronavirus OC43 [HCoV-OC43]
cugauacuguugauguuacua

SEQ ID NO: 3947764 - RNA, 12 nt, Human coronavirus OC43 [HCoV-OC43]
cugcugaugaag

SEQ ID NO: 3947765 - RNA, 15 nt, Human coronavirus OC43 [HCoV-OC43]
cugguuuuacuagca

SEQ ID NO: 3947766 - RNA, 13 nt, Human coronavirus OC43 [HCoV-OC43]
cuugauguggaug

SEQ ID NO: 3947767 - RNA, 14 nt, Human coronavirus OC43 [HCoV-OC43]
cuuguucuggcaaa

SEQ ID NO: 3947768 - RNA, 14 nt, Human coronavirus OC43 [HCoV-OC43]
cuuguuuacaagga

SEQ ID NO: 3947769 - RNA, 18 nt, Human coronavirus OC43 [HCoV-OC43]
cuuguuuuacuauucuuc

SEQ ID NO: 3947770 - RNA, 16 nt, Human coronavirus OC43 [HCoV-OC43]
gacaagccuaaucauu

SEQ ID NO: 3947771 - RNA, 12 nt, Human coronavirus OC43 [HCoV-OC43]
gacaagugccca

SEQ ID NO: 3947772 - RNA, 12 nt, Human coronavirus OC43 [HCoV-OC43]
gagaagaaauau

SEQ ID NO: 3947773 - RNA, 18 nt, Human coronavirus OC43 [HCoV-OC43]
gaucuuaauuguuauuau

SEQ ID NO: 3947774 - RNA, 16 nt, Human coronavirus OC43 [HCoV-OC43]
gaugucuuuuauucag

SEQ ID NO: 3947775 - RNA, 16 nt, Human coronavirus OC43 [HCoV-OC43]
gaugugaaugcugauu

SEQ ID NO: 3947776 - RNA, 13 nt, Human coronavirus OC43 [HCoV-OC43]
gauugugcugcau

SEQ ID NO: 3947777 - RNA, 17 nt, Human coronavirus OC43 [HCoV-OC43]
gcaccagauuugucacu

SEQ ID NO: 3947778 - RNA, 17 nt, Human coronavirus OC43 [HCoV-OC43]
gcagcaaaauaagagua

SEQ ID NO: 3947779 - RNA, 13 nt, Human coronavirus OC43 [HCoV-OC43]
gcagucauuuaac

SEQ ID NO: 3947780 - RNA, 17 nt, Human coronavirus OC43 [HCoV-OC43]
gcauuguugagaaauaa

SEQ ID NO: 3947781 - RNA, 16 nt, Human coronavirus OC43 [HCoV-OC43]
gccacuaaaccucagc

SEQ ID NO: 3947782 - RNA, 14 nt, Human coronavirus OC43 [HCoV-OC43]
gccauuuacuguua

SEQ ID NO: 3947783 - RNA, 17 nt, Human coronavirus OC43 [HCoV-OC43]
gccgacaagugcccaag

SEQ ID NO: 3947784 - RNA, 15 nt, Human coronavirus OC43 [HCoV-OC43]
gcgcaauuagguuug

SEQ ID NO: 3947785 - RNA, 16 nt, Human coronavirus OC43 [HCoV-OC43]
gcgcacauccagcaga

SEQ ID NO: 3947786 - RNA, 23 nt, Human coronavirus OC43 [HCoV-OC43]
gcguaguagagccaauucuggca

SEQ ID NO: 3947787 - RNA, 15 nt, Human coronavirus OC43 [HCoV-OC43]
gcuaauguuucuguu

SEQ ID NO: 3947788 - RNA, 17 nt, Human coronavirus OC43 [HCoV-OC43]
gcuagucuuguucuggc

SEQ ID NO: 3947789 - RNA, 21 nt, Human coronavirus OC43 [HCoV-OC43]
gcuauaagugcuucuuuacaa

SEQ ID NO: 3947790 - RNA, 12 nt, Human coronavirus OC43 [HCoV-OC43]
gcuauuguuaac

SEQ ID NO: 3947791 - RNA, 15 nt, Human coronavirus OC43 [HCoV-OC43]
gcucaacccaagcaa

SEQ ID NO: 3947792 - RNA, 18 nt, Human coronavirus OC43 [HCoV-OC43]
gcuccauaugguuuguau

SEQ ID NO: 3947793 - RNA, 16 nt, Human coronavirus OC43 [HCoV-OC43]
gcugcaugaugcuuag

SEQ ID NO: 3947794 - RNA, 19 nt, Human coronavirus OC43 [HCoV-OC43]
ggcuauuccgacuagguuu

SEQ ID NO: 3947795 - RNA, 14 nt, Human coronavirus OC43 [HCoV-OC43]
gggguagaagagcu

SEQ ID NO: 3947796 - RNA, 19 nt, Human coronavirus OC43 [HCoV-OC43]
guaaauccaaacauuauga

SEQ ID NO: 3947797 - RNA, 17 nt, Human coronavirus OC43 [HCoV-OC43]
guaaucauauuguuaau

SEQ ID NO: 3947798 - RNA, 17 nt, Human coronavirus OC43 [HCoV-OC43]
guagagccaauucuggc

SEQ ID NO: 3947799 - RNA, 17 nt, Human coronavirus OC43 [HCoV-OC43]
guaggauauuguagagu

SEQ ID NO: 3947800 - RNA, 14 nt, Human coronavirus OC43 [HCoV-OC43]
gucuuguucuggca

SEQ ID NO: 3947801 - RNA, 20 nt, Human coronavirus OC43 [HCoV-OC43]
gugcccaagggaagagccag

SEQ ID NO: 3947802 - RNA, 14 nt, Human coronavirus OC43 [HCoV-OC43]
guuaauguaaauaa

SEQ ID NO: 3947803 - RNA, 16 nt, Human coronavirus OC43 [HCoV-OC43]
guucuuacuaaucaug

SEQ ID NO: 3947804 - RNA, 22 nt, Human coronavirus OC43 [HCoV-OC43]
guuguacccuacuauucuuggu

SEQ ID NO: 3947805 - RNA, 19 nt, Human coronavirus OC43 [HCoV-OC43]
guuuaugauauuaaucaug

SEQ ID NO: 3947806 - RNA, 15 nt, Human coronavirus OC43 [HCoV-OC43]
guuuggguacuuauu

SEQ ID NO: 3947807 - RNA, 14 nt, Human coronavirus OC43 [HCoV-OC43]
uaaugguuugggua

SEQ ID NO: 3947808 - RNA, 20 nt, Human coronavirus OC43 [HCoV-OC43]
uacucaguuucaaaagggaa

SEQ ID NO: 3947809 - RNA, 18 nt, Human coronavirus OC43 [HCoV-OC43]
uacuccugguaagcaauc

SEQ ID NO: 3947810 - RNA, 14 nt, Human coronavirus OC43 [HCoV-OC43]
uaguaaaugaauga

SEQ ID NO: 3947811 - RNA, 14 nt, Human coronavirus OC43 [HCoV-OC43]
uagugacccacagu

SEQ ID NO: 3947812 - RNA, 22 nt, Human coronavirus OC43 [HCoV-OC43]
uauaaguguugcagugcccaaa

SEQ ID NO: 3947813 - RNA, 14 nt, Human coronavirus OC43 [HCoV-OC43]
uauguuuguuuaug

SEQ ID NO: 3947814 - RNA, 15 nt, Human coronavirus OC43 [HCoV-OC43]
ucagcaaccaucagg

SEQ ID NO: 3947815 - RNA, 16 nt, Human coronavirus OC43 [HCoV-OC43]
ucauaagaauggacaa

SEQ ID NO: 3947816 - RNA, 13 nt, Human coronavirus OC43 [HCoV-OC43]
ucauuagugcaga

SEQ ID NO: 3947817 - RNA, 23 nt, Human coronavirus OC43 [HCoV-OC43]
uccacauaucguaauauggcacu

SEQ ID NO: 3947818 - RNA, 20 nt, Human coronavirus OC43 [HCoV-OC43]
uccuaaccuggguaaucauc

SEQ ID NO: 3947819 - RNA, 17 nt, Human coronavirus OC43 [HCoV-OC43]
uccuauaaguacugaua

SEQ ID NO: 3947820 - RNA, 17 nt, Human coronavirus OC43 [HCoV-OC43]
uccugacgagccccaga

SEQ ID NO: 3947821 - RNA, 17 nt, Human coronavirus OC43 [HCoV-OC43]
ucuacaggaaaaguuuu

SEQ ID NO: 3947822 - RNA, 20 nt, Human coronavirus OC43 [HCoV-OC43]
ucugggaauccugacgagcc

SEQ ID NO: 3947823 - RNA, 13 nt, Human coronavirus OC43 [HCoV-OC43]
ugaaaauaauguu

SEQ ID NO: 3947824 - RNA, 16 nt, Human coronavirus OC43 [HCoV-OC43]
ugaaggugcugaauga

SEQ ID NO: 3947825 - RNA, 18 nt, Human coronavirus OC43 [HCoV-OC43]
ugagcccuauacugaaga

SEQ ID NO: 3947826 - RNA, 18 nt, Human coronavirus OC43 [HCoV-OC43]
ugaguccaaaaccacagc

SEQ ID NO: 3947827 - RNA, 13 nt, Human coronavirus OC43 [HCoV-OC43]
ugauuauuuguau

SEQ ID NO: 3947828 - RNA, 13 nt, Human coronavirus OC43 [HCoV-OC43]
ugcagaauuuauc

SEQ ID NO: 3947829 - RNA, 22 nt, Human coronavirus OC43 [HCoV-OC43]
ugcaggaucgcguaguagagcc

SEQ ID NO: 3947830 - RNA, 16 nt, Human coronavirus OC43 [HCoV-OC43]
ugccgacaagugccca

SEQ ID NO: 3947831 - RNA, 19 nt, Human coronavirus OC43 [HCoV-OC43]
uggaacuagugacccacag

SEQ ID NO: 3947832 - RNA, 20 nt, Human coronavirus OC43 [HCoV-OC43]
uggauuguaaaauacaaaca

SEQ ID NO: 3947833 - RNA, 19 nt, Human coronavirus OC43 [HCoV-OC43]
uggccaaagugcagaauuu

SEQ ID NO: 3947834 - RNA, 12 nt, Human coronavirus OC43 [HCoV-OC43]
ugguaauuauuu

SEQ ID NO: 3947835 - RNA, 15 nt, Human coronavirus OC43 [HCoV-OC43]
ugguauuuuugcuaa

SEQ ID NO: 3947836 - RNA, 20 nt, Human coronavirus OC43 [HCoV-OC43]
ugucaaccuccguacuguua

SEQ ID NO: 3947837 - RNA, 19 nt, Human coronavirus OC43 [HCoV-OC43]
ugucccacugcugcugaua

SEQ ID NO: 3947838 - RNA, 13 nt, Human coronavirus OC43 [HCoV-OC43]
uuaaauuccuaaa

SEQ ID NO: 3947839 - RNA, 12 nt, Human coronavirus OC43 [HCoV-OC43]
uuaauguaaaua

SEQ ID NO: 3947840 - RNA, 22 nt, Human coronavirus OC43 [HCoV-OC43]
uuacaaugauguaaaaccacca

SEQ ID NO: 3947841 - RNA, 13 nt, Human coronavirus OC43 [HCoV-OC43]
uuauuuugcauga

SEQ ID NO: 3947842 - RNA, 20 nt, Human coronavirus OC43 [HCoV-OC43]
uuccuagauuuauucuaguu

SEQ ID NO: 3947843 - RNA, 23 nt, Human coronavirus OC43 [HCoV-OC43]
uugcuaauuuuauuuugcaugau

SEQ ID NO: 3947844 - RNA, 23 nt, Human coronavirus OC43 [HCoV-OC43]
uuuaacggcaaguuuuugucgaa

SEQ ID NO: 3947845 - RNA, 13 nt, Human coronavirus OC43 [HCoV-OC43]
uuucuuucugauu

SEQ ID NO: 3947846 - RNA, 22 nt, Human coronavirus OC43 [HCoV-OC43]
uuugaauaagccccgccagaag

SEQ ID NO: 3947847 - RNA, 20 nt, Human coronavirus OC43 [HCoV-OC43]
aaaacuacaccagcaccagu

SEQ ID NO: 3947848 - RNA, 16 nt, Human coronavirus OC43 [HCoV-OC43]
aaaacuuggaacuagu

SEQ ID NO: 3947849 - RNA, 18 nt, Human coronavirus OC43 [HCoV-OC43]
aaacaacuugauguguau

SEQ ID NO: 3947850 - RNA, 16 nt, Human coronavirus OC43 [HCoV-OC43]
aaagaacuauggcauu

SEQ ID NO: 3947851 - RNA, 14 nt, Human coronavirus OC43 [HCoV-OC43]
aaauguuuuugcuu

SEQ ID NO: 3947852 - RNA, 16 nt, Human coronavirus OC43 [HCoV-OC43]
aacuaauucugcuuua

SEQ ID NO: 3947853 - RNA, 15 nt, Human coronavirus OC43 [HCoV-OC43]
aacuagguacuggcu

SEQ ID NO: 3947854 - RNA, 17 nt, Human coronavirus OC43 [HCoV-OC43]
aacuggaaguuuuugga

SEQ ID NO: 3947855 - RNA, 16 nt, Human coronavirus OC43 [HCoV-OC43]
aagauggcguuaauuu

SEQ ID NO: 3947856 - RNA, 20 nt, Human coronavirus OC43 [HCoV-OC43]
aaggaaaauguugauuuuau

SEQ ID NO: 3947857 - RNA, 16 nt, Human coronavirus OC43 [HCoV-OC43]
aaguuaauuauggcca

SEQ ID NO: 3947858 - RNA, 16 nt, Human coronavirus OC43 [HCoV-OC43]
aaguuuuguguuguaa

SEQ ID NO: 3947859 - RNA, 20 nt, Human coronavirus OC43 [HCoV-OC43]
aauaagagauuugguuuuau

SEQ ID NO: 3947860 - RNA, 19 nt, Human coronavirus OC43 [HCoV-OC43]
aauaaugguauaggcacuu

SEQ ID NO: 3947861 - RNA, 21 nt, Human coronavirus OC43 [HCoV-OC43]
aauauuauguaaaauggccuu

SEQ ID NO: 3947862 - RNA, 22 nt, Human herpesvirus 1
aaucagcguucacccggcggcg

SEQ ID NO: 3947863 - RNA, 14 nt, Human herpesvirus 1
aaucggcggccgcc

SEQ ID NO: 3947864 - RNA, 16 nt, Human herpesvirus 1
aauuucaccgccccag

SEQ ID NO: 3947865 - RNA, 18 nt, Human herpesvirus 1
aauuugcacccagccuuu

SEQ ID NO: 3947866 - RNA, 16 nt, Human herpesvirus 1
acaacaagucucuggg

SEQ ID NO: 3947867 - RNA, 20 nt, Human herpesvirus 1
acaacccuacaaccugacca

SEQ ID NO: 3947868 - RNA, 17 nt, Human herpesvirus 1
acaauccccaggacacc

SEQ ID NO: 3947869 - RNA, 17 nt, Human herpesvirus 1
acaaucgcgaccacccc

SEQ ID NO: 3947870 - RNA, 15 nt, Human herpesvirus 1
acacaccagcggguc

SEQ ID NO: 3947871 - RNA, 22 nt, Human herpesvirus 1
acacacgggggagcgcucuugu

SEQ ID NO: 3947872 - RNA, 18 nt, Human herpesvirus 1
acaccccccaugcgggcu

SEQ ID NO: 3947873 - RNA, 16 nt, Human herpesvirus 1
acacccuaccccaguc

SEQ ID NO: 3947874 - RNA, 18 nt, Human herpesvirus 1
acaccugcaccacccccg

SEQ ID NO: 3947875 - RNA, 14 nt, Human herpesvirus 1
acacgacggccucg

SEQ ID NO: 3947876 - RNA, 18 nt, Human herpesvirus 1
acacuggguucuccugga

SEQ ID NO: 3947877 - RNA, 15 nt, Human herpesvirus 1
acagggcgggccgcc

SEQ ID NO: 3947878 - RNA, 22 nt, Human herpesvirus 1
acauaaccgaccgcagucccug

SEQ ID NO: 3947879 - RNA, 19 nt, Human herpesvirus 1
acauccaggcgggccuacc

SEQ ID NO: 3947880 - RNA, 23 nt, Human herpesvirus 1
acaugaccgcccgccccucgcca

SEQ ID NO: 3947881 - RNA, 16 nt, Human herpesvirus 1
acaugcggaaagcaag

SEQ ID NO: 3947882 - RNA, 23 nt, Human herpesvirus 1
acauggcccuggugucugccaug

SEQ ID NO: 3947883 - RNA, 16 nt, Human herpesvirus 1
acauguccgugccgcu

SEQ ID NO: 3947884 - RNA, 20 nt, Human herpesvirus 1
accaacacaacggcaugccu

SEQ ID NO: 3947885 - RNA, 22 nt, Human herpesvirus 1
accaacccgccccuaaccaggc

SEQ ID NO: 3947886 - RNA, 15 nt, Human herpesvirus 1
accaacgccgaugua

SEQ ID NO: 3947887 - RNA, 14 nt, Human herpesvirus 1
accacacaccagcg

SEQ ID NO: 3947888 - RNA, 14 nt, Human herpesvirus 1
accacaggugggug

SEQ ID NO: 3947889 - RNA, 16 nt, Human herpesvirus 1
accacgccacaacagc

SEQ ID NO: 3947890 - RNA, 18 nt, Human herpesvirus 1
accacgccccuuuccccc

SEQ ID NO: 3947891 - RNA, 20 nt, Human herpesvirus 1
accacgccccuuucccccug

SEQ ID NO: 3947892 - RNA, 16 nt, Human herpesvirus 1
accacgcccgaccaca

SEQ ID NO: 3947893 - RNA, 18 nt, Human herpesvirus 1
accacgugcacagccugg

SEQ ID NO: 3947894 - RNA, 21 nt, Human herpesvirus 1
accagaauaaugaccaccaca

SEQ ID NO: 3947895 - RNA, 14 nt, Human herpesvirus 1
accagcgcaccguc

SEQ ID NO: 3947896 - RNA, 18 nt, Human herpesvirus 1
accagcugagccgcgccg

SEQ ID NO: 3947897 - RNA, 18 nt, Human herpesvirus 1
accagguaauaccaaaua

SEQ ID NO: 3947898 - RNA, 23 nt, Human herpesvirus 1
accaguuuugcgaggagcccgcc

SEQ ID NO: 3947899 - RNA, 15 nt, Human herpesvirus 1
accauggccccccgc

SEQ ID NO: 3947900 - RNA, 15 nt, Human herpesvirus 1
acccaaaccccggau

SEQ ID NO: 3947901 - RNA, 17 nt, Human herpesvirus 1
acccaaccaaaccaggc

SEQ ID NO: 3947902 - RNA, 20 nt, Human herpesvirus 1
acccaaccaaaccaggcgug

SEQ ID NO: 3947903 - RNA, 15 nt, Human herpesvirus 1
acccaacccccggcc

SEQ ID NO: 3947904 - RNA, 16 nt, Human herpesvirus 1
acccaagccgccccag

SEQ ID NO: 3947905 - RNA, 15 nt, Human herpesvirus 1
acccagccuuuaacu

SEQ ID NO: 3947906 - RNA, 16 nt, Human herpesvirus 1
accccaccccugugcu

SEQ ID NO: 3947907 - RNA, 17 nt, Human herpesvirus 1
accccagggaccuccug

SEQ ID NO: 3947908 - RNA, 22 nt, Human herpesvirus 1
accccaguccccgggcccagcc

SEQ ID NO: 3947909 - RNA, 17 nt, Human herpesvirus 1
acccccaacgccacgca

SEQ ID NO: 3947910 - RNA, 13 nt, Human herpesvirus 1
accccccaugcca

SEQ ID NO: 3947911 - RNA, 12 nt, Human herpesvirus 1
accccccuggcc

SEQ ID NO: 3947912 - RNA, 13 nt, Human herpesvirus 1
acccccggcccca

SEQ ID NO: 3947913 - RNA, 16 nt, Human herpesvirus 1
acccccucgaccacca

SEQ ID NO: 3947914 - RNA, 16 nt, Human herpesvirus 1
accccgggcgcgcccu

SEQ ID NO: 3947915 - RNA, 14 nt, Human herpesvirus 1
acccgacucaccuc

SEQ ID NO: 3947916 - RNA, 19 nt, Human herpesvirus 1
acccgcaacgcgcuggggc

SEQ ID NO: 3947917 - RNA, 23 nt, Human herpesvirus 1
acccgccccuaaccaggccucca

SEQ ID NO: 3947918 - RNA, 18 nt, Human herpesvirus 1
acccgcgacccccgggcu

SEQ ID NO: 3947919 - RNA, 21 nt, Human herpesvirus 1
acccgugacacccuaccccag

SEQ ID NO: 3947920 - RNA, 14 nt, Human herpesvirus 1
acccucucuucccu

SEQ ID NO: 3947921 - RNA, 17 nt, Human herpesvirus 1
acccugcgcgagcaccu

SEQ ID NO: 3947922 - RNA, 22 nt, Human herpesvirus 1
acccuggcgccaaagcugcugg

SEQ ID NO: 3947923 - RNA, 21 nt, Human herpesvirus 1
accgacagcacucacagcccc

SEQ ID NO: 3947924 - RNA, 15 nt, Human herpesvirus 1
accgacauggagcug

SEQ ID NO: 3947925 - RNA, 15 nt, Human herpesvirus 1
accgaggggccaagu

SEQ ID NO: 3947926 - RNA, 15 nt, Human herpesvirus 1
accgcagccuggucg

SEQ ID NO: 3947927 - RNA, 14 nt, Human herpesvirus 1
accgccaucagccu

SEQ ID NO: 3947928 - RNA, 22 nt, Human herpesvirus 1
accgccggcggcgacgugcccc

SEQ ID NO: 3947929 - RNA, 16 nt, Human herpesvirus 1
accgcgugaccccagg

SEQ ID NO: 3947930 - RNA, 16 nt, Human herpesvirus 1
accgcgugcccacguc

SEQ ID NO: 3947931 - RNA, 17 nt, Human herpesvirus 1
accgcguguuccccggg

SEQ ID NO: 3947932 - RNA, 20 nt, Human herpesvirus 1
accgcuuuauaggccgggac

SEQ ID NO: 3947933 - RNA, 18 nt, Human herpesvirus 1
accggcgcuacuucaccu

SEQ ID NO: 3947934 - RNA, 16 nt, Human herpesvirus 1
accgggcccccgcccc

SEQ ID NO: 3947935 - RNA, 17 nt, Human herpesvirus 1
accgggcccggccaggc

SEQ ID NO: 3947936 - RNA, 19 nt, Human herpesvirus 1
accgguucucccuguucaa

SEQ ID NO: 3947937 - RNA, 15 nt, Human herpesvirus 1
accgucauccacacc

SEQ ID NO: 3947938 - RNA, 20 nt, Human herpesvirus 1
accgucccguagucccaucc

SEQ ID NO: 3947939 - RNA, 22 nt, Human herpesvirus 1
accgucgccgcgggccacgcca

SEQ ID NO: 3947940 - RNA, 17 nt, Human herpesvirus 1
accgucggaggcccccc

SEQ ID NO: 3947941 - RNA, 18 nt, Human herpesvirus 1
accgugacuaagcguccc

SEQ ID NO: 3947942 - RNA, 18 nt, Human herpesvirus 1
accuccgcgagcagagcc

SEQ ID NO: 3947943 - RNA, 23 nt, Human herpesvirus 1
accucgggugcauauccugggau

SEQ ID NO: 3947944 - RNA, 21 nt, Human herpesvirus 1
accugacgcgccuagccaacc

SEQ ID NO: 3947945 - RNA, 14 nt, Human herpesvirus 1
accugcucacgacc

SEQ ID NO: 3947946 - RNA, 22 nt, Human herpesvirus 1
accuggggcgcgcggucggcaa

SEQ ID NO: 3947947 - RNA, 21 nt, Human herpesvirus 1
acgacccucgagauccccggg

SEQ ID NO: 3947948 - RNA, 20 nt, Human herpesvirus 1
acgaccuguugauggccugu

SEQ ID NO: 3947949 - RNA, 15 nt, Human herpesvirus 1
acgagaugcugcgcu

SEQ ID NO: 3947950 - RNA, 18 nt, Human herpesvirus 1
acgagcacccugcugccc

SEQ ID NO: 3947951 - RNA, 13 nt, Human herpesvirus 1
acgagcuccuggc

SEQ ID NO: 3947952 - RNA, 16 nt, Human herpesvirus 1
acgagcuccuggccua

SEQ ID NO: 3947953 - RNA, 14 nt, Human herpesvirus 1
acgagcugacccug

SEQ ID NO: 3947954 - RNA, 24 nt, Human herpesvirus 1
acgaggcggccaacgacuuccucg

SEQ ID NO: 3947955 - RNA, 19 nt, Human herpesvirus 1
acgaguaucugcgggccgc

SEQ ID NO: 3947956 - RNA, 14 nt, Human herpesvirus 1
gggggucggcaggc

SEQ ID NO: 3947957 - RNA, 22 nt, Human herpesvirus 1
ggggucaaccacgaacccccau

SEQ ID NO: 3947958 - RNA, 16 nt, Human herpesvirus 1
ggggucaggucugcgg

SEQ ID NO: 3947959 - RNA, 12 nt, Human herpesvirus 1
ggguaccacagg

SEQ ID NO: 3947960 - RNA, 23 nt, Human herpesvirus 1
ggguauaaauuccggaaggggac

SEQ ID NO: 3947961 - RNA, 16 nt, Human herpesvirus 1
ggguauauaaggccug

SEQ ID NO: 3947962 - RNA, 20 nt, Human herpesvirus 1
gggucagcuccucgcgcggc

SEQ ID NO: 3947963 - RNA, 23 nt, Human herpesvirus 1
gggucccuccuuagcacgaucga

SEQ ID NO: 3947964 - RNA, 18 nt, Human herpesvirus 1
gggucuccgaaagccacc

SEQ ID NO: 3947965 - RNA, 23 nt, Human herpesvirus 1
gggucuguuggggacacuggguu

SEQ ID NO: 3947966 - RNA, 16 nt, Human herpesvirus 1
gggugacgguggacag

SEQ ID NO: 3947967 - RNA, 17 nt, Human herpesvirus 1
gggugcgggggggucag

SEQ ID NO: 3947968 - RNA, 18 nt, Human herpesvirus 1
gguacaacgcgacgcaca

SEQ ID NO: 3947969 - RNA, 16 nt, Human herpesvirus 1
gguaccgcgugacccc

SEQ ID NO: 3947970 - RNA, 23 nt, Human herpesvirus 1
gguacgaagaccagggcccguug

SEQ ID NO: 3947971 - RNA, 13 nt, Human herpesvirus 1
gguagcgggggac

SEQ ID NO: 3947972 - RNA, 19 nt, Human herpesvirus 1
gguauggcugcccccccgc

SEQ ID NO: 3947973 - RNA, 12 nt, Human herpesvirus 1
gguccacaccca

SEQ ID NO: 3947974 - RNA, 22 nt, Human herpesvirus 1
gguccgcggggccucccccgga

SEQ ID NO: 3947975 - RNA, 20 nt, Human herpesvirus 1
gguccguguuucucgcccca

SEQ ID NO: 3947976 - RNA, 20 nt, Human herpesvirus 1
gguccucgugcccucgcggg

SEQ ID NO: 3947977 - RNA, 13 nt, Human herpesvirus 1
ggucguccgcgga

SEQ ID NO: 3947978 - RNA, 15 nt, Human herpesvirus 1
ggucuaucacacccg

SEQ ID NO: 3947979 - RNA, 17 nt, Human herpesvirus 1
ggucucccagggagccc

SEQ ID NO: 3947980 - RNA, 19 nt, Human herpesvirus 1
ggucucccagggagccccg

SEQ ID NO: 3947981 - RNA, 16 nt, Human herpesvirus 1
ggucugucucgucucc

SEQ ID NO: 3947982 - RNA, 17 nt, Human herpesvirus 1
ggugaacgccuccgccc

SEQ ID NO: 3947983 - RNA, 18 nt, Human herpesvirus 1
ggugacgccgacgaggac

SEQ ID NO: 3947984 - RNA, 21 nt, Human herpesvirus 1
gguggaucuuagccuccccgg

SEQ ID NO: 3947985 - RNA, 16 nt, Human herpesvirus 1
gguggaugccucucuc

SEQ ID NO: 3947986 - RNA, 13 nt, Human herpesvirus 1
gguggcacagaac

SEQ ID NO: 3947987 - RNA, 20 nt, Human herpesvirus 1
gguggcgaccacgggcuguc

SEQ ID NO: 3947988 - RNA, 15 nt, Human herpesvirus 1
ggugggcguccugga

SEQ ID NO: 3947989 - RNA, 23 nt, Human herpesvirus 1
gguggucucuggccgcgcccacu

SEQ ID NO: 3947990 - RNA, 18 nt, Human herpesvirus 1
ggugucugggaauagagc

SEQ ID NO: 3947991 - RNA, 15 nt, Human herpesvirus 1
gguucccccccgugg

SEQ ID NO: 3947992 - RNA, 16 nt, Human herpesvirus 1
gguucucccuguucaa

SEQ ID NO: 3947993 - RNA, 23 nt, Human herpesvirus 1
gguugcggcccgcguuuggccug

SEQ ID NO: 3947994 - RNA, 23 nt, Human herpesvirus 1
guaacguuccgccuggaggacgg

SEQ ID NO: 3947995 - RNA, 14 nt, Human herpesvirus 1
guaaggacacgcgc

SEQ ID NO: 3947996 - RNA, 16 nt, Human herpesvirus 1
guacccuuaauaaauu

SEQ ID NO: 3947997 - RNA, 19 nt, Human herpesvirus 1
guaccugcagacgguggug

SEQ ID NO: 3947998 - RNA, 16 nt, Human herpesvirus 1
guacgccccaccggca

SEQ ID NO: 3947999 - RNA, 16 nt, Human herpesvirus 1
guacgccgccaccgug

SEQ ID NO: 3948000 - RNA, 19 nt, Human herpesvirus 1
guacgccgccaccguggcc

SEQ ID NO: 3948001 - RNA, 16 nt, Human herpesvirus 1
guacucccaccagcug

SEQ ID NO: 3948002 - RNA, 17 nt, Human herpesvirus 1
acgccucccccacaucc

SEQ ID NO: 3948003 - RNA, 15 nt, Human herpesvirus 1
acgccugccaaccug

SEQ ID NO: 3948004 - RNA, 19 nt, Human herpesvirus 1
acgccuggggucgcggccg

SEQ ID NO: 3948005 - RNA, 17 nt, Human herpesvirus 1
acgcgaccgucgccgcg

SEQ ID NO: 3948006 - RNA, 16 nt, Human herpesvirus 1
acgcgagcgaggcccc

SEQ ID NO: 3948007 - RNA, 18 nt, Human herpesvirus 1
acgcgcaccuguuccgcc

SEQ ID NO: 3948008 - RNA, 22 nt, Human herpesvirus 1
acgcgccgcgggcccccggccg

SEQ ID NO: 3948009 - RNA, 21 nt, Human herpesvirus 1
acgcgcgcgaccucaccacca

SEQ ID NO: 3948010 - RNA, 11 nt, Human herpesvirus 1
acgcgcguccu

SEQ ID NO: 3948011 - RNA, 18 nt, Human herpesvirus 1
acgcgcguccuucuuguc

SEQ ID NO: 3948012 - RNA, 14 nt, Human herpesvirus 1
acgcgggccccggg

SEQ ID NO: 3948013 - RNA, 17 nt, Human herpesvirus 1
acgcuggggguccuggu

SEQ ID NO: 3948014 - RNA, 13 nt, Human herpesvirus 1
acggcauaugcaa

SEQ ID NO: 3948015 - RNA, 17 nt, Human herpesvirus 1
acggcauucgggccugc

SEQ ID NO: 3948016 - RNA, 22 nt, Human herpesvirus 1
acggcgaaugcagcgccggccu

SEQ ID NO: 3948017 - RNA, 14 nt, Human herpesvirus 1
acggcggaccuggc

SEQ ID NO: 3948018 - RNA, 14 nt, Human herpesvirus 1
acgggcggccaccc

SEQ ID NO: 3948019 - RNA, 19 nt, Human herpesvirus 1
acggggccgggagcgccag

SEQ ID NO: 3948020 - RNA, 20 nt, Human herpesvirus 1
acgggguaugugauaugcua

SEQ ID NO: 3948021 - RNA, 21 nt, Human herpesvirus 1
acgguggugcccagcggccug

SEQ ID NO: 3948022 - RNA, 16 nt, Human herpesvirus 1
acguccugggccaccu

SEQ ID NO: 3948023 - RNA, 23 nt, Human herpesvirus 1
acgucgccccuguggcccuggcg

SEQ ID NO: 3948024 - RNA, 18 nt, Human herpesvirus 1
acgugguccgcggggccu

SEQ ID NO: 3948025 - RNA, 17 nt, Human herpesvirus 1
acguucgcgcgccaucu

SEQ ID NO: 3948026 - RNA, 14 nt, Human herpesvirus 1
acuacauuaaauug

SEQ ID NO: 3948027 - RNA, 22 nt, Human herpesvirus 1
acuacgcuucggccgccaccca

SEQ ID NO: 3948028 - RNA, 11 nt, Human herpesvirus 1
acuccccggac

SEQ ID NO: 3948029 - RNA, 12 nt, Human herpesvirus 1
acuccccggacc

SEQ ID NO: 3948030 - RNA, 12 nt, Human herpesvirus 1
acuccggccgcg

SEQ ID NO: 3948031 - RNA, 13 nt, Human herpesvirus 1
acuccgucuuggu

SEQ ID NO: 3948032 - RNA, 16 nt, Human herpesvirus 1
acucgacccacugccu

SEQ ID NO: 3948033 - RNA, 16 nt, Human herpesvirus 1
acucucccccaccgcc

SEQ ID NO: 3948034 - RNA, 14 nt, Human herpesvirus 1
acucucgcaccauc

SEQ ID NO: 3948035 - RNA, 11 nt, Human herpesvirus 1
acucugggcgu

SEQ ID NO: 3948036 - RNA, 23 nt, Human herpesvirus 1
acugcggucugucucgucuccuc

SEQ ID NO: 3948037 - RNA, 22 nt, Human herpesvirus 1
acuggaggaggaggaagaggag

SEQ ID NO: 3948038 - RNA, 20 nt, Human herpesvirus 1
acuggccgggagcaccacau

SEQ ID NO: 3948039 - RNA, 16 nt, Human herpesvirus 1
acuggguucuccugga

SEQ ID NO: 3948040 - RNA, 20 nt, Human herpesvirus 1
acuucccgguaugguaauua

SEQ ID NO: 3948041 - RNA, 18 nt, Human herpesvirus 1
agacaccuuggcccuggc

SEQ ID NO: 3948042 - RNA, 21 nt, Human herpesvirus 1
agaccggauggaggagccccu

SEQ ID NO: 3948043 - RNA, 14 nt, Human herpesvirus 1
agaccuauguguuu

SEQ ID NO: 3948044 - RNA, 16 nt, Human herpesvirus 1
agacgcugcuccgccu

SEQ ID NO: 3948045 - RNA, 18 nt, Human herpesvirus 1
agacggcauucgggccug

SEQ ID NO: 3948046 - RNA, 16 nt, Human herpesvirus 1
agagcggggccguggc

SEQ ID NO: 3948047 - RNA, 13 nt, Human herpesvirus 1
agaggcccacgcc

SEQ ID NO: 3948048 - RNA, 18 nt, Human herpesvirus 1
agagucgacgaccugggg

SEQ ID NO: 3948049 - RNA, 18 nt, Human herpesvirus 1
agagucggagcccgcugg

SEQ ID NO: 3948050 - RNA, 13 nt, Human herpesvirus 1
agcagagccgcaa

SEQ ID NO: 3948051 - RNA, 19 nt, Human herpesvirus 1
agcagguccgcggugggcu

SEQ ID NO: 3948052 - RNA, 18 nt, Human herpesvirus 1
agcaucgggaugcugccc

SEQ ID NO: 3948053 - RNA, 21 nt, Human herpesvirus 1
agcauucgcucucgccuuucc

SEQ ID NO: 3948054 - RNA, 16 nt, Human herpesvirus 1
agccacccacgccgcc

SEQ ID NO: 3948055 - RNA, 15 nt, Human herpesvirus 1
agcccaacccacacg

SEQ ID NO: 3948056 - RNA, 18 nt, Human herpesvirus 1
agcccaacccacacgcac

SEQ ID NO: 3948057 - RNA, 21 nt, Human herpesvirus 1
agcccacaugcggaaagcaag

SEQ ID NO: 3948058 - RNA, 22 nt, Human herpesvirus 1
agccccaaagcgcauacgccuc

SEQ ID NO: 3948059 - RNA, 12 nt, Human herpesvirus 1
agccccccagcc

SEQ ID NO: 3948060 - RNA, 20 nt, Human herpesvirus 1
agccccggucuccccgggag

SEQ ID NO: 3948061 - RNA, 14 nt, Human herpesvirus 1
agcccggaggcgcc

SEQ ID NO: 3948062 - RNA, 15 nt, Human herpesvirus 1
agcccggccguguga

SEQ ID NO: 3948063 - RNA, 23 nt, Human herpesvirus 1
agcccucccgaccgacaccccca

SEQ ID NO: 3948064 - RNA, 16 nt, Human herpesvirus 1
agcccugcucgggcag

SEQ ID NO: 3948065 - RNA, 23 nt, Human herpesvirus 1
agccgcgauuccgagggccgggc

SEQ ID NO: 3948066 - RNA, 13 nt, Human herpesvirus 1
agcgaaggcugcc

SEQ ID NO: 3948067 - RNA, 15 nt, Human herpesvirus 1
agcgccccggcgacc

SEQ ID NO: 3948068 - RNA, 14 nt, Human herpesvirus 1
agcgcccuccugac

SEQ ID NO: 3948069 - RNA, 21 nt, Human herpesvirus 1
agcguauaccaacccgccccu

SEQ ID NO: 3948070 - RNA, 20 nt, Human herpesvirus 1
agcgucccugggcccuggcc

SEQ ID NO: 3948071 - RNA, 17 nt, Human herpesvirus 1
agcgugacgcacccccu

SEQ ID NO: 3948072 - RNA, 21 nt, Human herpesvirus 1
agcuccuggccuacgucuccg

SEQ ID NO: 3948073 - RNA, 20 nt, Human herpesvirus 1
agcucgcggagggcggccag

SEQ ID NO: 3948074 - RNA, 18 nt, Human herpesvirus 1
agcuugcgucccuccccg

SEQ ID NO: 3948075 - RNA, 15 nt, Human herpesvirus 1
agcuuuccgagggcg

SEQ ID NO: 3948076 - RNA, 18 nt, Human herpesvirus 1
aggacaaacccaaccguc

SEQ ID NO: 3948077 - RNA, 14 nt, Human herpesvirus 1
aggaccccgugggc

SEQ ID NO: 3948078 - RNA, 15 nt, Human herpesvirus 1
aggaccgcgcccccg

SEQ ID NO: 3948079 - RNA, 14 nt, Human herpesvirus 1
aggagaucgccauc

SEQ ID NO: 3948080 - RNA, 15 nt, Human herpesvirus 1
aggaggccgccacgc

SEQ ID NO: 3948081 - RNA, 19 nt, Human herpesvirus 1
aggauucggcccucuugga

SEQ ID NO: 3948082 - RNA, 18 nt, Human herpesvirus 1
aggcccgcaagcugaacc

SEQ ID NO: 3948083 - RNA, 21 nt, Human herpesvirus 1
aggccuuguuccgcuucccgg

SEQ ID NO: 3948084 - RNA, 19 nt, Human herpesvirus 1
aggcgcucgucgccuggcu

SEQ ID NO: 3948085 - RNA, 23 nt, Human herpesvirus 1
agggaaagcaaagaggggcuggg

SEQ ID NO: 3948086 - RNA, 15 nt, Human herpesvirus 1
agggagccccggucu

SEQ ID NO: 3948087 - RNA, 15 nt, Human herpesvirus 1
agggcagggccgcgg

SEQ ID NO: 3948088 - RNA, 16 nt, Human herpesvirus 1
agggcaucgcgguggu

SEQ ID NO: 3948089 - RNA, 14 nt, Human herpesvirus 1
agggccgugcccau

SEQ ID NO: 3948090 - RNA, 19 nt, Human herpesvirus 1
agggcugccagaccucaac

SEQ ID NO: 3948091 - RNA, 18 nt, Human herpesvirus 1
aggggcgcuuaccgccac

SEQ ID NO: 3948092 - RNA, 22 nt, Human herpesvirus 1
agggggggggggcauuucagug

SEQ ID NO: 3948093 - RNA, 23 nt, Human herpesvirus 1
agggggucugucgguccacggcc

SEQ ID NO: 3948094 - RNA, 14 nt, Human herpesvirus 1
agggugucccagga

SEQ ID NO: 3948095 - RNA, 19 nt, Human herpesvirus 1
agguacggggcggcccgug

SEQ ID NO: 3948096 - RNA, 20 nt, Human herpesvirus 1
aggugcccccgcgccucccg

SEQ ID NO: 3948097 - RNA, 23 nt, Human herpesvirus 1
aguaacaugcgcacgugauguag

SEQ ID NO: 3948098 - RNA, 19 nt, Human herpesvirus 1
aguaugccccccuggcgag

SEQ ID NO: 3948099 - RNA, 15 nt, Human herpesvirus 1
aguccgaagaggaag

SEQ ID NO: 3948100 - RNA, 21 nt, Human herpesvirus 1
agucggcaagauccucgggcu

SEQ ID NO: 3948101 - RNA, 19 nt, Human herpesvirus 1
agucuucggggcccggccc

SEQ ID NO: 3948102 - RNA, 13 nt, Human herpesvirus 1
agugaaagacacg

SEQ ID NO: 3948103 - RNA, 16 nt, Human herpesvirus 1
aguucgagcagccgcg

SEQ ID NO: 3948104 - RNA, 18 nt, Human herpesvirus 1
aguuggcauuggauccgg

SEQ ID NO: 3948105 - RNA, 21 nt, Human herpesvirus 1
aguugggccgggcgacccaga

SEQ ID NO: 3948106 - RNA, 18 nt, Human herpesvirus 1
aguuuguggacccaaagc

SEQ ID NO: 3948107 - RNA, 20 nt, Human herpesvirus 1
auaaagccgccacccucucu

SEQ ID NO: 3948108 - RNA, 20 nt, Human herpesvirus 1
auaaauuuuacaaacagauu

SEQ ID NO: 3948109 - RNA, 17 nt, Human herpesvirus 1
auacggugcgggcggcc

SEQ ID NO: 3948110 - RNA, 19 nt, Human herpesvirus 1
auagccauccccgcgucca

SEQ ID NO: 3948111 - RNA, 13 nt, Human herpesvirus 1
auauccugagccc

SEQ ID NO: 3948112 - RNA, 12 nt, Human herpesvirus 1
auaugccugugu

SEQ ID NO: 3948113 - RNA, 15 nt, Human herpesvirus 1
auaugccuguguguc

SEQ ID NO: 3948114 - RNA, 18 nt, Human herpesvirus 1
aucaccaaccacccgggg

SEQ ID NO: 3948115 - RNA, 22 nt, Human herpesvirus 1
aucaccccgcaauuugcaccca

SEQ ID NO: 3948116 - RNA, 17 nt, Human herpesvirus 1
aucagcuguggacccga

SEQ ID NO: 3948117 - RNA, 11 nt, Human herpesvirus 1
cucgccccgga

SEQ ID NO: 3948118 - RNA, 20 nt, Human herpesvirus 1
cucgcgcguggaccuggggg

SEQ ID NO: 3948119 - RNA, 19 nt, Human herpesvirus 1
cucgcggagcuguacgugc

SEQ ID NO: 3948120 - RNA, 14 nt, Human herpesvirus 1
cucgcugcccuucu

SEQ ID NO: 3948121 - RNA, 16 nt, Human herpesvirus 1
cucgcugcuggcggac

SEQ ID NO: 3948122 - RNA, 18 nt, Human herpesvirus 1
cucggcccccgaggccag

SEQ ID NO: 3948123 - RNA, 19 nt, Human herpesvirus 1
cucguacgcaugggccgcc

SEQ ID NO: 3948124 - RNA, 15 nt, Human herpesvirus 1
cucgucgggguggca

SEQ ID NO: 3948125 - RNA, 16 nt, Human herpesvirus 1
cucgucuccucuucuc

SEQ ID NO: 3948126 - RNA, 13 nt, Human herpesvirus 1
cucguuugccgcc

SEQ ID NO: 3948127 - RNA, 14 nt, Human herpesvirus 1
cucucccgggccgc

SEQ ID NO: 3948128 - RNA, 12 nt, Human herpesvirus 1
cucucuucucuc

SEQ ID NO: 3948129 - RNA, 16 nt, Human herpesvirus 1
cucuggacgcccgggc

SEQ ID NO: 3948130 - RNA, 15 nt, Human herpesvirus 1
cucuggacuggacca

SEQ ID NO: 3948131 - RNA, 23 nt, Human herpesvirus 1
cucugggggcgacccguaaaugg

SEQ ID NO: 3948132 - RNA, 22 nt, Human herpesvirus 1
cucugggucugugccaccagcc

SEQ ID NO: 3948133 - RNA, 14 nt, Human herpesvirus 1
cucuucgcuuuccu

SEQ ID NO: 3948134 - RNA, 13 nt, Human herpesvirus 1
uccggccuggggg

SEQ ID NO: 3948135 - RNA, 19 nt, Human herpesvirus 1
uccggccugggggccgucc

SEQ ID NO: 3948136 - RNA, 12 nt, Human herpesvirus 1
uccggggguccg

SEQ ID NO: 3948137 - RNA, 22 nt, Human herpesvirus 1
uccggucgccccgacccccuug

SEQ ID NO: 3948138 - RNA, 19 nt, Human herpesvirus 1
uccguggccccggccccca

SEQ ID NO: 3948139 - RNA, 18 nt, Human herpesvirus 1
uccuaacccagaccccgg

SEQ ID NO: 3948140 - RNA, 22 nt, Human herpesvirus 1
uccuacgccggggcggucguca

SEQ ID NO: 3948141 - RNA, 14 nt, Human herpesvirus 1
uccugauguggcug

SEQ ID NO: 3948142 - RNA, 16 nt, Human herpesvirus 1
uccugauguggcugcu

SEQ ID NO: 3948143 - RNA, 22 nt, Human herpesvirus 1
uccuguaaguacgcccucccgc

SEQ ID NO: 3948144 - RNA, 23 nt, Human herpesvirus 1
uccuuacgcuaaucccccggcuc

SEQ ID NO: 3948145 - RNA, 18 nt, Human herpesvirus 1
ucgaccaccauccccgcu

SEQ ID NO: 3948146 - RNA, 23 nt, Human herpesvirus 1
ucgacggcuucuacgcgcgcgac

SEQ ID NO: 3948147 - RNA, 19 nt, Human herpesvirus 1
ucgacucuaucgcgcgcau

SEQ ID NO: 3948148 - RNA, 18 nt, Human herpesvirus 1
ucgagaugagccagaccc

SEQ ID NO: 3948149 - RNA, 14 nt, Human herpesvirus 1
ucgagaugggccag

SEQ ID NO: 3948150 - RNA, 20 nt, Human herpesvirus 1
ucgagccaacgcccugacca

SEQ ID NO: 3948151 - RNA, 21 nt, Human herpesvirus 1
ucgaucguccaucaccacgcc

SEQ ID NO: 3948152 - RNA, 23 nt, Human herpesvirus 1
ucgccccguacaaguucaaggcc

SEQ ID NO: 3948153 - RNA, 13 nt, Human herpesvirus 1
ucgccgcggcucc

SEQ ID NO: 3948154 - RNA, 15 nt, Human herpesvirus 1
ucgccuggcugaccc

SEQ ID NO: 3948155 - RNA, 23 nt, Human herpesvirus 1
ucgcgauacccucgggcaucucg

SEQ ID NO: 3948156 - RNA, 18 nt, Human herpesvirus 1
ucgcggagggcggccagc

SEQ ID NO: 3948157 - RNA, 13 nt, Human herpesvirus 1
ucgcggccgcgac

SEQ ID NO: 3948158 - RNA, 15 nt, Human herpesvirus 1
ucgcggcuucgcggu

SEQ ID NO: 3948159 - RNA, 16 nt, Human herpesvirus 1
ucgcgggccucguggg

SEQ ID NO: 3948160 - RNA, 16 nt, Human herpesvirus 1
ucgcgguagcccggcc

SEQ ID NO: 3948161 - RNA, 19 nt, Human herpesvirus 1
ucgcgguggucuucaagga

SEQ ID NO: 3948162 - RNA, 21 nt, Human herpesvirus 1
ucgcuagaccacgccccuuuc

SEQ ID NO: 3948163 - RNA, 22 nt, Human herpesvirus 1
ucgcuugguuucggaugggagg

SEQ ID NO: 3948164 - RNA, 14 nt, Human herpesvirus 1
ucggcaggcaccgc

SEQ ID NO: 3948165 - RNA, 20 nt, Human herpesvirus 1
ucggccgccgacgaccuggu

SEQ ID NO: 3948166 - RNA, 20 nt, Human herpesvirus 1
ucggccguuucuccgcccga

SEQ ID NO: 3948167 - RNA, 20 nt, Human herpesvirus 1
ucgggcauggccccggggcg

SEQ ID NO: 3948168 - RNA, 13 nt, Human herpesvirus 1
ucgugcccuucca

SEQ ID NO: 3948169 - RNA, 13 nt, Human herpesvirus 1
ucuacaacaacua

SEQ ID NO: 3948170 - RNA, 12 nt, Human herpesvirus 1
ucucccagggag

SEQ ID NO: 3948171 - RNA, 17 nt, Human herpesvirus 1
ucucccagggagccccg

SEQ ID NO: 3948172 - RNA, 21 nt, Human herpesvirus 1
ucuccgaucccaacuccucag

SEQ ID NO: 3948173 - RNA, 15 nt, Human herpesvirus 1
ucuccggacccccgc

SEQ ID NO: 3948174 - RNA, 23 nt, Human herpesvirus 1
ucugggcccgacagaccuccccg

SEQ ID NO: 3948175 - RNA, 15 nt, Human herpesvirus 1
ucugggggccugucc

SEQ ID NO: 3948176 - RNA, 20 nt, Human herpesvirus 1
ucuuccacgaacccagcgac

SEQ ID NO: 3948177 - RNA, 15 nt, Human herpesvirus 1
ugaaaccggccaacg

SEQ ID NO: 3948178 - RNA, 18 nt, Human herpesvirus 1
ugaaagacacgggcacca

SEQ ID NO: 3948179 - RNA, 14 nt, Human herpesvirus 1
ugaaccccaacgcc

SEQ ID NO: 3948180 - RNA, 18 nt, Human herpesvirus 1
ugaacgacugggccgagg

SEQ ID NO: 3948181 - RNA, 22 nt, Human herpesvirus 1
ugaagcccccaacaugacccag

SEQ ID NO: 3948182 - RNA, 13 nt, Human herpesvirus 1
ugaccccagggau

SEQ ID NO: 3948183 - RNA, 20 nt, Human herpesvirus 1
ugacccuaggaggccgccac

SEQ ID NO: 3948184 - RNA, 15 nt, Human herpesvirus 1
ugacgccucagggcc

SEQ ID NO: 3948185 - RNA, 16 nt, Human herpesvirus 1
ugacggccgacgacga

SEQ ID NO: 3948186 - RNA, 19 nt, Human herpesvirus 1
ugauaaugaucaagcggcg

SEQ ID NO: 3948187 - RNA, 22 nt, Human herpesvirus 1
ugaucuuggcguuauucccaaa

SEQ ID NO: 3948188 - RNA, 17 nt, Human herpesvirus 1
aaaagaccgcaucgaca

SEQ ID NO: 3948189 - RNA, 15 nt, Human herpesvirus 1
aaacgccucccccug

SEQ ID NO: 3948190 - RNA, 20 nt, Human herpesvirus 1
aaacggccgaagccacgccc

SEQ ID NO: 3948191 - RNA, 20 nt, Human herpesvirus 1
aaacucauuaaugggcggcc

SEQ ID NO: 3948192 - RNA, 21 nt, Human herpesvirus 1
aaagcugcuggcgcgcacccc

SEQ ID NO: 3948193 - RNA, 22 nt, Human herpesvirus 1
aacagcucgcggaggagccagu

SEQ ID NO: 3948194 - RNA, 11 nt, Human herpesvirus 1
aaccaggccgu

SEQ ID NO: 3948195 - RNA, 15 nt, Human herpesvirus 1
aacccaaccaaacca

SEQ ID NO: 3948196 - RNA, 23 nt, Human herpesvirus 1
aacccacacgcacuugcggcaag

SEQ ID NO: 3948197 - RNA, 16 nt, Human herpesvirus 1
aaccccacgcccccgc

SEQ ID NO: 3948198 - RNA, 17 nt, Human herpesvirus 1
aaccuccgggggcggcg

SEQ ID NO: 3948199 - RNA, 12 nt, Human herpesvirus 1
aacgacggcccg

SEQ ID NO: 3948200 - RNA, 22 nt, Human herpesvirus 1
aacgcaacggcgggagcugggu

SEQ ID NO: 3948201 - RNA, 21 nt, Human herpesvirus 1
aacgccgcuaccgacgcuccc

SEQ ID NO: 3948202 - RNA, 17 nt, Human herpesvirus 1
aacgccuccccuguugg

SEQ ID NO: 3948203 - RNA, 21 nt, Human herpesvirus 1
aacuucgacccgcaacgcgcu

SEQ ID NO: 3948204 - RNA, 19 nt, Human herpesvirus 1
aagacccccccggagccgg

SEQ ID NO: 3948205 - RNA, 17 nt, Human herpesvirus 1
aagauggccgaccccaa

SEQ ID NO: 3948206 - RNA, 13 nt, Human herpesvirus 1
aagccacaaaaug

SEQ ID NO: 3948207 - RNA, 14 nt, Human herpesvirus 1
aagccuacuacucg

SEQ ID NO: 3948208 - RNA, 17 nt, Human herpesvirus 1
aagccuacuacucggaa

SEQ ID NO: 3948209 - RNA, 18 nt, Human herpesvirus 1
aagcgacggacgugcgcc

SEQ ID NO: 3948210 - RNA, 19 nt, Human herpesvirus 1
aagcuagccgaggcccggg

SEQ ID NO: 3948211 - RNA, 17 nt, Human herpesvirus 1
aagcugaugucccucau

SEQ ID NO: 3948212 - RNA, 10 nt, Human herpesvirus 1
aaggccuggg

SEQ ID NO: 3948213 - RNA, 19 nt, Human herpesvirus 1
aagucgguagcgggggacg

SEQ ID NO: 3948214 - RNA, 13 nt, Human herpesvirus 1
aauaaaaacauug

SEQ ID NO: 3948215 - RNA, 24 nt, Human herpesvirus 1
aaucauaaccacgcccagcgcaga

SEQ ID NO: 3948216 - RNA, 18 nt, Human herpesvirus 1
cccgucgaagcugauguc

SEQ ID NO: 3948217 - RNA, 15 nt, Human herpesvirus 1
cccgugucugugggc

SEQ ID NO: 3948218 - RNA, 18 nt, Human herpesvirus 1
cccgugugccgcgccugg

SEQ ID NO: 3948219 - RNA, 21 nt, Human herpesvirus 1
cccuaaccaggccuccacccc

SEQ ID NO: 3948220 - RNA, 13 nt, Human herpesvirus 1
cccuaccccaguc

SEQ ID NO: 3948221 - RNA, 21 nt, Human herpesvirus 1
ccuaccggccccugggccccg

SEQ ID NO: 3948222 - RNA, 13 nt, Human herpesvirus 1
ccuagccgcagca

SEQ ID NO: 3948223 - RNA, 18 nt, Human herpesvirus 1
ccuaugccacgccagggc

SEQ ID NO: 3948224 - RNA, 14 nt, Human herpesvirus 1
ccucagggccuccg

SEQ ID NO: 3948225 - RNA, 14 nt, Human herpesvirus 1
ccucaggucauccu

SEQ ID NO: 3948226 - RNA, 19 nt, Human herpesvirus 1
ccuccaccacccaacccca

SEQ ID NO: 3948227 - RNA, 11 nt, Human herpesvirus 1
ccuccaugggg

SEQ ID NO: 3948228 - RNA, 22 nt, Human herpesvirus 1
ccucccgauaaaaagcgccccg

SEQ ID NO: 3948229 - RNA, 17 nt, Human herpesvirus 1
ccucccgucaccgguuc

SEQ ID NO: 3948230 - RNA, 16 nt, Human herpesvirus 1
ccuccgacgcccagca

SEQ ID NO: 3948231 - RNA, 16 nt, Human herpesvirus 1
ccuccgcgccaggccc

SEQ ID NO: 3948232 - RNA, 21 nt, Human herpesvirus 1
ccuccgcgccaggcccgccgc

SEQ ID NO: 3948233 - RNA, 17 nt, Human herpesvirus 1
ccuccgcuggggccccc

SEQ ID NO: 3948234 - RNA, 15 nt, Human herpesvirus 1
ccucgaccaccaccu

SEQ ID NO: 3948235 - RNA, 13 nt, Human herpesvirus 1
ccucgaugacguc

SEQ ID NO: 3948236 - RNA, 21 nt, Human herpesvirus 1
ccucgcgccacacucaccggc

SEQ ID NO: 3948237 - RNA, 17 nt, Human herpesvirus 1
ccucucacacagcaucc

SEQ ID NO: 3948238 - RNA, 21 nt, Human herpesvirus 1
ccucucguucuccggggcccg

SEQ ID NO: 3948239 - RNA, 14 nt, Human herpesvirus 1
ccucugggcccgcc

SEQ ID NO: 3948240 - RNA, 23 nt, Human herpesvirus 1
ccucugggucugugccaccagcc

SEQ ID NO: 3948241 - RNA, 20 nt, Human herpesvirus 1
ccucugugucagguggcccu

SEQ ID NO: 3948242 - RNA, 16 nt, Human herpesvirus 1
ccugagcccggcggcg

SEQ ID NO: 3948243 - RNA, 17 nt, Human herpesvirus 1
ccugaucgccggcgcgg

SEQ ID NO: 3948244 - RNA, 13 nt, Human herpesvirus 1
ccugcccccugga

SEQ ID NO: 3948245 - RNA, 18 nt, Human herpesvirus 1
ccugcccgacagggccgu

SEQ ID NO: 3948246 - RNA, 16 nt, Human herpesvirus 1
ccugcgaggugcgcca

SEQ ID NO: 3948247 - RNA, 17 nt, Human herpesvirus 1
ccugcgccccgccgccc

SEQ ID NO: 3948248 - RNA, 20 nt, Human herpesvirus 1
ccugcuuauucucggggagc

SEQ ID NO: 3948249 - RNA, 22 nt, Human herpesvirus 1
ccuggagcucaaucuggcccaa

SEQ ID NO: 3948250 - RNA, 21 nt, Human herpesvirus 1
ccuggaggacggcgccggggc

SEQ ID NO: 3948251 - RNA, 15 nt, Human herpesvirus 1
ccuggauucgcugga

SEQ ID NO: 3948252 - RNA, 11 nt, Human herpesvirus 1
ccuggccagga

SEQ ID NO: 3948253 - RNA, 20 nt, Human herpesvirus 1
ccuggccccaguccccaaga

SEQ ID NO: 3948254 - RNA, 19 nt, Human herpesvirus 1
ccuggccgaggacaccccu

SEQ ID NO: 3948255 - RNA, 17 nt, Human herpesvirus 1
ccuggcgagcccagacc

SEQ ID NO: 3948256 - RNA, 16 nt, Human herpesvirus 1
ccuggcuggccgcucg

SEQ ID NO: 3948257 - RNA, 14 nt, Human herpesvirus 1
ccugggccaccuga

SEQ ID NO: 3948258 - RNA, 17 nt, Human herpesvirus 1
ccugggggacugcaucg

SEQ ID NO: 3948259 - RNA, 13 nt, Human herpesvirus 1
ccugggggcaccc

SEQ ID NO: 3948260 - RNA, 13 nt, Human herpesvirus 1
ccugggguuccug

SEQ ID NO: 3948261 - RNA, 16 nt, Human herpesvirus 1
ccuggucagaggccca

SEQ ID NO: 3948262 - RNA, 18 nt, Human herpesvirus 1
ccugucgcacccacagcu

SEQ ID NO: 3948263 - RNA, 21 nt, Human herpesvirus 1
ccuguguccgcuucucuuugg

SEQ ID NO: 3948264 - RNA, 18 nt, Human herpesvirus 1
ccuguuugucgccuggcu

SEQ ID NO: 3948265 - RNA, 19 nt, Human herpesvirus 1
ccuuccccccccccccuua

SEQ ID NO: 3948266 - RNA, 20 nt, Human herpesvirus 1
ccuuccuaacccagaccccg

SEQ ID NO: 3948267 - RNA, 20 nt, Human herpesvirus 1
ccuucugcgggucaccugcc

SEQ ID NO: 3948268 - RNA, 12 nt, Human herpesvirus 1
ccuucuucgccu

SEQ ID NO: 3948269 - RNA, 13 nt, Human herpesvirus 1
ccuuuggggcgcu

SEQ ID NO: 3948270 - RNA, 18 nt, Human herpesvirus 1
ccuuuguccccgccgaca

SEQ ID NO: 3948271 - RNA, 18 nt, Human herpesvirus 1
cgaacaaacgacccacca

SEQ ID NO: 3948272 - RNA, 18 nt, Human herpesvirus 1
cgaacaucuugagggggg

SEQ ID NO: 3948273 - RNA, 14 nt, Human herpesvirus 1
cgaacccagcgacc

SEQ ID NO: 3948274 - RNA, 21 nt, Human herpesvirus 1
cgaagacccccccggagccgg

SEQ ID NO: 3948275 - RNA, 15 nt, Human herpesvirus 1
cgaagagggggaccc

SEQ ID NO: 3948276 - RNA, 14 nt, Human herpesvirus 1
cgaagcuucggggg

SEQ ID NO: 3948277 - RNA, 12 nt, Human herpesvirus 1
cgacaacagccc

SEQ ID NO: 3948278 - RNA, 12 nt, Human herpesvirus 1
cgacaacugccu

SEQ ID NO: 3948279 - RNA, 12 nt, Human herpesvirus 1
cgacacccccau

SEQ ID NO: 3948280 - RNA, 13 nt, Human herpesvirus 1
cgacagccccccc

SEQ ID NO: 3948281 - RNA, 19 nt, Human herpesvirus 1
cgacagcccccccaagcgc

SEQ ID NO: 3948282 - RNA, 23 nt, Human herpesvirus 1
cgaccaacgucgccgcccugagc

SEQ ID NO: 3948283 - RNA, 22 nt, Human herpesvirus 1
cgaccaccauccccgcucccuc

SEQ ID NO: 3948284 - RNA, 17 nt, Human herpesvirus 1
cgaccagcgccgggugg

SEQ ID NO: 3948285 - RNA, 14 nt, Human herpesvirus 1
cgaccaggcgcgcc

SEQ ID NO: 3948286 - RNA, 19 nt, Human herpesvirus 1
cgaccaggcgcgccgcgag

SEQ ID NO: 3948287 - RNA, 21 nt, Human herpesvirus 1
cgacccccauggagcacgagc

SEQ ID NO: 3948288 - RNA, 15 nt, Human herpesvirus 1
cgacccgcaacgcgc

SEQ ID NO: 3948289 - RNA, 19 nt, Human herpesvirus 1
cgacccugaucccccgcgc

SEQ ID NO: 3948290 - RNA, 15 nt, Human herpesvirus 1
cgaccgacuccccgc

SEQ ID NO: 3948291 - RNA, 18 nt, Human herpesvirus 1
cgaccgcagucccugagu

SEQ ID NO: 3948292 - RNA, 19 nt, Human herpesvirus 1
cgaccgcagucccugaguu

SEQ ID NO: 3948293 - RNA, 21 nt, Human herpesvirus 1
cgaccgcgcccucgccacacc

SEQ ID NO: 3948294 - RNA, 13 nt, Human herpesvirus 1
cgacgaccugggg

SEQ ID NO: 3948295 - RNA, 13 nt, Human herpesvirus 1
cgacgcacacacc

SEQ ID NO: 3948296 - RNA, 14 nt, Human herpesvirus 1
cgacgcacacaccc

SEQ ID NO: 3948297 - RNA, 19 nt, Human herpesvirus 1
cgacgccgugggcaauggc

SEQ ID NO: 3948298 - RNA, 14 nt, Human herpesvirus 1
cgacggcccgacca

SEQ ID NO: 3948299 - RNA, 17 nt, Human herpesvirus 1
cgacgucgcgccugggu

SEQ ID NO: 3948300 - RNA, 16 nt, Human herpesvirus 1
cgacgugguccgcggg

SEQ ID NO: 3948301 - RNA, 22 nt, Human herpesvirus 1
cgacugccagcuaugggcccug

SEQ ID NO: 3948302 - RNA, 13 nt, Human herpesvirus 1
cgacugccccccc

SEQ ID NO: 3948303 - RNA, 18 nt, Human herpesvirus 1
cgacugggggggauccgc

SEQ ID NO: 3948304 - RNA, 21 nt, Human herpesvirus 1
cgacugggggggauccgcccu

SEQ ID NO: 3948305 - RNA, 14 nt, Human herpesvirus 1
cgacuugccccccu

SEQ ID NO: 3948306 - RNA, 16 nt, Human herpesvirus 1
cgagaucaaggacagc

SEQ ID NO: 3948307 - RNA, 20 nt, Human herpesvirus 1
cgagccaacgcccugaccaa

SEQ ID NO: 3948308 - RNA, 18 nt, Human herpesvirus 1
cgagcccaccguggcccg

SEQ ID NO: 3948309 - RNA, 14 nt, Human herpesvirus 1
cgagcccagacccc

SEQ ID NO: 3948310 - RNA, 14 nt, Human herpesvirus 1
cgagccgacggccc

SEQ ID NO: 3948311 - RNA, 19 nt, Human herpesvirus 1
cgagcucccagagacccca

SEQ ID NO: 3948312 - RNA, 23 nt, Human herpesvirus 1
cgaggacaccccucguggccccg

SEQ ID NO: 3948313 - RNA, 14 nt, Human herpesvirus 1
cgaggagguggacg

SEQ ID NO: 3948314 - RNA, 21 nt, Human herpesvirus 1
cgaggcgcauaaagggccggu

SEQ ID NO: 3948315 - RNA, 16 nt, Human herpesvirus 1
cgagggccgggcccca

SEQ ID NO: 3948316 - RNA, 19 nt, Human herpesvirus 1
cgaggggcagcugggggag

SEQ ID NO: 3948317 - RNA, 17 nt, Human herpesvirus 1
cgaggucccgugcaacc

SEQ ID NO: 3948318 - RNA, 13 nt, Human herpesvirus 1
cgagucuggaagg

SEQ ID NO: 3948319 - RNA, 20 nt, Human herpesvirus 1
cgaucccaacaacucccccg

SEQ ID NO: 3948320 - RNA, 15 nt, Human herpesvirus 1
cgaugagccaaccuc

SEQ ID NO: 3948321 - RNA, 17 nt, Human herpesvirus 1
cgaugcgaucgagccgu

SEQ ID NO: 3948322 - RNA, 11 nt, Human herpesvirus 1
cgauggcagga

SEQ ID NO: 3948323 - RNA, 16 nt, Human herpesvirus 1
cgauggcaggagccgc

SEQ ID NO: 3948324 - RNA, 11 nt, Human herpesvirus 1
cgcaagccccu

SEQ ID NO: 3948325 - RNA, 18 nt, Human herpesvirus 1
cgcaagcuaugcagcccc

SEQ ID NO: 3948326 - RNA, 15 nt, Human herpesvirus 1
cgcacauccucaccc

SEQ ID NO: 3948327 - RNA, 19 nt, Human herpesvirus 1
cgcaccaagccgcucuccg

SEQ ID NO: 3948328 - RNA, 22 nt, Human herpesvirus 1
cgcagcguccgguuggccgcgc

SEQ ID NO: 3948329 - RNA, 18 nt, Human herpesvirus 1
cgcagggcgccaugcgug

SEQ ID NO: 3948330 - RNA, 19 nt, Human herpesvirus 1
cgcaugaucuccggacccc

SEQ ID NO: 3948331 - RNA, 14 nt, Human herpesvirus 1
cgccaaacgccagc

SEQ ID NO: 3948332 - RNA, 17 nt, Human herpesvirus 1
cgccaaacgccagccug

SEQ ID NO: 3948333 - RNA, 14 nt, Human herpesvirus 1
cgccacaccacgcc

SEQ ID NO: 3948334 - RNA, 12 nt, Human herpesvirus 1
cgccacccaggc

SEQ ID NO: 3948335 - RNA, 19 nt, Human herpesvirus 1
cgccacccaggcgcugggc

SEQ ID NO: 3948336 - RNA, 16 nt, Human herpesvirus 1
cgccacgcgcggcugg

SEQ ID NO: 3948337 - RNA, 15 nt, Human herpesvirus 1
gaucgccugucuccu

SEQ ID NO: 3948338 - RNA, 14 nt, Human herpesvirus 1
gaucguccaccucc

SEQ ID NO: 3948339 - RNA, 15 nt, Human herpesvirus 1
gaucuacugcugggc

SEQ ID NO: 3948340 - RNA, 20 nt, Human herpesvirus 1
gaucuacugcugggccaugg

SEQ ID NO: 3948341 - RNA, 14 nt, Human herpesvirus 1
gaugcccacgggca

SEQ ID NO: 3948342 - RNA, 17 nt, Human herpesvirus 1
gauggaggagccccugc

SEQ ID NO: 3948343 - RNA, 12 nt, Human herpesvirus 1
gauggcccugga

SEQ ID NO: 3948344 - RNA, 13 nt, Human herpesvirus 1
gauggccugugcu

SEQ ID NO: 3948345 - RNA, 17 nt, Human herpesvirus 1
gaugggcaucgugggcg

SEQ ID NO: 3948346 - RNA, 17 nt, Human herpesvirus 1
gaugggcgaccuggggc

SEQ ID NO: 3948347 - RNA, 13 nt, Human herpesvirus 1
gauggggagagcc

SEQ ID NO: 3948348 - RNA, 14 nt, Human herpesvirus 1
gauggggagagccc

SEQ ID NO: 3948349 - RNA, 15 nt, Human herpesvirus 1
gauggggagagccca

SEQ ID NO: 3948350 - RNA, 13 nt, Human herpesvirus 1
gauguaggcuggu

SEQ ID NO: 3948351 - RNA, 13 nt, Human herpesvirus 1
gauucagcgggcg

SEQ ID NO: 3948352 - RNA, 13 nt, Human herpesvirus 1
gauuccgagggcc

SEQ ID NO: 3948353 - RNA, 22 nt, Human herpesvirus 1
gauuccgccaacgcacuguggc

SEQ ID NO: 3948354 - RNA, 21 nt, Human herpesvirus 1
gauugguccuugucugugccg

SEQ ID NO: 3948355 - RNA, 16 nt, Human herpesvirus 1
gcaacucgccccacga

SEQ ID NO: 3948356 - RNA, 16 nt, Human herpesvirus 1
gcaagguggugauggg

SEQ ID NO: 3948357 - RNA, 13 nt, Human herpesvirus 1
gcaauuugcaccc

SEQ ID NO: 3948358 - RNA, 16 nt, Human herpesvirus 1
gcaauuugcacccagc

SEQ ID NO: 3948359 - RNA, 18 nt, Human herpesvirus 1
gcaauuugcacccagccu

SEQ ID NO: 3948360 - RNA, 21 nt, Human herpesvirus 1
gcacacccccauccggugguc

SEQ ID NO: 3948361 - RNA, 18 nt, Human herpesvirus 1
gcacaucaaggugggcca

SEQ ID NO: 3948362 - RNA, 17 nt, Human herpesvirus 1
gcacauccucacccuca

SEQ ID NO: 3948363 - RNA, 20 nt, Human herpesvirus 1
gcacaugggggaggugcccc

SEQ ID NO: 3948364 - RNA, 21 nt, Human herpesvirus 1
gcaccaccgacucucccaccg

SEQ ID NO: 3948365 - RNA, 23 nt, Human herpesvirus 1
gcaccaccgacucucccaccgcc

SEQ ID NO: 3948366 - RNA, 16 nt, Human herpesvirus 1
gcacccaaggggccgu

SEQ ID NO: 3948367 - RNA, 14 nt, Human herpesvirus 1
gcaccccccccaaa

SEQ ID NO: 3948368 - RNA, 16 nt, Human herpesvirus 1
gcaccgagccaagggc

SEQ ID NO: 3948369 - RNA, 12 nt, Human herpesvirus 1
gcaccgggcccc

SEQ ID NO: 3948370 - RNA, 18 nt, Human herpesvirus 1
gcaccgugggacaccggc

SEQ ID NO: 3948371 - RNA, 17 nt, Human herpesvirus 1
gcacgaccugcgcuucg

SEQ ID NO: 3948372 - RNA, 19 nt, Human herpesvirus 1
gcacgagcgcgcugcucag

SEQ ID NO: 3948373 - RNA, 21 nt, Human herpesvirus 1
gcacgaguucaaccucgggug

SEQ ID NO: 3948374 - RNA, 15 nt, Human herpesvirus 1
gcacgccaaugcccu

SEQ ID NO: 3948375 - RNA, 20 nt, Human herpesvirus 1
gcacgccaaugcccucccug

SEQ ID NO: 3948376 - RNA, 13 nt, Human herpesvirus 1
gcacgcccccgcg

SEQ ID NO: 3948377 - RNA, 18 nt, Human herpesvirus 1
gcacggaacacaaggcca

SEQ ID NO: 3948378 - RNA, 21 nt, Human herpesvirus 1
gcacggaacacaaggccaaga

SEQ ID NO: 3948379 - RNA, 14 nt, Human herpesvirus 1
gcacucccugccgc

SEQ ID NO: 3948380 - RNA, 19 nt, Human herpesvirus 1
gcacuugcggcaagacccg

SEQ ID NO: 3948381 - RNA, 21 nt, Human herpesvirus 1
gcacuuuccccaugcgacagc

SEQ ID NO: 3948382 - RNA, 23 nt, Human herpesvirus 1
gcagacgguggugcccagcggcc

SEQ ID NO: 3948383 - RNA, 19 nt, Human herpesvirus 1
gcagcaugggacccacaga

SEQ ID NO: 3948384 - RNA, 23 nt, Human herpesvirus 1
gcagcguccgguuggccgcgcgg

SEQ ID NO: 3948385 - RNA, 22 nt, Human herpesvirus 1
gcaggcgacggcgucucccggg

SEQ ID NO: 3948386 - RNA, 19 nt, Human herpesvirus 1
gcaggcgguugucgggggu

SEQ ID NO: 3948387 - RNA, 13 nt, Human herpesvirus 1
gcagucccugagu

SEQ ID NO: 3948388 - RNA, 20 nt, Human herpesvirus 1
gcagugcauggcgcucaggg

SEQ ID NO: 3948389 - RNA, 15 nt, Human herpesvirus 1
gcaguucgagcagcc

SEQ ID NO: 3948390 - RNA, 14 nt, Human herpesvirus 1
gcauacgcucgggc

SEQ ID NO: 3948391 - RNA, 12 nt, Human herpesvirus 1
gcauccagggag

SEQ ID NO: 3948392 - RNA, 16 nt, Human herpesvirus 1
gcauccgagcaccccc

SEQ ID NO: 3948393 - RNA, 22 nt, Human herpesvirus 1
gcaucgacacgcgcguccuucu

SEQ ID NO: 3948394 - RNA, 11 nt, Human herpesvirus 1
gcaucgcgcgg

SEQ ID NO: 3948395 - RNA, 20 nt, Human herpesvirus 1
gcaucggaacacgccuaccg

SEQ ID NO: 3948396 - RNA, 14 nt, Human herpesvirus 1
gcaugcaccccaga

SEQ ID NO: 3948397 - RNA, 18 nt, Human herpesvirus 1
gcauggcgcagcugggac

SEQ ID NO: 3948398 - RNA, 16 nt, Human herpesvirus 1
gcauucgggccugccu

SEQ ID NO: 3948399 - RNA, 21 nt, Human herpesvirus 1
gcauucgggccugccugcggc

SEQ ID NO: 3948400 - RNA, 23 nt, Human herpesvirus 1
gcauucgggccugccugcggcuc

SEQ ID NO: 3948401 - RNA, 16 nt, Human herpesvirus 1
gcauuuauugacccaa

SEQ ID NO: 3948402 - RNA, 14 nt, Human herpesvirus 1
gccaaagccccgga

SEQ ID NO: 3948403 - RNA, 14 nt, Human herpesvirus 1
gccaacgcccugac

SEQ ID NO: 3948404 - RNA, 18 nt, Human herpesvirus 1
gccaagaagaagggcacg

SEQ ID NO: 3948405 - RNA, 22 nt, Human herpesvirus 1
gccacaccacgccacaacagcc

SEQ ID NO: 3948406 - RNA, 13 nt, Human herpesvirus 1
gccaccagccugg

SEQ ID NO: 3948407 - RNA, 13 nt, Human herpesvirus 1
gccaccauccuca

SEQ ID NO: 3948408 - RNA, 20 nt, Human herpesvirus 1
gccaccauccucaagcaggc

SEQ ID NO: 3948409 - RNA, 15 nt, Human herpesvirus 1
gccacccacccacca

SEQ ID NO: 3948410 - RNA, 17 nt, Human herpesvirus 1
gccacccacgccgccuc

SEQ ID NO: 3948411 - RNA, 19 nt, Human herpesvirus 1
gccaccccgaacaacaugg

SEQ ID NO: 3948412 - RNA, 22 nt, Human herpesvirus 1
gccacccgacaacagcccccgg

SEQ ID NO: 3948413 - RNA, 23 nt, Human herpesvirus 1
gccacccgacaacagcccccggg

SEQ ID NO: 3948414 - RNA, 14 nt, Human herpesvirus 1
gccacccucucuuc

SEQ ID NO: 3948415 - RNA, 12 nt, Human herpesvirus 1
gccaccgugggc

SEQ ID NO: 3948416 - RNA, 15 nt, Human herpesvirus 1
gccaccgugggccgg

SEQ ID NO: 3948417 - RNA, 14 nt, Human herpesvirus 1
gccaccucgcccac

SEQ ID NO: 3948418 - RNA, 18 nt, Human herpesvirus 1
gccacgucgaccgcgccc

SEQ ID NO: 3948419 - RNA, 16 nt, Human herpesvirus 1
gccacuggccgggagc

SEQ ID NO: 3948420 - RNA, 14 nt, Human herpesvirus 1
gccacuuccccgac

SEQ ID NO: 3948421 - RNA, 18 nt, Human herpesvirus 1
gccagaacucgccccgga

SEQ ID NO: 3948422 - RNA, 13 nt, Human herpesvirus 1
gccagcgacccgc

SEQ ID NO: 3948423 - RNA, 22 nt, Human herpesvirus 1
gccagcgcggcggggcccggcc

SEQ ID NO: 3948424 - RNA, 14 nt, Human herpesvirus 1
gccagggcgcuacg

SEQ ID NO: 3948425 - RNA, 19 nt, Human herpesvirus 1
gccaggucggcgaccgcca

SEQ ID NO: 3948426 - RNA, 22 nt, Human herpesvirus 1
gccaggucggcgaccgccagcc

SEQ ID NO: 3948427 - RNA, 16 nt, Human herpesvirus 1
gccaguccgcugcacc

SEQ ID NO: 3948428 - RNA, 16 nt, Human herpesvirus 1
gccauauccugagccc

SEQ ID NO: 3948429 - RNA, 16 nt, Human herpesvirus 1
gccaucgccucggcca

SEQ ID NO: 3948430 - RNA, 12 nt, Human herpesvirus 1
gccaugcuggcg

SEQ ID NO: 3948431 - RNA, 21 nt, Human herpesvirus 1
cgccagcgcggcggggcccgg

SEQ ID NO: 3948432 - RNA, 21 nt, Human herpesvirus 1
cgccagggcgcccccgcgcgg

SEQ ID NO: 3948433 - RNA, 18 nt, Human herpesvirus 1
cgccagugcguuccggac

SEQ ID NO: 3948434 - RNA, 19 nt, Human herpesvirus 1
cgccaucagccuuaccacg

SEQ ID NO: 3948435 - RNA, 21 nt, Human herpesvirus 1
cgcccaacucucgcaccaucc

SEQ ID NO: 3948436 - RNA, 17 nt, Human herpesvirus 1
cgcccaaugggccgggc

SEQ ID NO: 3948437 - RNA, 21 nt, Human herpesvirus 1
cgcccaccggaagcccaaccc

SEQ ID NO: 3948438 - RNA, 16 nt, Human herpesvirus 1
cgcccagcagcucccc

SEQ ID NO: 3948439 - RNA, 17 nt, Human herpesvirus 1
cgccccacacagcccuc

SEQ ID NO: 3948440 - RNA, 23 nt, Human herpesvirus 1
cgccccccaaaccauguccggca

SEQ ID NO: 3948441 - RNA, 18 nt, Human herpesvirus 1
cgccccccccccgucacc

SEQ ID NO: 3948442 - RNA, 18 nt, Human herpesvirus 1
cgccccgccguggcauuc

SEQ ID NO: 3948443 - RNA, 22 nt, Human herpesvirus 1
cgccccgugucugugggccaag

SEQ ID NO: 3948444 - RNA, 17 nt, Human herpesvirus 1
cgccccuaaccaggccu

SEQ ID NO: 3948445 - RNA, 12 nt, Human herpesvirus 1
cgccccucgggu

SEQ ID NO: 3948446 - RNA, 14 nt, Human herpesvirus 1
cgccccuuuccccc

SEQ ID NO: 3948447 - RNA, 15 nt, Human herpesvirus 1
cgcccgccccuggcg

SEQ ID NO: 3948448 - RNA, 14 nt, Human herpesvirus 1
cgcccgcgacgcca

SEQ ID NO: 3948449 - RNA, 16 nt, Human herpesvirus 1
cgcccggggccagcgc

SEQ ID NO: 3948450 - RNA, 21 nt, Human herpesvirus 1
cgcccguguucgagggccaag

SEQ ID NO: 3948451 - RNA, 19 nt, Human herpesvirus 1
cgccgaagagucggagccc

SEQ ID NO: 3948452 - RNA, 17 nt, Human herpesvirus 1
cgccgaccgacuccccg

SEQ ID NO: 3948453 - RNA, 15 nt, Human herpesvirus 1
cgccgacgaccuggu

SEQ ID NO: 3948454 - RNA, 16 nt, Human herpesvirus 1
cgccgacggacagcca

SEQ ID NO: 3948455 - RNA, 21 nt, Human herpesvirus 1
cgccgaucccgacuccccgga

SEQ ID NO: 3948456 - RNA, 16 nt, Human herpesvirus 1
cgccgcgacccgcacg

SEQ ID NO: 3948457 - RNA, 21 nt, Human herpesvirus 1
cgccgcgacccgcacgagccg

SEQ ID NO: 3948458 - RNA, 23 nt, Human herpesvirus 1
cgccgcggcucccggcccgggcc

SEQ ID NO: 3948459 - RNA, 19 nt, Human herpesvirus 1
cgccgcuaccgacgcuccc

SEQ ID NO: 3948460 - RNA, 22 nt, Human herpesvirus 1
cgccgcuaccgacgcucccguc

SEQ ID NO: 3948461 - RNA, 12 nt, Human herpesvirus 1
cgccggagccgg

SEQ ID NO: 3948462 - RNA, 21 nt, Human herpesvirus 1
cgccggcaugcaccccagagg

SEQ ID NO: 3948463 - RNA, 13 nt, Human herpesvirus 1
cgccggggcgguc

SEQ ID NO: 3948464 - RNA, 20 nt, Human herpesvirus 1
cgccuaccggccccugggcc

SEQ ID NO: 3948465 - RNA, 14 nt, Human herpesvirus 1
cgccucagggccuc

SEQ ID NO: 3948466 - RNA, 14 nt, Human herpesvirus 1
cgccucggccaccg

SEQ ID NO: 3948467 - RNA, 21 nt, Human herpesvirus 1
cgccucggucaccccaauccc

SEQ ID NO: 3948468 - RNA, 20 nt, Human herpesvirus 1
cgcgaaaucguggcgcggcu

SEQ ID NO: 3948469 - RNA, 16 nt, Human herpesvirus 1
cgcgacaacgagcccc

SEQ ID NO: 3948470 - RNA, 18 nt, Human herpesvirus 1
cgcgacccaccgggcccg

SEQ ID NO: 3948471 - RNA, 20 nt, Human herpesvirus 1
cgcgaccccauggccgcucc

SEQ ID NO: 3948472 - RNA, 21 nt, Human herpesvirus 1
cgcgacccucaccggguacgg

SEQ ID NO: 3948473 - RNA, 16 nt, Human herpesvirus 1
cgcgaccucaccacca

SEQ ID NO: 3948474 - RNA, 22 nt, Human herpesvirus 1
cgcgaccucaccaccaaggccc

SEQ ID NO: 3948475 - RNA, 19 nt, Human herpesvirus 1
cgcgacgccauggaccgca

SEQ ID NO: 3948476 - RNA, 23 nt, Human herpesvirus 1
cgcgacgggcagugaggguggca

SEQ ID NO: 3948477 - RNA, 17 nt, Human herpesvirus 1
cgcgagcucccagagac

SEQ ID NO: 3948478 - RNA, 18 nt, Human herpesvirus 1
cgcgagcucccugcggcu

SEQ ID NO: 3948479 - RNA, 21 nt, Human herpesvirus 1
cgcgaucccccgcccccggcu

SEQ ID NO: 3948480 - RNA, 18 nt, Human herpesvirus 1
cgcgccaaacgccagccu

SEQ ID NO: 3948481 - RNA, 12 nt, Human herpesvirus 1
cgcgccaucugg

SEQ ID NO: 3948482 - RNA, 14 nt, Human herpesvirus 1
cgcgcccacuacac

SEQ ID NO: 3948483 - RNA, 16 nt, Human herpesvirus 1
cgcgcccacuacacca

SEQ ID NO: 3948484 - RNA, 23 nt, Human herpesvirus 1
cgcgcccgggcgcguccccggcc

SEQ ID NO: 3948485 - RNA, 16 nt, Human herpesvirus 1
cgcgccgcgggccccc

SEQ ID NO: 3948486 - RNA, 14 nt, Human herpesvirus 1
cgcgccucccggcc

SEQ ID NO: 3948487 - RNA, 11 nt, Human herpesvirus 1
cgcgccugggu

SEQ ID NO: 3948488 - RNA, 12 nt, Human herpesvirus 1
cgcgcgcgcuuu

SEQ ID NO: 3948489 - RNA, 19 nt, Human herpesvirus 1
cgcgcgggggcgccggugg

SEQ ID NO: 3948490 - RNA, 17 nt, Human herpesvirus 1
cgcgcuaacggugaccc

SEQ ID NO: 3948491 - RNA, 18 nt, Human herpesvirus 1
cgcgcucaaccaccgcuc

SEQ ID NO: 3948492 - RNA, 12 nt, Human herpesvirus 1
cgcgcuccuccc

SEQ ID NO: 3948493 - RNA, 12 nt, Human herpesvirus 1
cgcggaccaccg

SEQ ID NO: 3948494 - RNA, 13 nt, Human herpesvirus 1
cgcggaggagcca

SEQ ID NO: 3948495 - RNA, 19 nt, Human herpesvirus 1
cgcggcaaagaccuuccgg

SEQ ID NO: 3948496 - RNA, 16 nt, Human herpesvirus 1
cgcggccgugggcgcc

SEQ ID NO: 3948497 - RNA, 14 nt, Human herpesvirus 1
cgcggcggggcccg

SEQ ID NO: 3948498 - RNA, 17 nt, Human herpesvirus 1
cgcggcggggcccggcc

SEQ ID NO: 3948499 - RNA, 21 nt, Human herpesvirus 1
cgcggcuucaucgcgccccuc

SEQ ID NO: 3948500 - RNA, 21 nt, Human herpesvirus 1
cgcgggcgacgccccggccgc

SEQ ID NO: 3948501 - RNA, 17 nt, Human herpesvirus 1
cgcgggcguucccgagc

SEQ ID NO: 3948502 - RNA, 19 nt, Human herpesvirus 1
cgcggggacacgauuccgg

SEQ ID NO: 3948503 - RNA, 12 nt, Human herpesvirus 1
cgcggggccucc

SEQ ID NO: 3948504 - RNA, 20 nt, Human herpesvirus 1
cgcgguggacagccaggagc

SEQ ID NO: 3948505 - RNA, 20 nt, Human herpesvirus 1
cgcgguuuaccgccaccagc

SEQ ID NO: 3948506 - RNA, 19 nt, Human herpesvirus 1
cgcguauagccuaugccac

SEQ ID NO: 3948507 - RNA, 15 nt, Human herpesvirus 1
cgcguccacccggag

SEQ ID NO: 3948508 - RNA, 17 nt, Human herpesvirus 1
cgcgucgacgucgcgcc

SEQ ID NO: 3948509 - RNA, 22 nt, Human herpesvirus 1
cgcgucgacgucgcgccugggu

SEQ ID NO: 3948510 - RNA, 17 nt, Human herpesvirus 1
cgcgucuggccccggcg

SEQ ID NO: 3948511 - RNA, 19 nt, Human herpesvirus 1
cgcgugcccacgucgcccc

SEQ ID NO: 3948512 - RNA, 22 nt, Human herpesvirus 1
cgcguguaauacuugcgcggcu

SEQ ID NO: 3948513 - RNA, 21 nt, Human herpesvirus 1
cgcguguuccccgggagcccc

SEQ ID NO: 3948514 - RNA, 12 nt, Human herpesvirus 1
cgcuagaccacg

SEQ ID NO: 3948515 - RNA, 21 nt, Human herpesvirus 1
cgcuauaaagccgccacccuc

SEQ ID NO: 3948516 - RNA, 13 nt, Human herpesvirus 1
cgcuaucggggcc

SEQ ID NO: 3948517 - RNA, 14 nt, Human herpesvirus 1
cgcuaucuccuggg

SEQ ID NO: 3948518 - RNA, 18 nt, Human herpesvirus 1
cgcuaugacggcaauaaa

SEQ ID NO: 3948519 - RNA, 22 nt, Human herpesvirus 1
cgcucccaaccgcgacccuccg

SEQ ID NO: 3948520 - RNA, 15 nt, Human herpesvirus 1
cgcugcccgacccgg

SEQ ID NO: 3948521 - RNA, 17 nt, Human herpesvirus 1
cgcugcccuucugucug

SEQ ID NO: 3948522 - RNA, 17 nt, Human herpesvirus 1
cgcugcgucggcauggu

SEQ ID NO: 3948523 - RNA, 20 nt, Human herpesvirus 1
cgcugcuccgccuggccugc

SEQ ID NO: 3948524 - RNA, 14 nt, Human herpesvirus 1
cgcugcugcggcca

SEQ ID NO: 3948525 - RNA, 15 nt, Human herpesvirus 1
cgcugcugcggccag

SEQ ID NO: 3948526 - RNA, 19 nt, Human herpesvirus 1
cgcuggcaacucgccccac

SEQ ID NO: 3948527 - RNA, 13 nt, Human herpesvirus 1
cgcuggggcugcc

SEQ ID NO: 3948528 - RNA, 16 nt, Human herpesvirus 1
cgcuuccaucgccccu

SEQ ID NO: 3948529 - RNA, 18 nt, Human herpesvirus 1
cgcuucccgguaugguaa

SEQ ID NO: 3948530 - RNA, 21 nt, Human herpesvirus 1
cggaaacugccuccaccgggc

SEQ ID NO: 3948531 - RNA, 21 nt, Human herpesvirus 1
cggacaacauccccccgacca

SEQ ID NO: 3948532 - RNA, 18 nt, Human herpesvirus 1
cggacccaaaauaauaaa

SEQ ID NO: 3948533 - RNA, 12 nt, Human herpesvirus 1
cggacccgcauc

SEQ ID NO: 3948534 - RNA, 21 nt, Human herpesvirus 1
cggacccgcaucccccgucug

SEQ ID NO: 3948535 - RNA, 21 nt, Human herpesvirus 1
cggacccucucuucucucccg

SEQ ID NO: 3948536 - RNA, 23 nt, Human herpesvirus 1
cggacgcgcggcgcgagcucccu

SEQ ID NO: 3948537 - RNA, 13 nt, Human herpesvirus 1
cggagcucccggg

SEQ ID NO: 3948538 - RNA, 16 nt, Human herpesvirus 1
cggagggaaccaccau

SEQ ID NO: 3948539 - RNA, 17 nt, Human herpesvirus 1
cggaggucuccgucacc

SEQ ID NO: 3948540 - RNA, 22 nt, Human herpesvirus 1
cggagguggggcgggggccccg

SEQ ID NO: 3948541 - RNA, 17 nt, Human herpesvirus 1
cggcaaagaccuuccgg

SEQ ID NO: 3948542 - RNA, 17 nt, Human herpesvirus 1
cggcaagauccucgggc

SEQ ID NO: 3948543 - RNA, 16 nt, Human herpesvirus 1
cggcaagcggagcggc

SEQ ID NO: 3948544 - RNA, 19 nt, Human herpesvirus 1
cggcaccuauggcgccuga

SEQ ID NO: 3948545 - RNA, 15 nt, Human herpesvirus 1
ugccgucgcuagacc

SEQ ID NO: 3948546 - RNA, 19 nt, Human herpesvirus 1
ugccugacccucuccggga

SEQ ID NO: 3948547 - RNA, 11 nt, Human herpesvirus 1
ugccugugugu

SEQ ID NO: 3948548 - RNA, 21 nt, Human herpesvirus 1
ugcgauucuagccucgugggg

SEQ ID NO: 3948549 - RNA, 22 nt, Human herpesvirus 1
ugcgauucuuuuaucccacgcg

SEQ ID NO: 3948550 - RNA, 23 nt, Human herpesvirus 1
ugcgcgaucccccgcccccggcu

SEQ ID NO: 3948551 - RNA, 20 nt, Human herpesvirus 1
ugcgcgggguuacgcgggcc

SEQ ID NO: 3948552 - RNA, 21 nt, Human herpesvirus 1
ugcgcgggguuacgcgggccc

SEQ ID NO: 3948553 - RNA, 17 nt, Human herpesvirus 1
ugcggaaagcaagaaca

SEQ ID NO: 3948554 - RNA, 23 nt, Human herpesvirus 1
ugcggacccucucuucucucccg

SEQ ID NO: 3948555 - RNA, 21 nt, Human herpesvirus 1
ugcggccggcgggacucuggg

SEQ ID NO: 3948556 - RNA, 17 nt, Human herpesvirus 1
ugcgggcgguccauuaa

SEQ ID NO: 3948557 - RNA, 17 nt, Human herpesvirus 1
ugcgggguugggauggg

SEQ ID NO: 3948558 - RNA, 15 nt, Human herpesvirus 1
ugcgguccggagaca

SEQ ID NO: 3948559 - RNA, 16 nt, Human herpesvirus 1
ugcgguccggagccgc

SEQ ID NO: 3948560 - RNA, 14 nt, Human herpesvirus 1
ugcguagcauaccu

SEQ ID NO: 3948561 - RNA, 18 nt, Human herpesvirus 1
ugcgucgggccucccgga

SEQ ID NO: 3948562 - RNA, 17 nt, Human herpesvirus 1
ugcgugccggucgccgc

SEQ ID NO: 3948563 - RNA, 20 nt, Human herpesvirus 1
ugcucuggggucccugucgc

SEQ ID NO: 3948564 - RNA, 23 nt, Human herpesvirus 1
ugcucuggggucccugucgccuc

SEQ ID NO: 3948565 - RNA, 14 nt, Human herpesvirus 1
ugcugcgcggcgcc

SEQ ID NO: 3948566 - RNA, 20 nt, Human herpesvirus 1
ugcuuauucucggggagcuu

SEQ ID NO: 3948567 - RNA, 19 nt, Human herpesvirus 1
uggaacgaggccgcagccu

SEQ ID NO: 3948568 - RNA, 18 nt, Human herpesvirus 1
uggagccugagcuggcga

SEQ ID NO: 3948569 - RNA, 19 nt, Human herpesvirus 1
uggagcucaaucuggccca

SEQ ID NO: 3948570 - RNA, 16 nt, Human herpesvirus 1
uggaggacggcgccgg

SEQ ID NO: 3948571 - RNA, 20 nt, Human herpesvirus 1
uggcacaccaccgaccucaa

SEQ ID NO: 3948572 - RNA, 17 nt, Human herpesvirus 1
uggccagcggcccgggg

SEQ ID NO: 3948573 - RNA, 17 nt, Human herpesvirus 1
uggccaucgguccccuc

SEQ ID NO: 3948574 - RNA, 21 nt, Human herpesvirus 1
uggccccccgcguccaaaccc

SEQ ID NO: 3948575 - RNA, 17 nt, Human herpesvirus 1
uggcccccgccucuggg

SEQ ID NO: 3948576 - RNA, 16 nt, Human herpesvirus 1
uggccccggcccccaa

SEQ ID NO: 3948577 - RNA, 21 nt, Human herpesvirus 1
uggcccuggcggacggcggcc

SEQ ID NO: 3948578 - RNA, 15 nt, Human herpesvirus 1
uggccgggagcacca

SEQ ID NO: 3948579 - RNA, 20 nt, Human herpesvirus 1
uggcgcguaucugguccccg

SEQ ID NO: 3948580 - RNA, 12 nt, Human herpesvirus 1
uggcuccgggcc

SEQ ID NO: 3948581 - RNA, 23 nt, Human herpesvirus 1
uggcuucggccguuucuccgccc

SEQ ID NO: 3948582 - RNA, 22 nt, Human herpesvirus 1
ugggcccugcuccggcggggcc

SEQ ID NO: 3948583 - RNA, 22 nt, Human herpesvirus 1
ugggccgggccgcccacuuccc

SEQ ID NO: 3948584 - RNA, 14 nt, Human herpesvirus 1
ugggcgcucacgag

SEQ ID NO: 3948585 - RNA, 15 nt, Human herpesvirus 1
ugggcggccucuccg

SEQ ID NO: 3948586 - RNA, 18 nt, Human herpesvirus 1
uggggacgguggcgccgc

SEQ ID NO: 3948587 - RNA, 19 nt, Human herpesvirus 1
ugggggccugucccauccg

SEQ ID NO: 3948588 - RNA, 15 nt, Human herpesvirus 1
uggggggguccggca

SEQ ID NO: 3948589 - RNA, 15 nt, Human herpesvirus 1
ugggguuucuguguu

SEQ ID NO: 3948590 - RNA, 14 nt, Human herpesvirus 1
uggguggucucugg

SEQ ID NO: 3948591 - RNA, 20 nt, Human herpesvirus 1
uggguguguuuauugggcgc

SEQ ID NO: 3948592 - RNA, 16 nt, Human herpesvirus 1
uggguuucacugaaac

SEQ ID NO: 3948593 - RNA, 15 nt, Human herpesvirus 1
uggucagaggcccac

SEQ ID NO: 3948594 - RNA, 14 nt, Human herpesvirus 1
ugguccgccuagcc

SEQ ID NO: 3948595 - RNA, 16 nt, Human herpesvirus 1
ugguccucgaggaggc

SEQ ID NO: 3948596 - RNA, 22 nt, Human herpesvirus 1
uggucggcgucggugaucccca

SEQ ID NO: 3948597 - RNA, 18 nt, Human herpesvirus 1
uggucucuggccgcgccc

SEQ ID NO: 3948598 - RNA, 15 nt, Human herpesvirus 1
uggugcgagcugcag

SEQ ID NO: 3948599 - RNA, 20 nt, Human herpesvirus 1
ugguggcaccuccccagcgg

SEQ ID NO: 3948600 - RNA, 16 nt, Human herpesvirus 1
uguacugcggucuguc

SEQ ID NO: 3948601 - RNA, 20 nt, Human herpesvirus 1
uguaucgcaucuuuccugug

SEQ ID NO: 3948602 - RNA, 14 nt, Human herpesvirus 1
ugucacgcgggagg

SEQ ID NO: 3948603 - RNA, 21 nt, Human herpesvirus 1
uguccccgaacaaacgaccca

SEQ ID NO: 3948604 - RNA, 19 nt, Human herpesvirus 1
agccgccccagcaccgaca

SEQ ID NO: 3948605 - RNA, 14 nt, Human herpesvirus 1
agccggccccggca

SEQ ID NO: 3948606 - RNA, 15 nt, Human herpesvirus 1
agccguaacccaacc

SEQ ID NO: 3948607 - RNA, 20 nt, Human herpesvirus 1
agccuaugccacgccagggc

SEQ ID NO: 3948608 - RNA, 14 nt, Human herpesvirus 1
agccuuuaacuaca

SEQ ID NO: 3948609 - RNA, 15 nt, Human herpesvirus 1
agccuuuaacuacau

SEQ ID NO: 3948610 - RNA, 15 nt, Human herpesvirus 1
agcgaagcagccgcc

SEQ ID NO: 3948611 - RNA, 17 nt, Human herpesvirus 1
agcgacguccugggcca

SEQ ID NO: 3948612 - RNA, 22 nt, Human herpesvirus 1
agcgacguccugggccaccuga

SEQ ID NO: 3948613 - RNA, 17 nt, Human herpesvirus 1
agcgcccgucggucugc

SEQ ID NO: 3948614 - RNA, 21 nt, Human herpesvirus 1
agcgccggcggucgcgcuccu

SEQ ID NO: 3948615 - RNA, 15 nt, Human herpesvirus 1
agcgcggccgugggc

SEQ ID NO: 3948616 - RNA, 12 nt, Human herpesvirus 1
agcgcugcugcg

SEQ ID NO: 3948617 - RNA, 19 nt, Human herpesvirus 1
agcggcacgaccggcucca

SEQ ID NO: 3948618 - RNA, 15 nt, Human herpesvirus 1
agcgggggggcggcc

SEQ ID NO: 3948619 - RNA, 18 nt, Human herpesvirus 1
agcucccagagaccccag

SEQ ID NO: 3948620 - RNA, 20 nt, Human herpesvirus 1
agcucccagagaccccaggg

SEQ ID NO: 3948621 - RNA, 15 nt, Human herpesvirus 1
agcucgcggcccggg

SEQ ID NO: 3948622 - RNA, 22 nt, Human herpesvirus 1
agcucgucgggguggcacagaa

SEQ ID NO: 3948623 - RNA, 21 nt, Human herpesvirus 1
agcugaugucccucauuuuac

SEQ ID NO: 3948624 - RNA, 22 nt, Human herpesvirus 1
agcuguccgagacccccaacgc

SEQ ID NO: 3948625 - RNA, 16 nt, Human herpesvirus 1
agcuucagcgccguca

SEQ ID NO: 3948626 - RNA, 14 nt, Human herpesvirus 1
aggacaaacccaac

SEQ ID NO: 3948627 - RNA, 12 nt, Human herpesvirus 1
aggagcgccggc

SEQ ID NO: 3948628 - RNA, 16 nt, Human herpesvirus 1
aggaugccagccaggg

SEQ ID NO: 3948629 - RNA, 20 nt, Human herpesvirus 1
aggaugccagccagggcggc

SEQ ID NO: 3948630 - RNA, 19 nt, Human herpesvirus 1
aggauggagagcgaaggcu

SEQ ID NO: 3948631 - RNA, 15 nt, Human herpesvirus 1
aggcacggcagcaug

SEQ ID NO: 3948632 - RNA, 14 nt, Human herpesvirus 1
aggcccgccgccac

SEQ ID NO: 3948633 - RNA, 13 nt, Human herpesvirus 1
aggcccgggccac

SEQ ID NO: 3948634 - RNA, 16 nt, Human herpesvirus 1
aggcccgggccacggc

SEQ ID NO: 3948635 - RNA, 15 nt, Human herpesvirus 1
aggccuccacccccu

SEQ ID NO: 3948636 - RNA, 15 nt, Human herpesvirus 1
aggcgaccgccggcg

SEQ ID NO: 3948637 - RNA, 19 nt, Human herpesvirus 1
aggcgcauaaagggccggu

SEQ ID NO: 3948638 - RNA, 13 nt, Human herpesvirus 1
aggcgccugcccc

SEQ ID NO: 3948639 - RNA, 23 nt, Human herpesvirus 1
aggcgccugccccgccacccagu

SEQ ID NO: 3948640 - RNA, 15 nt, Human herpesvirus 1
aggcgcuuccccgcg

SEQ ID NO: 3948641 - RNA, 12 nt, Human herpesvirus 1
aggcggccgagg

SEQ ID NO: 3948642 - RNA, 18 nt, Human herpesvirus 1
aggcugucgacgcccccu

SEQ ID NO: 3948643 - RNA, 17 nt, Human herpesvirus 1
agggcgacgccgugggc

SEQ ID NO: 3948644 - RNA, 13 nt, Human herpesvirus 1
agggcgaggaggg

SEQ ID NO: 3948645 - RNA, 19 nt, Human herpesvirus 1
agggcgaggagggcggcga

SEQ ID NO: 3948646 - RNA, 14 nt, Human herpesvirus 1
agggcgcccccgcg

SEQ ID NO: 3948647 - RNA, 18 nt, Human herpesvirus 1
agggcggccagccgcgcg

SEQ ID NO: 3948648 - RNA, 17 nt, Human herpesvirus 1
aggggaaaagugaaaga

SEQ ID NO: 3948649 - RNA, 18 nt, Human herpesvirus 1
aggggaaaagugaaagac

SEQ ID NO: 3948650 - RNA, 11 nt, Human herpesvirus 1
agggggacccc

SEQ ID NO: 3948651 - RNA, 18 nt, Human herpesvirus 1
aggguauggggcggggga

SEQ ID NO: 3948652 - RNA, 13 nt, Human herpesvirus 1
agggugucccagg

SEQ ID NO: 3948653 - RNA, 14 nt, Human herpesvirus 1
agguacggggcggc

SEQ ID NO: 3948654 - RNA, 22 nt, Human herpesvirus 1
aguacaaccccucgcgggugga

SEQ ID NO: 3948655 - RNA, 16 nt, Human herpesvirus 1
agucccgaagaccgcc

SEQ ID NO: 3948656 - RNA, 23 nt, Human herpesvirus 1
agucccuccaaucgccgguuccu

SEQ ID NO: 3948657 - RNA, 16 nt, Human herpesvirus 1
agucccugaguuggga

SEQ ID NO: 3948658 - RNA, 17 nt, Human herpesvirus 1
agucccugaguugggaa

SEQ ID NO: 3948659 - RNA, 13 nt, Human herpesvirus 1
agugccccgaccc

SEQ ID NO: 3948660 - RNA, 16 nt, Human herpesvirus 1
aguggcaggaggugga

SEQ ID NO: 3948661 - RNA, 20 nt, Human herpesvirus 1
aguguuucguuccuuccccc

SEQ ID NO: 3948662 - RNA, 20 nt, Human herpesvirus 1
aguucaccguggccugggac

SEQ ID NO: 3948663 - RNA, 21 nt, Human herpesvirus 1
aguugagccgcgccauccuca

SEQ ID NO: 3948664 - RNA, 13 nt, Human herpesvirus 1
aguuuauccugga

SEQ ID NO: 3948665 - RNA, 22 nt, Human herpesvirus 1
auaaaggcggugguaucuaguu

SEQ ID NO: 3948666 - RNA, 17 nt, Human herpesvirus 1
auaaccgaccgcagucc

SEQ ID NO: 3948667 - RNA, 20 nt, Human herpesvirus 1
auaguuugguccccccucua

SEQ ID NO: 3948668 - RNA, 14 nt, Human herpesvirus 1
auauaaggccuggg

SEQ ID NO: 3948669 - RNA, 16 nt, Human herpesvirus 1
aucaaggugggccagc

SEQ ID NO: 3948670 - RNA, 21 nt, Human herpesvirus 1
aucaccccgcaauuugcaccc

SEQ ID NO: 3948671 - RNA, 20 nt, Human herpesvirus 1
aucacccgagucucugggcg

SEQ ID NO: 3948672 - RNA, 18 nt, Human herpesvirus 1
aucagccucgucccgccc

SEQ ID NO: 3948673 - RNA, 22 nt, Human herpesvirus 1
aucagccuuaccacgcccgacc

SEQ ID NO: 3948674 - RNA, 14 nt, Human herpesvirus 1
auccaccaccuuca

SEQ ID NO: 3948675 - RNA, 14 nt, Human herpesvirus 1
auccagggagaaac

SEQ ID NO: 3948676 - RNA, 23 nt, Human herpesvirus 1
aucccacaaacacaaaacacacg

SEQ ID NO: 3948677 - RNA, 21 nt, Human herpesvirus 1
aucccacguccccgggucugu

SEQ ID NO: 3948678 - RNA, 15 nt, Human herpesvirus 1
aucccaggaucacac

SEQ ID NO: 3948679 - RNA, 18 nt, Human herpesvirus 1
aucccggguuaauguaaa

SEQ ID NO: 3948680 - RNA, 16 nt, Human herpesvirus 1
auccguggccccggcc

SEQ ID NO: 3948681 - RNA, 15 nt, Human herpesvirus 1
auccucaagcaggcc

SEQ ID NO: 3948682 - RNA, 13 nt, Human herpesvirus 1
aucgccccuggcg

SEQ ID NO: 3948683 - RNA, 23 nt, Human herpesvirus 1
aucgccggggaccgcagccuggu

SEQ ID NO: 3948684 - RNA, 22 nt, Human herpesvirus 1
aucgcgggcgccauggcgggac

SEQ ID NO: 3948685 - RNA, 15 nt, Human herpesvirus 1
aucgggaugcugccc

SEQ ID NO: 3948686 - RNA, 16 nt, Human herpesvirus 1
aucgggaugcugcccc

SEQ ID NO: 3948687 - RNA, 12 nt, Human herpesvirus 1
aucgucggugcc

SEQ ID NO: 3948688 - RNA, 13 nt, Human herpesvirus 1
aucuccugggggc

SEQ ID NO: 3948689 - RNA, 17 nt, Human herpesvirus 1
aucucugggcgggccgu

SEQ ID NO: 3948690 - RNA, 21 nt, Human herpesvirus 1
aucucuguaacggggacccca

SEQ ID NO: 3948691 - RNA, 16 nt, Human herpesvirus 1
augcacgaccuguuga

SEQ ID NO: 3948692 - RNA, 20 nt, Human herpesvirus 1
augggcaucgugggcggcgu

SEQ ID NO: 3948693 - RNA, 19 nt, Human herpesvirus 1
augggcuacuaccuaggca

SEQ ID NO: 3948694 - RNA, 18 nt, Human herpesvirus 1
auggugaucgccugucuc

SEQ ID NO: 3948695 - RNA, 12 nt, Human herpesvirus 1
augguugcagug

SEQ ID NO: 3948696 - RNA, 20 nt, Human herpesvirus 1
auguccccaaaauaaaagac

SEQ ID NO: 3948697 - RNA, 18 nt, Human herpesvirus 1
augucggguccaaacucc

SEQ ID NO: 3948698 - RNA, 13 nt, Human herpesvirus 1
augugauaugcua

SEQ ID NO: 3948699 - RNA, 18 nt, Human herpesvirus 1
auguggauaaaaagccag

SEQ ID NO: 3948700 - RNA, 17 nt, Human herpesvirus 1
auuacuuuaagcgcugc

SEQ ID NO: 3948701 - RNA, 17 nt, Human herpesvirus 1
auuggcucggacgagac

SEQ ID NO: 3948702 - RNA, 11 nt, Human herpesvirus 1
auuuggggcgc

SEQ ID NO: 3948703 - RNA, 16 nt, Human herpesvirus 1
caaaaaccgccccccc

SEQ ID NO: 3948704 - RNA, 13 nt, Human herpesvirus 1
caaacaggagcug

SEQ ID NO: 3948705 - RNA, 19 nt, Human herpesvirus 1
caacacaacggcaugccuc

SEQ ID NO: 3948706 - RNA, 18 nt, Human herpesvirus 1
caaccacccgcaccccca

SEQ ID NO: 3948707 - RNA, 19 nt, Human herpesvirus 1
caacccccuaagacccacc

SEQ ID NO: 3948708 - RNA, 18 nt, Human herpesvirus 1
caaccccggucucccagg

SEQ ID NO: 3948709 - RNA, 21 nt, Human herpesvirus 1
caacggcaugccucugcgggc

SEQ ID NO: 3948710 - RNA, 19 nt, Human herpesvirus 1
caacuccagaccaccgguc

SEQ ID NO: 3948711 - RNA, 15 nt, Human herpesvirus 1
caagaccccccuggc

SEQ ID NO: 3948712 - RNA, 16 nt, Human herpesvirus 1
caagauggccgacccc

SEQ ID NO: 3948713 - RNA, 22 nt, Human herpesvirus 1
caagccccuagccccgcccccu

SEQ ID NO: 3948714 - RNA, 13 nt, Human herpesvirus 1
caagccgccccag

SEQ ID NO: 3948715 - RNA, 15 nt, Human herpesvirus 1
caagccgcucuccgg

SEQ ID NO: 3948716 - RNA, 16 nt, Human herpesvirus 1
caagccgcucuccgga

SEQ ID NO: 3948717 - RNA, 14 nt, Human herpesvirus 1
caaggacagcggcc

SEQ ID NO: 3948718 - RNA, 19 nt, Human herpesvirus 1
caaggcguccauucucccg

SEQ ID NO: 3948719 - RNA, 17 nt, Human herpesvirus 1
cccugagccgcuuuccu

SEQ ID NO: 3948720 - RNA, 15 nt, Human herpesvirus 1
cccugaguugggaau

SEQ ID NO: 3948721 - RNA, 21 nt, Human herpesvirus 1
cccugcgcgagcaccugcggg

SEQ ID NO: 3948722 - RNA, 18 nt, Human herpesvirus 1
cccugcugcaggcccccc

SEQ ID NO: 3948723 - RNA, 19 nt, Human herpesvirus 1
cccuggacacccucuucgu

SEQ ID NO: 3948724 - RNA, 23 nt, Human herpesvirus 1
cccuggacgugggccucacccac

SEQ ID NO: 3948725 - RNA, 14 nt, Human herpesvirus 1
cccuggcgagccca

SEQ ID NO: 3948726 - RNA, 17 nt, Human herpesvirus 1
cccuggugaagaccacu

SEQ ID NO: 3948727 - RNA, 19 nt, Human herpesvirus 1
cccugguguuucuggggag

SEQ ID NO: 3948728 - RNA, 20 nt, Human herpesvirus 1
cccugguguuucuggggagc

SEQ ID NO: 3948729 - RNA, 13 nt, Human herpesvirus 1
cccugucgccucc

SEQ ID NO: 3948730 - RNA, 13 nt, Human herpesvirus 1
cccugugucgcgc

SEQ ID NO: 3948731 - RNA, 19 nt, Human herpesvirus 1
cccuguuggucggggagug

SEQ ID NO: 3948732 - RNA, 16 nt, Human herpesvirus 1
cccuuaauaaauuuua

SEQ ID NO: 3948733 - RNA, 17 nt, Human herpesvirus 1
cccuuguauguccccaa

SEQ ID NO: 3948734 - RNA, 20 nt, Human herpesvirus 1
ccgaaccaccacugcacucc

SEQ ID NO: 3948735 - RNA, 18 nt, Human herpesvirus 1
ccgaagagucggagcccg

SEQ ID NO: 3948736 - RNA, 17 nt, Human herpesvirus 1
ccgacaacagcccccgg

SEQ ID NO: 3948737 - RNA, 16 nt, Human herpesvirus 1
ccgacaccaccagcug

SEQ ID NO: 3948738 - RNA, 15 nt, Human herpesvirus 1
ccgacaucaccaccg

SEQ ID NO: 3948739 - RNA, 15 nt, Human herpesvirus 1
ccgaccacccggaac

SEQ ID NO: 3948740 - RNA, 13 nt, Human herpesvirus 1
ccgacccccuugu

SEQ ID NO: 3948741 - RNA, 16 nt, Human herpesvirus 1
ccgaccucggacgcca

SEQ ID NO: 3948742 - RNA, 16 nt, Human herpesvirus 1
ccgacgaaucccccaa

SEQ ID NO: 3948743 - RNA, 13 nt, Human herpesvirus 1
ccgacgaggugcg

SEQ ID NO: 3948744 - RNA, 17 nt, Human herpesvirus 1
ccgacgcccagcagcuc

SEQ ID NO: 3948745 - RNA, 22 nt, Human herpesvirus 1
ccgacggcccgaagccugcugu

SEQ ID NO: 3948746 - RNA, 18 nt, Human herpesvirus 1
ccgacggcguaguggagg

SEQ ID NO: 3948747 - RNA, 14 nt, Human herpesvirus 1
ccgacucaccucaa

SEQ ID NO: 3948748 - RNA, 15 nt, Human herpesvirus 1
ccgacugccagcuau

SEQ ID NO: 3948749 - RNA, 22 nt, Human herpesvirus 1
ccgagaguuugaucguggacgg

SEQ ID NO: 3948750 - RNA, 15 nt, Human herpesvirus 1
ccgagcuuguuuucg

SEQ ID NO: 3948751 - RNA, 17 nt, Human herpesvirus 1
ccgaggcgauuagccag

SEQ ID NO: 3948752 - RNA, 15 nt, Human herpesvirus 1
ccgaucgcagcgucc

SEQ ID NO: 3948753 - RNA, 21 nt, Human herpesvirus 1
ccgauucucuuccgacgccau

SEQ ID NO: 3948754 - RNA, 20 nt, Human herpesvirus 1
ccgcaaaucccaccaaacug

SEQ ID NO: 3948755 - RNA, 13 nt, Human herpesvirus 1
ccgcaaccagcug

SEQ ID NO: 3948756 - RNA, 16 nt, Human herpesvirus 1
ccgcaacgcgcugggg

SEQ ID NO: 3948757 - RNA, 22 nt, Human herpesvirus 1
ccgcaauuucaccgccccagca

SEQ ID NO: 3948758 - RNA, 18 nt, Human herpesvirus 1
ccgcaauuugcacccagc

SEQ ID NO: 3948759 - RNA, 21 nt, Human herpesvirus 1
ccgcaauuugcacccagccuu

SEQ ID NO: 3948760 - RNA, 22 nt, Human herpesvirus 1
ccgcaauuugcacccagccuuu

SEQ ID NO: 3948761 - RNA, 13 nt, Human herpesvirus 1
ccgcagccugguc

SEQ ID NO: 3948762 - RNA, 17 nt, Human herpesvirus 1
ccgcagccuucucccgg

SEQ ID NO: 3948763 - RNA, 15 nt, Human herpesvirus 1
ccgcauacuccggcc

SEQ ID NO: 3948764 - RNA, 19 nt, Human herpesvirus 1
ccgcaucccccgucugggu

SEQ ID NO: 3948765 - RNA, 14 nt, Human herpesvirus 1
ccgccagcgcggcg

SEQ ID NO: 3948766 - RNA, 19 nt, Human herpesvirus 1
ccgccaucgagccaacgcc

SEQ ID NO: 3948767 - RNA, 16 nt, Human herpesvirus 1
ccgccaucgccuaccu

SEQ ID NO: 3948768 - RNA, 20 nt, Human herpesvirus 1
ccgcccaaugggccgggccg

SEQ ID NO: 3948769 - RNA, 17 nt, Human herpesvirus 1
ccgcccaccgcugggcg

SEQ ID NO: 3948770 - RNA, 18 nt, Human herpesvirus 1
ccgccccccccccgucac

SEQ ID NO: 3948771 - RNA, 17 nt, Human herpesvirus 1
ccgccccuaucgcucga

SEQ ID NO: 3948772 - RNA, 12 nt, Human herpesvirus 1
ccgcccgccccu

SEQ ID NO: 3948773 - RNA, 17 nt, Human herpesvirus 1
ccgcccgugcugccguc

SEQ ID NO: 3948774 - RNA, 17 nt, Human herpesvirus 1
ccgcccuggacacccuc

SEQ ID NO: 3948775 - RNA, 15 nt, Human herpesvirus 1
ccgccgacgaccugg

SEQ ID NO: 3948776 - RNA, 22 nt, Human herpesvirus 1
ccgccgcaaagccacccacgcc

SEQ ID NO: 3948777 - RNA, 15 nt, Human herpesvirus 1
ccgccucggcccgcg

SEQ ID NO: 3948778 - RNA, 18 nt, Human herpesvirus 1
ccgccucgguccaccgca

SEQ ID NO: 3948779 - RNA, 23 nt, Human herpesvirus 1
ccgccuggaggacggcgccgggg

SEQ ID NO: 3948780 - RNA, 16 nt, Human herpesvirus 1
ccgccuggucccccgg

SEQ ID NO: 3948781 - RNA, 15 nt, Human herpesvirus 1
ccgcgaccaccccga

SEQ ID NO: 3948782 - RNA, 13 nt, Human herpesvirus 1
ccgcgacccccgg

SEQ ID NO: 3948783 - RNA, 16 nt, Human herpesvirus 1
ccgcgagauggccgcc

SEQ ID NO: 3948784 - RNA, 15 nt, Human herpesvirus 1
ccgcgagcagagccg

SEQ ID NO: 3948785 - RNA, 19 nt, Human herpesvirus 1
ccgcgcaugaucuccggac

SEQ ID NO: 3948786 - RNA, 16 nt, Human herpesvirus 1
ccgcgccgucgggcgu

SEQ ID NO: 3948787 - RNA, 12 nt, Human herpesvirus 1
ccgcgcgggggc

SEQ ID NO: 3948788 - RNA, 16 nt, Human herpesvirus 1
ccgcgcuaugacggca

SEQ ID NO: 3948789 - RNA, 19 nt, Human herpesvirus 1
ccgcgcuaugacggcaaua

SEQ ID NO: 3948790 - RNA, 22 nt, Human herpesvirus 1
ccgcggccccagcccucucccc

SEQ ID NO: 3948791 - RNA, 16 nt, Human herpesvirus 1
ccgcggccuggguugg

SEQ ID NO: 3948792 - RNA, 18 nt, Human herpesvirus 1
ccgcggccuggguuggcg

SEQ ID NO: 3948793 - RNA, 15 nt, Human herpesvirus 1
ccgcgggaggccgcc

SEQ ID NO: 3948794 - RNA, 14 nt, Human herpesvirus 1
ccgcgggccacgcc

SEQ ID NO: 3948795 - RNA, 21 nt, Human herpesvirus 1
ccgcgggccacgccacccugc

SEQ ID NO: 3948796 - RNA, 16 nt, Human herpesvirus 1
ccgcgggcccccggcc

SEQ ID NO: 3948797 - RNA, 14 nt, Human herpesvirus 1
ccgcgguccagacc

SEQ ID NO: 3948798 - RNA, 16 nt, Human herpesvirus 1
ccgcgguggacagcca

SEQ ID NO: 3948799 - RNA, 19 nt, Human herpesvirus 1
ccgcgguggacagccagga

SEQ ID NO: 3948800 - RNA, 14 nt, Human herpesvirus 1
ccgcguccacccgg

SEQ ID NO: 3948801 - RNA, 21 nt, Human herpesvirus 1
ccgcguuugagaccgccggca

SEQ ID NO: 3948802 - RNA, 15 nt, Human herpesvirus 1
ccgcuccccaagcau

SEQ ID NO: 3948803 - RNA, 20 nt, Human herpesvirus 1
ccgcucggcggcagcccgga

SEQ ID NO: 3948804 - RNA, 15 nt, Human herpesvirus 1
ccgcucugacggccc

SEQ ID NO: 3948805 - RNA, 18 nt, Human herpesvirus 1
ccgcugcccgacccggcc

SEQ ID NO: 3948806 - RNA, 14 nt, Human herpesvirus 1
ccgcugcgcauccc

SEQ ID NO: 3948807 - RNA, 17 nt, Human herpesvirus 1
ccgcugcgcaucccccc

SEQ ID NO: 3948808 - RNA, 21 nt, Human herpesvirus 1
ccgcuucucuuuggccauccc

SEQ ID NO: 3948809 - RNA, 18 nt, Human herpesvirus 1
ccgcuuuaucccacggcc

SEQ ID NO: 3948810 - RNA, 22 nt, Human herpesvirus 1
ccggaagcccaacccacacgca

SEQ ID NO: 3948811 - RNA, 18 nt, Human herpesvirus 1
ccggacgcgcggcgcgag

SEQ ID NO: 3948812 - RNA, 16 nt, Human herpesvirus 1
ccggagcucgcggcac

SEQ ID NO: 3948813 - RNA, 20 nt, Human herpesvirus 1
ccggccccugggccccggga

SEQ ID NO: 3948814 - RNA, 15 nt, Human herpesvirus 1
ccggcccuaacccca

SEQ ID NO: 3948815 - RNA, 15 nt, Human herpesvirus 1
ccggcccugcugcug

SEQ ID NO: 3948816 - RNA, 20 nt, Human herpesvirus 1
ccggcgcguguaccacaucc

SEQ ID NO: 3948817 - RNA, 23 nt, Human herpesvirus 1
ccggcggacccccggaggcgccu

SEQ ID NO: 3948818 - RNA, 19 nt, Human herpesvirus 1
ccggcggccccuggcgccg

SEQ ID NO: 3948819 - RNA, 15 nt, Human herpesvirus 1
ccggcggcgcuggcg

SEQ ID NO: 3948820 - RNA, 21 nt, Human herpesvirus 1
ccggcgggguuauaggccacg

SEQ ID NO: 3948821 - RNA, 12 nt, Human herpesvirus 1
ccgggagccccg

SEQ ID NO: 3948822 - RNA, 17 nt, Human herpesvirus 1
ccgggccgcaccgggcc

SEQ ID NO: 3948823 - RNA, 22 nt, Human herpesvirus 1
ccgggccggagcucgcggcacg

SEQ ID NO: 3948824 - RNA, 19 nt, Human herpesvirus 1
ccgggcgcgugcugcgccu

SEQ ID NO: 3948825 - RNA, 13 nt, Human herpesvirus 1
ccgggcguugggg

SEQ ID NO: 3948826 - RNA, 14 nt, Human herpesvirus 1
ccggggagggcagg

SEQ ID NO: 3948827 - RNA, 16 nt, Human herpesvirus 1
ccggggagggcagggc

SEQ ID NO: 3948828 - RNA, 17 nt, Human herpesvirus 1
ccggggcucucggggcc

SEQ ID NO: 3948829 - RNA, 21 nt, Human herpesvirus 1
ccggggcucucggggccgcag

SEQ ID NO: 3948830 - RNA, 22 nt, Human herpesvirus 1
ccggggcuggcacaccaccgac

SEQ ID NO: 3948831 - RNA, 17 nt, Human herpesvirus 1
ccggggggucggcaggc

SEQ ID NO: 3948832 - RNA, 18 nt, Human herpesvirus 1
ccggguagcguacggacc

SEQ ID NO: 3948833 - RNA, 17 nt, Human herpesvirus 1
ccgguaccaucaaccac

SEQ ID NO: 3948834 - RNA, 12 nt, Human herpesvirus 1
cgcgcauggcag

SEQ ID NO: 3948835 - RNA, 19 nt, Human herpesvirus 1
cgcgccaaacgccagccug

SEQ ID NO: 3948836 - RNA, 17 nt, Human herpesvirus 1
cgcgccacacucaccgg

SEQ ID NO: 3948837 - RNA, 15 nt, Human herpesvirus 1
cgcgccauccucacg

SEQ ID NO: 3948838 - RNA, 20 nt, Human herpesvirus 1
cgcgcccacuacaccagcca

SEQ ID NO: 3948839 - RNA, 19 nt, Human herpesvirus 1
cgcgccccaaggcgcugcg

SEQ ID NO: 3948840 - RNA, 13 nt, Human herpesvirus 1
cgcgcccccgucc

SEQ ID NO: 3948841 - RNA, 15 nt, Human herpesvirus 1
cgcgccccgccggcg

SEQ ID NO: 3948842 - RNA, 14 nt, Human herpesvirus 1
cgcgccgcgggccc

SEQ ID NO: 3948843 - RNA, 22 nt, Human herpesvirus 1
cgcgccgcugcccgacccggcc

SEQ ID NO: 3948844 - RNA, 22 nt, Human herpesvirus 1
cgcgccguuggcccccgccucu

SEQ ID NO: 3948845 - RNA, 21 nt, Human herpesvirus 1
cgcgccuagccaaccuguggc

SEQ ID NO: 3948846 - RNA, 15 nt, Human herpesvirus 1
cgcgcgaccucacca

SEQ ID NO: 3948847 - RNA, 13 nt, Human herpesvirus 1
cgcgcgucccccg

SEQ ID NO: 3948848 - RNA, 21 nt, Human herpesvirus 1
cgcgcucaaccaccgcucccc

SEQ ID NO: 3948849 - RNA, 16 nt, Human herpesvirus 1
cgcggaccaccgggcc

SEQ ID NO: 3948850 - RNA, 15 nt, Human herpesvirus 1
cgcggaggagggcgu

SEQ ID NO: 3948851 - RNA, 18 nt, Human herpesvirus 1
cgcggcccggggccugcu

SEQ ID NO: 3948852 - RNA, 21 nt, Human herpesvirus 1
cgcggcccuuaaugggcaacc

SEQ ID NO: 3948853 - RNA, 19 nt, Human herpesvirus 1
cgcggcgcgagcucccugc

SEQ ID NO: 3948854 - RNA, 18 nt, Human herpesvirus 1
cgcggcggggcccggcca

SEQ ID NO: 3948855 - RNA, 15 nt, Human herpesvirus 1
cgcggcguccgcgcc

SEQ ID NO: 3948856 - RNA, 18 nt, Human herpesvirus 1
cgcggcguccgcgccccu

SEQ ID NO: 3948857 - RNA, 17 nt, Human herpesvirus 1
cgcggcucguggccagg

SEQ ID NO: 3948858 - RNA, 15 nt, Human herpesvirus 1
cgcgggcccccggcc

SEQ ID NO: 3948859 - RNA, 12 nt, Human herpesvirus 1
cgcggggccccc

SEQ ID NO: 3948860 - RNA, 19 nt, Human herpesvirus 1
cgcggggccucccccggac

SEQ ID NO: 3948861 - RNA, 20 nt, Human herpesvirus 1
cgcgggguuacgcgggcccc

SEQ ID NO: 3948862 - RNA, 21 nt, Human herpesvirus 1
cgcgguacagaucggcgccgc

SEQ ID NO: 3948863 - RNA, 14 nt, Human herpesvirus 1
cgcguccccggccc

SEQ ID NO: 3948864 - RNA, 17 nt, Human herpesvirus 1
cgcgucucuggggagcc

SEQ ID NO: 3948865 - RNA, 14 nt, Human herpesvirus 1
cgcguggaccuggg

SEQ ID NO: 3948866 - RNA, 22 nt, Human herpesvirus 1
cgcguguacugcggucugucuc

SEQ ID NO: 3948867 - RNA, 20 nt, Human herpesvirus 1
cgcguguuccccgggagccc

SEQ ID NO: 3948868 - RNA, 23 nt, Human herpesvirus 1
cgcuacugcgcgaucguccaccu

SEQ ID NO: 3948869 - RNA, 22 nt, Human herpesvirus 1
cgcuacugcgugggccgcgcgg

SEQ ID NO: 3948870 - RNA, 16 nt, Human herpesvirus 1
cgcuacuucaccuucg

SEQ ID NO: 3948871 - RNA, 22 nt, Human herpesvirus 1
cgcuagccgaucccucgcgagg

SEQ ID NO: 3948872 - RNA, 15 nt, Human herpesvirus 1
cgcucccucagcauc

SEQ ID NO: 3948873 - RNA, 17 nt, Human herpesvirus 1
cgcucccucgaccacca

SEQ ID NO: 3948874 - RNA, 16 nt, Human herpesvirus 1
cgcuccgacgacgcgc

SEQ ID NO: 3948875 - RNA, 12 nt, Human herpesvirus 1
cgcuccucugcg

SEQ ID NO: 3948876 - RNA, 22 nt, Human herpesvirus 1
cgcuccucugcggccggcggga

SEQ ID NO: 3948877 - RNA, 16 nt, Human herpesvirus 1
cgcugcuccgccuggc

SEQ ID NO: 3948878 - RNA, 19 nt, Human herpesvirus 1
cgcugcugcggccagucca

SEQ ID NO: 3948879 - RNA, 13 nt, Human herpesvirus 1
cgcuggaccucac

SEQ ID NO: 3948880 - RNA, 16 nt, Human herpesvirus 1
cgcuggccgacguggc

SEQ ID NO: 3948881 - RNA, 21 nt, Human herpesvirus 1
cgcugggcgagguggagcugc

SEQ ID NO: 3948882 - RNA, 18 nt, Human herpesvirus 1
cgcuggggguccuggugg

SEQ ID NO: 3948883 - RNA, 18 nt, Human herpesvirus 1
cgcuggucgucgggcgcc

SEQ ID NO: 3948884 - RNA, 18 nt, Human herpesvirus 1
cgcuguugccggaacgca

SEQ ID NO: 3948885 - RNA, 12 nt, Human herpesvirus 1
cgcuuggagcca

SEQ ID NO: 3948886 - RNA, 22 nt, Human herpesvirus 1
cgcuuugugggggaccaggucc

SEQ ID NO: 3948887 - RNA, 16 nt, Human herpesvirus 1
cggaaacccguccggg

SEQ ID NO: 3948888 - RNA, 17 nt, Human herpesvirus 1
cggaaacguucgcgcgc

SEQ ID NO: 3948889 - RNA, 20 nt, Human herpesvirus 1
cggaacgcaccgaggggcca

SEQ ID NO: 3948890 - RNA, 17 nt, Human herpesvirus 1
cggaaggggacacgggc

SEQ ID NO: 3948891 - RNA, 13 nt, Human herpesvirus 1
cggacccgggccg

SEQ ID NO: 3948892 - RNA, 20 nt, Human herpesvirus 1
cggacccucucuucucuccc

SEQ ID NO: 3948893 - RNA, 16 nt, Human herpesvirus 1
cggagccgcgcggcca

SEQ ID NO: 3948894 - RNA, 15 nt, Human herpesvirus 1
cggagguccagcgcc

SEQ ID NO: 3948895 - RNA, 23 nt, Human herpesvirus 1
cggagguggggcgggggccccgc

SEQ ID NO: 3948896 - RNA, 22 nt, Human herpesvirus 1
cggcaccuauggcgccugacgc

SEQ ID NO: 3948897 - RNA, 15 nt, Human herpesvirus 1
cggcacgccuggggu

SEQ ID NO: 3948898 - RNA, 17 nt, Human herpesvirus 1
cggcacuuucugacgcc

SEQ ID NO: 3948899 - RNA, 17 nt, Human herpesvirus 1
cggcagcccggaggcgc

SEQ ID NO: 3948900 - RNA, 22 nt, Human herpesvirus 1
cggcauggugaucgccugucuc

SEQ ID NO: 3948901 - RNA, 23 nt, Human herpesvirus 1
cggccaacgccgcgacccgcacg

SEQ ID NO: 3948902 - RNA, 21 nt, Human herpesvirus 1
cggccacgcaaaaccaggccg

SEQ ID NO: 3948903 - RNA, 18 nt, Human herpesvirus 1
cggccacuggccgggagc

SEQ ID NO: 3948904 - RNA, 14 nt, Human herpesvirus 1
cggccagccgcgcg

SEQ ID NO: 3948905 - RNA, 16 nt, Human herpesvirus 1
cggccaguugagccgc

SEQ ID NO: 3948906 - RNA, 16 nt, Human herpesvirus 1
cggccccugauggagc

SEQ ID NO: 3948907 - RNA, 16 nt, Human herpesvirus 1
cggcccgaagccugcu

SEQ ID NO: 3948908 - RNA, 18 nt, Human herpesvirus 1
cggccgccacccaggcgc

SEQ ID NO: 3948909 - RNA, 14 nt, Human herpesvirus 1
cggccgcgguacag

SEQ ID NO: 3948910 - RNA, 20 nt, Human herpesvirus 1
cggccggauucccgggccgg

SEQ ID NO: 3948911 - RNA, 19 nt, Human herpesvirus 1
cggccuauggcuccugcga

SEQ ID NO: 3948912 - RNA, 21 nt, Human herpesvirus 1
cggcgacgugcccccuccucg

SEQ ID NO: 3948913 - RNA, 20 nt, Human herpesvirus 1
cggcgagcguauaccaaccc

SEQ ID NO: 3948914 - RNA, 18 nt, Human herpesvirus 1
cggcgccucuggacugga

SEQ ID NO: 3948915 - RNA, 20 nt, Human herpesvirus 1
cggcgcgcuucuacccgugu

SEQ ID NO: 3948916 - RNA, 16 nt, Human herpesvirus 1
cggcggcagcccggag

SEQ ID NO: 3948917 - RNA, 15 nt, Human herpesvirus 1
cggcggccccuggcg

SEQ ID NO: 3948918 - RNA, 21 nt, Human herpesvirus 1
cggcguccgcgccccucuggc

SEQ ID NO: 3948919 - RNA, 16 nt, Human herpesvirus 1
cggcgugggcgcguuu

SEQ ID NO: 3948920 - RNA, 22 nt, Human herpesvirus 1
cggcucaacgagcuccuggccu

SEQ ID NO: 3948921 - RNA, 21 nt, Human herpesvirus 1
cggcucggccuauggcuccug

SEQ ID NO: 3948922 - RNA, 23 nt, Human herpesvirus 1
cggcuggcgcggugccugacgcc

SEQ ID NO: 3948923 - RNA, 19 nt, Human herpesvirus 1
cggcuguagcgccccggcg

SEQ ID NO: 3948924 - RNA, 16 nt, Human herpesvirus 1
cgggacgaggccgugc

SEQ ID NO: 3948925 - RNA, 17 nt, Human herpesvirus 1
cgggauccucggccagc

SEQ ID NO: 3948926 - RNA, 19 nt, Human herpesvirus 1
cgggauccucggccagcuc

SEQ ID NO: 3948927 - RNA, 14 nt, Human herpesvirus 1
cgggcacgccaagc

SEQ ID NO: 3948928 - RNA, 18 nt, Human herpesvirus 1
cgggcccagccuucccgu

SEQ ID NO: 3948929 - RNA, 20 nt, Human herpesvirus 1
cgggcgaaaaaaggcggugc

SEQ ID NO: 3948930 - RNA, 14 nt, Human herpesvirus 1
cgggcgacgcacac

SEQ ID NO: 3948931 - RNA, 12 nt, Human herpesvirus 1
cgggcgcguccc

SEQ ID NO: 3948932 - RNA, 22 nt, Human herpesvirus 1
cgggcgggugaacgagccgacg

SEQ ID NO: 3948933 - RNA, 19 nt, Human herpesvirus 1
cgggcuacccucacuaucg

SEQ ID NO: 3948934 - RNA, 21 nt, Human herpesvirus 1
cgggcuacuggugggugagcg

SEQ ID NO: 3948935 - RNA, 14 nt, Human herpesvirus 1
cgggcuccaguccc

SEQ ID NO: 3948936 - RNA, 16 nt, Human herpesvirus 1
cggggccgcccuggcc

SEQ ID NO: 3948937 - RNA, 17 nt, Human herpesvirus 1
cggggccgcccuggccg

SEQ ID NO: 3948938 - RNA, 22 nt, Human herpesvirus 1
cggggcggggccuuggcggccg

SEQ ID NO: 3948939 - RNA, 20 nt, Human herpesvirus 1
cggggcucucggggccgcag

SEQ ID NO: 3948940 - RNA, 14 nt, Human herpesvirus 1
cggggcuggcacac

SEQ ID NO: 3948941 - RNA, 15 nt, Human herpesvirus 1
cgggggauggggaga

SEQ ID NO: 3948942 - RNA, 20 nt, Human herpesvirus 1
cgggggauggggagagccca

SEQ ID NO: 3948943 - RNA, 14 nt, Human herpesvirus 1
cgggggcccugcca

SEQ ID NO: 3948944 - RNA, 24 nt, Human herpesvirus 1
cggguccaaacucccgacaccacc

SEQ ID NO: 3948945 - RNA, 15 nt, Human herpesvirus 1
cggguucccccggca

SEQ ID NO: 3948946 - RNA, 19 nt, Human herpesvirus 1
cgguacauggcccuggugu

SEQ ID NO: 3948947 - RNA, 16 nt, Human herpesvirus 1
cgguacgaagaccagg

SEQ ID NO: 3948948 - RNA, 12 nt, Human herpesvirus 1
uuucccacgcca

SEQ ID NO: 3948949 - RNA, 12 nt, Human herpesvirus 1
uuuccccucccg

SEQ ID NO: 3948950 - RNA, 15 nt, Human herpesvirus 1
uuuggguccgggccc

SEQ ID NO: 3948951 - RNA, 16 nt, Human herpesvirus 1
uuuguguuccgugucu

SEQ ID NO: 3948952 - RNA, 13 nt, Human herpesvirus 1
uuuguuguaaaua

SEQ ID NO: 3948953 - RNA, 17 nt, Human herpesvirus 1
uuuugucggugggggcu

SEQ ID NO: 3948954 - RNA, 17 nt, Human herpesvirus 1
uuuugugccuaccgcuu

SEQ ID NO: 3948955 - RNA, 20 nt, Human herpesvirus 1
acucagggcucuacccucug

SEQ ID NO: 3948956 - RNA, 16 nt, Human herpesvirus 1
acucccgacaccacca

SEQ ID NO: 3948957 - RNA, 22 nt, Human herpesvirus 1
acuccucagcgcgauccgacau

SEQ ID NO: 3948958 - RNA, 11 nt, Human herpesvirus 1
acuccuccccg

SEQ ID NO: 3948959 - RNA, 22 nt, Human herpesvirus 1
acugccucccccgcccuggaca

SEQ ID NO: 3948960 - RNA, 18 nt, Human herpesvirus 1
acugggcgaccgccggcg

SEQ ID NO: 3948961 - RNA, 19 nt, Human herpesvirus 1
acuuccuauaagacucucc

SEQ ID NO: 3948962 - RNA, 20 nt, Human herpesvirus 1
agaacaauaaaggcgguggu

SEQ ID NO: 3948963 - RNA, 22 nt, Human herpesvirus 1
agaaccuuuaggaugccagcca

SEQ ID NO: 3948964 - RNA, 11 nt, Human herpesvirus 1
agacacccccc

SEQ ID NO: 3948965 - RNA, 17 nt, Human herpesvirus 1
agaccaggccuggucag

SEQ ID NO: 3948966 - RNA, 22 nt, Human herpesvirus 1
agaccguggccgacaacugccu

SEQ ID NO: 3948967 - RNA, 21 nt, Human herpesvirus 1
agacggcauucgggccugccu

SEQ ID NO: 3948968 - RNA, 19 nt, Human herpesvirus 1
agacucucccccaccgccc

SEQ ID NO: 3948969 - RNA, 22 nt, Human herpesvirus 1
agagucggagcccgcuggggcg

SEQ ID NO: 3948970 - RNA, 12 nt, Human herpesvirus 1
agauagagcugc

SEQ ID NO: 3948971 - RNA, 22 nt, Human herpesvirus 1
agaucaaggacagcggccugcu

SEQ ID NO: 3948972 - RNA, 18 nt, Human herpesvirus 1
agaucuacugcugggcca

SEQ ID NO: 3948973 - RNA, 20 nt, Human herpesvirus 1
agauuguccgcggggccucc

SEQ ID NO: 3948974 - RNA, 13 nt, Human herpesvirus 1
agauuuuucugua

SEQ ID NO: 3948975 - RNA, 21 nt, Human herpesvirus 1
agcaaccccaugaaggcccug

SEQ ID NO: 3948976 - RNA, 13 nt, Human herpesvirus 1
agcagcgcccggc

SEQ ID NO: 3948977 - RNA, 15 nt, Human herpesvirus 1
agcaggucgacggcu

SEQ ID NO: 3948978 - RNA, 14 nt, Human herpesvirus 1
agcauaccugggug

SEQ ID NO: 3948979 - RNA, 21 nt, Human herpesvirus 1
agccaauccgugucggggagg

SEQ ID NO: 3948980 - RNA, 14 nt, Human herpesvirus 1
agccacccacccac

SEQ ID NO: 3948981 - RNA, 17 nt, Human herpesvirus 1
agccauauccugagccc

SEQ ID NO: 3948982 - RNA, 16 nt, Human herpesvirus 1
agcccccaaaccccac

SEQ ID NO: 3948983 - RNA, 17 nt, Human herpesvirus 1
agcccccagaugcccac

SEQ ID NO: 3948984 - RNA, 17 nt, Human herpesvirus 1
agccccggcccugaugc

SEQ ID NO: 3948985 - RNA, 18 nt, Human herpesvirus 1
agccccggucuccccggg

SEQ ID NO: 3948986 - RNA, 16 nt, Human herpesvirus 1
agccgacggcccgaag

SEQ ID NO: 3948987 - RNA, 23 nt, Human herpesvirus 1
agccgccacccucucuucccuca

SEQ ID NO: 3948988 - RNA, 18 nt, Human herpesvirus 1
agccgcgccgacaucacc

SEQ ID NO: 3948989 - RNA, 13 nt, Human herpesvirus 1
agccucuguguca

SEQ ID NO: 3948990 - RNA, 18 nt, Human herpesvirus 1
agccucugugucaggugg

SEQ ID NO: 3948991 - RNA, 16 nt, Human herpesvirus 1
agccugcggccggaug

SEQ ID NO: 3948992 - RNA, 17 nt, Human herpesvirus 1
agcgaccccacggccuc

SEQ ID NO: 3948993 - RNA, 20 nt, Human herpesvirus 1
agcgcacggaacacaaggcc

SEQ ID NO: 3948994 - RNA, 13 nt, Human herpesvirus 1
agcgcacugcccg

SEQ ID NO: 3948995 - RNA, 18 nt, Human herpesvirus 1
agcgcacugcccgacgcc

SEQ ID NO: 3948996 - RNA, 23 nt, Human herpesvirus 1
agcgcgcugcucagcgccaaggu

SEQ ID NO: 3948997 - RNA, 14 nt, Human herpesvirus 1
agcgcggaggaggg

SEQ ID NO: 3948998 - RNA, 23 nt, Human herpesvirus 1
agcgggucuuuuguguuggcccu

SEQ ID NO: 3948999 - RNA, 20 nt, Human herpesvirus 1
agcguccgggcgcuuggcau

SEQ ID NO: 3949000 - RNA, 18 nt, Human herpesvirus 1
agcguguucguggaacca

SEQ ID NO: 3949001 - RNA, 16 nt, Human herpesvirus 1
agcucaaucuggccca

SEQ ID NO: 3949002 - RNA, 18 nt, Human herpesvirus 1
agcucgcggagggcggcc

SEQ ID NO: 3949003 - RNA, 22 nt, Human herpesvirus 1
aggaacccgcgcuaugacggca

SEQ ID NO: 3949004 - RNA, 15 nt, Human herpesvirus 1
aggacagcggccugc

SEQ ID NO: 3949005 - RNA, 14 nt, Human herpesvirus 1
aggaccgcgccccc

SEQ ID NO: 3949006 - RNA, 22 nt, Human herpesvirus 1
aggacgcccgcgacgccaugga

SEQ ID NO: 3949007 - RNA, 13 nt, Human herpesvirus 1
aggagacaauacc

SEQ ID NO: 3949008 - RNA, 21 nt, Human herpesvirus 1
aggagacaauaccggaaggaa

SEQ ID NO: 3949009 - RNA, 21 nt, Human herpesvirus 1
aggagccccugcccgacaggg

SEQ ID NO: 3949010 - RNA, 19 nt, Human herpesvirus 1
aggagcucaagaaccccac

SEQ ID NO: 3949011 - RNA, 13 nt, Human herpesvirus 1
aggcccacgccuc

SEQ ID NO: 3949012 - RNA, 13 nt, Human herpesvirus 1
aggccccccgccg

SEQ ID NO: 3949013 - RNA, 22 nt, Human herpesvirus 1
aggcccgcaagcugaaccccaa

SEQ ID NO: 3949014 - RNA, 18 nt, Human herpesvirus 1
aggccggcgccgacacgc

SEQ ID NO: 3949015 - RNA, 15 nt, Human herpesvirus 1
aggccugggauccca

SEQ ID NO: 3949016 - RNA, 12 nt, Human herpesvirus 1
aggcgcuucccc

SEQ ID NO: 3949017 - RNA, 12 nt, Human herpesvirus 1
aggcggccuggg

SEQ ID NO: 3949018 - RNA, 14 nt, Human herpesvirus 1
agggaccuccugga

SEQ ID NO: 3949019 - RNA, 20 nt, Human herpesvirus 1
agggaccuccuggacuuuga

SEQ ID NO: 3949020 - RNA, 15 nt, Human herpesvirus 1
agggagaaaccccag

SEQ ID NO: 3949021 - RNA, 20 nt, Human herpesvirus 1
agggauccacgacaaccccg

SEQ ID NO: 3949022 - RNA, 12 nt, Human herpesvirus 1
agggcagggccg

SEQ ID NO: 3949023 - RNA, 17 nt, Human herpesvirus 1
aggggggaaagguggac

SEQ ID NO: 3949024 - RNA, 18 nt, Human herpesvirus 1
aggucaaaugccgggcca

SEQ ID NO: 3949025 - RNA, 15 nt, Human herpesvirus 1
agguccagcgccgca

SEQ ID NO: 3949026 - RNA, 18 nt, Human herpesvirus 1
aggucuccgucaccgcga

SEQ ID NO: 3949027 - RNA, 13 nt, Human herpesvirus 1
aggugcgccaggu

SEQ ID NO: 3949028 - RNA, 23 nt, Human herpesvirus 1
aggugcuucuguuuggcgccccc

SEQ ID NO: 3949029 - RNA, 15 nt, Human herpesvirus 1
aggugggccagccgc

SEQ ID NO: 3949030 - RNA, 13 nt, Human herpesvirus 1
agguugggggccg

SEQ ID NO: 3949031 - RNA, 17 nt, Human herpesvirus 1
aguacgcccucccgcug

SEQ ID NO: 3949032 - RNA, 19 nt, Human herpesvirus 1
agucccaucccccgauccc

SEQ ID NO: 3949033 - RNA, 16 nt, Human herpesvirus 1
aguccgcugcaccgau

SEQ ID NO: 3949034 - RNA, 23 nt, Human herpesvirus 1
agucuucggggcccggcccauug

SEQ ID NO: 3949035 - RNA, 20 nt, Human herpesvirus 1
agugaaagacacgggcacca

SEQ ID NO: 3949036 - RNA, 21 nt, Human herpesvirus 1
agugggcguggcuucggccgu

SEQ ID NO: 3949037 - RNA, 14 nt, Human herpesvirus 1
aguguacccuggcg

SEQ ID NO: 3949038 - RNA, 14 nt, Human herpesvirus 1
aguucgagcagccg

SEQ ID NO: 3949039 - RNA, 12 nt, Human herpesvirus 1
aguugccccacc

SEQ ID NO: 3949040 - RNA, 23 nt, Human herpesvirus 1
aguuguucggucauaagcuucag

SEQ ID NO: 3949041 - RNA, 21 nt, Human herpesvirus 1
aguuuguguuggcgacuggcg

SEQ ID NO: 3949042 - RNA, 12 nt, Human herpesvirus 1
auaaaaagccag

SEQ ID NO: 3949043 - RNA, 14 nt, Human herpesvirus 1
auaaaagaccaaaa

SEQ ID NO: 3949044 - RNA, 18 nt, Human herpesvirus 1
auaaccacgcccagcgca

SEQ ID NO: 3949045 - RNA, 14 nt, Human herpesvirus 1
auacacagccaccc

SEQ ID NO: 3949046 - RNA, 20 nt, Human herpesvirus 1
auagcaacaaggccguggac

SEQ ID NO: 3949047 - RNA, 21 nt, Human herpesvirus 1
auauaguuugguccccccucu

SEQ ID NO: 3949048 - RNA, 23 nt, Human herpesvirus 1
auauuuuucaauaaaaggcauua

SEQ ID NO: 3949049 - RNA, 12 nt, Human herpesvirus 1
aucaccacgccc

SEQ ID NO: 3949050 - RNA, 15 nt, Human herpesvirus 1
aucaccaugcuggag

SEQ ID NO: 3949051 - RNA, 15 nt, Human herpesvirus 1
aucauaaccacgccc

SEQ ID NO: 3949052 - RNA, 16 nt, Human herpesvirus 1
aucauagcccuggugu

SEQ ID NO: 3949053 - RNA, 22 nt, Human herpesvirus 1
aucauugccgcguugguccucg

SEQ ID NO: 3949054 - RNA, 21 nt, Human herpesvirus 1
auccaaaaccacaaccucccg

SEQ ID NO: 3949055 - RNA, 19 nt, Human herpesvirus 1
aucccaccaaacuggcaca

SEQ ID NO: 3949056 - RNA, 18 nt, Human herpesvirus 1
auccccaacgcgcugccc

SEQ ID NO: 3949057 - RNA, 16 nt, Human herpesvirus 1
aucccgacuccccgga

SEQ ID NO: 3949058 - RNA, 16 nt, Human herpesvirus 1
auccgaacgcagcccc

SEQ ID NO: 3949059 - RNA, 15 nt, Human herpesvirus 1
aucgccgcggcuccc

SEQ ID NO: 3949060 - RNA, 20 nt, Human herpesvirus 1
aucgcucgaccucuccacac

SEQ ID NO: 3949061 - RNA, 14 nt, Human herpesvirus 1
aucgguccccucug

SEQ ID NO: 3949062 - RNA, 15 nt, Human herpesvirus 1
aucugacgcgcccca

SEQ ID NO: 3949063 - RNA, 17 nt, Human herpesvirus 1
aucugggauggcuccug

SEQ ID NO: 3949064 - RNA, 17 nt, Human herpesvirus 1
aucuguguucccuggcc

SEQ ID NO: 3949065 - RNA, 11 nt, Human herpesvirus 1
augccuguggg

SEQ ID NO: 3949066 - RNA, 13 nt, Human herpesvirus 1
augcggaaagcaa

SEQ ID NO: 3949067 - RNA, 14 nt, Human herpesvirus 1
augcggaaagcaag

SEQ ID NO: 3949068 - RNA, 20 nt, Human herpesvirus 1
augcgggauccucggccagc

SEQ ID NO: 3949069 - RNA, 19 nt, Human herpesvirus 1
augcuggaggaucacgagu

SEQ ID NO: 3949070 - RNA, 19 nt, Human herpesvirus 1
auggaguccacgguaggcc

SEQ ID NO: 3949071 - RNA, 22 nt, Human herpesvirus 1
auggaguccacgguaggcccag

SEQ ID NO: 3949072 - RNA, 16 nt, Human herpesvirus 1
accaccauccccgcuc

SEQ ID NO: 3949073 - RNA, 17 nt, Human herpesvirus 1
accaccauccccgcucc

SEQ ID NO: 3949074 - RNA, 13 nt, Human herpesvirus 1
accaccauggccc

SEQ ID NO: 3949075 - RNA, 18 nt, Human herpesvirus 1
accaccauggccccccgc

SEQ ID NO: 3949076 - RNA, 16 nt, Human herpesvirus 1
accacgugcacagccu

SEQ ID NO: 3949077 - RNA, 23 nt, Human herpesvirus 1
accagcagguccgcggugggcug

SEQ ID NO: 3949078 - RNA, 13 nt, Human herpesvirus 1
accagcgcaccgu

SEQ ID NO: 3949079 - RNA, 14 nt, Human herpesvirus 1
accagcgggucuuu

SEQ ID NO: 3949080 - RNA, 21 nt, Human herpesvirus 1
accagcgggucuuuuguguug

SEQ ID NO: 3949081 - RNA, 17 nt, Human herpesvirus 1
accaucccccggccacc

SEQ ID NO: 3949082 - RNA, 21 nt, Human herpesvirus 1
accaucccggguuaauguaaa

SEQ ID NO: 3949083 - RNA, 22 nt, Human herpesvirus 1
accaucccggguuaauguaaau

SEQ ID NO: 3949084 - RNA, 19 nt, Human herpesvirus 1
accauggccccccgcgucc

SEQ ID NO: 3949085 - RNA, 23 nt, Human herpesvirus 1
accauguccggcagggggauggg

SEQ ID NO: 3949086 - RNA, 21 nt, Human herpesvirus 1
acccaaaacacacggagcugc

SEQ ID NO: 3949087 - RNA, 18 nt, Human herpesvirus 1
acccaccgacacaugcac

SEQ ID NO: 3949088 - RNA, 19 nt, Human herpesvirus 1
accccaacgccuccccugu

SEQ ID NO: 3949089 - RNA, 15 nt, Human herpesvirus 1
accccaugaaggccc

SEQ ID NO: 3949090 - RNA, 15 nt, Human herpesvirus 1
accccauggacccca

SEQ ID NO: 3949091 - RNA, 20 nt, Human herpesvirus 1
acccccccggagccgggcgc

SEQ ID NO: 3949092 - RNA, 19 nt, Human herpesvirus 1
acccccucgaccaccaucc

SEQ ID NO: 3949093 - RNA, 19 nt, Human herpesvirus 1
accccgcaauuugcaccca

SEQ ID NO: 3949094 - RNA, 22 nt, Human herpesvirus 1
accccgcaauuugcacccagcc

SEQ ID NO: 3949095 - RNA, 19 nt, Human herpesvirus 1
accccggggcucagccaga

SEQ ID NO: 3949096 - RNA, 18 nt, Human herpesvirus 1
acccgaaacugcuuccgu

SEQ ID NO: 3949097 - RNA, 12 nt, Human herpesvirus 1
acccgacacuga

SEQ ID NO: 3949098 - RNA, 22 nt, Human herpesvirus 1
acccgaggcggccugggucuuc

SEQ ID NO: 3949099 - RNA, 19 nt, Human herpesvirus 1
acccgcacuacgaguacau

SEQ ID NO: 3949100 - RNA, 18 nt, Human herpesvirus 1
acccgcuaaccaccaagg

SEQ ID NO: 3949101 - RNA, 22 nt, Human herpesvirus 1
acccggggggcugcgaguccug

SEQ ID NO: 3949102 - RNA, 18 nt, Human herpesvirus 1
acccuaggaggccgccac

SEQ ID NO: 3949103 - RNA, 15 nt, Human herpesvirus 1
acccuccgcuggggc

SEQ ID NO: 3949104 - RNA, 13 nt, Human herpesvirus 1
acccugcugcagg

SEQ ID NO: 3949105 - RNA, 14 nt, Human herpesvirus 1
acccugcugcaggc

SEQ ID NO: 3949106 - RNA, 13 nt, Human herpesvirus 1
accgaagaggugc

SEQ ID NO: 3949107 - RNA, 17 nt, Human herpesvirus 1
accgcaacuucccaccc

SEQ ID NO: 3949108 - RNA, 14 nt, Human herpesvirus 1
accgcagucccuga

SEQ ID NO: 3949109 - RNA, 18 nt, Human herpesvirus 1
accgcauacuccggccgc

SEQ ID NO: 3949110 - RNA, 12 nt, Human herpesvirus 1
accgcaucgaca

SEQ ID NO: 3949111 - RNA, 15 nt, Human herpesvirus 1
accgccaucagccuu

SEQ ID NO: 3949112 - RNA, 14 nt, Human herpesvirus 1
accgcccgccccuc

SEQ ID NO: 3949113 - RNA, 18 nt, Human herpesvirus 1
accgcccgccccucgcca

SEQ ID NO: 3949114 - RNA, 23 nt, Human herpesvirus 1
accgccggcggcgacgugccccc

SEQ ID NO: 3949115 - RNA, 15 nt, Human herpesvirus 1
accgcgagcgccgcu

SEQ ID NO: 3949116 - RNA, 15 nt, Human herpesvirus 1
accggcacccggccu

SEQ ID NO: 3949117 - RNA, 23 nt, Human herpesvirus 1
accggccccugggccccgggaca

SEQ ID NO: 3949118 - RNA, 13 nt, Human herpesvirus 1
accguggccuggg

SEQ ID NO: 3949119 - RNA, 17 nt, Human herpesvirus 1
accguugcccgggccgu

SEQ ID NO: 3949120 - RNA, 18 nt, Human herpesvirus 1
accucaccaccaaggccc

SEQ ID NO: 3949121 - RNA, 13 nt, Human herpesvirus 1
accucgcccaccc

SEQ ID NO: 3949122 - RNA, 15 nt, Human herpesvirus 1
accugcgcuucgccg

SEQ ID NO: 3949123 - RNA, 17 nt, Human herpesvirus 1
accuucaucgaccucaa

SEQ ID NO: 3949124 - RNA, 16 nt, Human herpesvirus 1
accuuccgguccugga

SEQ ID NO: 3949125 - RNA, 14 nt, Human herpesvirus 1
acgacaucuugucg

SEQ ID NO: 3949126 - RNA, 12 nt, Human herpesvirus 1
acgaccacgaga

SEQ ID NO: 3949127 - RNA, 23 nt, Human herpesvirus 1
acgaccuguugauggccugugcu

SEQ ID NO: 3949128 - RNA, 20 nt, Human herpesvirus 1
acgagcacccugcugccccc

SEQ ID NO: 3949129 - RNA, 17 nt, Human herpesvirus 1
acgaugaccgcccccag

SEQ ID NO: 3949130 - RNA, 15 nt, Human herpesvirus 1
acgccaacgccgcca

SEQ ID NO: 3949131 - RNA, 13 nt, Human herpesvirus 1
acgccacaacagc

SEQ ID NO: 3949132 - RNA, 20 nt, Human herpesvirus 1
acgcccacuuuauucgcguc

SEQ ID NO: 3949133 - RNA, 19 nt, Human herpesvirus 1
acgcccgcaaacaggagcu

SEQ ID NO: 3949134 - RNA, 12 nt, Human herpesvirus 1
acgccucccccu

SEQ ID NO: 3949135 - RNA, 21 nt, Human herpesvirus 1
acgccuccgcccgugcugccg

SEQ ID NO: 3949136 - RNA, 20 nt, Human herpesvirus 1
acgccuggggucgcggccgc

SEQ ID NO: 3949137 - RNA, 21 nt, Human herpesvirus 1
acgcgccgcgggcccccggcc

SEQ ID NO: 3949138 - RNA, 22 nt, Human herpesvirus 1
acgcgcggcugguccacaccca

SEQ ID NO: 3949139 - RNA, 21 nt, Human herpesvirus 1
acgcggggcuguacucgaccc

SEQ ID NO: 3949140 - RNA, 15 nt, Human herpesvirus 1
acgcgucauaugcaa

SEQ ID NO: 3949141 - RNA, 13 nt, Human herpesvirus 1
acgcuuggagcca

SEQ ID NO: 3949142 - RNA, 19 nt, Human herpesvirus 1
acggaacacaaggccaaga

SEQ ID NO: 3949143 - RNA, 18 nt, Human herpesvirus 1
acggcagcaugggaccca

SEQ ID NO: 3949144 - RNA, 18 nt, Human herpesvirus 1
acggccgaagccacgccc

SEQ ID NO: 3949145 - RNA, 20 nt, Human herpesvirus 1
acgggcggccacccccccgg

SEQ ID NO: 3949146 - RNA, 22 nt, Human herpesvirus 1
acgggcgucaccaugcagcgcc

SEQ ID NO: 3949147 - RNA, 21 nt, Human herpesvirus 1
acggguguggggacccgcccc

SEQ ID NO: 3949148 - RNA, 18 nt, Human herpesvirus 1
acgguucgcgaacccuuu

SEQ ID NO: 3949149 - RNA, 15 nt, Human herpesvirus 1
acguccugggccacc

SEQ ID NO: 3949150 - RNA, 15 nt, Human herpesvirus 1
acgucgaccgcgccc

SEQ ID NO: 3949151 - RNA, 16 nt, Human herpesvirus 1
acgucgcgccugggug

SEQ ID NO: 3949152 - RNA, 17 nt, Human herpesvirus 1
acgugcacagccuggcc

SEQ ID NO: 3949153 - RNA, 14 nt, Human herpesvirus 1
acgugcccccuccu

SEQ ID NO: 3949154 - RNA, 20 nt, Human herpesvirus 1
acgugcccccuccucguccg

SEQ ID NO: 3949155 - RNA, 18 nt, Human herpesvirus 1
acgugcgcgaucccccgc

SEQ ID NO: 3949156 - RNA, 17 nt, Human herpesvirus 1
acguucgagcgccaccu

SEQ ID NO: 3949157 - RNA, 19 nt, Human herpesvirus 1
acuacauuaaauuggguuc

SEQ ID NO: 3949158 - RNA, 12 nt, Human herpesvirus 1
acuaccuaggca

SEQ ID NO: 3949159 - RNA, 15 nt, Human herpesvirus 1
cggcagcgcuccgac

SEQ ID NO: 3949160 - RNA, 18 nt, Human herpesvirus 1
cggcagucuccuggcagc

SEQ ID NO: 3949161 - RNA, 22 nt, Human herpesvirus 1
cggcagucuccuggcagcccug

SEQ ID NO: 3949162 - RNA, 16 nt, Human herpesvirus 1
cggccaacgccgcgac

SEQ ID NO: 3949163 - RNA, 18 nt, Human herpesvirus 1
cggccaccucgcccaccc

SEQ ID NO: 3949164 - RNA, 16 nt, Human herpesvirus 1
cggccacuggccggga

SEQ ID NO: 3949165 - RNA, 22 nt, Human herpesvirus 1
cggccagaucuacugcugggcc

SEQ ID NO: 3949166 - RNA, 14 nt, Human herpesvirus 1
cggcccacccuggc

SEQ ID NO: 3949167 - RNA, 15 nt, Human herpesvirus 1
cggcccacccuggcg

SEQ ID NO: 3949168 - RNA, 14 nt, Human herpesvirus 1
cggccccugggccc

SEQ ID NO: 3949169 - RNA, 17 nt, Human herpesvirus 1
cggcccuaaccccaccc

SEQ ID NO: 3949170 - RNA, 18 nt, Human herpesvirus 1
cggcccuaaccccacccc

SEQ ID NO: 3949171 - RNA, 17 nt, Human herpesvirus 1
cggccgaagccacgccc

SEQ ID NO: 3949172 - RNA, 17 nt, Human herpesvirus 1
cggccgccacccaggcg

SEQ ID NO: 3949173 - RNA, 15 nt, Human herpesvirus 1
cggccgcccuucccg

SEQ ID NO: 3949174 - RNA, 17 nt, Human herpesvirus 1
cggccgcgacccaggcg

SEQ ID NO: 3949175 - RNA, 21 nt, Human herpesvirus 1
cggccgcgacccaggcggcga

SEQ ID NO: 3949176 - RNA, 21 nt, Human herpesvirus 1
cggccggauucccgggccgga

SEQ ID NO: 3949177 - RNA, 15 nt, Human herpesvirus 1
cggccguugucuccc

SEQ ID NO: 3949178 - RNA, 22 nt, Human herpesvirus 1
cggccguuucuccgcccgaccg

SEQ ID NO: 3949179 - RNA, 14 nt, Human herpesvirus 1
cggcgaccgccagc

SEQ ID NO: 3949180 - RNA, 16 nt, Human herpesvirus 1
cggcgaccgccagccg

SEQ ID NO: 3949181 - RNA, 16 nt, Human herpesvirus 1
cggcgagguggacguc

SEQ ID NO: 3949182 - RNA, 16 nt, Human herpesvirus 1
cggcgccgacacgcgg

SEQ ID NO: 3949183 - RNA, 15 nt, Human herpesvirus 1
cggcgccgaccaccc

SEQ ID NO: 3949184 - RNA, 20 nt, Human herpesvirus 1
cggcgccgcccgccccuggc

SEQ ID NO: 3949185 - RNA, 16 nt, Human herpesvirus 1
cggcgcgacaacgagc

SEQ ID NO: 3949186 - RNA, 15 nt, Human herpesvirus 1
cggcgcuggcggcca

SEQ ID NO: 3949187 - RNA, 13 nt, Human herpesvirus 1
cggcggcgaggcc

SEQ ID NO: 3949188 - RNA, 14 nt, Human herpesvirus 1
cggcggcgcuccuc

SEQ ID NO: 3949189 - RNA, 14 nt, Human herpesvirus 1
cggcgggagcuggg

SEQ ID NO: 3949190 - RNA, 19 nt, Human herpesvirus 1
cggcggucgcgcuccucug

SEQ ID NO: 3949191 - RNA, 19 nt, Human herpesvirus 1
cggcguccgcgccccucug

SEQ ID NO: 3949192 - RNA, 17 nt, Human herpesvirus 1
cggcguuaaccgcaccc

SEQ ID NO: 3949193 - RNA, 14 nt, Human herpesvirus 1
cggcuacaggggcc

SEQ ID NO: 3949194 - RNA, 15 nt, Human herpesvirus 1
cggcucggccuaugg

SEQ ID NO: 3949195 - RNA, 22 nt, Human herpesvirus 1
cggcugguccacacccaguggc

SEQ ID NO: 3949196 - RNA, 16 nt, Human herpesvirus 1
cgggaacaccuccgcg

SEQ ID NO: 3949197 - RNA, 18 nt, Human herpesvirus 1
cgggaccugaaccccagc

SEQ ID NO: 3949198 - RNA, 19 nt, Human herpesvirus 1
cgggaccugaaccccagcc

SEQ ID NO: 3949199 - RNA, 21 nt, Human herpesvirus 1
cgggagccccggaccccacgc

SEQ ID NO: 3949200 - RNA, 14 nt, Human herpesvirus 1
cgggagccccgguc

SEQ ID NO: 3949201 - RNA, 19 nt, Human herpesvirus 1
cgggcaaguaugccccccu

SEQ ID NO: 3949202 - RNA, 22 nt, Human herpesvirus 1
cgggcaaguaugccccccuggc

SEQ ID NO: 3949203 - RNA, 16 nt, Human herpesvirus 1
cgggcaccacacacca

SEQ ID NO: 3949204 - RNA, 15 nt, Human herpesvirus 1
cgggcagugagggug

SEQ ID NO: 3949205 - RNA, 18 nt, Human herpesvirus 1
cgggcaucggaacacgcc

SEQ ID NO: 3949206 - RNA, 16 nt, Human herpesvirus 1
cgggccacggcgccga

SEQ ID NO: 3949207 - RNA, 17 nt, Human herpesvirus 1
cgggccgccucgggggc

SEQ ID NO: 3949208 - RNA, 21 nt, Human herpesvirus 1
cgggccgccucgggggcggga

SEQ ID NO: 3949209 - RNA, 21 nt, Human herpesvirus 1
cgggccgugauuccucuccgc

SEQ ID NO: 3949210 - RNA, 17 nt, Human herpesvirus 1
cgggccguuucccaccc

SEQ ID NO: 3949211 - RNA, 15 nt, Human herpesvirus 1
cgggccugccugcgg

SEQ ID NO: 3949212 - RNA, 17 nt, Human herpesvirus 1
cgggcgacgccccggcc

SEQ ID NO: 3949213 - RNA, 19 nt, Human herpesvirus 1
cgggcgaugagccaaccuc

SEQ ID NO: 3949214 - RNA, 18 nt, Human herpesvirus 1
cgggcgcaauugcggcca

SEQ ID NO: 3949215 - RNA, 14 nt, Human herpesvirus 1
cgggcgcugggugg

SEQ ID NO: 3949216 - RNA, 21 nt, Human herpesvirus 1
cgggcgcuugcgcaccuggug

SEQ ID NO: 3949217 - RNA, 22 nt, Human herpesvirus 1
cgggcgguucgccgccaccagc

SEQ ID NO: 3949218 - RNA, 22 nt, Human herpesvirus 1
cgggcuacccucacuaucgagg

SEQ ID NO: 3949219 - RNA, 15 nt, Human herpesvirus 1
cgggcucguccccug

SEQ ID NO: 3949220 - RNA, 20 nt, Human herpesvirus 1
cgggcucgucuuggccacca

SEQ ID NO: 3949221 - RNA, 16 nt, Human herpesvirus 1
cggggaccccaucagc

SEQ ID NO: 3949222 - RNA, 18 nt, Human herpesvirus 1
cggggaccuugccccggc

SEQ ID NO: 3949223 - RNA, 18 nt, Human herpesvirus 1
cggggcagagccgcccgu

SEQ ID NO: 3949224 - RNA, 13 nt, Human herpesvirus 1
cggggccagcgcc

SEQ ID NO: 3949225 - RNA, 12 nt, Human herpesvirus 1
cggggcccggcc

SEQ ID NO: 3949226 - RNA, 11 nt, Human herpesvirus 1
cggggcgccgu

SEQ ID NO: 3949227 - RNA, 15 nt, Human herpesvirus 1
cggggcggggacggg

SEQ ID NO: 3949228 - RNA, 17 nt, Human herpesvirus 1
cggggcggggacgggga

SEQ ID NO: 3949229 - RNA, 19 nt, Human herpesvirus 1
cggggcucucggggccgca

SEQ ID NO: 3949230 - RNA, 15 nt, Human herpesvirus 1
cggggggugggaccu

SEQ ID NO: 3949231 - RNA, 12 nt, Human herpesvirus 1
cggguccgcggg

SEQ ID NO: 3949232 - RNA, 15 nt, Human herpesvirus 1
cgguacauggcccug

SEQ ID NO: 3949233 - RNA, 21 nt, Human herpesvirus 1
cgguccggagccgcgcggcca

SEQ ID NO: 3949234 - RNA, 16 nt, Human herpesvirus 1
cgguccugacggccaa

SEQ ID NO: 3949235 - RNA, 18 nt, Human herpesvirus 1
cggugaccgcgugcccac

SEQ ID NO: 3949236 - RNA, 21 nt, Human herpesvirus 1
cggugccaguccgcugcaccg

SEQ ID NO: 3949237 - RNA, 16 nt, Human herpesvirus 1
cggugcgucugggccc

SEQ ID NO: 3949238 - RNA, 16 nt, Human herpesvirus 1
cggugguccgccuagc

SEQ ID NO: 3949239 - RNA, 17 nt, Human herpesvirus 1
cgguuacucggcccccg

SEQ ID NO: 3949240 - RNA, 18 nt, Human herpesvirus 1
cgguugcccccgaacacc

SEQ ID NO: 3949241 - RNA, 17 nt, Human herpesvirus 1
cgguuggggaggcugua

SEQ ID NO: 3949242 - RNA, 15 nt, Human herpesvirus 1
cgguugguccagacg

SEQ ID NO: 3949243 - RNA, 13 nt, Human herpesvirus 1
cguaaccuccggg

SEQ ID NO: 3949244 - RNA, 21 nt, Human herpesvirus 1
cguagcgucgcgacagaacug

SEQ ID NO: 3949245 - RNA, 22 nt, Human herpesvirus 1
cguauacagaacauuguuuugg

SEQ ID NO: 3949246 - RNA, 16 nt, Human herpesvirus 1
cgucaccaugcagcgc

SEQ ID NO: 3949247 - RNA, 19 nt, Human herpesvirus 1
cgucacgcaagaccaggcc

SEQ ID NO: 3949248 - RNA, 17 nt, Human herpesvirus 1
cgucauagugggccucc

SEQ ID NO: 3949249 - RNA, 16 nt, Human herpesvirus 1
cguccaucaccacgcc

SEQ ID NO: 3949250 - RNA, 21 nt, Human herpesvirus 1
cguccaucauagcccuggugu

SEQ ID NO: 3949251 - RNA, 21 nt, Human herpesvirus 1
cguccgccgagucuucggggc

SEQ ID NO: 3949252 - RNA, 13 nt, Human herpesvirus 1
cguccgcgccccu

SEQ ID NO: 3949253 - RNA, 17 nt, Human herpesvirus 1
cguccgguuggccgcgc

SEQ ID NO: 3949254 - RNA, 23 nt, Human herpesvirus 1
cguccuuugggcgggaggaagcc

SEQ ID NO: 3949255 - RNA, 19 nt, Human herpesvirus 1
cgucgacucuaucgcgcgc

SEQ ID NO: 3949256 - RNA, 23 nt, Human herpesvirus 1
cgucgccgcccugagcgcccucc

SEQ ID NO: 3949257 - RNA, 16 nt, Human herpesvirus 1
cgucgccgcgggccac

SEQ ID NO: 3949258 - RNA, 23 nt, Human herpesvirus 1
cgucgccuggcugacccacgcgg

SEQ ID NO: 3949259 - RNA, 16 nt, Human herpesvirus 1
cgucgggaggccacag

SEQ ID NO: 3949260 - RNA, 17 nt, Human herpesvirus 1
cgucucucuuccccccc

SEQ ID NO: 3949261 - RNA, 17 nt, Human herpesvirus 1
cgucucuggggagccuc

SEQ ID NO: 3949262 - RNA, 22 nt, Human herpesvirus 1
cgucuugguggguggguggcug

SEQ ID NO: 3949263 - RNA, 23 nt, Human herpesvirus 1
cgugaacgcucuacugcagaugc

SEQ ID NO: 3949264 - RNA, 18 nt, Human herpesvirus 1
cgugacacccuaccccag

SEQ ID NO: 3949265 - RNA, 21 nt, Human herpesvirus 1
cgugacacccuaccccagucc

SEQ ID NO: 3949266 - RNA, 13 nt, Human herpesvirus 1
cgugaccccaggg

SEQ ID NO: 3949267 - RNA, 21 nt, Human herpesvirus 1
cgugacgcacccccugacccc

SEQ ID NO: 3949268 - RNA, 15 nt, Human herpesvirus 1
cgugcacagccuggc

SEQ ID NO: 3949269 - RNA, 17 nt, Human herpesvirus 1
cgugcacagccuggccg

SEQ ID NO: 3949270 - RNA, 22 nt, Human herpesvirus 1
cgugcccucgcgggccucgugg

SEQ ID NO: 3949271 - RNA, 12 nt, Human herpesvirus 1
cgugcccuucca

SEQ ID NO: 3949272 - RNA, 14 nt, Human herpesvirus 1
cgugcuccugugag

SEQ ID NO: 3949273 - RNA, 17 nt, Human herpesvirus 1
cgugcucgugugguaca

SEQ ID NO: 3949274 - RNA, 19 nt, Human herpesvirus 1
cgugcuuguuuguguuccg

SEQ ID NO: 3949275 - RNA, 17 nt, Human herpesvirus 1
cguggauacggucaccc

SEQ ID NO: 3949276 - RNA, 15 nt, Human herpesvirus 1
cgugggccucaccca

SEQ ID NO: 3949277 - RNA, 14 nt, Human herpesvirus 1
cguguuugugggga

SEQ ID NO: 3949278 - RNA, 21 nt, Human herpesvirus 1
cguuauucccaaacagggccu

SEQ ID NO: 3949279 - RNA, 15 nt, Human herpesvirus 1
cguuccucacugccu

SEQ ID NO: 3949280 - RNA, 19 nt, Human herpesvirus 1
cguugcagggccuggugcu

SEQ ID NO: 3949281 - RNA, 11 nt, Human herpesvirus 1
cguuggccccc

SEQ ID NO: 3949282 - RNA, 17 nt, Human herpesvirus 1
cguuggcccccgccucu

SEQ ID NO: 3949283 - RNA, 20 nt, Human herpesvirus 1
cguugucuccccgauggccc

SEQ ID NO: 3949284 - RNA, 16 nt, Human herpesvirus 1
cuaaccaggccuccac

SEQ ID NO: 3949285 - RNA, 13 nt, Human herpesvirus 1
cuacauuaaauug

SEQ ID NO: 3949286 - RNA, 14 nt, Human herpesvirus 1
cuacugcugggcca

SEQ ID NO: 3949287 - RNA, 17 nt, Human herpesvirus 1
cuagccgaggcccggga

SEQ ID NO: 3949288 - RNA, 18 nt, Human herpesvirus 1
cuauaagacucuccccca

SEQ ID NO: 3949289 - RNA, 16 nt, Human herpesvirus 1
cuaugacggcaauaaa

SEQ ID NO: 3949290 - RNA, 21 nt, Human herpesvirus 1
cuauuuucccccccgggccgc

SEQ ID NO: 3949291 - RNA, 16 nt, Human herpesvirus 1
cucaacgagcuccugg

SEQ ID NO: 3949292 - RNA, 16 nt, Human herpesvirus 1
cucaagaaccccacca

SEQ ID NO: 3949293 - RNA, 21 nt, Human herpesvirus 1
cucaagcacacacgggggagc

SEQ ID NO: 3949294 - RNA, 14 nt, Human herpesvirus 1
cucacagggcgggc

SEQ ID NO: 3949295 - RNA, 18 nt, Human herpesvirus 1
cucacagggcgggccgcc

SEQ ID NO: 3949296 - RNA, 21 nt, Human herpesvirus 1
cucagcauccuuaaccgcugg

SEQ ID NO: 3949297 - RNA, 15 nt, Human herpesvirus 1
cucagggccuccgac

SEQ ID NO: 3949298 - RNA, 14 nt, Human herpesvirus 1
cucaugcgcgguga

SEQ ID NO: 3949299 - RNA, 20 nt, Human herpesvirus 1
cucauuuguggacgccgggg

SEQ ID NO: 3949300 - RNA, 22 nt, Human herpesvirus 1
cuccaaucgccgguuccucccg

SEQ ID NO: 3949301 - RNA, 14 nt, Human herpesvirus 1
cuccaccacccaac

SEQ ID NO: 3949302 - RNA, 22 nt, Human herpesvirus 1
cuccaggcugucgacgcccccu

SEQ ID NO: 3949303 - RNA, 23 nt, Human herpesvirus 1
cuccaggcugucgacgcccccuc

SEQ ID NO: 3949304 - RNA, 14 nt, Human herpesvirus 1
cuccaggugcgccu

SEQ ID NO: 3949305 - RNA, 23 nt, Human herpesvirus 1
cucccaacccccuaagacccacc

SEQ ID NO: 3949306 - RNA, 17 nt, Human herpesvirus 1
cucccaccgccaucagc

SEQ ID NO: 3949307 - RNA, 13 nt, Human herpesvirus 1
cuccccagcggcc

SEQ ID NO: 3949308 - RNA, 13 nt, Human herpesvirus 1
cucccccaccgcc

SEQ ID NO: 3949309 - RNA, 16 nt, Human herpesvirus 1
cucccccguguccugg

SEQ ID NO: 3949310 - RNA, 21 nt, Human herpesvirus 1
cucccccuccgcaucccagga

SEQ ID NO: 3949311 - RNA, 16 nt, Human herpesvirus 1
cuccccgccgcggccu

SEQ ID NO: 3949312 - RNA, 18 nt, Human herpesvirus 1
cuccccuucccucccccu

SEQ ID NO: 3949313 - RNA, 15 nt, Human herpesvirus 1
cuccgaaagccacca

SEQ ID NO: 3949314 - RNA, 18 nt, Human herpesvirus 1
cuccgacgacgcgcagcc

SEQ ID NO: 3949315 - RNA, 20 nt, Human herpesvirus 1
cuccgcaacggggcgccguc

SEQ ID NO: 3949316 - RNA, 16 nt, Human herpesvirus 1
cuccuccccgcgccgu

SEQ ID NO: 3949317 - RNA, 20 nt, Human herpesvirus 1
cuccucuucuccccuucccu

SEQ ID NO: 3949318 - RNA, 18 nt, Human herpesvirus 1
cuccuggaacgaggccgc

SEQ ID NO: 3949319 - RNA, 13 nt, Human herpesvirus 1
cucgagaugagcc

SEQ ID NO: 3949320 - RNA, 12 nt, Human herpesvirus 1
cucgcaccagcc

SEQ ID NO: 3949321 - RNA, 14 nt, Human herpesvirus 1
cucgcaccaucccg

SEQ ID NO: 3949322 - RNA, 21 nt, Human herpesvirus 1
cucgcgaguacuuccacgccc

SEQ ID NO: 3949323 - RNA, 14 nt, Human herpesvirus 1
cucggaaacugccu

SEQ ID NO: 3949324 - RNA, 21 nt, Human herpesvirus 1
cucggccaccgugggccggcg

SEQ ID NO: 3949325 - RNA, 21 nt, Human herpesvirus 1
cucggccuauggcuccugcga

SEQ ID NO: 3949326 - RNA, 21 nt, Human herpesvirus 1
cucggcgacgugauggccguc

SEQ ID NO: 3949327 - RNA, 15 nt, Human herpesvirus 1
cucggcgccucugga

SEQ ID NO: 3949328 - RNA, 15 nt, Human herpesvirus 1
cucggcgggcacgcc

SEQ ID NO: 3949329 - RNA, 18 nt, Human herpesvirus 1
cucgggaacggacggggu

SEQ ID NO: 3949330 - RNA, 19 nt, Human herpesvirus 1
cucguccgcgccccccgac

SEQ ID NO: 3949331 - RNA, 17 nt, Human herpesvirus 1
cucguggcgucucgccg

SEQ ID NO: 3949332 - RNA, 14 nt, Human herpesvirus 1
cucguucugcugca

SEQ ID NO: 3949333 - RNA, 14 nt, Human herpesvirus 1
cucuacccucugga

SEQ ID NO: 3949334 - RNA, 16 nt, Human herpesvirus 1
cucucgcaccaucccg

SEQ ID NO: 3949335 - RNA, 16 nt, Human herpesvirus 1
cucuggacuggaccac

SEQ ID NO: 3949336 - RNA, 13 nt, Human herpesvirus 1
cucugggggccug

SEQ ID NO: 3949337 - RNA, 15 nt, Human herpesvirus 1
cucuucuccccuucc

SEQ ID NO: 3949338 - RNA, 13 nt, Human herpesvirus 1
cugaccagcgcac

SEQ ID NO: 3949339 - RNA, 13 nt, Human herpesvirus 1
cugacccucuccg

SEQ ID NO: 3949340 - RNA, 16 nt, Human herpesvirus 1
cugcagaaucacgagc

SEQ ID NO: 3949341 - RNA, 14 nt, Human herpesvirus 1
cugcagaugcagag

SEQ ID NO: 3949342 - RNA, 13 nt, Human herpesvirus 1
cugccauggagcg

SEQ ID NO: 3949343 - RNA, 19 nt, Human herpesvirus 1
cugccccccccaccccaga

SEQ ID NO: 3949344 - RNA, 17 nt, Human herpesvirus 1
cugccccgcuucauccc

SEQ ID NO: 3949345 - RNA, 22 nt, Human herpesvirus 1
cugccgucgcuagaccacgccc

SEQ ID NO: 3949346 - RNA, 12 nt, Human herpesvirus 1
cugccucccccg

SEQ ID NO: 3949347 - RNA, 12 nt, Human herpesvirus 1
cugcggccggcg

SEQ ID NO: 3949348 - RNA, 16 nt, Human herpesvirus 1
cugcgggucaccugcc

SEQ ID NO: 3949349 - RNA, 13 nt, Human herpesvirus 1
cugcgugggccgc

SEQ ID NO: 3949350 - RNA, 16 nt, Human herpesvirus 1
cugcucacgaccccca

SEQ ID NO: 3949351 - RNA, 16 nt, Human herpesvirus 1
cugcuccgccuggccu

SEQ ID NO: 3949352 - RNA, 18 nt, Human herpesvirus 1
cugcugcggcccacccug

SEQ ID NO: 3949353 - RNA, 20 nt, Human herpesvirus 1
cuggacguccccgaggaccc

SEQ ID NO: 3949354 - RNA, 13 nt, Human herpesvirus 1
cuggagcucaauc

SEQ ID NO: 3949355 - RNA, 21 nt, Human herpesvirus 1
cuggaucccaacgaccccgcc

SEQ ID NO: 3949356 - RNA, 15 nt, Human herpesvirus 1
cuggccgcgcccacu

SEQ ID NO: 3949357 - RNA, 16 nt, Human herpesvirus 1
cuggccgcgcccacua

SEQ ID NO: 3949358 - RNA, 11 nt, Human herpesvirus 1
cuggccggccu

SEQ ID NO: 3949359 - RNA, 17 nt, Human herpesvirus 1
cuggccgggagcaccac

SEQ ID NO: 3949360 - RNA, 16 nt, Human herpesvirus 1
cuggcgcaaccacgcc

SEQ ID NO: 3949361 - RNA, 23 nt, Human herpesvirus 1
cuggcgcccccccaacgggggac

SEQ ID NO: 3949362 - RNA, 15 nt, Human herpesvirus 1
cuggggcccccaggg

SEQ ID NO: 3949363 - RNA, 23 nt, Human herpesvirus 1
cugggggcacccacgcccgcgac

SEQ ID NO: 3949364 - RNA, 14 nt, Human herpesvirus 1
cuggggucgcggcc

SEQ ID NO: 3949365 - RNA, 23 nt, Human herpesvirus 1
cuggucgucgggcgccaaagccc

SEQ ID NO: 3949366 - RNA, 18 nt, Human herpesvirus 1
cuggugcugucugacaca

SEQ ID NO: 3949367 - RNA, 15 nt, Human herpesvirus 1
cugguggcaccuccc

SEQ ID NO: 3949368 - RNA, 20 nt, Human herpesvirus 1
cuguaaguacgcccucccgc

SEQ ID NO: 3949369 - RNA, 21 nt, Human herpesvirus 1
cuguacgacugggggggaucc

SEQ ID NO: 3949370 - RNA, 19 nt, Human herpesvirus 1
cuguacucgacccacugcc

SEQ ID NO: 3949371 - RNA, 14 nt, Human herpesvirus 1
cuguaugacagcgg

SEQ ID NO: 3949372 - RNA, 22 nt, Human herpesvirus 1
cuguccaccgggaagcagggcc

SEQ ID NO: 3949373 - RNA, 18 nt, Human herpesvirus 1
cugucgaucguccaucac

SEQ ID NO: 3949374 - RNA, 16 nt, Human herpesvirus 1
cugucgcacccacagc

SEQ ID NO: 3949375 - RNA, 20 nt, Human herpesvirus 1
cugugggccaagauggccca

SEQ ID NO: 3949376 - RNA, 16 nt, Human herpesvirus 1
cuguugguauaggucc

SEQ ID NO: 3949377 - RNA, 17 nt, Human herpesvirus 1
cuuaccaucccccggcc

SEQ ID NO: 3949378 - RNA, 21 nt, Human herpesvirus 1
cuucauccccgagaaccagcg

SEQ ID NO: 3949379 - RNA, 13 nt, Human herpesvirus 1
cuuccccacggga

SEQ ID NO: 3949380 - RNA, 11 nt, Human herpesvirus 1
cuuccccuucc

SEQ ID NO: 3949381 - RNA, 18 nt, Human herpesvirus 1
cuuccucguacgcauggg

SEQ ID NO: 3949382 - RNA, 13 nt, Human herpesvirus 1
cuucggggcccgg

SEQ ID NO: 3949383 - RNA, 14 nt, Human herpesvirus 1
cuucuacaccuccc

SEQ ID NO: 3949384 - RNA, 13 nt, Human herpesvirus 1
cuucuccgcgugg

SEQ ID NO: 3949385 - RNA, 13 nt, Human herpesvirus 1
cuuggagccagcc

SEQ ID NO: 3949386 - RNA, 17 nt, Human herpesvirus 1
cuugggcccgggggccu

SEQ ID NO: 3949387 - RNA, 20 nt, Human herpesvirus 1
cuugggguugacgcuggggg

SEQ ID NO: 3949388 - RNA, 14 nt, Human herpesvirus 1
cuuggucuggccca

SEQ ID NO: 3949389 - RNA, 21 nt, Human herpesvirus 1
cuugguucggggccgcccugg

SEQ ID NO: 3949390 - RNA, 17 nt, Human herpesvirus 1
cuuugggcgggaggaag

SEQ ID NO: 3949391 - RNA, 19 nt, Human herpesvirus 1
cuuuuuuuauugggaggcg

SEQ ID NO: 3949392 - RNA, 17 nt, Human herpesvirus 1
gaaaccccagcauaccu

SEQ ID NO: 3949393 - RNA, 23 nt, Human herpesvirus 1
gaaacucggccgucccggggcag

SEQ ID NO: 3949394 - RNA, 18 nt, Human herpesvirus 1
cagcucgcggaggagcca

SEQ ID NO: 3949395 - RNA, 23 nt, Human herpesvirus 1
cagcucgcggcccggggccugcu

SEQ ID NO: 3949396 - RNA, 14 nt, Human herpesvirus 1
cagcugagccgcgc

SEQ ID NO: 3949397 - RNA, 20 nt, Human herpesvirus 1
cagcuugaagaucgccgggu

SEQ ID NO: 3949398 - RNA, 23 nt, Human herpesvirus 1
cagcuuuuuuugcgaaccguccc

SEQ ID NO: 3949399 - RNA, 14 nt, Human herpesvirus 1
caggaccgccugcc

SEQ ID NO: 3949400 - RNA, 23 nt, Human herpesvirus 1
caggacuuccccuuccucgcgga

SEQ ID NO: 3949401 - RNA, 16 nt, Human herpesvirus 1
caggaucacaccgguc

SEQ ID NO: 3949402 - RNA, 17 nt, Human herpesvirus 1
caggaucacaccgguca

SEQ ID NO: 3949403 - RNA, 17 nt, Human herpesvirus 1
caggccaucgccgggga

SEQ ID NO: 3949404 - RNA, 16 nt, Human herpesvirus 1
caggcccgccgccacu

SEQ ID NO: 3949405 - RNA, 19 nt, Human herpesvirus 1
caggcgacggcgucucccg

SEQ ID NO: 3949406 - RNA, 18 nt, Human herpesvirus 1
caggcgccuccggggguc

SEQ ID NO: 3949407 - RNA, 13 nt, Human herpesvirus 1
caggcggcgaacg

SEQ ID NO: 3949408 - RNA, 16 nt, Human herpesvirus 1
cagggaccuccuggac

SEQ ID NO: 3949409 - RNA, 11 nt, Human herpesvirus 1
cagggagaaac

SEQ ID NO: 3949410 - RNA, 23 nt, Human herpesvirus 1
cagggcgacgccgugggcaaugg

SEQ ID NO: 3949411 - RNA, 16 nt, Human herpesvirus 1
caggucccccacacca

SEQ ID NO: 3949412 - RNA, 21 nt, Human herpesvirus 1
caggugggugcuuuggaaacu

SEQ ID NO: 3949413 - RNA, 22 nt, Human herpesvirus 1
caguaccgccagggcgcuacga

SEQ ID NO: 3949414 - RNA, 23 nt, Human herpesvirus 1
caguacuggaaguaccugcagac

SEQ ID NO: 3949415 - RNA, 13 nt, Human herpesvirus 1
cagucccugaguu

SEQ ID NO: 3949416 - RNA, 19 nt, Human herpesvirus 1
cagucgcccgaagacaccc

SEQ ID NO: 3949417 - RNA, 22 nt, Human herpesvirus 1
cagucggcaagauccucgggcu

SEQ ID NO: 3949418 - RNA, 12 nt, Human herpesvirus 1
cagucuccuggc

SEQ ID NO: 3949419 - RNA, 13 nt, Human herpesvirus 1
cagugaggguggc

SEQ ID NO: 3949420 - RNA, 13 nt, Human herpesvirus 1
caguguacccugg

SEQ ID NO: 3949421 - RNA, 18 nt, Human herpesvirus 1
caguucgagcagccgcgc

SEQ ID NO: 3949422 - RNA, 16 nt, Human herpesvirus 1
caguuuauccuggagc

SEQ ID NO: 3949423 - RNA, 19 nt, Human herpesvirus 1
cauaaccgaccgcaguccc

SEQ ID NO: 3949424 - RNA, 22 nt, Human herpesvirus 1
cauaaccgaccgcagucccuga

SEQ ID NO: 3949425 - RNA, 17 nt, Human herpesvirus 1
cauacacgagcacccug

SEQ ID NO: 3949426 - RNA, 23 nt, Human herpesvirus 1
cauacacgagcacccugcugccc

SEQ ID NO: 3949427 - RNA, 14 nt, Human herpesvirus 1
cauauccaccaccu

SEQ ID NO: 3949428 - RNA, 13 nt, Human herpesvirus 1
caucacccgggug

SEQ ID NO: 3949429 - RNA, 18 nt, Human herpesvirus 1
caucccccgccuuuuugg

SEQ ID NO: 3949430 - RNA, 19 nt, Human herpesvirus 1
cauccccgagaaccagcgc

SEQ ID NO: 3949431 - RNA, 17 nt, Human herpesvirus 1
cauccccgcuccccaag

SEQ ID NO: 3949432 - RNA, 21 nt, Human herpesvirus 1
caucgaguauguacugcggcu

SEQ ID NO: 3949433 - RNA, 14 nt, Human herpesvirus 1
caucgccgcggcuc

SEQ ID NO: 3949434 - RNA, 14 nt, Human herpesvirus 1
caucgccucggcca

SEQ ID NO: 3949435 - RNA, 21 nt, Human herpesvirus 1
caucgguccccucugggcccg

SEQ ID NO: 3949436 - RNA, 15 nt, Human herpesvirus 1
caucucgcgccccga

SEQ ID NO: 3949437 - RNA, 19 nt, Human herpesvirus 1
caucugggauggcuccugg

SEQ ID NO: 3949438 - RNA, 23 nt, Human herpesvirus 1
caucugggauggcuccuggccag

SEQ ID NO: 3949439 - RNA, 23 nt, Human herpesvirus 1
caugaagccacuguuuuccgccc

SEQ ID NO: 3949440 - RNA, 21 nt, Human herpesvirus 1
caugaccgcccgccccucgcc

SEQ ID NO: 3949441 - RNA, 13 nt, Human herpesvirus 1
caugcacgaccug

SEQ ID NO: 3949442 - RNA, 12 nt, Human herpesvirus 1
caugccacccuc

SEQ ID NO: 3949443 - RNA, 17 nt, Human herpesvirus 1
caugcggcugcagagca

SEQ ID NO: 3949444 - RNA, 12 nt, Human herpesvirus 1
cauggaaggaac

SEQ ID NO: 3949445 - RNA, 17 nt, Human herpesvirus 1
cauggagcacgagcagg

SEQ ID NO: 3949446 - RNA, 14 nt, Human herpesvirus 1
cauggccaugacgg

SEQ ID NO: 3949447 - RNA, 17 nt, Human herpesvirus 1
cauggccaugacggguc

SEQ ID NO: 3949448 - RNA, 19 nt, Human herpesvirus 1
cauggcgccacaccacgcc

SEQ ID NO: 3949449 - RNA, 23 nt, Human herpesvirus 1
caugggaugucuuacuguauauc

SEQ ID NO: 3949450 - RNA, 14 nt, Human herpesvirus 1
cauuaucccauucc

SEQ ID NO: 3949451 - RNA, 14 nt, Human herpesvirus 1
ccaaaauaaaagac

SEQ ID NO: 3949452 - RNA, 15 nt, Human herpesvirus 1
ccaaacgccagccug

SEQ ID NO: 3949453 - RNA, 19 nt, Human herpesvirus 1
ccaaagcugcuggcgcgca

SEQ ID NO: 3949454 - RNA, 16 nt, Human herpesvirus 1
ccaacaauccccagga

SEQ ID NO: 3949455 - RNA, 20 nt, Human herpesvirus 1
ccaacccggacgcguccggg

SEQ ID NO: 3949456 - RNA, 12 nt, Human herpesvirus 1
ccaaccugaccg

SEQ ID NO: 3949457 - RNA, 13 nt, Human herpesvirus 1
ccaacgacggccc

SEQ ID NO: 3949458 - RNA, 17 nt, Human herpesvirus 1
ccaacgucuccuccacc

SEQ ID NO: 3949459 - RNA, 21 nt, Human herpesvirus 1
ccaacgucuccuccaccaccc

SEQ ID NO: 3949460 - RNA, 15 nt, Human herpesvirus 1
ccaacucucgcacca

SEQ ID NO: 3949461 - RNA, 20 nt, Human herpesvirus 1
ccaacucucgcaccaucccg

SEQ ID NO: 3949462 - RNA, 13 nt, Human herpesvirus 1
ccaagauggccca

SEQ ID NO: 3949463 - RNA, 19 nt, Human herpesvirus 1
ccaagccgggacuccgcgg

SEQ ID NO: 3949464 - RNA, 20 nt, Human herpesvirus 1
ccaaguacgccgccaccgug

SEQ ID NO: 3949465 - RNA, 20 nt, Human herpesvirus 1
ccaaucgccgguuccucccg

SEQ ID NO: 3949466 - RNA, 17 nt, Human herpesvirus 1
ccacaacaacgaccagg

SEQ ID NO: 3949467 - RNA, 19 nt, Human herpesvirus 1
ccacacagcccucccgacc

SEQ ID NO: 3949468 - RNA, 21 nt, Human herpesvirus 1
ccacacucaccggcggacccc

SEQ ID NO: 3949469 - RNA, 23 nt, Human herpesvirus 1
ccacagcuuuggguucguuccgg

SEQ ID NO: 3949470 - RNA, 22 nt, Human herpesvirus 1
ccacauaaccgaccgcaguccc

SEQ ID NO: 3949471 - RNA, 13 nt, Human herpesvirus 1
ccacaugcggaaa

SEQ ID NO: 3949472 - RNA, 23 nt, Human herpesvirus 1
ccacaugcggaaagcaagaacaa

SEQ ID NO: 3949473 - RNA, 15 nt, Human herpesvirus 1
ccaccaaggcccggg

SEQ ID NO: 3949474 - RNA, 14 nt, Human herpesvirus 1
ccaccauccccgcu

SEQ ID NO: 3949475 - RNA, 19 nt, Human herpesvirus 1
ccaccauggccccccgcgu

SEQ ID NO: 3949476 - RNA, 20 nt, Human herpesvirus 1
ccacccccccggaggaaacc

SEQ ID NO: 3949477 - RNA, 22 nt, Human herpesvirus 1
ccacccccccggaggaaacccc

SEQ ID NO: 3949478 - RNA, 19 nt, Human herpesvirus 1
ccacccggccauccgcgcc

SEQ ID NO: 3949479 - RNA, 19 nt, Human herpesvirus 1
ccacccuccgcuggggccc

SEQ ID NO: 3949480 - RNA, 22 nt, Human herpesvirus 1
ccacccucucuucccucagguc

SEQ ID NO: 3949481 - RNA, 12 nt, Human herpesvirus 1
ccacccuggagc

SEQ ID NO: 3949482 - RNA, 16 nt, Human herpesvirus 1
ccaccgacagccugaa

SEQ ID NO: 3949483 - RNA, 17 nt, Human herpesvirus 1
ccaccgccaucagccuu

SEQ ID NO: 3949484 - RNA, 21 nt, Human herpesvirus 1
ccaccgccaucagccuuacca

SEQ ID NO: 3949485 - RNA, 22 nt, Human herpesvirus 1
ccaccgggaagcagggcccgcc

SEQ ID NO: 3949486 - RNA, 11 nt, Human herpesvirus 1
ccaccgggccu

SEQ ID NO: 3949487 - RNA, 17 nt, Human herpesvirus 1
ccacgacacccacccca

SEQ ID NO: 3949488 - RNA, 15 nt, Human herpesvirus 1
ccacgcaaacaacac

SEQ ID NO: 3949489 - RNA, 22 nt, Human herpesvirus 1
ccacgcagccagaacucgcccc

SEQ ID NO: 3949490 - RNA, 18 nt, Human herpesvirus 1
ccacgcccccgccgcccg

SEQ ID NO: 3949491 - RNA, 21 nt, Human herpesvirus 1
ccacgccccuuucccccuguu

SEQ ID NO: 3949492 - RNA, 20 nt, Human herpesvirus 1
ccacgcccuuccccacggga

SEQ ID NO: 3949493 - RNA, 23 nt, Human herpesvirus 1
ccacgccgacgccaacgccgcca

SEQ ID NO: 3949494 - RNA, 16 nt, Human herpesvirus 1
ccacgcucuccccugc

SEQ ID NO: 3949495 - RNA, 14 nt, Human herpesvirus 1
ccacggccucgcca

SEQ ID NO: 3949496 - RNA, 18 nt, Human herpesvirus 1
ccacggguguggggaccc

SEQ ID NO: 3949497 - RNA, 15 nt, Human herpesvirus 1
ccacgguaggcccag

SEQ ID NO: 3949498 - RNA, 16 nt, Human herpesvirus 1
ccacgguaggcccagc

SEQ ID NO: 3949499 - RNA, 22 nt, Human herpesvirus 1
ccacguccccgggucuguuggg

SEQ ID NO: 3949500 - RNA, 14 nt, Human herpesvirus 1
ccacgugcacagcc

SEQ ID NO: 3949501 - RNA, 15 nt, Human herpesvirus 1
ccacuacaccagcca

SEQ ID NO: 3949502 - RNA, 21 nt, Human herpesvirus 1
ccacuggccgggagcaccaca

SEQ ID NO: 3949503 - RNA, 18 nt, Human herpesvirus 1
ccacuguuuuccgcccca

SEQ ID NO: 3949504 - RNA, 21 nt, Human herpesvirus 1
ccagacccaacccccggcccc

SEQ ID NO: 3949505 - RNA, 16 nt, Human herpesvirus 1
ccagaccccgggcgcg

SEQ ID NO: 3949506 - RNA, 17 nt, Human herpesvirus 1
ccagaccggcaccaccg

SEQ ID NO: 3949507 - RNA, 18 nt, Human herpesvirus 1
ccagacgacaucagcugu

SEQ ID NO: 3949508 - RNA, 22 nt, Human herpesvirus 1
ccagacgcgggcgacgcacaca

SEQ ID NO: 3949509 - RNA, 15 nt, Human herpesvirus 1
ccagagaccccaggg

SEQ ID NO: 3949510 - RNA, 21 nt, Human herpesvirus 1
gaaacuguccugucuuggggc

SEQ ID NO: 3949511 - RNA, 16 nt, Human herpesvirus 1
gaacaacaugggccug

SEQ ID NO: 3949512 - RNA, 17 nt, Human herpesvirus 1
gaacaacaugggccuga

SEQ ID NO: 3949513 - RNA, 19 nt, Human herpesvirus 1
gaacaauaaaggcgguggu

SEQ ID NO: 3949514 - RNA, 20 nt, Human herpesvirus 1
gaacaucuugaggggggaga

SEQ ID NO: 3949515 - RNA, 15 nt, Human herpesvirus 1
gaaccccaacgccau

SEQ ID NO: 3949516 - RNA, 19 nt, Human herpesvirus 1
gaaccccaacgccaucgcc

SEQ ID NO: 3949517 - RNA, 20 nt, Human herpesvirus 1
gaacccgcgcuaugacggca

SEQ ID NO: 3949518 - RNA, 19 nt, Human herpesvirus 1
gaaccuagggaacccagag

SEQ ID NO: 3949519 - RNA, 15 nt, Human herpesvirus 1
gaacgaggcccgcaa

SEQ ID NO: 3949520 - RNA, 13 nt, Human herpesvirus 1
gaacgcaggcgcu

SEQ ID NO: 3949521 - RNA, 18 nt, Human herpesvirus 1
gaagaggaggagggggcc

SEQ ID NO: 3949522 - RNA, 21 nt, Human herpesvirus 1
gaagcucgaacgcggguggga

SEQ ID NO: 3949523 - RNA, 22 nt, Human herpesvirus 1
gaaggaacccgcgcuaugacgg

SEQ ID NO: 3949524 - RNA, 22 nt, Human herpesvirus 1
gaaugcagcgccggccuccccg

SEQ ID NO: 3949525 - RNA, 23 nt, Human herpesvirus 1
gacaaccccggucucccagggag

SEQ ID NO: 3949526 - RNA, 18 nt, Human herpesvirus 1
gacaacgcgacaggccag

SEQ ID NO: 3949527 - RNA, 13 nt, Human herpesvirus 1
gacaccaccagcu

SEQ ID NO: 3949528 - RNA, 16 nt, Human herpesvirus 1
gacacgggcaccacac

SEQ ID NO: 3949529 - RNA, 16 nt, Human herpesvirus 1
gacacugaaaugcccc

SEQ ID NO: 3949530 - RNA, 22 nt, Human herpesvirus 1
gacagcggggacucgggcgagu

SEQ ID NO: 3949531 - RNA, 16 nt, Human herpesvirus 1
gacaugaccgcccgcc

SEQ ID NO: 3949532 - RNA, 19 nt, Human herpesvirus 1
gacaugaccgcccgccccu

SEQ ID NO: 3949533 - RNA, 19 nt, Human herpesvirus 1
gacauuaaccaccugcgcu

SEQ ID NO: 3949534 - RNA, 15 nt, Human herpesvirus 1
gaccaacgacggccc

SEQ ID NO: 3949535 - RNA, 15 nt, Human herpesvirus 1
gaccacacacccccc

SEQ ID NO: 3949536 - RNA, 20 nt, Human herpesvirus 1
gaccaccauccccgcucccc

SEQ ID NO: 3949537 - RNA, 21 nt, Human herpesvirus 1
gaccaccauccccgcucccca

SEQ ID NO: 3949538 - RNA, 20 nt, Human herpesvirus 1
gaccaccggucgucccucgc

SEQ ID NO: 3949539 - RNA, 14 nt, Human herpesvirus 1
gaccacgccccuuu

SEQ ID NO: 3949540 - RNA, 15 nt, Human herpesvirus 1
gaccacgugcacagc

SEQ ID NO: 3949541 - RNA, 20 nt, Human herpesvirus 1
gaccagccguccucgcacca

SEQ ID NO: 3949542 - RNA, 15 nt, Human herpesvirus 1
gaccagcgcacugcc

SEQ ID NO: 3949543 - RNA, 23 nt, Human herpesvirus 1
gaccaucacccgagucucugggc

SEQ ID NO: 3949544 - RNA, 13 nt, Human herpesvirus 1
gacccaaaauaau

SEQ ID NO: 3949545 - RNA, 20 nt, Human herpesvirus 1
gaccccagcgaccccacggc

SEQ ID NO: 3949546 - RNA, 20 nt, Human herpesvirus 1
gacccccaacgccacgcagc

SEQ ID NO: 3949547 - RNA, 16 nt, Human herpesvirus 1
gaccccgcccaugggu

SEQ ID NO: 3949548 - RNA, 15 nt, Human herpesvirus 1
gaccccgggcgcgcc

SEQ ID NO: 3949549 - RNA, 18 nt, Human herpesvirus 1
gaccccggggcucagcca

SEQ ID NO: 3949550 - RNA, 20 nt, Human herpesvirus 1
gacccgcaacgcgcuggggc

SEQ ID NO: 3949551 - RNA, 14 nt, Human herpesvirus 1
gacccgcauccccc

SEQ ID NO: 3949552 - RNA, 21 nt, Human herpesvirus 1
gacccguuccagccccccagc

SEQ ID NO: 3949553 - RNA, 23 nt, Human herpesvirus 1
gacccuaggaggccgccacgcgc

SEQ ID NO: 3949554 - RNA, 20 nt, Human herpesvirus 1
gaccgacagcacucacagcc

SEQ ID NO: 3949555 - RNA, 23 nt, Human herpesvirus 1
gaccgacagcacucacagccccg

SEQ ID NO: 3949556 - RNA, 14 nt, Human herpesvirus 1
gaccgaguacccgc

SEQ ID NO: 3949557 - RNA, 17 nt, Human herpesvirus 1
gaccgcagucccugagu

SEQ ID NO: 3949558 - RNA, 16 nt, Human herpesvirus 1
gaccgcaucgacacgc

SEQ ID NO: 3949559 - RNA, 20 nt, Human herpesvirus 1
gaccgcccccagcugggccc

SEQ ID NO: 3949560 - RNA, 17 nt, Human herpesvirus 1
gaccgcccgccccucgc

SEQ ID NO: 3949561 - RNA, 17 nt, Human herpesvirus 1
gaccgccugccgcgcgg

SEQ ID NO: 3949562 - RNA, 19 nt, Human herpesvirus 1
gaccgcguguacgggcugu

SEQ ID NO: 3949563 - RNA, 22 nt, Human herpesvirus 1
gaccgcuucaagcaggucgacg

SEQ ID NO: 3949564 - RNA, 15 nt, Human herpesvirus 1
gaccggauggaggag

SEQ ID NO: 3949565 - RNA, 19 nt, Human herpesvirus 1
gaccuauguguuucagaua

SEQ ID NO: 3949566 - RNA, 22 nt, Human herpesvirus 1
gaccuccccgcgcaugcucugg

SEQ ID NO: 3949567 - RNA, 21 nt, Human herpesvirus 1
gaccugcuuauucucggggag

SEQ ID NO: 3949568 - RNA, 12 nt, Human herpesvirus 1
gaccuggggcgc

SEQ ID NO: 3949569 - RNA, 10 nt, Human herpesvirus 1
gaccuggggg

SEQ ID NO: 3949570 - RNA, 13 nt, Human herpesvirus 1
gacgacgcccgcc

SEQ ID NO: 3949571 - RNA, 14 nt, Human herpesvirus 1
gacgacgcccgccg

SEQ ID NO: 3949572 - RNA, 13 nt, Human herpesvirus 1
gacgagauuuaau

SEQ ID NO: 3949573 - RNA, 16 nt, Human herpesvirus 1
gacgagccgcgcgccg

SEQ ID NO: 3949574 - RNA, 14 nt, Human herpesvirus 1
gacgccagcuuucc

SEQ ID NO: 3949575 - RNA, 23 nt, Human herpesvirus 1
gacgccagcuuuccgcugagccu

SEQ ID NO: 3949576 - RNA, 12 nt, Human herpesvirus 1
gacgccgcgcag

SEQ ID NO: 3949577 - RNA, 15 nt, Human herpesvirus 1
gacgcgcagccggcg

SEQ ID NO: 3949578 - RNA, 18 nt, Human herpesvirus 1
gacgcucccgucgcccga

SEQ ID NO: 3949579 - RNA, 23 nt, Human herpesvirus 1
gacggcccgaccaacgucgccgc

SEQ ID NO: 3949580 - RNA, 14 nt, Human herpesvirus 1
gacggcggaccugg

SEQ ID NO: 3949581 - RNA, 13 nt, Human herpesvirus 1
gacgggcagugag

SEQ ID NO: 3949582 - RNA, 17 nt, Human herpesvirus 1
gacgucaauugcccgag

SEQ ID NO: 3949583 - RNA, 15 nt, Human herpesvirus 1
gacguccugggccac

SEQ ID NO: 3949584 - RNA, 22 nt, Human herpesvirus 1
gacguccugggccaccugacgc

SEQ ID NO: 3949585 - RNA, 19 nt, Human herpesvirus 1
gacgucgccccuguggccc

SEQ ID NO: 3949586 - RNA, 21 nt, Human herpesvirus 1
gacgucugggaacacaggcgc

SEQ ID NO: 3949587 - RNA, 16 nt, Human herpesvirus 1
gacguuuuccucgucc

SEQ ID NO: 3949588 - RNA, 21 nt, Human herpesvirus 1
gacuaagcgucccugggcccu

SEQ ID NO: 3949589 - RNA, 21 nt, Human herpesvirus 1
gacucaagcacacacggggga

SEQ ID NO: 3949590 - RNA, 23 nt, Human herpesvirus 1
gacucaagcacacacgggggagc

SEQ ID NO: 3949591 - RNA, 23 nt, Human herpesvirus 1
gacucagggcucuacccucugga

SEQ ID NO: 3949592 - RNA, 21 nt, Human herpesvirus 1
gacucguuauugcacccccga

SEQ ID NO: 3949593 - RNA, 21 nt, Human herpesvirus 1
gagaaacggccgaagccacgc

SEQ ID NO: 3949594 - RNA, 19 nt, Human herpesvirus 1
gagaccagucgcccgaaga

SEQ ID NO: 3949595 - RNA, 14 nt, Human herpesvirus 1
gagacgggcgguuc

SEQ ID NO: 3949596 - RNA, 12 nt, Human herpesvirus 1
gagagcccacau

SEQ ID NO: 3949597 - RNA, 18 nt, Human herpesvirus 1
gagaguuugaucguggac

SEQ ID NO: 3949598 - RNA, 17 nt, Human herpesvirus 1
gagcacccugcugcccc

SEQ ID NO: 3949599 - RNA, 17 nt, Human herpesvirus 1
gagccaacgcccugacc

SEQ ID NO: 3949600 - RNA, 17 nt, Human herpesvirus 1
gagcccacaugcggaaa

SEQ ID NO: 3949601 - RNA, 22 nt, Human herpesvirus 1
gagcccacaugcggaaagcaag

SEQ ID NO: 3949602 - RNA, 23 nt, Human herpesvirus 1
gagcccacaugcggaaagcaaga

SEQ ID NO: 3949603 - RNA, 23 nt, Human herpesvirus 1
gagcccagaccccuucuccccac

SEQ ID NO: 3949604 - RNA, 13 nt, Human herpesvirus 1
gagccccccgcug

SEQ ID NO: 3949605 - RNA, 18 nt, Human herpesvirus 1
gagccgugcaccguggga

SEQ ID NO: 3949606 - RNA, 20 nt, Human herpesvirus 1
gagccucugugucagguggc

SEQ ID NO: 3949607 - RNA, 16 nt, Human herpesvirus 1
gagccuguuguggcuc

SEQ ID NO: 3949608 - RNA, 21 nt, Human herpesvirus 1
auggcacaccgguccccggag

SEQ ID NO: 3949609 - RNA, 15 nt, Human herpesvirus 1
auggcccuccaggcu

SEQ ID NO: 3949610 - RNA, 16 nt, Human herpesvirus 1
auggcugcccccccgc

SEQ ID NO: 3949611 - RNA, 14 nt, Human herpesvirus 1
augggcccugcucc

SEQ ID NO: 3949612 - RNA, 17 nt, Human herpesvirus 1
augggcggccccggccg

SEQ ID NO: 3949613 - RNA, 17 nt, Human herpesvirus 1
augucccucauuuuaca

SEQ ID NO: 3949614 - RNA, 15 nt, Human herpesvirus 1
auguuuaugggauuu

SEQ ID NO: 3949615 - RNA, 18 nt, Human herpesvirus 1
auugacccaaaacacacg

SEQ ID NO: 3949616 - RNA, 21 nt, Human herpesvirus 1
auugcacccccgacgaggugc

SEQ ID NO: 3949617 - RNA, 23 nt, Human herpesvirus 1
auuuccgacgaacgcggaccccc

SEQ ID NO: 3949618 - RNA, 14 nt, Human herpesvirus 1
caaaaccacaaccu

SEQ ID NO: 3949619 - RNA, 13 nt, Human herpesvirus 1
caaaauaaaagac

SEQ ID NO: 3949620 - RNA, 13 nt, Human herpesvirus 1
caaacaaccagcc

SEQ ID NO: 3949621 - RNA, 13 nt, Human herpesvirus 1
caaacgacccacc

SEQ ID NO: 3949622 - RNA, 14 nt, Human herpesvirus 1
caaacgccagccug

SEQ ID NO: 3949623 - RNA, 16 nt, Human herpesvirus 1
caaagugccccgaccc

SEQ ID NO: 3949624 - RNA, 16 nt, Human herpesvirus 1
caaaugccgggccaag

SEQ ID NO: 3949625 - RNA, 14 nt, Human herpesvirus 1
caacaacucccccg

SEQ ID NO: 3949626 - RNA, 21 nt, Human herpesvirus 1
caaccccagggaccuccugga

SEQ ID NO: 3949627 - RNA, 19 nt, Human herpesvirus 1
caaccccggucucccaggg

SEQ ID NO: 3949628 - RNA, 19 nt, Human herpesvirus 1
caaccgcgacccuccggga

SEQ ID NO: 3949629 - RNA, 20 nt, Human herpesvirus 1
caaccgcgacccuccgggau

SEQ ID NO: 3949630 - RNA, 23 nt, Human herpesvirus 1
caaccucgggugcauauccuggg

SEQ ID NO: 3949631 - RNA, 14 nt, Human herpesvirus 1
caacgaggguuggg

SEQ ID NO: 3949632 - RNA, 14 nt, Human herpesvirus 1
caacgccuccccug

SEQ ID NO: 3949633 - RNA, 22 nt, Human herpesvirus 1
caacgcgaccgucgccgcgggc

SEQ ID NO: 3949634 - RNA, 14 nt, Human herpesvirus 1
caacgcgcuggggc

SEQ ID NO: 3949635 - RNA, 20 nt, Human herpesvirus 1
caacgucuccuccaccaccc

SEQ ID NO: 3949636 - RNA, 15 nt, Human herpesvirus 1
caacuccagaccacc

SEQ ID NO: 3949637 - RNA, 20 nt, Human herpesvirus 1
caagaagaagggcacgagcg

SEQ ID NO: 3949638 - RNA, 17 nt, Human herpesvirus 1
caagaccaacccagcca

SEQ ID NO: 3949639 - RNA, 18 nt, Human herpesvirus 1
caagcccccgcccgaccg

SEQ ID NO: 3949640 - RNA, 22 nt, Human herpesvirus 1
caagccgcgauuccgagggccg

SEQ ID NO: 3949641 - RNA, 18 nt, Human herpesvirus 1
caaggugggccagccgca

SEQ ID NO: 3949642 - RNA, 18 nt, Human herpesvirus 1
caaguucaaggccaccau

SEQ ID NO: 3949643 - RNA, 20 nt, Human herpesvirus 1
caauaaaagaccacaccaac

SEQ ID NO: 3949644 - RNA, 23 nt, Human herpesvirus 1
caauccgugucggggaggggaaa

SEQ ID NO: 3949645 - RNA, 14 nt, Human herpesvirus 1
caaugggccgggcc

SEQ ID NO: 3949646 - RNA, 21 nt, Human herpesvirus 1
cacaaacacaaaacacacggg

SEQ ID NO: 3949647 - RNA, 20 nt, Human herpesvirus 1
cacaaacaucuggaggcuuu

SEQ ID NO: 3949648 - RNA, 14 nt, Human herpesvirus 1
cacaaccucccggg

SEQ ID NO: 3949649 - RNA, 18 nt, Human herpesvirus 1
cacaacggcaugccucug

SEQ ID NO: 3949650 - RNA, 16 nt, Human herpesvirus 1
cacacaccccccaugc

SEQ ID NO: 3949651 - RNA, 17 nt, Human herpesvirus 1
cacaccaccgaccucaa

SEQ ID NO: 3949652 - RNA, 16 nt, Human herpesvirus 1
cacaccccccaugcca

SEQ ID NO: 3949653 - RNA, 17 nt, Human herpesvirus 1
cacauaaccgaccgcag

SEQ ID NO: 3949654 - RNA, 19 nt, Human herpesvirus 1
cacaugcggaaagcaagaa

SEQ ID NO: 3949655 - RNA, 20 nt, Human herpesvirus 1
caccaacaaccuucugcggg

SEQ ID NO: 3949656 - RNA, 13 nt, Human herpesvirus 1
caccacccaaccc

SEQ ID NO: 3949657 - RNA, 18 nt, Human herpesvirus 1
caccacccaaccccaacu

SEQ ID NO: 3949658 - RNA, 15 nt, Human herpesvirus 1
caccacgccacaaca

SEQ ID NO: 3949659 - RNA, 16 nt, Human herpesvirus 1
caccauccccgcuccc

SEQ ID NO: 3949660 - RNA, 11 nt, Human herpesvirus 1
cacccaacaac

SEQ ID NO: 3949661 - RNA, 18 nt, Human herpesvirus 1
caccccaacgccuccccu

SEQ ID NO: 3949662 - RNA, 13 nt, Human herpesvirus 1
caccccccaugcc

SEQ ID NO: 3949663 - RNA, 19 nt, Human herpesvirus 1
cacccgccccuccauccca

SEQ ID NO: 3949664 - RNA, 14 nt, Human herpesvirus 1
cacccuaccccagu

SEQ ID NO: 3949665 - RNA, 21 nt, Human herpesvirus 1
cacccucucuucccucagguc

SEQ ID NO: 3949666 - RNA, 13 nt, Human herpesvirus 1
caccgcucccccc

SEQ ID NO: 3949667 - RNA, 15 nt, Human herpesvirus 1
caccggcggaccccc

SEQ ID NO: 3949668 - RNA, 17 nt, Human herpesvirus 1
caccgucauccacaccu

SEQ ID NO: 3949669 - RNA, 14 nt, Human herpesvirus 1
caccguggccuggg

SEQ ID NO: 3949670 - RNA, 21 nt, Human herpesvirus 1
caccguggccugggacugggu

SEQ ID NO: 3949671 - RNA, 17 nt, Human herpesvirus 1
caccucccagugucccg

SEQ ID NO: 3949672 - RNA, 22 nt, Human herpesvirus 1
caccuccggagcgugacgcacc

SEQ ID NO: 3949673 - RNA, 23 nt, Human herpesvirus 1
caccuguguggcgguugguccag

SEQ ID NO: 3949674 - RNA, 16 nt, Human herpesvirus 1
caccuuggcccuggcu

SEQ ID NO: 3949675 - RNA, 19 nt, Human herpesvirus 1
cacgaccuguugauggccu

SEQ ID NO: 3949676 - RNA, 22 nt, Human herpesvirus 1
cacgagaucaaggacagcggcc

SEQ ID NO: 3949677 - RNA, 13 nt, Human herpesvirus 1
cacgagccggggc

SEQ ID NO: 3949678 - RNA, 15 nt, Human herpesvirus 1
cacgagcgcgcugcu

SEQ ID NO: 3949679 - RNA, 21 nt, Human herpesvirus 1
cacgcaguacuggaaguaccu

SEQ ID NO: 3949680 - RNA, 12 nt, Human herpesvirus 1
cacgcccgacca

SEQ ID NO: 3949681 - RNA, 17 nt, Human herpesvirus 1
cacgcgccgccgacucc

SEQ ID NO: 3949682 - RNA, 20 nt, Human herpesvirus 1
cacgcgcgacgggcagugag

SEQ ID NO: 3949683 - RNA, 19 nt, Human herpesvirus 1
cacgcgcguccuucuuguc

SEQ ID NO: 3949684 - RNA, 16 nt, Human herpesvirus 1
cacggcgucgcuguga

SEQ ID NO: 3949685 - RNA, 12 nt, Human herpesvirus 1
cacgggcgccac

SEQ ID NO: 3949686 - RNA, 15 nt, Human herpesvirus 1
cacgguucccgagag

SEQ ID NO: 3949687 - RNA, 17 nt, Human herpesvirus 1
cacgucgaccgcgcccu

SEQ ID NO: 3949688 - RNA, 17 nt, Human herpesvirus 1
cacgugcacagccuggc

SEQ ID NO: 3949689 - RNA, 14 nt, Human herpesvirus 1
cacgugcgugccgg

SEQ ID NO: 3949690 - RNA, 13 nt, Human herpesvirus 1
cacuacaccagcc

SEQ ID NO: 3949691 - RNA, 21 nt, Human herpesvirus 1
cacucaaaaagccccaaagcg

SEQ ID NO: 3949692 - RNA, 18 nt, Human herpesvirus 1
cacucgacccccgcgucc

SEQ ID NO: 3949693 - RNA, 20 nt, Human herpesvirus 1
cacuggccgggagcaccaca

SEQ ID NO: 3949694 - RNA, 18 nt, Human herpesvirus 1
cacuggguucuccuggaa

SEQ ID NO: 3949695 - RNA, 16 nt, Human herpesvirus 1
cacuguggcucuccuc

SEQ ID NO: 3949696 - RNA, 18 nt, Human herpesvirus 1
cacuugcggcaagacccg

SEQ ID NO: 3949697 - RNA, 14 nt, Human herpesvirus 1
cagaccgaagaggu

SEQ ID NO: 3949698 - RNA, 22 nt, Human herpesvirus 1
cagacgaaaagccccgggccgc

SEQ ID NO: 3949699 - RNA, 12 nt, Human herpesvirus 1
cagacgcacccg

SEQ ID NO: 3949700 - RNA, 20 nt, Human herpesvirus 1
cagacgcugcuccgccuggc

SEQ ID NO: 3949701 - RNA, 19 nt, Human herpesvirus 1
cagagacaacgcgacaggc

SEQ ID NO: 3949702 - RNA, 14 nt, Human herpesvirus 1
cagagaccccaggg

SEQ ID NO: 3949703 - RNA, 15 nt, Human herpesvirus 1
cagauagagcugcuc

SEQ ID NO: 3949704 - RNA, 15 nt, Human herpesvirus 1
cagaugcccacgggc

SEQ ID NO: 3949705 - RNA, 19 nt, Human herpesvirus 1
cagcacggcgucgcuguga

SEQ ID NO: 3949706 - RNA, 14 nt, Human herpesvirus 1
cagcagacgcugcu

SEQ ID NO: 3949707 - RNA, 22 nt, Human herpesvirus 1
cagcagacgcugcuccgccugg

SEQ ID NO: 3949708 - RNA, 14 nt, Human herpesvirus 1
cagcaucccccgcc

SEQ ID NO: 3949709 - RNA, 22 nt, Human herpesvirus 1
cagcaucgggaugcugccccgc

SEQ ID NO: 3949710 - RNA, 20 nt, Human herpesvirus 1
cagccagaacucgccccgga

SEQ ID NO: 3949711 - RNA, 20 nt, Human herpesvirus 1
cagcccccagaugcccacgg

SEQ ID NO: 3949712 - RNA, 14 nt, Human herpesvirus 1
cagcccccccaagc

SEQ ID NO: 3949713 - RNA, 13 nt, Human herpesvirus 1
cagccgcgccgcu

SEQ ID NO: 3949714 - RNA, 14 nt, Human herpesvirus 1
cagccgcgccgcug

SEQ ID NO: 3949715 - RNA, 16 nt, Human herpesvirus 1
cagccgggacgaggcc

SEQ ID NO: 3949716 - RNA, 23 nt, Human herpesvirus 1
cagccugccucuccccccaggcc

SEQ ID NO: 3949717 - RNA, 14 nt, Human herpesvirus 1
cagccugcggccgg

SEQ ID NO: 3949718 - RNA, 15 nt, Human herpesvirus 1
cagccuuaccacgcc

SEQ ID NO: 3949719 - RNA, 21 nt, Human herpesvirus 1
cagcgacguccugggccaccu

SEQ ID NO: 3949720 - RNA, 14 nt, Human herpesvirus 1
cagcgccaagguca

SEQ ID NO: 3949721 - RNA, 19 nt, Human herpesvirus 1
cagcgccaaggucaccgac

SEQ ID NO: 3949722 - RNA, 22 nt, Human herpesvirus 1
cagcgccgcaaccagcugcacg

SEQ ID NO: 3949723 - RNA, 20 nt, Human herpesvirus 1
cagcgcggcggggcccggcc

SEQ ID NO: 3949724 - RNA, 17 nt, Human herpesvirus 1
cagcucgcggaggagcc

SEQ ID NO: 3949725 - RNA, 13 nt, Human herpesvirus 1
ugcacagccuggc

SEQ ID NO: 3949726 - RNA, 14 nt, Human herpesvirus 1
ugcacagccuggcc

SEQ ID NO: 3949727 - RNA, 21 nt, Human herpesvirus 1
ugcacccccgacgaggugcgc

SEQ ID NO: 3949728 - RNA, 13 nt, Human herpesvirus 1
ugcacucccugcc

SEQ ID NO: 3949729 - RNA, 15 nt, Human herpesvirus 1
ugcagggccuggugc

SEQ ID NO: 3949730 - RNA, 23 nt, Human herpesvirus 1
ugccaaagcgcccgucggucugc

SEQ ID NO: 3949731 - RNA, 17 nt, Human herpesvirus 1
ugccacuccggcgccgc

SEQ ID NO: 3949732 - RNA, 16 nt, Human herpesvirus 1
ugccaucgcgcccccu

SEQ ID NO: 3949733 - RNA, 21 nt, Human herpesvirus 1
ugccccaccguugcccgggcc

SEQ ID NO: 3949734 - RNA, 21 nt, Human herpesvirus 1
ugccccggccggauucccggg

SEQ ID NO: 3949735 - RNA, 12 nt, Human herpesvirus 1
ugccccugguga

SEQ ID NO: 3949736 - RNA, 21 nt, Human herpesvirus 1
ugcccuccccccgcccccggc

SEQ ID NO: 3949737 - RNA, 19 nt, Human herpesvirus 1
ugcccucccugacggccau

SEQ ID NO: 3949738 - RNA, 11 nt, Human herpesvirus 1
ugcccucgcgg

SEQ ID NO: 3949739 - RNA, 21 nt, Human herpesvirus 1
ugccgcccguugcagggccug

SEQ ID NO: 3949740 - RNA, 17 nt, Human herpesvirus 1
ugccggucggcgggccc

SEQ ID NO: 3949741 - RNA, 19 nt, Human herpesvirus 1
ugccggucggcgggcccgc

SEQ ID NO: 3949742 - RNA, 15 nt, Human herpesvirus 1
ugccuccaccgggcc

SEQ ID NO: 3949743 - RNA, 15 nt, Human herpesvirus 1
ugccucuccccccag

SEQ ID NO: 3949744 - RNA, 14 nt, Human herpesvirus 1
ugccugacccucuc

SEQ ID NO: 3949745 - RNA, 18 nt, Human herpesvirus 1
ugcgauggcgacacaccu

SEQ ID NO: 3949746 - RNA, 14 nt, Human herpesvirus 1
ugcgauucuagccu

SEQ ID NO: 3949747 - RNA, 21 nt, Human herpesvirus 1
ugcgccuggauucgcuggacc

SEQ ID NO: 3949748 - RNA, 18 nt, Human herpesvirus 1
ugcggaaagcaagaacaa

SEQ ID NO: 3949749 - RNA, 13 nt, Human herpesvirus 1
ugcggcccgcguu

SEQ ID NO: 3949750 - RNA, 15 nt, Human herpesvirus 1
ugcggccggcgggac

SEQ ID NO: 3949751 - RNA, 22 nt, Human herpesvirus 1
ugcggccggcgggacucugggc

SEQ ID NO: 3949752 - RNA, 20 nt, Human herpesvirus 1
ugcgggaguuucuccgcggu

SEQ ID NO: 3949753 - RNA, 20 nt, Human herpesvirus 1
ugcgguucguucuggacggg

SEQ ID NO: 3949754 - RNA, 17 nt, Human herpesvirus 1
ugcgucgggccucccgg

SEQ ID NO: 3949755 - RNA, 19 nt, Human herpesvirus 1
ugcguucaucggacccccc

SEQ ID NO: 3949756 - RNA, 20 nt, Human herpesvirus 1
ugcucacgacccccaaguuc

SEQ ID NO: 3949757 - RNA, 15 nt, Human herpesvirus 1
uggacgcccgggcgc

SEQ ID NO: 3949758 - RNA, 20 nt, Human herpesvirus 1
uggagagcgaaggcugccgc

SEQ ID NO: 3949759 - RNA, 17 nt, Human herpesvirus 1
uggcaacucgccccacg

SEQ ID NO: 3949760 - RNA, 15 nt, Human herpesvirus 1
uggcacaccgguccc

SEQ ID NO: 3949761 - RNA, 13 nt, Human herpesvirus 1
uggcaggagccgc

SEQ ID NO: 3949762 - RNA, 21 nt, Human herpesvirus 1
uggccaggggcauccgggacc

SEQ ID NO: 3949763 - RNA, 20 nt, Human herpesvirus 1
uggccccaguccccaagacc

SEQ ID NO: 3949764 - RNA, 22 nt, Human herpesvirus 1
uggcccuuccuaacccagaccc

SEQ ID NO: 3949765 - RNA, 21 nt, Human herpesvirus 1
uggccgacaacugccugaccc

SEQ ID NO: 3949766 - RNA, 21 nt, Human herpesvirus 1
uggccgcucgguggcuccggg

SEQ ID NO: 3949767 - RNA, 17 nt, Human herpesvirus 1
uggccggggagggcagg

SEQ ID NO: 3949768 - RNA, 15 nt, Human herpesvirus 1
uggccgugggucugu

SEQ ID NO: 3949769 - RNA, 10 nt, Human herpesvirus 1
uggcgccccc

SEQ ID NO: 3949770 - RNA, 13 nt, Human herpesvirus 1
uggcgccccggcc

SEQ ID NO: 3949771 - RNA, 14 nt, Human herpesvirus 1
uggcgccccggccc

SEQ ID NO: 3949772 - RNA, 19 nt, Human herpesvirus 1
uggcgccgccugguccccc

SEQ ID NO: 3949773 - RNA, 17 nt, Human herpesvirus 1
uggcgcggugccugacg

SEQ ID NO: 3949774 - RNA, 18 nt, Human herpesvirus 1
uggcgcggugccugacgc

SEQ ID NO: 3949775 - RNA, 19 nt, Human herpesvirus 1
uggcgcgucguucgggcgg

SEQ ID NO: 3949776 - RNA, 16 nt, Human herpesvirus 1
uggcgucggcggcucc

SEQ ID NO: 3949777 - RNA, 22 nt, Human herpesvirus 1
uggcguucgucgcccuccacca

SEQ ID NO: 3949778 - RNA, 15 nt, Human herpesvirus 1
uggcuccuggccagg

SEQ ID NO: 3949779 - RNA, 15 nt, Human herpesvirus 1
uggcugacccacgcg

SEQ ID NO: 3949780 - RNA, 20 nt, Human herpesvirus 1
uggcuggguuuuuggcccug

SEQ ID NO: 3949781 - RNA, 23 nt, Human herpesvirus 1
ugggaacggacacgcggggacac

SEQ ID NO: 3949782 - RNA, 12 nt, Human herpesvirus 1
ugggcauccagg

SEQ ID NO: 3949783 - RNA, 16 nt, Human herpesvirus 1
ugggcauccagggaga

SEQ ID NO: 3949784 - RNA, 17 nt, Human herpesvirus 1
ugggccaccgacagccu

SEQ ID NO: 3949785 - RNA, 23 nt, Human herpesvirus 1
ugggccauggacagcgaccuggg

SEQ ID NO: 3949786 - RNA, 13 nt, Human herpesvirus 1
ugggccgggccgc

SEQ ID NO: 3949787 - RNA, 17 nt, Human herpesvirus 1
ugggccucacccacgcc

SEQ ID NO: 3949788 - RNA, 20 nt, Human herpesvirus 1
ugggccucucguucuccggg

SEQ ID NO: 3949789 - RNA, 23 nt, Human herpesvirus 1
ugggccucucguucuccggggcc

SEQ ID NO: 3949790 - RNA, 21 nt, Human herpesvirus 1
ugggcggccccggccgcccuu

SEQ ID NO: 3949791 - RNA, 13 nt, Human herpesvirus 1
uggggcgcuggcc

SEQ ID NO: 3949792 - RNA, 12 nt, Human herpesvirus 1
ugggggacgagg

SEQ ID NO: 3949793 - RNA, 22 nt, Human herpesvirus 1
ugggucugugccaccagccugg

SEQ ID NO: 3949794 - RNA, 21 nt, Human herpesvirus 1
uggguuggcgucgggaccauc

SEQ ID NO: 3949795 - RNA, 19 nt, Human herpesvirus 1
ugguaucaaacucauuugu

SEQ ID NO: 3949796 - RNA, 16 nt, Human herpesvirus 1
uggucccccggggacc

SEQ ID NO: 3949797 - RNA, 18 nt, Human herpesvirus 1
ugguccgcggggccuccc

SEQ ID NO: 3949798 - RNA, 20 nt, Human herpesvirus 1
uggucggcgagcuggauggc

SEQ ID NO: 3949799 - RNA, 20 nt, Human herpesvirus 1
uggucuucaaggagaacauc

SEQ ID NO: 3949800 - RNA, 16 nt, Human herpesvirus 1
uggugaucgccugucu

SEQ ID NO: 3949801 - RNA, 21 nt, Human herpesvirus 1
uggugucugccauggagcgca

SEQ ID NO: 3949802 - RNA, 17 nt, Human herpesvirus 1
uguaacuucgacccgca

SEQ ID NO: 3949803 - RNA, 17 nt, Human herpesvirus 1
uguaaguacgcccuccc

SEQ ID NO: 3949804 - RNA, 21 nt, Human herpesvirus 1
ugucccgacauuaaccaccug

SEQ ID NO: 3949805 - RNA, 18 nt, Human herpesvirus 1
uguccuggggauggccau

SEQ ID NO: 3949806 - RNA, 21 nt, Human herpesvirus 1
ugucucgucuccucuucuccc

SEQ ID NO: 3949807 - RNA, 19 nt, Human herpesvirus 1
ugucugccauggagcgcac

SEQ ID NO: 3949808 - RNA, 16 nt, Human herpesvirus 1
uguggacgccggggcc

SEQ ID NO: 3949809 - RNA, 21 nt, Human herpesvirus 1
uguggcgcgaggggggguccg

SEQ ID NO: 3949810 - RNA, 12 nt, Human herpesvirus 1
uguggggacccg

SEQ ID NO: 3949811 - RNA, 12 nt, Human herpesvirus 1
ugugggguccuc

SEQ ID NO: 3949812 - RNA, 17 nt, Human herpesvirus 1
uuaaaaaucgugaguca

SEQ ID NO: 3949813 - RNA, 16 nt, Human herpesvirus 1
uucaccccgaagcccc

SEQ ID NO: 3949814 - RNA, 16 nt, Human herpesvirus 1
uucaucgcgccccucg

SEQ ID NO: 3949815 - RNA, 19 nt, Human herpesvirus 1
uucccccccgaccggcacc

SEQ ID NO: 3949816 - RNA, 21 nt, Human herpesvirus 1
uucccgaaacuucaucacccc

SEQ ID NO: 3949817 - RNA, 11 nt, Human herpesvirus 1
uucccgggccg

SEQ ID NO: 3949818 - RNA, 13 nt, Human herpesvirus 1
uuccgcugagccu

SEQ ID NO: 3949819 - RNA, 11 nt, Human herpesvirus 1
uucgaggaggu

SEQ ID NO: 3949820 - RNA, 21 nt, Human herpesvirus 1
uucgcaccaacaaccuucugc

SEQ ID NO: 3949821 - RNA, 15 nt, Human herpesvirus 1
uucgcuggaccucac

SEQ ID NO: 3949822 - RNA, 15 nt, Human herpesvirus 1
uucggacagacucaa

SEQ ID NO: 3949823 - RNA, 20 nt, Human herpesvirus 1
uucuacgcgcgcgaccucac

SEQ ID NO: 3949824 - RNA, 16 nt, Human herpesvirus 1
uucuccggggcccggc

SEQ ID NO: 3949825 - RNA, 18 nt, Human herpesvirus 1
uucugcgggucaccugcc

SEQ ID NO: 3949826 - RNA, 12 nt, Human herpesvirus 1
uugcacccagcc

SEQ ID NO: 3949827 - RNA, 14 nt, Human herpesvirus 1
uugcacccagccuu

SEQ ID NO: 3949828 - RNA, 11 nt, Human herpesvirus 1
uugcccucuuu

SEQ ID NO: 3949829 - RNA, 23 nt, Human herpesvirus 1
uuggccgucccguuaccaagacc

SEQ ID NO: 3949830 - RNA, 24 nt, Human herpesvirus 1
uugguauagguccacggccacugg

SEQ ID NO: 3949831 - RNA, 20 nt, Human herpesvirus 1
uuguacccuuaauaaauuuu

SEQ ID NO: 3949832 - RNA, 18 nt, Human herpesvirus 1
uuguccccgaacaaacga

SEQ ID NO: 3949833 - RNA, 15 nt, Human herpesvirus 1
uugucgucucucuuc

SEQ ID NO: 3949834 - RNA, 16 nt, Human herpesvirus 1
uuguggacccaaagcc

SEQ ID NO: 3949835 - RNA, 14 nt, Human herpesvirus 1
uuguuccgcuuccc

SEQ ID NO: 3949836 - RNA, 13 nt, Human herpesvirus 1
uuuaaccuccccc

SEQ ID NO: 3949837 - RNA, 20 nt, Human herpesvirus 1
uuuaacuacauuaaauuggg

SEQ ID NO: 3949838 - RNA, 14 nt, Human herpesvirus 1
uuuccgcugagccu

SEQ ID NO: 3949839 - RNA, 22 nt, Human herpesvirus 1
uuucguccaccaaagucucugu

SEQ ID NO: 3949840 - RNA, 16 nt, Human herpesvirus 1
uuucguuccuuccccc

SEQ ID NO: 3949841 - RNA, 18 nt, Human herpesvirus 1
uuugcacccagccuuuaa

SEQ ID NO: 3949842 - RNA, 12 nt, Human herpesvirus 1
uuuguggggagg

SEQ ID NO: 3949843 - RNA, 15 nt, Human herpesvirus 1
gcucggaaacugccu

SEQ ID NO: 3949844 - RNA, 15 nt, Human herpesvirus 1
gcucggcggcagccc

SEQ ID NO: 3949845 - RNA, 21 nt, Human herpesvirus 1
gcucgucagggccggcggcgc

SEQ ID NO: 3949846 - RNA, 15 nt, Human herpesvirus 1
gcucgucgccuggcu

SEQ ID NO: 3949847 - RNA, 15 nt, Human herpesvirus 1
gcugaccgacccucc

SEQ ID NO: 3949848 - RNA, 22 nt, Human herpesvirus 1
gcugagccgcgccgacaucacc

SEQ ID NO: 3949849 - RNA, 23 nt, Human herpesvirus 1
gcugcagaaucacgagcugaccc

SEQ ID NO: 3949850 - RNA, 15 nt, Human herpesvirus 1
gcugcagagcaaccc

SEQ ID NO: 3949851 - RNA, 23 nt, Human herpesvirus 1
gcugccgucgcuagaccacgccc

SEQ ID NO: 3949852 - RNA, 13 nt, Human herpesvirus 1
gcugcggcccacc

SEQ ID NO: 3949853 - RNA, 17 nt, Human herpesvirus 1
gcugcgguugcccccga

SEQ ID NO: 3949854 - RNA, 16 nt, Human herpesvirus 1
gcugcuccgccuggcc

SEQ ID NO: 3949855 - RNA, 18 nt, Human herpesvirus 1
gcuggcacaccaccgacc

SEQ ID NO: 3949856 - RNA, 23 nt, Human herpesvirus 1
gcugggaccccggcggccccugg

SEQ ID NO: 3949857 - RNA, 20 nt, Human herpesvirus 1
gcuggggcccccaggguccg

SEQ ID NO: 3949858 - RNA, 23 nt, Human herpesvirus 1
gcuggucgucgggcgccaaagcc

SEQ ID NO: 3949859 - RNA, 16 nt, Human herpesvirus 1
gcuguagcgccccggc

SEQ ID NO: 3949860 - RNA, 15 nt, Human herpesvirus 1
gcuguuguaggcggu

SEQ ID NO: 3949861 - RNA, 14 nt, Human herpesvirus 1
gcuuccggccuggg

SEQ ID NO: 3949862 - RNA, 23 nt, Human herpesvirus 1
gcuuccggccugggggccguccu

SEQ ID NO: 3949863 - RNA, 16 nt, Human herpesvirus 1
gcuucggccguuucuc

SEQ ID NO: 3949864 - RNA, 14 nt, Human herpesvirus 1
gcuuggagccagcc

SEQ ID NO: 3949865 - RNA, 15 nt, Human herpesvirus 1
gcuuuauacacagau

SEQ ID NO: 3949866 - RNA, 14 nt, Human herpesvirus 1
ggaaagcaagaaca

SEQ ID NO: 3949867 - RNA, 13 nt, Human herpesvirus 1
ggaacaccuccgc

SEQ ID NO: 3949868 - RNA, 12 nt, Human herpesvirus 1
ggaacccagagu

SEQ ID NO: 3949869 - RNA, 13 nt, Human herpesvirus 1
ggaacgaggcccg

SEQ ID NO: 3949870 - RNA, 22 nt, Human herpesvirus 1
ggaacgaggcccgcaagcugaa

SEQ ID NO: 3949871 - RNA, 14 nt, Human herpesvirus 1
ggaaggaacccgcg

SEQ ID NO: 3949872 - RNA, 15 nt, Human herpesvirus 1
ggacagcgaccuggg

SEQ ID NO: 3949873 - RNA, 12 nt, Human herpesvirus 1
ggaccaccgccc

SEQ ID NO: 3949874 - RNA, 19 nt, Human herpesvirus 1
ggacccaagccgccccagc

SEQ ID NO: 3949875 - RNA, 23 nt, Human herpesvirus 1
ggaccccacgacacccaccccaa

SEQ ID NO: 3949876 - RNA, 14 nt, Human herpesvirus 1
ggaccccagcgacc

SEQ ID NO: 3949877 - RNA, 21 nt, Human herpesvirus 1
ggacccgcaucccccgucugg

SEQ ID NO: 3949878 - RNA, 15 nt, Human herpesvirus 1
ggacccgccccggag

SEQ ID NO: 3949879 - RNA, 15 nt, Human herpesvirus 1
ggaccgcagccuggu

SEQ ID NO: 3949880 - RNA, 15 nt, Human herpesvirus 1
ggaccgccucggucc

SEQ ID NO: 3949881 - RNA, 13 nt, Human herpesvirus 1
ggaccgggguccc

SEQ ID NO: 3949882 - RNA, 17 nt, Human herpesvirus 1
ggacgaccugugauggg

SEQ ID NO: 3949883 - RNA, 14 nt, Human herpesvirus 1
ggacggcgccgggg

SEQ ID NO: 3949884 - RNA, 18 nt, Human herpesvirus 1
ggacggcggggcagagcc

SEQ ID NO: 3949885 - RNA, 23 nt, Human herpesvirus 1
ggacuacacggagguccagcgcc

SEQ ID NO: 3949886 - RNA, 14 nt, Human herpesvirus 1
ggacugggcaagcc

SEQ ID NO: 3949887 - RNA, 19 nt, Human herpesvirus 1
ggacugggugccaaagcgc

SEQ ID NO: 3949888 - RNA, 14 nt, Human herpesvirus 1
ggagaacccgacca

SEQ ID NO: 3949889 - RNA, 12 nt, Human herpesvirus 1
ggagagcccaca

SEQ ID NO: 3949890 - RNA, 15 nt, Human herpesvirus 1
ggaggaagaccugcu

SEQ ID NO: 3949891 - RNA, 19 nt, Human herpesvirus 1
ggaggcgccugccccgcca

SEQ ID NO: 3949892 - RNA, 19 nt, Human herpesvirus 1
ggaggcuguaggucuggga

SEQ ID NO: 3949893 - RNA, 21 nt, Human herpesvirus 1
ggaggggcuccuuagcgcggc

SEQ ID NO: 3949894 - RNA, 18 nt, Human herpesvirus 1
ggagggugguuccccccc

SEQ ID NO: 3949895 - RNA, 16 nt, Human herpesvirus 1
ggaggugcccccgcgc

SEQ ID NO: 3949896 - RNA, 19 nt, Human herpesvirus 1
ggagguggggcgggggccc

SEQ ID NO: 3949897 - RNA, 19 nt, Human herpesvirus 1
ggaucaccaaccacccggg

SEQ ID NO: 3949898 - RNA, 20 nt, Human herpesvirus 1
ggaucccaacgaccccgccc

SEQ ID NO: 3949899 - RNA, 23 nt, Human herpesvirus 1
ggaucgccuguugggccuuaucc

SEQ ID NO: 3949900 - RNA, 23 nt, Human herpesvirus 1
ggaugaaaaugaaccagacccua

SEQ ID NO: 3949901 - RNA, 15 nt, Human herpesvirus 1
ggaugccagccaggg

SEQ ID NO: 3949902 - RNA, 14 nt, Human herpesvirus 1
ggauggggagagcc

SEQ ID NO: 3949903 - RNA, 17 nt, Human herpesvirus 1
ggauggggagagcccac

SEQ ID NO: 3949904 - RNA, 19 nt, Human herpesvirus 1
ggauggggagagcccacau

SEQ ID NO: 3949905 - RNA, 15 nt, Human herpesvirus 1
ggaugucgcccgucu

SEQ ID NO: 3949906 - RNA, 14 nt, Human herpesvirus 1
ggauucccgggccg

SEQ ID NO: 3949907 - RNA, 22 nt, Human herpesvirus 1
ggcaagcccuacaccggccacc

SEQ ID NO: 3949908 - RNA, 22 nt, Human herpesvirus 1
ggcacccaaggggccgugcggg

SEQ ID NO: 3949909 - RNA, 17 nt, Human herpesvirus 1
ggcaccgcaccagcgcg

SEQ ID NO: 3949910 - RNA, 18 nt, Human herpesvirus 1
ggcagcaugggacccaca

SEQ ID NO: 3949911 - RNA, 16 nt, Human herpesvirus 1
ggcagcccggaggcgc

SEQ ID NO: 3949912 - RNA, 20 nt, Human herpesvirus 1
ggcauccagggagaaacccc

SEQ ID NO: 3949913 - RNA, 18 nt, Human herpesvirus 1
ggccaaccagcguccgcc

SEQ ID NO: 3949914 - RNA, 14 nt, Human herpesvirus 1
ggccaagcuagccg

SEQ ID NO: 3949915 - RNA, 16 nt, Human herpesvirus 1
ggccaaguacgccgcc

SEQ ID NO: 3949916 - RNA, 19 nt, Human herpesvirus 1
ggccaaguuggcccccgga

SEQ ID NO: 3949917 - RNA, 22 nt, Human herpesvirus 1
ggccacgcaaaaccaggccgac

SEQ ID NO: 3949918 - RNA, 22 nt, Human herpesvirus 1
ggccacggguguggggacccgc

SEQ ID NO: 3949919 - RNA, 16 nt, Human herpesvirus 1
ggccacuggccgggag

SEQ ID NO: 3949920 - RNA, 21 nt, Human herpesvirus 1
ggccacuggccgggagcacca

SEQ ID NO: 3949921 - RNA, 14 nt, Human herpesvirus 1
ggccauggcccgcc

SEQ ID NO: 3949922 - RNA, 16 nt, Human herpesvirus 1
ggccauguugggccgc

SEQ ID NO: 3949923 - RNA, 14 nt, Human herpesvirus 1
ggcccaacagccgc

SEQ ID NO: 3949924 - RNA, 13 nt, Human herpesvirus 1
ggcccaaggcccc

SEQ ID NO: 3949925 - RNA, 17 nt, Human herpesvirus 1
ggcccagcauguccgcc

SEQ ID NO: 3949926 - RNA, 22 nt, Human herpesvirus 1
ggccccauacacgagcacccug

SEQ ID NO: 3949927 - RNA, 23 nt, Human herpesvirus 1
ggccccauacacgagcacccugc

SEQ ID NO: 3949928 - RNA, 14 nt, Human herpesvirus 1
ggccccgacagccc

SEQ ID NO: 3949929 - RNA, 12 nt, Human herpesvirus 1
ggccccgcgucu

SEQ ID NO: 3949930 - RNA, 16 nt, Human herpesvirus 1
ggccccggggagacag

SEQ ID NO: 3949931 - RNA, 13 nt, Human herpesvirus 1
ggccccugggccc

SEQ ID NO: 3949932 - RNA, 14 nt, Human herpesvirus 1
ggcccgaagccugc

SEQ ID NO: 3949933 - RNA, 16 nt, Human herpesvirus 1
ggcccgcaagcugaac

SEQ ID NO: 3949934 - RNA, 14 nt, Human herpesvirus 1
ggcccgccucggag

SEQ ID NO: 3949935 - RNA, 17 nt, Human herpesvirus 1
ggcccgcgggaggccgc

SEQ ID NO: 3949936 - RNA, 16 nt, Human herpesvirus 1
ggcccgcguuuggccu

SEQ ID NO: 3949937 - RNA, 22 nt, Human herpesvirus 1
ggcccggcccauugggcgggag

SEQ ID NO: 3949938 - RNA, 11 nt, Human herpesvirus 1
ggcccggggcc

SEQ ID NO: 3949939 - RNA, 21 nt, Human herpesvirus 1
ggccgccacgcgcggcugguc

SEQ ID NO: 3949940 - RNA, 16 nt, Human herpesvirus 1
ggccgccgacgaccug

SEQ ID NO: 3949941 - RNA, 12 nt, Human herpesvirus 1
ggccgccgcgga

SEQ ID NO: 3949942 - RNA, 19 nt, Human herpesvirus 1
ggccgcgcccacuacacca

SEQ ID NO: 3949943 - RNA, 21 nt, Human herpesvirus 1
ggccgcgguggacagccagga

SEQ ID NO: 3949944 - RNA, 19 nt, Human herpesvirus 1
ggccggauucccgggccgg

SEQ ID NO: 3949945 - RNA, 15 nt, Human herpesvirus 1
ggccggccuggcggc

SEQ ID NO: 3949946 - RNA, 12 nt, Human herpesvirus 1
ggccgggagcgc

SEQ ID NO: 3949947 - RNA, 20 nt, Human herpesvirus 1
ggccggggagggcagggccg

SEQ ID NO: 3949948 - RNA, 21 nt, Human herpesvirus 1
ggccggggagggcagggccgc

SEQ ID NO: 3949949 - RNA, 17 nt, Human herpesvirus 1
ggccgugauuccucucc

SEQ ID NO: 3949950 - RNA, 23 nt, Human herpesvirus 1
ggccgugguccucgaggaggcgg

SEQ ID NO: 3949951 - RNA, 17 nt, Human herpesvirus 1
ggccucccccggacgac

SEQ ID NO: 3949952 - RNA, 19 nt, Human herpesvirus 1
ggccuccgcguacgaggac

SEQ ID NO: 3949953 - RNA, 15 nt, Human herpesvirus 1
ggccucgugggcacu

SEQ ID NO: 3949954 - RNA, 21 nt, Human herpesvirus 1
ggccucucguucuccggggcc

SEQ ID NO: 3949955 - RNA, 18 nt, Human herpesvirus 1
ggccugaacaaacaaacc

SEQ ID NO: 3949956 - RNA, 21 nt, Human herpesvirus 1
ggccuggugcucgugggccuc

SEQ ID NO: 3949957 - RNA, 18 nt, Human herpesvirus 1
ggccuuguuccgcuuccc

SEQ ID NO: 3949958 - RNA, 22 nt, Human herpesvirus 1
ggcgacaacgcgaccgucgccg

SEQ ID NO: 3949959 - RNA, 12 nt, Human herpesvirus 1
ggcgacacaccu

SEQ ID NO: 3949960 - RNA, 13 nt, Human herpesvirus 1
auccacaccgcgg

SEQ ID NO: 3949961 - RNA, 16 nt, Human herpesvirus 1
aucccacguccccggg

SEQ ID NO: 3949962 - RNA, 14 nt, Human herpesvirus 1
auccccaggacacc

SEQ ID NO: 3949963 - RNA, 18 nt, Human herpesvirus 1
auccccccgucagccugc

SEQ ID NO: 3949964 - RNA, 15 nt, Human herpesvirus 1
aucccccgcgcggcu

SEQ ID NO: 3949965 - RNA, 16 nt, Human herpesvirus 1
aucccccggccacccc

SEQ ID NO: 3949966 - RNA, 13 nt, Human herpesvirus 1
auccgacaugucc

SEQ ID NO: 3949967 - RNA, 24 nt, Human herpesvirus 1
auccgggaagacgaccagccgucc

SEQ ID NO: 3949968 - RNA, 15 nt, Human herpesvirus 1
auccgucgggaggcc

SEQ ID NO: 3949969 - RNA, 20 nt, Human herpesvirus 1
auccguggccccggccccca

SEQ ID NO: 3949970 - RNA, 15 nt, Human herpesvirus 1
auccuggagcaccga

SEQ ID NO: 3949971 - RNA, 16 nt, Human herpesvirus 1
aucgcaucuuuccugu

SEQ ID NO: 3949972 - RNA, 22 nt, Human herpesvirus 1
aucgccggguggcacgggccca

SEQ ID NO: 3949973 - RNA, 17 nt, Human herpesvirus 1
aucgccgguuccucccg

SEQ ID NO: 3949974 - RNA, 19 nt, Human herpesvirus 1
aucgcgaccaccccaaaua

SEQ ID NO: 3949975 - RNA, 18 nt, Human herpesvirus 1
aucgcucgaccucuccac

SEQ ID NO: 3949976 - RNA, 20 nt, Human herpesvirus 1
aucgguccccucugggcccg

SEQ ID NO: 3949977 - RNA, 14 nt, Human herpesvirus 1
aucguccaccuccg

SEQ ID NO: 3949978 - RNA, 16 nt, Human herpesvirus 1
aucgucgccugccccc

SEQ ID NO: 3949979 - RNA, 19 nt, Human herpesvirus 1
aucgugagucacagcgacc

SEQ ID NO: 3949980 - RNA, 13 nt, Human herpesvirus 1
aucuccggacccc

SEQ ID NO: 3949981 - RNA, 22 nt, Human herpesvirus 1
aucuccugggggcacccacgcc

SEQ ID NO: 3949982 - RNA, 12 nt, Human herpesvirus 1
aucuugucccca

SEQ ID NO: 3949983 - RNA, 19 nt, Human herpesvirus 1
aucuuugaggaccgcgccc

SEQ ID NO: 3949984 - RNA, 22 nt, Human herpesvirus 1
augaagccacuguuuuccgccc

SEQ ID NO: 3949985 - RNA, 12 nt, Human herpesvirus 1
augagccagacc

SEQ ID NO: 3949986 - RNA, 17 nt, Human herpesvirus 1
augaguacgaggaucug

SEQ ID NO: 3949987 - RNA, 19 nt, Human herpesvirus 1
augauccucaucgagggca

SEQ ID NO: 3949988 - RNA, 13 nt, Human herpesvirus 1
augcacgcccccg

SEQ ID NO: 3949989 - RNA, 17 nt, Human herpesvirus 1
augcccacgggucgugc

SEQ ID NO: 3949990 - RNA, 13 nt, Human herpesvirus 1
augccgugccgcc

SEQ ID NO: 3949991 - RNA, 15 nt, Human herpesvirus 1
augccgugccgcccg

SEQ ID NO: 3949992 - RNA, 20 nt, Human herpesvirus 1
auggcacaccgguccccgga

SEQ ID NO: 3949993 - RNA, 23 nt, Human herpesvirus 1
auggcacgaguucaaccucgggu

SEQ ID NO: 3949994 - RNA, 21 nt, Human herpesvirus 1
auggcccaguguacccuggcg

SEQ ID NO: 3949995 - RNA, 13 nt, Human herpesvirus 1
auggcgacacacc

SEQ ID NO: 3949996 - RNA, 13 nt, Human herpesvirus 1
auggggagagccc

SEQ ID NO: 3949997 - RNA, 21 nt, Human herpesvirus 1
auggguugugguuauaugcac

SEQ ID NO: 3949998 - RNA, 13 nt, Human herpesvirus 1
auguccccaaaau

SEQ ID NO: 3949999 - RNA, 16 nt, Human herpesvirus 1
auguccccaaaauaaa

SEQ ID NO: 3950000 - RNA, 22 nt, Human herpesvirus 1
auguguguaaaauaaauuauug

SEQ ID NO: 3950001 - RNA, 17 nt, Human herpesvirus 1
auguuugcgggccuggg

SEQ ID NO: 3950002 - RNA, 11 nt, Human herpesvirus 1
auuaaagacaa

SEQ ID NO: 3950003 - RNA, 18 nt, Human herpesvirus 1
auuccgcggccccagccc

SEQ ID NO: 3950004 - RNA, 15 nt, Human herpesvirus 1
auucgcuggaccuca

SEQ ID NO: 3950005 - RNA, 19 nt, Human herpesvirus 1
auucucccgaaccaggccg

SEQ ID NO: 3950006 - RNA, 20 nt, Human herpesvirus 1
auucucgucuguccucggga

SEQ ID NO: 3950007 - RNA, 12 nt, Human herpesvirus 1
auugggcgggag

SEQ ID NO: 3950008 - RNA, 15 nt, Human herpesvirus 1
caaaauaaaagacca

SEQ ID NO: 3950009 - RNA, 17 nt, Human herpesvirus 1
caaaauaaaagaccaaa

SEQ ID NO: 3950010 - RNA, 12 nt, Human herpesvirus 1
caaagcugcugg

SEQ ID NO: 3950011 - RNA, 13 nt, Human herpesvirus 1
caaauaaagccac

SEQ ID NO: 3950012 - RNA, 17 nt, Human herpesvirus 1
caaaucccggcgccggu

SEQ ID NO: 3950013 - RNA, 11 nt, Human herpesvirus 1
caacaaacccc

SEQ ID NO: 3950014 - RNA, 13 nt, Human herpesvirus 1
caacagggguuca

SEQ ID NO: 3950015 - RNA, 17 nt, Human herpesvirus 1
caaccccggucucccag

SEQ ID NO: 3950016 - RNA, 23 nt, Human herpesvirus 1
caaccccuuuggggcgcuggccg

SEQ ID NO: 3950017 - RNA, 17 nt, Human herpesvirus 1
caaccugauccgcggcg

SEQ ID NO: 3950018 - RNA, 13 nt, Human herpesvirus 1
caacgaccccgcc

SEQ ID NO: 3950019 - RNA, 14 nt, Human herpesvirus 1
caacgcacuguggc

SEQ ID NO: 3950020 - RNA, 19 nt, Human herpesvirus 1
caacgccaucgccucggcc

SEQ ID NO: 3950021 - RNA, 12 nt, Human herpesvirus 1
caacgcgacgca

SEQ ID NO: 3950022 - RNA, 12 nt, Human herpesvirus 1
caacgggggacc

SEQ ID NO: 3950023 - RNA, 14 nt, Human herpesvirus 1
caacgucgccgccc

SEQ ID NO: 3950024 - RNA, 14 nt, Human herpesvirus 1
caacgucuccucca

SEQ ID NO: 3950025 - RNA, 21 nt, Human herpesvirus 1
caacgucuccuccaccaccca

SEQ ID NO: 3950026 - RNA, 21 nt, Human herpesvirus 1
caacucucgcaccaucccggg

SEQ ID NO: 3950027 - RNA, 23 nt, Human herpesvirus 1
caacucucgcaccaucccggguu

SEQ ID NO: 3950028 - RNA, 16 nt, Human herpesvirus 1
caacugacgcuggccg

SEQ ID NO: 3950029 - RNA, 14 nt, Human herpesvirus 1
caagaacaauaaag

SEQ ID NO: 3950030 - RNA, 14 nt, Human herpesvirus 1
caagaccaccuccu

SEQ ID NO: 3950031 - RNA, 21 nt, Human herpesvirus 1
caagagacgucgccccugugg

SEQ ID NO: 3950032 - RNA, 14 nt, Human herpesvirus 1
caagagcgcucccc

SEQ ID NO: 3950033 - RNA, 19 nt, Human herpesvirus 1
caagaucuuucggugucua

SEQ ID NO: 3950034 - RNA, 19 nt, Human herpesvirus 1
caagcuaugcagccccgug

SEQ ID NO: 3950035 - RNA, 18 nt, Human herpesvirus 1
caaggacagcggccugcu

SEQ ID NO: 3950036 - RNA, 19 nt, Human herpesvirus 1
caaggacgcccgcgacgcc

SEQ ID NO: 3950037 - RNA, 15 nt, Human herpesvirus 1
caaggagcgccggcg

SEQ ID NO: 3950038 - RNA, 17 nt, Human herpesvirus 1
caaguacgccgccaccg

SEQ ID NO: 3950039 - RNA, 12 nt, Human herpesvirus 1
caauccccagga

SEQ ID NO: 3950040 - RNA, 19 nt, Human herpesvirus 1
caauccgugucggggaggg

SEQ ID NO: 3950041 - RNA, 16 nt, Human herpesvirus 1
cacaacacaaacaucu

SEQ ID NO: 3950042 - RNA, 15 nt, Human herpesvirus 1
cacaacgccagccug

SEQ ID NO: 3950043 - RNA, 21 nt, Human herpesvirus 1
cacaacggcaugccucugcgg

SEQ ID NO: 3950044 - RNA, 10 nt, Human herpesvirus 1
cacacacccu

SEQ ID NO: 3950045 - RNA, 17 nt, Human herpesvirus 1
cacacacgggggagcgc

SEQ ID NO: 3950046 - RNA, 16 nt, Human herpesvirus 1
cacacagcccucccga

SEQ ID NO: 3950047 - RNA, 16 nt, Human herpesvirus 1
cacaccacgccacaac

SEQ ID NO: 3950048 - RNA, 21 nt, Human herpesvirus 1
cacaccaucucccccgugucc

SEQ ID NO: 3950049 - RNA, 18 nt, Human herpesvirus 1
cacauaaauuuggcuggu

SEQ ID NO: 3950050 - RNA, 15 nt, Human herpesvirus 1
caccaaggcccgggc

SEQ ID NO: 3950051 - RNA, 16 nt, Human herpesvirus 1
caccacacaccagcgg

SEQ ID NO: 3950052 - RNA, 21 nt, Human herpesvirus 1
caccacauaaccgaccgcagu

SEQ ID NO: 3950053 - RNA, 14 nt, Human herpesvirus 1
caccaucucccccg

SEQ ID NO: 3950054 - RNA, 22 nt, Human herpesvirus 1
cacccacgccgccucggcccgc

SEQ ID NO: 3950055 - RNA, 18 nt, Human herpesvirus 1
caccccccgacgccagcu

SEQ ID NO: 3950056 - RNA, 20 nt, Human herpesvirus 1
cacccccgaguucccccggg

SEQ ID NO: 3950057 - RNA, 18 nt, Human herpesvirus 1
cacccggagguuccggag

SEQ ID NO: 3950058 - RNA, 13 nt, Human herpesvirus 1
cacccuaccccag

SEQ ID NO: 3950059 - RNA, 14 nt, Human herpesvirus 1
cacccugcugcagg

SEQ ID NO: 3950060 - RNA, 13 nt, Human herpesvirus 1
caccgcccacaga

SEQ ID NO: 3950061 - RNA, 18 nt, Human herpesvirus 1
caccgccccccuguuccc

SEQ ID NO: 3950062 - RNA, 12 nt, Human herpesvirus 1
caccgcugggcg

SEQ ID NO: 3950063 - RNA, 23 nt, Human herpesvirus 1
caccggguacggcgucugggcca

SEQ ID NO: 3950064 - RNA, 23 nt, Human herpesvirus 1
caccgguuuccgcgacccaccgg

SEQ ID NO: 3950065 - RNA, 21 nt, Human herpesvirus 1
caccgucggaggccccccaga

SEQ ID NO: 3950066 - RNA, 17 nt, Human herpesvirus 1
caccuacuacgaugggg

SEQ ID NO: 3950067 - RNA, 21 nt, Human herpesvirus 1
caccucgaggacacccgcgca

SEQ ID NO: 3950068 - RNA, 21 nt, Human herpesvirus 1
caccucgcccacccacuccuc

SEQ ID NO: 3950069 - RNA, 15 nt, Human herpesvirus 1
caccugcgcucccuc

SEQ ID NO: 3950070 - RNA, 13 nt, Human herpesvirus 1
caccuuggcccug

SEQ ID NO: 3950071 - RNA, 16 nt, Human herpesvirus 1
cacgacaaccccgguc

SEQ ID NO: 3950072 - RNA, 22 nt, Human herpesvirus 1
cacgacaaccccggucucccag

SEQ ID NO: 3950073 - RNA, 18 nt, Human herpesvirus 1
cacgagcgcgcugcucag

SEQ ID NO: 3950074 - RNA, 23 nt, Human herpesvirus 1
cacgagcgcgcugcucagcgcca

SEQ ID NO: 3950075 - RNA, 22 nt, Human herpesvirus 1
cacgaggcaguuaacugucugg

SEQ ID NO: 3950076 - RNA, 22 nt, Human herpesvirus 1
cacgcacuugcggcaagacccg

SEQ ID NO: 3950077 - RNA, 14 nt, Human herpesvirus 1
cacgcaucgacgug

SEQ ID NO: 3950078 - RNA, 17 nt, Human herpesvirus 1
cacgcccccgccgcccg

SEQ ID NO: 3950079 - RNA, 12 nt, Human herpesvirus 1
cacgccgccucg

SEQ ID NO: 3950080 - RNA, 19 nt, Human herpesvirus 1
cacgcucuccccugcugcc

SEQ ID NO: 3950081 - RNA, 19 nt, Human herpesvirus 1
cacggagggaaccaccauc

SEQ ID NO: 3950082 - RNA, 20 nt, Human herpesvirus 1
cacggcaaggagcgccggcg

SEQ ID NO: 3950083 - RNA, 18 nt, Human herpesvirus 1
cacggccacuggccggga

SEQ ID NO: 3950084 - RNA, 23 nt, Human herpesvirus 1
cacggcgaaugcagcgccggccu

SEQ ID NO: 3950085 - RNA, 15 nt, Human herpesvirus 1
cacggcuaccuggcc

SEQ ID NO: 3950086 - RNA, 19 nt, Human herpesvirus 1
cacggcuaccuggccccag

SEQ ID NO: 3950087 - RNA, 16 nt, Human herpesvirus 1
cacggguggccgggcg

SEQ ID NO: 3950088 - RNA, 14 nt, Human herpesvirus 1
cacgguaggcccag

SEQ ID NO: 3950089 - RNA, 23 nt, Human herpesvirus 1
cacgguggugcaguucgagcagc

SEQ ID NO: 3950090 - RNA, 21 nt, Human herpesvirus 1
cacguacacggguggccgggc

SEQ ID NO: 3950091 - RNA, 17 nt, Human herpesvirus 1
cacgugcugcugcggcc

SEQ ID NO: 3950092 - RNA, 22 nt, Human herpesvirus 1
cacguugggguuguugcuggcg

SEQ ID NO: 3950093 - RNA, 18 nt, Human herpesvirus 1
cacguuuaccccgcagcc

SEQ ID NO: 3950094 - RNA, 19 nt, Human herpesvirus 1
cacucaaaaagccccaaag

SEQ ID NO: 3950095 - RNA, 20 nt, Human herpesvirus 1
cacucccgucucgcugcccu

SEQ ID NO: 3950096 - RNA, 17 nt, Human herpesvirus 1
cacugcacucccugccg

SEQ ID NO: 3950097 - RNA, 22 nt, Human herpesvirus 1
cagaccccuucuccccacaaca

SEQ ID NO: 3950098 - RNA, 17 nt, Human herpesvirus 1
cagacgagcgcgcuugu

SEQ ID NO: 3950099 - RNA, 18 nt, Human herpesvirus 1
cagacgagcgcgcuuguc

SEQ ID NO: 3950100 - RNA, 21 nt, Human herpesvirus 1
cagacgcccuccgaggagauc

SEQ ID NO: 3950101 - RNA, 23 nt, Human herpesvirus 1
cagacgcugcuccgccuggccug

SEQ ID NO: 3950102 - RNA, 20 nt, Human herpesvirus 1
cagacucaagcacacacggg

SEQ ID NO: 3950103 - RNA, 14 nt, Human herpesvirus 1
cagagccgcccguc

SEQ ID NO: 3950104 - RNA, 17 nt, Human herpesvirus 1
cagaggcgcgcgcaccu

SEQ ID NO: 3950105 - RNA, 18 nt, Human herpesvirus 1
cagagguguucacgcacc

SEQ ID NO: 3950106 - RNA, 15 nt, Human herpesvirus 1
cagaucggcgccgcg

SEQ ID NO: 3950107 - RNA, 23 nt, Human herpesvirus 1
cagcaccgacaccgcacugcggc

SEQ ID NO: 3950108 - RNA, 19 nt, Human herpesvirus 1
cagcaccguuaccaccgau

SEQ ID NO: 3950109 - RNA, 23 nt, Human herpesvirus 1
cagcagacgcugcuccgccuggc

SEQ ID NO: 3950110 - RNA, 21 nt, Human herpesvirus 1
cagccaauccgugucggggag

SEQ ID NO: 3950111 - RNA, 15 nt, Human herpesvirus 1
cagccccccagccuc

SEQ ID NO: 3950112 - RNA, 17 nt, Human herpesvirus 1
cagccccccagccuccc

SEQ ID NO: 3950113 - RNA, 17 nt, Human herpesvirus 1
cagcccccccaagcgcc

SEQ ID NO: 3950114 - RNA, 22 nt, Human herpesvirus 1
cagccccgcauaucccacccug

SEQ ID NO: 3950115 - RNA, 21 nt, Human herpesvirus 1
cagccucgucccgcccguguu

SEQ ID NO: 3950116 - RNA, 21 nt, Human herpesvirus 1
cagccugccucuccccccagg

SEQ ID NO: 3950117 - RNA, 17 nt, Human herpesvirus 1
cagccuggucgaggcgg

SEQ ID NO: 3950118 - RNA, 19 nt, Human herpesvirus 1
cagccuguuuguccugggg

SEQ ID NO: 3950119 - RNA, 15 nt, Human herpesvirus 1
cagccuucucccggu

SEQ ID NO: 3950120 - RNA, 19 nt, Human herpesvirus 1
cagcgacguccugggccac

SEQ ID NO: 3950121 - RNA, 16 nt, Human herpesvirus 1
cagcgccgcaaccagc

SEQ ID NO: 3950122 - RNA, 19 nt, Human herpesvirus 1
cagcguauccacccccgcc

SEQ ID NO: 3950123 - RNA, 19 nt, Human herpesvirus 1
cagcuuuuaccgcuuccuc

SEQ ID NO: 3950124 - RNA, 20 nt, Human herpesvirus 1
caggaaauccguggccccgg

SEQ ID NO: 3950125 - RNA, 13 nt, Human herpesvirus 1
caggccccccgcc

SEQ ID NO: 3950126 - RNA, 13 nt, Human herpesvirus 1
caggccuccaccc

SEQ ID NO: 3950127 - RNA, 22 nt, Human herpesvirus 1
caggcgcugucuccccggggcc

SEQ ID NO: 3950128 - RNA, 21 nt, Human herpesvirus 1
caggcugucgacgcccccucc

SEQ ID NO: 3950129 - RNA, 12 nt, Human herpesvirus 1
cagggaccuccu

SEQ ID NO: 3950130 - RNA, 15 nt, Human herpesvirus 1
cagggaccuccugga

SEQ ID NO: 3950131 - RNA, 22 nt, Human herpesvirus 1
cagggauccacgacaaccccgg

SEQ ID NO: 3950132 - RNA, 23 nt, Human herpesvirus 1
cagggccggcggcgcuccucgcc

SEQ ID NO: 3950133 - RNA, 16 nt, Human herpesvirus 1
cagggccucgcugacc

SEQ ID NO: 3950134 - RNA, 13 nt, Human herpesvirus 1
cagggcgggccgc

SEQ ID NO: 3950135 - RNA, 21 nt, Human herpesvirus 1
cagggcuacgugcucgacagc

SEQ ID NO: 3950136 - RNA, 18 nt, Human herpesvirus 1
cagggcucuacccucugg

SEQ ID NO: 3950137 - RNA, 17 nt, Human herpesvirus 1
caggguaccgcgugacc

SEQ ID NO: 3950138 - RNA, 19 nt, Human herpesvirus 1
caguaacaugcgcacguga

SEQ ID NO: 3950139 - RNA, 14 nt, Human herpesvirus 1
caguaccgccaggg

SEQ ID NO: 3950140 - RNA, 21 nt, Human herpesvirus 1
cagucaaacgaccucaucagc

SEQ ID NO: 3950141 - RNA, 21 nt, Human herpesvirus 1
cagucgcccgaagacaccccc

SEQ ID NO: 3950142 - RNA, 19 nt, Human herpesvirus 1
cagucuccuggcagcccug

SEQ ID NO: 3950143 - RNA, 16 nt, Human herpesvirus 1
cagucuucggcgguga

SEQ ID NO: 3950144 - RNA, 12 nt, Human herpesvirus 1
caguggcuccgg

SEQ ID NO: 3950145 - RNA, 15 nt, Human herpesvirus 1
cauaaccgaccgcag

SEQ ID NO: 3950146 - RNA, 14 nt, Human herpesvirus 1
cauaccgaccacac

SEQ ID NO: 3950147 - RNA, 14 nt, Human herpesvirus 1
cauagcccuggugu

SEQ ID NO: 3950148 - RNA, 18 nt, Human herpesvirus 1
cauaucgcuucccgaccu

SEQ ID NO: 3950149 - RNA, 23 nt, Human herpesvirus 1
caucaaggcggagaacaccgaug

SEQ ID NO: 3950150 - RNA, 17 nt, Human herpesvirus 1
caucagcucgcggcccg

SEQ ID NO: 3950151 - RNA, 20 nt, Human herpesvirus 1
caucagcuguggacccgagc

SEQ ID NO: 3950152 - RNA, 22 nt, Human herpesvirus 1
caucagcuguggacccgagcuc

SEQ ID NO: 3950153 - RNA, 22 nt, Human herpesvirus 1
caucccacaaacacaaaacaca

SEQ ID NO: 3950154 - RNA, 17 nt, Human herpesvirus 1
caucccaggaucacacc

SEQ ID NO: 3950155 - RNA, 17 nt, Human herpesvirus 1
caucccccgucuggguu

SEQ ID NO: 3950156 - RNA, 20 nt, Human herpesvirus 1
cauccgaacgcagccccgcu

SEQ ID NO: 3950157 - RNA, 17 nt, Human herpesvirus 1
cauccugcggcucgugg

SEQ ID NO: 3950158 - RNA, 20 nt, Human herpesvirus 1
caucgacacgcgcguccuuc

SEQ ID NO: 3950159 - RNA, 21 nt, Human herpesvirus 1
caucgacacgcgcguccuucu

SEQ ID NO: 3950160 - RNA, 19 nt, Human herpesvirus 1
caucgccucggccaccgug

SEQ ID NO: 3950161 - RNA, 16 nt, Human herpesvirus 1
caucggcaaggacgcc

SEQ ID NO: 3950162 - RNA, 20 nt, Human herpesvirus 1
caucggcaaggacgcccgcg

SEQ ID NO: 3950163 - RNA, 20 nt, Human herpesvirus 1
caucgguguguccuuuuggg

SEQ ID NO: 3950164 - RNA, 19 nt, Human herpesvirus 1
caucugaagccguccgacc

SEQ ID NO: 3950165 - RNA, 14 nt, Human herpesvirus 1
caugacccagaccg

SEQ ID NO: 3950166 - RNA, 22 nt, Human herpesvirus 1
caugcgggcucggcuccccgcc

SEQ ID NO: 3950167 - RNA, 24 nt, Human herpesvirus 1
cauggaccccagcgaccccacggc

SEQ ID NO: 3950168 - RNA, 12 nt, Human herpesvirus 1
cauggccaugac

SEQ ID NO: 3950169 - RNA, 15 nt, Human herpesvirus 1
cauggcgggacuggg

SEQ ID NO: 3950170 - RNA, 17 nt, Human herpesvirus 1
cauggugaucgccuguc

SEQ ID NO: 3950171 - RNA, 14 nt, Human herpesvirus 1
cauggugccgaccg

SEQ ID NO: 3950172 - RNA, 21 nt, Human herpesvirus 1
cauuuauugacccaaaacaca

SEQ ID NO: 3950173 - RNA, 18 nt, Human herpesvirus 1
ccaaaauaaaagaccaaa

SEQ ID NO: 3950174 - RNA, 21 nt, Human herpesvirus 1
ccaaacccaccgacacaugca

SEQ ID NO: 3950175 - RNA, 15 nt, Human herpesvirus 1
ccaaacucccgacac

SEQ ID NO: 3950176 - RNA, 20 nt, Human herpesvirus 1
ccaaacucccgacaccacca

SEQ ID NO: 3950177 - RNA, 19 nt, Human herpesvirus 1
ccaaauaaagccacugaaa

SEQ ID NO: 3950178 - RNA, 23 nt, Human herpesvirus 1
ccaacaacucccccgcgcgcccc

SEQ ID NO: 3950179 - RNA, 20 nt, Human herpesvirus 1
ccaacaauccccaggacacc

SEQ ID NO: 3950180 - RNA, 19 nt, Human herpesvirus 1
ccaacgaccccgcccaugg

SEQ ID NO: 3950181 - RNA, 15 nt, Human herpesvirus 1
ccaacgcguccgugg

SEQ ID NO: 3950182 - RNA, 13 nt, Human herpesvirus 1
gccuccacccccu

SEQ ID NO: 3950183 - RNA, 16 nt, Human herpesvirus 1
gccuccacccccucga

SEQ ID NO: 3950184 - RNA, 12 nt, Human herpesvirus 1
gccucccgauca

SEQ ID NO: 3950185 - RNA, 19 nt, Human herpesvirus 1
gccuccgcccgugcugccg

SEQ ID NO: 3950186 - RNA, 23 nt, Human herpesvirus 1
gccucggcccgcgaacggcacgc

SEQ ID NO: 3950187 - RNA, 23 nt, Human herpesvirus 1
gccucucacacagcaucccccgc

SEQ ID NO: 3950188 - RNA, 17 nt, Human herpesvirus 1
gccugccaaccugaucc

SEQ ID NO: 3950189 - RNA, 18 nt, Human herpesvirus 1
gccugccucuccccccag

SEQ ID NO: 3950190 - RNA, 22 nt, Human herpesvirus 1
gccugggaucccacguccccgg

SEQ ID NO: 3950191 - RNA, 18 nt, Human herpesvirus 1
gccuggucccccggggac

SEQ ID NO: 3950192 - RNA, 20 nt, Human herpesvirus 1
gccuguuguggcucggggcg

SEQ ID NO: 3950193 - RNA, 14 nt, Human herpesvirus 1
gcgaaugcagcgcc

SEQ ID NO: 3950194 - RNA, 19 nt, Human herpesvirus 1
gcgaccuggggcgcgcggu

SEQ ID NO: 3950195 - RNA, 13 nt, Human herpesvirus 1
gcgacgggcagug

SEQ ID NO: 3950196 - RNA, 15 nt, Human herpesvirus 1
gcgacgggcagugag

SEQ ID NO: 3950197 - RNA, 16 nt, Human herpesvirus 1
gcgacguccugggcca

SEQ ID NO: 3950198 - RNA, 18 nt, Human herpesvirus 1
gcgacguccugggccacc

SEQ ID NO: 3950199 - RNA, 14 nt, Human herpesvirus 1
gcgagcccagaccc

SEQ ID NO: 3950200 - RNA, 18 nt, Human herpesvirus 1
gcgagcucccagagaccc

SEQ ID NO: 3950201 - RNA, 13 nt, Human herpesvirus 1
gcgaggugcgcca

SEQ ID NO: 3950202 - RNA, 18 nt, Human herpesvirus 1
gcgagguggagcugcccg

SEQ ID NO: 3950203 - RNA, 14 nt, Human herpesvirus 1
gcgcaccuggugau

SEQ ID NO: 3950204 - RNA, 17 nt, Human herpesvirus 1
gcgcagaggcggccaga

SEQ ID NO: 3950205 - RNA, 16 nt, Human herpesvirus 1
gcgcagguggugcaug

SEQ ID NO: 3950206 - RNA, 14 nt, Human herpesvirus 1
gcgcauccccccgu

SEQ ID NO: 3950207 - RNA, 20 nt, Human herpesvirus 1
gcgcauccgucgggaggcca

SEQ ID NO: 3950208 - RNA, 22 nt, Human herpesvirus 1
gcgcauccgucgggaggccaca

SEQ ID NO: 3950209 - RNA, 22 nt, Human herpesvirus 1
gcgccaacgcguccguggagcg

SEQ ID NO: 3950210 - RNA, 14 nt, Human herpesvirus 1
gcgccacacucacc

SEQ ID NO: 3950211 - RNA, 21 nt, Human herpesvirus 1
gcgccacgguggugcaguucg

SEQ ID NO: 3950212 - RNA, 15 nt, Human herpesvirus 1
gcgccaucuggaccg

SEQ ID NO: 3950213 - RNA, 18 nt, Human herpesvirus 1
gcgcccacuacaccagcc

SEQ ID NO: 3950214 - RNA, 19 nt, Human herpesvirus 1
gcgcccacuacaccagcca

SEQ ID NO: 3950215 - RNA, 18 nt, Human herpesvirus 1
gcgccccgccgccccaca

SEQ ID NO: 3950216 - RNA, 14 nt, Human herpesvirus 1
gcgcccuccugacc

SEQ ID NO: 3950217 - RNA, 13 nt, Human herpesvirus 1
gcgccgacggaca

SEQ ID NO: 3950218 - RNA, 19 nt, Human herpesvirus 1
gcgccgcaaccagcugcac

SEQ ID NO: 3950219 - RNA, 20 nt, Human herpesvirus 1
gcgccgcugcccgacccggc

SEQ ID NO: 3950220 - RNA, 21 nt, Human herpesvirus 1
gcgccgucuuucuccccaacg

SEQ ID NO: 3950221 - RNA, 21 nt, Human herpesvirus 1
gcgccuagccaaccuguggca

SEQ ID NO: 3950222 - RNA, 21 nt, Human herpesvirus 1
gcgccugccccgccacccagu

SEQ ID NO: 3950223 - RNA, 23 nt, Human herpesvirus 1
gcgccuggcgucuccucuggggg

SEQ ID NO: 3950224 - RNA, 17 nt, Human herpesvirus 1
gcgcgaaaucguggcgc

SEQ ID NO: 3950225 - RNA, 16 nt, Human herpesvirus 1
gcgcgaauugacccua

SEQ ID NO: 3950226 - RNA, 17 nt, Human herpesvirus 1
gcgcgaccucaccacca

SEQ ID NO: 3950227 - RNA, 14 nt, Human herpesvirus 1
gcgcgaucccccgc

SEQ ID NO: 3950228 - RNA, 22 nt, Human herpesvirus 1
gcgcgauccgacauguccgugc

SEQ ID NO: 3950229 - RNA, 15 nt, Human herpesvirus 1
gcgcgccugccgcag

SEQ ID NO: 3950230 - RNA, 17 nt, Human herpesvirus 1
gcgcgcgucgacgucgc

SEQ ID NO: 3950231 - RNA, 17 nt, Human herpesvirus 1
gcgcgcuuguccccgaa

SEQ ID NO: 3950232 - RNA, 14 nt, Human herpesvirus 1
gcgcgggggcgccg

SEQ ID NO: 3950233 - RNA, 19 nt, Human herpesvirus 1
gcgcgggguuacgcgggcc

SEQ ID NO: 3950234 - RNA, 17 nt, Human herpesvirus 1
gcgcguccuucuugucg

SEQ ID NO: 3950235 - RNA, 20 nt, Human herpesvirus 1
gcgcuaagugcccaggacgg

SEQ ID NO: 3950236 - RNA, 14 nt, Human herpesvirus 1
gcgcuaugacggca

SEQ ID NO: 3950237 - RNA, 19 nt, Human herpesvirus 1
gcgcucaaccaccgcuccc

SEQ ID NO: 3950238 - RNA, 13 nt, Human herpesvirus 1
gcgcuccucugcg

SEQ ID NO: 3950239 - RNA, 12 nt, Human herpesvirus 1
gcgcuccugaug

SEQ ID NO: 3950240 - RNA, 18 nt, Human herpesvirus 1
gcgcuucauagucgccga

SEQ ID NO: 3950241 - RNA, 18 nt, Human herpesvirus 1
gcggaaagcaagaacaau

SEQ ID NO: 3950242 - RNA, 14 nt, Human herpesvirus 1
gcggagggcggcca

SEQ ID NO: 3950243 - RNA, 22 nt, Human herpesvirus 1
gcggcaaagaccuuccgguccu

SEQ ID NO: 3950244 - RNA, 16 nt, Human herpesvirus 1
gcggcagucuccuggc

SEQ ID NO: 3950245 - RNA, 17 nt, Human herpesvirus 1
gcggccaacgacuuccu

SEQ ID NO: 3950246 - RNA, 17 nt, Human herpesvirus 1
gcggccacacagccggc

SEQ ID NO: 3950247 - RNA, 21 nt, Human herpesvirus 1
gcggccagaucuacugcuggg

SEQ ID NO: 3950248 - RNA, 19 nt, Human herpesvirus 1
gcggccaguugagccgcgc

SEQ ID NO: 3950249 - RNA, 19 nt, Human herpesvirus 1
gcggcccacccuggcgcca

SEQ ID NO: 3950250 - RNA, 13 nt, Human herpesvirus 1
gcggcccccgcga

SEQ ID NO: 3950251 - RNA, 20 nt, Human herpesvirus 1
gcggccccggccgcccuucc

SEQ ID NO: 3950252 - RNA, 20 nt, Human herpesvirus 1
gcggccccugauggagccug

SEQ ID NO: 3950253 - RNA, 13 nt, Human herpesvirus 1
gcggccccuggcg

SEQ ID NO: 3950254 - RNA, 13 nt, Human herpesvirus 1
gcggccgugggcg

SEQ ID NO: 3950255 - RNA, 14 nt, Human herpesvirus 1
gcggcgcgagcucc

SEQ ID NO: 3950256 - RNA, 17 nt, Human herpesvirus 1
gcggcucaacgagcucc

SEQ ID NO: 3950257 - RNA, 21 nt, Human herpesvirus 1
gcggcucaacgagcuccuggc

SEQ ID NO: 3950258 - RNA, 23 nt, Human herpesvirus 1
gcgggaacaccuccgcgagcaga

SEQ ID NO: 3950259 - RNA, 20 nt, Human herpesvirus 1
gcgggacccgacaggcgacc

SEQ ID NO: 3950260 - RNA, 15 nt, Human herpesvirus 1
gcgggauccucggcc

SEQ ID NO: 3950261 - RNA, 19 nt, Human herpesvirus 1
gcgggccaacuaggagaca

SEQ ID NO: 3950262 - RNA, 19 nt, Human herpesvirus 1
gcgggccucgugggcacuu

SEQ ID NO: 3950263 - RNA, 16 nt, Human herpesvirus 1
gcgggcgacgcacaca

SEQ ID NO: 3950264 - RNA, 20 nt, Human herpesvirus 1
gcggggcggggaaugugugu

SEQ ID NO: 3950265 - RNA, 23 nt, Human herpesvirus 1
gcgggggauggggagagcccaca

SEQ ID NO: 3950266 - RNA, 13 nt, Human herpesvirus 1
gcgggggcgccgg

SEQ ID NO: 3950267 - RNA, 13 nt, Human herpesvirus 1
gcggggggugggu

SEQ ID NO: 3950268 - RNA, 19 nt, Human herpesvirus 1
gcgggguuacgcgggcccc

SEQ ID NO: 3950269 - RNA, 19 nt, Human herpesvirus 1
gcgggguuauaggccacgc

SEQ ID NO: 3950270 - RNA, 14 nt, Human herpesvirus 1
gcggguccagaggg

SEQ ID NO: 3950271 - RNA, 15 nt, Human herpesvirus 1
gcgguccugacggcc

SEQ ID NO: 3950272 - RNA, 16 nt, Human herpesvirus 1
gcgguccugacggcca

SEQ ID NO: 3950273 - RNA, 19 nt, Human herpesvirus 1
gcggugaacgaagcggcca

SEQ ID NO: 3950274 - RNA, 14 nt, Human herpesvirus 1
gcggugccugacgc

SEQ ID NO: 3950275 - RNA, 16 nt, Human herpesvirus 1
gcguagagcuguggca

SEQ ID NO: 3950276 - RNA, 16 nt, Human herpesvirus 1
gcgucagucccgacac

SEQ ID NO: 3950277 - RNA, 18 nt, Human herpesvirus 1
gcgucgccccgugucugu

SEQ ID NO: 3950278 - RNA, 23 nt, Human herpesvirus 1
gcgucgcgacagaacugcguuug

SEQ ID NO: 3950279 - RNA, 18 nt, Human herpesvirus 1
gcgucggugauccccaac

SEQ ID NO: 3950280 - RNA, 13 nt, Human herpesvirus 1
gcguggaccuggg

SEQ ID NO: 3950281 - RNA, 13 nt, Human herpesvirus 1
gcgugggccgcgc

SEQ ID NO: 3950282 - RNA, 16 nt, Human herpesvirus 1
gcguggugcgagcugc

SEQ ID NO: 3950283 - RNA, 18 nt, Human herpesvirus 1
gcguguaccacauccagg

SEQ ID NO: 3950284 - RNA, 19 nt, Human herpesvirus 1
gcguguuccccgggagccc

SEQ ID NO: 3950285 - RNA, 18 nt, Human herpesvirus 1
gcguuaaccgcacccccc

SEQ ID NO: 3950286 - RNA, 18 nt, Human herpesvirus 1
gcguuugcacaacacaaa

SEQ ID NO: 3950287 - RNA, 19 nt, Human herpesvirus 1
gcuaucuccugggggcacc

SEQ ID NO: 3950288 - RNA, 13 nt, Human herpesvirus 1
gcucacgaccccc

SEQ ID NO: 3950289 - RNA, 14 nt, Human herpesvirus 1
gcucacgaccccca

SEQ ID NO: 3950290 - RNA, 11 nt, Human herpesvirus 1
gcucagccaga

SEQ ID NO: 3950291 - RNA, 21 nt, Human herpesvirus 1
gcuccagucccggcccggcgg

SEQ ID NO: 3950292 - RNA, 19 nt, Human herpesvirus 1
gcuccgaguacggcggcuc

SEQ ID NO: 3950293 - RNA, 21 nt, Human herpesvirus 1
gcuccgcaacggggcgccguc

SEQ ID NO: 3950294 - RNA, 19 nt, Human herpesvirus 1
gcuccggggaucugguccg

SEQ ID NO: 3950295 - RNA, 20 nt, Human herpesvirus 1
gcuccugauguggcugcucc

SEQ ID NO: 3950296 - RNA, 23 nt, Human herpesvirus 1
gcuccuguaaguacgcccucccg

SEQ ID NO: 3950297 - RNA, 22 nt, Human herpesvirus 1
gcuccuuagcgcggccgugggc

SEQ ID NO: 3950298 - RNA, 19 nt, Human herpesvirus 1
gcucgccagcgacccgcac

SEQ ID NO: 3950299 - RNA, 17 nt, Human herpesvirus 1
ccaacgucgccgcccug

SEQ ID NO: 3950300 - RNA, 18 nt, Human herpesvirus 1
ccaacgucuccuccacca

SEQ ID NO: 3950301 - RNA, 11 nt, Human herpesvirus 1
ccaagccggga

SEQ ID NO: 3950302 - RNA, 19 nt, Human herpesvirus 1
ccaagcuagccgaggcccg

SEQ ID NO: 3950303 - RNA, 20 nt, Human herpesvirus 1
ccaaggccccauacacgagc

SEQ ID NO: 3950304 - RNA, 15 nt, Human herpesvirus 1
ccaaggucaccgaca

SEQ ID NO: 3950305 - RNA, 21 nt, Human herpesvirus 1
ccaaguacgcuuucgacccca

SEQ ID NO: 3950306 - RNA, 16 nt, Human herpesvirus 1
ccaaguucaccguggc

SEQ ID NO: 3950307 - RNA, 15 nt, Human herpesvirus 1
ccaaugcccucccug

SEQ ID NO: 3950308 - RNA, 16 nt, Human herpesvirus 1
ccaaugggccgggccg

SEQ ID NO: 3950309 - RNA, 13 nt, Human herpesvirus 1
ccacaaaaugcaa

SEQ ID NO: 3950310 - RNA, 23 nt, Human herpesvirus 1
ccacaccaccuacuacgaugggg

SEQ ID NO: 3950311 - RNA, 17 nt, Human herpesvirus 1
ccacaugaagccacugu

SEQ ID NO: 3950312 - RNA, 18 nt, Human herpesvirus 1
ccaccacccggccggugg

SEQ ID NO: 3950313 - RNA, 14 nt, Human herpesvirus 1
ccaccauggccccc

SEQ ID NO: 3950314 - RNA, 15 nt, Human herpesvirus 1
ccacccaggcgcugg

SEQ ID NO: 3950315 - RNA, 17 nt, Human herpesvirus 1
ccacccaggcgcugggc

SEQ ID NO: 3950316 - RNA, 18 nt, Human herpesvirus 1
ccaccgcgcuccucccgc

SEQ ID NO: 3950317 - RNA, 12 nt, Human herpesvirus 1
ccaccgggccca

SEQ ID NO: 3950318 - RNA, 21 nt, Human herpesvirus 1
ccaccuucaccaccaaccuga

SEQ ID NO: 3950319 - RNA, 17 nt, Human herpesvirus 1
ccacgagaucaaggaca

SEQ ID NO: 3950320 - RNA, 17 nt, Human herpesvirus 1
ccacgaugaccgccccc

SEQ ID NO: 3950321 - RNA, 13 nt, Human herpesvirus 1
ccacgccacccug

SEQ ID NO: 3950322 - RNA, 13 nt, Human herpesvirus 1
ccacgcucucccc

SEQ ID NO: 3950323 - RNA, 22 nt, Human herpesvirus 1
ccacgcucuccccugcugccau

SEQ ID NO: 3950324 - RNA, 14 nt, Human herpesvirus 1
ccacggccacuggc

SEQ ID NO: 3950325 - RNA, 19 nt, Human herpesvirus 1
ccacggcgccgaccacccg

SEQ ID NO: 3950326 - RNA, 14 nt, Human herpesvirus 1
ccacgguaggccca

SEQ ID NO: 3950327 - RNA, 22 nt, Human herpesvirus 1
ccacgucgaccgcgcccucgcc

SEQ ID NO: 3950328 - RNA, 17 nt, Human herpesvirus 1
ccacuacaccagccaau

SEQ ID NO: 3950329 - RNA, 13 nt, Human herpesvirus 1
ccacuggccggga

SEQ ID NO: 3950330 - RNA, 21 nt, Human herpesvirus 1
ccagagguguucacgcaccuc

SEQ ID NO: 3950331 - RNA, 15 nt, Human herpesvirus 1
ccagauaauccagau

SEQ ID NO: 3950332 - RNA, 18 nt, Human herpesvirus 1
ccagcagacgcugcuccg

SEQ ID NO: 3950333 - RNA, 17 nt, Human herpesvirus 1
ccagccguccucgcacc

SEQ ID NO: 3950334 - RNA, 17 nt, Human herpesvirus 1
ccagcgcggcggggccc

SEQ ID NO: 3950335 - RNA, 22 nt, Human herpesvirus 1
ccagcggcacgaccggcuccau

SEQ ID NO: 3950336 - RNA, 21 nt, Human herpesvirus 1
ccagcguaaccuccgggggcg

SEQ ID NO: 3950337 - RNA, 16 nt, Human herpesvirus 1
ccagcguccgccgagu

SEQ ID NO: 3950338 - RNA, 15 nt, Human herpesvirus 1
ccagcuuuccgcuga

SEQ ID NO: 3950339 - RNA, 20 nt, Human herpesvirus 1
ccaggaaauccguggccccg

SEQ ID NO: 3950340 - RNA, 19 nt, Human herpesvirus 1
ccaggcccgccgccacugu

SEQ ID NO: 3950341 - RNA, 14 nt, Human herpesvirus 1
ccaggcgcugggcg

SEQ ID NO: 3950342 - RNA, 18 nt, Human herpesvirus 1
ccagggaccuccuggacu

SEQ ID NO: 3950343 - RNA, 19 nt, Human herpesvirus 1
ccagggagaaaccccagca

SEQ ID NO: 3950344 - RNA, 21 nt, Human herpesvirus 1
ccaggguaccgcgugacccca

SEQ ID NO: 3950345 - RNA, 22 nt, Human herpesvirus 1
ccaguccaguuaucgcggcuuc

SEQ ID NO: 3950346 - RNA, 19 nt, Human herpesvirus 1
ccaguccccgggcccagcc

SEQ ID NO: 3950347 - RNA, 19 nt, Human herpesvirus 1
ccaucaccccgcaauuugc

SEQ ID NO: 3950348 - RNA, 23 nt, Human herpesvirus 1
ccaucgagccaacgcccugacca

SEQ ID NO: 3950349 - RNA, 20 nt, Human herpesvirus 1
ccaucgccccuggcgcgcga

SEQ ID NO: 3950350 - RNA, 21 nt, Human herpesvirus 1
ccaucgguccccucugggccc

SEQ ID NO: 3950351 - RNA, 22 nt, Human herpesvirus 1
ccaucgguccccucugggcccg

SEQ ID NO: 3950352 - RNA, 19 nt, Human herpesvirus 1
ccaucuacguugcggggcg

SEQ ID NO: 3950353 - RNA, 20 nt, Human herpesvirus 1
ccaucugggauggcuccugg

SEQ ID NO: 3950354 - RNA, 16 nt, Human herpesvirus 1
ccauggaccccagcga

SEQ ID NO: 3950355 - RNA, 21 nt, Human herpesvirus 1
ccauggagcacgagcaggcgg

SEQ ID NO: 3950356 - RNA, 15 nt, Human herpesvirus 1
cccaaaacacacgga

SEQ ID NO: 3950357 - RNA, 16 nt, Human herpesvirus 1
cccaacccacacgcac

SEQ ID NO: 3950358 - RNA, 14 nt, Human herpesvirus 1
cccaaccccaacuc

SEQ ID NO: 3950359 - RNA, 22 nt, Human herpesvirus 1
cccaacucucgcaccaucccgg

SEQ ID NO: 3950360 - RNA, 13 nt, Human herpesvirus 1
cccaagccgcccc

SEQ ID NO: 3950361 - RNA, 16 nt, Human herpesvirus 1
cccaauccgacgggga

SEQ ID NO: 3950362 - RNA, 18 nt, Human herpesvirus 1
cccaccaacgucuccucc

SEQ ID NO: 3950363 - RNA, 21 nt, Human herpesvirus 1
cccaccggaagcccaacccac

SEQ ID NO: 3950364 - RNA, 17 nt, Human herpesvirus 1
cccacgaucaccgcggg

SEQ ID NO: 3950365 - RNA, 15 nt, Human herpesvirus 1
cccacgucgucucgg

SEQ ID NO: 3950366 - RNA, 13 nt, Human herpesvirus 1
cccagcaaggcgu

SEQ ID NO: 3950367 - RNA, 19 nt, Human herpesvirus 1
cccagcauguccgccggga

SEQ ID NO: 3950368 - RNA, 14 nt, Human herpesvirus 1
cccagcgaccccac

SEQ ID NO: 3950369 - RNA, 15 nt, Human herpesvirus 1
cccagcggcacgacc

SEQ ID NO: 3950370 - RNA, 22 nt, Human herpesvirus 1
cccaguccccgggcccagccuu

SEQ ID NO: 3950371 - RNA, 15 nt, Human herpesvirus 1
cccaucagccucguc

SEQ ID NO: 3950372 - RNA, 21 nt, Human herpesvirus 1
cccauccgaacgcagccccgc

SEQ ID NO: 3950373 - RNA, 18 nt, Human herpesvirus 1
cccaucuaaugccacgcg

SEQ ID NO: 3950374 - RNA, 14 nt, Human herpesvirus 1
cccaugggucccaa

SEQ ID NO: 3950375 - RNA, 14 nt, Human herpesvirus 1
ccccaaccccuucc

SEQ ID NO: 3950376 - RNA, 14 nt, Human herpesvirus 1
ccccaaggcgcugc

SEQ ID NO: 3950377 - RNA, 14 nt, Human herpesvirus 1
ccccaccccggagg

SEQ ID NO: 3950378 - RNA, 15 nt, Human herpesvirus 1
ccccacgacacccac

SEQ ID NO: 3950379 - RNA, 18 nt, Human herpesvirus 1
ccccacgaugaccgcccc

SEQ ID NO: 3950380 - RNA, 22 nt, Human herpesvirus 1
ccccacgcccccgccgcccggg

SEQ ID NO: 3950381 - RNA, 23 nt, Human herpesvirus 1
ccccacgugaucagcacgccacc

SEQ ID NO: 3950382 - RNA, 21 nt, Human herpesvirus 1
ccccagagguguucacgcacc

SEQ ID NO: 3950383 - RNA, 14 nt, Human herpesvirus 1
ccccagccuucacg

SEQ ID NO: 3950384 - RNA, 18 nt, Human herpesvirus 1
ccccagggaccuccugga

SEQ ID NO: 3950385 - RNA, 12 nt, Human herpesvirus 1
ccccccagccuc

SEQ ID NO: 3950386 - RNA, 11 nt, Human herpesvirus 1
ccccccccuuc

SEQ ID NO: 3950387 - RNA, 12 nt, Human herpesvirus 1
ccccccgcgcuc

SEQ ID NO: 3950388 - RNA, 13 nt, Human herpesvirus 1
cccccgcccgggu

SEQ ID NO: 3950389 - RNA, 19 nt, Human herpesvirus 1
cccccggcauggcgcagcu

SEQ ID NO: 3950390 - RNA, 20 nt, Human herpesvirus 1
cccccggguuuucccacgcc

SEQ ID NO: 3950391 - RNA, 20 nt, Human herpesvirus 1
cccccuguuugucgacgaga

SEQ ID NO: 3950392 - RNA, 15 nt, Human herpesvirus 1
ccccgacccucccau

SEQ ID NO: 3950393 - RNA, 15 nt, Human herpesvirus 1
ccccgcugcggccac

SEQ ID NO: 3950394 - RNA, 15 nt, Human herpesvirus 1
ccccggacccgggcc

SEQ ID NO: 3950395 - RNA, 16 nt, Human herpesvirus 1
ccccggacgacauggc

SEQ ID NO: 3950396 - RNA, 22 nt, Human herpesvirus 1
ccccggcauggcgcagcuggga

SEQ ID NO: 3950397 - RNA, 12 nt, Human herpesvirus 1
ccccggccaccu

SEQ ID NO: 3950398 - RNA, 17 nt, Human herpesvirus 1
ccccggucuccccggga

SEQ ID NO: 3950399 - RNA, 23 nt, Human herpesvirus 1
ccccgucuggguuuuccccuccc

SEQ ID NO: 3950400 - RNA, 14 nt, Human herpesvirus 1
ccccuagccccgcc

SEQ ID NO: 3950401 - RNA, 18 nt, Human herpesvirus 1
ccccucgaccaccauccc

SEQ ID NO: 3950402 - RNA, 17 nt, Human herpesvirus 1
ccccucgccccauacuc

SEQ ID NO: 3950403 - RNA, 18 nt, Human herpesvirus 1
ccccucugggcccgccug

SEQ ID NO: 3950404 - RNA, 13 nt, Human herpesvirus 1
ccccuggcgcgcg

SEQ ID NO: 3950405 - RNA, 13 nt, Human herpesvirus 1
cccgaagccugcu

SEQ ID NO: 3950406 - RNA, 17 nt, Human herpesvirus 1
cccgacaccaccagcug

SEQ ID NO: 3950407 - RNA, 17 nt, Human herpesvirus 1
cccgacagaccuccccg

SEQ ID NO: 3950408 - RNA, 22 nt, Human herpesvirus 1
cccgaccgcguguacgggcugu

SEQ ID NO: 3950409 - RNA, 16 nt, Human herpesvirus 1
cccgaggccccacguc

SEQ ID NO: 3950410 - RNA, 17 nt, Human herpesvirus 1
cccgaucccaacaacuc

SEQ ID NO: 3950411 - RNA, 18 nt, Human herpesvirus 1
cccgcaaacaggagcugu

SEQ ID NO: 3950412 - RNA, 19 nt, Human herpesvirus 1
cccgcaacgcgcuggggcu

SEQ ID NO: 3950413 - RNA, 16 nt, Human herpesvirus 1
cccgcaauuugcaccc

SEQ ID NO: 3950414 - RNA, 18 nt, Human herpesvirus 1
cccgcagucccgggggcu

SEQ ID NO: 3950415 - RNA, 16 nt, Human herpesvirus 1
cccgcauaucccaccc

SEQ ID NO: 3950416 - RNA, 19 nt, Human herpesvirus 1
cccgcaucccccgucuggg

SEQ ID NO: 3950417 - RNA, 13 nt, Human herpesvirus 1
cccgcccccgccg

SEQ ID NO: 3950418 - RNA, 18 nt, Human herpesvirus 1
cccgcccgaccgcgugua

SEQ ID NO: 3950419 - RNA, 18 nt, Human herpesvirus 1
cccgccgcaaagccaccc

SEQ ID NO: 3950420 - RNA, 19 nt, Human herpesvirus 1
cccgccgcaaagccaccca

SEQ ID NO: 3950421 - RNA, 17 nt, Human herpesvirus 1
cccgccgcccggggcca

SEQ ID NO: 3950422 - RNA, 17 nt, Human herpesvirus 1
cccgccguugagccccu

SEQ ID NO: 3950423 - RNA, 13 nt, Human herpesvirus 1
cccgcgacgccau

SEQ ID NO: 3950424 - RNA, 16 nt, Human herpesvirus 1
cccgcgcucgcgagua

SEQ ID NO: 3950425 - RNA, 15 nt, Human herpesvirus 1
cccggaggcguuccg

SEQ ID NO: 3950426 - RNA, 23 nt, Human herpesvirus 1
cccggagggcugccagaccucaa

SEQ ID NO: 3950427 - RNA, 20 nt, Human herpesvirus 1
cccggcggccccuggcgccg

SEQ ID NO: 3950428 - RNA, 12 nt, Human herpesvirus 1
cccggcucuccg

SEQ ID NO: 3950429 - RNA, 21 nt, Human herpesvirus 1
cccgggacaccccccaugcgg

SEQ ID NO: 3950430 - RNA, 17 nt, Human herpesvirus 1
cccgggagcuccgcacc

SEQ ID NO: 3950431 - RNA, 17 nt, Human herpesvirus 1
cccgggccgcaccgggc

SEQ ID NO: 3950432 - RNA, 16 nt, Human herpesvirus 1
cccguccgcaucgauc

SEQ ID NO: 3950433 - RNA, 17 nt, Human herpesvirus 1
cccguccucgcccgcca

SEQ ID NO: 3950434 - RNA, 16 nt, Human herpesvirus 1
cccgucgaagcugaug

SEQ ID NO: 3950435 - RNA, 15 nt, Human herpesvirus 1
cccuaaccaggccuc

SEQ ID NO: 3950436 - RNA, 15 nt, Human herpesvirus 1
cccuaaggcccggcu

SEQ ID NO: 3950437 - RNA, 13 nt, Human herpesvirus 1
cccuacaaccuga

SEQ ID NO: 3950438 - RNA, 17 nt, Human herpesvirus 1
cccuacaaccugaccau

SEQ ID NO: 3950439 - RNA, 17 nt, Human herpesvirus 1
cccuacucucccuccag

SEQ ID NO: 3950440 - RNA, 14 nt, Human herpesvirus 1
cccuagaggcuggu

SEQ ID NO: 3950441 - RNA, 18 nt, Human herpesvirus 1
cccuauuuucccccccgg

SEQ ID NO: 3950442 - RNA, 15 nt, Human herpesvirus 1
cccucaaccccggcg

SEQ ID NO: 3950443 - RNA, 15 nt, Human herpesvirus 1
cccuccccccgcccc

SEQ ID NO: 3950444 - RNA, 20 nt, Human herpesvirus 1
cccucccccuccgcauccca

SEQ ID NO: 3950445 - RNA, 16 nt, Human herpesvirus 1
cccuccgcaucccagg

SEQ ID NO: 3950446 - RNA, 19 nt, Human herpesvirus 1
cccuccgcaucccaggauc

SEQ ID NO: 3950447 - RNA, 19 nt, Human herpesvirus 1
cccuccgcuggggccccca

SEQ ID NO: 3950448 - RNA, 22 nt, Human herpesvirus 1
cccuccgcuggggcccccaggg

SEQ ID NO: 3950449 - RNA, 15 nt, Human herpesvirus 1
cccucgaccaccauc

SEQ ID NO: 3950450 - RNA, 13 nt, Human herpesvirus 1
cccucgucccccu

SEQ ID NO: 3950451 - RNA, 12 nt, Human herpesvirus 1
cccucucuuccc

SEQ ID NO: 3950452 - RNA, 17 nt, Human herpesvirus 1
cccucucuucccucagg

SEQ ID NO: 3950453 - RNA, 23 nt, Human herpesvirus 1
cccucucuucucucccgggccgc

SEQ ID NO: 3950454 - RNA, 13 nt, Human herpesvirus 1
cccucugggcccg

SEQ ID NO: 3950455 - RNA, 16 nt, Human herpesvirus 1
cccugaucccccgcgc

SEQ ID NO: 3950456 - RNA, 19 nt, Human herpesvirus 1
cccugcgguccggagccgc

SEQ ID NO: 3950457 - RNA, 13 nt, Human herpesvirus 1
cccugcgucgccc

SEQ ID NO: 3950458 - RNA, 15 nt, Human herpesvirus 1
cccugcugcccccgg

SEQ ID NO: 3950459 - RNA, 17 nt, Human herpesvirus 1
cccugcugcccccggag

SEQ ID NO: 3950460 - RNA, 19 nt, Human herpesvirus 1
cccuggacgugggccucac

SEQ ID NO: 3950461 - RNA, 16 nt, Human herpesvirus 1
cccugggcccuggccg

SEQ ID NO: 3950462 - RNA, 19 nt, Human herpesvirus 1
cccuguggaacgaggcccg

SEQ ID NO: 3950463 - RNA, 16 nt, Human herpesvirus 1
cccuguucaaccccag

SEQ ID NO: 3950464 - RNA, 19 nt, Human herpesvirus 1
cccuguuugucgccuggcu

SEQ ID NO: 3950465 - RNA, 15 nt, Human herpesvirus 1
cccuuccccgcuguc

SEQ ID NO: 3950466 - RNA, 16 nt, Human herpesvirus 1
ccgaacagcucgcgga

SEQ ID NO: 3950467 - RNA, 12 nt, Human herpesvirus 1
ccgaacccaggc

SEQ ID NO: 3950468 - RNA, 16 nt, Human herpesvirus 1
ccgaacgacacacggc

SEQ ID NO: 3950469 - RNA, 18 nt, Human herpesvirus 1
ccgaacugggcgaccgcc

SEQ ID NO: 3950470 - RNA, 14 nt, Human herpesvirus 1
ccgaagcccagcgu

SEQ ID NO: 3950471 - RNA, 14 nt, Human herpesvirus 1
ccgaagccccggcc

SEQ ID NO: 3950472 - RNA, 13 nt, Human herpesvirus 1
ccgacagaccucc

SEQ ID NO: 3950473 - RNA, 15 nt, Human herpesvirus 1
ccgacagggccgugc

SEQ ID NO: 3950474 - RNA, 17 nt, Human herpesvirus 1
ccgacaucaccaccguc

SEQ ID NO: 3950475 - RNA, 14 nt, Human herpesvirus 1
ccgacauggucaug

SEQ ID NO: 3950476 - RNA, 14 nt, Human herpesvirus 1
ccgacauuaaccac

SEQ ID NO: 3950477 - RNA, 14 nt, Human herpesvirus 1
ccgaccacacaccc

SEQ ID NO: 3950478 - RNA, 16 nt, Human herpesvirus 1
ccgaccacacaccccc

SEQ ID NO: 3950479 - RNA, 18 nt, Human herpesvirus 1
ccgacccccauggagcac

SEQ ID NO: 3950480 - RNA, 18 nt, Human herpesvirus 1
ccgacgaacgcggacccc

SEQ ID NO: 3950481 - RNA, 13 nt, Human herpesvirus 1
ccgacggacagcc

SEQ ID NO: 3950482 - RNA, 18 nt, Human herpesvirus 1
ccgacuccccgccuccgg

SEQ ID NO: 3950483 - RNA, 17 nt, Human herpesvirus 1
ccgagacccccaacgcc

SEQ ID NO: 3950484 - RNA, 19 nt, Human herpesvirus 1
ccgagucuucggggcccgg

SEQ ID NO: 3950485 - RNA, 17 nt, Human herpesvirus 1
ccgaguucccccggcac

SEQ ID NO: 3950486 - RNA, 20 nt, Human herpesvirus 1
ccgaguucccccggcacgcc

SEQ ID NO: 3950487 - RNA, 16 nt, Human herpesvirus 1
ccgaucccaggcgccg

SEQ ID NO: 3950488 - RNA, 23 nt, Human herpesvirus 1
ccgaucccaggcgccgacggaca

SEQ ID NO: 3950489 - RNA, 19 nt, Human herpesvirus 1
ccgaugcggcggcgcugca

SEQ ID NO: 3950490 - RNA, 16 nt, Human herpesvirus 1
ccgauggcccuccagg

SEQ ID NO: 3950491 - RNA, 16 nt, Human herpesvirus 1
ccgauggccgucccgc

SEQ ID NO: 3950492 - RNA, 12 nt, Human herpesvirus 1
ccgcaacaccaa

SEQ ID NO: 3950493 - RNA, 20 nt, Human herpesvirus 1
ccgcaaccagcugcacgacc

SEQ ID NO: 3950494 - RNA, 18 nt, Human herpesvirus 1
ccgcaacuucccacccgg

SEQ ID NO: 3950495 - RNA, 16 nt, Human herpesvirus 1
ccgcaagccccuagcc

SEQ ID NO: 3950496 - RNA, 15 nt, Human herpesvirus 1
ccgcaagcuaugcag

SEQ ID NO: 3950497 - RNA, 16 nt, Human herpesvirus 1
ccgcaauuugcaccca

SEQ ID NO: 3950498 - RNA, 17 nt, Human herpesvirus 1
ccgcaauuugcacccag

SEQ ID NO: 3950499 - RNA, 15 nt, Human herpesvirus 1
ccgcaccaagccgcu

SEQ ID NO: 3950500 - RNA, 15 nt, Human herpesvirus 1
ccgcaccgggccccc

SEQ ID NO: 3950501 - RNA, 14 nt, Human herpesvirus 1
ccgcagcaccucua

SEQ ID NO: 3950502 - RNA, 12 nt, Human herpesvirus 1
ccgcagccuggu

SEQ ID NO: 3950503 - RNA, 17 nt, Human herpesvirus 1
ccgcauaucccacccug

SEQ ID NO: 3950504 - RNA, 21 nt, Human herpesvirus 1
ccgcauaucccacccuggagc

SEQ ID NO: 3950505 - RNA, 21 nt, Human herpesvirus 1
ccgccagcgcggcggggcccg

SEQ ID NO: 3950506 - RNA, 14 nt, Human herpesvirus 1
ccgcccaacucucg

SEQ ID NO: 3950507 - RNA, 21 nt, Human herpesvirus 1
ccgcccaacucucgcaccauc

SEQ ID NO: 3950508 - RNA, 12 nt, Human herpesvirus 1
ccgcccccggca

SEQ ID NO: 3950509 - RNA, 13 nt, Human herpesvirus 1
ccgcccccggcau

SEQ ID NO: 3950510 - RNA, 19 nt, Human herpesvirus 1
ccgcccggggccagcgcca

SEQ ID NO: 3950511 - RNA, 14 nt, Human herpesvirus 1
ccgcccuggccgcg

SEQ ID NO: 3950512 - RNA, 13 nt, Human herpesvirus 1
ccgccgcccgggg

SEQ ID NO: 3950513 - RNA, 15 nt, Human herpesvirus 1
ccgccgcccggggcc

SEQ ID NO: 3950514 - RNA, 18 nt, Human herpesvirus 1
ccgccggcaugcacccca

SEQ ID NO: 3950515 - RNA, 14 nt, Human herpesvirus 1
ccgccuagccgcag

SEQ ID NO: 3950516 - RNA, 20 nt, Human herpesvirus 1
ccgccugucgcacccacagc

SEQ ID NO: 3950517 - RNA, 20 nt, Human herpesvirus 1
ccgcgaacggcacgcccccu

SEQ ID NO: 3950518 - RNA, 13 nt, Human herpesvirus 1
ccgcgacccgcac

SEQ ID NO: 3950519 - RNA, 14 nt, Human herpesvirus 1
ccgcgacccuccgg

SEQ ID NO: 3950520 - RNA, 21 nt, Human herpesvirus 1
ccgcgacgccuuaccaucccc

SEQ ID NO: 3950521 - RNA, 18 nt, Human herpesvirus 1
ccgcgcauauccgggggc

SEQ ID NO: 3950522 - RNA, 11 nt, Human herpesvirus 1
ccgcgccaggc

SEQ ID NO: 3950523 - RNA, 13 nt, Human herpesvirus 1
ccgcgccucccgg

SEQ ID NO: 3950524 - RNA, 13 nt, Human herpesvirus 1
ccgcggccugggu

SEQ ID NO: 3950525 - RNA, 16 nt, Human herpesvirus 1
ccgcggucaucacccg

SEQ ID NO: 3950526 - RNA, 15 nt, Human herpesvirus 1
ccgcggugggcugga

SEQ ID NO: 3950527 - RNA, 14 nt, Human herpesvirus 1
ccgcguacgaggac

SEQ ID NO: 3950528 - RNA, 18 nt, Human herpesvirus 1
ccgcguggaucggcgcca

SEQ ID NO: 3950529 - RNA, 21 nt, Human herpesvirus 1
ccgcgugggugaugucggguc

SEQ ID NO: 3950530 - RNA, 20 nt, Human herpesvirus 1
ccgcguguuccccgggagcc

SEQ ID NO: 3950531 - RNA, 22 nt, Human herpesvirus 1
ccgcguguuccccgggagcccc

SEQ ID NO: 3950532 - RNA, 15 nt, Human herpesvirus 1
ccgcguuuggccugc

SEQ ID NO: 3950533 - RNA, 21 nt, Human herpesvirus 1
ccgcguuuggccugcggcgca

SEQ ID NO: 3950534 - RNA, 16 nt, Human herpesvirus 1
ccgcuaaaagaccgca

SEQ ID NO: 3950535 - RNA, 17 nt, Human herpesvirus 1
ccgcuaucuccuggggg

SEQ ID NO: 3950536 - RNA, 17 nt, Human herpesvirus 1
ccgcugacccccaccgc

SEQ ID NO: 3950537 - RNA, 20 nt, Human herpesvirus 1
ccgcugcgcauccccccguc

SEQ ID NO: 3950538 - RNA, 23 nt, Human herpesvirus 1
ccgcuggcuggaaaccgagcuug

SEQ ID NO: 3950539 - RNA, 14 nt, Human herpesvirus 1
ccgcuuccaucgcc

SEQ ID NO: 3950540 - RNA, 19 nt, Human herpesvirus 1
ccggaaccugcucacgacc

SEQ ID NO: 3950541 - RNA, 18 nt, Human herpesvirus 1
ccggaccccacgcacccc

SEQ ID NO: 3950542 - RNA, 15 nt, Human herpesvirus 1
ccggacccgggccgu

SEQ ID NO: 3950543 - RNA, 23 nt, Human herpesvirus 1
ccggagccgggcgcgugcugcgc

SEQ ID NO: 3950544 - RNA, 15 nt, Human herpesvirus 1
ccggagcgugacgca

SEQ ID NO: 3950545 - RNA, 16 nt, Human herpesvirus 1
ccggaucgcgcucguc

SEQ ID NO: 3950546 - RNA, 17 nt, Human herpesvirus 1
ccggcaccaacaacgac

SEQ ID NO: 3950547 - RNA, 12 nt, Human herpesvirus 1
ccggcacggacc

SEQ ID NO: 3950548 - RNA, 13 nt, Human herpesvirus 1
ccggccgcaccca

SEQ ID NO: 3950549 - RNA, 11 nt, Human herpesvirus 1
ccggccugggc

SEQ ID NO: 3950550 - RNA, 18 nt, Human herpesvirus 1
ccggcgcggugggcggca

SEQ ID NO: 3950551 - RNA, 15 nt, Human herpesvirus 1
ccggcuacaggggcc

SEQ ID NO: 3950552 - RNA, 18 nt, Human herpesvirus 1
ccgggacgaccacgagac

SEQ ID NO: 3950553 - RNA, 14 nt, Human herpesvirus 1
ccgggacugggugg

SEQ ID NO: 3950554 - RNA, 23 nt, Human herpesvirus 1
ccgggaggggucgcacaccgaac

SEQ ID NO: 3950555 - RNA, 16 nt, Human herpesvirus 1
ccgggccacggcgccg

SEQ ID NO: 3950556 - RNA, 14 nt, Human herpesvirus 1
ccgggccgcccacu

SEQ ID NO: 3950557 - RNA, 19 nt, Human herpesvirus 1
ccgggccguugcccgggcc

SEQ ID NO: 3950558 - RNA, 19 nt, Human herpesvirus 1
ccgggcgcaauugcggcca

SEQ ID NO: 3950559 - RNA, 18 nt, Human herpesvirus 1
ccgggcgcguccccggcc

SEQ ID NO: 3950560 - RNA, 18 nt, Human herpesvirus 1
ccggggcccggcccugcu

SEQ ID NO: 3950561 - RNA, 14 nt, Human herpesvirus 1
ccggggcucagcca

SEQ ID NO: 3950562 - RNA, 16 nt, Human herpesvirus 1
ccggggcuggcacacc

SEQ ID NO: 3950563 - RNA, 15 nt, Human herpesvirus 1
ccggggggcggaacg

SEQ ID NO: 3950564 - RNA, 16 nt, Human herpesvirus 1
ccgguaugccgcggcc

SEQ ID NO: 3950565 - RNA, 17 nt, Human herpesvirus 1
ccgguauuauuuaccua

SEQ ID NO: 3950566 - RNA, 15 nt, Human herpesvirus 1
ccgguccuggaccag

SEQ ID NO: 3950567 - RNA, 15 nt, Human herpesvirus 1
ccggugaacgccucc

SEQ ID NO: 3950568 - RNA, 18 nt, Human herpesvirus 1
ccggugguccguguggag

SEQ ID NO: 3950569 - RNA, 14 nt, Human herpesvirus 1
ccgguucucccugu

SEQ ID NO: 3950570 - RNA, 18 nt, Human herpesvirus 1
ccgguuggccgcgcggca

SEQ ID NO: 3950571 - RNA, 20 nt, Human herpesvirus 1
ccguacaaguucaaggccac

SEQ ID NO: 3950572 - RNA, 14 nt, Human herpesvirus 1
ccgucccacgcucu

SEQ ID NO: 3950573 - RNA, 20 nt, Human herpesvirus 1
ccguccccugccccccccac

SEQ ID NO: 3950574 - RNA, 21 nt, Human herpesvirus 1
ccguccccuucgaggagguga

SEQ ID NO: 3950575 - RNA, 20 nt, Human herpesvirus 1
ccguccgcaucgauccggag

SEQ ID NO: 3950576 - RNA, 21 nt, Human herpesvirus 1
ccgucgcacgcguccagucgg

SEQ ID NO: 3950577 - RNA, 20 nt, Human herpesvirus 1
ccgucgccgcgggccacgcc

SEQ ID NO: 3950578 - RNA, 18 nt, Human herpesvirus 1
ccgucgcuagaccacgcc

SEQ ID NO: 3950579 - RNA, 15 nt, Human herpesvirus 1
ccgucggaggccccc

SEQ ID NO: 3950580 - RNA, 23 nt, Human herpesvirus 1
ccgucuggguuuuccccucccgu

SEQ ID NO: 3950581 - RNA, 23 nt, Human herpesvirus 1
ccgugacuaagcgucccugggcc

SEQ ID NO: 3950582 - RNA, 19 nt, Human herpesvirus 1
ccgugauccuuaggggccg

SEQ ID NO: 3950583 - RNA, 18 nt, Human herpesvirus 1
ccgugcacacgacggccu

SEQ ID NO: 3950584 - RNA, 13 nt, Human herpesvirus 1
ccguggaccccac

SEQ ID NO: 3950585 - RNA, 20 nt, Human herpesvirus 1
ccgugggcgacugcgacccc

SEQ ID NO: 3950586 - RNA, 21 nt, Human herpesvirus 1
ccguggggacgguggcgccgc

SEQ ID NO: 3950587 - RNA, 10 nt, Human herpesvirus 1
ccgugucuau

SEQ ID NO: 3950588 - RNA, 13 nt, Human herpesvirus 1
ccguuccagcccc

SEQ ID NO: 3950589 - RNA, 21 nt, Human herpesvirus 1
ccguugcccgggccuccucaa

SEQ ID NO: 3950590 - RNA, 15 nt, Human herpesvirus 1
ccguuucuccgcccg

SEQ ID NO: 3950591 - RNA, 20 nt, Human herpesvirus 1
ccuaaacgcaccgucggagg

SEQ ID NO: 3950592 - RNA, 18 nt, Human herpesvirus 1
ccucacccacgccggcac

SEQ ID NO: 3950593 - RNA, 17 nt, Human herpesvirus 1
ccucacguucgcacgca

SEQ ID NO: 3950594 - RNA, 16 nt, Human herpesvirus 1
ccucagagacaacgcg

SEQ ID NO: 3950595 - RNA, 23 nt, Human herpesvirus 1
ccuccaggcugucgacgcccccu

SEQ ID NO: 3950596 - RNA, 15 nt, Human herpesvirus 1
ccuccccgcacagau

SEQ ID NO: 3950597 - RNA, 18 nt, Human herpesvirus 1
ccuccccgcgcaugcucu

SEQ ID NO: 3950598 - RNA, 13 nt, Human herpesvirus 1
ccucccgccaccc

SEQ ID NO: 3950599 - RNA, 15 nt, Human herpesvirus 1
ccucccugacggcca

SEQ ID NO: 3950600 - RNA, 20 nt, Human herpesvirus 1
ccucccugacggccaucgcc

SEQ ID NO: 3950601 - RNA, 15 nt, Human herpesvirus 1
ccuccgaagacgucc

SEQ ID NO: 3950602 - RNA, 16 nt, Human herpesvirus 1
ccuccgcaucccagga

SEQ ID NO: 3950603 - RNA, 23 nt, Human herpesvirus 1
ccuccgcgccaggcccgccgcca

SEQ ID NO: 3950604 - RNA, 23 nt, Human herpesvirus 1
ccuccggagcgugacgcaccccc

SEQ ID NO: 3950605 - RNA, 17 nt, Human herpesvirus 1
ccucgaugacgucccgg

SEQ ID NO: 3950606 - RNA, 12 nt, Human herpesvirus 1
ccucgcaccagc

SEQ ID NO: 3950607 - RNA, 18 nt, Human herpesvirus 1
ccucgcgccacacucacc

SEQ ID NO: 3950608 - RNA, 13 nt, Human herpesvirus 1
ccucgcgcggcga

SEQ ID NO: 3950609 - RNA, 14 nt, Human herpesvirus 1
ccucgcgggccucg

SEQ ID NO: 3950610 - RNA, 16 nt, Human herpesvirus 1
ccucggccaccguggg

SEQ ID NO: 3950611 - RNA, 23 nt, Human herpesvirus 1
ccucggcccgcgaacggcacgcc

SEQ ID NO: 3950612 - RNA, 14 nt, Human herpesvirus 1
ccucguggccccga

SEQ ID NO: 3950613 - RNA, 15 nt, Human herpesvirus 1
ccucucuucccucag

SEQ ID NO: 3950614 - RNA, 16 nt, Human herpesvirus 1
ccucucuucucucccg

SEQ ID NO: 3950615 - RNA, 16 nt, Human herpesvirus 1
ccucuggacuggacca

SEQ ID NO: 3950616 - RNA, 19 nt, Human herpesvirus 1
ccucugggcccgccuggau

SEQ ID NO: 3950617 - RNA, 17 nt, Human herpesvirus 1
ccucuucuccccuuccc

SEQ ID NO: 3950618 - RNA, 18 nt, Human herpesvirus 1
ccucuucuccccuucccu

SEQ ID NO: 3950619 - RNA, 21 nt, Human herpesvirus 1
ccugacgcgccgcgggccccc

SEQ ID NO: 3950620 - RNA, 23 nt, Human herpesvirus 1
ccugagacaagagcgcucccccg

SEQ ID NO: 3950621 - RNA, 12 nt, Human herpesvirus 1
ccugauggagcc

SEQ ID NO: 3950622 - RNA, 13 nt, Human herpesvirus 1
ccugauggagccu

SEQ ID NO: 3950623 - RNA, 13 nt, Human herpesvirus 1
ccugccccgccac

SEQ ID NO: 3950624 - RNA, 21 nt, Human herpesvirus 1
ccugcgguccggagccgcgcg

SEQ ID NO: 3950625 - RNA, 20 nt, Human herpesvirus 1
ccugcuacagccgcccccug

SEQ ID NO: 3950626 - RNA, 17 nt, Human herpesvirus 1
ccugcucacgaccccca

SEQ ID NO: 3950627 - RNA, 21 nt, Human herpesvirus 1
ccuggauucgcuggaccucac

SEQ ID NO: 3950628 - RNA, 19 nt, Human herpesvirus 1
ccuggcggacggcggccau

SEQ ID NO: 3950629 - RNA, 15 nt, Human herpesvirus 1
ccuggcugacccacg

SEQ ID NO: 3950630 - RNA, 14 nt, Human herpesvirus 1
ccugggccccggga

SEQ ID NO: 3950631 - RNA, 15 nt, Human herpesvirus 1
ccugggcccuggccg

SEQ ID NO: 3950632 - RNA, 17 nt, Human herpesvirus 1
ccuggugcucgugggcc

SEQ ID NO: 3950633 - RNA, 17 nt, Human herpesvirus 1
ccugguuguccguggcc

SEQ ID NO: 3950634 - RNA, 13 nt, Human herpesvirus 1
ccugucgcaccca

SEQ ID NO: 3950635 - RNA, 15 nt, Human herpesvirus 1
ccuguggcccuggcg

SEQ ID NO: 3950636 - RNA, 17 nt, Human herpesvirus 1
ccuuaaccgcuggcugg

SEQ ID NO: 3950637 - RNA, 22 nt, Human herpesvirus 1
ccuuacgcuaaucccccggcuc

SEQ ID NO: 3950638 - RNA, 13 nt, Human herpesvirus 1
ccuuagcgcggcc

SEQ ID NO: 3950639 - RNA, 22 nt, Human herpesvirus 1
ccuucaucgaccucaacaucac

SEQ ID NO: 3950640 - RNA, 21 nt, Human herpesvirus 1
ccuucgacguggaggaaggcg

SEQ ID NO: 3950641 - RNA, 16 nt, Human herpesvirus 1
ccuucgcaacaccucc

SEQ ID NO: 3950642 - RNA, 19 nt, Human herpesvirus 1
ccuucuugucgucucucuu

SEQ ID NO: 3950643 - RNA, 15 nt, Human herpesvirus 1
ccuugcggcagcgcu

SEQ ID NO: 3950644 - RNA, 18 nt, Human herpesvirus 1
ccuuggucuggcccacgc

SEQ ID NO: 3950645 - RNA, 17 nt, Human herpesvirus 1
ccuuugacggcgcggcc

SEQ ID NO: 3950646 - RNA, 18 nt, Human herpesvirus 1
cgaaaucguggcgcggcu

SEQ ID NO: 3950647 - RNA, 20 nt, Human herpesvirus 1
cgaacaaacgacccaccaau

SEQ ID NO: 3950648 - RNA, 21 nt, Human herpesvirus 1
cgaacacggggacggcggggc

SEQ ID NO: 3950649 - RNA, 15 nt, Human herpesvirus 1
cgaacgcggaccccc

SEQ ID NO: 3950650 - RNA, 18 nt, Human herpesvirus 1
cgaagacaccccccacca

SEQ ID NO: 3950651 - RNA, 12 nt, Human herpesvirus 1
cgaagcccagcg

SEQ ID NO: 3950652 - RNA, 13 nt, Human herpesvirus 1
cgaagccccggcc

SEQ ID NO: 3950653 - RNA, 12 nt, Human herpesvirus 1
cgaaggcugccg

SEQ ID NO: 3950654 - RNA, 23 nt, Human herpesvirus 1
cgaaugcagcgccggccuccccg

SEQ ID NO: 3950655 - RNA, 15 nt, Human herpesvirus 1
cgacaacgagccccc

SEQ ID NO: 3950656 - RNA, 19 nt, Human herpesvirus 1
cgacacugaaaugcccccc

SEQ ID NO: 3950657 - RNA, 12 nt, Human herpesvirus 1
cgacagaccucc

SEQ ID NO: 3950658 - RNA, 16 nt, Human herpesvirus 1
cgacagaccuccccgc

SEQ ID NO: 3950659 - RNA, 15 nt, Human herpesvirus 1
cgaccaacuaccccg

SEQ ID NO: 3950660 - RNA, 17 nt, Human herpesvirus 1
cgacccccuuguauguc

SEQ ID NO: 3950661 - RNA, 22 nt, Human herpesvirus 1
cgacccccuuguauguccccaa

SEQ ID NO: 3950662 - RNA, 15 nt, Human herpesvirus 1
cgaccgacagcacuc

SEQ ID NO: 3950663 - RNA, 16 nt, Human herpesvirus 1
cgaccgccagccgcgg

SEQ ID NO: 3950664 - RNA, 15 nt, Human herpesvirus 1
cgaccggcacccggc

SEQ ID NO: 3950665 - RNA, 18 nt, Human herpesvirus 1
cgaccucggcgccucugg

SEQ ID NO: 3950666 - RNA, 14 nt, Human herpesvirus 1
cgaccuggggcgcg

SEQ ID NO: 3950667 - RNA, 13 nt, Human herpesvirus 1
cgaccuguugaug

SEQ ID NO: 3950668 - RNA, 23 nt, Human herpesvirus 1
cgacgccuuaccaucccccggcc

SEQ ID NO: 3950669 - RNA, 17 nt, Human herpesvirus 1
cgacggcgucucccggg

SEQ ID NO: 3950670 - RNA, 15 nt, Human herpesvirus 1
cgacguccugggcca

SEQ ID NO: 3950671 - RNA, 12 nt, Human herpesvirus 1
cgacgucugucg

SEQ ID NO: 3950672 - RNA, 21 nt, Human herpesvirus 1
cgacuugccccccuccccgca

SEQ ID NO: 3950673 - RNA, 12 nt, Human herpesvirus 1
cgagaugagcca

SEQ ID NO: 3950674 - RNA, 20 nt, Human herpesvirus 1
cgagcucccagagaccccag

SEQ ID NO: 3950675 - RNA, 22 nt, Human herpesvirus 1
cgaggacaccccucguggcccc

SEQ ID NO: 3950676 - RNA, 16 nt, Human herpesvirus 1
cgaggaggugaucgac

SEQ ID NO: 3950677 - RNA, 16 nt, Human herpesvirus 1
cgaggauaaccugggg

SEQ ID NO: 3950678 - RNA, 13 nt, Human herpesvirus 1
cgaggcggccacg

SEQ ID NO: 3950679 - RNA, 13 nt, Human herpesvirus 1
cgagggccgggcc

SEQ ID NO: 3950680 - RNA, 23 nt, Human herpesvirus 1
cgaggggaugggcgaccuggggc

SEQ ID NO: 3950681 - RNA, 18 nt, Human herpesvirus 1
cgaguucccccggcacgc

SEQ ID NO: 3950682 - RNA, 18 nt, Human herpesvirus 1
cgaucccccgcccccggc

SEQ ID NO: 3950683 - RNA, 18 nt, Human herpesvirus 1
cgaucccgaacgacacac

SEQ ID NO: 3950684 - RNA, 18 nt, Human herpesvirus 1
cgaucugugagugucgcg

SEQ ID NO: 3950685 - RNA, 21 nt, Human herpesvirus 1
cgauucuuuuaucccacgcgu

SEQ ID NO: 3950686 - RNA, 17 nt, Human herpesvirus 1
cgcaaagccacccacgc

SEQ ID NO: 3950687 - RNA, 22 nt, Human herpesvirus 1
cgcaacaaccuggagaccaccg

SEQ ID NO: 3950688 - RNA, 17 nt, Human herpesvirus 1
cgcaaccagcugcacga

SEQ ID NO: 3950689 - RNA, 17 nt, Human herpesvirus 1
cgcaacuucccacccgg

SEQ ID NO: 3950690 - RNA, 18 nt, Human herpesvirus 1
cgcaacuucccacccgga

SEQ ID NO: 3950691 - RNA, 16 nt, Human herpesvirus 1
cgcaccaucccggguu

SEQ ID NO: 3950692 - RNA, 13 nt, Human herpesvirus 1
cgcaccgggcccc

SEQ ID NO: 3950693 - RNA, 22 nt, Human herpesvirus 1
cgcaccucgaggacacccgcgc

SEQ ID NO: 3950694 - RNA, 22 nt, Human herpesvirus 1
cgcacgcauacgggcggccacc

SEQ ID NO: 3950695 - RNA, 23 nt, Human herpesvirus 1
cgcacgcauacgggcggccaccc

SEQ ID NO: 3950696 - RNA, 21 nt, Human herpesvirus 1
cgcacgcucccaucgcgggcg

SEQ ID NO: 3950697 - RNA, 23 nt, Human herpesvirus 1
cgcacgcucccaucgcgggcgcc

SEQ ID NO: 3950698 - RNA, 22 nt, Human herpesvirus 1
cgcagacgaaaagccccgggcc

SEQ ID NO: 3950699 - RNA, 14 nt, Human herpesvirus 1
cgcagccccgcugg

SEQ ID NO: 3950700 - RNA, 21 nt, Human herpesvirus 1
cgcagccuauguucgcgggcg

SEQ ID NO: 3950701 - RNA, 16 nt, Human herpesvirus 1
cgcagccuucucccgg

SEQ ID NO: 3950702 - RNA, 14 nt, Human herpesvirus 1
cgcagcugggaccc

SEQ ID NO: 3950703 - RNA, 22 nt, Human herpesvirus 1
cgcaggugugguucggccaccg

SEQ ID NO: 3950704 - RNA, 23 nt, Human herpesvirus 1
cgcauauauacgcuuggagccag

SEQ ID NO: 3950705 - RNA, 16 nt, Human herpesvirus 1
cgcaucaagaccaccu

SEQ ID NO: 3950706 - RNA, 20 nt, Human herpesvirus 1
cgcaugaucuccggaccccc

SEQ ID NO: 3950707 - RNA, 16 nt, Human herpesvirus 1
cgccacaacagcccug

SEQ ID NO: 3950708 - RNA, 20 nt, Human herpesvirus 1
cgccacccgaaccaccacug

SEQ ID NO: 3950709 - RNA, 22 nt, Human herpesvirus 1
cgccagccuguuuguccugggg

SEQ ID NO: 3950710 - RNA, 17 nt, Human herpesvirus 1
cgccagcgcggcggggc

SEQ ID NO: 3950711 - RNA, 14 nt, Human herpesvirus 1
cgccaucaaccccg

SEQ ID NO: 3950712 - RNA, 20 nt, Human herpesvirus 1
cgcccaaugggccgggccgc

SEQ ID NO: 3950713 - RNA, 15 nt, Human herpesvirus 1
cgcccaccuccuggc

SEQ ID NO: 3950714 - RNA, 14 nt, Human herpesvirus 1
cgcccagacgcccu

SEQ ID NO: 3950715 - RNA, 20 nt, Human herpesvirus 1
cgcccagcucauucaccccg

SEQ ID NO: 3950716 - RNA, 19 nt, Human herpesvirus 1
cgccccccaaaccaugucc

SEQ ID NO: 3950717 - RNA, 14 nt, Human herpesvirus 1
cgccccccccccgu

SEQ ID NO: 3950718 - RNA, 21 nt, Human herpesvirus 1
cgccccccguggaccccacga

SEQ ID NO: 3950719 - RNA, 13 nt, Human herpesvirus 1
cgccccgauggcc

SEQ ID NO: 3950720 - RNA, 21 nt, Human herpesvirus 1
cgccccgugucugugggccaa

SEQ ID NO: 3950721 - RNA, 15 nt, Human herpesvirus 1
cgcccgaccacacac

SEQ ID NO: 3950722 - RNA, 23 nt, Human herpesvirus 1
cgcccgauuuacagcccccagau

SEQ ID NO: 3950723 - RNA, 14 nt, Human herpesvirus 1
cgcccgccccugcg

SEQ ID NO: 3950724 - RNA, 19 nt, Human herpesvirus 1
cgcccgcgacgccauggac

SEQ ID NO: 3950725 - RNA, 15 nt, Human herpesvirus 1
cgcccggcggaccca

SEQ ID NO: 3950726 - RNA, 17 nt, Human herpesvirus 1
cgcccggguccccgcgg

SEQ ID NO: 3950727 - RNA, 13 nt, Human herpesvirus 1
cgcccgucucugc

SEQ ID NO: 3950728 - RNA, 16 nt, Human herpesvirus 1
cgcccuuccccacggg

SEQ ID NO: 3950729 - RNA, 13 nt, Human herpesvirus 1
cgccgacacgcgg

SEQ ID NO: 3950730 - RNA, 22 nt, Human herpesvirus 1
cgccgagccccccgcugcggcc

SEQ ID NO: 3950731 - RNA, 13 nt, Human herpesvirus 1
cgccgccacacuc

SEQ ID NO: 3950732 - RNA, 19 nt, Human herpesvirus 1
cgccgcgacccgcacgagc

SEQ ID NO: 3950733 - RNA, 19 nt, Human herpesvirus 1
cgccgcgagauggccgccc

SEQ ID NO: 3950734 - RNA, 17 nt, Human herpesvirus 1
cgccgcgaguacguggc

SEQ ID NO: 3950735 - RNA, 15 nt, Human herpesvirus 1
cgccgcgccccgccg

SEQ ID NO: 3950736 - RNA, 21 nt, Human herpesvirus 1
cgccgcggaucgggccuuggu

SEQ ID NO: 3950737 - RNA, 21 nt, Human herpesvirus 1
cgccggcggucgcgcuccucu

SEQ ID NO: 3950738 - RNA, 13 nt, Human herpesvirus 1
cgccggggaccgc

SEQ ID NO: 3950739 - RNA, 19 nt, Human herpesvirus 1
cgccggggaccgcagccug

SEQ ID NO: 3950740 - RNA, 13 nt, Human herpesvirus 1
cgccggggcucuc

SEQ ID NO: 3950741 - RNA, 22 nt, Human herpesvirus 1
cgccggguagcguacggaccgc

SEQ ID NO: 3950742 - RNA, 18 nt, Human herpesvirus 1
cgccggguggcacgggcc

SEQ ID NO: 3950743 - RNA, 17 nt, Human herpesvirus 1
cgccgguuccucccgcu

SEQ ID NO: 3950744 - RNA, 16 nt, Human herpesvirus 1
cgccguugagccccuc

SEQ ID NO: 3950745 - RNA, 17 nt, Human herpesvirus 1
cgccuaccggccccugg

SEQ ID NO: 3950746 - RNA, 15 nt, Human herpesvirus 1
cgccucagggccucc

SEQ ID NO: 3950747 - RNA, 15 nt, Human herpesvirus 1
cgccucccccugagc

SEQ ID NO: 3950748 - RNA, 19 nt, Human herpesvirus 1
cgccucccccugagccgcu

SEQ ID NO: 3950749 - RNA, 12 nt, Human herpesvirus 1
cgccuccgcccg

SEQ ID NO: 3950750 - RNA, 14 nt, Human herpesvirus 1
cgccucggagccga

SEQ ID NO: 3950751 - RNA, 16 nt, Human herpesvirus 1
cgccucggucacccca

SEQ ID NO: 3950752 - RNA, 20 nt, Human herpesvirus 1
cgccucucgcugcuggcgga

SEQ ID NO: 3950753 - RNA, 13 nt, Human herpesvirus 1
cgccugccccgcc

SEQ ID NO: 3950754 - RNA, 19 nt, Human herpesvirus 1
cgccugcggcgaccucggc

SEQ ID NO: 3950755 - RNA, 18 nt, Human herpesvirus 1
cgccugguugcggcccgc

SEQ ID NO: 3950756 - RNA, 22 nt, Human herpesvirus 1
cgcgaagacccccccggagccg

SEQ ID NO: 3950757 - RNA, 21 nt, Human herpesvirus 1
cgcgaccaccccaaauacagc

SEQ ID NO: 3950758 - RNA, 17 nt, Human herpesvirus 1
cgcgacccgcacgagcc

SEQ ID NO: 3950759 - RNA, 16 nt, Human herpesvirus 1
cgcgagcaccugcggg

SEQ ID NO: 3950760 - RNA, 15 nt, Human herpesvirus 1
cgcgagcgaggcccc

SEQ ID NO: 3950761 - RNA, 15 nt, Human herpesvirus 1
gcaggcgccuccggg

SEQ ID NO: 3950762 - RNA, 12 nt, Human herpesvirus 1
gcagggcccgcc

SEQ ID NO: 3950763 - RNA, 22 nt, Human herpesvirus 1
gcaggugugguucggccaccgc

SEQ ID NO: 3950764 - RNA, 18 nt, Human herpesvirus 1
gcagucccugaguuggga

SEQ ID NO: 3950765 - RNA, 13 nt, Human herpesvirus 1
gcagucuccuggc

SEQ ID NO: 3950766 - RNA, 15 nt, Human herpesvirus 1
gcagucuccuggcag

SEQ ID NO: 3950767 - RNA, 16 nt, Human herpesvirus 1
gcauacgccuccccca

SEQ ID NO: 3950768 - RNA, 16 nt, Human herpesvirus 1
gcauacgcucgggccc

SEQ ID NO: 3950769 - RNA, 23 nt, Human herpesvirus 1
gcauaucccacccuggagcucaa

SEQ ID NO: 3950770 - RNA, 23 nt, Human herpesvirus 1
gcauccacccuccgcuggggccc

SEQ ID NO: 3950771 - RNA, 22 nt, Human herpesvirus 1
gcauccagggagaaaccccagc

SEQ ID NO: 3950772 - RNA, 11 nt, Human herpesvirus 1
gcaucccagga

SEQ ID NO: 3950773 - RNA, 20 nt, Human herpesvirus 1
gcauccccccgucagccugc

SEQ ID NO: 3950774 - RNA, 14 nt, Human herpesvirus 1
gcaucccccgccuu

SEQ ID NO: 3950775 - RNA, 17 nt, Human herpesvirus 1
gcaucccccgucugggu

SEQ ID NO: 3950776 - RNA, 18 nt, Human herpesvirus 1
gcaucccccgucuggguu

SEQ ID NO: 3950777 - RNA, 19 nt, Human herpesvirus 1
gcaucccccgucuggguuu

SEQ ID NO: 3950778 - RNA, 23 nt, Human herpesvirus 1
gcauccgggaccugaaccccagc

SEQ ID NO: 3950779 - RNA, 22 nt, Human herpesvirus 1
gcauccgucgggaggccacaga

SEQ ID NO: 3950780 - RNA, 20 nt, Human herpesvirus 1
gcaucgaacgcacaccccca

SEQ ID NO: 3950781 - RNA, 16 nt, Human herpesvirus 1
gcaucuucgcccgcag

SEQ ID NO: 3950782 - RNA, 21 nt, Human herpesvirus 1
gcaugaucuccggacccccgc

SEQ ID NO: 3950783 - RNA, 15 nt, Human herpesvirus 1
gcauggcgcagcugg

SEQ ID NO: 3950784 - RNA, 13 nt, Human herpesvirus 1
gcauucgggccug

SEQ ID NO: 3950785 - RNA, 17 nt, Human herpesvirus 1
gccaaacgccagccugu

SEQ ID NO: 3950786 - RNA, 12 nt, Human herpesvirus 1
gccaaauuuaug

SEQ ID NO: 3950787 - RNA, 16 nt, Human herpesvirus 1
gccaacaauccccagg

SEQ ID NO: 3950788 - RNA, 18 nt, Human herpesvirus 1
gccaacaauccccaggac

SEQ ID NO: 3950789 - RNA, 16 nt, Human herpesvirus 1
gccaacgcccugacca

SEQ ID NO: 3950790 - RNA, 15 nt, Human herpesvirus 1
gccaacgccgcgacc

SEQ ID NO: 3950791 - RNA, 16 nt, Human herpesvirus 1
gccaagauggcccagu

SEQ ID NO: 3950792 - RNA, 19 nt, Human herpesvirus 1
gccaauccgugucggggag

SEQ ID NO: 3950793 - RNA, 23 nt, Human herpesvirus 1
gccaaugcccucccugacggcca

SEQ ID NO: 3950794 - RNA, 15 nt, Human herpesvirus 1
gccacaacagcccug

SEQ ID NO: 3950795 - RNA, 12 nt, Human herpesvirus 1
gccacacccgcg

SEQ ID NO: 3950796 - RNA, 21 nt, Human herpesvirus 1
gccacacucaaaaagccccaa

SEQ ID NO: 3950797 - RNA, 20 nt, Human herpesvirus 1
gccacaggaauaccagaaua

SEQ ID NO: 3950798 - RNA, 15 nt, Human herpesvirus 1
gccacccgaaccacc

SEQ ID NO: 3950799 - RNA, 23 nt, Human herpesvirus 1
gccaccugcgcggguugcugcgc

SEQ ID NO: 3950800 - RNA, 16 nt, Human herpesvirus 1
gccagaacucgccccg

SEQ ID NO: 3950801 - RNA, 22 nt, Human herpesvirus 1
gccagaucuacugcugggccau

SEQ ID NO: 3950802 - RNA, 19 nt, Human herpesvirus 1
gccagcagacgcugcuccg

SEQ ID NO: 3950803 - RNA, 19 nt, Human herpesvirus 1
gccaggggcauccgggacc

SEQ ID NO: 3950804 - RNA, 17 nt, Human herpesvirus 1
gccaguccgcugcaccg

SEQ ID NO: 3950805 - RNA, 14 nt, Human herpesvirus 1
gccaucaaccccgc

SEQ ID NO: 3950806 - RNA, 13 nt, Human herpesvirus 1
gccauccccgcgu

SEQ ID NO: 3950807 - RNA, 15 nt, Human herpesvirus 1
gccaucgagccaacg

SEQ ID NO: 3950808 - RNA, 23 nt, Human herpesvirus 1
gccaugcgccagggcgcccccgc

SEQ ID NO: 3950809 - RNA, 17 nt, Human herpesvirus 1
gccaugcuggcggacgg

SEQ ID NO: 3950810 - RNA, 19 nt, Human herpesvirus 1
gccauguuugcgggccugg

SEQ ID NO: 3950811 - RNA, 20 nt, Human herpesvirus 1
gccauguuugcgggccuggg

SEQ ID NO: 3950812 - RNA, 11 nt, Human herpesvirus 1
gcccacccccc

SEQ ID NO: 3950813 - RNA, 16 nt, Human herpesvirus 1
gcccacccuggcgcca

SEQ ID NO: 3950814 - RNA, 19 nt, Human herpesvirus 1
gcccacgaucaccgcggga

SEQ ID NO: 3950815 - RNA, 20 nt, Human herpesvirus 1
gcccacuacaccagccaauc

SEQ ID NO: 3950816 - RNA, 20 nt, Human herpesvirus 1
gcccagaccccuucucccca

SEQ ID NO: 3950817 - RNA, 22 nt, Human herpesvirus 1
gcccauuuacguggcuggguuu

SEQ ID NO: 3950818 - RNA, 19 nt, Human herpesvirus 1
gccccaccccccgacgcca

SEQ ID NO: 3950819 - RNA, 19 nt, Human herpesvirus 1
gcccccaacaugacccaga

SEQ ID NO: 3950820 - RNA, 16 nt, Human herpesvirus 1
gcccccagaugcccac

SEQ ID NO: 3950821 - RNA, 16 nt, Human herpesvirus 1
gcccccagcugggccc

SEQ ID NO: 3950822 - RNA, 14 nt, Human herpesvirus 1
gccccccagccucc

SEQ ID NO: 3950823 - RNA, 15 nt, Human herpesvirus 1
gccccccagccuccc

SEQ ID NO: 3950824 - RNA, 17 nt, Human herpesvirus 1
gccccccgcugcggcca

SEQ ID NO: 3950825 - RNA, 19 nt, Human herpesvirus 1
gccccccguguuugugggg

SEQ ID NO: 3950826 - RNA, 20 nt, Human herpesvirus 1
gccccccuggcgagcccaga

SEQ ID NO: 3950827 - RNA, 15 nt, Human herpesvirus 1
gcccccgaggccagc

SEQ ID NO: 3950828 - RNA, 17 nt, Human herpesvirus 1
gcccccgaggccagcau

SEQ ID NO: 3950829 - RNA, 19 nt, Human herpesvirus 1
gcccccgccccucccccga

SEQ ID NO: 3950830 - RNA, 16 nt, Human herpesvirus 1
gcccccgcuuccggau

SEQ ID NO: 3950831 - RNA, 19 nt, Human herpesvirus 1
gcccccuuuguccccgccg

SEQ ID NO: 3950832 - RNA, 12 nt, Human herpesvirus 1
gccccgaccccc

SEQ ID NO: 3950833 - RNA, 15 nt, Human herpesvirus 1
gccccgacccccuug

SEQ ID NO: 3950834 - RNA, 22 nt, Human herpesvirus 1
gccccgcccccuuuguccccgc

SEQ ID NO: 3950835 - RNA, 17 nt, Human herpesvirus 1
gccccggaagaccccga

SEQ ID NO: 3950836 - RNA, 19 nt, Human herpesvirus 1
gccccggaccccacgcacc

SEQ ID NO: 3950837 - RNA, 14 nt, Human herpesvirus 1
gccccggcccccaa

SEQ ID NO: 3950838 - RNA, 16 nt, Human herpesvirus 1
gccccggccgccuggu

SEQ ID NO: 3950839 - RNA, 11 nt, Human herpesvirus 1
gccccgggccg

SEQ ID NO: 3950840 - RNA, 17 nt, Human herpesvirus 1
gccccgugucugugggc

SEQ ID NO: 3950841 - RNA, 16 nt, Human herpesvirus 1
gccccuaaccaggccu

SEQ ID NO: 3950842 - RNA, 18 nt, Human herpesvirus 1
gccccuaaccaggccucc

SEQ ID NO: 3950843 - RNA, 22 nt, Human herpesvirus 1
gccccuaaccaggccuccaccc

SEQ ID NO: 3950844 - RNA, 15 nt, Human herpesvirus 1
gccccuguggcccug

SEQ ID NO: 3950845 - RNA, 20 nt, Human herpesvirus 1
gcccgacagaccuccccgcg

SEQ ID NO: 3950846 - RNA, 17 nt, Human herpesvirus 1
gcccgaccacacacccc

SEQ ID NO: 3950847 - RNA, 19 nt, Human herpesvirus 1
gcccgaccacacacccccc

SEQ ID NO: 3950848 - RNA, 11 nt, Human herpesvirus 1
gcccgcccccc

SEQ ID NO: 3950849 - RNA, 14 nt, Human herpesvirus 1
gcccgccccucgcc

SEQ ID NO: 3950850 - RNA, 15 nt, Human herpesvirus 1
gcccgccccucgcca

SEQ ID NO: 3950851 - RNA, 15 nt, Human herpesvirus 1
gcccggaggcgcccg

SEQ ID NO: 3950852 - RNA, 18 nt, Human herpesvirus 1
gcccgggccacggcgccg

SEQ ID NO: 3950853 - RNA, 21 nt, Human herpesvirus 1
gcccgggggacucacuaccca

SEQ ID NO: 3950854 - RNA, 22 nt, Human herpesvirus 1
gcccguugcagggccuggugcu

SEQ ID NO: 3950855 - RNA, 14 nt, Human herpesvirus 1
gcccuaaccccacc

SEQ ID NO: 3950856 - RNA, 21 nt, Human herpesvirus 1
gcccuaaccccaccccugugc

SEQ ID NO: 3950857 - RNA, 17 nt, Human herpesvirus 1
gcccucccugacggcca

SEQ ID NO: 3950858 - RNA, 22 nt, Human herpesvirus 1
gcccucuuggaggaccccgugg

SEQ ID NO: 3950859 - RNA, 15 nt, Human herpesvirus 1
gcccucuuuuucuuu

SEQ ID NO: 3950860 - RNA, 16 nt, Human herpesvirus 1
gcccugagcgcccucc

SEQ ID NO: 3950861 - RNA, 14 nt, Human herpesvirus 1
gcccugaugcagga

SEQ ID NO: 3950862 - RNA, 15 nt, Human herpesvirus 1
gcccugaugcaggau

SEQ ID NO: 3950863 - RNA, 15 nt, Human herpesvirus 1
gcccuggccgaggac

SEQ ID NO: 3950864 - RNA, 18 nt, Human herpesvirus 1
gcccugguguuucugggg

SEQ ID NO: 3950865 - RNA, 19 nt, Human herpesvirus 1
gccgaccgcuucaagcagg

SEQ ID NO: 3950866 - RNA, 13 nt, Human herpesvirus 1
gccgacggcccga

SEQ ID NO: 3950867 - RNA, 22 nt, Human herpesvirus 1
gccgagcucaaaucgcauccga

SEQ ID NO: 3950868 - RNA, 22 nt, Human herpesvirus 1
gccgagucuucggggcccggcc

SEQ ID NO: 3950869 - RNA, 15 nt, Human herpesvirus 1
gccgaucccucgcga

SEQ ID NO: 3950870 - RNA, 14 nt, Human herpesvirus 1
gccgcaccgggccc

SEQ ID NO: 3950871 - RNA, 21 nt, Human herpesvirus 1
gccgccaccguggccggccug

SEQ ID NO: 3950872 - RNA, 16 nt, Human herpesvirus 1
gccgccccagcaccga

SEQ ID NO: 3950873 - RNA, 20 nt, Human herpesvirus 1
gccgcccggggccagcgcca

SEQ ID NO: 3950874 - RNA, 19 nt, Human herpesvirus 1
gccgccgaagggacucugg

SEQ ID NO: 3950875 - RNA, 16 nt, Human herpesvirus 1
gccgccgcgccccgcc

SEQ ID NO: 3950876 - RNA, 15 nt, Human herpesvirus 1
gccgccugguccccc

SEQ ID NO: 3950877 - RNA, 17 nt, Human herpesvirus 1
gccgccuggucccccgg

SEQ ID NO: 3950878 - RNA, 17 nt, Human herpesvirus 1
gccgcgcggacgacggc

SEQ ID NO: 3950879 - RNA, 15 nt, Human herpesvirus 1
gccgcgcggaggcgu

SEQ ID NO: 3950880 - RNA, 15 nt, Human herpesvirus 1
gccgcggcucccggc

SEQ ID NO: 3950881 - RNA, 13 nt, Human herpesvirus 1
gccgcgggccacg

SEQ ID NO: 3950882 - RNA, 13 nt, Human herpesvirus 1
gccgcgggccccc

SEQ ID NO: 3950883 - RNA, 15 nt, Human herpesvirus 1
gccgcgguacagauc

SEQ ID NO: 3950884 - RNA, 21 nt, Human herpesvirus 1
gccgcuggcaacucgccccac

SEQ ID NO: 3950885 - RNA, 16 nt, Human herpesvirus 1
gccggacgacgugguc

SEQ ID NO: 3950886 - RNA, 16 nt, Human herpesvirus 1
gccggcaugcacccca

SEQ ID NO: 3950887 - RNA, 18 nt, Human herpesvirus 1
gccggcaugcaccccaga

SEQ ID NO: 3950888 - RNA, 11 nt, Human herpesvirus 1
gccggccuggc

SEQ ID NO: 3950889 - RNA, 22 nt, Human herpesvirus 1
gccggcguuucugaccugcacc

SEQ ID NO: 3950890 - RNA, 17 nt, Human herpesvirus 1
gccggggagggcagggc

SEQ ID NO: 3950891 - RNA, 23 nt, Human herpesvirus 1
gccgguauggggcaugaucagac

SEQ ID NO: 3950892 - RNA, 22 nt, Human herpesvirus 1
gccgguugcgguucguucugga

SEQ ID NO: 3950893 - RNA, 18 nt, Human herpesvirus 1
gccguccucgcaccagcc

SEQ ID NO: 3950894 - RNA, 21 nt, Human herpesvirus 1
gccgucgcuccacuacgaguc

SEQ ID NO: 3950895 - RNA, 19 nt, Human herpesvirus 1
gccgucgggcgucccacac

SEQ ID NO: 3950896 - RNA, 16 nt, Human herpesvirus 1
gccgugauuccucucc

SEQ ID NO: 3950897 - RNA, 17 nt, Human herpesvirus 1
gccgugauuccucuccg

SEQ ID NO: 3950898 - RNA, 20 nt, Human herpesvirus 1
gccuacacucgacccccgcg

SEQ ID NO: 3950899 - RNA, 16 nt, Human herpesvirus 1
gccuagccgcagcaaa

SEQ ID NO: 3950900 - RNA, 16 nt, Human herpesvirus 1
gccucaacauaccccg

SEQ ID NO: 3950901 - RNA, 12 nt, Human herpesvirus 1
gccucacccacg

SEQ ID NO: 3950902 - RNA, 14 nt, Human herpesvirus 1
gccucaccugacca

SEQ ID NO: 3950903 - RNA, 19 nt, Human herpesvirus 1
aguucaccguggccuggga

SEQ ID NO: 3950904 - RNA, 21 nt, Human herpesvirus 1
aguucaccguggccugggacu

SEQ ID NO: 3950905 - RNA, 14 nt, Human herpesvirus 1
aguuuccacccccc

SEQ ID NO: 3950906 - RNA, 19 nt, Human herpesvirus 1
aguuuguggacccaaagcc

SEQ ID NO: 3950907 - RNA, 19 nt, Human herpesvirus 1
auaaauuuuacaaacagau

SEQ ID NO: 3950908 - RNA, 23 nt, Human herpesvirus 1
auaaccgaccgcagucccugagu

SEQ ID NO: 3950909 - RNA, 13 nt, Human herpesvirus 1
auaacgcacugaa

SEQ ID NO: 3950910 - RNA, 22 nt, Human herpesvirus 1
auaagcuugccguuaagaccau

SEQ ID NO: 3950911 - RNA, 13 nt, Human herpesvirus 1
auaaggccuggga

SEQ ID NO: 3950912 - RNA, 18 nt, Human herpesvirus 1
auacagcauggcgccaca

SEQ ID NO: 3950913 - RNA, 12 nt, Human herpesvirus 1
auagagcugcuc

SEQ ID NO: 3950914 - RNA, 15 nt, Human herpesvirus 1
aucaccccgcaauuu

SEQ ID NO: 3950915 - RNA, 17 nt, Human herpesvirus 1
aucacggcaaggagcgc

SEQ ID NO: 3950916 - RNA, 20 nt, Human herpesvirus 1
auccacgguggagguucugu

SEQ ID NO: 3950917 - RNA, 11 nt, Human herpesvirus 1
auccccgcucc

SEQ ID NO: 3950918 - RNA, 18 nt, Human herpesvirus 1
auccccgcucccucgacc

SEQ ID NO: 3950919 - RNA, 14 nt, Human herpesvirus 1
aucccgaggcccca

SEQ ID NO: 3950920 - RNA, 19 nt, Human herpesvirus 1
aucccggguuaauguaaau

SEQ ID NO: 3950921 - RNA, 14 nt, Human herpesvirus 1
aucgccugucuccu

SEQ ID NO: 3950922 - RNA, 18 nt, Human herpesvirus 1
aucgcgguagcccggccg

SEQ ID NO: 3950923 - RNA, 19 nt, Human herpesvirus 1
aucguccaucaccacgccc

SEQ ID NO: 3950924 - RNA, 14 nt, Human herpesvirus 1
aucgucgaggaggu

SEQ ID NO: 3950925 - RNA, 14 nt, Human herpesvirus 1
aucuccggaccccc

SEQ ID NO: 3950926 - RNA, 17 nt, Human herpesvirus 1
augaccgcccgccccuc

SEQ ID NO: 3950927 - RNA, 13 nt, Human herpesvirus 1
augagccagaccc

SEQ ID NO: 3950928 - RNA, 20 nt, Human herpesvirus 1
augcagcgccggccuccccg

SEQ ID NO: 3950929 - RNA, 23 nt, Human herpesvirus 1
augccaaguauuggacuggagga

SEQ ID NO: 3950930 - RNA, 14 nt, Human herpesvirus 1
augccccccuggcg

SEQ ID NO: 3950931 - RNA, 15 nt, Human herpesvirus 1
augccccccuggcga

SEQ ID NO: 3950932 - RNA, 21 nt, Human herpesvirus 1
augccccccuggcgagcccag

SEQ ID NO: 3950933 - RNA, 15 nt, Human herpesvirus 1
cacgccgccucggcc

SEQ ID NO: 3950934 - RNA, 22 nt, Human herpesvirus 1
cacgccuggggucgcggccgcg

SEQ ID NO: 3950935 - RNA, 11 nt, Human herpesvirus 1
cacgcgccgcc

SEQ ID NO: 3950936 - RNA, 17 nt, Human herpesvirus 1
cacgcgcgacgggcagu

SEQ ID NO: 3950937 - RNA, 23 nt, Human herpesvirus 1
cacgcgcggcugguccacaccca

SEQ ID NO: 3950938 - RNA, 17 nt, Human herpesvirus 1
cacggaacacaaggcca

SEQ ID NO: 3950939 - RNA, 18 nt, Human herpesvirus 1
cacggcgaaugcagcgcc

SEQ ID NO: 3950940 - RNA, 15 nt, Human herpesvirus 1
cacggcguggagcaa

SEQ ID NO: 3950941 - RNA, 18 nt, Human herpesvirus 1
cacggcuaccuggcccca

SEQ ID NO: 3950942 - RNA, 15 nt, Human herpesvirus 1
cacuccggcgccgcc

SEQ ID NO: 3950943 - RNA, 14 nt, Human herpesvirus 1
cacugccucccccg

SEQ ID NO: 3950944 - RNA, 19 nt, Human herpesvirus 1
cacuggccgggagcaccac

SEQ ID NO: 3950945 - RNA, 21 nt, Human herpesvirus 1
cagacauuccgcuaucuccug

SEQ ID NO: 3950946 - RNA, 17 nt, Human herpesvirus 1
cagacccaacccccggc

SEQ ID NO: 3950947 - RNA, 18 nt, Human herpesvirus 1
cagacccaacccccggcc

SEQ ID NO: 3950948 - RNA, 16 nt, Human herpesvirus 1
cagacgagcgcgcuug

SEQ ID NO: 3950949 - RNA, 15 nt, Human herpesvirus 1
cagacgcgggcgacg

SEQ ID NO: 3950950 - RNA, 22 nt, Human herpesvirus 1
cagacgguggugcccagcggcc

SEQ ID NO: 3950951 - RNA, 14 nt, Human herpesvirus 1
cagacucucgguga

SEQ ID NO: 3950952 - RNA, 15 nt, Human herpesvirus 1
cagauagccaucccc

SEQ ID NO: 3950953 - RNA, 19 nt, Human herpesvirus 1
cagauuccaaagugccccg

SEQ ID NO: 3950954 - RNA, 21 nt, Human herpesvirus 1
cagcaccuucaucgaccucaa

SEQ ID NO: 3950955 - RNA, 13 nt, Human herpesvirus 1
cagcagcucccca

SEQ ID NO: 3950956 - RNA, 15 nt, Human herpesvirus 1
cagcagguccgcggu

SEQ ID NO: 3950957 - RNA, 20 nt, Human herpesvirus 1
ggaggagccccugcccgaca

SEQ ID NO: 3950958 - RNA, 15 nt, Human herpesvirus 1
ggaggccacagaaac

SEQ ID NO: 3950959 - RNA, 20 nt, Human herpesvirus 1
ggagggcguaacguuccgcc

SEQ ID NO: 3950960 - RNA, 21 nt, Human herpesvirus 1
ggaggggaaaagugaaagaca

SEQ ID NO: 3950961 - RNA, 21 nt, Human herpesvirus 1
ggaggggggggucgggcgcug

SEQ ID NO: 3950962 - RNA, 17 nt, Human herpesvirus 1
ggagguuccggaggcgc

SEQ ID NO: 3950963 - RNA, 21 nt, Human herpesvirus 1
ggaguacgcguacucccacca

SEQ ID NO: 3950964 - RNA, 15 nt, Human herpesvirus 1
ggagucccgaggacg

SEQ ID NO: 3950965 - RNA, 22 nt, Human herpesvirus 1
ggauccgacccccauggagcac

SEQ ID NO: 3950966 - RNA, 16 nt, Human herpesvirus 1
ggauccucggccagcu

SEQ ID NO: 3950967 - RNA, 16 nt, Human herpesvirus 1
ggaucggcgccaugcu

SEQ ID NO: 3950968 - RNA, 19 nt, Human herpesvirus 1
ggaucugguccgccgcgag

SEQ ID NO: 3950969 - RNA, 20 nt, Human herpesvirus 1
ggaucuuagccuccccgggc

SEQ ID NO: 3950970 - RNA, 16 nt, Human herpesvirus 1
ggaugggcgaccuggg

SEQ ID NO: 3950971 - RNA, 11 nt, Human herpesvirus 1
ggauggggaga

SEQ ID NO: 3950972 - RNA, 15 nt, Human herpesvirus 1
ggauggggagagccc

SEQ ID NO: 3950973 - RNA, 11 nt, Human herpesvirus 1
ggauggggccc

SEQ ID NO: 3950974 - RNA, 12 nt, Human herpesvirus 1
ggcacccacgcc

SEQ ID NO: 3950975 - RNA, 16 nt, Human herpesvirus 1
ggcacguacacgggug

SEQ ID NO: 3950976 - RNA, 14 nt, Human herpesvirus 1
ggcagcccggaggc

SEQ ID NO: 3950977 - RNA, 22 nt, Human herpesvirus 1
ggcagucuccuggcagcccugg

SEQ ID NO: 3950978 - RNA, 15 nt, Human herpesvirus 1
ggcaugcaccccaga

SEQ ID NO: 3950979 - RNA, 23 nt, Human herpesvirus 1
ggcaugcaccccagagguguuca

SEQ ID NO: 3950980 - RNA, 17 nt, Human herpesvirus 1
ggccaagcuagccgagg

SEQ ID NO: 3950981 - RNA, 15 nt, Human herpesvirus 1
ggccacccccccgga

SEQ ID NO: 3950982 - RNA, 16 nt, Human herpesvirus 1
ggccacccccccggag

SEQ ID NO: 3950983 - RNA, 21 nt, Human herpesvirus 1
ggccacucacgcauccccagu

SEQ ID NO: 3950984 - RNA, 23 nt, Human herpesvirus 1
ggccaucgguccccucugggccc

SEQ ID NO: 3950985 - RNA, 19 nt, Human herpesvirus 1
ggccauggacagcgaccug

SEQ ID NO: 3950986 - RNA, 16 nt, Human herpesvirus 1
ggccauggcccgccuc

SEQ ID NO: 3950987 - RNA, 22 nt, Human herpesvirus 1
ggcccagcauguccgccgggac

SEQ ID NO: 3950988 - RNA, 19 nt, Human herpesvirus 1
ggccccacggucagucugg

SEQ ID NO: 3950989 - RNA, 21 nt, Human herpesvirus 1
ggccccaguccccaagacccc

SEQ ID NO: 3950990 - RNA, 13 nt, Human herpesvirus 1
ggcccccaggguc

SEQ ID NO: 3950991 - RNA, 18 nt, Human herpesvirus 1
ggccccgcgucuggcccc

SEQ ID NO: 3950992 - RNA, 18 nt, Human herpesvirus 1
ggccccggcaccacgggu

SEQ ID NO: 3950993 - RNA, 14 nt, Human herpesvirus 1
ggccccugggcccc

SEQ ID NO: 3950994 - RNA, 17 nt, Human herpesvirus 1
ggcccgcguuuggccug

SEQ ID NO: 3950995 - RNA, 19 nt, Human herpesvirus 1
ggcccggaacgggaggcca

SEQ ID NO: 3950996 - RNA, 18 nt, Human herpesvirus 1
ggcccggcuagacccacg

SEQ ID NO: 3950997 - RNA, 17 nt, Human herpesvirus 1
ggcccgggccacggcgc

SEQ ID NO: 3950998 - RNA, 14 nt, Human herpesvirus 1
ggcccggggccugc

SEQ ID NO: 3950999 - RNA, 23 nt, Human herpesvirus 1
ggcccgggggggcaucgcgcggg

SEQ ID NO: 3951000 - RNA, 15 nt, Human herpesvirus 1
ggcccgucgugucuu

SEQ ID NO: 3951001 - RNA, 14 nt, Human herpesvirus 1
ggcccuaaccccac

SEQ ID NO: 3951002 - RNA, 19 nt, Human herpesvirus 1
ggcccuaaccccaccccug

SEQ ID NO: 3951003 - RNA, 20 nt, Human herpesvirus 1
ggcccugccacuccggcgcc

SEQ ID NO: 3951004 - RNA, 16 nt, Human herpesvirus 1
ggcccuguaugacagc

SEQ ID NO: 3951005 - RNA, 15 nt, Human herpesvirus 1
ggccgccacccaggc

SEQ ID NO: 3951006 - RNA, 19 nt, Human herpesvirus 1
ggccgccacgcgcccgagu

SEQ ID NO: 3951007 - RNA, 18 nt, Human herpesvirus 1
ggccgccgacgaccuggu

SEQ ID NO: 3951008 - RNA, 17 nt, Human herpesvirus 1
ggccgcgguggacagcc

SEQ ID NO: 3951009 - RNA, 16 nt, Human herpesvirus 1
ggccgggcgacccaga

SEQ ID NO: 3951010 - RNA, 18 nt, Human herpesvirus 1
ggccgucccggggcaggc

SEQ ID NO: 3951011 - RNA, 22 nt, Human herpesvirus 1
ggccgugauuccucuccgcggu

SEQ ID NO: 3951012 - RNA, 20 nt, Human herpesvirus 1
ggccgugcacacgacggccu

SEQ ID NO: 3951013 - RNA, 14 nt, Human herpesvirus 1
ggccguggacggca

SEQ ID NO: 3951014 - RNA, 13 nt, Human herpesvirus 1
ggccgugugacac

SEQ ID NO: 3951015 - RNA, 18 nt, Human herpesvirus 1
ggccuaauuguccgcgca

SEQ ID NO: 3951016 - RNA, 14 nt, Human herpesvirus 1
ggccuccacccccu

SEQ ID NO: 3951017 - RNA, 23 nt, Human herpesvirus 1
ggccucgaugacgucccggcucu

SEQ ID NO: 3951018 - RNA, 15 nt, Human herpesvirus 1
ggccucuccggccug

SEQ ID NO: 3951019 - RNA, 20 nt, Human herpesvirus 1
ggccugccugcggcucgucg

SEQ ID NO: 3951020 - RNA, 15 nt, Human herpesvirus 1
ggccugggccgcgag

SEQ ID NO: 3951021 - RNA, 22 nt, Human herpesvirus 1
ggccuuguuccgcuucccggua

SEQ ID NO: 3951022 - RNA, 16 nt, Human herpesvirus 1
ggccuuuuacgagguc

SEQ ID NO: 3951023 - RNA, 15 nt, Human herpesvirus 1
ggcgaccgccagccg

SEQ ID NO: 3951024 - RNA, 21 nt, Human herpesvirus 1
ggcgaccucggcgccucugga

SEQ ID NO: 3951025 - RNA, 19 nt, Human herpesvirus 1
ggcgacgccgugggcaaug

SEQ ID NO: 3951026 - RNA, 14 nt, Human herpesvirus 1
ggcgacgugauggc

SEQ ID NO: 3951027 - RNA, 16 nt, Human herpesvirus 1
ggcgagcccagacccc

SEQ ID NO: 3951028 - RNA, 17 nt, Human herpesvirus 1
ggcgaggccggcgccga

SEQ ID NO: 3951029 - RNA, 17 nt, Human herpesvirus 1
ggcgcaauugcggccac

SEQ ID NO: 3951030 - RNA, 22 nt, Human herpesvirus 1
ggcgcauaaagggccggugguc

SEQ ID NO: 3951031 - RNA, 17 nt, Human herpesvirus 1
ggcgccacaccacgcca

SEQ ID NO: 3951032 - RNA, 18 nt, Human herpesvirus 1
ggcgccacaccacgccac

SEQ ID NO: 3951033 - RNA, 20 nt, Human herpesvirus 1
ggcgccagcguaaccuccgg

SEQ ID NO: 3951034 - RNA, 12 nt, Human herpesvirus 1
ggcgccccggcc

SEQ ID NO: 3951035 - RNA, 18 nt, Human herpesvirus 1
ggcgccgcccgccccugg

SEQ ID NO: 3951036 - RNA, 13 nt, Human herpesvirus 1
ggcgcggggcccc

SEQ ID NO: 3951037 - RNA, 23 nt, Human herpesvirus 1
ggcgcguguacugcggucugucu

SEQ ID NO: 3951038 - RNA, 21 nt, Human herpesvirus 1
ggcgcuacgaccggugcguug

SEQ ID NO: 3951039 - RNA, 16 nt, Human herpesvirus 1
ggcgcuugcgcaccug

SEQ ID NO: 3951040 - RNA, 19 nt, Human herpesvirus 1
ggcggacccccggaggcgc

SEQ ID NO: 3951041 - RNA, 12 nt, Human herpesvirus 1
ggcggaccuggc

SEQ ID NO: 3951042 - RNA, 20 nt, Human herpesvirus 1
ggcggauuuggggcgcuccu

SEQ ID NO: 3951043 - RNA, 21 nt, Human herpesvirus 1
ggcggauuuggggcgcuccug

SEQ ID NO: 3951044 - RNA, 14 nt, Human herpesvirus 1
ggcggcagcccgga

SEQ ID NO: 3951045 - RNA, 16 nt, Human herpesvirus 1
ggcggccccggccgcc

SEQ ID NO: 3951046 - RNA, 17 nt, Human herpesvirus 1
ggcggcgcuggcggcca

SEQ ID NO: 3951047 - RNA, 14 nt, Human herpesvirus 1
ggcggcgugugggg

SEQ ID NO: 3951048 - RNA, 23 nt, Human herpesvirus 1
ggcgggacucugggcguggugcg

SEQ ID NO: 3951049 - RNA, 20 nt, Human herpesvirus 1
ggcggggccuuggcggccgc

SEQ ID NO: 3951050 - RNA, 17 nt, Human herpesvirus 1
ggcgggggauggggaga

SEQ ID NO: 3951051 - RNA, 10 nt, Human herpesvirus 1
ggcgguggua

SEQ ID NO: 3951052 - RNA, 20 nt, Human herpesvirus 1
ggcgucuccucugggggcga

SEQ ID NO: 3951053 - RNA, 15 nt, Human herpesvirus 1
ggcgucugggccacc

SEQ ID NO: 3951054 - RNA, 19 nt, Human herpesvirus 1
ggcuuccgacgccccccgu

SEQ ID NO: 3951055 - RNA, 16 nt, Human herpesvirus 1
gggaccugaaccccag

SEQ ID NO: 3951056 - RNA, 15 nt, Human herpesvirus 1
gggagaaaccccagc

SEQ ID NO: 3951057 - RNA, 18 nt, Human herpesvirus 1
gggagaacaacgagcugc

SEQ ID NO: 3951058 - RNA, 14 nt, Human herpesvirus 1
gggagccccggguu

SEQ ID NO: 3951059 - RNA, 16 nt, Human herpesvirus 1
gggagcgcucuugucu

SEQ ID NO: 3951060 - RNA, 13 nt, Human herpesvirus 1
gggaugcugcccc

SEQ ID NO: 3951061 - RNA, 21 nt, Human herpesvirus 1
gggccccgggacaccccccau

SEQ ID NO: 3951062 - RNA, 13 nt, Human herpesvirus 1
gggcccgccugga

SEQ ID NO: 3951063 - RNA, 15 nt, Human herpesvirus 1
gggccgggccccaua

SEQ ID NO: 3951064 - RNA, 22 nt, Human herpesvirus 1
gggccgugcgauggacaccgca

SEQ ID NO: 3951065 - RNA, 19 nt, Human herpesvirus 1
gggccguuucccaccccca

SEQ ID NO: 3951066 - RNA, 16 nt, Human herpesvirus 1
gggccuugccgugguc

SEQ ID NO: 3951067 - RNA, 20 nt, Human herpesvirus 1
gggcgccucggucaccccaa

SEQ ID NO: 3951068 - RNA, 16 nt, Human herpesvirus 1
gggcgcggcgcgacaa

SEQ ID NO: 3951069 - RNA, 20 nt, Human herpesvirus 1
gggcgcuuggcaugcgcggg

SEQ ID NO: 3951070 - RNA, 17 nt, Human herpesvirus 1
gggcgcuuggucgggag

SEQ ID NO: 3951071 - RNA, 21 nt, Human herpesvirus 1
gggcgggggauggggagagcc

SEQ ID NO: 3951072 - RNA, 15 nt, Human herpesvirus 1
gugguauuccugccg

SEQ ID NO: 3951073 - RNA, 16 nt, Human herpesvirus 1
gugguccgccuagccg

SEQ ID NO: 3951074 - RNA, 16 nt, Human herpesvirus 1
guggucucuggccgcg

SEQ ID NO: 3951075 - RNA, 19 nt, Human herpesvirus 1
guguaugucuggugugugg

SEQ ID NO: 3951076 - RNA, 21 nt, Human herpesvirus 1
guuaacugucuggagacccua

SEQ ID NO: 3951077 - RNA, 15 nt, Human herpesvirus 1
guuacucggcccccg

SEQ ID NO: 3951078 - RNA, 13 nt, Human herpesvirus 1
guuauaggccacg

SEQ ID NO: 3951079 - RNA, 13 nt, Human herpesvirus 1
guucaaccccagg

SEQ ID NO: 3951080 - RNA, 18 nt, Human herpesvirus 1
guuccgggaugccgugcc

SEQ ID NO: 3951081 - RNA, 14 nt, Human herpesvirus 1
guuccguuuggaaa

SEQ ID NO: 3951082 - RNA, 13 nt, Human herpesvirus 1
guucggggccgcc

SEQ ID NO: 3951083 - RNA, 14 nt, Human herpesvirus 1
guucugcugcaccg

SEQ ID NO: 3951084 - RNA, 14 nt, Human herpesvirus 1
guugcagggccugg

SEQ ID NO: 3951085 - RNA, 14 nt, Human herpesvirus 1
guuggcccccgccu

SEQ ID NO: 3951086 - RNA, 14 nt, Human herpesvirus 1
guuucagauagagc

SEQ ID NO: 3951087 - RNA, 14 nt, Human herpesvirus 1
guuugcccauaaua

SEQ ID NO: 3951088 - RNA, 21 nt, Human herpesvirus 1
guuugggagagccggccccgg

SEQ ID NO: 3951089 - RNA, 16 nt, Human herpesvirus 1
uaaagccgccacccuc

SEQ ID NO: 3951090 - RNA, 14 nt, Human herpesvirus 1
uaaauuauugcuac

SEQ ID NO: 3951091 - RNA, 17 nt, Human herpesvirus 1
uaacaaccacccgcacc

SEQ ID NO: 3951092 - RNA, 23 nt, Human herpesvirus 1
uaaccgcaccccccucguccccc

SEQ ID NO: 3951093 - RNA, 17 nt, Human herpesvirus 1
uaaccgcgagcgccgcu

SEQ ID NO: 3951094 - RNA, 22 nt, Human herpesvirus 1
uaagcgucccugggcccuggcc

SEQ ID NO: 3951095 - RNA, 16 nt, Human herpesvirus 1
uacaaccccucgcggg

SEQ ID NO: 3951096 - RNA, 22 nt, Human herpesvirus 1
uacacucgcgcguguacaacau

SEQ ID NO: 3951097 - RNA, 12 nt, Human herpesvirus 1
uacauggcccug

SEQ ID NO: 3951098 - RNA, 18 nt, Human herpesvirus 1
uaccccaguccccgggcc

SEQ ID NO: 3951099 - RNA, 18 nt, Human herpesvirus 1
uaccggaaggaacccgcg

SEQ ID NO: 3951100 - RNA, 16 nt, Human herpesvirus 1
uacgcggggcuguacu

SEQ ID NO: 3951101 - RNA, 18 nt, Human herpesvirus 1
uacgcuaaucccccggcu

SEQ ID NO: 3951102 - RNA, 16 nt, Human herpesvirus 1
uacgcuuggagccagc

SEQ ID NO: 3951103 - RNA, 12 nt, Human herpesvirus 1
uacggcggcucc

SEQ ID NO: 3951104 - RNA, 17 nt, Human herpesvirus 1
uacgggcuguuccgcca

SEQ ID NO: 3951105 - RNA, 14 nt, Human herpesvirus 1
uacucgacccacug

SEQ ID NO: 3951106 - RNA, 12 nt, Human herpesvirus 1
uagagacagccg

SEQ ID NO: 3951107 - RNA, 14 nt, Human herpesvirus 1
uagccuccccgggc

SEQ ID NO: 3951108 - RNA, 15 nt, Human herpesvirus 1
uagccuccccgggcc

SEQ ID NO: 3951109 - RNA, 12 nt, Human herpesvirus 1
uagcgggggacg

SEQ ID NO: 3951110 - RNA, 20 nt, Human herpesvirus 1
uaggagacaccuuggcccug

SEQ ID NO: 3951111 - RNA, 18 nt, Human herpesvirus 1
uagucccaucccccgauc

SEQ ID NO: 3951112 - RNA, 21 nt, Human herpesvirus 1
uauagccuaugccacgccagg

SEQ ID NO: 3951113 - RNA, 23 nt, Human herpesvirus 1
uaucuccugggggcacccacgcc

SEQ ID NO: 3951114 - RNA, 13 nt, Human herpesvirus 1
ucaacauaccccg

SEQ ID NO: 3951115 - RNA, 19 nt, Human herpesvirus 1
ucaacgauauguugggccg

SEQ ID NO: 3951116 - RNA, 20 nt, Human herpesvirus 1
ucaaggacagcggccugcug

SEQ ID NO: 3951117 - RNA, 17 nt, Human herpesvirus 1
ucaaggugggccagccg

SEQ ID NO: 3951118 - RNA, 12 nt, Human herpesvirus 1
ucaaucuggccc

SEQ ID NO: 3951119 - RNA, 14 nt, Human herpesvirus 1
ucacagccccgcau

SEQ ID NO: 3951120 - RNA, 20 nt, Human herpesvirus 1
ucaccaccaaggcccgggcc

SEQ ID NO: 3951121 - RNA, 20 nt, Human herpesvirus 1
ucaccgggacgaccacgaga

SEQ ID NO: 3951122 - RNA, 17 nt, Human herpesvirus 1
ucaccgguuuccgcgac

SEQ ID NO: 3951123 - RNA, 15 nt, Human herpesvirus 1
ucacgcacgccaaug

SEQ ID NO: 3951124 - RNA, 22 nt, Human herpesvirus 1
ucacgcgggaggccgcccagcu

SEQ ID NO: 3951125 - RNA, 16 nt, Human herpesvirus 1
ucacggcuaccuggcc

SEQ ID NO: 3951126 - RNA, 21 nt, Human herpesvirus 1
ucacggcuaccuggccccagu

SEQ ID NO: 3951127 - RNA, 15 nt, Human herpesvirus 1
ucagccgggacgagg

SEQ ID NO: 3951128 - RNA, 16 nt, Human herpesvirus 1
ucauagugggccucca

SEQ ID NO: 3951129 - RNA, 14 nt, Human herpesvirus 1
ucaucagccgggac

SEQ ID NO: 3951130 - RNA, 14 nt, Human herpesvirus 1
ucauccacaccuua

SEQ ID NO: 3951131 - RNA, 12 nt, Human herpesvirus 1
ucaucccacccc

SEQ ID NO: 3951132 - RNA, 20 nt, Human herpesvirus 1
ucaucgaccucaacaucacc

SEQ ID NO: 3951133 - RNA, 20 nt, Human herpesvirus 1
ucaugcgcaagcgccgcaac

SEQ ID NO: 3951134 - RNA, 21 nt, Human herpesvirus 1
uccaccacccaaccccaacuc

SEQ ID NO: 3951135 - RNA, 13 nt, Human herpesvirus 1
uccacggccaagu

SEQ ID NO: 3951136 - RNA, 17 nt, Human herpesvirus 1
uccagagggcaacgcgg

SEQ ID NO: 3951137 - RNA, 13 nt, Human herpesvirus 1
uccagcacacccc

SEQ ID NO: 3951138 - RNA, 18 nt, Human herpesvirus 1
uccagccuccccuccagg

SEQ ID NO: 3951139 - RNA, 19 nt, Human herpesvirus 1
uccagccuccccuccaggu

SEQ ID NO: 3951140 - RNA, 22 nt, Human herpesvirus 1
uccaggcugucgacgcccccuc

SEQ ID NO: 3951141 - RNA, 20 nt, Human herpesvirus 1
uccagggagaaaccccagca

SEQ ID NO: 3951142 - RNA, 19 nt, Human herpesvirus 1
uccagggggaugcuagccu

SEQ ID NO: 3951143 - RNA, 16 nt, Human herpesvirus 1
ucccagcggcacgacc

SEQ ID NO: 3951144 - RNA, 10 nt, Human herpesvirus 1
ucccaggacu

SEQ ID NO: 3951145 - RNA, 17 nt, Human herpesvirus 1
ucccaggaucacaccgg

SEQ ID NO: 3951146 - RNA, 11 nt, Human herpesvirus 1
ucccagggagc

SEQ ID NO: 3951147 - RNA, 17 nt, Human herpesvirus 1
uccccaaaauaaaagac

SEQ ID NO: 3951148 - RNA, 13 nt, Human herpesvirus 1
ucccccccaucac

SEQ ID NO: 3951149 - RNA, 15 nt, Human herpesvirus 1
ucccccgaccucgcc

SEQ ID NO: 3951150 - RNA, 18 nt, Human herpesvirus 1
ucccccgucuggguuuuc

SEQ ID NO: 3951151 - RNA, 21 nt, Human herpesvirus 1
ucccccuccgcaucccaggau

SEQ ID NO: 3951152 - RNA, 20 nt, Human herpesvirus 1
uccccgaggaccccgugggc

SEQ ID NO: 3951153 - RNA, 13 nt, Human herpesvirus 1
uccccuucccucc

SEQ ID NO: 3951154 - RNA, 21 nt, Human herpesvirus 1
uccccuucccucccccuccgc

SEQ ID NO: 3951155 - RNA, 14 nt, Human herpesvirus 1
ucccgaaccaggcc

SEQ ID NO: 3951156 - RNA, 22 nt, Human herpesvirus 1
ucccgacaccaccagcuggcau

SEQ ID NO: 3951157 - RNA, 23 nt, Human herpesvirus 1
ucccgccaacacccccuuccccc

SEQ ID NO: 3951158 - RNA, 20 nt, Human herpesvirus 1
ucccgcccaccggaagccca

SEQ ID NO: 3951159 - RNA, 24 nt, Human herpesvirus 1
ucccgcugcgcauccccccgucag

SEQ ID NO: 3951160 - RNA, 17 nt, Human herpesvirus 1
ucccucccccuccgcau

SEQ ID NO: 3951161 - RNA, 16 nt, Human herpesvirus 1
ucccugucgccuccca

SEQ ID NO: 3951162 - RNA, 17 nt, Human herpesvirus 1
ucccugucgccucccaa

SEQ ID NO: 3951163 - RNA, 20 nt, Human herpesvirus 1
ucccuguuugucgccuggcu

SEQ ID NO: 3951164 - RNA, 16 nt, Human herpesvirus 1
uccgagggccgggccc

SEQ ID NO: 3951165 - RNA, 21 nt, Human herpesvirus 1
uccgcaagccccuagccccgc

SEQ ID NO: 3951166 - RNA, 23 nt, Human herpesvirus 1
uccgccaacgcacuguggcucuc

SEQ ID NO: 3951167 - RNA, 18 nt, Human herpesvirus 1
uccgcccgugcugccguc

SEQ ID NO: 3951168 - RNA, 21 nt, Human herpesvirus 1
uccgccgagucuucggggccc

SEQ ID NO: 3951169 - RNA, 21 nt, Human herpesvirus 1
uccgccuggccugcgaggugc

SEQ ID NO: 3951170 - RNA, 19 nt, Human herpesvirus 1
uccgcgacccaccgggccc

SEQ ID NO: 3951171 - RNA, 21 nt, Human herpesvirus 1
uccgcggggccucccccggac

SEQ ID NO: 3951172 - RNA, 23 nt, Human herpesvirus 1
uccgcuuccaucgccccuggcgc

SEQ ID NO: 3951173 - RNA, 19 nt, Human herpesvirus 1
uccggagaucuauaaggcc

SEQ ID NO: 3951174 - RNA, 19 nt, Human herpesvirus 1
uccggcacggacccaaaau

SEQ ID NO: 3951175 - RNA, 19 nt, Human herpesvirus 1
uccggccucgaugacgucc

SEQ ID NO: 3951176 - RNA, 18 nt, Human herpesvirus 1
uccggcgcguguaccaca

SEQ ID NO: 3951177 - RNA, 17 nt, Human herpesvirus 1
uccggcgggagccaccc

SEQ ID NO: 3951178 - RNA, 16 nt, Human herpesvirus 1
uccgggagggcgucgc

SEQ ID NO: 3951179 - RNA, 22 nt, Human herpesvirus 1
uccgguccuggaccagcugacc

SEQ ID NO: 3951180 - RNA, 14 nt, Human herpesvirus 1
uccguggccccggc

SEQ ID NO: 3951181 - RNA, 16 nt, Human herpesvirus 1
uccucgcaccagcccu

SEQ ID NO: 3951182 - RNA, 14 nt, Human herpesvirus 1
uccucguggccguu

SEQ ID NO: 3951183 - RNA, 15 nt, Human herpesvirus 1
uccuggaccagcuga

SEQ ID NO: 3951184 - RNA, 18 nt, Human herpesvirus 1
uccugggccaccugacgc

SEQ ID NO: 3951185 - RNA, 12 nt, Human herpesvirus 1
uccugucccugc

SEQ ID NO: 3951186 - RNA, 18 nt, Human herpesvirus 1
ucgaaacuuaacacacca

SEQ ID NO: 3951187 - RNA, 19 nt, Human herpesvirus 1
uggaucuuagccuccccgg

SEQ ID NO: 3951188 - RNA, 16 nt, Human herpesvirus 1
uggcccccggacccgg

SEQ ID NO: 3951189 - RNA, 20 nt, Human herpesvirus 1
uggcccccggacccgggccg

SEQ ID NO: 3951190 - RNA, 15 nt, Human herpesvirus 1
uggcccuggcucccg

SEQ ID NO: 3951191 - RNA, 20 nt, Human herpesvirus 1
uggccgacaacugccugacc

SEQ ID NO: 3951192 - RNA, 21 nt, Human herpesvirus 1
uggccgcucccaaccgcgacc

SEQ ID NO: 3951193 - RNA, 15 nt, Human herpesvirus 1
uggccggggagggca

SEQ ID NO: 3951194 - RNA, 17 nt, Human herpesvirus 1
accacgccccuuucccc

SEQ ID NO: 3951195 - RNA, 20 nt, Human herpesvirus 1
accacgcccgaccacacacc

SEQ ID NO: 3951196 - RNA, 21 nt, Human herpesvirus 1
accacguacggcucgcggguc

SEQ ID NO: 3951197 - RNA, 21 nt, Human herpesvirus 1
accacguuucggcguguguuu

SEQ ID NO: 3951198 - RNA, 19 nt, Human herpesvirus 1
accacugcacucccugccg

SEQ ID NO: 3951199 - RNA, 13 nt, Human herpesvirus 1
accagguccccca

SEQ ID NO: 3951200 - RNA, 20 nt, Human herpesvirus 1
accaggucccccacaccacc

SEQ ID NO: 3951201 - RNA, 20 nt, Human herpesvirus 1
accauggccccccgcgucca

SEQ ID NO: 3951202 - RNA, 12 nt, Human herpesvirus 1
acccaaccccaa

SEQ ID NO: 3951203 - RNA, 15 nt, Human herpesvirus 1
acccaagccgggacu

SEQ ID NO: 3951204 - RNA, 16 nt, Human herpesvirus 1
acccacccaccaagac

SEQ ID NO: 3951205 - RNA, 17 nt, Human herpesvirus 1
acccagaccccgggcgc

SEQ ID NO: 3951206 - RNA, 18 nt, Human herpesvirus 1
acccagaccggcaccacc

SEQ ID NO: 3951207 - RNA, 19 nt, Human herpesvirus 1
acccagccuuuaacuacau

SEQ ID NO: 3951208 - RNA, 19 nt, Human herpesvirus 1
acccaguggcuccgggcca

SEQ ID NO: 3951209 - RNA, 14 nt, Human herpesvirus 1
accccaacgccucc

SEQ ID NO: 3951210 - RNA, 16 nt, Human herpesvirus 1
accccaacuccagacc

SEQ ID NO: 3951211 - RNA, 15 nt, Human herpesvirus 1
accccacgacaccca

SEQ ID NO: 3951212 - RNA, 14 nt, Human herpesvirus 1
accccagggaccuc

SEQ ID NO: 3951213 - RNA, 20 nt, Human herpesvirus 1
acccccaucuaaugccacgc

SEQ ID NO: 3951214 - RNA, 23 nt, Human herpesvirus 1
accccccaccauuaucgggccgc

SEQ ID NO: 3951215 - RNA, 19 nt, Human herpesvirus 1
acccccgaguucccccggg

SEQ ID NO: 3951216 - RNA, 11 nt, Human herpesvirus 1
acccccggccc

SEQ ID NO: 3951217 - RNA, 18 nt, Human herpesvirus 1
acccccgggcuacacggc

SEQ ID NO: 3951218 - RNA, 21 nt, Human herpesvirus 1
acccccucgaccaccaccucc

SEQ ID NO: 3951219 - RNA, 17 nt, Human herpesvirus 1
accccgaagccccggcc

SEQ ID NO: 3951220 - RNA, 23 nt, Human herpesvirus 1
accccgagaaccuagggaaccca

SEQ ID NO: 3951221 - RNA, 18 nt, Human herpesvirus 1
accccgcaauuugcaccc

SEQ ID NO: 3951222 - RNA, 21 nt, Human herpesvirus 1
accccgcaauuugcacccagc

SEQ ID NO: 3951223 - RNA, 19 nt, Human herpesvirus 1
accccgcuccugugcaccc

SEQ ID NO: 3951224 - RNA, 21 nt, Human herpesvirus 1
accccggagggcugccagacc

SEQ ID NO: 3951225 - RNA, 20 nt, Human herpesvirus 1
accccggggcucagccagac

SEQ ID NO: 3951226 - RNA, 19 nt, Human herpesvirus 1
accccggucucccagggag

SEQ ID NO: 3951227 - RNA, 22 nt, Human herpesvirus 1
accccgugggcgacugcgaccc

SEQ ID NO: 3951228 - RNA, 22 nt, Human herpesvirus 1
accccucguggccccgacagcc

SEQ ID NO: 3951229 - RNA, 21 nt, Human herpesvirus 1
accccuuuggggcgcuggccg

SEQ ID NO: 3951230 - RNA, 20 nt, Human herpesvirus 1
acccgacaacagcccccggg

SEQ ID NO: 3951231 - RNA, 21 nt, Human herpesvirus 1
acccgcaacgcgcuggggcug

SEQ ID NO: 3951232 - RNA, 13 nt, Human herpesvirus 1
acccgccacgaga

SEQ ID NO: 3951233 - RNA, 15 nt, Human herpesvirus 1
acccgccccuccauc

SEQ ID NO: 3951234 - RNA, 20 nt, Human herpesvirus 1
acccgggccguuucccaccc

SEQ ID NO: 3951235 - RNA, 16 nt, Human herpesvirus 1
acccguguuugcccau

SEQ ID NO: 3951236 - RNA, 19 nt, Human herpesvirus 1
acccuaugguacacacggg

SEQ ID NO: 3951237 - RNA, 17 nt, Human herpesvirus 1
acccucucuucucuccc

SEQ ID NO: 3951238 - RNA, 14 nt, Human herpesvirus 1
acccugcugccccc

SEQ ID NO: 3951239 - RNA, 23 nt, Human herpesvirus 1
accgaagaggugcugccgccgcg

SEQ ID NO: 3951240 - RNA, 20 nt, Human herpesvirus 1
accgaccgcagucccugagu

SEQ ID NO: 3951241 - RNA, 22 nt, Human herpesvirus 1
accgcagacgaaaagccccggg

SEQ ID NO: 3951242 - RNA, 13 nt, Human herpesvirus 1
accgcagucccug

SEQ ID NO: 3951243 - RNA, 16 nt, Human herpesvirus 1
accgcagucccugagu

SEQ ID NO: 3951244 - RNA, 15 nt, Human herpesvirus 1
accgcaucuucgccc

SEQ ID NO: 3951245 - RNA, 19 nt, Human herpesvirus 1
accgccaacaauccccagg

SEQ ID NO: 3951246 - RNA, 15 nt, Human herpesvirus 1
accgcgcccucgcca

SEQ ID NO: 3951247 - RNA, 22 nt, Human herpesvirus 1
accgcguguuccccgggagccc

SEQ ID NO: 3951248 - RNA, 15 nt, Human herpesvirus 1
accggaaggaacccg

SEQ ID NO: 3951249 - RNA, 12 nt, Human herpesvirus 1
accgguccccgg

SEQ ID NO: 3951250 - RNA, 15 nt, Human herpesvirus 1
accguggccggccug

SEQ ID NO: 3951251 - RNA, 16 nt, Human herpesvirus 1
accucaacaucaccau

SEQ ID NO: 3951252 - RNA, 16 nt, Human herpesvirus 1
accuccacccccucga

SEQ ID NO: 3951253 - RNA, 16 nt, Human herpesvirus 1
accucccagugucccg

SEQ ID NO: 3951254 - RNA, 19 nt, Human herpesvirus 1
accuccuccgacgcccagc

SEQ ID NO: 3951255 - RNA, 18 nt, Human herpesvirus 1
accucggcgggcacgcca

SEQ ID NO: 3951256 - RNA, 12 nt, Human herpesvirus 1
accugcaccacc

SEQ ID NO: 3951257 - RNA, 20 nt, Human herpesvirus 1
accugcgcggguugcugcgc

SEQ ID NO: 3951258 - RNA, 21 nt, Human herpesvirus 1
accugcucacgacccccaagu

SEQ ID NO: 3951259 - RNA, 18 nt, Human herpesvirus 1
accugggggacugcaucg

SEQ ID NO: 3951260 - RNA, 17 nt, Human herpesvirus 1
acgacccgaagcugcuc

SEQ ID NO: 3951261 - RNA, 18 nt, Human herpesvirus 1
acgacgacgacgcccgcc

SEQ ID NO: 3951262 - RNA, 14 nt, Human herpesvirus 1
acgacgcccgccgc

SEQ ID NO: 3951263 - RNA, 13 nt, Human herpesvirus 1
acgacggccucgu

SEQ ID NO: 3951264 - RNA, 19 nt, Human herpesvirus 1
acgacggcggcgaggccgg

SEQ ID NO: 3951265 - RNA, 17 nt, Human herpesvirus 1
acgagcccccgccccuc

SEQ ID NO: 3951266 - RNA, 13 nt, Human herpesvirus 1
acgaggacgacga

SEQ ID NO: 3951267 - RNA, 15 nt, Human herpesvirus 1
acgaguccauccugc

SEQ ID NO: 3951268 - RNA, 17 nt, Human herpesvirus 1
acgcaaaaccaggccga

SEQ ID NO: 3951269 - RNA, 22 nt, Human herpesvirus 1
acgcacaugggggaggugcccc

SEQ ID NO: 3951270 - RNA, 13 nt, Human herpesvirus 1
acgcaccccccgc

SEQ ID NO: 3951271 - RNA, 15 nt, Human herpesvirus 1
acgcccagcagcucc

SEQ ID NO: 3951272 - RNA, 12 nt, Human herpesvirus 1
acgcccccgccg

SEQ ID NO: 3951273 - RNA, 21 nt, Human herpesvirus 1
acgcccccgccgcccggggcc

SEQ ID NO: 3951274 - RNA, 14 nt, Human herpesvirus 1
acgccccuuucccc

SEQ ID NO: 3951275 - RNA, 15 nt, Human herpesvirus 1
acgccgccucggccc

SEQ ID NO: 3951276 - RNA, 19 nt, Human herpesvirus 1
acgccguggcgccccggcc

SEQ ID NO: 3951277 - RNA, 17 nt, Human herpesvirus 1
acgccucccccugagcc

SEQ ID NO: 3951278 - RNA, 23 nt, Human herpesvirus 1
acgccuccgcccgugcugccguc

SEQ ID NO: 3951279 - RNA, 14 nt, Human herpesvirus 1
acgcgaaggacgcc

SEQ ID NO: 3951280 - RNA, 19 nt, Human herpesvirus 1
acgcgccaaacgccagccu

SEQ ID NO: 3951281 - RNA, 13 nt, Human herpesvirus 1
acgcgcggcuggu

SEQ ID NO: 3951282 - RNA, 15 nt, Human herpesvirus 1
acgcgggaggccgcc

SEQ ID NO: 3951283 - RNA, 17 nt, Human herpesvirus 1
acgcuaaucccccggcu

SEQ ID NO: 3951284 - RNA, 19 nt, Human herpesvirus 1
acggacccaaaauaauaaa

SEQ ID NO: 3951285 - RNA, 11 nt, Human herpesvirus 1
acggcaaggag

SEQ ID NO: 3951286 - RNA, 14 nt, Human herpesvirus 1
acggcacgcccccu

SEQ ID NO: 3951287 - RNA, 19 nt, Human herpesvirus 1
acggcauucgggccugccu

SEQ ID NO: 3951288 - RNA, 24 nt, Human herpesvirus 1
acggcauucgggccugccugcggc

SEQ ID NO: 3951289 - RNA, 16 nt, Human herpesvirus 1
acggccacuggccggg

SEQ ID NO: 3951290 - RNA, 18 nt, Human herpesvirus 1
acggccacuggccgggag

SEQ ID NO: 3951291 - RNA, 16 nt, Human herpesvirus 1
acggccguugucuccc

SEQ ID NO: 3951292 - RNA, 17 nt, Human herpesvirus 1
acggcgaaugcagcgcc

SEQ ID NO: 3951293 - RNA, 22 nt, Human herpesvirus 1
acgggcggccacccccccggag

SEQ ID NO: 3951294 - RNA, 20 nt, Human herpesvirus 1
acgggcuguuccgccaggcg

SEQ ID NO: 3951295 - RNA, 19 nt, Human herpesvirus 1
acggggaccgggacugggu

SEQ ID NO: 3951296 - RNA, 22 nt, Human herpesvirus 1
acggggauggucggggcguccc

SEQ ID NO: 3951297 - RNA, 23 nt, Human herpesvirus 1
acgggggcccugccacuccggcg

SEQ ID NO: 3951298 - RNA, 16 nt, Human herpesvirus 1
acggguguggggaccc

SEQ ID NO: 3951299 - RNA, 20 nt, Human herpesvirus 1
acgguacauggcccuggugu

SEQ ID NO: 3951300 - RNA, 15 nt, Human herpesvirus 1
acggucacccugcug

SEQ ID NO: 3951301 - RNA, 16 nt, Human herpesvirus 1
acgucaugcggcugca

SEQ ID NO: 3951302 - RNA, 12 nt, Human herpesvirus 1
acguccuuuggg

SEQ ID NO: 3951303 - RNA, 16 nt, Human herpesvirus 1
acgugcacagccuggc

SEQ ID NO: 3951304 - RNA, 16 nt, Human herpesvirus 1
acgugcgauucagcgc

SEQ ID NO: 3951305 - RNA, 21 nt, Human herpesvirus 1
acgugcgcaacaaccuggaga

SEQ ID NO: 3951306 - RNA, 17 nt, Human herpesvirus 1
acgugcugcugcggccc

SEQ ID NO: 3951307 - RNA, 17 nt, Human herpesvirus 1
acuaagcgucccugggc

SEQ ID NO: 3951308 - RNA, 22 nt, Human herpesvirus 1
cggcacgccuggggucgcggcc

SEQ ID NO: 3951309 - RNA, 16 nt, Human herpesvirus 1
cggcacuuucugacgc

SEQ ID NO: 3951310 - RNA, 13 nt, Human herpesvirus 1
ggacgggguuccc

SEQ ID NO: 3951311 - RNA, 20 nt, Human herpesvirus 1
ggacugguuggaagcgcggg

SEQ ID NO: 3951312 - RNA, 15 nt, Human herpesvirus 1
ggagacagcgccugc

SEQ ID NO: 3951313 - RNA, 20 nt, Human herpesvirus 1
ggagagacgauggcaggagc

SEQ ID NO: 3951314 - RNA, 14 nt, Human herpesvirus 1
ggagagcccacaug

SEQ ID NO: 3951315 - RNA, 17 nt, Human herpesvirus 1
ggagagccggccccggc

SEQ ID NO: 3951316 - RNA, 13 nt, Human herpesvirus 1
ggagcccgcccuu

SEQ ID NO: 3951317 - RNA, 15 nt, Human herpesvirus 1
ggagccugagcuggc

SEQ ID NO: 3951318 - RNA, 15 nt, Human herpesvirus 1
ggagcucccgggagc

SEQ ID NO: 3951319 - RNA, 17 nt, Human herpesvirus 1
ggaggaaacccccgacc

SEQ ID NO: 3951320 - RNA, 18 nt, Human herpesvirus 1
ggaggccgcaucgaacgc

SEQ ID NO: 3951321 - RNA, 16 nt, Human herpesvirus 1
ggaggcgccgcgcgga

SEQ ID NO: 3951322 - RNA, 22 nt, Human herpesvirus 1
ggagggcgccucggucacccca

SEQ ID NO: 3951323 - RNA, 15 nt, Human herpesvirus 1
ggagggcggccagcc

SEQ ID NO: 3951324 - RNA, 12 nt, Human herpesvirus 1
ggaggggcuccu

SEQ ID NO: 3951325 - RNA, 23 nt, Human herpesvirus 1
ggaggugcuucuguuuggcgccc

SEQ ID NO: 3951326 - RNA, 21 nt, Human herpesvirus 1
ggauacacaaacuuccccccc

SEQ ID NO: 3951327 - RNA, 14 nt, Human herpesvirus 1
ggauccgaccccca

SEQ ID NO: 3951328 - RNA, 18 nt, Human herpesvirus 1
ggaucugguccgccgcga

SEQ ID NO: 3951329 - RNA, 15 nt, Human herpesvirus 1
ggaugcugccccgcu

SEQ ID NO: 3951330 - RNA, 20 nt, Human herpesvirus 1
ggauggagagcgaaggcugc

SEQ ID NO: 3951331 - RNA, 15 nt, Human herpesvirus 1
ggauuuggguugggg

SEQ ID NO: 3951332 - RNA, 23 nt, Human herpesvirus 1
ggcacaccgguccccggaggcgu

SEQ ID NO: 3951333 - RNA, 13 nt, Human herpesvirus 1
ggcacggacccaa

SEQ ID NO: 3951334 - RNA, 12 nt, Human herpesvirus 1
ggcagcuggggg

SEQ ID NO: 3951335 - RNA, 18 nt, Human herpesvirus 1
ggcagugaggguggcaug

SEQ ID NO: 3951336 - RNA, 23 nt, Human herpesvirus 1
ggccagaucuacugcugggccau

SEQ ID NO: 3951337 - RNA, 22 nt, Human herpesvirus 1
ggccaucgguccccucugggcc

SEQ ID NO: 3951338 - RNA, 20 nt, Human herpesvirus 1
ggcccagcauguccgccggg

SEQ ID NO: 3951339 - RNA, 11 nt, Human herpesvirus 1
ggccccacggu

SEQ ID NO: 3951340 - RNA, 13 nt, Human herpesvirus 1
ggccccacgguca

SEQ ID NO: 3951341 - RNA, 21 nt, Human herpesvirus 1
ggccccccgcguccaaaccca

SEQ ID NO: 3951342 - RNA, 14 nt, Human herpesvirus 1
ggcccccgcccccg

SEQ ID NO: 3951343 - RNA, 18 nt, Human herpesvirus 1
ggccccuggcgccgccug

SEQ ID NO: 3951344 - RNA, 20 nt, Human herpesvirus 1
ggcccgcgucgggauccaca

SEQ ID NO: 3951345 - RNA, 14 nt, Human herpesvirus 1
ggcccggaggaggc

SEQ ID NO: 3951346 - RNA, 16 nt, Human herpesvirus 1
ggcccggccaaccagc

SEQ ID NO: 3951347 - RNA, 13 nt, Human herpesvirus 1
ggcccggccaggc

SEQ ID NO: 3951348 - RNA, 17 nt, Human herpesvirus 1
ggcccggcuagacccac

SEQ ID NO: 3951349 - RNA, 20 nt, Human herpesvirus 1
ggcccgggccacggcgccga

SEQ ID NO: 3951350 - RNA, 15 nt, Human herpesvirus 1
ggcccuccaggcugu

SEQ ID NO: 3951351 - RNA, 19 nt, Human herpesvirus 1
ggcccucuuggaggacccc

SEQ ID NO: 3951352 - RNA, 16 nt, Human herpesvirus 1
ggcccugccacuccgg

SEQ ID NO: 3951353 - RNA, 16 nt, Human herpesvirus 1
ggcccugcugcugccg

SEQ ID NO: 3951354 - RNA, 14 nt, Human herpesvirus 1
ggcccuggcucccg

SEQ ID NO: 3951355 - RNA, 18 nt, Human herpesvirus 1
ggcccuguacagcucgcg

SEQ ID NO: 3951356 - RNA, 14 nt, Human herpesvirus 1
ggccgaagccacgc

SEQ ID NO: 3951357 - RNA, 13 nt, Human herpesvirus 1
ggccgacgacgac

SEQ ID NO: 3951358 - RNA, 19 nt, Human herpesvirus 1
ggccgcaggacccagcaag

SEQ ID NO: 3951359 - RNA, 21 nt, Human herpesvirus 1
ggccgccaccauccucaagca

SEQ ID NO: 3951360 - RNA, 22 nt, Human herpesvirus 1
ggccgccagcgcggcggggccc

SEQ ID NO: 3951361 - RNA, 19 nt, Human herpesvirus 1
ggccgcccacuucccggua

SEQ ID NO: 3951362 - RNA, 17 nt, Human herpesvirus 1
ggccgcgcggcaacaca

SEQ ID NO: 3951363 - RNA, 16 nt, Human herpesvirus 1
ggccggcgggugagcg

SEQ ID NO: 3951364 - RNA, 19 nt, Human herpesvirus 1
ggccggggagggcagggcc

SEQ ID NO: 3951365 - RNA, 14 nt, Human herpesvirus 1
ggccguggcggcca

SEQ ID NO: 3951366 - RNA, 18 nt, Human herpesvirus 1
ggccguuucuccgcccga

SEQ ID NO: 3951367 - RNA, 19 nt, Human herpesvirus 1
ggccuccacccccucgacc

SEQ ID NO: 3951368 - RNA, 23 nt, Human herpesvirus 1
ggccuccacccccucgaccacca

SEQ ID NO: 3951369 - RNA, 14 nt, Human herpesvirus 1
ggccucccccggac

SEQ ID NO: 3951370 - RNA, 16 nt, Human herpesvirus 1
ggccucucacacagca

SEQ ID NO: 3951371 - RNA, 13 nt, Human herpesvirus 1
ggccuggcggcgg

SEQ ID NO: 3951372 - RNA, 16 nt, Human herpesvirus 1
ggccuggucagaggcc

SEQ ID NO: 3951373 - RNA, 11 nt, Human herpesvirus 1
ggccugguggc

SEQ ID NO: 3951374 - RNA, 22 nt, Human herpesvirus 1
ggccuucuuucgaaccgugguc

SEQ ID NO: 3951375 - RNA, 18 nt, Human herpesvirus 1
ggccuuggcggccgccca

SEQ ID NO: 3951376 - RNA, 13 nt, Human herpesvirus 1
ggcgaccgccggc

SEQ ID NO: 3951377 - RNA, 17 nt, Human herpesvirus 1
ggcgaccgccggcgagg

SEQ ID NO: 3951378 - RNA, 17 nt, Human herpesvirus 1
ggcgacggcgucucccg

SEQ ID NO: 3951379 - RNA, 16 nt, Human herpesvirus 1
ggcgccaaagcugcug

SEQ ID NO: 3951380 - RNA, 15 nt, Human herpesvirus 1
ggcgccugccccgcc

SEQ ID NO: 3951381 - RNA, 17 nt, Human herpesvirus 1
ggcgccugccccgccac

SEQ ID NO: 3951382 - RNA, 20 nt, Human herpesvirus 1
ggcgccugccccgccaccca

SEQ ID NO: 3951383 - RNA, 16 nt, Human herpesvirus 1
ggcgccugugugucuu

SEQ ID NO: 3951384 - RNA, 14 nt, Human herpesvirus 1
ggcgcgcccucuuc

SEQ ID NO: 3951385 - RNA, 19 nt, Human herpesvirus 1
ggcgcgcgaaaucguggcg

SEQ ID NO: 3951386 - RNA, 14 nt, Human herpesvirus 1
ggcgcggugccuga

SEQ ID NO: 3951387 - RNA, 20 nt, Human herpesvirus 1
ggcgcguccccggcccggag

SEQ ID NO: 3951388 - RNA, 19 nt, Human herpesvirus 1
ggcgcuacuucaccuucgg

SEQ ID NO: 3951389 - RNA, 14 nt, Human herpesvirus 1
ggcgcuuaccgcca

SEQ ID NO: 3951390 - RNA, 13 nt, Human herpesvirus 1
ggcgcuuggcaug

SEQ ID NO: 3951391 - RNA, 13 nt, Human herpesvirus 1
ggcggaccuggcg

SEQ ID NO: 3951392 - RNA, 18 nt, Human herpesvirus 1
ggcggccaacgacuuccu

SEQ ID NO: 3951393 - RNA, 13 nt, Human herpesvirus 1
ggcggccccggcc

SEQ ID NO: 3951394 - RNA, 23 nt, Human herpesvirus 1
ggcggcgacgugcccccuccucg

SEQ ID NO: 3951395 - RNA, 23 nt, Human herpesvirus 1
ggcggcgugugggggugccccaa

SEQ ID NO: 3951396 - RNA, 12 nt, Human herpesvirus 1
ggcgggacucug

SEQ ID NO: 3951397 - RNA, 20 nt, Human herpesvirus 1
ggcgggccuaccggacccgu

SEQ ID NO: 3951398 - RNA, 16 nt, Human herpesvirus 1
ggcgguucgccgccac

SEQ ID NO: 3951399 - RNA, 19 nt, Human herpesvirus 1
ggcguagagcuguggcacu

SEQ ID NO: 3951400 - RNA, 18 nt, Human herpesvirus 1
ggcguccuggaugcugug

SEQ ID NO: 3951401 - RNA, 21 nt, Human herpesvirus 1
ggcgucuccucugggggcgac

SEQ ID NO: 3951402 - RNA, 18 nt, Human herpesvirus 1
ggcgucucgccggacgac

SEQ ID NO: 3951403 - RNA, 23 nt, Human herpesvirus 1
ggcguuauucccaaacagggccu

SEQ ID NO: 3951404 - RNA, 23 nt, Human herpesvirus 1
ggcucaagaucuuucggugucua

SEQ ID NO: 3951405 - RNA, 18 nt, Human herpesvirus 1
ggcucccggcccgggccc

SEQ ID NO: 3951406 - RNA, 22 nt, Human herpesvirus 1
ggcuccggggggcuuccggccu

SEQ ID NO: 3951407 - RNA, 16 nt, Human herpesvirus 1
ggcucgucuuggccac

SEQ ID NO: 3951408 - RNA, 19 nt, Human herpesvirus 1
ggcucucggggccgcagga

SEQ ID NO: 3951409 - RNA, 22 nt, Human herpesvirus 1
ggcugccaaacagcuggccgcc

SEQ ID NO: 3951410 - RNA, 22 nt, Human herpesvirus 1
ggcugccgccagguugggggcc

SEQ ID NO: 3951411 - RNA, 18 nt, Human herpesvirus 1
ggcugguccacacccagu

SEQ ID NO: 3951412 - RNA, 18 nt, Human herpesvirus 1
ggcuggucccgcuggugu

SEQ ID NO: 3951413 - RNA, 22 nt, Human herpesvirus 1
ggcugucgacgcccccucccug

SEQ ID NO: 3951414 - RNA, 17 nt, Human herpesvirus 1
ggcuguuccgccaggcg

SEQ ID NO: 3951415 - RNA, 17 nt, Human herpesvirus 1
ggcuuccgacgcccccc

SEQ ID NO: 3951416 - RNA, 21 nt, Human herpesvirus 1
ggcuuuuguugcugcgcggcg

SEQ ID NO: 3951417 - RNA, 17 nt, Human herpesvirus 1
gggaaaagugaaagaca

SEQ ID NO: 3951418 - RNA, 16 nt, Human herpesvirus 1
gggaccagguccccca

SEQ ID NO: 3951419 - RNA, 15 nt, Human herpesvirus 1
gggaccgcagccugg

SEQ ID NO: 3951420 - RNA, 13 nt, Human herpesvirus 1
gggaccuccugga

SEQ ID NO: 3951421 - RNA, 20 nt, Human herpesvirus 1
gggagccccggucuccccgg

SEQ ID NO: 3951422 - RNA, 23 nt, Human herpesvirus 1
gggaggggggggucgggcgcugg

SEQ ID NO: 3951423 - RNA, 16 nt, Human herpesvirus 1
gggauccgacccccau

SEQ ID NO: 3951424 - RNA, 22 nt, Human herpesvirus 1
gggcacgccaagcccccgcccg

SEQ ID NO: 3951425 - RNA, 18 nt, Human herpesvirus 1
caggccuggucagaggcc

SEQ ID NO: 3951426 - RNA, 16 nt, Human herpesvirus 1
caggcgaccgccggcg

SEQ ID NO: 3951427 - RNA, 15 nt, Human herpesvirus 1
cagggagccccgguc

SEQ ID NO: 3951428 - RNA, 19 nt, Human herpesvirus 1
cagggccuccgaccccaga

SEQ ID NO: 3951429 - RNA, 17 nt, Human herpesvirus 1
cagggccucgcugacca

SEQ ID NO: 3951430 - RNA, 22 nt, Human herpesvirus 1
cagggcgggccgccucgggggc

SEQ ID NO: 3951431 - RNA, 20 nt, Human herpesvirus 1
caggggccauguugggccgc

SEQ ID NO: 3951432 - RNA, 16 nt, Human herpesvirus 1
cagggggaugcuagcc

SEQ ID NO: 3951433 - RNA, 19 nt, Human herpesvirus 1
caggucccccacaccaccu

SEQ ID NO: 3951434 - RNA, 21 nt, Human herpesvirus 1
caggugacgccuucgaggguc

SEQ ID NO: 3951435 - RNA, 22 nt, Human herpesvirus 1
caguacauguucuuuaugcgcc

SEQ ID NO: 3951436 - RNA, 19 nt, Human herpesvirus 1
cagucccugaguugggaau

SEQ ID NO: 3951437 - RNA, 18 nt, Human herpesvirus 1
cagucgcccgaagacacc

SEQ ID NO: 3951438 - RNA, 15 nt, Human herpesvirus 1
caguggcuccgggcc

SEQ ID NO: 3951439 - RNA, 20 nt, Human herpesvirus 1
caguugggccgggcgaccca

SEQ ID NO: 3951440 - RNA, 21 nt, Human herpesvirus 1
cauaaccgaccgcagucccug

SEQ ID NO: 3951441 - RNA, 16 nt, Human herpesvirus 1
cauacacagccaccca

SEQ ID NO: 3951442 - RNA, 15 nt, Human herpesvirus 1
cauaccgaccacacc

SEQ ID NO: 3951443 - RNA, 22 nt, Human herpesvirus 1
cauagccgccgaagggacucug

SEQ ID NO: 3951444 - RNA, 14 nt, Human herpesvirus 1
cauccaccacccgg

SEQ ID NO: 3951445 - RNA, 15 nt, Human herpesvirus 1
cauccagcuggugcu

SEQ ID NO: 3951446 - RNA, 13 nt, Human herpesvirus 1
cauccagggagaa

SEQ ID NO: 3951447 - RNA, 18 nt, Human herpesvirus 1
cauccccgcuccccaagc

SEQ ID NO: 3951448 - RNA, 15 nt, Human herpesvirus 1
cauccgaacgcagcc

SEQ ID NO: 3951449 - RNA, 15 nt, Human herpesvirus 1
cauccgagcaccccc

SEQ ID NO: 3951450 - RNA, 21 nt, Human herpesvirus 1
cauccgggaagacgaccagcc

SEQ ID NO: 3951451 - RNA, 15 nt, Human herpesvirus 1
caucgacacgcgcgu

SEQ ID NO: 3951452 - RNA, 18 nt, Human herpesvirus 1
caucgaccacgcccuucc

SEQ ID NO: 3951453 - RNA, 12 nt, Human herpesvirus 1
caucgccccugg

SEQ ID NO: 3951454 - RNA, 15 nt, Human herpesvirus 1
caucgccucggccac

SEQ ID NO: 3951455 - RNA, 13 nt, Human herpesvirus 1
caucgcgccccuc

SEQ ID NO: 3951456 - RNA, 22 nt, Human herpesvirus 1
caucggacccccccucgcgcca

SEQ ID NO: 3951457 - RNA, 19 nt, Human herpesvirus 1
caucuuuuuugccgccucg

SEQ ID NO: 3951458 - RNA, 16 nt, Human herpesvirus 1
caugccucugcgggca

SEQ ID NO: 3951459 - RNA, 17 nt, Human herpesvirus 1
caugcgcaagcgccgca

SEQ ID NO: 3951460 - RNA, 13 nt, Human herpesvirus 1
caugcggcugcag

SEQ ID NO: 3951461 - RNA, 10 nt, Human herpesvirus 1
caugcgggcu

SEQ ID NO: 3951462 - RNA, 12 nt, Human herpesvirus 1
caugcuggagga

SEQ ID NO: 3951463 - RNA, 16 nt, Human herpesvirus 1
cauggauaacaaccac

SEQ ID NO: 3951464 - RNA, 15 nt, Human herpesvirus 1
cauuaaccaccugcg

SEQ ID NO: 3951465 - RNA, 14 nt, Human herpesvirus 1
cauugguguauguu

SEQ ID NO: 3951466 - RNA, 22 nt, Human herpesvirus 1
ccaaagcugcuggcgcgcaccc

SEQ ID NO: 3951467 - RNA, 22 nt, Human herpesvirus 1
ccaaagugccccgaccccgaga

SEQ ID NO: 3951468 - RNA, 19 nt, Human herpesvirus 1
ccaaccgcgacccuccggg

SEQ ID NO: 3951469 - RNA, 14 nt, Human herpesvirus 1
ccaacgcccugacc

SEQ ID NO: 3951470 - RNA, 16 nt, Human herpesvirus 1
ccaacgccuccccugu

SEQ ID NO: 3951471 - RNA, 21 nt, Human herpesvirus 1
ccaacgucgccgcccugagcg

SEQ ID NO: 3951472 - RNA, 23 nt, Human herpesvirus 1
ccaagauggcccaguguacccug

SEQ ID NO: 3951473 - RNA, 17 nt, Human herpesvirus 1
ccaagggggaggggcca

SEQ ID NO: 3951474 - RNA, 15 nt, Human herpesvirus 1
ccaaguacgccgcca

SEQ ID NO: 3951475 - RNA, 18 nt, Human herpesvirus 1
ccaauaaagaucgcggua

SEQ ID NO: 3951476 - RNA, 16 nt, Human herpesvirus 1
ccaaugcccucccuga

SEQ ID NO: 3951477 - RNA, 19 nt, Human herpesvirus 1
ccacaacauccgcggcuuc

SEQ ID NO: 3951478 - RNA, 12 nt, Human herpesvirus 1
ccacacagccgg

SEQ ID NO: 3951479 - RNA, 20 nt, Human herpesvirus 1
ccacacccaguggcuccggg

SEQ ID NO: 3951480 - RNA, 14 nt, Human herpesvirus 1
ccaccaccuccacc

SEQ ID NO: 3951481 - RNA, 22 nt, Human herpesvirus 1
ccacccaggugacgccuucgag

SEQ ID NO: 3951482 - RNA, 17 nt, Human herpesvirus 1
ccacccaguuuccaccc

SEQ ID NO: 3951483 - RNA, 18 nt, Human herpesvirus 1
ccacccccucgaccacca

SEQ ID NO: 3951484 - RNA, 21 nt, Human herpesvirus 1
ccacccggagcuuucuuccgg

SEQ ID NO: 3951485 - RNA, 14 nt, Human herpesvirus 1
ccaccgacucuccc

SEQ ID NO: 3951486 - RNA, 15 nt, Human herpesvirus 1
ccaccgccccccugu

SEQ ID NO: 3951487 - RNA, 12 nt, Human herpesvirus 1
ccaccgcugggc

SEQ ID NO: 3951488 - RNA, 17 nt, Human herpesvirus 1
ccaccgggaagcagggc

SEQ ID NO: 3951489 - RNA, 20 nt, Human herpesvirus 1
ccaccgugggccggcgggug

SEQ ID NO: 3951490 - RNA, 19 nt, Human herpesvirus 1
ccaccguugcccgggccgu

SEQ ID NO: 3951491 - RNA, 21 nt, Human herpesvirus 1
ccaccuacuacgaugggggcg

SEQ ID NO: 3951492 - RNA, 13 nt, Human herpesvirus 1
ccaccuccacccc

SEQ ID NO: 3951493 - RNA, 17 nt, Human herpesvirus 1
ccaccugcgcucccuca

SEQ ID NO: 3951494 - RNA, 23 nt, Human herpesvirus 1
ccaccuuccguccccugcccccc

SEQ ID NO: 3951495 - RNA, 22 nt, Human herpesvirus 1
ccacgacaaccccggucuccca

SEQ ID NO: 3951496 - RNA, 19 nt, Human herpesvirus 1
ccacgacccgacucaccuc

SEQ ID NO: 3951497 - RNA, 11 nt, Human herpesvirus 1
ccacgccaggg

SEQ ID NO: 3951498 - RNA, 17 nt, Human herpesvirus 1
ccacgcccccgccgccc

SEQ ID NO: 3951499 - RNA, 19 nt, Human herpesvirus 1
ccacgcccgaccacacacc

SEQ ID NO: 3951500 - RNA, 16 nt, Human herpesvirus 1
ccacgggggggugggg

SEQ ID NO: 3951501 - RNA, 16 nt, Human herpesvirus 1
ccacuacaccagccaa

SEQ ID NO: 3951502 - RNA, 19 nt, Human herpesvirus 1
ccacuccuccccgcgccgu

SEQ ID NO: 3951503 - RNA, 16 nt, Human herpesvirus 1
ccacugcacucccugc

SEQ ID NO: 3951504 - RNA, 12 nt, Human herpesvirus 1
ccacuguuuucc

SEQ ID NO: 3951505 - RNA, 20 nt, Human herpesvirus 1
ccagaauaaugaccaccaca

SEQ ID NO: 3951506 - RNA, 18 nt, Human herpesvirus 1
ccagaccgaagaggugcu

SEQ ID NO: 3951507 - RNA, 13 nt, Human herpesvirus 1
ccagagaccccag

SEQ ID NO: 3951508 - RNA, 19 nt, Human herpesvirus 1
ccagaggcgcgcgcaccuc

SEQ ID NO: 3951509 - RNA, 15 nt, Human herpesvirus 1
ccagcagacgcugcu

SEQ ID NO: 3951510 - RNA, 15 nt, Human herpesvirus 1
ccagccccccagccu

SEQ ID NO: 3951511 - RNA, 14 nt, Human herpesvirus 1
ccagcccucucccc

SEQ ID NO: 3951512 - RNA, 20 nt, Human herpesvirus 1
ccagcccucucccccgcucu

SEQ ID NO: 3951513 - RNA, 20 nt, Human herpesvirus 1
ccagccuguuuguccugggg

SEQ ID NO: 3951514 - RNA, 21 nt, Human herpesvirus 1
ccagccuucacgugcugcugc

SEQ ID NO: 3951515 - RNA, 16 nt, Human herpesvirus 1
ccagcgcggcggggcc

SEQ ID NO: 3951516 - RNA, 12 nt, Human herpesvirus 1
ccagcugggccc

SEQ ID NO: 3951517 - RNA, 15 nt, Human herpesvirus 1
ccaggaucacaccgg

SEQ ID NO: 3951518 - RNA, 13 nt, Human herpesvirus 1
ccaggccuccacc

SEQ ID NO: 3951519 - RNA, 23 nt, Human herpesvirus 1
ccaggcggcguuaaccgcacccc

SEQ ID NO: 3951520 - RNA, 13 nt, Human herpesvirus 1
ccagggagccccg

SEQ ID NO: 3951521 - RNA, 21 nt, Human herpesvirus 1
ccagggcgaggugcgguuggg

SEQ ID NO: 3951522 - RNA, 13 nt, Human herpesvirus 1
ccagggcggggcu

SEQ ID NO: 3951523 - RNA, 19 nt, Human herpesvirus 1
ccagggggaugcuagccug

SEQ ID NO: 3951524 - RNA, 18 nt, Human herpesvirus 1
ccagguugggggccguga

SEQ ID NO: 3951525 - RNA, 16 nt, Human herpesvirus 1
ccauaaggucauccga

SEQ ID NO: 3951526 - RNA, 16 nt, Human herpesvirus 1
ccauaucgcuucccga

SEQ ID NO: 3951527 - RNA, 18 nt, Human herpesvirus 1
ccaucaccccgcaauuug

SEQ ID NO: 3951528 - RNA, 12 nt, Human herpesvirus 1
ccaucagccucg

SEQ ID NO: 3951529 - RNA, 16 nt, Human herpesvirus 1
ccauccccgcucccca

SEQ ID NO: 3951530 - RNA, 23 nt, Human herpesvirus 1
ccaucccggguuaauguaaauaa

SEQ ID NO: 3951531 - RNA, 21 nt, Human herpesvirus 1
ccauccgaacgcagccccgcu

SEQ ID NO: 3951532 - RNA, 16 nt, Human herpesvirus 1
ccauccugcggcucgu

SEQ ID NO: 3951533 - RNA, 23 nt, Human herpesvirus 1
ccaucgaguucgccaggcugcag

SEQ ID NO: 3951534 - RNA, 22 nt, Human herpesvirus 1
ccaucgccucggccaccguggg

SEQ ID NO: 3951535 - RNA, 14 nt, Human herpesvirus 1
ccaucuaaugccac

SEQ ID NO: 3951536 - RNA, 13 nt, Human herpesvirus 1
ccauggaccccag

SEQ ID NO: 3951537 - RNA, 15 nt, Human herpesvirus 1
ccauggaccgcaucu

SEQ ID NO: 3951538 - RNA, 17 nt, Human herpesvirus 1
ccauggcgggacugggc

SEQ ID NO: 3951539 - RNA, 19 nt, Human herpesvirus 1
ccauguuugcgggccuggg

SEQ ID NO: 3951540 - RNA, 17 nt, Human herpesvirus 1
ccgguauggggggggcu

SEQ ID NO: 3951541 - RNA, 15 nt, Human herpesvirus 1
ccggucggcgggccc

SEQ ID NO: 3951542 - RNA, 23 nt, Human herpesvirus 1
ccggucucccagggagccccggu

SEQ ID NO: 3951543 - RNA, 18 nt, Human herpesvirus 1
ccggucuccccgggagcc

SEQ ID NO: 3951544 - RNA, 23 nt, Human herpesvirus 1
ccggugaacgccuccgcccgugc

SEQ ID NO: 3951545 - RNA, 23 nt, Human herpesvirus 1
ccgguuccucccgcucggcggca

SEQ ID NO: 3951546 - RNA, 16 nt, Human herpesvirus 1
ccgguucguauccaca

SEQ ID NO: 3951547 - RNA, 20 nt, Human herpesvirus 1
ccguaaacgccgagcugcga

SEQ ID NO: 3951548 - RNA, 13 nt, Human herpesvirus 1
ccguccgaaccca

SEQ ID NO: 3951549 - RNA, 18 nt, Human herpesvirus 1
ccguccucgcaccagccc

SEQ ID NO: 3951550 - RNA, 18 nt, Human herpesvirus 1
ccgucgggaggccacaga

SEQ ID NO: 3951551 - RNA, 17 nt, Human herpesvirus 1
ccgucguauccacggug

SEQ ID NO: 3951552 - RNA, 16 nt, Human herpesvirus 1
ccguggccccacgguc

SEQ ID NO: 3951553 - RNA, 12 nt, Human herpesvirus 1
ccguggccccgg

SEQ ID NO: 3951554 - RNA, 18 nt, Human herpesvirus 1
ccguggccgacaacugcc

SEQ ID NO: 3951555 - RNA, 16 nt, Human herpesvirus 1
ccguggcgccccggcc

SEQ ID NO: 3951556 - RNA, 19 nt, Human herpesvirus 1
ccguggcgccccggccccu

SEQ ID NO: 3951557 - RNA, 22 nt, Human herpesvirus 1
ccguggggacgguggcgccgca

SEQ ID NO: 3951558 - RNA, 16 nt, Human herpesvirus 1
ccgugguccuguggag

SEQ ID NO: 3951559 - RNA, 16 nt, Human herpesvirus 1
ccgugucugugggcca

SEQ ID NO: 3951560 - RNA, 16 nt, Human herpesvirus 1
ccguguucgagggcca

SEQ ID NO: 3951561 - RNA, 17 nt, Human herpesvirus 1
ccguguuggagcgcgcc

SEQ ID NO: 3951562 - RNA, 15 nt, Human herpesvirus 1
ccguuaaccccccac

SEQ ID NO: 3951563 - RNA, 15 nt, Human herpesvirus 1
ccguuggcccccgcc

SEQ ID NO: 3951564 - RNA, 20 nt, Human herpesvirus 1
ccuaaccaggccuccacccc

SEQ ID NO: 3951565 - RNA, 14 nt, Human herpesvirus 1
ccuaccccaguccc

SEQ ID NO: 3951566 - RNA, 16 nt, Human herpesvirus 1
ccuaccggccccuggg

SEQ ID NO: 3951567 - RNA, 21 nt, Human herpesvirus 1
ccuaucgcucgaccucuccac

SEQ ID NO: 3951568 - RNA, 20 nt, Human herpesvirus 1
ccuaugguacacacgggugc

SEQ ID NO: 3951569 - RNA, 16 nt, Human herpesvirus 1
ccucaagcaggccauc

SEQ ID NO: 3951570 - RNA, 20 nt, Human herpesvirus 1
ccucacagggcgggccgccu

SEQ ID NO: 3951571 - RNA, 16 nt, Human herpesvirus 1
ccucauguccaccgac

SEQ ID NO: 3951572 - RNA, 11 nt, Human herpesvirus 1
ccuccccccgc

SEQ ID NO: 3951573 - RNA, 19 nt, Human herpesvirus 1
ccucccccgcccuggacac

SEQ ID NO: 3951574 - RNA, 18 nt, Human herpesvirus 1
ccucccccguagaucucu

SEQ ID NO: 3951575 - RNA, 12 nt, Human herpesvirus 1
ccucccccuccg

SEQ ID NO: 3951576 - RNA, 14 nt, Human herpesvirus 1
ccuccccgcacaga

SEQ ID NO: 3951577 - RNA, 22 nt, Human herpesvirus 1
ccucccgcucggcggcagcccg

SEQ ID NO: 3951578 - RNA, 14 nt, Human herpesvirus 1
ccuccgaggagauc

SEQ ID NO: 3951579 - RNA, 19 nt, Human herpesvirus 1
ccuccgcaucccaggauca

SEQ ID NO: 3951580 - RNA, 13 nt, Human herpesvirus 1
ccuccgcgccagg

SEQ ID NO: 3951581 - RNA, 14 nt, Human herpesvirus 1
ccucgaccaccacc

SEQ ID NO: 3951582 - RNA, 17 nt, Human herpesvirus 1
ccucgaccaccaccucc

SEQ ID NO: 3951583 - RNA, 13 nt, Human herpesvirus 1
ccucgaggacacc

SEQ ID NO: 3951584 - RNA, 17 nt, Human herpesvirus 1
ccucgcacauccucacc

SEQ ID NO: 3951585 - RNA, 16 nt, Human herpesvirus 1
ccucgccacgucgacc

SEQ ID NO: 3951586 - RNA, 18 nt, Human herpesvirus 1
ccucgcccgccaucgagc

SEQ ID NO: 3951587 - RNA, 15 nt, Human herpesvirus 1
ccucucacacagcau

SEQ ID NO: 3951588 - RNA, 21 nt, Human herpesvirus 1
ccucuccgcggugucugggaa

SEQ ID NO: 3951589 - RNA, 19 nt, Human herpesvirus 1
ccucucuucccucagguca

SEQ ID NO: 3951590 - RNA, 22 nt, Human herpesvirus 1
ccugaccaacgacggcccgacc

SEQ ID NO: 3951591 - RNA, 21 nt, Human herpesvirus 1
ccugagcccggcggcgcuggc

SEQ ID NO: 3951592 - RNA, 20 nt, Human herpesvirus 1
ccugagcgcccuccugacca

SEQ ID NO: 3951593 - RNA, 18 nt, Human herpesvirus 1
ccugaucauuacccccgu

SEQ ID NO: 3951594 - RNA, 18 nt, Human herpesvirus 1
ccugaugcacgcccccgc

SEQ ID NO: 3951595 - RNA, 18 nt, Human herpesvirus 1
ccugauguggcugcuccg

SEQ ID NO: 3951596 - RNA, 21 nt, Human herpesvirus 1
ccugcaccacccccgccgucc

SEQ ID NO: 3951597 - RNA, 22 nt, Human herpesvirus 1
ccugccccgccacccaguuucc

SEQ ID NO: 3951598 - RNA, 13 nt, Human herpesvirus 1
ccugccgcgcgga

SEQ ID NO: 3951599 - RNA, 13 nt, Human herpesvirus 1
ccugcgcgacgcc

SEQ ID NO: 3951600 - RNA, 13 nt, Human herpesvirus 1
ccugcggcuggcg

SEQ ID NO: 3951601 - RNA, 18 nt, Human herpesvirus 1
ccugcuccggcggggccu

SEQ ID NO: 3951602 - RNA, 21 nt, Human herpesvirus 1
ccugcucgggcaggugcagac

SEQ ID NO: 3951603 - RNA, 22 nt, Human herpesvirus 1
ccugcucgggcaggugcagacc

SEQ ID NO: 3951604 - RNA, 20 nt, Human herpesvirus 1
ccugcugcaggccccccgcc

SEQ ID NO: 3951605 - RNA, 14 nt, Human herpesvirus 1
ccuggaccagcuga

SEQ ID NO: 3951606 - RNA, 14 nt, Human herpesvirus 1
ccuggaugcugugg

SEQ ID NO: 3951607 - RNA, 13 nt, Human herpesvirus 1
ccuggcgccgccu

SEQ ID NO: 3951608 - RNA, 17 nt, Human herpesvirus 1
ccuggcggacggcggcc

SEQ ID NO: 3951609 - RNA, 13 nt, Human herpesvirus 1
ccuggcugaccca

SEQ ID NO: 3951610 - RNA, 22 nt, Human herpesvirus 1
ccugggauccgacccccaugga

SEQ ID NO: 3951611 - RNA, 13 nt, Human herpesvirus 1
ccugggccaccug

SEQ ID NO: 3951612 - RNA, 15 nt, Human herpesvirus 1
ccuggggucgcucug

SEQ ID NO: 3951613 - RNA, 14 nt, Human herpesvirus 1
ccugggucagcucc

SEQ ID NO: 3951614 - RNA, 16 nt, Human herpesvirus 1
ccuggguguguuuauu

SEQ ID NO: 3951615 - RNA, 22 nt, Human herpesvirus 1
ccuggguuggcgucgggaccau

SEQ ID NO: 3951616 - RNA, 14 nt, Human herpesvirus 1
ccuggucagaggcc

SEQ ID NO: 3951617 - RNA, 18 nt, Human herpesvirus 1
ccugucggccgccgacga

SEQ ID NO: 3951618 - RNA, 23 nt, Human herpesvirus 1
ccuguugguauagguccacggcc

SEQ ID NO: 3951619 - RNA, 15 nt, Human herpesvirus 1
ccuguuugucgccug

SEQ ID NO: 3951620 - RNA, 17 nt, Human herpesvirus 1
ccuguuugucgccuggc

SEQ ID NO: 3951621 - RNA, 20 nt, Human herpesvirus 1
ccuuauccacaugaagccac

SEQ ID NO: 3951622 - RNA, 16 nt, Human herpesvirus 1
ccuucauguccaaccc

SEQ ID NO: 3951623 - RNA, 14 nt, Human herpesvirus 1
ccuuccccacggga

SEQ ID NO: 3951624 - RNA, 16 nt, Human herpesvirus 1
ccuucccccucccccc

SEQ ID NO: 3951625 - RNA, 13 nt, Human herpesvirus 1
ccuugccccggcc

SEQ ID NO: 3951626 - RNA, 11 nt, Human herpesvirus 1
ccuugccgugg

SEQ ID NO: 3951627 - RNA, 17 nt, Human herpesvirus 1
ccuugcggcagcgcucc

SEQ ID NO: 3951628 - RNA, 14 nt, Human herpesvirus 1
ccuuggcggccgcc

SEQ ID NO: 3951629 - RNA, 16 nt, Human herpesvirus 1
ccuuggucgaucccga

SEQ ID NO: 3951630 - RNA, 19 nt, Human herpesvirus 1
ccuugguuccgacgccuca

SEQ ID NO: 3951631 - RNA, 22 nt, Human herpesvirus 1
ccuugguuccgacgccucaaca

SEQ ID NO: 3951632 - RNA, 14 nt, Human herpesvirus 1
ccuugugugucaau

SEQ ID NO: 3951633 - RNA, 15 nt, Human herpesvirus 1
ccuuucccccuguuu

SEQ ID NO: 3951634 - RNA, 14 nt, Human herpesvirus 1
ccuuuucgccgccc

SEQ ID NO: 3951635 - RNA, 15 nt, Human herpesvirus 1
cgaacgggggcccug

SEQ ID NO: 3951636 - RNA, 20 nt, Human herpesvirus 1
cgaagcggccauggcccgcc

SEQ ID NO: 3951637 - RNA, 21 nt, Human herpesvirus 1
cgacaaccccggucucccagg

SEQ ID NO: 3951638 - RNA, 14 nt, Human herpesvirus 1
cgacaccaccagcu

SEQ ID NO: 3951639 - RNA, 15 nt, Human herpesvirus 1
cgacaccaccagcug

SEQ ID NO: 3951640 - RNA, 14 nt, Human herpesvirus 1
cgacaccgcccucg

SEQ ID NO: 3951641 - RNA, 19 nt, Human herpesvirus 1
cgacagcacucacagcccc

SEQ ID NO: 3951642 - RNA, 13 nt, Human herpesvirus 1
cgaccaccaccuc

SEQ ID NO: 3951643 - RNA, 15 nt, Human herpesvirus 1
cgaccaccauccccg

SEQ ID NO: 3951644 - RNA, 15 nt, Human herpesvirus 1
cgaccaucacccgag

SEQ ID NO: 3951645 - RNA, 15 nt, Human herpesvirus 1
cgacccaccaauaaa

SEQ ID NO: 3951646 - RNA, 21 nt, Human herpesvirus 1
cgacccccuuguaugucccca

SEQ ID NO: 3951647 - RNA, 15 nt, Human herpesvirus 1
cgacccgaagcugcu

SEQ ID NO: 3951648 - RNA, 16 nt, Human herpesvirus 1
cgacccugaucccccg

SEQ ID NO: 3951649 - RNA, 19 nt, Human herpesvirus 1
cgaccgcaacuucccaccc

SEQ ID NO: 3951650 - RNA, 15 nt, Human herpesvirus 1
cgaccgcagucccug

SEQ ID NO: 3951651 - RNA, 17 nt, Human herpesvirus 1
cgaccgccggcggcgac

SEQ ID NO: 3951652 - RNA, 17 nt, Human herpesvirus 1
cgaccuguugauggccu

SEQ ID NO: 3951653 - RNA, 12 nt, Human herpesvirus 1
cgacgaccuggg

SEQ ID NO: 3951654 - RNA, 11 nt, Human herpesvirus 1
cgacgccucaa

SEQ ID NO: 3951655 - RNA, 16 nt, Human herpesvirus 1
cgacggcggaccuggc

SEQ ID NO: 3951656 - RNA, 15 nt, Human herpesvirus 1
ucccacacucucugg

SEQ ID NO: 3951657 - RNA, 19 nt, Human herpesvirus 1
ucccacacucucugggcgg

SEQ ID NO: 3951658 - RNA, 19 nt, Human herpesvirus 1
ucccaccaaacuggcacau

SEQ ID NO: 3951659 - RNA, 22 nt, Human herpesvirus 1
ucccaccgccaucagccuuacc

SEQ ID NO: 3951660 - RNA, 19 nt, Human herpesvirus 1
ucccacgcucuccccugcu

SEQ ID NO: 3951661 - RNA, 17 nt, Human herpesvirus 1
ucccacggccucgccag

SEQ ID NO: 3951662 - RNA, 16 nt, Human herpesvirus 1
ucccagagaccccagg

SEQ ID NO: 3951663 - RNA, 17 nt, Human herpesvirus 1
ucccagagaccccaggg

SEQ ID NO: 3951664 - RNA, 22 nt, Human herpesvirus 1
ucccagcggcacgaccggcucc

SEQ ID NO: 3951665 - RNA, 16 nt, Human herpesvirus 1
ucccagggagccccgg

SEQ ID NO: 3951666 - RNA, 19 nt, Human herpesvirus 1
ucccaucccccgaucccaa

SEQ ID NO: 3951667 - RNA, 18 nt, Human herpesvirus 1
uccccaaaauaaaagacc

SEQ ID NO: 3951668 - RNA, 20 nt, Human herpesvirus 1
uccccccgucagccugccuc

SEQ ID NO: 3951669 - RNA, 19 nt, Human herpesvirus 1
ucccccuccgcaucccagg

SEQ ID NO: 3951670 - RNA, 23 nt, Human herpesvirus 1
uccccgauggcccuccaggcugu

SEQ ID NO: 3951671 - RNA, 13 nt, Human herpesvirus 1
uccccgcacagau

SEQ ID NO: 3951672 - RNA, 19 nt, Human herpesvirus 1
uccccgcgccguuggcccc

SEQ ID NO: 3951673 - RNA, 15 nt, Human herpesvirus 1
uccccgggagccccg

SEQ ID NO: 3951674 - RNA, 16 nt, Human herpesvirus 1
uccccgggagccccgg

SEQ ID NO: 3951675 - RNA, 15 nt, Human herpesvirus 1
uccccgggcccagcc

SEQ ID NO: 3951676 - RNA, 19 nt, Human herpesvirus 1
ucccgauaaaaagcgcccc

SEQ ID NO: 3951677 - RNA, 20 nt, Human herpesvirus 1
ucccgcaauuucaccgcccc

SEQ ID NO: 3951678 - RNA, 21 nt, Human herpesvirus 1
ucccgccaacacccccuuccc

SEQ ID NO: 3951679 - RNA, 17 nt, Human herpesvirus 1
ucccgcccaccgcuggg

SEQ ID NO: 3951680 - RNA, 16 nt, Human herpesvirus 1
ucccggguuaauguaa

SEQ ID NO: 3951681 - RNA, 15 nt, Human herpesvirus 1
ucccuaaggcccggc

SEQ ID NO: 3951682 - RNA, 19 nt, Human herpesvirus 1
ucccucauuuuacaauaaa

SEQ ID NO: 3951683 - RNA, 15 nt, Human herpesvirus 1
ucccucccccuccgc

SEQ ID NO: 3951684 - RNA, 20 nt, Human herpesvirus 1
ucccucccccuccgcauccc

SEQ ID NO: 3951685 - RNA, 17 nt, Human herpesvirus 1
ucccucgaccaccaucc

SEQ ID NO: 3951686 - RNA, 12 nt, Human herpesvirus 1
ucccugggcccu

SEQ ID NO: 3951687 - RNA, 16 nt, Human herpesvirus 1
ucccugggcccuggcc

SEQ ID NO: 3951688 - RNA, 14 nt, Human herpesvirus 1
uccgaaagccacca

SEQ ID NO: 3951689 - RNA, 16 nt, Human herpesvirus 1
uccgaacgcagccccg

SEQ ID NO: 3951690 - RNA, 18 nt, Human herpesvirus 1
uccgaacgcagccccgcu

SEQ ID NO: 3951691 - RNA, 14 nt, Human herpesvirus 1
uccgacgccccccg

SEQ ID NO: 3951692 - RNA, 17 nt, Human herpesvirus 1
uccgagcacccccccca

SEQ ID NO: 3951693 - RNA, 17 nt, Human herpesvirus 1
uccgaguucccccggca

SEQ ID NO: 3951694 - RNA, 16 nt, Human herpesvirus 1
uccgcccgugcugccg

SEQ ID NO: 3951695 - RNA, 17 nt, Human herpesvirus 1
uccgccugucgcaccca

SEQ ID NO: 3951696 - RNA, 18 nt, Human herpesvirus 1
uccgccugucgcacccac

SEQ ID NO: 3951697 - RNA, 12 nt, Human herpesvirus 1
uccgcgccccuc

SEQ ID NO: 3951698 - RNA, 13 nt, Human herpesvirus 1
uccgcgccccucu

SEQ ID NO: 3951699 - RNA, 16 nt, Human herpesvirus 1
uccgcuaucuccuggg

SEQ ID NO: 3951700 - RNA, 12 nt, Human herpesvirus 1
uccgcuggggcc

SEQ ID NO: 3951701 - RNA, 16 nt, Human herpesvirus 1
uccgcuggggccccca

SEQ ID NO: 3951702 - RNA, 17 nt, Human herpesvirus 1
uccggagacauggcccc

SEQ ID NO: 3951703 - RNA, 18 nt, Human herpesvirus 1
uccggagacauggccccc

SEQ ID NO: 3951704 - RNA, 21 nt, Human herpesvirus 1
uccggaggcgccgcgcggacg

SEQ ID NO: 3951705 - RNA, 15 nt, Human herpesvirus 1
uccgggaugggcuac

SEQ ID NO: 3951706 - RNA, 19 nt, Human herpesvirus 1
uccggggggcuuccggccu

SEQ ID NO: 3951707 - RNA, 17 nt, Human herpesvirus 1
uccgucuucggccccgc

SEQ ID NO: 3951708 - RNA, 15 nt, Human herpesvirus 1
uccgugucggggagg

SEQ ID NO: 3951709 - RNA, 14 nt, Human herpesvirus 1
uccuaacccagacc

SEQ ID NO: 3951710 - RNA, 15 nt, Human herpesvirus 1
uccucacugccuccc

SEQ ID NO: 3951711 - RNA, 15 nt, Human herpesvirus 1
uccugcgccccgccg

SEQ ID NO: 3951712 - RNA, 22 nt, Human herpesvirus 1
uccuggaacgaggccgcagccu

SEQ ID NO: 3951713 - RNA, 15 nt, Human herpesvirus 1
uccuucuugucgucu

SEQ ID NO: 3951714 - RNA, 17 nt, Human herpesvirus 1
uccuucuugucgucucu

SEQ ID NO: 3951715 - RNA, 23 nt, Human herpesvirus 1
ucgaccaccauccccgcucccca

SEQ ID NO: 3951716 - RNA, 20 nt, Human herpesvirus 1
ucgacccgcaacgcgcuggg

SEQ ID NO: 3951717 - RNA, 19 nt, Human herpesvirus 1
ucgagccaacgcccugacc

SEQ ID NO: 3951718 - RNA, 15 nt, Human herpesvirus 1
ucgaggugucucgca

SEQ ID NO: 3951719 - RNA, 20 nt, Human herpesvirus 1
ucgauccaggacgccgcgac

SEQ ID NO: 3951720 - RNA, 18 nt, Human herpesvirus 1
ucgaugacgucccggcuc

SEQ ID NO: 3951721 - RNA, 20 nt, Human herpesvirus 1
ucgcacgcguccagucggca

SEQ ID NO: 3951722 - RNA, 21 nt, Human herpesvirus 1
ucgcccagacgcccuccgagg

SEQ ID NO: 3951723 - RNA, 13 nt, Human herpesvirus 1
ucgccccaguggc

SEQ ID NO: 3951724 - RNA, 15 nt, Human herpesvirus 1
ucgccgacaucgaca

SEQ ID NO: 3951725 - RNA, 12 nt, Human herpesvirus 1
ucgccgcuccgu

SEQ ID NO: 3951726 - RNA, 14 nt, Human herpesvirus 1
ucgccugcccccug

SEQ ID NO: 3951727 - RNA, 18 nt, Human herpesvirus 1
ucgcgauuuccgacgaac

SEQ ID NO: 3951728 - RNA, 23 nt, Human herpesvirus 1
ucgcggcuucgcgguggcggucc

SEQ ID NO: 3951729 - RNA, 17 nt, Human herpesvirus 1
ucgcguggugcgagcug

SEQ ID NO: 3951730 - RNA, 16 nt, Human herpesvirus 1
ucgcuagaccacgccc

SEQ ID NO: 3951731 - RNA, 12 nt, Human herpesvirus 1
ucggaggccccc

SEQ ID NO: 3951732 - RNA, 14 nt, Human herpesvirus 1
ucggaggcccccca

SEQ ID NO: 3951733 - RNA, 17 nt, Human herpesvirus 1
ucggccgccacccaggc

SEQ ID NO: 3951734 - RNA, 15 nt, Human herpesvirus 1
ucggccgccgacgac

SEQ ID NO: 3951735 - RNA, 17 nt, Human herpesvirus 1
ucggccgucccggggca

SEQ ID NO: 3951736 - RNA, 19 nt, Human herpesvirus 1
ucggccgucccggggcagg

SEQ ID NO: 3951737 - RNA, 12 nt, Human herpesvirus 1
ucgggaggccac

SEQ ID NO: 3951738 - RNA, 14 nt, Human herpesvirus 1
ucgggaugcugccc

SEQ ID NO: 3951739 - RNA, 20 nt, Human herpesvirus 1
ucgggccugccugcggcucg

SEQ ID NO: 3951740 - RNA, 19 nt, Human herpesvirus 1
ucggggagcuucgcuuugu

SEQ ID NO: 3951741 - RNA, 15 nt, Human herpesvirus 1
ucgggugugcaccuu

SEQ ID NO: 3951742 - RNA, 17 nt, Human herpesvirus 1
ucgguccacggccaagu

SEQ ID NO: 3951743 - RNA, 13 nt, Human herpesvirus 1
ucggucugcacca

SEQ ID NO: 3951744 - RNA, 22 nt, Human herpesvirus 1
ucggugccaguccgcugcaccg

SEQ ID NO: 3951745 - RNA, 20 nt, Human herpesvirus 1
ucggugcgucugggcccgac

SEQ ID NO: 3951746 - RNA, 18 nt, Human herpesvirus 1
ucguacgcaugggccgcc

SEQ ID NO: 3951747 - RNA, 15 nt, Human herpesvirus 1
ucguccggcgcgcgu

SEQ ID NO: 3951748 - RNA, 14 nt, Human herpesvirus 1
ucgucucucuuccc

SEQ ID NO: 3951749 - RNA, 15 nt, Human herpesvirus 1
ucgucucucuucccc

SEQ ID NO: 3951750 - RNA, 15 nt, Human herpesvirus 1
ucuaaugccacgcga

SEQ ID NO: 3951751 - RNA, 21 nt, Human herpesvirus 1
ucuacccucuggacgcccggg

SEQ ID NO: 3951752 - RNA, 16 nt, Human herpesvirus 1
ucuacugcugggccau

SEQ ID NO: 3951753 - RNA, 17 nt, Human herpesvirus 1
ucuagccucguggggcu

SEQ ID NO: 3951754 - RNA, 15 nt, Human herpesvirus 1
ucuauaucucugggc

SEQ ID NO: 3951755 - RNA, 22 nt, Human herpesvirus 1
ucucccaccgccaucagccuua

SEQ ID NO: 3951756 - RNA, 13 nt, Human herpesvirus 1
ucuccccugcugc

SEQ ID NO: 3951757 - RNA, 16 nt, Human herpesvirus 1
ucucccgaaccaggcc

SEQ ID NO: 3951758 - RNA, 12 nt, Human herpesvirus 1
ucucccuguuca

SEQ ID NO: 3951759 - RNA, 17 nt, Human herpesvirus 1
ucuccucuucuccccuu

SEQ ID NO: 3951760 - RNA, 19 nt, Human herpesvirus 1
ucuccucuucuccccuucc

SEQ ID NO: 3951761 - RNA, 18 nt, Human herpesvirus 1
ucucucccgggccgcccc

SEQ ID NO: 3951762 - RNA, 24 nt, Human herpesvirus 1
ucugaccugcaccgaucgcagcgu

SEQ ID NO: 3951763 - RNA, 19 nt, Human herpesvirus 1
ucugcggccggcgggacuc

SEQ ID NO: 3951764 - RNA, 20 nt, Human herpesvirus 1
ucugcuccgcaacggggcgc

SEQ ID NO: 3951765 - RNA, 14 nt, Human herpesvirus 1
ucuggacuggacca

SEQ ID NO: 3951766 - RNA, 22 nt, Human herpesvirus 1
ucugggauggcuccuggccagg

SEQ ID NO: 3951767 - RNA, 19 nt, Human herpesvirus 1
ucugggccaccgacagccu

SEQ ID NO: 3951768 - RNA, 12 nt, Human herpesvirus 1
ucugggcgggcc

SEQ ID NO: 3951769 - RNA, 18 nt, Human herpesvirus 1
ucugucgguccacggcca

SEQ ID NO: 3951770 - RNA, 18 nt, Human herpesvirus 1
ucugucucgucuccucuu

SEQ ID NO: 3951771 - RNA, 11 nt, Human herpesvirus 1
acaaacacaaa

SEQ ID NO: 3951772 - RNA, 19 nt, Human herpesvirus 1
acaaacgacccaccaauaa

SEQ ID NO: 3951773 - RNA, 21 nt, Human herpesvirus 1
acaaccccggucucccaggga

SEQ ID NO: 3951774 - RNA, 22 nt, Human herpesvirus 1
acaaccccggucucccagggag

SEQ ID NO: 3951775 - RNA, 18 nt, Human herpesvirus 1
acaacccuacaaccugac

SEQ ID NO: 3951776 - RNA, 21 nt, Human herpesvirus 1
acaacgaccaggcgcgccgcg

SEQ ID NO: 3951777 - RNA, 23 nt, Human herpesvirus 1
acaacgaguaucugcgggccgcg

SEQ ID NO: 3951778 - RNA, 21 nt, Human herpesvirus 1
acaacgccagccugcggccgg

SEQ ID NO: 3951779 - RNA, 18 nt, Human herpesvirus 1
acaagucucugggggccu

SEQ ID NO: 3951780 - RNA, 12 nt, Human herpesvirus 1
acacaaggccaa

SEQ ID NO: 3951781 - RNA, 13 nt, Human herpesvirus 1
acaccaccagcug

SEQ ID NO: 3951782 - RNA, 16 nt, Human herpesvirus 1
acacccccgugacuca

SEQ ID NO: 3951783 - RNA, 18 nt, Human herpesvirus 1
acacgagcacccugcugc

SEQ ID NO: 3951784 - RNA, 21 nt, Human herpesvirus 1
acacgagcacccugcugcccc

SEQ ID NO: 3951785 - RNA, 14 nt, Human herpesvirus 1
acacggagcugcuc

SEQ ID NO: 3951786 - RNA, 14 nt, Human herpesvirus 1
acacgggcaccaca

SEQ ID NO: 3951787 - RNA, 13 nt, Human herpesvirus 1
acacgggcuaccc

SEQ ID NO: 3951788 - RNA, 14 nt, Human herpesvirus 1
acacucgacccccg

SEQ ID NO: 3951789 - RNA, 14 nt, Human herpesvirus 1
acacugaaaugccc

SEQ ID NO: 3951790 - RNA, 23 nt, Human herpesvirus 1
acagaugucaacgccgcuaccga

SEQ ID NO: 3951791 - RNA, 14 nt, Human herpesvirus 1
acagcgaccugggg

SEQ ID NO: 3951792 - RNA, 13 nt, Human herpesvirus 1
acagcggccugcu

SEQ ID NO: 3951793 - RNA, 22 nt, Human herpesvirus 1
acagcuggccgccgucgcacgc

SEQ ID NO: 3951794 - RNA, 21 nt, Human herpesvirus 1
acagggcgggccgccucgggg

SEQ ID NO: 3951795 - RNA, 19 nt, Human herpesvirus 1
acauucuccacuacuacgu

SEQ ID NO: 3951796 - RNA, 22 nt, Human herpesvirus 1
accaagagacgucgccccugug

SEQ ID NO: 3951797 - RNA, 13 nt, Human herpesvirus 1
accacacaccagc

SEQ ID NO: 3951798 - RNA, 13 nt, Human herpesvirus 1
accaccaaggccc

SEQ ID NO: 3951799 - RNA, 18 nt, Human herpesvirus 1
accaccaaggcccgggcc

SEQ ID NO: 3951800 - RNA, 11 nt, Human herpesvirus 1
accaccagcug

SEQ ID NO: 3951801 - RNA, 22 nt, Human herpesvirus 1
gcccccggcauggcgcagcugg

SEQ ID NO: 3951802 - RNA, 13 nt, Human herpesvirus 1
gccccgacccccu

SEQ ID NO: 3951803 - RNA, 20 nt, Human herpesvirus 1
gccccgauggcccuggacgc

SEQ ID NO: 3951804 - RNA, 23 nt, Human herpesvirus 1
gccccgcauaucccacccuggag

SEQ ID NO: 3951805 - RNA, 15 nt, Human herpesvirus 1
gccccgccacccagu

SEQ ID NO: 3951806 - RNA, 21 nt, Human herpesvirus 1
gccccgcuucauccccgagaa

SEQ ID NO: 3951807 - RNA, 14 nt, Human herpesvirus 1
gccccggaagaccc

SEQ ID NO: 3951808 - RNA, 19 nt, Human herpesvirus 1
gccccggaagaccccgagg

SEQ ID NO: 3951809 - RNA, 23 nt, Human herpesvirus 1
gccccggagggagaacccgacca

SEQ ID NO: 3951810 - RNA, 19 nt, Human herpesvirus 1
gccccggccgcccuucccg

SEQ ID NO: 3951811 - RNA, 18 nt, Human herpesvirus 1
gccccgggacacccccca

SEQ ID NO: 3951812 - RNA, 19 nt, Human herpesvirus 1
gccccuaaccaggccucca

SEQ ID NO: 3951813 - RNA, 20 nt, Human herpesvirus 1
gccccuaaccaggccuccac

SEQ ID NO: 3951814 - RNA, 16 nt, Human herpesvirus 1
gccccugggccccggg

SEQ ID NO: 3951815 - RNA, 14 nt, Human herpesvirus 1
gccccuguggcccu

SEQ ID NO: 3951816 - RNA, 14 nt, Human herpesvirus 1
gccccuuucccccu

SEQ ID NO: 3951817 - RNA, 18 nt, Human herpesvirus 1
gcccgaagacacccccca

SEQ ID NO: 3951818 - RNA, 18 nt, Human herpesvirus 1
gcccgauuuacagccccc

SEQ ID NO: 3951819 - RNA, 17 nt, Human herpesvirus 1
gcccgcaaacaggagcu

SEQ ID NO: 3951820 - RNA, 22 nt, Human herpesvirus 1
gcccgcaagggggggggggcau

SEQ ID NO: 3951821 - RNA, 15 nt, Human herpesvirus 1
gcccgcccuguaccg

SEQ ID NO: 3951822 - RNA, 18 nt, Human herpesvirus 1
gcccggaacgggaggcca

SEQ ID NO: 3951823 - RNA, 22 nt, Human herpesvirus 1
gcccggccaaccagcguccgcc

SEQ ID NO: 3951824 - RNA, 20 nt, Human herpesvirus 1
gcccggcccugcugcugccg

SEQ ID NO: 3951825 - RNA, 20 nt, Human herpesvirus 1
gcccgggccacggcgccgac

SEQ ID NO: 3951826 - RNA, 13 nt, Human herpesvirus 1
gcccggggccugc

SEQ ID NO: 3951827 - RNA, 14 nt, Human herpesvirus 1
gcccgggggccugg

SEQ ID NO: 3951828 - RNA, 13 nt, Human herpesvirus 1
gcccggguccccg

SEQ ID NO: 3951829 - RNA, 17 nt, Human herpesvirus 1
gcccguccucgcccgcc

SEQ ID NO: 3951830 - RNA, 22 nt, Human herpesvirus 1
gcccgucuuuaaccucccccgg

SEQ ID NO: 3951831 - RNA, 22 nt, Human herpesvirus 1
gcccgugauccuuaggggccgu

SEQ ID NO: 3951832 - RNA, 16 nt, Human herpesvirus 1
gcccguuaacccccca

SEQ ID NO: 3951833 - RNA, 21 nt, Human herpesvirus 1
gcccguugcagggccuggugc

SEQ ID NO: 3951834 - RNA, 23 nt, Human herpesvirus 1
gcccuaaccccaccccugugcua

SEQ ID NO: 3951835 - RNA, 19 nt, Human herpesvirus 1
gcccuccccccgcccccgg

SEQ ID NO: 3951836 - RNA, 17 nt, Human herpesvirus 1
gcccucgccacacccgc

SEQ ID NO: 3951837 - RNA, 21 nt, Human herpesvirus 1
gcccucgcgggccucgugggc

SEQ ID NO: 3951838 - RNA, 20 nt, Human herpesvirus 1
gcccugaccaacgacggccc

SEQ ID NO: 3951839 - RNA, 22 nt, Human herpesvirus 1
gcccugagcgcccuccugacca

SEQ ID NO: 3951840 - RNA, 21 nt, Human herpesvirus 1
gcccugccacuccggcgccgc

SEQ ID NO: 3951841 - RNA, 14 nt, Human herpesvirus 1
gccgcaaccagcug

SEQ ID NO: 3951842 - RNA, 19 nt, Human herpesvirus 1
gccgcaguacuaccuggcc

SEQ ID NO: 3951843 - RNA, 12 nt, Human herpesvirus 1
gccgccacgcgc

SEQ ID NO: 3951844 - RNA, 21 nt, Human herpesvirus 1
gccgccagcgcggcggggccc

SEQ ID NO: 3951845 - RNA, 13 nt, Human herpesvirus 1
gccgcccagcuca

SEQ ID NO: 3951846 - RNA, 14 nt, Human herpesvirus 1
gccgcccggggcca

SEQ ID NO: 3951847 - RNA, 21 nt, Human herpesvirus 1
gccgcccugagcgcccuccug

SEQ ID NO: 3951848 - RNA, 21 nt, Human herpesvirus 1
gccgccgaagggacucuggcg

SEQ ID NO: 3951849 - RNA, 15 nt, Human herpesvirus 1
gccgccgcgccccgc

SEQ ID NO: 3951850 - RNA, 18 nt, Human herpesvirus 1
gccgccucacgcccgcaa

SEQ ID NO: 3951851 - RNA, 16 nt, Human herpesvirus 1
gccgccucggcccgcg

SEQ ID NO: 3951852 - RNA, 22 nt, Human herpesvirus 1
gccgcgacccaggcggcgaacg

SEQ ID NO: 3951853 - RNA, 22 nt, Human herpesvirus 1
gccgcgcccacuacaccagcca

SEQ ID NO: 3951854 - RNA, 13 nt, Human herpesvirus 1
gccgcgcggacga

SEQ ID NO: 3951855 - RNA, 15 nt, Human herpesvirus 1
gccgcggaucgggcc

SEQ ID NO: 3951856 - RNA, 20 nt, Human herpesvirus 1
gccgcggguauagaucgacg

SEQ ID NO: 3951857 - RNA, 14 nt, Human herpesvirus 1
gccgcugaccccca

SEQ ID NO: 3951858 - RNA, 15 nt, Human herpesvirus 1
gccggcaacugacgc

SEQ ID NO: 3951859 - RNA, 20 nt, Human herpesvirus 1
gccggcacguaccugcggcu

SEQ ID NO: 3951860 - RNA, 21 nt, Human herpesvirus 1
gccggcguuucugaccugcac

SEQ ID NO: 3951861 - RNA, 23 nt, Human herpesvirus 1
gccggcguuucugaccugcaccg

SEQ ID NO: 3951862 - RNA, 13 nt, Human herpesvirus 1
gccgggagcacca

SEQ ID NO: 3951863 - RNA, 15 nt, Human herpesvirus 1
gccgggagcaccaca

SEQ ID NO: 3951864 - RNA, 16 nt, Human herpesvirus 1
gccgggcgacccagau

SEQ ID NO: 3951865 - RNA, 19 nt, Human herpesvirus 1
gccggggaccgcagccugg

SEQ ID NO: 3951866 - RNA, 20 nt, Human herpesvirus 1
gccggggaccgcagccuggu

SEQ ID NO: 3951867 - RNA, 21 nt, Human herpesvirus 1
gccguggcgccccggccccuc

SEQ ID NO: 3951868 - RNA, 19 nt, Human herpesvirus 1
gccuacacucgacccccgc

SEQ ID NO: 3951869 - RNA, 16 nt, Human herpesvirus 1
gccucccaacccccua

SEQ ID NO: 3951870 - RNA, 22 nt, Human herpesvirus 1
gccucccaacccccuaagaccc

SEQ ID NO: 3951871 - RNA, 13 nt, Human herpesvirus 1
gccucccccugag

SEQ ID NO: 3951872 - RNA, 18 nt, Human herpesvirus 1
gccucccccugagccgcu

SEQ ID NO: 3951873 - RNA, 15 nt, Human herpesvirus 1
gccuccgaccccaga

SEQ ID NO: 3951874 - RNA, 20 nt, Human herpesvirus 1
gccucgaugacgucccggcu

SEQ ID NO: 3951875 - RNA, 18 nt, Human herpesvirus 1
gccucggcccgcgaacgg

SEQ ID NO: 3951876 - RNA, 16 nt, Human herpesvirus 1
gccucgggggcgggac

SEQ ID NO: 3951877 - RNA, 12 nt, Human herpesvirus 1
gccucucccccc

SEQ ID NO: 3951878 - RNA, 15 nt, Human herpesvirus 1
gccucucgcugcugg

SEQ ID NO: 3951879 - RNA, 15 nt, Human herpesvirus 1
gccugacgcgccgcg

SEQ ID NO: 3951880 - RNA, 14 nt, Human herpesvirus 1
gccugccgccucac

SEQ ID NO: 3951881 - RNA, 20 nt, Human herpesvirus 1
gccugccucuccccccaggc

SEQ ID NO: 3951882 - RNA, 14 nt, Human herpesvirus 1
gccugccugcggcu

SEQ ID NO: 3951883 - RNA, 11 nt, Human herpesvirus 1
gccuggaggac

SEQ ID NO: 3951884 - RNA, 21 nt, Human herpesvirus 1
gccugggucuuccgcggagcu

SEQ ID NO: 3951885 - RNA, 19 nt, Human herpesvirus 1
gccuguguccgcuucucuu

SEQ ID NO: 3951886 - RNA, 17 nt, Human herpesvirus 1
gccuucacgugcugcug

SEQ ID NO: 3951887 - RNA, 19 nt, Human herpesvirus 1
gccuucacgugcugcugcg

SEQ ID NO: 3951888 - RNA, 14 nt, Human herpesvirus 1
gccuuuaacuacau

SEQ ID NO: 3951889 - RNA, 12 nt, Human herpesvirus 1
gccuuucccccc

SEQ ID NO: 3951890 - RNA, 18 nt, Human herpesvirus 1
gcgaagacccccccggag

SEQ ID NO: 3951891 - RNA, 18 nt, Human herpesvirus 1
gcgacaacgagcccccgc

SEQ ID NO: 3951892 - RNA, 20 nt, Human herpesvirus 1
gcgacaacgcgggcguuccc

SEQ ID NO: 3951893 - RNA, 13 nt, Human herpesvirus 1
gcgacccuccggg

SEQ ID NO: 3951894 - RNA, 23 nt, Human herpesvirus 1
gcgaccgcaacuucccacccgga

SEQ ID NO: 3951895 - RNA, 20 nt, Human herpesvirus 1
gcgaccgccggcgaggugga

SEQ ID NO: 3951896 - RNA, 20 nt, Human herpesvirus 1
gcgaccgucgccgcgggcca

SEQ ID NO: 3951897 - RNA, 22 nt, Human herpesvirus 1
gcgagcucccagagaccccagg

SEQ ID NO: 3951898 - RNA, 19 nt, Human herpesvirus 1
gcgaguccugcgccccgcc

SEQ ID NO: 3951899 - RNA, 17 nt, Human herpesvirus 1
gcgcaagcgccgcaaca

SEQ ID NO: 3951900 - RNA, 15 nt, Human herpesvirus 1
gcgcaauugcggcca

SEQ ID NO: 3951901 - RNA, 18 nt, Human herpesvirus 1
gcgcauacgccuccccca

SEQ ID NO: 3951902 - RNA, 23 nt, Human herpesvirus 1
gcgcaucuucggcgggugucugc

SEQ ID NO: 3951903 - RNA, 18 nt, Human herpesvirus 1
gcgccaaacgccagccug

SEQ ID NO: 3951904 - RNA, 21 nt, Human herpesvirus 1
gcgccaggucggcgaccgcca

SEQ ID NO: 3951905 - RNA, 19 nt, Human herpesvirus 1
gcgccaugcuggcggacgg

SEQ ID NO: 3951906 - RNA, 17 nt, Human herpesvirus 1
gcgccauggcgggacug

SEQ ID NO: 3951907 - RNA, 17 nt, Human herpesvirus 1
gcgcccacuacaccagc

SEQ ID NO: 3951908 - RNA, 12 nt, Human herpesvirus 1
gcgccccccaaa

SEQ ID NO: 3951909 - RNA, 12 nt, Human herpesvirus 1
gcgcccccgccc

SEQ ID NO: 3951910 - RNA, 11 nt, Human herpesvirus 1
gcgccccgaug

SEQ ID NO: 3951911 - RNA, 20 nt, Human herpesvirus 1
gcgccccggccccucauggg

SEQ ID NO: 3951912 - RNA, 12 nt, Human herpesvirus 1
gcgccgaccacc

SEQ ID NO: 3951913 - RNA, 19 nt, Human herpesvirus 1
gcgccgcaaaucccaccaa

SEQ ID NO: 3951914 - RNA, 20 nt, Human herpesvirus 1
gcgccguuggcccccgccuc

SEQ ID NO: 3951915 - RNA, 14 nt, Human herpesvirus 1
gcgccuagccaacc

SEQ ID NO: 3951916 - RNA, 20 nt, Human herpesvirus 1
gcgccuagccaaccuguggc

SEQ ID NO: 3951917 - RNA, 16 nt, Human herpesvirus 1
cccucccccuccgcau

SEQ ID NO: 3951918 - RNA, 22 nt, Human herpesvirus 1
cccucccgcugcgcaucccccc

SEQ ID NO: 3951919 - RNA, 13 nt, Human herpesvirus 1
cccucccgucacc

SEQ ID NO: 3951920 - RNA, 15 nt, Human herpesvirus 1
cccuccgcuggggcc

SEQ ID NO: 3951921 - RNA, 13 nt, Human herpesvirus 1
cccucgccacguc

SEQ ID NO: 3951922 - RNA, 19 nt, Human herpesvirus 1
cccucucuucccucagguc

SEQ ID NO: 3951923 - RNA, 21 nt, Human herpesvirus 1
cccucuuuuucuuuaaccgcg

SEQ ID NO: 3951924 - RNA, 18 nt, Human herpesvirus 1
cccugaccccgcuccugu

SEQ ID NO: 3951925 - RNA, 22 nt, Human herpesvirus 1
cccugcugcaggccccccgccg

SEQ ID NO: 3951926 - RNA, 12 nt, Human herpesvirus 1
cccuggccgugg

SEQ ID NO: 3951927 - RNA, 13 nt, Human herpesvirus 1
cccuggcgccgcc

SEQ ID NO: 3951928 - RNA, 17 nt, Human herpesvirus 1
cccuggcgccgccuggu

SEQ ID NO: 3951929 - RNA, 17 nt, Human herpesvirus 1
cccuggcggacggcggc

SEQ ID NO: 3951930 - RNA, 16 nt, Human herpesvirus 1
cccuguuugucgacga

SEQ ID NO: 3951931 - RNA, 22 nt, Human herpesvirus 1
cccuguuugucgccuggcuggc

SEQ ID NO: 3951932 - RNA, 16 nt, Human herpesvirus 1
cccuucccucccccuc

SEQ ID NO: 3951933 - RNA, 17 nt, Human herpesvirus 1
ccgaacccggcccgggg

SEQ ID NO: 3951934 - RNA, 14 nt, Human herpesvirus 1
ccgacaccaccagc

SEQ ID NO: 3951935 - RNA, 15 nt, Human herpesvirus 1
ccgacagcacucaca

SEQ ID NO: 3951936 - RNA, 13 nt, Human herpesvirus 1
ccgaccggguccc

SEQ ID NO: 3951937 - RNA, 12 nt, Human herpesvirus 1
ccgacgccucaa

SEQ ID NO: 3951938 - RNA, 15 nt, Human herpesvirus 1
ccgacguggcgcacg

SEQ ID NO: 3951939 - RNA, 14 nt, Human herpesvirus 1
ccgacuccccggac

SEQ ID NO: 3951940 - RNA, 18 nt, Human herpesvirus 1
ccgagccccccgcugcgg

SEQ ID NO: 3951941 - RNA, 21 nt, Human herpesvirus 1
ccgagccccccgcugcggcca

SEQ ID NO: 3951942 - RNA, 17 nt, Human herpesvirus 1
ccgagcuaugggccucu

SEQ ID NO: 3951943 - RNA, 19 nt, Human herpesvirus 1
ccgaggcgauuagccagca

SEQ ID NO: 3951944 - RNA, 16 nt, Human herpesvirus 1
ccgaggcggccugggu

SEQ ID NO: 3951945 - RNA, 15 nt, Human herpesvirus 1
ccgagggccgggccc

SEQ ID NO: 3951946 - RNA, 13 nt, Human herpesvirus 1
ccgaggggccaag

SEQ ID NO: 3951947 - RNA, 18 nt, Human herpesvirus 1
ccgaucccaacuccucag

SEQ ID NO: 3951948 - RNA, 21 nt, Human herpesvirus 1
ccgcaacgcgcuggggcugcc

SEQ ID NO: 3951949 - RNA, 16 nt, Human herpesvirus 1
ccgcaacuucccaccc

SEQ ID NO: 3951950 - RNA, 19 nt, Human herpesvirus 1
ccgcaauuugcacccagcc

SEQ ID NO: 3951951 - RNA, 23 nt, Human herpesvirus 1
ccgcagucccugaguugggaaua

SEQ ID NO: 3951952 - RNA, 22 nt, Human herpesvirus 1
ccgcauccacccuccgcugggg

SEQ ID NO: 3951953 - RNA, 14 nt, Human herpesvirus 1
ccgcaucccaggau

SEQ ID NO: 3951954 - RNA, 19 nt, Human herpesvirus 1
ccgccaaauaaagccacug

SEQ ID NO: 3951955 - RNA, 23 nt, Human herpesvirus 1
ccgccauguuugcgggccugggc

SEQ ID NO: 3951956 - RNA, 12 nt, Human herpesvirus 1
ccgccccacccc

SEQ ID NO: 3951957 - RNA, 17 nt, Human herpesvirus 1
ccgcccccaacaggugg

SEQ ID NO: 3951958 - RNA, 21 nt, Human herpesvirus 1
ccgcccccagcugggcccgga

SEQ ID NO: 3951959 - RNA, 21 nt, Human herpesvirus 1
ccgcccucacagggcgggccg

SEQ ID NO: 3951960 - RNA, 12 nt, Human herpesvirus 1
ccgccggcggcg

SEQ ID NO: 3951961 - RNA, 16 nt, Human herpesvirus 1
ccgccugucgcucguc

SEQ ID NO: 3951962 - RNA, 14 nt, Human herpesvirus 1
ccgccuuccggacc

SEQ ID NO: 3951963 - RNA, 22 nt, Human herpesvirus 1
ccgcgacccaccgggcccggcc

SEQ ID NO: 3951964 - RNA, 13 nt, Human herpesvirus 1
ccgcgacccggac

SEQ ID NO: 3951965 - RNA, 20 nt, Human herpesvirus 1
ccgcgacccggacgccgauc

SEQ ID NO: 3951966 - RNA, 22 nt, Human herpesvirus 1
ccgcgagcgccgcuacugcgcg

SEQ ID NO: 3951967 - RNA, 23 nt, Human herpesvirus 1
ccgcgauuccgagggccgggccc

SEQ ID NO: 3951968 - RNA, 14 nt, Human herpesvirus 1
ccgcgcccucgcca

SEQ ID NO: 3951969 - RNA, 21 nt, Human herpesvirus 1
ccgcgccgcugcccgacccgg

SEQ ID NO: 3951970 - RNA, 19 nt, Human herpesvirus 1
ccgcgcggacggcgcgggg

SEQ ID NO: 3951971 - RNA, 18 nt, Human herpesvirus 1
ccgcgcuccucccgccac

SEQ ID NO: 3951972 - RNA, 14 nt, Human herpesvirus 1
ccgcggaucgggcc

SEQ ID NO: 3951973 - RNA, 16 nt, Human herpesvirus 1
ccgcggaucugcuccg

SEQ ID NO: 3951974 - RNA, 19 nt, Human herpesvirus 1
ccgcgggcccccggccgcc

SEQ ID NO: 3951975 - RNA, 16 nt, Human herpesvirus 1
ccgcguccaaacccac

SEQ ID NO: 3951976 - RNA, 15 nt, Human herpesvirus 1
ccgcgucuggccccg

SEQ ID NO: 3951977 - RNA, 15 nt, Human herpesvirus 1
ccgcucgguggcucc

SEQ ID NO: 3951978 - RNA, 14 nt, Human herpesvirus 1
ccgcuggggccccc

SEQ ID NO: 3951979 - RNA, 18 nt, Human herpesvirus 1
ccgcuuuauaggccggga

SEQ ID NO: 3951980 - RNA, 11 nt, Human herpesvirus 1
ccggaaggaac

SEQ ID NO: 3951981 - RNA, 18 nt, Human herpesvirus 1
ccggacccguuccagccc

SEQ ID NO: 3951982 - RNA, 24 nt, Human herpesvirus 1
ccggacgacgugguccgcggggcc

SEQ ID NO: 3951983 - RNA, 14 nt, Human herpesvirus 1
ccggacgcgcggcg

SEQ ID NO: 3951984 - RNA, 21 nt, Human herpesvirus 1
ccggaggcgccgcgcggacgg

SEQ ID NO: 3951985 - RNA, 19 nt, Human herpesvirus 1
ccggaggcgccugccccgc

SEQ ID NO: 3951986 - RNA, 12 nt, Human herpesvirus 1
ccggaggugggg

SEQ ID NO: 3951987 - RNA, 15 nt, Human herpesvirus 1
ccggcacgccugggg

SEQ ID NO: 3951988 - RNA, 18 nt, Human herpesvirus 1
ccggcccauugggcggga

SEQ ID NO: 3951989 - RNA, 21 nt, Human herpesvirus 1
ccggccccugggccccgggac

SEQ ID NO: 3951990 - RNA, 16 nt, Human herpesvirus 1
ccggcccuaaccccac

SEQ ID NO: 3951991 - RNA, 22 nt, Human herpesvirus 1
ccggcccuaaccccaccccugu

SEQ ID NO: 3951992 - RNA, 17 nt, Human herpesvirus 1
ccggccuggcggcggcc

SEQ ID NO: 3951993 - RNA, 17 nt, Human herpesvirus 1
ccggccugggggccguc

SEQ ID NO: 3951994 - RNA, 13 nt, Human herpesvirus 1
ccggcgccgcccg

SEQ ID NO: 3951995 - RNA, 15 nt, Human herpesvirus 1
ccggcggacccaagc

SEQ ID NO: 3951996 - RNA, 16 nt, Human herpesvirus 1
ccggcggacccaagcc

SEQ ID NO: 3951997 - RNA, 16 nt, Human herpesvirus 1
ccggcggacccccgga

SEQ ID NO: 3951998 - RNA, 23 nt, Human herpesvirus 1
ccggcgggguuauaggccacgca

SEQ ID NO: 3951999 - RNA, 13 nt, Human herpesvirus 1
ccggcggucgcgc

SEQ ID NO: 3952000 - RNA, 19 nt, Human herpesvirus 1
ccggcggucgcgcuccucu

SEQ ID NO: 3952001 - RNA, 16 nt, Human herpesvirus 1
ccgggaagcagggccc

SEQ ID NO: 3952002 - RNA, 15 nt, Human herpesvirus 1
ccgggacgaggccgu

SEQ ID NO: 3952003 - RNA, 16 nt, Human herpesvirus 1
ccgggacuccgcggac

SEQ ID NO: 3952004 - RNA, 15 nt, Human herpesvirus 1
ccgggagccccggac

SEQ ID NO: 3952005 - RNA, 14 nt, Human herpesvirus 1
ccgggcgaugagcc

SEQ ID NO: 3952006 - RNA, 14 nt, Human herpesvirus 1
ccgggcgcgucccc

SEQ ID NO: 3952007 - RNA, 16 nt, Human herpesvirus 1
ccgggcgcuuggcaug

SEQ ID NO: 3952008 - RNA, 17 nt, Human herpesvirus 1
ccgggcgcuuggcaugc

SEQ ID NO: 3952009 - RNA, 16 nt, Human herpesvirus 1
ccggggaucugguccg

SEQ ID NO: 3952010 - RNA, 13 nt, Human herpesvirus 1
ccgggggccuggu

SEQ ID NO: 3952011 - RNA, 21 nt, Human herpesvirus 1
ccggguacggcgucugggcca

SEQ ID NO: 3952012 - RNA, 13 nt, Human herpesvirus 1
ccgggucccuccu

SEQ ID NO: 3952013 - RNA, 15 nt, Human herpesvirus 1
ccgggucuguugggg

SEQ ID NO: 3952014 - RNA, 15 nt, Human herpesvirus 1
ccggguuccgcgacc

SEQ ID NO: 3952015 - RNA, 20 nt, Human herpesvirus 1
ccggucaacgaggguugggg

SEQ ID NO: 3952016 - RNA, 13 nt, Human herpesvirus 1
ccggucucccagg

SEQ ID NO: 3952017 - RNA, 12 nt, Human herpesvirus 1
ccguccccugcc

SEQ ID NO: 3952018 - RNA, 20 nt, Human herpesvirus 1
ccgucccguagucccauccc

SEQ ID NO: 3952019 - RNA, 14 nt, Human herpesvirus 1
ccgucgaagcugau

SEQ ID NO: 3952020 - RNA, 22 nt, Human herpesvirus 1
ccgucgauccaggacgccgcga

SEQ ID NO: 3952021 - RNA, 20 nt, Human herpesvirus 1
ccgucgcacgcguccagucg

SEQ ID NO: 3952022 - RNA, 22 nt, Human herpesvirus 1
ccgucgcccgauuuacagcccc

SEQ ID NO: 3952023 - RNA, 15 nt, Human herpesvirus 1
ccgucgccgcgggcc

SEQ ID NO: 3952024 - RNA, 17 nt, Human herpesvirus 1
ccgucuggguuuucccc

SEQ ID NO: 3952025 - RNA, 14 nt, Human herpesvirus 1
ccgugcaccguggg

SEQ ID NO: 3952026 - RNA, 15 nt, Human herpesvirus 1
ccguggccccggccc

SEQ ID NO: 3952027 - RNA, 21 nt, Human herpesvirus 1
ccguggccgacaacugccuga

SEQ ID NO: 3952028 - RNA, 18 nt, Human herpesvirus 1
ccguggccggccugcgcg

SEQ ID NO: 3952029 - RNA, 13 nt, Human herpesvirus 1
ccguugcccgggc

SEQ ID NO: 3952030 - RNA, 19 nt, Human herpesvirus 1
ccguugcccgggccuccuc

SEQ ID NO: 3952031 - RNA, 15 nt, Human herpesvirus 1
ccguuucgggcggca

SEQ ID NO: 3952032 - RNA, 17 nt, Human herpesvirus 1
gagcgcccuccugacca

SEQ ID NO: 3952033 - RNA, 18 nt, Human herpesvirus 1
gagcgcgcuuguccccga

SEQ ID NO: 3952034 - RNA, 18 nt, Human herpesvirus 1
gagcggcaccaccggggc

SEQ ID NO: 3952035 - RNA, 17 nt, Human herpesvirus 1
gagcguuucugucggac

SEQ ID NO: 3952036 - RNA, 19 nt, Human herpesvirus 1
gagcucaucgcgacccugu

SEQ ID NO: 3952037 - RNA, 12 nt, Human herpesvirus 1
gaggaucacgag

SEQ ID NO: 3952038 - RNA, 19 nt, Human herpesvirus 1
gaggcaguuaacugucugg

SEQ ID NO: 3952039 - RNA, 18 nt, Human herpesvirus 1
gaggccacguguagccug

SEQ ID NO: 3952040 - RNA, 16 nt, Human herpesvirus 1
gaggcgccugccccgc

SEQ ID NO: 3952041 - RNA, 15 nt, Human herpesvirus 1
gaggggggagauggg

SEQ ID NO: 3952042 - RNA, 23 nt, Human herpesvirus 1
gaggugcuucuguuuggcgcccc

SEQ ID NO: 3952043 - RNA, 21 nt, Human herpesvirus 1
gaguacccgcucucgcgcgug

SEQ ID NO: 3952044 - RNA, 20 nt, Human herpesvirus 1
gauagagucgacgaccuggg

SEQ ID NO: 3952045 - RNA, 16 nt, Human herpesvirus 1
gaucccaacaacuccc

SEQ ID NO: 3952046 - RNA, 14 nt, Human herpesvirus 1
gaucccccgcgcgg

SEQ ID NO: 3952047 - RNA, 20 nt, Human herpesvirus 1
gaucccccgcgcggcugcca

SEQ ID NO: 3952048 - RNA, 21 nt, Human herpesvirus 1
gaucccccgcgcggcugccaa

SEQ ID NO: 3952049 - RNA, 12 nt, Human herpesvirus 1
gauccggcggga

SEQ ID NO: 3952050 - RNA, 18 nt, Human herpesvirus 1
ccagaucuacugcugggc

SEQ ID NO: 3952051 - RNA, 19 nt, Human herpesvirus 1
ccagaucuacugcugggcc

SEQ ID NO: 3952052 - RNA, 24 nt, Human herpesvirus 1
ccagaucuacugcugggccaugga

SEQ ID NO: 3952053 - RNA, 20 nt, Human herpesvirus 1
ccagccccagaaaccccgga

SEQ ID NO: 3952054 - RNA, 19 nt, Human herpesvirus 1
ccagccuguuuguccuggg

SEQ ID NO: 3952055 - RNA, 18 nt, Human herpesvirus 1
ccagcgcagaggcggcca

SEQ ID NO: 3952056 - RNA, 15 nt, Human herpesvirus 1
ccagcuaugggcccu

SEQ ID NO: 3952057 - RNA, 19 nt, Human herpesvirus 1
ccaggaaauccguggcccc

SEQ ID NO: 3952058 - RNA, 19 nt, Human herpesvirus 1
ccaggaucacaccggucaa

SEQ ID NO: 3952059 - RNA, 14 nt, Human herpesvirus 1
ccaggccuccaccc

SEQ ID NO: 3952060 - RNA, 15 nt, Human herpesvirus 1
ccaggcgcgccgcga

SEQ ID NO: 3952061 - RNA, 18 nt, Human herpesvirus 1
ccagggagaaaccccagc

SEQ ID NO: 3952062 - RNA, 12 nt, Human herpesvirus 1
ccagggagcccc

SEQ ID NO: 3952063 - RNA, 23 nt, Human herpesvirus 1
ccagggcacccaaggggccgugc

SEQ ID NO: 3952064 - RNA, 16 nt, Human herpesvirus 1
ccagggcggggcucag

SEQ ID NO: 3952065 - RNA, 18 nt, Human herpesvirus 1
ccaggucggcgaccgcca

SEQ ID NO: 3952066 - RNA, 22 nt, Human herpesvirus 1
ccaggucggcgaccgccagccg

SEQ ID NO: 3952067 - RNA, 20 nt, Human herpesvirus 1
ccaguggcuccgggccaacc

SEQ ID NO: 3952068 - RNA, 21 nt, Human herpesvirus 1
ccaguggcuccgggccaacca

SEQ ID NO: 3952069 - RNA, 17 nt, Human herpesvirus 1
ccaguugagccgcgcca

SEQ ID NO: 3952070 - RNA, 21 nt, Human herpesvirus 1
ccaucaccccgcaauuugcac

SEQ ID NO: 3952071 - RNA, 14 nt, Human herpesvirus 1
ccaucccccgaucc

SEQ ID NO: 3952072 - RNA, 18 nt, Human herpesvirus 1
ccauccgaacgcagcccc

SEQ ID NO: 3952073 - RNA, 20 nt, Human herpesvirus 1
ccauccugcggcucguggcg

SEQ ID NO: 3952074 - RNA, 22 nt, Human herpesvirus 1
ccaucgaguucgccaggcugca

SEQ ID NO: 3952075 - RNA, 20 nt, Human herpesvirus 1
ccaucgccucggccaccgug

SEQ ID NO: 3952076 - RNA, 13 nt, Human herpesvirus 1
ccaucgguccccu

SEQ ID NO: 3952077 - RNA, 17 nt, Human herpesvirus 1
ccaucugggauggcucc

SEQ ID NO: 3952078 - RNA, 19 nt, Human herpesvirus 1
ccauggacagcgaccuggg

SEQ ID NO: 3952079 - RNA, 20 nt, Human herpesvirus 1
ccauggacagcgaccugggg

SEQ ID NO: 3952080 - RNA, 16 nt, Human herpesvirus 1
ccauguccggcagggg

SEQ ID NO: 3952081 - RNA, 20 nt, Human herpesvirus 1
ccauguuugcgggccugggc

SEQ ID NO: 3952082 - RNA, 18 nt, Human herpesvirus 1
cccaacaacucccccgcg

SEQ ID NO: 3952083 - RNA, 17 nt, Human herpesvirus 1
cccaacccccggcccca

SEQ ID NO: 3952084 - RNA, 20 nt, Human herpesvirus 1
cccaacccccuaagacccac

SEQ ID NO: 3952085 - RNA, 17 nt, Human herpesvirus 1
cccaacuccagaccacc

SEQ ID NO: 3952086 - RNA, 14 nt, Human herpesvirus 1
cccaacuccucagc

SEQ ID NO: 3952087 - RNA, 22 nt, Human herpesvirus 1
cccaauaaacguauaucgcuac

SEQ ID NO: 3952088 - RNA, 17 nt, Human herpesvirus 1
cccacacagcccucccg

SEQ ID NO: 3952089 - RNA, 18 nt, Human herpesvirus 1
cccaccccccgacgccag

SEQ ID NO: 3952090 - RNA, 17 nt, Human herpesvirus 1
cccaccgacacaugcac

SEQ ID NO: 3952091 - RNA, 18 nt, Human herpesvirus 1
cccaccguugcccgggcc

SEQ ID NO: 3952092 - RNA, 14 nt, Human herpesvirus 1
cccacgcucucccc

SEQ ID NO: 3952093 - RNA, 18 nt, Human herpesvirus 1
cccacuacaccagccaau

SEQ ID NO: 3952094 - RNA, 19 nt, Human herpesvirus 1
cccacuacaccagccaauc

SEQ ID NO: 3952095 - RNA, 13 nt, Human herpesvirus 1
cccagaccccggg

SEQ ID NO: 3952096 - RNA, 13 nt, Human herpesvirus 1
cccagaugcccac

SEQ ID NO: 3952097 - RNA, 16 nt, Human herpesvirus 1
cccagaugcccacggg

SEQ ID NO: 3952098 - RNA, 18 nt, Human herpesvirus 1
cccagauuguccgcgggg

SEQ ID NO: 3952099 - RNA, 12 nt, Human herpesvirus 1
cccagcaccgac

SEQ ID NO: 3952100 - RNA, 15 nt, Human herpesvirus 1
cccagcagcucccca

SEQ ID NO: 3952101 - RNA, 16 nt, Human herpesvirus 1
cccaggaucacaccgg

SEQ ID NO: 3952102 - RNA, 20 nt, Human herpesvirus 1
cccaggcggcgaacgggggc

SEQ ID NO: 3952103 - RNA, 13 nt, Human herpesvirus 1
cccaguccccggg

SEQ ID NO: 3952104 - RNA, 18 nt, Human herpesvirus 1
cccaguccccgggcccag

SEQ ID NO: 3952105 - RNA, 23 nt, Human herpesvirus 1
cccaucccgaggccccacgucgg

SEQ ID NO: 3952106 - RNA, 19 nt, Human herpesvirus 1
cccauccggugguccgugu

SEQ ID NO: 3952107 - RNA, 15 nt, Human herpesvirus 1
cccaucuaaugccac

SEQ ID NO: 3952108 - RNA, 12 nt, Human herpesvirus 1
ccccaaggaggg

SEQ ID NO: 3952109 - RNA, 14 nt, Human herpesvirus 1
ccccaccccugugc

SEQ ID NO: 3952110 - RNA, 21 nt, Human herpesvirus 1
ccccaguggguuuugcggacc

SEQ ID NO: 3952111 - RNA, 19 nt, Human herpesvirus 1
ccccaugcgggcucggcuc

SEQ ID NO: 3952112 - RNA, 19 nt, Human herpesvirus 1
cccccauaagguccguccg

SEQ ID NO: 3952113 - RNA, 21 nt, Human herpesvirus 1
cccccaucuaaugccacgcga

SEQ ID NO: 3952114 - RNA, 13 nt, Human herpesvirus 1
cccccccaagcgc

SEQ ID NO: 3952115 - RNA, 13 nt, Human herpesvirus 1
cccccccucgcgc

SEQ ID NO: 3952116 - RNA, 20 nt, Human herpesvirus 1
cccccggugccaauaaaccc

SEQ ID NO: 3952117 - RNA, 20 nt, Human herpesvirus 1
cccccgucgaagcugauguc

SEQ ID NO: 3952118 - RNA, 13 nt, Human herpesvirus 1
cccccuccgcgcc

SEQ ID NO: 3952119 - RNA, 22 nt, Human herpesvirus 1
cccccucuaucccgcccaccgc

SEQ ID NO: 3952120 - RNA, 11 nt, Human herpesvirus 1
cccccuggccu

SEQ ID NO: 3952121 - RNA, 14 nt, Human herpesvirus 1
ccccgacaugaccg

SEQ ID NO: 3952122 - RNA, 19 nt, Human herpesvirus 1
ccccgaggauucggcccuc

SEQ ID NO: 3952123 - RNA, 12 nt, Human herpesvirus 1
ccccgccaccca

SEQ ID NO: 3952124 - RNA, 21 nt, Human herpesvirus 1
ccccgcgagguccgaagacuc

SEQ ID NO: 3952125 - RNA, 14 nt, Human herpesvirus 1
ccccgcucccucga

SEQ ID NO: 3952126 - RNA, 16 nt, Human herpesvirus 1
ccccgcuucauccccg

SEQ ID NO: 3952127 - RNA, 20 nt, Human herpesvirus 1
ccccggaggcguuccgggca

SEQ ID NO: 3952128 - RNA, 16 nt, Human herpesvirus 1
ccccggagggcugcca

SEQ ID NO: 3952129 - RNA, 16 nt, Human herpesvirus 1
ccccggaggggcuccu

SEQ ID NO: 3952130 - RNA, 20 nt, Human herpesvirus 1
ccccggauaugcgcgggguu

SEQ ID NO: 3952131 - RNA, 19 nt, Human herpesvirus 1
ccccggauggggcccgggu

SEQ ID NO: 3952132 - RNA, 12 nt, Human herpesvirus 1
ccccggccccca

SEQ ID NO: 3952133 - RNA, 14 nt, Human herpesvirus 1
ccccggggcgggug

SEQ ID NO: 3952134 - RNA, 16 nt, Human herpesvirus 1
ccccggggcucagcca

SEQ ID NO: 3952135 - RNA, 15 nt, Human herpesvirus 1
ccccggucucccagg

SEQ ID NO: 3952136 - RNA, 22 nt, Human herpesvirus 1
ccccguccccuucgaggaggug

SEQ ID NO: 3952137 - RNA, 16 nt, Human herpesvirus 1
ccccucguucugcugc

SEQ ID NO: 3952138 - RNA, 13 nt, Human herpesvirus 1
ccccugagccgcu

SEQ ID NO: 3952139 - RNA, 21 nt, Human herpesvirus 1
ccccuucuccccacaacaugg

SEQ ID NO: 3952140 - RNA, 12 nt, Human herpesvirus 1
cccgaaccaggc

SEQ ID NO: 3952141 - RNA, 14 nt, Human herpesvirus 1
cccgagaccagucg

SEQ ID NO: 3952142 - RNA, 21 nt, Human herpesvirus 1
cccgcacagaugggacgccau

SEQ ID NO: 3952143 - RNA, 12 nt, Human herpesvirus 1
cccgcccaccgg

SEQ ID NO: 3952144 - RNA, 16 nt, Human herpesvirus 1
cccgcccggguccccg

SEQ ID NO: 3952145 - RNA, 14 nt, Human herpesvirus 1
cccgcgacccggac

SEQ ID NO: 3952146 - RNA, 16 nt, Human herpesvirus 1
cccgcgcaugcucugg

SEQ ID NO: 3952147 - RNA, 17 nt, Human herpesvirus 1
cccgcgcgggggcgccg

SEQ ID NO: 3952148 - RNA, 15 nt, Human herpesvirus 1
cccgcgcuaugacgg

SEQ ID NO: 3952149 - RNA, 21 nt, Human herpesvirus 1
cccgcgcuaugacggcaauaa

SEQ ID NO: 3952150 - RNA, 22 nt, Human herpesvirus 1
cccgcggaaacguucgcgcgcc

SEQ ID NO: 3952151 - RNA, 15 nt, Human herpesvirus 1
cccgcguccacccgg

SEQ ID NO: 3952152 - RNA, 23 nt, Human herpesvirus 1
cccgcgucgggauccacaccgcg

SEQ ID NO: 3952153 - RNA, 18 nt, Human herpesvirus 1
cccgcgugcaacgcggga

SEQ ID NO: 3952154 - RNA, 14 nt, Human herpesvirus 1
cccgcucucgcgcg

SEQ ID NO: 3952155 - RNA, 21 nt, Human herpesvirus 1
cccgcugcgcauccccccguc

SEQ ID NO: 3952156 - RNA, 18 nt, Human herpesvirus 1
cccggccaccccgaacaa

SEQ ID NO: 3952157 - RNA, 21 nt, Human herpesvirus 1
cccggcccggaggaggcucuc

SEQ ID NO: 3952158 - RNA, 14 nt, Human herpesvirus 1
cccggcccugcugc

SEQ ID NO: 3952159 - RNA, 19 nt, Human herpesvirus 1
cccggcccugcugcugccg

SEQ ID NO: 3952160 - RNA, 15 nt, Human herpesvirus 1
cccggcuagacccac

SEQ ID NO: 3952161 - RNA, 18 nt, Human herpesvirus 1
cccggcuagacccacggg

SEQ ID NO: 3952162 - RNA, 17 nt, Human herpesvirus 1
cccgggccacggcgccg

SEQ ID NO: 3952163 - RNA, 19 nt, Human herpesvirus 1
cccgggcgcgcccucuucu

SEQ ID NO: 3952164 - RNA, 21 nt, Human herpesvirus 1
cccggguacgaccaucacccg

SEQ ID NO: 3952165 - RNA, 14 nt, Human herpesvirus 1
cccggucgccgagc

SEQ ID NO: 3952166 - RNA, 20 nt, Human herpesvirus 1
cccguccgaagaucgcgugu

SEQ ID NO: 3952167 - RNA, 19 nt, Human herpesvirus 1
ugucggggaggggaaaagu

SEQ ID NO: 3952168 - RNA, 17 nt, Human herpesvirus 1
ugugccaucgcgccccc

SEQ ID NO: 3952169 - RNA, 22 nt, Human herpesvirus 1
uguggggacccggcccuaaccc

SEQ ID NO: 3952170 - RNA, 13 nt, Human herpesvirus 1
uguguuucagaua

SEQ ID NO: 3952171 - RNA, 13 nt, Human herpesvirus 1
uguucacaggggg

SEQ ID NO: 3952172 - RNA, 16 nt, Human herpesvirus 1
uguuuucguggacucg

SEQ ID NO: 3952173 - RNA, 14 nt, Human herpesvirus 1
uuaacuacauuaaa

SEQ ID NO: 3952174 - RNA, 12 nt, Human herpesvirus 1
uuaauguaaaua

SEQ ID NO: 3952175 - RNA, 18 nt, Human herpesvirus 1
uuccagccccccagccuc

SEQ ID NO: 3952176 - RNA, 15 nt, Human herpesvirus 1
uuccaggucccaccu

SEQ ID NO: 3952177 - RNA, 12 nt, Human herpesvirus 1
uucccacgcuuc

SEQ ID NO: 3952178 - RNA, 15 nt, Human herpesvirus 1
uucccccccaucacc

SEQ ID NO: 3952179 - RNA, 15 nt, Human herpesvirus 1
uuccgguaugggggg

SEQ ID NO: 3952180 - RNA, 16 nt, Human herpesvirus 1
uucguggaaccaugac

SEQ ID NO: 3952181 - RNA, 20 nt, Human herpesvirus 1
uucugaucgcguaccagccc

SEQ ID NO: 3952182 - RNA, 12 nt, Human herpesvirus 1
uucuguggccuc

SEQ ID NO: 3952183 - RNA, 14 nt, Human herpesvirus 1
uugagccccucgcc

SEQ ID NO: 3952184 - RNA, 12 nt, Human herpesvirus 1
uugcccgggccg

SEQ ID NO: 3952185 - RNA, 18 nt, Human herpesvirus 1
uugccgugguccugugga

SEQ ID NO: 3952186 - RNA, 18 nt, Human herpesvirus 1
uugcggccacgggcugcg

SEQ ID NO: 3952187 - RNA, 21 nt, Human herpesvirus 1
uuggcccccggacccgggccg

SEQ ID NO: 3952188 - RNA, 22 nt, Human herpesvirus 1
uuggccggggagggcagggccg

SEQ ID NO: 3952189 - RNA, 18 nt, Human herpesvirus 1
uugggcgggaggaagcca

SEQ ID NO: 3952190 - RNA, 23 nt, Human herpesvirus 1
uuguauguccccaaaauaaaaga

SEQ ID NO: 3952191 - RNA, 21 nt, Human herpesvirus 1
uugucugcguauuccagggcg

SEQ ID NO: 3952192 - RNA, 22 nt, Human herpesvirus 1
uuucggugucuaacgguccuca

SEQ ID NO: 3952193 - RNA, 14 nt, Human herpesvirus 1
uuugcccauaauaa

SEQ ID NO: 3952194 - RNA, 15 nt, Human herpesvirus 1
uuuucgagugucgca

SEQ ID NO: 3952195 - RNA, 15 nt, Human herpesvirus 1
uuuuguuugucguca

SEQ ID NO: 3952196 - RNA, 19 nt, Human herpesvirus 1
ucaccaugcagcgccggac

SEQ ID NO: 3952197 - RNA, 17 nt, Human herpesvirus 1
ucacccacgccggcacc

SEQ ID NO: 3952198 - RNA, 17 nt, Human herpesvirus 1
ucaccccgcaauuugca

SEQ ID NO: 3952199 - RNA, 18 nt, Human herpesvirus 1
ucaccccgcaauuugcac

SEQ ID NO: 3952200 - RNA, 16 nt, Human herpesvirus 1
ucaccggcggaccccc

SEQ ID NO: 3952201 - RNA, 18 nt, Human herpesvirus 1
ucaccggugcgcccccca

SEQ ID NO: 3952202 - RNA, 13 nt, Human herpesvirus 1
ucaccguggccug

SEQ ID NO: 3952203 - RNA, 14 nt, Human herpesvirus 1
ucaccguggccugg

SEQ ID NO: 3952204 - RNA, 16 nt, Human herpesvirus 1
ucacgagcugacccug

SEQ ID NO: 3952205 - RNA, 21 nt, Human herpesvirus 1
ucacggugaccgcgugcccac

SEQ ID NO: 3952206 - RNA, 20 nt, Human herpesvirus 1
ucagagacaacgcgacaggc

SEQ ID NO: 3952207 - RNA, 16 nt, Human herpesvirus 1
ucagccugccucuccc

SEQ ID NO: 3952208 - RNA, 16 nt, Human herpesvirus 1
ucagcgacguccuggg

SEQ ID NO: 3952209 - RNA, 19 nt, Human herpesvirus 1
ucagcgacguccugggcca

SEQ ID NO: 3952210 - RNA, 19 nt, Human herpesvirus 1
ucagcuguggacccgagcu

SEQ ID NO: 3952211 - RNA, 12 nt, Human herpesvirus 1
ucagggcggcgg

SEQ ID NO: 3952212 - RNA, 22 nt, Human herpesvirus 1
ucagggcucuacccucuggacg

SEQ ID NO: 3952213 - RNA, 16 nt, Human herpesvirus 1
ucauccacaccuuauc

SEQ ID NO: 3952214 - RNA, 12 nt, Human herpesvirus 1
ucauccacgccg

SEQ ID NO: 3952215 - RNA, 22 nt, Human herpesvirus 1
ucaucgggggaguugugaucau

SEQ ID NO: 3952216 - RNA, 21 nt, Human herpesvirus 1
uccacacccaguggcuccggg

SEQ ID NO: 3952217 - RNA, 15 nt, Human herpesvirus 1
uccacaccugcacca

SEQ ID NO: 3952218 - RNA, 17 nt, Human herpesvirus 1
uccaccaaagucucugu

SEQ ID NO: 3952219 - RNA, 15 nt, Human herpesvirus 1
uccaccccccauguc

SEQ ID NO: 3952220 - RNA, 18 nt, Human herpesvirus 1
uccacgaacccagcgacc

SEQ ID NO: 3952221 - RNA, 20 nt, Human herpesvirus 1
uccacgaacccagcgaccuc

SEQ ID NO: 3952222 - RNA, 14 nt, Human herpesvirus 1
uccacgacaacccc

SEQ ID NO: 3952223 - RNA, 19 nt, Human herpesvirus 1
uccacggccaaguacgugc

SEQ ID NO: 3952224 - RNA, 20 nt, Human herpesvirus 1
uccacggccacuggccggga

SEQ ID NO: 3952225 - RNA, 17 nt, Human herpesvirus 1
uccaugcagugcauggc

SEQ ID NO: 3952226 - RNA, 18 nt, Human herpesvirus 1
ucccaccaacgucuccuc

SEQ ID NO: 3952227 - RNA, 18 nt, Human herpesvirus 1
ucccacgcucuccccugc

SEQ ID NO: 3952228 - RNA, 16 nt, Human herpesvirus 1
ucccauuaucccauuc

SEQ ID NO: 3952229 - RNA, 20 nt, Human herpesvirus 1
uccccaagcaucgaccacgc

SEQ ID NO: 3952230 - RNA, 17 nt, Human herpesvirus 1
ucccccaagggggaggg

SEQ ID NO: 3952231 - RNA, 16 nt, Human herpesvirus 1
ucccccacaccaccua

SEQ ID NO: 3952232 - RNA, 18 nt, Human herpesvirus 1
uccccgauggcccuccag

SEQ ID NO: 3952233 - RNA, 12 nt, Human herpesvirus 1
uccccggcccgg

SEQ ID NO: 3952234 - RNA, 17 nt, Human herpesvirus 1
uccccuucccucccccu

SEQ ID NO: 3952235 - RNA, 13 nt, Human herpesvirus 1
uccccuuccucgc

SEQ ID NO: 3952236 - RNA, 17 nt, Human herpesvirus 1
ucccgacaccaccagcu

SEQ ID NO: 3952237 - RNA, 19 nt, Human herpesvirus 1
ucccgacaccaccagcugg

SEQ ID NO: 3952238 - RNA, 19 nt, Human herpesvirus 1
ucccgaccuccggucccga

SEQ ID NO: 3952239 - RNA, 19 nt, Human herpesvirus 1
ucccgcccaccgcugggcg

SEQ ID NO: 3952240 - RNA, 23 nt, Human herpesvirus 1
ucccgccuuccggaccugcucuc

SEQ ID NO: 3952241 - RNA, 22 nt, Human herpesvirus 1
ucccggcccguaacgucgcggg

SEQ ID NO: 3952242 - RNA, 12 nt, Human herpesvirus 1
ucccggcgccgg

SEQ ID NO: 3952243 - RNA, 22 nt, Human herpesvirus 1
ucccggcgggguuauaggccac

SEQ ID NO: 3952244 - RNA, 22 nt, Human herpesvirus 1
ucccgguaugguaauuagaaac

SEQ ID NO: 3952245 - RNA, 16 nt, Human herpesvirus 1
ucccguagucccaucc

SEQ ID NO: 3952246 - RNA, 19 nt, Human herpesvirus 1
ucccucccccuccgcaucc

SEQ ID NO: 3952247 - RNA, 17 nt, Human herpesvirus 1
uccgcaagccccuagcc

SEQ ID NO: 3952248 - RNA, 20 nt, Human herpesvirus 1
uccgcaccaagccgcucucc

SEQ ID NO: 3952249 - RNA, 15 nt, Human herpesvirus 1
uccgcaucccaggau

SEQ ID NO: 3952250 - RNA, 22 nt, Human herpesvirus 1
uccgccggcaacugacgcuggc

SEQ ID NO: 3952251 - RNA, 13 nt, Human herpesvirus 1
uccgcgccaggcc

SEQ ID NO: 3952252 - RNA, 22 nt, Human herpesvirus 1
uccgcgccccccgacccuccca

SEQ ID NO: 3952253 - RNA, 22 nt, Human herpesvirus 1
uccggaaacaacccuacaaccu

SEQ ID NO: 3952254 - RNA, 14 nt, Human herpesvirus 1
uccggaggcgccgc

SEQ ID NO: 3952255 - RNA, 19 nt, Human herpesvirus 1
uccggcaauucccgcggcc

SEQ ID NO: 3952256 - RNA, 22 nt, Human herpesvirus 1
uccggcagggggaugggggggc

SEQ ID NO: 3952257 - RNA, 13 nt, Human herpesvirus 1
uccggccugggcc

SEQ ID NO: 3952258 - RNA, 21 nt, Human herpesvirus 1
ggcgacccugaucccccgcgc

SEQ ID NO: 3952259 - RNA, 18 nt, Human herpesvirus 1
ggcgaccgccggcggcga

SEQ ID NO: 3952260 - RNA, 22 nt, Human herpesvirus 1
ggcgcccaccccgugugccgcg

SEQ ID NO: 3952261 - RNA, 12 nt, Human herpesvirus 1
ggcgccgcgaga

SEQ ID NO: 3952262 - RNA, 16 nt, Human herpesvirus 1
ggcgcgcuucuacccg

SEQ ID NO: 3952263 - RNA, 14 nt, Human herpesvirus 1
ggcgcggcucgugg

SEQ ID NO: 3952264 - RNA, 18 nt, Human herpesvirus 1
ggcgcuggguggucucug

SEQ ID NO: 3952265 - RNA, 16 nt, Human herpesvirus 1
ggcggaaaccguaacg

SEQ ID NO: 3952266 - RNA, 20 nt, Human herpesvirus 1
ggcggacccccggaggcgcc

SEQ ID NO: 3952267 - RNA, 23 nt, Human herpesvirus 1
ggcggacccccggaggcgccugc

SEQ ID NO: 3952268 - RNA, 16 nt, Human herpesvirus 1
ggcggauuuggggcgc

SEQ ID NO: 3952269 - RNA, 20 nt, Human herpesvirus 1
ggcggcgacuuugacgaggc

SEQ ID NO: 3952270 - RNA, 14 nt, Human herpesvirus 1
ggcgggacuggcca

SEQ ID NO: 3952271 - RNA, 13 nt, Human herpesvirus 1
ggcgggagccacc

SEQ ID NO: 3952272 - RNA, 22 nt, Human herpesvirus 1
ggcgggcccgcgggaggccgcc

SEQ ID NO: 3952273 - RNA, 21 nt, Human herpesvirus 1
ggcgggcuccagucccggccc

SEQ ID NO: 3952274 - RNA, 18 nt, Human herpesvirus 1
ggcgggguuauaggccac

SEQ ID NO: 3952275 - RNA, 14 nt, Human herpesvirus 1
ggcgggugggccuu

SEQ ID NO: 3952276 - RNA, 16 nt, Human herpesvirus 1
ggcgguaacaggcgcg

SEQ ID NO: 3952277 - RNA, 21 nt, Human herpesvirus 1
ggcggucagcgagacgaccuc

SEQ ID NO: 3952278 - RNA, 17 nt, Human herpesvirus 1
ggcgguccugacggcca

SEQ ID NO: 3952279 - RNA, 21 nt, Human herpesvirus 1
ggcguaccaaacaaacaaacc

SEQ ID NO: 3952280 - RNA, 18 nt, Human herpesvirus 1
ggcguaccgaaggcgcuu

SEQ ID NO: 3952281 - RNA, 22 nt, Human herpesvirus 1
ggcgucaccaugcagcgccgga

SEQ ID NO: 3952282 - RNA, 14 nt, Human herpesvirus 1
ggcguccuggaugc

SEQ ID NO: 3952283 - RNA, 19 nt, Human herpesvirus 1
ggcgucugggccaccgaca

SEQ ID NO: 3952284 - RNA, 22 nt, Human herpesvirus 1
ggcguugggguggaucuuagcc

SEQ ID NO: 3952285 - RNA, 13 nt, Human herpesvirus 1
ggcugccgugagg

SEQ ID NO: 3952286 - RNA, 14 nt, Human herpesvirus 1
ggcugggcuuccga

SEQ ID NO: 3952287 - RNA, 20 nt, Human herpesvirus 1
ggcuguagcgccccggcgac

SEQ ID NO: 3952288 - RNA, 21 nt, Human herpesvirus 1
ggcuucggccguuucuccgcc

SEQ ID NO: 3952289 - RNA, 12 nt, Human herpesvirus 1
gggaacccagag

SEQ ID NO: 3952290 - RNA, 23 nt, Human herpesvirus 1
gggacgcgcaccuguuccgccug

SEQ ID NO: 3952291 - RNA, 13 nt, Human herpesvirus 1
gggacuggccaau

SEQ ID NO: 3952292 - RNA, 11 nt, Human herpesvirus 1
gggacugggca

SEQ ID NO: 3952293 - RNA, 15 nt, Human herpesvirus 1
gggagagcccacaug

SEQ ID NO: 3952294 - RNA, 19 nt, Human herpesvirus 1
gggagcggugacgaacgcg

SEQ ID NO: 3952295 - RNA, 12 nt, Human herpesvirus 1
gggaggccacag

SEQ ID NO: 3952296 - RNA, 20 nt, Human herpesvirus 1
gggaggccgcaucgaacgca

SEQ ID NO: 3952297 - RNA, 15 nt, Human herpesvirus 1
gggagggcagggccg

SEQ ID NO: 3952298 - RNA, 13 nt, Human herpesvirus 1
gggcaggugcaga

SEQ ID NO: 3952299 - RNA, 20 nt, Human herpesvirus 1
gggcaucucgcgccccgaug

SEQ ID NO: 3952300 - RNA, 23 nt, Human herpesvirus 1
gggccaauaucgcuagagacagc

SEQ ID NO: 3952301 - RNA, 20 nt, Human herpesvirus 1
gggccauguugggccgccac

SEQ ID NO: 3952302 - RNA, 19 nt, Human herpesvirus 1
gggccccauaaaacccaag

SEQ ID NO: 3952303 - RNA, 18 nt, Human herpesvirus 1
gggcccccgcccccgccg

SEQ ID NO: 3952304 - RNA, 17 nt, Human herpesvirus 1
gggccccggggagacag

SEQ ID NO: 3952305 - RNA, 18 nt, Human herpesvirus 1
gggccccggggagacagc

SEQ ID NO: 3952306 - RNA, 14 nt, Human herpesvirus 1
gggcccgcgucggg

SEQ ID NO: 3952307 - RNA, 22 nt, Human herpesvirus 1
gggccggcgggugagcgcgcgg

SEQ ID NO: 3952308 - RNA, 13 nt, Human herpesvirus 1
gggccgggccgcc

SEQ ID NO: 3952309 - RNA, 19 nt, Human herpesvirus 1
gggccggggacggcgaaca

SEQ ID NO: 3952310 - RNA, 17 nt, Human herpesvirus 1
gggccuggugcucgugg

SEQ ID NO: 3952311 - RNA, 23 nt, Human herpesvirus 1
gggccuucuuucgaaccgugguc

SEQ ID NO: 3952312 - RNA, 16 nt, Human herpesvirus 1
gggccuuggcggccgc

SEQ ID NO: 3952313 - RNA, 16 nt, Human herpesvirus 1
gggcgccacgguggug

SEQ ID NO: 3952314 - RNA, 14 nt, Human herpesvirus 1
gggcgccggugguu

SEQ ID NO: 3952315 - RNA, 19 nt, Human herpesvirus 1
gggcggccucuccggccug

SEQ ID NO: 3952316 - RNA, 22 nt, Human herpesvirus 1
gggcggggacggggaggcgggc

SEQ ID NO: 3952317 - RNA, 19 nt, Human herpesvirus 1
gggcugccgccagguuggg

SEQ ID NO: 3952318 - RNA, 14 nt, Human herpesvirus 1
ggggauggggagag

SEQ ID NO: 3952319 - RNA, 19 nt, Human herpesvirus 1
ggggauggggagagcccac

SEQ ID NO: 3952320 - RNA, 14 nt, Human herpesvirus 1
ggggccagcgccaa

SEQ ID NO: 3952321 - RNA, 12 nt, Human herpesvirus 1
ggggccguggcg

SEQ ID NO: 3952322 - RNA, 20 nt, Human herpesvirus 1
ggggccuccgaagacguccg

SEQ ID NO: 3952323 - RNA, 15 nt, Human herpesvirus 1
ggggccuuggggccc

SEQ ID NO: 3952324 - RNA, 20 nt, Human herpesvirus 1
ggggcgggugggccuugccg

SEQ ID NO: 3952325 - RNA, 21 nt, Human herpesvirus 1
ggggcuguacucgacccacug

SEQ ID NO: 3952326 - RNA, 14 nt, Human herpesvirus 1
gggggauggggaga

SEQ ID NO: 3952327 - RNA, 15 nt, Human herpesvirus 1
gggggcauuucagug

SEQ ID NO: 3952328 - RNA, 20 nt, Human herpesvirus 1
cggggccugcuacagccgcc

SEQ ID NO: 3952329 - RNA, 16 nt, Human herpesvirus 1
cggggccuuggcggcc

SEQ ID NO: 3952330 - RNA, 22 nt, Human herpesvirus 1
cggggccuuuucgccgcccucg

SEQ ID NO: 3952331 - RNA, 18 nt, Human herpesvirus 1
cgggggacucacuaccca

SEQ ID NO: 3952332 - RNA, 19 nt, Human herpesvirus 1
cgggggauggggagagccc

SEQ ID NO: 3952333 - RNA, 13 nt, Human herpesvirus 1
cgggucccgaccg

SEQ ID NO: 3952334 - RNA, 21 nt, Human herpesvirus 1
cgggucuuuuguguuggcccu

SEQ ID NO: 3952335 - RNA, 17 nt, Human herpesvirus 1
cggguguggggacccgc

SEQ ID NO: 3952336 - RNA, 16 nt, Human herpesvirus 1
cgguagcgggggacgc

SEQ ID NO: 3952337 - RNA, 19 nt, Human herpesvirus 1
cgguaugccgcggccaugg

SEQ ID NO: 3952338 - RNA, 15 nt, Human herpesvirus 1
cggucaccccaaucc

SEQ ID NO: 3952339 - RNA, 17 nt, Human herpesvirus 1
cgguccggagccgcgcg

SEQ ID NO: 3952340 - RNA, 15 nt, Human herpesvirus 1
cgguccugacggcca

SEQ ID NO: 3952341 - RNA, 16 nt, Human herpesvirus 1
cgguccuggaccagcu

SEQ ID NO: 3952342 - RNA, 14 nt, Human herpesvirus 1
cggucgggcggaga

SEQ ID NO: 3952343 - RNA, 22 nt, Human herpesvirus 1
cggucuccccgggagccccgga

SEQ ID NO: 3952344 - RNA, 19 nt, Human herpesvirus 1
cggugacgcgccaaacgcc

SEQ ID NO: 3952345 - RNA, 17 nt, Human herpesvirus 1
cggugauguucgggcgg

SEQ ID NO: 3952346 - RNA, 18 nt, Human herpesvirus 1
cgguggugcccagcggcc

SEQ ID NO: 3952347 - RNA, 18 nt, Human herpesvirus 1
cggugucugggaauagag

SEQ ID NO: 3952348 - RNA, 17 nt, Human herpesvirus 1
cguaaacgccgagcugc

SEQ ID NO: 3952349 - RNA, 14 nt, Human herpesvirus 1
cguaaacggcgggc

SEQ ID NO: 3952350 - RNA, 18 nt, Human herpesvirus 1
cguacaaguucaaggcca

SEQ ID NO: 3952351 - RNA, 13 nt, Human herpesvirus 1
cguacugcccauu

SEQ ID NO: 3952352 - RNA, 18 nt, Human herpesvirus 1
cguagagcuguggcacua

SEQ ID NO: 3952353 - RNA, 13 nt, Human herpesvirus 1
cgucaaaaguugu

SEQ ID NO: 3952354 - RNA, 22 nt, Human herpesvirus 1
cgucacgcacgccaaugcccuc

SEQ ID NO: 3952355 - RNA, 22 nt, Human herpesvirus 1
cgucagcgaggauaaccugggg

SEQ ID NO: 3952356 - RNA, 18 nt, Human herpesvirus 1
cgucauagugggccucca

SEQ ID NO: 3952357 - RNA, 23 nt, Human herpesvirus 1
cguccauucucccgaaccaggcc

SEQ ID NO: 3952358 - RNA, 16 nt, Human herpesvirus 1
cgucccacgcucuccc

SEQ ID NO: 3952359 - RNA, 14 nt, Human herpesvirus 1
cguccccuggggcg

SEQ ID NO: 3952360 - RNA, 18 nt, Human herpesvirus 1
cguccccuuacaguucca

SEQ ID NO: 3952361 - RNA, 16 nt, Human herpesvirus 1
cgucccggcucuccga

SEQ ID NO: 3952362 - RNA, 15 nt, Human herpesvirus 1
cgucgcacgcgucca

SEQ ID NO: 3952363 - RNA, 17 nt, Human herpesvirus 1
cgucgcuagaccacgcc

SEQ ID NO: 3952364 - RNA, 20 nt, Human herpesvirus 1
cgucgcuagaccacgccccu

SEQ ID NO: 3952365 - RNA, 12 nt, Human herpesvirus 1
cgucgggaggcc

SEQ ID NO: 3952366 - RNA, 15 nt, Human herpesvirus 1
cgucgggccucccgg

SEQ ID NO: 3952367 - RNA, 16 nt, Human herpesvirus 1
cgucgggccucccgga

SEQ ID NO: 3952368 - RNA, 20 nt, Human herpesvirus 1
cgucggucugcaccaugacc

SEQ ID NO: 3952369 - RNA, 17 nt, Human herpesvirus 1
cgucuccucuucucccc

SEQ ID NO: 3952370 - RNA, 22 nt, Human herpesvirus 1
cgucuucggccccgcgucuggc

SEQ ID NO: 3952371 - RNA, 16 nt, Human herpesvirus 1
cgugauuccucuccgc

SEQ ID NO: 3952372 - RNA, 13 nt, Human herpesvirus 1
cgugcaccguggg

SEQ ID NO: 3952373 - RNA, 20 nt, Human herpesvirus 1
cguggagcaaaacgccuccc

SEQ ID NO: 3952374 - RNA, 13 nt, Human herpesvirus 1
cguggagcaggaa

SEQ ID NO: 3952375 - RNA, 15 nt, Human herpesvirus 1
cguggugcgagcugc

SEQ ID NO: 3952376 - RNA, 18 nt, Human herpesvirus 1
cguggugcgucgggccuc

SEQ ID NO: 3952377 - RNA, 19 nt, Human herpesvirus 1
cguguacugcggucugucu

SEQ ID NO: 3952378 - RNA, 20 nt, Human herpesvirus 1
cgugugccugccguccgaac

SEQ ID NO: 3952379 - RNA, 14 nt, Human herpesvirus 1
cguguucagggcga

SEQ ID NO: 3952380 - RNA, 15 nt, Human herpesvirus 1
cguguuugcccauaa

SEQ ID NO: 3952381 - RNA, 18 nt, Human herpesvirus 1
cguuccuucccccucccc

SEQ ID NO: 3952382 - RNA, 22 nt, Human herpesvirus 1
cguuccuucccccuccccccgc

SEQ ID NO: 3952383 - RNA, 17 nt, Human herpesvirus 1
cguuucuccgcccgacc

SEQ ID NO: 3952384 - RNA, 22 nt, Human herpesvirus 1
cguuuggguguggggacccggc

SEQ ID NO: 3952385 - RNA, 21 nt, Human herpesvirus 1
cuaaacgcaccgucggaggcc

SEQ ID NO: 3952386 - RNA, 14 nt, Human herpesvirus 1
cuaagaaauuccaa

SEQ ID NO: 3952387 - RNA, 20 nt, Human herpesvirus 1
cuaaggcccggcuagaccca

SEQ ID NO: 3952388 - RNA, 17 nt, Human herpesvirus 1
cuacaacaagucucugg

SEQ ID NO: 3952389 - RNA, 20 nt, Human herpesvirus 1
cuacacccuugugugucaau

SEQ ID NO: 3952390 - RNA, 13 nt, Human herpesvirus 1
cuaccccauggga

SEQ ID NO: 3952391 - RNA, 14 nt, Human herpesvirus 1
cuaccggccccugg

SEQ ID NO: 3952392 - RNA, 18 nt, Human herpesvirus 1
cuaccuaggcaucggggg

SEQ ID NO: 3952393 - RNA, 14 nt, Human herpesvirus 1
cuacgcgccggccg

SEQ ID NO: 3952394 - RNA, 19 nt, Human herpesvirus 1
cuagccgaucccucgcgag

SEQ ID NO: 3952395 - RNA, 21 nt, Human herpesvirus 1
cuagcucgcggagggcggcca

SEQ ID NO: 3952396 - RNA, 14 nt, Human herpesvirus 1
cuaggagacaccuu

SEQ ID NO: 3952397 - RNA, 13 nt, Human herpesvirus 1
cuagggaacccag

SEQ ID NO: 3952398 - RNA, 15 nt, Human herpesvirus 1
cuaucgcucgaccuc

SEQ ID NO: 3952399 - RNA, 21 nt, Human herpesvirus 1
cuauggcgccugacgcgccgc

SEQ ID NO: 3952400 - RNA, 19 nt, Human herpesvirus 1
cucaacaucaccaugcugg

SEQ ID NO: 3952401 - RNA, 21 nt, Human herpesvirus 1
cucaaguacaaccccucgcgg

SEQ ID NO: 3952402 - RNA, 17 nt, Human herpesvirus 1
cucacgcccgcaaacag

SEQ ID NO: 3952403 - RNA, 19 nt, Human herpesvirus 1
cucagcaacacgcucgcgg

SEQ ID NO: 3952404 - RNA, 16 nt, Human herpesvirus 1
cucauuuuacaauaaa

SEQ ID NO: 3952405 - RNA, 14 nt, Human herpesvirus 1
cuccacccccucga

SEQ ID NO: 3952406 - RNA, 14 nt, Human herpesvirus 1
cuccagccuccccu

SEQ ID NO: 3952407 - RNA, 22 nt, Human herpesvirus 1
cucccaacccccuaagacccac

SEQ ID NO: 3952408 - RNA, 22 nt, Human herpesvirus 1
cucccaaccgcgacccuccggg

SEQ ID NO: 3952409 - RNA, 13 nt, Human herpesvirus 1
cucccagggagcc

SEQ ID NO: 3952410 - RNA, 12 nt, Human herpesvirus 1
cuccccagcggc

SEQ ID NO: 3952411 - RNA, 18 nt, Human herpesvirus 1
cucccccaccgcccacag

SEQ ID NO: 3952412 - RNA, 15 nt, Human herpesvirus 1
cuccccgccgcggcc

SEQ ID NO: 3952413 - RNA, 15 nt, Human herpesvirus 1
cuccccgggagcccc

SEQ ID NO: 3952414 - RNA, 14 nt, Human herpesvirus 1
cucccgacaccacc

SEQ ID NO: 3952415 - RNA, 19 nt, Human herpesvirus 1
cucccggaagagccugccg

SEQ ID NO: 3952416 - RNA, 16 nt, Human herpesvirus 1
cucccggcccguaacg

SEQ ID NO: 3952417 - RNA, 15 nt, Human herpesvirus 1
cucccugacggccau

SEQ ID NO: 3952418 - RNA, 17 nt, Human herpesvirus 1
cuccgcuggggccccca

SEQ ID NO: 3952419 - RNA, 12 nt, Human herpesvirus 1
cuccggaccccc

SEQ ID NO: 3952420 - RNA, 20 nt, Human herpesvirus 1
cuccggagagacgauggcag

SEQ ID NO: 3952421 - RNA, 21 nt, Human herpesvirus 1
cuccggggggcuuccggccug

SEQ ID NO: 3952422 - RNA, 23 nt, Human herpesvirus 1
cuccuggccuacgucuccgugcu

SEQ ID NO: 3952423 - RNA, 18 nt, Human herpesvirus 1
cuccugggggcacccacg

SEQ ID NO: 3952424 - RNA, 16 nt, Human herpesvirus 1
cucgagaugggccagg

SEQ ID NO: 3952425 - RNA, 22 nt, Human herpesvirus 1
cucgaugacgucccggcucucc

SEQ ID NO: 3952426 - RNA, 22 nt, Human herpesvirus 1
cucgaugcgcaucagcucgcgg

SEQ ID NO: 3952427 - RNA, 18 nt, Human herpesvirus 1
cucgccacgucgaccgcg

SEQ ID NO: 3952428 - RNA, 13 nt, Human herpesvirus 1
gccauggagcgca

SEQ ID NO: 3952429 - RNA, 18 nt, Human herpesvirus 1
gcccaaugggccgggccg

SEQ ID NO: 3952430 - RNA, 19 nt, Human herpesvirus 1
gcccaaugggccgggccgc

SEQ ID NO: 3952431 - RNA, 19 nt, Human herpesvirus 1
gcccacacaacgcuccgcc

SEQ ID NO: 3952432 - RNA, 18 nt, Human herpesvirus 1
gcccacaugcggaaagca

SEQ ID NO: 3952433 - RNA, 21 nt, Human herpesvirus 1
gcccacccacuccuccccgcg

SEQ ID NO: 3952434 - RNA, 15 nt, Human herpesvirus 1
gcccaccccccacgg

SEQ ID NO: 3952435 - RNA, 16 nt, Human herpesvirus 1
gcccaccgcugggcgc

SEQ ID NO: 3952436 - RNA, 23 nt, Human herpesvirus 1
gcccaccggaagcccaacccaca

SEQ ID NO: 3952437 - RNA, 22 nt, Human herpesvirus 1
gcccagcgcagaggcggccaga

SEQ ID NO: 3952438 - RNA, 16 nt, Human herpesvirus 1
gcccaguguacccugg

SEQ ID NO: 3952439 - RNA, 16 nt, Human herpesvirus 1
gcccauaucugcuacg

SEQ ID NO: 3952440 - RNA, 20 nt, Human herpesvirus 1
gcccauuuacguggcugggu

SEQ ID NO: 3952441 - RNA, 16 nt, Human herpesvirus 1
gccccauacacgagca

SEQ ID NO: 3952442 - RNA, 17 nt, Human herpesvirus 1
gccccaucccgaggccc

SEQ ID NO: 3952443 - RNA, 19 nt, Human herpesvirus 1
gcccccagaugcccacggg

SEQ ID NO: 3952444 - RNA, 13 nt, Human herpesvirus 1
gcccccagggucc

SEQ ID NO: 3952445 - RNA, 12 nt, Human herpesvirus 1
gccccccagccu

SEQ ID NO: 3952446 - RNA, 15 nt, Human herpesvirus 1
gccccccccacccca

SEQ ID NO: 3952447 - RNA, 12 nt, Human herpesvirus 1
gcccccccgcgc

SEQ ID NO: 3952448 - RNA, 20 nt, Human herpesvirus 1
gccccccguggaccccacga

SEQ ID NO: 3952449 - RNA, 16 nt, Human herpesvirus 1
gcccccgaggccagca

SEQ ID NO: 3952450 - RNA, 20 nt, Human herpesvirus 1
gcccccgccgcccggggcca

SEQ ID NO: 3952451 - RNA, 21 nt, Human herpesvirus 1
gcccccgccguugagccccuc

SEQ ID NO: 3952452 - RNA, 14 nt, Human herpesvirus 1
cggucauccacgcc

SEQ ID NO: 3952453 - RNA, 11 nt, Human herpesvirus 1
cgguccugacg

SEQ ID NO: 3952454 - RNA, 18 nt, Human herpesvirus 1
cggucggcaaggugguga

SEQ ID NO: 3952455 - RNA, 18 nt, Human herpesvirus 1
cggucuccccgggagccc

SEQ ID NO: 3952456 - RNA, 17 nt, Human herpesvirus 1
cggugacgccgacgagg

SEQ ID NO: 3952457 - RNA, 14 nt, Human herpesvirus 1
cggugccuuucccc

SEQ ID NO: 3952458 - RNA, 23 nt, Human herpesvirus 1
cgguuccucccgcucggcggcag

SEQ ID NO: 3952459 - RNA, 20 nt, Human herpesvirus 1
cguaacgucgcgggacccga

SEQ ID NO: 3952460 - RNA, 19 nt, Human herpesvirus 1
cguacggccucgugcucgu

SEQ ID NO: 3952461 - RNA, 17 nt, Human herpesvirus 1
cguacucccaccagcug

SEQ ID NO: 3952462 - RNA, 17 nt, Human herpesvirus 1
cgucaccaugcagcgcc

SEQ ID NO: 3952463 - RNA, 17 nt, Human herpesvirus 1
cguccaaacccaccgac

SEQ ID NO: 3952464 - RNA, 19 nt, Human herpesvirus 1
cguccgcgccccucuggcc

SEQ ID NO: 3952465 - RNA, 16 nt, Human herpesvirus 1
cguccucgcaccagcc

SEQ ID NO: 3952466 - RNA, 21 nt, Human herpesvirus 1
cguccuuugggcgggaggaag

SEQ ID NO: 3952467 - RNA, 20 nt, Human herpesvirus 1
cgucgcccuccaccaacgcc

SEQ ID NO: 3952468 - RNA, 15 nt, Human herpesvirus 1
cgucgccgcgggcca

SEQ ID NO: 3952469 - RNA, 19 nt, Human herpesvirus 1
cgucgccgcgggccacgcc

SEQ ID NO: 3952470 - RNA, 18 nt, Human herpesvirus 1
cgucgccuggcugaccca

SEQ ID NO: 3952471 - RNA, 14 nt, Human herpesvirus 1
cgucguucgggcgg

SEQ ID NO: 3952472 - RNA, 19 nt, Human herpesvirus 1
cgucucugcuacgccgcug

SEQ ID NO: 3952473 - RNA, 16 nt, Human herpesvirus 1
cgucugggccaccgac

SEQ ID NO: 3952474 - RNA, 16 nt, Human herpesvirus 1
cgucuuuaaccucccc

SEQ ID NO: 3952475 - RNA, 14 nt, Human herpesvirus 1
cgugaccccaggga

SEQ ID NO: 3952476 - RNA, 23 nt, Human herpesvirus 1
cgugcccauuuacguggcugggu

SEQ ID NO: 3952477 - RNA, 17 nt, Human herpesvirus 1
cgugccguuguucccau

SEQ ID NO: 3952478 - RNA, 21 nt, Human herpesvirus 1
cgugcgccuggauucgcugga

SEQ ID NO: 3952479 - RNA, 14 nt, Human herpesvirus 1
cgugcgcucgcucu

SEQ ID NO: 3952480 - RNA, 15 nt, Human herpesvirus 1
cgugcguagcauacc

SEQ ID NO: 3952481 - RNA, 16 nt, Human herpesvirus 1
cgugcuccugugagcu

SEQ ID NO: 3952482 - RNA, 22 nt, Human herpesvirus 1
cguggaccccacgacacccacc

SEQ ID NO: 3952483 - RNA, 16 nt, Human herpesvirus 1
cguggagcaaaacgcc

SEQ ID NO: 3952484 - RNA, 21 nt, Human herpesvirus 1
cguggagcgcaucaagaccac

SEQ ID NO: 3952485 - RNA, 16 nt, Human herpesvirus 1
cguggcggccccugau

SEQ ID NO: 3952486 - RNA, 17 nt, Human herpesvirus 1
cgugggccucacccacg

SEQ ID NO: 3952487 - RNA, 23 nt, Human herpesvirus 1
cgugggcgacugcgaccccagcc

SEQ ID NO: 3952488 - RNA, 13 nt, Human herpesvirus 1
cguguuugcccau

SEQ ID NO: 3952489 - RNA, 15 nt, Human herpesvirus 1
cguguuuguggggag

SEQ ID NO: 3952490 - RNA, 20 nt, Human herpesvirus 1
cguuccagccccccagccuc

SEQ ID NO: 3952491 - RNA, 22 nt, Human herpesvirus 1
cguuccucacugccucccccgc

SEQ ID NO: 3952492 - RNA, 19 nt, Human herpesvirus 1
cguucuccggggcccggcc

SEQ ID NO: 3952493 - RNA, 12 nt, Human herpesvirus 1
cguucugcugca

SEQ ID NO: 3952494 - RNA, 19 nt, Human herpesvirus 1
cguugagccccucgcccgu

SEQ ID NO: 3952495 - RNA, 16 nt, Human herpesvirus 1
cguugcagggccuggu

SEQ ID NO: 3952496 - RNA, 17 nt, Human herpesvirus 1
cguugcagggccuggug

SEQ ID NO: 3952497 - RNA, 15 nt, Human herpesvirus 1
cguugcccgggccgu

SEQ ID NO: 3952498 - RNA, 19 nt, Human herpesvirus 1
cuaacagucuuccgcugac

SEQ ID NO: 3952499 - RNA, 19 nt, Human herpesvirus 1
cuaagcgucccugggcccu

SEQ ID NO: 3952500 - RNA, 14 nt, Human herpesvirus 1
cuaaucccccggcu

SEQ ID NO: 3952501 - RNA, 22 nt, Human herpesvirus 1
cuacaacaacuaccucggcggg

SEQ ID NO: 3952502 - RNA, 19 nt, Human herpesvirus 1
cuaccgcuuuauaggccgg

SEQ ID NO: 3952503 - RNA, 17 nt, Human herpesvirus 1
cuacgccguguuggagc

SEQ ID NO: 3952504 - RNA, 22 nt, Human herpesvirus 1
cuagccaaccuguggcagaccg

SEQ ID NO: 3952505 - RNA, 22 nt, Human herpesvirus 1
cuagcucgcggagggcggccag

SEQ ID NO: 3952506 - RNA, 14 nt, Human herpesvirus 1
cuauaaagccgcca

SEQ ID NO: 3952507 - RNA, 16 nt, Human herpesvirus 1
cuauaagacucucccc

SEQ ID NO: 3952508 - RNA, 23 nt, Human herpesvirus 1
cuaucuccugggggcacccacgc

SEQ ID NO: 3952509 - RNA, 19 nt, Human herpesvirus 1
cucaagauggccgacccca

SEQ ID NO: 3952510 - RNA, 16 nt, Human herpesvirus 1
cucacccacgccggca

SEQ ID NO: 3952511 - RNA, 17 nt, Human herpesvirus 1
cucaccggcggaccccc

SEQ ID NO: 3952512 - RNA, 23 nt, Human herpesvirus 1
cucagagacaacgcgacaggcca

SEQ ID NO: 3952513 - RNA, 20 nt, Human herpesvirus 1
cucagggccuccgaccccag

SEQ ID NO: 3952514 - RNA, 16 nt, Human herpesvirus 1
cucaugauccucaucg

SEQ ID NO: 3952515 - RNA, 13 nt, Human herpesvirus 1
cuccaccacccaa

SEQ ID NO: 3952516 - RNA, 22 nt, Human herpesvirus 1
cuccacuacuacguggagcagg

SEQ ID NO: 3952517 - RNA, 21 nt, Human herpesvirus 1
cucccaaccgcgacccuccgg

SEQ ID NO: 3952518 - RNA, 15 nt, Human herpesvirus 1
cucccagagacccca

SEQ ID NO: 3952519 - RNA, 15 nt, Human herpesvirus 1
cucccagggagcccc

SEQ ID NO: 3952520 - RNA, 18 nt, Human herpesvirus 1
cuccccccaggccuacca

SEQ ID NO: 3952521 - RNA, 20 nt, Human herpesvirus 1
cucccccguagaucucugua

SEQ ID NO: 3952522 - RNA, 13 nt, Human herpesvirus 1
cuccccgggagcc

SEQ ID NO: 3952523 - RNA, 18 nt, Human herpesvirus 1
cuccccgggagccccgga

SEQ ID NO: 3952524 - RNA, 12 nt, Human herpesvirus 1
cuccccuucccu

SEQ ID NO: 3952525 - RNA, 15 nt, Human herpesvirus 1
cucccucgaccacca

SEQ ID NO: 3952526 - RNA, 15 nt, Human herpesvirus 1
cucccugcggcuggc

SEQ ID NO: 3952527 - RNA, 13 nt, Human herpesvirus 1
cuccgaguacggc

SEQ ID NO: 3952528 - RNA, 15 nt, Human herpesvirus 1
cuccgcccccaaccc

SEQ ID NO: 3952529 - RNA, 18 nt, Human herpesvirus 1
cuccgcgccaggcccgcc

SEQ ID NO: 3952530 - RNA, 13 nt, Human herpesvirus 1
cuccggccgcggu

SEQ ID NO: 3952531 - RNA, 12 nt, Human herpesvirus 1
cuccggcgccgc

SEQ ID NO: 3952532 - RNA, 22 nt, Human herpesvirus 1
cuccuacaacaagucucugggg

SEQ ID NO: 3952533 - RNA, 13 nt, Human herpesvirus 1
cuccuccaccacc

SEQ ID NO: 3952534 - RNA, 15 nt, Human herpesvirus 1
cuccuccaccaccca

SEQ ID NO: 3952535 - RNA, 13 nt, Human herpesvirus 1
cuccucuucuccc

SEQ ID NO: 3952536 - RNA, 16 nt, Human herpesvirus 1
cuccucuucuccccuu

SEQ ID NO: 3952537 - RNA, 22 nt, Human herpesvirus 1
cuccuggacuuugagcuugccu

SEQ ID NO: 3952538 - RNA, 14 nt, Human herpesvirus 1
cuccuggcagcccu

SEQ ID NO: 3952539 - RNA, 20 nt, Human herpesvirus 1
cuccugggggcacccacgcc

SEQ ID NO: 3952540 - RNA, 11 nt, Human herpesvirus 1
cuccuuagcac

SEQ ID NO: 3952541 - RNA, 12 nt, Human herpesvirus 1
cucgaccaccau

SEQ ID NO: 3952542 - RNA, 14 nt, Human herpesvirus 1
cucgaucggccacg

SEQ ID NO: 3952543 - RNA, 16 nt, Human herpesvirus 1
cucgaucggccacggg

SEQ ID NO: 3952544 - RNA, 17 nt, Human herpesvirus 1
cucgccagcgacccgca

SEQ ID NO: 3952545 - RNA, 14 nt, Human herpesvirus 1
cucgcccacccacu

SEQ ID NO: 3952546 - RNA, 14 nt, Human herpesvirus 1
cucgcggcccgggg

SEQ ID NO: 3952547 - RNA, 15 nt, Human herpesvirus 1
cucgcuuugccggga

SEQ ID NO: 3952548 - RNA, 13 nt, Human herpesvirus 1
cucggggagcuuc

SEQ ID NO: 3952549 - RNA, 20 nt, Human herpesvirus 1
cucgucuccucuucuccccu

SEQ ID NO: 3952550 - RNA, 13 nt, Human herpesvirus 1
cucgugugguaca

SEQ ID NO: 3952551 - RNA, 19 nt, Human herpesvirus 1
cucguuccucacugccucc

SEQ ID NO: 3952552 - RNA, 14 nt, Human herpesvirus 1
cucucaagauggcc

SEQ ID NO: 3952553 - RNA, 16 nt, Human herpesvirus 1
cucuccccccaggccu

SEQ ID NO: 3952554 - RNA, 14 nt, Human herpesvirus 1
cucucggugccccu

SEQ ID NO: 3952555 - RNA, 18 nt, Human herpesvirus 1
cucuggacgcccgggcgc

SEQ ID NO: 3952556 - RNA, 18 nt, Human herpesvirus 1
cucuggccgcgcccacua

SEQ ID NO: 3952557 - RNA, 15 nt, Human herpesvirus 1
cucugggcgggccgu

SEQ ID NO: 3952558 - RNA, 17 nt, Human herpesvirus 1
cucuggggucccugucg

SEQ ID NO: 3952559 - RNA, 16 nt, Human herpesvirus 1
cucugggucugugcca

SEQ ID NO: 3952560 - RNA, 23 nt, Human herpesvirus 1
cucuucuccccuucccucccccu

SEQ ID NO: 3952561 - RNA, 22 nt, Human herpesvirus 1
cugaucauuacccccguccgca

SEQ ID NO: 3952562 - RNA, 16 nt, Human herpesvirus 1
cugcaccgaucgcagc

SEQ ID NO: 3952563 - RNA, 20 nt, Human herpesvirus 1
cugcaccgaucgcagcgucc

SEQ ID NO: 3952564 - RNA, 16 nt, Human herpesvirus 1
cugcacgaccugcgcu

SEQ ID NO: 3952565 - RNA, 13 nt, Human herpesvirus 1
cugcaucggcaag

SEQ ID NO: 3952566 - RNA, 19 nt, Human herpesvirus 1
cugccccgcuucauccccg

SEQ ID NO: 3952567 - RNA, 14 nt, Human herpesvirus 1
cugccucccccgcc

SEQ ID NO: 3952568 - RNA, 18 nt, Human herpesvirus 1
cugccucuccccccaggc

SEQ ID NO: 3952569 - RNA, 20 nt, Human herpesvirus 1
cugcgaccccagccuucacg

SEQ ID NO: 3952570 - RNA, 17 nt, Human herpesvirus 1
cugcgaguccugcgccc

SEQ ID NO: 3952571 - RNA, 15 nt, Human herpesvirus 1
cugcgccuugggccc

SEQ ID NO: 3952572 - RNA, 16 nt, Human herpesvirus 1
cugcgcgagcaccugc

SEQ ID NO: 3952573 - RNA, 20 nt, Human herpesvirus 1
cugcggcccacccuggcgcc

SEQ ID NO: 3952574 - RNA, 19 nt, Human herpesvirus 1
cugcguucaucggaccccc

SEQ ID NO: 3952575 - RNA, 15 nt, Human herpesvirus 1
cugcuacgccgcuga

SEQ ID NO: 3952576 - RNA, 19 nt, Human herpesvirus 1
cugcucagcgccaagguca

SEQ ID NO: 3952577 - RNA, 14 nt, Human herpesvirus 1
cugcuccgccuggc

SEQ ID NO: 3952578 - RNA, 20 nt, Human herpesvirus 1
cugcugcccccggagcuguc

SEQ ID NO: 3952579 - RNA, 21 nt, Human herpesvirus 1
cugcugcccccggagcugucc

SEQ ID NO: 3952580 - RNA, 16 nt, Human herpesvirus 1
cuggaaguaccugcag

SEQ ID NO: 3952581 - RNA, 15 nt, Human herpesvirus 1
cuggaccgggguccc

SEQ ID NO: 3952582 - RNA, 22 nt, Human herpesvirus 1
cuggaccggggucccagcggca

SEQ ID NO: 3952583 - RNA, 17 nt, Human herpesvirus 1
cuggcaacucgccccac

SEQ ID NO: 3952584 - RNA, 18 nt, Human herpesvirus 1
cuggccaaucggcggccg

SEQ ID NO: 3952585 - RNA, 12 nt, Human herpesvirus 1
cuggccccggcg

SEQ ID NO: 3952586 - RNA, 18 nt, Human herpesvirus 1
cuggcccgcgccccaccc

SEQ ID NO: 3952587 - RNA, 21 nt, Human herpesvirus 1
cuggccggccuggcggcggcc

SEQ ID NO: 3952588 - RNA, 14 nt, Human herpesvirus 1
cuggccgggagcac

SEQ ID NO: 3952589 - RNA, 17 nt, Human herpesvirus 1
cuggcgagcccagaccc

SEQ ID NO: 3952590 - RNA, 14 nt, Human herpesvirus 1
cuggcugacccacg

SEQ ID NO: 3952591 - RNA, 23 nt, Human herpesvirus 1
cuggcuggccgcucgguggcucc

SEQ ID NO: 3952592 - RNA, 22 nt, Human herpesvirus 1
cugggaacggacacgcggggac

SEQ ID NO: 3952593 - RNA, 17 nt, Human herpesvirus 1
cugggauggcuccuggc

SEQ ID NO: 3952594 - RNA, 19 nt, Human herpesvirus 1
cugggccaccugacgcgcc

SEQ ID NO: 3952595 - RNA, 13 nt, Human herpesvirus 1
cuggggagcugua

SEQ ID NO: 3952596 - RNA, 19 nt, Human herpesvirus 1
cugggucugugccaccagc

SEQ ID NO: 3952597 - RNA, 20 nt, Human herpesvirus 1
cugggugccaaagcgcccgu

SEQ ID NO: 3952598 - RNA, 13 nt, Human herpesvirus 1
cuggguggucucu

SEQ ID NO: 3952599 - RNA, 22 nt, Human herpesvirus 1
cuggguggucucuggccgcgcc

SEQ ID NO: 3952600 - RNA, 15 nt, Human herpesvirus 1
cuggguucuccugga

SEQ ID NO: 3952601 - RNA, 18 nt, Human herpesvirus 1
cuguagcgccccggcgac

SEQ ID NO: 3952602 - RNA, 15 nt, Human herpesvirus 1
cugucccgcgugcaa

SEQ ID NO: 3952603 - RNA, 21 nt, Human herpesvirus 1
cuguccgagacccccaacgcc

SEQ ID NO: 3952604 - RNA, 23 nt, Human herpesvirus 1
cugucgggcggauuuggggcgcu

SEQ ID NO: 3952605 - RNA, 17 nt, Human herpesvirus 1
cugucgguccacggcca

SEQ ID NO: 3952606 - RNA, 16 nt, Human herpesvirus 1
cugucucgucuccucu

SEQ ID NO: 3952607 - RNA, 16 nt, Human herpesvirus 1
cugucuuggggcccac

SEQ ID NO: 3952608 - RNA, 19 nt, Human herpesvirus 1
cuguggaacgaggcccgca

SEQ ID NO: 3952609 - RNA, 12 nt, Human herpesvirus 1
cuguggcccugg

SEQ ID NO: 3952610 - RNA, 14 nt, Human herpesvirus 1
cuguggccucccga

SEQ ID NO: 3952611 - RNA, 22 nt, Human herpesvirus 1
cugugguguuuuuggcaucaug

SEQ ID NO: 3952612 - RNA, 20 nt, Human herpesvirus 1
cuguucaaccccagggaccu

SEQ ID NO: 3952613 - RNA, 19 nt, Human herpesvirus 1
cuuaaccgcccaccuccug

SEQ ID NO: 3952614 - RNA, 20 nt, Human herpesvirus 1
cuuaaccgcccaccuccugg

SEQ ID NO: 3952615 - RNA, 19 nt, Human herpesvirus 1
cuuaauaaauuuuacaaac

SEQ ID NO: 3952616 - RNA, 16 nt, Human herpesvirus 1
cuuaccgccacaggaa

SEQ ID NO: 3952617 - RNA, 15 nt, Human herpesvirus 1
cuucaucgaccucaa

SEQ ID NO: 3952618 - RNA, 14 nt, Human herpesvirus 1
cuucccccccauca

SEQ ID NO: 3952619 - RNA, 17 nt, Human herpesvirus 1
cuucccccccaucaccc

SEQ ID NO: 3952620 - RNA, 17 nt, Human herpesvirus 1
cuuccggaccugcucuc

SEQ ID NO: 3952621 - RNA, 22 nt, Human herpesvirus 1
cuucgcuuuccugucggccgcc

SEQ ID NO: 3952622 - RNA, 19 nt, Human herpesvirus 1
cuucgcuuugugggggacc

SEQ ID NO: 3952623 - RNA, 23 nt, Human herpesvirus 1
cuucggccccgcgucuggccccg

SEQ ID NO: 3952624 - RNA, 15 nt, Human herpesvirus 1
cuucggggcccggcc

SEQ ID NO: 3952625 - RNA, 13 nt, Human herpesvirus 1
cuucggugccagu

SEQ ID NO: 3952626 - RNA, 15 nt, Human herpesvirus 1
cuugaggggggagau

SEQ ID NO: 3952627 - RNA, 23 nt, Human herpesvirus 1
cuugaggggggagaugggacccg

SEQ ID NO: 3952628 - RNA, 13 nt, Human herpesvirus 1
cuuggcggccgcc

SEQ ID NO: 3952629 - RNA, 18 nt, Human herpesvirus 1
cuuggcggccgcccaacu

SEQ ID NO: 3952630 - RNA, 16 nt, Human herpesvirus 1
cuugguucggggccgc

SEQ ID NO: 3952631 - RNA, 16 nt, Human herpesvirus 1
cuuuaaaaagcagggg

SEQ ID NO: 3952632 - RNA, 23 nt, Human herpesvirus 1
cuuuaagcgcugcugcggccagu

SEQ ID NO: 3952633 - RNA, 13 nt, Human herpesvirus 1
cuuuccccaugcg

SEQ ID NO: 3952634 - RNA, 15 nt, Human herpesvirus 1
gaaaagugaaagaca

SEQ ID NO: 3952635 - RNA, 23 nt, Human herpesvirus 1
gaaacuguccugucuuggggccc

SEQ ID NO: 3952636 - RNA, 18 nt, Human herpesvirus 1
gaaacuuaacacaccaaa

SEQ ID NO: 3952637 - RNA, 13 nt, Human herpesvirus 1
gaaagcaagaaca

SEQ ID NO: 3952638 - RNA, 14 nt, Human herpesvirus 1
gaaagcaagaacaa

SEQ ID NO: 3952639 - RNA, 19 nt, Human herpesvirus 1
gaaagcaagaacaauaaag

SEQ ID NO: 3952640 - RNA, 21 nt, Human herpesvirus 1
gaaagcaagaacaauaaaggc

SEQ ID NO: 3952641 - RNA, 15 nt, Human herpesvirus 1
gaacaacaugggccu

SEQ ID NO: 3952642 - RNA, 16 nt, Human herpesvirus 1
gaacacaaggccaaga

SEQ ID NO: 3952643 - RNA, 18 nt, Human herpesvirus 1
gaacaccuucuuugcccu

SEQ ID NO: 3952644 - RNA, 20 nt, Human herpesvirus 1
gaacccccaucuaaugccac

SEQ ID NO: 3952645 - RNA, 21 nt, Human herpesvirus 1
gaacccgcgcuaugacggcaa

SEQ ID NO: 3952646 - RNA, 13 nt, Human herpesvirus 1
gaacgacugggcc

SEQ ID NO: 3952647 - RNA, 20 nt, Human herpesvirus 1
gaacggacacgcggggacac

SEQ ID NO: 3952648 - RNA, 14 nt, Human herpesvirus 1
gaacgggggcccug

SEQ ID NO: 3952649 - RNA, 12 nt, Human herpesvirus 1
gaagagccugcc

SEQ ID NO: 3952650 - RNA, 17 nt, Human herpesvirus 1
gaaggcccuguacccgc

SEQ ID NO: 3952651 - RNA, 15 nt, Human herpesvirus 1
gaagggcacgagcgc

SEQ ID NO: 3952652 - RNA, 19 nt, Human herpesvirus 1
gaauaaaccgguauuauuu

SEQ ID NO: 3952653 - RNA, 18 nt, Human herpesvirus 1
gaaucccccaagggggag

SEQ ID NO: 3952654 - RNA, 14 nt, Human herpesvirus 1
gacacaaaugccca

SEQ ID NO: 3952655 - RNA, 15 nt, Human herpesvirus 1
gacacaaaugcccac

SEQ ID NO: 3952656 - RNA, 22 nt, Human herpesvirus 1
gacacccuaccccaguccccgg

SEQ ID NO: 3952657 - RNA, 16 nt, Human herpesvirus 1
gacacgcgcguccuuc

SEQ ID NO: 3952658 - RNA, 19 nt, Human herpesvirus 1
gacacuggguucuccugga

SEQ ID NO: 3952659 - RNA, 20 nt, Human herpesvirus 1
gacagaccuccccgcgcaug

SEQ ID NO: 3952660 - RNA, 21 nt, Human herpesvirus 1
gacagccaggagcguuucugu

SEQ ID NO: 3952661 - RNA, 14 nt, Human herpesvirus 1
gacagggccgugcc

SEQ ID NO: 3952662 - RNA, 23 nt, Human herpesvirus 1
gaccacaccgacgaaucccccaa

SEQ ID NO: 3952663 - RNA, 21 nt, Human herpesvirus 1
gaccacgcccuuccccacggg

SEQ ID NO: 3952664 - RNA, 13 nt, Human herpesvirus 1
gaccagauggaag

SEQ ID NO: 3952665 - RNA, 16 nt, Human herpesvirus 1
gaccaggcgcgccgcg

SEQ ID NO: 3952666 - RNA, 19 nt, Human herpesvirus 1
gaccaguuuugcgaggagc

SEQ ID NO: 3952667 - RNA, 14 nt, Human herpesvirus 1
gacccaacccccgg

SEQ ID NO: 3952668 - RNA, 19 nt, Human herpesvirus 1
gacccagaccggcaccacc

SEQ ID NO: 3952669 - RNA, 18 nt, Human herpesvirus 1
gaccccauggaccccagc

SEQ ID NO: 3952670 - RNA, 21 nt, Human herpesvirus 1
gacccccaacgccacgcagcc

SEQ ID NO: 3952671 - RNA, 13 nt, Human herpesvirus 1
gacccccuuguau

SEQ ID NO: 3952672 - RNA, 13 nt, Human herpesvirus 1
gaccccuucuccc

SEQ ID NO: 3952673 - RNA, 11 nt, Human herpesvirus 1
gacccgacuca

SEQ ID NO: 3952674 - RNA, 22 nt, Human herpesvirus 1
gacccgcacgagccggggcugg

SEQ ID NO: 3952675 - RNA, 18 nt, Human herpesvirus 1
gacccgccccggagggag

SEQ ID NO: 3952676 - RNA, 12 nt, Human herpesvirus 1
gacccucuccgg

SEQ ID NO: 3952677 - RNA, 21 nt, Human herpesvirus 1
gacccucucuucucucccggg

SEQ ID NO: 3952678 - RNA, 14 nt, Human herpesvirus 1
gaccgacaccccca

SEQ ID NO: 3952679 - RNA, 12 nt, Human herpesvirus 1
gaccgcagccug

SEQ ID NO: 3952680 - RNA, 23 nt, Human herpesvirus 1
gaccggauggaggagccccugcc

SEQ ID NO: 3952681 - RNA, 18 nt, Human herpesvirus 1
gaccggcaagcggagcgg

SEQ ID NO: 3952682 - RNA, 15 nt, Human herpesvirus 1
gaccggcaccaccga

SEQ ID NO: 3952683 - RNA, 14 nt, Human herpesvirus 1
gaccggcggguccc

SEQ ID NO: 3952684 - RNA, 23 nt, Human herpesvirus 1
gaccugcaccgaucgcagcgucc

SEQ ID NO: 3952685 - RNA, 10 nt, Human herpesvirus 1
gaccuggggu

SEQ ID NO: 3952686 - RNA, 17 nt, Human herpesvirus 1
gaccuggggucgcucug

SEQ ID NO: 3952687 - RNA, 22 nt, Human herpesvirus 1
gaccuguugauggccugugcuu

SEQ ID NO: 3952688 - RNA, 14 nt, Human herpesvirus 1
gaccuugccccggc

SEQ ID NO: 3952689 - RNA, 16 nt, Human herpesvirus 1
gacgaaaagccccggg

SEQ ID NO: 3952690 - RNA, 16 nt, Human herpesvirus 1
gacgacauggccagcg

SEQ ID NO: 3952691 - RNA, 18 nt, Human herpesvirus 1
gacgccccccguggaccc

SEQ ID NO: 3952692 - RNA, 19 nt, Human herpesvirus 1
gacgcccccucccuguuug

SEQ ID NO: 3952693 - RNA, 12 nt, Human herpesvirus 1
gacgcccgggcg

SEQ ID NO: 3952694 - RNA, 14 nt, Human herpesvirus 1
gacgcguggcggcc

SEQ ID NO: 3952695 - RNA, 23 nt, Human herpesvirus 1
gacggaccuuggucuggcccacg

SEQ ID NO: 3952696 - RNA, 19 nt, Human herpesvirus 1
gacggcauucgggccugcc

SEQ ID NO: 3952697 - RNA, 19 nt, Human herpesvirus 1
gacggcgcggggcccccgc

SEQ ID NO: 3952698 - RNA, 13 nt, Human herpesvirus 1
gacggcggggcag

SEQ ID NO: 3952699 - RNA, 14 nt, Human herpesvirus 1
gacggcggggcaga

SEQ ID NO: 3952700 - RNA, 16 nt, Human herpesvirus 1
gacggguacgugaacg

SEQ ID NO: 3952701 - RNA, 23 nt, Human herpesvirus 1
gacgucccggcucuccgauccca

SEQ ID NO: 3952702 - RNA, 14 nt, Human herpesvirus 1
gacguccugggcca

SEQ ID NO: 3952703 - RNA, 22 nt, Human herpesvirus 1
gacguuaucucgguggaggcgc

SEQ ID NO: 3952704 - RNA, 22 nt, Human herpesvirus 1
gacguuuaucggcaggcaccgc

SEQ ID NO: 3952705 - RNA, 22 nt, Human herpesvirus 1
gacucaagcacacacgggggag

SEQ ID NO: 3952706 - RNA, 21 nt, Human herpesvirus 1
gacucaccucaaagggacgac

SEQ ID NO: 3952707 - RNA, 23 nt, Human herpesvirus 1
gacucucccccaccgcccacaga

SEQ ID NO: 3952708 - RNA, 14 nt, Human herpesvirus 1
gacugcaucggcaa

SEQ ID NO: 3952709 - RNA, 15 nt, Human herpesvirus 1
gagcaccacauaacc

SEQ ID NO: 3952710 - RNA, 15 nt, Human herpesvirus 1
gagcaccccccccaa

SEQ ID NO: 3952711 - RNA, 15 nt, Human herpesvirus 1
gagccccggucuccc

SEQ ID NO: 3952712 - RNA, 18 nt, Human herpesvirus 1
gagccccggucuccccgg

SEQ ID NO: 3952713 - RNA, 22 nt, Human herpesvirus 1
gagcccgcuggggcggcugggc

SEQ ID NO: 3952714 - RNA, 14 nt, Human herpesvirus 1
gagccgcgcggcca

SEQ ID NO: 3952715 - RNA, 13 nt, Human herpesvirus 1
gagccgcuuuccu

SEQ ID NO: 3952716 - RNA, 23 nt, Human herpesvirus 1
gagccgggcgcgugcugcgccuu

SEQ ID NO: 3952717 - RNA, 14 nt, Human herpesvirus 1
gagcgcaguccacg

SEQ ID NO: 3952718 - RNA, 14 nt, Human herpesvirus 1
gagcgcccuccuga

SEQ ID NO: 3952719 - RNA, 18 nt, Human herpesvirus 1
gagcgcgauccggccggg

SEQ ID NO: 3952720 - RNA, 17 nt, Human herpesvirus 1
gagcggggccguggcgg

SEQ ID NO: 3952721 - RNA, 16 nt, Human herpesvirus 1
gagcuccgcaccaagc

SEQ ID NO: 3952722 - RNA, 13 nt, Human herpesvirus 1
gaggaaacccccg

SEQ ID NO: 3952723 - RNA, 22 nt, Human herpesvirus 1
gaggacaccccucguggccccg

SEQ ID NO: 3952724 - RNA, 13 nt, Human herpesvirus 1
gaggagcccgccc

SEQ ID NO: 3952725 - RNA, 14 nt, Human herpesvirus 1
gaggcccacgccuc

SEQ ID NO: 3952726 - RNA, 14 nt, Human herpesvirus 1
gagggccgggcccc

SEQ ID NO: 3952727 - RNA, 12 nt, Human herpesvirus 1
gaggggggagau

SEQ ID NO: 3952728 - RNA, 19 nt, Human herpesvirus 1
gagggugguucccccccgu

SEQ ID NO: 3952729 - RNA, 19 nt, Human herpesvirus 1
gaggucguuuucaugcccg

SEQ ID NO: 3952730 - RNA, 15 nt, Human herpesvirus 1
gagguggagcugccc

SEQ ID NO: 3952731 - RNA, 18 nt, Human herpesvirus 1
gaguccugcgccccgccg

SEQ ID NO: 3952732 - RNA, 15 nt, Human herpesvirus 1
gaucauuacccccgu

SEQ ID NO: 3952733 - RNA, 17 nt, Human herpesvirus 1
gaucccaacgaccccgc

SEQ ID NO: 3952734 - RNA, 13 nt, Human herpesvirus 1
gaucccaggcgcc

SEQ ID NO: 3952735 - RNA, 21 nt, Human herpesvirus 1
gauccgacauguccgugccgc

SEQ ID NO: 3952736 - RNA, 22 nt, Human herpesvirus 1
gaucgccugucuccucguggcc

SEQ ID NO: 3952737 - RNA, 20 nt, Human herpesvirus 1
gaugacgucccggcucuccg

SEQ ID NO: 3952738 - RNA, 14 nt, Human herpesvirus 1
gaugagccagaccc

SEQ ID NO: 3952739 - RNA, 13 nt, Human herpesvirus 1
gaugccagccagg

SEQ ID NO: 3952740 - RNA, 16 nt, Human herpesvirus 1
gauggaggagccccug

SEQ ID NO: 3952741 - RNA, 21 nt, Human herpesvirus 1
gauggcacaccgguccccgga

SEQ ID NO: 3952742 - RNA, 22 nt, Human herpesvirus 1
gauggccauagccgccgaaggg

SEQ ID NO: 3952743 - RNA, 14 nt, Human herpesvirus 1
gauggccugugcuu

SEQ ID NO: 3952744 - RNA, 22 nt, Human herpesvirus 1
gauggggagagcccacaugcgg

SEQ ID NO: 3952745 - RNA, 13 nt, Human herpesvirus 1
gaugggggggcaa

SEQ ID NO: 3952746 - RNA, 11 nt, Human herpesvirus 1
gauuuggguug

SEQ ID NO: 3952747 - RNA, 13 nt, Human herpesvirus 1
gcaaacaggagcu

SEQ ID NO: 3952748 - RNA, 13 nt, Human herpesvirus 1
gcaacaaccugga

SEQ ID NO: 3952749 - RNA, 20 nt, Human herpesvirus 1
gcaacgcgcuggggcugccg

SEQ ID NO: 3952750 - RNA, 20 nt, Human herpesvirus 1
gcaacggcgggagcuggguu

SEQ ID NO: 3952751 - RNA, 16 nt, Human herpesvirus 1
gcaagaccaggccugg

SEQ ID NO: 3952752 - RNA, 23 nt, Human herpesvirus 1
gcaauuucaccgccccagcaccg

SEQ ID NO: 3952753 - RNA, 21 nt, Human herpesvirus 1
gcaauuuguacccuuaauaaa

SEQ ID NO: 3952754 - RNA, 17 nt, Human herpesvirus 1
gcacagaugggacgcca

SEQ ID NO: 3952755 - RNA, 21 nt, Human herpesvirus 1
gcaccacauaaccgaccgcag

SEQ ID NO: 3952756 - RNA, 14 nt, Human herpesvirus 1
gcaccaucccgggu

SEQ ID NO: 3952757 - RNA, 23 nt, Human herpesvirus 1
gcaccaugaccaaguggcaggag

SEQ ID NO: 3952758 - RNA, 12 nt, Human herpesvirus 1
gcaccccagagg

SEQ ID NO: 3952759 - RNA, 23 nt, Human herpesvirus 1
gcaccgagccaagggcuccugua

SEQ ID NO: 3952760 - RNA, 20 nt, Human herpesvirus 1
gcaccgucggaggcccccca

SEQ ID NO: 3952761 - RNA, 22 nt, Human herpesvirus 1
gcaccgucggaggccccccaga

SEQ ID NO: 3952762 - RNA, 18 nt, Human herpesvirus 1
gcaccuccccagcggcca

SEQ ID NO: 3952763 - RNA, 15 nt, Human herpesvirus 1
gcacgagccggggcu

SEQ ID NO: 3952764 - RNA, 12 nt, Human herpesvirus 1
gcacgcgccgcc

SEQ ID NO: 3952765 - RNA, 19 nt, Human herpesvirus 1
gcagaccggcaagcggagc

SEQ ID NO: 3952766 - RNA, 23 nt, Human herpesvirus 1
gcagacgaaaagccccgggccgc

SEQ ID NO: 3952767 - RNA, 19 nt, Human herpesvirus 1
gcagacgguggugcccagc

SEQ ID NO: 3952768 - RNA, 14 nt, Human herpesvirus 1
gcagagcaacccca

SEQ ID NO: 3952769 - RNA, 15 nt, Human herpesvirus 1
gcagaggcggccaga

SEQ ID NO: 3952770 - RNA, 12 nt, Human herpesvirus 1
gcagaugcagag

SEQ ID NO: 3952771 - RNA, 17 nt, Human herpesvirus 1
gcagccgaugccccggg

SEQ ID NO: 3952772 - RNA, 20 nt, Human herpesvirus 1
gcagccggaaugaggagcuc

SEQ ID NO: 3952773 - RNA, 19 nt, Human herpesvirus 1
gcagccuggucgaggcggc

SEQ ID NO: 3952774 - RNA, 21 nt, Human herpesvirus 1
gcagccuucucccggugccuu

SEQ ID NO: 3952775 - RNA, 16 nt, Human herpesvirus 1
gcagcgccggccuccc

SEQ ID NO: 3952776 - RNA, 13 nt, Human herpesvirus 1
gcaggauggagag

SEQ ID NO: 3952777 - RNA, 15 nt, Human herpesvirus 1
gcaggccccccgccg

SEQ ID NO: 3952778 - RNA, 19 nt, Human herpesvirus 1
gcaggcgcugucuccccgg

SEQ ID NO: 3952779 - RNA, 14 nt, Human herpesvirus 1
gcagucccugaguu

SEQ ID NO: 3952780 - RNA, 20 nt, Human herpesvirus 1
gcauacgccucccccacauc

SEQ ID NO: 3952781 - RNA, 21 nt, Human herpesvirus 1
gcauacgggcggccacccccc

SEQ ID NO: 3952782 - RNA, 17 nt, Human herpesvirus 1
gcauauccgggggcacg

SEQ ID NO: 3952783 - RNA, 17 nt, Human herpesvirus 1
gcaucaaaagcccgaua

SEQ ID NO: 3952784 - RNA, 12 nt, Human herpesvirus 1
gcaucccaggau

SEQ ID NO: 3952785 - RNA, 17 nt, Human herpesvirus 1
gcauccgagcacccccc

SEQ ID NO: 3952786 - RNA, 12 nt, Human herpesvirus 1
gccaaccaagag

SEQ ID NO: 3952787 - RNA, 14 nt, Human herpesvirus 1
gccaaccugauccg

SEQ ID NO: 3952788 - RNA, 19 nt, Human herpesvirus 1
gccacacucaaaaagcccc

SEQ ID NO: 3952789 - RNA, 13 nt, Human herpesvirus 1
gccacccccccgg

SEQ ID NO: 3952790 - RNA, 23 nt, Human herpesvirus 1
gccacgagaucaaggacagcggc

SEQ ID NO: 3952791 - RNA, 18 nt, Human herpesvirus 1
gccacgcaaaaccaggcc

SEQ ID NO: 3952792 - RNA, 13 nt, Human herpesvirus 1
gccacgccagggc

SEQ ID NO: 3952793 - RNA, 16 nt, Human herpesvirus 1
gccacggcgccgacca

SEQ ID NO: 3952794 - RNA, 19 nt, Human herpesvirus 1
gccacguaucugacggccg

SEQ ID NO: 3952795 - RNA, 18 nt, Human herpesvirus 1
gccagacccaacccccgg

SEQ ID NO: 3952796 - RNA, 23 nt, Human herpesvirus 1
gccagaucuacugcugggccaug

SEQ ID NO: 3952797 - RNA, 17 nt, Human herpesvirus 1
gccagccugcggccgga

SEQ ID NO: 3952798 - RNA, 22 nt, Human herpesvirus 1
gccaguccgcugcaccgaugua

SEQ ID NO: 3952799 - RNA, 14 nt, Human herpesvirus 1
gccaucccguggau

SEQ ID NO: 3952800 - RNA, 23 nt, Human herpesvirus 1
gccaucgcguggugcgagcugca

SEQ ID NO: 3952801 - RNA, 13 nt, Human herpesvirus 1
gcccaacccacac

SEQ ID NO: 3952802 - RNA, 19 nt, Human herpesvirus 1
gcccaacucucgcaccauc

SEQ ID NO: 3952803 - RNA, 20 nt, Human herpesvirus 1
gcccacaugcggaaagcaag

SEQ ID NO: 3952804 - RNA, 17 nt, Human herpesvirus 1
gcccaccgcugggcgcu

SEQ ID NO: 3952805 - RNA, 18 nt, Human herpesvirus 1
gcccaccggaagcccaac

SEQ ID NO: 3952806 - RNA, 14 nt, Human herpesvirus 1
gcccaccuccuggc

SEQ ID NO: 3952807 - RNA, 15 nt, Human herpesvirus 1
gcccacgccucgggc

SEQ ID NO: 3952808 - RNA, 17 nt, Human herpesvirus 1
gcccacgucgccccgcc

SEQ ID NO: 3952809 - RNA, 15 nt, Human herpesvirus 1
gcccacuacaccagc

SEQ ID NO: 3952810 - RNA, 16 nt, Human herpesvirus 1
gcccacuacaccagcc

SEQ ID NO: 3952811 - RNA, 18 nt, Human herpesvirus 1
gcccacuacaccagccaa

SEQ ID NO: 3952812 - RNA, 19 nt, Human herpesvirus 1
gcccacuacaccagccaau

SEQ ID NO: 3952813 - RNA, 14 nt, Human herpesvirus 1
gcccacuucccccc

SEQ ID NO: 3952814 - RNA, 16 nt, Human herpesvirus 1
gcccagcagcucccca

SEQ ID NO: 3952815 - RNA, 20 nt, Human herpesvirus 1
gcccagcgcagaggcggcca

SEQ ID NO: 3952816 - RNA, 18 nt, Human herpesvirus 1
gcccagcggccuggacgu

SEQ ID NO: 3952817 - RNA, 19 nt, Human herpesvirus 1
gccccacacagcccucccg

SEQ ID NO: 3952818 - RNA, 14 nt, Human herpesvirus 1
gccccagaaacccc

SEQ ID NO: 3952819 - RNA, 16 nt, Human herpesvirus 1
gccccaguccccaaga

SEQ ID NO: 3952820 - RNA, 19 nt, Human herpesvirus 1
gccccauaaaacccaagcc

SEQ ID NO: 3952821 - RNA, 13 nt, Human herpesvirus 1
gccccauacacga

SEQ ID NO: 3952822 - RNA, 20 nt, Human herpesvirus 1
gccccauacacgagcacccu

SEQ ID NO: 3952823 - RNA, 23 nt, Human herpesvirus 1
gccccauacacgagcacccugcu

SEQ ID NO: 3952824 - RNA, 19 nt, Human herpesvirus 1
gcccccggacccgggccgu

SEQ ID NO: 3952825 - RNA, 23 nt, Human herpesvirus 1
gccccgacgcacccccccaacgg

SEQ ID NO: 3952826 - RNA, 22 nt, Human herpesvirus 1
gccccgaugcggcggcgcugca

SEQ ID NO: 3952827 - RNA, 22 nt, Human herpesvirus 1
gccccgcauaucccacccugga

SEQ ID NO: 3952828 - RNA, 13 nt, Human herpesvirus 1
gccccgccaccca

SEQ ID NO: 3952829 - RNA, 16 nt, Human herpesvirus 1
gccccggcccccaaua

SEQ ID NO: 3952830 - RNA, 18 nt, Human herpesvirus 1
gccccgggccgcgucgcc

SEQ ID NO: 3952831 - RNA, 20 nt, Human herpesvirus 1
gccccggggagacagcgccu

SEQ ID NO: 3952832 - RNA, 21 nt, Human herpesvirus 1
gccccggguuccgcgaccacc

SEQ ID NO: 3952833 - RNA, 18 nt, Human herpesvirus 1
gccccggucuccccggga

SEQ ID NO: 3952834 - RNA, 21 nt, Human herpesvirus 1
gccccguacaaguucaaggcc

SEQ ID NO: 3952835 - RNA, 15 nt, Human herpesvirus 1
gccccuggcgccgcc

SEQ ID NO: 3952836 - RNA, 18 nt, Human herpesvirus 1
gccccuggcgccgccugg

SEQ ID NO: 3952837 - RNA, 17 nt, Human herpesvirus 1
gccccuguggcccuggc

SEQ ID NO: 3952838 - RNA, 16 nt, Human herpesvirus 1
gcccgaagacaccccc

SEQ ID NO: 3952839 - RNA, 16 nt, Human herpesvirus 1
gcccgaccacacaccc

SEQ ID NO: 3952840 - RNA, 20 nt, Human herpesvirus 1
gcccgaccacacacccccca

SEQ ID NO: 3952841 - RNA, 19 nt, Human herpesvirus 1
gcccgauuuacagccccca

SEQ ID NO: 3952842 - RNA, 20 nt, Human herpesvirus 1
gcccgauuuacagcccccag

SEQ ID NO: 3952843 - RNA, 21 nt, Human herpesvirus 1
gcccgauuuacagcccccaga

SEQ ID NO: 3952844 - RNA, 18 nt, Human herpesvirus 1
gcccgcaaacaggagcug

SEQ ID NO: 3952845 - RNA, 17 nt, Human herpesvirus 1
gcccgcgggaggccgcc

SEQ ID NO: 3952846 - RNA, 18 nt, Human herpesvirus 1
gcccgcgggaggccgccc

SEQ ID NO: 3952847 - RNA, 13 nt, Human herpesvirus 1
gcccgcuggggcg

SEQ ID NO: 3952848 - RNA, 18 nt, Human herpesvirus 1
gcccggaggcgcccgcgg

SEQ ID NO: 3952849 - RNA, 23 nt, Human herpesvirus 1
gcccgggcaaguaugccccccug

SEQ ID NO: 3952850 - RNA, 22 nt, Human herpesvirus 1
gcccgggcgcuugcgcaccugg

SEQ ID NO: 3952851 - RNA, 16 nt, Human herpesvirus 1
gcccggggccagcgcc

SEQ ID NO: 3952852 - RNA, 13 nt, Human herpesvirus 1
gcccgugcugccg

SEQ ID NO: 3952853 - RNA, 20 nt, Human herpesvirus 1
gcccucacagggcgggccgc

SEQ ID NO: 3952854 - RNA, 13 nt, Human herpesvirus 1
gcccuccugacca

SEQ ID NO: 3952855 - RNA, 11 nt, Human herpesvirus 1
gcccucucccc

SEQ ID NO: 3952856 - RNA, 20 nt, Human herpesvirus 1
gcccucuuggaggaccccgu

SEQ ID NO: 3952857 - RNA, 22 nt, Human herpesvirus 1
gcccugagacaagagcgcuccc

SEQ ID NO: 3952858 - RNA, 14 nt, Human herpesvirus 1
gcccugcugcugcc

SEQ ID NO: 3952859 - RNA, 22 nt, Human herpesvirus 1
gcccuggccgcggaucugcucc

SEQ ID NO: 3952860 - RNA, 15 nt, Human herpesvirus 1
gccgacggcccgaag

SEQ ID NO: 3952861 - RNA, 19 nt, Human herpesvirus 1
gccgacucccggcuugccg

SEQ ID NO: 3952862 - RNA, 16 nt, Human herpesvirus 1
gccgcccccuggucag

SEQ ID NO: 3952863 - RNA, 14 nt, Human herpesvirus 1
gccgccgcggacgc

SEQ ID NO: 3952864 - RNA, 12 nt, Human herpesvirus 1
gccgcgccccgc

SEQ ID NO: 3952865 - RNA, 21 nt, Human herpesvirus 1
gccgcgccccgccggcgacaa

SEQ ID NO: 3952866 - RNA, 14 nt, Human herpesvirus 1
gccgcgcguccccc

SEQ ID NO: 3952867 - RNA, 14 nt, Human herpesvirus 1
gccgcggccugggu

SEQ ID NO: 3952868 - RNA, 14 nt, Human herpesvirus 1
gccgcgggccacgc

SEQ ID NO: 3952869 - RNA, 18 nt, Human herpesvirus 1
gccgcuaccgacgcuccc

SEQ ID NO: 3952870 - RNA, 16 nt, Human herpesvirus 1
gccgcucgguggcucc

SEQ ID NO: 3952871 - RNA, 23 nt, Human herpesvirus 1
gccgcuguggccucaccugacca

SEQ ID NO: 3952872 - RNA, 17 nt, Human herpesvirus 1
gccggaacgcaccgagg

SEQ ID NO: 3952873 - RNA, 17 nt, Human herpesvirus 1
gccgggagcgccaggac

SEQ ID NO: 3952874 - RNA, 18 nt, Human herpesvirus 1
gccgggccgcccacuucc

SEQ ID NO: 3952875 - RNA, 18 nt, Human herpesvirus 1
gccggucggcgggcccgc

SEQ ID NO: 3952876 - RNA, 20 nt, Human herpesvirus 1
gccgguuccucccgcucggc

SEQ ID NO: 3952877 - RNA, 15 nt, Human herpesvirus 1
gccguccgaacccag

SEQ ID NO: 3952878 - RNA, 22 nt, Human herpesvirus 1
gccguccucgcaccagcccuug

SEQ ID NO: 3952879 - RNA, 18 nt, Human herpesvirus 1
gccgucuuucuccccaac

SEQ ID NO: 3952880 - RNA, 17 nt, Human herpesvirus 1
gccgugcuccugugagc

SEQ ID NO: 3952881 - RNA, 15 nt, Human herpesvirus 1
gccguuggcccccgc

SEQ ID NO: 3952882 - RNA, 18 nt, Human herpesvirus 1
gccuaccggccccugggc

SEQ ID NO: 3952883 - RNA, 17 nt, Human herpesvirus 1
gccuacuacucggaaag

SEQ ID NO: 3952884 - RNA, 15 nt, Human herpesvirus 1
gccucccccugagcc

SEQ ID NO: 3952885 - RNA, 24 nt, Human herpesvirus 1
gccucccggggggucggcaggcga

SEQ ID NO: 3952886 - RNA, 20 nt, Human herpesvirus 1
gccuccgcccgugcugccgu

SEQ ID NO: 3952887 - RNA, 17 nt, Human herpesvirus 1
gccucggagccgagcuc

SEQ ID NO: 3952888 - RNA, 15 nt, Human herpesvirus 1
gccucgggggcggga

SEQ ID NO: 3952889 - RNA, 13 nt, Human herpesvirus 1
gccucgugggcac

SEQ ID NO: 3952890 - RNA, 18 nt, Human herpesvirus 1
gccucguggggcuggacg

SEQ ID NO: 3952891 - RNA, 21 nt, Human herpesvirus 1
gccugacccucuccgggaugg

SEQ ID NO: 3952892 - RNA, 21 nt, Human herpesvirus 1
gccugacgccugccaaccuga

SEQ ID NO: 3952893 - RNA, 16 nt, Human herpesvirus 1
gccugccucucccccc

SEQ ID NO: 3952894 - RNA, 21 nt, Human herpesvirus 1
gccugccucuccccccaggcc

SEQ ID NO: 3952895 - RNA, 14 nt, Human herpesvirus 1
gccugcggcgcacc

SEQ ID NO: 3952896 - RNA, 15 nt, Human herpesvirus 1
gccuggaucccaacg

SEQ ID NO: 3952897 - RNA, 22 nt, Human herpesvirus 1
gccuggaucccaacgaccccgc

SEQ ID NO: 3952898 - RNA, 13 nt, Human herpesvirus 1
gccuggccugcga

SEQ ID NO: 3952899 - RNA, 19 nt, Human herpesvirus 1
gccuggcugacccacgcgg

SEQ ID NO: 3952900 - RNA, 20 nt, Human herpesvirus 1
gccuggucagaggcccacgc

SEQ ID NO: 3952901 - RNA, 20 nt, Human herpesvirus 1
gccuucccccggccaccucg

SEQ ID NO: 3952902 - RNA, 13 nt, Human herpesvirus 1
gccuucucccggu

SEQ ID NO: 3952903 - RNA, 12 nt, Human herpesvirus 1
gcgaacccccgu

SEQ ID NO: 3952904 - RNA, 16 nt, Human herpesvirus 1
gcgaagacgaggcggc

SEQ ID NO: 3952905 - RNA, 13 nt, Human herpesvirus 1
gcgaaggcugccg

SEQ ID NO: 3952906 - RNA, 14 nt, Human herpesvirus 1
gcgaccaccccaaa

SEQ ID NO: 3952907 - RNA, 19 nt, Human herpesvirus 1
gcgaccccagccuucacgu

SEQ ID NO: 3952908 - RNA, 14 nt, Human herpesvirus 1
gcgacccuccggga

SEQ ID NO: 3952909 - RNA, 20 nt, Human herpesvirus 1
gcgaccucggcgccucugga

SEQ ID NO: 3952910 - RNA, 18 nt, Human herpesvirus 1
gcgacggcgucucccggg

SEQ ID NO: 3952911 - RNA, 21 nt, Human herpesvirus 1
gcgagauuuuucuguaucuga

SEQ ID NO: 3952912 - RNA, 17 nt, Human herpesvirus 1
gcgagcaccugcgggac

SEQ ID NO: 3952913 - RNA, 16 nt, Human herpesvirus 1
gcgagcucccagagac

SEQ ID NO: 3952914 - RNA, 15 nt, Human herpesvirus 1
gcgagcucccugcgg

SEQ ID NO: 3952915 - RNA, 17 nt, Human herpesvirus 1
gcgaggagggcggcgac

SEQ ID NO: 3952916 - RNA, 14 nt, Human herpesvirus 1
gcgcaacaaccugg

SEQ ID NO: 3952917 - RNA, 21 nt, Human herpesvirus 1
gcgcaccuccuccgacgccca

SEQ ID NO: 3952918 - RNA, 16 nt, Human herpesvirus 1
gcgcaccuguuccgcc

SEQ ID NO: 3952919 - RNA, 15 nt, Human herpesvirus 1
gcgcagaggcggcca

SEQ ID NO: 3952920 - RNA, 21 nt, Human herpesvirus 1
gcgcagcugggaccccggcgg

SEQ ID NO: 3952921 - RNA, 17 nt, Human herpesvirus 1
gcgcaguccacgggggg

SEQ ID NO: 3952922 - RNA, 15 nt, Human herpesvirus 1
gcgcaucagcucgcg

SEQ ID NO: 3952923 - RNA, 22 nt, Human herpesvirus 1
gcgccaggcccgccgccacugu

SEQ ID NO: 3952924 - RNA, 18 nt, Human herpesvirus 1
gcgccaucuggaccgggg

SEQ ID NO: 3952925 - RNA, 20 nt, Human herpesvirus 1
gcgcccgucggucugcacca

SEQ ID NO: 3952926 - RNA, 22 nt, Human herpesvirus 1
gcgccggguggcgccugugugu

SEQ ID NO: 3952927 - RNA, 15 nt, Human herpesvirus 1
gcgccggucgucacg

SEQ ID NO: 3952928 - RNA, 14 nt, Human herpesvirus 1
gcgccggugguucg

SEQ ID NO: 3952929 - RNA, 14 nt, Human herpesvirus 1
gcgccucuggacug

SEQ ID NO: 3952930 - RNA, 14 nt, Human herpesvirus 1
gcgcgaugcgaucg

SEQ ID NO: 3952931 - RNA, 19 nt, Human herpesvirus 1
gcgcgcugcucagcgccaa

SEQ ID NO: 3952932 - RNA, 19 nt, Human herpesvirus 1
gcgcgcuuguccccgaaca

SEQ ID NO: 3952933 - RNA, 19 nt, Human herpesvirus 1
gcgcggaugcucggcgacg

SEQ ID NO: 3952934 - RNA, 12 nt, Human herpesvirus 1
gcgcggccgugg

SEQ ID NO: 3952935 - RNA, 12 nt, Human herpesvirus 1
gcgcggcugcca

SEQ ID NO: 3952936 - RNA, 19 nt, Human herpesvirus 1
gcgcguaucugguccccgc

SEQ ID NO: 3952937 - RNA, 19 nt, Human herpesvirus 1
gcgcguccccggcccggag

SEQ ID NO: 3952938 - RNA, 22 nt, Human herpesvirus 1
gcgcgugcuguugggcgggacg

SEQ ID NO: 3952939 - RNA, 15 nt, Human herpesvirus 1
gcgcucaaccaccgc

SEQ ID NO: 3952940 - RNA, 21 nt, Human herpesvirus 1
gcgcucgcucucggugccccu

SEQ ID NO: 3952941 - RNA, 13 nt, Human herpesvirus 1
gcgcugcccuccc

SEQ ID NO: 3952942 - RNA, 19 nt, Human herpesvirus 1
gcgcuggguggucucuggc

SEQ ID NO: 3952943 - RNA, 16 nt, Human herpesvirus 1
gcggagaacaccgaug

SEQ ID NO: 3952944 - RNA, 15 nt, Human herpesvirus 1
gcggagcucccggga

SEQ ID NO: 3952945 - RNA, 22 nt, Human herpesvirus 1
gcggagcuguacgugcgggaac

SEQ ID NO: 3952946 - RNA, 13 nt, Human herpesvirus 1
gcggcagcgcucc

SEQ ID NO: 3952947 - RNA, 14 nt, Human herpesvirus 1
gcggcagucuccug

SEQ ID NO: 3952948 - RNA, 22 nt, Human herpesvirus 1
gcggcauaacuccgaccggcgg

SEQ ID NO: 3952949 - RNA, 15 nt, Human herpesvirus 1
gcggcccacccuggc

SEQ ID NO: 3952950 - RNA, 19 nt, Human herpesvirus 1
gcggccccagcccucuccc

SEQ ID NO: 3952951 - RNA, 19 nt, Human herpesvirus 1
gcggccuggacguccccga

SEQ ID NO: 3952952 - RNA, 22 nt, Human herpesvirus 1
gcggccuggguuggcgucggga

SEQ ID NO: 3952953 - RNA, 22 nt, Human herpesvirus 1
gcggcgaacgggggcccugcca

SEQ ID NO: 3952954 - RNA, 23 nt, Human herpesvirus 1
gcggcgaccucggcgccucugga

SEQ ID NO: 3952955 - RNA, 14 nt, Human herpesvirus 1
gcggcgaggccggc

SEQ ID NO: 3952956 - RNA, 20 nt, Human herpesvirus 1
gcggcguccgcgccccucug

SEQ ID NO: 3952957 - RNA, 21 nt, Human herpesvirus 1
gcggcgugguaucggccgugu

SEQ ID NO: 3952958 - RNA, 14 nt, Human herpesvirus 1
gcggcucguggcgu

SEQ ID NO: 3952959 - RNA, 20 nt, Human herpesvirus 1
gcggcugguccacacccagu

SEQ ID NO: 3952960 - RNA, 23 nt, Human herpesvirus 1
gcgggacuggccaaucggcggcc

SEQ ID NO: 3952961 - RNA, 20 nt, Human herpesvirus 1
gcgggaguuaccgcccaaug

SEQ ID NO: 3952962 - RNA, 17 nt, Human herpesvirus 1
gcggggacucgggcgag

SEQ ID NO: 3952963 - RNA, 13 nt, Human herpesvirus 1
gcggggcccggcc

SEQ ID NO: 3952964 - RNA, 13 nt, Human herpesvirus 1
gcgggggccccgc

SEQ ID NO: 3952965 - RNA, 17 nt, Human herpesvirus 1
gcgggguugggauggga

SEQ ID NO: 3952966 - RNA, 22 nt, Human herpesvirus 1
gcgggugaacgagccgacggcc

SEQ ID NO: 3952967 - RNA, 17 nt, Human herpesvirus 1
gcggucugucucgucuc

SEQ ID NO: 3952968 - RNA, 14 nt, Human herpesvirus 1
gcggugacgaacgc

SEQ ID NO: 3952969 - RNA, 13 nt, Human herpesvirus 1
gcggugguaucua

SEQ ID NO: 3952970 - RNA, 21 nt, Human herpesvirus 1
gcguaccaaacaaacaaacca

SEQ ID NO: 3952971 - RNA, 16 nt, Human herpesvirus 1
gcguauccacccccgc

SEQ ID NO: 3952972 - RNA, 21 nt, Human herpesvirus 1
gcguccgguuggccgcgcggc

SEQ ID NO: 3952973 - RNA, 13 nt, Human herpesvirus 1
gcgucggcggcuc

SEQ ID NO: 3952974 - RNA, 18 nt, Human herpesvirus 1
gcguuucugaccugcacc

SEQ ID NO: 3952975 - RNA, 11 nt, Human herpesvirus 1
gcuacgacauc

SEQ ID NO: 3952976 - RNA, 14 nt, Human herpesvirus 1
gcuacuauccccgc

SEQ ID NO: 3952977 - RNA, 13 nt, Human herpesvirus 1
gcuaucuccuggg

SEQ ID NO: 3952978 - RNA, 17 nt, Human herpesvirus 1
gcucagcgccaagguca

SEQ ID NO: 3952979 - RNA, 17 nt, Human herpesvirus 1
gcucccgccuuccggac

SEQ ID NO: 3952980 - RNA, 22 nt, Human herpesvirus 1
gcuccuacaacaagucucuggg

SEQ ID NO: 3952981 - RNA, 22 nt, Human herpesvirus 1
gcucggccuauggcuccugcga

SEQ ID NO: 3952982 - RNA, 19 nt, Human herpesvirus 1
gcucggcggcagcccggag

SEQ ID NO: 3952983 - RNA, 16 nt, Human herpesvirus 1
gcucggcuccccgccg

SEQ ID NO: 3952984 - RNA, 16 nt, Human herpesvirus 1
gcucgucgccuggcug

SEQ ID NO: 3952985 - RNA, 13 nt, Human herpesvirus 1
gcucuacugcaga

SEQ ID NO: 3952986 - RNA, 20 nt, Human herpesvirus 1
gcugaagcacaacgccagcc

SEQ ID NO: 3952987 - RNA, 21 nt, Human herpesvirus 1
gcugacccuguggaacgaggc

SEQ ID NO: 3952988 - RNA, 21 nt, Human herpesvirus 1
gcugccccgcuucauccccga

SEQ ID NO: 3952989 - RNA, 23 nt, Human herpesvirus 1
gcugccccgcuucauccccgaga

SEQ ID NO: 3952990 - RNA, 21 nt, Human herpesvirus 1
gcugcccgacccggcccgagg

SEQ ID NO: 3952991 - RNA, 22 nt, Human herpesvirus 1
gcugccgucgcuagaccacgcc

SEQ ID NO: 3952992 - RNA, 21 nt, Human herpesvirus 1
gcugcgcggcguccgcgcccc

SEQ ID NO: 3952993 - RNA, 20 nt, Human herpesvirus 1
gcugcggccacacagccggc

SEQ ID NO: 3952994 - RNA, 13 nt, Human herpesvirus 1
gcugcgugucaaa

SEQ ID NO: 3952995 - RNA, 15 nt, Human herpesvirus 1
gcuggcaacucgccc

SEQ ID NO: 3952996 - RNA, 23 nt, Human herpesvirus 1
gcugggggagaacaacgagcugc

SEQ ID NO: 3952997 - RNA, 17 nt, Human herpesvirus 1
gcuggguggucucuggc

SEQ ID NO: 3952998 - RNA, 21 nt, Human herpesvirus 1
gcugguccacacccaguggcu

SEQ ID NO: 3952999 - RNA, 22 nt, Human herpesvirus 1
gcuucauccccgagaaccagcg

SEQ ID NO: 3953000 - RNA, 20 nt, Human herpesvirus 1
gcuuccgacgccccccgugg

SEQ ID NO: 3953001 - RNA, 20 nt, Human herpesvirus 1
gcuucggccguuucuccgcc

SEQ ID NO: 3953002 - RNA, 15 nt, Human herpesvirus 1
gcuugagucuguccg

SEQ ID NO: 3953003 - RNA, 18 nt, Human herpesvirus 1
gcuugguuucggauggga

SEQ ID NO: 3953004 - RNA, 12 nt, Human herpesvirus 1
ggaaacccccga

SEQ ID NO: 3953005 - RNA, 12 nt, Human herpesvirus 1
ggaaagcaagaa

SEQ ID NO: 3953006 - RNA, 15 nt, Human herpesvirus 1
ggaacacacccccgu

SEQ ID NO: 3953007 - RNA, 21 nt, Human herpesvirus 1
ggaacacacccccgugacuca

SEQ ID NO: 3953008 - RNA, 22 nt, Human herpesvirus 1
ggaacacgccuaccggccccug

SEQ ID NO: 3953009 - RNA, 17 nt, Human herpesvirus 1
ggaaccugcucacgacc

SEQ ID NO: 3953010 - RNA, 20 nt, Human herpesvirus 1
ggaacgggaggccacagcgc

SEQ ID NO: 3953011 - RNA, 23 nt, Human herpesvirus 1
ggacacuacgaucucgaagccau

SEQ ID NO: 3953012 - RNA, 20 nt, Human herpesvirus 1
ggacacuggguucuccugga

SEQ ID NO: 3953013 - RNA, 21 nt, Human herpesvirus 1
ggacacuggguucuccuggaa

SEQ ID NO: 3953014 - RNA, 14 nt, Human herpesvirus 1
ggacagccaggagc

SEQ ID NO: 3953015 - RNA, 18 nt, Human herpesvirus 1
ggacauccaccacccggc

SEQ ID NO: 3953016 - RNA, 17 nt, Human herpesvirus 1
ggaccaccgccccccug

SEQ ID NO: 3953017 - RNA, 14 nt, Human herpesvirus 1
ggaccccacgacac

SEQ ID NO: 3953018 - RNA, 18 nt, Human herpesvirus 1
ggaccccagcgaccccac

SEQ ID NO: 3953019 - RNA, 19 nt, Human herpesvirus 1
ggacccccccucgcgccac

SEQ ID NO: 3953020 - RNA, 19 nt, Human herpesvirus 1
ggaccgccugccgcgcgga

SEQ ID NO: 3953021 - RNA, 17 nt, Human herpesvirus 1
ggaccggggucccagcg

SEQ ID NO: 3953022 - RNA, 15 nt, Human herpesvirus 1
ggacgccggggccuu

SEQ ID NO: 3953023 - RNA, 21 nt, Human herpesvirus 1
ggacgcgcggcgcgagcuccc

SEQ ID NO: 3953024 - RNA, 20 nt, Human herpesvirus 1
ggacgcguccggggagggcg

SEQ ID NO: 3953025 - RNA, 16 nt, Human herpesvirus 1
gggcaucgcggugguc

SEQ ID NO: 3953026 - RNA, 13 nt, Human herpesvirus 1
gggccagccgcag

SEQ ID NO: 3953027 - RNA, 21 nt, Human herpesvirus 1
gggccauggacagcgaccugg

SEQ ID NO: 3953028 - RNA, 20 nt, Human herpesvirus 1
gggcccacgaucaccgcggg

SEQ ID NO: 3953029 - RNA, 22 nt, Human herpesvirus 1
gggcccacgaucaccgcgggag

SEQ ID NO: 3953030 - RNA, 12 nt, Human herpesvirus 1
gggcccccgccc

SEQ ID NO: 3953031 - RNA, 20 nt, Human herpesvirus 1
gggccccgggacacccccca

SEQ ID NO: 3953032 - RNA, 16 nt, Human herpesvirus 1
gggcccgggggccugg

SEQ ID NO: 3953033 - RNA, 18 nt, Human herpesvirus 1
gggcccugcuccggcggg

SEQ ID NO: 3953034 - RNA, 14 nt, Human herpesvirus 1
gggccgcgguggac

SEQ ID NO: 3953035 - RNA, 15 nt, Human herpesvirus 1
gggccguggcggcca

SEQ ID NO: 3953036 - RNA, 14 nt, Human herpesvirus 1
gggccguugcccgg

SEQ ID NO: 3953037 - RNA, 18 nt, Human herpesvirus 1
gggcgaggagggcggcga

SEQ ID NO: 3953038 - RNA, 15 nt, Human herpesvirus 1
gggcgcuggccgugg

SEQ ID NO: 3953039 - RNA, 12 nt, Human herpesvirus 1
gggcggccccgg

SEQ ID NO: 3953040 - RNA, 12 nt, Human herpesvirus 1
gggcggcggcgu

SEQ ID NO: 3953041 - RNA, 21 nt, Human herpesvirus 1
gggcguaacguuccgccugga

SEQ ID NO: 3953042 - RNA, 23 nt, Human herpesvirus 1
gggcucuacccucuggacgcccg

SEQ ID NO: 3953043 - RNA, 18 nt, Human herpesvirus 1
ggggaaaagugaaagaca

SEQ ID NO: 3953044 - RNA, 17 nt, Human herpesvirus 1
ggggaccagguccccca

SEQ ID NO: 3953045 - RNA, 13 nt, Human herpesvirus 1
ggggacccggccc

SEQ ID NO: 3953046 - RNA, 14 nt, Human herpesvirus 1
ggggagagcccaca

SEQ ID NO: 3953047 - RNA, 12 nt, Human herpesvirus 1
ggggagcuucgc

SEQ ID NO: 3953048 - RNA, 18 nt, Human herpesvirus 1
ggggaugggcgaccuggg

SEQ ID NO: 3953049 - RNA, 15 nt, Human herpesvirus 1
ggggcccggccaacc

SEQ ID NO: 3953050 - RNA, 15 nt, Human herpesvirus 1
ggggccucccccgga

SEQ ID NO: 3953051 - RNA, 10 nt, Human herpesvirus 1
ggggcgggac

SEQ ID NO: 3953052 - RNA, 19 nt, Human herpesvirus 1
gggggaugcuagccugugu

SEQ ID NO: 3953053 - RNA, 22 nt, Human herpesvirus 1
gggggcugcgaguccugcgccc

SEQ ID NO: 3953054 - RNA, 17 nt, Human herpesvirus 1
ggggucuccgaaagcca

SEQ ID NO: 3953055 - RNA, 23 nt, Human herpesvirus 1
gggucagaacuacacggagggca

SEQ ID NO: 3953056 - RNA, 18 nt, Human herpesvirus 1
gggucugugccaccagcc

SEQ ID NO: 3953057 - RNA, 17 nt, Human herpesvirus 1
gggucuguuggggacac

SEQ ID NO: 3953058 - RNA, 12 nt, Human herpesvirus 1
ggguucuccugg

SEQ ID NO: 3953059 - RNA, 22 nt, Human herpesvirus 1
gguaccgcgugaccccagggau

SEQ ID NO: 3953060 - RNA, 14 nt, Human herpesvirus 1
gguacgugaacgcu

SEQ ID NO: 3953061 - RNA, 14 nt, Human herpesvirus 1
gguagcgggggacg

SEQ ID NO: 3953062 - RNA, 17 nt, Human herpesvirus 1
ggucaaaugccgggcca

SEQ ID NO: 3953063 - RNA, 15 nt, Human herpesvirus 1
gguccacggccacug

SEQ ID NO: 3953064 - RNA, 19 nt, Human herpesvirus 1
gguccccucugggcccgcc

SEQ ID NO: 3953065 - RNA, 17 nt, Human herpesvirus 1
ggucgaucccgaacgac

SEQ ID NO: 3953066 - RNA, 15 nt, Human herpesvirus 1
ggucggcgaccgcca

SEQ ID NO: 3953067 - RNA, 16 nt, Human herpesvirus 1
ggucggcgggcccgcg

SEQ ID NO: 3953068 - RNA, 15 nt, Human herpesvirus 1
ggucgggaggccgca

SEQ ID NO: 3953069 - RNA, 15 nt, Human herpesvirus 1
ggucgggcggagaaa

SEQ ID NO: 3953070 - RNA, 13 nt, Human herpesvirus 1
ggucucccaggga

SEQ ID NO: 3953071 - RNA, 23 nt, Human herpesvirus 1
ggucucccagggagccccggucu

SEQ ID NO: 3953072 - RNA, 17 nt, Human herpesvirus 1
ggucuccccgggagccc

SEQ ID NO: 3953073 - RNA, 19 nt, Human herpesvirus 1
ggucuccccgggagccccg

SEQ ID NO: 3953074 - RNA, 16 nt, Human herpesvirus 1
ggucucuggccgcgcc

SEQ ID NO: 3953075 - RNA, 18 nt, Human herpesvirus 1
ggucucuggccgcgccca

SEQ ID NO: 3953076 - RNA, 19 nt, Human herpesvirus 1
ggucugggaacggacacgc

SEQ ID NO: 3953077 - RNA, 19 nt, Human herpesvirus 1
ggucugucucgucuccucu

SEQ ID NO: 3953078 - RNA, 20 nt, Human herpesvirus 1
ggugacguuuaucggcaggc

SEQ ID NO: 3953079 - RNA, 21 nt, Human herpesvirus 1
ggugccugacgccugccaacc

SEQ ID NO: 3953080 - RNA, 23 nt, Human herpesvirus 1
ggugcgauggcgacacaccugug

SEQ ID NO: 3953081 - RNA, 14 nt, Human herpesvirus 1
gguggagcugcccg

SEQ ID NO: 3953082 - RNA, 11 nt, Human herpesvirus 1
gguggagggug

SEQ ID NO: 3953083 - RNA, 16 nt, Human herpesvirus 1
gguggcgucgcaucga

SEQ ID NO: 3953084 - RNA, 14 nt, Human herpesvirus 1
gguggugcccagcg

SEQ ID NO: 3953085 - RNA, 13 nt, Human herpesvirus 1
gguuaauguaaau

SEQ ID NO: 3953086 - RNA, 17 nt, Human herpesvirus 1
gguuacgcgggccccgg

SEQ ID NO: 3953087 - RNA, 15 nt, Human herpesvirus 1
gguuccgcgaccacc

SEQ ID NO: 3953088 - RNA, 13 nt, Human herpesvirus 1
gguugcggcccgc

SEQ ID NO: 3953089 - RNA, 18 nt, Human herpesvirus 1
gguuguccguggccccac

SEQ ID NO: 3953090 - RNA, 15 nt, Human herpesvirus 1
guaaccccccccaaa

SEQ ID NO: 3953091 - RNA, 16 nt, Human herpesvirus 1
guaacggcauaugcaa

SEQ ID NO: 3953092 - RNA, 17 nt, Human herpesvirus 1
guacggcacccgcgcga

SEQ ID NO: 3953093 - RNA, 15 nt, Human herpesvirus 1
guacggggccgggag

SEQ ID NO: 3953094 - RNA, 22 nt, Human herpesvirus 1
guacguggucguccgcggaccg

SEQ ID NO: 3953095 - RNA, 17 nt, Human herpesvirus 1
guacuggaugcgccgcc

SEQ ID NO: 3953096 - RNA, 20 nt, Human herpesvirus 1
guagcgccccggcgacccug

SEQ ID NO: 3953097 - RNA, 12 nt, Human herpesvirus 1
guaggcccagca

SEQ ID NO: 3953098 - RNA, 15 nt, Human herpesvirus 1
guagggugguuccug

SEQ ID NO: 3953099 - RNA, 22 nt, Human herpesvirus 1
guagggugguuccuguaucugg

SEQ ID NO: 3953100 - RNA, 19 nt, Human herpesvirus 1
guaucggggguucccacca

SEQ ID NO: 3953101 - RNA, 16 nt, Human herpesvirus 1
guaucugacgcgcccc

SEQ ID NO: 3953102 - RNA, 17 nt, Human herpesvirus 1
gucaaacgaccucauca

SEQ ID NO: 3953103 - RNA, 23 nt, Human herpesvirus 1
gucacagcgaccgcaacuuccca

SEQ ID NO: 3953104 - RNA, 22 nt, Human herpesvirus 1
gucacggugaccgcgugcccac

SEQ ID NO: 3953105 - RNA, 22 nt, Human herpesvirus 1
guccaccaaagucucugugggu

SEQ ID NO: 3953106 - RNA, 17 nt, Human herpesvirus 1
guccacgguaggcccag

SEQ ID NO: 3953107 - RNA, 20 nt, Human herpesvirus 1
guccagcgccgcaaccagcu

SEQ ID NO: 3953108 - RNA, 19 nt, Human herpesvirus 1
gucccauccgaacgcagcc

SEQ ID NO: 3953109 - RNA, 19 nt, Human herpesvirus 1
gucccaucugugcggggag

SEQ ID NO: 3953110 - RNA, 17 nt, Human herpesvirus 1
guccccaaaauaaaaga

SEQ ID NO: 3953111 - RNA, 13 nt, Human herpesvirus 1
guccccgaggacc

SEQ ID NO: 3953112 - RNA, 21 nt, Human herpesvirus 1
guccccgaggaccccgugggc

SEQ ID NO: 3953113 - RNA, 16 nt, Human herpesvirus 1
guccccgcgaagaccc

SEQ ID NO: 3953114 - RNA, 18 nt, Human herpesvirus 1
guccccggcccggaggag

SEQ ID NO: 3953115 - RNA, 13 nt, Human herpesvirus 1
guccccucugggc

SEQ ID NO: 3953116 - RNA, 22 nt, Human herpesvirus 1
gucccgacauuaaccaccugcg

SEQ ID NO: 3953117 - RNA, 15 nt, Human herpesvirus 1
gucccuccuuagcac

SEQ ID NO: 3953118 - RNA, 14 nt, Human herpesvirus 1
gucccugcgucgcc

SEQ ID NO: 3953119 - RNA, 14 nt, Human herpesvirus 1
guccgcggaccggc

SEQ ID NO: 3953120 - RNA, 16 nt, Human herpesvirus 1
guccgcggaccggcgg

SEQ ID NO: 3953121 - RNA, 18 nt, Human herpesvirus 1
guccggagccgcgcggcc

SEQ ID NO: 3953122 - RNA, 18 nt, Human herpesvirus 1
guccuggaugcuguggac

SEQ ID NO: 3953123 - RNA, 11 nt, Human herpesvirus 1
guccuggggau

SEQ ID NO: 3953124 - RNA, 16 nt, Human herpesvirus 1
guccuggggauggcca

SEQ ID NO: 3953125 - RNA, 12 nt, Human herpesvirus 1
guccuguggagc

SEQ ID NO: 3953126 - RNA, 11 nt, Human herpesvirus 1
gucgacgagau

SEQ ID NO: 3953127 - RNA, 20 nt, Human herpesvirus 1
gucgcaacgccgcaggggag

SEQ ID NO: 3953128 - RNA, 12 nt, Human herpesvirus 1
gucgcacccaca

SEQ ID NO: 3953129 - RNA, 14 nt, Human herpesvirus 1
gucgccccuguggc

SEQ ID NO: 3953130 - RNA, 22 nt, Human herpesvirus 1
gucgccguuucgggcggcaggc

SEQ ID NO: 3953131 - RNA, 19 nt, Human herpesvirus 1
gucgccuggcugacccacg

SEQ ID NO: 3953132 - RNA, 16 nt, Human herpesvirus 1
gucgcgcuccucugcg

SEQ ID NO: 3953133 - RNA, 17 nt, Human herpesvirus 1
gucgcgggacccgacag

SEQ ID NO: 3953134 - RNA, 20 nt, Human herpesvirus 1
gucggcaagauccucgggcu

SEQ ID NO: 3953135 - RNA, 20 nt, Human herpesvirus 1
gucgucauagugggccucca

SEQ ID NO: 3953136 - RNA, 18 nt, Human herpesvirus 1
gucgucucucuucccccc

SEQ ID NO: 3953137 - RNA, 15 nt, Human herpesvirus 1
gucuccacgugcgug

SEQ ID NO: 3953138 - RNA, 13 nt, Human herpesvirus 1
gucucccagggag

SEQ ID NO: 3953139 - RNA, 12 nt, Human herpesvirus 1
gucuccucuucu

SEQ ID NO: 3953140 - RNA, 19 nt, Human herpesvirus 1
gucuccucuucuccccuuc

SEQ ID NO: 3953141 - RNA, 11 nt, Human herpesvirus 1
gucucuggccg

SEQ ID NO: 3953142 - RNA, 14 nt, Human herpesvirus 1
gucuguccucggga

SEQ ID NO: 3953143 - RNA, 16 nt, Human herpesvirus 1
gucuucggccccgcgu

SEQ ID NO: 3953144 - RNA, 19 nt, Human herpesvirus 1
gugaaagacacgggcacca

SEQ ID NO: 3953145 - RNA, 15 nt, Human herpesvirus 1
gugacgcacccccug

SEQ ID NO: 3953146 - RNA, 18 nt, Human herpesvirus 1
gugagcgcgcggaugcuc

SEQ ID NO: 3953147 - RNA, 14 nt, Human herpesvirus 1
gugcacagccuggc

SEQ ID NO: 3953148 - RNA, 14 nt, Human herpesvirus 1
gugccaccagccug

SEQ ID NO: 3953149 - RNA, 16 nt, Human herpesvirus 1
gugcccacgucgcccc

SEQ ID NO: 3953150 - RNA, 23 nt, Human herpesvirus 1
gugcccccccucguucugcugca

SEQ ID NO: 3953151 - RNA, 15 nt, Human herpesvirus 1
gugccgcuguggccu

SEQ ID NO: 3953152 - RNA, 16 nt, Human herpesvirus 1
gugcgauggcgacaca

SEQ ID NO: 3953153 - RNA, 17 nt, Human herpesvirus 1
gugcgauucagcgcgga

SEQ ID NO: 3953154 - RNA, 21 nt, Human herpesvirus 1
gugcgcucgcucucggugccc

SEQ ID NO: 3953155 - RNA, 15 nt, Human herpesvirus 1
gugcgggcggcccug

SEQ ID NO: 3953156 - RNA, 18 nt, Human herpesvirus 1
gugcguagcauaccuggg

SEQ ID NO: 3953157 - RNA, 19 nt, Human herpesvirus 1
gugcgucgggccucccgga

SEQ ID NO: 3953158 - RNA, 13 nt, Human herpesvirus 1
gugcuuuggaaac

SEQ ID NO: 3953159 - RNA, 23 nt, Human herpesvirus 1
guggaacgaggcccgcaagcuga

SEQ ID NO: 3953160 - RNA, 14 nt, Human herpesvirus 1
guggacccaaagcc

SEQ ID NO: 3953161 - RNA, 17 nt, Human herpesvirus 1
guggacgccggggccuu

SEQ ID NO: 3953162 - RNA, 21 nt, Human herpesvirus 1
guggagcaaaacgccuccccc

SEQ ID NO: 3953163 - RNA, 14 nt, Human herpesvirus 1
guggaucuuagccu

SEQ ID NO: 3953164 - RNA, 17 nt, Human herpesvirus 1
guggcacgggcccaagg

SEQ ID NO: 3953165 - RNA, 21 nt, Human herpesvirus 1
guggccggccugcgcgacgcc

SEQ ID NO: 3953166 - RNA, 22 nt, Human herpesvirus 1
guggcucucgagaugagccaga

SEQ ID NO: 3953167 - RNA, 17 nt, Human herpesvirus 1
gugggcgacugcgaccc

SEQ ID NO: 3953168 - RNA, 22 nt, Human herpesvirus 1
gugggggaaccuagggcggggc

SEQ ID NO: 3953169 - RNA, 15 nt, Human herpesvirus 1
gugggugaugucggg

SEQ ID NO: 3953170 - RNA, 22 nt, Human herpesvirus 1
guggguuuuuuaaaaacgacac

SEQ ID NO: 3953171 - RNA, 21 nt, Human herpesvirus 1
gugguccgcggggccuccccc

SEQ ID NO: 3953172 - RNA, 14 nt, Human herpesvirus 1
guggucucuggccg

SEQ ID NO: 3953173 - RNA, 23 nt, Human herpesvirus 1
gugguuuuuauuuacaacaaacc

SEQ ID NO: 3953174 - RNA, 22 nt, Human herpesvirus 1
gugucugcuccccaccccggag

SEQ ID NO: 3953175 - RNA, 12 nt, Human herpesvirus 1
gugugcccaccc

SEQ ID NO: 3953176 - RNA, 18 nt, Human herpesvirus 1
gugugggguccucaugga

SEQ ID NO: 3953177 - RNA, 15 nt, Human herpesvirus 1
guguggguggaggag

SEQ ID NO: 3953178 - RNA, 14 nt, Human herpesvirus 1
guuaauguaaauaa

SEQ ID NO: 3953179 - RNA, 20 nt, Human herpesvirus 1
guuauucccaaacagggccu

SEQ ID NO: 3953180 - RNA, 12 nt, Human herpesvirus 1
guucccccccgu

SEQ ID NO: 3953181 - RNA, 16 nt, Human herpesvirus 1
guuccggaggcgccgc

SEQ ID NO: 3953182 - RNA, 21 nt, Human herpesvirus 1
guuccgggaugccgugccgcc

SEQ ID NO: 3953183 - RNA, 15 nt, Human herpesvirus 1
guucgagcagccgcg

SEQ ID NO: 3953184 - RNA, 19 nt, Human herpesvirus 1
guucgagcagccgcgccgc

SEQ ID NO: 3953185 - RNA, 14 nt, Human herpesvirus 1
guucgagcgccacc

SEQ ID NO: 3953186 - RNA, 19 nt, Human herpesvirus 1
guucgcgucccgcccaccg

SEQ ID NO: 3953187 - RNA, 14 nt, Human herpesvirus 1
guucggccaccgcu

SEQ ID NO: 3953188 - RNA, 12 nt, Human herpesvirus 1
guucguuccggg

SEQ ID NO: 3953189 - RNA, 14 nt, Human herpesvirus 1
guucucccuguuca

SEQ ID NO: 3953190 - RNA, 22 nt, Human herpesvirus 1
guucuggacgggagucccgagg

SEQ ID NO: 3953191 - RNA, 17 nt, Human herpesvirus 1
guugcccgcggaccacc

SEQ ID NO: 3953192 - RNA, 17 nt, Human herpesvirus 1
guuggcgucgggaccau

SEQ ID NO: 3953193 - RNA, 21 nt, Human herpesvirus 1
guuggguuuucuuugugccug

SEQ ID NO: 3953194 - RNA, 16 nt, Human herpesvirus 1
guugugguuauaugca

SEQ ID NO: 3953195 - RNA, 17 nt, Human herpesvirus 1
guuuacgcgggcacgca

SEQ ID NO: 3953196 - RNA, 16 nt, Human herpesvirus 1
guuuaggguaccacag

SEQ ID NO: 3953197 - RNA, 14 nt, Human herpesvirus 1
guuugcccuccccc

SEQ ID NO: 3953198 - RNA, 13 nt, Human herpesvirus 1
guuuucucuuccc

SEQ ID NO: 3953199 - RNA, 21 nt, Human herpesvirus 1
uaaagggccggugguccgccu

SEQ ID NO: 3953200 - RNA, 19 nt, Human herpesvirus 1
uaaaugguguccgcggucc

SEQ ID NO: 3953201 - RNA, 20 nt, Human herpesvirus 1
uaaauuccggaaggggacac

SEQ ID NO: 3953202 - RNA, 19 nt, Human herpesvirus 1
uaaauuuuacaaacagauu

SEQ ID NO: 3953203 - RNA, 16 nt, Human herpesvirus 1
uaacccagaccccggg

SEQ ID NO: 3953204 - RNA, 21 nt, Human herpesvirus 1
uacaaccacauacagcgccau

SEQ ID NO: 3953205 - RNA, 14 nt, Human herpesvirus 1
uacaaguucaaggc

SEQ ID NO: 3953206 - RNA, 13 nt, Human herpesvirus 1
uacacagccaccc

SEQ ID NO: 3953207 - RNA, 22 nt, Human herpesvirus 1
uacaccgaaugcuccuacaaca

SEQ ID NO: 3953208 - RNA, 17 nt, Human herpesvirus 1
uacaccggccacccagg

SEQ ID NO: 3953209 - RNA, 22 nt, Human herpesvirus 1
uacaccucccagugucccgaca

SEQ ID NO: 3953210 - RNA, 21 nt, Human herpesvirus 1
uacacgagcacccugcugccc

SEQ ID NO: 3953211 - RNA, 17 nt, Human herpesvirus 1
uacagcauggcgccaca

SEQ ID NO: 3953212 - RNA, 12 nt, Human herpesvirus 1
uacagcccccag

SEQ ID NO: 3953213 - RNA, 19 nt, Human herpesvirus 1
uaccaacccgccccuaacc

SEQ ID NO: 3953214 - RNA, 15 nt, Human herpesvirus 1
uaccaucccccggcc

SEQ ID NO: 3953215 - RNA, 23 nt, Human herpesvirus 1
uacgccgccaccguggccggccu

SEQ ID NO: 3953216 - RNA, 13 nt, Human herpesvirus 1
uacgcgggccccg

SEQ ID NO: 3953217 - RNA, 14 nt, Human herpesvirus 1
uacgcgggccccgg

SEQ ID NO: 3953218 - RNA, 15 nt, Human herpesvirus 1
uacgcgggccccggg

SEQ ID NO: 3953219 - RNA, 19 nt, Human herpesvirus 1
uacgcgguacgccccaccg

SEQ ID NO: 3953220 - RNA, 19 nt, Human herpesvirus 1
uacggcuaccgggaggggu

SEQ ID NO: 3953221 - RNA, 14 nt, Human herpesvirus 1
uacuauccccgcag

SEQ ID NO: 3953222 - RNA, 22 nt, Human herpesvirus 1
uacuccggccgcgguacagauc

SEQ ID NO: 3953223 - RNA, 16 nt, Human herpesvirus 1
uacucgaucacggagg

SEQ ID NO: 3953224 - RNA, 14 nt, Human herpesvirus 1
uacugcugggccau

SEQ ID NO: 3953225 - RNA, 13 nt, Human herpesvirus 1
uacuugcgcggcu

SEQ ID NO: 3953226 - RNA, 12 nt, Human herpesvirus 1
uagaccacgccc

SEQ ID NO: 3953227 - RNA, 21 nt, Human herpesvirus 1
uagccagcagacgcugcuccg

SEQ ID NO: 3953228 - RNA, 12 nt, Human herpesvirus 1
uauaaggccugg

SEQ ID NO: 3953229 - RNA, 16 nt, Human herpesvirus 1
uaucccgcccaccgcu

SEQ ID NO: 3953230 - RNA, 19 nt, Human herpesvirus 1
uaucccuaaggcccggcua

SEQ ID NO: 3953231 - RNA, 22 nt, Human herpesvirus 1
uauggggcgggggauggggaga

SEQ ID NO: 3953232 - RNA, 15 nt, Human herpesvirus 1
ucaaaaguuguuagc

SEQ ID NO: 3953233 - RNA, 20 nt, Human herpesvirus 1
ucaaccacccggccauccgc

SEQ ID NO: 3953234 - RNA, 19 nt, Human herpesvirus 1
ucacagggcgggccgccuc

SEQ ID NO: 3953235 - RNA, 15 nt, Human herpesvirus 1
ucaccaccaaggccc

SEQ ID NO: 3953236 - RNA, 12 nt, Human herpesvirus 1
ucacccacgccg

SEQ ID NO: 3953237 - RNA, 21 nt, Human herpesvirus 1
ucacccccgaguucccccggg

SEQ ID NO: 3953238 - RNA, 21 nt, Human herpesvirus 1
ucacgcgggaggccgcccagc

SEQ ID NO: 3953239 - RNA, 17 nt, Human herpesvirus 1
ucagccagacgccgggu

SEQ ID NO: 3953240 - RNA, 18 nt, Human herpesvirus 1
ucagcuuuuaccgcuucc

SEQ ID NO: 3953241 - RNA, 14 nt, Human herpesvirus 1
ucauaaccacgccc

SEQ ID NO: 3953242 - RNA, 14 nt, Human herpesvirus 1
ucaucaacgcgacc

SEQ ID NO: 3953243 - RNA, 16 nt, Human herpesvirus 1
uccaaaaccacaaccu

SEQ ID NO: 3953244 - RNA, 23 nt, Human herpesvirus 1
uccaccacccaaccccaacucca

SEQ ID NO: 3953245 - RNA, 16 nt, Human herpesvirus 1
uccaccaccuucacca

SEQ ID NO: 3953246 - RNA, 20 nt, Human herpesvirus 1
uccacccccucgaccaccau

SEQ ID NO: 3953247 - RNA, 15 nt, Human herpesvirus 1
uccacgaacccagcg

SEQ ID NO: 3953248 - RNA, 19 nt, Human herpesvirus 1
uccacgguaggcccagcau

SEQ ID NO: 3953249 - RNA, 12 nt, Human herpesvirus 1
uccagcccccca

SEQ ID NO: 3953250 - RNA, 17 nt, Human herpesvirus 1
uccaggcugucgacgcc

SEQ ID NO: 3953251 - RNA, 14 nt, Human herpesvirus 1
uccagggcggggcu

SEQ ID NO: 3953252 - RNA, 15 nt, Human herpesvirus 1
uccauaccgaccaca

SEQ ID NO: 3953253 - RNA, 17 nt, Human herpesvirus 1
uccauaccgaccacacc

SEQ ID NO: 3953254 - RNA, 13 nt, Human herpesvirus 1
ucccaacaacucc

SEQ ID NO: 3953255 - RNA, 15 nt, Human herpesvirus 1
ucccaacgaccccgc

SEQ ID NO: 3953256 - RNA, 20 nt, Human herpesvirus 1
acccugaucccccgcgcggc

SEQ ID NO: 3953257 - RNA, 18 nt, Human herpesvirus 1
acccuguggaacgaggcc

SEQ ID NO: 3953258 - RNA, 15 nt, Human herpesvirus 1
accgacagcacucac

SEQ ID NO: 3953259 - RNA, 17 nt, Human herpesvirus 1
accgacucucccaccgc

SEQ ID NO: 3953260 - RNA, 13 nt, Human herpesvirus 1
accgcagccuggu

SEQ ID NO: 3953261 - RNA, 15 nt, Human herpesvirus 1
accgcagucccugag

SEQ ID NO: 3953262 - RNA, 17 nt, Human herpesvirus 1
accgcagucccugaguu

SEQ ID NO: 3953263 - RNA, 22 nt, Human herpesvirus 1
accgcccaaugggccgggccgc

SEQ ID NO: 3953264 - RNA, 17 nt, Human herpesvirus 1
accgcccaccuccuggc

SEQ ID NO: 3953265 - RNA, 16 nt, Human herpesvirus 1
accgccggcgaggugg

SEQ ID NO: 3953266 - RNA, 17 nt, Human herpesvirus 1
accgcgguucgcguccc

SEQ ID NO: 3953267 - RNA, 20 nt, Human herpesvirus 1
accgcgguucgcgucccgcc

SEQ ID NO: 3953268 - RNA, 19 nt, Human herpesvirus 1
accgcgugaccccagggau

SEQ ID NO: 3953269 - RNA, 17 nt, Human herpesvirus 1
accggacccgcaucccc

SEQ ID NO: 3953270 - RNA, 23 nt, Human herpesvirus 1
accggacccgcaucccccgucug

SEQ ID NO: 3953271 - RNA, 21 nt, Human herpesvirus 1
accggcaccaccgacucuccc

SEQ ID NO: 3953272 - RNA, 18 nt, Human herpesvirus 1
accgguaugccgcggcca

SEQ ID NO: 3953273 - RNA, 19 nt, Human herpesvirus 1
accguaacggcauaugcaa

SEQ ID NO: 3953274 - RNA, 15 nt, Human herpesvirus 1
accucaccaccaagg

SEQ ID NO: 3953275 - RNA, 14 nt, Human herpesvirus 1
accucgaggacacc

SEQ ID NO: 3953276 - RNA, 17 nt, Human herpesvirus 1
accucggacgccacacc

SEQ ID NO: 3953277 - RNA, 13 nt, Human herpesvirus 1
accucuccacacc

SEQ ID NO: 3953278 - RNA, 13 nt, Human herpesvirus 1
accuucaucgacc

SEQ ID NO: 3953279 - RNA, 20 nt, Human herpesvirus 1
accuuccguccccugccccc

SEQ ID NO: 3953280 - RNA, 22 nt, Human herpesvirus 1
accuucugcgggucaccugcca

SEQ ID NO: 3953281 - RNA, 14 nt, Human herpesvirus 1
accuugccccggcc

SEQ ID NO: 3953282 - RNA, 15 nt, Human herpesvirus 1
accuuggcccuggcu

SEQ ID NO: 3953283 - RNA, 15 nt, Human herpesvirus 1
accuuggucuggccc

SEQ ID NO: 3953284 - RNA, 18 nt, Human herpesvirus 1
acgaacgcggaccccccc

SEQ ID NO: 3953285 - RNA, 22 nt, Human herpesvirus 1
acgacccucgagauccccgggg

SEQ ID NO: 3953286 - RNA, 12 nt, Human herpesvirus 1
acgaggccaagc

SEQ ID NO: 3953287 - RNA, 15 nt, Human herpesvirus 1
acgaugaccgccccc

SEQ ID NO: 3953288 - RNA, 18 nt, Human herpesvirus 1
acgaugaccgcccccagc

SEQ ID NO: 3953289 - RNA, 20 nt, Human herpesvirus 1
acgaugaccgcccccagcug

SEQ ID NO: 3953290 - RNA, 16 nt, Human herpesvirus 1
acgcaagaccaggccu

SEQ ID NO: 3953291 - RNA, 17 nt, Human herpesvirus 1
acgcaagaccaggccug

SEQ ID NO: 3953292 - RNA, 23 nt, Human herpesvirus 1
acgcacaugggggaggugccccc

SEQ ID NO: 3953293 - RNA, 16 nt, Human herpesvirus 1
acgcacccccugaccc

SEQ ID NO: 3953294 - RNA, 20 nt, Human herpesvirus 1
acgcacccgcugcgucggca

SEQ ID NO: 3953295 - RNA, 13 nt, Human herpesvirus 1
acgcacuguggcu

SEQ ID NO: 3953296 - RNA, 20 nt, Human herpesvirus 1
acgcacuugcggcaagaccc

SEQ ID NO: 3953297 - RNA, 19 nt, Human herpesvirus 1
acgcagccagaacucgccc

SEQ ID NO: 3953298 - RNA, 16 nt, Human herpesvirus 1
acgccaaugcccuccc

SEQ ID NO: 3953299 - RNA, 18 nt, Human herpesvirus 1
acgccauacacagccacc

SEQ ID NO: 3953300 - RNA, 17 nt, Human herpesvirus 1
acgccaucgccucggcc

SEQ ID NO: 3953301 - RNA, 22 nt, Human herpesvirus 1
acgcccgccgcaaagccaccca

SEQ ID NO: 3953302 - RNA, 18 nt, Human herpesvirus 1
acgcccgcgacccggacg

SEQ ID NO: 3953303 - RNA, 14 nt, Human herpesvirus 1
acgccgcugacccc

SEQ ID NO: 3953304 - RNA, 23 nt, Human herpesvirus 1
acgccggguagcguacggaccgc

SEQ ID NO: 3953305 - RNA, 20 nt, Human herpesvirus 1
acgccguggcgccccggccc

SEQ ID NO: 3953306 - RNA, 17 nt, Human herpesvirus 1
acgccuaccggccccug

SEQ ID NO: 3953307 - RNA, 13 nt, Human herpesvirus 1
acgccucccccug

SEQ ID NO: 3953308 - RNA, 13 nt, Human herpesvirus 1
acgccugccaacc

SEQ ID NO: 3953309 - RNA, 21 nt, Human herpesvirus 1
acgccuuaccaucccccggcc

SEQ ID NO: 3953310 - RNA, 16 nt, Human herpesvirus 1
acgcgagcgacccgcg

SEQ ID NO: 3953311 - RNA, 23 nt, Human herpesvirus 1
acgcgcauccgucgggaggccac

SEQ ID NO: 3953312 - RNA, 17 nt, Human herpesvirus 1
acgcgccggccgcaccc

SEQ ID NO: 3953313 - RNA, 16 nt, Human herpesvirus 1
acgcgcgcgaccucac

SEQ ID NO: 3953314 - RNA, 12 nt, Human herpesvirus 1
acgcgcuaacgg

SEQ ID NO: 3953315 - RNA, 13 nt, Human herpesvirus 1
acgcgcuggggcu

SEQ ID NO: 3953316 - RNA, 19 nt, Human herpesvirus 1
acgcgguauggcugccccc

SEQ ID NO: 3953317 - RNA, 20 nt, Human herpesvirus 1
acgcucuccccugcugccau

SEQ ID NO: 3953318 - RNA, 20 nt, Human herpesvirus 1
acgcugcuccgccuggccug

SEQ ID NO: 3953319 - RNA, 19 nt, Human herpesvirus 1
acgcuggggguccuggugg

SEQ ID NO: 3953320 - RNA, 12 nt, Human herpesvirus 1
acggaccgucug

SEQ ID NO: 3953321 - RNA, 19 nt, Human herpesvirus 1
acggcccgaagccugcugu

SEQ ID NO: 3953322 - RNA, 21 nt, Human herpesvirus 1
acggccuccgcguacgaggac

SEQ ID NO: 3953323 - RNA, 21 nt, Human herpesvirus 1
acggcgccggggcucucgggg

SEQ ID NO: 3953324 - RNA, 15 nt, Human herpesvirus 1
acggcgucugggcca

SEQ ID NO: 3953325 - RNA, 19 nt, Human herpesvirus 1
acggcgucugggccaccga

SEQ ID NO: 3953326 - RNA, 22 nt, Human herpesvirus 1
acgggacacuuguccggagaac

SEQ ID NO: 3953327 - RNA, 20 nt, Human herpesvirus 1
acgucaauugcccgaggcgc

SEQ ID NO: 3953328 - RNA, 14 nt, Human herpesvirus 1
acgucgagaaggac

SEQ ID NO: 3953329 - RNA, 15 nt, Human herpesvirus 1
acgucgcgccugggu

SEQ ID NO: 3953330 - RNA, 18 nt, Human herpesvirus 1
acgugcacagccuggccg

SEQ ID NO: 3953331 - RNA, 15 nt, Human herpesvirus 1
acgugcucgacagcc

SEQ ID NO: 3953332 - RNA, 15 nt, Human herpesvirus 1
acgugggccucaccc

SEQ ID NO: 3953333 - RNA, 23 nt, Human herpesvirus 1
acguucgcgcgccaucuggaccg

SEQ ID NO: 3953334 - RNA, 15 nt, Human herpesvirus 1
acuacaccagccaau

SEQ ID NO: 3953335 - RNA, 19 nt, Human herpesvirus 1
acuacucggaaagcgaaga

SEQ ID NO: 3953336 - RNA, 22 nt, Human herpesvirus 1
acucauuuguggacgccggggc

SEQ ID NO: 3953337 - RNA, 19 nt, Human herpesvirus 1
acucccgacaccaccagcu

SEQ ID NO: 3953338 - RNA, 14 nt, Human herpesvirus 1
acucucccaccgcc

SEQ ID NO: 3953339 - RNA, 15 nt, Human herpesvirus 1
acucucccaccgcca

SEQ ID NO: 3953340 - RNA, 22 nt, Human herpesvirus 1
acugcaucgucgaggaggugga

SEQ ID NO: 3953341 - RNA, 13 nt, Human herpesvirus 1
acugcgaccccag

SEQ ID NO: 3953342 - RNA, 22 nt, Human herpesvirus 1
acuggugccggucgugagagaa

SEQ ID NO: 3953343 - RNA, 22 nt, Human herpesvirus 1
acuucccgguaugguaauuaaa

SEQ ID NO: 3953344 - RNA, 15 nt, Human herpesvirus 1
acuugcggcaagacc

SEQ ID NO: 3953345 - RNA, 14 nt, Human herpesvirus 1
agacacgggcacca

SEQ ID NO: 3953346 - RNA, 18 nt, Human herpesvirus 1
agacacgggcaccacaca

SEQ ID NO: 3953347 - RNA, 21 nt, Human herpesvirus 1
agacacgggcaccacacacca

SEQ ID NO: 3953348 - RNA, 16 nt, Human herpesvirus 1
agacagccgaucucca

SEQ ID NO: 3953349 - RNA, 21 nt, Human herpesvirus 1
agaccaccggucgucccucgc

SEQ ID NO: 3953350 - RNA, 21 nt, Human herpesvirus 1
agacccgggcgaugagccaac

SEQ ID NO: 3953351 - RNA, 20 nt, Human herpesvirus 1
agaccggcaccaccgacucu

SEQ ID NO: 3953352 - RNA, 22 nt, Human herpesvirus 1
agacgaaaagccccgggccgcg

SEQ ID NO: 3953353 - RNA, 16 nt, Human herpesvirus 1
agacgacaccgugguc

SEQ ID NO: 3953354 - RNA, 19 nt, Human herpesvirus 1
agacgagcgcgcuuguccc

SEQ ID NO: 3953355 - RNA, 22 nt, Human herpesvirus 1
agacgcgggcgacgcacacacc

SEQ ID NO: 3953356 - RNA, 22 nt, Human herpesvirus 1
agacggcauucgggccugccug

SEQ ID NO: 3953357 - RNA, 20 nt, Human herpesvirus 1
agcaaacgccccgcccacac

SEQ ID NO: 3953358 - RNA, 12 nt, Human herpesvirus 1
agcaccacauaa

SEQ ID NO: 3953359 - RNA, 15 nt, Human herpesvirus 1
agcacccugcugccc

SEQ ID NO: 3953360 - RNA, 14 nt, Human herpesvirus 1
agcaccgacaccgc

SEQ ID NO: 3953361 - RNA, 21 nt, Human herpesvirus 1
agcaccucuaccagcaggucc

SEQ ID NO: 3953362 - RNA, 13 nt, Human herpesvirus 1
agcauaccugggu

SEQ ID NO: 3953363 - RNA, 23 nt, Human herpesvirus 1
agcauacgcucgggcccgcgucg

SEQ ID NO: 3953364 - RNA, 20 nt, Human herpesvirus 1
agcaucgaccacgcccuucc

SEQ ID NO: 3953365 - RNA, 22 nt, Human herpesvirus 1
agcauggcgccacaccacgcca

SEQ ID NO: 3953366 - RNA, 15 nt, Human herpesvirus 1
agccagacccaaccc

SEQ ID NO: 3953367 - RNA, 14 nt, Human herpesvirus 1
agccccggacccca

SEQ ID NO: 3953368 - RNA, 19 nt, Human herpesvirus 1
agccccggucuccccggga

SEQ ID NO: 3953369 - RNA, 21 nt, Human herpesvirus 1
agcccugguguuucuggggag

SEQ ID NO: 3953370 - RNA, 21 nt, Human herpesvirus 1
gugcgccaggucggcgaccgc

SEQ ID NO: 3953371 - RNA, 17 nt, Human herpesvirus 1
gugcgucgggccucccg

SEQ ID NO: 3953372 - RNA, 19 nt, Human herpesvirus 1
gugcucgugugguacaccg

SEQ ID NO: 3953373 - RNA, 18 nt, Human herpesvirus 1
gugcugccgucgcuagac

SEQ ID NO: 3953374 - RNA, 21 nt, Human herpesvirus 1
gugcugcugcggcccacccug

SEQ ID NO: 3953375 - RNA, 14 nt, Human herpesvirus 1
gugcuugagucugu

SEQ ID NO: 3953376 - RNA, 16 nt, Human herpesvirus 1
gugcuugagucugucc

SEQ ID NO: 3953377 - RNA, 14 nt, Human herpesvirus 1
gugcuuucuggugc

SEQ ID NO: 3953378 - RNA, 21 nt, Human herpesvirus 1
guggacgggcucgccagcgac

SEQ ID NO: 3953379 - RNA, 22 nt, Human herpesvirus 1
guggagcugcccggcggccagu

SEQ ID NO: 3953380 - RNA, 16 nt, Human herpesvirus 1
guggaggcgcggcgcc

SEQ ID NO: 3953381 - RNA, 14 nt, Human herpesvirus 1
guggcaccucccca

SEQ ID NO: 3953382 - RNA, 19 nt, Human herpesvirus 1
guggcgcacgaauccuucg

SEQ ID NO: 3953383 - RNA, 11 nt, Human herpesvirus 1
guggcgccccg

SEQ ID NO: 3953384 - RNA, 19 nt, Human herpesvirus 1
guggcgccgcaaaucccac

SEQ ID NO: 3953385 - RNA, 18 nt, Human herpesvirus 1
guggcuccgggccaacca

SEQ ID NO: 3953386 - RNA, 16 nt, Human herpesvirus 1
gugggcgaggggggag

SEQ ID NO: 3953387 - RNA, 14 nt, Human herpesvirus 1
gugggcguccugga

SEQ ID NO: 3953388 - RNA, 15 nt, Human herpesvirus 1
gugggggugggcauc

SEQ ID NO: 3953389 - RNA, 16 nt, Human herpesvirus 1
gugggguccucaugga

SEQ ID NO: 3953390 - RNA, 19 nt, Human herpesvirus 1
gugggucuguugguccugg

SEQ ID NO: 3953391 - RNA, 16 nt, Human herpesvirus 1
guggucuucaaggaga

SEQ ID NO: 3953392 - RNA, 19 nt, Human herpesvirus 1
gugguucccccccguggcu

SEQ ID NO: 3953393 - RNA, 15 nt, Human herpesvirus 1
gugguucgggugugc

SEQ ID NO: 3953394 - RNA, 14 nt, Human herpesvirus 1
gugucaauggacgc

SEQ ID NO: 3953395 - RNA, 20 nt, Human herpesvirus 1
gugugaguuuguggacccaa

SEQ ID NO: 3953396 - RNA, 18 nt, Human herpesvirus 1
guguucguacgcggggcu

SEQ ID NO: 3953397 - RNA, 15 nt, Human herpesvirus 1
guguuuguggggagg

SEQ ID NO: 3953398 - RNA, 15 nt, Human herpesvirus 1
guuacgcgggccccg

SEQ ID NO: 3953399 - RNA, 12 nt, Human herpesvirus 1
guucccuggccg

SEQ ID NO: 3953400 - RNA, 21 nt, Human herpesvirus 1
guuccgccugucgcacccaca

SEQ ID NO: 3953401 - RNA, 22 nt, Human herpesvirus 1
guuccgcuuccaucgccccugg

SEQ ID NO: 3953402 - RNA, 13 nt, Human herpesvirus 1
guucgggcggacg

SEQ ID NO: 3953403 - RNA, 22 nt, Human herpesvirus 1
guucgucgcccuccaccaacgc

SEQ ID NO: 3953404 - RNA, 14 nt, Human herpesvirus 1
guucguuccgggca

SEQ ID NO: 3953405 - RNA, 20 nt, Human herpesvirus 1
guugacgcuggggguccugg

SEQ ID NO: 3953406 - RNA, 24 nt, Human herpesvirus 1
guugccaucgcguggugcgagcug

SEQ ID NO: 3953407 - RNA, 18 nt, Human herpesvirus 1
guugcugcgcggcgcccg

SEQ ID NO: 3953408 - RNA, 20 nt, Human herpesvirus 1
guuggggggugggggaaccu

SEQ ID NO: 3953409 - RNA, 14 nt, Human herpesvirus 1
guuguggcucgggg

SEQ ID NO: 3953410 - RNA, 17 nt, Human herpesvirus 1
guuguuagcccugcucg

SEQ ID NO: 3953411 - RNA, 17 nt, Human herpesvirus 1
guuuaggguaccacagg

SEQ ID NO: 3953412 - RNA, 16 nt, Human herpesvirus 1
guuuccgcgacccacc

SEQ ID NO: 3953413 - RNA, 18 nt, Human herpesvirus 1
guuucuuggccccugggg

SEQ ID NO: 3953414 - RNA, 14 nt, Human herpesvirus 1
guuugcgggccugg

SEQ ID NO: 3953415 - RNA, 17 nt, Human herpesvirus 1
uaaaagaccaaaaucaa

SEQ ID NO: 3953416 - RNA, 15 nt, Human herpesvirus 1
uaaaauaaauuauug

SEQ ID NO: 3953417 - RNA, 17 nt, Human herpesvirus 1
uaaacccccaaacaccc

SEQ ID NO: 3953418 - RNA, 17 nt, Human herpesvirus 1
uaaaccgguauuauuua

SEQ ID NO: 3953419 - RNA, 15 nt, Human herpesvirus 1
uaaagccacugaaac

SEQ ID NO: 3953420 - RNA, 22 nt, Human herpesvirus 1
uaaccaccugcgcucccucagc

SEQ ID NO: 3953421 - RNA, 23 nt, Human herpesvirus 1
uaaccgaccgcagucccugaguu

SEQ ID NO: 3953422 - RNA, 10 nt, Human herpesvirus 1
uaaggccugg

SEQ ID NO: 3953423 - RNA, 14 nt, Human herpesvirus 1
uaaggucauccgag

SEQ ID NO: 3953424 - RNA, 17 nt, Human herpesvirus 1
uacacagccacccaccc

SEQ ID NO: 3953425 - RNA, 13 nt, Human herpesvirus 1
uacacccaaguuc

SEQ ID NO: 3953426 - RNA, 18 nt, Human herpesvirus 1
uacaccggccacccaggu

SEQ ID NO: 3953427 - RNA, 15 nt, Human herpesvirus 1
uaccccaguccccgg

SEQ ID NO: 3953428 - RNA, 14 nt, Human herpesvirus 1
uaccgaccacaccg

SEQ ID NO: 3953429 - RNA, 17 nt, Human herpesvirus 1
uaccgcgagcucccaga

SEQ ID NO: 3953430 - RNA, 19 nt, Human herpesvirus 1
uacgcuaaucccccggcuc

SEQ ID NO: 3953431 - RNA, 18 nt, Human herpesvirus 1
uacgcuucggccgccacc

SEQ ID NO: 3953432 - RNA, 16 nt, Human herpesvirus 1
uacgugugcccacccc

SEQ ID NO: 3953433 - RNA, 22 nt, Human herpesvirus 1
uacugcgcgaucguccaccucc

SEQ ID NO: 3953434 - RNA, 23 nt, Human herpesvirus 1
uagaccagaggcgcgcgcaccuc

SEQ ID NO: 3953435 - RNA, 16 nt, Human herpesvirus 1
uagcgccccggcgacc

SEQ ID NO: 3953436 - RNA, 15 nt, Human herpesvirus 1
uagcguguucgugga

SEQ ID NO: 3953437 - RNA, 21 nt, Human herpesvirus 1
uaggaugccagccagggcggc

SEQ ID NO: 3953438 - RNA, 15 nt, Human herpesvirus 1
uauccuggagcaccg

SEQ ID NO: 3953439 - RNA, 16 nt, Human herpesvirus 1
uaugccccccuggcga

SEQ ID NO: 3953440 - RNA, 24 nt, Human herpesvirus 1
uaugguacacacgggugcgucugg

SEQ ID NO: 3953441 - RNA, 23 nt, Human herpesvirus 1
uauguccccaaaauaaaagacca

SEQ ID NO: 3953442 - RNA, 19 nt, Human herpesvirus 1
uauucccaaacagggccuu

SEQ ID NO: 3953443 - RNA, 20 nt, Human herpesvirus 1
ucaaccccagggaccuccug

SEQ ID NO: 3953444 - RNA, 13 nt, Human herpesvirus 1
ucaagcaggccau

SEQ ID NO: 3953445 - RNA, 23 nt, Human herpesvirus 1
ucaagcaggccaucgccggggac

SEQ ID NO: 3953446 - RNA, 22 nt, Human herpesvirus 1
ucaaggacagcggccugcugga

SEQ ID NO: 3953447 - RNA, 19 nt, Human herpesvirus 1
ucacacagcaucccccgcc

SEQ ID NO: 3953448 - RNA, 16 nt, Human herpesvirus 1
ucaccaaccacccggg

SEQ ID NO: 3953449 - RNA, 13 nt, Human herpesvirus 1
ucaccaccaaggc

SEQ ID NO: 3953450 - RNA, 19 nt, Human herpesvirus 1
ucaccaccauggccccccg

SEQ ID NO: 3953451 - RNA, 18 nt, Human herpesvirus 1
ucaccaccgucagcaccu

SEQ ID NO: 3953452 - RNA, 16 nt, Human herpesvirus 1
ucaccaugcuggagga

SEQ ID NO: 3953453 - RNA, 21 nt, Human herpesvirus 1
ucaccccaaucccccccgacc

SEQ ID NO: 3953454 - RNA, 19 nt, Human herpesvirus 1
ucaccccgaagccccggcc

SEQ ID NO: 3953455 - RNA, 22 nt, Human herpesvirus 1
ucaccccgaagccccggcccug

SEQ ID NO: 3953456 - RNA, 10 nt, Human herpesvirus 1
ucaccccgca

SEQ ID NO: 3953457 - RNA, 22 nt, Human herpesvirus 1
ucaccggguacggcgucugggc

SEQ ID NO: 3953458 - RNA, 17 nt, Human herpesvirus 1
ucacgcaagaccaggcc

SEQ ID NO: 3953459 - RNA, 23 nt, Human herpesvirus 1
ucacgcgggaggccgcccagcuc

SEQ ID NO: 3953460 - RNA, 13 nt, Human herpesvirus 1
ucacggcaaggag

SEQ ID NO: 3953461 - RNA, 14 nt, Human herpesvirus 1
ucacgugcugcugc

SEQ ID NO: 3953462 - RNA, 19 nt, Human herpesvirus 1
ucagccuuaccacgcccga

SEQ ID NO: 3953463 - RNA, 14 nt, Human herpesvirus 1
ucagcgccaagguc

SEQ ID NO: 3953464 - RNA, 21 nt, Human herpesvirus 1
ucagcgcgauccgacaugucc

SEQ ID NO: 3953465 - RNA, 20 nt, Human herpesvirus 1
ucagggcucuacccucugga

SEQ ID NO: 3953466 - RNA, 15 nt, Human herpesvirus 1
ucaucaccgacgacg

SEQ ID NO: 3953467 - RNA, 19 nt, Human herpesvirus 1
uccaccaaagucucugugg

SEQ ID NO: 3953468 - RNA, 15 nt, Human herpesvirus 1
uccacccccucgacc

SEQ ID NO: 3953469 - RNA, 20 nt, Human herpesvirus 1
uccacgccgacgccaacgcc

SEQ ID NO: 3953470 - RNA, 11 nt, Human herpesvirus 1
uccacggccac

SEQ ID NO: 3953471 - RNA, 16 nt, Human herpesvirus 1
uccacuacuacgugga

SEQ ID NO: 3953472 - RNA, 15 nt, Human herpesvirus 1
uccagccccccagcc

SEQ ID NO: 3953473 - RNA, 19 nt, Human herpesvirus 1
uccagccccccagccuccc

SEQ ID NO: 3953474 - RNA, 17 nt, Human herpesvirus 1
uccagccuccccuccag

SEQ ID NO: 3953475 - RNA, 15 nt, Human herpesvirus 1
uccaggucccaccug

SEQ ID NO: 3953476 - RNA, 10 nt, Human herpesvirus 1
uccaucgccc

SEQ ID NO: 3953477 - RNA, 15 nt, Human herpesvirus 1
ucccaaacagggccu

SEQ ID NO: 3953478 - RNA, 15 nt, Human herpesvirus 1
ucccacgcucucccc

SEQ ID NO: 3953479 - RNA, 14 nt, Human herpesvirus 1
ucccaggaucacac

SEQ ID NO: 3953480 - RNA, 22 nt, Human herpesvirus 1
ucccauccgaacgcagccccgc

SEQ ID NO: 3953481 - RNA, 20 nt, Human herpesvirus 1
uccccaagaccccccuggcc

SEQ ID NO: 3953482 - RNA, 23 nt, Human herpesvirus 1
ucccccaccgcccacagagggcc

SEQ ID NO: 3953483 - RNA, 17 nt, Human herpesvirus 1
ucccccgcgcgccccga

SEQ ID NO: 3953484 - RNA, 17 nt, Human herpesvirus 1
ucccccggcacgccugg

SEQ ID NO: 3953485 - RNA, 20 nt, Human herpesvirus 1
ucccccggcacgccuggggu

SEQ ID NO: 3953486 - RNA, 18 nt, Human herpesvirus 1
ucccccuccgcaucccag

SEQ ID NO: 3953487 - RNA, 20 nt, Human herpesvirus 1
ucccccuccgcaucccagga

SEQ ID NO: 3953488 - RNA, 15 nt, Human herpesvirus 1
uccccgauggcccuc

SEQ ID NO: 3953489 - RNA, 23 nt, Human herpesvirus 1
uccccgcgaagacccccccggag

SEQ ID NO: 3953490 - RNA, 23 nt, Human herpesvirus 1
uccccgcuccccaagcaucgacc

SEQ ID NO: 3953491 - RNA, 14 nt, Human herpesvirus 1
uccccgcugucacu

SEQ ID NO: 3953492 - RNA, 14 nt, Human herpesvirus 1
uccccucugggccc

SEQ ID NO: 3953493 - RNA, 12 nt, Human herpesvirus 1
ucccgaagccca

SEQ ID NO: 3953494 - RNA, 13 nt, Human herpesvirus 1
ucccgacaccacc

SEQ ID NO: 3953495 - RNA, 22 nt, Human herpesvirus 1
ucccgcagauuccauucggggu

SEQ ID NO: 3953496 - RNA, 23 nt, Human herpesvirus 1
ucccggggggucggcaggcgacg

SEQ ID NO: 3953497 - RNA, 22 nt, Human herpesvirus 1
ucccgguaugguaauuaaaaac

SEQ ID NO: 3953498 - RNA, 15 nt, Human herpesvirus 1
ucccucgaccaccau

SEQ ID NO: 3953499 - RNA, 20 nt, Human herpesvirus 1
ucccucgcaugaagccccca

SEQ ID NO: 3953500 - RNA, 15 nt, Human herpesvirus 1
ucccuggccgugguc

SEQ ID NO: 3953501 - RNA, 14 nt, Human herpesvirus 1
ucccugucgccucc

SEQ ID NO: 3953502 - RNA, 22 nt, Human herpesvirus 1
ucccuguuugucgccuggcugg

SEQ ID NO: 3953503 - RNA, 14 nt, Human herpesvirus 1
uccgaacccaggcc

SEQ ID NO: 3953504 - RNA, 17 nt, Human herpesvirus 1
uccgaacgcagccccgc

SEQ ID NO: 3953505 - RNA, 20 nt, Human herpesvirus 1
uccgcccccaaccccuuccc

SEQ ID NO: 3953506 - RNA, 20 nt, Human herpesvirus 1
uccgcgccaggcccgccgcc

SEQ ID NO: 3953507 - RNA, 17 nt, Human herpesvirus 1
uccgcggagcucccggg

SEQ ID NO: 3953508 - RNA, 15 nt, Human herpesvirus 1
uccgcggccccagcc

SEQ ID NO: 3953509 - RNA, 19 nt, Human herpesvirus 1
uccggcgcgcgucucuggg

SEQ ID NO: 3953510 - RNA, 17 nt, Human herpesvirus 1
uccgggaccugaacccc

SEQ ID NO: 3953511 - RNA, 13 nt, Human herpesvirus 1
uccggggcccggc

SEQ ID NO: 3953512 - RNA, 13 nt, Human herpesvirus 1
uccguccccugcc

SEQ ID NO: 3953513 - RNA, 18 nt, Human herpesvirus 1
uccguccccugccccccc

SEQ ID NO: 3953514 - RNA, 18 nt, Human herpesvirus 1
uccgucuucggccccgcg

SEQ ID NO: 3953515 - RNA, 15 nt, Human herpesvirus 1
uccguggccccggcc

SEQ ID NO: 3953516 - RNA, 13 nt, Human herpesvirus 1
uccucccgccacc

SEQ ID NO: 3953517 - RNA, 14 nt, Human herpesvirus 1
uccucccgcucggc

SEQ ID NO: 3953518 - RNA, 15 nt, Human herpesvirus 1
uccucgugcccucgc

SEQ ID NO: 3953519 - RNA, 12 nt, Human herpesvirus 1
uccucguggccg

SEQ ID NO: 3953520 - RNA, 19 nt, Human herpesvirus 1
uccugaugcacgcccccgc

SEQ ID NO: 3953521 - RNA, 20 nt, Human herpesvirus 1
uccugaugcacgcccccgcg

SEQ ID NO: 3953522 - RNA, 17 nt, Human herpesvirus 1
uccugcgccccgccgcc

SEQ ID NO: 3953523 - RNA, 14 nt, Human herpesvirus 1
uccugggccaccug

SEQ ID NO: 3953524 - RNA, 19 nt, Human herpesvirus 1
ucgaagcugaugucccuca

SEQ ID NO: 3953525 - RNA, 14 nt, Human herpesvirus 1
ucgaccaccauccc

SEQ ID NO: 3953526 - RNA, 21 nt, Human herpesvirus 1
ucgaccccauggaccccagcg

SEQ ID NO: 3953527 - RNA, 15 nt, Human herpesvirus 1
ucgacgaccugggga

SEQ ID NO: 3953528 - RNA, 20 nt, Human herpesvirus 1
ucgacgucgcgccugggugc

SEQ ID NO: 3953529 - RNA, 14 nt, Human herpesvirus 1
ucgagcagccgcgc

SEQ ID NO: 3953530 - RNA, 15 nt, Human herpesvirus 1
ucgaggcggccgagg

SEQ ID NO: 3953531 - RNA, 16 nt, Human herpesvirus 1
ucgaguucgccaggcu

SEQ ID NO: 3953532 - RNA, 17 nt, Human herpesvirus 1
ucgaguucgccaggcug

SEQ ID NO: 3953533 - RNA, 14 nt, Human herpesvirus 1
ucgcacccacagcu

SEQ ID NO: 3953534 - RNA, 14 nt, Human herpesvirus 1
ucgccacgucgacc

SEQ ID NO: 3953535 - RNA, 16 nt, Human herpesvirus 1
ucgccccacgacccga

SEQ ID NO: 3953536 - RNA, 13 nt, Human herpesvirus 1
ucgcccuccacca

SEQ ID NO: 3953537 - RNA, 16 nt, Human herpesvirus 1
ucgccgcggcucccgg

SEQ ID NO: 3953538 - RNA, 17 nt, Human herpesvirus 1
ucgccgcggcucccggc

SEQ ID NO: 3953539 - RNA, 22 nt, Human herpesvirus 1
ucgccggggaccgcagccuggu

SEQ ID NO: 3953540 - RNA, 15 nt, Human herpesvirus 1
ucgccuaccuucgca

SEQ ID NO: 3953541 - RNA, 15 nt, Human herpesvirus 1
ucgccugcggcgacc

SEQ ID NO: 3953542 - RNA, 20 nt, Human herpesvirus 1
ucgcggagggcggccagccg

SEQ ID NO: 3953543 - RNA, 19 nt, Human herpesvirus 1
ucgcggccgcgacccaggc

SEQ ID NO: 3953544 - RNA, 11 nt, Human herpesvirus 1
ucggcauggug

SEQ ID NO: 3953545 - RNA, 19 nt, Human herpesvirus 1
ucggccuauggcuccugcg

SEQ ID NO: 3953546 - RNA, 21 nt, Human herpesvirus 1
ucggcgagcuggauggcgcgu

SEQ ID NO: 3953547 - RNA, 13 nt, Human herpesvirus 1
ucggcuccccgcc

SEQ ID NO: 3953548 - RNA, 19 nt, Human herpesvirus 1
ucgggaccaucaucggggg

SEQ ID NO: 3953549 - RNA, 17 nt, Human herpesvirus 1
ucgggaugcugccccgc

SEQ ID NO: 3953550 - RNA, 14 nt, Human herpesvirus 1
ucgggccucccgga

SEQ ID NO: 3953551 - RNA, 15 nt, Human herpesvirus 1
ucgggcgccaaagcc

SEQ ID NO: 3953552 - RNA, 13 nt, Human herpesvirus 1
ucgggcgcugggu

SEQ ID NO: 3953553 - RNA, 15 nt, Human herpesvirus 1
ucgggcgcugggugg

SEQ ID NO: 3953554 - RNA, 22 nt, Human herpesvirus 1
ucgggcgcuggguggucucugg

SEQ ID NO: 3953555 - RNA, 20 nt, Human herpesvirus 1
ucggggaggggaaaagugaa

SEQ ID NO: 3953556 - RNA, 16 nt, Human herpesvirus 1
ucggggccgcccuggc

SEQ ID NO: 3953557 - RNA, 14 nt, Human herpesvirus 1
ucguccccuggggc

SEQ ID NO: 3953558 - RNA, 18 nt, Human herpesvirus 1
ucgucgggcgccaaagcc

SEQ ID NO: 3953559 - RNA, 12 nt, Human herpesvirus 1
ucgugagagaau

SEQ ID NO: 3953560 - RNA, 15 nt, Human herpesvirus 1
ucgugcaugucguca

SEQ ID NO: 3953561 - RNA, 19 nt, Human herpesvirus 1
ucgugggccucugggucug

SEQ ID NO: 3953562 - RNA, 16 nt, Human herpesvirus 1
ucgugucuuucggugg

SEQ ID NO: 3953563 - RNA, 21 nt, Human herpesvirus 1
ucucaucgccgcgcguccccc

SEQ ID NO: 3953564 - RNA, 14 nt, Human herpesvirus 1
ucuccacaccugca

SEQ ID NO: 3953565 - RNA, 12 nt, Human herpesvirus 1
ucuccgcccgac

SEQ ID NO: 3953566 - RNA, 12 nt, Human herpesvirus 1
ucuccgccucuc

SEQ ID NO: 3953567 - RNA, 22 nt, Human herpesvirus 1
ucuccuccaccacccaacccca

SEQ ID NO: 3953568 - RNA, 18 nt, Human herpesvirus 1
ucuggccaucgguccccu

SEQ ID NO: 3953569 - RNA, 21 nt, Human herpesvirus 1
ucugggcccgacagaccuccc

SEQ ID NO: 3953570 - RNA, 18 nt, Human herpesvirus 1
ucugggguuugcccuccc

SEQ ID NO: 3953571 - RNA, 15 nt, Human herpesvirus 1
ucuggguuuuccccu

SEQ ID NO: 3953572 - RNA, 19 nt, Human herpesvirus 1
ucugguccgccgcgagccc

SEQ ID NO: 3953573 - RNA, 12 nt, Human herpesvirus 1
ucugugggccaa

SEQ ID NO: 3953574 - RNA, 15 nt, Human herpesvirus 1
ucuguuucuuggccc

SEQ ID NO: 3953575 - RNA, 20 nt, Human herpesvirus 1
ucuuccgcggagcucccggg

SEQ ID NO: 3953576 - RNA, 14 nt, Human herpesvirus 1
ucuucuccccuucc

SEQ ID NO: 3953577 - RNA, 14 nt, Human herpesvirus 1
ucuuuccugugugu

SEQ ID NO: 3953578 - RNA, 18 nt, Human herpesvirus 1
ucuuuuguguuggcccua

SEQ ID NO: 3953579 - RNA, 17 nt, Human herpesvirus 1
ugaaaccggccaacgcc

SEQ ID NO: 3953580 - RNA, 12 nt, Human herpesvirus 1
ugaaccccagcc

SEQ ID NO: 3953581 - RNA, 17 nt, Human herpesvirus 1
ugacacccuaccccagu

SEQ ID NO: 3953582 - RNA, 19 nt, Human herpesvirus 1
ugaccaacgacggcccgac

SEQ ID NO: 3953583 - RNA, 19 nt, Human herpesvirus 1
ugaccagcgcacugcccga

SEQ ID NO: 3953584 - RNA, 16 nt, Human herpesvirus 1
ugaccccgcuccugug

SEQ ID NO: 3953585 - RNA, 14 nt, Human herpesvirus 1
ugacccucuccggg

SEQ ID NO: 3953586 - RNA, 21 nt, Human herpesvirus 1
ugaccgcccgccccucgccac

SEQ ID NO: 3953587 - RNA, 12 nt, Human herpesvirus 1
ugaccugcaccg

SEQ ID NO: 3953588 - RNA, 15 nt, Human herpesvirus 1
ugacggccaucgccg

SEQ ID NO: 3953589 - RNA, 15 nt, Human herpesvirus 1
ugacggccgacgacg

SEQ ID NO: 3953590 - RNA, 21 nt, Human herpesvirus 1
ugaggacgucgagaaggacaa

SEQ ID NO: 3953591 - RNA, 17 nt, Human herpesvirus 1
ugauggcacaccggucc

SEQ ID NO: 3953592 - RNA, 18 nt, Human herpesvirus 1
ugauggccugugcuuucu

SEQ ID NO: 3953593 - RNA, 17 nt, Human herpesvirus 1
ugauuccucuccgcggu

SEQ ID NO: 3953594 - RNA, 18 nt, Human herpesvirus 1
ugcaccgguucucccugu

SEQ ID NO: 3953595 - RNA, 22 nt, Human herpesvirus 1
ugcagggccuggugcucguggg

SEQ ID NO: 3953596 - RNA, 19 nt, Human herpesvirus 1
ugcaugucgucacggugac

SEQ ID NO: 3953597 - RNA, 18 nt, Human herpesvirus 1
ugccaccagccugguugu

SEQ ID NO: 3953598 - RNA, 13 nt, Human herpesvirus 1
ugccagaccucaa

SEQ ID NO: 3953599 - RNA, 11 nt, Human herpesvirus 1
ugcccacgggu

SEQ ID NO: 3953600 - RNA, 12 nt, Human herpesvirus 1
ugcccagcggcc

SEQ ID NO: 3953601 - RNA, 14 nt, Human herpesvirus 1
ugcccccggagcug

SEQ ID NO: 3953602 - RNA, 23 nt, Human herpesvirus 1
ugcccucgcgggccucgugggca

SEQ ID NO: 3953603 - RNA, 22 nt, Human herpesvirus 1
ugcccuuccaggucccaccuga

SEQ ID NO: 3953604 - RNA, 16 nt, Human herpesvirus 1
ugccgcuuuacgaggc

SEQ ID NO: 3953605 - RNA, 22 nt, Human herpesvirus 1
gggcguaacguuccgccuggag

SEQ ID NO: 3953606 - RNA, 14 nt, Human herpesvirus 1
gggcguagagcugu

SEQ ID NO: 3953607 - RNA, 13 nt, Human herpesvirus 1
gggcucggcuccc

SEQ ID NO: 3953608 - RNA, 15 nt, Human herpesvirus 1
gggcucguccccugg

SEQ ID NO: 3953609 - RNA, 16 nt, Human herpesvirus 1
gggcucuacccucugg

SEQ ID NO: 3953610 - RNA, 16 nt, Human herpesvirus 1
ggggacccgccccgga

SEQ ID NO: 3953611 - RNA, 18 nt, Human herpesvirus 1
ggggaccuugccccggcc

SEQ ID NO: 3953612 - RNA, 21 nt, Human herpesvirus 1
ggggacgcgcaccuguuccgc

SEQ ID NO: 3953613 - RNA, 15 nt, Human herpesvirus 1
ggggacggcggggca

SEQ ID NO: 3953614 - RNA, 14 nt, Human herpesvirus 1
ggggagggcagggc

SEQ ID NO: 3953615 - RNA, 23 nt, Human herpesvirus 1
ggggaggggggggucgggcgcug

SEQ ID NO: 3953616 - RNA, 14 nt, Human herpesvirus 1
ggggcauuucagug

SEQ ID NO: 3953617 - RNA, 19 nt, Human herpesvirus 1
ggggccauguugggccgcc

SEQ ID NO: 3953618 - RNA, 17 nt, Human herpesvirus 1
ggggcccacccacccga

SEQ ID NO: 3953619 - RNA, 13 nt, Human herpesvirus 1
ggggccggggacg

SEQ ID NO: 3953620 - RNA, 18 nt, Human herpesvirus 1
ggggccuuggcggccgcc

SEQ ID NO: 3953621 - RNA, 15 nt, Human herpesvirus 1
ggggcgcuggccgug

SEQ ID NO: 3953622 - RNA, 17 nt, Human herpesvirus 1
ggggcgggggccccgcc

SEQ ID NO: 3953623 - RNA, 21 nt, Human herpesvirus 1
ggggcgugucuguuucuuggc

SEQ ID NO: 3953624 - RNA, 21 nt, Human herpesvirus 1
ggggcuggcgcaaccacgccc

SEQ ID NO: 3953625 - RNA, 14 nt, Human herpesvirus 1
gggggcccggaacg

SEQ ID NO: 3953626 - RNA, 12 nt, Human herpesvirus 1
ggggggcuuccg

SEQ ID NO: 3953627 - RNA, 21 nt, Human herpesvirus 1
ggggguccggcacggacccaa

SEQ ID NO: 3953628 - RNA, 19 nt, Human herpesvirus 1
gggguccggcacggaccca

SEQ ID NO: 3953629 - RNA, 15 nt, Human herpesvirus 1
ggggugggggugggc

SEQ ID NO: 3953630 - RNA, 20 nt, Human herpesvirus 1
ggguaccgcgugaccccagg

SEQ ID NO: 3953631 - RNA, 11 nt, Human herpesvirus 1
ggguccgggcc

SEQ ID NO: 3953632 - RNA, 19 nt, Human herpesvirus 1
ggguggagggugucccagg

SEQ ID NO: 3953633 - RNA, 13 nt, Human herpesvirus 1
ggguggcacagaa

SEQ ID NO: 3953634 - RNA, 13 nt, Human herpesvirus 1
ggguucuccugga

SEQ ID NO: 3953635 - RNA, 11 nt, Human herpesvirus 1
ggucaccugcc

SEQ ID NO: 3953636 - RNA, 14 nt, Human herpesvirus 1
ggucaccugccagu

SEQ ID NO: 3953637 - RNA, 15 nt, Human herpesvirus 1
ggucagaggcccacg

SEQ ID NO: 3953638 - RNA, 21 nt, Human herpesvirus 1
ggucagcgacguccugggcca

SEQ ID NO: 3953639 - RNA, 11 nt, Human herpesvirus 1
gguccccccuc

SEQ ID NO: 3953640 - RNA, 16 nt, Human herpesvirus 1
gguccccucugggccc

SEQ ID NO: 3953641 - RNA, 13 nt, Human herpesvirus 1
gguccggcacgga

SEQ ID NO: 3953642 - RNA, 17 nt, Human herpesvirus 1
gguccuggccggccugg

SEQ ID NO: 3953643 - RNA, 21 nt, Human herpesvirus 1
ggucgaucccgaagcccagcg

SEQ ID NO: 3953644 - RNA, 22 nt, Human herpesvirus 1
ggucgcccgucucugcuacgcc

SEQ ID NO: 3953645 - RNA, 19 nt, Human herpesvirus 1
ggucggcaagguggugaug

SEQ ID NO: 3953646 - RNA, 17 nt, Human herpesvirus 1
ggucgggcgcugggugg

SEQ ID NO: 3953647 - RNA, 16 nt, Human herpesvirus 1
ggucggugacgcgcca

SEQ ID NO: 3953648 - RNA, 22 nt, Human herpesvirus 1
ggucgucccucgcaugaagccc

SEQ ID NO: 3953649 - RNA, 19 nt, Human herpesvirus 1
ggucucgcuuugccgggaa

SEQ ID NO: 3953650 - RNA, 13 nt, Human herpesvirus 1
ggucuggcccacg

SEQ ID NO: 3953651 - RNA, 17 nt, Human herpesvirus 1
ggucuguauagcccggg

SEQ ID NO: 3953652 - RNA, 17 nt, Human herpesvirus 1
ggugauguugcccgcgg

SEQ ID NO: 3953653 - RNA, 19 nt, Human herpesvirus 1
ggugccaaagcgcccgucg

SEQ ID NO: 3953654 - RNA, 18 nt, Human herpesvirus 1
ggugccaauaaaccccca

SEQ ID NO: 3953655 - RNA, 20 nt, Human herpesvirus 1
ggugccaguccgcugcaccg

SEQ ID NO: 3953656 - RNA, 18 nt, Human herpesvirus 1
ggugccccaaggagggcg

SEQ ID NO: 3953657 - RNA, 22 nt, Human herpesvirus 1
ggugccgaccgggucccuccuu

SEQ ID NO: 3953658 - RNA, 11 nt, Human herpesvirus 1
ggugcuccgcc

SEQ ID NO: 3953659 - RNA, 17 nt, Human herpesvirus 1
gguggagcugcccggcg

SEQ ID NO: 3953660 - RNA, 14 nt, Human herpesvirus 1
ggugggcguccugg

SEQ ID NO: 3953661 - RNA, 11 nt, Human herpesvirus 1
ggugggggaac

SEQ ID NO: 3953662 - RNA, 17 nt, Human herpesvirus 1
ggugguccguguggagg

SEQ ID NO: 3953663 - RNA, 16 nt, Human herpesvirus 1
gguuagacccaugggu

SEQ ID NO: 3953664 - RNA, 23 nt, Human herpesvirus 1
guaauuucuacgugcccccggau

SEQ ID NO: 3953665 - RNA, 20 nt, Human herpesvirus 1
guacaacaucauccagcugg

SEQ ID NO: 3953666 - RNA, 17 nt, Human herpesvirus 1
guacaacggcucggccu

SEQ ID NO: 3953667 - RNA, 21 nt, Human herpesvirus 1
guacauguucuuuaugcgccc

SEQ ID NO: 3953668 - RNA, 15 nt, Human herpesvirus 1
guacgaccaucaccc

SEQ ID NO: 3953669 - RNA, 14 nt, Human herpesvirus 1
guacgccccaccgg

SEQ ID NO: 3953670 - RNA, 19 nt, Human herpesvirus 1
guacgcccucccgcugcgc

SEQ ID NO: 3953671 - RNA, 17 nt, Human herpesvirus 1
guacugcggucugucuc

SEQ ID NO: 3953672 - RNA, 16 nt, Human herpesvirus 1
guauccacccccgccc

SEQ ID NO: 3953673 - RNA, 16 nt, Human herpesvirus 1
guaugacagcggggac

SEQ ID NO: 3953674 - RNA, 15 nt, Human herpesvirus 1
gucacgcacgccgcc

SEQ ID NO: 3953675 - RNA, 21 nt, Human herpesvirus 1
gucagccugccucucccccca

SEQ ID NO: 3953676 - RNA, 13 nt, Human herpesvirus 1
gucagcgacgucc

SEQ ID NO: 3953677 - RNA, 17 nt, Human herpesvirus 1
gucagcuccucgcgcgg

SEQ ID NO: 3953678 - RNA, 15 nt, Human herpesvirus 1
gucauagugggccuc

SEQ ID NO: 3953679 - RNA, 11 nt, Human herpesvirus 1
gucauaugcaa

SEQ ID NO: 3953680 - RNA, 18 nt, Human herpesvirus 1
gucaugcgcaagcgccgc

SEQ ID NO: 3953681 - RNA, 13 nt, Human herpesvirus 1
guccagcgccgca

SEQ ID NO: 3953682 - RNA, 21 nt, Human herpesvirus 1
guccagggggaugcuagccug

SEQ ID NO: 3953683 - RNA, 13 nt, Human herpesvirus 1
guccccaaaauaa

SEQ ID NO: 3953684 - RNA, 15 nt, Human herpesvirus 1
gucccccacaccacc

SEQ ID NO: 3953685 - RNA, 14 nt, Human herpesvirus 1
gucccccuggaggu

SEQ ID NO: 3953686 - RNA, 15 nt, Human herpesvirus 1
gucccccuggaggug

SEQ ID NO: 3953687 - RNA, 22 nt, Human herpesvirus 1
guccccgaacaaacgacccacc

SEQ ID NO: 3953688 - RNA, 19 nt, Human herpesvirus 1
guccccugccccccccacc

SEQ ID NO: 3953689 - RNA, 12 nt, Human herpesvirus 1
guccccuggggc

SEQ ID NO: 3953690 - RNA, 12 nt, Human herpesvirus 1
gucccgcccacc

SEQ ID NO: 3953691 - RNA, 15 nt, Human herpesvirus 1
gucccgcccaccgga

SEQ ID NO: 3953692 - RNA, 20 nt, Human herpesvirus 1
guccgcggggccucccccgg

SEQ ID NO: 3953693 - RNA, 22 nt, Human herpesvirus 1
guccggcacggacccaaaauaa

SEQ ID NO: 3953694 - RNA, 20 nt, Human herpesvirus 1
guccgggggcucggaaacug

SEQ ID NO: 3953695 - RNA, 14 nt, Human herpesvirus 1
guccugacggccaa

SEQ ID NO: 3953696 - RNA, 15 nt, Human herpesvirus 1
guccugcgccccgcc

SEQ ID NO: 3953697 - RNA, 15 nt, Human herpesvirus 1
guccuggaccagcug

SEQ ID NO: 3953698 - RNA, 18 nt, Human herpesvirus 1
guccuggagcuccgggga

SEQ ID NO: 3953699 - RNA, 17 nt, Human herpesvirus 1
guccuggccggccuggc

SEQ ID NO: 3953700 - RNA, 20 nt, Human herpesvirus 1
gucgaccgcgcccucgccac

SEQ ID NO: 3953701 - RNA, 15 nt, Human herpesvirus 1
gucgccccuguggcc

SEQ ID NO: 3953702 - RNA, 23 nt, Human herpesvirus 1
gucgcccgauuuacagcccccag

SEQ ID NO: 3953703 - RNA, 21 nt, Human herpesvirus 1
gucgcgcgcgcuuugcggagg

SEQ ID NO: 3953704 - RNA, 15 nt, Human herpesvirus 1
gucggaccaccgccc

SEQ ID NO: 3953705 - RNA, 18 nt, Human herpesvirus 1
gucgggaggccacagaaa

SEQ ID NO: 3953706 - RNA, 17 nt, Human herpesvirus 1
gucggggcgucccugga

SEQ ID NO: 3953707 - RNA, 13 nt, Human herpesvirus 1
gucgucagcaccg

SEQ ID NO: 3953708 - RNA, 19 nt, Human herpesvirus 1
gucgucgggcgccaaagcc

SEQ ID NO: 3953709 - RNA, 16 nt, Human herpesvirus 1
gucuccaagcuuuccg

SEQ ID NO: 3953710 - RNA, 21 nt, Human herpesvirus 1
gucuccgaaagccaccaauag

SEQ ID NO: 3953711 - RNA, 12 nt, Human herpesvirus 1
gucucucuuccc

SEQ ID NO: 3953712 - RNA, 20 nt, Human herpesvirus 1
gucucuggccgcgcccacua

SEQ ID NO: 3953713 - RNA, 14 nt, Human herpesvirus 1
gucuggagacccua

SEQ ID NO: 3953714 - RNA, 22 nt, Human herpesvirus 1
gucugugccggagguggggcgg

SEQ ID NO: 3953715 - RNA, 22 nt, Human herpesvirus 1
gugaacacggcgaaugcagcgc

SEQ ID NO: 3953716 - RNA, 16 nt, Human herpesvirus 1
gugaccgcgugcccac

SEQ ID NO: 3953717 - RNA, 23 nt, Human herpesvirus 1
gugacgcgccaaacgccagccug

SEQ ID NO: 3953718 - RNA, 14 nt, Human herpesvirus 1
gugauuccucuccg

SEQ ID NO: 3953719 - RNA, 12 nt, Human herpesvirus 1
gugcacagccug

SEQ ID NO: 3953720 - RNA, 15 nt, Human herpesvirus 1
gugcacagccuggcc

SEQ ID NO: 3953721 - RNA, 22 nt, Human herpesvirus 1
gugcccauuuacguggcugggu

SEQ ID NO: 3953722 - RNA, 17 nt, Human herpesvirus 1
gugccugacgccugcca

SEQ ID NO: 3953723 - RNA, 19 nt, Human herpesvirus 1
gcgcgaauugacccuagga

SEQ ID NO: 3953724 - RNA, 14 nt, Human herpesvirus 1
gcgcgaccucacca

SEQ ID NO: 3953725 - RNA, 15 nt, Human herpesvirus 1
gcgcgaucguccacc

SEQ ID NO: 3953726 - RNA, 22 nt, Human herpesvirus 1
gcgcgccaucuggaccgggguc

SEQ ID NO: 3953727 - RNA, 13 nt, Human herpesvirus 1
gcgcgccgcgagu

SEQ ID NO: 3953728 - RNA, 18 nt, Human herpesvirus 1
gcgcgcgcaccuccuccg

SEQ ID NO: 3953729 - RNA, 18 nt, Human herpesvirus 1
gcgcgcggaugcucggcg

SEQ ID NO: 3953730 - RNA, 20 nt, Human herpesvirus 1
gcgcgcuuguccccgaacaa

SEQ ID NO: 3953731 - RNA, 16 nt, Human herpesvirus 1
gcgcggaugacggccc

SEQ ID NO: 3953732 - RNA, 16 nt, Human herpesvirus 1
gcgcggaugcucggcg

SEQ ID NO: 3953733 - RNA, 20 nt, Human herpesvirus 1
gcgcggccacgucguccggg

SEQ ID NO: 3953734 - RNA, 14 nt, Human herpesvirus 1
gcgcggccgugggc

SEQ ID NO: 3953735 - RNA, 13 nt, Human herpesvirus 1
gcgcggcguccgc

SEQ ID NO: 3953736 - RNA, 21 nt, Human herpesvirus 1
gcgcgucgacgucgcgccugg

SEQ ID NO: 3953737 - RNA, 15 nt, Human herpesvirus 1
gcgcguuugcacaac

SEQ ID NO: 3953738 - RNA, 22 nt, Human herpesvirus 1
gcgcucaaccaccgcucccccc

SEQ ID NO: 3953739 - RNA, 14 nt, Human herpesvirus 1
gcgcuuccccgcgg

SEQ ID NO: 3953740 - RNA, 23 nt, Human herpesvirus 1
gcgcuucuacccguguuugccca

SEQ ID NO: 3953741 - RNA, 13 nt, Human herpesvirus 1
gcgcuuugcggag

SEQ ID NO: 3953742 - RNA, 16 nt, Human herpesvirus 1
gcggacaacgugaucg

SEQ ID NO: 3953743 - RNA, 12 nt, Human herpesvirus 1
gcggacccccgg

SEQ ID NO: 3953744 - RNA, 22 nt, Human herpesvirus 1
gcggagguccggccugggccgc

SEQ ID NO: 3953745 - RNA, 14 nt, Human herpesvirus 1
gcggaugacggccc

SEQ ID NO: 3953746 - RNA, 15 nt, Human herpesvirus 1
gcggauuuggggcgc

SEQ ID NO: 3953747 - RNA, 17 nt, Human herpesvirus 1
gcggcauaacuccgacc

SEQ ID NO: 3953748 - RNA, 21 nt, Human herpesvirus 1
gcggccacgcaaaaccaggcc

SEQ ID NO: 3953749 - RNA, 12 nt, Human herpesvirus 1
gcggccauggcc

SEQ ID NO: 3953750 - RNA, 17 nt, Human herpesvirus 1
gcggccgcccaacucuc

SEQ ID NO: 3953751 - RNA, 20 nt, Human herpesvirus 1
gcggcgaacgggggcccugc

SEQ ID NO: 3953752 - RNA, 11 nt, Human herpesvirus 1
gcggcggggca

SEQ ID NO: 3953753 - RNA, 16 nt, Human herpesvirus 1
gcggcggucagcgacg

SEQ ID NO: 3953754 - RNA, 16 nt, Human herpesvirus 1
gcggcucaacgagcuc

SEQ ID NO: 3953755 - RNA, 13 nt, Human herpesvirus 1
gcggcucguggcg

SEQ ID NO: 3953756 - RNA, 22 nt, Human herpesvirus 1
gcggcuuaugaacgacugggcc

SEQ ID NO: 3953757 - RNA, 16 nt, Human herpesvirus 1
gcgggacaucaaggcg

SEQ ID NO: 3953758 - RNA, 15 nt, Human herpesvirus 1
gcgggagacgggcgg

SEQ ID NO: 3953759 - RNA, 20 nt, Human herpesvirus 1
gcgggaguuucuccgcgguc

SEQ ID NO: 3953760 - RNA, 17 nt, Human herpesvirus 1
gcgggccccggggagac

SEQ ID NO: 3953761 - RNA, 14 nt, Human herpesvirus 1
gcgggccucguggg

SEQ ID NO: 3953762 - RNA, 20 nt, Human herpesvirus 1
gcgggcucgucuuggccacc

SEQ ID NO: 3953763 - RNA, 17 nt, Human herpesvirus 1
gcggggaggggggcaag

SEQ ID NO: 3953764 - RNA, 12 nt, Human herpesvirus 1
gcggggcagagc

SEQ ID NO: 3953765 - RNA, 20 nt, Human herpesvirus 1
gcggggccuuggcggccgcc

SEQ ID NO: 3953766 - RNA, 12 nt, Human herpesvirus 1
gcgggggauggg

SEQ ID NO: 3953767 - RNA, 13 nt, Human herpesvirus 1
gcgggggaugggg

SEQ ID NO: 3953768 - RNA, 17 nt, Human herpesvirus 1
gcgggguuauaggccac

SEQ ID NO: 3953769 - RNA, 19 nt, Human herpesvirus 1
gcgggguugggaugggacc

SEQ ID NO: 3953770 - RNA, 15 nt, Human herpesvirus 1
gcgggugucugcucc

SEQ ID NO: 3953771 - RNA, 20 nt, Human herpesvirus 1
gcgguacagaucggcgccgc

SEQ ID NO: 3953772 - RNA, 15 nt, Human herpesvirus 1
gcggucggcaaggug

SEQ ID NO: 3953773 - RNA, 22 nt, Human herpesvirus 1
gcguacaacggcucggccuaug

SEQ ID NO: 3953774 - RNA, 18 nt, Human herpesvirus 1
gcguagcaaacgccccgc

SEQ ID NO: 3953775 - RNA, 16 nt, Human herpesvirus 1
gcguagcauaccuggg

SEQ ID NO: 3953776 - RNA, 19 nt, Human herpesvirus 1
gcguaucugguccccgcga

SEQ ID NO: 3953777 - RNA, 15 nt, Human herpesvirus 1
gcguccaaacccacc

SEQ ID NO: 3953778 - RNA, 18 nt, Human herpesvirus 1
gcguccaucauagcccug

SEQ ID NO: 3953779 - RNA, 16 nt, Human herpesvirus 1
gcguccccggcccgga

SEQ ID NO: 3953780 - RNA, 20 nt, Human herpesvirus 1
gcguccuggaugcuguggac

SEQ ID NO: 3953781 - RNA, 17 nt, Human herpesvirus 1
gcgucgacgucgcgccu

SEQ ID NO: 3953782 - RNA, 20 nt, Human herpesvirus 1
gcgugcccacgucgccccgc

SEQ ID NO: 3953783 - RNA, 18 nt, Human herpesvirus 1
gcguucaucggacccccc

SEQ ID NO: 3953784 - RNA, 21 nt, Human herpesvirus 1
gcguuucugucggaccaccgc

SEQ ID NO: 3953785 - RNA, 17 nt, Human herpesvirus 1
gcuaagugcccaggacg

SEQ ID NO: 3953786 - RNA, 17 nt, Human herpesvirus 1
gcuagccgaggcccggg

SEQ ID NO: 3953787 - RNA, 19 nt, Human herpesvirus 1
gcuauccccaucacgguca

SEQ ID NO: 3953788 - RNA, 18 nt, Human herpesvirus 1
gcucaaaucgcauccgag

SEQ ID NO: 3953789 - RNA, 18 nt, Human herpesvirus 1
gcucaaccaccgcucccc

SEQ ID NO: 3953790 - RNA, 17 nt, Human herpesvirus 1
gcucaagaaccccacca

SEQ ID NO: 3953791 - RNA, 18 nt, Human herpesvirus 1
gcucccagagaccccagg

SEQ ID NO: 3953792 - RNA, 17 nt, Human herpesvirus 1
gcucccgggagcuccgc

SEQ ID NO: 3953793 - RNA, 15 nt, Human herpesvirus 1
gcucccucgaccacc

SEQ ID NO: 3953794 - RNA, 14 nt, Human herpesvirus 1
gcucccugcggcug

SEQ ID NO: 3953795 - RNA, 19 nt, Human herpesvirus 1
gcuccgacgacgcgcagcc

SEQ ID NO: 3953796 - RNA, 22 nt, Human herpesvirus 1
gcuccgacgacgcgcagccggc

SEQ ID NO: 3953797 - RNA, 16 nt, Human herpesvirus 1
gcuccgccuggccugc

SEQ ID NO: 3953798 - RNA, 21 nt, Human herpesvirus 1
gcuccggggaucugguccgcc

SEQ ID NO: 3953799 - RNA, 15 nt, Human herpesvirus 1
gcuccugauguggcu

SEQ ID NO: 3953800 - RNA, 17 nt, Human herpesvirus 1
gcuccugcgacccgaaa

SEQ ID NO: 3953801 - RNA, 23 nt, Human herpesvirus 1
gcuccuggccaggaucaccaacc

SEQ ID NO: 3953802 - RNA, 16 nt, Human herpesvirus 1
gcuccuuagcgcggcc

SEQ ID NO: 3953803 - RNA, 23 nt, Human herpesvirus 1
gcucgaccucuccacaccugcac

SEQ ID NO: 3953804 - RNA, 20 nt, Human herpesvirus 1
gcucgcggagggcggccagc

SEQ ID NO: 3953805 - RNA, 15 nt, Human herpesvirus 1
gcucgcucucggugc

SEQ ID NO: 3953806 - RNA, 13 nt, Human herpesvirus 1
gcucgggcccgcg

SEQ ID NO: 3953807 - RNA, 23 nt, Human herpesvirus 1
gcucgucagggccggcggcgcuc

SEQ ID NO: 3953808 - RNA, 12 nt, Human herpesvirus 1
gcucgucgccug

SEQ ID NO: 3953809 - RNA, 18 nt, Human herpesvirus 1
gcucuccccugcugccau

SEQ ID NO: 3953810 - RNA, 23 nt, Human herpesvirus 1
gcugacccccaccgcgcuccucc

SEQ ID NO: 3953811 - RNA, 14 nt, Human herpesvirus 1
gcugaggacgucga

SEQ ID NO: 3953812 - RNA, 22 nt, Human herpesvirus 1
gcugaugucccucauuuuacaa

SEQ ID NO: 3953813 - RNA, 14 nt, Human herpesvirus 1
gcugccaaacagcu

SEQ ID NO: 3953814 - RNA, 15 nt, Human herpesvirus 1
gcugccagaccucaa

SEQ ID NO: 3953815 - RNA, 17 nt, Human herpesvirus 1
gcugcgcauccccccgu

SEQ ID NO: 3953816 - RNA, 13 nt, Human herpesvirus 1
gcugcucagcgcc

SEQ ID NO: 3953817 - RNA, 18 nt, Human herpesvirus 1
gcugcugcggccagucca

SEQ ID NO: 3953818 - RNA, 16 nt, Human herpesvirus 1
gcuggccgacguggcg

SEQ ID NO: 3953819 - RNA, 18 nt, Human herpesvirus 1
gcuggccgcucgguggcu

SEQ ID NO: 3953820 - RNA, 12 nt, Human herpesvirus 1
gcugucauuccu

SEQ ID NO: 3953821 - RNA, 16 nt, Human herpesvirus 1
gcuguccgagaccccc

SEQ ID NO: 3953822 - RNA, 12 nt, Human herpesvirus 1
gcuugcggggcu

SEQ ID NO: 3953823 - RNA, 12 nt, Human herpesvirus 1
gcuuggagccag

SEQ ID NO: 3953824 - RNA, 22 nt, Human herpesvirus 1
gcuuuaucccacggccucgcca

SEQ ID NO: 3953825 - RNA, 11 nt, Human herpesvirus 1
ggaacccgcgc

SEQ ID NO: 3953826 - RNA, 16 nt, Human herpesvirus 1
ggaacuacuaugacag

SEQ ID NO: 3953827 - RNA, 14 nt, Human herpesvirus 1
ggacaccccccaug

SEQ ID NO: 3953828 - RNA, 17 nt, Human herpesvirus 1
ggacagcaaccagaagc

SEQ ID NO: 3953829 - RNA, 15 nt, Human herpesvirus 1
ggaccaccgcccccc

SEQ ID NO: 3953830 - RNA, 12 nt, Human herpesvirus 1
ggaccacgugca

SEQ ID NO: 3953831 - RNA, 19 nt, Human herpesvirus 1
ggaccacgugcacagccug

SEQ ID NO: 3953832 - RNA, 20 nt, Human herpesvirus 1
ggaccacgugcacagccugg

SEQ ID NO: 3953833 - RNA, 14 nt, Human herpesvirus 1
ggaccagguccccc

SEQ ID NO: 3953834 - RNA, 21 nt, Human herpesvirus 1
ggaccaggucccccacaccac

SEQ ID NO: 3953835 - RNA, 19 nt, Human herpesvirus 1
ggaccccggggcucagcca

SEQ ID NO: 3953836 - RNA, 14 nt, Human herpesvirus 1
ggaccgcagccugg

SEQ ID NO: 3953837 - RNA, 16 nt, Human herpesvirus 1
ggaccggggucccagc

SEQ ID NO: 3953838 - RNA, 12 nt, Human herpesvirus 1
ggaccuccugga

SEQ ID NO: 3953839 - RNA, 17 nt, Human herpesvirus 1
ggacgccauacacagcc

SEQ ID NO: 3953840 - RNA, 20 nt, Human herpesvirus 1
ggacgccauacacagccacc

SEQ ID NO: 3953841 - RNA, 22 nt, Human herpesvirus 1
ggacgccgaccgacuccccgcc

SEQ ID NO: 3953842 - RNA, 17 nt, Human herpesvirus 1
ggacgggcucgccagcg

SEQ ID NO: 3953843 - RNA, 15 nt, Human herpesvirus 1
ggacuuugagcuugc

SEQ ID NO: 3953844 - RNA, 16 nt, Human herpesvirus 1
ggagacauggcccccg

SEQ ID NO: 3953845 - RNA, 18 nt, Human herpesvirus 1
ggagagcccacaugcgga

SEQ ID NO: 3953846 - RNA, 23 nt, Human herpesvirus 1
ggagagcccacaugcggaaagca

SEQ ID NO: 3953847 - RNA, 13 nt, Human herpesvirus 1
ggagcaccacaua

SEQ ID NO: 3953848 - RNA, 21 nt, Human herpesvirus 1
ggagccccggaccccacgcac

SEQ ID NO: 3953849 - RNA, 23 nt, Human herpesvirus 1
ggagccccggucuccccgggagc

SEQ ID NO: 3953850 - RNA, 14 nt, Human herpesvirus 1
ggagccgagcucaa

SEQ ID NO: 3953851 - RNA, 20 nt, Human herpesvirus 1
ggagcucaagaaccccacca

SEQ ID NO: 3953852 - RNA, 14 nt, Human herpesvirus 1
ggagcucccgggag

SEQ ID NO: 3953853 - RNA, 21 nt, Human herpesvirus 1
ggagcuguccgagacccccaa

SEQ ID NO: 3953854 - RNA, 16 nt, Human herpesvirus 1
ggaggagccccugccc

SEQ ID NO: 3953855 - RNA, 13 nt, Human herpesvirus 1
ggagguccagcgc

SEQ ID NO: 3953856 - RNA, 20 nt, Human herpesvirus 1
ggagguccagcgccgcaacc

SEQ ID NO: 3953857 - RNA, 20 nt, Human herpesvirus 1
ggauccgacccccauggagc

SEQ ID NO: 3953858 - RNA, 20 nt, Human herpesvirus 1
ggaucuuugaggaccgcgcc

SEQ ID NO: 3953859 - RNA, 13 nt, Human herpesvirus 1
ggaugcugccccg

SEQ ID NO: 3953860 - RNA, 16 nt, Human herpesvirus 1
ggaugcugccccgcuu

SEQ ID NO: 3953861 - RNA, 18 nt, Human herpesvirus 1
ggcacaccgguccccgga

SEQ ID NO: 3953862 - RNA, 17 nt, Human herpesvirus 1
ggcaccuccccagcggc

SEQ ID NO: 3953863 - RNA, 20 nt, Human herpesvirus 1
ggcacgcccccuacgaggac

SEQ ID NO: 3953864 - RNA, 17 nt, Human herpesvirus 1
ggcagcgcuccgacgac

SEQ ID NO: 3953865 - RNA, 21 nt, Human herpesvirus 1
ggcagucuccuggcagcccug

SEQ ID NO: 3953866 - RNA, 13 nt, Human herpesvirus 1
ggcaucggaacac

SEQ ID NO: 3953867 - RNA, 17 nt, Human herpesvirus 1
ggcauggcgcagcuggg

SEQ ID NO: 3953868 - RNA, 18 nt, Human herpesvirus 1
ggcauggggggggggcgg

SEQ ID NO: 3953869 - RNA, 20 nt, Human herpesvirus 1
ggccaaccagcguccgccga

SEQ ID NO: 3953870 - RNA, 20 nt, Human herpesvirus 1
ggccaacgacuuccucguac

SEQ ID NO: 3953871 - RNA, 23 nt, Human herpesvirus 1
ggccaauaucgcuagagacagcc

SEQ ID NO: 3953872 - RNA, 17 nt, Human herpesvirus 1
ggccacacagccggcca

SEQ ID NO: 3953873 - RNA, 23 nt, Human herpesvirus 1
ggccagccgcaguacuaccuggc

SEQ ID NO: 3953874 - RNA, 18 nt, Human herpesvirus 1
ggccaggggcauccggga

SEQ ID NO: 3953875 - RNA, 23 nt, Human herpesvirus 1
ggccauuaacuuuaucaccacca

SEQ ID NO: 3953876 - RNA, 12 nt, Human herpesvirus 1
ggcccaacagcc

SEQ ID NO: 3953877 - RNA, 20 nt, Human herpesvirus 1
ggcccacgaucaccgcggga

SEQ ID NO: 3953878 - RNA, 12 nt, Human herpesvirus 1
ggccccccgccg

SEQ ID NO: 3953879 - RNA, 23 nt, Human herpesvirus 1
ggccccggggagacagcgccugc

SEQ ID NO: 3953880 - RNA, 20 nt, Human herpesvirus 1
ggcccgccaucugggauggc

SEQ ID NO: 3953881 - RNA, 22 nt, Human herpesvirus 1
ggcccgggggacucacuaccca

SEQ ID NO: 3953882 - RNA, 19 nt, Human herpesvirus 1
ggcccgggggccugguggc

SEQ ID NO: 3953883 - RNA, 14 nt, Human herpesvirus 1
ggcccugcuccggc

SEQ ID NO: 3953884 - RNA, 22 nt, Human herpesvirus 1
ggcccuuccuaacccagacccc

SEQ ID NO: 3953885 - RNA, 22 nt, Human herpesvirus 1
ggccgaggcgauuagccagcag

SEQ ID NO: 3953886 - RNA, 16 nt, Human herpesvirus 1
ggccgcaggacccagc

SEQ ID NO: 3953887 - RNA, 21 nt, Human herpesvirus 1
ggccgcccaacucucgcacca

SEQ ID NO: 3953888 - RNA, 22 nt, Human herpesvirus 1
ggccgccccgaagagggggacc

SEQ ID NO: 3953889 - RNA, 18 nt, Human herpesvirus 1
ggccgcccuggccgcgga

SEQ ID NO: 3953890 - RNA, 20 nt, Human herpesvirus 1
ggccgcgacccaggcggcga

SEQ ID NO: 3953891 - RNA, 18 nt, Human herpesvirus 1
ggccgcgguggacagcca

SEQ ID NO: 3953892 - RNA, 14 nt, Human herpesvirus 1
ggccgcucgguggc

SEQ ID NO: 3953893 - RNA, 20 nt, Human herpesvirus 1
ggccggcggcgcuccucgcc

SEQ ID NO: 3953894 - RNA, 12 nt, Human herpesvirus 1
ggccgucgggca

SEQ ID NO: 3953895 - RNA, 15 nt, Human herpesvirus 1
ggccguggcggccaa

SEQ ID NO: 3953896 - RNA, 22 nt, Human herpesvirus 1
ggccgugggucuguugguccug

SEQ ID NO: 3953897 - RNA, 14 nt, Human herpesvirus 1
ggccucgugggcac

SEQ ID NO: 3953898 - RNA, 21 nt, Human herpesvirus 1
ggccuggacguccccgaggac

SEQ ID NO: 3953899 - RNA, 19 nt, Human herpesvirus 1
ggccugggucuuccgcgga

SEQ ID NO: 3953900 - RNA, 17 nt, Human herpesvirus 1
ggcgacgcacacacccu

SEQ ID NO: 3953901 - RNA, 19 nt, Human herpesvirus 1
ggcgccacaccacgccaca

SEQ ID NO: 3953902 - RNA, 10 nt, Human herpesvirus 1
ggcgcccccc

SEQ ID NO: 3953903 - RNA, 15 nt, Human herpesvirus 1
ggcgccgaccacccg

SEQ ID NO: 3953904 - RNA, 11 nt, Human herpesvirus 1
ggcgccgcgag

SEQ ID NO: 3953905 - RNA, 20 nt, Human herpesvirus 1
ggcgccgcgagauggccgcc

SEQ ID NO: 3953906 - RNA, 19 nt, Human herpesvirus 1
ggcgccggucgucacgcac

SEQ ID NO: 3953907 - RNA, 18 nt, Human herpesvirus 1
ggcgccucggucacccca

SEQ ID NO: 3953908 - RNA, 22 nt, Human herpesvirus 1
ggcgcgacaacgagcccccgcc

SEQ ID NO: 3953909 - RNA, 23 nt, Human herpesvirus 1
ggcgcgcgaaaucguggcgcggc

SEQ ID NO: 3953910 - RNA, 19 nt, Human herpesvirus 1
ggcgcucagggcggcgguc

SEQ ID NO: 3953911 - RNA, 22 nt, Human herpesvirus 1
ggcgcugacggaccuuggucug

SEQ ID NO: 3953912 - RNA, 14 nt, Human herpesvirus 1
ggcgcuuggccggg

SEQ ID NO: 3953913 - RNA, 17 nt, Human herpesvirus 1
ggcggacccaagccgcc

SEQ ID NO: 3953914 - RNA, 23 nt, Human herpesvirus 1
ggcggagaaacggccgaagccac

SEQ ID NO: 3953915 - RNA, 15 nt, Human herpesvirus 1
ggcggcaggcgccag

SEQ ID NO: 3953916 - RNA, 16 nt, Human herpesvirus 1
ggcggcaggcgccagc

SEQ ID NO: 3953917 - RNA, 20 nt, Human herpesvirus 1
ggcggccaaguacgccgcca

SEQ ID NO: 3953918 - RNA, 16 nt, Human herpesvirus 1
ggcggccccggcagcc

SEQ ID NO: 3953919 - RNA, 16 nt, Human herpesvirus 1
ggcggcgacgugcccc

SEQ ID NO: 3953920 - RNA, 15 nt, Human herpesvirus 1
ggcggcgaggccggc

SEQ ID NO: 3953921 - RNA, 20 nt, Human herpesvirus 1
ggcggcgaggccggcgccga

SEQ ID NO: 3953922 - RNA, 16 nt, Human herpesvirus 1
ggcggcggucagcgac

SEQ ID NO: 3953923 - RNA, 22 nt, Human herpesvirus 1
ggcggcgugugggggugcccca

SEQ ID NO: 3953924 - RNA, 10 nt, Human herpesvirus 1
ggcgggccgu

SEQ ID NO: 3953925 - RNA, 20 nt, Human herpesvirus 1
ggcggucagcgacguccugg

SEQ ID NO: 3953926 - RNA, 15 nt, Human herpesvirus 1
ggcggugcuccgccg

SEQ ID NO: 3953927 - RNA, 16 nt, Human herpesvirus 1
ggcguaacguuccgcc

SEQ ID NO: 3953928 - RNA, 19 nt, Human herpesvirus 1
ggcguacaacggcucggcc

SEQ ID NO: 3953929 - RNA, 23 nt, Human herpesvirus 1
ggcgucgcugugaugaagcagcg

SEQ ID NO: 3953930 - RNA, 14 nt, Human herpesvirus 1
ggcgucgggcaugg

SEQ ID NO: 3953931 - RNA, 17 nt, Human herpesvirus 1
ggcuccagucccggccc

SEQ ID NO: 3953932 - RNA, 22 nt, Human herpesvirus 1
ggcuccaugcagugcauggcgc

SEQ ID NO: 3953933 - RNA, 20 nt, Human herpesvirus 1
ggcuccccgccgcggccugg

SEQ ID NO: 3953934 - RNA, 15 nt, Human herpesvirus 1
ggcuccgggccaacc

SEQ ID NO: 3953935 - RNA, 23 nt, Human herpesvirus 1
ggcuccuguaaguacgcccuccc

SEQ ID NO: 3953936 - RNA, 14 nt, Human herpesvirus 1
ggcucgccagcgac

SEQ ID NO: 3953937 - RNA, 14 nt, Human herpesvirus 1
ggcucggcuccccg

SEQ ID NO: 3953938 - RNA, 17 nt, Human herpesvirus 1
ggcucguggcgucucgc

SEQ ID NO: 3953939 - RNA, 21 nt, Human herpesvirus 1
ggcucguggcgucucgccgga

SEQ ID NO: 3953940 - RNA, 18 nt, Human herpesvirus 1
ggcuugguucggggccgc

SEQ ID NO: 3953941 - RNA, 20 nt, Human herpesvirus 1
gggacacuuguccggagaac

SEQ ID NO: 3953942 - RNA, 12 nt, Human herpesvirus 1
gggaccuccugg

SEQ ID NO: 3953943 - RNA, 16 nt, Human herpesvirus 1
gggaugcuagccugug

SEQ ID NO: 3953944 - RNA, 17 nt, Human herpesvirus 1
gggauggggagagccca

SEQ ID NO: 3953945 - RNA, 18 nt, Human herpesvirus 1
gggauugguuagacccau

SEQ ID NO: 3953946 - RNA, 20 nt, Human herpesvirus 1
gggcaaguaugccccccugg

SEQ ID NO: 3953947 - RNA, 20 nt, Human herpesvirus 1
gggcacccaaggggccgugc

SEQ ID NO: 3953948 - RNA, 20 nt, Human herpesvirus 1
gggccaaccaagagacgucg

SEQ ID NO: 3953949 - RNA, 16 nt, Human herpesvirus 1
gggccgccacgcgcgg

SEQ ID NO: 3953950 - RNA, 12 nt, Human herpesvirus 1
gggccgcgcgga

SEQ ID NO: 3953951 - RNA, 20 nt, Human herpesvirus 1
gggccucccggaagagccug

SEQ ID NO: 3953952 - RNA, 18 nt, Human herpesvirus 1
gggccucugggucugugc

SEQ ID NO: 3953953 - RNA, 19 nt, Human herpesvirus 1
gggccugccugcggcucgu

SEQ ID NO: 3953954 - RNA, 23 nt, Human herpesvirus 1
gggccuggugcucgugggccucu

SEQ ID NO: 3953955 - RNA, 15 nt, Human herpesvirus 1
gggcgcugggugguc

SEQ ID NO: 3953956 - RNA, 13 nt, Human herpesvirus 1
gggcgguucgccg

SEQ ID NO: 3953957 - RNA, 15 nt, Human herpesvirus 1
aaacccccaaacacc

SEQ ID NO: 3953958 - RNA, 21 nt, Human herpesvirus 1
aaacuguccugucuuggggcc

SEQ ID NO: 3953959 - RNA, 20 nt, Human herpesvirus 1
aaagcaagaacaauaaaggc

SEQ ID NO: 3953960 - RNA, 14 nt, Human herpesvirus 1
aaagccacugaaac

SEQ ID NO: 3953961 - RNA, 19 nt, Human herpesvirus 1
aaagggauacacaaacuuc

SEQ ID NO: 3953962 - RNA, 17 nt, Human herpesvirus 1
aaaguuguuagcccugc

SEQ ID NO: 3953963 - RNA, 11 nt, Human herpesvirus 1
aaauaaagcca

SEQ ID NO: 3953964 - RNA, 22 nt, Human herpesvirus 1
aaauacagcauggcgccacacc

SEQ ID NO: 3953965 - RNA, 18 nt, Human herpesvirus 1
aaauuuuacaaacagauu

SEQ ID NO: 3953966 - RNA, 14 nt, Human herpesvirus 1
aacacaaacaucug

SEQ ID NO: 3953967 - RNA, 15 nt, Human herpesvirus 1
aacagcccccggguu

SEQ ID NO: 3953968 - RNA, 17 nt, Human herpesvirus 1
aaccccaacuccagacc

SEQ ID NO: 3953969 - RNA, 16 nt, Human herpesvirus 1
aaccccaccccugugc

SEQ ID NO: 3953970 - RNA, 19 nt, Human herpesvirus 1
aacccccuaagacccaccc

SEQ ID NO: 3953971 - RNA, 20 nt, Human herpesvirus 1
aacccccuccgcgccaggcc

SEQ ID NO: 3953972 - RNA, 13 nt, Human herpesvirus 1
aaccgguauuauu

SEQ ID NO: 3953973 - RNA, 17 nt, Human herpesvirus 1
aaccucgggugcauauc

SEQ ID NO: 3953974 - RNA, 20 nt, Human herpesvirus 1
aaccuucgcaacaccucccc

SEQ ID NO: 3953975 - RNA, 17 nt, Human herpesvirus 1
aacgagccgacggcccg

SEQ ID NO: 3953976 - RNA, 16 nt, Human herpesvirus 1
aacgcagccccgcugg

SEQ ID NO: 3953977 - RNA, 22 nt, Human herpesvirus 1
aacucucgcaccaucccggguu

SEQ ID NO: 3953978 - RNA, 18 nt, Human herpesvirus 1
aacugccugacccucucc

SEQ ID NO: 3953979 - RNA, 17 nt, Human herpesvirus 1
aacugucuggagacccu

SEQ ID NO: 3953980 - RNA, 16 nt, Human herpesvirus 1
aacuucaucacccccg

SEQ ID NO: 3953981 - RNA, 15 nt, Human herpesvirus 1
aagaccaaaaucaaa

SEQ ID NO: 3953982 - RNA, 20 nt, Human herpesvirus 1
aagacccgggcgaugagcca

SEQ ID NO: 3953983 - RNA, 13 nt, Human herpesvirus 1
aagcaagaacaau

SEQ ID NO: 3953984 - RNA, 17 nt, Human herpesvirus 1
aagcaagaacaauaaag

SEQ ID NO: 3953985 - RNA, 13 nt, Human herpesvirus 1
aagcgcugcugcg

SEQ ID NO: 3953986 - RNA, 13 nt, Human herpesvirus 1
aagcugauguccc

SEQ ID NO: 3953987 - RNA, 23 nt, Human herpesvirus 1
aagcugaugucccucauuuuaca

SEQ ID NO: 3953988 - RNA, 21 nt, Human herpesvirus 1
aaggcgcugcgguugcccccg

SEQ ID NO: 3953989 - RNA, 18 nt, Human herpesvirus 1
aagucucugggggccugu

SEQ ID NO: 3953990 - RNA, 13 nt, Human herpesvirus 1
aagugaaagacac

SEQ ID NO: 3953991 - RNA, 18 nt, Human herpesvirus 1
cgggcgacgcacacaccc

SEQ ID NO: 3953992 - RNA, 13 nt, Human herpesvirus 1
cgggcgaugagcc

SEQ ID NO: 3953993 - RNA, 14 nt, Human herpesvirus 1
cgggcgaugagcca

SEQ ID NO: 3953994 - RNA, 19 nt, Human herpesvirus 1
cgggcgccuucccccggcc

SEQ ID NO: 3953995 - RNA, 14 nt, Human herpesvirus 1
cgggcgcgcccucu

SEQ ID NO: 3953996 - RNA, 17 nt, Human herpesvirus 1
cgggcgcguccccggcc

SEQ ID NO: 3953997 - RNA, 13 nt, Human herpesvirus 1
cgggcggagaaac

SEQ ID NO: 3953998 - RNA, 13 nt, Human herpesvirus 1
cgggcggcccugc

SEQ ID NO: 3953999 - RNA, 18 nt, Human herpesvirus 1
cgggcgucaccaugcagc

SEQ ID NO: 3954000 - RNA, 15 nt, Human herpesvirus 1
cgggcuacacggccg

SEQ ID NO: 3954001 - RNA, 15 nt, Human herpesvirus 1
cgggcuacugguggg

SEQ ID NO: 3954002 - RNA, 19 nt, Human herpesvirus 1
cggggaccuugccccggcc

SEQ ID NO: 3954003 - RNA, 18 nt, Human herpesvirus 1
cggggccguggcggccaa

SEQ ID NO: 3954004 - RNA, 17 nt, Human herpesvirus 1
guaggcuggucagcacg

SEQ ID NO: 3954005 - RNA, 12 nt, Human herpesvirus 1
guaucaaacuca

SEQ ID NO: 3954006 - RNA, 14 nt, Human herpesvirus 1
guauggggggggcu

SEQ ID NO: 3954007 - RNA, 11 nt, Human herpesvirus 1
guaugucccca

SEQ ID NO: 3954008 - RNA, 21 nt, Human herpesvirus 1
guauguccccaaaauaaaaga

SEQ ID NO: 3954009 - RNA, 23 nt, Human herpesvirus 1
gucaccgguucguauccacaaua

SEQ ID NO: 3954010 - RNA, 18 nt, Human herpesvirus 1
gucaucacccgggugcuu

SEQ ID NO: 3954011 - RNA, 12 nt, Human herpesvirus 1
guccaccaaagu

SEQ ID NO: 3954012 - RNA, 20 nt, Human herpesvirus 1
guccacggccacuggccggg

SEQ ID NO: 3954013 - RNA, 21 nt, Human herpesvirus 1
guccacgguaggcccagcaug

SEQ ID NO: 3954014 - RNA, 13 nt, Human herpesvirus 1
guccagaccacgg

SEQ ID NO: 3954015 - RNA, 20 nt, Human herpesvirus 1
guccaucaccacgcccagua

SEQ ID NO: 3954016 - RNA, 23 nt, Human herpesvirus 1
guccccccucuaucccgcccacc

SEQ ID NO: 3954017 - RNA, 19 nt, Human herpesvirus 1
guccccgggucuguugggg

SEQ ID NO: 3954018 - RNA, 23 nt, Human herpesvirus 1
guccccucugggcccgccuggau

SEQ ID NO: 3954019 - RNA, 18 nt, Human herpesvirus 1
gucccgaagaccgccggu

SEQ ID NO: 3954020 - RNA, 19 nt, Human herpesvirus 1
guccgccaaauaaagccac

SEQ ID NO: 3954021 - RNA, 19 nt, Human herpesvirus 1
guccgcugugccaucgcgc

SEQ ID NO: 3954022 - RNA, 14 nt, Human herpesvirus 1
guccguggagcgca

SEQ ID NO: 3954023 - RNA, 13 nt, Human herpesvirus 1
guccguguggagg

SEQ ID NO: 3954024 - RNA, 18 nt, Human herpesvirus 1
guccucaucaccgacgac

SEQ ID NO: 3954025 - RNA, 15 nt, Human herpesvirus 1
guccuguggagccug

SEQ ID NO: 3954026 - RNA, 13 nt, Human herpesvirus 1
guccuucuugucg

SEQ ID NO: 3954027 - RNA, 21 nt, Human herpesvirus 1
guccuuugggcgggaggaagc

SEQ ID NO: 3954028 - RNA, 19 nt, Human herpesvirus 1
gucgaccgcgcccucgcca

SEQ ID NO: 3954029 - RNA, 19 nt, Human herpesvirus 1
gucgacgaccuggggacgg

SEQ ID NO: 3954030 - RNA, 16 nt, Human herpesvirus 1
gucgacgucgcgccug

SEQ ID NO: 3954031 - RNA, 19 nt, Human herpesvirus 1
gucgcccgauuuacagccc

SEQ ID NO: 3954032 - RNA, 14 nt, Human herpesvirus 1
gucgcccuccacca

SEQ ID NO: 3954033 - RNA, 19 nt, Human herpesvirus 1
gucgccgcgggccacgcca

SEQ ID NO: 3954034 - RNA, 15 nt, Human herpesvirus 1
gucgcgccugggugc

SEQ ID NO: 3954035 - RNA, 19 nt, Human herpesvirus 1
gucggcaagauccucgggc

SEQ ID NO: 3954036 - RNA, 16 nt, Human herpesvirus 1
gucggcggcuguagcg

SEQ ID NO: 3954037 - RNA, 15 nt, Human herpesvirus 1
gucgucgggcgccaa

SEQ ID NO: 3954038 - RNA, 12 nt, Human herpesvirus 1
gucgucucucuu

SEQ ID NO: 3954039 - RNA, 17 nt, Human herpesvirus 1
gucuccccgauggcccu

SEQ ID NO: 3954040 - RNA, 20 nt, Human herpesvirus 1
gucuccccgggagccccgga

SEQ ID NO: 3954041 - RNA, 15 nt, Human herpesvirus 1
gucuccccggggccc

SEQ ID NO: 3954042 - RNA, 17 nt, Human herpesvirus 1
gucugcuccccaccccg

SEQ ID NO: 3954043 - RNA, 21 nt, Human herpesvirus 1
gucuggagacccuaugguaca

SEQ ID NO: 3954044 - RNA, 13 nt, Human herpesvirus 1
gucuggccccggc

SEQ ID NO: 3954045 - RNA, 15 nt, Human herpesvirus 1
gucugggcccgacag

SEQ ID NO: 3954046 - RNA, 21 nt, Human herpesvirus 1
gucuggguuuuccccucccgu

SEQ ID NO: 3954047 - RNA, 18 nt, Human herpesvirus 1
gucugugccaccagccug

SEQ ID NO: 3954048 - RNA, 18 nt, Human herpesvirus 1
gucuucgcgaacccccgu

SEQ ID NO: 3954049 - RNA, 14 nt, Human herpesvirus 1
gucuucggccccgc

SEQ ID NO: 3954050 - RNA, 16 nt, Human herpesvirus 1
gugaaagacacgggca

SEQ ID NO: 3954051 - RNA, 15 nt, Human herpesvirus 1
gugacucaggacauc

SEQ ID NO: 3954052 - RNA, 16 nt, Human herpesvirus 1
gugaucagcacgccac

SEQ ID NO: 3954053 - RNA, 12 nt, Human herpesvirus 1
gugauuccucuc

SEQ ID NO: 3954054 - RNA, 20 nt, Human herpesvirus 1
gugccgcccguugcagggcc

SEQ ID NO: 3954055 - RNA, 15 nt, Human herpesvirus 1
gugcgccaggucggc

SEQ ID NO: 3954056 - RNA, 15 nt, Human herpesvirus 1
gugcucgacagccac

SEQ ID NO: 3954057 - RNA, 16 nt, Human herpesvirus 1
guggacgagaugcugc

SEQ ID NO: 3954058 - RNA, 20 nt, Human herpesvirus 1
guggagcugcccggcggcca

SEQ ID NO: 3954059 - RNA, 18 nt, Human herpesvirus 1
guggcacuaccccauggg

SEQ ID NO: 3954060 - RNA, 17 nt, Human herpesvirus 1
guggccgggcguugggg

SEQ ID NO: 3954061 - RNA, 22 nt, Human herpesvirus 1
guggcgucucgccggacgacgu

SEQ ID NO: 3954062 - RNA, 20 nt, Human herpesvirus 1
guggcuccggggggcuuccg

SEQ ID NO: 3954063 - RNA, 22 nt, Human herpesvirus 1
gugggcgacugcgaccccagcc

SEQ ID NO: 3954064 - RNA, 15 nt, Human herpesvirus 1
gugggggugccccaa

SEQ ID NO: 3954065 - RNA, 16 nt, Human herpesvirus 1
gugggugcuuuggaaa

SEQ ID NO: 3954066 - RNA, 17 nt, Human herpesvirus 1
gugguccuguggagccu

SEQ ID NO: 3954067 - RNA, 14 nt, Human herpesvirus 1
guggugcgagcugc

SEQ ID NO: 3954068 - RNA, 16 nt, Human herpesvirus 1
gugucagguggcccuu

SEQ ID NO: 3954069 - RNA, 13 nt, Human herpesvirus 1
guguucgagggcc

SEQ ID NO: 3954070 - RNA, 11 nt, Human herpesvirus 1
guucaaggcca

SEQ ID NO: 3954071 - RNA, 22 nt, Human herpesvirus 1
gacagcccccccaagcgccccc

SEQ ID NO: 3954072 - RNA, 16 nt, Human herpesvirus 1
gacaucagcuguggac

SEQ ID NO: 3954073 - RNA, 14 nt, Human herpesvirus 1
gacauccaccaccc

SEQ ID NO: 3954074 - RNA, 17 nt, Human herpesvirus 1
gacauggucaugcgcaa

SEQ ID NO: 3954075 - RNA, 21 nt, Human herpesvirus 1
gacauuccgcuaucuccuggg

SEQ ID NO: 3954076 - RNA, 17 nt, Human herpesvirus 1
gaccaccaccuccaccc

SEQ ID NO: 3954077 - RNA, 15 nt, Human herpesvirus 1
gaccaccauccccgc

SEQ ID NO: 3954078 - RNA, 14 nt, Human herpesvirus 1
gaccaccccaaaua

SEQ ID NO: 3954079 - RNA, 16 nt, Human herpesvirus 1
gaccacgagaccgaca

SEQ ID NO: 3954080 - RNA, 20 nt, Human herpesvirus 1
gaccacgcccuuccccacgg

SEQ ID NO: 3954081 - RNA, 16 nt, Human herpesvirus 1
gaccagccguccucgc

SEQ ID NO: 3954082 - RNA, 23 nt, Human herpesvirus 1
gaccagccguccucgcaccagcc

SEQ ID NO: 3954083 - RNA, 16 nt, Human herpesvirus 1
gaccagcgccgggugg

SEQ ID NO: 3954084 - RNA, 11 nt, Human herpesvirus 1
gaccaggcgcg

SEQ ID NO: 3954085 - RNA, 15 nt, Human herpesvirus 1
gaccaggucccccac

SEQ ID NO: 3954086 - RNA, 16 nt, Human herpesvirus 1
gacccaaagcccucag

SEQ ID NO: 3954087 - RNA, 13 nt, Human herpesvirus 1
gacccaccaauaa

SEQ ID NO: 3954088 - RNA, 14 nt, Human herpesvirus 1
gacccaccgggccc

SEQ ID NO: 3954089 - RNA, 17 nt, Human herpesvirus 1
gaccccacgacacccac

SEQ ID NO: 3954090 - RNA, 19 nt, Human herpesvirus 1
gacccccaacgccacgcag

SEQ ID NO: 3954091 - RNA, 19 nt, Human herpesvirus 1
gacccccuuguaugucccc

SEQ ID NO: 3954092 - RNA, 19 nt, Human herpesvirus 1
acgaguccauccugcggcu

SEQ ID NO: 3954093 - RNA, 19 nt, Human herpesvirus 1
acgcaagaccaggccuggu

SEQ ID NO: 3954094 - RNA, 16 nt, Human herpesvirus 1
acgcacacacccuagc

SEQ ID NO: 3954095 - RNA, 16 nt, Human herpesvirus 1
acgcacgccaaugccc

SEQ ID NO: 3954096 - RNA, 14 nt, Human herpesvirus 1
acgcacgccgcccc

SEQ ID NO: 3954097 - RNA, 14 nt, Human herpesvirus 1
acgcaugggccgcc

SEQ ID NO: 3954098 - RNA, 17 nt, Human herpesvirus 1
acgccaagggggucugu

SEQ ID NO: 3954099 - RNA, 19 nt, Human herpesvirus 1
acgcccgaccacacacccc

SEQ ID NO: 3954100 - RNA, 22 nt, Human herpesvirus 1
acgccgccaccguggccggccu

SEQ ID NO: 3954101 - RNA, 14 nt, Human herpesvirus 1
acgccggggccuug

SEQ ID NO: 3954102 - RNA, 16 nt, Human herpesvirus 1
acgccuaccggccccu

SEQ ID NO: 3954103 - RNA, 20 nt, Human herpesvirus 1
acgccuaccggccccugggc

SEQ ID NO: 3954104 - RNA, 23 nt, Human herpesvirus 1
acgccucagggccuccgacccca

SEQ ID NO: 3954105 - RNA, 12 nt, Human herpesvirus 1
cgcgauccggcc

SEQ ID NO: 3954106 - RNA, 22 nt, Human herpesvirus 1
cgcgcauccgucgggaggccac

SEQ ID NO: 3954107 - RNA, 19 nt, Human herpesvirus 1
cgcgccaagguggacuggu

SEQ ID NO: 3954108 - RNA, 14 nt, Human herpesvirus 1
cgcgccccucuggc

SEQ ID NO: 3954109 - RNA, 12 nt, Human herpesvirus 1
cgcgcccgggcg

SEQ ID NO: 3954110 - RNA, 13 nt, Human herpesvirus 1
cgcgcccucgcca

SEQ ID NO: 3954111 - RNA, 13 nt, Human herpesvirus 1
cgcgccgcgagua

SEQ ID NO: 3954112 - RNA, 14 nt, Human herpesvirus 1
cgcacgagccgggg

SEQ ID NO: 3954113 - RNA, 19 nt, Human herpesvirus 1
cgcacggaacacaaggcca

SEQ ID NO: 3954114 - RNA, 20 nt, Human herpesvirus 1
cgcacucgagcggcgugggc

SEQ ID NO: 3954115 - RNA, 22 nt, Human herpesvirus 1
cgcacuugcggcaagacccggg

SEQ ID NO: 3954116 - RNA, 20 nt, Human herpesvirus 1
cgcagacgaaaagccccggg

SEQ ID NO: 3954117 - RNA, 22 nt, Human herpesvirus 1
cgcagcaccuccuacgccgggg

SEQ ID NO: 3954118 - RNA, 17 nt, Human herpesvirus 1
cgcagccccgcuggaac

SEQ ID NO: 3954119 - RNA, 14 nt, Human herpesvirus 1
cgcagccuggucga

SEQ ID NO: 3954120 - RNA, 19 nt, Human herpesvirus 1
cgcaggcgcugucuccccg

SEQ ID NO: 3954121 - RNA, 16 nt, Human herpesvirus 1
cgcauaucccacccug

SEQ ID NO: 3954122 - RNA, 20 nt, Human herpesvirus 1
cgcauccccccgucagccug

SEQ ID NO: 3954123 - RNA, 17 nt, Human herpesvirus 1
cgcaucuuuccugugug

SEQ ID NO: 3954124 - RNA, 16 nt, Human herpesvirus 1
cgccaaagcugcuggc

SEQ ID NO: 3954125 - RNA, 18 nt, Human herpesvirus 1
cgccaacaauccccagga

SEQ ID NO: 3954126 - RNA, 20 nt, Human herpesvirus 1
cgccaagguggacugguugg

SEQ ID NO: 3954127 - RNA, 19 nt, Human herpesvirus 1
cgccacaccaucucccccg

SEQ ID NO: 3954128 - RNA, 13 nt, Human herpesvirus 1
cgccacacccgcg

SEQ ID NO: 3954129 - RNA, 19 nt, Human herpesvirus 1
cgccaccagcaucgcgcgc

SEQ ID NO: 3954130 - RNA, 23 nt, Human herpesvirus 1
cgccacgguggugcaguucgagc

SEQ ID NO: 3954131 - RNA, 15 nt, Human herpesvirus 1
cgccagccugcggcc

SEQ ID NO: 3954132 - RNA, 18 nt, Human herpesvirus 1
cgccagccugcggccgga

SEQ ID NO: 3954133 - RNA, 22 nt, Human herpesvirus 1
cgccaggucggcgaccgccagc

SEQ ID NO: 3954134 - RNA, 17 nt, Human herpesvirus 1
cgccagguugggggccg

SEQ ID NO: 3954135 - RNA, 23 nt, Human herpesvirus 1
cgccaucugggauggcuccuggc

SEQ ID NO: 3954136 - RNA, 15 nt, Human herpesvirus 1
cgccaugcuggcgga

SEQ ID NO: 3954137 - RNA, 23 nt, Human herpesvirus 1
cgccauguuugcgggccugggcg

SEQ ID NO: 3954138 - RNA, 15 nt, Human herpesvirus 1
cgcccaaugggccgg

SEQ ID NO: 3954139 - RNA, 14 nt, Human herpesvirus 1
cgcccaccuccugg

SEQ ID NO: 3954140 - RNA, 21 nt, Human herpesvirus 1
cgccccaucccgaggccccac

SEQ ID NO: 3954141 - RNA, 15 nt, Human herpesvirus 1
cgcccccagcugggc

SEQ ID NO: 3954142 - RNA, 17 nt, Human herpesvirus 1
cgcccccagcugggccc

SEQ ID NO: 3954143 - RNA, 20 nt, Human herpesvirus 1
cgcccccggcuacaggggcc

SEQ ID NO: 3954144 - RNA, 20 nt, Human herpesvirus 1
cgccccgaagagggggaccc

SEQ ID NO: 3954145 - RNA, 19 nt, Human herpesvirus 1
cgccccgacccccuuguau

SEQ ID NO: 3954146 - RNA, 14 nt, Human herpesvirus 1
cgccccggccgccu

SEQ ID NO: 3954147 - RNA, 19 nt, Human herpesvirus 1
cgccccggcgacccugauc

SEQ ID NO: 3954148 - RNA, 16 nt, Human herpesvirus 1
cgccccuaaccaggcc

SEQ ID NO: 3954149 - RNA, 19 nt, Human herpesvirus 1
cgccccucgccacgucgac

SEQ ID NO: 3954150 - RNA, 12 nt, Human herpesvirus 1
cgccccuguggc

SEQ ID NO: 3954151 - RNA, 13 nt, Human herpesvirus 1
cgccccuguggcc

SEQ ID NO: 3954152 - RNA, 18 nt, Human herpesvirus 1
cgcccgauuuacagcccc

SEQ ID NO: 3954153 - RNA, 22 nt, Human herpesvirus 1
cgcccgauuuacagcccccaga

SEQ ID NO: 3954154 - RNA, 17 nt, Human herpesvirus 1
cgcccgccaucgagcca

SEQ ID NO: 3954155 - RNA, 16 nt, Human herpesvirus 1
cgcccgccccucgcca

SEQ ID NO: 3954156 - RNA, 13 nt, Human herpesvirus 1
cgcccgccccugc

SEQ ID NO: 3954157 - RNA, 17 nt, Human herpesvirus 1
cgcccggggccagcgcc

SEQ ID NO: 3954158 - RNA, 16 nt, Human herpesvirus 1
cgcccggguccccgcg

SEQ ID NO: 3954159 - RNA, 16 nt, Human herpesvirus 1
cgcccguccucgcccg

SEQ ID NO: 3954160 - RNA, 22 nt, Human herpesvirus 1
cgcccuaacagucuuccgcuga

SEQ ID NO: 3954161 - RNA, 22 nt, Human herpesvirus 1
cgcccucgcccagacgcccucc

SEQ ID NO: 3954162 - RNA, 21 nt, Human herpesvirus 1
cgcccucgguucgccuucacg

SEQ ID NO: 3954163 - RNA, 14 nt, Human herpesvirus 1
cgccgaccacccgg

SEQ ID NO: 3954164 - RNA, 19 nt, Human herpesvirus 1
cgccgagucuucggggccc

SEQ ID NO: 3954165 - RNA, 22 nt, Human herpesvirus 1
cgccgcaaagccacccacgccg

SEQ ID NO: 3954166 - RNA, 16 nt, Human herpesvirus 1
cgccgcgagauggccg

SEQ ID NO: 3954167 - RNA, 16 nt, Human herpesvirus 1
cgccgcggccuggguu

SEQ ID NO: 3954168 - RNA, 12 nt, Human herpesvirus 1
cgccgcgggcca

SEQ ID NO: 3954169 - RNA, 14 nt, Human herpesvirus 1
cgccgcgggccacg

SEQ ID NO: 3954170 - RNA, 19 nt, Human herpesvirus 1
cgccgcugacccccaccgc

SEQ ID NO: 3954171 - RNA, 14 nt, Human herpesvirus 1
cgccggccgcaccc

SEQ ID NO: 3954172 - RNA, 23 nt, Human herpesvirus 1
cgccggcggcgacgugcccccuc

SEQ ID NO: 3954173 - RNA, 21 nt, Human herpesvirus 1
cgccggguagcguacggaccg

SEQ ID NO: 3954174 - RNA, 19 nt, Human herpesvirus 1
cgccgucccacgcucuccc

SEQ ID NO: 3954175 - RNA, 13 nt, Human herpesvirus 1
cgccucagggccu

SEQ ID NO: 3954176 - RNA, 20 nt, Human herpesvirus 1
cgccucccccacauccggga

SEQ ID NO: 3954177 - RNA, 20 nt, Human herpesvirus 1
cgccuccgcccgugcugccg

SEQ ID NO: 3954178 - RNA, 13 nt, Human herpesvirus 1
cgccucggagccg

SEQ ID NO: 3954179 - RNA, 15 nt, Human herpesvirus 1
cgccucggcccgcga

SEQ ID NO: 3954180 - RNA, 23 nt, Human herpesvirus 1
cgccugccaaccugauccgcggc

SEQ ID NO: 3954181 - RNA, 17 nt, Human herpesvirus 1
cgccugcccccuggacg

SEQ ID NO: 3954182 - RNA, 22 nt, Human herpesvirus 1
cgccugcguucaucggaccccc

SEQ ID NO: 3954183 - RNA, 21 nt, Human herpesvirus 1
cgccuggauucgcuggaccuc

SEQ ID NO: 3954184 - RNA, 18 nt, Human herpesvirus 1
cgccuggcgucuccucug

SEQ ID NO: 3954185 - RNA, 21 nt, Human herpesvirus 1
cgccuggcgucuccucugggg

SEQ ID NO: 3954186 - RNA, 14 nt, Human herpesvirus 1
cgccuugcggcagc

SEQ ID NO: 3954187 - RNA, 17 nt, Human herpesvirus 1
cgcgaccaccccgagaa

SEQ ID NO: 3954188 - RNA, 14 nt, Human herpesvirus 1
cgcgacccuccggg

SEQ ID NO: 3954189 - RNA, 17 nt, Human herpesvirus 1
cgcgaccucaccaccaa

SEQ ID NO: 3954190 - RNA, 14 nt, Human herpesvirus 1
cgcgaucccccgcc

SEQ ID NO: 3954191 - RNA, 19 nt, Human herpesvirus 1
cgcgaucguccaccuccgg

SEQ ID NO: 3954192 - RNA, 15 nt, Human herpesvirus 1
cgcgauguggauaaa

SEQ ID NO: 3954193 - RNA, 13 nt, Human herpesvirus 1
cgcgcauggcagc

SEQ ID NO: 3954194 - RNA, 22 nt, Human herpesvirus 1
cgcgcccacuacaccagccaau

SEQ ID NO: 3954195 - RNA, 20 nt, Human herpesvirus 1
cgcgccgcgggcccccggcc

SEQ ID NO: 3954196 - RNA, 14 nt, Human herpesvirus 1
cgcgccgcugcccg

SEQ ID NO: 3954197 - RNA, 16 nt, Human herpesvirus 1
cgcgccguuggccccc

SEQ ID NO: 3954198 - RNA, 13 nt, Human herpesvirus 1
cgcgccucccggg

SEQ ID NO: 3954199 - RNA, 13 nt, Human herpesvirus 1
cgcgcgaccucac

SEQ ID NO: 3954200 - RNA, 20 nt, Human herpesvirus 1
cgcgcgauagagucgacgac

SEQ ID NO: 3954201 - RNA, 23 nt, Human herpesvirus 1
cgcgcgaugcgaucgagccgugc

SEQ ID NO: 3954202 - RNA, 21 nt, Human herpesvirus 1
cgcgcggacggcgcggggccc

SEQ ID NO: 3954203 - RNA, 17 nt, Human herpesvirus 1
cgcgcggaugacggccc

SEQ ID NO: 3954204 - RNA, 19 nt, Human herpesvirus 1
cgcgcggcgcgagcucccu

SEQ ID NO: 3954205 - RNA, 17 nt, Human herpesvirus 1
cgcgcguccuucuuguc

SEQ ID NO: 3954206 - RNA, 20 nt, Human herpesvirus 1
cgcgcgucucuggggagccu

SEQ ID NO: 3954207 - RNA, 18 nt, Human herpesvirus 1
cgcgcuaugacggcaaua

SEQ ID NO: 3954208 - RNA, 19 nt, Human herpesvirus 1
cgcggacggcgcggggccc

SEQ ID NO: 3954209 - RNA, 15 nt, Human herpesvirus 1
cgcggaucugcuccg

SEQ ID NO: 3954210 - RNA, 17 nt, Human herpesvirus 1
cgcggcauaacuccgac

SEQ ID NO: 3954211 - RNA, 14 nt, Human herpesvirus 1
cgcggcccggggcc

SEQ ID NO: 3954212 - RNA, 11 nt, Human herpesvirus 1
cgcggcgcgcu

SEQ ID NO: 3954213 - RNA, 17 nt, Human herpesvirus 1
cgcggcguccgcgcccc

SEQ ID NO: 3954214 - RNA, 13 nt, Human herpesvirus 1
cgcggcucccggc

SEQ ID NO: 3954215 - RNA, 14 nt, Human herpesvirus 1
cgcggcugguccac

SEQ ID NO: 3954216 - RNA, 18 nt, Human herpesvirus 1
cgcgggcccccggccgcc

SEQ ID NO: 3954217 - RNA, 19 nt, Human herpesvirus 1
cgcgggcgacgccccggcc

SEQ ID NO: 3954218 - RNA, 19 nt, Human herpesvirus 1
cgcgggcucgucuuggcca

SEQ ID NO: 3954219 - RNA, 13 nt, Human herpesvirus 1
cgcggggccuccg

SEQ ID NO: 3954220 - RNA, 12 nt, Human herpesvirus 1
cgcgggggcgcc

SEQ ID NO: 3954221 - RNA, 19 nt, Human herpesvirus 1
cgcgggguuacgcgggccc

SEQ ID NO: 3954222 - RNA, 23 nt, Human herpesvirus 1
cgcgggucuguauagcccgggca

SEQ ID NO: 3954223 - RNA, 16 nt, Human herpesvirus 1
cgcggguugcugcgcg

SEQ ID NO: 3954224 - RNA, 13 nt, Human herpesvirus 1
cgcgguucgcguc

SEQ ID NO: 3954225 - RNA, 21 nt, Human herpesvirus 1
cgcgguuuaccgccaccagca

SEQ ID NO: 3954226 - RNA, 15 nt, Human herpesvirus 1
cgucccggcucuccg

SEQ ID NO: 3954227 - RNA, 22 nt, Human herpesvirus 1
cgucccguagucccaucccccg

SEQ ID NO: 3954228 - RNA, 17 nt, Human herpesvirus 1
cguccgaacccaggccu

SEQ ID NO: 3954229 - RNA, 15 nt, Human herpesvirus 1
cguccggggagggcg

SEQ ID NO: 3954230 - RNA, 21 nt, Human herpesvirus 1
cguccgguuggccgcgcggca

SEQ ID NO: 3954231 - RNA, 12 nt, Human herpesvirus 1
cgucgauccagg

SEQ ID NO: 3954232 - RNA, 14 nt, Human herpesvirus 1
cgucgcgggacccg

SEQ ID NO: 3954233 - RNA, 16 nt, Human herpesvirus 1
cgucgcugugaugaag

SEQ ID NO: 3954234 - RNA, 23 nt, Human herpesvirus 1
cgucucccgggggcgcuuggccg

SEQ ID NO: 3954235 - RNA, 15 nt, Human herpesvirus 1
cgucuccuccaccac

SEQ ID NO: 3954236 - RNA, 14 nt, Human herpesvirus 1
cgucucucuucccc

SEQ ID NO: 3954237 - RNA, 22 nt, Human herpesvirus 1
cgucugggcccgacagaccucc

SEQ ID NO: 3954238 - RNA, 23 nt, Human herpesvirus 1
cgugacuaagcgucccugggccc

SEQ ID NO: 3954239 - RNA, 18 nt, Human herpesvirus 1
cgugcgggaacaccuccg

SEQ ID NO: 3954240 - RNA, 15 nt, Human herpesvirus 1
cgugcgugccggucg

SEQ ID NO: 3954241 - RNA, 21 nt, Human herpesvirus 1
cgugcugcgccuugggcccgg

SEQ ID NO: 3954242 - RNA, 17 nt, Human herpesvirus 1
cguggaccugggggacu

SEQ ID NO: 3954243 - RNA, 15 nt, Human herpesvirus 1
cguggacgggcucgc

SEQ ID NO: 3954244 - RNA, 19 nt, Human herpesvirus 1
cguggacgggcucgccagc

SEQ ID NO: 3954245 - RNA, 20 nt, Human herpesvirus 1
cguggauaucgaguccgaag

SEQ ID NO: 3954246 - RNA, 19 nt, Human herpesvirus 1
cguggccgacaacugccug

SEQ ID NO: 3954247 - RNA, 18 nt, Human herpesvirus 1
cguggccgguaccaucaa

SEQ ID NO: 3954248 - RNA, 19 nt, Human herpesvirus 1
cguggcgucucgccggacg

SEQ ID NO: 3954249 - RNA, 22 nt, Human herpesvirus 1
cgugggcgccuugcggcagcgc

SEQ ID NO: 3954250 - RNA, 16 nt, Human herpesvirus 1
cguggugcgucgggcc

SEQ ID NO: 3954251 - RNA, 23 nt, Human herpesvirus 1
cguguacaacaucauccagcugg

SEQ ID NO: 3954252 - RNA, 19 nt, Human herpesvirus 1
cguguuggagcgcgccugc

SEQ ID NO: 3954253 - RNA, 14 nt, Human herpesvirus 1
cguguuugcccaua

SEQ ID NO: 3954254 - RNA, 18 nt, Human herpesvirus 1
cguguuugcccauaauaa

SEQ ID NO: 3954255 - RNA, 21 nt, Human herpesvirus 1
cguuacuaucaccgucccccc

SEQ ID NO: 3954256 - RNA, 18 nt, Human herpesvirus 1
cguuccucacugccuccc

SEQ ID NO: 3954257 - RNA, 16 nt, Human herpesvirus 1
cguucgcgcgccaucu

SEQ ID NO: 3954258 - RNA, 18 nt, Human herpesvirus 1
cguugcagggccuggugc

SEQ ID NO: 3954259 - RNA, 23 nt, Human herpesvirus 1
cguugggguggaucuuagccucc

SEQ ID NO: 3954260 - RNA, 16 nt, Human herpesvirus 1
cguuucccacccccac

SEQ ID NO: 3954261 - RNA, 20 nt, Human herpesvirus 1
cuaagacccaccccccgucc

SEQ ID NO: 3954262 - RNA, 14 nt, Human herpesvirus 1
cuaagcgucccugg

SEQ ID NO: 3954263 - RNA, 20 nt, Human herpesvirus 1
cuaagcgucccugggcccug

SEQ ID NO: 3954264 - RNA, 13 nt, Human herpesvirus 1
cuaagugcccagg

SEQ ID NO: 3954265 - RNA, 15 nt, Human herpesvirus 1
cuacaccagccaauc

SEQ ID NO: 3954266 - RNA, 18 nt, Human herpesvirus 1
cuacacccuuguguguca

SEQ ID NO: 3954267 - RNA, 16 nt, Human herpesvirus 1
cuacaccucccagugu

SEQ ID NO: 3954268 - RNA, 23 nt, Human herpesvirus 1
cuacaggggccauguugggccgc

SEQ ID NO: 3954269 - RNA, 17 nt, Human herpesvirus 1
cuacccguguuugccca

SEQ ID NO: 3954270 - RNA, 12 nt, Human herpesvirus 1
cuacgugccccc

SEQ ID NO: 3954271 - RNA, 13 nt, Human herpesvirus 1
cuagagacagccg

SEQ ID NO: 3954272 - RNA, 17 nt, Human herpesvirus 1
cuagauacccccccuua

SEQ ID NO: 3954273 - RNA, 19 nt, Human herpesvirus 1
cuagccgaggcccgggaga

SEQ ID NO: 3954274 - RNA, 12 nt, Human herpesvirus 1
cuagcucgcgga

SEQ ID NO: 3954275 - RNA, 19 nt, Human herpesvirus 1
cuaucacacccgccccucc

SEQ ID NO: 3954276 - RNA, 20 nt, Human herpesvirus 1
cuaucacggcaaggagcgcc

SEQ ID NO: 3954277 - RNA, 21 nt, Human herpesvirus 1
cuaucccgcccaccgcugggc

SEQ ID NO: 3954278 - RNA, 16 nt, Human herpesvirus 1
cuauuuucccccccgg

SEQ ID NO: 3954279 - RNA, 13 nt, Human herpesvirus 1
cucaacaucacca

SEQ ID NO: 3954280 - RNA, 13 nt, Human herpesvirus 1
cucaaucuggccc

SEQ ID NO: 3954281 - RNA, 20 nt, Human herpesvirus 1
cucaccaccaaggcccgggc

SEQ ID NO: 3954282 - RNA, 23 nt, Human herpesvirus 1
cucaccggguacggcgucugggc

SEQ ID NO: 3954283 - RNA, 22 nt, Human herpesvirus 1
cucacgcgcauccgcaagcuau

SEQ ID NO: 3954284 - RNA, 16 nt, Human herpesvirus 1
cucacuaucgagggcg

SEQ ID NO: 3954285 - RNA, 19 nt, Human herpesvirus 1
cucagggccuccgacccca

SEQ ID NO: 3954286 - RNA, 22 nt, Human herpesvirus 1
cucagggccuccgaccccagac

SEQ ID NO: 3954287 - RNA, 22 nt, Human herpesvirus 1
cuccacccccucgaccaccacc

SEQ ID NO: 3954288 - RNA, 23 nt, Human herpesvirus 1
cucccaccagcugagccgcgccg

SEQ ID NO: 3954289 - RNA, 18 nt, Human herpesvirus 1
cucccagagaccccaggg

SEQ ID NO: 3954290 - RNA, 22 nt, Human herpesvirus 1
cuccccaagcaucgaccacgcc

SEQ ID NO: 3954291 - RNA, 14 nt, Human herpesvirus 1
cuccccccgcguca

SEQ ID NO: 3954292 - RNA, 17 nt, Human herpesvirus 1
cuccccgauggcccucc

SEQ ID NO: 3954293 - RNA, 23 nt, Human herpesvirus 1
cuccccgggagccccggacccca

SEQ ID NO: 3954294 - RNA, 15 nt, Human herpesvirus 1
cuccccuucccuccc

SEQ ID NO: 3954295 - RNA, 15 nt, Human herpesvirus 1
cucccgacaccacca

SEQ ID NO: 3954296 - RNA, 13 nt, Human herpesvirus 1
cucccgccacccg

SEQ ID NO: 3954297 - RNA, 21 nt, Human herpesvirus 1
cucccgcugcgcauccccccg

SEQ ID NO: 3954298 - RNA, 14 nt, Human herpesvirus 1
cucccggaagagcc

SEQ ID NO: 3954299 - RNA, 16 nt, Human herpesvirus 1
cucccggcccgggccc

SEQ ID NO: 3954300 - RNA, 14 nt, Human herpesvirus 1
cucccugcggcugg

SEQ ID NO: 3954301 - RNA, 15 nt, Human herpesvirus 1
cuccgacgacgcgca

SEQ ID NO: 3954302 - RNA, 14 nt, Human herpesvirus 1
cuccgacgcccagc

SEQ ID NO: 3954303 - RNA, 18 nt, Human herpesvirus 1
cuccgaguucccccggca

SEQ ID NO: 3954304 - RNA, 17 nt, Human herpesvirus 1
cuccgcccgugcugccg

SEQ ID NO: 3954305 - RNA, 20 nt, Human herpesvirus 1
cuccgcuggggcccccaggg

SEQ ID NO: 3954306 - RNA, 14 nt, Human herpesvirus 1
cuccggcgccgccc

SEQ ID NO: 3954307 - RNA, 15 nt, Human herpesvirus 1
cuccggcgccgcccg

SEQ ID NO: 3954308 - RNA, 20 nt, Human herpesvirus 1
cuccggggcccggcccugcu

SEQ ID NO: 3954309 - RNA, 21 nt, Human herpesvirus 1
cuccggggguccggcgcgugu

SEQ ID NO: 3954310 - RNA, 19 nt, Human herpesvirus 1
cuccugauguggcugcucc

SEQ ID NO: 3954311 - RNA, 22 nt, Human herpesvirus 1
cuccugauguggcugcuccgcu

SEQ ID NO: 3954312 - RNA, 14 nt, Human herpesvirus 1
cuccuggccaggau

SEQ ID NO: 3954313 - RNA, 20 nt, Human herpesvirus 1
cuccuggccuacgucuccgu

SEQ ID NO: 3954314 - RNA, 17 nt, Human herpesvirus 1
cuccugggucagcuccu

SEQ ID NO: 3954315 - RNA, 14 nt, Human herpesvirus 1
cucgaccaccaccu

SEQ ID NO: 3954316 - RNA, 13 nt, Human herpesvirus 1
cucgaucggccac

SEQ ID NO: 3954317 - RNA, 18 nt, Human herpesvirus 1
cucgcaugaagcccccaa

SEQ ID NO: 3954318 - RNA, 15 nt, Human herpesvirus 1
cucgccccacgaccc

SEQ ID NO: 3954319 - RNA, 20 nt, Human herpesvirus 1
cucgccgcccuagaggcugg

SEQ ID NO: 3954320 - RNA, 14 nt, Human herpesvirus 1
cucgcgccacacuc

SEQ ID NO: 3954321 - RNA, 20 nt, Human herpesvirus 1
cucgcgggccucgugggcac

SEQ ID NO: 3954322 - RNA, 23 nt, Human herpesvirus 1
cucggggccgcaggacccagcaa

SEQ ID NO: 3954323 - RNA, 18 nt, Human herpesvirus 1
cucguccccuggggcggc

SEQ ID NO: 3954324 - RNA, 15 nt, Human herpesvirus 1
cucguccggcgcgcg

SEQ ID NO: 3954325 - RNA, 15 nt, Human herpesvirus 1
cucgucgccuggcug

SEQ ID NO: 3954326 - RNA, 16 nt, Human herpesvirus 1
cucgucgggguggcac

SEQ ID NO: 3954327 - RNA, 13 nt, Human herpesvirus 1
cucgucuccucuu

SEQ ID NO: 3954328 - RNA, 16 nt, Human herpesvirus 1
cucgugcccucgcggg

SEQ ID NO: 3954329 - RNA, 16 nt, Human herpesvirus 1
cucguggcgucucgcc

SEQ ID NO: 3954330 - RNA, 14 nt, Human herpesvirus 1
cucgugggccucug

SEQ ID NO: 3954331 - RNA, 22 nt, Human herpesvirus 1
cucguucuccggggcccggccc

SEQ ID NO: 3954332 - RNA, 17 nt, Human herpesvirus 1
cucuacugcagaugcag

SEQ ID NO: 3954333 - RNA, 23 nt, Human herpesvirus 1
cucuccccccaggccuaccagca

SEQ ID NO: 3954334 - RNA, 14 nt, Human herpesvirus 1
cucuccccugcugc

SEQ ID NO: 3954335 - RNA, 18 nt, Human herpesvirus 1
cucuccgggaugggcuac

SEQ ID NO: 3954336 - RNA, 23 nt, Human herpesvirus 1
cucucgcaccaucccggguuaau

SEQ ID NO: 3954337 - RNA, 19 nt, Human herpesvirus 1
cucucggugaucuuggcgu

SEQ ID NO: 3954338 - RNA, 18 nt, Human herpesvirus 1
cucuggccaucggucccc

SEQ ID NO: 3954339 - RNA, 20 nt, Human herpesvirus 1
cucugggggccugucccauc

SEQ ID NO: 3954340 - RNA, 17 nt, Human herpesvirus 1
gacccuaugguacacac

SEQ ID NO: 3954341 - RNA, 18 nt, Human herpesvirus 1
gaccgcaacuucccaccc

SEQ ID NO: 3954342 - RNA, 15 nt, Human herpesvirus 1
gaccgcgcccucgcc

SEQ ID NO: 3954343 - RNA, 22 nt, Human herpesvirus 1
gaccggcaccaccgacucuccc

SEQ ID NO: 3954344 - RNA, 20 nt, Human herpesvirus 1
gaccggcgggucccgaccga

SEQ ID NO: 3954345 - RNA, 15 nt, Human herpesvirus 1
gaccggggucccagc

SEQ ID NO: 3954346 - RNA, 20 nt, Human herpesvirus 1
gaccgggucccuccuuagca

SEQ ID NO: 3954347 - RNA, 14 nt, Human herpesvirus 1
gaccgucugcaaga

SEQ ID NO: 3954348 - RNA, 18 nt, Human herpesvirus 1
gaccucggcgccucugga

SEQ ID NO: 3954349 - RNA, 16 nt, Human herpesvirus 1
gaccugcaccgaucgc

SEQ ID NO: 3954350 - RNA, 17 nt, Human herpesvirus 1
gaccuguugauggccug

SEQ ID NO: 3954351 - RNA, 16 nt, Human herpesvirus 1
gacgacacgcucgccg

SEQ ID NO: 3954352 - RNA, 19 nt, Human herpesvirus 1
gacgagaugcugcgcuccg

SEQ ID NO: 3954353 - RNA, 12 nt, Human herpesvirus 1
gacgccccccgu

SEQ ID NO: 3954354 - RNA, 16 nt, Human herpesvirus 1
gacgccguggcgcccc

SEQ ID NO: 3954355 - RNA, 14 nt, Human herpesvirus 1
gacgccgugggcaa

SEQ ID NO: 3954356 - RNA, 21 nt, Human herpesvirus 1
gacgccuuaccaucccccggc

SEQ ID NO: 3954357 - RNA, 14 nt, Human herpesvirus 1
gacgcgcagccggc

SEQ ID NO: 3954358 - RNA, 23 nt, Human herpesvirus 1
gacgcguggcggccccugaugga

SEQ ID NO: 3954359 - RNA, 15 nt, Human herpesvirus 1
gacggugagcgagga

SEQ ID NO: 3954360 - RNA, 18 nt, Human herpesvirus 1
gacucucccccaccgccc

SEQ ID NO: 3954361 - RNA, 22 nt, Human herpesvirus 1
gacuggccaaucggcggccgcc

SEQ ID NO: 3954362 - RNA, 19 nt, Human herpesvirus 1
gacuuuuggaugucgcccg

SEQ ID NO: 3954363 - RNA, 13 nt, Human herpesvirus 1
gagacaauaccgg

SEQ ID NO: 3954364 - RNA, 17 nt, Human herpesvirus 1
gagacccccaacgccac

SEQ ID NO: 3954365 - RNA, 22 nt, Human herpesvirus 1
gagaucuauaaggccauccagc

SEQ ID NO: 3954366 - RNA, 22 nt, Human herpesvirus 1
gagcaaccccaugaaggcccug

SEQ ID NO: 3954367 - RNA, 12 nt, Human herpesvirus 1
gagcaccccccc

SEQ ID NO: 3954368 - RNA, 18 nt, Human herpesvirus 1
gagccaacgcccugacca

SEQ ID NO: 3954369 - RNA, 21 nt, Human herpesvirus 1
gagccaguggucggcgagcug

SEQ ID NO: 3954370 - RNA, 23 nt, Human herpesvirus 1
gagccccccgcugcggccacaca

SEQ ID NO: 3954371 - RNA, 16 nt, Human herpesvirus 1
gagccgugcaccgugg

SEQ ID NO: 3954372 - RNA, 15 nt, Human herpesvirus 1
gagcgaaggcugccg

SEQ ID NO: 3954373 - RNA, 13 nt, Human herpesvirus 1
gagcucccagaga

SEQ ID NO: 3954374 - RNA, 18 nt, Human herpesvirus 1
gagcugcagaaucacgag

SEQ ID NO: 3954375 - RNA, 17 nt, Human herpesvirus 1
gagcugcccggcggcca

SEQ ID NO: 3954376 - RNA, 18 nt, Human herpesvirus 1
gagcuguacgugcgggaa

SEQ ID NO: 3954377 - RNA, 22 nt, Human herpesvirus 1
gagcuucgcuuugugggggacc

SEQ ID NO: 3954378 - RNA, 19 nt, Human herpesvirus 1
gaggaccgcgcccccgucc

SEQ ID NO: 3954379 - RNA, 22 nt, Human herpesvirus 1
gaggacggcgccggggcucucg

SEQ ID NO: 3954380 - RNA, 12 nt, Human herpesvirus 1
gaggauuacuuu

SEQ ID NO: 3954381 - RNA, 21 nt, Human herpesvirus 1
gaggccacguguagccuggau

SEQ ID NO: 3954382 - RNA, 13 nt, Human herpesvirus 1
gagggcggccagc

SEQ ID NO: 3954383 - RNA, 18 nt, Human herpesvirus 1
gagggcguaacguuccgc

SEQ ID NO: 3954384 - RNA, 13 nt, Human herpesvirus 1
gaggggggagggg

SEQ ID NO: 3954385 - RNA, 11 nt, Human herpesvirus 1
gaggggggcaa

SEQ ID NO: 3954386 - RNA, 18 nt, Human herpesvirus 1
gaggguuggggggguccg

SEQ ID NO: 3954387 - RNA, 18 nt, Human herpesvirus 1
gaggucaaaugccgggcc

SEQ ID NO: 3954388 - RNA, 18 nt, Human herpesvirus 1
gagucgacgaccugggga

SEQ ID NO: 3954389 - RNA, 20 nt, Human herpesvirus 1
gagucuggaaggggggaaag

SEQ ID NO: 3954390 - RNA, 19 nt, Human herpesvirus 1
gagugucgcagcaccuccu

SEQ ID NO: 3954391 - RNA, 22 nt, Human herpesvirus 1
gaguugccccaccguugcccgg

SEQ ID NO: 3954392 - RNA, 20 nt, Human herpesvirus 1
gaguuuguggacccaaagcc

SEQ ID NO: 3954393 - RNA, 13 nt, Human herpesvirus 1
gauaaaaagccag

SEQ ID NO: 3954394 - RNA, 20 nt, Human herpesvirus 1
gauaacaaccacccgcaccc

SEQ ID NO: 3954395 - RNA, 13 nt, Human herpesvirus 1
gauacccccccuu

SEQ ID NO: 3954396 - RNA, 21 nt, Human herpesvirus 1
gaucaugguacggggccggga

SEQ ID NO: 3954397 - RNA, 20 nt, Human herpesvirus 1
gauccaaaaccacaaccucc

SEQ ID NO: 3954398 - RNA, 18 nt, Human herpesvirus 1
gaucccacguccccgggu

SEQ ID NO: 3954399 - RNA, 12 nt, Human herpesvirus 1
gaucccccgccc

SEQ ID NO: 3954400 - RNA, 15 nt, Human herpesvirus 1
gaucccucgcgaggg

SEQ ID NO: 3954401 - RNA, 15 nt, Human herpesvirus 1
gauccgcggcgacaa

SEQ ID NO: 3954402 - RNA, 23 nt, Human herpesvirus 1
gauccgcggcgacaacgcgggcg

SEQ ID NO: 3954403 - RNA, 17 nt, Human herpesvirus 1
gauccucgggcuacugg

SEQ ID NO: 3954404 - RNA, 16 nt, Human herpesvirus 1
gaucgcgcucgucacc

SEQ ID NO: 3954405 - RNA, 16 nt, Human herpesvirus 1
gaucgcguaccagccc

SEQ ID NO: 3954406 - RNA, 15 nt, Human herpesvirus 1
gaugcacgcccccgc

SEQ ID NO: 3954407 - RNA, 19 nt, Human herpesvirus 1
gaugccgugccgcccguug

SEQ ID NO: 3954408 - RNA, 13 nt, Human herpesvirus 1
gaugccugugggu

SEQ ID NO: 3954409 - RNA, 17 nt, Human herpesvirus 1
gaugcgaucgagccgug

SEQ ID NO: 3954410 - RNA, 15 nt, Human herpesvirus 1
gcaacgcgcuggggc

SEQ ID NO: 3954411 - RNA, 19 nt, Human herpesvirus 1
gcaacgcgcuggggcugcc

SEQ ID NO: 3954412 - RNA, 21 nt, Human herpesvirus 1
gcaacggcgggagcuggguua

SEQ ID NO: 3954413 - RNA, 14 nt, Human herpesvirus 1
gcaacggggcgccg

SEQ ID NO: 3954414 - RNA, 14 nt, Human herpesvirus 1
gcaagaacaauaaa

SEQ ID NO: 3954415 - RNA, 20 nt, Human herpesvirus 1
gcaagaggucgucgggggac

SEQ ID NO: 3954416 - RNA, 12 nt, Human herpesvirus 1
gcaagcugaacc

SEQ ID NO: 3954417 - RNA, 23 nt, Human herpesvirus 1
gcaaugcggagggcacccaacaa

SEQ ID NO: 3954418 - RNA, 17 nt, Human herpesvirus 1
gcaauuugcacccagcc

SEQ ID NO: 3954419 - RNA, 23 nt, Human herpesvirus 1
gcacaacacaaacaucuggaggc

SEQ ID NO: 3954420 - RNA, 17 nt, Human herpesvirus 1
gcacaacgccagccugc

SEQ ID NO: 3954421 - RNA, 15 nt, Human herpesvirus 1
gcacacacccuagcg

SEQ ID NO: 3954422 - RNA, 14 nt, Human herpesvirus 1
gcacaccggucccc

SEQ ID NO: 3954423 - RNA, 21 nt, Human herpesvirus 1
gcaccacggguauaaggacau

SEQ ID NO: 3954424 - RNA, 17 nt, Human herpesvirus 1
gcaccagcgcggaggag

SEQ ID NO: 3954425 - RNA, 15 nt, Human herpesvirus 1
gcaccaucccggguu

SEQ ID NO: 3954426 - RNA, 17 nt, Human herpesvirus 1
gcacccccugaccccgc

SEQ ID NO: 3954427 - RNA, 16 nt, Human herpesvirus 1
gcacgagcaggcgguc

SEQ ID NO: 3954428 - RNA, 16 nt, Human herpesvirus 1
gcacgaucgagguggc

SEQ ID NO: 3954429 - RNA, 16 nt, Human herpesvirus 1
gcacgcauacgggcgg

SEQ ID NO: 3954430 - RNA, 21 nt, Human herpesvirus 1
gcacgcgcgauagagucgacg

SEQ ID NO: 3954431 - RNA, 16 nt, Human herpesvirus 1
gcacgggcccaaggcc

SEQ ID NO: 3954432 - RNA, 14 nt, Human herpesvirus 1
gcacuguggcucuc

SEQ ID NO: 3954433 - RNA, 22 nt, Human herpesvirus 1
gcacuugcggcaagacccgggc

SEQ ID NO: 3954434 - RNA, 17 nt, Human herpesvirus 1
gcagacgcugcuccgcc

SEQ ID NO: 3954435 - RNA, 13 nt, Human herpesvirus 1
gcagcaaauuaaa

SEQ ID NO: 3954436 - RNA, 17 nt, Human herpesvirus 1
gcagcaugggacccaca

SEQ ID NO: 3954437 - RNA, 21 nt, Human herpesvirus 1
gcagccagaacucgccccgga

SEQ ID NO: 3954438 - RNA, 21 nt, Human herpesvirus 1
gcagcgccggacgcgcggcgc

SEQ ID NO: 3954439 - RNA, 21 nt, Human herpesvirus 1
gcaggcgccuccggggguccg

SEQ ID NO: 3954440 - RNA, 21 nt, Human herpesvirus 1
gcagggccgcggggggggcgg

SEQ ID NO: 3954441 - RNA, 14 nt, Human herpesvirus 1
gcagggggaugggg

SEQ ID NO: 3954442 - RNA, 14 nt, Human herpesvirus 1
gcaggugugguucg

SEQ ID NO: 3954443 - RNA, 20 nt, Human herpesvirus 1
gcaguacuggaaguaccugc

SEQ ID NO: 3954444 - RNA, 18 nt, Human herpesvirus 1
gcaguccacgggggggag

SEQ ID NO: 3954445 - RNA, 20 nt, Human herpesvirus 1
gcagucuccuggcagcccug

SEQ ID NO: 3954446 - RNA, 23 nt, Human herpesvirus 1
gcaucaaggcuugguucggggcc

SEQ ID NO: 3954447 - RNA, 14 nt, Human herpesvirus 1
gcauccacccuccg

SEQ ID NO: 3954448 - RNA, 15 nt, Human herpesvirus 1
gcauccacccuccgc

SEQ ID NO: 3954449 - RNA, 16 nt, Human herpesvirus 1
gcaucccaggaucaca

SEQ ID NO: 3954450 - RNA, 15 nt, Human herpesvirus 1
gcaucggaacacgcc

SEQ ID NO: 3954451 - RNA, 21 nt, Human herpesvirus 1
gcaucggcaaggacgcccgcg

SEQ ID NO: 3954452 - RNA, 17 nt, Human herpesvirus 1
gcaugaagcccccaaca

SEQ ID NO: 3954453 - RNA, 19 nt, Human herpesvirus 1
gcaugaagcccccaacaug

SEQ ID NO: 3954454 - RNA, 16 nt, Human herpesvirus 1
gcaugcgcgggcucgu

SEQ ID NO: 3954455 - RNA, 13 nt, Human herpesvirus 1
cccguggacccca

SEQ ID NO: 3954456 - RNA, 12 nt, Human herpesvirus 1
cccguggcucuc

SEQ ID NO: 3954457 - RNA, 15 nt, Human herpesvirus 1
cccgugugccgcgcc

SEQ ID NO: 3954458 - RNA, 17 nt, Human herpesvirus 1
cccuccgcaucccagga

SEQ ID NO: 3954459 - RNA, 20 nt, Human herpesvirus 1
cccucgaccaccauccccgc

SEQ ID NO: 3954460 - RNA, 17 nt, Human herpesvirus 1
cccucucuucucucccg

SEQ ID NO: 3954461 - RNA, 18 nt, Human herpesvirus 1
cccucuggacgcccgggc

SEQ ID NO: 3954462 - RNA, 19 nt, Human herpesvirus 1
cccucugggcccgccugga

SEQ ID NO: 3954463 - RNA, 20 nt, Human herpesvirus 1
cccugagcgcccuccugacc

SEQ ID NO: 3954464 - RNA, 15 nt, Human herpesvirus 1
cccugaucccccgcg

SEQ ID NO: 3954465 - RNA, 20 nt, Human herpesvirus 1
cccugcuccggcggggccuc

SEQ ID NO: 3954466 - RNA, 23 nt, Human herpesvirus 1
cccuuaauaaauuuuacaaacag

SEQ ID NO: 3954467 - RNA, 15 nt, Human herpesvirus 1
cccuuccccacggga

SEQ ID NO: 3954468 - RNA, 17 nt, Human herpesvirus 1
ccgaacaaacgacccac

SEQ ID NO: 3954469 - RNA, 20 nt, Human herpesvirus 1
ccgaacgcagccccgcugga

SEQ ID NO: 3954470 - RNA, 13 nt, Human herpesvirus 1
ccgaagaggugcu

SEQ ID NO: 3954471 - RNA, 20 nt, Human herpesvirus 1
ccgacagcacucacagcccc

SEQ ID NO: 3954472 - RNA, 17 nt, Human herpesvirus 1
ccgaccauccgccggca

SEQ ID NO: 3954473 - RNA, 16 nt, Human herpesvirus 1
ccgacccggcccgagg

SEQ ID NO: 3954474 - RNA, 13 nt, Human herpesvirus 1
ccgacccuccggg

SEQ ID NO: 3954475 - RNA, 14 nt, Human herpesvirus 1
ccgaccgcaguccc

SEQ ID NO: 3954476 - RNA, 17 nt, Human herpesvirus 1
ccgaccucggacgccac

SEQ ID NO: 3954477 - RNA, 13 nt, Human herpesvirus 1
ccgacgccagcuu

SEQ ID NO: 3954478 - RNA, 15 nt, Human herpesvirus 1
ccgacucaccucaaa

SEQ ID NO: 3954479 - RNA, 16 nt, Human herpesvirus 1
ccgacucucccaccgc

SEQ ID NO: 3954480 - RNA, 19 nt, Human herpesvirus 1
ccgagacccccaacgccac

SEQ ID NO: 3954481 - RNA, 12 nt, Human herpesvirus 1
ccgagccaaggg

SEQ ID NO: 3954482 - RNA, 15 nt, Human herpesvirus 1
ccgagcuaugggccu

SEQ ID NO: 3954483 - RNA, 20 nt, Human herpesvirus 1
ccgagcuuguuuucgugggg

SEQ ID NO: 3954484 - RNA, 14 nt, Human herpesvirus 1
ccgaguucccccgg

SEQ ID NO: 3954485 - RNA, 13 nt, Human herpesvirus 1
ccgcaaaucccac

SEQ ID NO: 3954486 - RNA, 18 nt, Human herpesvirus 1
ccgcaacgcgcuggggcu

SEQ ID NO: 3954487 - RNA, 21 nt, Human herpesvirus 1
ccgcaagcccccaaaccccac

SEQ ID NO: 3954488 - RNA, 15 nt, Human herpesvirus 1
ccgcaauuugcaccc

SEQ ID NO: 3954489 - RNA, 22 nt, Human herpesvirus 1
ccgcagcaccucuaccagcagg

SEQ ID NO: 3954490 - RNA, 12 nt, Human herpesvirus 1
ccgcagucccug

SEQ ID NO: 3954491 - RNA, 20 nt, Human herpesvirus 1
ccgcaucccccgucuggguu

SEQ ID NO: 3954492 - RNA, 22 nt, Human herpesvirus 1
ccgccaacgcacuguggcucuc

SEQ ID NO: 3954493 - RNA, 13 nt, Human herpesvirus 1
ccgcccacuuccc

SEQ ID NO: 3954494 - RNA, 18 nt, Human herpesvirus 1
ccgcccggggccagcgcc

SEQ ID NO: 3954495 - RNA, 19 nt, Human herpesvirus 1
ccgccgagucuucggggcc

SEQ ID NO: 3954496 - RNA, 15 nt, Human herpesvirus 1
ccgccgcgccccgcc

SEQ ID NO: 3954497 - RNA, 21 nt, Human herpesvirus 1
ccgccgcggaucgggccuugg

SEQ ID NO: 3954498 - RNA, 13 nt, Human herpesvirus 1
ccgccggcgaggu

SEQ ID NO: 3954499 - RNA, 14 nt, Human herpesvirus 1
ccgccguccgaacc

SEQ ID NO: 3954500 - RNA, 16 nt, Human herpesvirus 1
ccgccguugagccccu

SEQ ID NO: 3954501 - RNA, 14 nt, Human herpesvirus 1
ccgccucggagccg

SEQ ID NO: 3954502 - RNA, 23 nt, Human herpesvirus 1
ccgccucguuugccgccaucgcc

SEQ ID NO: 3954503 - RNA, 21 nt, Human herpesvirus 1
ccgccugucgcacccacagcu

SEQ ID NO: 3954504 - RNA, 18 nt, Human herpesvirus 1
ccgcgaagacccccccgg

SEQ ID NO: 3954505 - RNA, 17 nt, Human herpesvirus 1
ccgcgacccccgggcua

SEQ ID NO: 3954506 - RNA, 15 nt, Human herpesvirus 1
ccgcgagcucccaga

SEQ ID NO: 3954507 - RNA, 14 nt, Human herpesvirus 1
ccgcgcauccgacc

SEQ ID NO: 3954508 - RNA, 13 nt, Human herpesvirus 1
ccgcgccccccga

SEQ ID NO: 3954509 - RNA, 22 nt, Human herpesvirus 1
ccgcgccgacaucaccaccguc

SEQ ID NO: 3954510 - RNA, 13 nt, Human herpesvirus 1
ccgcgcgccccga

SEQ ID NO: 3954511 - RNA, 21 nt, Human herpesvirus 1
ccgcgcggacggcgcggggcc

SEQ ID NO: 3954512 - RNA, 13 nt, Human herpesvirus 1
ccgcgcggcugcc

SEQ ID NO: 3954513 - RNA, 21 nt, Human herpesvirus 1
ccgcggcuucaucgcgccccu

SEQ ID NO: 3954514 - RNA, 19 nt, Human herpesvirus 1
ccgcguccaaacccaccga

SEQ ID NO: 3954515 - RNA, 15 nt, Human herpesvirus 1
ccgcgucgccggcac

SEQ ID NO: 3954516 - RNA, 17 nt, Human herpesvirus 1
ccgcuguucucguuccu

SEQ ID NO: 3954517 - RNA, 19 nt, Human herpesvirus 1
ccgcuuuaucccacggccu

SEQ ID NO: 3954518 - RNA, 17 nt, Human herpesvirus 1
ccggaagcccaacccac

SEQ ID NO: 3954519 - RNA, 11 nt, Human herpesvirus 1
ccggaccccac

SEQ ID NO: 3954520 - RNA, 12 nt, Human herpesvirus 1
ccggacccccgc

SEQ ID NO: 3954521 - RNA, 15 nt, Human herpesvirus 1
ccggagccgggcgcg

SEQ ID NO: 3954522 - RNA, 19 nt, Human herpesvirus 1
ccggagcucgcggcacgcg

SEQ ID NO: 3954523 - RNA, 17 nt, Human herpesvirus 1
ccggaggaaacccccga

SEQ ID NO: 3954524 - RNA, 18 nt, Human herpesvirus 1
ccggaggcgccugccccg

SEQ ID NO: 3954525 - RNA, 18 nt, Human herpesvirus 1
ccggcaauucccgcggcc

SEQ ID NO: 3954526 - RNA, 22 nt, Human herpesvirus 1
ccggcagggggaugggggggca

SEQ ID NO: 3954527 - RNA, 14 nt, Human herpesvirus 1
ccggccuggcggcg

SEQ ID NO: 3954528 - RNA, 14 nt, Human herpesvirus 1
ccggcgccgacacg

SEQ ID NO: 3954529 - RNA, 15 nt, Human herpesvirus 1
ccggcggacccccgg

SEQ ID NO: 3954530 - RNA, 19 nt, Human herpesvirus 1
ccggcggcgacgugccccc

SEQ ID NO: 3954531 - RNA, 16 nt, Human herpesvirus 1
ccggcggggccucacg

SEQ ID NO: 3954532 - RNA, 22 nt, Human herpesvirus 1
ccggcguuucugaccugcaccg

SEQ ID NO: 3954533 - RNA, 15 nt, Human herpesvirus 1
ccggcuagacccacg

SEQ ID NO: 3954534 - RNA, 20 nt, Human herpesvirus 1
ccgggaccugaaccccagcc

SEQ ID NO: 3954535 - RNA, 22 nt, Human herpesvirus 1
ccgggacuuuuggaugucgccc

SEQ ID NO: 3954536 - RNA, 23 nt, Human herpesvirus 1
ccgggccccauaaaacccaagcc

SEQ ID NO: 3954537 - RNA, 14 nt, Human herpesvirus 1
ccgggccgcaccgg

SEQ ID NO: 3954538 - RNA, 19 nt, Human herpesvirus 1
ccgggccggagcucgcggc

SEQ ID NO: 3954539 - RNA, 21 nt, Human herpesvirus 1
ccggggagacagcgccugcgu

SEQ ID NO: 3954540 - RNA, 15 nt, Human herpesvirus 1
ccggggaucuggucc

SEQ ID NO: 3954541 - RNA, 23 nt, Human herpesvirus 1
ccggggcaggcgguugucggggg

SEQ ID NO: 3954542 - RNA, 15 nt, Human herpesvirus 1
ccggggccagcgcca

SEQ ID NO: 3954543 - RNA, 23 nt, Human herpesvirus 1
ccggggcucucggggccgcagga

SEQ ID NO: 3954544 - RNA, 20 nt, Human herpesvirus 1
ccgggggccugguggcaccu

SEQ ID NO: 3954545 - RNA, 11 nt, Human herpesvirus 1
ccgggggcgcu

SEQ ID NO: 3954546 - RNA, 17 nt, Human herpesvirus 1
ccggggucccagcggca

SEQ ID NO: 3954547 - RNA, 19 nt, Human herpesvirus 1
ccggguacggcgucugggc

SEQ ID NO: 3954548 - RNA, 19 nt, Human herpesvirus 1
ccggguccccgcggaagcg

SEQ ID NO: 3954549 - RNA, 15 nt, Human herpesvirus 1
ccgguaugguaauua

SEQ ID NO: 3954550 - RNA, 18 nt, Human herpesvirus 1
ccggucaacgaggguugg

SEQ ID NO: 3954551 - RNA, 22 nt, Human herpesvirus 1
ccggucgccccgacccccuugu

SEQ ID NO: 3954552 - RNA, 15 nt, Human herpesvirus 1
ccggucuccccggga

SEQ ID NO: 3954553 - RNA, 20 nt, Human herpesvirus 1
ccggucuccccgggagcccc

SEQ ID NO: 3954554 - RNA, 13 nt, Human herpesvirus 1
ccggugcgccccc

SEQ ID NO: 3954555 - RNA, 13 nt, Human herpesvirus 1
ccguccgaccgcc

SEQ ID NO: 3954556 - RNA, 22 nt, Human herpesvirus 1
ccguccgccggcaugcacccca

SEQ ID NO: 3954557 - RNA, 21 nt, Human herpesvirus 1
ccgucgcuagaccacgccccu

SEQ ID NO: 3954558 - RNA, 23 nt, Human herpesvirus 1
ccgucguaacggaguccuguccc

SEQ ID NO: 3954559 - RNA, 15 nt, Human herpesvirus 1
ccgucucugcuacgc

SEQ ID NO: 3954560 - RNA, 22 nt, Human herpesvirus 1
ccgugcugccgucgcuagacca

SEQ ID NO: 3954561 - RNA, 13 nt, Human herpesvirus 1
ccguguccuggag

SEQ ID NO: 3954562 - RNA, 20 nt, Human herpesvirus 1
ccguuggcccccgccucugg

SEQ ID NO: 3954563 - RNA, 23 nt, Human herpesvirus 1
ccuaccggacccguuccagcccc

SEQ ID NO: 3954564 - RNA, 20 nt, Human herpesvirus 1
ccuaucacggcaaggagcgc

SEQ ID NO: 3954565 - RNA, 14 nt, Human herpesvirus 1
ccuauguguuucag

SEQ ID NO: 3954566 - RNA, 15 nt, Human herpesvirus 1
ccucaaguacaaccc

SEQ ID NO: 3954567 - RNA, 23 nt, Human herpesvirus 1
ccucaccaccaaggcccgggcca

SEQ ID NO: 3954568 - RNA, 17 nt, Human herpesvirus 1
ccucacccacgccggca

SEQ ID NO: 3954569 - RNA, 13 nt, Human herpesvirus 1
ccucaucaccgac

SEQ ID NO: 3954570 - RNA, 14 nt, Human herpesvirus 1
ccucaucccacccc

SEQ ID NO: 3954571 - RNA, 20 nt, Human herpesvirus 1
ccuccaucgaguucgccagg

SEQ ID NO: 3954572 - RNA, 14 nt, Human herpesvirus 1
ccucccccacaucc

SEQ ID NO: 3954573 - RNA, 17 nt, Human herpesvirus 1
ccucccgcucggcggca

SEQ ID NO: 3954574 - RNA, 21 nt, Human herpesvirus 1
ccucccggaagagccugccgc

SEQ ID NO: 3954575 - RNA, 22 nt, Human herpesvirus 1
ccucccggggggucggcaggcg

SEQ ID NO: 3954576 - RNA, 20 nt, Human herpesvirus 1
ccucccggggucaaccacga

SEQ ID NO: 3954577 - RNA, 20 nt, Human herpesvirus 1
ccuccgacgcccagcagcuc

SEQ ID NO: 3954578 - RNA, 22 nt, Human herpesvirus 1
ccuccgcgccaggcccgccgcc

SEQ ID NO: 3954579 - RNA, 19 nt, Human herpesvirus 1
ccuccucguccggcgcgcg

SEQ ID NO: 3954580 - RNA, 14 nt, Human herpesvirus 1
ccucgaccaccauc

SEQ ID NO: 3954581 - RNA, 15 nt, Human herpesvirus 1
ccucgaccaccaucc

SEQ ID NO: 3954582 - RNA, 17 nt, Human herpesvirus 1
ccucgaccaccaucccc

SEQ ID NO: 3954583 - RNA, 18 nt, Human herpesvirus 1
ccucgaugacgucccggc

SEQ ID NO: 3954584 - RNA, 13 nt, Human herpesvirus 1
ccucgcaccagcc

SEQ ID NO: 3954585 - RNA, 18 nt, Human herpesvirus 1
ccucgccccauacucccg

SEQ ID NO: 3954586 - RNA, 12 nt, Human herpesvirus 1
ccucgcgcggcg

SEQ ID NO: 3954587 - RNA, 19 nt, Human herpesvirus 1
ccucggacgccacaccauc

SEQ ID NO: 3954588 - RNA, 12 nt, Human herpesvirus 1
ccucggccagcu

SEQ ID NO: 3954589 - RNA, 16 nt, Human herpesvirus 1
ccucggcgggcacgcc

SEQ ID NO: 3954590 - RNA, 13 nt, Human herpesvirus 1
ccucguggccccg

SEQ ID NO: 3954591 - RNA, 15 nt, Human herpesvirus 1
ccucguuugccgcca

SEQ ID NO: 3954592 - RNA, 16 nt, Human herpesvirus 1
ccucucgcugcuggcg

SEQ ID NO: 3954593 - RNA, 22 nt, Human herpesvirus 1
ccucugggucugugccaccagc

SEQ ID NO: 3954594 - RNA, 21 nt, Human herpesvirus 1
ccucuucuccccuucccuccc

SEQ ID NO: 3954595 - RNA, 18 nt, Human herpesvirus 1
ccugaccaacgacggccc

SEQ ID NO: 3954596 - RNA, 16 nt, Human herpesvirus 1
ccugacgcgccuagcc

SEQ ID NO: 3954597 - RNA, 16 nt, Human herpesvirus 1
ccugaguugggaauaa

SEQ ID NO: 3954598 - RNA, 16 nt, Human herpesvirus 1
ccugaugcacgccccc

SEQ ID NO: 3954599 - RNA, 14 nt, Human herpesvirus 1
ccugauguggcugc

SEQ ID NO: 3954600 - RNA, 18 nt, Human herpesvirus 1
ccugccacuccggcgccg

SEQ ID NO: 3954601 - RNA, 18 nt, Human herpesvirus 1
ccugccccccccacccca

SEQ ID NO: 3954602 - RNA, 20 nt, Human herpesvirus 1
ccugccccccccaccccaga

SEQ ID NO: 3954603 - RNA, 23 nt, Human herpesvirus 1
ccugcgcgacgcccuccaucgga

SEQ ID NO: 3954604 - RNA, 14 nt, Human herpesvirus 1
ccugcgcuucgccg

SEQ ID NO: 3954605 - RNA, 23 nt, Human herpesvirus 1
ccugcgggacaucaaggcggaga

SEQ ID NO: 3954606 - RNA, 13 nt, Human herpesvirus 1
ccuggaccagcug

SEQ ID NO: 3954607 - RNA, 13 nt, Human herpesvirus 1
ccuggacgcggca

SEQ ID NO: 3954608 - RNA, 15 nt, Human herpesvirus 1
ccuggagcaccgagc

SEQ ID NO: 3954609 - RNA, 21 nt, Human herpesvirus 1
ccuggagcucaaucuggccca

SEQ ID NO: 3954610 - RNA, 17 nt, Human herpesvirus 1
ccuggccaaugggggcu

SEQ ID NO: 3954611 - RNA, 19 nt, Human herpesvirus 1
ccuggccgugguccucgag

SEQ ID NO: 3954612 - RNA, 18 nt, Human herpesvirus 1
ccuggcgagcccagaccc

SEQ ID NO: 3954613 - RNA, 22 nt, Human herpesvirus 1
ccuggcgccaaagcugcuggcg

SEQ ID NO: 3954614 - RNA, 19 nt, Human herpesvirus 1
ccuggcgguccagggggau

SEQ ID NO: 3954615 - RNA, 14 nt, Human herpesvirus 1
ccuggcugacccac

SEQ ID NO: 3954616 - RNA, 18 nt, Human herpesvirus 1
ccugggauccgaccccca

SEQ ID NO: 3954617 - RNA, 20 nt, Human herpesvirus 1
ccugggccaccugacgcgcc

SEQ ID NO: 3954618 - RNA, 14 nt, Human herpesvirus 1
ccugggcccuggcc

SEQ ID NO: 3954619 - RNA, 11 nt, Human herpesvirus 1
ccuggggcgcg

SEQ ID NO: 3954620 - RNA, 20 nt, Human herpesvirus 1
ccugggggacugcaucggca

SEQ ID NO: 3954621 - RNA, 18 nt, Human herpesvirus 1
ccuggucagaggcccacg

SEQ ID NO: 3954622 - RNA, 19 nt, Human herpesvirus 1
ccugguuguccguggcccc

SEQ ID NO: 3954623 - RNA, 20 nt, Human herpesvirus 1
ccugucuuggggcccaccca

SEQ ID NO: 3954624 - RNA, 14 nt, Human herpesvirus 1
ccugugcuuucugg

SEQ ID NO: 3954625 - RNA, 19 nt, Human herpesvirus 1
ccugugugucguauguuua

SEQ ID NO: 3954626 - RNA, 21 nt, Human herpesvirus 1
ccugugugucguauguuuaug

SEQ ID NO: 3954627 - RNA, 20 nt, Human herpesvirus 1
ccugugugucuucucuucgu

SEQ ID NO: 3954628 - RNA, 14 nt, Human herpesvirus 1
ccuucccgcuuccg

SEQ ID NO: 3954629 - RNA, 15 nt, Human herpesvirus 1
ccuucccucccccuc

SEQ ID NO: 3954630 - RNA, 18 nt, Human herpesvirus 1
ccuuccuaacccagaccc

SEQ ID NO: 3954631 - RNA, 20 nt, Human herpesvirus 1
ccuucgccccacacagcccu

SEQ ID NO: 3954632 - RNA, 17 nt, Human herpesvirus 1
ccuugccccggccggau

SEQ ID NO: 3954633 - RNA, 21 nt, Human herpesvirus 1
ccuugggcccgggggccuggu

SEQ ID NO: 3954634 - RNA, 17 nt, Human herpesvirus 1
ccuuguuccgcuucccg

SEQ ID NO: 3954635 - RNA, 14 nt, Human herpesvirus 1
ccuuuccgcccgcc

SEQ ID NO: 3954636 - RNA, 20 nt, Human herpesvirus 1
ccuuugcgcucccgccuucc

SEQ ID NO: 3954637 - RNA, 20 nt, Human herpesvirus 1
ccuuuuggguuucacugaaa

SEQ ID NO: 3954638 - RNA, 22 nt, Human herpesvirus 1
cgaagccccggcccugaugcag

SEQ ID NO: 3954639 - RNA, 22 nt, Human herpesvirus 1
cgaagcugcucucgcacucgag

SEQ ID NO: 3954640 - RNA, 20 nt, Human herpesvirus 1
cgacaacgcgggcguucccg

SEQ ID NO: 3954641 - RNA, 17 nt, Human herpesvirus 1
cgacacgcucgccgagc

SEQ ID NO: 3954642 - RNA, 20 nt, Human herpesvirus 1
cgacacggucauccacgccg

SEQ ID NO: 3954643 - RNA, 20 nt, Human herpesvirus 1
cgacagcggauggcacgagu

SEQ ID NO: 3954644 - RNA, 13 nt, Human herpesvirus 1
cgacaucuugucg

SEQ ID NO: 3954645 - RNA, 19 nt, Human herpesvirus 1
cgaccaacuaccccgauca

SEQ ID NO: 3954646 - RNA, 17 nt, Human herpesvirus 1
cgaccacgcccuucccc

SEQ ID NO: 3954647 - RNA, 16 nt, Human herpesvirus 1
cgaccacgggcuguca

SEQ ID NO: 3954648 - RNA, 13 nt, Human herpesvirus 1
cgaccaucacccg

SEQ ID NO: 3954649 - RNA, 20 nt, Human herpesvirus 1
cgacccuguuggucggggag

SEQ ID NO: 3954650 - RNA, 17 nt, Human herpesvirus 1
cgaccgcagucccugag

SEQ ID NO: 3954651 - RNA, 21 nt, Human herpesvirus 1
cgaccgccaacaauccccagg

SEQ ID NO: 3954652 - RNA, 21 nt, Human herpesvirus 1
cgaccggacccgcaucccccg

SEQ ID NO: 3954653 - RNA, 16 nt, Human herpesvirus 1
cgaccggguucccccg

SEQ ID NO: 3954654 - RNA, 16 nt, Human herpesvirus 1
cgaccucaacaucacc

SEQ ID NO: 3954655 - RNA, 22 nt, Human herpesvirus 1
cgaccucuccacaccugcacca

SEQ ID NO: 3954656 - RNA, 12 nt, Human herpesvirus 1
cgagaaggacaa

SEQ ID NO: 3954657 - RNA, 12 nt, Human herpesvirus 1
cgagcagagccg

SEQ ID NO: 3954658 - RNA, 19 nt, Human herpesvirus 1
cgagccaagggcuccugua

SEQ ID NO: 3954659 - RNA, 14 nt, Human herpesvirus 1
cgagcgccagcgcu

SEQ ID NO: 3954660 - RNA, 14 nt, Human herpesvirus 1
cgagcucccagaga

SEQ ID NO: 3954661 - RNA, 18 nt, Human herpesvirus 1
cgagcucccagagacccc

SEQ ID NO: 3954662 - RNA, 17 nt, Human herpesvirus 1
cgagcugacccugugga

SEQ ID NO: 3954663 - RNA, 20 nt, Human herpesvirus 1
cgaggaccacgugcacagcc

SEQ ID NO: 3954664 - RNA, 12 nt, Human herpesvirus 1
cgaggagcccgc

SEQ ID NO: 3954665 - RNA, 16 nt, Human herpesvirus 1
cgaggagggguuuggg

SEQ ID NO: 3954666 - RNA, 19 nt, Human herpesvirus 1
cgaggcgauuagccagcag

SEQ ID NO: 3954667 - RNA, 15 nt, Human herpesvirus 1
cgagggccgggcccc

SEQ ID NO: 3954668 - RNA, 23 nt, Human herpesvirus 1
cgagggcgcuuggucgggaggcc

SEQ ID NO: 3954669 - RNA, 22 nt, Human herpesvirus 1
cgaggggaugggcgaccugggg

SEQ ID NO: 3954670 - RNA, 14 nt, Human herpesvirus 1
cgaggggcagcugg

SEQ ID NO: 3954671 - RNA, 22 nt, Human herpesvirus 1
cgaggucaaaugccgggccaag

SEQ ID NO: 3954672 - RNA, 18 nt, Human herpesvirus 1
cgaggugcgccaggucgg

SEQ ID NO: 3954673 - RNA, 23 nt, Human herpesvirus 1
cgaggugcgguuggggaggcugu

SEQ ID NO: 3954674 - RNA, 16 nt, Human herpesvirus 1
cgagucuucggggccc

SEQ ID NO: 3954675 - RNA, 16 nt, Human herpesvirus 1
cgaucccaacuccuca

SEQ ID NO: 3954676 - RNA, 12 nt, Human herpesvirus 1
cgauuggcaaug

SEQ ID NO: 3954677 - RNA, 16 nt, Human herpesvirus 1
cgcaacaaccuggaga

SEQ ID NO: 3954678 - RNA, 14 nt, Human herpesvirus 1
cgcaacggggcgcc

SEQ ID NO: 3954679 - RNA, 21 nt, Human herpesvirus 1
cgcaauuugcacccagccuuu

SEQ ID NO: 3954680 - RNA, 17 nt, Human herpesvirus 1
cgcacauccucacccuc

SEQ ID NO: 3954681 - RNA, 13 nt, Human herpesvirus 1
cgcaccagcccuu

SEQ ID NO: 3954682 - RNA, 15 nt, Human herpesvirus 1
cgcaccgaggggcca

SEQ ID NO: 3954683 - RNA, 14 nt, Human herpesvirus 1
cgcaccgggccccc

SEQ ID NO: 3954684 - RNA, 19 nt, Human herpesvirus 1
cgcaccgucggaggccccc

SEQ ID NO: 3954685 - RNA, 20 nt, Human herpesvirus 1
cgcguccggggagggcgagg

SEQ ID NO: 3954686 - RNA, 16 nt, Human herpesvirus 1
cgcgucuggccccggc

SEQ ID NO: 3954687 - RNA, 15 nt, Human herpesvirus 1
cgcgugaccccaggg

SEQ ID NO: 3954688 - RNA, 18 nt, Human herpesvirus 1
cgcgugcugcgccuuggg

SEQ ID NO: 3954689 - RNA, 16 nt, Human herpesvirus 1
cgcuaaucccccggcu

SEQ ID NO: 3954690 - RNA, 15 nt, Human herpesvirus 1
cgcucaaccaccgcu

SEQ ID NO: 3954691 - RNA, 16 nt, Human herpesvirus 1
cgcucccucgaccacc

SEQ ID NO: 3954692 - RNA, 19 nt, Human herpesvirus 1
cgcucgguguacccguacg

SEQ ID NO: 3954693 - RNA, 16 nt, Human herpesvirus 1
cgcucgucgccuggcu

SEQ ID NO: 3954694 - RNA, 23 nt, Human herpesvirus 1
cgcucuugggguugacgcugggg

SEQ ID NO: 3954695 - RNA, 16 nt, Human herpesvirus 1
cgcugacccccaccgc

SEQ ID NO: 3954696 - RNA, 20 nt, Human herpesvirus 1
cgcuggggcccccagggucc

SEQ ID NO: 3954697 - RNA, 23 nt, Human herpesvirus 1
cgcuggguggucucuggccgcgc

SEQ ID NO: 3954698 - RNA, 22 nt, Human herpesvirus 1
cggaacgcaccgaggggccaag

SEQ ID NO: 3954699 - RNA, 15 nt, Human herpesvirus 1
cggaacgggaggcca

SEQ ID NO: 3954700 - RNA, 11 nt, Human herpesvirus 1
cggaagcccaa

SEQ ID NO: 3954701 - RNA, 21 nt, Human herpesvirus 1
cggacagccauauccugagcc

SEQ ID NO: 3954702 - RNA, 16 nt, Human herpesvirus 1
cggaccaccgcccccc

SEQ ID NO: 3954703 - RNA, 23 nt, Human herpesvirus 1
cggaccaccgccccccuguuccc

SEQ ID NO: 3954704 - RNA, 21 nt, Human herpesvirus 1
cggacccccggaggcgccugc

SEQ ID NO: 3954705 - RNA, 20 nt, Human herpesvirus 1
cggacccguuccagcccccc

SEQ ID NO: 3954706 - RNA, 16 nt, Human herpesvirus 1
cggacgacggcggcga

SEQ ID NO: 3954707 - RNA, 13 nt, Human herpesvirus 1
cggacgccacacc

SEQ ID NO: 3954708 - RNA, 15 nt, Human herpesvirus 1
cggagcgggggggcg

SEQ ID NO: 3954709 - RNA, 24 nt, Human herpesvirus 1
cggaggauuacuuuaagcgcugcu

SEQ ID NO: 3954710 - RNA, 23 nt, Human herpesvirus 1
cggaguccugucccugcgucgcc

SEQ ID NO: 3954711 - RNA, 23 nt, Human herpesvirus 1
cggaucugcuccgcaacggggcg

SEQ ID NO: 3954712 - RNA, 16 nt, Human herpesvirus 1
cggcaagacccgggcg

SEQ ID NO: 3954713 - RNA, 20 nt, Human herpesvirus 1
cggcagcaugggacccacag

SEQ ID NO: 3954714 - RNA, 15 nt, Human herpesvirus 1
cggcaugccucugcg

SEQ ID NO: 3954715 - RNA, 16 nt, Human herpesvirus 1
cggccaacgaggacca

SEQ ID NO: 3954716 - RNA, 21 nt, Human herpesvirus 1
cggccaacgccgcgacccgca

SEQ ID NO: 3954717 - RNA, 20 nt, Human herpesvirus 1
cggccacgcaaaaccaggcc

SEQ ID NO: 3954718 - RNA, 20 nt, Human herpesvirus 1
cggccacgggcugcguguca

SEQ ID NO: 3954719 - RNA, 19 nt, Human herpesvirus 1
cggccacuggccgggagca

SEQ ID NO: 3954720 - RNA, 13 nt, Human herpesvirus 1
cggccccagcccu

SEQ ID NO: 3954721 - RNA, 18 nt, Human herpesvirus 1
cggccccagcccucuccc

SEQ ID NO: 3954722 - RNA, 17 nt, Human herpesvirus 1
cggcccccgaggccagc

SEQ ID NO: 3954723 - RNA, 18 nt, Human herpesvirus 1
cggccccggcaccacggg

SEQ ID NO: 3954724 - RNA, 16 nt, Human herpesvirus 1
cggcccgggggacuca

SEQ ID NO: 3954725 - RNA, 16 nt, Human herpesvirus 1
cggccgccaccauccu

SEQ ID NO: 3954726 - RNA, 13 nt, Human herpesvirus 1
cggccgccgcgga

SEQ ID NO: 3954727 - RNA, 18 nt, Human herpesvirus 1
cggccggauucccgggcc

SEQ ID NO: 3954728 - RNA, 13 nt, Human herpesvirus 1
cggccuccgcgua

SEQ ID NO: 3954729 - RNA, 15 nt, Human herpesvirus 1
cggccucuccggccu

SEQ ID NO: 3954730 - RNA, 13 nt, Human herpesvirus 1
cggccugcuggac

SEQ ID NO: 3954731 - RNA, 20 nt, Human herpesvirus 1
cggccugggucuuccgcgga

SEQ ID NO: 3954732 - RNA, 19 nt, Human herpesvirus 1
cggccuguuugagcagaag

SEQ ID NO: 3954733 - RNA, 10 nt, Human herpesvirus 1
cggcgcggcc

SEQ ID NO: 3954734 - RNA, 16 nt, Human herpesvirus 1
cggcggacccccggag

SEQ ID NO: 3954735 - RNA, 20 nt, Human herpesvirus 1
cggcggcgaggccggcgccg

SEQ ID NO: 3954736 - RNA, 20 nt, Human herpesvirus 1
cggcgggcacgccaagcccc

SEQ ID NO: 3954737 - RNA, 13 nt, Human herpesvirus 1
cggcggggccuca

SEQ ID NO: 3954738 - RNA, 13 nt, Human herpesvirus 1
cggcgucugggcc

SEQ ID NO: 3954739 - RNA, 14 nt, Human herpesvirus 1
cggcgucugggcca

SEQ ID NO: 3954740 - RNA, 13 nt, Human herpesvirus 1
cggcucaacgagc

SEQ ID NO: 3954741 - RNA, 22 nt, Human herpesvirus 1
cggcucuccgaucccaacuccu

SEQ ID NO: 3954742 - RNA, 15 nt, Human herpesvirus 1
cggcugguccacacc

SEQ ID NO: 3954743 - RNA, 18 nt, Human herpesvirus 1
cggcugguccacacccag

SEQ ID NO: 3954744 - RNA, 23 nt, Human herpesvirus 1
cggcugguccacacccaguggcu

SEQ ID NO: 3954745 - RNA, 14 nt, Human herpesvirus 1
cgggaccugaaccc

SEQ ID NO: 3954746 - RNA, 20 nt, Human herpesvirus 1
cgggagccccggucuccccg

SEQ ID NO: 3954747 - RNA, 12 nt, Human herpesvirus 1
cgggaggaagcc

SEQ ID NO: 3954748 - RNA, 15 nt, Human herpesvirus 1
cgggaggauguguuu

SEQ ID NO: 3954749 - RNA, 21 nt, Human herpesvirus 1
cgggaggccgcaucgaacgca

SEQ ID NO: 3954750 - RNA, 21 nt, Human herpesvirus 1
cgggccacgccacccugcgcg

SEQ ID NO: 3954751 - RNA, 17 nt, Human herpesvirus 1
cgggcccccggccgccg

SEQ ID NO: 3954752 - RNA, 19 nt, Human herpesvirus 1
cgggccccggggagacagc

SEQ ID NO: 3954753 - RNA, 21 nt, Human herpesvirus 1
cgggccccggggagacagcgc

SEQ ID NO: 3954754 - RNA, 23 nt, Human herpesvirus 1
cgggcgacgcacacacccuagcg

SEQ ID NO: 3954755 - RNA, 11 nt, Human herpesvirus 1
cgggcgcggcg

SEQ ID NO: 3954756 - RNA, 12 nt, Human herpesvirus 1
cgggcgcugggu

SEQ ID NO: 3954757 - RNA, 14 nt, Human herpesvirus 1
cgggcggccacccc

SEQ ID NO: 3954758 - RNA, 12 nt, Human herpesvirus 1
cgggcguccgcc

SEQ ID NO: 3954759 - RNA, 18 nt, Human herpesvirus 1
cgggcuguuccgccaggc

SEQ ID NO: 3954760 - RNA, 22 nt, Human herpesvirus 1
cgggcuguuccgccaggcgguc

SEQ ID NO: 3954761 - RNA, 21 nt, Human herpesvirus 1
cggggacggggaggcgggccc

SEQ ID NO: 3954762 - RNA, 14 nt, Human herpesvirus 1
cggggagggcaggg

SEQ ID NO: 3954763 - RNA, 24 nt, Human herpesvirus 1
cggggaucugguccgccgcgagcc

SEQ ID NO: 3954764 - RNA, 15 nt, Human herpesvirus 1
cggggcccggcccau

SEQ ID NO: 3954765 - RNA, 19 nt, Human herpesvirus 1
cggggcccggcccugcugc

SEQ ID NO: 3954766 - RNA, 22 nt, Human herpesvirus 1
cggggcggggguguccgggggc

SEQ ID NO: 3954767 - RNA, 13 nt, Human herpesvirus 1
cggggcucagcca

SEQ ID NO: 3954768 - RNA, 19 nt, Human herpesvirus 1
cggggcuguacucgaccca

SEQ ID NO: 3954769 - RNA, 16 nt, Human herpesvirus 1
cgggggauggggagag

SEQ ID NO: 3954770 - RNA, 14 nt, Human herpesvirus 1
cgggggccuggugg

SEQ ID NO: 3954771 - RNA, 19 nt, Human herpesvirus 1
cgggguuacgcgggccccg

SEQ ID NO: 3954772 - RNA, 22 nt, Human herpesvirus 1
cgggucuuuuguguuggcccua

SEQ ID NO: 3954773 - RNA, 18 nt, Human herpesvirus 1
cgggugcuucccacgcga

SEQ ID NO: 3954774 - RNA, 18 nt, Human herpesvirus 1
cggguuccgcgaccaccc

SEQ ID NO: 3954775 - RNA, 21 nt, Human herpesvirus 1
cggucagcgacguccugggcc

SEQ ID NO: 3954776 - RNA, 22 nt, Human herpesvirus 1
cggucagcgagacgaccucccc

SEQ ID NO: 3954777 - RNA, 21 nt, Human herpesvirus 1
cggucauccacgccgacgcca

SEQ ID NO: 3954778 - RNA, 13 nt, Human herpesvirus 1
cgguccacggcca

SEQ ID NO: 3954779 - RNA, 16 nt, Human herpesvirus 1
cgguccccucugggcc

SEQ ID NO: 3954780 - RNA, 20 nt, Human herpesvirus 1
cgguccggagccgcgcggcc

SEQ ID NO: 3954781 - RNA, 22 nt, Human herpesvirus 1
cgguccggagccgcgcggccac

SEQ ID NO: 3954782 - RNA, 18 nt, Human herpesvirus 1
cggucgccccgacccccu

SEQ ID NO: 3954783 - RNA, 18 nt, Human herpesvirus 1
cggucucccagggagccc

SEQ ID NO: 3954784 - RNA, 18 nt, Human herpesvirus 1
cggugaacgaagcggcca

SEQ ID NO: 3954785 - RNA, 21 nt, Human herpesvirus 1
cggugaacgaagcggccaugg

SEQ ID NO: 3954786 - RNA, 14 nt, Human herpesvirus 1
cggugaccgcgugc

SEQ ID NO: 3954787 - RNA, 17 nt, Human herpesvirus 1
cggugcgucugggcccg

SEQ ID NO: 3954788 - RNA, 17 nt, Human herpesvirus 1
cggugcuccgccgcgga

SEQ ID NO: 3954789 - RNA, 13 nt, Human herpesvirus 1
cgguggacagcca

SEQ ID NO: 3954790 - RNA, 21 nt, Human herpesvirus 1
cggugguccgccuagccgcag

SEQ ID NO: 3954791 - RNA, 13 nt, Human herpesvirus 1
cgguucgccgcca

SEQ ID NO: 3954792 - RNA, 21 nt, Human herpesvirus 1
cgguuuccuuugcgcucccgc

SEQ ID NO: 3954793 - RNA, 21 nt, Human herpesvirus 1
cguacaaguucaaggccacca

SEQ ID NO: 3954794 - RNA, 15 nt, Human herpesvirus 1
cguacgcaugggccg

SEQ ID NO: 3954795 - RNA, 15 nt, Human herpesvirus 1
cguaucugacggccg

SEQ ID NO: 3954796 - RNA, 14 nt, Human herpesvirus 1
cgucaccaugcagc

SEQ ID NO: 3954797 - RNA, 18 nt, Human herpesvirus 1
cgucagccugccucuccc

SEQ ID NO: 3954798 - RNA, 14 nt, Human herpesvirus 1
cguccaccaaaguc

SEQ ID NO: 3954799 - RNA, 23 nt, Human herpesvirus 1
cucugugucagguggcccuuccu

SEQ ID NO: 3954800 - RNA, 13 nt, Human herpesvirus 1
cucuuccccccca

SEQ ID NO: 3954801 - RNA, 16 nt, Human herpesvirus 1
cucuuggaggaccccg

SEQ ID NO: 3954802 - RNA, 18 nt, Human herpesvirus 1
cugaaccccagccccaga

SEQ ID NO: 3954803 - RNA, 23 nt, Human herpesvirus 1
cugacccucuccgggaugggcua

SEQ ID NO: 3954804 - RNA, 14 nt, Human herpesvirus 1
cugacgccucaggg

SEQ ID NO: 3954805 - RNA, 17 nt, Human herpesvirus 1
cugacgccucagggccu

SEQ ID NO: 3954806 - RNA, 21 nt, Human herpesvirus 1
cugagacaagagcgcuccccc

SEQ ID NO: 3954807 - RNA, 21 nt, Human herpesvirus 1
cugagccgcgccgacaucacc

SEQ ID NO: 3954808 - RNA, 20 nt, Human herpesvirus 1
cugagcgcccuccugaccaa

SEQ ID NO: 3954809 - RNA, 16 nt, Human herpesvirus 1
cugauguggcugcucc

SEQ ID NO: 3954810 - RNA, 23 nt, Human herpesvirus 1
cugcaagaggucgucgggggacg

SEQ ID NO: 3954811 - RNA, 18 nt, Human herpesvirus 1
cugcaccgguucucccug

SEQ ID NO: 3954812 - RNA, 13 nt, Human herpesvirus 1
cugccagaccuca

SEQ ID NO: 3954813 - RNA, 21 nt, Human herpesvirus 1
cugccagcuaugggcccugcu

SEQ ID NO: 3954814 - RNA, 15 nt, Human herpesvirus 1
cugccccccccaccc

SEQ ID NO: 3954815 - RNA, 16 nt, Human herpesvirus 1
cugccccgccacccag

SEQ ID NO: 3954816 - RNA, 17 nt, Human herpesvirus 1
cugcccgucgcgcgugu

SEQ ID NO: 3954817 - RNA, 16 nt, Human herpesvirus 1
cugccgucgcuagacc

SEQ ID NO: 3954818 - RNA, 18 nt, Human herpesvirus 1
cugccgucgcuagaccac

SEQ ID NO: 3954819 - RNA, 16 nt, Human herpesvirus 1
cugcgcgacgcccucc

SEQ ID NO: 3954820 - RNA, 10 nt, Human herpesvirus 1
cugcgcggcg

SEQ ID NO: 3954821 - RNA, 21 nt, Human herpesvirus 1
cugcggccacacagccggcca

SEQ ID NO: 3954822 - RNA, 22 nt, Human herpesvirus 1
cugcggcucaacgagcuccugg

SEQ ID NO: 3954823 - RNA, 23 nt, Human herpesvirus 1
cugcggcucaacgagcuccuggc

SEQ ID NO: 3954824 - RNA, 15 nt, Human herpesvirus 1
cugcuccgccuggcc

SEQ ID NO: 3954825 - RNA, 20 nt, Human herpesvirus 1
cugcuccgcuaaaagaccgc

SEQ ID NO: 3954826 - RNA, 18 nt, Human herpesvirus 1
cugcugcaggccccccgc

SEQ ID NO: 3954827 - RNA, 15 nt, Human herpesvirus 1
cugcugcggccaguc

SEQ ID NO: 3954828 - RNA, 13 nt, Human herpesvirus 1
cugcugggccaug

SEQ ID NO: 3954829 - RNA, 17 nt, Human herpesvirus 1
cugcuuauucucgggga

SEQ ID NO: 3954830 - RNA, 18 nt, Human herpesvirus 1
cuggacguccccgaggac

SEQ ID NO: 3954831 - RNA, 16 nt, Human herpesvirus 1
cuggacgugggccuca

SEQ ID NO: 3954832 - RNA, 15 nt, Human herpesvirus 1
cuggaugcgccgcca

SEQ ID NO: 3954833 - RNA, 14 nt, Human herpesvirus 1
cuggccgcgcccac

SEQ ID NO: 3954834 - RNA, 20 nt, Human herpesvirus 1
cuggcgcggugccugacgcc

SEQ ID NO: 3954835 - RNA, 19 nt, Human herpesvirus 1
cuggcguucgucgcccucc

SEQ ID NO: 3954836 - RNA, 20 nt, Human herpesvirus 1
cuggcguucgucgcccucca

SEQ ID NO: 3954837 - RNA, 13 nt, Human herpesvirus 1
cuggcuggccgcu

SEQ ID NO: 3954838 - RNA, 14 nt, Human herpesvirus 1
cugggaccccggcg

SEQ ID NO: 3954839 - RNA, 17 nt, Human herpesvirus 1
cugggaccccggcggcc

SEQ ID NO: 3954840 - RNA, 19 nt, Human herpesvirus 1
cugggcgagguggagcugc

SEQ ID NO: 3954841 - RNA, 20 nt, Human herpesvirus 1
cugggcuuccgacgcccccc

SEQ ID NO: 3954842 - RNA, 15 nt, Human herpesvirus 1
cuggggucgcggccg

SEQ ID NO: 3954843 - RNA, 22 nt, Human herpesvirus 1
cuggggucgcggccgcgaccca

SEQ ID NO: 3954844 - RNA, 17 nt, Human herpesvirus 1
cugggucugugccacca

SEQ ID NO: 3954845 - RNA, 20 nt, Human herpesvirus 1
cugggucugugccaccagcc

SEQ ID NO: 3954846 - RNA, 15 nt, Human herpesvirus 1
cuggguggucucugg

SEQ ID NO: 3954847 - RNA, 17 nt, Human herpesvirus 1
cuggguggucucuggcc

SEQ ID NO: 3954848 - RNA, 20 nt, Human herpesvirus 1
cuggguuggcgucgggacca

SEQ ID NO: 3954849 - RNA, 14 nt, Human herpesvirus 1
cuggguuuuccccu

SEQ ID NO: 3954850 - RNA, 16 nt, Human herpesvirus 1
cuggucagaggcccac

SEQ ID NO: 3954851 - RNA, 14 nt, Human herpesvirus 1
cugguccacaccca

SEQ ID NO: 3954852 - RNA, 16 nt, Human herpesvirus 1
cuggucgaggcggccg

SEQ ID NO: 3954853 - RNA, 22 nt, Human herpesvirus 1
cuggucgucgggcgccaaagcc

SEQ ID NO: 3954854 - RNA, 20 nt, Human herpesvirus 1
cuguacccgcuaaccaccaa

SEQ ID NO: 3954855 - RNA, 21 nt, Human herpesvirus 1
cuguaccggugggcguccugg

SEQ ID NO: 3954856 - RNA, 22 nt, Human herpesvirus 1
cuguaccggugggcguccugga

SEQ ID NO: 3954857 - RNA, 15 nt, Human herpesvirus 1
cuguaggucugggaa

SEQ ID NO: 3954858 - RNA, 15 nt, Human herpesvirus 1
cuguauagcccgggc

SEQ ID NO: 3954859 - RNA, 19 nt, Human herpesvirus 1
cugucucgucuccucuucu

SEQ ID NO: 3954860 - RNA, 14 nt, Human herpesvirus 1
cugugccaccagcc

SEQ ID NO: 3954861 - RNA, 19 nt, Human herpesvirus 1
cuguggccucaccugacca

SEQ ID NO: 3954862 - RNA, 13 nt, Human herpesvirus 1
cuguggcucuccu

SEQ ID NO: 3954863 - RNA, 20 nt, Human herpesvirus 1
cuguugguccuggccggccu

SEQ ID NO: 3954864 - RNA, 18 nt, Human herpesvirus 1
cuuaauaaauuuuacaaa

SEQ ID NO: 3954865 - RNA, 14 nt, Human herpesvirus 1
cuuaccgccacagg

SEQ ID NO: 3954866 - RNA, 22 nt, Human herpesvirus 1
cuuauccacaugaagccacugu

SEQ ID NO: 3954867 - RNA, 13 nt, Human herpesvirus 1
cuuccccgcuguc

SEQ ID NO: 3954868 - RNA, 23 nt, Human herpesvirus 1
cuucccucccccuccgcauccca

SEQ ID NO: 3954869 - RNA, 14 nt, Human herpesvirus 1
cuuccggccucgau

SEQ ID NO: 3954870 - RNA, 14 nt, Human herpesvirus 1
cuuccggccugggg

SEQ ID NO: 3954871 - RNA, 22 nt, Human herpesvirus 1
cuuccguccccugcccccccca

SEQ ID NO: 3954872 - RNA, 19 nt, Human herpesvirus 1
cuucgcgaacccccgucac

SEQ ID NO: 3954873 - RNA, 16 nt, Human herpesvirus 1
cuucgcgcccgggcgc

SEQ ID NO: 3954874 - RNA, 15 nt, Human herpesvirus 1
cuucgcuuugugggg

SEQ ID NO: 3954875 - RNA, 21 nt, Human herpesvirus 1
cuucggccccgcgucuggccc

SEQ ID NO: 3954876 - RNA, 14 nt, Human herpesvirus 1
cuucuccccuuccc

SEQ ID NO: 3954877 - RNA, 15 nt, Human herpesvirus 1
cuucuccccuucccu

SEQ ID NO: 3954878 - RNA, 21 nt, Human herpesvirus 1
cuugaagaucgccggguggca

SEQ ID NO: 3954879 - RNA, 17 nt, Human herpesvirus 1
cuugcgcaccuggugau

SEQ ID NO: 3954880 - RNA, 21 nt, Human herpesvirus 1
cuuggagccagcccgcccuca

SEQ ID NO: 3954881 - RNA, 19 nt, Human herpesvirus 1
cuugggcccgggggccugg

SEQ ID NO: 3954882 - RNA, 17 nt, Human herpesvirus 1
cuugguucggggccgcc

SEQ ID NO: 3954883 - RNA, 17 nt, Human herpesvirus 1
cuuuaagcgcugcugcg

SEQ ID NO: 3954884 - RNA, 17 nt, Human herpesvirus 1
gaaauagcaacaaggcc

SEQ ID NO: 3954885 - RNA, 19 nt, Human herpesvirus 1
gaaaugcccccccccccuu

SEQ ID NO: 3954886 - RNA, 23 nt, Human herpesvirus 1
gaaccguggucgaggugucucgc

SEQ ID NO: 3954887 - RNA, 14 nt, Human herpesvirus 1
gaacgcagccccgc

SEQ ID NO: 3954888 - RNA, 22 nt, Human herpesvirus 1
gaacgccuccgcccgugcugcc

SEQ ID NO: 3954889 - RNA, 18 nt, Human herpesvirus 1
gaagaacagaaaaccgaa

SEQ ID NO: 3954890 - RNA, 15 nt, Human herpesvirus 1
gaagacaccccccac

SEQ ID NO: 3954891 - RNA, 20 nt, Human herpesvirus 1
gaagaucgccggguggcacg

SEQ ID NO: 3954892 - RNA, 20 nt, Human herpesvirus 1
gaagcccaacccacacgcac

SEQ ID NO: 3954893 - RNA, 12 nt, Human herpesvirus 1
gaagcugauguc

SEQ ID NO: 3954894 - RNA, 22 nt, Human herpesvirus 1
gaaggagacaauaccggaagga

SEQ ID NO: 3954895 - RNA, 17 nt, Human herpesvirus 1
gaaugugugcggagguc

SEQ ID NO: 3954896 - RNA, 21 nt, Human herpesvirus 1
gacaaccccggucucccaggg

SEQ ID NO: 3954897 - RNA, 19 nt, Human herpesvirus 1
gacaauaccggaaggaacc

SEQ ID NO: 3954898 - RNA, 18 nt, Human herpesvirus 1
gacacaaaugcccacggg

SEQ ID NO: 3954899 - RNA, 15 nt, Human herpesvirus 1
gacacgcgcguccuu

SEQ ID NO: 3954900 - RNA, 14 nt, Human herpesvirus 1
gacacgggcaccac

SEQ ID NO: 3954901 - RNA, 16 nt, Human herpesvirus 1
gacagcaaccagaagc

SEQ ID NO: 3954902 - RNA, 18 nt, Human herpesvirus 1
gacagcggauggcacgag

SEQ ID NO: 3954903 - RNA, 18 nt, Human herpesvirus 1
gaccacgugcacagccug

SEQ ID NO: 3954904 - RNA, 22 nt, Human herpesvirus 1
gaccagcugaccgacccuccgg

SEQ ID NO: 3954905 - RNA, 22 nt, Human herpesvirus 1
gaccccaucagccucgucccgc

SEQ ID NO: 3954906 - RNA, 14 nt, Human herpesvirus 1
gacccccccgacau

SEQ ID NO: 3954907 - RNA, 23 nt, Human herpesvirus 1
gacccccccucgcgccacacuca

SEQ ID NO: 3954908 - RNA, 21 nt, Human herpesvirus 1
gacccccuuguauguccccaa

SEQ ID NO: 3954909 - RNA, 22 nt, Human herpesvirus 1
gacccccuuguauguccccaaa

SEQ ID NO: 3954910 - RNA, 15 nt, Human herpesvirus 1
gacccgacucaccuc

SEQ ID NO: 3954911 - RNA, 17 nt, Human herpesvirus 1
gacccgcaacgcgcugg

SEQ ID NO: 3954912 - RNA, 19 nt, Human herpesvirus 1
gacccgcaucccccgucug

SEQ ID NO: 3954913 - RNA, 17 nt, Human herpesvirus 1
gcauggggggggggcgg

SEQ ID NO: 3954914 - RNA, 17 nt, Human herpesvirus 1
gccaaauuuauguguua

SEQ ID NO: 3954915 - RNA, 17 nt, Human herpesvirus 1
gccaacaauccccagga

SEQ ID NO: 3954916 - RNA, 19 nt, Human herpesvirus 1
gccaacgccgcgacccgca

SEQ ID NO: 3954917 - RNA, 17 nt, Human herpesvirus 1
gccaaguuggcccccgg

SEQ ID NO: 3954918 - RNA, 20 nt, Human herpesvirus 1
gccacccaggcgcugggcga

SEQ ID NO: 3954919 - RNA, 21 nt, Human herpesvirus 1
gccacccgaaccaccacugca

SEQ ID NO: 3954920 - RNA, 21 nt, Human herpesvirus 1
gccacccgacaacagcccccg

SEQ ID NO: 3954921 - RNA, 14 nt, Human herpesvirus 1
gccacgccagggcc

SEQ ID NO: 3954922 - RNA, 19 nt, Human herpesvirus 1
gccacuggccgggagcacc

SEQ ID NO: 3954923 - RNA, 20 nt, Human herpesvirus 1
gccacuggccgggagcacca

SEQ ID NO: 3954924 - RNA, 23 nt, Human herpesvirus 1
gccagccuguuuguccuggggau

SEQ ID NO: 3954925 - RNA, 16 nt, Human herpesvirus 1
gccagcgcggcggggc

SEQ ID NO: 3954926 - RNA, 13 nt, Human herpesvirus 1
gccagcuaugggc

SEQ ID NO: 3954927 - RNA, 16 nt, Human herpesvirus 1
gccagcuaugggcccu

SEQ ID NO: 3954928 - RNA, 22 nt, Human herpesvirus 1
gccagcuaugggcccugcuccg

SEQ ID NO: 3954929 - RNA, 16 nt, Human herpesvirus 1
gccaggaccgccugcc

SEQ ID NO: 3954930 - RNA, 17 nt, Human herpesvirus 1
gccagggcgcccccgcg

SEQ ID NO: 3954931 - RNA, 18 nt, Human herpesvirus 1
gccaggucggcgaccgcc

SEQ ID NO: 3954932 - RNA, 13 nt, Human herpesvirus 1
gccauccucacgc

SEQ ID NO: 3954933 - RNA, 19 nt, Human herpesvirus 1
gccaucugggauggcuccu

SEQ ID NO: 3954934 - RNA, 14 nt, Human herpesvirus 1
gccaugcgugccgu

SEQ ID NO: 3954935 - RNA, 24 nt, Human herpesvirus 1
gcccaacucucgcaccaucccggg

SEQ ID NO: 3954936 - RNA, 14 nt, Human herpesvirus 1
gcccaccgcugggc

SEQ ID NO: 3954937 - RNA, 15 nt, Human herpesvirus 1
gcccaccgcugggcg

SEQ ID NO: 3954938 - RNA, 15 nt, Human herpesvirus 1
gcccacgucgccccg

SEQ ID NO: 3954939 - RNA, 18 nt, Human herpesvirus 1
gcccacgucgccccgccg

SEQ ID NO: 3954940 - RNA, 15 nt, Human herpesvirus 1
gcccagacgcccucc

SEQ ID NO: 3954941 - RNA, 19 nt, Human herpesvirus 1
gcccaguaacaugcgcacg

SEQ ID NO: 3954942 - RNA, 21 nt, Human herpesvirus 1
gccccauacucccgccagcac

SEQ ID NO: 3954943 - RNA, 19 nt, Human herpesvirus 1
gccccccccaccccagacg

SEQ ID NO: 3954944 - RNA, 23 nt, Human herpesvirus 1
gcccccccccccuugcgggcggu

SEQ ID NO: 3954945 - RNA, 21 nt, Human herpesvirus 1
gccccccguguuuguggggag

SEQ ID NO: 3954946 - RNA, 13 nt, Human herpesvirus 1
gcccccgccccuc

SEQ ID NO: 3954947 - RNA, 23 nt, Human herpesvirus 1
gcccccuuuguccccgccgacaa

SEQ ID NO: 3954948 - RNA, 22 nt, Human herpesvirus 1
gccccgaacccugcgguccgga

SEQ ID NO: 3954949 - RNA, 13 nt, Human herpesvirus 1
gccccgacgcacc

SEQ ID NO: 3954950 - RNA, 23 nt, Human herpesvirus 1
gccccgauggcccuggacgcggc

SEQ ID NO: 3954951 - RNA, 21 nt, Human herpesvirus 1
gccccgcauaucccacccugg

SEQ ID NO: 3954952 - RNA, 17 nt, Human herpesvirus 1
gccccgcgucuggcccc

SEQ ID NO: 3954953 - RNA, 18 nt, Human herpesvirus 1
gccccggaccccacgcac

SEQ ID NO: 3954954 - RNA, 16 nt, Human herpesvirus 1
gccccgggacaccccc

SEQ ID NO: 3954955 - RNA, 17 nt, Human herpesvirus 1
gccccggucuccccggg

SEQ ID NO: 3954956 - RNA, 18 nt, Human herpesvirus 1
gccccgguguccgagccc

SEQ ID NO: 3954957 - RNA, 22 nt, Human herpesvirus 1
gccccguacaaguucaaggcca

SEQ ID NO: 3954958 - RNA, 23 nt, Human herpesvirus 1
gccccguacaaguucaaggccac

SEQ ID NO: 3954959 - RNA, 17 nt, Human herpesvirus 1
gcccgaagacacccccc

SEQ ID NO: 3954960 - RNA, 20 nt, Human herpesvirus 1
gcccgaccaacgucgccgcc

SEQ ID NO: 3954961 - RNA, 15 nt, Human herpesvirus 1
gcccgaccacacacc

SEQ ID NO: 3954962 - RNA, 24 nt, Human herpesvirus 1
gcccgccaucugggauggcuccug

SEQ ID NO: 3954963 - RNA, 13 nt, Human herpesvirus 1
gcccgcgaacggc

SEQ ID NO: 3954964 - RNA, 15 nt, Human herpesvirus 1
gcccgcguaaccccg

SEQ ID NO: 3954965 - RNA, 19 nt, Human herpesvirus 1
gcccgcguuuggccugcgg

SEQ ID NO: 3954966 - RNA, 20 nt, Human herpesvirus 1
gcccggcccauugggcggga

SEQ ID NO: 3954967 - RNA, 21 nt, Human herpesvirus 1
gcccgggcaaguaugcccccc

SEQ ID NO: 3954968 - RNA, 10 nt, Human herpesvirus 1
gcccggggcc

SEQ ID NO: 3954969 - RNA, 21 nt, Human herpesvirus 1
gcccgggggccugguggcacc

SEQ ID NO: 3954970 - RNA, 21 nt, Human herpesvirus 1
gcccggguauaaauuccggaa

SEQ ID NO: 3954971 - RNA, 14 nt, Human herpesvirus 1
gcccggguccccgc

SEQ ID NO: 3954972 - RNA, 18 nt, Human herpesvirus 1
gcccguugcagggccugg

SEQ ID NO: 3954973 - RNA, 23 nt, Human herpesvirus 1
gcccugguguuucuggggagcug

SEQ ID NO: 3954974 - RNA, 17 nt, Human herpesvirus 1
gccgacaucgacacggu

SEQ ID NO: 3954975 - RNA, 16 nt, Human herpesvirus 1
gccgagccccccgcug

SEQ ID NO: 3954976 - RNA, 22 nt, Human herpesvirus 1
gccgagccccccgcugcggcca

SEQ ID NO: 3954977 - RNA, 21 nt, Human herpesvirus 1
gccgaggcgauuagccagcag

SEQ ID NO: 3954978 - RNA, 23 nt, Human herpesvirus 1
gccgaggucccgugcaacccuua

SEQ ID NO: 3954979 - RNA, 21 nt, Human herpesvirus 1
gccgagucuucggggcccggc

SEQ ID NO: 3954980 - RNA, 16 nt, Human herpesvirus 1
gccgcaaaucccacca

SEQ ID NO: 3954981 - RNA, 16 nt, Human herpesvirus 1
gccgcaggacccagca

SEQ ID NO: 3954982 - RNA, 20 nt, Human herpesvirus 1
gccgcaguacuaccuggcca

SEQ ID NO: 3954983 - RNA, 23 nt, Human herpesvirus 1
gccgccaccauccucaagcaggc

SEQ ID NO: 3954984 - RNA, 19 nt, Human herpesvirus 1
gccgccaccguggccggcc

SEQ ID NO: 3954985 - RNA, 17 nt, Human herpesvirus 1
gccgccacgcgcccgag

SEQ ID NO: 3954986 - RNA, 20 nt, Human herpesvirus 1
gccgcccaacucucgcacca

SEQ ID NO: 3954987 - RNA, 15 nt, Human herpesvirus 1
gccgcccuagaggcu

SEQ ID NO: 3954988 - RNA, 15 nt, Human herpesvirus 1
gccgcgacccgcacg

SEQ ID NO: 3954989 - RNA, 14 nt, Human herpesvirus 1
gccgcgccccgccg

SEQ ID NO: 3954990 - RNA, 16 nt, Human herpesvirus 1
gccgcgccgcugcccg

SEQ ID NO: 3954991 - RNA, 16 nt, Human herpesvirus 1
gccgcgcgccgcgcgu

SEQ ID NO: 3954992 - RNA, 17 nt, Human herpesvirus 1
gccgcggaucugcuccg

SEQ ID NO: 3954993 - RNA, 13 nt, Human herpesvirus 1
gccgcggcucccg

SEQ ID NO: 3954994 - RNA, 21 nt, Human herpesvirus 1
gccgcgggcccccggccgccg

SEQ ID NO: 3954995 - RNA, 23 nt, Human herpesvirus 1
gccgcgguacagaucggcgccgc

SEQ ID NO: 3954996 - RNA, 18 nt, Human herpesvirus 1
gccggauucccgggccgg

SEQ ID NO: 3954997 - RNA, 13 nt, Human herpesvirus 1
gccggcggcgacg

SEQ ID NO: 3954998 - RNA, 16 nt, Human herpesvirus 1
gccgggaacgcuagcc

SEQ ID NO: 3954999 - RNA, 19 nt, Human herpesvirus 1
gccgggacuccgcggacgg

SEQ ID NO: 3955000 - RNA, 20 nt, Human herpesvirus 1
gccgggccgcccacuucccg

SEQ ID NO: 3955001 - RNA, 19 nt, Human herpesvirus 1
gccggggagggcagggccg

SEQ ID NO: 3955002 - RNA, 18 nt, Human herpesvirus 1
gccggguggcgccugugu

SEQ ID NO: 3955003 - RNA, 19 nt, Human herpesvirus 1
gccgguccgcugugccauc

SEQ ID NO: 3955004 - RNA, 17 nt, Human herpesvirus 1
gccggucgccgugcucc

SEQ ID NO: 3955005 - RNA, 24 nt, Human herpesvirus 1
gccggugguccgccuagccgcagc

SEQ ID NO: 3955006 - RNA, 16 nt, Human herpesvirus 1
gccgucgcuagaccac

SEQ ID NO: 3955007 - RNA, 16 nt, Human herpesvirus 1
gccgugguccugugga

SEQ ID NO: 3955008 - RNA, 13 nt, Human herpesvirus 1
gccguugucuccc

SEQ ID NO: 3955009 - RNA, 14 nt, Human herpesvirus 1
gccuaccagcaggg

SEQ ID NO: 3955010 - RNA, 19 nt, Human herpesvirus 1
gccucaacauaccccgcug

SEQ ID NO: 3955011 - RNA, 20 nt, Human herpesvirus 1
gccucacgaccgcauccacc

SEQ ID NO: 3955012 - RNA, 14 nt, Human herpesvirus 1
gccuccaccgggcc

SEQ ID NO: 3955013 - RNA, 19 nt, Human herpesvirus 1
gccuccaugggguccgcag

SEQ ID NO: 3955014 - RNA, 14 nt, Human herpesvirus 1
gccucccccugagc

SEQ ID NO: 3955015 - RNA, 17 nt, Human herpesvirus 1
gccucucgcugcuggcg

SEQ ID NO: 3955016 - RNA, 18 nt, Human herpesvirus 1
gccucugggguuugcccu

SEQ ID NO: 3955017 - RNA, 17 nt, Human herpesvirus 1
gccucugggucugugcc

SEQ ID NO: 3955018 - RNA, 20 nt, Human herpesvirus 1
gccucugggucugugccacc

SEQ ID NO: 3955019 - RNA, 14 nt, Human herpesvirus 1
gccugacgccugcc

SEQ ID NO: 3955020 - RNA, 23 nt, Human herpesvirus 1
gccugacgcgccgcgggcccccg

SEQ ID NO: 3955021 - RNA, 17 nt, Human herpesvirus 1
gccuggcauucgacgac

SEQ ID NO: 3955022 - RNA, 17 nt, Human herpesvirus 1
gccuggucagaggccca

SEQ ID NO: 3955023 - RNA, 18 nt, Human herpesvirus 1
gccugucgcacccacagc

SEQ ID NO: 3955024 - RNA, 18 nt, Human herpesvirus 1
gccugugugucuucucuu

SEQ ID NO: 3955025 - RNA, 15 nt, Human herpesvirus 1
gccuguuugagcaga

SEQ ID NO: 3955026 - RNA, 17 nt, Human herpesvirus 1
gccuuccggaccugcuc

SEQ ID NO: 3955027 - RNA, 19 nt, Human herpesvirus 1
gacccgacaggcgaccgcc

SEQ ID NO: 3955028 - RNA, 19 nt, Human herpesvirus 1
gacccgcaacgcgcugggg

SEQ ID NO: 3955029 - RNA, 23 nt, Human herpesvirus 1
gacccgcaacgcgcuggggcugc

SEQ ID NO: 3955030 - RNA, 13 nt, Human herpesvirus 1
gacccggcccgag

SEQ ID NO: 3955031 - RNA, 18 nt, Human herpesvirus 1
gacccggcccuaacccca

SEQ ID NO: 3955032 - RNA, 17 nt, Human herpesvirus 1
gacccguuccagccccc

SEQ ID NO: 3955033 - RNA, 12 nt, Human herpesvirus 1
gacccuccggga

SEQ ID NO: 3955034 - RNA, 22 nt, Human herpesvirus 1
gacccucucuucucucccgggc

SEQ ID NO: 3955035 - RNA, 14 nt, Human herpesvirus 1
gaccgcagucccug

SEQ ID NO: 3955036 - RNA, 17 nt, Human herpesvirus 1
gaccggcaagcggagcg

SEQ ID NO: 3955037 - RNA, 21 nt, Human herpesvirus 1
gaccguuuggggcgugucugu

SEQ ID NO: 3955038 - RNA, 13 nt, Human herpesvirus 1
gaccucaccacca

SEQ ID NO: 3955039 - RNA, 14 nt, Human herpesvirus 1
gaccucggcgccuc

SEQ ID NO: 3955040 - RNA, 21 nt, Human herpesvirus 1
gaccuggggucgcucugucca

SEQ ID NO: 3955041 - RNA, 21 nt, Human herpesvirus 1
gacgagacgaacucguggacg

SEQ ID NO: 3955042 - RNA, 14 nt, Human herpesvirus 1
gacgcacacacccu

SEQ ID NO: 3955043 - RNA, 15 nt, Human herpesvirus 1
gacgcccagcagcuc

SEQ ID NO: 3955044 - RNA, 15 nt, Human herpesvirus 1
gacgccccggccgcc

SEQ ID NO: 3955045 - RNA, 22 nt, Human herpesvirus 1
gacgcgccccaaggcgcugcgg

SEQ ID NO: 3955046 - RNA, 17 nt, Human herpesvirus 1
gacgcucccgucgcccg

SEQ ID NO: 3955047 - RNA, 20 nt, Human herpesvirus 1
gacgcucuggacgucuggga

SEQ ID NO: 3955048 - RNA, 21 nt, Human herpesvirus 1
gacgcugcuccgccuggccug

SEQ ID NO: 3955049 - RNA, 20 nt, Human herpesvirus 1
gacgcuggccgacguggcgc

SEQ ID NO: 3955050 - RNA, 11 nt, Human herpesvirus 1
gacgcuggggg

SEQ ID NO: 3955051 - RNA, 18 nt, Human herpesvirus 1
gacggacgugcgccugga

SEQ ID NO: 3955052 - RNA, 17 nt, Human herpesvirus 1
gacggccaacgaggacc

SEQ ID NO: 3955053 - RNA, 17 nt, Human herpesvirus 1
gacggcccgaagccugc

SEQ ID NO: 3955054 - RNA, 20 nt, Human herpesvirus 1
gacggcccuuacggaccaga

SEQ ID NO: 3955055 - RNA, 18 nt, Human herpesvirus 1
gacggugagcgaggacgg

SEQ ID NO: 3955056 - RNA, 13 nt, Human herpesvirus 1
gacgguggugccc

SEQ ID NO: 3955057 - RNA, 16 nt, Human herpesvirus 1
gacguccugggccacc

SEQ ID NO: 3955058 - RNA, 19 nt, Human herpesvirus 1
gacgucgagaaggacaaac

SEQ ID NO: 3955059 - RNA, 18 nt, Human herpesvirus 1
gacgucuccaagcuuucc

SEQ ID NO: 3955060 - RNA, 15 nt, Human herpesvirus 1
gacucucccaccgcc

SEQ ID NO: 3955061 - RNA, 13 nt, Human herpesvirus 1
gacucucccccac

SEQ ID NO: 3955062 - RNA, 19 nt, Human herpesvirus 1
gagaaccuagggaacccag

SEQ ID NO: 3955063 - RNA, 23 nt, Human herpesvirus 1
gagcaaaacgccucccccugagc

SEQ ID NO: 3955064 - RNA, 21 nt, Human herpesvirus 1
gagcagagccgcaagccccca

SEQ ID NO: 3955065 - RNA, 18 nt, Human herpesvirus 1
gagcaggcggucggcggc

SEQ ID NO: 3955066 - RNA, 22 nt, Human herpesvirus 1
gagccacccgacaacagccccc

SEQ ID NO: 3955067 - RNA, 21 nt, Human herpesvirus 1
gagccagacccaacccccggc

SEQ ID NO: 3955068 - RNA, 19 nt, Human herpesvirus 1
gagcccccgccccuccccc

SEQ ID NO: 3955069 - RNA, 18 nt, Human herpesvirus 1
gagccccggaccccacgc

SEQ ID NO: 3955070 - RNA, 21 nt, Human herpesvirus 1
gagccccucgcccguccucgc

SEQ ID NO: 3955071 - RNA, 12 nt, Human herpesvirus 1
gagcgacccgcg

SEQ ID NO: 3955072 - RNA, 11 nt, Human herpesvirus 1
gagcuaugggc

SEQ ID NO: 3955073 - RNA, 22 nt, Human herpesvirus 1
gagcucccagagaccccagggu

SEQ ID NO: 3955074 - RNA, 21 nt, Human herpesvirus 1
gaggacaccccucguggcccc

SEQ ID NO: 3955075 - RNA, 20 nt, Human herpesvirus 1
gaggacgucgagaaggacaa

SEQ ID NO: 3955076 - RNA, 18 nt, Human herpesvirus 1
gaggagcccgcccuucgc

SEQ ID NO: 3955077 - RNA, 21 nt, Human herpesvirus 1
gaggaggaagaggaggagggg

SEQ ID NO: 3955078 - RNA, 23 nt, Human herpesvirus 1
gaggagggggccggggacggcga

SEQ ID NO: 3955079 - RNA, 19 nt, Human herpesvirus 1
gaggccuuguuccgcuucc

SEQ ID NO: 3955080 - RNA, 17 nt, Human herpesvirus 1
gaggcgcgcgcaccucc

SEQ ID NO: 3955081 - RNA, 23 nt, Human herpesvirus 1
gagggcaacgcgggacuaugccg

SEQ ID NO: 3955082 - RNA, 23 nt, Human herpesvirus 1
gagggcguaacguuccgccugga

SEQ ID NO: 3955083 - RNA, 17 nt, Human herpesvirus 1
gaggggcugggggagcg

SEQ ID NO: 3955084 - RNA, 22 nt, Human herpesvirus 1
gagguggacgucggagacgagc

SEQ ID NO: 3955085 - RNA, 14 nt, Human herpesvirus 1
gaguacgaggaucu

SEQ ID NO: 3955086 - RNA, 15 nt, Human herpesvirus 1
gauagagcugcuccg

SEQ ID NO: 3955087 - RNA, 19 nt, Human herpesvirus 1
gaucacggagggaaccacc

SEQ ID NO: 3955088 - RNA, 14 nt, Human herpesvirus 1
gauccucggccagc

SEQ ID NO: 3955089 - RNA, 16 nt, Human herpesvirus 1
gauccucgggcuacug

SEQ ID NO: 3955090 - RNA, 13 nt, Human herpesvirus 1
gaucggcgccgcg

SEQ ID NO: 3955091 - RNA, 17 nt, Human herpesvirus 1
gaugcuguggacgacgg

SEQ ID NO: 3955092 - RNA, 17 nt, Human herpesvirus 1
gaugucggguccaaacu

SEQ ID NO: 3955093 - RNA, 23 nt, Human herpesvirus 1
gauuuggguugggguuucugugu

SEQ ID NO: 3955094 - RNA, 23 nt, Human herpesvirus 1
gcaaaacgccucccccugagccg

SEQ ID NO: 3955095 - RNA, 17 nt, Human herpesvirus 1
gcaaaucccaccaaacu

SEQ ID NO: 3955096 - RNA, 20 nt, Human herpesvirus 1
gcaacaaggccguggacggc

SEQ ID NO: 3955097 - RNA, 19 nt, Human herpesvirus 1
gcaacacaacacgguuccc

SEQ ID NO: 3955098 - RNA, 18 nt, Human herpesvirus 1
gcaaccagcugcacgacc

SEQ ID NO: 3955099 - RNA, 19 nt, Human herpesvirus 1
gcaaccccaugaaggcccu

SEQ ID NO: 3955100 - RNA, 20 nt, Human herpesvirus 1
gcacaaaaagaccccgaucc

SEQ ID NO: 3955101 - RNA, 13 nt, Human herpesvirus 1
gcaccacccccgc

SEQ ID NO: 3955102 - RNA, 13 nt, Human herpesvirus 1
gcaccaucccggg

SEQ ID NO: 3955103 - RNA, 15 nt, Human herpesvirus 1
gcacccacgcccgcg

SEQ ID NO: 3955104 - RNA, 19 nt, Human herpesvirus 1
gcaccccccucgucccccu

SEQ ID NO: 3955105 - RNA, 20 nt, Human herpesvirus 1
gcaccgcaccagcgcggagg

SEQ ID NO: 3955106 - RNA, 15 nt, Human herpesvirus 1
gcaccgggcccccgc

SEQ ID NO: 3955107 - RNA, 16 nt, Human herpesvirus 1
gcaccgguucucccug

SEQ ID NO: 3955108 - RNA, 20 nt, Human herpesvirus 1
gcaccuccuacgccggggcg

SEQ ID NO: 3955109 - RNA, 16 nt, Human herpesvirus 1
gcaccucgaggacacc

SEQ ID NO: 3955110 - RNA, 20 nt, Human herpesvirus 1
gcacgaguucaaccucgggu

SEQ ID NO: 3955111 - RNA, 20 nt, Human herpesvirus 1
gcacgcccccuacgaggacg

SEQ ID NO: 3955112 - RNA, 15 nt, Human herpesvirus 1
gcagaccuauguguu

SEQ ID NO: 3955113 - RNA, 15 nt, Human herpesvirus 1
gcagacgcacccgcu

SEQ ID NO: 3955114 - RNA, 21 nt, Human herpesvirus 1
gcagcccggaggcgcccgcgg

SEQ ID NO: 3955115 - RNA, 15 nt, Human herpesvirus 1
gcagccuucucccgg

SEQ ID NO: 3955116 - RNA, 16 nt, Human herpesvirus 1
gcagccuucucccggu

SEQ ID NO: 3955117 - RNA, 14 nt, Human herpesvirus 1
gcagcuccccauga

SEQ ID NO: 3955118 - RNA, 15 nt, Human herpesvirus 1
guucagggcgacgcc

SEQ ID NO: 3955119 - RNA, 22 nt, Human herpesvirus 1
guucccccggcacgccuggggu

SEQ ID NO: 3955120 - RNA, 13 nt, Human herpesvirus 1
guuccgccuggag

SEQ ID NO: 3955121 - RNA, 23 nt, Human herpesvirus 1
guuccggacgccuucgccccaca

SEQ ID NO: 3955122 - RNA, 16 nt, Human herpesvirus 1
guuccguuuuccggaa

SEQ ID NO: 3955123 - RNA, 13 nt, Human herpesvirus 1
guugggaugggac

SEQ ID NO: 3955124 - RNA, 13 nt, Human herpesvirus 1
guugguccagacg

SEQ ID NO: 3955125 - RNA, 13 nt, Human herpesvirus 1
guuguugcuggcg

SEQ ID NO: 3955126 - RNA, 23 nt, Human herpesvirus 1
guuucguuccuucccccuccccc

SEQ ID NO: 3955127 - RNA, 14 nt, Human herpesvirus 1
guuugguccccccu

SEQ ID NO: 3955128 - RNA, 14 nt, Human herpesvirus 1
guuuucucuucccg

SEQ ID NO: 3955129 - RNA, 13 nt, Human herpesvirus 1
uaaaagaccaaaa

SEQ ID NO: 3955130 - RNA, 15 nt, Human herpesvirus 1
uaaaagaccacacca

SEQ ID NO: 3955131 - RNA, 12 nt, Human herpesvirus 1
uaaaaggcauua

SEQ ID NO: 3955132 - RNA, 20 nt, Human herpesvirus 1
uaaaccagguaauaccaaau

SEQ ID NO: 3955133 - RNA, 18 nt, Human herpesvirus 1
uaaauuuuacaaacagau

SEQ ID NO: 3955134 - RNA, 22 nt, Human herpesvirus 1
uaacaaccacccgcacccccag

SEQ ID NO: 3955135 - RNA, 17 nt, Human herpesvirus 1
uaacuacauuaaauugg

SEQ ID NO: 3955136 - RNA, 13 nt, Human herpesvirus 1
uaagacucucccc

SEQ ID NO: 3955137 - RNA, 13 nt, Human herpesvirus 1
uaaugaccaccac

SEQ ID NO: 3955138 - RNA, 11 nt, Human herpesvirus 1
uacaaacagau

SEQ ID NO: 3955139 - RNA, 13 nt, Human herpesvirus 1
uacaaccugacca

SEQ ID NO: 3955140 - RNA, 14 nt, Human herpesvirus 1
uacacagccaccca

SEQ ID NO: 3955141 - RNA, 13 nt, Human herpesvirus 1
uacacgagcaccc

SEQ ID NO: 3955142 - RNA, 14 nt, Human herpesvirus 1
uacacgagcacccu

SEQ ID NO: 3955143 - RNA, 14 nt, Human herpesvirus 1
uacagcccccagau

SEQ ID NO: 3955144 - RNA, 21 nt, Human herpesvirus 1
uacauugaggcggaaaauccc

SEQ ID NO: 3955145 - RNA, 23 nt, Human herpesvirus 1
uaccacgcccgaccacacacccc

SEQ ID NO: 3955146 - RNA, 18 nt, Human herpesvirus 1
uaccgaaggcgcuucccc

SEQ ID NO: 3955147 - RNA, 22 nt, Human herpesvirus 1
uaccggacccguuccagccccc

SEQ ID NO: 3955148 - RNA, 15 nt, Human herpesvirus 1
uaccuuuuuaauauc

SEQ ID NO: 3955149 - RNA, 14 nt, Human herpesvirus 1
uacggaccgccucg

SEQ ID NO: 3955150 - RNA, 21 nt, Human herpesvirus 1
uacuacaacgggagucgccuc

SEQ ID NO: 3955151 - RNA, 18 nt, Human herpesvirus 1
uacuacucggaaagcgaa

SEQ ID NO: 3955152 - RNA, 16 nt, Human herpesvirus 1
uacugcggucugucuc

SEQ ID NO: 3955153 - RNA, 19 nt, Human herpesvirus 1
uagaaacucauuaaugggc

SEQ ID NO: 3955154 - RNA, 12 nt, Human herpesvirus 1
uagcgccccggc

SEQ ID NO: 3955155 - RNA, 16 nt, Human herpesvirus 1
uagcucgcggagggcg

SEQ ID NO: 3955156 - RNA, 14 nt, Human herpesvirus 1
uagggaacccagag

SEQ ID NO: 3955157 - RNA, 15 nt, Human herpesvirus 1
uauacacagauguca

SEQ ID NO: 3955158 - RNA, 18 nt, Human herpesvirus 1
uauagccuaugccacgcc

SEQ ID NO: 3955159 - RNA, 13 nt, Human herpesvirus 1
uauauccguguau

SEQ ID NO: 3955160 - RNA, 14 nt, Human herpesvirus 1
uaucccacccugga

SEQ ID NO: 3955161 - RNA, 13 nt, Human herpesvirus 1
uaucccacggccu

SEQ ID NO: 3955162 - RNA, 21 nt, Human herpesvirus 1
uauccgaucccaggcgccgac

SEQ ID NO: 3955163 - RNA, 12 nt, Human herpesvirus 1
uauccugagccc

SEQ ID NO: 3955164 - RNA, 12 nt, Human herpesvirus 1
uauuauuuaccu

SEQ ID NO: 3955165 - RNA, 12 nt, Human herpesvirus 1
uauuccugccga

SEQ ID NO: 3955166 - RNA, 15 nt, Human herpesvirus 1
ucaacauaccccgcu

SEQ ID NO: 3955167 - RNA, 14 nt, Human herpesvirus 1
ucaaccacccggcc

SEQ ID NO: 3955168 - RNA, 15 nt, Human herpesvirus 1
ucaauaaaaggcauu

SEQ ID NO: 3955169 - RNA, 13 nt, Human herpesvirus 1
ucacagccccgca

SEQ ID NO: 3955170 - RNA, 13 nt, Human herpesvirus 1
cugaaccccagcc

SEQ ID NO: 3955171 - RNA, 16 nt, Human herpesvirus 1
cugaccccgcuccugu

SEQ ID NO: 3955172 - RNA, 16 nt, Human herpesvirus 1
cugacgccucagggcc

SEQ ID NO: 3955173 - RNA, 15 nt, Human herpesvirus 1
cugacgcgccuagcc

SEQ ID NO: 3955174 - RNA, 18 nt, Human herpesvirus 1
cugagccgcuuuccuacc

SEQ ID NO: 3955175 - RNA, 15 nt, Human herpesvirus 1
cugagcgcccuccug

SEQ ID NO: 3955176 - RNA, 16 nt, Human herpesvirus 1
cugaucccccgcgcgg

SEQ ID NO: 3955177 - RNA, 14 nt, Human herpesvirus 1
cugauguggcugcu

SEQ ID NO: 3955178 - RNA, 19 nt, Human herpesvirus 1
cugcaagaggucgucgggg

SEQ ID NO: 3955179 - RNA, 22 nt, Human herpesvirus 1
cugcagaaucacgagcugaccc

SEQ ID NO: 3955180 - RNA, 17 nt, Human herpesvirus 1
cugccaaacagcuggcc

SEQ ID NO: 3955181 - RNA, 14 nt, Human herpesvirus 1
cugccagaccucaa

SEQ ID NO: 3955182 - RNA, 14 nt, Human herpesvirus 1
cugccccgccaccc

SEQ ID NO: 3955183 - RNA, 15 nt, Human herpesvirus 1
cugcccggcggccag

SEQ ID NO: 3955184 - RNA, 16 nt, Human herpesvirus 1
cugcccuucugucugg

SEQ ID NO: 3955185 - RNA, 17 nt, Human herpesvirus 1
cugccucuccccccagg

SEQ ID NO: 3955186 - RNA, 18 nt, Human herpesvirus 1
cugccugacccucuccgg

SEQ ID NO: 3955187 - RNA, 20 nt, Human herpesvirus 1
cugccugacccucuccggga

SEQ ID NO: 3955188 - RNA, 21 nt, Human herpesvirus 1
cugcgaguccugcgccccgcc

SEQ ID NO: 3955189 - RNA, 16 nt, Human herpesvirus 1
cugcgccuugggcccg

SEQ ID NO: 3955190 - RNA, 19 nt, Human herpesvirus 1
cugcgccuugggcccgggg

SEQ ID NO: 3955191 - RNA, 19 nt, Human herpesvirus 1
cugcgcgagcaccugcggg

SEQ ID NO: 3955192 - RNA, 15 nt, Human herpesvirus 1
cugcgcggcgcccgc

SEQ ID NO: 3955193 - RNA, 22 nt, Human herpesvirus 1
cugcgggccgcgguggacagcc

SEQ ID NO: 3955194 - RNA, 23 nt, Human herpesvirus 1
cugcgggccgcgguggacagcca

SEQ ID NO: 3955195 - RNA, 23 nt, Human herpesvirus 1
cugcgguccggagccgcgcggcc

SEQ ID NO: 3955196 - RNA, 12 nt, Human herpesvirus 1
cugcgugucaaa

SEQ ID NO: 3955197 - RNA, 18 nt, Human herpesvirus 1
cugcuccccaccccggag

SEQ ID NO: 3955198 - RNA, 19 nt, Human herpesvirus 1
cugcuccgcaacggggcgc

SEQ ID NO: 3955199 - RNA, 15 nt, Human herpesvirus 1
cuggacgcccgggcg

SEQ ID NO: 3955200 - RNA, 17 nt, Human herpesvirus 1
cuggccaaucggcggcc

SEQ ID NO: 3955201 - RNA, 17 nt, Human herpesvirus 1
cuggccccaguccccaa

SEQ ID NO: 3955202 - RNA, 19 nt, Human herpesvirus 1
cuggccccaguccccaaga

SEQ ID NO: 3955203 - RNA, 18 nt, Human herpesvirus 1
cuggccgacguggcgcac

SEQ ID NO: 3955204 - RNA, 18 nt, Human herpesvirus 1
cuggccgcucgguggcuc

SEQ ID NO: 3955205 - RNA, 18 nt, Human herpesvirus 1
cuggccgggagcaccaca

SEQ ID NO: 3955206 - RNA, 21 nt, Human herpesvirus 1
cuggccugcgaggugcgccag

SEQ ID NO: 3955207 - RNA, 18 nt, Human herpesvirus 1
cuggccuuuuacgagguc

SEQ ID NO: 3955208 - RNA, 15 nt, Human herpesvirus 1
cuggcguacaacggc

SEQ ID NO: 3955209 - RNA, 23 nt, Human herpesvirus 1
cuggcguucgucgcccuccacca

SEQ ID NO: 3955210 - RNA, 17 nt, Human herpesvirus 1
cugggauccgaccccca

SEQ ID NO: 3955211 - RNA, 15 nt, Human herpesvirus 1
cugggauggcuccug

SEQ ID NO: 3955212 - RNA, 14 nt, Human herpesvirus 1
cugggccaccugac

SEQ ID NO: 3955213 - RNA, 20 nt, Human herpesvirus 1
cugggccauggacagcgacc

SEQ ID NO: 3955214 - RNA, 13 nt, Human herpesvirus 1
cugggccgagguc

SEQ ID NO: 3955215 - RNA, 18 nt, Human herpesvirus 1
cugggggcacccacgccc

SEQ ID NO: 3955216 - RNA, 20 nt, Human herpesvirus 1
cugggggggauccgcccuau

SEQ ID NO: 3955217 - RNA, 14 nt, Human herpesvirus 1
cuggguucuccugg

SEQ ID NO: 3955218 - RNA, 19 nt, Human herpesvirus 1
cugguccacacccaguggc

SEQ ID NO: 3955219 - RNA, 18 nt, Human herpesvirus 1
cuggucccccggggaccu

SEQ ID NO: 3955220 - RNA, 15 nt, Human herpesvirus 1
cugguugcggcccgc

SEQ ID NO: 3955221 - RNA, 19 nt, Human herpesvirus 1
cugguuguccguggcccca

SEQ ID NO: 3955222 - RNA, 22 nt, Human herpesvirus 1
cuguccugucuuggggcccacc

SEQ ID NO: 3955223 - RNA, 17 nt, Human herpesvirus 1
cugucgcacccacagcu

SEQ ID NO: 3955224 - RNA, 16 nt, Human herpesvirus 1
cugucggaccaccgcc

SEQ ID NO: 3955225 - RNA, 16 nt, Human herpesvirus 1
cugugccaccagccug

SEQ ID NO: 3955226 - RNA, 14 nt, Human herpesvirus 1
cuguggacccgagc

SEQ ID NO: 3955227 - RNA, 16 nt, Human herpesvirus 1
cuguggcagaccggca

SEQ ID NO: 3955228 - RNA, 20 nt, Human herpesvirus 1
cuuaauaaauuuuacaaaca

SEQ ID NO: 3955229 - RNA, 14 nt, Human herpesvirus 1
cuucagcgccguca

SEQ ID NO: 3955230 - RNA, 14 nt, Human herpesvirus 1
cuucaucacccccg

SEQ ID NO: 3955231 - RNA, 17 nt, Human herpesvirus 1
cuuccccccccccccuu

SEQ ID NO: 3955232 - RNA, 14 nt, Human herpesvirus 1
cuucccucagguca

SEQ ID NO: 3955233 - RNA, 12 nt, Human herpesvirus 1
cuucccuccccc

SEQ ID NO: 3955234 - RNA, 13 nt, Human herpesvirus 1
cuucccucccccu

SEQ ID NO: 3955235 - RNA, 14 nt, Human herpesvirus 1
cuuccgguccugga

SEQ ID NO: 3955236 - RNA, 17 nt, Human herpesvirus 1
cuucgacguggaggaag

SEQ ID NO: 3955237 - RNA, 16 nt, Human herpesvirus 1
cuucggccccgcgucu

SEQ ID NO: 3955238 - RNA, 21 nt, Human herpesvirus 1
cuucuugucgucucucuuccc

SEQ ID NO: 3955239 - RNA, 22 nt, Human herpesvirus 1
cuugaggggggagaugggaccc

SEQ ID NO: 3955240 - RNA, 18 nt, Human herpesvirus 1
cuuggccggggagggcag

SEQ ID NO: 3955241 - RNA, 12 nt, Human herpesvirus 1
cuuggcggccgc

SEQ ID NO: 3955242 - RNA, 20 nt, Human herpesvirus 1
cuugguucggggccgcccug

SEQ ID NO: 3955243 - RNA, 23 nt, Human herpesvirus 1
cuugguucggggccgcccuggcc

SEQ ID NO: 3955244 - RNA, 15 nt, Human herpesvirus 1
cuuuaaccucccccg

SEQ ID NO: 3955245 - RNA, 16 nt, Human herpesvirus 1
cuuuaacuacauuaaa

SEQ ID NO: 3955246 - RNA, 23 nt, Human herpesvirus 1
cuuuccgagggcgagcucagcuu

SEQ ID NO: 3955247 - RNA, 18 nt, Human herpesvirus 1
gaaaaugaaccagacccu

SEQ ID NO: 3955248 - RNA, 15 nt, Human herpesvirus 1
gaaacuggcccgcgc

SEQ ID NO: 3955249 - RNA, 18 nt, Human herpesvirus 1
gaacaauaaaggcggugg

SEQ ID NO: 3955250 - RNA, 14 nt, Human herpesvirus 1
gaacacaaggccaa

SEQ ID NO: 3955251 - RNA, 22 nt, Human herpesvirus 1
gaacacggggacggcggggcag

SEQ ID NO: 3955252 - RNA, 21 nt, Human herpesvirus 1
gaaccacguacggcucgcggg

SEQ ID NO: 3955253 - RNA, 21 nt, Human herpesvirus 1
gaaccuagggaacccagagua

SEQ ID NO: 3955254 - RNA, 15 nt, Human herpesvirus 1
gaacgcagccccgcu

SEQ ID NO: 3955255 - RNA, 16 nt, Human herpesvirus 1
gaacgcggaccccccc

SEQ ID NO: 3955256 - RNA, 14 nt, Human herpesvirus 1
gaagaccagggccc

SEQ ID NO: 3955257 - RNA, 15 nt, Human herpesvirus 1
gaagacccccccgga

SEQ ID NO: 3955258 - RNA, 24 nt, Human herpesvirus 1
gaagaccugcuuauucucggggag

SEQ ID NO: 3955259 - RNA, 15 nt, Human herpesvirus 1
gaagacgaggcggcc

SEQ ID NO: 3955260 - RNA, 16 nt, Human herpesvirus 1
gaaggcgcuuccccgc

SEQ ID NO: 3955261 - RNA, 14 nt, Human herpesvirus 1
gaaucccccaaggg

SEQ ID NO: 3955262 - RNA, 19 nt, Human herpesvirus 1
gacacacggcguggagcaa

SEQ ID NO: 3955263 - RNA, 16 nt, Human herpesvirus 1
gacaccgcguguuccc

SEQ ID NO: 3955264 - RNA, 22 nt, Human herpesvirus 1
gacacguugggguuguugcugg

SEQ ID NO: 3955265 - RNA, 20 nt, Human herpesvirus 1
gacagcacucacagccccgc

SEQ ID NO: 3955266 - RNA, 21 nt, Human herpesvirus 1
cgcgccgcugcccgacccggc

SEQ ID NO: 3955267 - RNA, 19 nt, Human herpesvirus 1
cgcgccguuggcccccgcc

SEQ ID NO: 3955268 - RNA, 12 nt, Human herpesvirus 1
cgcgccucccgg

SEQ ID NO: 3955269 - RNA, 16 nt, Human herpesvirus 1
cgcgcgaaaucguggc

SEQ ID NO: 3955270 - RNA, 17 nt, Human herpesvirus 1
cgcgcggacgacggcgg

SEQ ID NO: 3955271 - RNA, 15 nt, Human herpesvirus 1
cgcgcggucggcaag

SEQ ID NO: 3955272 - RNA, 14 nt, Human herpesvirus 1
cgcgcgucgacguc

SEQ ID NO: 3955273 - RNA, 19 nt, Human herpesvirus 1
cgcgcgucucuggggagcc

SEQ ID NO: 3955274 - RNA, 17 nt, Human herpesvirus 1
cgcgcguggaccugggg

SEQ ID NO: 3955275 - RNA, 17 nt, Human herpesvirus 1
cgcggagggcggccagc

SEQ ID NO: 3955276 - RNA, 17 nt, Human herpesvirus 1
cgcggcccggggccugc

SEQ ID NO: 3955277 - RNA, 18 nt, Human herpesvirus 1
cgcggccgcgacccaggc

SEQ ID NO: 3955278 - RNA, 16 nt, Human herpesvirus 1
cgcggcgacaacgcgg

SEQ ID NO: 3955279 - RNA, 21 nt, Human herpesvirus 1
cgcggcugccaaacagcuggc

SEQ ID NO: 3955280 - RNA, 19 nt, Human herpesvirus 1
cgcggcuucaucgcgcccc

SEQ ID NO: 3955281 - RNA, 16 nt, Human herpesvirus 1
cgcgggaggccgcccc

SEQ ID NO: 3955282 - RNA, 13 nt, Human herpesvirus 1
cgcgggcgacgcc

SEQ ID NO: 3955283 - RNA, 14 nt, Human herpesvirus 1
cgcggggcccccgc

SEQ ID NO: 3955284 - RNA, 15 nt, Human herpesvirus 1
cgcggggccuccccc

SEQ ID NO: 3955285 - RNA, 23 nt, Human herpesvirus 1
cgcggggggggcgggcucguccc

SEQ ID NO: 3955286 - RNA, 23 nt, Human herpesvirus 1
cgcgguacgccccaccggcacca

SEQ ID NO: 3955287 - RNA, 16 nt, Human herpesvirus 1
cgcgguagcccggccg

SEQ ID NO: 3955288 - RNA, 19 nt, Human herpesvirus 1
cgcgguagcccggccgugu

SEQ ID NO: 3955289 - RNA, 22 nt, Human herpesvirus 1
cgcgguucgcgucccgcccacc

SEQ ID NO: 3955290 - RNA, 18 nt, Human herpesvirus 1
cgcgugcccacgucgccc

SEQ ID NO: 3955291 - RNA, 21 nt, Human herpesvirus 1
cgcgugcccacgucgccccgc

SEQ ID NO: 3955292 - RNA, 14 nt, Human herpesvirus 1
cgcucccgccuucc

SEQ ID NO: 3955293 - RNA, 18 nt, Human herpesvirus 1
cgcuccugugcacccuca

SEQ ID NO: 3955294 - RNA, 21 nt, Human herpesvirus 1
cgcucgcucucggugccccug

SEQ ID NO: 3955295 - RNA, 14 nt, Human herpesvirus 1
cgcucugacggccc

SEQ ID NO: 3955296 - RNA, 16 nt, Human herpesvirus 1
cgcuggggcugccgug

SEQ ID NO: 3955297 - RNA, 21 nt, Human herpesvirus 1
cgcuggguggucucuggccgc

SEQ ID NO: 3955298 - RNA, 12 nt, Human herpesvirus 1
cgcugugccauc

SEQ ID NO: 3955299 - RNA, 17 nt, Human herpesvirus 1
cgcugugccaucgcgcc

SEQ ID NO: 3955300 - RNA, 23 nt, Human herpesvirus 1
cgcuguucucguuccucacugcc

SEQ ID NO: 3955301 - RNA, 15 nt, Human herpesvirus 1
cgcuucauccccgag

SEQ ID NO: 3955302 - RNA, 17 nt, Human herpesvirus 1
cgcuuuauaggccggga

SEQ ID NO: 3955303 - RNA, 23 nt, Human herpesvirus 1
cggaaaaccugggcggccucucc

SEQ ID NO: 3955304 - RNA, 22 nt, Human herpesvirus 1
cggaaagcaagaacaauaaagg

SEQ ID NO: 3955305 - RNA, 23 nt, Human herpesvirus 1
cggacccucucuucucucccggg

SEQ ID NO: 3955306 - RNA, 15 nt, Human herpesvirus 1
cggaccugcucucgc

SEQ ID NO: 3955307 - RNA, 21 nt, Human herpesvirus 1
cggacgccguggcgccccggc

SEQ ID NO: 3955308 - RNA, 19 nt, Human herpesvirus 1
cggacggcgcggggccccc

SEQ ID NO: 3955309 - RNA, 14 nt, Human herpesvirus 1
cggagcccgcuggg

SEQ ID NO: 3955310 - RNA, 20 nt, Human herpesvirus 1
cggagcuuucuuccggccuc

SEQ ID NO: 3955311 - RNA, 19 nt, Human herpesvirus 1
cggaggaaacccccgaccc

SEQ ID NO: 3955312 - RNA, 13 nt, Human herpesvirus 1
cggaggagccagu

SEQ ID NO: 3955313 - RNA, 23 nt, Human herpesvirus 1
cggaggggcuccuuagcgcggcc

SEQ ID NO: 3955314 - RNA, 16 nt, Human herpesvirus 1
cggcaagauccucggg

SEQ ID NO: 3955315 - RNA, 17 nt, Human herpesvirus 1
cggcaauucccgcggcc

SEQ ID NO: 3955316 - RNA, 19 nt, Human herpesvirus 1
cggcaccaccgacucuccc

SEQ ID NO: 3955317 - RNA, 14 nt, Human herpesvirus 1
cggcacgccugggg

SEQ ID NO: 3955318 - RNA, 18 nt, Human herpesvirus 1
cggcagcgcuccgacgac

SEQ ID NO: 3955319 - RNA, 19 nt, Human herpesvirus 1
cggcaggcaccgcaccagc

SEQ ID NO: 3955320 - RNA, 19 nt, Human herpesvirus 1
cggcauucgggccugccug

SEQ ID NO: 3955321 - RNA, 16 nt, Human herpesvirus 1
cggccaaccagcgucc

SEQ ID NO: 3955322 - RNA, 18 nt, Human herpesvirus 1
cggccacacagccggcca

SEQ ID NO: 3955323 - RNA, 12 nt, Human herpesvirus 1
cggccaccgcua

SEQ ID NO: 3955324 - RNA, 21 nt, Human herpesvirus 1
cggccagaucuacugcugggc

SEQ ID NO: 3955325 - RNA, 12 nt, Human herpesvirus 1
cggccccagccc

SEQ ID NO: 3955326 - RNA, 23 nt, Human herpesvirus 1
cggccccgcgucuggccccggcg

SEQ ID NO: 3955327 - RNA, 18 nt, Human herpesvirus 1
cggccccugggccccggg

SEQ ID NO: 3955328 - RNA, 19 nt, Human herpesvirus 1
cggccccugggccccggga

SEQ ID NO: 3955329 - RNA, 18 nt, Human herpesvirus 1
cggcccgcguuuggccug

SEQ ID NO: 3955330 - RNA, 20 nt, Human herpesvirus 1
cggcccucuuggaggacccc

SEQ ID NO: 3955331 - RNA, 16 nt, Human herpesvirus 1
cggcccugaugcagga

SEQ ID NO: 3955332 - RNA, 12 nt, Human herpesvirus 1
cggcccugcugc

SEQ ID NO: 3955333 - RNA, 19 nt, Human herpesvirus 1
cggccgccacccaggcgcu

SEQ ID NO: 3955334 - RNA, 15 nt, Human herpesvirus 1
cggccgugggcgccu

SEQ ID NO: 3955335 - RNA, 17 nt, Human herpesvirus 1
cggccguugucuccccg

SEQ ID NO: 3955336 - RNA, 21 nt, Human herpesvirus 1
cggcgaccucggcgccucugg

SEQ ID NO: 3955337 - RNA, 20 nt, Human herpesvirus 1
cggcgacuuugacgaggcca

SEQ ID NO: 3955338 - RNA, 17 nt, Human herpesvirus 1
cggcgcccaccccgugu

SEQ ID NO: 3955339 - RNA, 21 nt, Human herpesvirus 1
cggcgccggggcucucggggc

SEQ ID NO: 3955340 - RNA, 23 nt, Human herpesvirus 1
cggcgcgacaacgagcccccgcc

SEQ ID NO: 3955341 - RNA, 17 nt, Human herpesvirus 1
cggcgcgagcucccugc

SEQ ID NO: 3955342 - RNA, 13 nt, Human herpesvirus 1
cggcgcggggccc

SEQ ID NO: 3955343 - RNA, 19 nt, Human herpesvirus 1
cggcgcguguaccacaucc

SEQ ID NO: 3955344 - RNA, 14 nt, Human herpesvirus 1
cggcgcugcagcgc

SEQ ID NO: 3955345 - RNA, 22 nt, Human herpesvirus 1
cggcggccaguugagccgcgcc

SEQ ID NO: 3955346 - RNA, 21 nt, Human herpesvirus 1
cggcggcuguagcgccccggc

SEQ ID NO: 3955347 - RNA, 15 nt, Human herpesvirus 1
cggcggggcccggcc

SEQ ID NO: 3955348 - RNA, 20 nt, Human herpesvirus 1
cggcgggugucugcucccca

SEQ ID NO: 3955349 - RNA, 23 nt, Human herpesvirus 1
cggcgguaaucauaaccacgccc

SEQ ID NO: 3955350 - RNA, 14 nt, Human herpesvirus 1
cggcgugucggugc

SEQ ID NO: 3955351 - RNA, 14 nt, Human herpesvirus 1
cggcuaccuggccc

SEQ ID NO: 3955352 - RNA, 16 nt, Human herpesvirus 1
cggcucggccuauggc

SEQ ID NO: 3955353 - RNA, 19 nt, Human herpesvirus 1
cggcugccaaacagcuggc

SEQ ID NO: 3955354 - RNA, 14 nt, Human herpesvirus 1
cgggagccccggac

SEQ ID NO: 3955355 - RNA, 14 nt, Human herpesvirus 1
cgggagcgccagga

SEQ ID NO: 3955356 - RNA, 16 nt, Human herpesvirus 1
cgggaggaagccacaa

SEQ ID NO: 3955357 - RNA, 23 nt, Human herpesvirus 1
cgggauaccgguaugccgcggcc

SEQ ID NO: 3955358 - RNA, 14 nt, Human herpesvirus 1
cgggauccacaccg

SEQ ID NO: 3955359 - RNA, 13 nt, Human herpesvirus 1
cgggcaccacaca

SEQ ID NO: 3955360 - RNA, 16 nt, Human herpesvirus 1
cgggcaucucgcgccc

SEQ ID NO: 3955361 - RNA, 18 nt, Human herpesvirus 1
cgggccacgccacccugc

SEQ ID NO: 3955362 - RNA, 13 nt, Human herpesvirus 1
cgggcccaaggcc

SEQ ID NO: 3955363 - RNA, 16 nt, Human herpesvirus 1
cgggcccaaggcccca

SEQ ID NO: 3955364 - RNA, 13 nt, Human herpesvirus 1
cgggcccccggcc

SEQ ID NO: 3955365 - RNA, 22 nt, Human herpesvirus 1
cgggccccggggagacagcgcc

SEQ ID NO: 3955366 - RNA, 14 nt, Human herpesvirus 1
cgggcccggccagg

SEQ ID NO: 3955367 - RNA, 13 nt, Human herpesvirus 1
cgggccgcccacu

SEQ ID NO: 3955368 - RNA, 19 nt, Human herpesvirus 1
cgggccgcccacuucccgg

SEQ ID NO: 3955369 - RNA, 16 nt, Human herpesvirus 1
cgggccucgugggcac

SEQ ID NO: 3955370 - RNA, 16 nt, Human herpesvirus 1
caaggugggccagccg

SEQ ID NO: 3955371 - RNA, 20 nt, Human herpesvirus 1
caaguggcaggagguggacg

SEQ ID NO: 3955372 - RNA, 13 nt, Human herpesvirus 1
caaucggcggccg

SEQ ID NO: 3955373 - RNA, 20 nt, Human herpesvirus 1
caauguuuuuauuggucaaa

SEQ ID NO: 3955374 - RNA, 14 nt, Human herpesvirus 1
caauuugcacccag

SEQ ID NO: 3955375 - RNA, 17 nt, Human herpesvirus 1
caauuugcacccagccu

SEQ ID NO: 3955376 - RNA, 18 nt, Human herpesvirus 1
caauuugcacccagccuu

SEQ ID NO: 3955377 - RNA, 19 nt, Human herpesvirus 1
cacaacgccagccugcggc

SEQ ID NO: 3955378 - RNA, 20 nt, Human herpesvirus 1
cacaacggcaugccucugcg

SEQ ID NO: 3955379 - RNA, 13 nt, Human herpesvirus 1
cacacaccagcgg

SEQ ID NO: 3955380 - RNA, 14 nt, Human herpesvirus 1
cacacaccccccau

SEQ ID NO: 3955381 - RNA, 19 nt, Human herpesvirus 1
cacaccagcuacgccgccg

SEQ ID NO: 3955382 - RNA, 16 nt, Human herpesvirus 1
cacaccgguccccgga

SEQ ID NO: 3955383 - RNA, 17 nt, Human herpesvirus 1
cacacgggugcgucugg

SEQ ID NO: 3955384 - RNA, 13 nt, Human herpesvirus 1
cacagccuggccg

SEQ ID NO: 3955385 - RNA, 16 nt, Human herpesvirus 1
cacagccuggccgugc

SEQ ID NO: 3955386 - RNA, 15 nt, Human herpesvirus 1
cacaugcggaaagca

SEQ ID NO: 3955387 - RNA, 17 nt, Human herpesvirus 1
cacaugcggaaagcaag

SEQ ID NO: 3955388 - RNA, 21 nt, Human herpesvirus 1
cacaugcggaaagcaagaaca

SEQ ID NO: 3955389 - RNA, 20 nt, Human herpesvirus 1
cacaugggggaggugccccc

SEQ ID NO: 3955390 - RNA, 15 nt, Human herpesvirus 1
caccaacgcacgagc

SEQ ID NO: 3955391 - RNA, 15 nt, Human herpesvirus 1
caccaccaaccugac

SEQ ID NO: 3955392 - RNA, 14 nt, Human herpesvirus 1
caccaccuucacca

SEQ ID NO: 3955393 - RNA, 17 nt, Human herpesvirus 1
caccagcagcuugcggg

SEQ ID NO: 3955394 - RNA, 12 nt, Human herpesvirus 1
caccagccuggu

SEQ ID NO: 3955395 - RNA, 23 nt, Human herpesvirus 1
caccagccugguuguccguggcc

SEQ ID NO: 3955396 - RNA, 16 nt, Human herpesvirus 1
caccaugcuggaggau

SEQ ID NO: 3955397 - RNA, 16 nt, Human herpesvirus 1
cacccacccaccaaga

SEQ ID NO: 3955398 - RNA, 14 nt, Human herpesvirus 1
cacccacgccgccu

SEQ ID NO: 3955399 - RNA, 18 nt, Human herpesvirus 1
cacccaguuuccaccccc

SEQ ID NO: 3955400 - RNA, 15 nt, Human herpesvirus 1
cacccccccaacggg

SEQ ID NO: 3955401 - RNA, 14 nt, Human herpesvirus 1
cacccccgcccggg

SEQ ID NO: 3955402 - RNA, 17 nt, Human herpesvirus 1
caccccgaagccccggc

SEQ ID NO: 3955403 - RNA, 23 nt, Human herpesvirus 1
caccccgcaauuugcacccagcc

SEQ ID NO: 3955404 - RNA, 15 nt, Human herpesvirus 1
cacccgaaccaccac

SEQ ID NO: 3955405 - RNA, 16 nt, Human herpesvirus 1
cacccgaggcggccug

SEQ ID NO: 3955406 - RNA, 16 nt, Human herpesvirus 1
cacccuaccccagucc

SEQ ID NO: 3955407 - RNA, 22 nt, Human herpesvirus 1
cacccuccgcuggggcccccag

SEQ ID NO: 3955408 - RNA, 18 nt, Human herpesvirus 1
cacccugcugcccccgga

SEQ ID NO: 3955409 - RNA, 19 nt, Human herpesvirus 1
cacccugcugcccccggag

SEQ ID NO: 3955410 - RNA, 17 nt, Human herpesvirus 1
caccgaacccggcccgg

SEQ ID NO: 3955411 - RNA, 14 nt, Human herpesvirus 1
caccgacacaugca

SEQ ID NO: 3955412 - RNA, 21 nt, Human herpesvirus 1
caccgacaccgcacugcggcu

SEQ ID NO: 3955413 - RNA, 16 nt, Human herpesvirus 1
caccgcaccagcgcgg

SEQ ID NO: 3955414 - RNA, 17 nt, Human herpesvirus 1
caccgcccacagagggc

SEQ ID NO: 3955415 - RNA, 14 nt, Human herpesvirus 1
caccgcugggcgcu

SEQ ID NO: 3955416 - RNA, 18 nt, Human herpesvirus 1
caccgggaagcagggccc

SEQ ID NO: 3955417 - RNA, 16 nt, Human herpesvirus 1
caccggugcgcccccc

SEQ ID NO: 3955418 - RNA, 19 nt, Human herpesvirus 1
caccgguucguauccacaa

SEQ ID NO: 3955419 - RNA, 12 nt, Human herpesvirus 1
caccuccacccc

SEQ ID NO: 3955420 - RNA, 22 nt, Human herpesvirus 1
caccuccacccccucgaccacc

SEQ ID NO: 3955421 - RNA, 18 nt, Human herpesvirus 1
caccuccccagcggccag

SEQ ID NO: 3955422 - RNA, 20 nt, Human herpesvirus 1
caccuccgcgagcagagccg

SEQ ID NO: 3955423 - RNA, 19 nt, Human herpesvirus 1
caccuuugacggcgcggcc

SEQ ID NO: 3955424 - RNA, 20 nt, Human herpesvirus 1
caccuuugacggcgcggccg

SEQ ID NO: 3955425 - RNA, 16 nt, Human herpesvirus 1
cacgacacccacccca

SEQ ID NO: 3955426 - RNA, 13 nt, Human herpesvirus 1
cacgaccugcgcu

SEQ ID NO: 3955427 - RNA, 13 nt, Human herpesvirus 1
cacgagcgccagc

SEQ ID NO: 3955428 - RNA, 17 nt, Human herpesvirus 1
cacgauuccgguuuggg

SEQ ID NO: 3955429 - RNA, 15 nt, Human herpesvirus 1
cacgcaagaccaggc

SEQ ID NO: 3955430 - RNA, 19 nt, Human herpesvirus 1
cacgcaagaccaggccugg

SEQ ID NO: 3955431 - RNA, 15 nt, Human herpesvirus 1
cacgcacgcucccau

SEQ ID NO: 3955432 - RNA, 17 nt, Human herpesvirus 1
cacgccaagcccccgcc

SEQ ID NO: 3955433 - RNA, 18 nt, Human herpesvirus 1
cacgccaaugcccucccu

SEQ ID NO: 3955434 - RNA, 18 nt, Human herpesvirus 1
cacgccuaccggccccug

SEQ ID NO: 3955435 - RNA, 21 nt, Human herpesvirus 1
cacgccuaccggccccugggc

SEQ ID NO: 3955436 - RNA, 20 nt, Human herpesvirus 1
cacgccuggggucgcggccg

SEQ ID NO: 3955437 - RNA, 23 nt, Human herpesvirus 1
cacgcgccgccgacucccggcuu

SEQ ID NO: 3955438 - RNA, 20 nt, Human herpesvirus 1
cacgcucgcggagcuguacg

SEQ ID NO: 3955439 - RNA, 20 nt, Human herpesvirus 1
cacgggcaccacacaccagc

SEQ ID NO: 3955440 - RNA, 13 nt, Human herpesvirus 1
cacggggacggcg

SEQ ID NO: 3955441 - RNA, 22 nt, Human herpesvirus 1
cacggguggccgggcguugggg

SEQ ID NO: 3955442 - RNA, 21 nt, Human herpesvirus 1
cacgugaucagcacgccaccg

SEQ ID NO: 3955443 - RNA, 14 nt, Human herpesvirus 1
cacgugcugcugcg

SEQ ID NO: 3955444 - RNA, 16 nt, Human herpesvirus 1
cacuacaccagccaau

SEQ ID NO: 3955445 - RNA, 22 nt, Human herpesvirus 1
cacuacccaccgcgagaugucc

SEQ ID NO: 3955446 - RNA, 22 nt, Human herpesvirus 1
cacuacgcuucggccgccaccc

SEQ ID NO: 3955447 - RNA, 15 nt, Human herpesvirus 1
cacucacagccccgc

SEQ ID NO: 3955448 - RNA, 22 nt, Human herpesvirus 1
cacucaccggcggacccccgga

SEQ ID NO: 3955449 - RNA, 16 nt, Human herpesvirus 1
cacugcccgucgcgcg

SEQ ID NO: 3955450 - RNA, 16 nt, Human herpesvirus 1
cacuggccgggagcac

SEQ ID NO: 3955451 - RNA, 11 nt, Human herpesvirus 1
cacugucgucg

SEQ ID NO: 3955452 - RNA, 16 nt, Human herpesvirus 1
cacuguuuuccgcccc

SEQ ID NO: 3955453 - RNA, 18 nt, Human herpesvirus 1
cacuucccgguaugguaa

SEQ ID NO: 3955454 - RNA, 16 nt, Human herpesvirus 1
cagaacucgccccgga

SEQ ID NO: 3955455 - RNA, 19 nt, Human herpesvirus 1
cagaccccuucuccccaca

SEQ ID NO: 3955456 - RNA, 19 nt, Human herpesvirus 1
cagacgaaaagccccgggc

SEQ ID NO: 3955457 - RNA, 15 nt, Human herpesvirus 1
cagagaccccagggu

SEQ ID NO: 3955458 - RNA, 20 nt, Human herpesvirus 1
cagaucuacugcugggccau

SEQ ID NO: 3955459 - RNA, 20 nt, Human herpesvirus 1
cagauuguccgcggggccuc

SEQ ID NO: 3955460 - RNA, 18 nt, Human herpesvirus 1
cagcaaauaugccuuggu

SEQ ID NO: 3955461 - RNA, 20 nt, Human herpesvirus 1
cagcaaauaugccuuggugg

SEQ ID NO: 3955462 - RNA, 19 nt, Human herpesvirus 1
cagcaucgggaugcugccc

SEQ ID NO: 3955463 - RNA, 14 nt, Human herpesvirus 1
cagcauggcgccac

SEQ ID NO: 3955464 - RNA, 15 nt, Human herpesvirus 1
cagccacuuccccga

SEQ ID NO: 3955465 - RNA, 18 nt, Human herpesvirus 1
cagccauauccugagccc

SEQ ID NO: 3955466 - RNA, 19 nt, Human herpesvirus 1
cagcccgcccucacagggc

SEQ ID NO: 3955467 - RNA, 15 nt, Human herpesvirus 1
cagcccucccgaccg

SEQ ID NO: 3955468 - RNA, 15 nt, Human herpesvirus 1
cagccugccucuccc

SEQ ID NO: 3955469 - RNA, 16 nt, Human herpesvirus 1
cagccuuuaacuacau

SEQ ID NO: 3955470 - RNA, 20 nt, Human herpesvirus 1
cagcgaagcagccgccuggc

SEQ ID NO: 3955471 - RNA, 16 nt, Human herpesvirus 1
cagcgaccccacggcc

SEQ ID NO: 3955472 - RNA, 22 nt, Human herpesvirus 1
cagcgaccccacggccuccgcg

SEQ ID NO: 3955473 - RNA, 14 nt, Human herpesvirus 1
cagcgaccuggggu

SEQ ID NO: 3955474 - RNA, 18 nt, Human herpesvirus 1
cagcgccggccuccccgu

SEQ ID NO: 3955475 - RNA, 14 nt, Human herpesvirus 1
cagcggccugcugg

SEQ ID NO: 3955476 - RNA, 16 nt, Human herpesvirus 1
cagcugaccgacccuc

SEQ ID NO: 3955477 - RNA, 13 nt, Human herpesvirus 1
cagcugagccgcg

SEQ ID NO: 3955478 - RNA, 19 nt, Human herpesvirus 1
caggaaauccguggccccg

SEQ ID NO: 3955479 - RNA, 22 nt, Human herpesvirus 1
caggaaauccguggccccggcc

SEQ ID NO: 3955480 - RNA, 15 nt, Human herpesvirus 1
caggacaccgcgugu

SEQ ID NO: 3955481 - RNA, 22 nt, Human herpesvirus 1
caggacgccgcgacgccuuacc

SEQ ID NO: 3955482 - RNA, 21 nt, Human herpesvirus 1
caggccguuccgaucgcccug

SEQ ID NO: 3955483 - RNA, 14 nt, Human herpesvirus 1
caggccuccacccc

SEQ ID NO: 3955484 - RNA, 16 nt, Human herpesvirus 1
caggccuccacccccu

SEQ ID NO: 3955485 - RNA, 12 nt, Human herpesvirus 1
cccaacagccgc

SEQ ID NO: 3955486 - RNA, 15 nt, Human herpesvirus 1
cccaacccacacgca

SEQ ID NO: 3955487 - RNA, 15 nt, Human herpesvirus 1
cccaacgccacgcag

SEQ ID NO: 3955488 - RNA, 19 nt, Human herpesvirus 1
cccacacaacgcuccgccc

SEQ ID NO: 3955489 - RNA, 12 nt, Human herpesvirus 1
cccacacgcacu

SEQ ID NO: 3955490 - RNA, 17 nt, Human herpesvirus 1
cccacccacuccucccc

SEQ ID NO: 3955491 - RNA, 15 nt, Human herpesvirus 1
cccaccccccacggg

SEQ ID NO: 3955492 - RNA, 13 nt, Human herpesvirus 1
cccaccccccguc

SEQ ID NO: 3955493 - RNA, 24 nt, Human herpesvirus 1
cccacgaucaccgcgggagcggug

SEQ ID NO: 3955494 - RNA, 15 nt, Human herpesvirus 1
cccacgcccccgccg

SEQ ID NO: 3955495 - RNA, 12 nt, Human herpesvirus 1
cccacgccgccu

SEQ ID NO: 3955496 - RNA, 13 nt, Human herpesvirus 1
cccacgucgcccc

SEQ ID NO: 3955497 - RNA, 14 nt, Human herpesvirus 1
cccacuccuccccg

SEQ ID NO: 3955498 - RNA, 15 nt, Human herpesvirus 1
cccagaccccgggcg

SEQ ID NO: 3955499 - RNA, 17 nt, Human herpesvirus 1
cccagagaccccagggu

SEQ ID NO: 3955500 - RNA, 19 nt, Human herpesvirus 1
cccagagguguucacgcac

SEQ ID NO: 3955501 - RNA, 20 nt, Human herpesvirus 1
cccagagguguucacgcacc

SEQ ID NO: 3955502 - RNA, 13 nt, Human herpesvirus 1
cccagccucccga

SEQ ID NO: 3955503 - RNA, 15 nt, Human herpesvirus 1
cccagccucccgauc

SEQ ID NO: 3955504 - RNA, 23 nt, Human herpesvirus 1
cccagccuucacgugcugcugcg

SEQ ID NO: 3955505 - RNA, 13 nt, Human herpesvirus 1
cccagcgacccca

SEQ ID NO: 3955506 - RNA, 18 nt, Human herpesvirus 1
cccagcgaccccacggcc

SEQ ID NO: 3955507 - RNA, 15 nt, Human herpesvirus 1
cccaggaucacaccg

SEQ ID NO: 3955508 - RNA, 18 nt, Human herpesvirus 1
cccaggaucacaccgguc

SEQ ID NO: 3955509 - RNA, 14 nt, Human herpesvirus 1
cccaggcgcugggc

SEQ ID NO: 3955510 - RNA, 23 nt, Human herpesvirus 1
cccaggcggcgaacgggggcccu

SEQ ID NO: 3955511 - RNA, 21 nt, Human herpesvirus 1
cccaguaacaugcgcacguga

SEQ ID NO: 3955512 - RNA, 21 nt, Human herpesvirus 1
cccauaaaacccaagccggga

SEQ ID NO: 3955513 - RNA, 23 nt, Human herpesvirus 1
cccauccgaacgcagccccgcug

SEQ ID NO: 3955514 - RNA, 20 nt, Human herpesvirus 1
cccaucgccgcggcucccgg

SEQ ID NO: 3955515 - RNA, 16 nt, Human herpesvirus 1
cccaucgcgggcgcca

SEQ ID NO: 3955516 - RNA, 23 nt, Human herpesvirus 1
cccaucugugcggggaggggggc

SEQ ID NO: 3955517 - RNA, 14 nt, Human herpesvirus 1
cccaugaaggcccu

SEQ ID NO: 3955518 - RNA, 14 nt, Human herpesvirus 1
ccccaacgccacgc

SEQ ID NO: 3955519 - RNA, 19 nt, Human herpesvirus 1
ccccaacgccacgcagcca

SEQ ID NO: 3955520 - RNA, 21 nt, Human herpesvirus 1
ccccaacgccacgcagccaga

SEQ ID NO: 3955521 - RNA, 10 nt, Human herpesvirus 1
ccccaaggag

SEQ ID NO: 3955522 - RNA, 20 nt, Human herpesvirus 1
ccccaguccccgggcccagc

SEQ ID NO: 3955523 - RNA, 19 nt, Human herpesvirus 1
ccccauacacgagcacccu

SEQ ID NO: 3955524 - RNA, 21 nt, Human herpesvirus 1
ccccaucgccgcggcucccgg

SEQ ID NO: 3955525 - RNA, 18 nt, Human herpesvirus 1
ccccaucuaaugccacgc

SEQ ID NO: 3955526 - RNA, 11 nt, Human herpesvirus 1
cccccaaacac

SEQ ID NO: 3955527 - RNA, 19 nt, Human herpesvirus 1
cccccaaaucccggcgccg

SEQ ID NO: 3955528 - RNA, 13 nt, Human herpesvirus 1
cccccccacccgc

SEQ ID NO: 3955529 - RNA, 16 nt, Human herpesvirus 1
cccccgccucuggggu

SEQ ID NO: 3955530 - RNA, 21 nt, Human herpesvirus 1
cccccggacgacauggccagc

SEQ ID NO: 3955531 - RNA, 16 nt, Human herpesvirus 1
cccccggccaccccga

SEQ ID NO: 3955532 - RNA, 17 nt, Human herpesvirus 1
cccccggccgccgcgga

SEQ ID NO: 3955533 - RNA, 22 nt, Human herpesvirus 1
cccccggccgccgcggacgccg

SEQ ID NO: 3955534 - RNA, 12 nt, Human herpesvirus 1
cccccgggccgc

SEQ ID NO: 3955535 - RNA, 14 nt, Human herpesvirus 1
cccccgucagccug

SEQ ID NO: 3955536 - RNA, 22 nt, Human herpesvirus 1
cccccguguuuguggggagggg

SEQ ID NO: 3955537 - RNA, 13 nt, Human herpesvirus 1
cccccuggaggug

SEQ ID NO: 3955538 - RNA, 20 nt, Human herpesvirus 1
cccccuggagguguacaccc

SEQ ID NO: 3955539 - RNA, 19 nt, Human herpesvirus 1
cccccuuguauguccccaa

SEQ ID NO: 3955540 - RNA, 15 nt, Human herpesvirus 1
ccccgacagcccccc

SEQ ID NO: 3955541 - RNA, 15 nt, Human herpesvirus 1
ccccgaccagcgccg

SEQ ID NO: 3955542 - RNA, 15 nt, Human herpesvirus 1
ccccgacugcccccc

SEQ ID NO: 3955543 - RNA, 15 nt, Human herpesvirus 1
ccccgauggcccucc

SEQ ID NO: 3955544 - RNA, 18 nt, Human herpesvirus 1
ccccgcaauuugcaccca

SEQ ID NO: 3955545 - RNA, 12 nt, Human herpesvirus 1
ccccgcccgggg

SEQ ID NO: 3955546 - RNA, 12 nt, Human herpesvirus 1
ccccgcccgggu

SEQ ID NO: 3955547 - RNA, 20 nt, Human herpesvirus 1
ccccgcgccucccggcccgu

SEQ ID NO: 3955548 - RNA, 17 nt, Human herpesvirus 1
ccccgcuucauccccga

SEQ ID NO: 3955549 - RNA, 14 nt, Human herpesvirus 1
ccccggagccgggc

SEQ ID NO: 3955550 - RNA, 12 nt, Human herpesvirus 1
ccccgucacccg

SEQ ID NO: 3955551 - RNA, 17 nt, Human herpesvirus 1
ccccuaagacccacccc

SEQ ID NO: 3955552 - RNA, 18 nt, Human herpesvirus 1
ccccuccgcgccaggccc

SEQ ID NO: 3955553 - RNA, 15 nt, Human herpesvirus 1
ccccugauggagccu

SEQ ID NO: 3955554 - RNA, 19 nt, Human herpesvirus 1
ccccugccccccccacccc

SEQ ID NO: 3955555 - RNA, 13 nt, Human herpesvirus 1
ccccuggcgagcc

SEQ ID NO: 3955556 - RNA, 18 nt, Human herpesvirus 1
ccccuguggcccuggcgg

SEQ ID NO: 3955557 - RNA, 19 nt, Human herpesvirus 1
ccccuuaaugggugcgggg

SEQ ID NO: 3955558 - RNA, 20 nt, Human herpesvirus 1
cccgaaacuucaucaccccc

SEQ ID NO: 3955559 - RNA, 15 nt, Human herpesvirus 1
cccgacaccaccagc

SEQ ID NO: 3955560 - RNA, 23 nt, Human herpesvirus 1
cccgcaacgcgcuggggcugccg

SEQ ID NO: 3955561 - RNA, 17 nt, Human herpesvirus 1
cccgcccaccgcugggc

SEQ ID NO: 3955562 - RNA, 13 nt, Human herpesvirus 1
cccgccccggagg

SEQ ID NO: 3955563 - RNA, 18 nt, Human herpesvirus 1
cccgccccucgccacguc

SEQ ID NO: 3955564 - RNA, 14 nt, Human herpesvirus 1
cccgccgccacugu

SEQ ID NO: 3955565 - RNA, 13 nt, Human herpesvirus 1
cccgccgccccac

SEQ ID NO: 3955566 - RNA, 18 nt, Human herpesvirus 1
cccgccguugagccccuc

SEQ ID NO: 3955567 - RNA, 18 nt, Human herpesvirus 1
cccgcgacccggacgccg

SEQ ID NO: 3955568 - RNA, 21 nt, Human herpesvirus 1
cccgcgcgccccgagaccagu

SEQ ID NO: 3955569 - RNA, 13 nt, Human herpesvirus 1
cccgcguccaccc

SEQ ID NO: 3955570 - RNA, 18 nt, Human herpesvirus 1
cccgcguccacccggagg

SEQ ID NO: 3955571 - RNA, 18 nt, Human herpesvirus 1
cccgcgucuggccccggc

SEQ ID NO: 3955572 - RNA, 16 nt, Human herpesvirus 1
cccgcucugacggccc

SEQ ID NO: 3955573 - RNA, 14 nt, Human herpesvirus 1
cccgcuggggcggc

SEQ ID NO: 3955574 - RNA, 17 nt, Human herpesvirus 1
cccggaaccugcucacg

SEQ ID NO: 3955575 - RNA, 22 nt, Human herpesvirus 1
cccggaagagccugccgccuca

SEQ ID NO: 3955576 - RNA, 17 nt, Human herpesvirus 1
cccggaccccacgcacc

SEQ ID NO: 3955577 - RNA, 16 nt, Human herpesvirus 1
cccggacgacauggcc

SEQ ID NO: 3955578 - RNA, 15 nt, Human herpesvirus 1
cccggaggaggcucu

SEQ ID NO: 3955579 - RNA, 22 nt, Human herpesvirus 1
cccggccggauucccgggccgg

SEQ ID NO: 3955580 - RNA, 24 nt, Human herpesvirus 1
cccggcgggguuauaggccacgca

SEQ ID NO: 3955581 - RNA, 15 nt, Human herpesvirus 1
cccggggcucagcca

SEQ ID NO: 3955582 - RNA, 16 nt, Human herpesvirus 1
cccgggucuguugggg

SEQ ID NO: 3955583 - RNA, 16 nt, Human herpesvirus 1
cccggucucccaggga

SEQ ID NO: 3955584 - RNA, 17 nt, Human herpesvirus 1
cccguaaaugguugcag

SEQ ID NO: 3955585 - RNA, 17 nt, Human herpesvirus 1
cccguagucccaucccc

SEQ ID NO: 3955586 - RNA, 20 nt, Human herpesvirus 1
cccguggggacgguggcgcc

SEQ ID NO: 3955587 - RNA, 23 nt, Human herpesvirus 1
cccguggggacgguggcgccgca

SEQ ID NO: 3955588 - RNA, 14 nt, Human herpesvirus 1
cccgugucuguggg

SEQ ID NO: 3955589 - RNA, 18 nt, Human herpesvirus 1
cccguuccagccccccag

SEQ ID NO: 3955590 - RNA, 14 nt, Human herpesvirus 1
cccuaaccaccgcu

SEQ ID NO: 3955591 - RNA, 19 nt, Human herpesvirus 1
cccuacaccggccacccag

SEQ ID NO: 3955592 - RNA, 19 nt, Human herpesvirus 1
cccucacagggcgggccgc

SEQ ID NO: 3955593 - RNA, 14 nt, Human herpesvirus 1
cccuccccccgcgu

SEQ ID NO: 3955594 - RNA, 22 nt, Human herpesvirus 1
cccuccggggguccggcgcgug

SEQ ID NO: 3955595 - RNA, 20 nt, Human herpesvirus 1
cccucgaccaccaccuccac

SEQ ID NO: 3955596 - RNA, 15 nt, Human herpesvirus 1
cccucgggcaucucg

SEQ ID NO: 3955597 - RNA, 19 nt, Human herpesvirus 1
cccucguucugcugcaccg

SEQ ID NO: 3955598 - RNA, 15 nt, Human herpesvirus 1
cccucugggcccgcc

SEQ ID NO: 3955599 - RNA, 23 nt, Human herpesvirus 1
cccucuuggaggaccccgugggg

SEQ ID NO: 3955600 - RNA, 18 nt, Human herpesvirus 1
cgacgguaaacugcaucg

SEQ ID NO: 3955601 - RNA, 16 nt, Human herpesvirus 1
cgacgucgcgccuggg

SEQ ID NO: 3955602 - RNA, 23 nt, Human herpesvirus 1
cgacgugguccgcggggccuccc

SEQ ID NO: 3955603 - RNA, 15 nt, Human herpesvirus 1
cgacugcccccccca

SEQ ID NO: 3955604 - RNA, 20 nt, Human herpesvirus 1
cgacugcgaccccagccuuc

SEQ ID NO: 3955605 - RNA, 20 nt, Human herpesvirus 1
cgagaucaaggacagcggcc

SEQ ID NO: 3955606 - RNA, 17 nt, Human herpesvirus 1
cgagauccccggggccc

SEQ ID NO: 3955607 - RNA, 19 nt, Human herpesvirus 1
cgagcagccgcgccgcugc

SEQ ID NO: 3955608 - RNA, 17 nt, Human herpesvirus 1
cgagccaacgcccugac

SEQ ID NO: 3955609 - RNA, 12 nt, Human herpesvirus 1
cgagccccccgc

SEQ ID NO: 3955610 - RNA, 16 nt, Human herpesvirus 1
cgagccggggcuggca

SEQ ID NO: 3955611 - RNA, 22 nt, Human herpesvirus 1
cgagccgugcaccgugggacac

SEQ ID NO: 3955612 - RNA, 12 nt, Human herpesvirus 1
cgagcgcgcugc

SEQ ID NO: 3955613 - RNA, 19 nt, Human herpesvirus 1
cgagcgcgcuuguccccga

SEQ ID NO: 3955614 - RNA, 16 nt, Human herpesvirus 1
cgagcuaugggccucu

SEQ ID NO: 3955615 - RNA, 16 nt, Human herpesvirus 1
cgagcugacccugugg

SEQ ID NO: 3955616 - RNA, 22 nt, Human herpesvirus 1
cgaggaccacgugcacagccug

SEQ ID NO: 3955617 - RNA, 23 nt, Human herpesvirus 1
cgaggaggacgucuccaagcuuu

SEQ ID NO: 3955618 - RNA, 16 nt, Human herpesvirus 1
cgaggcccgcaagcug

SEQ ID NO: 3955619 - RNA, 20 nt, Human herpesvirus 1
cgaggcccgcaagcugaacc

SEQ ID NO: 3955620 - RNA, 22 nt, Human herpesvirus 1
cgaggcggccugggucuuccgc

SEQ ID NO: 3955621 - RNA, 22 nt, Human herpesvirus 1
cgagggcaucuuuuuugccgcc

SEQ ID NO: 3955622 - RNA, 23 nt, Human herpesvirus 1
cgagguggagcugcccggcggcc

SEQ ID NO: 3955623 - RNA, 15 nt, Human herpesvirus 1
cgaguccgaagagga

SEQ ID NO: 3955624 - RNA, 17 nt, Human herpesvirus 1
cgagucuucggggcccg

SEQ ID NO: 3955625 - RNA, 21 nt, Human herpesvirus 1
cgaucccaacaacucccccgc

SEQ ID NO: 3955626 - RNA, 23 nt, Human herpesvirus 1
cgaucuccacgcgaccccauggc

SEQ ID NO: 3955627 - RNA, 21 nt, Human herpesvirus 1
cgaucugugagugucgcggcg

SEQ ID NO: 3955628 - RNA, 17 nt, Human herpesvirus 1
cgcaacgcgcuggggcu

SEQ ID NO: 3955629 - RNA, 15 nt, Human herpesvirus 1
cgcaauugcggccac

SEQ ID NO: 3955630 - RNA, 20 nt, Human herpesvirus 1
cgcaauuugcacccagccuu

SEQ ID NO: 3955631 - RNA, 20 nt, Human herpesvirus 1
cgcacaucaaggugggccag

SEQ ID NO: 3955632 - RNA, 13 nt, Human herpesvirus 1
cgcacccacagcu

SEQ ID NO: 3955633 - RNA, 19 nt, Human herpesvirus 1
cgcaccgggcccccgcccc

SEQ ID NO: 3955634 - RNA, 20 nt, Human herpesvirus 1
cgcaccgucggaggcccccc

SEQ ID NO: 3955635 - RNA, 21 nt, Human herpesvirus 1
cgcaccuccuccgacgcccag

SEQ ID NO: 3955636 - RNA, 12 nt, Human herpesvirus 1
cgcaccugguga

SEQ ID NO: 3955637 - RNA, 16 nt, Human herpesvirus 1
cgcacgagccggggcu

SEQ ID NO: 3955638 - RNA, 16 nt, Human herpesvirus 1
cgcagaggcggccaga

SEQ ID NO: 3955639 - RNA, 20 nt, Human herpesvirus 1
cgcaguccacgggggggagc

SEQ ID NO: 3955640 - RNA, 16 nt, Human herpesvirus 1
cgcagucccgggggcu

SEQ ID NO: 3955641 - RNA, 23 nt, Human herpesvirus 1
cgcauccgucgggaggccacaga

SEQ ID NO: 3955642 - RNA, 15 nt, Human herpesvirus 1
cgcaucuuuccugug

SEQ ID NO: 3955643 - RNA, 17 nt, Human herpesvirus 1
cgcaugaucuccggacc

SEQ ID NO: 3955644 - RNA, 21 nt, Human herpesvirus 1
cgcaugaucuccggacccccg

SEQ ID NO: 3955645 - RNA, 14 nt, Human herpesvirus 1
cgccacccaggcgc

SEQ ID NO: 3955646 - RNA, 14 nt, Human herpesvirus 1
cgccagcaccccgg

SEQ ID NO: 3955647 - RNA, 19 nt, Human herpesvirus 1
cgccagcgcggcggggccc

SEQ ID NO: 3955648 - RNA, 20 nt, Human herpesvirus 1
cgccagcuuuccgcugagcc

SEQ ID NO: 3955649 - RNA, 13 nt, Human herpesvirus 1
cgccagggccucg

SEQ ID NO: 3955650 - RNA, 22 nt, Human herpesvirus 1
cgccagggcgcccccgcgcggg

SEQ ID NO: 3955651 - RNA, 13 nt, Human herpesvirus 1
cgccaucagccuu

SEQ ID NO: 3955652 - RNA, 20 nt, Human herpesvirus 1
cgccauguuugcgggccugg

SEQ ID NO: 3955653 - RNA, 21 nt, Human herpesvirus 1
cgccauguuugcgggccuggg

SEQ ID NO: 3955654 - RNA, 21 nt, Human herpesvirus 1
cgcccagacgcccuccgagga

SEQ ID NO: 3955655 - RNA, 20 nt, Human herpesvirus 1
cgccccccguguuugugggg

SEQ ID NO: 3955656 - RNA, 11 nt, Human herpesvirus 1
cgcccccggca

SEQ ID NO: 3955657 - RNA, 19 nt, Human herpesvirus 1
cgccccggaagaccccgag

SEQ ID NO: 3955658 - RNA, 17 nt, Human herpesvirus 1
cgccccucccccgaccu

SEQ ID NO: 3955659 - RNA, 14 nt, Human herpesvirus 1
cgccccuggcgcgc

SEQ ID NO: 3955660 - RNA, 18 nt, Human herpesvirus 1
cgccccuguggcccuggc

SEQ ID NO: 3955661 - RNA, 15 nt, Human herpesvirus 1
cgcccgaccgcgugu

SEQ ID NO: 3955662 - RNA, 17 nt, Human herpesvirus 1
cgcccgccccccgaccg

SEQ ID NO: 3955663 - RNA, 17 nt, Human herpesvirus 1
cgcccgccccugcgcag

SEQ ID NO: 3955664 - RNA, 21 nt, Human herpesvirus 1
cgcccgcgacgccauggaccg

SEQ ID NO: 3955665 - RNA, 13 nt, Human herpesvirus 1
cgcccggggccag

SEQ ID NO: 3955666 - RNA, 22 nt, Human herpesvirus 1
cgcccgucuuuaaccucccccg

SEQ ID NO: 3955667 - RNA, 21 nt, Human herpesvirus 1
cgcccucacagggcgggccgc

SEQ ID NO: 3955668 - RNA, 15 nt, Human herpesvirus 1
cgcccuggccgcgga

SEQ ID NO: 3955669 - RNA, 21 nt, Human herpesvirus 1
cgccgacaucaccaccgucag

SEQ ID NO: 3955670 - RNA, 13 nt, Human herpesvirus 1
cgccgacucccgg

SEQ ID NO: 3955671 - RNA, 13 nt, Human herpesvirus 1
cgccgagcccccc

SEQ ID NO: 3955672 - RNA, 21 nt, Human herpesvirus 1
cgccgagcugcgaucgcuggu

SEQ ID NO: 3955673 - RNA, 23 nt, Human herpesvirus 1
cgccgagucuucggggcccggcc

SEQ ID NO: 3955674 - RNA, 21 nt, Human herpesvirus 1
cgccgcaaagccacccacgcc

SEQ ID NO: 3955675 - RNA, 16 nt, Human herpesvirus 1
cgccgccaccguggcc

SEQ ID NO: 3955676 - RNA, 19 nt, Human herpesvirus 1
cgccgccaccguggccggc

SEQ ID NO: 3955677 - RNA, 16 nt, Human herpesvirus 1
cgccgcccugagcgcc

SEQ ID NO: 3955678 - RNA, 16 nt, Human herpesvirus 1
cgccgcgagcccgucu

SEQ ID NO: 3955679 - RNA, 21 nt, Human herpesvirus 1
cgccgcgaguacguggccggu

SEQ ID NO: 3955680 - RNA, 19 nt, Human herpesvirus 1
cgccgcgcguugggcccug

SEQ ID NO: 3955681 - RNA, 15 nt, Human herpesvirus 1
cgccgcggccugggu

SEQ ID NO: 3955682 - RNA, 12 nt, Human herpesvirus 1
cgccgcgggccc

SEQ ID NO: 3955683 - RNA, 13 nt, Human herpesvirus 1
cgccgcugacccc

SEQ ID NO: 3955684 - RNA, 22 nt, Human herpesvirus 1
cgccggcggucgcgcuccucug

SEQ ID NO: 3955685 - RNA, 21 nt, Human herpesvirus 1
cgccggggcucucggggccgc

SEQ ID NO: 3955686 - RNA, 12 nt, Human herpesvirus 1
cgccguccgaac

SEQ ID NO: 3955687 - RNA, 15 nt, Human herpesvirus 1
cgccguccgaaccca

SEQ ID NO: 3955688 - RNA, 14 nt, Human herpesvirus 1
cgccguccuugcau

SEQ ID NO: 3955689 - RNA, 14 nt, Human herpesvirus 1
cgccguggcgcccc

SEQ ID NO: 3955690 - RNA, 16 nt, Human herpesvirus 1
cgccguguuggagcgc

SEQ ID NO: 3955691 - RNA, 16 nt, Human herpesvirus 1
cgccguuggcccccgc

SEQ ID NO: 3955692 - RNA, 17 nt, Human herpesvirus 1
cgccucaacauaccccg

SEQ ID NO: 3955693 - RNA, 22 nt, Human herpesvirus 1
cgccucaacauaccccgcuguu

SEQ ID NO: 3955694 - RNA, 20 nt, Human herpesvirus 1
cgccucccggggggucggca

SEQ ID NO: 3955695 - RNA, 19 nt, Human herpesvirus 1
cgccuccgcccgugcugcc

SEQ ID NO: 3955696 - RNA, 12 nt, Human herpesvirus 1
cgccucgggcga

SEQ ID NO: 3955697 - RNA, 19 nt, Human herpesvirus 1
cgccuggcugacccacgcg

SEQ ID NO: 3955698 - RNA, 22 nt, Human herpesvirus 1
cgccuggcuggccgcucggugg

SEQ ID NO: 3955699 - RNA, 14 nt, Human herpesvirus 1
cgccuuaccauccc

SEQ ID NO: 3955700 - RNA, 22 nt, Human herpesvirus 1
cgccuuuuuggguccgggcccg

SEQ ID NO: 3955701 - RNA, 14 nt, Human herpesvirus 1
cgcgaacgaccaac

SEQ ID NO: 3955702 - RNA, 20 nt, Human herpesvirus 1
cgcgaaggacgccggagccg

SEQ ID NO: 3955703 - RNA, 19 nt, Human herpesvirus 1
cgcgacccaccgggcccgg

SEQ ID NO: 3955704 - RNA, 14 nt, Human herpesvirus 1
cgcgacccaggcgg

SEQ ID NO: 3955705 - RNA, 15 nt, Human herpesvirus 1
cgcgaccccauggcc

SEQ ID NO: 3955706 - RNA, 17 nt, Human herpesvirus 1
cgcgaccgacagcacuc

SEQ ID NO: 3955707 - RNA, 21 nt, Human herpesvirus 1
cgcgaccucaccaccaaggcc

SEQ ID NO: 3955708 - RNA, 17 nt, Human herpesvirus 1
cgcgagauggccgcccc

SEQ ID NO: 3955709 - RNA, 22 nt, Human herpesvirus 1
cgcgagauggccgccccggugu

SEQ ID NO: 3955710 - RNA, 18 nt, Human herpesvirus 1
cgcgagcagagccgcaag

SEQ ID NO: 3955711 - RNA, 18 nt, Human herpesvirus 1
cgcgauuccgagggccgg

SEQ ID NO: 3955712 - RNA, 19 nt, Human herpesvirus 1
cgcgcaccuguuccgccug

SEQ ID NO: 3955713 - RNA, 20 nt, Human herpesvirus 1
cgcgcaccuguuccgccugu

SEQ ID NO: 3955714 - RNA, 22 nt, Human herpesvirus 1
ucugucucgucuccucuucucc

SEQ ID NO: 3955715 - RNA, 19 nt, Human herpesvirus 1
ucuuagccuccccgggcca

SEQ ID NO: 3955716 - RNA, 16 nt, Human herpesvirus 1
ucuucccccccaucac

SEQ ID NO: 3955717 - RNA, 15 nt, Human herpesvirus 1
ucuucuccccuuccc

SEQ ID NO: 3955718 - RNA, 14 nt, Human herpesvirus 1
ucuucucucccggg

SEQ ID NO: 3955719 - RNA, 23 nt, Human herpesvirus 1
ucuuggaggaccccguggggacg

SEQ ID NO: 3955720 - RNA, 12 nt, Human herpesvirus 1
ucuuugugccug

SEQ ID NO: 3955721 - RNA, 18 nt, Human herpesvirus 1
ugaacgaagcggccaugg

SEQ ID NO: 3955722 - RNA, 21 nt, Human herpesvirus 1
ugaacgcaacggcgggagcug

SEQ ID NO: 3955723 - RNA, 17 nt, Human herpesvirus 1
ugacccagaccggcacc

SEQ ID NO: 3955724 - RNA, 15 nt, Human herpesvirus 1
ugaccgcccccagcu

SEQ ID NO: 3955725 - RNA, 18 nt, Human herpesvirus 1
ugagcccggcggcgcugg

SEQ ID NO: 3955726 - RNA, 17 nt, Human herpesvirus 1
ugagcgcccuccugacc

SEQ ID NO: 3955727 - RNA, 18 nt, Human herpesvirus 1
ugagcgcccuccugacca

SEQ ID NO: 3955728 - RNA, 22 nt, Human herpesvirus 1
ugaugucccucauuuuacaaua

SEQ ID NO: 3955729 - RNA, 22 nt, Human herpesvirus 1
ugcacaacacaaacaucuggag

SEQ ID NO: 3955730 - RNA, 15 nt, Human herpesvirus 1
ugcacucccugccgc

SEQ ID NO: 3955731 - RNA, 13 nt, Human herpesvirus 1
ugcauauccuggg

SEQ ID NO: 3955732 - RNA, 13 nt, Human herpesvirus 1
ugcccauaauaaa

SEQ ID NO: 3955733 - RNA, 20 nt, Human herpesvirus 1
ugcccgacagggccgugccc

SEQ ID NO: 3955734 - RNA, 21 nt, Human herpesvirus 1
ugcccucccugacggccaucg

SEQ ID NO: 3955735 - RNA, 13 nt, Human herpesvirus 1
ugcccucgcgggc

SEQ ID NO: 3955736 - RNA, 21 nt, Human herpesvirus 1
ugcccucgcgggccucguggg

SEQ ID NO: 3955737 - RNA, 13 nt, Human herpesvirus 1
ugccgggaacgcu

SEQ ID NO: 3955738 - RNA, 20 nt, Human herpesvirus 1
ugccuugguggaugccucuc

SEQ ID NO: 3955739 - RNA, 13 nt, Human herpesvirus 1
ugcgaccccagcc

SEQ ID NO: 3955740 - RNA, 20 nt, Human herpesvirus 1
ugcgccuggauucgcuggac

SEQ ID NO: 3955741 - RNA, 19 nt, Human herpesvirus 1
ugcgcgaucccccgccccc

SEQ ID NO: 3955742 - RNA, 16 nt, Human herpesvirus 1
ugcggagggcacccaa

SEQ ID NO: 3955743 - RNA, 22 nt, Human herpesvirus 1
ugcggcuuaugaacgacugggc

SEQ ID NO: 3955744 - RNA, 15 nt, Human herpesvirus 1
ugcgggcucggcucc

SEQ ID NO: 3955745 - RNA, 14 nt, Human herpesvirus 1
ugcgguuggggagg

SEQ ID NO: 3955746 - RNA, 13 nt, Human herpesvirus 1
ugcuacagccgcc

SEQ ID NO: 3955747 - RNA, 17 nt, Human herpesvirus 1
ugcucagcgccaagguc

SEQ ID NO: 3955748 - RNA, 15 nt, Human herpesvirus 1
ugcucgacagccacu

SEQ ID NO: 3955749 - RNA, 22 nt, Human herpesvirus 1
ugcugcaggccccccgccgucc

SEQ ID NO: 3955750 - RNA, 20 nt, Human herpesvirus 1
ugcugcccccggagcugucc

SEQ ID NO: 3955751 - RNA, 17 nt, Human herpesvirus 1
ugcugcggcccacccug

SEQ ID NO: 3955752 - RNA, 13 nt, Human herpesvirus 1
ugcuucccacgcg

SEQ ID NO: 3955753 - RNA, 22 nt, Human herpesvirus 1
uggaacgaggccgcagccuucu

SEQ ID NO: 3955754 - RNA, 17 nt, Human herpesvirus 1
uggaccuugggccgucg

SEQ ID NO: 3955755 - RNA, 15 nt, Human herpesvirus 1
uggacgcgccucccg

SEQ ID NO: 3955756 - RNA, 17 nt, Human herpesvirus 1
uggacgcgccucccggg

SEQ ID NO: 3955757 - RNA, 23 nt, Human herpesvirus 1
uggagcgcacggaacacaaggcc

SEQ ID NO: 3955758 - RNA, 15 nt, Human herpesvirus 1
uggaggcgcggcgcc

SEQ ID NO: 3955759 - RNA, 15 nt, Human herpesvirus 1
uggagggugucccag

SEQ ID NO: 3955760 - RNA, 16 nt, Human herpesvirus 1
uggaggucguuuucau

SEQ ID NO: 3955761 - RNA, 16 nt, Human herpesvirus 1
uggaucuuagccuccc

SEQ ID NO: 3955762 - RNA, 21 nt, Human herpesvirus 1
uggcacaaaaagaccccgauc

SEQ ID NO: 3955763 - RNA, 23 nt, Human herpesvirus 1
uggcagccgaugccccgggagac

SEQ ID NO: 3955764 - RNA, 15 nt, Human herpesvirus 1
uggcauucgacgaca

SEQ ID NO: 3955765 - RNA, 12 nt, Human herpesvirus 1
uggccagcggcc

SEQ ID NO: 3955766 - RNA, 15 nt, Human herpesvirus 1
uggccagcggcccgg

SEQ ID NO: 3955767 - RNA, 21 nt, Human herpesvirus 1
uggccaucgguccccucuggg

SEQ ID NO: 3955768 - RNA, 16 nt, Human herpesvirus 1
uggccccaguccccaa

SEQ ID NO: 3955769 - RNA, 12 nt, Human herpesvirus 1
uggcccuccagg

SEQ ID NO: 3955770 - RNA, 12 nt, Human herpesvirus 1
uggcccuggcuc

SEQ ID NO: 3955771 - RNA, 21 nt, Human herpesvirus 1
uggccggggagggcagggccg

SEQ ID NO: 3955772 - RNA, 17 nt, Human herpesvirus 1
uggcgagcccagacccc

SEQ ID NO: 3955773 - RNA, 12 nt, Human herpesvirus 1
uggcgccccggc

SEQ ID NO: 3955774 - RNA, 18 nt, Human herpesvirus 1
uggcgccugacgcgccgc

SEQ ID NO: 3955775 - RNA, 20 nt, Human herpesvirus 1
uggcgcgucguucgggcgga

SEQ ID NO: 3955776 - RNA, 14 nt, Human herpesvirus 1
uggcgucccaucug

SEQ ID NO: 3955777 - RNA, 16 nt, Human herpesvirus 1
uggcuccuggccagga

SEQ ID NO: 3955778 - RNA, 13 nt, Human herpesvirus 1
uggcugccccccc

SEQ ID NO: 3955779 - RNA, 15 nt, Human herpesvirus 1
ugggacaccggcgcu

SEQ ID NO: 3955780 - RNA, 18 nt, Human herpesvirus 1
ugggagagccggccccgg

SEQ ID NO: 3955781 - RNA, 17 nt, Human herpesvirus 1
ugggcacuuuccccaug

SEQ ID NO: 3955782 - RNA, 22 nt, Human herpesvirus 1
ugggcauccagggagaaacccc

SEQ ID NO: 3955783 - RNA, 13 nt, Human herpesvirus 1
ugggccagccgca

SEQ ID NO: 3955784 - RNA, 14 nt, Human herpesvirus 1
ugggccugaucgcc

SEQ ID NO: 3955785 - RNA, 14 nt, Human herpesvirus 1
ugggcggccccggc

SEQ ID NO: 3955786 - RNA, 15 nt, Human herpesvirus 1
ugggcggccccggcc

SEQ ID NO: 3955787 - RNA, 16 nt, Human herpesvirus 1
uggggacgguggcgcc

SEQ ID NO: 3955788 - RNA, 19 nt, Human herpesvirus 1
uggggagagcccacaugcg

SEQ ID NO: 3955789 - RNA, 15 nt, Human herpesvirus 1
uggggagccucgauc

SEQ ID NO: 3955790 - RNA, 18 nt, Human herpesvirus 1
ugggggcguagagcugug

SEQ ID NO: 3955791 - RNA, 16 nt, Human herpesvirus 1
uggggggggcugccgc

SEQ ID NO: 3955792 - RNA, 13 nt, Human herpesvirus 1
uggggggggggcg

SEQ ID NO: 3955793 - RNA, 22 nt, Human herpesvirus 1
ugggugcgggggggucaggucu

SEQ ID NO: 3955794 - RNA, 16 nt, Human herpesvirus 1
ugguaauuagaaacuc

SEQ ID NO: 3955795 - RNA, 18 nt, Human herpesvirus 1
ugguccccccucuauccc

SEQ ID NO: 3955796 - RNA, 22 nt, Human herpesvirus 1
uggucgaucccgaacgacacac

SEQ ID NO: 3955797 - RNA, 12 nt, Human herpesvirus 1
uggucucuggcc

SEQ ID NO: 3955798 - RNA, 13 nt, Human herpesvirus 1
ugguuauaugcac

SEQ ID NO: 3955799 - RNA, 21 nt, Human herpesvirus 1
uguacaacaucauccagcugg

SEQ ID NO: 3955800 - RNA, 14 nt, Human herpesvirus 1
uguagcgccccggc

SEQ ID NO: 3955801 - RNA, 23 nt, Human herpesvirus 1
uguauguccccaaaauaaaagac

SEQ ID NO: 3955802 - RNA, 22 nt, Human herpesvirus 1
uguccaccgggaagcagggccc

SEQ ID NO: 3955803 - RNA, 23 nt, Human herpesvirus 1
ugucccauccgaacgcagccccg

SEQ ID NO: 3955804 - RNA, 23 nt, Human herpesvirus 1
uguccccgccgacaagccgcgau

SEQ ID NO: 3955805 - RNA, 14 nt, Human herpesvirus 1
uguccucgggacau

SEQ ID NO: 3955806 - RNA, 17 nt, Human herpesvirus 1
ugucgucucucuucccc

SEQ ID NO: 3955807 - RNA, 19 nt, Human herpesvirus 1
ugucuccccgauggcccuc

SEQ ID NO: 3955808 - RNA, 14 nt, Human herpesvirus 1
ugucucgucuccuc

SEQ ID NO: 3955809 - RNA, 20 nt, Human herpesvirus 1
ugucugugggccaagauggc

SEQ ID NO: 3955810 - RNA, 21 nt, Human herpesvirus 1
uguucguggaaccaugaccuc

SEQ ID NO: 3955811 - RNA, 12 nt, Human herpesvirus 1
uguuggggacac

SEQ ID NO: 3955812 - RNA, 11 nt, Human herpesvirus 1
uuaacagacga

SEQ ID NO: 3955813 - RNA, 13 nt, Human herpesvirus 1
uuaaccaccugcg

SEQ ID NO: 3955814 - RNA, 11 nt, Human herpesvirus 1
uuacagccccc

SEQ ID NO: 3955815 - RNA, 13 nt, Human herpesvirus 1
uuacguacaacca

SEQ ID NO: 3955816 - RNA, 12 nt, Human herpesvirus 1
uuagccagcaga

SEQ ID NO: 3955817 - RNA, 15 nt, Human herpesvirus 1
uucacgugcugcugc

SEQ ID NO: 3955818 - RNA, 17 nt, Human herpesvirus 1
uuccaggucccaccuga

SEQ ID NO: 3955819 - RNA, 12 nt, Human herpesvirus 1
uuccccucccgu

SEQ ID NO: 3955820 - RNA, 12 nt, Human herpesvirus 1
uucccgaaacuu

SEQ ID NO: 3955821 - RNA, 11 nt, Human herpesvirus 1
uucccuccccc

SEQ ID NO: 3955822 - RNA, 21 nt, Human herpesvirus 1
uuccgcggccccagcccucuc

SEQ ID NO: 3955823 - RNA, 13 nt, Human herpesvirus 1
uucgccccacaca

SEQ ID NO: 3955824 - RNA, 16 nt, Human herpesvirus 1
uucggaugggaggcaa

SEQ ID NO: 3955825 - RNA, 20 nt, Human herpesvirus 1
uugccgugguccuguggagc

SEQ ID NO: 3955826 - RNA, 13 nt, Human herpesvirus 1
uuggggcccaccc

SEQ ID NO: 3955827 - RNA, 14 nt, Human herpesvirus 1
uuggucaaacucag

SEQ ID NO: 3955828 - RNA, 17 nt, Human herpesvirus 1
uugucgucucucuuccc

SEQ ID NO: 3955829 - RNA, 19 nt, Human herpesvirus 1
uuucaccgccccagcaccg

SEQ ID NO: 3955830 - RNA, 20 nt, Human herpesvirus 1
aaaacagcgacgacgucugu

SEQ ID NO: 3955831 - RNA, 18 nt, Human herpesvirus 1
aaaacugauaaaacagcg

SEQ ID NO: 3955832 - RNA, 14 nt, Human herpesvirus 1
aaacaagagccucc

SEQ ID NO: 3955833 - RNA, 23 nt, Human herpesvirus 1
aaacaagagccuccguuggguuu

SEQ ID NO: 3955834 - RNA, 11 nt, Human herpesvirus 1
aaacaucugga

SEQ ID NO: 3955835 - RNA, 13 nt, Human herpesvirus 1
aaaccccacgccc

SEQ ID NO: 3955836 - RNA, 16 nt, Human herpesvirus 1
aaaccccacgcccccg

SEQ ID NO: 3955837 - RNA, 14 nt, Human herpesvirus 1
aaaccugggcggcc

SEQ ID NO: 3955838 - RNA, 13 nt, Human herpesvirus 1
aaacgccagccug

SEQ ID NO: 3955839 - RNA, 22 nt, Human herpesvirus 1
aaacgccucccccugagccgcu

SEQ ID NO: 3955840 - RNA, 20 nt, Human herpesvirus 1
aaacgucagacgagcgcgcu

SEQ ID NO: 3955841 - RNA, 15 nt, Human herpesvirus 1
aaacugacaucgcga

SEQ ID NO: 3955842 - RNA, 19 nt, Human herpesvirus 1
aaagacacgggcaccacac

SEQ ID NO: 3955843 - RNA, 14 nt, Human herpesvirus 1
aaagaccaaaauca

SEQ ID NO: 3955844 - RNA, 21 nt, Human herpesvirus 1
aacaagucucugggggccugu

SEQ ID NO: 3955845 - RNA, 17 nt, Human herpesvirus 1
aacacgcucgcggagcu

SEQ ID NO: 3955846 - RNA, 12 nt, Human herpesvirus 1
aacaugacccag

SEQ ID NO: 3955847 - RNA, 13 nt, Human herpesvirus 1
aacaugggccuga

SEQ ID NO: 3955848 - RNA, 20 nt, Human herpesvirus 1
aaccaccuuccguccccugc

SEQ ID NO: 3955849 - RNA, 13 nt, Human herpesvirus 1
aacccaaccgucc

SEQ ID NO: 3955850 - RNA, 13 nt, Human herpesvirus 1
aaccccaacucca

SEQ ID NO: 3955851 - RNA, 12 nt, Human herpesvirus 1
aaccccaccccu

SEQ ID NO: 3955852 - RNA, 11 nt, Human herpesvirus 1
aaccccaggga

SEQ ID NO: 3955853 - RNA, 16 nt, Human herpesvirus 1
aaccccuuuggggcgc

SEQ ID NO: 3955854 - RNA, 20 nt, Human herpesvirus 1
aacccgccccuaaccaggcc

SEQ ID NO: 3955855 - RNA, 22 nt, Human herpesvirus 1
aaccgcaccccccucguccccc

SEQ ID NO: 3955856 - RNA, 11 nt, Human herpesvirus 1
aaccggccgcc

SEQ ID NO: 3955857 - RNA, 22 nt, Human herpesvirus 1
aaccuuuaggaugccagccagg

SEQ ID NO: 3955858 - RNA, 12 nt, Human herpesvirus 1
aacgaggcccgc

SEQ ID NO: 3955859 - RNA, 20 nt, Human herpesvirus 1
aacgcaacggcgggagcugg

SEQ ID NO: 3955860 - RNA, 12 nt, Human herpesvirus 1
aacgccuccccc

SEQ ID NO: 3955861 - RNA, 15 nt, Human herpesvirus 1
aacgcgcuggggcug

SEQ ID NO: 3955862 - RNA, 16 nt, Human herpesvirus 1
aacgggggggugucgc

SEQ ID NO: 3955863 - RNA, 18 nt, Human herpesvirus 1
aacgucuccuccaccacc

SEQ ID NO: 3955864 - RNA, 15 nt, Human herpesvirus 1
aacgugcgcgauccc

SEQ ID NO: 3955865 - RNA, 14 nt, Human herpesvirus 1
aacucucgcaccau

SEQ ID NO: 3955866 - RNA, 23 nt, Human herpesvirus 1
aacuggguggcggggcaggcgcc

SEQ ID NO: 3955867 - RNA, 18 nt, Human herpesvirus 1
aagaggaggagggggccg

SEQ ID NO: 3955868 - RNA, 13 nt, Human herpesvirus 1
aagaggggcuggg

SEQ ID NO: 3955869 - RNA, 17 nt, Human herpesvirus 1
aagcacacacgggggag

SEQ ID NO: 3955870 - RNA, 12 nt, Human herpesvirus 1
aagcuagccgag

SEQ ID NO: 3955871 - RNA, 18 nt, Human herpesvirus 1
aaggugggccagccgcag

SEQ ID NO: 3955872 - RNA, 18 nt, Human herpesvirus 1
aaguucaccguggccugg

SEQ ID NO: 3955873 - RNA, 19 nt, Human herpesvirus 1
aaguucaccguggccuggg

SEQ ID NO: 3955874 - RNA, 15 nt, Human herpesvirus 1
aauaaauuuuacaaa

SEQ ID NO: 3955875 - RNA, 19 nt, Human herpesvirus 1
aaucaccggugcgcccccc

SEQ ID NO: 3955876 - RNA, 18 nt, Human herpesvirus 1
aaugggcggccccggccg

SEQ ID NO: 3955877 - RNA, 15 nt, Human herpesvirus 1
aauuagaaacucauu

SEQ ID NO: 3955878 - RNA, 23 nt, Human herpesvirus 1
aauucccgcggcccuuaaugggc

SEQ ID NO: 3955879 - RNA, 15 nt, Human herpesvirus 1
aauuugcacccagcc

SEQ ID NO: 3955880 - RNA, 14 nt, Human herpesvirus 1
acaacccuacaacc

SEQ ID NO: 3955881 - RNA, 19 nt, Human herpesvirus 1
acaacgccagccugcggcc

SEQ ID NO: 3955882 - RNA, 14 nt, Human herpesvirus 1
acaacggcaugccu

SEQ ID NO: 3955883 - RNA, 22 nt, Human herpesvirus 1
acaacucccccgcgcgccccga

SEQ ID NO: 3955884 - RNA, 19 nt, Human herpesvirus 1
acaagaucaacgccaaggg

SEQ ID NO: 3955885 - RNA, 21 nt, Human herpesvirus 1
acaauccccaggacaccgcgu

SEQ ID NO: 3955886 - RNA, 20 nt, Human herpesvirus 1
acacaaaaggcguaccaaac

SEQ ID NO: 3955887 - RNA, 21 nt, Human herpesvirus 1
acaccagcgggucuuuugugu

SEQ ID NO: 3955888 - RNA, 15 nt, Human herpesvirus 1
acacccgccccucca

SEQ ID NO: 3955889 - RNA, 21 nt, Human herpesvirus 1
acaccgcguguuccccgggag

SEQ ID NO: 3955890 - RNA, 21 nt, Human herpesvirus 1
acaccggucaacgaggguugg

SEQ ID NO: 3955891 - RNA, 18 nt, Human herpesvirus 1
acaccuuggcccuggcuc

SEQ ID NO: 3955892 - RNA, 17 nt, Human herpesvirus 1
acacgagcgccagcgcu

SEQ ID NO: 3955893 - RNA, 18 nt, Human herpesvirus 1
acacggccguugucuccc

SEQ ID NO: 3955894 - RNA, 18 nt, Human herpesvirus 1
acagccgcccccugguca

SEQ ID NO: 3955895 - RNA, 20 nt, Human herpesvirus 1
acaggcgaccgccggcggcg

SEQ ID NO: 3955896 - RNA, 22 nt, Human herpesvirus 1
acaggggccauguugggccgcc

SEQ ID NO: 3955897 - RNA, 12 nt, Human herpesvirus 1
acauccccccga

SEQ ID NO: 3955898 - RNA, 22 nt, Human herpesvirus 1
acauguccgugccgcuuuaucc

SEQ ID NO: 3955899 - RNA, 18 nt, Human herpesvirus 1
accacaccaacgcacgag

SEQ ID NO: 3955900 - RNA, 21 nt, Human herpesvirus 1
accacaggugggugcuuugga

SEQ ID NO: 3955901 - RNA, 22 nt, Human herpesvirus 1
accacauaaccgaccgcagucc

SEQ ID NO: 3955902 - RNA, 16 nt, Human herpesvirus 1
accacccaaccccaac

SEQ ID NO: 3955903 - RNA, 17 nt, Human herpesvirus 1
accaccccaaauacagc

SEQ ID NO: 3955904 - RNA, 22 nt, Human herpesvirus 1
accacccccgccguccgaaccc

SEQ ID NO: 3955905 - RNA, 16 nt, Human herpesvirus 1
accaccgucagcaccu

SEQ ID NO: 3955906 - RNA, 17 nt, Human herpesvirus 1
acuacgcuucggccgcc

SEQ ID NO: 3955907 - RNA, 17 nt, Human herpesvirus 1
acucaccggcggacccc

SEQ ID NO: 3955908 - RNA, 21 nt, Human herpesvirus 1
acucauuaaugggcggccccg

SEQ ID NO: 3955909 - RNA, 23 nt, Human herpesvirus 1
acucccccgcgcgccccgagacc

SEQ ID NO: 3955910 - RNA, 13 nt, Human herpesvirus 1
acucucccaccgc

SEQ ID NO: 3955911 - RNA, 22 nt, Human herpesvirus 1
acucucccaccgccaucagccu

SEQ ID NO: 3955912 - RNA, 13 nt, Human herpesvirus 1
acucucgcaccau

SEQ ID NO: 3955913 - RNA, 17 nt, Human herpesvirus 1
acugccugacccucucc

SEQ ID NO: 3955914 - RNA, 18 nt, Human herpesvirus 1
acugccugacccucuccg

SEQ ID NO: 3955915 - RNA, 15 nt, Human herpesvirus 1
acuggaugcgccgcc

SEQ ID NO: 3955916 - RNA, 14 nt, Human herpesvirus 1
acuggccgggagca

SEQ ID NO: 3955917 - RNA, 17 nt, Human herpesvirus 1
acugugcuauccccauc

SEQ ID NO: 3955918 - RNA, 23 nt, Human herpesvirus 1
acuucccacccggagcuuucuuc

SEQ ID NO: 3955919 - RNA, 18 nt, Human herpesvirus 1
acuuccccgacugccccc

SEQ ID NO: 3955920 - RNA, 18 nt, Human herpesvirus 1
acuucgcgcccgggcgcg

SEQ ID NO: 3955921 - RNA, 16 nt, Human herpesvirus 1
agaacucgccccggaa

SEQ ID NO: 3955922 - RNA, 20 nt, Human herpesvirus 1
agaaguaauaguccguguuc

SEQ ID NO: 3955923 - RNA, 15 nt, Human herpesvirus 1
agacacgggcaccac

SEQ ID NO: 3955924 - RNA, 14 nt, Human herpesvirus 1
agacccaacccccg

SEQ ID NO: 3955925 - RNA, 12 nt, Human herpesvirus 1
agacccccccgg

SEQ ID NO: 3955926 - RNA, 23 nt, Human herpesvirus 1
agacccgggcgaugagccaaccu

SEQ ID NO: 3955927 - RNA, 17 nt, Human herpesvirus 1
agaccgcaucgacacgc

SEQ ID NO: 3955928 - RNA, 17 nt, Human herpesvirus 1
agacgaccagccguccu

SEQ ID NO: 3955929 - RNA, 21 nt, Human herpesvirus 1
agacgagcgcgcuuguccccg

SEQ ID NO: 3955930 - RNA, 21 nt, Human herpesvirus 1
agacgcugcuccgccuggccu

SEQ ID NO: 3955931 - RNA, 14 nt, Human herpesvirus 1
agacgucgccccug

SEQ ID NO: 3955932 - RNA, 14 nt, Human herpesvirus 1
agagaccccagggu

SEQ ID NO: 3955933 - RNA, 13 nt, Human herpesvirus 1
agagcaaccccau

SEQ ID NO: 3955934 - RNA, 12 nt, Human herpesvirus 1
agaggugcugcc

SEQ ID NO: 3955935 - RNA, 17 nt, Human herpesvirus 1
agagucgacgaccuggg

SEQ ID NO: 3955936 - RNA, 15 nt, Human herpesvirus 1
agauguccaauccac

SEQ ID NO: 3955937 - RNA, 18 nt, Human herpesvirus 1
agauuguccgcggggccu

SEQ ID NO: 3955938 - RNA, 21 nt, Human herpesvirus 1
agcacccugcugcccccggag

SEQ ID NO: 3955939 - RNA, 19 nt, Human herpesvirus 1
agcacgccaccgacaccgc

SEQ ID NO: 3955940 - RNA, 16 nt, Human herpesvirus 1
agccauccccgcgucc

SEQ ID NO: 3955941 - RNA, 14 nt, Human herpesvirus 1
agccccccagccuc

SEQ ID NO: 3955942 - RNA, 16 nt, Human herpesvirus 1
agcccccgccccuccc

SEQ ID NO: 3955943 - RNA, 17 nt, Human herpesvirus 1
agccccgcauaucccac

SEQ ID NO: 3955944 - RNA, 13 nt, Human herpesvirus 1
agccccggacccc

SEQ ID NO: 3955945 - RNA, 17 nt, Human herpesvirus 1
agccccucgcccguccu

SEQ ID NO: 3955946 - RNA, 23 nt, Human herpesvirus 1
agccuguuuguccuggggauggc

SEQ ID NO: 3955947 - RNA, 17 nt, Human herpesvirus 1
agcgccggguggcgccu

SEQ ID NO: 3955948 - RNA, 19 nt, Human herpesvirus 1
agcgcgcugcucagcgcca

SEQ ID NO: 3955949 - RNA, 13 nt, Human herpesvirus 1
agcgcucuugucu

SEQ ID NO: 3955950 - RNA, 23 nt, Human herpesvirus 1
agcggccauggcccgccucggag

SEQ ID NO: 3955951 - RNA, 15 nt, Human herpesvirus 1
agcguauccaccccc

SEQ ID NO: 3955952 - RNA, 21 nt, Human herpesvirus 1
agcgugcgauacuucgcgccc

SEQ ID NO: 3955953 - RNA, 16 nt, Human herpesvirus 1
agcucccagagacccc

SEQ ID NO: 3955954 - RNA, 22 nt, Human herpesvirus 1
agcugcucgagaugggccaggg

SEQ ID NO: 3955955 - RNA, 21 nt, Human herpesvirus 1
agcugggaccccggcggcccc

SEQ ID NO: 3955956 - RNA, 14 nt, Human herpesvirus 1
aggaaauccguggc

SEQ ID NO: 3955957 - RNA, 12 nt, Human herpesvirus 1
aggaacacaccc

SEQ ID NO: 3955958 - RNA, 20 nt, Human herpesvirus 1
aggacgucuccaagcuuucc

SEQ ID NO: 3955959 - RNA, 13 nt, Human herpesvirus 1
aggagcccgcccu

SEQ ID NO: 3955960 - RNA, 13 nt, Human herpesvirus 1
aggaggccgccac

SEQ ID NO: 3955961 - RNA, 18 nt, Human herpesvirus 1
aggcaguuaacugucugg

SEQ ID NO: 3955962 - RNA, 17 nt, Human herpesvirus 1
aggcccgggccacggcg

SEQ ID NO: 3955963 - RNA, 17 nt, Human herpesvirus 1
aggccgcagccuucucc

SEQ ID NO: 3955964 - RNA, 23 nt, Human herpesvirus 1
aggcgacggcgucucccgggggc

SEQ ID NO: 3955965 - RNA, 20 nt, Human herpesvirus 1
aggcgcauaaagggccggug

SEQ ID NO: 3955966 - RNA, 14 nt, Human herpesvirus 1
aggcgccugccccg

SEQ ID NO: 3955967 - RNA, 17 nt, Human herpesvirus 1
aggcgccugccccgcca

SEQ ID NO: 3955968 - RNA, 18 nt, Human herpesvirus 1
aggcgcugucuccccggg

SEQ ID NO: 3955969 - RNA, 16 nt, Human herpesvirus 1
aggcuguaggucuggg

SEQ ID NO: 3955970 - RNA, 23 nt, Human herpesvirus 1
agggccacucacgcauccccagu

SEQ ID NO: 3955971 - RNA, 17 nt, Human herpesvirus 1
agggccucgcugaccag

SEQ ID NO: 3955972 - RNA, 20 nt, Human herpesvirus 1
aggggcuccuuagcgcggcc

SEQ ID NO: 3955973 - RNA, 12 nt, Human herpesvirus 1
aggggggguccg

SEQ ID NO: 3955974 - RNA, 14 nt, Human herpesvirus 1
aggucccaccugac

SEQ ID NO: 3955975 - RNA, 14 nt, Human herpesvirus 1
agguccggccuggg

SEQ ID NO: 3955976 - RNA, 23 nt, Human herpesvirus 1
aguacgcguacucccaccagcug

SEQ ID NO: 3955977 - RNA, 17 nt, Human herpesvirus 1
aguaugccccccuggcg

SEQ ID NO: 3955978 - RNA, 13 nt, Human herpesvirus 1
aguccccgggccc

SEQ ID NO: 3955979 - RNA, 20 nt, Human herpesvirus 1
aguccccgggcccagccuuc

SEQ ID NO: 3955980 - RNA, 19 nt, Human herpesvirus 1
agucccugaguugggaaua

SEQ ID NO: 3955981 - RNA, 19 nt, Human herpesvirus 1
agucucugggggccugucc

SEQ ID NO: 3955982 - RNA, 11 nt, Human herpesvirus 1
agugaaagaca

SEQ ID NO: 3955983 - RNA, 15 nt, Human herpesvirus 1
agugaaagacacggg

SEQ ID NO: 3955984 - RNA, 16 nt, Human herpesvirus 1
agugaaagacacgggc

SEQ ID NO: 3955985 - RNA, 17 nt, Human herpesvirus 1
aguggaggaagaccugc

SEQ ID NO: 3955986 - RNA, 14 nt, Human herpesvirus 1
agugggccuccaug

SEQ ID NO: 3955987 - RNA, 20 nt, Human herpesvirus 1
uggccggggagggcagggcc

SEQ ID NO: 3955988 - RNA, 22 nt, Human herpesvirus 1
uggccggggagggcagggccgc

SEQ ID NO: 3955989 - RNA, 16 nt, Human herpesvirus 1
uggcgagcccagaccc

SEQ ID NO: 3955990 - RNA, 16 nt, Human herpesvirus 1
uggcgcagcugggacc

SEQ ID NO: 3955991 - RNA, 20 nt, Human herpesvirus 1
uggcgcagcugggaccccgg

SEQ ID NO: 3955992 - RNA, 23 nt, Human herpesvirus 1
uggcgcccccccaacgggggacc

SEQ ID NO: 3955993 - RNA, 20 nt, Human herpesvirus 1
uggcgcccccgaccucggac

SEQ ID NO: 3955994 - RNA, 17 nt, Human herpesvirus 1
uggcgcgcaccccguuc

SEQ ID NO: 3955995 - RNA, 18 nt, Human herpesvirus 1
uggcggggcaggcgccuc

SEQ ID NO: 3955996 - RNA, 13 nt, Human herpesvirus 1
uggcuggccgcuc

SEQ ID NO: 3955997 - RNA, 18 nt, Human herpesvirus 1
ugggauccgacccccaug

SEQ ID NO: 3955998 - RNA, 19 nt, Human herpesvirus 1
ugggcgaccuggggcgcgc

SEQ ID NO: 3955999 - RNA, 23 nt, Human herpesvirus 1
uggggacccggcccuaaccccac

SEQ ID NO: 3956000 - RNA, 18 nt, Human herpesvirus 1
uggggauggccauagccg

SEQ ID NO: 3956001 - RNA, 14 nt, Human herpesvirus 1
ugggggccuguccc

SEQ ID NO: 3956002 - RNA, 17 nt, Human herpesvirus 1
ugggguccgggagggcg

SEQ ID NO: 3956003 - RNA, 20 nt, Human herpesvirus 1
ugggguggaucuuagccucc

SEQ ID NO: 3956004 - RNA, 13 nt, Human herpesvirus 1
uggguccgggccc

SEQ ID NO: 3956005 - RNA, 17 nt, Human herpesvirus 1
ugggucggugacgcgcc

SEQ ID NO: 3956006 - RNA, 20 nt, Human herpesvirus 1
ugguauagguccacggccac

SEQ ID NO: 3956007 - RNA, 18 nt, Human herpesvirus 1
ugguccacacccaguggc

SEQ ID NO: 3956008 - RNA, 19 nt, Human herpesvirus 1
ugguccuguggagccuguu

SEQ ID NO: 3956009 - RNA, 15 nt, Human herpesvirus 1
uggucggcgagcugg

SEQ ID NO: 3956010 - RNA, 23 nt, Human herpesvirus 1
uggucguccgcggaccggcggcg

SEQ ID NO: 3956011 - RNA, 20 nt, Human herpesvirus 1
uggucgucgggcgccaaagc

SEQ ID NO: 3956012 - RNA, 23 nt, Human herpesvirus 1
uggucucuggccgcgcccacuac

SEQ ID NO: 3956013 - RNA, 17 nt, Human herpesvirus 1
uggugcgauggcgacac

SEQ ID NO: 3956014 - RNA, 19 nt, Human herpesvirus 1
uggugcgucgggccucccg

SEQ ID NO: 3956015 - RNA, 15 nt, Human herpesvirus 1
uggugcugucugaca

SEQ ID NO: 3956016 - RNA, 18 nt, Human herpesvirus 1
uggugcugucugacacac

SEQ ID NO: 3956017 - RNA, 11 nt, Human herpesvirus 1
ugguugcagug

SEQ ID NO: 3956018 - RNA, 20 nt, Human herpesvirus 1
uguacugcggucugucucgu

SEQ ID NO: 3956019 - RNA, 17 nt, Human herpesvirus 1
uguccccgaacaaacga

SEQ ID NO: 3956020 - RNA, 17 nt, Human herpesvirus 1
uguccgcgcauccgacc

SEQ ID NO: 3956021 - RNA, 17 nt, Human herpesvirus 1
uguccgcggggccuccg

SEQ ID NO: 3956022 - RNA, 22 nt, Human herpesvirus 1
uguccggcagggggaugggggg

SEQ ID NO: 3956023 - RNA, 16 nt, Human herpesvirus 1
ugucgcagcaccuccu

SEQ ID NO: 3956024 - RNA, 17 nt, Human herpesvirus 1
ugucgcagggcgccaug

SEQ ID NO: 3956025 - RNA, 14 nt, Human herpesvirus 1
ugucugugggccaa

SEQ ID NO: 3956026 - RNA, 15 nt, Human herpesvirus 1
ugucuguuucuuggc

SEQ ID NO: 3956027 - RNA, 15 nt, Human herpesvirus 1
ugugccaccagccug

SEQ ID NO: 3956028 - RNA, 22 nt, Human herpesvirus 1
ugugcuuucuggugcugucuga

SEQ ID NO: 3956029 - RNA, 15 nt, Human herpesvirus 1
uguggacccaaagcc

SEQ ID NO: 3956030 - RNA, 16 nt, Human herpesvirus 1
uguggacccaaagccc

SEQ ID NO: 3956031 - RNA, 14 nt, Human herpesvirus 1
uguggggacccgcc

SEQ ID NO: 3956032 - RNA, 16 nt, Human herpesvirus 1
uguggggacccggccc

SEQ ID NO: 3956033 - RNA, 13 nt, Human herpesvirus 1
ugugggguccuca

SEQ ID NO: 3956034 - RNA, 20 nt, Human herpesvirus 1
uguuccccgggagccccggg

SEQ ID NO: 3956035 - RNA, 14 nt, Human herpesvirus 1
uguuccgccugucg

SEQ ID NO: 3956036 - RNA, 20 nt, Human herpesvirus 1
uguuggagcgcgccugccgc

SEQ ID NO: 3956037 - RNA, 12 nt, Human herpesvirus 1
uguuggcccuaa

SEQ ID NO: 3956038 - RNA, 13 nt, Human herpesvirus 1
uguugggcgggac

SEQ ID NO: 3956039 - RNA, 16 nt, Human herpesvirus 1
uguuugucgccuggcu

SEQ ID NO: 3956040 - RNA, 18 nt, Human herpesvirus 1
uuaaccgcaccccccucg

SEQ ID NO: 3956041 - RNA, 16 nt, Human herpesvirus 1
uuaacuacauuaaauu

SEQ ID NO: 3956042 - RNA, 22 nt, Human herpesvirus 1
uuaccgcccaaugggccgggcc

SEQ ID NO: 3956043 - RNA, 16 nt, Human herpesvirus 1
uuagccuccccgggcc

SEQ ID NO: 3956044 - RNA, 21 nt, Human herpesvirus 1
uuauuaacucacaggggcgcu

SEQ ID NO: 3956045 - RNA, 14 nt, Human herpesvirus 1
uucaucgaccucaa

SEQ ID NO: 3956046 - RNA, 22 nt, Human herpesvirus 1
uucccacgcgaaucgucgccug

SEQ ID NO: 3956047 - RNA, 16 nt, Human herpesvirus 1
uuccgagggccgggcc

SEQ ID NO: 3956048 - RNA, 18 nt, Human herpesvirus 1
uuccucuccgcggugucu

SEQ ID NO: 3956049 - RNA, 17 nt, Human herpesvirus 1
uucgcaacaccuccccc

SEQ ID NO: 3956050 - RNA, 17 nt, Human herpesvirus 1
uucgcaccaacaaccuu

SEQ ID NO: 3956051 - RNA, 13 nt, Human herpesvirus 1
uucuuccggccuc

SEQ ID NO: 3956052 - RNA, 19 nt, Human herpesvirus 1
uugcacaacacaaacaucu

SEQ ID NO: 3956053 - RNA, 16 nt, Human herpesvirus 1
uuggacuggaggagga

SEQ ID NO: 3956054 - RNA, 14 nt, Human herpesvirus 1
uuggcugaggacgu

SEQ ID NO: 3956055 - RNA, 13 nt, Human herpesvirus 1
uuggggggguccg

SEQ ID NO: 3956056 - RNA, 19 nt, Human herpesvirus 1
uugucgucucucuuccccc

SEQ ID NO: 3956057 - RNA, 20 nt, Human herpesvirus 1
uuguggggaggggggggucg

SEQ ID NO: 3956058 - RNA, 14 nt, Human herpesvirus 1
uuguguuggcccua

SEQ ID NO: 3956059 - RNA, 13 nt, Human herpesvirus 1
uuucaccgggacg

SEQ ID NO: 3956060 - RNA, 21 nt, Human herpesvirus 1
uuugcggacccucucuucucu

SEQ ID NO: 3956061 - RNA, 22 nt, Human herpesvirus 1
uuuguacccuuaauaaauuuua

SEQ ID NO: 3956062 - RNA, 16 nt, Human herpesvirus 1
uuuuacaaacagauuu

SEQ ID NO: 3956063 - RNA, 17 nt, Human herpesvirus 1
uuuucgccgcccucgcc

SEQ ID NO: 3956064 - RNA, 13 nt, Human herpesvirus 1
augcccucccuga

SEQ ID NO: 3956065 - RNA, 16 nt, Human herpesvirus 1
augccgcggccauggu

SEQ ID NO: 3956066 - RNA, 18 nt, Human herpesvirus 1
augcgccagggcgccccc

SEQ ID NO: 3956067 - RNA, 19 nt, Human herpesvirus 1
augcgccagggcgcccccg

SEQ ID NO: 3956068 - RNA, 18 nt, Human herpesvirus 1
auggacagcgaccugggg

SEQ ID NO: 3956069 - RNA, 24 nt, Human herpesvirus 1
auggcacgaguucaaccucgggug

SEQ ID NO: 3956070 - RNA, 12 nt, Human herpesvirus 1
auggcaggagcc

SEQ ID NO: 3956071 - RNA, 16 nt, Human herpesvirus 1
auggccauagccgccg

SEQ ID NO: 3956072 - RNA, 17 nt, Human herpesvirus 1
auggcccuggugucugc

SEQ ID NO: 3956073 - RNA, 15 nt, Human herpesvirus 1
auggcgggacugggc

SEQ ID NO: 3956074 - RNA, 19 nt, Human herpesvirus 1
augggccagggcgaggugc

SEQ ID NO: 3956075 - RNA, 14 nt, Human herpesvirus 1
augggcgaccuggg

SEQ ID NO: 3956076 - RNA, 12 nt, Human herpesvirus 1
auggggagagcc

SEQ ID NO: 3956077 - RNA, 17 nt, Human herpesvirus 1
auggggcgggggauggg

SEQ ID NO: 3956078 - RNA, 22 nt, Human herpesvirus 1
augggucccaauuggccguccc

SEQ ID NO: 3956079 - RNA, 23 nt, Human herpesvirus 1
auggucggggcgucccuggauau

SEQ ID NO: 3956080 - RNA, 14 nt, Human herpesvirus 1
auguccccaaaaua

SEQ ID NO: 3956081 - RNA, 14 nt, Human herpesvirus 1
auuaaccaccugcg

SEQ ID NO: 3956082 - RNA, 15 nt, Human herpesvirus 1
auuccaaagugcccc

SEQ ID NO: 3956083 - RNA, 15 nt, Human herpesvirus 1
auucccaaacagggc

SEQ ID NO: 3956084 - RNA, 11 nt, Human herpesvirus 1
auuccucuccg

SEQ ID NO: 3956085 - RNA, 17 nt, Human herpesvirus 1
auuuguacccuuaauaa

SEQ ID NO: 3956086 - RNA, 21 nt, Human herpesvirus 1
caaacacaaaacacacggguu

SEQ ID NO: 3956087 - RNA, 15 nt, Human herpesvirus 1
caacagcccccgggu

SEQ ID NO: 3956088 - RNA, 13 nt, Human herpesvirus 1
caacaugacccag

SEQ ID NO: 3956089 - RNA, 15 nt, Human herpesvirus 1
caaccagcugcacga

SEQ ID NO: 3956090 - RNA, 15 nt, Human herpesvirus 1
caaccccaacuccag

SEQ ID NO: 3956091 - RNA, 23 nt, Human herpesvirus 1
caaccccagggaccuccuggacu

SEQ ID NO: 3956092 - RNA, 19 nt, Human herpesvirus 1
caaccuggagaccaccgcg

SEQ ID NO: 3956093 - RNA, 15 nt, Human herpesvirus 1
caacgagcugcggcu

SEQ ID NO: 3956094 - RNA, 15 nt, Human herpesvirus 1
caacgaggguugggg

SEQ ID NO: 3956095 - RNA, 17 nt, Human herpesvirus 1
caacgcgacccucaccg

SEQ ID NO: 3956096 - RNA, 20 nt, Human herpesvirus 1
caacgcgggcguucccgagc

SEQ ID NO: 3956097 - RNA, 20 nt, Human herpesvirus 1
caacuucccacccggagcuu

SEQ ID NO: 3956098 - RNA, 20 nt, Human herpesvirus 1
caagaggucgucgggggacg

SEQ ID NO: 3956099 - RNA, 17 nt, Human herpesvirus 1
caagccccuagccccgc

SEQ ID NO: 3956100 - RNA, 23 nt, Human herpesvirus 1
caagccccuagccccgcccccuu

SEQ ID NO: 3956101 - RNA, 15 nt, Human herpesvirus 1
caagccgccccagca

SEQ ID NO: 3956102 - RNA, 19 nt, Human herpesvirus 1
caaggcuugguucggggcc

SEQ ID NO: 3956103 - RNA, 14 nt, Human herpesvirus 1
caaggugggccagc

SEQ ID NO: 3956104 - RNA, 14 nt, Human herpesvirus 1
caaguucaaggcca

SEQ ID NO: 3956105 - RNA, 20 nt, Human herpesvirus 1
caaucccccccgaccggguu

SEQ ID NO: 3956106 - RNA, 17 nt, Human herpesvirus 1
caauccgugucggggag

SEQ ID NO: 3956107 - RNA, 12 nt, Human herpesvirus 1
cacaaccucccg

SEQ ID NO: 3956108 - RNA, 10 nt, Human herpesvirus 1
cacaccaccg

SEQ ID NO: 3956109 - RNA, 15 nt, Human herpesvirus 1
cacaccggucaacga

SEQ ID NO: 3956110 - RNA, 15 nt, Human herpesvirus 1
cacacggagcugcuc

SEQ ID NO: 3956111 - RNA, 14 nt, Human herpesvirus 1
cacagccggccacg

SEQ ID NO: 3956112 - RNA, 23 nt, Human herpesvirus 1
cacagggcgggccgccucggggg

SEQ ID NO: 3956113 - RNA, 18 nt, Human herpesvirus 1
cacaucaaggugggccag

SEQ ID NO: 3956114 - RNA, 17 nt, Human herpesvirus 1
cacaugaagccacuguu

SEQ ID NO: 3956115 - RNA, 18 nt, Human herpesvirus 1
cacaugcggaaagcaaga

SEQ ID NO: 3956116 - RNA, 12 nt, Human herpesvirus 1
caccaccagcug

SEQ ID NO: 3956117 - RNA, 20 nt, Human herpesvirus 1
caccaccgucagcaccuuca

SEQ ID NO: 3956118 - RNA, 14 nt, Human herpesvirus 1
caccagccugguug

SEQ ID NO: 3956119 - RNA, 19 nt, Human herpesvirus 1
caccaucccggguuaaugu

SEQ ID NO: 3956120 - RNA, 15 nt, Human herpesvirus 1
cacccaguggcuccg

SEQ ID NO: 3956121 - RNA, 14 nt, Human herpesvirus 1
caccccccacgggc

SEQ ID NO: 3956122 - RNA, 14 nt, Human herpesvirus 1
caccccccaugucc

SEQ ID NO: 3956123 - RNA, 20 nt, Human herpesvirus 1
cacccccucgaccaccaccu

SEQ ID NO: 3956124 - RNA, 15 nt, Human herpesvirus 1
caccccgaagccccg

SEQ ID NO: 3956125 - RNA, 16 nt, Human herpesvirus 1
caccccgcaauuugca

SEQ ID NO: 3956126 - RNA, 17 nt, Human herpesvirus 1
caccccgcaauuugcac

SEQ ID NO: 3956127 - RNA, 22 nt, Human herpesvirus 1
caccccgcaauuugcacccagc

SEQ ID NO: 3956128 - RNA, 21 nt, Human herpesvirus 1
cacccgacaacagcccccggg

SEQ ID NO: 3956129 - RNA, 19 nt, Human herpesvirus 1
cacccgaggcggccugggu

SEQ ID NO: 3956130 - RNA, 18 nt, Human herpesvirus 1
cacccggaaccugcucac

SEQ ID NO: 3956131 - RNA, 17 nt, Human herpesvirus 1
cacccgggugcuuccca

SEQ ID NO: 3956132 - RNA, 22 nt, Human herpesvirus 1
cacccgggugcuucccacgcga

SEQ ID NO: 3956133 - RNA, 16 nt, Human herpesvirus 1
cacccucacgcgcauc

SEQ ID NO: 3956134 - RNA, 15 nt, Human herpesvirus 1
cacccucucuucccu

SEQ ID NO: 3956135 - RNA, 20 nt, Human herpesvirus 1
caccgacgaaucccccaagg

SEQ ID NO: 3956136 - RNA, 16 nt, Human herpesvirus 1
caccgccaucagccuu

SEQ ID NO: 3956137 - RNA, 19 nt, Human herpesvirus 1
caccgcguguuccccggga

SEQ ID NO: 3956138 - RNA, 22 nt, Human herpesvirus 1
caccggugcgccccccaaacca

SEQ ID NO: 3956139 - RNA, 22 nt, Human herpesvirus 1
caccgucggaggccccccagau

SEQ ID NO: 3956140 - RNA, 15 nt, Human herpesvirus 1
caccguggccuggga

SEQ ID NO: 3956141 - RNA, 11 nt, Human herpesvirus 1
caccuccaccc

SEQ ID NO: 3956142 - RNA, 15 nt, Human herpesvirus 1
caccuguuccgccug

SEQ ID NO: 3956143 - RNA, 15 nt, Human herpesvirus 1
cacgaacccccaucu

SEQ ID NO: 3956144 - RNA, 23 nt, Human herpesvirus 1
cacgaccuguugauggccugugc

SEQ ID NO: 3956145 - RNA, 15 nt, Human herpesvirus 1
cacgagcacccugcu

SEQ ID NO: 3956146 - RNA, 19 nt, Human herpesvirus 1
cacgagcacccugcugccc

SEQ ID NO: 3956147 - RNA, 15 nt, Human herpesvirus 1
cacgcaaaaccaggc

SEQ ID NO: 3956148 - RNA, 21 nt, Human herpesvirus 1
cacgcaagaccaggccugguc

SEQ ID NO: 3956149 - RNA, 23 nt, Human herpesvirus 1
cacgcaccucgaggacacccgcg

SEQ ID NO: 3956150 - RNA, 18 nt, Human herpesvirus 1
cacgcccgaccacacacc

SEQ ID NO: 3956151 - RNA, 13 nt, Human herpesvirus 1
cagccccccagcc

SEQ ID NO: 3956152 - RNA, 16 nt, Human herpesvirus 1
cagccgcgccgcugcc

SEQ ID NO: 3956153 - RNA, 17 nt, Human herpesvirus 1
cagccgcgccgcugccc

SEQ ID NO: 3956154 - RNA, 19 nt, Human herpesvirus 1
cagccggaaugaggagcuc

SEQ ID NO: 3956155 - RNA, 24 nt, Human herpesvirus 1
cagccuggucgaggcggccgaggc

SEQ ID NO: 3956156 - RNA, 18 nt, Human herpesvirus 1
cagccuguuuguccuggg

SEQ ID NO: 3956157 - RNA, 23 nt, Human herpesvirus 1
cagccuucucccggugccuuucc

SEQ ID NO: 3956158 - RNA, 13 nt, Human herpesvirus 1
cagcgaccugggg

SEQ ID NO: 3956159 - RNA, 18 nt, Human herpesvirus 1
cagcgacguccugggcca

SEQ ID NO: 3956160 - RNA, 14 nt, Human herpesvirus 1
cagcgccggguggc

SEQ ID NO: 3956161 - RNA, 15 nt, Human herpesvirus 1
cagcgccugcguuca

SEQ ID NO: 3956162 - RNA, 14 nt, Human herpesvirus 1
cagcgggcgcggcg

SEQ ID NO: 3956163 - RNA, 14 nt, Human herpesvirus 1
cagcuaugggcccu

SEQ ID NO: 3956164 - RNA, 17 nt, Human herpesvirus 1
cagcugaccgacccucc

SEQ ID NO: 3956165 - RNA, 15 nt, Human herpesvirus 1
cagcugagccgcgcc

SEQ ID NO: 3956166 - RNA, 17 nt, Human herpesvirus 1
cagcugcacgaccugcg

SEQ ID NO: 3956167 - RNA, 20 nt, Human herpesvirus 1
cagcugggaccccggcggcc

SEQ ID NO: 3956168 - RNA, 20 nt, Human herpesvirus 1
cagcuggugcuuuuccacaa

SEQ ID NO: 3956169 - RNA, 15 nt, Human herpesvirus 1
cagcuucagcgccgu

SEQ ID NO: 3956170 - RNA, 18 nt, Human herpesvirus 1
cagcuuuccgcugagccu

SEQ ID NO: 3956171 - RNA, 23 nt, Human herpesvirus 1
caggaucacaccggucaacgagg

SEQ ID NO: 3956172 - RNA, 16 nt, Human herpesvirus 1
caggccgacugccagc

SEQ ID NO: 3956173 - RNA, 17 nt, Human herpesvirus 1
caggccgacugccagcu

SEQ ID NO: 3956174 - RNA, 14 nt, Human herpesvirus 1
caggcgggccuacc

SEQ ID NO: 3956175 - RNA, 20 nt, Human herpesvirus 1
caggcugucgacgcccccuc

SEQ ID NO: 3956176 - RNA, 22 nt, Human herpesvirus 1
cagggagaaaccccagcauacc

SEQ ID NO: 3956177 - RNA, 15 nt, Human herpesvirus 1
cagggcccgccaucu

SEQ ID NO: 3956178 - RNA, 20 nt, Human herpesvirus 1
cagggccuccgaccccagac

SEQ ID NO: 3956179 - RNA, 15 nt, Human herpesvirus 1
caggguaccgcguga

SEQ ID NO: 3956180 - RNA, 21 nt, Human herpesvirus 1
cagguggcccuuccuaaccca

SEQ ID NO: 3956181 - RNA, 14 nt, Human herpesvirus 1
caguauaucaucaa

SEQ ID NO: 3956182 - RNA, 15 nt, Human herpesvirus 1
cagugauguaaaugg

SEQ ID NO: 3956183 - RNA, 20 nt, Human herpesvirus 1
caguggcuccgggccaacca

SEQ ID NO: 3956184 - RNA, 21 nt, Human herpesvirus 1
caguggcugaagcacaacgcc

SEQ ID NO: 3956185 - RNA, 18 nt, Human herpesvirus 1
cauaccuggguguguuua

SEQ ID NO: 3956186 - RNA, 20 nt, Human herpesvirus 1
cauacuccggccgcgguaca

SEQ ID NO: 3956187 - RNA, 14 nt, Human herpesvirus 1
cauaucccacccug

SEQ ID NO: 3956188 - RNA, 12 nt, Human herpesvirus 1
caucacccccga

SEQ ID NO: 3956189 - RNA, 18 nt, Human herpesvirus 1
caucagccucgucccgcc

SEQ ID NO: 3956190 - RNA, 14 nt, Human herpesvirus 1
caucauccagcugg

SEQ ID NO: 3956191 - RNA, 13 nt, Human herpesvirus 1
caucccacccccc

SEQ ID NO: 3956192 - RNA, 21 nt, Human herpesvirus 1
cauccgaacgcagccccgcug

SEQ ID NO: 3956193 - RNA, 18 nt, Human herpesvirus 1
caucggggguugcugucc

SEQ ID NO: 3956194 - RNA, 22 nt, Human herpesvirus 1
caugaagcccccaacaugaccc

SEQ ID NO: 3956195 - RNA, 22 nt, Human herpesvirus 1
caugaccgcccgccccucgcca

SEQ ID NO: 3956196 - RNA, 13 nt, Human herpesvirus 1
caugcaccccaga

SEQ ID NO: 3956197 - RNA, 23 nt, Human herpesvirus 1
caugcgcgggcucgucuuggcca

SEQ ID NO: 3956198 - RNA, 14 nt, Human herpesvirus 1
cauggccagcggcc

SEQ ID NO: 3956199 - RNA, 20 nt, Human herpesvirus 1
caugggacacaaaugcccac

SEQ ID NO: 3956200 - RNA, 20 nt, Human herpesvirus 1
caugggccugaucgccggcg

SEQ ID NO: 3956201 - RNA, 15 nt, Human herpesvirus 1
cauguccgugccgcu

SEQ ID NO: 3956202 - RNA, 19 nt, Human herpesvirus 1
cauguuugcgggccugggc

SEQ ID NO: 3956203 - RNA, 12 nt, Human herpesvirus 1
cauuagggagaa

SEQ ID NO: 3956204 - RNA, 24 nt, Human herpesvirus 1
cauugccgcguugguccucgugcc

SEQ ID NO: 3956205 - RNA, 13 nt, Human herpesvirus 1
cauuuuacaauaa

SEQ ID NO: 3956206 - RNA, 15 nt, Human herpesvirus 1
ccaaagcgcccgucg

SEQ ID NO: 3956207 - RNA, 19 nt, Human herpesvirus 1
ccaacacaacggcaugccu

SEQ ID NO: 3956208 - RNA, 21 nt, Human herpesvirus 1
ccaaccucggaugacucaggg

SEQ ID NO: 3956209 - RNA, 15 nt, Human herpesvirus 1
ccaacgccuccccug

SEQ ID NO: 3956210 - RNA, 13 nt, Human herpesvirus 1
ccaacuccagacc

SEQ ID NO: 3956211 - RNA, 14 nt, Human herpesvirus 1
ccaacuccagacca

SEQ ID NO: 3956212 - RNA, 21 nt, Human herpesvirus 1
ccaagcuagccgaggcccggg

SEQ ID NO: 3956213 - RNA, 13 nt, Human herpesvirus 1
ccacaaccucccg

SEQ ID NO: 3956214 - RNA, 14 nt, Human herpesvirus 1
ccacaaccucccgg

SEQ ID NO: 3956215 - RNA, 11 nt, Human herpesvirus 1
ccacaccaccu

SEQ ID NO: 3956216 - RNA, 13 nt, Human herpesvirus 1
ccacacccagugg

SEQ ID NO: 3956217 - RNA, 15 nt, Human herpesvirus 1
ccacauacagcgcca

SEQ ID NO: 3956218 - RNA, 23 nt, Human herpesvirus 1
ccacauccaggcgggccuaccgg

SEQ ID NO: 3956219 - RNA, 17 nt, Human herpesvirus 1
ccacaugcggaaagcaa

SEQ ID NO: 3956220 - RNA, 20 nt, Human herpesvirus 1
ccacaugcggaaagcaagaa

SEQ ID NO: 3956221 - RNA, 14 nt, Human herpesvirus 1
ccaccaaggcccgg

SEQ ID NO: 3956222 - RNA, 18 nt, Human herpesvirus 1
ccaccaaggcccgggcca

SEQ ID NO: 3956223 - RNA, 19 nt, Human herpesvirus 1
ccaccaccuccacccccuc

SEQ ID NO: 3956224 - RNA, 11 nt, Human herpesvirus 1
ccaccagccug

SEQ ID NO: 3956225 - RNA, 15 nt, Human herpesvirus 1
ccaccauccccgcuc

SEQ ID NO: 3956226 - RNA, 18 nt, Human herpesvirus 1
ccaccauuaucgggccgc

SEQ ID NO: 3956227 - RNA, 15 nt, Human herpesvirus 1
ccacccccgcccggg

SEQ ID NO: 3956228 - RNA, 17 nt, Human herpesvirus 1
ccacccccgccguccga

SEQ ID NO: 3956229 - RNA, 13 nt, Human herpesvirus 1
ccacccgaaccac

SEQ ID NO: 3956230 - RNA, 13 nt, Human herpesvirus 1
ccaccgaccucaa

SEQ ID NO: 3956231 - RNA, 20 nt, Human herpesvirus 1
ccaccgauagcguccgggcg

SEQ ID NO: 3956232 - RNA, 19 nt, Human herpesvirus 1
ccaccgccccgaacccugc

SEQ ID NO: 3956233 - RNA, 12 nt, Human herpesvirus 1
ccaccggaagcc

SEQ ID NO: 3956234 - RNA, 18 nt, Human herpesvirus 1
ccaccggaagcccaaccc

SEQ ID NO: 3956235 - RNA, 21 nt, Human herpesvirus 1
ccaccgugggccggcggguga

SEQ ID NO: 3956236 - RNA, 16 nt, Human herpesvirus 1
ccaccuccacccccuc

SEQ ID NO: 3956237 - RNA, 20 nt, Human herpesvirus 1
ccaccugacgcgccuagcca

SEQ ID NO: 3956238 - RNA, 22 nt, Human herpesvirus 1
ccaccugcgcucccucagcauc

SEQ ID NO: 3956239 - RNA, 20 nt, Human herpesvirus 1
ccacgccccuuucccccugu

SEQ ID NO: 3956240 - RNA, 15 nt, Human herpesvirus 1
ccacgccgacgccaa

SEQ ID NO: 3956241 - RNA, 13 nt, Human herpesvirus 1
ccacgccucgggc

SEQ ID NO: 3956242 - RNA, 15 nt, Human herpesvirus 1
ccacgggggggagca

SEQ ID NO: 3956243 - RNA, 18 nt, Human herpesvirus 1
ccacgugaucagcacgcc

SEQ ID NO: 3956244 - RNA, 17 nt, Human herpesvirus 1
ccacgugcacagccugg

SEQ ID NO: 3956245 - RNA, 17 nt, Human herpesvirus 1
ccacguguagccuggau

SEQ ID NO: 3956246 - RNA, 15 nt, Human herpesvirus 1
ccacugccugcaucu

SEQ ID NO: 3956247 - RNA, 17 nt, Human herpesvirus 1
ccacuguuuuccgcccc

SEQ ID NO: 3956248 - RNA, 16 nt, Human herpesvirus 1
ccagaccggcaccacc

SEQ ID NO: 3956249 - RNA, 18 nt, Human herpesvirus 1
ccagacgcgggcgacgca

SEQ ID NO: 3956250 - RNA, 15 nt, Human herpesvirus 1
ccagaggcgcgcgca

SEQ ID NO: 3956251 - RNA, 21 nt, Human herpesvirus 1
ccagaguaccgcgagcuccca

SEQ ID NO: 3956252 - RNA, 15 nt, Human herpesvirus 1
ccagaugcccacggg

SEQ ID NO: 3956253 - RNA, 17 nt, Human herpesvirus 1
ccagaugcccacgggca

SEQ ID NO: 3956254 - RNA, 20 nt, Human herpesvirus 1
ccagcagacgcugcuccgcc

SEQ ID NO: 3956255 - RNA, 18 nt, Human herpesvirus 1
ccagcagcuugcggggcu

SEQ ID NO: 3956256 - RNA, 17 nt, Human herpesvirus 1
ccagcaucgcgcgcguc

SEQ ID NO: 3956257 - RNA, 18 nt, Human herpesvirus 1
ccagccagggcggcggua

SEQ ID NO: 3956258 - RNA, 21 nt, Human herpesvirus 1
ccagccuguuuguccugggga

SEQ ID NO: 3956259 - RNA, 15 nt, Human herpesvirus 1
ccagcgaccucgccg

SEQ ID NO: 3956260 - RNA, 17 nt, Human herpesvirus 1
ccagcgaccucgccgaa

SEQ ID NO: 3956261 - RNA, 16 nt, Human herpesvirus 1
ccagcggcacgaccgg

SEQ ID NO: 3956262 - RNA, 15 nt, Human herpesvirus 1
ccagcuacgccgccg

SEQ ID NO: 3956263 - RNA, 21 nt, Human herpesvirus 1
ccagcuaugggcccugcuccg

SEQ ID NO: 3956264 - RNA, 17 nt, Human herpesvirus 1
ccagcugagccgcgccg

SEQ ID NO: 3956265 - RNA, 17 nt, Human herpesvirus 1
ccaggaaauccguggcc

SEQ ID NO: 3956266 - RNA, 11 nt, Human herpesvirus 1
ccaggaucaca

SEQ ID NO: 3956267 - RNA, 17 nt, Human herpesvirus 1
ccaggcccgccgccacu

SEQ ID NO: 3956268 - RNA, 19 nt, Human herpesvirus 1
ccaggccuaccagcagggg

SEQ ID NO: 3956269 - RNA, 15 nt, Human herpesvirus 1
ccaggccuccacccc

SEQ ID NO: 3956270 - RNA, 17 nt, Human herpesvirus 1
ccaggcgccgacggaca

SEQ ID NO: 3956271 - RNA, 19 nt, Human herpesvirus 1
ccaggcggcgaacgggggc

SEQ ID NO: 3956272 - RNA, 19 nt, Human herpesvirus 1
ccaggcugucgacgccccc

SEQ ID NO: 3956273 - RNA, 22 nt, Human herpesvirus 1
ccagggcgcccccgcgcggggg

SEQ ID NO: 3956274 - RNA, 13 nt, Human herpesvirus 1
ccaggucccaccu

SEQ ID NO: 3956275 - RNA, 15 nt, Human herpesvirus 1
ccaguccccgggccc

SEQ ID NO: 3956276 - RNA, 17 nt, Human herpesvirus 1
ccagucccggcccggcg

SEQ ID NO: 3956277 - RNA, 22 nt, Human herpesvirus 1
ccagucgcccgaagacaccccc

SEQ ID NO: 3956278 - RNA, 17 nt, Human herpesvirus 1
ccaguggcuccgggcca

SEQ ID NO: 3956279 - RNA, 16 nt, Human herpesvirus 1
ccaguugagccgcgcc

SEQ ID NO: 3956280 - RNA, 15 nt, Human herpesvirus 1
ccauauccaccaccu

SEQ ID NO: 3956281 - RNA, 18 nt, Human herpesvirus 1
ccaucccccggccacccc

SEQ ID NO: 3956282 - RNA, 16 nt, Human herpesvirus 1
ccaucccgaggcccca

SEQ ID NO: 3956283 - RNA, 13 nt, Human herpesvirus 1
ccauccgccggca

SEQ ID NO: 3956284 - RNA, 22 nt, Human herpesvirus 1
ccaucgccggggaccgcagccu

SEQ ID NO: 3956285 - RNA, 11 nt, Human herpesvirus 1
ccaugcuggcg

SEQ ID NO: 3956286 - RNA, 17 nt, Human herpesvirus 1
ccauggagcgcacggaa

SEQ ID NO: 3956287 - RNA, 21 nt, Human herpesvirus 1
ccaugggacacaaaugcccac

SEQ ID NO: 3956288 - RNA, 22 nt, Human herpesvirus 1
ccauuaucgggccgcuggcaac

SEQ ID NO: 3956289 - RNA, 18 nt, Human herpesvirus 1
ccauuuacguggcugggu

SEQ ID NO: 3956290 - RNA, 20 nt, Human herpesvirus 1
cccaaaacacacggagcugc

SEQ ID NO: 3956291 - RNA, 22 nt, Human herpesvirus 1
cccaacaaagacggugacgccg

SEQ ID NO: 3956292 - RNA, 12 nt, Human herpesvirus 1
cccaacaacacc

SEQ ID NO: 3956293 - RNA, 12 nt, Human herpesvirus 1
cccaacggggga

SEQ ID NO: 3956294 - RNA, 12 nt, Human herpesvirus 1
cccaacgggggc

SEQ ID NO: 3956295 - RNA, 14 nt, Human herpesvirus 1
cccaacuccagacc

SEQ ID NO: 3956296 - RNA, 15 nt, Human herpesvirus 1
cccaacuccagacca

SEQ ID NO: 3956297 - RNA, 12 nt, Human herpesvirus 1
cccaccagcuga

SEQ ID NO: 3956298 - RNA, 18 nt, Human herpesvirus 1
cccaccgcgcuccucccg

SEQ ID NO: 3956299 - RNA, 17 nt, Human herpesvirus 1
cccaccgggcccggcca

SEQ ID NO: 3956300 - RNA, 15 nt, Human herpesvirus 1
cccacgacccgacuc

SEQ ID NO: 3956301 - RNA, 20 nt, Human herpesvirus 1
cccacgacccgacucaccuc

SEQ ID NO: 3956302 - RNA, 17 nt, Human herpesvirus 1
cccacgcaccccccgcg

SEQ ID NO: 3956303 - RNA, 16 nt, Human herpesvirus 1
cccacuacaccagcca

SEQ ID NO: 3956304 - RNA, 14 nt, Human herpesvirus 1
cccagcgaccucgc

SEQ ID NO: 3956305 - RNA, 12 nt, Human herpesvirus 1
cccagcugggcc

SEQ ID NO: 3956306 - RNA, 14 nt, Human herpesvirus 1
cccagcugggcccg

SEQ ID NO: 3956307 - RNA, 18 nt, Human herpesvirus 1
cccaggccuaccagcagg

SEQ ID NO: 3956308 - RNA, 22 nt, Human herpesvirus 1
cccaggcggcguuaaccgcacc

SEQ ID NO: 3956309 - RNA, 13 nt, Human herpesvirus 1
cccauacucccgc

SEQ ID NO: 3956310 - RNA, 15 nt, Human herpesvirus 1
cccaucaccccgcaa

SEQ ID NO: 3956311 - RNA, 22 nt, Human herpesvirus 1
cccaucgcgggcgccauggcgg

SEQ ID NO: 3956312 - RNA, 15 nt, Human herpesvirus 1
cccaugaaggcccug

SEQ ID NO: 3956313 - RNA, 16 nt, Human herpesvirus 1
cccaugcgacagcgga

SEQ ID NO: 3956314 - RNA, 22 nt, Human herpesvirus 1
cccaugggacacaaaugcccac

SEQ ID NO: 3956315 - RNA, 20 nt, Human herpesvirus 1
ccccauaucgcuucccgacc

SEQ ID NO: 3956316 - RNA, 13 nt, Human herpesvirus 1
ccccaucaccccg

SEQ ID NO: 3956317 - RNA, 15 nt, Human herpesvirus 1
ccccauggaccccag

SEQ ID NO: 3956318 - RNA, 17 nt, Human herpesvirus 1
cccccaaaccccacgcc

SEQ ID NO: 3956319 - RNA, 16 nt, Human herpesvirus 1
cccccaucaccccgca

SEQ ID NO: 3956320 - RNA, 18 nt, Human herpesvirus 1
cccccaucuuguccccaa

SEQ ID NO: 3956321 - RNA, 23 nt, Human herpesvirus 1
ccccccacgugaucagcacgcca

SEQ ID NO: 3956322 - RNA, 14 nt, Human herpesvirus 1
ccccccccacccca

SEQ ID NO: 3956323 - RNA, 14 nt, Human herpesvirus 1
ccccccgcugcggc

SEQ ID NO: 3956324 - RNA, 16 nt, Human herpesvirus 1
ccccccguggacccca

SEQ ID NO: 3956325 - RNA, 13 nt, Human herpesvirus 1
cccccgcgcggcu

SEQ ID NO: 3956326 - RNA, 18 nt, Human herpesvirus 1
cccccggcacgccugggg

SEQ ID NO: 3956327 - RNA, 13 nt, Human herpesvirus 1
cccccgucugggu

SEQ ID NO: 3956328 - RNA, 19 nt, Human herpesvirus 1
cccccguguuuguggggag

SEQ ID NO: 3956329 - RNA, 16 nt, Human herpesvirus 1
ccccgaacccugcggu

SEQ ID NO: 3956330 - RNA, 14 nt, Human herpesvirus 1
ccccgagaaccagc

SEQ ID NO: 3956331 - RNA, 21 nt, Human herpesvirus 1
ccccgagaaccagcgcaccgu

SEQ ID NO: 3956332 - RNA, 15 nt, Human herpesvirus 1
ccccgauccgcgucu

SEQ ID NO: 3956333 - RNA, 15 nt, Human herpesvirus 1
ccccgcgcggcugcc

SEQ ID NO: 3956334 - RNA, 20 nt, Human herpesvirus 1
ccccggaggcgccugccccg

SEQ ID NO: 3956335 - RNA, 14 nt, Human herpesvirus 1
ccccggccaccccg

SEQ ID NO: 3956336 - RNA, 17 nt, Human herpesvirus 1
ccccggcccccaauaaa

SEQ ID NO: 3956337 - RNA, 13 nt, Human herpesvirus 1
ccccgggccaaua

SEQ ID NO: 3956338 - RNA, 23 nt, Human herpesvirus 1
ccccggguuccgcgaccaccccg

SEQ ID NO: 3956339 - RNA, 14 nt, Human herpesvirus 1
ccccggucuccccg

SEQ ID NO: 3956340 - RNA, 12 nt, Human herpesvirus 1
ccccuccauccc

SEQ ID NO: 3956341 - RNA, 15 nt, Human herpesvirus 1
ccccuggacgugggc

SEQ ID NO: 3956342 - RNA, 17 nt, Human herpesvirus 1
ccccuuccccgcuguca

SEQ ID NO: 3956343 - RNA, 16 nt, Human herpesvirus 1
ccccuucccucccccu

SEQ ID NO: 3956344 - RNA, 19 nt, Human herpesvirus 1
ccccuucccucccccuccg

SEQ ID NO: 3956345 - RNA, 19 nt, Human herpesvirus 1
cccgaaccaggccguuccg

SEQ ID NO: 3956346 - RNA, 19 nt, Human herpesvirus 1
cccgaagacaccccccacc

SEQ ID NO: 3956347 - RNA, 19 nt, Human herpesvirus 1
cccgaagccugcuguuucg

SEQ ID NO: 3956348 - RNA, 18 nt, Human herpesvirus 1
cccgacgccagcuuuccg

SEQ ID NO: 3956349 - RNA, 21 nt, Human herpesvirus 1
cccgagaaccuagggaaccca

SEQ ID NO: 3956350 - RNA, 18 nt, Human herpesvirus 1
cccgagaccagucgcccg

SEQ ID NO: 3956351 - RNA, 15 nt, Human herpesvirus 1
cccgaugcggcggcg

SEQ ID NO: 3956352 - RNA, 20 nt, Human herpesvirus 1
cccgauggcccuccaggcug

SEQ ID NO: 3956353 - RNA, 22 nt, Human herpesvirus 1
cccgcaauuugcacccagccuu

SEQ ID NO: 3956354 - RNA, 13 nt, Human herpesvirus 1
cccgcacccccag

SEQ ID NO: 3956355 - RNA, 20 nt, Human herpesvirus 1
cccgcauaucccacccugga

SEQ ID NO: 3956356 - RNA, 23 nt, Human herpesvirus 1
cccgcauaucccacccuggagcu

SEQ ID NO: 3956357 - RNA, 15 nt, Human herpesvirus 1
cccgcaucccccguc

SEQ ID NO: 3956358 - RNA, 19 nt, Human herpesvirus 1
cccgccaacacccccuucc

SEQ ID NO: 3956359 - RNA, 13 nt, Human herpesvirus 1
cccgcccccggca

SEQ ID NO: 3956360 - RNA, 13 nt, Human herpesvirus 1
cccgcccccggcu

SEQ ID NO: 3956361 - RNA, 15 nt, Human herpesvirus 1
cccgccgccacuguc

SEQ ID NO: 3956362 - RNA, 15 nt, Human herpesvirus 1
cccgcgcggcugcca

SEQ ID NO: 3956363 - RNA, 15 nt, Human herpesvirus 1
cccgcggaccaccgg

SEQ ID NO: 3956364 - RNA, 23 nt, Human herpesvirus 1
cccgcgucuggccccggcgagcg

SEQ ID NO: 3956365 - RNA, 22 nt, Human herpesvirus 1
cccgcguuugagaccgccggca

SEQ ID NO: 3956366 - RNA, 15 nt, Human herpesvirus 1
cccgcucccucgacc

SEQ ID NO: 3956367 - RNA, 21 nt, Human herpesvirus 1
cccgcuccugugcacccucac

SEQ ID NO: 3956368 - RNA, 16 nt, Human herpesvirus 1
cccggaccccacgcac

SEQ ID NO: 3956369 - RNA, 24 nt, Human herpesvirus 1
cccggacgacauggccagcggccc

SEQ ID NO: 3956370 - RNA, 21 nt, Human herpesvirus 1
cccggcaaccccgaaggcgga

SEQ ID NO: 3956371 - RNA, 14 nt, Human herpesvirus 1
cccggcaccacggg

SEQ ID NO: 3956372 - RNA, 16 nt, Human herpesvirus 1
cccggcacgccugggg

SEQ ID NO: 3956373 - RNA, 19 nt, Human herpesvirus 1
cccggcauggcgcagcugg

SEQ ID NO: 3956374 - RNA, 22 nt, Human herpesvirus 1
cccggcucuccgaucccaacuc

SEQ ID NO: 3956375 - RNA, 12 nt, Human herpesvirus 1
cccggggccagc

SEQ ID NO: 3956376 - RNA, 13 nt, Human herpesvirus 1
cccggggccugcu

SEQ ID NO: 3956377 - RNA, 14 nt, Human herpesvirus 1
cccggggcucagcc

SEQ ID NO: 3956378 - RNA, 13 nt, Human herpesvirus 1
cccggucucccag

SEQ ID NO: 3956379 - RNA, 23 nt, Human herpesvirus 1
cccgucucgcugcccuucugucu

SEQ ID NO: 3956380 - RNA, 21 nt, Human herpesvirus 1
cccgucuggguuuuccccucc

SEQ ID NO: 3956381 - RNA, 18 nt, Human herpesvirus 1
gccuuguuccgcuucccg

SEQ ID NO: 3956382 - RNA, 14 nt, Human herpesvirus 1
gcgacaacgcgacc

SEQ ID NO: 3956383 - RNA, 15 nt, Human herpesvirus 1
gcgaccacgggcugu

SEQ ID NO: 3956384 - RNA, 23 nt, Human herpesvirus 1
gcgacccguaaaugguugcagug

SEQ ID NO: 3956385 - RNA, 18 nt, Human herpesvirus 1
gcgacccugaucccccgc

SEQ ID NO: 3956386 - RNA, 12 nt, Human herpesvirus 1
gcgaccuggggu

SEQ ID NO: 3956387 - RNA, 15 nt, Human herpesvirus 1
gcgacgcacacaccc

SEQ ID NO: 3956388 - RNA, 17 nt, Human herpesvirus 1
gcgacugcgaccccagc

SEQ ID NO: 3956389 - RNA, 21 nt, Human herpesvirus 1
gcgaggugcgguuggggaggc

SEQ ID NO: 3956390 - RNA, 17 nt, Human herpesvirus 1
gcgaguccugcgccccg

SEQ ID NO: 3956391 - RNA, 17 nt, Human herpesvirus 1
gcgaugagccaaccucg

SEQ ID NO: 3956392 - RNA, 15 nt, Human herpesvirus 1
gcgcaccuggugaug

SEQ ID NO: 3956393 - RNA, 19 nt, Human herpesvirus 1
gcgcagcugggaccccggc

SEQ ID NO: 3956394 - RNA, 19 nt, Human herpesvirus 1
gcgcauacgccucccccac

SEQ ID NO: 3956395 - RNA, 11 nt, Human herpesvirus 1
gcgccaaagcc

SEQ ID NO: 3956396 - RNA, 10 nt, Human herpesvirus 1
gcgccaggcc

SEQ ID NO: 3956397 - RNA, 21 nt, Human herpesvirus 1
gcgccauggcgggacugggca

SEQ ID NO: 3956398 - RNA, 15 nt, Human herpesvirus 1
gcgcccacuacacca

SEQ ID NO: 3956399 - RNA, 14 nt, Human herpesvirus 1
gcgcccccgcgcgg

SEQ ID NO: 3956400 - RNA, 21 nt, Human herpesvirus 1
gcgccgacaucaccaccguca

SEQ ID NO: 3956401 - RNA, 13 nt, Human herpesvirus 1
gcgccgcgggccc

SEQ ID NO: 3956402 - RNA, 17 nt, Human herpesvirus 1
gcgccgucgggcguccc

SEQ ID NO: 3956403 - RNA, 17 nt, Human herpesvirus 1
gcgccuugcggcagcgc

SEQ ID NO: 3956404 - RNA, 15 nt, Human herpesvirus 1
gcgcgcgaccucacc

SEQ ID NO: 3956405 - RNA, 21 nt, Human herpesvirus 1
gcgcggacaacauccccccga

SEQ ID NO: 3956406 - RNA, 12 nt, Human herpesvirus 1
gcgcguccccgg

SEQ ID NO: 3956407 - RNA, 17 nt, Human herpesvirus 1
gcgcgucguucgggcgg

SEQ ID NO: 3956408 - RNA, 17 nt, Human herpesvirus 1
gcgcuccgacgacgcgc

SEQ ID NO: 3956409 - RNA, 16 nt, Human herpesvirus 1
gcgcugcucagcgcca

SEQ ID NO: 3956410 - RNA, 15 nt, Human herpesvirus 1
gcgcuggccgugggu

SEQ ID NO: 3956411 - RNA, 15 nt, Human herpesvirus 1
gcgcuggggcugccg

SEQ ID NO: 3956412 - RNA, 17 nt, Human herpesvirus 1
gcggaccggcggcgcug

SEQ ID NO: 3956413 - RNA, 19 nt, Human herpesvirus 1
gcggacgccguggcgcccc

SEQ ID NO: 3956414 - RNA, 22 nt, Human herpesvirus 1
gcggacggcgcggggcccccgc

SEQ ID NO: 3956415 - RNA, 20 nt, Human herpesvirus 1
gcggcaccaccggggccuga

SEQ ID NO: 3956416 - RNA, 15 nt, Human herpesvirus 1
gcggcagcccggagg

SEQ ID NO: 3956417 - RNA, 22 nt, Human herpesvirus 1
gcggccaucgaaaacuacgugc

SEQ ID NO: 3956418 - RNA, 14 nt, Human herpesvirus 1
gcggccgcccaacu

SEQ ID NO: 3956419 - RNA, 16 nt, Human herpesvirus 1
gcggcgcuggcggcca

SEQ ID NO: 3956420 - RNA, 21 nt, Human herpesvirus 1
gcggcgguacguacgggaccg

SEQ ID NO: 3956421 - RNA, 13 nt, Human herpesvirus 1
gcggcgugugggg

SEQ ID NO: 3956422 - RNA, 22 nt, Human herpesvirus 1
gcggcucaacgagcuccuggcc

SEQ ID NO: 3956423 - RNA, 17 nt, Human herpesvirus 1
gcgggcccccggccgcc

SEQ ID NO: 3956424 - RNA, 16 nt, Human herpesvirus 1
gcgggccgccucgggg

SEQ ID NO: 3956425 - RNA, 13 nt, Human herpesvirus 1
gcgggcgccaugg

SEQ ID NO: 3956426 - RNA, 12 nt, Human herpesvirus 1
gcggggccgugg

SEQ ID NO: 3956427 - RNA, 17 nt, Human herpesvirus 1
gcgggggauggggagag

SEQ ID NO: 3956428 - RNA, 15 nt, Human herpesvirus 1
gcggggggugggacc

SEQ ID NO: 3956429 - RNA, 15 nt, Human herpesvirus 1
gcggguagggucgug

SEQ ID NO: 3956430 - RNA, 22 nt, Human herpesvirus 1
gcggguaugguggaccgcggac

SEQ ID NO: 3956431 - RNA, 16 nt, Human herpesvirus 1
gcgggugucugcuccc

SEQ ID NO: 3956432 - RNA, 23 nt, Human herpesvirus 1
gcggguugcugcgcggcguccgc

SEQ ID NO: 3956433 - RNA, 23 nt, Human herpesvirus 1
gcguccaaacccaccgacacaug

SEQ ID NO: 3956434 - RNA, 13 nt, Human herpesvirus 1
gcguccacccgga

SEQ ID NO: 3956435 - RNA, 24 nt, Human herpesvirus 1
gcguccuucuugucgucucucuuc

SEQ ID NO: 3956436 - RNA, 11 nt, Human herpesvirus 1
gcgucuggccc

SEQ ID NO: 3956437 - RNA, 13 nt, Human herpesvirus 1
gcgucugggccac

SEQ ID NO: 3956438 - RNA, 14 nt, Human herpesvirus 1
gcgucugggccacc

SEQ ID NO: 3956439 - RNA, 15 nt, Human herpesvirus 1
gcgugaccccaggga

SEQ ID NO: 3956440 - RNA, 16 nt, Human herpesvirus 1
gcgugaccccagggau

SEQ ID NO: 3956441 - RNA, 16 nt, Human herpesvirus 1
gcgugacgcacccccu

SEQ ID NO: 3956442 - RNA, 18 nt, Human herpesvirus 1
gcgugacgcacccccuga

SEQ ID NO: 3956443 - RNA, 21 nt, Human herpesvirus 1
gcgugcuccuaaacgcaccgu

SEQ ID NO: 3956444 - RNA, 17 nt, Human herpesvirus 1
gcguggaccugggggac

SEQ ID NO: 3956445 - RNA, 16 nt, Human herpesvirus 1
gcguggaucggcgcca

SEQ ID NO: 3956446 - RNA, 18 nt, Human herpesvirus 1
gcuacgaguugccccacc

SEQ ID NO: 3956447 - RNA, 18 nt, Human herpesvirus 1
gcuacgccgcugaccccc

SEQ ID NO: 3956448 - RNA, 20 nt, Human herpesvirus 1
gcuacgccgcugacccccac

SEQ ID NO: 3956449 - RNA, 21 nt, Human herpesvirus 1
gcuagaccacgccccuuuccc

SEQ ID NO: 3956450 - RNA, 13 nt, Human herpesvirus 1
gcuaugacggcaa

SEQ ID NO: 3956451 - RNA, 15 nt, Human herpesvirus 1
gcucaaucuggccca

SEQ ID NO: 3956452 - RNA, 21 nt, Human herpesvirus 1
gcuccgaguucccccggcacg

SEQ ID NO: 3956453 - RNA, 13 nt, Human herpesvirus 1
gcuccgccgcgga

SEQ ID NO: 3956454 - RNA, 21 nt, Human herpesvirus 1
gcuccggggggcuuccggccu

SEQ ID NO: 3956455 - RNA, 18 nt, Human herpesvirus 1
gcuccugauguggcugcu

SEQ ID NO: 3956456 - RNA, 18 nt, Human herpesvirus 1
gcucgcggaggagccagu

SEQ ID NO: 3956457 - RNA, 18 nt, Human herpesvirus 1
gcucgcggagggcggcca

SEQ ID NO: 3956458 - RNA, 21 nt, Human herpesvirus 1
gcucgcggagggcggccagcc

SEQ ID NO: 3956459 - RNA, 15 nt, Human herpesvirus 1
gcucggccuauggcu

SEQ ID NO: 3956460 - RNA, 14 nt, Human herpesvirus 1
gcucgguggcuccg

SEQ ID NO: 3956461 - RNA, 20 nt, Human herpesvirus 1
gcucgucgggguggcacaga

SEQ ID NO: 3956462 - RNA, 17 nt, Human herpesvirus 1
gcucgugggccucuggg

SEQ ID NO: 3956463 - RNA, 17 nt, Human herpesvirus 1
gcucuccgaucccaacu

SEQ ID NO: 3956464 - RNA, 21 nt, Human herpesvirus 1
gcucucgcgcguggaccuggg

SEQ ID NO: 3956465 - RNA, 14 nt, Human herpesvirus 1
gcugccagaccuca

SEQ ID NO: 3956466 - RNA, 20 nt, Human herpesvirus 1
gcugccccgcuucauccccg

SEQ ID NO: 3956467 - RNA, 16 nt, Human herpesvirus 1
gcugcccuucugucug

SEQ ID NO: 3956468 - RNA, 21 nt, Human herpesvirus 1
gcugcccuucugucuggacca

SEQ ID NO: 3956469 - RNA, 19 nt, Human herpesvirus 1
gcugcgaguccugcgcccc

SEQ ID NO: 3956470 - RNA, 22 nt, Human herpesvirus 1
gcugcgcggcguccgcgccccu

SEQ ID NO: 3956471 - RNA, 12 nt, Human herpesvirus 1
gcuggaccucac

SEQ ID NO: 3956472 - RNA, 19 nt, Human herpesvirus 1
gcuggacuacacggagguc

SEQ ID NO: 3956473 - RNA, 17 nt, Human herpesvirus 1
gcuggcaacucgcccca

SEQ ID NO: 3956474 - RNA, 17 nt, Human herpesvirus 1
gcuggggcggcugggcu

SEQ ID NO: 3956475 - RNA, 18 nt, Human herpesvirus 1
gcuggguggucucuggcc

SEQ ID NO: 3956476 - RNA, 19 nt, Human herpesvirus 1
gcuggguggucucuggccg

SEQ ID NO: 3956477 - RNA, 16 nt, Human herpesvirus 1
gcuguacucgacccac

SEQ ID NO: 3956478 - RNA, 17 nt, Human herpesvirus 1
gcuuguccccgaacaaa

SEQ ID NO: 3956479 - RNA, 23 nt, Human herpesvirus 1
ggaaaccguaacggcauaugcaa

SEQ ID NO: 3956480 - RNA, 15 nt, Human herpesvirus 1
ggaaagcaagaacaa

SEQ ID NO: 3956481 - RNA, 14 nt, Human herpesvirus 1
ggaaagguggacag

SEQ ID NO: 3956482 - RNA, 22 nt, Human herpesvirus 1
ggaacuacuaugacagcuucag

SEQ ID NO: 3956483 - RNA, 23 nt, Human herpesvirus 1
ggaagcagggcccgccaucuggg

SEQ ID NO: 3956484 - RNA, 22 nt, Human herpesvirus 1
ggacaccggcgcuacuucaccu

SEQ ID NO: 3956485 - RNA, 20 nt, Human herpesvirus 1
ggacagccauauccugagcc

SEQ ID NO: 3956486 - RNA, 14 nt, Human herpesvirus 1
ggaccagagcgcga

SEQ ID NO: 3956487 - RNA, 23 nt, Human herpesvirus 1
ggacccaagccgccccagcaccg

SEQ ID NO: 3956488 - RNA, 12 nt, Human herpesvirus 1
ggacccccggag

SEQ ID NO: 3956489 - RNA, 23 nt, Human herpesvirus 1
ggacccgugacacccuaccccag

SEQ ID NO: 3956490 - RNA, 15 nt, Human herpesvirus 1
ggaccuccuggacuu

SEQ ID NO: 3956491 - RNA, 22 nt, Human herpesvirus 1
ggacgacggcggcgaggccggc

SEQ ID NO: 3956492 - RNA, 21 nt, Human herpesvirus 1
ggagcaaaacgccucccccug

SEQ ID NO: 3956493 - RNA, 17 nt, Human herpesvirus 1
ggagccccggaccccac

SEQ ID NO: 3956494 - RNA, 14 nt, Human herpesvirus 1
ggagccuguugugg

SEQ ID NO: 3956495 - RNA, 13 nt, Human herpesvirus 1
ggagcgccaggac

SEQ ID NO: 3956496 - RNA, 23 nt, Human herpesvirus 1
gggcgucaccaugcagcgccgga

SEQ ID NO: 3956497 - RNA, 13 nt, Human herpesvirus 1
gggcgucccugga

SEQ ID NO: 3956498 - RNA, 19 nt, Human herpesvirus 1
gggcucgccagcgacccgc

SEQ ID NO: 3956499 - RNA, 18 nt, Human herpesvirus 1
gggcucggcuccccgccg

SEQ ID NO: 3956500 - RNA, 21 nt, Human herpesvirus 1
gggcucggcuccccgccgcgg

SEQ ID NO: 3956501 - RNA, 13 nt, Human herpesvirus 1
gggcugccgugag

SEQ ID NO: 3956502 - RNA, 18 nt, Human herpesvirus 1
gggcuggcacaccaccga

SEQ ID NO: 3956503 - RNA, 19 nt, Human herpesvirus 1
gggcuguacucgacccacu

SEQ ID NO: 3956504 - RNA, 18 nt, Human herpesvirus 1
gggcuguuccgccaggcg

SEQ ID NO: 3956505 - RNA, 21 nt, Human herpesvirus 1
gggcuuggacgcgccucccgg

SEQ ID NO: 3956506 - RNA, 22 nt, Human herpesvirus 1
ggggacugcaucggcaaggacg

SEQ ID NO: 3956507 - RNA, 13 nt, Human herpesvirus 1
ggggagagcccac

SEQ ID NO: 3956508 - RNA, 18 nt, Human herpesvirus 1
ggggcauccgggaccuga

SEQ ID NO: 3956509 - RNA, 20 nt, Human herpesvirus 1
ggggcauccgggaccugaac

SEQ ID NO: 3956510 - RNA, 21 nt, Human herpesvirus 1
ggggccccgacgcaccccccc

SEQ ID NO: 3956511 - RNA, 18 nt, Human herpesvirus 1
ggggcgcuuaccgccaca

SEQ ID NO: 3956512 - RNA, 16 nt, Human herpesvirus 1
ggggcuuccggccugg

SEQ ID NO: 3956513 - RNA, 11 nt, Human herpesvirus 1
gggggcggcgu

SEQ ID NO: 3956514 - RNA, 22 nt, Human herpesvirus 1
gggggcuuccggccugggggcc

SEQ ID NO: 3956515 - RNA, 15 nt, Human herpesvirus 1
ggggguugcuguccc

SEQ ID NO: 3956516 - RNA, 17 nt, Human herpesvirus 1
gggucaccugccaguca

SEQ ID NO: 3956517 - RNA, 21 nt, Human herpesvirus 1
gggucgcucuguccaccggga

SEQ ID NO: 3956518 - RNA, 11 nt, Human herpesvirus 1
gggucgggcgc

SEQ ID NO: 3956519 - RNA, 18 nt, Human herpesvirus 1
gggucuguugguccuggc

SEQ ID NO: 3956520 - RNA, 17 nt, Human herpesvirus 1
ggguucgauuggcaaug

SEQ ID NO: 3956521 - RNA, 23 nt, Human herpesvirus 1
ggguugacgcuggggguccuggu

SEQ ID NO: 3956522 - RNA, 20 nt, Human herpesvirus 1
ggguuggggggguccggcac

SEQ ID NO: 3956523 - RNA, 15 nt, Human herpesvirus 1
ggguuucacugaaac

SEQ ID NO: 3956524 - RNA, 20 nt, Human herpesvirus 1
gguacaacgcgacgcacauc

SEQ ID NO: 3956525 - RNA, 17 nt, Human herpesvirus 1
gguaccgcgugacccca

SEQ ID NO: 3956526 - RNA, 19 nt, Human herpesvirus 1
gguagcccggccgugugac

SEQ ID NO: 3956527 - RNA, 13 nt, Human herpesvirus 1
gguaggcccagca

SEQ ID NO: 3956528 - RNA, 15 nt, Human herpesvirus 1
gguccauuaaagaca

SEQ ID NO: 3956529 - RNA, 15 nt, Human herpesvirus 1
ggucccaccugacgc

SEQ ID NO: 3956530 - RNA, 17 nt, Human herpesvirus 1
gguccgcggggccuccc

SEQ ID NO: 3956531 - RNA, 19 nt, Human herpesvirus 1
ggucggcgagcuggauggc

SEQ ID NO: 3956532 - RNA, 23 nt, Human herpesvirus 1
ggucuccccgggagccccggacc

SEQ ID NO: 3956533 - RNA, 17 nt, Human herpesvirus 1
ggucuguugguccuggc

SEQ ID NO: 3956534 - RNA, 15 nt, Human herpesvirus 1
ggugacgguggacag

SEQ ID NO: 3956535 - RNA, 18 nt, Human herpesvirus 1
gguggagggugucccagg

SEQ ID NO: 3956536 - RNA, 20 nt, Human herpesvirus 1
gguggucucuggccgcgccc

SEQ ID NO: 3956537 - RNA, 17 nt, Human herpesvirus 1
gguguccgagcccaccg

SEQ ID NO: 3956538 - RNA, 12 nt, Human herpesvirus 1
gguguccgcggu

SEQ ID NO: 3956539 - RNA, 22 nt, Human herpesvirus 1
gguuccggaggcgccgcgcgga

SEQ ID NO: 3956540 - RNA, 20 nt, Human herpesvirus 1
gguucgcgucccgcccaccg

SEQ ID NO: 3956541 - RNA, 14 nt, Human herpesvirus 1
gguugcggcccgcg

SEQ ID NO: 3956542 - RNA, 20 nt, Human herpesvirus 1
guacaaguucaaggccacca

SEQ ID NO: 3956543 - RNA, 14 nt, Human herpesvirus 1
guacauguccccgu

SEQ ID NO: 3956544 - RNA, 18 nt, Human herpesvirus 1
guaccaucaaccacccgg

SEQ ID NO: 3956545 - RNA, 19 nt, Human herpesvirus 1
guacgccccaccggcacca

SEQ ID NO: 3956546 - RNA, 14 nt, Human herpesvirus 1
guacucgacccacu

SEQ ID NO: 3956547 - RNA, 18 nt, Human herpesvirus 1
guacugcggucugucucg

SEQ ID NO: 3956548 - RNA, 23 nt, Human herpesvirus 1
guacuggaaguaccugcagacgg

SEQ ID NO: 3956549 - RNA, 23 nt, Human herpesvirus 1
guacuggaugcgccgccacacuc

SEQ ID NO: 3956550 - RNA, 20 nt, Human herpesvirus 1
guaggcccagcauguccgcc

SEQ ID NO: 3956551 - RNA, 22 nt, Human herpesvirus 1
guauggggcgggggauggggag

SEQ ID NO: 3956552 - RNA, 23 nt, Human herpesvirus 1
guaugucaccggcugagucccuc

SEQ ID NO: 3956553 - RNA, 21 nt, Human herpesvirus 1
gucaccgguucguauccacaa

SEQ ID NO: 3956554 - RNA, 23 nt, Human herpesvirus 1
gucaccgguuuccgcgacccacc

SEQ ID NO: 3956555 - RNA, 13 nt, Human herpesvirus 1
guccaaacccacc

SEQ ID NO: 3956556 - RNA, 19 nt, Human herpesvirus 1
guccaccaaagucucugug

SEQ ID NO: 3956557 - RNA, 21 nt, Human herpesvirus 1
guccacggccacuggccggga

SEQ ID NO: 3956558 - RNA, 16 nt, Human herpesvirus 1
guccacgggggggagc

SEQ ID NO: 3956559 - RNA, 15 nt, Human herpesvirus 1
guccccgaacaaacg

SEQ ID NO: 3956560 - RNA, 17 nt, Human herpesvirus 1
guccccggcccggagga

SEQ ID NO: 3956561 - RNA, 18 nt, Human herpesvirus 1
guccccucugggcccgcc

SEQ ID NO: 3956562 - RNA, 13 nt, Human herpesvirus 1
guccccuggggcg

SEQ ID NO: 3956563 - RNA, 15 nt, Human herpesvirus 1
guccccuucgaggag

SEQ ID NO: 3956564 - RNA, 20 nt, Human herpesvirus 1
gucccgcaauuucaccgccc

SEQ ID NO: 3956565 - RNA, 13 nt, Human herpesvirus 1
gucccgcccgugu

SEQ ID NO: 3956566 - RNA, 19 nt, Human herpesvirus 1
gucccggcucuccgauccc

SEQ ID NO: 3956567 - RNA, 21 nt, Human herpesvirus 1
gucccguuaccaagaccaacc

SEQ ID NO: 3956568 - RNA, 16 nt, Human herpesvirus 1
gucccugggcccuggc

SEQ ID NO: 3956569 - RNA, 17 nt, Human herpesvirus 1
guccgcgcauccgaccc

SEQ ID NO: 3956570 - RNA, 16 nt, Human herpesvirus 1
guccgcgggagguucc

SEQ ID NO: 3956571 - RNA, 12 nt, Human herpesvirus 1
guccgcggggcc

SEQ ID NO: 3956572 - RNA, 16 nt, Human herpesvirus 1
guccucaccgagccuc

SEQ ID NO: 3956573 - RNA, 14 nt, Human herpesvirus 1
guccucgcaccagc

SEQ ID NO: 3956574 - RNA, 14 nt, Human herpesvirus 1
guccugcgccccgc

SEQ ID NO: 3956575 - RNA, 16 nt, Human herpesvirus 1
guccugcgccccgccg

SEQ ID NO: 3956576 - RNA, 21 nt, Human herpesvirus 1
gucgacgcagacgcacccgcu

SEQ ID NO: 3956577 - RNA, 20 nt, Human herpesvirus 1
gucgccccgugucugugggc

SEQ ID NO: 3956578 - RNA, 18 nt, Human herpesvirus 1
gucgccgugcuccuguga

SEQ ID NO: 3956579 - RNA, 15 nt, Human herpesvirus 1
gucggaggcccccca

SEQ ID NO: 3956580 - RNA, 14 nt, Human herpesvirus 1
gucgggaggccaca

SEQ ID NO: 3956581 - RNA, 18 nt, Human herpesvirus 1
gucgggguggcacagaac

SEQ ID NO: 3956582 - RNA, 16 nt, Human herpesvirus 1
gucgucacgcacgcca

SEQ ID NO: 3956583 - RNA, 14 nt, Human herpesvirus 1
gucgucgaucgacg

SEQ ID NO: 3956584 - RNA, 21 nt, Human herpesvirus 1
gucgucucucuucccccccau

SEQ ID NO: 3956585 - RNA, 20 nt, Human herpesvirus 1
gucucccagggagccccggu

SEQ ID NO: 3956586 - RNA, 13 nt, Human herpesvirus 1
gucuccgugcugu

SEQ ID NO: 3956587 - RNA, 23 nt, Human herpesvirus 1
gucuccgugcuguaccggugggc

SEQ ID NO: 3956588 - RNA, 17 nt, Human herpesvirus 1
gucuccuccaccaccca

SEQ ID NO: 3956589 - RNA, 19 nt, Human herpesvirus 1
gucugcuccccaccccgga

SEQ ID NO: 3956590 - RNA, 16 nt, Human herpesvirus 1
gucuucggggcccggc

SEQ ID NO: 3956591 - RNA, 18 nt, Human herpesvirus 1
gugaacgcaacggcggga

SEQ ID NO: 3956592 - RNA, 13 nt, Human herpesvirus 1
gugagcgaggacg

SEQ ID NO: 3956593 - RNA, 16 nt, Human herpesvirus 1
gugagucacagcgacc

SEQ ID NO: 3956594 - RNA, 18 nt, Human herpesvirus 1
gugcacagccuggccgug

SEQ ID NO: 3956595 - RNA, 15 nt, Human herpesvirus 1
gugcaugucgucacg

SEQ ID NO: 3956596 - RNA, 15 nt, Human herpesvirus 1
gugccaccagccugg

SEQ ID NO: 3956597 - RNA, 20 nt, Human herpesvirus 1
gugcccacgucgccccgccg

SEQ ID NO: 3956598 - RNA, 12 nt, Human herpesvirus 1
gugcccccgcgc

SEQ ID NO: 3956599 - RNA, 21 nt, Human herpesvirus 1
gugcccccggauaugcgcggg

SEQ ID NO: 3956600 - RNA, 20 nt, Human herpesvirus 1
gugcccuuccaggucccacc

SEQ ID NO: 3956601 - RNA, 23 nt, Human herpesvirus 1
gugccgcccguugcagggccugg

SEQ ID NO: 3956602 - RNA, 16 nt, Human herpesvirus 1
gugccuuuguuuccca

SEQ ID NO: 3956603 - RNA, 23 nt, Human herpesvirus 1
gugcguagcauaccugggugugu

SEQ ID NO: 3956604 - RNA, 15 nt, Human herpesvirus 1
gugcgucugggcccg

SEQ ID NO: 3956605 - RNA, 17 nt, Human herpesvirus 1
gugcucgugggccucug

SEQ ID NO: 3956606 - RNA, 15 nt, Human herpesvirus 1
gugcuuucuggugcu

SEQ ID NO: 3956607 - RNA, 21 nt, Human herpesvirus 1
guggaccccacgacacccacc

SEQ ID NO: 3956608 - RNA, 18 nt, Human herpesvirus 1
guggacgccggggccuug

SEQ ID NO: 3956609 - RNA, 22 nt, Human herpesvirus 1
guggagcaaaacgccucccccu

SEQ ID NO: 3956610 - RNA, 14 nt, Human herpesvirus 1
ucgaccaccaccuc

SEQ ID NO: 3956611 - RNA, 21 nt, Human herpesvirus 1
ucgacccgcaacgcgcugggg

SEQ ID NO: 3956612 - RNA, 19 nt, Human herpesvirus 1
ucgacgcccccucccuguu

SEQ ID NO: 3956613 - RNA, 13 nt, Human herpesvirus 1
ucgagaugagcca

SEQ ID NO: 3956614 - RNA, 19 nt, Human herpesvirus 1
ucgagcagccgcgccgcug

SEQ ID NO: 3956615 - RNA, 14 nt, Human herpesvirus 1
ucgagcgccaccug

SEQ ID NO: 3956616 - RNA, 14 nt, Human herpesvirus 1
ucgaggggcagcug

SEQ ID NO: 3956617 - RNA, 17 nt, Human herpesvirus 1
ucgcagggcgccaugcg

SEQ ID NO: 3956618 - RNA, 16 nt, Human herpesvirus 1
ucgcauccgagcaccc

SEQ ID NO: 3956619 - RNA, 17 nt, Human herpesvirus 1
ucgccacacccgcgacc

SEQ ID NO: 3956620 - RNA, 19 nt, Human herpesvirus 1
ucgccccuguggcccuggc

SEQ ID NO: 3956621 - RNA, 19 nt, Human herpesvirus 1
ucgcccgauuuacagcccc

SEQ ID NO: 3956622 - RNA, 13 nt, Human herpesvirus 1
ucgccgagccccc

SEQ ID NO: 3956623 - RNA, 23 nt, Human herpesvirus 1
ucgccgcccugagcgcccuccug

SEQ ID NO: 3956624 - RNA, 12 nt, Human herpesvirus 1
ucgcgcuccucu

SEQ ID NO: 3956625 - RNA, 24 nt, Human herpesvirus 1
ucgcgggacccgacaggcgaccgc

SEQ ID NO: 3956626 - RNA, 17 nt, Human herpesvirus 1
ucgcgucccgcccaccg

SEQ ID NO: 3956627 - RNA, 23 nt, Human herpesvirus 1
ucgcucucggugcgucugggccc

SEQ ID NO: 3956628 - RNA, 16 nt, Human herpesvirus 1
ucgcuucccgaccucc

SEQ ID NO: 3956629 - RNA, 20 nt, Human herpesvirus 1
ucggccccgcgucuggcccc

SEQ ID NO: 3956630 - RNA, 22 nt, Human herpesvirus 1
ucggccguuucuccgcccgacc

SEQ ID NO: 3956631 - RNA, 17 nt, Human herpesvirus 1
ucggcgaccgccagccg

SEQ ID NO: 3956632 - RNA, 20 nt, Human herpesvirus 1
ucgggccucccggaagagcc

SEQ ID NO: 3956633 - RNA, 16 nt, Human herpesvirus 1
ucgggcgccaaagccc

SEQ ID NO: 3956634 - RNA, 17 nt, Human herpesvirus 1
ucggggccgcccuggcc

SEQ ID NO: 3956635 - RNA, 16 nt, Human herpesvirus 1
ucggucccccgaggcc

SEQ ID NO: 3956636 - RNA, 15 nt, Human herpesvirus 1
ucggucgaagccuac

SEQ ID NO: 3956637 - RNA, 16 nt, Human herpesvirus 1
ucguauccacaauaaa

SEQ ID NO: 3956638 - RNA, 18 nt, Human herpesvirus 1
ucgugcgcucgcucucgg

SEQ ID NO: 3956639 - RNA, 12 nt, Human herpesvirus 1
ucguggccccga

SEQ ID NO: 3956640 - RNA, 21 nt, Human herpesvirus 1
ucuaacgguccucaccgagcc

SEQ ID NO: 3956641 - RNA, 20 nt, Human herpesvirus 1
ucuccgcggugucugggaau

SEQ ID NO: 3956642 - RNA, 16 nt, Human herpesvirus 1
ucuccggggcccggcc

SEQ ID NO: 3956643 - RNA, 16 nt, Human herpesvirus 1
ucuccgucaccgcgac

SEQ ID NO: 3956644 - RNA, 14 nt, Human herpesvirus 1
ucucuucccucagg

SEQ ID NO: 3956645 - RNA, 14 nt, Human herpesvirus 1
ucugaucgacgacg

SEQ ID NO: 3956646 - RNA, 12 nt, Human herpesvirus 1
ucugcgggccgc

SEQ ID NO: 3956647 - RNA, 19 nt, Human herpesvirus 1
ucugcuacgccgcugaccc

SEQ ID NO: 3956648 - RNA, 13 nt, Human herpesvirus 1
ucuggccccggcg

SEQ ID NO: 3956649 - RNA, 17 nt, Human herpesvirus 1
ucuggccgcgcccacua

SEQ ID NO: 3956650 - RNA, 21 nt, Human herpesvirus 1
ucuggcguucgucgcccucca

SEQ ID NO: 3956651 - RNA, 20 nt, Human herpesvirus 1
ucugggauggcuccuggcca

SEQ ID NO: 3956652 - RNA, 23 nt, Human herpesvirus 1
ucugggccaccgacagccugaac

SEQ ID NO: 3956653 - RNA, 13 nt, Human herpesvirus 1
ucugggggccugu

SEQ ID NO: 3956654 - RNA, 22 nt, Human herpesvirus 1
ucuggggucccugucgccuccc

SEQ ID NO: 3956655 - RNA, 18 nt, Human herpesvirus 1
ucuggguuuuccccuccc

SEQ ID NO: 3956656 - RNA, 21 nt, Human herpesvirus 1
ucuggguuuuccccucccguc

SEQ ID NO: 3956657 - RNA, 17 nt, Human herpesvirus 1
ucuggugcugucugaca

SEQ ID NO: 3956658 - RNA, 19 nt, Human herpesvirus 1
ucuguuggggacacugggu

SEQ ID NO: 3956659 - RNA, 23 nt, Human herpesvirus 1
ucuucggccccgcgucuggcccc

SEQ ID NO: 3956660 - RNA, 18 nt, Human herpesvirus 1
ucuucggggcccggccca

SEQ ID NO: 3956661 - RNA, 16 nt, Human herpesvirus 1
ucuuuuguguuggccc

SEQ ID NO: 3956662 - RNA, 17 nt, Human herpesvirus 1
ucuuuuguguuggcccu

SEQ ID NO: 3956663 - RNA, 16 nt, Human herpesvirus 1
ugaaaaucgguccccc

SEQ ID NO: 3956664 - RNA, 14 nt, Human herpesvirus 1
ugaaccagacccua

SEQ ID NO: 3956665 - RNA, 18 nt, Human herpesvirus 1
ugaagaucgccggguggc

SEQ ID NO: 3956666 - RNA, 16 nt, Human herpesvirus 1
ugaaggcccuguaccc

SEQ ID NO: 3956667 - RNA, 13 nt, Human herpesvirus 1
ugacagcggggac

SEQ ID NO: 3956668 - RNA, 18 nt, Human herpesvirus 1
ugaccaacgacggcccga

SEQ ID NO: 3956669 - RNA, 16 nt, Human herpesvirus 1
ugaccgacccuccggg

SEQ ID NO: 3956670 - RNA, 15 nt, Human herpesvirus 1
ugaccgcccacgacu

SEQ ID NO: 3956671 - RNA, 14 nt, Human herpesvirus 1
ugacgaggccaagc

SEQ ID NO: 3956672 - RNA, 22 nt, Human herpesvirus 1
ugacgcacccccugaccccgcu

SEQ ID NO: 3956673 - RNA, 23 nt, Human herpesvirus 1
ugagccagacccaacccccggcc

SEQ ID NO: 3956674 - RNA, 17 nt, Human herpesvirus 1
ugaguacgaggaucugu

SEQ ID NO: 3956675 - RNA, 20 nt, Human herpesvirus 1
ugaguuuguggacccaaagc

SEQ ID NO: 3956676 - RNA, 18 nt, Human herpesvirus 1
ugaucagacgagccgcgc

SEQ ID NO: 3956677 - RNA, 14 nt, Human herpesvirus 1
ugauccgcggcgac

SEQ ID NO: 3956678 - RNA, 16 nt, Human herpesvirus 1
ugauccuuaggggccg

SEQ ID NO: 3956679 - RNA, 18 nt, Human herpesvirus 1
ugaucgcguaccagcccc

SEQ ID NO: 3956680 - RNA, 20 nt, Human herpesvirus 1
ugauggcacaccgguccccg

SEQ ID NO: 3956681 - RNA, 20 nt, Human herpesvirus 1
ugaugucccucauuuuacaa

SEQ ID NO: 3956682 - RNA, 18 nt, Human herpesvirus 1
ugcacagccuggccgugc

SEQ ID NO: 3956683 - RNA, 11 nt, Human herpesvirus 1
ugcacccagcc

SEQ ID NO: 3956684 - RNA, 15 nt, Human herpesvirus 1
ugcacccagccuuua

SEQ ID NO: 3956685 - RNA, 13 nt, Human herpesvirus 1
ugcaccccagagg

SEQ ID NO: 3956686 - RNA, 13 nt, Human herpesvirus 1
ugcacgcccccgc

SEQ ID NO: 3956687 - RNA, 16 nt, Human herpesvirus 1
ugcacgcccccgcguu

SEQ ID NO: 3956688 - RNA, 21 nt, Human herpesvirus 1
ugcagaaucacgagcugaccc

SEQ ID NO: 3956689 - RNA, 19 nt, Human herpesvirus 1
ugcagcgccggccuccccg

SEQ ID NO: 3956690 - RNA, 13 nt, Human herpesvirus 1
ugcaucggcaagg

SEQ ID NO: 3956691 - RNA, 18 nt, Human herpesvirus 1
ugcaugucgucacgguga

SEQ ID NO: 3956692 - RNA, 23 nt, Human herpesvirus 1
ugccacgcgagcgacccgcgacu

SEQ ID NO: 3956693 - RNA, 18 nt, Human herpesvirus 1
ugccagcuaugggcccug

SEQ ID NO: 3956694 - RNA, 17 nt, Human herpesvirus 1
ugccaguccgcugcacc

SEQ ID NO: 3956695 - RNA, 17 nt, Human herpesvirus 1
ugccaucgcgcccccuc

SEQ ID NO: 3956696 - RNA, 16 nt, Human herpesvirus 1
ugcccauuuacguggc

SEQ ID NO: 3956697 - RNA, 22 nt, Human herpesvirus 1
ugcccauuuacguggcuggguu

SEQ ID NO: 3956698 - RNA, 16 nt, Human herpesvirus 1
ugcccccgcgccuccc

SEQ ID NO: 3956699 - RNA, 23 nt, Human herpesvirus 1
ugcccccgcgccucccggcccgu

SEQ ID NO: 3956700 - RNA, 23 nt, Human herpesvirus 1
ugccccuggugaagaccacuccc

SEQ ID NO: 3956701 - RNA, 20 nt, Human herpesvirus 1
ugcccgcggaccaccgggcc

SEQ ID NO: 3956702 - RNA, 20 nt, Human herpesvirus 1
ugcccuuccaggucccaccu

SEQ ID NO: 3956703 - RNA, 19 nt, Human herpesvirus 1
ugccgcccguugcagggcc

SEQ ID NO: 3956704 - RNA, 16 nt, Human herpesvirus 1
ugccggucggcgggcc

SEQ ID NO: 3956705 - RNA, 16 nt, Human herpesvirus 1
ugccuccaccgggccc

SEQ ID NO: 3956706 - RNA, 19 nt, Human herpesvirus 1
ugccucuccccccaggccu

SEQ ID NO: 3956707 - RNA, 16 nt, Human herpesvirus 1
ugcgcccggcggaccc

SEQ ID NO: 3956708 - RNA, 14 nt, Human herpesvirus 1
ugcgccuugggccc

SEQ ID NO: 3956709 - RNA, 17 nt, Human herpesvirus 1
ugcgcucccgccuuccg

SEQ ID NO: 3956710 - RNA, 14 nt, Human herpesvirus 1
ugcggcggcgcugc

SEQ ID NO: 3956711 - RNA, 16 nt, Human herpesvirus 1
ugcggggaggggggca

SEQ ID NO: 3956712 - RNA, 17 nt, Human herpesvirus 1
ugcggggcggggacggg

SEQ ID NO: 3956713 - RNA, 15 nt, Human herpesvirus 1
ugcgggucaccugcc

SEQ ID NO: 3956714 - RNA, 13 nt, Human herpesvirus 1
ugcggucugucuc

SEQ ID NO: 3956715 - RNA, 18 nt, Human herpesvirus 1
ugcgguuggggaggcugu

SEQ ID NO: 3956716 - RNA, 18 nt, Human herpesvirus 1
ugcgucccuccccgguuu

SEQ ID NO: 3956717 - RNA, 21 nt, Human herpesvirus 1
ugcuccgccgcggaucgggcc

SEQ ID NO: 3956718 - RNA, 14 nt, Human herpesvirus 1
ugcuccgccuggcc

SEQ ID NO: 3956719 - RNA, 18 nt, Human herpesvirus 1
ugcucgggcaggugcaga

SEQ ID NO: 3956720 - RNA, 13 nt, Human herpesvirus 1
uggacccaaagcc

SEQ ID NO: 3956721 - RNA, 15 nt, Human herpesvirus 1
uggaccccagcgacc

SEQ ID NO: 3956722 - RNA, 23 nt, Human herpesvirus 1
uggaccccagcgaccccacggcc

SEQ ID NO: 3956723 - RNA, 15 nt, Human herpesvirus 1
uggagagcgaaggcu

SEQ ID NO: 3956724 - RNA, 15 nt, Human herpesvirus 1
uggaucggcgccaug

SEQ ID NO: 3956725 - RNA, 15 nt, Human herpesvirus 1
aaaaccacaaccucc

SEQ ID NO: 3956726 - RNA, 21 nt, Human herpesvirus 1
aaacgacaucuugucgucaaa

SEQ ID NO: 3956727 - RNA, 23 nt, Human herpesvirus 1
aaacucccgacaccaccagcugg

SEQ ID NO: 3956728 - RNA, 21 nt, Human herpesvirus 1
aaagacacgggcaccacacac

SEQ ID NO: 3956729 - RNA, 17 nt, Human herpesvirus 1
aaagugaaagacacggg

SEQ ID NO: 3956730 - RNA, 18 nt, Human herpesvirus 1
aaaugguguccgcggucc

SEQ ID NO: 3956731 - RNA, 14 nt, Human herpesvirus 1
aaauuuuacaaaca

SEQ ID NO: 3956732 - RNA, 16 nt, Human herpesvirus 1
aaauuuuacaaacaga

SEQ ID NO: 3956733 - RNA, 13 nt, Human herpesvirus 1
aacaucaaacacg

SEQ ID NO: 3956734 - RNA, 15 nt, Human herpesvirus 1
aacaugacccagacc

SEQ ID NO: 3956735 - RNA, 17 nt, Human herpesvirus 1
aaccacccgcaccccca

SEQ ID NO: 3956736 - RNA, 15 nt, Human herpesvirus 1
aaccccccccaaaaa

SEQ ID NO: 3956737 - RNA, 14 nt, Human herpesvirus 1
aaccccggucuccc

SEQ ID NO: 3956738 - RNA, 19 nt, Human herpesvirus 1
aaccccuuuggggcgcugg

SEQ ID NO: 3956739 - RNA, 16 nt, Human herpesvirus 1
aacccgcgcuaugacg

SEQ ID NO: 3956740 - RNA, 20 nt, Human herpesvirus 1
aaccucggaugacucagggc

SEQ ID NO: 3956741 - RNA, 19 nt, Human herpesvirus 1
aaccuucgcaacaccuccc

SEQ ID NO: 3956742 - RNA, 23 nt, Human herpesvirus 1
aaccuucugcgggucaccugcca

SEQ ID NO: 3956743 - RNA, 19 nt, Human herpesvirus 1
aacgauauguugggccgcg

SEQ ID NO: 3956744 - RNA, 15 nt, Human herpesvirus 1
aacgccagccugcgg

SEQ ID NO: 3956745 - RNA, 21 nt, Human herpesvirus 1
aacgccucccccugagccgcu

SEQ ID NO: 3956746 - RNA, 17 nt, Human herpesvirus 1
aacgcguccguggagcg

SEQ ID NO: 3956747 - RNA, 13 nt, Human herpesvirus 1
aacgguccucacc

SEQ ID NO: 3956748 - RNA, 20 nt, Human herpesvirus 1
aacucucaguuuaucaugga

SEQ ID NO: 3956749 - RNA, 16 nt, Human herpesvirus 1
aacucucgcaccaucc

SEQ ID NO: 3956750 - RNA, 20 nt, Human herpesvirus 1
aacuucaucacccccgaguu

SEQ ID NO: 3956751 - RNA, 16 nt, Human herpesvirus 1
aagcgucccugggccc

SEQ ID NO: 3956752 - RNA, 17 nt, Human herpesvirus 1
aagcgucccugggcccu

SEQ ID NO: 3956753 - RNA, 18 nt, Human herpesvirus 1
aagcuagccgaggcccgg

SEQ ID NO: 3956754 - RNA, 17 nt, Human herpesvirus 1
aagcuaugcagccccgu

SEQ ID NO: 3956755 - RNA, 12 nt, Human herpesvirus 1
aaggccugggau

SEQ ID NO: 3956756 - RNA, 19 nt, Human herpesvirus 1
aauaaaccgguauuauuua

SEQ ID NO: 3956757 - RNA, 22 nt, Human herpesvirus 1
aauaaagagccguaacccaacc

SEQ ID NO: 3956758 - RNA, 11 nt, Human herpesvirus 1
aauaaagccac

SEQ ID NO: 3956759 - RNA, 13 nt, Human herpesvirus 1
aauaaauuuuaca

SEQ ID NO: 3956760 - RNA, 21 nt, Human herpesvirus 1
aauaacgacccgaagcugcuc

SEQ ID NO: 3956761 - RNA, 21 nt, Human herpesvirus 1
aauacagcauggcgccacacc

SEQ ID NO: 3956762 - RNA, 12 nt, Human herpesvirus 1
aauccccaggac

SEQ ID NO: 3956763 - RNA, 17 nt, Human herpesvirus 1
aaucuggcccaacagcc

SEQ ID NO: 3956764 - RNA, 23 nt, Human herpesvirus 1
aauguuuuuauuggucaaacuca

SEQ ID NO: 3956765 - RNA, 17 nt, Human herpesvirus 1
aauuugcacccagccuu

SEQ ID NO: 3956766 - RNA, 19 nt, Human herpesvirus 1
acaaacccaaccgucccgu

SEQ ID NO: 3956767 - RNA, 15 nt, Human herpesvirus 1
acaacggcucggccu

SEQ ID NO: 3956768 - RNA, 15 nt, Human herpesvirus 1
acaacucccccgcgc

SEQ ID NO: 3956769 - RNA, 19 nt, Human herpesvirus 1
acacaacggcaugccucug

SEQ ID NO: 3956770 - RNA, 11 nt, Human herpesvirus 1
acacacggguu

SEQ ID NO: 3956771 - RNA, 15 nt, Human herpesvirus 1
acacagccggccacg

SEQ ID NO: 3956772 - RNA, 21 nt, Human herpesvirus 1
acaccagcagcuugcggggcu

SEQ ID NO: 3956773 - RNA, 16 nt, Human herpesvirus 1
acaccgguccccggag

SEQ ID NO: 3956774 - RNA, 16 nt, Human herpesvirus 1
acacgcgcguccuucu

SEQ ID NO: 3956775 - RNA, 15 nt, Human herpesvirus 1
acacucgacccccgc

SEQ ID NO: 3956776 - RNA, 17 nt, Human herpesvirus 1
acagagggccacucacg

SEQ ID NO: 3956777 - RNA, 15 nt, Human herpesvirus 1
acagcauggcgccac

SEQ ID NO: 3956778 - RNA, 13 nt, Human herpesvirus 1
acagccgcccccu

SEQ ID NO: 3956779 - RNA, 17 nt, Human herpesvirus 1
acagcuucagcgccguc

SEQ ID NO: 3956780 - RNA, 17 nt, Human herpesvirus 1
acaugcggaaagcaaga

SEQ ID NO: 3956781 - RNA, 17 nt, Human herpesvirus 1
acauggccagcggcccg

SEQ ID NO: 3956782 - RNA, 20 nt, Human herpesvirus 1
accaaacaaacaaaccaaaa

SEQ ID NO: 3956783 - RNA, 20 nt, Human herpesvirus 1
accacaaucgcgaccacccc

SEQ ID NO: 3956784 - RNA, 15 nt, Human herpesvirus 1
accaccaaggcccgg

SEQ ID NO: 3956785 - RNA, 17 nt, Human herpesvirus 1
accaccacugcacuccc

SEQ ID NO: 3956786 - RNA, 18 nt, Human herpesvirus 1
accacccaaccccaacuc

SEQ ID NO: 3956787 - RNA, 21 nt, Human herpesvirus 1
accaccccgagaaccuaggga

SEQ ID NO: 3956788 - RNA, 14 nt, Human herpesvirus 1
accaccgaccucaa

SEQ ID NO: 3956789 - RNA, 19 nt, Human herpesvirus 1
accacgugcacagccuggc

SEQ ID NO: 3956790 - RNA, 13 nt, Human herpesvirus 1
accagcguccgcc

SEQ ID NO: 3956791 - RNA, 16 nt, Human herpesvirus 1
accagcuacgccgccg

SEQ ID NO: 3956792 - RNA, 23 nt, Human herpesvirus 1
accaggaaauccguggccccggc

SEQ ID NO: 3956793 - RNA, 15 nt, Human herpesvirus 1
accaggccuccaccc

SEQ ID NO: 3956794 - RNA, 17 nt, Human herpesvirus 1
accaggucccccacacc

SEQ ID NO: 3956795 - RNA, 15 nt, Human herpesvirus 1
accaucccccggcca

SEQ ID NO: 3956796 - RNA, 15 nt, Human herpesvirus 1
accauccccgcuccc

SEQ ID NO: 3956797 - RNA, 19 nt, Human herpesvirus 1
accaucccggguuaaugua

SEQ ID NO: 3956798 - RNA, 14 nt, Human herpesvirus 1
acccaccccaacgc

SEQ ID NO: 3956799 - RNA, 13 nt, Human herpesvirus 1
acccaccgggccc

SEQ ID NO: 3956800 - RNA, 16 nt, Human herpesvirus 1
acccagccuuuaacua

SEQ ID NO: 3956801 - RNA, 17 nt, Human herpesvirus 1
accccaaauacagcaug

SEQ ID NO: 3956802 - RNA, 17 nt, Human herpesvirus 1
accccaccccugugcua

SEQ ID NO: 3956803 - RNA, 11 nt, Human herpesvirus 1
accccacgccc

SEQ ID NO: 3956804 - RNA, 20 nt, Human herpesvirus 1
accccagcgaccccacggcc

SEQ ID NO: 3956805 - RNA, 18 nt, Human herpesvirus 1
accccagggaccuccugg

SEQ ID NO: 3956806 - RNA, 23 nt, Human herpesvirus 1
accccaguccccgggcccagccu

SEQ ID NO: 3956807 - RNA, 23 nt, Human herpesvirus 1
accccgcaauuugcacccagccu

SEQ ID NO: 3956808 - RNA, 17 nt, Human herpesvirus 1
accccggagggcugcca

SEQ ID NO: 3956809 - RNA, 13 nt, Human herpesvirus 1
acccgacucaccu

SEQ ID NO: 3956810 - RNA, 13 nt, Human herpesvirus 1
acccgccccggag

SEQ ID NO: 3956811 - RNA, 18 nt, Human herpesvirus 1
acccgccccuaaccaggc

SEQ ID NO: 3956812 - RNA, 22 nt, Human herpesvirus 1
acccgccccuaaccaggccucc

SEQ ID NO: 3956813 - RNA, 16 nt, Human herpesvirus 1
acccgcgacccccggg

SEQ ID NO: 3956814 - RNA, 18 nt, Human herpesvirus 1
acccguuccagcccccca

SEQ ID NO: 3956815 - RNA, 21 nt, Human herpesvirus 1
acccguuccagccccccagcc

SEQ ID NO: 3956816 - RNA, 15 nt, Human herpesvirus 1
acccuaccccagucc

SEQ ID NO: 3956817 - RNA, 18 nt, Human herpesvirus 1
acccuaccccaguccccg

SEQ ID NO: 3956818 - RNA, 13 nt, Human herpesvirus 1
acccuaugguaca

SEQ ID NO: 3956819 - RNA, 13 nt, Human herpesvirus 1
acccucucuucuc

SEQ ID NO: 3956820 - RNA, 20 nt, Human herpesvirus 1
acccucuggacgcccgggcg

SEQ ID NO: 3956821 - RNA, 14 nt, Human herpesvirus 2
aaaccugggcggcc

SEQ ID NO: 3956822 - RNA, 19 nt, Human herpesvirus 2
aaacuuuauauuuauaaaa

SEQ ID NO: 3956823 - RNA, 15 nt, Human herpesvirus 2
aaagguccggcggcc

SEQ ID NO: 3956824 - RNA, 15 nt, Human herpesvirus 2
aaauaaaaagacacc

SEQ ID NO: 3956825 - RNA, 18 nt, Human herpesvirus 2
aaaugucacgauaagaac

SEQ ID NO: 3956826 - RNA, 19 nt, Human herpesvirus 2
aacaacacguucgccccgc

SEQ ID NO: 3956827 - RNA, 17 nt, Human herpesvirus 2
aacaacaguacucaucg

SEQ ID NO: 3956828 - RNA, 17 nt, Human herpesvirus 2
aacacaagcucgccgug

SEQ ID NO: 3956829 - RNA, 14 nt, Human herpesvirus 2
aacacugaggaacu

SEQ ID NO: 3956830 - RNA, 13 nt, Human herpesvirus 2
aaccacacacacg

SEQ ID NO: 3956831 - RNA, 18 nt, Human herpesvirus 2
aaccagccccgcaggcag

SEQ ID NO: 3956832 - RNA, 15 nt, Human herpesvirus 2
aacccccgaccccgc

SEQ ID NO: 3956833 - RNA, 17 nt, Human herpesvirus 2
aaccggcgagggcggcc

SEQ ID NO: 3956834 - RNA, 15 nt, Human herpesvirus 2
aacgacccccagcgc

SEQ ID NO: 3956835 - RNA, 13 nt, Human herpesvirus 2
aacuccgcccucg

SEQ ID NO: 3956836 - RNA, 22 nt, Human herpesvirus 2
aagagacgaugggagccccgcg

SEQ ID NO: 3956837 - RNA, 15 nt, Human herpesvirus 2
aagcaagaaaacggu

SEQ ID NO: 3956838 - RNA, 21 nt, Human herpesvirus 2
aagcccgaacggaaggccucc

SEQ ID NO: 3956839 - RNA, 21 nt, Human herpesvirus 2
aagcgccgcgcgggacccacg

SEQ ID NO: 3956840 - RNA, 16 nt, Human herpesvirus 2
aaggaagccgcccccc

SEQ ID NO: 3956841 - RNA, 15 nt, Human herpesvirus 2
aaggagucgccgccc

SEQ ID NO: 3956842 - RNA, 16 nt, Human herpesvirus 2
aaggccaggggggcag

SEQ ID NO: 3956843 - RNA, 14 nt, Human herpesvirus 2
aaggcggacccaga

SEQ ID NO: 3956844 - RNA, 16 nt, Human herpesvirus 2
aagugccgcacggccg

SEQ ID NO: 3956845 - RNA, 15 nt, Human herpesvirus 2
aauaaaacccagacc

SEQ ID NO: 3956846 - RNA, 11 nt, Human herpesvirus 2
aaucacggcac

SEQ ID NO: 3956847 - RNA, 11 nt, Human herpesvirus 2
aauuaaauaca

SEQ ID NO: 3956848 - RNA, 15 nt, Human herpesvirus 2
aauuagcaacuuuua

SEQ ID NO: 3956849 - RNA, 18 nt, Human herpesvirus 2
acaaacagaccgcggaca

SEQ ID NO: 3956850 - RNA, 18 nt, Human herpesvirus 2
acaacagccccugggugu

SEQ ID NO: 3956851 - RNA, 23 nt, Human herpesvirus 2
acacacccccaucgggcugcugg

SEQ ID NO: 3956852 - RNA, 13 nt, Human herpesvirus 2
acacacuuuguug

SEQ ID NO: 3956853 - RNA, 19 nt, Human herpesvirus 2
acacagagaaaggccccca

SEQ ID NO: 3956854 - RNA, 12 nt, Human herpesvirus 2
acaccagggcau

SEQ ID NO: 3956855 - RNA, 19 nt, Human herpesvirus 2
acacccccuguccccgccc

SEQ ID NO: 3956856 - RNA, 14 nt, Human herpesvirus 2
acaccgggcugggg

SEQ ID NO: 3956857 - RNA, 22 nt, Human herpesvirus 2
acacggucggugccccccaucu

SEQ ID NO: 3956858 - RNA, 15 nt, Human herpesvirus 2
acacguucuuugcca

SEQ ID NO: 3956859 - RNA, 22 nt, Human herpesvirus 2
acagaggcgguagcggacgcac

SEQ ID NO: 3956860 - RNA, 15 nt, Human herpesvirus 2
acagccagggcuggg

SEQ ID NO: 3956861 - RNA, 15 nt, Human herpesvirus 2
acagccccuggggcu

SEQ ID NO: 3956862 - RNA, 20 nt, Human herpesvirus 2
acagcugcgccagaaaccgg

SEQ ID NO: 3956863 - RNA, 22 nt, Human herpesvirus 2
acagugggugcucggggacaga

SEQ ID NO: 3956864 - RNA, 16 nt, Human herpesvirus 2
acaugaggcugagggg

SEQ ID NO: 3956865 - RNA, 15 nt, Human herpesvirus 2
accaaccccgucucc

SEQ ID NO: 3956866 - RNA, 12 nt, Human herpesvirus 2
accaccaaggcc

SEQ ID NO: 3956867 - RNA, 23 nt, Human herpesvirus 2
accacgugcacagccuggccgug

SEQ ID NO: 3956868 - RNA, 19 nt, Human herpesvirus 2
accacguguccccagggag

SEQ ID NO: 3956869 - RNA, 16 nt, Human herpesvirus 2
accaggcgcugcugcg

SEQ ID NO: 3956870 - RNA, 13 nt, Human herpesvirus 2
acccccccccauc

SEQ ID NO: 3956871 - RNA, 14 nt, Human herpesvirus 2
accccccccucuca

SEQ ID NO: 3956872 - RNA, 12 nt, Human herpesvirus 2
accccccggguu

SEQ ID NO: 3956873 - RNA, 18 nt, Human herpesvirus 2
acccccgaacagccccug

SEQ ID NO: 3956874 - RNA, 16 nt, Human herpesvirus 2
accccgagcgugcccu

SEQ ID NO: 3956875 - RNA, 17 nt, Human herpesvirus 2
accccgauagucccccg

SEQ ID NO: 3956876 - RNA, 17 nt, Human herpesvirus 2
accccgcccgcuugcau

SEQ ID NO: 3956877 - RNA, 13 nt, Human herpesvirus 2
accccgcugcugu

SEQ ID NO: 3956878 - RNA, 15 nt, Human herpesvirus 2
accccgucucccugc

SEQ ID NO: 3956879 - RNA, 17 nt, Human herpesvirus 2
accccuuccuuuucuuu

SEQ ID NO: 3956880 - RNA, 21 nt, Human herpesvirus 2
acccgacccuguggcgggcgc

SEQ ID NO: 3956881 - RNA, 18 nt, Human herpesvirus 2
acccggacugcagccccg

SEQ ID NO: 3956882 - RNA, 14 nt, Human herpesvirus 2
acccggguccccga

SEQ ID NO: 3956883 - RNA, 11 nt, Human herpesvirus 2
accgagagcgc

SEQ ID NO: 3956884 - RNA, 23 nt, Human herpesvirus 2
accgccucuguuccuuucccuuc

SEQ ID NO: 3956885 - RNA, 13 nt, Human herpesvirus 2
accgcgcgccgcc

SEQ ID NO: 3956886 - RNA, 15 nt, Human herpesvirus 2
accgcgcgccgccgc

SEQ ID NO: 3956887 - RNA, 18 nt, Human herpesvirus 2
accgcggcuucuucgccg

SEQ ID NO: 3956888 - RNA, 20 nt, Human herpesvirus 2
accgcggcuucuucgccgcc

SEQ ID NO: 3956889 - RNA, 15 nt, Human herpesvirus 2
accgcucacccaccc

SEQ ID NO: 3956890 - RNA, 16 nt, Human herpesvirus 2
accgcugucgcccccg

SEQ ID NO: 3956891 - RNA, 19 nt, Human herpesvirus 2
accggcgccgaucgcagcg

SEQ ID NO: 3956892 - RNA, 16 nt, Human herpesvirus 2
accggggccccaucug

SEQ ID NO: 3956893 - RNA, 17 nt, Human herpesvirus 2
accgucgccgccggcca

SEQ ID NO: 3956894 - RNA, 17 nt, Human herpesvirus 2
accgucggugccagacc

SEQ ID NO: 3956895 - RNA, 15 nt, Human herpesvirus 2
accuaauuuuugugu

SEQ ID NO: 3956896 - RNA, 17 nt, Human herpesvirus 2
accuccccggcggccgc

SEQ ID NO: 3956897 - RNA, 16 nt, Human herpesvirus 2
accuccccgugcgugc

SEQ ID NO: 3956898 - RNA, 13 nt, Human herpesvirus 2
accucucgccgcu

SEQ ID NO: 3956899 - RNA, 16 nt, Human herpesvirus 2
accugccccggcgcgu

SEQ ID NO: 3956900 - RNA, 22 nt, Human herpesvirus 2
accugcgcggcguuggcgcgcu

SEQ ID NO: 3956901 - RNA, 22 nt, Human herpesvirus 2
acgaaguggguauacuuuuguc

SEQ ID NO: 3956902 - RNA, 18 nt, Human herpesvirus 2
acgacagcggggacccgg

SEQ ID NO: 3956903 - RNA, 12 nt, Human herpesvirus 2
acgaccugcagc

SEQ ID NO: 3956904 - RNA, 13 nt, Human herpesvirus 2
acgacgccuggcg

SEQ ID NO: 3956905 - RNA, 18 nt, Human herpesvirus 2
acgagaacgagaugguuu

SEQ ID NO: 3956906 - RNA, 12 nt, Human herpesvirus 2
acgagacagacg

SEQ ID NO: 3956907 - RNA, 18 nt, Human herpesvirus 2
acgagccaaaccagcccc

SEQ ID NO: 3956908 - RNA, 17 nt, Human herpesvirus 2
acgccagcugcuggcca

SEQ ID NO: 3956909 - RNA, 13 nt, Human herpesvirus 2
acgccgaugccca

SEQ ID NO: 3956910 - RNA, 24 nt, Human herpesvirus 2
acgccuccggaagagagcgccccg

SEQ ID NO: 3956911 - RNA, 15 nt, Human herpesvirus 2
acgcgccucccgggg

SEQ ID NO: 3956912 - RNA, 21 nt, Human herpesvirus 2
acgcgcgacugccuccacgcc

SEQ ID NO: 3956913 - RNA, 20 nt, Human herpesvirus 2
acgcgguauggcugcccccg

SEQ ID NO: 3956914 - RNA, 23 nt, Human herpesvirus 2
acgcgucgggggccggggcggcc

SEQ ID NO: 3956915 - RNA, 20 nt, Human herpesvirus 2
acggcaacaaagggccuccg

SEQ ID NO: 3956916 - RNA, 17 nt, Human herpesvirus 2
acggcccaccugcacga

SEQ ID NO: 3956917 - RNA, 23 nt, Human herpesvirus 2
acggccccggccgccuccccgcu

SEQ ID NO: 3956918 - RNA, 22 nt, Human herpesvirus 2
acggggaggagacaggaagugg

SEQ ID NO: 3956919 - RNA, 14 nt, Human herpesvirus 2
acgggggggcuggu

SEQ ID NO: 3956920 - RNA, 16 nt, Human herpesvirus 2
acggugaucgaggugu

SEQ ID NO: 3956921 - RNA, 15 nt, Human herpesvirus 2
acguguccccaggga

SEQ ID NO: 3956922 - RNA, 18 nt, Human herpesvirus 2
acguucggacggccccuc

SEQ ID NO: 3956923 - RNA, 21 nt, Human herpesvirus 2
acuacccuuucgacgcgcugg

SEQ ID NO: 3956924 - RNA, 18 nt, Human herpesvirus 2
acuaggacaguucauagg

SEQ ID NO: 3956925 - RNA, 18 nt, Human herpesvirus 2
acucgccauggcggccgc

SEQ ID NO: 3956926 - RNA, 18 nt, Human herpesvirus 2
acugccccccuccugggg

SEQ ID NO: 3956927 - RNA, 22 nt, Human herpesvirus 2
acugggccgaugugcccugcaa

SEQ ID NO: 3956928 - RNA, 21 nt, Human herpesvirus 2
acugggggcggggggugggag

SEQ ID NO: 3956929 - RNA, 12 nt, Human herpesvirus 2
acuuuauuggga

SEQ ID NO: 3956930 - RNA, 17 nt, Human herpesvirus 2
acuuucccccccacucc

SEQ ID NO: 3956931 - RNA, 14 nt, Human herpesvirus 2
agaaacggcaagaa

SEQ ID NO: 3956932 - RNA, 17 nt, Human herpesvirus 2
agaaggggggugugugu

SEQ ID NO: 3956933 - RNA, 22 nt, Human herpesvirus 2
agacggccaugaccucgccccc

SEQ ID NO: 3956934 - RNA, 12 nt, Human herpesvirus 2
agagaaaaagaa

SEQ ID NO: 3956935 - RNA, 13 nt, Human herpesvirus 2
agagagauuuccc

SEQ ID NO: 3956936 - RNA, 17 nt, Human herpesvirus 2
agagccgaacgcagguc

SEQ ID NO: 3956937 - RNA, 15 nt, Human herpesvirus 2
agagccgauccggcc

SEQ ID NO: 3956938 - RNA, 22 nt, Human herpesvirus 2
agaggucaauagauuuccccaa

SEQ ID NO: 3956939 - RNA, 22 nt, Human herpesvirus 2
agagucgauugcggggaccgca

SEQ ID NO: 3956940 - RNA, 17 nt, Human herpesvirus 2
agagugggggcgugagc

SEQ ID NO: 3956941 - RNA, 19 nt, Human herpesvirus 2
agcaacccuauaucccggg

SEQ ID NO: 3956942 - RNA, 20 nt, Human herpesvirus 2
agcagcuuuuaacgggccgc

SEQ ID NO: 3956943 - RNA, 20 nt, Human herpesvirus 2
agcauccugaaccgcuggcu

SEQ ID NO: 3956944 - RNA, 20 nt, Human herpesvirus 2
agccaccgucccgcccgcca

SEQ ID NO: 3956945 - RNA, 14 nt, Human herpesvirus 2
agcccccggcaucg

SEQ ID NO: 3956946 - RNA, 12 nt, Human herpesvirus 2
agccccgcaggc

SEQ ID NO: 3956947 - RNA, 18 nt, Human herpesvirus 2
agccgccaccccccuccc

SEQ ID NO: 3956948 - RNA, 17 nt, Human herpesvirus 2
agccgcccaagcggccc

SEQ ID NO: 3956949 - RNA, 18 nt, Human herpesvirus 2
agccgcccaagcggcccg

SEQ ID NO: 3956950 - RNA, 17 nt, Human herpesvirus 2
agccggggcacgcgguc

SEQ ID NO: 3956951 - RNA, 23 nt, Human herpesvirus 2
agcgccccgcggaccccgcccgc

SEQ ID NO: 3956952 - RNA, 14 nt, Human herpesvirus 2
agcgccgaccagaa

SEQ ID NO: 3956953 - RNA, 18 nt, Human herpesvirus 2
agcgccgcuacugcgcca

SEQ ID NO: 3956954 - RNA, 14 nt, Human herpesvirus 2
agcgcgccaggacc

SEQ ID NO: 3956955 - RNA, 15 nt, Human herpesvirus 2
agcgcguccagguac

SEQ ID NO: 3956956 - RNA, 20 nt, Human herpesvirus 2
agcggccgggucggcugucc

SEQ ID NO: 3956957 - RNA, 16 nt, Human herpesvirus 2
agcggcgaacacugcc

SEQ ID NO: 3956958 - RNA, 20 nt, Human herpesvirus 2
agcggcgagugcucgcagca

SEQ ID NO: 3956959 - RNA, 18 nt, Human herpesvirus 2
agcguaucggccaggagg

SEQ ID NO: 3956960 - RNA, 20 nt, Human herpesvirus 2
agcucgcggagggcggccag

SEQ ID NO: 3956961 - RNA, 17 nt, Human herpesvirus 2
agcucgucgcgacccug

SEQ ID NO: 3956962 - RNA, 19 nt, Human herpesvirus 2
agcuggcccuggacccaga

SEQ ID NO: 3956963 - RNA, 16 nt, Human herpesvirus 2
ggcggcgccugcgccc

SEQ ID NO: 3956964 - RNA, 14 nt, Human herpesvirus 2
ggcggcguggccgc

SEQ ID NO: 3956965 - RNA, 14 nt, Human herpesvirus 2
ggcggcucccccgc

SEQ ID NO: 3956966 - RNA, 16 nt, Human herpesvirus 2
ggcgggggugccgugg

SEQ ID NO: 3956967 - RNA, 22 nt, Human herpesvirus 2
ggcgguucgcgugcggccagcc

SEQ ID NO: 3956968 - RNA, 17 nt, Human herpesvirus 2
ggcgucuagcucgcgga

SEQ ID NO: 3956969 - RNA, 13 nt, Human herpesvirus 2
ggcgugcugugcc

SEQ ID NO: 3956970 - RNA, 21 nt, Human herpesvirus 2
ggcucccccgcggaccuuggc

SEQ ID NO: 3956971 - RNA, 12 nt, Human herpesvirus 2
ggcuccugcgca

SEQ ID NO: 3956972 - RNA, 17 nt, Human herpesvirus 2
ggcugcgggcgugucgu

SEQ ID NO: 3956973 - RNA, 13 nt, Human herpesvirus 2
ggcugcggggggc

SEQ ID NO: 3956974 - RNA, 15 nt, Human herpesvirus 2
ggcugcuauccagga

SEQ ID NO: 3956975 - RNA, 12 nt, Human herpesvirus 2
ggcugcuccgcu

SEQ ID NO: 3956976 - RNA, 21 nt, Human herpesvirus 2
ggcuggagcgcuggugggacg

SEQ ID NO: 3956977 - RNA, 21 nt, Human herpesvirus 2
ggcugguuggauguuuuugca

SEQ ID NO: 3956978 - RNA, 12 nt, Human herpesvirus 2
ggcuucgugggu

SEQ ID NO: 3956979 - RNA, 23 nt, Human herpesvirus 2
ggcuucuucgccgcccucgccca

SEQ ID NO: 3956980 - RNA, 22 nt, Human herpesvirus 2
gggaauaugcaagcgggcgggg

SEQ ID NO: 3956981 - RNA, 19 nt, Human herpesvirus 2
gggaccccgacguggcccg

SEQ ID NO: 3956982 - RNA, 23 nt, Human herpesvirus 2
gggacccgccagagacccugccc

SEQ ID NO: 3956983 - RNA, 13 nt, Human herpesvirus 2
gggacggccgggc

SEQ ID NO: 3956984 - RNA, 16 nt, Human herpesvirus 2
gggacugggggcgggg

SEQ ID NO: 3956985 - RNA, 16 nt, Human herpesvirus 2
gggagccgcggccccg

SEQ ID NO: 3956986 - RNA, 23 nt, Human herpesvirus 2
gggagcuucauuuugugggggcc

SEQ ID NO: 3956987 - RNA, 12 nt, Human herpesvirus 2
gggaggaggcgg

SEQ ID NO: 3956988 - RNA, 13 nt, Human herpesvirus 2
gggaggggcggga

SEQ ID NO: 3956989 - RNA, 21 nt, Human herpesvirus 2
gggagguggggggggggaaag

SEQ ID NO: 3956990 - RNA, 18 nt, Human herpesvirus 2
gggagguucccccguggc

SEQ ID NO: 3956991 - RNA, 16 nt, Human herpesvirus 2
gggcacggcguccucc

SEQ ID NO: 3956992 - RNA, 21 nt, Human herpesvirus 2
gggcacucuggcguccccagg

SEQ ID NO: 3956993 - RNA, 22 nt, Human herpesvirus 2
gggcagugcaguaccccaguuc

SEQ ID NO: 3956994 - RNA, 21 nt, Human herpesvirus 2
gggcccacagcugcgccagaa

SEQ ID NO: 3956995 - RNA, 19 nt, Human herpesvirus 2
gggccccgccccgccccac

SEQ ID NO: 3956996 - RNA, 17 nt, Human herpesvirus 2
gggcccggacuccgccc

SEQ ID NO: 3956997 - RNA, 17 nt, Human herpesvirus 2
gggccggcguucccgcu

SEQ ID NO: 3956998 - RNA, 23 nt, Human herpesvirus 2
gggccucggucgacgaggccugg

SEQ ID NO: 3956999 - RNA, 14 nt, Human herpesvirus 2
gggcgagcuggccc

SEQ ID NO: 3957000 - RNA, 15 nt, Human herpesvirus 2
gggcgcccccgccuc

SEQ ID NO: 3957001 - RNA, 16 nt, Human herpesvirus 2
gggcgcgagccaggca

SEQ ID NO: 3957002 - RNA, 15 nt, Human herpesvirus 2
gggcgcugguggccg

SEQ ID NO: 3957003 - RNA, 14 nt, Human herpesvirus 2
gggcggcguggccg

SEQ ID NO: 3957004 - RNA, 19 nt, Human herpesvirus 2
gggcggcguggccgcgacc

SEQ ID NO: 3957005 - RNA, 13 nt, Human herpesvirus 2
gggcgggcgggcg

SEQ ID NO: 3957006 - RNA, 19 nt, Human herpesvirus 2
gggcgggggugccguggac

SEQ ID NO: 3957007 - RNA, 22 nt, Human herpesvirus 2
gggcgguugcgguucguucugg

SEQ ID NO: 3957008 - RNA, 14 nt, Human herpesvirus 2
gggcguccccgagc

SEQ ID NO: 3957009 - RNA, 17 nt, Human herpesvirus 2
gggcgucgcgguggcaa

SEQ ID NO: 3957010 - RNA, 18 nt, Human herpesvirus 2
gggcguuauaagccgccg

SEQ ID NO: 3957011 - RNA, 17 nt, Human herpesvirus 2
gggcugucgggcgaugc

SEQ ID NO: 3957012 - RNA, 21 nt, Human herpesvirus 2
gggcuuggacgcgccucccgg

SEQ ID NO: 3957013 - RNA, 20 nt, Human herpesvirus 2
ggggaaagaaagagaaacaa

SEQ ID NO: 3957014 - RNA, 15 nt, Human herpesvirus 2
ggggaaagugggccg

SEQ ID NO: 3957015 - RNA, 20 nt, Human herpesvirus 2
ggggaaauguauggguccuu

SEQ ID NO: 3957016 - RNA, 20 nt, Human herpesvirus 2
ggggacacgcggcgggucgg

SEQ ID NO: 3957017 - RNA, 19 nt, Human herpesvirus 2
ggggacuugacggucgcca

SEQ ID NO: 3957018 - RNA, 16 nt, Human herpesvirus 2
ggggaggggggaagga

SEQ ID NO: 3957019 - RNA, 23 nt, Human herpesvirus 2
ggggagguggggggggggaaaga

SEQ ID NO: 3957020 - RNA, 20 nt, Human herpesvirus 2
ggggcaccaaaaaccagguc

SEQ ID NO: 3957021 - RNA, 13 nt, Human herpesvirus 2
ggggcacgcgguc

SEQ ID NO: 3957022 - RNA, 17 nt, Human herpesvirus 2
ggggcacgcggucagca

SEQ ID NO: 3957023 - RNA, 15 nt, Human herpesvirus 2
ggggcccgccgccgc

SEQ ID NO: 3957024 - RNA, 18 nt, Human herpesvirus 2
ggggccggggcggccccg

SEQ ID NO: 3957025 - RNA, 23 nt, Human herpesvirus 2
ggggccucggucgacgaggccug

SEQ ID NO: 3957026 - RNA, 17 nt, Human herpesvirus 2
ggggcgcugguggccgc

SEQ ID NO: 3957027 - RNA, 13 nt, Human herpesvirus 2
gggggaggcgcgc

SEQ ID NO: 3957028 - RNA, 16 nt, Human herpesvirus 2
gggggcaagugcagua

SEQ ID NO: 3957029 - RNA, 14 nt, Human herpesvirus 2
gggggccaugacac

SEQ ID NO: 3957030 - RNA, 16 nt, Human herpesvirus 2
gggggcccaggucccc

SEQ ID NO: 3957031 - RNA, 16 nt, Human herpesvirus 2
gggggcccgggguucu

SEQ ID NO: 3957032 - RNA, 15 nt, Human herpesvirus 2
gggggcuaggagccg

SEQ ID NO: 3957033 - RNA, 19 nt, Human herpesvirus 2
gggggcuugauuugcgcgc

SEQ ID NO: 3957034 - RNA, 12 nt, Human herpesvirus 2
gggggggaaaga

SEQ ID NO: 3957035 - RNA, 13 nt, Human herpesvirus 2
gggggggaagaga

SEQ ID NO: 3957036 - RNA, 13 nt, Human herpesvirus 2
gggggggaaggga

SEQ ID NO: 3957037 - RNA, 21 nt, Human herpesvirus 2
ggggucccgccucccggccgc

SEQ ID NO: 3957038 - RNA, 15 nt, Human herpesvirus 2
ggggucgaaggaaag

SEQ ID NO: 3957039 - RNA, 16 nt, Human herpesvirus 2
gggguguagggcccaa

SEQ ID NO: 3957040 - RNA, 14 nt, Human herpesvirus 2
gggguugggucugc

SEQ ID NO: 3957041 - RNA, 12 nt, Human herpesvirus 2
ggguccuggugg

SEQ ID NO: 3957042 - RNA, 12 nt, Human herpesvirus 2
gggucggcaugc

SEQ ID NO: 3957043 - RNA, 16 nt, Human herpesvirus 2
gggugcucggggacag

SEQ ID NO: 3957044 - RNA, 20 nt, Human herpesvirus 2
ggguuccccgagagcccagg

SEQ ID NO: 3957045 - RNA, 16 nt, Human herpesvirus 2
ggguuuuggcggcccg

SEQ ID NO: 3957046 - RNA, 19 nt, Human herpesvirus 2
gguaauuagcaacuuuuaa

SEQ ID NO: 3957047 - RNA, 12 nt, Human herpesvirus 2
gguacugcacug

SEQ ID NO: 3957048 - RNA, 22 nt, Human herpesvirus 2
gguaguguguccccccccccuc

SEQ ID NO: 3957049 - RNA, 16 nt, Human herpesvirus 2
ggucaauagauuuccc

SEQ ID NO: 3957050 - RNA, 13 nt, Human herpesvirus 2
ggucaccggggcg

SEQ ID NO: 3957051 - RNA, 18 nt, Human herpesvirus 2
gguccuggaggggggugc

SEQ ID NO: 3957052 - RNA, 21 nt, Human herpesvirus 2
ggucgcgcuuuuccgccgccg

SEQ ID NO: 3957053 - RNA, 18 nt, Human herpesvirus 2
ggucgcguuuucucuguu

SEQ ID NO: 3957054 - RNA, 12 nt, Human herpesvirus 2
ggucggacagga

SEQ ID NO: 3957055 - RNA, 22 nt, Human herpesvirus 2
ggucggccagcacgaccaggga

SEQ ID NO: 3957056 - RNA, 16 nt, Human herpesvirus 2
ggucugugggugguga

SEQ ID NO: 3957057 - RNA, 20 nt, Human herpesvirus 2
ggugccucacgguccucacc

SEQ ID NO: 3957058 - RNA, 14 nt, Human herpesvirus 2
ggugcgccccgccg

SEQ ID NO: 3957059 - RNA, 24 nt, Human herpesvirus 2
ggugcgccccgccggggcgcacaa

SEQ ID NO: 3957060 - RNA, 22 nt, Human herpesvirus 2
ggugggccuagccgugggccug

SEQ ID NO: 3957061 - RNA, 13 nt, Human herpesvirus 2
ggugggggaagaa

SEQ ID NO: 3957062 - RNA, 21 nt, Human herpesvirus 2
gguggugauggggguccuggu

SEQ ID NO: 3957063 - RNA, 13 nt, Human herpesvirus 2
gguggugcaguuu

SEQ ID NO: 3957064 - RNA, 16 nt, Human herpesvirus 2
gguguggucgggcgga

SEQ ID NO: 3957065 - RNA, 15 nt, Human herpesvirus 2
gguucccauuggccc

SEQ ID NO: 3957066 - RNA, 20 nt, Human herpesvirus 2
gguucggggccagggcuggc

SEQ ID NO: 3957067 - RNA, 15 nt, Human herpesvirus 2
gguugaugggcgggg

SEQ ID NO: 3957068 - RNA, 22 nt, Human herpesvirus 2
gguugucuucuuuuccaccccu

SEQ ID NO: 3957069 - RNA, 16 nt, Human herpesvirus 2
guaacccaguuccuca

SEQ ID NO: 3957070 - RNA, 18 nt, Human herpesvirus 2
guacccggcagagagauu

SEQ ID NO: 3957071 - RNA, 14 nt, Human herpesvirus 2
guacucaucgggac

SEQ ID NO: 3957072 - RNA, 15 nt, Human herpesvirus 2
guauaguacggggga

SEQ ID NO: 3957073 - RNA, 18 nt, Human herpesvirus 2
guaucgugccuggcggca

SEQ ID NO: 3957074 - RNA, 16 nt, Human herpesvirus 2
gucaccggggcgcccc

SEQ ID NO: 3957075 - RNA, 15 nt, Human herpesvirus 2
gucaccgggggcccc

SEQ ID NO: 3957076 - RNA, 18 nt, Human herpesvirus 2
gucaccgggggccccggg

SEQ ID NO: 3957077 - RNA, 20 nt, Human herpesvirus 2
gucagcgaucgccagccgcg

SEQ ID NO: 3957078 - RNA, 22 nt, Human herpesvirus 2
gucaggcgcgcgguaugcgugg

SEQ ID NO: 3957079 - RNA, 17 nt, Human herpesvirus 2
guccagguacccggcgg

SEQ ID NO: 3957080 - RNA, 23 nt, Human herpesvirus 2
gccccccccccucaccccuccga

SEQ ID NO: 3957081 - RNA, 17 nt, Human herpesvirus 2
gccccccgacgugcgcg

SEQ ID NO: 3957082 - RNA, 14 nt, Human herpesvirus 2
gccccccgggagcc

SEQ ID NO: 3957083 - RNA, 18 nt, Human herpesvirus 2
gcccccgacccggggccc

SEQ ID NO: 3957084 - RNA, 20 nt, Human herpesvirus 2
gcccccgacccggggcccga

SEQ ID NO: 3957085 - RNA, 21 nt, Human herpesvirus 2
gcccccggccuuugcuuccuc

SEQ ID NO: 3957086 - RNA, 22 nt, Human herpesvirus 2
gccccgaacagcaacacacacc

SEQ ID NO: 3957087 - RNA, 18 nt, Human herpesvirus 2
gccccgacaucaaccacc

SEQ ID NO: 3957088 - RNA, 16 nt, Human herpesvirus 2
gccccgcggaccccgc

SEQ ID NO: 3957089 - RNA, 22 nt, Human herpesvirus 2
gccccgcggucgcgcgggccgu

SEQ ID NO: 3957090 - RNA, 14 nt, Human herpesvirus 2
gccccggcggcccc

SEQ ID NO: 3957091 - RNA, 16 nt, Human herpesvirus 2
gccccggucugugggu

SEQ ID NO: 3957092 - RNA, 13 nt, Human herpesvirus 2
gccccucugcuuu

SEQ ID NO: 3957093 - RNA, 15 nt, Human herpesvirus 2
gcccgaaccccgcgg

SEQ ID NO: 3957094 - RNA, 23 nt, Human herpesvirus 2
gcccgaaccccgcggcccugagc

SEQ ID NO: 3957095 - RNA, 17 nt, Human herpesvirus 2
gcccgaccgggcggugc

SEQ ID NO: 3957096 - RNA, 15 nt, Human herpesvirus 2
gcccgccaacccccg

SEQ ID NO: 3957097 - RNA, 13 nt, Human herpesvirus 2
gcccgccagggcc

SEQ ID NO: 3957098 - RNA, 22 nt, Human herpesvirus 2
gcccgccagugcaucccagacg

SEQ ID NO: 3957099 - RNA, 13 nt, Human herpesvirus 2
gcccgccccaggg

SEQ ID NO: 3957100 - RNA, 19 nt, Human herpesvirus 2
gcccgccccagggggcggc

SEQ ID NO: 3957101 - RNA, 15 nt, Human herpesvirus 2
gcccgcccccgacgg

SEQ ID NO: 3957102 - RNA, 15 nt, Human herpesvirus 2
gcccgcgagccgcac

SEQ ID NO: 3957103 - RNA, 14 nt, Human herpesvirus 2
gcccgcguccccgg

SEQ ID NO: 3957104 - RNA, 19 nt, Human herpesvirus 2
gcccgcguccccggcccuc

SEQ ID NO: 3957105 - RNA, 21 nt, Human herpesvirus 2
gcccgcgugccgcagaccacc

SEQ ID NO: 3957106 - RNA, 18 nt, Human herpesvirus 2
gcccggacuccgccccgg

SEQ ID NO: 3957107 - RNA, 15 nt, Human herpesvirus 2
gcccguggguggcca

SEQ ID NO: 3957108 - RNA, 14 nt, Human herpesvirus 2
gcccuacggcggcc

SEQ ID NO: 3957109 - RNA, 20 nt, Human herpesvirus 2
gcccucacgucuucgcccac

SEQ ID NO: 3957110 - RNA, 21 nt, Human herpesvirus 2
gcccuggacccagacacggug

SEQ ID NO: 3957111 - RNA, 16 nt, Human herpesvirus 2
gccgacgugccgggga

SEQ ID NO: 3957112 - RNA, 15 nt, Human herpesvirus 2
gccgacuccaggagc

SEQ ID NO: 3957113 - RNA, 20 nt, Human herpesvirus 2
gccgagcguaucggccagga

SEQ ID NO: 3957114 - RNA, 16 nt, Human herpesvirus 2
gccgaucgcagcgucc

SEQ ID NO: 3957115 - RNA, 19 nt, Human herpesvirus 2
gccgcagaccaccucgcgg

SEQ ID NO: 3957116 - RNA, 17 nt, Human herpesvirus 2
gccgcccgcgccgcgac

SEQ ID NO: 3957117 - RNA, 12 nt, Human herpesvirus 2
gccgccggccac

SEQ ID NO: 3957118 - RNA, 15 nt, Human herpesvirus 2
gccgccuccccgcug

SEQ ID NO: 3957119 - RNA, 13 nt, Human herpesvirus 2
gccgcgcccccgg

SEQ ID NO: 3957120 - RNA, 12 nt, Human herpesvirus 2
gccgcgcccgcg

SEQ ID NO: 3957121 - RNA, 18 nt, Human herpesvirus 2
gccgcgcgagcggccgug

SEQ ID NO: 3957122 - RNA, 16 nt, Human herpesvirus 2
gccgcgggggaggcgc

SEQ ID NO: 3957123 - RNA, 21 nt, Human herpesvirus 2
gccgcgguggcgucggcggcc

SEQ ID NO: 3957124 - RNA, 18 nt, Human herpesvirus 2
gccgcugcccgacgcgcc

SEQ ID NO: 3957125 - RNA, 17 nt, Human herpesvirus 2
gccgcugggggggcggg

SEQ ID NO: 3957126 - RNA, 13 nt, Human herpesvirus 2
gccgcugugccag

SEQ ID NO: 3957127 - RNA, 18 nt, Human herpesvirus 2
gccgcuguggcccuggcg

SEQ ID NO: 3957128 - RNA, 19 nt, Human herpesvirus 2
gccgcuuuaccccgcggcc

SEQ ID NO: 3957129 - RNA, 12 nt, Human herpesvirus 2
gccgggagaguu

SEQ ID NO: 3957130 - RNA, 16 nt, Human herpesvirus 2
gccgggagcguggggc

SEQ ID NO: 3957131 - RNA, 15 nt, Human herpesvirus 2
gccgucgggccccgg

SEQ ID NO: 3957132 - RNA, 22 nt, Human herpesvirus 2
gccgugggccuguggggccugc

SEQ ID NO: 3957133 - RNA, 18 nt, Human herpesvirus 2
gccuagccgugggccugu

SEQ ID NO: 3957134 - RNA, 20 nt, Human herpesvirus 2
gccucccgcaagagccugcc

SEQ ID NO: 3957135 - RNA, 15 nt, Human herpesvirus 2
gccucgggcggcgug

SEQ ID NO: 3957136 - RNA, 24 nt, Human herpesvirus 2
gccucgggcggcguggccgcgacc

SEQ ID NO: 3957137 - RNA, 12 nt, Human herpesvirus 2
gccucguggggc

SEQ ID NO: 3957138 - RNA, 21 nt, Human herpesvirus 2
gccucuguuucuccaggcgcu

SEQ ID NO: 3957139 - RNA, 15 nt, Human herpesvirus 2
gccucuuugggccgu

SEQ ID NO: 3957140 - RNA, 22 nt, Human herpesvirus 2
gccugccccgcggaggcguggu

SEQ ID NO: 3957141 - RNA, 16 nt, Human herpesvirus 2
gccugguggucgucgg

SEQ ID NO: 3957142 - RNA, 17 nt, Human herpesvirus 2
gcgacccgccgggggcg

SEQ ID NO: 3957143 - RNA, 22 nt, Human herpesvirus 2
gcgaccgggcggcgcgcccccc

SEQ ID NO: 3957144 - RNA, 20 nt, Human herpesvirus 2
gcgacugccuccacgcccug

SEQ ID NO: 3957145 - RNA, 20 nt, Human herpesvirus 2
gcgagaaguaauaguccgug

SEQ ID NO: 3957146 - RNA, 20 nt, Human herpesvirus 2
gcgagcucccugcggcuggc

SEQ ID NO: 3957147 - RNA, 19 nt, Human herpesvirus 2
gcgaggggcgggaggggcg

SEQ ID NO: 3957148 - RNA, 14 nt, Human herpesvirus 2
gcgauccugggccu

SEQ ID NO: 3957149 - RNA, 18 nt, Human herpesvirus 2
gcgcaggggggccgggga

SEQ ID NO: 3957150 - RNA, 16 nt, Human herpesvirus 2
gcgccaccgcccgcac

SEQ ID NO: 3957151 - RNA, 19 nt, Human herpesvirus 2
gcgcccccgacccggggcc

SEQ ID NO: 3957152 - RNA, 18 nt, Human herpesvirus 2
gcgccgccgcgcgggccc

SEQ ID NO: 3957153 - RNA, 17 nt, Human herpesvirus 2
gcgccggcaccaggcua

SEQ ID NO: 3957154 - RNA, 17 nt, Human herpesvirus 2
gcgccgggccucccgca

SEQ ID NO: 3957155 - RNA, 12 nt, Human herpesvirus 2
gcgccgggcgcg

SEQ ID NO: 3957156 - RNA, 14 nt, Human herpesvirus 2
gcgccgucgggccc

SEQ ID NO: 3957157 - RNA, 16 nt, Human herpesvirus 2
gcgccgucgucgcccg

SEQ ID NO: 3957158 - RNA, 23 nt, Human herpesvirus 2
gcgcgacugccuccacgcccugc

SEQ ID NO: 3957159 - RNA, 13 nt, Human herpesvirus 2
gcgcgcauccaca

SEQ ID NO: 3957160 - RNA, 18 nt, Human herpesvirus 2
gcgcgccaccgcccgcac

SEQ ID NO: 3957161 - RNA, 19 nt, Human herpesvirus 2
gcgcgccgacgaccugcag

SEQ ID NO: 3957162 - RNA, 19 nt, Human herpesvirus 2
gcgcguugguccgggggcg

SEQ ID NO: 3957163 - RNA, 16 nt, Human herpesvirus 2
gcgcuccgaucggggu

SEQ ID NO: 3957164 - RNA, 14 nt, Human herpesvirus 2
gcgcucgcucuccg

SEQ ID NO: 3957165 - RNA, 13 nt, Human herpesvirus 2
gcgcugcggggac

SEQ ID NO: 3957166 - RNA, 19 nt, Human herpesvirus 2
gcgcuuauaagagcgggcc

SEQ ID NO: 3957167 - RNA, 18 nt, Human herpesvirus 2
gcgcuucaucgucgccga

SEQ ID NO: 3957168 - RNA, 22 nt, Human herpesvirus 2
gcgcuucaucgucgccgacucc

SEQ ID NO: 3957169 - RNA, 18 nt, Human herpesvirus 2
gcggacgcacgcggggac

SEQ ID NO: 3957170 - RNA, 21 nt, Human herpesvirus 2
gcggagagagggggggaaaga

SEQ ID NO: 3957171 - RNA, 14 nt, Human herpesvirus 2
gcggcaccggggaa

SEQ ID NO: 3957172 - RNA, 14 nt, Human herpesvirus 2
gcggcccuggagcg

SEQ ID NO: 3957173 - RNA, 23 nt, Human herpesvirus 2
gcggcgaaccgguagccggggca

SEQ ID NO: 3957174 - RNA, 16 nt, Human herpesvirus 2
gcggcggcaugcgcgg

SEQ ID NO: 3957175 - RNA, 16 nt, Human herpesvirus 2
gcgggagccagggucg

SEQ ID NO: 3957176 - RNA, 13 nt, Human herpesvirus 2
gcgggaggggcgg

SEQ ID NO: 3957177 - RNA, 20 nt, Human herpesvirus 2
gcgggcacucuggcgucccc

SEQ ID NO: 3957178 - RNA, 11 nt, Human herpesvirus 2
gcgggccccgu

SEQ ID NO: 3957179 - RNA, 22 nt, Human herpesvirus 2
gcgggccguucggcaggcccgc

SEQ ID NO: 3957180 - RNA, 23 nt, Human herpesvirus 2
gcgggcucguguuggccaccaac

SEQ ID NO: 3957181 - RNA, 20 nt, Human herpesvirus 2
gcggggacccgccagagacc

SEQ ID NO: 3957182 - RNA, 14 nt, Human herpesvirus 2
gcggggcaccggca

SEQ ID NO: 3957183 - RNA, 18 nt, Human herpesvirus 2
gcggucgcgcgggccgug

SEQ ID NO: 3957184 - RNA, 19 nt, Human herpesvirus 2
gcgucgcucucggucccgc

SEQ ID NO: 3957185 - RNA, 15 nt, Human herpesvirus 2
gcgucgggcacaggc

SEQ ID NO: 3957186 - RNA, 16 nt, Human herpesvirus 2
gcgucgggggccgggg

SEQ ID NO: 3957187 - RNA, 16 nt, Human herpesvirus 2
gcgugccuggccgcgc

SEQ ID NO: 3957188 - RNA, 22 nt, Human herpesvirus 2
gcgugcguucuggcggcccugg

SEQ ID NO: 3957189 - RNA, 23 nt, Human herpesvirus 2
gcgugcugcugagcccugccccg

SEQ ID NO: 3957190 - RNA, 21 nt, Human herpesvirus 2
gcguucuggcggcccuggagc

SEQ ID NO: 3957191 - RNA, 16 nt, Human herpesvirus 2
gcguugccgggggcca

SEQ ID NO: 3957192 - RNA, 17 nt, Human herpesvirus 2
gcguugccgggggccau

SEQ ID NO: 3957193 - RNA, 21 nt, Human herpesvirus 2
gcuaacgagcgcgcugccgga

SEQ ID NO: 3957194 - RNA, 14 nt, Human herpesvirus 2
gcuaccucacccca

SEQ ID NO: 3957195 - RNA, 20 nt, Human herpesvirus 2
gcuagucuccgaucugcccc

SEQ ID NO: 3957196 - RNA, 18 nt, Human herpesvirus 2
gcuccccuucagccugga

SEQ ID NO: 3957197 - RNA, 14 nt, Human herpesvirus 2
gcuccuagcccccc

SEQ ID NO: 3957198 - RNA, 15 nt, Human herpesvirus 2
gcucgaccagcggcc

SEQ ID NO: 3957199 - RNA, 18 nt, Human herpesvirus 2
gcucgcggagggcggcca

SEQ ID NO: 3957200 - RNA, 13 nt, Human herpesvirus 2
gcucgggcuggcc

SEQ ID NO: 3957201 - RNA, 22 nt, Human herpesvirus 2
gcucguaaaaauggcggccgcc

SEQ ID NO: 3957202 - RNA, 23 nt, Human herpesvirus 2
gcucucaacacccacgacccacc

SEQ ID NO: 3957203 - RNA, 22 nt, Human herpesvirus 2
gcucuccgagggcgagcucggc

SEQ ID NO: 3957204 - RNA, 14 nt, Human herpesvirus 2
gcucugccugcacg

SEQ ID NO: 3957205 - RNA, 20 nt, Human herpesvirus 2
gcugagggcggcgacguucg

SEQ ID NO: 3957206 - RNA, 20 nt, Human herpesvirus 2
gcugcacgucggacgccagc

SEQ ID NO: 3957207 - RNA, 13 nt, Human herpesvirus 2
gcugccccgcggu

SEQ ID NO: 3957208 - RNA, 22 nt, Human herpesvirus 2
gcugccccgcgugcagcgcggg

SEQ ID NO: 3957209 - RNA, 17 nt, Human herpesvirus 2
gcugcccgcggaccacc

SEQ ID NO: 3957210 - RNA, 14 nt, Human herpesvirus 2
gcugccgccgcggg

SEQ ID NO: 3957211 - RNA, 22 nt, Human herpesvirus 2
gcugcucucccguaccccgccg

SEQ ID NO: 3957212 - RNA, 14 nt, Human herpesvirus 2
gcugcugagcccug

SEQ ID NO: 3957213 - RNA, 15 nt, Human herpesvirus 2
gcugcugagcccugc

SEQ ID NO: 3957214 - RNA, 16 nt, Human herpesvirus 2
gcugcugcgcauggcc

SEQ ID NO: 3957215 - RNA, 12 nt, Human herpesvirus 2
gcuggcccugga

SEQ ID NO: 3957216 - RNA, 15 nt, Human herpesvirus 2
gcuggcccuggaccc

SEQ ID NO: 3957217 - RNA, 15 nt, Human herpesvirus 2
gcuguaucuggucug

SEQ ID NO: 3957218 - RNA, 17 nt, Human herpesvirus 2
gcuguauucccuugccc

SEQ ID NO: 3957219 - RNA, 21 nt, Human herpesvirus 2
gcuuagggugugaccccccca

SEQ ID NO: 3957220 - RNA, 23 nt, Human herpesvirus 2
gcuuccaccccccccccccuucc

SEQ ID NO: 3957221 - RNA, 16 nt, Human herpesvirus 2
gcuucccccgcccacc

SEQ ID NO: 3957222 - RNA, 14 nt, Human herpesvirus 2
gcuugaagggcacu

SEQ ID NO: 3957223 - RNA, 21 nt, Human herpesvirus 2
gcuugccccucccccggccca

SEQ ID NO: 3957224 - RNA, 19 nt, Human herpesvirus 2
gcuuggaggcccucuggga

SEQ ID NO: 3957225 - RNA, 20 nt, Human herpesvirus 2
gcuuggccguguggucgccc

SEQ ID NO: 3957226 - RNA, 22 nt, Human herpesvirus 2
gcuugugcccucguaggcccgg

SEQ ID NO: 3957227 - RNA, 15 nt, Human herpesvirus 2
gcuuuccacaccccc

SEQ ID NO: 3957228 - RNA, 18 nt, Human herpesvirus 2
gcuuucccuccacccgcc

SEQ ID NO: 3957229 - RNA, 16 nt, Human herpesvirus 2
gcuuuuacccucaccc

SEQ ID NO: 3957230 - RNA, 21 nt, Human herpesvirus 2
ggaaagggaacagcgaccaaa

SEQ ID NO: 3957231 - RNA, 21 nt, Human herpesvirus 2
ggaacacaggcgcuucaucgu

SEQ ID NO: 3957232 - RNA, 16 nt, Human herpesvirus 2
ggaagaagagaggcga

SEQ ID NO: 3957233 - RNA, 22 nt, Human herpesvirus 2
ggaagcugccucccccccggag

SEQ ID NO: 3957234 - RNA, 22 nt, Human herpesvirus 2
ggacacggcccccgaauccggg

SEQ ID NO: 3957235 - RNA, 13 nt, Human herpesvirus 2
ggacagccagggc

SEQ ID NO: 3957236 - RNA, 17 nt, Human herpesvirus 2
ggacagccagggcuggg

SEQ ID NO: 3957237 - RNA, 12 nt, Human herpesvirus 2
ggaccggccccc

SEQ ID NO: 3957238 - RNA, 14 nt, Human herpesvirus 2
ggacgacgggcgcc

SEQ ID NO: 3957239 - RNA, 17 nt, Human herpesvirus 2
ggacgagccaaaccagc

SEQ ID NO: 3957240 - RNA, 23 nt, Human herpesvirus 2
ggacgcacgcggggacccgccag

SEQ ID NO: 3957241 - RNA, 21 nt, Human herpesvirus 2
ggacgcagcggcguccacgcc

SEQ ID NO: 3957242 - RNA, 22 nt, Human herpesvirus 2
ggacgcagcggcguccacgccc

SEQ ID NO: 3957243 - RNA, 16 nt, Human herpesvirus 2
ggacgcguucgagggu

SEQ ID NO: 3957244 - RNA, 14 nt, Human herpesvirus 2
ggacggccgggcag

SEQ ID NO: 3957245 - RNA, 20 nt, Human herpesvirus 2
ggacggguauaaaggccagg

SEQ ID NO: 3957246 - RNA, 18 nt, Human herpesvirus 2
ggagaguucaauagauuu

SEQ ID NO: 3957247 - RNA, 14 nt, Human herpesvirus 2
ggagcguggggcgc

SEQ ID NO: 3957248 - RNA, 18 nt, Human herpesvirus 2
ggaggaggcggcgccugc

SEQ ID NO: 3957249 - RNA, 20 nt, Human herpesvirus 2
ggaggagggcgaugacccac

SEQ ID NO: 3957250 - RNA, 15 nt, Human herpesvirus 2
ggaggcgccucugcc

SEQ ID NO: 3957251 - RNA, 19 nt, Human herpesvirus 2
ggagggcagggccgcuggg

SEQ ID NO: 3957252 - RNA, 12 nt, Human herpesvirus 2
ggaggggcuccu

SEQ ID NO: 3957253 - RNA, 16 nt, Human herpesvirus 2
ggaggggggugcugug

SEQ ID NO: 3957254 - RNA, 16 nt, Human herpesvirus 2
ggauacgggggcgggg

SEQ ID NO: 3957255 - RNA, 17 nt, Human herpesvirus 2
ggauccaggggagggcg

SEQ ID NO: 3957256 - RNA, 21 nt, Human herpesvirus 2
ggaucgugugcacgaaaaaga

SEQ ID NO: 3957257 - RNA, 17 nt, Human herpesvirus 2
ggcacaccggcggggcg

SEQ ID NO: 3957258 - RNA, 20 nt, Human herpesvirus 2
ggcacaccggcggggcgggc

SEQ ID NO: 3957259 - RNA, 15 nt, Human herpesvirus 2
ggcacagguggugca

SEQ ID NO: 3957260 - RNA, 17 nt, Human herpesvirus 2
ggcacagguggugcacg

SEQ ID NO: 3957261 - RNA, 16 nt, Human herpesvirus 2
ggcacgagaagccgcc

SEQ ID NO: 3957262 - RNA, 15 nt, Human herpesvirus 2
ggcaggagggcgggc

SEQ ID NO: 3957263 - RNA, 11 nt, Human herpesvirus 2
ggcaggccgcg

SEQ ID NO: 3957264 - RNA, 16 nt, Human herpesvirus 2
ggcaggcgcgcggguc

SEQ ID NO: 3957265 - RNA, 14 nt, Human herpesvirus 2
ggcaggggcagcuc

SEQ ID NO: 3957266 - RNA, 18 nt, Human herpesvirus 2
ggcauaccuccgaccggc

SEQ ID NO: 3957267 - RNA, 16 nt, Human herpesvirus 2
ggcaugcgacggcguc

SEQ ID NO: 3957268 - RNA, 13 nt, Human herpesvirus 2
ggcauggaagccc

SEQ ID NO: 3957269 - RNA, 18 nt, Human herpesvirus 2
ggccaaccgcgcgccgcc

SEQ ID NO: 3957270 - RNA, 24 nt, Human herpesvirus 2
ggccagagcguucggcggagcugg

SEQ ID NO: 3957271 - RNA, 14 nt, Human herpesvirus 2
ggccagcgggggcc

SEQ ID NO: 3957272 - RNA, 13 nt, Human herpesvirus 2
ggcccacgagcuc

SEQ ID NO: 3957273 - RNA, 23 nt, Human herpesvirus 2
ggccccgccccgccccaccccgc

SEQ ID NO: 3957274 - RNA, 12 nt, Human herpesvirus 2
ggccccgccggg

SEQ ID NO: 3957275 - RNA, 16 nt, Human herpesvirus 2
ggccccggcggccccg

SEQ ID NO: 3957276 - RNA, 15 nt, Human herpesvirus 2
ggccccucgcucccc

SEQ ID NO: 3957277 - RNA, 13 nt, Human herpesvirus 2
ggcccgcagcuuc

SEQ ID NO: 3957278 - RNA, 15 nt, Human herpesvirus 2
ggcccggacuccgcc

SEQ ID NO: 3957279 - RNA, 18 nt, Human herpesvirus 2
ggcccucgcugcucuccc

SEQ ID NO: 3957280 - RNA, 15 nt, Human herpesvirus 2
ggcccugccuccgga

SEQ ID NO: 3957281 - RNA, 17 nt, Human herpesvirus 2
ggccgacgugccgggga

SEQ ID NO: 3957282 - RNA, 20 nt, Human herpesvirus 2
ggccgagcguaucggccagg

SEQ ID NO: 3957283 - RNA, 9 nt, Human herpesvirus 2
ggccgccgg

SEQ ID NO: 3957284 - RNA, 20 nt, Human herpesvirus 2
ggccgccuccccgcuggagc

SEQ ID NO: 3957285 - RNA, 22 nt, Human herpesvirus 2
ggccgccuccccgcuggagccc

SEQ ID NO: 3957286 - RNA, 15 nt, Human herpesvirus 2
ggccgcgguggcguc

SEQ ID NO: 3957287 - RNA, 20 nt, Human herpesvirus 2
ggccgcucgcugcagggccu

SEQ ID NO: 3957288 - RNA, 22 nt, Human herpesvirus 2
ggccgcucgcugcagggccugg

SEQ ID NO: 3957289 - RNA, 12 nt, Human herpesvirus 2
ggccgcuggggg

SEQ ID NO: 3957290 - RNA, 19 nt, Human herpesvirus 2
ggccggcguucccgcucgc

SEQ ID NO: 3957291 - RNA, 14 nt, Human herpesvirus 2
ggccgggacggcgc

SEQ ID NO: 3957292 - RNA, 21 nt, Human herpesvirus 2
ggccggggagggcagggccgc

SEQ ID NO: 3957293 - RNA, 13 nt, Human herpesvirus 2
ggccgugggcguc

SEQ ID NO: 3957294 - RNA, 19 nt, Human herpesvirus 2
ggccucccgcaagagccug

SEQ ID NO: 3957295 - RNA, 17 nt, Human herpesvirus 2
ggcgacgccgcggccga

SEQ ID NO: 3957296 - RNA, 20 nt, Human herpesvirus 2
ggcgacggcaccgccgggcg

SEQ ID NO: 3957297 - RNA, 15 nt, Human herpesvirus 2
ggcgagugcucgcag

SEQ ID NO: 3957298 - RNA, 21 nt, Human herpesvirus 2
ggcgaugcgacgccgccccug

SEQ ID NO: 3957299 - RNA, 20 nt, Human herpesvirus 2
ggcgauguccggggcgguga

SEQ ID NO: 3957300 - RNA, 23 nt, Human herpesvirus 2
ggcgcacacgccaucgacccgga

SEQ ID NO: 3957301 - RNA, 16 nt, Human herpesvirus 2
ggcgccaagcgccccg

SEQ ID NO: 3957302 - RNA, 18 nt, Human herpesvirus 2
ggcgcccgccccugcgca

SEQ ID NO: 3957303 - RNA, 13 nt, Human herpesvirus 2
ggcgccgccccgc

SEQ ID NO: 3957304 - RNA, 12 nt, Human herpesvirus 2
ggcgccgccggu

SEQ ID NO: 3957305 - RNA, 13 nt, Human herpesvirus 2
ggcgcgcccaccg

SEQ ID NO: 3957306 - RNA, 14 nt, Human herpesvirus 2
ggcgcggugccuga

SEQ ID NO: 3957307 - RNA, 14 nt, Human herpesvirus 2
ggcgcugguggccg

SEQ ID NO: 3957308 - RNA, 18 nt, Human herpesvirus 2
ggcgcuucaucgucgccg

SEQ ID NO: 3957309 - RNA, 14 nt, Human herpesvirus 2
ggcggccaccccgc

SEQ ID NO: 3957310 - RNA, 15 nt, Human herpesvirus 2
ggcggccaccccgcc

SEQ ID NO: 3957311 - RNA, 16 nt, Human herpesvirus 2
ggcggcccuggagcgc

SEQ ID NO: 3957312 - RNA, 22 nt, Human herpesvirus 2
ggcggccucggccggcggagcc

SEQ ID NO: 3957313 - RNA, 21 nt, Human herpesvirus 2
ggcggcgaaccgguagccggg

SEQ ID NO: 3957314 - RNA, 16 nt, Human herpesvirus 2
uaguccgcgccuccug

SEQ ID NO: 3957315 - RNA, 20 nt, Human herpesvirus 2
uaguguguccccccccccuc

SEQ ID NO: 3957316 - RNA, 14 nt, Human herpesvirus 2
uaugcuaauuaaau

SEQ ID NO: 3957317 - RNA, 14 nt, Human herpesvirus 2
uauuagcaucgggg

SEQ ID NO: 3957318 - RNA, 17 nt, Human herpesvirus 2
uauugaaacagacauac

SEQ ID NO: 3957319 - RNA, 13 nt, Human herpesvirus 2
ucaaacaggccau

SEQ ID NO: 3957320 - RNA, 16 nt, Human herpesvirus 2
ucaccccaccccaucc

SEQ ID NO: 3957321 - RNA, 18 nt, Human herpesvirus 2
ucacccccgaguuccccc

SEQ ID NO: 3957322 - RNA, 22 nt, Human herpesvirus 2
ucaccgguguucggaaccaguu

SEQ ID NO: 3957323 - RNA, 18 nt, Human herpesvirus 2
ucacgagguuuggggcgg

SEQ ID NO: 3957324 - RNA, 14 nt, Human herpesvirus 2
ucaguccgcgcggg

SEQ ID NO: 3957325 - RNA, 18 nt, Human herpesvirus 2
ucaucaaacacgggcucg

SEQ ID NO: 3957326 - RNA, 17 nt, Human herpesvirus 2
uccaccaccagcaccac

SEQ ID NO: 3957327 - RNA, 16 nt, Human herpesvirus 2
uccacgcccugcugua

SEQ ID NO: 3957328 - RNA, 15 nt, Human herpesvirus 2
uccacgccguggacg

SEQ ID NO: 3957329 - RNA, 23 nt, Human herpesvirus 2
uccagaacccccguaaacaccag

SEQ ID NO: 3957330 - RNA, 15 nt, Human herpesvirus 2
ucccaauucgucacc

SEQ ID NO: 3957331 - RNA, 21 nt, Human herpesvirus 2
uccccaggcgacgccaggccc

SEQ ID NO: 3957332 - RNA, 14 nt, Human herpesvirus 2
uccccccggggggc

SEQ ID NO: 3957333 - RNA, 20 nt, Human herpesvirus 2
ucccccgggcagccgggccc

SEQ ID NO: 3957334 - RNA, 16 nt, Human herpesvirus 2
uccccgaaagccacca

SEQ ID NO: 3957335 - RNA, 14 nt, Human herpesvirus 2
uccccgcuggagcc

SEQ ID NO: 3957336 - RNA, 15 nt, Human herpesvirus 2
uccccuucagccugg

SEQ ID NO: 3957337 - RNA, 17 nt, Human herpesvirus 2
uccccuucagccuggac

SEQ ID NO: 3957338 - RNA, 12 nt, Human herpesvirus 2
ucccgcaagagc

SEQ ID NO: 3957339 - RNA, 21 nt, Human herpesvirus 2
ucccuaacacggaggagccgg

SEQ ID NO: 3957340 - RNA, 20 nt, Human herpesvirus 2
uccgacgacgcguacguggc

SEQ ID NO: 3957341 - RNA, 20 nt, Human herpesvirus 2
uccgacguugcuuuuaccca

SEQ ID NO: 3957342 - RNA, 17 nt, Human herpesvirus 2
uccgcacccccgccuac

SEQ ID NO: 3957343 - RNA, 12 nt, Human herpesvirus 2
uccgcccgcccc

SEQ ID NO: 3957344 - RNA, 21 nt, Human herpesvirus 2
uccgcggcuuuaucaccccgc

SEQ ID NO: 3957345 - RNA, 14 nt, Human herpesvirus 2
uccgcucccgccuc

SEQ ID NO: 3957346 - RNA, 18 nt, Human herpesvirus 2
uccgggagcgggggaggg

SEQ ID NO: 3957347 - RNA, 11 nt, Human herpesvirus 2
uccggggcggu

SEQ ID NO: 3957348 - RNA, 16 nt, Human herpesvirus 2
uccgggggccuggugg

SEQ ID NO: 3957349 - RNA, 14 nt, Human herpesvirus 2
uccggucccuuccc

SEQ ID NO: 3957350 - RNA, 22 nt, Human herpesvirus 2
uccgucguuuggggcuccccga

SEQ ID NO: 3957351 - RNA, 15 nt, Human herpesvirus 2
uccucaaacaggcca

SEQ ID NO: 3957352 - RNA, 15 nt, Human herpesvirus 2
uccucacgggggggc

SEQ ID NO: 3957353 - RNA, 19 nt, Human herpesvirus 2
uccuccguguuagggaagu

SEQ ID NO: 3957354 - RNA, 19 nt, Human herpesvirus 2
uccucguuuuguuuucucu

SEQ ID NO: 3957355 - RNA, 12 nt, Human herpesvirus 2
ucgaaggucggg

SEQ ID NO: 3957356 - RNA, 16 nt, Human herpesvirus 2
ucgaaucugggaagac

SEQ ID NO: 3957357 - RNA, 21 nt, Human herpesvirus 2
ucgacacacacaccccccuuc

SEQ ID NO: 3957358 - RNA, 21 nt, Human herpesvirus 2
ucgagguggcggaggggauca

SEQ ID NO: 3957359 - RNA, 21 nt, Human herpesvirus 2
ucgaugagccgguagugcagg

SEQ ID NO: 3957360 - RNA, 15 nt, Human herpesvirus 2
ucgcaaccacagcaa

SEQ ID NO: 3957361 - RNA, 16 nt, Human herpesvirus 2
ucgcaagccacccugg

SEQ ID NO: 3957362 - RNA, 14 nt, Human herpesvirus 2
ucgccaacucuguc

SEQ ID NO: 3957363 - RNA, 19 nt, Human herpesvirus 2
ucgccgccccgacucugug

SEQ ID NO: 3957364 - RNA, 18 nt, Human herpesvirus 2
ucgccucucuucuucccc

SEQ ID NO: 3957365 - RNA, 18 nt, Human herpesvirus 2
ucgcgcuuuuccgccgcc

SEQ ID NO: 3957366 - RNA, 13 nt, Human herpesvirus 2
caccccgcccgcu

SEQ ID NO: 3957367 - RNA, 13 nt, Human herpesvirus 2
caccccgccgcag

SEQ ID NO: 3957368 - RNA, 16 nt, Human herpesvirus 2
cacccgggcgccgggg

SEQ ID NO: 3957369 - RNA, 19 nt, Human herpesvirus 2
cacccuagccuucggccac

SEQ ID NO: 3957370 - RNA, 15 nt, Human herpesvirus 2
cacccugggucggga

SEQ ID NO: 3957371 - RNA, 12 nt, Human herpesvirus 2
caccgcccccau

SEQ ID NO: 3957372 - RNA, 14 nt, Human herpesvirus 2
caccgcgcccacag

SEQ ID NO: 3957373 - RNA, 19 nt, Human herpesvirus 2
caccggcguuucggugcug

SEQ ID NO: 3957374 - RNA, 23 nt, Human herpesvirus 2
caccgggcugggggucccgcgcu

SEQ ID NO: 3957375 - RNA, 15 nt, Human herpesvirus 2
caccggggaaacagg

SEQ ID NO: 3957376 - RNA, 18 nt, Human herpesvirus 2
caccggggaaacaggcac

SEQ ID NO: 3957377 - RNA, 19 nt, Human herpesvirus 2
cacgaccagggaggccaga

SEQ ID NO: 3957378 - RNA, 19 nt, Human herpesvirus 2
cacgacccaccgcccccgc

SEQ ID NO: 3957379 - RNA, 13 nt, Human herpesvirus 2
cacgacccgccuc

SEQ ID NO: 3957380 - RNA, 21 nt, Human herpesvirus 2
cacgcaggccgcccccagcag

SEQ ID NO: 3957381 - RNA, 13 nt, Human herpesvirus 2
cacgcccccacuc

SEQ ID NO: 3957382 - RNA, 21 nt, Human herpesvirus 2
cacgccguggacgcccccucc

SEQ ID NO: 3957383 - RNA, 16 nt, Human herpesvirus 2
cacgcgcuggccccuc

SEQ ID NO: 3957384 - RNA, 12 nt, Human herpesvirus 2
cacggccccgaa

SEQ ID NO: 3957385 - RNA, 20 nt, Human herpesvirus 2
cacgguccucaccgagccgc

SEQ ID NO: 3957386 - RNA, 18 nt, Human herpesvirus 2
cacguguccccagggagc

SEQ ID NO: 3957387 - RNA, 20 nt, Human herpesvirus 2
cacguguccccagggagccc

SEQ ID NO: 3957388 - RNA, 16 nt, Human herpesvirus 2
cacguucgccccgcag

SEQ ID NO: 3957389 - RNA, 21 nt, Human herpesvirus 2
cacucccgaaaccgcaggcgc

SEQ ID NO: 3957390 - RNA, 13 nt, Human herpesvirus 2
cagaauaaaaggc

SEQ ID NO: 3957391 - RNA, 17 nt, Human herpesvirus 2
cagacccgagcuccggg

SEQ ID NO: 3957392 - RNA, 21 nt, Human herpesvirus 2
cagacgcccuccgaggagauc

SEQ ID NO: 3957393 - RNA, 20 nt, Human herpesvirus 2
cagagacccugccccccggc

SEQ ID NO: 3957394 - RNA, 15 nt, Human herpesvirus 2
cagcacggcggccag

SEQ ID NO: 3957395 - RNA, 15 nt, Human herpesvirus 2
cagccagggcuggga

SEQ ID NO: 3957396 - RNA, 13 nt, Human herpesvirus 2
cagccccuggggc

SEQ ID NO: 3957397 - RNA, 22 nt, Human herpesvirus 2
cagccccuggggcugucgggcg

SEQ ID NO: 3957398 - RNA, 14 nt, Human herpesvirus 2
cagcccggaccccu

SEQ ID NO: 3957399 - RNA, 15 nt, Human herpesvirus 2
cagccuacaucaccc

SEQ ID NO: 3957400 - RNA, 18 nt, Human herpesvirus 2
cagcgcccuuccgcgucc

SEQ ID NO: 3957401 - RNA, 17 nt, Human herpesvirus 2
cagcgcgucggugccgc

SEQ ID NO: 3957402 - RNA, 20 nt, Human herpesvirus 2
cagcguaacgcacccccgga

SEQ ID NO: 3957403 - RNA, 21 nt, Human herpesvirus 2
cagcgugucaaaggccagcag

SEQ ID NO: 3957404 - RNA, 14 nt, Human herpesvirus 2
cagcugcgccagaa

SEQ ID NO: 3957405 - RNA, 20 nt, Human herpesvirus 2
cagcuuuuaacgggccgcca

SEQ ID NO: 3957406 - RNA, 23 nt, Human herpesvirus 2
caggaauggagaagggaaaggaa

SEQ ID NO: 3957407 - RNA, 18 nt, Human herpesvirus 2
caggccaucgccggggac

SEQ ID NO: 3957408 - RNA, 17 nt, Human herpesvirus 2
caggcccgccccaccgc

SEQ ID NO: 3957409 - RNA, 14 nt, Human herpesvirus 2
caggcccgccgacg

SEQ ID NO: 3957410 - RNA, 16 nt, Human herpesvirus 2
caggcgacccgccgcc

SEQ ID NO: 3957411 - RNA, 15 nt, Human herpesvirus 2
caggcgacgccaggc

SEQ ID NO: 3957412 - RNA, 22 nt, Human herpesvirus 2
caggcgcuccagguacugcugc

SEQ ID NO: 3957413 - RNA, 16 nt, Human herpesvirus 2
caggcgucgcucucgg

SEQ ID NO: 3957414 - RNA, 20 nt, Human herpesvirus 2
caggcuggagcucugccugc

SEQ ID NO: 3957415 - RNA, 14 nt, Human herpesvirus 2
cagggaaacagaaa

SEQ ID NO: 3957416 - RNA, 20 nt, Human herpesvirus 2
cagggagccacucccgcggc

SEQ ID NO: 3957417 - RNA, 21 nt, Human herpesvirus 2
cagggagccacucccgcggcc

SEQ ID NO: 3957418 - RNA, 18 nt, Human herpesvirus 2
caggggggcaggcgggcc

SEQ ID NO: 3957419 - RNA, 23 nt, Human herpesvirus 2
caggggggcuuggacugggagcc

SEQ ID NO: 3957420 - RNA, 12 nt, Human herpesvirus 2
cagguggcccuu

SEQ ID NO: 3957421 - RNA, 13 nt, Human herpesvirus 2
caguaacggggga

SEQ ID NO: 3957422 - RNA, 23 nt, Human herpesvirus 2
caguggagccaaaccccccggcc

SEQ ID NO: 3957423 - RNA, 22 nt, Human herpesvirus 2
caguucgcgaccgaucuggagc

SEQ ID NO: 3957424 - RNA, 19 nt, Human herpesvirus 2
caguuucaccgccccagca

SEQ ID NO: 3957425 - RNA, 16 nt, Human herpesvirus 2
cauaaaacccacccuc

SEQ ID NO: 3957426 - RNA, 16 nt, Human herpesvirus 2
cauacaccccacccua

SEQ ID NO: 3957427 - RNA, 13 nt, Human herpesvirus 2
cauacgcggcgug

SEQ ID NO: 3957428 - RNA, 19 nt, Human herpesvirus 2
caucaagaauucccagggc

SEQ ID NO: 3957429 - RNA, 19 nt, Human herpesvirus 2
cauccgaucgaugagccgg

SEQ ID NO: 3957430 - RNA, 16 nt, Human herpesvirus 2
caucgccaacucuguc

SEQ ID NO: 3957431 - RNA, 20 nt, Human herpesvirus 2
caucgucccccgucugccag

SEQ ID NO: 3957432 - RNA, 16 nt, Human herpesvirus 2
caugaccucucgccgc

SEQ ID NO: 3957433 - RNA, 15 nt, Human herpesvirus 2
caugcaaaugggauu

SEQ ID NO: 3957434 - RNA, 18 nt, Human herpesvirus 2
cauggcggggggggggcu

SEQ ID NO: 3957435 - RNA, 13 nt, Human herpesvirus 2
cauuggcaagcaa

SEQ ID NO: 3957436 - RNA, 20 nt, Human herpesvirus 2
cauuguugucguguggugug

SEQ ID NO: 3957437 - RNA, 19 nt, Human herpesvirus 2
cauuugcccgcgggucugc

SEQ ID NO: 3957438 - RNA, 20 nt, Human herpesvirus 2
ccaacagggaguccucgccg

SEQ ID NO: 3957439 - RNA, 18 nt, Human herpesvirus 2
ccaaccccgucucccugc

SEQ ID NO: 3957440 - RNA, 18 nt, Human herpesvirus 2
ccaacgcgggcggucugg

SEQ ID NO: 3957441 - RNA, 21 nt, Human herpesvirus 2
ccaacucauacacgcgcuggc

SEQ ID NO: 3957442 - RNA, 13 nt, Human herpesvirus 2
ccaaggaacccaa

SEQ ID NO: 3957443 - RNA, 11 nt, Human herpesvirus 2
ccacacagaaa

SEQ ID NO: 3957444 - RNA, 12 nt, Human herpesvirus 2
ccacacaguccg

SEQ ID NO: 3957445 - RNA, 17 nt, Human herpesvirus 2
ccacacccccuccccgu

SEQ ID NO: 3957446 - RNA, 20 nt, Human herpesvirus 2
ccaccaauacaccagagccg

SEQ ID NO: 3957447 - RNA, 12 nt, Human herpesvirus 2
ccacccuggguc

SEQ ID NO: 3957448 - RNA, 16 nt, Human herpesvirus 2
ccaccgcgcccacagc

SEQ ID NO: 3957449 - RNA, 18 nt, Human herpesvirus 2
ccaccggccgaggcgccu

SEQ ID NO: 3957450 - RNA, 18 nt, Human herpesvirus 2
ccaccgucccgcccgcca

SEQ ID NO: 3957451 - RNA, 11 nt, Human herpesvirus 2
ccacgcccugc

SEQ ID NO: 3957452 - RNA, 14 nt, Human herpesvirus 2
ccacgcccugcugu

SEQ ID NO: 3957453 - RNA, 15 nt, Human herpesvirus 2
ccacgcugcgcggcg

SEQ ID NO: 3957454 - RNA, 20 nt, Human herpesvirus 2
ccacgucaccgggggccccg

SEQ ID NO: 3957455 - RNA, 19 nt, Human herpesvirus 2
ccagagccccccacguggg

SEQ ID NO: 3957456 - RNA, 14 nt, Human herpesvirus 2
ccagauggggcccc

SEQ ID NO: 3957457 - RNA, 13 nt, Human herpesvirus 2
ccagccccgcagg

SEQ ID NO: 3957458 - RNA, 21 nt, Human herpesvirus 2
ccagcgccggguggcgccucu

SEQ ID NO: 3957459 - RNA, 22 nt, Human herpesvirus 2
ccaggaacucacggcagacgcg

SEQ ID NO: 3957460 - RNA, 18 nt, Human herpesvirus 2
ccaggaggggggcagugc

SEQ ID NO: 3957461 - RNA, 23 nt, Human herpesvirus 2
ccaggcaaacgguaagcagcgcg

SEQ ID NO: 3957462 - RNA, 20 nt, Human herpesvirus 2
ccaggcgacgccaggccccc

SEQ ID NO: 3957463 - RNA, 22 nt, Human herpesvirus 2
ccagggcgucgcuaacgagcgc

SEQ ID NO: 3957464 - RNA, 13 nt, Human herpesvirus 2
ccagggcuucgug

SEQ ID NO: 3957465 - RNA, 13 nt, Human herpesvirus 2
ccagguacugcug

SEQ ID NO: 3957466 - RNA, 14 nt, Human herpesvirus 2
ccaucgcucccagg

SEQ ID NO: 3957467 - RNA, 16 nt, Human herpesvirus 2
ccaugcaacgccgggc

SEQ ID NO: 3957468 - RNA, 18 nt, Human herpesvirus 2
ccaugggccccggucugu

SEQ ID NO: 3957469 - RNA, 17 nt, Human herpesvirus 2
cccaaggcgcugcgccu

SEQ ID NO: 3957470 - RNA, 17 nt, Human herpesvirus 2
cccacggaccuccggga

SEQ ID NO: 3957471 - RNA, 13 nt, Human herpesvirus 2
cccacggaugccg

SEQ ID NO: 3957472 - RNA, 15 nt, Human herpesvirus 2
cccagacccucacag

SEQ ID NO: 3957473 - RNA, 22 nt, Human herpesvirus 2
cccaggaggggggcagugcagu

SEQ ID NO: 3957474 - RNA, 23 nt, Human herpesvirus 2
cccaggaggggggcagugcagua

SEQ ID NO: 3957475 - RNA, 14 nt, Human herpesvirus 2
cccagggagccccg

SEQ ID NO: 3957476 - RNA, 22 nt, Human herpesvirus 2
cccagggcuucguggaagagga

SEQ ID NO: 3957477 - RNA, 16 nt, Human herpesvirus 2
cccagggggcggcgcc

SEQ ID NO: 3957478 - RNA, 10 nt, Human herpesvirus 2
cccagguccc

SEQ ID NO: 3957479 - RNA, 15 nt, Human herpesvirus 2
ccccaaccacccaac

SEQ ID NO: 3957480 - RNA, 14 nt, Human herpesvirus 2
ccccaccccggagg

SEQ ID NO: 3957481 - RNA, 13 nt, Human herpesvirus 2
ccccacuccaccc

SEQ ID NO: 3957482 - RNA, 16 nt, Human herpesvirus 2
ccccagggagccccgg

SEQ ID NO: 3957483 - RNA, 14 nt, Human herpesvirus 2
ccccagggcuucgu

SEQ ID NO: 3957484 - RNA, 12 nt, Human herpesvirus 2
cccccccaucug

SEQ ID NO: 3957485 - RNA, 12 nt, Human herpesvirus 2
ccccccccucca

SEQ ID NO: 3957486 - RNA, 12 nt, Human herpesvirus 2
ccccccccuucc

SEQ ID NO: 3957487 - RNA, 23 nt, Human herpesvirus 2
cccccgaacagccccuggggcug

SEQ ID NO: 3957488 - RNA, 22 nt, Human herpesvirus 2
cccccggccuuugcuuccucgc

SEQ ID NO: 3957489 - RNA, 23 nt, Human herpesvirus 2
cccccggcgcgggcggcgccgcg

SEQ ID NO: 3957490 - RNA, 21 nt, Human herpesvirus 2
cccccucucaaacaaaaacac

SEQ ID NO: 3957491 - RNA, 10 nt, Human herpesvirus 2
cccccucucu

SEQ ID NO: 3957492 - RNA, 18 nt, Human herpesvirus 2
ccccgaagcggccccgac

SEQ ID NO: 3957493 - RNA, 14 nt, Human herpesvirus 2
ccccgagcagcacg

SEQ ID NO: 3957494 - RNA, 15 nt, Human herpesvirus 2
ccccgcguuccggug

SEQ ID NO: 3957495 - RNA, 22 nt, Human herpesvirus 2
ccccgcucccguguaccucugg

SEQ ID NO: 3957496 - RNA, 23 nt, Human herpesvirus 2
ccccgggaggaggcggcgccugc

SEQ ID NO: 3957497 - RNA, 22 nt, Human herpesvirus 2
ccccgggcgaaaaggcccggcc

SEQ ID NO: 3957498 - RNA, 15 nt, Human herpesvirus 2
ccccgugcuccaacu

SEQ ID NO: 3957499 - RNA, 20 nt, Human herpesvirus 2
ccccgugguagucuuccggg

SEQ ID NO: 3957500 - RNA, 17 nt, Human herpesvirus 2
ccccucguucugcugca

SEQ ID NO: 3957501 - RNA, 13 nt, Human herpesvirus 2
ccccuucuccuua

SEQ ID NO: 3957502 - RNA, 23 nt, Human herpesvirus 2
ccccuugacgugguccacccggg

SEQ ID NO: 3957503 - RNA, 23 nt, Human herpesvirus 2
cccgaauccggggcgugcugugc

SEQ ID NO: 3957504 - RNA, 16 nt, Human herpesvirus 2
cccgaccccgccgccg

SEQ ID NO: 3957505 - RNA, 23 nt, Human herpesvirus 2
cccgagcgugcccuuuucugcga

SEQ ID NO: 3957506 - RNA, 15 nt, Human herpesvirus 2
cccgcaacccgcagg

SEQ ID NO: 3957507 - RNA, 17 nt, Human herpesvirus 2
cccgccgacgccucguc

SEQ ID NO: 3957508 - RNA, 17 nt, Human herpesvirus 2
cccgccgggucaccggg

SEQ ID NO: 3957509 - RNA, 16 nt, Human herpesvirus 2
cccgcggaccaccggg

SEQ ID NO: 3957510 - RNA, 19 nt, Human herpesvirus 2
cccggcccugcggccaagc

SEQ ID NO: 3957511 - RNA, 17 nt, Human herpesvirus 2
cccggcgaccgccccgc

SEQ ID NO: 3957512 - RNA, 18 nt, Human herpesvirus 2
cccggcgaccgccccgcg

SEQ ID NO: 3957513 - RNA, 21 nt, Human herpesvirus 2
cccggcgaccgccccgcgccg

SEQ ID NO: 3957514 - RNA, 15 nt, Human herpesvirus 2
cccggcggccccggc

SEQ ID NO: 3957515 - RNA, 21 nt, Human herpesvirus 2
cccggcggccgcauauacugc

SEQ ID NO: 3957516 - RNA, 19 nt, Human herpesvirus 2
cccgggcgagcuggcccug

SEQ ID NO: 3957517 - RNA, 23 nt, Human herpesvirus 2
cccgggggggggcaagugcagua

SEQ ID NO: 3957518 - RNA, 16 nt, Human herpesvirus 2
cccguacuacccuuuc

SEQ ID NO: 3957519 - RNA, 17 nt, Human herpesvirus 2
cccguguaccucugggc

SEQ ID NO: 3957520 - RNA, 13 nt, Human herpesvirus 2
cccgugugggagg

SEQ ID NO: 3957521 - RNA, 13 nt, Human herpesvirus 2
cccuagaggcugu

SEQ ID NO: 3957522 - RNA, 15 nt, Human herpesvirus 2
cccucccgcaccccc

SEQ ID NO: 3957523 - RNA, 19 nt, Human herpesvirus 2
cccucucaacgcccaggcc

SEQ ID NO: 3957524 - RNA, 21 nt, Human herpesvirus 2
cccucugcuuuuggugcgucu

SEQ ID NO: 3957525 - RNA, 17 nt, Human herpesvirus 2
cccugccccgcccccuc

SEQ ID NO: 3957526 - RNA, 13 nt, Human herpesvirus 2
cccugcgucgccc

SEQ ID NO: 3957527 - RNA, 23 nt, Human herpesvirus 2
cccugggccgcucguuccucacg

SEQ ID NO: 3957528 - RNA, 21 nt, Human herpesvirus 2
cccuguccccgccccccccag

SEQ ID NO: 3957529 - RNA, 20 nt, Human herpesvirus 2
cccuuucuuuucccccuacc

SEQ ID NO: 3957530 - RNA, 15 nt, Human herpesvirus 2
ccgaacagccccugg

SEQ ID NO: 3957531 - RNA, 15 nt, Human herpesvirus 2
ccgaacggaaggccu

SEQ ID NO: 3957532 - RNA, 15 nt, Human herpesvirus 2
ccgaagcggccccga

SEQ ID NO: 3957533 - RNA, 18 nt, Human herpesvirus 2
ccgaaggaagccgccccc

SEQ ID NO: 3957534 - RNA, 16 nt, Human herpesvirus 2
ccgaccagcgccgggu

SEQ ID NO: 3957535 - RNA, 15 nt, Human herpesvirus 2
ccgaccccgccgccg

SEQ ID NO: 3957536 - RNA, 13 nt, Human herpesvirus 2
ccgacccuguggc

SEQ ID NO: 3957537 - RNA, 18 nt, Human herpesvirus 2
ccgaccucgucgcgcgca

SEQ ID NO: 3957538 - RNA, 15 nt, Human herpesvirus 2
ccgacggcggggccc

SEQ ID NO: 3957539 - RNA, 14 nt, Human herpesvirus 2
ccgagaauuucuua

SEQ ID NO: 3957540 - RNA, 17 nt, Human herpesvirus 2
ccgagccgcugugccag

SEQ ID NO: 3957541 - RNA, 15 nt, Human herpesvirus 2
ccgagggcagguccc

SEQ ID NO: 3957542 - RNA, 14 nt, Human herpesvirus 2
ccgaguucccccgg

SEQ ID NO: 3957543 - RNA, 16 nt, Human herpesvirus 2
ccgauagccuccgagg

SEQ ID NO: 3957544 - RNA, 17 nt, Human herpesvirus 2
ccgaucgaugagccggu

SEQ ID NO: 3957545 - RNA, 17 nt, Human herpesvirus 2
ccgcaccggggcggcga

SEQ ID NO: 3957546 - RNA, 14 nt, Human herpesvirus 2
ccgcaggcgcgcca

SEQ ID NO: 3957547 - RNA, 22 nt, Human herpesvirus 2
ccgcaguuucaccgccccagca

SEQ ID NO: 3957548 - RNA, 17 nt, Human herpesvirus 2
ccgcauauacugcuggg

SEQ ID NO: 3957549 - RNA, 13 nt, Human herpesvirus 2
ccgccaacaccag

SEQ ID NO: 3957550 - RNA, 14 nt, Human herpesvirus 2
ccgcccgcagcugc

SEQ ID NO: 3957551 - RNA, 15 nt, Human herpesvirus 2
ccgcccgccccaggg

SEQ ID NO: 3957552 - RNA, 13 nt, Human herpesvirus 2
ccgccggcgguga

SEQ ID NO: 3957553 - RNA, 14 nt, Human herpesvirus 2
ccgccuaccagccc

SEQ ID NO: 3957554 - RNA, 23 nt, Human herpesvirus 2
ccgcgacggccccggccgccucc

SEQ ID NO: 3957555 - RNA, 16 nt, Human herpesvirus 2
ccgcgaugaccucccg

SEQ ID NO: 3957556 - RNA, 17 nt, Human herpesvirus 2
ccgcgaugaccucccgg

SEQ ID NO: 3957557 - RNA, 14 nt, Human herpesvirus 2
ccgcgauuccgagg

SEQ ID NO: 3957558 - RNA, 19 nt, Human herpesvirus 2
ccgcgauuccgagggcagg

SEQ ID NO: 3957559 - RNA, 16 nt, Human herpesvirus 2
ccgcggacagccaggg

SEQ ID NO: 3957560 - RNA, 22 nt, Human herpesvirus 2
ccgcggucgcgcgggccguggc

SEQ ID NO: 3957561 - RNA, 13 nt, Human herpesvirus 2
ccgcucccgccuc

SEQ ID NO: 3957562 - RNA, 22 nt, Human herpesvirus 2
ccgcucgucccccgaggccccc

SEQ ID NO: 3957563 - RNA, 16 nt, Human herpesvirus 2
ccgcugguuucucugc

SEQ ID NO: 3957564 - RNA, 16 nt, Human herpesvirus 2
ccgcuguggcccuggc

SEQ ID NO: 3957565 - RNA, 19 nt, Human herpesvirus 2
ccgcuguggcccuggcgga

SEQ ID NO: 3957566 - RNA, 16 nt, Human herpesvirus 2
ccggaaccccucuggg

SEQ ID NO: 3957567 - RNA, 19 nt, Human herpesvirus 2
ccggaccccgcugcugugc

SEQ ID NO: 3957568 - RNA, 18 nt, Human herpesvirus 2
ccggcccucccgcacccc

SEQ ID NO: 3957569 - RNA, 13 nt, Human herpesvirus 2
ccggcgcgggcgg

SEQ ID NO: 3957570 - RNA, 15 nt, Human herpesvirus 2
ccggcgcgggcggcg

SEQ ID NO: 3957571 - RNA, 22 nt, Human herpesvirus 2
ccggcggccgcauauacugcug

SEQ ID NO: 3957572 - RNA, 13 nt, Human herpesvirus 2
ccggcggcgggga

SEQ ID NO: 3957573 - RNA, 19 nt, Human herpesvirus 2
ccggcgugggugacuggga

SEQ ID NO: 3957574 - RNA, 22 nt, Human herpesvirus 2
ccggcguuucugaccggcgccg

SEQ ID NO: 3957575 - RNA, 15 nt, Human herpesvirus 2
ccgggcagccgggcc

SEQ ID NO: 3957576 - RNA, 13 nt, Human herpesvirus 2
ccgggcccggccg

SEQ ID NO: 3957577 - RNA, 15 nt, Human herpesvirus 2
ccgggcccggccgcg

SEQ ID NO: 3957578 - RNA, 20 nt, Human herpesvirus 2
ccgggcgaaaaggcccggcc

SEQ ID NO: 3957579 - RNA, 19 nt, Human herpesvirus 2
ccggggacacgcggcgggu

SEQ ID NO: 3957580 - RNA, 18 nt, Human herpesvirus 2
ccggggaccgcagucugg

SEQ ID NO: 3957581 - RNA, 17 nt, Human herpesvirus 2
ccggggcacgcggucag

SEQ ID NO: 3957582 - RNA, 20 nt, Human herpesvirus 2
ccggggccguggggccccag

SEQ ID NO: 3957583 - RNA, 13 nt, Human herpesvirus 2
ccggggcucuucu

SEQ ID NO: 3957584 - RNA, 13 nt, Human herpesvirus 2
ccgggggccccgg

SEQ ID NO: 3957585 - RNA, 21 nt, Human herpesvirus 2
ccgggguuuccccggcccacc

SEQ ID NO: 3957586 - RNA, 12 nt, Human herpesvirus 2
ccggucucccuc

SEQ ID NO: 3957587 - RNA, 16 nt, Human herpesvirus 2
ccguaucagcacccca

SEQ ID NO: 3957588 - RNA, 18 nt, Human herpesvirus 2
ccgucacgagccccuggg

SEQ ID NO: 3957589 - RNA, 19 nt, Human herpesvirus 2
ccgucgccgccggccacgc

SEQ ID NO: 3957590 - RNA, 16 nt, Human herpesvirus 2
ccgucuuugggccccg

SEQ ID NO: 3957591 - RNA, 18 nt, Human herpesvirus 2
ccgucuuugggccccgcc

SEQ ID NO: 3957592 - RNA, 19 nt, Human herpesvirus 2
ccgugaugucgggcguggg

SEQ ID NO: 3957593 - RNA, 19 nt, Human herpesvirus 2
ccguggcgccuggggacua

SEQ ID NO: 3957594 - RNA, 13 nt, Human herpesvirus 2
ccguggggcccca

SEQ ID NO: 3957595 - RNA, 17 nt, Human herpesvirus 2
ccguguaccucugggcc

SEQ ID NO: 3957596 - RNA, 21 nt, Human herpesvirus 2
caggcccucgcugcucucccg

SEQ ID NO: 3957597 - RNA, 15 nt, Human herpesvirus 2
caggccgcccccagc

SEQ ID NO: 3957598 - RNA, 14 nt, Human herpesvirus 2
caggcgcugcugcg

SEQ ID NO: 3957599 - RNA, 23 nt, Human herpesvirus 2
caggcgucgaucucaucaaacac

SEQ ID NO: 3957600 - RNA, 13 nt, Human herpesvirus 2
cagggaggccaga

SEQ ID NO: 3957601 - RNA, 14 nt, Human herpesvirus 2
caggggcccgccgc

SEQ ID NO: 3957602 - RNA, 11 nt, Human herpesvirus 2
caguggagcca

SEQ ID NO: 3957603 - RNA, 22 nt, Human herpesvirus 2
cagugggugcucggggacagag

SEQ ID NO: 3957604 - RNA, 16 nt, Human herpesvirus 2
cauacgauauucgcgu

SEQ ID NO: 3957605 - RNA, 14 nt, Human herpesvirus 2
caucaggcucauug

SEQ ID NO: 3957606 - RNA, 16 nt, Human herpesvirus 2
cauccggucgacgucc

SEQ ID NO: 3957607 - RNA, 17 nt, Human herpesvirus 2
caucgcaagccacccug

SEQ ID NO: 3957608 - RNA, 15 nt, Human herpesvirus 2
caugcgacggcgucu

SEQ ID NO: 3957609 - RNA, 23 nt, Human herpesvirus 2
cauggauaacagcuacccgcauc

SEQ ID NO: 3957610 - RNA, 13 nt, Human herpesvirus 2
cauggggaacccc

SEQ ID NO: 3957611 - RNA, 17 nt, Human herpesvirus 2
cauggggaacccccaga

SEQ ID NO: 3957612 - RNA, 17 nt, Human herpesvirus 2
cauuuaggauggcugcu

SEQ ID NO: 3957613 - RNA, 20 nt, Human herpesvirus 2
ccaaccuggcacagcgggca

SEQ ID NO: 3957614 - RNA, 22 nt, Human herpesvirus 2
ccaacgcgcuguggcgcgcccc

SEQ ID NO: 3957615 - RNA, 17 nt, Human herpesvirus 2
ccaagcuaaggcgcccg

SEQ ID NO: 3957616 - RNA, 12 nt, Human herpesvirus 2
ccacacacaccc

SEQ ID NO: 3957617 - RNA, 17 nt, Human herpesvirus 2
ccacacacacccccugu

SEQ ID NO: 3957618 - RNA, 12 nt, Human herpesvirus 2
ccacagccaccu

SEQ ID NO: 3957619 - RNA, 12 nt, Human herpesvirus 2
ccaccaaccugg

SEQ ID NO: 3957620 - RNA, 15 nt, Human herpesvirus 2
ccaccccgccgcagc

SEQ ID NO: 3957621 - RNA, 12 nt, Human herpesvirus 2
ccaccgcacccg

SEQ ID NO: 3957622 - RNA, 15 nt, Human herpesvirus 2
ccaccgcucacccac

SEQ ID NO: 3957623 - RNA, 15 nt, Human herpesvirus 2
ccacggaccuccggg

SEQ ID NO: 3957624 - RNA, 20 nt, Human herpesvirus 2
ccacggucaggaccagggac

SEQ ID NO: 3957625 - RNA, 15 nt, Human herpesvirus 2
ccacggucagucugg

SEQ ID NO: 3957626 - RNA, 16 nt, Human herpesvirus 2
ccacguccaccuuggc

SEQ ID NO: 3957627 - RNA, 17 nt, Human herpesvirus 2
ccacgugcacagccugg

SEQ ID NO: 3957628 - RNA, 22 nt, Human herpesvirus 2
ccacuuccuauaaacucucccc

SEQ ID NO: 3957629 - RNA, 23 nt, Human herpesvirus 2
ccagacgaagucacccggguccc

SEQ ID NO: 3957630 - RNA, 15 nt, Human herpesvirus 2
ccagacgcccuccga

SEQ ID NO: 3957631 - RNA, 18 nt, Human herpesvirus 2
ccagcagcuugcggggcu

SEQ ID NO: 3957632 - RNA, 16 nt, Human herpesvirus 2
ccagccccgcaggcag

SEQ ID NO: 3957633 - RNA, 15 nt, Human herpesvirus 2
ccagcgcacccuggc

SEQ ID NO: 3957634 - RNA, 16 nt, Human herpesvirus 2
ccagcuuucccuccac

SEQ ID NO: 3957635 - RNA, 16 nt, Human herpesvirus 2
ccaggaacucacggca

SEQ ID NO: 3957636 - RNA, 20 nt, Human herpesvirus 2
ccaggaggggggcagugcag

SEQ ID NO: 3957637 - RNA, 17 nt, Human herpesvirus 2
ccaggcgacgccaggcc

SEQ ID NO: 3957638 - RNA, 13 nt, Human herpesvirus 2
ccagguggcccuu

SEQ ID NO: 3957639 - RNA, 15 nt, Human herpesvirus 2
ccauaacgcgcccgc

SEQ ID NO: 3957640 - RNA, 17 nt, Human herpesvirus 2
ccauacaaauuaaauac

SEQ ID NO: 3957641 - RNA, 19 nt, Human herpesvirus 2
ccauauguacgcguacccc

SEQ ID NO: 3957642 - RNA, 16 nt, Human herpesvirus 2
ccaugaccucgccccc

SEQ ID NO: 3957643 - RNA, 17 nt, Human herpesvirus 2
ccaugaccucucgccgc

SEQ ID NO: 3957644 - RNA, 17 nt, Human herpesvirus 2
ccaugcaacgccgggcg

SEQ ID NO: 3957645 - RNA, 12 nt, Human herpesvirus 2
ccaugggccccg

SEQ ID NO: 3957646 - RNA, 14 nt, Human herpesvirus 2
cccacagccaccuc

SEQ ID NO: 3957647 - RNA, 19 nt, Human herpesvirus 2
cccacagcugcgccagaaa

SEQ ID NO: 3957648 - RNA, 17 nt, Human herpesvirus 2
cccacccuuguuggagc

SEQ ID NO: 3957649 - RNA, 15 nt, Human herpesvirus 2
cccaccgcaccacca

SEQ ID NO: 3957650 - RNA, 12 nt, Human herpesvirus 2
cccagacacggu

SEQ ID NO: 3957651 - RNA, 15 nt, Human herpesvirus 2
cccagcacaggcagg

SEQ ID NO: 3957652 - RNA, 21 nt, Human herpesvirus 2
cccagcgcggacgcggccaga

SEQ ID NO: 3957653 - RNA, 19 nt, Human herpesvirus 2
cccagcuuucccuccaccc

SEQ ID NO: 3957654 - RNA, 11 nt, Human herpesvirus 2
cccagggcacc

SEQ ID NO: 3957655 - RNA, 21 nt, Human herpesvirus 2
ccccaaaccccgguuggggcg

SEQ ID NO: 3957656 - RNA, 15 nt, Human herpesvirus 2
ccccagcuuucccuc

SEQ ID NO: 3957657 - RNA, 18 nt, Human herpesvirus 2
ccccaggaggggggcagu

SEQ ID NO: 3957658 - RNA, 19 nt, Human herpesvirus 2
ccccaggaggggggcagug

SEQ ID NO: 3957659 - RNA, 23 nt, Human herpesvirus 2
ccccaggaggggggcagugcagu

SEQ ID NO: 3957660 - RNA, 23 nt, Human herpesvirus 2
cccccaggaggggggcagugcag

SEQ ID NO: 3957661 - RNA, 12 nt, Human herpesvirus 2
ccccccaucugc

SEQ ID NO: 3957662 - RNA, 12 nt, Human herpesvirus 2
cccccggaagga

SEQ ID NO: 3957663 - RNA, 12 nt, Human herpesvirus 2
cccccgggggug

SEQ ID NO: 3957664 - RNA, 19 nt, Human herpesvirus 2
cccccucccccgcuucugg

SEQ ID NO: 3957665 - RNA, 20 nt, Human herpesvirus 2
cccccugaguugcgccggca

SEQ ID NO: 3957666 - RNA, 13 nt, Human herpesvirus 2
ccccgagcagcac

SEQ ID NO: 3957667 - RNA, 20 nt, Human herpesvirus 2
ccccgaguucccccgggacu

SEQ ID NO: 3957668 - RNA, 19 nt, Human herpesvirus 2
ccccgcccccucucccaca

SEQ ID NO: 3957669 - RNA, 11 nt, Human herpesvirus 2
ccccgccgggu

SEQ ID NO: 3957670 - RNA, 21 nt, Human herpesvirus 2
ccccgcgcacgcgcgacugcc

SEQ ID NO: 3957671 - RNA, 23 nt, Human herpesvirus 2
ccccgcucguggcgggcgcggca

SEQ ID NO: 3957672 - RNA, 23 nt, Human herpesvirus 2
ccccggaggggcuccucagcgcg

SEQ ID NO: 3957673 - RNA, 15 nt, Human herpesvirus 2
ccccggcggccccgg

SEQ ID NO: 3957674 - RNA, 22 nt, Human herpesvirus 2
ccccgggcguuauaagccgccg

SEQ ID NO: 3957675 - RNA, 15 nt, Human herpesvirus 2
ccccggggcccgcag

SEQ ID NO: 3957676 - RNA, 16 nt, Human herpesvirus 2
ccccggggccgucgcg

SEQ ID NO: 3957677 - RNA, 15 nt, Human herpesvirus 2
ccccggguuccccga

SEQ ID NO: 3957678 - RNA, 22 nt, Human herpesvirus 2
ccccgguuggggcgggcagccg

SEQ ID NO: 3957679 - RNA, 17 nt, Human herpesvirus 2
ccccgucugucgccucu

SEQ ID NO: 3957680 - RNA, 23 nt, Human herpesvirus 2
ccccugggugucgaccgcugucg

SEQ ID NO: 3957681 - RNA, 13 nt, Human herpesvirus 2
ccccuuccguccc

SEQ ID NO: 3957682 - RNA, 20 nt, Human herpesvirus 2
cccgaacagccccuggggcu

SEQ ID NO: 3957683 - RNA, 22 nt, Human herpesvirus 2
cccgaacagccccuggggcugu

SEQ ID NO: 3957684 - RNA, 15 nt, Human herpesvirus 2
cccgaacggaaggcc

SEQ ID NO: 3957685 - RNA, 14 nt, Human herpesvirus 2
cccgcaccagcucg

SEQ ID NO: 3957686 - RNA, 23 nt, Human herpesvirus 2
cccgcacgaagugaaccaacugc

SEQ ID NO: 3957687 - RNA, 12 nt, Human herpesvirus 2
cccgccauggcg

SEQ ID NO: 3957688 - RNA, 16 nt, Human herpesvirus 2
cccgccccgccccacc

SEQ ID NO: 3957689 - RNA, 12 nt, Human herpesvirus 2
cccgccgcagcu

SEQ ID NO: 3957690 - RNA, 21 nt, Human herpesvirus 2
cccgccgggucaccggggcgc

SEQ ID NO: 3957691 - RNA, 17 nt, Human herpesvirus 2
cccgcggaccaccgggc

SEQ ID NO: 3957692 - RNA, 17 nt, Human herpesvirus 2
cccgcggcccugagccg

SEQ ID NO: 3957693 - RNA, 19 nt, Human herpesvirus 2
cccgcguauauauccgcga

SEQ ID NO: 3957694 - RNA, 19 nt, Human herpesvirus 2
cccgcuggagccccugggg

SEQ ID NO: 3957695 - RNA, 23 nt, Human herpesvirus 2
cccggcggccgcauauacugcug

SEQ ID NO: 3957696 - RNA, 23 nt, Human herpesvirus 2
cccggcguggagcgccgggccuc

SEQ ID NO: 3957697 - RNA, 17 nt, Human herpesvirus 2
cccggggcccgcagcuu

SEQ ID NO: 3957698 - RNA, 13 nt, Human herpesvirus 2
cccggggggagga

SEQ ID NO: 3957699 - RNA, 22 nt, Human herpesvirus 2
cccgggggggggcaagugcagu

SEQ ID NO: 3957700 - RNA, 13 nt, Human herpesvirus 2
cccggguccgggg

SEQ ID NO: 3957701 - RNA, 15 nt, Human herpesvirus 2
cccggucugugggug

SEQ ID NO: 3957702 - RNA, 13 nt, Human herpesvirus 2
cccgucccggcag

SEQ ID NO: 3957703 - RNA, 13 nt, Human herpesvirus 2
cccgucugccagg

SEQ ID NO: 3957704 - RNA, 12 nt, Human herpesvirus 2
cccguggcccac

SEQ ID NO: 3957705 - RNA, 16 nt, Human herpesvirus 2
cccguguaccucuggg

SEQ ID NO: 3957706 - RNA, 16 nt, Human herpesvirus 2
cccgugucgcuccccu

SEQ ID NO: 3957707 - RNA, 12 nt, Human herpesvirus 2
cccuacccuucc

SEQ ID NO: 3957708 - RNA, 16 nt, Human herpesvirus 2
cccuagccuucggcca

SEQ ID NO: 3957709 - RNA, 22 nt, Human herpesvirus 2
cccuauacgcgguauggcugcc

SEQ ID NO: 3957710 - RNA, 13 nt, Human herpesvirus 2
cccucaccccucc

SEQ ID NO: 3957711 - RNA, 20 nt, Human herpesvirus 2
cccucccgcacccccgcguu

SEQ ID NO: 3957712 - RNA, 21 nt, Human herpesvirus 2
ccgcauauacugcugggccau

SEQ ID NO: 3957713 - RNA, 22 nt, Human herpesvirus 2
ccgcaucaguccgcgcggggcg

SEQ ID NO: 3957714 - RNA, 16 nt, Human herpesvirus 2
ccgccagcgcccuucc

SEQ ID NO: 3957715 - RNA, 15 nt, Human herpesvirus 2
ccgcccccucuccca

SEQ ID NO: 3957716 - RNA, 22 nt, Human herpesvirus 2
ccgcgcacgcgcgacugccucc

SEQ ID NO: 3957717 - RNA, 17 nt, Human herpesvirus 2
ccgcggccauccugccc

SEQ ID NO: 3957718 - RNA, 20 nt, Human herpesvirus 2
ccgcggcccugagccgcgcg

SEQ ID NO: 3957719 - RNA, 13 nt, Human herpesvirus 2
ccgcgggaggaag

SEQ ID NO: 3957720 - RNA, 14 nt, Human herpesvirus 2
ccgcgggaggaugu

SEQ ID NO: 3957721 - RNA, 16 nt, Human herpesvirus 2
ccgcgggaggcggugg

SEQ ID NO: 3957722 - RNA, 13 nt, Human herpesvirus 2
ccgcgucugcuac

SEQ ID NO: 3957723 - RNA, 16 nt, Human herpesvirus 2
ccgcgugcuuccgcac

SEQ ID NO: 3957724 - RNA, 13 nt, Human herpesvirus 2
ccgcugcugugca

SEQ ID NO: 3957725 - RNA, 22 nt, Human herpesvirus 2
ccggacugcagccccggucccc

SEQ ID NO: 3957726 - RNA, 21 nt, Human herpesvirus 2
ccggaggaaacccccgacccc

SEQ ID NO: 3957727 - RNA, 17 nt, Human herpesvirus 2
ccggcgguucgcgugcg

SEQ ID NO: 3957728 - RNA, 20 nt, Human herpesvirus 2
ccgggacgagccaaaccagc

SEQ ID NO: 3957729 - RNA, 14 nt, Human herpesvirus 2
ccgggagccgcggc

SEQ ID NO: 3957730 - RNA, 13 nt, Human herpesvirus 2
ccgggagcguggg

SEQ ID NO: 3957731 - RNA, 17 nt, Human herpesvirus 2
ccgggcgagcuggcccu

SEQ ID NO: 3957732 - RNA, 18 nt, Human herpesvirus 2
ccgggcgagcuggcccug

SEQ ID NO: 3957733 - RNA, 14 nt, Human herpesvirus 2
ccggggaaacaggc

SEQ ID NO: 3957734 - RNA, 14 nt, Human herpesvirus 2
ccggggagggcagg

SEQ ID NO: 3957735 - RNA, 16 nt, Human herpesvirus 2
ccggggagggcagggc

SEQ ID NO: 3957736 - RNA, 18 nt, Human herpesvirus 2
ccggggcgaacgggggau

SEQ ID NO: 3957737 - RNA, 20 nt, Human herpesvirus 2
ccgggggccugguggcaccu

SEQ ID NO: 3957738 - RNA, 11 nt, Human herpesvirus 2
ccgggggcgcu

SEQ ID NO: 3957739 - RNA, 23 nt, Human herpesvirus 2
ccggggggacgcgagccuguguc

SEQ ID NO: 3957740 - RNA, 14 nt, Human herpesvirus 2
ccggucccuucccc

SEQ ID NO: 3957741 - RNA, 20 nt, Human herpesvirus 2
ccggugucucgcggcccggc

SEQ ID NO: 3957742 - RNA, 16 nt, Human herpesvirus 2
ccguccuuuccacccc

SEQ ID NO: 3957743 - RNA, 13 nt, Human herpesvirus 2
ccgucgcuccggc

SEQ ID NO: 3957744 - RNA, 18 nt, Human herpesvirus 2
ccgugcugggcgcgagcc

SEQ ID NO: 3957745 - RNA, 19 nt, Human herpesvirus 2
ccgugcugggcgcgagcca

SEQ ID NO: 3957746 - RNA, 22 nt, Human herpesvirus 2
ccgugcugggcgcgagccaggc

SEQ ID NO: 3957747 - RNA, 14 nt, Human herpesvirus 2
ccguggggccccag

SEQ ID NO: 3957748 - RNA, 23 nt, Human herpesvirus 2
ccguggguuacgcaggcccucgc

SEQ ID NO: 3957749 - RNA, 22 nt, Human herpesvirus 2
ccguguuagggaagucucuugg

SEQ ID NO: 3957750 - RNA, 12 nt, Human herpesvirus 2
ccuacgcacccu

SEQ ID NO: 3957751 - RNA, 15 nt, Human herpesvirus 2
ccuagaggcuguccg

SEQ ID NO: 3957752 - RNA, 19 nt, Human herpesvirus 2
ccucacgguccucaccgag

SEQ ID NO: 3957753 - RNA, 15 nt, Human herpesvirus 2
ccucccagugccccg

SEQ ID NO: 3957754 - RNA, 14 nt, Human herpesvirus 2
ccuccgaggagauc

SEQ ID NO: 3957755 - RNA, 16 nt, Human herpesvirus 2
ccuccgcccuccgcca

SEQ ID NO: 3957756 - RNA, 18 nt, Human herpesvirus 2
ccuccgcccuccgccagc

SEQ ID NO: 3957757 - RNA, 21 nt, Human herpesvirus 2
ccuccuucgccgacgccuucc

SEQ ID NO: 3957758 - RNA, 19 nt, Human herpesvirus 2
ccucgagcucuucggcugc

SEQ ID NO: 3957759 - RNA, 13 nt, Human herpesvirus 2
ccucgcugcgccg

SEQ ID NO: 3957760 - RNA, 17 nt, Human herpesvirus 2
ccucgggccuacgcacc

SEQ ID NO: 3957761 - RNA, 21 nt, Human herpesvirus 2
ccucggggacgcacggcaccc

SEQ ID NO: 3957762 - RNA, 20 nt, Human herpesvirus 2
ccucgggggcagggggaggu

SEQ ID NO: 3957763 - RNA, 15 nt, Human herpesvirus 2
ccucugcgcgcggcg

SEQ ID NO: 3957764 - RNA, 17 nt, Human herpesvirus 2
ccugcgucgccccgugc

SEQ ID NO: 3957765 - RNA, 23 nt, Human herpesvirus 2
ccuggcgauccugggccuguggg

SEQ ID NO: 3957766 - RNA, 14 nt, Human herpesvirus 2
ccuggcggacggcc

SEQ ID NO: 3957767 - RNA, 21 nt, Human herpesvirus 2
ccuggcggccccuguuggagc

SEQ ID NO: 3957768 - RNA, 12 nt, Human herpesvirus 2
ccuggcucgccg

SEQ ID NO: 3957769 - RNA, 14 nt, Human herpesvirus 2
ccuggggcuccugc

SEQ ID NO: 3957770 - RNA, 13 nt, Human herpesvirus 2
ccuggggcugucg

SEQ ID NO: 3957771 - RNA, 23 nt, Human herpesvirus 2
ccuggguccgggggccugguggc

SEQ ID NO: 3957772 - RNA, 15 nt, Human herpesvirus 2
ccuggucacaaaagg

SEQ ID NO: 3957773 - RNA, 19 nt, Human herpesvirus 2
ccuguacgacagcggggac

SEQ ID NO: 3957774 - RNA, 14 nt, Human herpesvirus 2
ccugugucagcucc

SEQ ID NO: 3957775 - RNA, 13 nt, Human herpesvirus 2
ccuguugggcaca

SEQ ID NO: 3957776 - RNA, 14 nt, Human herpesvirus 2
ccuguuuccuuucc

SEQ ID NO: 3957777 - RNA, 12 nt, Human herpesvirus 2
ccuucagccugg

SEQ ID NO: 3957778 - RNA, 14 nt, Human herpesvirus 2
ccuucagccuggac

SEQ ID NO: 3957779 - RNA, 14 nt, Human herpesvirus 2
ccuuccccaccacc

SEQ ID NO: 3957780 - RNA, 17 nt, Human herpesvirus 2
ccuucgcgagggccccg

SEQ ID NO: 3957781 - RNA, 18 nt, Human herpesvirus 2
ccuuguuggagcggucgc

SEQ ID NO: 3957782 - RNA, 22 nt, Human herpesvirus 2
ccuuuccuuaaaaggcacccca

SEQ ID NO: 3957783 - RNA, 22 nt, Human herpesvirus 2
ccuuuuuucuuuuucucuuccc

SEQ ID NO: 3957784 - RNA, 12 nt, Human herpesvirus 2
cgaacacugccu

SEQ ID NO: 3957785 - RNA, 14 nt, Human herpesvirus 2
cgaacagccccugg

SEQ ID NO: 3957786 - RNA, 23 nt, Human herpesvirus 2
cgaauccggggcgugcugugccc

SEQ ID NO: 3957787 - RNA, 21 nt, Human herpesvirus 2
cgaccaaaacggaccccgcgu

SEQ ID NO: 3957788 - RNA, 18 nt, Human herpesvirus 2
cgaccagcguccugcgcg

SEQ ID NO: 3957789 - RNA, 14 nt, Human herpesvirus 2
cgaccccccggguu

SEQ ID NO: 3957790 - RNA, 11 nt, Human herpesvirus 2
cgacccgccuc

SEQ ID NO: 3957791 - RNA, 16 nt, Human herpesvirus 2
cgacccuguggcgggc

SEQ ID NO: 3957792 - RNA, 21 nt, Human herpesvirus 2
cgaccgccggccccaccgucu

SEQ ID NO: 3957793 - RNA, 19 nt, Human herpesvirus 2
cgaccgggcggugcccauc

SEQ ID NO: 3957794 - RNA, 16 nt, Human herpesvirus 2
cgacgaggccuucccg

SEQ ID NO: 3957795 - RNA, 22 nt, Human herpesvirus 2
cgacgagguccgucguuugggg

SEQ ID NO: 3957796 - RNA, 13 nt, Human herpesvirus 2
cgacgccaggccc

SEQ ID NO: 3957797 - RNA, 17 nt, Human herpesvirus 2
cgacggcuccugccacc

SEQ ID NO: 3957798 - RNA, 14 nt, Human herpesvirus 2
cgacgugccgggga

SEQ ID NO: 3957799 - RNA, 15 nt, Human herpesvirus 2
cgagaacgagauggu

SEQ ID NO: 3957800 - RNA, 23 nt, Human herpesvirus 2
cgagacauggggaacccccagac

SEQ ID NO: 3957801 - RNA, 20 nt, Human herpesvirus 2
cgagccccgcgaccaccaag

SEQ ID NO: 3957802 - RNA, 16 nt, Human herpesvirus 2
cgagccgcugugccag

SEQ ID NO: 3957803 - RNA, 14 nt, Human herpesvirus 2
cgagcggugucgcg

SEQ ID NO: 3957804 - RNA, 19 nt, Human herpesvirus 2
cgagcguggccggcgaccc

SEQ ID NO: 3957805 - RNA, 20 nt, Human herpesvirus 2
gcacguaaaacacgggcgcu

SEQ ID NO: 3957806 - RNA, 18 nt, Human herpesvirus 2
gcacgugcgucuucccag

SEQ ID NO: 3957807 - RNA, 16 nt, Human herpesvirus 2
gcagccccgguccccc

SEQ ID NO: 3957808 - RNA, 19 nt, Human herpesvirus 2
gcagccccggucccccgga

SEQ ID NO: 3957809 - RNA, 17 nt, Human herpesvirus 2
gcagcgugucaaaggcc

SEQ ID NO: 3957810 - RNA, 15 nt, Human herpesvirus 2
gcagcucgcccccgu

SEQ ID NO: 3957811 - RNA, 18 nt, Human herpesvirus 2
gcaggagggcgggccacg

SEQ ID NO: 3957812 - RNA, 17 nt, Human herpesvirus 2
gcaggcgcgcggguccc

SEQ ID NO: 3957813 - RNA, 14 nt, Human herpesvirus 2
gcaggcggcgggga

SEQ ID NO: 3957814 - RNA, 20 nt, Human herpesvirus 2
gcaggcgggcccaucacugu

SEQ ID NO: 3957815 - RNA, 13 nt, Human herpesvirus 2
gcaugcgacggcg

SEQ ID NO: 3957816 - RNA, 19 nt, Human herpesvirus 2
gcauggaccccccacgccc

SEQ ID NO: 3957817 - RNA, 12 nt, Human herpesvirus 2
gccaacucuguc

SEQ ID NO: 3957818 - RNA, 13 nt, Human herpesvirus 2
gccaacucugucu

SEQ ID NO: 3957819 - RNA, 23 nt, Human herpesvirus 2
gccaacucugucuucguguggcg

SEQ ID NO: 3957820 - RNA, 20 nt, Human herpesvirus 2
gccaccgucccgcccgccag

SEQ ID NO: 3957821 - RNA, 13 nt, Human herpesvirus 2
gccacucccgcgg

SEQ ID NO: 3957822 - RNA, 18 nt, Human herpesvirus 2
gccagauggggccccggu

SEQ ID NO: 3957823 - RNA, 22 nt, Human herpesvirus 2
gccagcacgaccagggaggcca

SEQ ID NO: 3957824 - RNA, 22 nt, Human herpesvirus 2
gccaggaacuccagcuuggccg

SEQ ID NO: 3957825 - RNA, 14 nt, Human herpesvirus 2
gccagugcauccca

SEQ ID NO: 3957826 - RNA, 17 nt, Human herpesvirus 2
gccauccucaaacaggc

SEQ ID NO: 3957827 - RNA, 23 nt, Human herpesvirus 2
gcccaacccaaccgacucccucc

SEQ ID NO: 3957828 - RNA, 14 nt, Human herpesvirus 2
gcccaccugcacga

SEQ ID NO: 3957829 - RNA, 16 nt, Human herpesvirus 2
gcccagcgcacccugg

SEQ ID NO: 3957830 - RNA, 19 nt, Human herpesvirus 2
gcccaggcccuggcgcacc

SEQ ID NO: 3957831 - RNA, 19 nt, Human herpesvirus 2
gcccauaaacaggccccgc

SEQ ID NO: 3957832 - RNA, 14 nt, Human herpesvirus 2
gccccaccccgccc

SEQ ID NO: 3957833 - RNA, 20 nt, Human herpesvirus 2
gccccacgucaccgggggcc

SEQ ID NO: 3957834 - RNA, 23 nt, Human herpesvirus 2
gccccagagccccccacgugggc

SEQ ID NO: 3957835 - RNA, 12 nt, Human herpesvirus 2
gcccccaccccc

SEQ ID NO: 3957836 - RNA, 23 nt, Human herpesvirus 2
agcuucauuuugugggggcccag

SEQ ID NO: 3957837 - RNA, 17 nt, Human herpesvirus 2
aggaaacgcgcgccccc

SEQ ID NO: 3957838 - RNA, 12 nt, Human herpesvirus 2
aggaagaaagaa

SEQ ID NO: 3957839 - RNA, 20 nt, Human herpesvirus 2
aggaccgccugccccgcgga

SEQ ID NO: 3957840 - RNA, 18 nt, Human herpesvirus 2
aggacgccggccgguccu

SEQ ID NO: 3957841 - RNA, 20 nt, Human herpesvirus 2
aggaguuucggaaagccggc

SEQ ID NO: 3957842 - RNA, 22 nt, Human herpesvirus 2
aggcaggggcagcucgcccccg

SEQ ID NO: 3957843 - RNA, 19 nt, Human herpesvirus 2
aggcccucugggacaccca

SEQ ID NO: 3957844 - RNA, 19 nt, Human herpesvirus 2
aggccgcccccagcaggug

SEQ ID NO: 3957845 - RNA, 17 nt, Human herpesvirus 2
aggcgaccccgcccccc

SEQ ID NO: 3957846 - RNA, 13 nt, Human herpesvirus 2
aggcgccucugcc

SEQ ID NO: 3957847 - RNA, 13 nt, Human herpesvirus 2
agggaauaugcaa

SEQ ID NO: 3957848 - RNA, 14 nt, Human herpesvirus 2
agggacgcgcagcg

SEQ ID NO: 3957849 - RNA, 14 nt, Human herpesvirus 2
aggggcaccaaaaa

SEQ ID NO: 3957850 - RNA, 21 nt, Human herpesvirus 2
aggggcaccaaaaaccagguc

SEQ ID NO: 3957851 - RNA, 18 nt, Human herpesvirus 2
aggggcgggaggaaggac

SEQ ID NO: 3957852 - RNA, 20 nt, Human herpesvirus 2
aggggcuccucagcgcggcc

SEQ ID NO: 3957853 - RNA, 12 nt, Human herpesvirus 2
aggggggagaug

SEQ ID NO: 3957854 - RNA, 23 nt, Human herpesvirus 2
agggugggggugguggugguggg

SEQ ID NO: 3957855 - RNA, 20 nt, Human herpesvirus 2
aggucugcgcgaggccgcuc

SEQ ID NO: 3957856 - RNA, 19 nt, Human herpesvirus 2
aggucuguuguguuugcug

SEQ ID NO: 3957857 - RNA, 20 nt, Human herpesvirus 2
agguggggggggggaaagac

SEQ ID NO: 3957858 - RNA, 23 nt, Human herpesvirus 2
aguaacaaacagagaaaaaaaac

SEQ ID NO: 3957859 - RNA, 14 nt, Human herpesvirus 2
agucucuuggggaa

SEQ ID NO: 3957860 - RNA, 13 nt, Human herpesvirus 2
aguguuugggaaa

SEQ ID NO: 3957861 - RNA, 21 nt, Human herpesvirus 2
aguuccuccgugcuggggaaa

SEQ ID NO: 3957862 - RNA, 10 nt, Human herpesvirus 2
auaaagagcu

SEQ ID NO: 3957863 - RNA, 15 nt, Human herpesvirus 2
auaaagguccggcgg

SEQ ID NO: 3957864 - RNA, 15 nt, Human herpesvirus 2
auagagggaacaaag

SEQ ID NO: 3957865 - RNA, 18 nt, Human herpesvirus 2
auagauuuccccaagaga

SEQ ID NO: 3957866 - RNA, 19 nt, Human herpesvirus 2
aucaguccgcgcggggcgc

SEQ ID NO: 3957867 - RNA, 17 nt, Human herpesvirus 2
aucccgaagccaucuga

SEQ ID NO: 3957868 - RNA, 14 nt, Human herpesvirus 2
auccggccucgggu

SEQ ID NO: 3957869 - RNA, 17 nt, Human herpesvirus 2
auccucaaacaggccau

SEQ ID NO: 3957870 - RNA, 15 nt, Human herpesvirus 2
aucggccaggagguc

SEQ ID NO: 3957871 - RNA, 20 nt, Human herpesvirus 2
aucgugugcacgaaaaagag

SEQ ID NO: 3957872 - RNA, 11 nt, Human herpesvirus 2
aucugggaaga

SEQ ID NO: 3957873 - RNA, 14 nt, Human herpesvirus 2
augaacugauugcc

SEQ ID NO: 3957874 - RNA, 16 nt, Human herpesvirus 2
augaugaccugggguc

SEQ ID NO: 3957875 - RNA, 21 nt, Human herpesvirus 2
augcgacggcgucucccgggg

SEQ ID NO: 3957876 - RNA, 14 nt, Human herpesvirus 2
auggagaagggaaa

SEQ ID NO: 3957877 - RNA, 23 nt, Human herpesvirus 2
auggcggccgcgcccccggccgc

SEQ ID NO: 3957878 - RNA, 13 nt, Human herpesvirus 2
augggcucggcgu

SEQ ID NO: 3957879 - RNA, 13 nt, Human herpesvirus 2
auggggagagggg

SEQ ID NO: 3957880 - RNA, 14 nt, Human herpesvirus 2
augggggggaaggg

SEQ ID NO: 3957881 - RNA, 15 nt, Human herpesvirus 2
auggggggggaaagg

SEQ ID NO: 3957882 - RNA, 15 nt, Human herpesvirus 2
auguucaaaaauaca

SEQ ID NO: 3957883 - RNA, 18 nt, Human herpesvirus 2
auguuguguucgccgacc

SEQ ID NO: 3957884 - RNA, 20 nt, Human herpesvirus 2
auugaccggggccccaucug

SEQ ID NO: 3957885 - RNA, 19 nt, Human herpesvirus 2
auuuaaggagucgccgccc

SEQ ID NO: 3957886 - RNA, 16 nt, Human herpesvirus 2
auuuuccccccacccc

SEQ ID NO: 3957887 - RNA, 15 nt, Human herpesvirus 2
auuuucuggaagagc

SEQ ID NO: 3957888 - RNA, 22 nt, Human herpesvirus 2
caaaagaaacggcaagaaagac

SEQ ID NO: 3957889 - RNA, 20 nt, Human herpesvirus 2
caacaugacaacgacgcccc

SEQ ID NO: 3957890 - RNA, 21 nt, Human herpesvirus 2
caacgcacguacguucugccc

SEQ ID NO: 3957891 - RNA, 23 nt, Human herpesvirus 2
caacgcccccuuuacgccuuucc

SEQ ID NO: 3957892 - RNA, 13 nt, Human herpesvirus 2
caacguccgggcg

SEQ ID NO: 3957893 - RNA, 17 nt, Human herpesvirus 2
caagaccugccccggcg

SEQ ID NO: 3957894 - RNA, 14 nt, Human herpesvirus 2
caagcccacaaccc

SEQ ID NO: 3957895 - RNA, 22 nt, Human herpesvirus 2
caagcgccccgcggaccccgcc

SEQ ID NO: 3957896 - RNA, 17 nt, Human herpesvirus 2
caauaaacgccuucccg

SEQ ID NO: 3957897 - RNA, 12 nt, Human herpesvirus 2
caauaaagccag

SEQ ID NO: 3957898 - RNA, 20 nt, Human herpesvirus 2
caauauggcccagcgcaccc

SEQ ID NO: 3957899 - RNA, 15 nt, Human herpesvirus 2
cacacacacaggccc

SEQ ID NO: 3957900 - RNA, 15 nt, Human herpesvirus 2
cacacaggcccacca

SEQ ID NO: 3957901 - RNA, 23 nt, Human herpesvirus 2
cacacccccaucgggcugcuggu

SEQ ID NO: 3957902 - RNA, 16 nt, Human herpesvirus 2
cacaccggagacccaa

SEQ ID NO: 3957903 - RNA, 15 nt, Human herpesvirus 2
cacaccgggcugggg

SEQ ID NO: 3957904 - RNA, 10 nt, Human herpesvirus 2
cacagccacc

SEQ ID NO: 3957905 - RNA, 17 nt, Human herpesvirus 2
cacaguuccgggaaggc

SEQ ID NO: 3957906 - RNA, 20 nt, Human herpesvirus 2
caccaaccuggcacagcggg

SEQ ID NO: 3957907 - RNA, 15 nt, Human herpesvirus 2
caccacccccccacu

SEQ ID NO: 3957908 - RNA, 20 nt, Human herpesvirus 2
caccagcucgggggccagga

SEQ ID NO: 3957909 - RNA, 12 nt, Human herpesvirus 2
caccccccugac

SEQ ID NO: 3957910 - RNA, 15 nt, Human herpesvirus 2
caccccccuucuccu

SEQ ID NO: 3957911 - RNA, 21 nt, Human herpesvirus 2
cacccuagccuucggccaccu

SEQ ID NO: 3957912 - RNA, 23 nt, Human herpesvirus 2
caccggccuggucguccgcggcc

SEQ ID NO: 3957913 - RNA, 22 nt, Human herpesvirus 2
caccggggcgccccccccgacg

SEQ ID NO: 3957914 - RNA, 13 nt, Human herpesvirus 2
caccugcgcggcg

SEQ ID NO: 3957915 - RNA, 20 nt, Human herpesvirus 2
caccuggcucgccgugcgcu

SEQ ID NO: 3957916 - RNA, 22 nt, Human herpesvirus 2
cacgaaguggguauacuuuugu

SEQ ID NO: 3957917 - RNA, 11 nt, Human herpesvirus 2
cacgacagacc

SEQ ID NO: 3957918 - RNA, 20 nt, Human herpesvirus 2
cacgagcucgacggcgccua

SEQ ID NO: 3957919 - RNA, 21 nt, Human herpesvirus 2
cacgaggucgucgugggccgg

SEQ ID NO: 3957920 - RNA, 22 nt, Human herpesvirus 2
cacgcccaacccaaccgacucc

SEQ ID NO: 3957921 - RNA, 19 nt, Human herpesvirus 2
cacgccguggacgcccccu

SEQ ID NO: 3957922 - RNA, 17 nt, Human herpesvirus 2
cacgcgcgacugccucc

SEQ ID NO: 3957923 - RNA, 17 nt, Human herpesvirus 2
cacggugcgugcggccc

SEQ ID NO: 3957924 - RNA, 21 nt, Human herpesvirus 2
cacggugcgugcggcccugcc

SEQ ID NO: 3957925 - RNA, 16 nt, Human herpesvirus 2
cacgucggacgccagc

SEQ ID NO: 3957926 - RNA, 17 nt, Human herpesvirus 2
cacguguccccagggag

SEQ ID NO: 3957927 - RNA, 15 nt, Human herpesvirus 2
cacguucgccccgca

SEQ ID NO: 3957928 - RNA, 19 nt, Human herpesvirus 2
cacucuggcguccccaggc

SEQ ID NO: 3957929 - RNA, 14 nt, Human herpesvirus 2
cacuucgcugucag

SEQ ID NO: 3957930 - RNA, 16 nt, Human herpesvirus 2
cagaccgcggacacgg

SEQ ID NO: 3957931 - RNA, 14 nt, Human herpesvirus 2
cagacucucgguga

SEQ ID NO: 3957932 - RNA, 15 nt, Human herpesvirus 2
cagagcucuuuauug

SEQ ID NO: 3957933 - RNA, 15 nt, Human herpesvirus 2
cagaggacgccggcc

SEQ ID NO: 3957934 - RNA, 13 nt, Human herpesvirus 2
cagauaugugagu

SEQ ID NO: 3957935 - RNA, 21 nt, Human herpesvirus 2
cagcaaccaggcgcugcugcg

SEQ ID NO: 3957936 - RNA, 19 nt, Human herpesvirus 2
cagcaccaccaccccccca

SEQ ID NO: 3957937 - RNA, 15 nt, Human herpesvirus 2
cagcacgaccaggga

SEQ ID NO: 3957938 - RNA, 17 nt, Human herpesvirus 2
cagcauccugaaccgcu

SEQ ID NO: 3957939 - RNA, 14 nt, Human herpesvirus 2
cagcccagaggagc

SEQ ID NO: 3957940 - RNA, 17 nt, Human herpesvirus 2
cagccccgcaggcaggc

SEQ ID NO: 3957941 - RNA, 16 nt, Human herpesvirus 2
cagccgcgccgcugcc

SEQ ID NO: 3957942 - RNA, 19 nt, Human herpesvirus 2
cagccuacaucaccccagg

SEQ ID NO: 3957943 - RNA, 20 nt, Human herpesvirus 2
cagccuacaucaccccaggg

SEQ ID NO: 3957944 - RNA, 22 nt, Human herpesvirus 2
cagccuggaccagaccguggcc

SEQ ID NO: 3957945 - RNA, 14 nt, Human herpesvirus 2
cagcgccggguggc

SEQ ID NO: 3957946 - RNA, 14 nt, Human herpesvirus 2
cagcgcggacgcgg

SEQ ID NO: 3957947 - RNA, 16 nt, Human herpesvirus 2
cagcgcgucggugccg

SEQ ID NO: 3957948 - RNA, 23 nt, Human herpesvirus 2
cagcggggacccgggcgagcugg

SEQ ID NO: 3957949 - RNA, 16 nt, Human herpesvirus 2
cagcguaacgcacccc

SEQ ID NO: 3957950 - RNA, 20 nt, Human herpesvirus 2
cagcucccccgcgcaggggg

SEQ ID NO: 3957951 - RNA, 13 nt, Human herpesvirus 2
cccucgaacaugg

SEQ ID NO: 3957952 - RNA, 15 nt, Human herpesvirus 2
cccucgccgccuucc

SEQ ID NO: 3957953 - RNA, 17 nt, Human herpesvirus 2
cccucggcagcccggac

SEQ ID NO: 3957954 - RNA, 17 nt, Human herpesvirus 2
cccucuuucccucccuc

SEQ ID NO: 3957955 - RNA, 12 nt, Human herpesvirus 2
cccuucagccug

SEQ ID NO: 3957956 - RNA, 14 nt, Human herpesvirus 2
cccuuucccccuuc

SEQ ID NO: 3957957 - RNA, 13 nt, Human herpesvirus 2
ccgaagaggugcu

SEQ ID NO: 3957958 - RNA, 23 nt, Human herpesvirus 2
ccgaaucuuuucaucgaaagggu

SEQ ID NO: 3957959 - RNA, 12 nt, Human herpesvirus 2
ccgaccagaacc

SEQ ID NO: 3957960 - RNA, 16 nt, Human herpesvirus 2
ccgacgcgcgcgcccc

SEQ ID NO: 3957961 - RNA, 16 nt, Human herpesvirus 2
ccgacgucucggcccc

SEQ ID NO: 3957962 - RNA, 13 nt, Human herpesvirus 2
ccgacucccuccg

SEQ ID NO: 3957963 - RNA, 20 nt, Human herpesvirus 2
ccgagcagcacggcggccag

SEQ ID NO: 3957964 - RNA, 16 nt, Human herpesvirus 2
ccgagcgucaggcccg

SEQ ID NO: 3957965 - RNA, 14 nt, Human herpesvirus 2
ccgaucuggagccg

SEQ ID NO: 3957966 - RNA, 15 nt, Human herpesvirus 2
ccgcacccccgccua

SEQ ID NO: 3957967 - RNA, 13 nt, Human herpesvirus 2
ccgcaccggggcg

SEQ ID NO: 3957968 - RNA, 18 nt, Human herpesvirus 2
ccgcagaccaccucgcgg

SEQ ID NO: 3957969 - RNA, 19 nt, Human herpesvirus 2
ccgcaggcgcgccaccgcc

SEQ ID NO: 3957970 - RNA, 11 nt, Human herpesvirus 2
cgagcucccug

SEQ ID NO: 3957971 - RNA, 20 nt, Human herpesvirus 2
cgaggaccacgugcacagcc

SEQ ID NO: 3957972 - RNA, 20 nt, Human herpesvirus 2
cgaggcccacccccccaccc

SEQ ID NO: 3957973 - RNA, 19 nt, Human herpesvirus 2
cgaggcccccggcccugcg

SEQ ID NO: 3957974 - RNA, 21 nt, Human herpesvirus 2
cgaggcgccucgggggcaggg

SEQ ID NO: 3957975 - RNA, 14 nt, Human herpesvirus 2
cgagggccccggcc

SEQ ID NO: 3957976 - RNA, 14 nt, Human herpesvirus 2
cgaguccugggugg

SEQ ID NO: 3957977 - RNA, 19 nt, Human herpesvirus 2
cgcaauaaacgccuucccg

SEQ ID NO: 3957978 - RNA, 16 nt, Human herpesvirus 2
cgcacccccggacccc

SEQ ID NO: 3957979 - RNA, 20 nt, Human herpesvirus 2
cgcaccgcugucccgacgau

SEQ ID NO: 3957980 - RNA, 22 nt, Human herpesvirus 2
cgcacguacguucugccccgcg

SEQ ID NO: 3957981 - RNA, 17 nt, Human herpesvirus 2
cgcaggccgcccccagc

SEQ ID NO: 3957982 - RNA, 14 nt, Human herpesvirus 2
cgcaucggaccccc

SEQ ID NO: 3957983 - RNA, 20 nt, Human herpesvirus 2
cgcaugggccgccagcaguc

SEQ ID NO: 3957984 - RNA, 22 nt, Human herpesvirus 2
cgcauuuaaggagucgccgccc

SEQ ID NO: 3957985 - RNA, 23 nt, Human herpesvirus 2
cgccaagcgccccgcggaccccg

SEQ ID NO: 3957986 - RNA, 20 nt, Human herpesvirus 2
cgccagacgggccggugggc

SEQ ID NO: 3957987 - RNA, 22 nt, Human herpesvirus 2
cgccaggccccccgggagccgc

SEQ ID NO: 3957988 - RNA, 18 nt, Human herpesvirus 2
cgcccagacccucacaga

SEQ ID NO: 3957989 - RNA, 23 nt, Human herpesvirus 2
cgcccaggcccuggcgcaccugc

SEQ ID NO: 3957990 - RNA, 23 nt, Human herpesvirus 2
cgccccgccccaccccgccccac

SEQ ID NO: 3957991 - RNA, 13 nt, Human herpesvirus 2
cgccccgcggacc

SEQ ID NO: 3957992 - RNA, 15 nt, Human herpesvirus 2
cgcccgaaaccagag

SEQ ID NO: 3957993 - RNA, 12 nt, Human herpesvirus 2
cgcccgccccag

SEQ ID NO: 3957994 - RNA, 13 nt, Human herpesvirus 2
cgcccgccccugc

SEQ ID NO: 3957995 - RNA, 15 nt, Human herpesvirus 2
cgcccgcguccgaca

SEQ ID NO: 3957996 - RNA, 16 nt, Human herpesvirus 2
cgccgacaacguccgg

SEQ ID NO: 3957997 - RNA, 15 nt, Human herpesvirus 2
cgccgacgccuuccc

SEQ ID NO: 3957998 - RNA, 19 nt, Human herpesvirus 2
cgccgccgggaaccccggc

SEQ ID NO: 3957999 - RNA, 21 nt, Human herpesvirus 2
cgccgcgcgggacccacgagg

SEQ ID NO: 3958000 - RNA, 21 nt, Human herpesvirus 2
cgccgcuacugcgccaccguc

SEQ ID NO: 3958001 - RNA, 22 nt, Human herpesvirus 2
cgccggccaaccgcgcgccgcc

SEQ ID NO: 3958002 - RNA, 19 nt, Human herpesvirus 2
cgccgggaaccccggcgug

SEQ ID NO: 3958003 - RNA, 18 nt, Human herpesvirus 2
cgccgggcgcgcggcgcg

SEQ ID NO: 3958004 - RNA, 19 nt, Human herpesvirus 2
cgccggguggcgccucugc

SEQ ID NO: 3958005 - RNA, 16 nt, Human herpesvirus 2
cgccguggacgccccc

SEQ ID NO: 3958006 - RNA, 18 nt, Human herpesvirus 2
cgccuccccgcuggagcc

SEQ ID NO: 3958007 - RNA, 21 nt, Human herpesvirus 2
cgccucccggccgccccccgu

SEQ ID NO: 3958008 - RNA, 21 nt, Human herpesvirus 2
cgccucgauguauggcgccuu

SEQ ID NO: 3958009 - RNA, 20 nt, Human herpesvirus 2
cgccuguuguuggucggguu

SEQ ID NO: 3958010 - RNA, 19 nt, Human herpesvirus 2
cgccuuccgacgcucucug

SEQ ID NO: 3958011 - RNA, 14 nt, Human herpesvirus 2
cgccuuuccucccc

SEQ ID NO: 3958012 - RNA, 16 nt, Human herpesvirus 2
cgcgacaagacccggc

SEQ ID NO: 3958013 - RNA, 16 nt, Human herpesvirus 2
cgcgaccaccaaggcc

SEQ ID NO: 3958014 - RNA, 12 nt, Human herpesvirus 2
cgcgacggcccc

SEQ ID NO: 3958015 - RNA, 23 nt, Human herpesvirus 2
cgcgaggccgcucuccgaagaga

SEQ ID NO: 3958016 - RNA, 16 nt, Human herpesvirus 2
cgcgagggccccggcc

SEQ ID NO: 3958017 - RNA, 12 nt, Human herpesvirus 2
cgcgauuccgag

SEQ ID NO: 3958018 - RNA, 12 nt, Human herpesvirus 2
cgcgcaccgcug

SEQ ID NO: 3958019 - RNA, 16 nt, Human herpesvirus 2
cgcgcaggggggccgg

SEQ ID NO: 3958020 - RNA, 13 nt, Human herpesvirus 2
cgcgccucccggg

SEQ ID NO: 3958021 - RNA, 14 nt, Human herpesvirus 2
cgcgcgcagaggga

SEQ ID NO: 3958022 - RNA, 18 nt, Human herpesvirus 2
cgcgcuaguacccagagg

SEQ ID NO: 3958023 - RNA, 18 nt, Human herpesvirus 2
cgcgcuguggcgcgcccc

SEQ ID NO: 3958024 - RNA, 22 nt, Human herpesvirus 2
cgcggaguaugaccgucggugc

SEQ ID NO: 3958025 - RNA, 21 nt, Human herpesvirus 2
cgcggccauccugcccaccgg

SEQ ID NO: 3958026 - RNA, 13 nt, Human herpesvirus 2
cgcggcggccgca

SEQ ID NO: 3958027 - RNA, 17 nt, Human herpesvirus 2
cgcgggcaggccgcggc

SEQ ID NO: 3958028 - RNA, 16 nt, Human herpesvirus 2
cgcgggcgggggcgcg

SEQ ID NO: 3958029 - RNA, 13 nt, Human herpesvirus 2
cgcgggcgucccc

SEQ ID NO: 3958030 - RNA, 23 nt, Human herpesvirus 2
cgcgggcucguguuccggccgug

SEQ ID NO: 3958031 - RNA, 23 nt, Human herpesvirus 2
cgcgggggaggcgcgcgcgcgcu

SEQ ID NO: 3958032 - RNA, 19 nt, Human herpesvirus 2
cgcggggggcacgggcccg

SEQ ID NO: 3958033 - RNA, 19 nt, Human herpesvirus 2
cgcgguggcgucggcggcc

SEQ ID NO: 3958034 - RNA, 17 nt, Human herpesvirus 2
cgcguacguggcgucgg

SEQ ID NO: 3958035 - RNA, 16 nt, Human herpesvirus 2
cgcgugcggccagccg

SEQ ID NO: 3958036 - RNA, 13 nt, Human herpesvirus 2
cgcuaccucaccc

SEQ ID NO: 3958037 - RNA, 23 nt, Human herpesvirus 2
cgcucggggguucgcgcaucucu

SEQ ID NO: 3958038 - RNA, 14 nt, Human herpesvirus 2
cgcugcggggacca

SEQ ID NO: 3958039 - RNA, 15 nt, Human herpesvirus 2
cgcuggagccccugg

SEQ ID NO: 3958040 - RNA, 15 nt, Human herpesvirus 2
cgcuggccccucugc

SEQ ID NO: 3958041 - RNA, 14 nt, Human herpesvirus 2
cgcuguggcgcgcc

SEQ ID NO: 3958042 - RNA, 13 nt, Human herpesvirus 2
cggaaagccggcc

SEQ ID NO: 3958043 - RNA, 19 nt, Human herpesvirus 2
cggaagagagcgccccgcc

SEQ ID NO: 3958044 - RNA, 13 nt, Human herpesvirus 2
cggacacggcccc

SEQ ID NO: 3958045 - RNA, 18 nt, Human herpesvirus 2
cggacacggccccgaaca

SEQ ID NO: 3958046 - RNA, 13 nt, Human herpesvirus 2
cggacccaccgca

SEQ ID NO: 3958047 - RNA, 19 nt, Human herpesvirus 2
cggacgccagcugcuggcc

SEQ ID NO: 3958048 - RNA, 22 nt, Human herpesvirus 2
cggacggccccucgcuccccgc

SEQ ID NO: 3958049 - RNA, 14 nt, Human herpesvirus 2
cggcacccccggcg

SEQ ID NO: 3958050 - RNA, 17 nt, Human herpesvirus 2
cggcagcccggaccccu

SEQ ID NO: 3958051 - RNA, 20 nt, Human herpesvirus 2
cggccaagcuaaggcgcccg

SEQ ID NO: 3958052 - RNA, 13 nt, Human herpesvirus 2
cggccaccccgcc

SEQ ID NO: 3958053 - RNA, 15 nt, Human herpesvirus 2
cggccaccccgccgc

SEQ ID NO: 3958054 - RNA, 14 nt, Human herpesvirus 2
cggccagccgcgcg

SEQ ID NO: 3958055 - RNA, 15 nt, Human herpesvirus 2
cggccauccccggcg

SEQ ID NO: 3958056 - RNA, 14 nt, Human herpesvirus 2
cggccauccugccc

SEQ ID NO: 3958057 - RNA, 22 nt, Human herpesvirus 2
cggcccgauccgaacggcgcac

SEQ ID NO: 3958058 - RNA, 10 nt, Human herpesvirus 2
cggcccgugg

SEQ ID NO: 3958059 - RNA, 12 nt, Human herpesvirus 2
cggcccugccuc

SEQ ID NO: 3958060 - RNA, 13 nt, Human herpesvirus 2
cggcccugcggcc

SEQ ID NO: 3958061 - RNA, 16 nt, Human herpesvirus 2
cggccgccauccccgc

SEQ ID NO: 3958062 - RNA, 12 nt, Human herpesvirus 2
cggccgccgcaa

SEQ ID NO: 3958063 - RNA, 19 nt, Human herpesvirus 2
cggccgcgcuaccucaccc

SEQ ID NO: 3958064 - RNA, 15 nt, Human herpesvirus 2
cggcgaccgccccgc

SEQ ID NO: 3958065 - RNA, 21 nt, Human herpesvirus 2
cggcgaccgccccgcgccggc

SEQ ID NO: 3958066 - RNA, 20 nt, Human herpesvirus 2
cggcgcacgcggugcgucgg

SEQ ID NO: 3958067 - RNA, 14 nt, Human herpesvirus 2
cggcgccgccccgc

SEQ ID NO: 3958068 - RNA, 24 nt, Human herpesvirus 2
cggcgccuaccugguacccacgga

SEQ ID NO: 3958069 - RNA, 15 nt, Human herpesvirus 2
cggcgcgagcucccu

SEQ ID NO: 3958070 - RNA, 15 nt, Human herpesvirus 2
cggcgcgggcggcgc

SEQ ID NO: 3958071 - RNA, 13 nt, Human herpesvirus 2
cggcggccccggc

SEQ ID NO: 3958072 - RNA, 13 nt, Human herpesvirus 2
cggcggcuccccc

SEQ ID NO: 3958073 - RNA, 22 nt, Human herpesvirus 2
cggcguuucugaccggcgccga

SEQ ID NO: 3958074 - RNA, 21 nt, Human herpesvirus 2
cggcucccccgacgucucggc

SEQ ID NO: 3958075 - RNA, 21 nt, Human herpesvirus 2
cggcucccccgcggccuuucc

SEQ ID NO: 3958076 - RNA, 23 nt, Human herpesvirus 2
cgggaggaaggacacgccucccu

SEQ ID NO: 3958077 - RNA, 21 nt, Human herpesvirus 2
cgggaggauguguucuccugg

SEQ ID NO: 3958078 - RNA, 22 nt, Human herpesvirus 2
cgggccguucggcaggcccgcc

SEQ ID NO: 3958079 - RNA, 15 nt, Human herpesvirus 2
cgggcgagcuggccc

SEQ ID NO: 3958080 - RNA, 17 nt, Human herpesvirus 2
cgggcgagcuggcccug

SEQ ID NO: 3958081 - RNA, 17 nt, Human herpesvirus 2
cgggcgggggucgggcg

SEQ ID NO: 3958082 - RNA, 18 nt, Human herpesvirus 2
cgggcgucugugcgccuu

SEQ ID NO: 3958083 - RNA, 16 nt, Human herpesvirus 2
cgggcugggggucccg

SEQ ID NO: 3958084 - RNA, 13 nt, Human herpesvirus 2
cggggagggacaa

SEQ ID NO: 3958085 - RNA, 20 nt, Human herpesvirus 2
cggggagggcagggccgcug

SEQ ID NO: 3958086 - RNA, 18 nt, Human herpesvirus 2
cggggcacgcggucagca

SEQ ID NO: 3958087 - RNA, 23 nt, Human herpesvirus 2
cggggcgugucuguccguugccc

SEQ ID NO: 3958088 - RNA, 22 nt, Human herpesvirus 2
cgggggaucugucgccggcgug

SEQ ID NO: 3958089 - RNA, 17 nt, Human herpesvirus 2
cgggggauggugguggg

SEQ ID NO: 3958090 - RNA, 14 nt, Human herpesvirus 2
cgggggccuggugg

SEQ ID NO: 3958091 - RNA, 21 nt, Human herpesvirus 2
cgggggucccgccucccggcc

SEQ ID NO: 3958092 - RNA, 16 nt, Human herpesvirus 2
cgggggucgggcgggc

SEQ ID NO: 3958093 - RNA, 11 nt, Human herpesvirus 2
cgggguggugg

SEQ ID NO: 3958094 - RNA, 16 nt, Human herpesvirus 2
cggguuuuuggcccug

SEQ ID NO: 3958095 - RNA, 21 nt, Human herpesvirus 2
cgguaagcagcgcguccaggu

SEQ ID NO: 3958096 - RNA, 22 nt, Human herpesvirus 2
cgguagugcaggugggccgacg

SEQ ID NO: 3958097 - RNA, 22 nt, Human herpesvirus 2
cgguauggcugcccccgcgcac

SEQ ID NO: 3958098 - RNA, 16 nt, Human herpesvirus 2
cggucaauaaagagcu

SEQ ID NO: 3958099 - RNA, 15 nt, Human herpesvirus 2
cggucaggaccaggg

SEQ ID NO: 3958100 - RNA, 17 nt, Human herpesvirus 2
cggucccuuccccacca

SEQ ID NO: 3958101 - RNA, 18 nt, Human herpesvirus 2
cgguccucaccgagccgc

SEQ ID NO: 3958102 - RNA, 14 nt, Human herpesvirus 2
cggugaucgaggug

SEQ ID NO: 3958103 - RNA, 23 nt, Human herpesvirus 2
cggugccgcuuuaccccgcggcc

SEQ ID NO: 3958104 - RNA, 17 nt, Human herpesvirus 2
cguacguucugccccgc

SEQ ID NO: 3958105 - RNA, 16 nt, Human herpesvirus 2
cgucacccccaggggg

SEQ ID NO: 3958106 - RNA, 20 nt, Human herpesvirus 2
cgucccagaauuuagccagg

SEQ ID NO: 3958107 - RNA, 13 nt, Human herpesvirus 2
cgucccgccacac

SEQ ID NO: 3958108 - RNA, 17 nt, Human herpesvirus 2
cguccggcuggcggcgc

SEQ ID NO: 3958109 - RNA, 18 nt, Human herpesvirus 2
cguccggcuggcggcgcg

SEQ ID NO: 3958110 - RNA, 21 nt, Human herpesvirus 2
cguccguauguuaauugcaau

SEQ ID NO: 3958111 - RNA, 13 nt, Human herpesvirus 2
cgucgaccgggga

SEQ ID NO: 3958112 - RNA, 17 nt, Human herpesvirus 2
cgucgaccggggacucc

SEQ ID NO: 3958113 - RNA, 21 nt, Human herpesvirus 2
cgucgccgaauacgacgccca

SEQ ID NO: 3958114 - RNA, 23 nt, Human herpesvirus 2
cgucucccgggggcgcuuggccg

SEQ ID NO: 3958115 - RNA, 16 nt, Human herpesvirus 2
cgucucgucgccgcuc

SEQ ID NO: 3958116 - RNA, 22 nt, Human herpesvirus 2
cgugcacagagccgauccggcc

SEQ ID NO: 3958117 - RNA, 21 nt, Human herpesvirus 2
cgugcgcucgcucuccgugcc

SEQ ID NO: 3958118 - RNA, 17 nt, Human herpesvirus 2
cgugcucugccacacgu

SEQ ID NO: 3958119 - RNA, 20 nt, Human herpesvirus 2
cgugcugggcgcgagccagg

SEQ ID NO: 3958120 - RNA, 21 nt, Human herpesvirus 2
cgugcugggcgcgagccaggc

SEQ ID NO: 3958121 - RNA, 14 nt, Human herpesvirus 2
cguggacgcccccu

SEQ ID NO: 3958122 - RNA, 19 nt, Human herpesvirus 2
cguggaugccggggccgug

SEQ ID NO: 3958123 - RNA, 19 nt, Human herpesvirus 2
cguggcccuccacgccgug

SEQ ID NO: 3958124 - RNA, 17 nt, Human herpesvirus 2
cguggcgccuggggacu

SEQ ID NO: 3958125 - RNA, 16 nt, Human herpesvirus 2
cgugugggaggguggc

SEQ ID NO: 3958126 - RNA, 15 nt, Human herpesvirus 2
cguucguucgcccgg

SEQ ID NO: 3958127 - RNA, 14 nt, Human herpesvirus 2
cguugcccccccgg

SEQ ID NO: 3958128 - RNA, 23 nt, Human herpesvirus 2
cuacgcguguacgcgaaggcgga

SEQ ID NO: 3958129 - RNA, 14 nt, Human herpesvirus 2
cuacuaccugggga

SEQ ID NO: 3958130 - RNA, 20 nt, Human herpesvirus 2
cucaccgagccgcugugcca

SEQ ID NO: 3958131 - RNA, 14 nt, Human herpesvirus 2
cucacggccaacga

SEQ ID NO: 3958132 - RNA, 15 nt, Human herpesvirus 2
cucagcgcggccgug

SEQ ID NO: 3958133 - RNA, 20 nt, Human herpesvirus 2
cucauacacgcgcuggcccc

SEQ ID NO: 3958134 - RNA, 23 nt, Human herpesvirus 2
cucauacacgcgcuggccccucu

SEQ ID NO: 3958135 - RNA, 14 nt, Human herpesvirus 2
cucaucgcacggcg

SEQ ID NO: 3958136 - RNA, 15 nt, Human herpesvirus 2
cucccccgcuucugg

SEQ ID NO: 3958137 - RNA, 21 nt, Human herpesvirus 2
cucccggccauccccggcgcc

SEQ ID NO: 3958138 - RNA, 13 nt, Human herpesvirus 2
cucccucgccgcc

SEQ ID NO: 3958139 - RNA, 15 nt, Human herpesvirus 2
cucccuuuuuucccc

SEQ ID NO: 3958140 - RNA, 22 nt, Human herpesvirus 2
cuccgcaauaaacgccuucccg

SEQ ID NO: 3958141 - RNA, 14 nt, Human herpesvirus 2
cuccgccagcgccc

SEQ ID NO: 3958142 - RNA, 11 nt, Human herpesvirus 2
cuccgcccucg

SEQ ID NO: 3958143 - RNA, 19 nt, Human herpesvirus 2
cuccggagaacccccugcc

SEQ ID NO: 3958144 - RNA, 17 nt, Human herpesvirus 2
cuccggucccuucccca

SEQ ID NO: 3958145 - RNA, 23 nt, Human herpesvirus 2
cuccggucccuuccccaccacca

SEQ ID NO: 3958146 - RNA, 14 nt, Human herpesvirus 2
cucgccgcuguggc

SEQ ID NO: 3958147 - RNA, 15 nt, Human herpesvirus 2
cucgcgucgggccag

SEQ ID NO: 3958148 - RNA, 15 nt, Human herpesvirus 2
cucgcugcucucccg

SEQ ID NO: 3958149 - RNA, 19 nt, Human herpesvirus 2
cucgcuguuuuuuuucucu

SEQ ID NO: 3958150 - RNA, 21 nt, Human herpesvirus 2
cucggcuugauggagccugcg

SEQ ID NO: 3958151 - RNA, 16 nt, Human herpesvirus 2
cucgggcggcguggcc

SEQ ID NO: 3958152 - RNA, 15 nt, Human herpesvirus 2
cucguaggcccgggg

SEQ ID NO: 3958153 - RNA, 13 nt, Human herpesvirus 2
cucucgaucccga

SEQ ID NO: 3958154 - RNA, 19 nt, Human herpesvirus 2
cucucggugaucuuggcgu

SEQ ID NO: 3958155 - RNA, 18 nt, Human herpesvirus 2
cucuggcuccaggccgcc

SEQ ID NO: 3958156 - RNA, 16 nt, Human herpesvirus 2
cucuggugucggccgc

SEQ ID NO: 3958157 - RNA, 17 nt, Human herpesvirus 2
cucuuccccccccccca

SEQ ID NO: 3958158 - RNA, 14 nt, Human herpesvirus 2
cucuucuuccccca

SEQ ID NO: 3958159 - RNA, 22 nt, Human herpesvirus 2
cugaaccgcuggcuggagaccg

SEQ ID NO: 3958160 - RNA, 19 nt, Human herpesvirus 2
cugaauuucccgcagaacc

SEQ ID NO: 3958161 - RNA, 23 nt, Human herpesvirus 2
cugacccucucgggcaugggcua

SEQ ID NO: 3958162 - RNA, 18 nt, Human herpesvirus 2
cugacgccggccaaccuc

SEQ ID NO: 3958163 - RNA, 21 nt, Human herpesvirus 2
cugaggccucauccggcccgc

SEQ ID NO: 3958164 - RNA, 22 nt, Human herpesvirus 2
cugcacgucggacgccagcugc

SEQ ID NO: 3958165 - RNA, 21 nt, Human herpesvirus 2
cugcacuugcccccccccggg

SEQ ID NO: 3958166 - RNA, 19 nt, Human herpesvirus 2
cugcagaugcugcccgcgg

SEQ ID NO: 3958167 - RNA, 17 nt, Human herpesvirus 2
cugccccccggcgcggg

SEQ ID NO: 3958168 - RNA, 15 nt, Human herpesvirus 2
cugcccgaccgggcg

SEQ ID NO: 3958169 - RNA, 14 nt, Human herpesvirus 2
cugcccgcggacca

SEQ ID NO: 3958170 - RNA, 22 nt, Human herpesvirus 2
cugccgacuuccgugccccugg

SEQ ID NO: 3958171 - RNA, 17 nt, Human herpesvirus 2
cugccgccgcgggagga

SEQ ID NO: 3958172 - RNA, 16 nt, Human herpesvirus 2
cugccucccccccgga

SEQ ID NO: 3958173 - RNA, 17 nt, Human herpesvirus 2
cugccucccccccggag

SEQ ID NO: 3958174 - RNA, 15 nt, Human herpesvirus 2
cugcgaggugcgcca

SEQ ID NO: 3958175 - RNA, 22 nt, Human herpesvirus 2
cugcgcagguccgagacggcca

SEQ ID NO: 3958176 - RNA, 23 nt, Human herpesvirus 2
cugcgcauggccugcgaggugcg

SEQ ID NO: 3958177 - RNA, 13 nt, Human herpesvirus 2
cugcgcgagccgu

SEQ ID NO: 3958178 - RNA, 16 nt, Human herpesvirus 2
cugcgcgcgcaccugc

SEQ ID NO: 3958179 - RNA, 12 nt, Human herpesvirus 2
cugcugagcccu

SEQ ID NO: 3958180 - RNA, 16 nt, Human herpesvirus 2
cugcugggccauggau

SEQ ID NO: 3958181 - RNA, 15 nt, Human herpesvirus 2
cuggacgggaguucc

SEQ ID NO: 3958182 - RNA, 23 nt, Human herpesvirus 2
cuggccgagcguaucggccagga

SEQ ID NO: 3958183 - RNA, 20 nt, Human herpesvirus 2
cuggccguccggggggacgc

SEQ ID NO: 3958184 - RNA, 13 nt, Human herpesvirus 2
cuggcggcgcggc

SEQ ID NO: 3958185 - RNA, 13 nt, Human herpesvirus 2
cuggcgggagcca

SEQ ID NO: 3958186 - RNA, 15 nt, Human herpesvirus 2
cuggcguccccaggc

SEQ ID NO: 3958187 - RNA, 20 nt, Human herpesvirus 2
cuggcugcggggggcggugg

SEQ ID NO: 3958188 - RNA, 20 nt, Human herpesvirus 2
cuggcuguguuugucugucg

SEQ ID NO: 3958189 - RNA, 13 nt, Human herpesvirus 2
cugggcccgccga

SEQ ID NO: 3958190 - RNA, 18 nt, Human herpesvirus 2
cugggccgcucguuccuc

SEQ ID NO: 3958191 - RNA, 21 nt, Human herpesvirus 2
cugggggcggggggugggagg

SEQ ID NO: 3958192 - RNA, 21 nt, Human herpesvirus 2
cuggucacaaaaggcacggcg

SEQ ID NO: 3958193 - RNA, 17 nt, Human herpesvirus 2
cugguuuuucugggggu

SEQ ID NO: 3958194 - RNA, 12 nt, Human herpesvirus 2
cuguaucugguc

SEQ ID NO: 3958195 - RNA, 13 nt, Human herpesvirus 2
cugucggccgcgg

SEQ ID NO: 3958196 - RNA, 21 nt, Human herpesvirus 2
cugugccagguggcccuuccg

SEQ ID NO: 3958197 - RNA, 17 nt, Human herpesvirus 2
cugugcgccuuuaagac

SEQ ID NO: 3958198 - RNA, 14 nt, Human herpesvirus 2
cugugcggcccucu

SEQ ID NO: 3958199 - RNA, 12 nt, Human herpesvirus 2
cuguuggagccg

SEQ ID NO: 3958200 - RNA, 15 nt, Human herpesvirus 2
cuguuguuguuucug

SEQ ID NO: 3958201 - RNA, 20 nt, Human herpesvirus 2
cuguuuccuuuccuuucccc

SEQ ID NO: 3958202 - RNA, 14 nt, Human herpesvirus 2
cuucccccccccua

SEQ ID NO: 3958203 - RNA, 20 nt, Human herpesvirus 2
cuuccgaccgacgggccccc

SEQ ID NO: 3958204 - RNA, 17 nt, Human herpesvirus 2
cuucgcggcggccgcac

SEQ ID NO: 3958205 - RNA, 20 nt, Human herpesvirus 2
cuucgucguagaucgggucc

SEQ ID NO: 3958206 - RNA, 18 nt, Human herpesvirus 2
cuugauuuacgagggggc

SEQ ID NO: 3958207 - RNA, 20 nt, Human herpesvirus 2
cuuggaggcccucugggaca

SEQ ID NO: 3958208 - RNA, 15 nt, Human herpesvirus 2
cuuggugcgccgccg

SEQ ID NO: 3958209 - RNA, 16 nt, Human herpesvirus 2
cuuuccccccccccuc

SEQ ID NO: 3958210 - RNA, 13 nt, Human herpesvirus 2
cuuucccccccuc

SEQ ID NO: 3958211 - RNA, 21 nt, Human herpesvirus 2
cuuuccgugcuucgggacccg

SEQ ID NO: 3958212 - RNA, 14 nt, Human herpesvirus 2
cuuuccuuuccccc

SEQ ID NO: 3958213 - RNA, 14 nt, Human herpesvirus 2
cuuugacuccuggg

SEQ ID NO: 3958214 - RNA, 14 nt, Human herpesvirus 2
cuuuuccgccgccg

SEQ ID NO: 3958215 - RNA, 15 nt, Human herpesvirus 2
cuuuuucucuucccc

SEQ ID NO: 3958216 - RNA, 21 nt, Human herpesvirus 2
gaaacacgguggcgcgcuggc

SEQ ID NO: 3958217 - RNA, 15 nt, Human herpesvirus 2
gaaacgaugaaggac

SEQ ID NO: 3958218 - RNA, 14 nt, Human herpesvirus 2
gaaacuuccgggag

SEQ ID NO: 3958219 - RNA, 21 nt, Human herpesvirus 2
gaaagaaacacaaggccccga

SEQ ID NO: 3958220 - RNA, 20 nt, Human herpesvirus 2
gaaagacaugauagagggaa

SEQ ID NO: 3958221 - RNA, 16 nt, Human herpesvirus 2
gaacagccccuggggc

SEQ ID NO: 3958222 - RNA, 22 nt, Human herpesvirus 2
gaacagcucgcggacgagcccg

SEQ ID NO: 3958223 - RNA, 19 nt, Human herpesvirus 2
gaacccccagacgaccauc

SEQ ID NO: 3958224 - RNA, 15 nt, Human herpesvirus 2
gaaccccucuggggu

SEQ ID NO: 3958225 - RNA, 23 nt, Human herpesvirus 2
gaaccgcuggcuggagaccgagc

SEQ ID NO: 3958226 - RNA, 16 nt, Human herpesvirus 2
gaaccgguagccgggg

SEQ ID NO: 3958227 - RNA, 19 nt, Human herpesvirus 2
gaaccgguagccggggcac

SEQ ID NO: 3958228 - RNA, 15 nt, Human herpesvirus 2
gaacggucuccgcca

SEQ ID NO: 3958229 - RNA, 24 nt, Human herpesvirus 2
gaacgugguguugggcgccggcca

SEQ ID NO: 3958230 - RNA, 23 nt, Human herpesvirus 2
gaacucgcccgccguuggggaua

SEQ ID NO: 3958231 - RNA, 15 nt, Human herpesvirus 2
gaacugauugccauc

SEQ ID NO: 3958232 - RNA, 16 nt, Human herpesvirus 2
gacacacacacaggcc

SEQ ID NO: 3958233 - RNA, 20 nt, Human herpesvirus 2
gacacgcaacaacggcgggc

SEQ ID NO: 3958234 - RNA, 14 nt, Human herpesvirus 2
gacagacgcggcga

SEQ ID NO: 3958235 - RNA, 17 nt, Human herpesvirus 2
gacagcggggacccggg

SEQ ID NO: 3958236 - RNA, 14 nt, Human herpesvirus 2
gacaucaaccaccu

SEQ ID NO: 3958237 - RNA, 16 nt, Human herpesvirus 2
gacaucaaccaccuuc

SEQ ID NO: 3958238 - RNA, 19 nt, Human herpesvirus 2
gacauguuacaccccccug

SEQ ID NO: 3958239 - RNA, 18 nt, Human herpesvirus 2
gaccaccccaaaaaccgc

SEQ ID NO: 3958240 - RNA, 20 nt, Human herpesvirus 2
gaccacccuaaggaugcccg

SEQ ID NO: 3958241 - RNA, 21 nt, Human herpesvirus 2
gaccacgcgcacgucgggggg

SEQ ID NO: 3958242 - RNA, 18 nt, Human herpesvirus 2
gaccagggaggccagaaa

SEQ ID NO: 3958243 - RNA, 19 nt, Human herpesvirus 2
gacccaccgcaccaccaua

SEQ ID NO: 3958244 - RNA, 16 nt, Human herpesvirus 2
gacccaccgcccccgc

SEQ ID NO: 3958245 - RNA, 14 nt, Human herpesvirus 2
gacccagucgccca

SEQ ID NO: 3958246 - RNA, 19 nt, Human herpesvirus 2
gacccugccccccggcgcg

SEQ ID NO: 3958247 - RNA, 11 nt, Human herpesvirus 2
gaccgcccccc

SEQ ID NO: 3958248 - RNA, 16 nt, Human herpesvirus 2
gaccgccccgcgccgg

SEQ ID NO: 3958249 - RNA, 14 nt, Human herpesvirus 2
gaccgccggcccca

SEQ ID NO: 3958250 - RNA, 17 nt, Human herpesvirus 2
gaccgccugccccgcgg

SEQ ID NO: 3958251 - RNA, 21 nt, Human herpesvirus 2
gaccgcugucgcccccgucug

SEQ ID NO: 3958252 - RNA, 21 nt, Human herpesvirus 2
gaccggcccccggaguccccc

SEQ ID NO: 3958253 - RNA, 13 nt, Human herpesvirus 2
gaccggcggggcc

SEQ ID NO: 3958254 - RNA, 15 nt, Human herpesvirus 2
gaccgucgccgccgg

SEQ ID NO: 3958255 - RNA, 17 nt, Human herpesvirus 2
gaccgucgccgccggcc

SEQ ID NO: 3958256 - RNA, 19 nt, Human herpesvirus 2
gaccgucuuugggccccgc

SEQ ID NO: 3958257 - RNA, 22 nt, Human herpesvirus 2
gaccuccccgugcgugcugcug

SEQ ID NO: 3958258 - RNA, 18 nt, Human herpesvirus 2
gaccugccccggcgcguc

SEQ ID NO: 3958259 - RNA, 14 nt, Human herpesvirus 2
gacgaggccuuccc

SEQ ID NO: 3958260 - RNA, 13 nt, Human herpesvirus 2
gacgcccgcgagc

SEQ ID NO: 3958261 - RNA, 22 nt, Human herpesvirus 2
gacgccucgauguauggcgccu

SEQ ID NO: 3958262 - RNA, 14 nt, Human herpesvirus 2
gacgcgaggcgcgg

SEQ ID NO: 3958263 - RNA, 13 nt, Human herpesvirus 2
gacgcucucugcc

SEQ ID NO: 3958264 - RNA, 22 nt, Human herpesvirus 2
gacgcuguuguuucugggcccg

SEQ ID NO: 3958265 - RNA, 16 nt, Human herpesvirus 2
gacggccccggccgcc

SEQ ID NO: 3958266 - RNA, 21 nt, Human herpesvirus 2
gacgggcgccacgguggugca

SEQ ID NO: 3958267 - RNA, 17 nt, Human herpesvirus 2
gacgucacgcccgucag

SEQ ID NO: 3958268 - RNA, 22 nt, Human herpesvirus 2
gacucgccuuugguuaaacaau

SEQ ID NO: 3958269 - RNA, 21 nt, Human herpesvirus 2
gacugauucucaccuggggcu

SEQ ID NO: 3958270 - RNA, 20 nt, Human herpesvirus 2
gacugggccgaugugcccug

SEQ ID NO: 3958271 - RNA, 16 nt, Human herpesvirus 2
gacuugacggucgcca

SEQ ID NO: 3958272 - RNA, 11 nt, Human herpesvirus 2
gagagcccagg

SEQ ID NO: 3958273 - RNA, 15 nt, Human herpesvirus 2
gagccccgcgaccac

SEQ ID NO: 3958274 - RNA, 16 nt, Human herpesvirus 2
gagcccugccccgccc

SEQ ID NO: 3958275 - RNA, 14 nt, Human herpesvirus 2
gagccgcgcggcca

SEQ ID NO: 3958276 - RNA, 21 nt, Human herpesvirus 2
gagccgguagugcaggugggc

SEQ ID NO: 3958277 - RNA, 21 nt, Human herpesvirus 2
gagccucuuugggccgugggu

SEQ ID NO: 3958278 - RNA, 21 nt, Human herpesvirus 2
gagcgccgucgggccccgggu

SEQ ID NO: 3958279 - RNA, 14 nt, Human herpesvirus 2
gagcugccccgcgg

SEQ ID NO: 3958280 - RNA, 18 nt, Human herpesvirus 2
gagcuuugcacgcggggu

SEQ ID NO: 3958281 - RNA, 19 nt, Human herpesvirus 2
gaggauguguucuccugga

SEQ ID NO: 3958282 - RNA, 15 nt, Human herpesvirus 2
gaggcgccucugccc

SEQ ID NO: 3958283 - RNA, 18 nt, Human herpesvirus 2
gaggggcuuggccuuccc

SEQ ID NO: 3958284 - RNA, 19 nt, Human herpesvirus 2
gagggggggaaagaaagag

SEQ ID NO: 3958285 - RNA, 17 nt, Human herpesvirus 2
gaggugcgccaggucag

SEQ ID NO: 3958286 - RNA, 18 nt, Human herpesvirus 2
gaguugcgccggcaccag

SEQ ID NO: 3958287 - RNA, 13 nt, Human herpesvirus 2
gauccaggggagg

SEQ ID NO: 3958288 - RNA, 15 nt, Human herpesvirus 2
gauccccggggggag

SEQ ID NO: 3958289 - RNA, 20 nt, Human herpesvirus 2
gaucccgaagccaucugaag

SEQ ID NO: 3958290 - RNA, 16 nt, Human herpesvirus 2
gaucgacgacgccugg

SEQ ID NO: 3958291 - RNA, 16 nt, Human herpesvirus 2
gaucgccagccgcggu

SEQ ID NO: 3958292 - RNA, 16 nt, Human herpesvirus 2
gaugaccucccggccc

SEQ ID NO: 3958293 - RNA, 24 nt, Human herpesvirus 2
gaugaccucccggcccgccgacca

SEQ ID NO: 3958294 - RNA, 18 nt, Human herpesvirus 2
gaugacggcaauaaaaga

SEQ ID NO: 3958295 - RNA, 19 nt, Human herpesvirus 2
gaugauaacgacgaccacc

SEQ ID NO: 3958296 - RNA, 17 nt, Human herpesvirus 2
gaugcgacgccgccccu

SEQ ID NO: 3958297 - RNA, 22 nt, Human herpesvirus 2
gauggggacgacgggcgccccc

SEQ ID NO: 3958298 - RNA, 21 nt, Human herpesvirus 2
gaugggggggaagggaggagg

SEQ ID NO: 3958299 - RNA, 16 nt, Human herpesvirus 2
gauguguucuccugga

SEQ ID NO: 3958300 - RNA, 21 nt, Human herpesvirus 2
gauuccggugugccccacccc

SEQ ID NO: 3958301 - RNA, 11 nt, Human herpesvirus 2
gauuuccccag

SEQ ID NO: 3958302 - RNA, 22 nt, Human herpesvirus 2
gcaacgggugguggccgaacgc

SEQ ID NO: 3958303 - RNA, 14 nt, Human herpesvirus 2
gcaagagccugccg

SEQ ID NO: 3958304 - RNA, 18 nt, Human herpesvirus 2
gcaagcgggcgggguggg

SEQ ID NO: 3958305 - RNA, 12 nt, Human herpesvirus 2
gcaauaaaagaa

SEQ ID NO: 3958306 - RNA, 17 nt, Human herpesvirus 2
gcacccaccggccccgc

SEQ ID NO: 3958307 - RNA, 17 nt, Human herpesvirus 2
gcacccgggccggguga

SEQ ID NO: 3958308 - RNA, 14 nt, Human herpesvirus 2
gcacccucgcacgu

SEQ ID NO: 3958309 - RNA, 13 nt, Human herpesvirus 2
gcaccgcuguccc

SEQ ID NO: 3958310 - RNA, 21 nt, Human herpesvirus 2
gcaccggacgcgcacgugggg

SEQ ID NO: 3958311 - RNA, 18 nt, Human herpesvirus 2
gcaccugcagaugcugcc

SEQ ID NO: 3958312 - RNA, 20 nt, Human herpesvirus 2
gcacgcgcgacugccuccac

SEQ ID NO: 3958313 - RNA, 22 nt, Human herpesvirus 2
gcacgcgcgcaggcuggagcuc

SEQ ID NO: 3958314 - RNA, 17 nt, Human herpesvirus 2
ugcgacggcgucucccg

SEQ ID NO: 3958315 - RNA, 18 nt, Human herpesvirus 2
ugcgacggcgucucccgg

SEQ ID NO: 3958316 - RNA, 19 nt, Human herpesvirus 2
ugcgacggcgucucccggg

SEQ ID NO: 3958317 - RNA, 15 nt, Human herpesvirus 2
ugcgaugacgugggu

SEQ ID NO: 3958318 - RNA, 19 nt, Human herpesvirus 2
ugcgcgagccguccgggaa

SEQ ID NO: 3958319 - RNA, 18 nt, Human herpesvirus 2
ugcgcgcuggucgugggg

SEQ ID NO: 3958320 - RNA, 22 nt, Human herpesvirus 2
ugcguuaacacacaugcugguu

SEQ ID NO: 3958321 - RNA, 23 nt, Human herpesvirus 2
ugcguucuggcggcccuggagcg

SEQ ID NO: 3958322 - RNA, 21 nt, Human herpesvirus 2
uggacggguauaaaggccagg

SEQ ID NO: 3958323 - RNA, 20 nt, Human herpesvirus 2
uggagccaaaccccccggcc

SEQ ID NO: 3958324 - RNA, 14 nt, Human herpesvirus 2
uggagcgcuggugg

SEQ ID NO: 3958325 - RNA, 21 nt, Human herpesvirus 2
uggaggcgccucugcccgacc

SEQ ID NO: 3958326 - RNA, 20 nt, Human herpesvirus 2
uggcaaacacaccgggcugg

SEQ ID NO: 3958327 - RNA, 14 nt, Human herpesvirus 2
uggccgcgaccguc

SEQ ID NO: 3958328 - RNA, 21 nt, Human herpesvirus 2
uggccggggagggcagggccg

SEQ ID NO: 3958329 - RNA, 19 nt, Human herpesvirus 2
uggccggguuuuuggcccu

SEQ ID NO: 3958330 - RNA, 23 nt, Human herpesvirus 2
uggcgaccgucuuugggccccgc

SEQ ID NO: 3958331 - RNA, 22 nt, Human herpesvirus 2
uggcggccgccgcaacacccgg

SEQ ID NO: 3958332 - RNA, 20 nt, Human herpesvirus 2
uggcggcuggggaaagggaa

SEQ ID NO: 3958333 - RNA, 16 nt, Human herpesvirus 2
uggcgucggcggcccc

SEQ ID NO: 3958334 - RNA, 18 nt, Human herpesvirus 2
ugggauaucucacacaga

SEQ ID NO: 3958335 - RNA, 22 nt, Human herpesvirus 2
ugggccugugggucugcgccac

SEQ ID NO: 3958336 - RNA, 18 nt, Human herpesvirus 2
ugggcgcgagccaggcaa

SEQ ID NO: 3958337 - RNA, 14 nt, Human herpesvirus 2
ugggcucggcgucg

SEQ ID NO: 3958338 - RNA, 15 nt, Human herpesvirus 2
uggggaaaucuauug

SEQ ID NO: 3958339 - RNA, 19 nt, Human herpesvirus 2
uggggacgacgggcgcccc

SEQ ID NO: 3958340 - RNA, 13 nt, Human herpesvirus 2
ugggggaagagag

SEQ ID NO: 3958341 - RNA, 12 nt, Human herpesvirus 2
uggggggggucg

SEQ ID NO: 3958342 - RNA, 15 nt, Human herpesvirus 2
uggggggggugugug

SEQ ID NO: 3958343 - RNA, 23 nt, Human herpesvirus 2
uggguguggucguggugcuggcc

SEQ ID NO: 3958344 - RNA, 16 nt, Human herpesvirus 2
ugguccacccgggacg

SEQ ID NO: 3958345 - RNA, 16 nt, Human herpesvirus 2
ugguccccgagcagca

SEQ ID NO: 3958346 - RNA, 17 nt, Human herpesvirus 2
ugguccccgagcagcac

SEQ ID NO: 3958347 - RNA, 21 nt, Human herpesvirus 2
uggucgggcggacguccaggg

SEQ ID NO: 3958348 - RNA, 23 nt, Human herpesvirus 2
uggugcaguuugagcagccgcgc

SEQ ID NO: 3958349 - RNA, 13 nt, Human herpesvirus 2
uggugcgccgccg

SEQ ID NO: 3958350 - RNA, 22 nt, Human herpesvirus 2
ugguggccgaaagaaaaggaag

SEQ ID NO: 3958351 - RNA, 13 nt, Human herpesvirus 2
uggugguggggug

SEQ ID NO: 3958352 - RNA, 17 nt, Human herpesvirus 2
uguaaaacgcgggcggg

SEQ ID NO: 3958353 - RNA, 14 nt, Human herpesvirus 2
uguauucccuugcc

SEQ ID NO: 3958354 - RNA, 21 nt, Human herpesvirus 2
ugucaucguauaccagccgcc

SEQ ID NO: 3958355 - RNA, 16 nt, Human herpesvirus 2
ugucgccggcgugggu

SEQ ID NO: 3958356 - RNA, 21 nt, Human herpesvirus 2
ugucgcggggacagccccggg

SEQ ID NO: 3958357 - RNA, 21 nt, Human herpesvirus 2
ugucugagugucugguuuuuc

SEQ ID NO: 3958358 - RNA, 20 nt, Human herpesvirus 2
ugugauagcgacgacagaac

SEQ ID NO: 3958359 - RNA, 18 nt, Human herpesvirus 2
uguggcggucggccagca

SEQ ID NO: 3958360 - RNA, 16 nt, Human herpesvirus 2
ugugggggcccagguc

SEQ ID NO: 3958361 - RNA, 14 nt, Human herpesvirus 2
uguguucuccugga

SEQ ID NO: 3958362 - RNA, 18 nt, Human herpesvirus 2
uguuccggccguggccug

SEQ ID NO: 3958363 - RNA, 14 nt, Human herpesvirus 2
uguuucccccccua

SEQ ID NO: 3958364 - RNA, 15 nt, Human herpesvirus 2
uguuugugcgggugc

SEQ ID NO: 3958365 - RNA, 14 nt, Human herpesvirus 2
uguuuuucuguugu

SEQ ID NO: 3958366 - RNA, 19 nt, Human herpesvirus 2
uuagggggacgaacaggcg

SEQ ID NO: 3958367 - RNA, 18 nt, Human herpesvirus 2
uuaggucggaggggugag

SEQ ID NO: 3958368 - RNA, 14 nt, Human herpesvirus 2
uuauaagccgccgc

SEQ ID NO: 3958369 - RNA, 13 nt, Human herpesvirus 2
uuauugaccaaau

SEQ ID NO: 3958370 - RNA, 13 nt, Human herpesvirus 2
uucaucacccccg

SEQ ID NO: 3958371 - RNA, 16 nt, Human herpesvirus 2
uuccacacccccuccc

SEQ ID NO: 3958372 - RNA, 12 nt, Human herpesvirus 2
uuccccaagaga

SEQ ID NO: 3958373 - RNA, 22 nt, Human herpesvirus 2
uuccccagcacggaggaacugg

SEQ ID NO: 3958374 - RNA, 22 nt, Human herpesvirus 2
uucccuucgcgagggccccggc

SEQ ID NO: 3958375 - RNA, 18 nt, Human herpesvirus 2
uuccgggagcgggggagg

SEQ ID NO: 3958376 - RNA, 23 nt, Human herpesvirus 2
uuccucaguguuugggaaaucua

SEQ ID NO: 3958377 - RNA, 21 nt, Human herpesvirus 2
uucgcggcggccgcacccacg

SEQ ID NO: 3958378 - RNA, 19 nt, Human herpesvirus 2
uucgugugcuuguguuuuu

SEQ ID NO: 3958379 - RNA, 15 nt, Human herpesvirus 2
uucucguacccccuc

SEQ ID NO: 3958380 - RNA, 22 nt, Human herpesvirus 2
uucuucgcgggcaggccgcggc

SEQ ID NO: 3958381 - RNA, 17 nt, Human herpesvirus 2
uugagaggggggggugg

SEQ ID NO: 3958382 - RNA, 20 nt, Human herpesvirus 2
uugcgcuuuccggcccuccc

SEQ ID NO: 3958383 - RNA, 19 nt, Human herpesvirus 2
uuggacgaucccgggcccu

SEQ ID NO: 3958384 - RNA, 18 nt, Human herpesvirus 2
uuggaggcgccucugccc

SEQ ID NO: 3958385 - RNA, 18 nt, Human herpesvirus 2
uuggcaaacacaccgggc

SEQ ID NO: 3958386 - RNA, 22 nt, Human herpesvirus 2
uuggcaaacacaccgggcuggg

SEQ ID NO: 3958387 - RNA, 21 nt, Human herpesvirus 2
uugggggggguguguguuuuc

SEQ ID NO: 3958388 - RNA, 20 nt, Human herpesvirus 2
uuggucaauaaaccggggcc

SEQ ID NO: 3958389 - RNA, 22 nt, Human herpesvirus 2
uuguaaaacgcgggcgggggcg

SEQ ID NO: 3958390 - RNA, 16 nt, Human herpesvirus 2
uuucagguuccggggg

SEQ ID NO: 3958391 - RNA, 19 nt, Human herpesvirus 2
uuuccggcaacccuccucg

SEQ ID NO: 3958392 - RNA, 23 nt, Human herpesvirus 2
uuuccuccgcgggucccuuccca

SEQ ID NO: 3958393 - RNA, 18 nt, Human herpesvirus 2
uuuugucguuccuuccuc

SEQ ID NO: 3958394 - RNA, 18 nt, Human herpesvirus 2
ccgggucaccggggcgcc

SEQ ID NO: 3958395 - RNA, 15 nt, Human herpesvirus 2
ccgggucggcugucc

SEQ ID NO: 3958396 - RNA, 18 nt, Human herpesvirus 2
ccggguuauaggccacac

SEQ ID NO: 3958397 - RNA, 16 nt, Human herpesvirus 2
ccgguacgccgcggcc

SEQ ID NO: 3958398 - RNA, 15 nt, Human herpesvirus 2
ccgguaugguaauua

SEQ ID NO: 3958399 - RNA, 17 nt, Human herpesvirus 2
ccgguguucggaaccag

SEQ ID NO: 3958400 - RNA, 22 nt, Human herpesvirus 2
ccguaaacugcuuggaggcccu

SEQ ID NO: 3958401 - RNA, 15 nt, Human herpesvirus 2
ccgucccgcccgcca

SEQ ID NO: 3958402 - RNA, 22 nt, Human herpesvirus 2
ccgucgcggccgcccgcgccgc

SEQ ID NO: 3958403 - RNA, 22 nt, Human herpesvirus 2
ccgucgcuccggcucccggccc

SEQ ID NO: 3958404 - RNA, 19 nt, Human herpesvirus 2
ccgugcccccccucguucu

SEQ ID NO: 3958405 - RNA, 21 nt, Human herpesvirus 2
ccgugcugggcgcgagccagg

SEQ ID NO: 3958406 - RNA, 17 nt, Human herpesvirus 2
ccguggcggaggccugu

SEQ ID NO: 3958407 - RNA, 17 nt, Human herpesvirus 2
ccguggggccccagggc

SEQ ID NO: 3958408 - RNA, 19 nt, Human herpesvirus 2
ccguggggccccagggcuu

SEQ ID NO: 3958409 - RNA, 20 nt, Human herpesvirus 2
ccguggguacggacaccccc

SEQ ID NO: 3958410 - RNA, 15 nt, Human herpesvirus 2
ccguguaccucuggg

SEQ ID NO: 3958411 - RNA, 18 nt, Human herpesvirus 2
ccguguaccucugggccc

SEQ ID NO: 3958412 - RNA, 22 nt, Human herpesvirus 2
ccgugucgcuccccuucagccu

SEQ ID NO: 3958413 - RNA, 16 nt, Human herpesvirus 2
ccuaccugcgcgugca

SEQ ID NO: 3958414 - RNA, 16 nt, Human herpesvirus 2
ccucaaacaggccauc

SEQ ID NO: 3958415 - RNA, 15 nt, Human herpesvirus 2
ccucaccccacccca

SEQ ID NO: 3958416 - RNA, 20 nt, Human herpesvirus 2
ccucacgguccucaccgagc

SEQ ID NO: 3958417 - RNA, 13 nt, Human herpesvirus 2
ccucagcgcggcc

SEQ ID NO: 3958418 - RNA, 17 nt, Human herpesvirus 2
ccucccuuccgagcgcg

SEQ ID NO: 3958419 - RNA, 20 nt, Human herpesvirus 2
ccuccgccagcgcccuuccg

SEQ ID NO: 3958420 - RNA, 20 nt, Human herpesvirus 2
ccuccgcccuccgccagcgc

SEQ ID NO: 3958421 - RNA, 22 nt, Human herpesvirus 2
ccuccggggcuugugcccucgu

SEQ ID NO: 3958422 - RNA, 20 nt, Human herpesvirus 2
ccucuguuccuuucccuucu

SEQ ID NO: 3958423 - RNA, 23 nt, Human herpesvirus 2
ccugccguaugcuaauuaaauac

SEQ ID NO: 3958424 - RNA, 21 nt, Human herpesvirus 2
ccugcgaggugcgccagguca

SEQ ID NO: 3958425 - RNA, 21 nt, Human herpesvirus 2
ccugcgccccgacggcccaca

SEQ ID NO: 3958426 - RNA, 14 nt, Human herpesvirus 2
ccugcggcagcgcg

SEQ ID NO: 3958427 - RNA, 17 nt, Human herpesvirus 2
ccugcggcagcgcgccg

SEQ ID NO: 3958428 - RNA, 22 nt, Human herpesvirus 2
ccuggagcgccagacgggccgg

SEQ ID NO: 3958429 - RNA, 20 nt, Human herpesvirus 2
ccuggccguccggggggacg

SEQ ID NO: 3958430 - RNA, 14 nt, Human herpesvirus 2
ccuggcgcaccugc

SEQ ID NO: 3958431 - RNA, 14 nt, Human herpesvirus 2
ccugggccuguggg

SEQ ID NO: 3958432 - RNA, 18 nt, Human herpesvirus 2
ccuggguccgggggccug

SEQ ID NO: 3958433 - RNA, 19 nt, Human herpesvirus 2
ccuguccccgcccccccca

SEQ ID NO: 3958434 - RNA, 17 nt, Human herpesvirus 2
ccuguggggccugcugu

SEQ ID NO: 3958435 - RNA, 23 nt, Human herpesvirus 2
ccuguuuuuacgggccccggaca

SEQ ID NO: 3958436 - RNA, 12 nt, Human herpesvirus 2
ccuucuucgccc

SEQ ID NO: 3958437 - RNA, 17 nt, Human herpesvirus 2
ccuugugugguuuauuc

SEQ ID NO: 3958438 - RNA, 13 nt, Human herpesvirus 2
ccuuuaagacaga

SEQ ID NO: 3958439 - RNA, 19 nt, Human herpesvirus 2
ccuuuccaccccccuuccc

SEQ ID NO: 3958440 - RNA, 15 nt, Human herpesvirus 2
ccuuucccccuuccc

SEQ ID NO: 3958441 - RNA, 21 nt, Human herpesvirus 2
cgaaccuguuuuuacgggccc

SEQ ID NO: 3958442 - RNA, 17 nt, Human herpesvirus 2
cgaacgggggucccgcc

SEQ ID NO: 3958443 - RNA, 15 nt, Human herpesvirus 2
cgacaacguccgggc

SEQ ID NO: 3958444 - RNA, 14 nt, Human herpesvirus 2
cgacacccgggccc

SEQ ID NO: 3958445 - RNA, 13 nt, Human herpesvirus 2
cgacagcggggac

SEQ ID NO: 3958446 - RNA, 14 nt, Human herpesvirus 2
cgacagcggggacc

SEQ ID NO: 3958447 - RNA, 15 nt, Human herpesvirus 2
cgacaucaaccaccu

SEQ ID NO: 3958448 - RNA, 17 nt, Human herpesvirus 2
cgaccagcgccgggugg

SEQ ID NO: 3958449 - RNA, 15 nt, Human herpesvirus 2
cgaccgacgggcccc

SEQ ID NO: 3958450 - RNA, 18 nt, Human herpesvirus 2
cgaccgccccgcgccggc

SEQ ID NO: 3958451 - RNA, 17 nt, Human herpesvirus 2
cgaccgucuuugggccc

SEQ ID NO: 3958452 - RNA, 18 nt, Human herpesvirus 2
cgacgcaaccuccggggc

SEQ ID NO: 3958453 - RNA, 13 nt, Human herpesvirus 2
cgacgccuggcgg

SEQ ID NO: 3958454 - RNA, 21 nt, Human herpesvirus 2
cgacgcgcgcgcccccgaccc

SEQ ID NO: 3958455 - RNA, 20 nt, Human herpesvirus 2
cgagagcgccgucgggcccc

SEQ ID NO: 3958456 - RNA, 17 nt, Human herpesvirus 2
cgagcccguggcccacg

SEQ ID NO: 3958457 - RNA, 19 nt, Human herpesvirus 2
cgagcucccugcggcuggc

SEQ ID NO: 3958458 - RNA, 13 nt, Human herpesvirus 2
cgagcuggcccug

SEQ ID NO: 3958459 - RNA, 15 nt, Human herpesvirus 2
cgagggcgagcucgg

SEQ ID NO: 3958460 - RNA, 21 nt, Human herpesvirus 2
cgaggugucccgccugugugc

SEQ ID NO: 3958461 - RNA, 14 nt, Human herpesvirus 2
cgaucgugcugcgc

SEQ ID NO: 3958462 - RNA, 13 nt, Human herpesvirus 2
cgaugggagcccc

SEQ ID NO: 3958463 - RNA, 15 nt, Human herpesvirus 2
cgcaccccaccccug

SEQ ID NO: 3958464 - RNA, 14 nt, Human herpesvirus 2
cgcacccuugcccg

SEQ ID NO: 3958465 - RNA, 15 nt, Human herpesvirus 2
cgcacgcggggaccc

SEQ ID NO: 3958466 - RNA, 21 nt, Human herpesvirus 2
cgcacucccgaaaccgcaggc

SEQ ID NO: 3958467 - RNA, 14 nt, Human herpesvirus 2
cgcagaccaccucg

SEQ ID NO: 3958468 - RNA, 12 nt, Human herpesvirus 2
cgcagcguccgg

SEQ ID NO: 3958469 - RNA, 22 nt, Human herpesvirus 2
cgcaggaacguguugaccugcu

SEQ ID NO: 3958470 - RNA, 21 nt, Human herpesvirus 2
cgcaggcuggagcucugccug

SEQ ID NO: 3958471 - RNA, 19 nt, Human herpesvirus 2
cgcagucuggucgaggugg

SEQ ID NO: 3958472 - RNA, 20 nt, Human herpesvirus 2
cgcaguuucaccgccccagc

SEQ ID NO: 3958473 - RNA, 15 nt, Human herpesvirus 2
cgcauaaagguccgg

SEQ ID NO: 3958474 - RNA, 21 nt, Human herpesvirus 2
cgcauaucgccauggaucccg

SEQ ID NO: 3958475 - RNA, 22 nt, Human herpesvirus 2
cgcaugacgacacgucccgcca

SEQ ID NO: 3958476 - RNA, 13 nt, Human herpesvirus 2
cgcaugguaauua

SEQ ID NO: 3958477 - RNA, 15 nt, Human herpesvirus 2
cgccaccguccaccu

SEQ ID NO: 3958478 - RNA, 18 nt, Human herpesvirus 2
cgccacgguggugcaguu

SEQ ID NO: 3958479 - RNA, 14 nt, Human herpesvirus 2
cgccagcugcuggc

SEQ ID NO: 3958480 - RNA, 14 nt, Human herpesvirus 2
cgccaggccccccg

SEQ ID NO: 3958481 - RNA, 21 nt, Human herpesvirus 2
cgccaugcaacgccgggcgcg

SEQ ID NO: 3958482 - RNA, 20 nt, Human herpesvirus 2
cgccauuucaaauaaaaggc

SEQ ID NO: 3958483 - RNA, 14 nt, Human herpesvirus 2
cgcccaacccgagc

SEQ ID NO: 3958484 - RNA, 17 nt, Human herpesvirus 2
cgcccaagcggcccgag

SEQ ID NO: 3958485 - RNA, 16 nt, Human herpesvirus 2
cgcccccacccccgag

SEQ ID NO: 3958486 - RNA, 15 nt, Human herpesvirus 2
cgcccccgacccggg

SEQ ID NO: 3958487 - RNA, 16 nt, Human herpesvirus 2
cgcccccgcggccucc

SEQ ID NO: 3958488 - RNA, 13 nt, Human herpesvirus 2
cgcccccgcuggc

SEQ ID NO: 3958489 - RNA, 17 nt, Human herpesvirus 2
cgcccccgcuggcggga

SEQ ID NO: 3958490 - RNA, 15 nt, Human herpesvirus 2
cgcccccgugccugu

SEQ ID NO: 3958491 - RNA, 15 nt, Human herpesvirus 2
cgccccgcgccggcu

SEQ ID NO: 3958492 - RNA, 19 nt, Human herpesvirus 2
cgccccgcgccggcuuccc

SEQ ID NO: 3958493 - RNA, 14 nt, Human herpesvirus 2
cgcccgccgcccuc

SEQ ID NO: 3958494 - RNA, 23 nt, Human herpesvirus 2
cgcccgcgugccgcagaccaccu

SEQ ID NO: 3958495 - RNA, 18 nt, Human herpesvirus 2
cgcccggagcggugggga

SEQ ID NO: 3958496 - RNA, 20 nt, Human herpesvirus 2
cgcccgggugaccacgcgca

SEQ ID NO: 3958497 - RNA, 22 nt, Human herpesvirus 2
cgcccucgagaugugccuucca

SEQ ID NO: 3958498 - RNA, 18 nt, Human herpesvirus 2
cgcccuuccgcguccgcg

SEQ ID NO: 3958499 - RNA, 12 nt, Human herpesvirus 2
cgccgccccgac

SEQ ID NO: 3958500 - RNA, 14 nt, Human herpesvirus 2
cgccgcgcgggccc

SEQ ID NO: 3958501 - RNA, 18 nt, Human herpesvirus 2
cgccgcgggggaggcgcg

SEQ ID NO: 3958502 - RNA, 20 nt, Human herpesvirus 2
cgccgcgggggaggcgcgcg

SEQ ID NO: 3958503 - RNA, 18 nt, Human herpesvirus 2
cgccgcuguggcccuggc

SEQ ID NO: 3958504 - RNA, 19 nt, Human herpesvirus 2
cgccggccaaccgcgcgcc

SEQ ID NO: 3958505 - RNA, 21 nt, Human herpesvirus 2
cgccggccaaccgcgcgccgc

SEQ ID NO: 3958506 - RNA, 19 nt, Human herpesvirus 2
cgccguggcggaggccugu

SEQ ID NO: 3958507 - RNA, 23 nt, Human herpesvirus 2
cgccucgauguauggcgccuucu

SEQ ID NO: 3958508 - RNA, 18 nt, Human herpesvirus 2
cgccucgggggcaggggg

SEQ ID NO: 3958509 - RNA, 17 nt, Human herpesvirus 2
cgccucugcccgaccgg

SEQ ID NO: 3958510 - RNA, 13 nt, Human herpesvirus 2
cgcgacacgcgcc

SEQ ID NO: 3958511 - RNA, 17 nt, Human herpesvirus 2
gcacccccggaccccgc

SEQ ID NO: 3958512 - RNA, 18 nt, Human herpesvirus 2
gcacgcgcgcaggcugga

SEQ ID NO: 3958513 - RNA, 22 nt, Human herpesvirus 2
gcacgcggggacccgccagaga

SEQ ID NO: 3958514 - RNA, 14 nt, Human herpesvirus 2
gcacgcggugcguc

SEQ ID NO: 3958515 - RNA, 13 nt, Human herpesvirus 2
gcacggaggaacu

SEQ ID NO: 3958516 - RNA, 21 nt, Human herpesvirus 2
gcagacgcguauucaccgacc

SEQ ID NO: 3958517 - RNA, 16 nt, Human herpesvirus 2
gcagagagauuucccc

SEQ ID NO: 3958518 - RNA, 15 nt, Human herpesvirus 2
gcagcacggcggcca

SEQ ID NO: 3958519 - RNA, 15 nt, Human herpesvirus 2
gcagcgcgggcgacg

SEQ ID NO: 3958520 - RNA, 23 nt, Human herpesvirus 2
gcagcgcgggcgacgggcggcug

SEQ ID NO: 3958521 - RNA, 20 nt, Human herpesvirus 2
gcagcguaacgcacccccgg

SEQ ID NO: 3958522 - RNA, 14 nt, Human herpesvirus 2
gcagcucccccgcg

SEQ ID NO: 3958523 - RNA, 18 nt, Human herpesvirus 2
gcaggcgcgccaccgccc

SEQ ID NO: 3958524 - RNA, 19 nt, Human herpesvirus 2
gcaggcguguugggaaggg

SEQ ID NO: 3958525 - RNA, 19 nt, Human herpesvirus 2
gcaggcuggagcucugccu

SEQ ID NO: 3958526 - RNA, 21 nt, Human herpesvirus 2
gcagggccgcugggggggcgg

SEQ ID NO: 3958527 - RNA, 13 nt, Human herpesvirus 2
gcaggugaugggc

SEQ ID NO: 3958528 - RNA, 15 nt, Human herpesvirus 2
gcaucacggcccacc

SEQ ID NO: 3958529 - RNA, 13 nt, Human herpesvirus 2
gcaucgggagggg

SEQ ID NO: 3958530 - RNA, 16 nt, Human herpesvirus 2
gcaugguaauuagcaa

SEQ ID NO: 3958531 - RNA, 15 nt, Human herpesvirus 2
gccaacagggagucc

SEQ ID NO: 3958532 - RNA, 16 nt, Human herpesvirus 2
gccaaccgcgcgccgc

SEQ ID NO: 3958533 - RNA, 17 nt, Human herpesvirus 2
gccaacgcgggcguccc

SEQ ID NO: 3958534 - RNA, 12 nt, Human herpesvirus 2
gccacccugggu

SEQ ID NO: 3958535 - RNA, 16 nt, Human herpesvirus 2
gccacgucgggguccc

SEQ ID NO: 3958536 - RNA, 17 nt, Human herpesvirus 2
gccagccgcccccgccg

SEQ ID NO: 3958537 - RNA, 22 nt, Human herpesvirus 2
gccaggaccgccugccccgcgg

SEQ ID NO: 3958538 - RNA, 23 nt, Human herpesvirus 2
gccaggagguccuggaggggggu

SEQ ID NO: 3958539 - RNA, 16 nt, Human herpesvirus 2
gccagggcuggcaccg

SEQ ID NO: 3958540 - RNA, 13 nt, Human herpesvirus 2
gccagggcuggga

SEQ ID NO: 3958541 - RNA, 22 nt, Human herpesvirus 2
gccaggucagcgaucgccagcc

SEQ ID NO: 3958542 - RNA, 13 nt, Human herpesvirus 2
gcccagcacaggc

SEQ ID NO: 3958543 - RNA, 19 nt, Human herpesvirus 2
gccccagggggcggcgccg

SEQ ID NO: 3958544 - RNA, 19 nt, Human herpesvirus 2
gcccccccuccgcgcagga

SEQ ID NO: 3958545 - RNA, 16 nt, Human herpesvirus 2
gccccccgggagccgc

SEQ ID NO: 3958546 - RNA, 23 nt, Human herpesvirus 2
gccccccgucccgagccccgcga

SEQ ID NO: 3958547 - RNA, 16 nt, Human herpesvirus 2
gcccccgcggccuccc

SEQ ID NO: 3958548 - RNA, 19 nt, Human herpesvirus 2
gcccccgcuggcgggagcc

SEQ ID NO: 3958549 - RNA, 15 nt, Human herpesvirus 2
gcccccggcccugcg

SEQ ID NO: 3958550 - RNA, 23 nt, Human herpesvirus 2
gccccgcgugcagcgcgggcgac

SEQ ID NO: 3958551 - RNA, 16 nt, Human herpesvirus 2
gccccucgcccccgcg

SEQ ID NO: 3958552 - RNA, 21 nt, Human herpesvirus 2
gccccuggugaagacgacccc

SEQ ID NO: 3958553 - RNA, 17 nt, Human herpesvirus 2
gccccuguuggagccgg

SEQ ID NO: 3958554 - RNA, 14 nt, Human herpesvirus 2
gcccgaccagcgcc

SEQ ID NO: 3958555 - RNA, 12 nt, Human herpesvirus 2
gcccgaccuguu

SEQ ID NO: 3958556 - RNA, 22 nt, Human herpesvirus 2
gcccgccccagggggcggcgcc

SEQ ID NO: 3958557 - RNA, 15 nt, Human herpesvirus 2
gcccgcccgccgccc

SEQ ID NO: 3958558 - RNA, 18 nt, Human herpesvirus 2
gcccgcgccgcgacggcc

SEQ ID NO: 3958559 - RNA, 13 nt, Human herpesvirus 2
gcccgcggaccac

SEQ ID NO: 3958560 - RNA, 15 nt, Human herpesvirus 2
gcccggccgcgacaa

SEQ ID NO: 3958561 - RNA, 13 nt, Human herpesvirus 2
gcccggcgccgcc

SEQ ID NO: 3958562 - RNA, 23 nt, Human herpesvirus 2
gcccggcgccgccccgccgcucc

SEQ ID NO: 3958563 - RNA, 16 nt, Human herpesvirus 2
gcccuccgccagcgcc

SEQ ID NO: 3958564 - RNA, 15 nt, Human herpesvirus 2
gcccuccgcuacacg

SEQ ID NO: 3958565 - RNA, 17 nt, Human herpesvirus 2
gcccucgcugcucuccc

SEQ ID NO: 3958566 - RNA, 21 nt, Human herpesvirus 2
gcccucucgaucccgaagcca

SEQ ID NO: 3958567 - RNA, 14 nt, Human herpesvirus 2
gccgaacgccucac

SEQ ID NO: 3958568 - RNA, 16 nt, Human herpesvirus 2
gccgacgaccugcagc

SEQ ID NO: 3958569 - RNA, 13 nt, Human herpesvirus 2
gccgccauccuca

SEQ ID NO: 3958570 - RNA, 22 nt, Human herpesvirus 2
gccgccauccucaaacaggcca

SEQ ID NO: 3958571 - RNA, 16 nt, Human herpesvirus 2
gccgcccaagcggccc

SEQ ID NO: 3958572 - RNA, 21 nt, Human herpesvirus 2
gccgccccgacucugugucuu

SEQ ID NO: 3958573 - RNA, 13 nt, Human herpesvirus 2
gccgccccgcagu

SEQ ID NO: 3958574 - RNA, 21 nt, Human herpesvirus 2
gccgcccgcgcaucacggccc

SEQ ID NO: 3958575 - RNA, 13 nt, Human herpesvirus 2
gccgccgaacagc

SEQ ID NO: 3958576 - RNA, 19 nt, Human herpesvirus 2
gccgccgagcgucaggccc

SEQ ID NO: 3958577 - RNA, 21 nt, Human herpesvirus 2
gccgccgagcgucaggcccgc

SEQ ID NO: 3958578 - RNA, 23 nt, Human herpesvirus 2
gccgccgagcgucaggcccgccg

SEQ ID NO: 3958579 - RNA, 15 nt, Human herpesvirus 2
gccgccggccacgcc

SEQ ID NO: 3958580 - RNA, 19 nt, Human herpesvirus 2
gccgcgacccacguccgua

SEQ ID NO: 3958581 - RNA, 15 nt, Human herpesvirus 2
gccgcgacggccccg

SEQ ID NO: 3958582 - RNA, 15 nt, Human herpesvirus 2
gccgcgccgcugccc

SEQ ID NO: 3958583 - RNA, 18 nt, Human herpesvirus 2
gccgcgcgacggccgaga

SEQ ID NO: 3958584 - RNA, 22 nt, Human herpesvirus 2
gccggccaauucuucccggagc

SEQ ID NO: 3958585 - RNA, 16 nt, Human herpesvirus 2
gccggggcggccccga

SEQ ID NO: 3958586 - RNA, 20 nt, Human herpesvirus 2
gccgggucaccggggcgccc

SEQ ID NO: 3958587 - RNA, 15 nt, Human herpesvirus 2
gccggguggcgccuc

SEQ ID NO: 3958588 - RNA, 14 nt, Human herpesvirus 2
gccgguagugcagg

SEQ ID NO: 3958589 - RNA, 18 nt, Human herpesvirus 2
gccgguagugcagguggg

SEQ ID NO: 3958590 - RNA, 20 nt, Human herpesvirus 2
gccgucgcacgcgcgcaggc

SEQ ID NO: 3958591 - RNA, 20 nt, Human herpesvirus 2
gccgucguuggucggugggu

SEQ ID NO: 3958592 - RNA, 17 nt, Human herpesvirus 2
gccguggacgcccccuc

SEQ ID NO: 3958593 - RNA, 15 nt, Human herpesvirus 2
gccuacgucugggug

SEQ ID NO: 3958594 - RNA, 12 nt, Human herpesvirus 2
gccucccaacgc

SEQ ID NO: 3958595 - RNA, 14 nt, Human herpesvirus 2
gccuccccgcugga

SEQ ID NO: 3958596 - RNA, 21 nt, Human herpesvirus 2
gccucccgcaagagccugccg

SEQ ID NO: 3958597 - RNA, 14 nt, Human herpesvirus 2
gccuccgcccuccg

SEQ ID NO: 3958598 - RNA, 16 nt, Human herpesvirus 2
gccuccgcccuccgcc

SEQ ID NO: 3958599 - RNA, 18 nt, Human herpesvirus 2
gccucgcgucgggccaga

SEQ ID NO: 3958600 - RNA, 17 nt, Human herpesvirus 2
gccucguggucgggggc

SEQ ID NO: 3958601 - RNA, 17 nt, Human herpesvirus 2
gccucuuugggccgugg

SEQ ID NO: 3958602 - RNA, 19 nt, Human herpesvirus 2
gccugccgucgcacgcgcg

SEQ ID NO: 3958603 - RNA, 16 nt, Human herpesvirus 2
gccugugggucugcgc

SEQ ID NO: 3958604 - RNA, 20 nt, Human herpesvirus 2
gccuugaacgucacgcaggc

SEQ ID NO: 3958605 - RNA, 21 nt, Human herpesvirus 2
gccuuucccguggcccuccac

SEQ ID NO: 3958606 - RNA, 22 nt, Human herpesvirus 2
gcgacacgcgcccggggcgggu

SEQ ID NO: 3958607 - RNA, 19 nt, Human herpesvirus 2
gcgaccccgauaguccccc

SEQ ID NO: 3958608 - RNA, 16 nt, Human herpesvirus 2
gcgaccgucgccgccg

SEQ ID NO: 3958609 - RNA, 19 nt, Human herpesvirus 2
gcgaccgucuuugggcccc

SEQ ID NO: 3958610 - RNA, 23 nt, Human herpesvirus 2
gcgaccgucuuugggccccgccc

SEQ ID NO: 3958611 - RNA, 15 nt, Human herpesvirus 2
gcgacgccaggcccc

SEQ ID NO: 3958612 - RNA, 15 nt, Human herpesvirus 2
gcgauccugggccug

SEQ ID NO: 3958613 - RNA, 20 nt, Human herpesvirus 2
gcgaugaccucccggcccgc

SEQ ID NO: 3958614 - RNA, 22 nt, Human herpesvirus 2
gcgcaggaucgugugcacgaaa

SEQ ID NO: 3958615 - RNA, 15 nt, Human herpesvirus 2
gcgccccgccggggc

SEQ ID NO: 3958616 - RNA, 16 nt, Human herpesvirus 2
gcgccgcgcccgcgug

SEQ ID NO: 3958617 - RNA, 17 nt, Human herpesvirus 2
gcgccgcgcccgcgugc

SEQ ID NO: 3958618 - RNA, 24 nt, Human herpesvirus 2
gcgccgcuacugcgccaccgucca

SEQ ID NO: 3958619 - RNA, 13 nt, Human herpesvirus 2
gcgccgggcagac

SEQ ID NO: 3958620 - RNA, 19 nt, Human herpesvirus 2
gcgccugcgccccgacggc

SEQ ID NO: 3958621 - RNA, 15 nt, Human herpesvirus 2
gcgcgccaccgcccg

SEQ ID NO: 3958622 - RNA, 19 nt, Human herpesvirus 2
gcgcgccccccccccacca

SEQ ID NO: 3958623 - RNA, 13 nt, Human herpesvirus 2
gcgcggacgcggc

SEQ ID NO: 3958624 - RNA, 14 nt, Human herpesvirus 2
gcgcgggcggcgcc

SEQ ID NO: 3958625 - RNA, 17 nt, Human herpesvirus 2
gcgcucauggccggaga

SEQ ID NO: 3958626 - RNA, 14 nt, Human herpesvirus 2
ggccccggccgccu

SEQ ID NO: 3958627 - RNA, 15 nt, Human herpesvirus 2
ggcccggccgccggu

SEQ ID NO: 3958628 - RNA, 14 nt, Human herpesvirus 2
ggcccggccgcgac

SEQ ID NO: 3958629 - RNA, 13 nt, Human herpesvirus 2
ggcccuccacgcc

SEQ ID NO: 3958630 - RNA, 21 nt, Human herpesvirus 2
ggccgagcguaucggccagga

SEQ ID NO: 3958631 - RNA, 22 nt, Human herpesvirus 2
ggccgcagggauaggggcaggc

SEQ ID NO: 3958632 - RNA, 14 nt, Human herpesvirus 2
ggccgcccccagca

SEQ ID NO: 3958633 - RNA, 19 nt, Human herpesvirus 2
ggccgccgcaacacccggc

SEQ ID NO: 3958634 - RNA, 23 nt, Human herpesvirus 2
ggccgccgcaacacccggcgcca

SEQ ID NO: 3958635 - RNA, 16 nt, Human herpesvirus 2
ggccgcgacaagaccc

SEQ ID NO: 3958636 - RNA, 24 nt, Human herpesvirus 2
ggccgggagcguggggcgcgcacc

SEQ ID NO: 3958637 - RNA, 19 nt, Human herpesvirus 2
ggccggggagggcagggcc

SEQ ID NO: 3958638 - RNA, 13 nt, Human herpesvirus 2
ccccgggcagccg

SEQ ID NO: 3958639 - RNA, 21 nt, Human herpesvirus 2
ccccuaaccgcgcgccuccuc

SEQ ID NO: 3958640 - RNA, 16 nt, Human herpesvirus 2
ccccucccccgcuucu

SEQ ID NO: 3958641 - RNA, 17 nt, Human herpesvirus 2
cccgaacagccccuggg

SEQ ID NO: 3958642 - RNA, 19 nt, Human herpesvirus 2
cccgaauccggggcgugcu

SEQ ID NO: 3958643 - RNA, 14 nt, Human herpesvirus 2
cccgagagcccagg

SEQ ID NO: 3958644 - RNA, 18 nt, Human herpesvirus 2
cccgcccccgacgggcgc

SEQ ID NO: 3958645 - RNA, 16 nt, Human herpesvirus 2
cccgccucccggccgc

SEQ ID NO: 3958646 - RNA, 17 nt, Human herpesvirus 2
cccgcgccucgggcggc

SEQ ID NO: 3958647 - RNA, 20 nt, Human herpesvirus 2
cccgcguauauauccgcgag

SEQ ID NO: 3958648 - RNA, 20 nt, Human herpesvirus 2
cccgcguccgacacccgggc

SEQ ID NO: 3958649 - RNA, 20 nt, Human herpesvirus 2
cccgcgugccgcagaccacc

SEQ ID NO: 3958650 - RNA, 17 nt, Human herpesvirus 2
cccgcgugccuggccgc

SEQ ID NO: 3958651 - RNA, 14 nt, Human herpesvirus 2
cccggcccgggccc

SEQ ID NO: 3958652 - RNA, 21 nt, Human herpesvirus 2
cccggccgcucgcugcagggc

SEQ ID NO: 3958653 - RNA, 14 nt, Human herpesvirus 2
cccggcguggagcg

SEQ ID NO: 3958654 - RNA, 12 nt, Human herpesvirus 2
cccgggcacgcg

SEQ ID NO: 3958655 - RNA, 20 nt, Human herpesvirus 2
cccggggcccucgagaugcg

SEQ ID NO: 3958656 - RNA, 21 nt, Human herpesvirus 2
cccggggcggguaggccagag

SEQ ID NO: 3958657 - RNA, 15 nt, Human herpesvirus 2
cccggggggggccuc

SEQ ID NO: 3958658 - RNA, 19 nt, Human herpesvirus 2
cccggucccccggaccccg

SEQ ID NO: 3958659 - RNA, 16 nt, Human herpesvirus 2
cccgugugggagggug

SEQ ID NO: 3958660 - RNA, 13 nt, Human herpesvirus 2
cccucaccccacc

SEQ ID NO: 3958661 - RNA, 16 nt, Human herpesvirus 2
cccucaccccacccca

SEQ ID NO: 3958662 - RNA, 20 nt, Human herpesvirus 2
cccuccucgcugcgccgggc

SEQ ID NO: 3958663 - RNA, 14 nt, Human herpesvirus 2
cccucgcugcucuc

SEQ ID NO: 3958664 - RNA, 19 nt, Human herpesvirus 2
cccucguucugcugcaccg

SEQ ID NO: 3958665 - RNA, 14 nt, Human herpesvirus 2
cccuguuggagccg

SEQ ID NO: 3958666 - RNA, 15 nt, Human herpesvirus 2
cccuguuggagccgg

SEQ ID NO: 3958667 - RNA, 15 nt, Human herpesvirus 2
cccuugcccgcuucc

SEQ ID NO: 3958668 - RNA, 14 nt, Human herpesvirus 2
ccgaagcggccccg

SEQ ID NO: 3958669 - RNA, 20 nt, Human herpesvirus 2
ccgaaggaggaaaguggggg

SEQ ID NO: 3958670 - RNA, 17 nt, Human herpesvirus 2
ccgacccuguggcgggc

SEQ ID NO: 3958671 - RNA, 15 nt, Human herpesvirus 2
ccgaccgggcggugc

SEQ ID NO: 3958672 - RNA, 18 nt, Human herpesvirus 2
ccgacgacgugcgcgugg

SEQ ID NO: 3958673 - RNA, 15 nt, Human herpesvirus 2
ccgacgcgaggcgcg

SEQ ID NO: 3958674 - RNA, 17 nt, Human herpesvirus 2
ccgacggcggggccccg

SEQ ID NO: 3958675 - RNA, 15 nt, Human herpesvirus 2
ccgacguggcccgcc

SEQ ID NO: 3958676 - RNA, 16 nt, Human herpesvirus 2
ccgacuuccgugcccc

SEQ ID NO: 3958677 - RNA, 15 nt, Human herpesvirus 2
ccgagagcccaggga

SEQ ID NO: 3958678 - RNA, 15 nt, Human herpesvirus 2
ccgagcgcgggggac

SEQ ID NO: 3958679 - RNA, 17 nt, Human herpesvirus 2
ccgaguccguaugcaac

SEQ ID NO: 3958680 - RNA, 12 nt, Human herpesvirus 2
ccgaugcccagu

SEQ ID NO: 3958681 - RNA, 15 nt, Human herpesvirus 2
ccgcacccgggccgg

SEQ ID NO: 3958682 - RNA, 16 nt, Human herpesvirus 2
ccgcagaccaccucgc

SEQ ID NO: 3958683 - RNA, 22 nt, Human herpesvirus 2
ccgcagccuauguucgcgggcg

SEQ ID NO: 3958684 - RNA, 19 nt, Human herpesvirus 2
ccgcagggauaggggcagg

SEQ ID NO: 3958685 - RNA, 23 nt, Human herpesvirus 2
ccgcaguuucaccgccccagcac

SEQ ID NO: 3958686 - RNA, 22 nt, Human herpesvirus 2
ccgcauauacugcugggccaug

SEQ ID NO: 3958687 - RNA, 18 nt, Human herpesvirus 2
ccgccaacgcgcuguggc

SEQ ID NO: 3958688 - RNA, 23 nt, Human herpesvirus 2
ccgccagagacccugccccccgg

SEQ ID NO: 3958689 - RNA, 14 nt, Human herpesvirus 2
ccgccagcagucgg

SEQ ID NO: 3958690 - RNA, 13 nt, Human herpesvirus 2
ccgcccccacccc

SEQ ID NO: 3958691 - RNA, 12 nt, Human herpesvirus 2
ccgccgcccgcg

SEQ ID NO: 3958692 - RNA, 15 nt, Human herpesvirus 2
ccgccuccggcccga

SEQ ID NO: 3958693 - RNA, 21 nt, Human herpesvirus 2
ccgcgaccaccaaggcccgga

SEQ ID NO: 3958694 - RNA, 23 nt, Human herpesvirus 2
ccgcgagcgccgcuacugcgcca

SEQ ID NO: 3958695 - RNA, 13 nt, Human herpesvirus 2
ccgcgcgccgccg

SEQ ID NO: 3958696 - RNA, 16 nt, Human herpesvirus 2
ccgcggccccacgguc

SEQ ID NO: 3958697 - RNA, 22 nt, Human herpesvirus 2
ccgcgguggcgucggcggcccc

SEQ ID NO: 3958698 - RNA, 14 nt, Human herpesvirus 2
ccgcgugccgcaga

SEQ ID NO: 3958699 - RNA, 19 nt, Human herpesvirus 2
ccgcuacugcgccaccguc

SEQ ID NO: 3958700 - RNA, 20 nt, Human herpesvirus 2
ccgcugugccagguggcccu

SEQ ID NO: 3958701 - RNA, 19 nt, Human herpesvirus 2
ccgcuuuauaggacgcgcu

SEQ ID NO: 3958702 - RNA, 14 nt, Human herpesvirus 2
ccggaaccccucug

SEQ ID NO: 3958703 - RNA, 15 nt, Human herpesvirus 2
ccggagacguccuug

SEQ ID NO: 3958704 - RNA, 22 nt, Human herpesvirus 2
ccggccaaccucauccgcggcg

SEQ ID NO: 3958705 - RNA, 14 nt, Human herpesvirus 2
ccggcccaccccca

SEQ ID NO: 3958706 - RNA, 15 nt, Human herpesvirus 2
ccggcccgcgucccc

SEQ ID NO: 3958707 - RNA, 15 nt, Human herpesvirus 2
ccggcccggcccgcu

SEQ ID NO: 3958708 - RNA, 14 nt, Human herpesvirus 2
ccggccgccauccc

SEQ ID NO: 3958709 - RNA, 17 nt, Human herpesvirus 2
ccggccgccauccccgc

SEQ ID NO: 3958710 - RNA, 19 nt, Human herpesvirus 2
ccggccgcgacaagacccg

SEQ ID NO: 3958711 - RNA, 14 nt, Human herpesvirus 2
ccggcgccaugagc

SEQ ID NO: 3958712 - RNA, 16 nt, Human herpesvirus 2
ccggcggagccccgga

SEQ ID NO: 3958713 - RNA, 19 nt, Human herpesvirus 2
ccggcguggagcgccgggc

SEQ ID NO: 3958714 - RNA, 15 nt, Human herpesvirus 2
ccggcgugggugacu

SEQ ID NO: 3958715 - RNA, 12 nt, Human herpesvirus 2
ccgggcccggcc

SEQ ID NO: 3958716 - RNA, 16 nt, Human herpesvirus 2
ccgggcccggccgccg

SEQ ID NO: 3958717 - RNA, 13 nt, Human herpesvirus 2
ccgggcccuuggg

SEQ ID NO: 3958718 - RNA, 18 nt, Human herpesvirus 2
ccgggcgccggggcccca

SEQ ID NO: 3958719 - RNA, 20 nt, Human herpesvirus 2
ccgggcguuauaagccgccg

SEQ ID NO: 3958720 - RNA, 16 nt, Human herpesvirus 2
ccggggaaacaggcac

SEQ ID NO: 3958721 - RNA, 12 nt, Human herpesvirus 2
ccggggcacgcg

SEQ ID NO: 3958722 - RNA, 13 nt, Human herpesvirus 2
ccgggggccuggu

SEQ ID NO: 3958723 - RNA, 13 nt, Human herpesvirus 2
ccggggggcgugg

SEQ ID NO: 3958724 - RNA, 18 nt, Human herpesvirus 2
ccgggggggggcaagugc

SEQ ID NO: 3958725 - RNA, 21 nt, Human herpesvirus 2
ccgggggggggcaagugcagu

SEQ ID NO: 3958726 - RNA, 22 nt, Human herpesvirus 2
ccgggggggggcaagugcagua

SEQ ID NO: 3958727 - RNA, 17 nt, Human herpesvirus 2
ccggggggucggcaugc

SEQ ID NO: 3958728 - RNA, 16 nt, Human herpesvirus 2
ccgggggucgcacgcc

SEQ ID NO: 3958729 - RNA, 13 nt, Human herpesvirus 2
cgcaaccuccggg

SEQ ID NO: 3958730 - RNA, 16 nt, Human herpesvirus 2
cgcacccaccggcccc

SEQ ID NO: 3958731 - RNA, 13 nt, Human herpesvirus 2
cgcacccuugccc

SEQ ID NO: 3958732 - RNA, 14 nt, Human herpesvirus 2
cgcaccgcuguccc

SEQ ID NO: 3958733 - RNA, 14 nt, Human herpesvirus 2
cgcacgcggggacc

SEQ ID NO: 3958734 - RNA, 18 nt, Human herpesvirus 2
cgcagcguccggcuggcg

SEQ ID NO: 3958735 - RNA, 19 nt, Human herpesvirus 2
cgcaucacggcccaccugc

SEQ ID NO: 3958736 - RNA, 13 nt, Human herpesvirus 2
cgcaucgccgccg

SEQ ID NO: 3958737 - RNA, 14 nt, Human herpesvirus 2
cgcaucuacgaccc

SEQ ID NO: 3958738 - RNA, 16 nt, Human herpesvirus 2
cgccaagcgccccgcg

SEQ ID NO: 3958739 - RNA, 14 nt, Human herpesvirus 2
cgccaccggccugg

SEQ ID NO: 3958740 - RNA, 20 nt, Human herpesvirus 2
cgccagcucggacaccagca

SEQ ID NO: 3958741 - RNA, 16 nt, Human herpesvirus 2
cgccaggccccccggg

SEQ ID NO: 3958742 - RNA, 20 nt, Human herpesvirus 2
cgccauccucaaacaggcca

SEQ ID NO: 3958743 - RNA, 13 nt, Human herpesvirus 2
cgccccccccagg

SEQ ID NO: 3958744 - RNA, 16 nt, Human herpesvirus 2
cgccccccgucccgag

SEQ ID NO: 3958745 - RNA, 13 nt, Human herpesvirus 2
cgccccgccgggg

SEQ ID NO: 3958746 - RNA, 20 nt, Human herpesvirus 2
cgcccgcguccgacacccgg

SEQ ID NO: 3958747 - RNA, 13 nt, Human herpesvirus 2
cgcccgcgugccg

SEQ ID NO: 3958748 - RNA, 23 nt, Human herpesvirus 2
cgcccucgagaugugccuuccag

SEQ ID NO: 3958749 - RNA, 16 nt, Human herpesvirus 2
cgcccuucaccaacga

SEQ ID NO: 3958750 - RNA, 21 nt, Human herpesvirus 2
cgccgaccaagacucggugcg

SEQ ID NO: 3958751 - RNA, 21 nt, Human herpesvirus 2
cgccgaccgccccccccggcg

SEQ ID NO: 3958752 - RNA, 16 nt, Human herpesvirus 2
cgccgagcgucaggcc

SEQ ID NO: 3958753 - RNA, 12 nt, Human herpesvirus 2
cgccgccuuccg

SEQ ID NO: 3958754 - RNA, 22 nt, Human herpesvirus 2
cgccgcgcauuuaaggagucgc

SEQ ID NO: 3958755 - RNA, 22 nt, Human herpesvirus 2
cgccgcgggggaggcgcgcgcg

SEQ ID NO: 3958756 - RNA, 12 nt, Human herpesvirus 2
cgccggggaccg

SEQ ID NO: 3958757 - RNA, 21 nt, Human herpesvirus 2
cgccgggggcggacggccccu

SEQ ID NO: 3958758 - RNA, 14 nt, Human herpesvirus 2
cgccggucucccuc

SEQ ID NO: 3958759 - RNA, 19 nt, Human herpesvirus 2
cgccuccccgcuggagccc

SEQ ID NO: 3958760 - RNA, 23 nt, Human herpesvirus 2
cgccuuccgacgcucucugccuc

SEQ ID NO: 3958761 - RNA, 18 nt, Human herpesvirus 2
cgcgaccgaucuggagcc

SEQ ID NO: 3958762 - RNA, 20 nt, Human herpesvirus 2
cgcgaccgucgccgccggcc

SEQ ID NO: 3958763 - RNA, 13 nt, Human herpesvirus 2
cgcgagggcccgg

SEQ ID NO: 3958764 - RNA, 15 nt, Human herpesvirus 2
cgcgcaucggacccc

SEQ ID NO: 3958765 - RNA, 14 nt, Human herpesvirus 2
cgcgcgagcggccg

SEQ ID NO: 3958766 - RNA, 14 nt, Human herpesvirus 2
cgcgcgcgcgcuuc

SEQ ID NO: 3958767 - RNA, 21 nt, Human herpesvirus 2
cgcgcuuuuccgccgccggga

SEQ ID NO: 3958768 - RNA, 12 nt, Human herpesvirus 2
cgcggaccaccg

SEQ ID NO: 3958769 - RNA, 15 nt, Human herpesvirus 2
cgcggaccggccccc

SEQ ID NO: 3958770 - RNA, 21 nt, Human herpesvirus 2
cgcggacgagcccguggccca

SEQ ID NO: 3958771 - RNA, 17 nt, Human herpesvirus 2
cgcggacgccgggcggc

SEQ ID NO: 3958772 - RNA, 19 nt, Human herpesvirus 2
cgcggcgccaacgcgggcg

SEQ ID NO: 3958773 - RNA, 22 nt, Human herpesvirus 2
cgcggcgccaacgcgggcgucc

SEQ ID NO: 3958774 - RNA, 15 nt, Human herpesvirus 2
cgcgggaggcggugg

SEQ ID NO: 3958775 - RNA, 14 nt, Human herpesvirus 2
cgcgggccguggcc

SEQ ID NO: 3958776 - RNA, 17 nt, Human herpesvirus 2
cgcgggucccuucccaa

SEQ ID NO: 3958777 - RNA, 19 nt, Human herpesvirus 2
cgcgguaauuagcagcuuu

SEQ ID NO: 3958778 - RNA, 20 nt, Human herpesvirus 2
cgcgguauggcugcccccgc

SEQ ID NO: 3958779 - RNA, 17 nt, Human herpesvirus 2
cgcggugccugacgccg

SEQ ID NO: 3958780 - RNA, 13 nt, Human herpesvirus 2
cgcguccccggcc

SEQ ID NO: 3958781 - RNA, 15 nt, Human herpesvirus 2
cgcgucggugccgcu

SEQ ID NO: 3958782 - RNA, 22 nt, Human herpesvirus 2
cgcgucguccgucacgagcccc

SEQ ID NO: 3958783 - RNA, 17 nt, Human herpesvirus 2
cgcguucagacgacaga

SEQ ID NO: 3958784 - RNA, 14 nt, Human herpesvirus 2
cgcuacugcgccac

SEQ ID NO: 3958785 - RNA, 20 nt, Human herpesvirus 2
cgcuccagguacugcugcac

SEQ ID NO: 3958786 - RNA, 22 nt, Human herpesvirus 2
cgcuccagguacugcugcacgu

SEQ ID NO: 3958787 - RNA, 19 nt, Human herpesvirus 2
cgcuccgaucggggucagg

SEQ ID NO: 3958788 - RNA, 19 nt, Human herpesvirus 2
cgcuccgcccgccccaggg

SEQ ID NO: 3958789 - RNA, 14 nt, Human herpesvirus 2
cgcucgcucuccgu

SEQ ID NO: 3958790 - RNA, 16 nt, Human herpesvirus 2
cgcucgcugcagggcc

SEQ ID NO: 3958791 - RNA, 15 nt, Human herpesvirus 2
cgcucggcaugcgcg

SEQ ID NO: 3958792 - RNA, 18 nt, Human herpesvirus 2
cgcucuccgugccccugg

SEQ ID NO: 3958793 - RNA, 12 nt, Human herpesvirus 2
cgcugcgccggg

SEQ ID NO: 3958794 - RNA, 22 nt, Human herpesvirus 2
cgcugcggggaccagccgacgu

SEQ ID NO: 3958795 - RNA, 15 nt, Human herpesvirus 2
cgcuggcgggagcca

SEQ ID NO: 3958796 - RNA, 17 nt, Human herpesvirus 2
cgcugguuucucugcgu

SEQ ID NO: 3958797 - RNA, 19 nt, Human herpesvirus 2
cgcuguggcgcgcccccgc

SEQ ID NO: 3958798 - RNA, 22 nt, Human herpesvirus 2
cgcuugagcuuauagagcgaag

SEQ ID NO: 3958799 - RNA, 15 nt, Human herpesvirus 2
cggaacgccccgggc

SEQ ID NO: 3958800 - RNA, 17 nt, Human herpesvirus 2
cggacacccccccccau

SEQ ID NO: 3958801 - RNA, 12 nt, Human herpesvirus 2
cggaccccgccc

SEQ ID NO: 3958802 - RNA, 12 nt, Human herpesvirus 2
cggaccuccggg

SEQ ID NO: 3958803 - RNA, 13 nt, Human herpesvirus 2
cggaccuggggga

SEQ ID NO: 3958804 - RNA, 16 nt, Human herpesvirus 2
cggacgcggccagaaa

SEQ ID NO: 3958805 - RNA, 23 nt, Human herpesvirus 2
cggaggccugucccugcgucgcc

SEQ ID NO: 3958806 - RNA, 23 nt, Human herpesvirus 2
cggaguaugaccgucggugccag

SEQ ID NO: 3958807 - RNA, 20 nt, Human herpesvirus 2
cggcacacaugauuccggcc

SEQ ID NO: 3958808 - RNA, 15 nt, Human herpesvirus 2
cggcaugcagcccag

SEQ ID NO: 3958809 - RNA, 17 nt, Human herpesvirus 2
cggcaugcagcccagag

SEQ ID NO: 3958810 - RNA, 21 nt, Human herpesvirus 2
cggcaugcgacggcgucuccc

SEQ ID NO: 3958811 - RNA, 22 nt, Human herpesvirus 2
cggccaccccgccgcagcucau

SEQ ID NO: 3958812 - RNA, 17 nt, Human herpesvirus 2
cggccacgucguccggg

SEQ ID NO: 3958813 - RNA, 16 nt, Human herpesvirus 2
cggccccucgcucccc

SEQ ID NO: 3958814 - RNA, 14 nt, Human herpesvirus 2
cggcccugagccgc

SEQ ID NO: 3958815 - RNA, 22 nt, Human herpesvirus 2
cggcccugagccgcgcggccac

SEQ ID NO: 3958816 - RNA, 14 nt, Human herpesvirus 2
cggcccuggagcgc

SEQ ID NO: 3958817 - RNA, 12 nt, Human herpesvirus 2
cggccgcaccca

SEQ ID NO: 3958818 - RNA, 15 nt, Human herpesvirus 2
cggccgcacccacga

SEQ ID NO: 3958819 - RNA, 17 nt, Human herpesvirus 2
cggccgccgcaacaccc

SEQ ID NO: 3958820 - RNA, 16 nt, Human herpesvirus 2
cggccgcggacgaccu

SEQ ID NO: 3958821 - RNA, 18 nt, Human herpesvirus 2
cggccggcggagccccgg

SEQ ID NO: 3958822 - RNA, 14 nt, Human herpesvirus 2
cggccuccccggcg

SEQ ID NO: 3958823 - RNA, 21 nt, Human herpesvirus 2
cggcgaacacugccucggagg

SEQ ID NO: 3958824 - RNA, 21 nt, Human herpesvirus 2
cggcgacccgccgggggcgga

SEQ ID NO: 3958825 - RNA, 20 nt, Human herpesvirus 2
cggcgagggcggccucggcc

SEQ ID NO: 3958826 - RNA, 19 nt, Human herpesvirus 2
cggcgauuaacaacaccaa

SEQ ID NO: 3958827 - RNA, 20 nt, Human herpesvirus 2
cggcgcgggcggcgccgcgc

SEQ ID NO: 3958828 - RNA, 16 nt, Human herpesvirus 2
cggcgcucgguugucc

SEQ ID NO: 3958829 - RNA, 12 nt, Human herpesvirus 2
cggcggagcccc

SEQ ID NO: 3958830 - RNA, 15 nt, Human herpesvirus 2
cggcggccaccccgc

SEQ ID NO: 3958831 - RNA, 13 nt, Human herpesvirus 2
cggcggccccccg

SEQ ID NO: 3958832 - RNA, 14 nt, Human herpesvirus 2
cggcggccccccgc

SEQ ID NO: 3958833 - RNA, 22 nt, Human herpesvirus 2
cggcgguucgcgugcggccagc

SEQ ID NO: 3958834 - RNA, 16 nt, Human herpesvirus 2
cggcgucuagcucgcg

SEQ ID NO: 3958835 - RNA, 19 nt, Human herpesvirus 2
cggcguggagcgccgggcc

SEQ ID NO: 3958836 - RNA, 10 nt, Human herpesvirus 2
cggcugggga

SEQ ID NO: 3958837 - RNA, 16 nt, Human herpesvirus 2
cgggacgagccaaacc

SEQ ID NO: 3958838 - RNA, 21 nt, Human herpesvirus 2
cgggagcaggacagccgaccc

SEQ ID NO: 3958839 - RNA, 19 nt, Human herpesvirus 2
cgggaggggcgggaggaag

SEQ ID NO: 3958840 - RNA, 22 nt, Human herpesvirus 2
cgggaggggcuuggccuucccg

SEQ ID NO: 3958841 - RNA, 21 nt, Human herpesvirus 2
cgggauccuccgccagcucgg

SEQ ID NO: 3958842 - RNA, 19 nt, Human herpesvirus 2
cgggccaacagggaguccu

SEQ ID NO: 3958843 - RNA, 15 nt, Human herpesvirus 2
cgggccgccauuccc

SEQ ID NO: 3958844 - RNA, 19 nt, Human herpesvirus 2
cgggccgucguuggccagc

SEQ ID NO: 3958845 - RNA, 22 nt, Human herpesvirus 2
cgggccuuuuuucggacgguga

SEQ ID NO: 3958846 - RNA, 17 nt, Human herpesvirus 2
ccgagcuccgggggacu

SEQ ID NO: 3958847 - RNA, 20 nt, Human herpesvirus 2
ccgaggcgccucgggggcag

SEQ ID NO: 3958848 - RNA, 21 nt, Human herpesvirus 2
ccgcaauaaacgccuucccgg

SEQ ID NO: 3958849 - RNA, 19 nt, Human herpesvirus 2
ccgcaguuucaccgcccca

SEQ ID NO: 3958850 - RNA, 11 nt, Human herpesvirus 2
ccgccauccuc

SEQ ID NO: 3958851 - RNA, 17 nt, Human herpesvirus 2
ccgcccaagcggcccga

SEQ ID NO: 3958852 - RNA, 18 nt, Human herpesvirus 2
ccgccccagggggcggcg

SEQ ID NO: 3958853 - RNA, 23 nt, Human herpesvirus 2
ccgccccccaccggaccaccggc

SEQ ID NO: 3958854 - RNA, 17 nt, Human herpesvirus 2
ccgccccccccaggggg

SEQ ID NO: 3958855 - RNA, 14 nt, Human herpesvirus 2
ccgcccccgcuggc

SEQ ID NO: 3958856 - RNA, 16 nt, Human herpesvirus 2
ccgcccgaccagcgcc

SEQ ID NO: 3958857 - RNA, 12 nt, Human herpesvirus 2
ccgccgccggga

SEQ ID NO: 3958858 - RNA, 16 nt, Human herpesvirus 2
ccgccggucucccucu

SEQ ID NO: 3958859 - RNA, 21 nt, Human herpesvirus 2
ccgccgucucccccgcgagca

SEQ ID NO: 3958860 - RNA, 16 nt, Human herpesvirus 2
ccgccuaccagccccu

SEQ ID NO: 3958861 - RNA, 21 nt, Human herpesvirus 2
ccgcgagacuagaggcccgga

SEQ ID NO: 3958862 - RNA, 22 nt, Human herpesvirus 2
ccgcgaugaccucccggcccgc

SEQ ID NO: 3958863 - RNA, 19 nt, Human herpesvirus 2
ccgcgcaucacggcccacc

SEQ ID NO: 3958864 - RNA, 19 nt, Human herpesvirus 2
ccgcgcccgcgugccgcag

SEQ ID NO: 3958865 - RNA, 15 nt, Human herpesvirus 2
ccgcgcgggcccgga

SEQ ID NO: 3958866 - RNA, 22 nt, Human herpesvirus 2
ccgcggccuuucccguggcccu

SEQ ID NO: 3958867 - RNA, 23 nt, Human herpesvirus 2
ccgcggggggcacgggcccgggg

SEQ ID NO: 3958868 - RNA, 17 nt, Human herpesvirus 2
ccgcgggucccuuccca

SEQ ID NO: 3958869 - RNA, 20 nt, Human herpesvirus 2
ccgcucgcugcagggccugg

SEQ ID NO: 3958870 - RNA, 12 nt, Human herpesvirus 2
ccgcuggcggga

SEQ ID NO: 3958871 - RNA, 17 nt, Human herpesvirus 2
ccggacgcgcacguggg

SEQ ID NO: 3958872 - RNA, 21 nt, Human herpesvirus 2
ccggauaaauguggggccccg

SEQ ID NO: 3958873 - RNA, 22 nt, Human herpesvirus 2
ccggauaaauguggggccccgg

SEQ ID NO: 3958874 - RNA, 12 nt, Human herpesvirus 2
ccggcaccaggc

SEQ ID NO: 3958875 - RNA, 23 nt, Human herpesvirus 2
ccggccgcucgcugcagggccug

SEQ ID NO: 3958876 - RNA, 22 nt, Human herpesvirus 2
ccggccuggucguccgcggccc

SEQ ID NO: 3958877 - RNA, 20 nt, Human herpesvirus 2
ccgggacuucgagcucgucu

SEQ ID NO: 3958878 - RNA, 14 nt, Human herpesvirus 2
ccgggagguucccc

SEQ ID NO: 3958879 - RNA, 20 nt, Human herpesvirus 2
ccgggauccuccgccagcuc

SEQ ID NO: 3958880 - RNA, 16 nt, Human herpesvirus 2
ccggggacacgcggcg

SEQ ID NO: 3958881 - RNA, 19 nt, Human herpesvirus 2
ccggggcacgcggucagca

SEQ ID NO: 3958882 - RNA, 12 nt, Human herpesvirus 2
ccggggcccgca

SEQ ID NO: 3958883 - RNA, 14 nt, Human herpesvirus 2
ccggggcccgcagc

SEQ ID NO: 3958884 - RNA, 19 nt, Human herpesvirus 2
ccggggcgugcugugcccu

SEQ ID NO: 3958885 - RNA, 13 nt, Human herpesvirus 2
ccggggggggccu

SEQ ID NO: 3958886 - RNA, 14 nt, Human herpesvirus 2
ccggggggggccuc

SEQ ID NO: 3958887 - RNA, 16 nt, Human herpesvirus 2
ccggggggggccucgg

SEQ ID NO: 3958888 - RNA, 20 nt, Human herpesvirus 2
ccgggggggggcaagugcag

SEQ ID NO: 3958889 - RNA, 16 nt, Human herpesvirus 2
ccgggugaccacgcgc

SEQ ID NO: 3958890 - RNA, 16 nt, Human herpesvirus 2
ccggguuuuuggcccu

SEQ ID NO: 3958891 - RNA, 15 nt, Human herpesvirus 2
ccgguaugcccggcc

SEQ ID NO: 3958892 - RNA, 12 nt, Human herpesvirus 2
ccguccaccucc

SEQ ID NO: 3958893 - RNA, 16 nt, Human herpesvirus 2
ccgucccggcagaagc

SEQ ID NO: 3958894 - RNA, 13 nt, Human herpesvirus 2
ccgucgggccccg

SEQ ID NO: 3958895 - RNA, 12 nt, Human herpesvirus 2
ccgugccccugg

SEQ ID NO: 3958896 - RNA, 22 nt, Human herpesvirus 2
ccgugcuggggaaaucucucug

SEQ ID NO: 3958897 - RNA, 20 nt, Human herpesvirus 2
ccgugggccuguggggccug

SEQ ID NO: 3958898 - RNA, 12 nt, Human herpesvirus 2
ccguggguacgg

SEQ ID NO: 3958899 - RNA, 15 nt, Human herpesvirus 2
ccgugucccucccgg

SEQ ID NO: 3958900 - RNA, 17 nt, Human herpesvirus 2
ccuaaggaugcccgcca

SEQ ID NO: 3958901 - RNA, 20 nt, Human herpesvirus 2
ccuagccgugggccuguggg

SEQ ID NO: 3958902 - RNA, 19 nt, Human herpesvirus 2
ccuauaaacucucccccgc

SEQ ID NO: 3958903 - RNA, 14 nt, Human herpesvirus 2
ccuaucuugauccc

SEQ ID NO: 3958904 - RNA, 14 nt, Human herpesvirus 2
ccucaaacaggcca

SEQ ID NO: 3958905 - RNA, 16 nt, Human herpesvirus 2
ccucagcgcggccgug

SEQ ID NO: 3958906 - RNA, 19 nt, Human herpesvirus 2
ccucagcgcggccgugggc

SEQ ID NO: 3958907 - RNA, 14 nt, Human herpesvirus 2
ccuccccgugcgug

SEQ ID NO: 3958908 - RNA, 11 nt, Human herpesvirus 2
ccucccggccg

SEQ ID NO: 3958909 - RNA, 17 nt, Human herpesvirus 2
ccuccgcgggucccuuc

SEQ ID NO: 3958910 - RNA, 18 nt, Human herpesvirus 2
ccuccgcgggucccuucc

SEQ ID NO: 3958911 - RNA, 20 nt, Human herpesvirus 2
ccuccggagaacccccugcc

SEQ ID NO: 3958912 - RNA, 17 nt, Human herpesvirus 2
ccucgcugcucucccgu

SEQ ID NO: 3958913 - RNA, 21 nt, Human herpesvirus 2
ccucgugcgcaugggccgcca

SEQ ID NO: 3958914 - RNA, 23 nt, Human herpesvirus 2
ccucgugcgcaugggccgccagc

SEQ ID NO: 3958915 - RNA, 16 nt, Human herpesvirus 2
ccucguggggcuggac

SEQ ID NO: 3958916 - RNA, 23 nt, Human herpesvirus 2
ccucuaucaugucuuuccaccac

SEQ ID NO: 3958917 - RNA, 23 nt, Human herpesvirus 2
ccucucaacgcccaggcccuggc

SEQ ID NO: 3958918 - RNA, 18 nt, Human herpesvirus 2
ccucugcccgaccgggcg

SEQ ID NO: 3958919 - RNA, 16 nt, Human herpesvirus 2
ccucugggacacccag

SEQ ID NO: 3958920 - RNA, 14 nt, Human herpesvirus 2
ccucuguuucucca

SEQ ID NO: 3958921 - RNA, 17 nt, Human herpesvirus 2
ccucuguuucuccaggc

SEQ ID NO: 3958922 - RNA, 22 nt, Human herpesvirus 2
ccugacccucucgggcaugggc

SEQ ID NO: 3958923 - RNA, 13 nt, Human herpesvirus 2
ccugcggcaggcg

SEQ ID NO: 3958924 - RNA, 18 nt, Human herpesvirus 2
ccugcucgaccagcggcc

SEQ ID NO: 3958925 - RNA, 20 nt, Human herpesvirus 2
ccuggaagcugccucccccc

SEQ ID NO: 3958926 - RNA, 14 nt, Human herpesvirus 2
ccuggccgcgcgga

SEQ ID NO: 3958927 - RNA, 15 nt, Human herpesvirus 2
ccuggcggccccugu

SEQ ID NO: 3958928 - RNA, 18 nt, Human herpesvirus 2
ccugggcggccucuccgg

SEQ ID NO: 3958929 - RNA, 23 nt, Human herpesvirus 2
ccugggggacccgacccuguggc

SEQ ID NO: 3958930 - RNA, 17 nt, Human herpesvirus 2
ccuggguccgggggccu

SEQ ID NO: 3958931 - RNA, 13 nt, Human herpesvirus 2
ccuguuuggggca

SEQ ID NO: 3958932 - RNA, 16 nt, Human herpesvirus 2
ccuuaaaaggcacccc

SEQ ID NO: 3958933 - RNA, 14 nt, Human herpesvirus 2
ccuuccuccacccc

SEQ ID NO: 3958934 - RNA, 10 nt, Human herpesvirus 2
ccuuccuguc

SEQ ID NO: 3958935 - RNA, 18 nt, Human herpesvirus 2
ccuuuccaccccccuucc

SEQ ID NO: 3958936 - RNA, 18 nt, Human herpesvirus 2
cgaaccgauggcccccac

SEQ ID NO: 3958937 - RNA, 15 nt, Human herpesvirus 2
cgaaggcggacccag

SEQ ID NO: 3958938 - RNA, 15 nt, Human herpesvirus 2
cgaaggucgggccgu

SEQ ID NO: 3958939 - RNA, 21 nt, Human herpesvirus 2
cgaccaucaagaauucccagg

SEQ ID NO: 3958940 - RNA, 20 nt, Human herpesvirus 2
cgacccccgugucgcucccc

SEQ ID NO: 3958941 - RNA, 15 nt, Human herpesvirus 2
cgaccccgccccccg

SEQ ID NO: 3958942 - RNA, 16 nt, Human herpesvirus 2
cgaccccgccccccga

SEQ ID NO: 3958943 - RNA, 21 nt, Human herpesvirus 2
cgaccccgccccccgacgcca

SEQ ID NO: 3958944 - RNA, 13 nt, Human herpesvirus 2
cgaccggcggggc

SEQ ID NO: 3958945 - RNA, 14 nt, Human herpesvirus 2
cgaccgggcggugc

SEQ ID NO: 3958946 - RNA, 14 nt, Human herpesvirus 2
cgacgaccaccgcg

SEQ ID NO: 3958947 - RNA, 18 nt, Human herpesvirus 2
cgacgaccaccgcgacca

SEQ ID NO: 3958948 - RNA, 17 nt, Human herpesvirus 2
cgacgaccaugggcccc

SEQ ID NO: 3958949 - RNA, 14 nt, Human herpesvirus 2
cgacgacgugcgcg

SEQ ID NO: 3958950 - RNA, 15 nt, Human herpesvirus 2
cgacgccuucccugu

SEQ ID NO: 3958951 - RNA, 18 nt, Human herpesvirus 2
cgagccccgcgaccacca

SEQ ID NO: 3958952 - RNA, 17 nt, Human herpesvirus 2
cgagccgcugugccagg

SEQ ID NO: 3958953 - RNA, 20 nt, Human herpesvirus 2
cgagccgcugugccaggugg

SEQ ID NO: 3958954 - RNA, 20 nt, Human herpesvirus 2
cgagcggcgcaucuucgccg

SEQ ID NO: 3958955 - RNA, 14 nt, Human herpesvirus 2
cgagcgguuggagg

SEQ ID NO: 3958956 - RNA, 17 nt, Human herpesvirus 2
cgagcguaucggccagg

SEQ ID NO: 3958957 - RNA, 16 nt, Human herpesvirus 2
cgaggccgcucuccga

SEQ ID NO: 3958958 - RNA, 13 nt, Human herpesvirus 2
cgaguccugggug

SEQ ID NO: 3958959 - RNA, 16 nt, Human herpesvirus 2
cgaguccugggugggu

SEQ ID NO: 3958960 - RNA, 14 nt, Human herpesvirus 2
cgaucccgggcccu

SEQ ID NO: 3958961 - RNA, 17 nt, Human herpesvirus 2
cgaugacguggguccgg

SEQ ID NO: 3958962 - RNA, 18 nt, Human herpesvirus 2
cgcaacaacggcgggccc

SEQ ID NO: 3958963 - RNA, 15 nt, Human herpesvirus 2
guggugcuggccaau

SEQ ID NO: 3958964 - RNA, 18 nt, Human herpesvirus 2
gugguuugccguggagcu

SEQ ID NO: 3958965 - RNA, 18 nt, Human herpesvirus 2
gugucggagaggcccgcc

SEQ ID NO: 3958966 - RNA, 20 nt, Human herpesvirus 2
gugucguugggcggcccccg

SEQ ID NO: 3958967 - RNA, 17 nt, Human herpesvirus 2
guguuuauuuucccccc

SEQ ID NO: 3958968 - RNA, 12 nt, Human herpesvirus 2
guguuucccccc

SEQ ID NO: 3958969 - RNA, 12 nt, Human herpesvirus 2
guuacugcacuu

SEQ ID NO: 3958970 - RNA, 18 nt, Human herpesvirus 2
guucaauagauuucccaa

SEQ ID NO: 3958971 - RNA, 18 nt, Human herpesvirus 2
guuccaccgcucacccac

SEQ ID NO: 3958972 - RNA, 18 nt, Human herpesvirus 2
guuccggguugcgccucc

SEQ ID NO: 3958973 - RNA, 14 nt, Human herpesvirus 2
guucgccccgcagc

SEQ ID NO: 3958974 - RNA, 11 nt, Human herpesvirus 2
guucuccugga

SEQ ID NO: 3958975 - RNA, 19 nt, Human herpesvirus 2
guucuuggcgcgcgcggcg

SEQ ID NO: 3958976 - RNA, 17 nt, Human herpesvirus 2
guugccgggggccauga

SEQ ID NO: 3958977 - RNA, 13 nt, Human herpesvirus 2
guugcgccuccgu

SEQ ID NO: 3958978 - RNA, 19 nt, Human herpesvirus 2
guuggacgcguuucccuuu

SEQ ID NO: 3958979 - RNA, 14 nt, Human herpesvirus 2
guuggagcggucgc

SEQ ID NO: 3958980 - RNA, 18 nt, Human herpesvirus 2
guuguccguucugucguc

SEQ ID NO: 3958981 - RNA, 12 nt, Human herpesvirus 2
guugucugucug

SEQ ID NO: 3958982 - RNA, 15 nt, Human herpesvirus 2
guuuacuauccuugc

SEQ ID NO: 3958983 - RNA, 20 nt, Human herpesvirus 2
guuucgggcguuccuucccu

SEQ ID NO: 3958984 - RNA, 22 nt, Human herpesvirus 2
guuucgggcguuccuucccuuu

SEQ ID NO: 3958985 - RNA, 19 nt, Human herpesvirus 2
guuugggaacacaggcgcu

SEQ ID NO: 3958986 - RNA, 18 nt, Human herpesvirus 2
uaaaacgcgggcgggggc

SEQ ID NO: 3958987 - RNA, 12 nt, Human herpesvirus 2
uaaacucucccc

SEQ ID NO: 3958988 - RNA, 22 nt, Human herpesvirus 2
uaaagaacgagacagacgaaaa

SEQ ID NO: 3958989 - RNA, 21 nt, Human herpesvirus 2
uaaagguccggcggccacccc

SEQ ID NO: 3958990 - RNA, 22 nt, Human herpesvirus 2
uaaggagucgccgccccgacuc

SEQ ID NO: 3958991 - RNA, 15 nt, Human herpesvirus 2
uaaggcaggggcagc

SEQ ID NO: 3958992 - RNA, 12 nt, Human herpesvirus 2
uacaaauuaaau

SEQ ID NO: 3958993 - RNA, 16 nt, Human herpesvirus 2
uacacgcgcuggcccc

SEQ ID NO: 3958994 - RNA, 21 nt, Human herpesvirus 2
uacacgcgcuggccccucugc

SEQ ID NO: 3958995 - RNA, 16 nt, Human herpesvirus 2
uacauaaaacccaccc

SEQ ID NO: 3958996 - RNA, 20 nt, Human herpesvirus 2
uaccccgccggucucccucu

SEQ ID NO: 3958997 - RNA, 19 nt, Human herpesvirus 2
uaccccuuugacuccuggg

SEQ ID NO: 3958998 - RNA, 15 nt, Human herpesvirus 2
uaccugacgcggccc

SEQ ID NO: 3958999 - RNA, 22 nt, Human herpesvirus 2
uacgagucugugcggcccucuc

SEQ ID NO: 3959000 - RNA, 13 nt, Human herpesvirus 2
uacuugcgcggcu

SEQ ID NO: 3959001 - RNA, 23 nt, Human herpesvirus 2
uagaacgccagauguggggugcg

SEQ ID NO: 3959002 - RNA, 16 nt, Human herpesvirus 2
uagcucgcggagggcg

SEQ ID NO: 3959003 - RNA, 12 nt, Human herpesvirus 2
uauacugcuggg

SEQ ID NO: 3959004 - RNA, 19 nt, Human herpesvirus 2
uauuuccaaacagggccuu

SEQ ID NO: 3959005 - RNA, 23 nt, Human herpesvirus 2
ucaaacaggccaucgccggggac

SEQ ID NO: 3959006 - RNA, 17 nt, Human herpesvirus 2
ucaauaaaaaacaccaa

SEQ ID NO: 3959007 - RNA, 15 nt, Human herpesvirus 2
ucaauagauuuccca

SEQ ID NO: 3959008 - RNA, 18 nt, Human herpesvirus 2
ucacccacccccccccca

SEQ ID NO: 3959009 - RNA, 18 nt, Human herpesvirus 2
ucaccggggcgccccccc

SEQ ID NO: 3959010 - RNA, 18 nt, Human herpesvirus 2
ucaccgggggccccgggu

SEQ ID NO: 3959011 - RNA, 19 nt, Human herpesvirus 2
ucaccuggggcuccugcgc

SEQ ID NO: 3959012 - RNA, 23 nt, Human herpesvirus 2
ucacgcaggccgcccccagcagg

SEQ ID NO: 3959013 - RNA, 19 nt, Human herpesvirus 2
ucacggcccaccugcacga

SEQ ID NO: 3959014 - RNA, 20 nt, Human herpesvirus 2
ucacggucgauuuaaccacu

SEQ ID NO: 3959015 - RNA, 18 nt, Human herpesvirus 2
ucaguguuugggaaaucu

SEQ ID NO: 3959016 - RNA, 14 nt, Human herpesvirus 2
ucauccggcccgcc

SEQ ID NO: 3959017 - RNA, 17 nt, Human herpesvirus 2
ucaucgggaaucucggg

SEQ ID NO: 3959018 - RNA, 14 nt, Human herpesvirus 2
ucaucgucccgguu

SEQ ID NO: 3959019 - RNA, 17 nt, Human herpesvirus 2
ucaucgucgccgacucc

SEQ ID NO: 3959020 - RNA, 14 nt, Human herpesvirus 2
uccaaacagggccu

SEQ ID NO: 3959021 - RNA, 13 nt, Human herpesvirus 2
uccacacccccuc

SEQ ID NO: 3959022 - RNA, 13 nt, Human herpesvirus 2
uccaccaccagca

SEQ ID NO: 3959023 - RNA, 13 nt, Human herpesvirus 2
uccaccuuggccc

SEQ ID NO: 3959024 - RNA, 13 nt, Human herpesvirus 2
uccagcuuggccg

SEQ ID NO: 3959025 - RNA, 20 nt, Human herpesvirus 2
uccccaagagacuucccuaa

SEQ ID NO: 3959026 - RNA, 19 nt, Human herpesvirus 2
uccccaggcgacgccaggc

SEQ ID NO: 3959027 - RNA, 15 nt, Human herpesvirus 2
uccccccccccucca

SEQ ID NO: 3959028 - RNA, 14 nt, Human herpesvirus 2
ucccccggaccccg

SEQ ID NO: 3959029 - RNA, 21 nt, Human herpesvirus 2
uccccggcgccaugagccgcc

SEQ ID NO: 3959030 - RNA, 14 nt, Human herpesvirus 2
uccccuggggcggc

SEQ ID NO: 3959031 - RNA, 22 nt, Human herpesvirus 2
ucccgauguuguguucgccgac

SEQ ID NO: 3959032 - RNA, 13 nt, Human herpesvirus 2
ucccgcccgccag

SEQ ID NO: 3959033 - RNA, 19 nt, Human herpesvirus 2
ucccgccgucucccccgcg

SEQ ID NO: 3959034 - RNA, 23 nt, Human herpesvirus 2
ucccggccgccauccccgcgcau

SEQ ID NO: 3959035 - RNA, 19 nt, Human herpesvirus 2
ucccggucggggccgccag

SEQ ID NO: 3959036 - RNA, 13 nt, Human herpesvirus 2
uccgaccugcagg

SEQ ID NO: 3959037 - RNA, 16 nt, Human herpesvirus 2
uccgacgacgcggacg

SEQ ID NO: 3959038 - RNA, 22 nt, Human herpesvirus 2
uccgcaauaaacgccuucccgg

SEQ ID NO: 3959039 - RNA, 23 nt, Human herpesvirus 2
uccgccagcgcccuuccgcgucc

SEQ ID NO: 3959040 - RNA, 20 nt, Human herpesvirus 2
uccgccccggcgaccgcccc

SEQ ID NO: 3959041 - RNA, 17 nt, Human herpesvirus 2
uccgcgggaagcgccgc

SEQ ID NO: 3959042 - RNA, 18 nt, Human herpesvirus 2
uccgcgggucccuuccca

SEQ ID NO: 3959043 - RNA, 22 nt, Human herpesvirus 2
uccgcgugguccccgagcagca

SEQ ID NO: 3959044 - RNA, 22 nt, Human herpesvirus 2
uccggcaacccuccucgcugcg

SEQ ID NO: 3959045 - RNA, 16 nt, Human herpesvirus 2
uccggguaaaaaagaa

SEQ ID NO: 3959046 - RNA, 18 nt, Human herpesvirus 2
uccgugcuggggaaaucu

SEQ ID NO: 3959047 - RNA, 16 nt, Human herpesvirus 2
uccucacgggggggcu

SEQ ID NO: 3959048 - RNA, 22 nt, Human herpesvirus 2
ucgaccggggacuccccucuac

SEQ ID NO: 3959049 - RNA, 14 nt, Human herpesvirus 2
ucgacgaggccugg

SEQ ID NO: 3959050 - RNA, 19 nt, Human herpesvirus 2
ucgagcguggccggcgacc

SEQ ID NO: 3959051 - RNA, 17 nt, Human herpesvirus 2
ucgauguauggcgccuu

SEQ ID NO: 3959052 - RNA, 17 nt, Human herpesvirus 2
ucgcaagccacccuggg

SEQ ID NO: 3959053 - RNA, 21 nt, Human herpesvirus 2
ucgcaccccaccccugugugc

SEQ ID NO: 3959054 - RNA, 23 nt, Human herpesvirus 2
ucgcacgcgcgcaggcuggagcu

SEQ ID NO: 3959055 - RNA, 19 nt, Human herpesvirus 2
ucgccccccgucgcuccgg

SEQ ID NO: 3959056 - RNA, 15 nt, Human herpesvirus 2
ucgcccccgugccug

SEQ ID NO: 3959057 - RNA, 15 nt, Human herpesvirus 2
ucgcccuagaggcug

SEQ ID NO: 3959058 - RNA, 12 nt, Human herpesvirus 2
ucgccggggacc

SEQ ID NO: 3959059 - RNA, 16 nt, Human herpesvirus 2
ucgccgucaaccccgc

SEQ ID NO: 3959060 - RNA, 19 nt, Human herpesvirus 2
ucgcgcaucucuggcucca

SEQ ID NO: 3959061 - RNA, 12 nt, Human herpesvirus 2
ucgcggacgagc

SEQ ID NO: 3959062 - RNA, 20 nt, Human herpesvirus 2
ucgcggagggcggccagccg

SEQ ID NO: 3959063 - RNA, 16 nt, Human herpesvirus 2
ucgcggcccggcgcca

SEQ ID NO: 3959064 - RNA, 18 nt, Human herpesvirus 2
ucgcggccgcccgcgccg

SEQ ID NO: 3959065 - RNA, 20 nt, Human herpesvirus 2
ucgcggggacagccccgggg

SEQ ID NO: 3959066 - RNA, 16 nt, Human herpesvirus 2
ucgcgucuccacaaaa

SEQ ID NO: 3959067 - RNA, 17 nt, Human herpesvirus 2
ucgcuccggcucccggc

SEQ ID NO: 3959068 - RNA, 23 nt, Human herpesvirus 2
ucgcuccggcucccggcccgggc

SEQ ID NO: 3959069 - RNA, 14 nt, Human herpesvirus 2
ucgcugcucucccg

SEQ ID NO: 3959070 - RNA, 16 nt, Human herpesvirus 2
ucggaaagccggcccc

SEQ ID NO: 3959071 - RNA, 14 nt, Human herpesvirus 2
ucggacggugaucg

SEQ ID NO: 3959072 - RNA, 20 nt, Human herpesvirus 2
ucggccagcacgaccaggga

SEQ ID NO: 3959073 - RNA, 13 nt, Human herpesvirus 2
ucggcccccgggg

SEQ ID NO: 3959074 - RNA, 18 nt, Human herpesvirus 2
ucggcgauguccggggcg

SEQ ID NO: 3959075 - RNA, 19 nt, Human herpesvirus 2
ucggcggaaaugcgcgagc

SEQ ID NO: 3959076 - RNA, 21 nt, Human herpesvirus 2
ucgggggcucggggggguacg

SEQ ID NO: 3959077 - RNA, 14 nt, Human herpesvirus 2
ucggggggacgagc

SEQ ID NO: 3959078 - RNA, 21 nt, Human herpesvirus 2
ggaacaaagaaauagaagaaa

SEQ ID NO: 3959079 - RNA, 18 nt, Human herpesvirus 2
ggaacuggguuacugcac

SEQ ID NO: 3959080 - RNA, 21 nt, Human herpesvirus 2
ggaagagaaaaagaaaaaagg

SEQ ID NO: 3959081 - RNA, 19 nt, Human herpesvirus 2
ggaagagagcgccccgccc

SEQ ID NO: 3959082 - RNA, 18 nt, Human herpesvirus 2
ggaagccgccccccaccg

SEQ ID NO: 3959083 - RNA, 23 nt, Human herpesvirus 2
ggaagccgccccccaccggacca

SEQ ID NO: 3959084 - RNA, 18 nt, Human herpesvirus 2
ggaagcugccuccccccc

SEQ ID NO: 3959085 - RNA, 15 nt, Human herpesvirus 2
ggaauuuccgcgucc

SEQ ID NO: 3959086 - RNA, 21 nt, Human herpesvirus 2
ggacacgcaacaacggcgggc

SEQ ID NO: 3959087 - RNA, 21 nt, Human herpesvirus 2
ggacaguucauaggccgggag

SEQ ID NO: 3959088 - RNA, 22 nt, Human herpesvirus 2
ggacaguucauaggccgggagc

SEQ ID NO: 3959089 - RNA, 23 nt, Human herpesvirus 2
ggacaucacccacgucgcccccc

SEQ ID NO: 3959090 - RNA, 20 nt, Human herpesvirus 2
ggaccacgugcacagccugg

SEQ ID NO: 3959091 - RNA, 20 nt, Human herpesvirus 2
ggaccccucaucgccgcgcc

SEQ ID NO: 3959092 - RNA, 21 nt, Human herpesvirus 2
ggacccgccagagacccugcc

SEQ ID NO: 3959093 - RNA, 15 nt, Human herpesvirus 2
ggacgacgggcgccc

SEQ ID NO: 3959094 - RNA, 21 nt, Human herpesvirus 2
ggacgacgggcgcccccgccu

SEQ ID NO: 3959095 - RNA, 14 nt, Human herpesvirus 2
ggacgcccggccca

SEQ ID NO: 3959096 - RNA, 14 nt, Human herpesvirus 2
ggacgggugggccu

SEQ ID NO: 3959097 - RNA, 21 nt, Human herpesvirus 2
ggacgucuccaagcucuccga

SEQ ID NO: 3959098 - RNA, 21 nt, Human herpesvirus 2
ggacuccgccccggcgaccgc

SEQ ID NO: 3959099 - RNA, 14 nt, Human herpesvirus 2
ggacugggagccgc

SEQ ID NO: 3959100 - RNA, 10 nt, Human herpesvirus 2
ggacugggcc

SEQ ID NO: 3959101 - RNA, 13 nt, Human herpesvirus 2
ggacugggggcgg

SEQ ID NO: 3959102 - RNA, 20 nt, Human herpesvirus 2
ggagccugcgaaucccccaa

SEQ ID NO: 3959103 - RNA, 14 nt, Human herpesvirus 2
ggagcggugcaggg

SEQ ID NO: 3959104 - RNA, 13 nt, Human herpesvirus 2
ggagcuucaucac

SEQ ID NO: 3959105 - RNA, 13 nt, Human herpesvirus 2
ggaggccuguccc

SEQ ID NO: 3959106 - RNA, 15 nt, Human herpesvirus 2
ggagggcggccagcc

SEQ ID NO: 3959107 - RNA, 19 nt, Human herpesvirus 2
ggaggggggcagugcagua

SEQ ID NO: 3959108 - RNA, 17 nt, Human herpesvirus 2
ggaugauggauugauug

SEQ ID NO: 3959109 - RNA, 14 nt, Human herpesvirus 2
ggaugggcggggcc

SEQ ID NO: 3959110 - RNA, 18 nt, Human herpesvirus 2
ggaugggcggggcccggg

SEQ ID NO: 3959111 - RNA, 17 nt, Human herpesvirus 2
ggcaacaaagggccucc

SEQ ID NO: 3959112 - RNA, 20 nt, Human herpesvirus 2
ggcaacccgacggcggggcc

SEQ ID NO: 3959113 - RNA, 17 nt, Human herpesvirus 2
ggcaccggggaaacagg

SEQ ID NO: 3959114 - RNA, 15 nt, Human herpesvirus 2
ggcaccuccccggcg

SEQ ID NO: 3959115 - RNA, 13 nt, Human herpesvirus 2
ggcagcccggacc

SEQ ID NO: 3959116 - RNA, 17 nt, Human herpesvirus 2
ggcagccgggcccgcca

SEQ ID NO: 3959117 - RNA, 14 nt, Human herpesvirus 2
ggcagcgcgccgac

SEQ ID NO: 3959118 - RNA, 21 nt, Human herpesvirus 2
ggcagcgcgccgacgaccugc

SEQ ID NO: 3959119 - RNA, 21 nt, Human herpesvirus 2
ggcaggcguguugggaaggga

SEQ ID NO: 3959120 - RNA, 21 nt, Human herpesvirus 2
ggccaaccucauccgcggcgc

SEQ ID NO: 3959121 - RNA, 23 nt, Human herpesvirus 2
ggccccagggcuucguggaagag

SEQ ID NO: 3959122 - RNA, 19 nt, Human herpesvirus 2
ggccccgcucguggcgggc

SEQ ID NO: 3959123 - RNA, 14 nt, Human herpesvirus 2
ggcccggggggggc

SEQ ID NO: 3959124 - RNA, 20 nt, Human herpesvirus 2
ggcccguagucuccgcgaga

SEQ ID NO: 3959125 - RNA, 15 nt, Human herpesvirus 2
ggcccgugugggagg

SEQ ID NO: 3959126 - RNA, 19 nt, Human herpesvirus 2
ggcccuccacgccguggac

SEQ ID NO: 3959127 - RNA, 13 nt, Human herpesvirus 2
ggcccucugggac

SEQ ID NO: 3959128 - RNA, 18 nt, Human herpesvirus 2
ggcccucugggacaccca

SEQ ID NO: 3959129 - RNA, 15 nt, Human herpesvirus 2
ggcccuggacccaga

SEQ ID NO: 3959130 - RNA, 19 nt, Human herpesvirus 2
ggcccuuggacgggugggc

SEQ ID NO: 3959131 - RNA, 20 nt, Human herpesvirus 2
ggccgagaagagcggcgagu

SEQ ID NO: 3959132 - RNA, 12 nt, Human herpesvirus 2
ggccgaggcgcc

SEQ ID NO: 3959133 - RNA, 11 nt, Human herpesvirus 2
ggccgcccccc

SEQ ID NO: 3959134 - RNA, 14 nt, Human herpesvirus 2
ggccgccccgcagu

SEQ ID NO: 3959135 - RNA, 21 nt, Human herpesvirus 2
ggccgcgcccccggccgcggu

SEQ ID NO: 3959136 - RNA, 12 nt, Human herpesvirus 2
ggccgcucuccg

SEQ ID NO: 3959137 - RNA, 16 nt, Human herpesvirus 2
ggccggcggagccccg

SEQ ID NO: 3959138 - RNA, 20 nt, Human herpesvirus 2
ggccggcguucccgcucgcg

SEQ ID NO: 3959139 - RNA, 20 nt, Human herpesvirus 2
ggccggggagggcagggccg

SEQ ID NO: 3959140 - RNA, 19 nt, Human herpesvirus 2
ggccucgcccgucccggca

SEQ ID NO: 3959141 - RNA, 14 nt, Human herpesvirus 2
ggccugcugugggu

SEQ ID NO: 3959142 - RNA, 18 nt, Human herpesvirus 2
ggcgaacgggggaucugu

SEQ ID NO: 3959143 - RNA, 20 nt, Human herpesvirus 2
ggcgaccgucuuugggcccc

SEQ ID NO: 3959144 - RNA, 23 nt, Human herpesvirus 2
ggcgaccgucuuugggccccgcc

SEQ ID NO: 3959145 - RNA, 15 nt, Human herpesvirus 2
ggcgacgggcggcug

SEQ ID NO: 3959146 - RNA, 14 nt, Human herpesvirus 2
ggcgagcuggcccu

SEQ ID NO: 3959147 - RNA, 12 nt, Human herpesvirus 2
ggcgagggcggc

SEQ ID NO: 3959148 - RNA, 21 nt, Human herpesvirus 2
ggcgaugguggcgaugggcag

SEQ ID NO: 3959149 - RNA, 16 nt, Human herpesvirus 2
ggcgcccagacccuca

SEQ ID NO: 3959150 - RNA, 15 nt, Human herpesvirus 2
ggcgcgcccccgccg

SEQ ID NO: 3959151 - RNA, 14 nt, Human herpesvirus 2
ggcgcuuggccggg

SEQ ID NO: 3959152 - RNA, 19 nt, Human herpesvirus 2
ggcggcgaaccgguagccg

SEQ ID NO: 3959153 - RNA, 14 nt, Human herpesvirus 2
ggcggcuggccacc

SEQ ID NO: 3959154 - RNA, 15 nt, Human herpesvirus 2
ggcggggccccgggc

SEQ ID NO: 3959155 - RNA, 16 nt, Human herpesvirus 2
ggcggucccggccgcc

SEQ ID NO: 3959156 - RNA, 15 nt, Human herpesvirus 2
ggcggucggccagca

SEQ ID NO: 3959157 - RNA, 12 nt, Human herpesvirus 2
ggcguccccagg

SEQ ID NO: 3959158 - RNA, 15 nt, Human herpesvirus 2
ggcguuauuuccaaa

SEQ ID NO: 3959159 - RNA, 23 nt, Human herpesvirus 2
ggcguuauuuccaaacagggccu

SEQ ID NO: 3959160 - RNA, 22 nt, Human herpesvirus 2
ggcuccagacgaaggacccaua

SEQ ID NO: 3959161 - RNA, 13 nt, Human herpesvirus 2
ggcucgcggggcc

SEQ ID NO: 3959162 - RNA, 16 nt, Human herpesvirus 2
ggcucgcggggccggg

SEQ ID NO: 3959163 - RNA, 16 nt, Human herpesvirus 2
ggcucuucuggucaug

SEQ ID NO: 3959164 - RNA, 13 nt, Human herpesvirus 2
gggaaacuaggac

SEQ ID NO: 3959165 - RNA, 14 nt, Human herpesvirus 2
gggaagucucuugg

SEQ ID NO: 3959166 - RNA, 15 nt, Human herpesvirus 2
gggacccgggcgagc

SEQ ID NO: 3959167 - RNA, 22 nt, Human herpesvirus 2
gggacgcccggcccauaaacag

SEQ ID NO: 3959168 - RNA, 14 nt, Human herpesvirus 2
gggacgcgagccug

SEQ ID NO: 3959169 - RNA, 18 nt, Human herpesvirus 2
gggacucauuugucgccg

SEQ ID NO: 3959170 - RNA, 21 nt, Human herpesvirus 2
gggagccagggucggacagga

SEQ ID NO: 3959171 - RNA, 13 nt, Human herpesvirus 2
gggaggguggcug

SEQ ID NO: 3959172 - RNA, 18 nt, Human herpesvirus 2
gggaugggggggaaggga

SEQ ID NO: 3959173 - RNA, 12 nt, Human herpesvirus 2
gggaugguggug

SEQ ID NO: 3959174 - RNA, 17 nt, Human herpesvirus 2
gggcaccaaaaaccagg

SEQ ID NO: 3959175 - RNA, 20 nt, Human herpesvirus 2
gggcaccacguguccccagg

SEQ ID NO: 3959176 - RNA, 16 nt, Human herpesvirus 2
gggcacgcggggugcg

SEQ ID NO: 3959177 - RNA, 18 nt, Human herpesvirus 2
gggcaggcgggcccauca

SEQ ID NO: 3959178 - RNA, 21 nt, Human herpesvirus 2
gggccauggaugaugaccugg

SEQ ID NO: 3959179 - RNA, 11 nt, Human herpesvirus 2
gggcccggacu

SEQ ID NO: 3959180 - RNA, 21 nt, Human herpesvirus 2
gggcccuucgcagcuucaccg

SEQ ID NO: 3959181 - RNA, 21 nt, Human herpesvirus 2
gggcccuuggguuccgcggac

SEQ ID NO: 3959182 - RNA, 14 nt, Human herpesvirus 2
gggccgccauuccc

SEQ ID NO: 3959183 - RNA, 14 nt, Human herpesvirus 2
gggccggugggccc

SEQ ID NO: 3959184 - RNA, 14 nt, Human herpesvirus 2
gggccguggccaga

SEQ ID NO: 3959185 - RNA, 22 nt, Human herpesvirus 2
gggccucucgacggagagccgg

SEQ ID NO: 3959186 - RNA, 15 nt, Human herpesvirus 2
gggcgaaaaggcccg

SEQ ID NO: 3959187 - RNA, 20 nt, Human herpesvirus 2
gggcgaaaaggcccggcccg

SEQ ID NO: 3959188 - RNA, 20 nt, Human herpesvirus 2
gggcgaagucccgcacgaag

SEQ ID NO: 3959189 - RNA, 16 nt, Human herpesvirus 2
gggcggacguccaggg

SEQ ID NO: 3959190 - RNA, 18 nt, Human herpesvirus 2
gggcggcaagaccugccc

SEQ ID NO: 3959191 - RNA, 19 nt, Human herpesvirus 2
gggcggccagccgcgcgac

SEQ ID NO: 3959192 - RNA, 12 nt, Human herpesvirus 2
gggcgggagggg

SEQ ID NO: 3959193 - RNA, 12 nt, Human herpesvirus 2
gggcgggcgggg

SEQ ID NO: 3959194 - RNA, 19 nt, Human herpesvirus 2
gggcguccugcggcagcgc

SEQ ID NO: 3959195 - RNA, 17 nt, Human herpesvirus 2
cauucacccccaccccc

SEQ ID NO: 3959196 - RNA, 19 nt, Human herpesvirus 2
cauuuugugggggcccagg

SEQ ID NO: 3959197 - RNA, 18 nt, Human herpesvirus 2
ccaaagucacgcccccug

SEQ ID NO: 3959198 - RNA, 23 nt, Human herpesvirus 2
ccaacucauacacgcgcuggccc

SEQ ID NO: 3959199 - RNA, 12 nt, Human herpesvirus 2
ccaacucugucu

SEQ ID NO: 3959200 - RNA, 14 nt, Human herpesvirus 2
ccaauucuucccgg

SEQ ID NO: 3959201 - RNA, 16 nt, Human herpesvirus 2
ccacaagcuaugcauc

SEQ ID NO: 3959202 - RNA, 16 nt, Human herpesvirus 2
ccacccaaccagcgcg

SEQ ID NO: 3959203 - RNA, 21 nt, Human herpesvirus 2
ccaccccccccccccuucccg

SEQ ID NO: 3959204 - RNA, 13 nt, Human herpesvirus 2
ccaccggccuggu

SEQ ID NO: 3959205 - RNA, 11 nt, Human herpesvirus 2
ccaccgggccu

SEQ ID NO: 3959206 - RNA, 14 nt, Human herpesvirus 2
ccaccucgcggcgg

SEQ ID NO: 3959207 - RNA, 19 nt, Human herpesvirus 2
ccaccuggaagcugccucc

SEQ ID NO: 3959208 - RNA, 23 nt, Human herpesvirus 2
ccacgagcacaaacgugcucugc

SEQ ID NO: 3959209 - RNA, 17 nt, Human herpesvirus 2
ccacggaccuccgggac

SEQ ID NO: 3959210 - RNA, 14 nt, Human herpesvirus 2
ccacgucaccgggg

SEQ ID NO: 3959211 - RNA, 14 nt, Human herpesvirus 2
ccacguccaccuug

SEQ ID NO: 3959212 - RNA, 22 nt, Human herpesvirus 2
ccacucgucgccaacggccagc

SEQ ID NO: 3959213 - RNA, 12 nt, Human herpesvirus 2
ccagacgcccgc

SEQ ID NO: 3959214 - RNA, 19 nt, Human herpesvirus 2
ccagacgcuguuguuucug

SEQ ID NO: 3959215 - RNA, 16 nt, Human herpesvirus 2
ccagaggcuggagcgc

SEQ ID NO: 3959216 - RNA, 14 nt, Human herpesvirus 2
ccagauguggggug

SEQ ID NO: 3959217 - RNA, 19 nt, Human herpesvirus 2
ccagcgcguugguccgggg

SEQ ID NO: 3959218 - RNA, 15 nt, Human herpesvirus 2
ccagcguccugcgcg

SEQ ID NO: 3959219 - RNA, 17 nt, Human herpesvirus 2
ccagcucgggggccagg

SEQ ID NO: 3959220 - RNA, 23 nt, Human herpesvirus 2
ccagcucgggggccaggaacucc

SEQ ID NO: 3959221 - RNA, 19 nt, Human herpesvirus 2
ccagcugcuggccaaacau

SEQ ID NO: 3959222 - RNA, 21 nt, Human herpesvirus 2
ccaggaggggggcagugcagu

SEQ ID NO: 3959223 - RNA, 17 nt, Human herpesvirus 2
ccaggcgcugcugcgca

SEQ ID NO: 3959224 - RNA, 21 nt, Human herpesvirus 2
ccagggcaccacgugucccca

SEQ ID NO: 3959225 - RNA, 12 nt, Human herpesvirus 2
ccagggcgucgc

SEQ ID NO: 3959226 - RNA, 23 nt, Human herpesvirus 2
ccaggggugcguuaucgcacccc

SEQ ID NO: 3959227 - RNA, 22 nt, Human herpesvirus 2
ccagguggcccuuccggacccc

SEQ ID NO: 3959228 - RNA, 13 nt, Human herpesvirus 2
ccaguuccuccgu

SEQ ID NO: 3959229 - RNA, 16 nt, Human herpesvirus 2
ccauacauuuccccau

SEQ ID NO: 3959230 - RNA, 15 nt, Human herpesvirus 2
ccaucucuguuucau

SEQ ID NO: 3959231 - RNA, 13 nt, Human herpesvirus 2
cccacaacccauc

SEQ ID NO: 3959232 - RNA, 15 nt, Human herpesvirus 2
cccacccccccgccg

SEQ ID NO: 3959233 - RNA, 21 nt, Human herpesvirus 2
cccaccggauaaauguggggc

SEQ ID NO: 3959234 - RNA, 19 nt, Human herpesvirus 2
cccacuuucccccccacuc

SEQ ID NO: 3959235 - RNA, 17 nt, Human herpesvirus 2
cccagcgcacccuggcc

SEQ ID NO: 3959236 - RNA, 19 nt, Human herpesvirus 2
cccagcgcggacgcggcca

SEQ ID NO: 3959237 - RNA, 18 nt, Human herpesvirus 2
cccaggaggggggcagug

SEQ ID NO: 3959238 - RNA, 14 nt, Human herpesvirus 2
cccaggcgacgcca

SEQ ID NO: 3959239 - RNA, 21 nt, Human herpesvirus 2
cccagggcuucguggaagagg

SEQ ID NO: 3959240 - RNA, 15 nt, Human herpesvirus 2
ccccacgucaccggg

SEQ ID NO: 3959241 - RNA, 23 nt, Human herpesvirus 2
ccccagcuuucccuccacccgcc

SEQ ID NO: 3959242 - RNA, 18 nt, Human herpesvirus 2
ccccaggcgacgccaggc

SEQ ID NO: 3959243 - RNA, 19 nt, Human herpesvirus 2
ccccagggagccccggguu

SEQ ID NO: 3959244 - RNA, 16 nt, Human herpesvirus 2
ccccauccccucccga

SEQ ID NO: 3959245 - RNA, 16 nt, Human herpesvirus 2
ccccauggcauccggg

SEQ ID NO: 3959246 - RNA, 22 nt, Human herpesvirus 2
cccccgggcgucguggcaugga

SEQ ID NO: 3959247 - RNA, 21 nt, Human herpesvirus 2
cccccggggggcguggagggg

SEQ ID NO: 3959248 - RNA, 14 nt, Human herpesvirus 2
ccccgauuccggug

SEQ ID NO: 3959249 - RNA, 15 nt, Human herpesvirus 2
ccccgcaggcaggcg

SEQ ID NO: 3959250 - RNA, 14 nt, Human herpesvirus 2
ccccgcgcaggggg

SEQ ID NO: 3959251 - RNA, 14 nt, Human herpesvirus 2
ccccgcgugcagcg

SEQ ID NO: 3959252 - RNA, 16 nt, Human herpesvirus 2
ccccgcgugcagcgcg

SEQ ID NO: 3959253 - RNA, 20 nt, Human herpesvirus 2
ccccgcugcugugcacccua

SEQ ID NO: 3959254 - RNA, 22 nt, Human herpesvirus 2
ccccggcgaccgccccgcgccg

SEQ ID NO: 3959255 - RNA, 13 nt, Human herpesvirus 2
ccccggcuccgag

SEQ ID NO: 3959256 - RNA, 23 nt, Human herpesvirus 2
ccccgggggggggcaagugcagu

SEQ ID NO: 3959257 - RNA, 17 nt, Human herpesvirus 2
ccccucaaagaacgugg

SEQ ID NO: 3959258 - RNA, 19 nt, Human herpesvirus 2
ccccucaccccuccgaccu

SEQ ID NO: 3959259 - RNA, 16 nt, Human herpesvirus 2
ccccucguucugcugc

SEQ ID NO: 3959260 - RNA, 20 nt, Human herpesvirus 2
ccccugaguugcgccggcac

SEQ ID NO: 3959261 - RNA, 15 nt, Human herpesvirus 2
ccccuguuggagccg

SEQ ID NO: 3959262 - RNA, 17 nt, Human herpesvirus 2
ccccuuugacuccuggg

SEQ ID NO: 3959263 - RNA, 14 nt, Human herpesvirus 2
cccgacccuguggc

SEQ ID NO: 3959264 - RNA, 15 nt, Human herpesvirus 2
cccgacguggcccgc

SEQ ID NO: 3959265 - RNA, 14 nt, Human herpesvirus 2
cccgagcgugcccu

SEQ ID NO: 3959266 - RNA, 13 nt, Human herpesvirus 2
cccgagcuccggg

SEQ ID NO: 3959267 - RNA, 15 nt, Human herpesvirus 2
cccgccagagacccu

SEQ ID NO: 3959268 - RNA, 22 nt, Human herpesvirus 2
cccgccauggcggggggggggc

SEQ ID NO: 3959269 - RNA, 14 nt, Human herpesvirus 2
cccgccccccccag

SEQ ID NO: 3959270 - RNA, 16 nt, Human herpesvirus 2
cccgcccccucuccca

SEQ ID NO: 3959271 - RNA, 13 nt, Human herpesvirus 2
cccgccggggcgc

SEQ ID NO: 3959272 - RNA, 15 nt, Human herpesvirus 2
cccgcgcaggggggc

SEQ ID NO: 3959273 - RNA, 17 nt, Human herpesvirus 2
cccgcgcaucacggccc

SEQ ID NO: 3959274 - RNA, 20 nt, Human herpesvirus 2
cccgcggucgcgcgggccgu

SEQ ID NO: 3959275 - RNA, 19 nt, Human herpesvirus 2
cccgcguccgacacccggg

SEQ ID NO: 3959276 - RNA, 20 nt, Human herpesvirus 2
cccggaccccgcugcugugc

SEQ ID NO: 3959277 - RNA, 15 nt, Human herpesvirus 2
cccggcccggcccgc

SEQ ID NO: 3959278 - RNA, 17 nt, Human herpesvirus 2
cccggccgccccccguc

SEQ ID NO: 3959279 - RNA, 22 nt, Human herpesvirus 2
cccggccuuugcuuccucgcgg

SEQ ID NO: 3959280 - RNA, 13 nt, Human herpesvirus 2
cccggcgccgccc

SEQ ID NO: 3959281 - RNA, 16 nt, Human herpesvirus 2
cccggcgccgccccgc

SEQ ID NO: 3959282 - RNA, 18 nt, Human herpesvirus 2
cccggcgcgggcggcgcc

SEQ ID NO: 3959283 - RNA, 18 nt, Human herpesvirus 2
cccggcggccccccgcgc

SEQ ID NO: 3959284 - RNA, 14 nt, Human herpesvirus 2
cccggcggcggucg

SEQ ID NO: 3959285 - RNA, 18 nt, Human herpesvirus 2
cccggcgucaugcacgcc

SEQ ID NO: 3959286 - RNA, 15 nt, Human herpesvirus 2
cccggcuccuccgug

SEQ ID NO: 3959287 - RNA, 22 nt, Human herpesvirus 2
cccgggauccuccgccagcucg

SEQ ID NO: 3959288 - RNA, 19 nt, Human herpesvirus 2
cccggguuaccgguacgcc

SEQ ID NO: 3959289 - RNA, 10 nt, Human herpesvirus 2
cccgucccga

SEQ ID NO: 3959290 - RNA, 21 nt, Human herpesvirus 2
cccgucuuuuuuuuuccuguu

SEQ ID NO: 3959291 - RNA, 19 nt, Human herpesvirus 2
cccguguaccucugggccc

SEQ ID NO: 3959292 - RNA, 17 nt, Human herpesvirus 2
cccuccgccagcgcccu

SEQ ID NO: 3959293 - RNA, 17 nt, Human herpesvirus 2
cccugcgucgccccgug

SEQ ID NO: 3959294 - RNA, 15 nt, Human herpesvirus 2
cccuggacugggccg

SEQ ID NO: 3959295 - RNA, 16 nt, Human herpesvirus 2
cccuggacugggccgc

SEQ ID NO: 3959296 - RNA, 16 nt, Human herpesvirus 2
cccuggcgcaccugca

SEQ ID NO: 3959297 - RNA, 21 nt, Human herpesvirus 2
cccuggguccgggggccuggu

SEQ ID NO: 3959298 - RNA, 20 nt, Human herpesvirus 2
ccgaacggaaggccucccgg

SEQ ID NO: 3959299 - RNA, 23 nt, Human herpesvirus 2
ccgaagagacgaugggagccccg

SEQ ID NO: 3959300 - RNA, 17 nt, Human herpesvirus 2
ccgaaggaggaaagugg

SEQ ID NO: 3959301 - RNA, 15 nt, Human herpesvirus 2
ccgaauacgacgccc

SEQ ID NO: 3959302 - RNA, 14 nt, Human herpesvirus 2
ccgacaucaaccac

SEQ ID NO: 3959303 - RNA, 16 nt, Human herpesvirus 2
ccgacauuccccucuc

SEQ ID NO: 3959304 - RNA, 14 nt, Human herpesvirus 2
ccgaccccgccgcc

SEQ ID NO: 3959305 - RNA, 20 nt, Human herpesvirus 2
ccgacgauuagccaccgcgc

SEQ ID NO: 3959306 - RNA, 23 nt, Human herpesvirus 2
ccgacggggagggacaaggagga

SEQ ID NO: 3959307 - RNA, 14 nt, Human herpesvirus 2
ccgagcagcacggc

SEQ ID NO: 3959308 - RNA, 15 nt, Human herpesvirus 2
ccgagccgcugugcc

SEQ ID NO: 3959309 - RNA, 21 nt, Human herpesvirus 2
ccgagccgcugugccaggugg

SEQ ID NO: 3959310 - RNA, 17 nt, Human herpesvirus 2
ccgagcgccgggcagac

SEQ ID NO: 3959311 - RNA, 22 nt, Human herpesvirus 2
ccgagcgccgggcagacagaca

SEQ ID NO: 3959312 - RNA, 19 nt, Human herpesvirus 2
gcgccaagcgccccgcgga

SEQ ID NO: 3959313 - RNA, 15 nt, Human herpesvirus 2
gcgccaccggccugg

SEQ ID NO: 3959314 - RNA, 13 nt, Human herpesvirus 2
gcgccaggucagc

SEQ ID NO: 3959315 - RNA, 21 nt, Human herpesvirus 2
gcgccauuacccuauacgcgg

SEQ ID NO: 3959316 - RNA, 17 nt, Human herpesvirus 2
gcgcccaccgguccuuc

SEQ ID NO: 3959317 - RNA, 18 nt, Human herpesvirus 2
gcgcccuuccgcguccgc

SEQ ID NO: 3959318 - RNA, 15 nt, Human herpesvirus 2
gcgccgccgucagcu

SEQ ID NO: 3959319 - RNA, 17 nt, Human herpesvirus 2
gcgccgcgacggccccg

SEQ ID NO: 3959320 - RNA, 23 nt, Human herpesvirus 2
gcgccgcgacggccccggccgcc

SEQ ID NO: 3959321 - RNA, 20 nt, Human herpesvirus 2
gcgccgucgucgcccgcccg

SEQ ID NO: 3959322 - RNA, 23 nt, Human herpesvirus 2
gcgccgucgucgcccgcccgccg

SEQ ID NO: 3959323 - RNA, 22 nt, Human herpesvirus 2
gcgccuaccugguacccacgga

SEQ ID NO: 3959324 - RNA, 14 nt, Human herpesvirus 2
gcgccucgggcggc

SEQ ID NO: 3959325 - RNA, 17 nt, Human herpesvirus 2
gcgcgacggccgagaag

SEQ ID NO: 3959326 - RNA, 18 nt, Human herpesvirus 2
gcgcgaggccgcucuccg

SEQ ID NO: 3959327 - RNA, 15 nt, Human herpesvirus 2
gcgcgcaucggaccc

SEQ ID NO: 3959328 - RNA, 16 nt, Human herpesvirus 2
gcgcgccgccgcgcgg

SEQ ID NO: 3959329 - RNA, 11 nt, Human herpesvirus 2
gcgcgcgcccc

SEQ ID NO: 3959330 - RNA, 15 nt, Human herpesvirus 2
gcgcgcuggcggaag

SEQ ID NO: 3959331 - RNA, 12 nt, Human herpesvirus 2
gcgcgcuugcac

SEQ ID NO: 3959332 - RNA, 20 nt, Human herpesvirus 2
gcgcggccacgucguccggg

SEQ ID NO: 3959333 - RNA, 16 nt, Human herpesvirus 2
gcgcgggcgacgggcg

SEQ ID NO: 3959334 - RNA, 13 nt, Human herpesvirus 2
gcgcgggcggcgc

SEQ ID NO: 3959335 - RNA, 18 nt, Human herpesvirus 2
gcgcggggguucggggcc

SEQ ID NO: 3959336 - RNA, 21 nt, Human herpesvirus 2
gcgcggggguucggggccagg

SEQ ID NO: 3959337 - RNA, 22 nt, Human herpesvirus 2
gcgcggucuagaugccagugga

SEQ ID NO: 3959338 - RNA, 13 nt, Human herpesvirus 2
gcgcgucggugcc

SEQ ID NO: 3959339 - RNA, 17 nt, Human herpesvirus 2
gcgcgugcagaacaccg

SEQ ID NO: 3959340 - RNA, 14 nt, Human herpesvirus 2
gcgcuggccccucu

SEQ ID NO: 3959341 - RNA, 19 nt, Human herpesvirus 2
gcgcuuagggugugacccc

SEQ ID NO: 3959342 - RNA, 15 nt, Human herpesvirus 2
gcggacagccagggc

SEQ ID NO: 3959343 - RNA, 12 nt, Human herpesvirus 2
gcggacuggcag

SEQ ID NO: 3959344 - RNA, 19 nt, Human herpesvirus 2
gcggagccucuuugggccg

SEQ ID NO: 3959345 - RNA, 22 nt, Human herpesvirus 2
gcggagccucuuugggccgugg

SEQ ID NO: 3959346 - RNA, 15 nt, Human herpesvirus 2
gcggaggcgugguga

SEQ ID NO: 3959347 - RNA, 22 nt, Human herpesvirus 2
gcggcacucgaagaaguuggug

SEQ ID NO: 3959348 - RNA, 22 nt, Human herpesvirus 2
gcggcauaccuccgaccggcgg

SEQ ID NO: 3959349 - RNA, 14 nt, Human herpesvirus 2
gcggccaccccgcc

SEQ ID NO: 3959350 - RNA, 18 nt, Human herpesvirus 2
gcggccauccugcccacc

SEQ ID NO: 3959351 - RNA, 16 nt, Human herpesvirus 2
gcggccccgacccaac

SEQ ID NO: 3959352 - RNA, 16 nt, Human herpesvirus 2
gcggccccggcggccc

SEQ ID NO: 3959353 - RNA, 12 nt, Human herpesvirus 2
gcggcccucucg

SEQ ID NO: 3959354 - RNA, 14 nt, Human herpesvirus 2
gcggcggggguggg

SEQ ID NO: 3959355 - RNA, 15 nt, Human herpesvirus 2
gcggcuugcgcgacc

SEQ ID NO: 3959356 - RNA, 22 nt, Human herpesvirus 2
gcgggaccccgacguggcccgc

SEQ ID NO: 3959357 - RNA, 14 nt, Human herpesvirus 2
gcgggaggggcggg

SEQ ID NO: 3959358 - RNA, 15 nt, Human herpesvirus 2
gcgggcgcggcacac

SEQ ID NO: 3959359 - RNA, 14 nt, Human herpesvirus 2
gcgggcggcgccgc

SEQ ID NO: 3959360 - RNA, 13 nt, Human herpesvirus 2
gcgggcgggauga

SEQ ID NO: 3959361 - RNA, 15 nt, Human herpesvirus 2
gcgggcgggggucgg

SEQ ID NO: 3959362 - RNA, 12 nt, Human herpesvirus 2
gcggggaugggg

SEQ ID NO: 3959363 - RNA, 16 nt, Human herpesvirus 2
gcggggcauggacccc

SEQ ID NO: 3959364 - RNA, 14 nt, Human herpesvirus 2
gcgggggccggggc

SEQ ID NO: 3959365 - RNA, 18 nt, Human herpesvirus 2
gcggggguucggggccag

SEQ ID NO: 3959366 - RNA, 19 nt, Human herpesvirus 2
gcgguagcggacgcacggc

SEQ ID NO: 3959367 - RNA, 14 nt, Human herpesvirus 2
gcggucggccagca

SEQ ID NO: 3959368 - RNA, 22 nt, Human herpesvirus 2
gcggucgucguccucacggcca

SEQ ID NO: 3959369 - RNA, 20 nt, Human herpesvirus 2
gcgguuggaggcgccucugc

SEQ ID NO: 3959370 - RNA, 16 nt, Human herpesvirus 2
gcguacguggcgucgg

SEQ ID NO: 3959371 - RNA, 19 nt, Human herpesvirus 2
gcguccggaaccccucugg

SEQ ID NO: 3959372 - RNA, 18 nt, Human herpesvirus 2
gcgucgcucucggucccg

SEQ ID NO: 3959373 - RNA, 16 nt, Human herpesvirus 2
gcgucggcggccccgg

SEQ ID NO: 3959374 - RNA, 21 nt, Human herpesvirus 2
gcgucuagcucgcggagggcg

SEQ ID NO: 3959375 - RNA, 16 nt, Human herpesvirus 2
gcgucucccgggggcg

SEQ ID NO: 3959376 - RNA, 11 nt, Human herpesvirus 2
gcgugccaacu

SEQ ID NO: 3959377 - RNA, 21 nt, Human herpesvirus 2
gcgugccaacucgcggcaccg

SEQ ID NO: 3959378 - RNA, 13 nt, Human herpesvirus 2
gcgugcugugccc

SEQ ID NO: 3959379 - RNA, 14 nt, Human herpesvirus 2
gcguggccgcgacc

SEQ ID NO: 3959380 - RNA, 18 nt, Human herpesvirus 2
gcgugguccccgagcagc

SEQ ID NO: 3959381 - RNA, 15 nt, Human herpesvirus 2
gcguugcgcuuuccg

SEQ ID NO: 3959382 - RNA, 13 nt, Human herpesvirus 2
gcguuucccuuuu

SEQ ID NO: 3959383 - RNA, 23 nt, Human herpesvirus 2
gcuaccgcggcuucuucgccgcc

SEQ ID NO: 3959384 - RNA, 20 nt, Human herpesvirus 2
gcuaguacccagaggcugga

SEQ ID NO: 3959385 - RNA, 17 nt, Human herpesvirus 2
gcucauggccggagaaa

SEQ ID NO: 3959386 - RNA, 20 nt, Human herpesvirus 2
gcucccguguaccucugggc

SEQ ID NO: 3959387 - RNA, 14 nt, Human herpesvirus 2
gcucccugcggcug

SEQ ID NO: 3959388 - RNA, 18 nt, Human herpesvirus 2
gcuccgcgugguccccga

SEQ ID NO: 3959389 - RNA, 22 nt, Human herpesvirus 2
gcuccgcgugguccccgagcag

SEQ ID NO: 3959390 - RNA, 13 nt, Human herpesvirus 2
gcucgcggggccg

SEQ ID NO: 3959391 - RNA, 18 nt, Human herpesvirus 2
gcucgcgguaauuagcag

SEQ ID NO: 3959392 - RNA, 15 nt, Human herpesvirus 2
gcucggacaccagca

SEQ ID NO: 3959393 - RNA, 13 nt, Human herpesvirus 2
gcucggucgccuu

SEQ ID NO: 3959394 - RNA, 14 nt, Human herpesvirus 2
gcucguccccuggg

SEQ ID NO: 3959395 - RNA, 17 nt, Human herpesvirus 2
gcucgucgcgacccugc

SEQ ID NO: 3959396 - RNA, 19 nt, Human herpesvirus 2
gcucugucccccgggcagc

SEQ ID NO: 3959397 - RNA, 23 nt, Human herpesvirus 2
gcucuguuucgcauaugcccugg

SEQ ID NO: 3959398 - RNA, 13 nt, Human herpesvirus 2
gcugcccccgcgc

SEQ ID NO: 3959399 - RNA, 11 nt, Human herpesvirus 2
gcugcggggac

SEQ ID NO: 3959400 - RNA, 20 nt, Human herpesvirus 2
gcugcugagcccugccccgc

SEQ ID NO: 3959401 - RNA, 16 nt, Human herpesvirus 2
gcuggagcucugccug

SEQ ID NO: 3959402 - RNA, 13 nt, Human herpesvirus 2
gcuggggaaaucu

SEQ ID NO: 3959403 - RNA, 15 nt, Human herpesvirus 2
gcugguggccgcggu

SEQ ID NO: 3959404 - RNA, 15 nt, Human herpesvirus 2
gcugguuucucugcg

SEQ ID NO: 3959405 - RNA, 18 nt, Human herpesvirus 2
gcuguggcccuggcggac

SEQ ID NO: 3959406 - RNA, 18 nt, Human herpesvirus 2
gcuuagucccggguccgg

SEQ ID NO: 3959407 - RNA, 21 nt, Human herpesvirus 2
gcuuccaccccccccccccuu

SEQ ID NO: 3959408 - RNA, 23 nt, Human herpesvirus 2
gcuugccccucccccggcccagc

SEQ ID NO: 3959409 - RNA, 12 nt, Human herpesvirus 2
gcuugcggggcu

SEQ ID NO: 3959410 - RNA, 16 nt, Human herpesvirus 2
gcuugcugcccgaagg

SEQ ID NO: 3959411 - RNA, 16 nt, Human herpesvirus 2
gcuuggacugggagcc

SEQ ID NO: 3959412 - RNA, 14 nt, Human herpesvirus 2
ggaaacgcaaaaaa

SEQ ID NO: 3959413 - RNA, 20 nt, Human herpesvirus 2
ggaaacgcaaaaaaaacaag

SEQ ID NO: 3959414 - RNA, 23 nt, Human herpesvirus 2
gggcguccugcggcagcgcgccg

SEQ ID NO: 3959415 - RNA, 11 nt, Human herpesvirus 2
gggcuccucag

SEQ ID NO: 3959416 - RNA, 19 nt, Human herpesvirus 2
gggcugggagcccuccucg

SEQ ID NO: 3959417 - RNA, 23 nt, Human herpesvirus 2
gggcuuggacugggagccgcgau

SEQ ID NO: 3959418 - RNA, 14 nt, Human herpesvirus 2
ggggaaagugggcc

SEQ ID NO: 3959419 - RNA, 21 nt, Human herpesvirus 2
ggggaaggaaucgggcgucug

SEQ ID NO: 3959420 - RNA, 13 nt, Human herpesvirus 2
ggggacagccccg

SEQ ID NO: 3959421 - RNA, 19 nt, Human herpesvirus 2
ggggacggccgggcagagc

SEQ ID NO: 3959422 - RNA, 13 nt, Human herpesvirus 2
ggggagggcgugg

SEQ ID NO: 3959423 - RNA, 15 nt, Human herpesvirus 2
ggggagggggugugg

SEQ ID NO: 3959424 - RNA, 21 nt, Human herpesvirus 2
ggggaucugucgccggcgugg

SEQ ID NO: 3959425 - RNA, 18 nt, Human herpesvirus 2
ggggaugggggggaaggg

SEQ ID NO: 3959426 - RNA, 14 nt, Human herpesvirus 2
ggggcaagugcagu

SEQ ID NO: 3959427 - RNA, 15 nt, Human herpesvirus 2
ggggcaagugcagua

SEQ ID NO: 3959428 - RNA, 18 nt, Human herpesvirus 2
ggggcaccaaaaaccagg

SEQ ID NO: 3959429 - RNA, 17 nt, Human herpesvirus 2
ggggccaggaacuccag

SEQ ID NO: 3959430 - RNA, 14 nt, Human herpesvirus 2
ggggccccagggcu

SEQ ID NO: 3959431 - RNA, 18 nt, Human herpesvirus 2
ggggccgucgcggccgcc

SEQ ID NO: 3959432 - RNA, 21 nt, Human herpesvirus 2
ggggcuccucagcgcggccgu

SEQ ID NO: 3959433 - RNA, 12 nt, Human herpesvirus 2
gggggaaacaca

SEQ ID NO: 3959434 - RNA, 21 nt, Human herpesvirus 2
gggggaacgcgcacccuugcc

SEQ ID NO: 3959435 - RNA, 20 nt, Human herpesvirus 2
gggggacccgacccuguggc

SEQ ID NO: 3959436 - RNA, 18 nt, Human herpesvirus 2
gggggcgcugguggccgc

SEQ ID NO: 3959437 - RNA, 12 nt, Human herpesvirus 2
gggggcgggcac

SEQ ID NO: 3959438 - RNA, 22 nt, Human herpesvirus 2
gggggucgggcgggcggggguc

SEQ ID NO: 3959439 - RNA, 14 nt, Human herpesvirus 2
ggggugggucgccg

SEQ ID NO: 3959440 - RNA, 14 nt, Human herpesvirus 2
ggguaggccagagc

SEQ ID NO: 3959441 - RNA, 15 nt, Human herpesvirus 2
ggguccgacgaggcc

SEQ ID NO: 3959442 - RNA, 20 nt, Human herpesvirus 2
ggguccgacgaggccuuccc

SEQ ID NO: 3959443 - RNA, 14 nt, Human herpesvirus 2
ggguccgggggccu

SEQ ID NO: 3959444 - RNA, 16 nt, Human herpesvirus 2
ggguccgggggccugg

SEQ ID NO: 3959445 - RNA, 15 nt, Human herpesvirus 2
gggugaggaagaaag

SEQ ID NO: 3959446 - RNA, 17 nt, Human herpesvirus 2
gggugugacccccccau

SEQ ID NO: 3959447 - RNA, 18 nt, Human herpesvirus 2
gggugugcugcuguuggg

SEQ ID NO: 3959448 - RNA, 17 nt, Human herpesvirus 2
ggguguguggggagggg

SEQ ID NO: 3959449 - RNA, 22 nt, Human herpesvirus 2
ggguucgcgcaucucuggcucc

SEQ ID NO: 3959450 - RNA, 20 nt, Human herpesvirus 2
ggguuuuuuaaccggcccca

SEQ ID NO: 3959451 - RNA, 14 nt, Human herpesvirus 2
gguacuggggcccc

SEQ ID NO: 3959452 - RNA, 16 nt, Human herpesvirus 2
gguagcggacgcacgg

SEQ ID NO: 3959453 - RNA, 13 nt, Human herpesvirus 2
ggucaauagauuu

SEQ ID NO: 3959454 - RNA, 19 nt, Human herpesvirus 2
ggucaauagauuuccccaa

SEQ ID NO: 3959455 - RNA, 18 nt, Human herpesvirus 2
ggucacaaaaggcacggc

SEQ ID NO: 3959456 - RNA, 21 nt, Human herpesvirus 2
gguccaauauggcccagcgca

SEQ ID NO: 3959457 - RNA, 13 nt, Human herpesvirus 2
ggucccccggacc

SEQ ID NO: 3959458 - RNA, 14 nt, Human herpesvirus 2
gguccccgaacaaa

SEQ ID NO: 3959459 - RNA, 14 nt, Human herpesvirus 2
gguccccgucggaa

SEQ ID NO: 3959460 - RNA, 15 nt, Human herpesvirus 2
ggucccgauggccgc

SEQ ID NO: 3959461 - RNA, 18 nt, Human herpesvirus 2
ggucccggccgccauccc

SEQ ID NO: 3959462 - RNA, 13 nt, Human herpesvirus 2
gguccuggugggc

SEQ ID NO: 3959463 - RNA, 19 nt, Human herpesvirus 2
ggucgaucucggggagggc

SEQ ID NO: 3959464 - RNA, 14 nt, Human herpesvirus 2
ggucgcucuguccc

SEQ ID NO: 3959465 - RNA, 20 nt, Human herpesvirus 2
ggucuuuccguggcgccugg

SEQ ID NO: 3959466 - RNA, 22 nt, Human herpesvirus 2
ggugacggaaaaccugggcggc

SEQ ID NO: 3959467 - RNA, 16 nt, Human herpesvirus 2
ggugcaguuugagcag

SEQ ID NO: 3959468 - RNA, 22 nt, Human herpesvirus 2
ggugcccaucuacguggccggg

SEQ ID NO: 3959469 - RNA, 23 nt, Human herpesvirus 2
gguggcccuuccggaccccgacc

SEQ ID NO: 3959470 - RNA, 15 nt, Human herpesvirus 2
gguguguuuggcgug

SEQ ID NO: 3959471 - RNA, 13 nt, Human herpesvirus 2
gguuggggcgggc

SEQ ID NO: 3959472 - RNA, 16 nt, Human herpesvirus 2
guacagcauguggccc

SEQ ID NO: 3959473 - RNA, 22 nt, Human herpesvirus 2
guacagccuacaucaccccagg

SEQ ID NO: 3959474 - RNA, 12 nt, Human herpesvirus 2
guacccucucaa

SEQ ID NO: 3959475 - RNA, 22 nt, Human herpesvirus 2
guacccucucaacgcccaggcc

SEQ ID NO: 3959476 - RNA, 14 nt, Human herpesvirus 2
guaccucugggccc

SEQ ID NO: 3959477 - RNA, 16 nt, Human herpesvirus 2
guacgaucgagguggc

SEQ ID NO: 3959478 - RNA, 16 nt, Human herpesvirus 2
guacuucuacaccucc

SEQ ID NO: 3959479 - RNA, 12 nt, Human herpesvirus 2
guaggccagagc

SEQ ID NO: 3959480 - RNA, 16 nt, Human herpesvirus 2
guaggguccgcggggg

SEQ ID NO: 3959481 - RNA, 20 nt, Human herpesvirus 2
guaucagugggugacagagu

SEQ ID NO: 3959482 - RNA, 12 nt, Human herpesvirus 2
guaucggccagg

SEQ ID NO: 3959483 - RNA, 13 nt, Human herpesvirus 2
guaucggccagga

SEQ ID NO: 3959484 - RNA, 15 nt, Human herpesvirus 2
guauucccccgcggg

SEQ ID NO: 3959485 - RNA, 14 nt, Human herpesvirus 2
gucaccgggggccc

SEQ ID NO: 3959486 - RNA, 15 nt, Human herpesvirus 2
gucaccuggcucgcc

SEQ ID NO: 3959487 - RNA, 16 nt, Human herpesvirus 2
guccccaggcgacgcc

SEQ ID NO: 3959488 - RNA, 16 nt, Human herpesvirus 2
guccccggugucuccg

SEQ ID NO: 3959489 - RNA, 21 nt, Human herpesvirus 2
guccccuacgccccccucggc

SEQ ID NO: 3959490 - RNA, 12 nt, Human herpesvirus 2
guccccuggggc

SEQ ID NO: 3959491 - RNA, 15 nt, Human herpesvirus 2
gucccgauggccgcc

SEQ ID NO: 3959492 - RNA, 12 nt, Human herpesvirus 2
gucccucgcgcg

SEQ ID NO: 3959493 - RNA, 19 nt, Human herpesvirus 2
gucccucgcgcgcauccac

SEQ ID NO: 3959494 - RNA, 20 nt, Human herpesvirus 2
guccuaaggcgccgacggcg

SEQ ID NO: 3959495 - RNA, 23 nt, Human herpesvirus 2
guccuaaggcgccgacggcggcg

SEQ ID NO: 3959496 - RNA, 20 nt, Human herpesvirus 2
guccuccggcgcgcacuccc

SEQ ID NO: 3959497 - RNA, 17 nt, Human herpesvirus 2
guccucgccgcuguggc

SEQ ID NO: 3959498 - RNA, 16 nt, Human herpesvirus 2
guccugcggcagcgcg

SEQ ID NO: 3959499 - RNA, 13 nt, Human herpesvirus 2
guccugcggcuca

SEQ ID NO: 3959500 - RNA, 21 nt, Human herpesvirus 2
guccuggaggggggugcugug

SEQ ID NO: 3959501 - RNA, 20 nt, Human herpesvirus 2
gucgccaacggccagcgggg

SEQ ID NO: 3959502 - RNA, 21 nt, Human herpesvirus 2
gucgcgcuuuuccgccgccgg

SEQ ID NO: 3959503 - RNA, 11 nt, Human herpesvirus 2
gucgcuaacga

SEQ ID NO: 3959504 - RNA, 16 nt, Human herpesvirus 2
gucgcuccggcucccg

SEQ ID NO: 3959505 - RNA, 20 nt, Human herpesvirus 2
gucgcuuuccacacccccuc

SEQ ID NO: 3959506 - RNA, 15 nt, Human herpesvirus 2
gucggagaggcccgc

SEQ ID NO: 3959507 - RNA, 13 nt, Human herpesvirus 2
gucggugccagac

SEQ ID NO: 3959508 - RNA, 13 nt, Human herpesvirus 2
gucguagaucggg

SEQ ID NO: 3959509 - RNA, 15 nt, Human herpesvirus 2
gucugcgccaccggc

SEQ ID NO: 3959510 - RNA, 20 nt, Human herpesvirus 2
gucugcgccaccggccuggu

SEQ ID NO: 3959511 - RNA, 21 nt, Human herpesvirus 2
gugacucgccauggcggccgc

SEQ ID NO: 3959512 - RNA, 17 nt, Human herpesvirus 2
gugcaccgaaggaggaa

SEQ ID NO: 3959513 - RNA, 13 nt, Human herpesvirus 2
gugccgcagacca

SEQ ID NO: 3959514 - RNA, 17 nt, Human herpesvirus 2
gugcgcucgcucuccgu

SEQ ID NO: 3959515 - RNA, 21 nt, Human herpesvirus 2
gugcgcucgcucuccgugccc

SEQ ID NO: 3959516 - RNA, 21 nt, Human herpesvirus 2
gugcgcuuauaagagcgggcc

SEQ ID NO: 3959517 - RNA, 15 nt, Human herpesvirus 2
gugcgugcggcccug

SEQ ID NO: 3959518 - RNA, 20 nt, Human herpesvirus 2
gugcgugcugcugagcccug

SEQ ID NO: 3959519 - RNA, 15 nt, Human herpesvirus 2
gugcucggggacaga

SEQ ID NO: 3959520 - RNA, 16 nt, Human herpesvirus 2
gugcugcugagcccug

SEQ ID NO: 3959521 - RNA, 15 nt, Human herpesvirus 2
gugcuggugguggaa

SEQ ID NO: 3959522 - RNA, 16 nt, Human herpesvirus 2
gugcugugcccugggu

SEQ ID NO: 3959523 - RNA, 21 nt, Human herpesvirus 2
gugcuguggcggucggccagc

SEQ ID NO: 3959524 - RNA, 15 nt, Human herpesvirus 2
guggacgcagcggcg

SEQ ID NO: 3959525 - RNA, 15 nt, Human herpesvirus 2
guggcccacgagcuc

SEQ ID NO: 3959526 - RNA, 16 nt, Human herpesvirus 2
guggcggucggccagc

SEQ ID NO: 3959527 - RNA, 15 nt, Human herpesvirus 2
gugggccuagccgug

SEQ ID NO: 3959528 - RNA, 16 nt, Human herpesvirus 2
guggggacgaggccca

SEQ ID NO: 3959529 - RNA, 22 nt, Human herpesvirus 2
gugggucugcgccaccggccug

SEQ ID NO: 3959530 - RNA, 14 nt, Human herpesvirus 2
gugggugggugugg

SEQ ID NO: 3959531 - RNA, 23 nt, Human herpesvirus 2
guggucguggugcuggccaaugc

SEQ ID NO: 3959532 - RNA, 16 nt, Human herpesvirus 2
cuuggcgcgcgcggcg

SEQ ID NO: 3959533 - RNA, 19 nt, Human herpesvirus 2
cuuuccacacccccucccc

SEQ ID NO: 3959534 - RNA, 20 nt, Human herpesvirus 2
cuuucccuucuccauuccug

SEQ ID NO: 3959535 - RNA, 23 nt, Human herpesvirus 2
cuuuccuuaaaaggcaccccauc

SEQ ID NO: 3959536 - RNA, 13 nt, Human herpesvirus 2
cuuucuuuccccc

SEQ ID NO: 3959537 - RNA, 18 nt, Human herpesvirus 2
cuuucuuuuugccuccca

SEQ ID NO: 3959538 - RNA, 22 nt, Human herpesvirus 2
cuuuuguuccaccgcucaccca

SEQ ID NO: 3959539 - RNA, 22 nt, Human herpesvirus 2
gaaaacggucggcgaacacaac

SEQ ID NO: 3959540 - RNA, 20 nt, Human herpesvirus 2
gaaacacgguggcgcgcugg

SEQ ID NO: 3959541 - RNA, 17 nt, Human herpesvirus 2
gaaaccgggggucgcac

SEQ ID NO: 3959542 - RNA, 22 nt, Human herpesvirus 2
gaaacuuccgggagcgggggag

SEQ ID NO: 3959543 - RNA, 22 nt, Human herpesvirus 2
gaaagcgaagacgaggccgcca

SEQ ID NO: 3959544 - RNA, 22 nt, Human herpesvirus 2
gaaagcuggcgucgggggcggg

SEQ ID NO: 3959545 - RNA, 20 nt, Human herpesvirus 2
gaaauaaagaacgagacaga

SEQ ID NO: 3959546 - RNA, 15 nt, Human herpesvirus 2
gaaaucucucugccg

SEQ ID NO: 3959547 - RNA, 14 nt, Human herpesvirus 2
gaaaugggggcggg

SEQ ID NO: 3959548 - RNA, 20 nt, Human herpesvirus 2
gaacggucuccgccaugcaa

SEQ ID NO: 3959549 - RNA, 19 nt, Human herpesvirus 2
gaacuccagcuuggccgug

SEQ ID NO: 3959550 - RNA, 19 nt, Human herpesvirus 2
gaagcccgaacggaaggcc

SEQ ID NO: 3959551 - RNA, 22 nt, Human herpesvirus 2
gaagcccgaacggaaggccucc

SEQ ID NO: 3959552 - RNA, 21 nt, Human herpesvirus 2
gaaggaacgcccgaaaccaga

SEQ ID NO: 3959553 - RNA, 22 nt, Human herpesvirus 2
gaaggaaucgggcgucugugcg

SEQ ID NO: 3959554 - RNA, 17 nt, Human herpesvirus 2
gaauugacaagcggggg

SEQ ID NO: 3959555 - RNA, 22 nt, Human herpesvirus 2
gacacacuuuguuguuggccuu

SEQ ID NO: 3959556 - RNA, 14 nt, Human herpesvirus 2
gacaccagcagcuu

SEQ ID NO: 3959557 - RNA, 21 nt, Human herpesvirus 2
gacaccagcagcuugcggggc

SEQ ID NO: 3959558 - RNA, 17 nt, Human herpesvirus 2
gacagccagggcuggga

SEQ ID NO: 3959559 - RNA, 14 nt, Human herpesvirus 2
gacagcggggaccc

SEQ ID NO: 3959560 - RNA, 18 nt, Human herpesvirus 2
gaccaaaacggaccccgc

SEQ ID NO: 3959561 - RNA, 23 nt, Human herpesvirus 2
gaccaccgcggacagccagggcu

SEQ ID NO: 3959562 - RNA, 16 nt, Human herpesvirus 2
gaccagaccguggccg

SEQ ID NO: 3959563 - RNA, 16 nt, Human herpesvirus 2
gacccaccgcaccacc

SEQ ID NO: 3959564 - RNA, 14 nt, Human herpesvirus 2
gaccccgcugcugu

SEQ ID NO: 3959565 - RNA, 15 nt, Human herpesvirus 2
gacccggcggcgguc

SEQ ID NO: 3959566 - RNA, 21 nt, Human herpesvirus 2
gacccgggcgagcuggcccug

SEQ ID NO: 3959567 - RNA, 13 nt, Human herpesvirus 2
gacccugcccccc

SEQ ID NO: 3959568 - RNA, 21 nt, Human herpesvirus 2
gaccgccccccccggcggggc

SEQ ID NO: 3959569 - RNA, 22 nt, Human herpesvirus 2
gaccggcggggcccccgaccga

SEQ ID NO: 3959570 - RNA, 22 nt, Human herpesvirus 2
gaccggucgcuuuccacacccc

SEQ ID NO: 3959571 - RNA, 22 nt, Human herpesvirus 2
gaccucgcccccgucgcccccc

SEQ ID NO: 3959572 - RNA, 14 nt, Human herpesvirus 2
gaccugcagccggc

SEQ ID NO: 3959573 - RNA, 19 nt, Human herpesvirus 2
gaccugggggauuguggga

SEQ ID NO: 3959574 - RNA, 15 nt, Human herpesvirus 2
gacgccagcugcugg

SEQ ID NO: 3959575 - RNA, 14 nt, Human herpesvirus 2
gacgcggcacaggu

SEQ ID NO: 3959576 - RNA, 20 nt, Human herpesvirus 2
gacgcggcacagguggugca

SEQ ID NO: 3959577 - RNA, 20 nt, Human herpesvirus 2
gacgcugucgacgagucuca

SEQ ID NO: 3959578 - RNA, 15 nt, Human herpesvirus 2
gacggcaauaaaaga

SEQ ID NO: 3959579 - RNA, 18 nt, Human herpesvirus 2
gacggccaugaccucgcc

SEQ ID NO: 3959580 - RNA, 21 nt, Human herpesvirus 2
gacgggaguuccgacgacgcg

SEQ ID NO: 3959581 - RNA, 13 nt, Human herpesvirus 2
gacggggaggaga

SEQ ID NO: 3959582 - RNA, 23 nt, Human herpesvirus 2
gacgggugggccuagccgugggc

SEQ ID NO: 3959583 - RNA, 17 nt, Human herpesvirus 2
gacgucggcggacacgc

SEQ ID NO: 3959584 - RNA, 15 nt, Human herpesvirus 2
gacuagaaaaacaaa

SEQ ID NO: 3959585 - RNA, 23 nt, Human herpesvirus 2
gacucacucguggaugccggggc

SEQ ID NO: 3959586 - RNA, 21 nt, Human herpesvirus 2
gacuccgccccggcgaccgcc

SEQ ID NO: 3959587 - RNA, 20 nt, Human herpesvirus 2
gacugcagccccgguccccc

SEQ ID NO: 3959588 - RNA, 23 nt, Human herpesvirus 2
gacugccuccacgcccugcugua

SEQ ID NO: 3959589 - RNA, 18 nt, Human herpesvirus 2
gacuggccgugcugggcg

SEQ ID NO: 3959590 - RNA, 15 nt, Human herpesvirus 2
gacuuccgugccccu

SEQ ID NO: 3959591 - RNA, 16 nt, Human herpesvirus 2
gacuuggugcgccgcc

SEQ ID NO: 3959592 - RNA, 21 nt, Human herpesvirus 2
gagagagggggggaaagaaag

SEQ ID NO: 3959593 - RNA, 14 nt, Human herpesvirus 2
gagagggggaagga

SEQ ID NO: 3959594 - RNA, 20 nt, Human herpesvirus 2
gagaguucaauagauuuccc

SEQ ID NO: 3959595 - RNA, 13 nt, Human herpesvirus 2
gagcagcacggcg

SEQ ID NO: 3959596 - RNA, 17 nt, Human herpesvirus 2
gagcagcacggcggcca

SEQ ID NO: 3959597 - RNA, 17 nt, Human herpesvirus 2
gagccccccacgugggc

SEQ ID NO: 3959598 - RNA, 21 nt, Human herpesvirus 2
gagcccucacgucuucgccca

SEQ ID NO: 3959599 - RNA, 23 nt, Human herpesvirus 2
gagcccugccccgcccccucucc

SEQ ID NO: 3959600 - RNA, 22 nt, Human herpesvirus 2
gagccgcccauccgaggaccgc

SEQ ID NO: 3959601 - RNA, 14 nt, Human herpesvirus 2
gagccgcugugcca

SEQ ID NO: 3959602 - RNA, 15 nt, Human herpesvirus 2
gagcgggcccggggc

SEQ ID NO: 3959603 - RNA, 17 nt, Human herpesvirus 2
gagcguaucggccagga

SEQ ID NO: 3959604 - RNA, 19 nt, Human herpesvirus 2
gaggaccacgugcacagcc

SEQ ID NO: 3959605 - RNA, 17 nt, Human herpesvirus 2
gaggagagcgucagcgc

SEQ ID NO: 3959606 - RNA, 22 nt, Human herpesvirus 2
gaggaggcggcgccugcgcccc

SEQ ID NO: 3959607 - RNA, 18 nt, Human herpesvirus 2
gaggcccggaacgagguu

SEQ ID NO: 3959608 - RNA, 17 nt, Human herpesvirus 2
gaggcccucugggacac

SEQ ID NO: 3959609 - RNA, 16 nt, Human herpesvirus 2
gaggcuggagcgcugg

SEQ ID NO: 3959610 - RNA, 19 nt, Human herpesvirus 2
gagggcucaucgggaaucu

SEQ ID NO: 3959611 - RNA, 13 nt, Human herpesvirus 2
gaggggcuccuca

SEQ ID NO: 3959612 - RNA, 16 nt, Human herpesvirus 2
gagucccccggcuccg

SEQ ID NO: 3959613 - RNA, 17 nt, Human herpesvirus 2
gagugggggggggggac

SEQ ID NO: 3959614 - RNA, 14 nt, Human herpesvirus 2
gauacaacacaccc

SEQ ID NO: 3959615 - RNA, 11 nt, Human herpesvirus 2
gauagcaaacg

SEQ ID NO: 3959616 - RNA, 19 nt, Human herpesvirus 2
gauccgaacggcgcacgcc

SEQ ID NO: 3959617 - RNA, 17 nt, Human herpesvirus 2
gaucguugacgacggcc

SEQ ID NO: 3959618 - RNA, 22 nt, Human herpesvirus 2
gaucuggcgaccgucuuugggc

SEQ ID NO: 3959619 - RNA, 17 nt, Human herpesvirus 2
gaugaagcgccaggggg

SEQ ID NO: 3959620 - RNA, 19 nt, Human herpesvirus 2
gaugagccgguagugcagg

SEQ ID NO: 3959621 - RNA, 15 nt, Human herpesvirus 2
gaugcagcucccccg

SEQ ID NO: 3959622 - RNA, 24 nt, Human herpesvirus 2
gaugcagcucccccgcgcaggggg

SEQ ID NO: 3959623 - RNA, 14 nt, Human herpesvirus 2
gaugcgccuggugg

SEQ ID NO: 3959624 - RNA, 21 nt, Human herpesvirus 2
gaugcgcgccgguacuggggc

SEQ ID NO: 3959625 - RNA, 13 nt, Human herpesvirus 2
gaugggcgggggg

SEQ ID NO: 3959626 - RNA, 13 nt, Human herpesvirus 2
gauggggguccug

SEQ ID NO: 3959627 - RNA, 16 nt, Human herpesvirus 2
gaugugucgcggggac

SEQ ID NO: 3959628 - RNA, 11 nt, Human herpesvirus 2
gauugauuuua

SEQ ID NO: 3959629 - RNA, 17 nt, Human herpesvirus 2
gauuuacgagggggcaa

SEQ ID NO: 3959630 - RNA, 15 nt, Human herpesvirus 2
gcaaacgugggauga

SEQ ID NO: 3959631 - RNA, 17 nt, Human herpesvirus 2
gcaaccaaaucaccccc

SEQ ID NO: 3959632 - RNA, 20 nt, Human herpesvirus 2
gcaaccaaaucacccccaga

SEQ ID NO: 3959633 - RNA, 15 nt, Human herpesvirus 2
gcaccacgugucccc

SEQ ID NO: 3959634 - RNA, 20 nt, Human herpesvirus 2
gcaccagcucgggggccagg

SEQ ID NO: 3959635 - RNA, 18 nt, Human herpesvirus 2
gcaccgcgggaggaaggc

SEQ ID NO: 3959636 - RNA, 16 nt, Human herpesvirus 2
gcaccggacgcgcacg

SEQ ID NO: 3959637 - RNA, 23 nt, Human herpesvirus 2
gcaccugcagaugcugcccgcgg

SEQ ID NO: 3959638 - RNA, 18 nt, Human herpesvirus 2
gcacgccgcgugggcucc

SEQ ID NO: 3959639 - RNA, 16 nt, Human herpesvirus 2
gcacgcggggacccgc

SEQ ID NO: 3959640 - RNA, 18 nt, Human herpesvirus 2
gcacgcguuuguggcgag

SEQ ID NO: 3959641 - RNA, 22 nt, Human herpesvirus 2
gcacguacguucugccccgcgu

SEQ ID NO: 3959642 - RNA, 17 nt, Human herpesvirus 2
gcacgugcgucuuccca

SEQ ID NO: 3959643 - RNA, 22 nt, Human herpesvirus 2
gcacucgggcguagagcucggc

SEQ ID NO: 3959644 - RNA, 14 nt, Human herpesvirus 2
gcagagagauuucc

SEQ ID NO: 3959645 - RNA, 13 nt, Human herpesvirus 2
gcagccgcgccgc

SEQ ID NO: 3959646 - RNA, 19 nt, Human herpesvirus 2
gcgcaugggccgccagcag

SEQ ID NO: 3959647 - RNA, 15 nt, Human herpesvirus 2
gcgccaagcgccccg

SEQ ID NO: 3959648 - RNA, 14 nt, Human herpesvirus 2
gcgccagggggauc

SEQ ID NO: 3959649 - RNA, 17 nt, Human herpesvirus 2
gcgcccccggccgcggu

SEQ ID NO: 3959650 - RNA, 16 nt, Human herpesvirus 2
gcgccguccucgugga

SEQ ID NO: 3959651 - RNA, 15 nt, Human herpesvirus 2
gcgccgucgggcccc

SEQ ID NO: 3959652 - RNA, 13 nt, Human herpesvirus 2
gcgcgcacucccg

SEQ ID NO: 3959653 - RNA, 14 nt, Human herpesvirus 2
gcgcgcccccgccg

SEQ ID NO: 3959654 - RNA, 13 nt, Human herpesvirus 2
gcgcgcguccgua

SEQ ID NO: 3959655 - RNA, 13 nt, Human herpesvirus 2
gcgcgcuucgcgg

SEQ ID NO: 3959656 - RNA, 19 nt, Human herpesvirus 2
gcgcgugugugagaaauaa

SEQ ID NO: 3959657 - RNA, 20 nt, Human herpesvirus 2
gcgcucgcucuccgugcccc

SEQ ID NO: 3959658 - RNA, 17 nt, Human herpesvirus 2
gcgcucggcaugcgcgg

SEQ ID NO: 3959659 - RNA, 17 nt, Human herpesvirus 2
gcggaacccgcgggcgc

SEQ ID NO: 3959660 - RNA, 19 nt, Human herpesvirus 2
gcggacccagaccugccgu

SEQ ID NO: 3959661 - RNA, 17 nt, Human herpesvirus 2
gcggaccggcccccgga

SEQ ID NO: 3959662 - RNA, 16 nt, Human herpesvirus 2
gcggacgaccugguga

SEQ ID NO: 3959663 - RNA, 19 nt, Human herpesvirus 2
gcggacuggcagccgggac

SEQ ID NO: 3959664 - RNA, 16 nt, Human herpesvirus 2
gcggagggcggccagc

SEQ ID NO: 3959665 - RNA, 23 nt, Human herpesvirus 2
gcggaggggaucagcaaccaggc

SEQ ID NO: 3959666 - RNA, 20 nt, Human herpesvirus 2
gcggaguaugaccgucggug

SEQ ID NO: 3959667 - RNA, 22 nt, Human herpesvirus 2
gcggcaccauaacaccgucccc

SEQ ID NO: 3959668 - RNA, 20 nt, Human herpesvirus 2
gcggccagccgcccccgccg

SEQ ID NO: 3959669 - RNA, 15 nt, Human herpesvirus 2
gcggccauccugccc

SEQ ID NO: 3959670 - RNA, 19 nt, Human herpesvirus 2
gcggccccuguuggagccg

SEQ ID NO: 3959671 - RNA, 22 nt, Human herpesvirus 2
gcggcccugagccgcgcggcca

SEQ ID NO: 3959672 - RNA, 21 nt, Human herpesvirus 2
gcggccgccgcaacacccggc

SEQ ID NO: 3959673 - RNA, 16 nt, Human herpesvirus 2
gcggcgacggcaccgc

SEQ ID NO: 3959674 - RNA, 14 nt, Human herpesvirus 2
gcggcgcgagcucc

SEQ ID NO: 3959675 - RNA, 18 nt, Human herpesvirus 2
gcggcuucuucgccgccc

SEQ ID NO: 3959676 - RNA, 17 nt, Human herpesvirus 2
gcgggaaaucaaggucg

SEQ ID NO: 3959677 - RNA, 14 nt, Human herpesvirus 2
gcgggaagcgccgc

SEQ ID NO: 3959678 - RNA, 16 nt, Human herpesvirus 2
gcgggcaggccgcggc

SEQ ID NO: 3959679 - RNA, 21 nt, Human herpesvirus 2
gcgggcguccccgagcggcgc

SEQ ID NO: 3959680 - RNA, 13 nt, Human herpesvirus 2
gcggggccccggg

SEQ ID NO: 3959681 - RNA, 20 nt, Human herpesvirus 2
gcggggggggggcugcgggc

SEQ ID NO: 3959682 - RNA, 15 nt, Human herpesvirus 2
gcgggucccuuccca

SEQ ID NO: 3959683 - RNA, 20 nt, Human herpesvirus 2
gcgggugcccauggcgucgg

SEQ ID NO: 3959684 - RNA, 19 nt, Human herpesvirus 2
gcgguauggcugcccccgc

SEQ ID NO: 3959685 - RNA, 14 nt, Human herpesvirus 2
gcggugcgccccgc

SEQ ID NO: 3959686 - RNA, 19 nt, Human herpesvirus 2
gcgguucgcgugcggccag

SEQ ID NO: 3959687 - RNA, 14 nt, Human herpesvirus 2
gcguaccccuuuga

SEQ ID NO: 3959688 - RNA, 21 nt, Human herpesvirus 2
gcguauaaaggcaggcgcgcg

SEQ ID NO: 3959689 - RNA, 18 nt, Human herpesvirus 2
gcguccgacacccgggcc

SEQ ID NO: 3959690 - RNA, 17 nt, Human herpesvirus 2
gcgucguccaggguggg

SEQ ID NO: 3959691 - RNA, 15 nt, Human herpesvirus 2
gcgugcggcccugcc

SEQ ID NO: 3959692 - RNA, 17 nt, Human herpesvirus 2
gcgugcguucuggcggc

SEQ ID NO: 3959693 - RNA, 15 nt, Human herpesvirus 2
gcgugcugcugagcc

SEQ ID NO: 3959694 - RNA, 18 nt, Human herpesvirus 2
gcguugcguuggggcacg

SEQ ID NO: 3959695 - RNA, 21 nt, Human herpesvirus 2
gcguugguucucguacccccu

SEQ ID NO: 3959696 - RNA, 15 nt, Human herpesvirus 2
gcuacccgcauccgc

SEQ ID NO: 3959697 - RNA, 18 nt, Human herpesvirus 2
gcuacccgcauccgcacg

SEQ ID NO: 3959698 - RNA, 15 nt, Human herpesvirus 2
gcuaguacccagagg

SEQ ID NO: 3959699 - RNA, 13 nt, Human herpesvirus 2
gcuccaggccgcc

SEQ ID NO: 3959700 - RNA, 21 nt, Human herpesvirus 2
gcuccagguacugcugcacgu

SEQ ID NO: 3959701 - RNA, 12 nt, Human herpesvirus 2
gcuccauccuga

SEQ ID NO: 3959702 - RNA, 13 nt, Human herpesvirus 2
gcuccccuucagc

SEQ ID NO: 3959703 - RNA, 19 nt, Human herpesvirus 2
gcuccccuucagccuggac

SEQ ID NO: 3959704 - RNA, 15 nt, Human herpesvirus 2
gcuccggcucccggc

SEQ ID NO: 3959705 - RNA, 16 nt, Human herpesvirus 2
gcuccucagcgcggcc

SEQ ID NO: 3959706 - RNA, 19 nt, Human herpesvirus 2
gcucgccagcgacccgcac

SEQ ID NO: 3959707 - RNA, 17 nt, Human herpesvirus 2
gcucgcggagggcggcc

SEQ ID NO: 3959708 - RNA, 15 nt, Human herpesvirus 2
gcucgucccccgagg

SEQ ID NO: 3959709 - RNA, 23 nt, Human herpesvirus 2
gcucugccugcacgagcgccguc

SEQ ID NO: 3959710 - RNA, 16 nt, Human herpesvirus 2
gcugcggggaccagcc

SEQ ID NO: 3959711 - RNA, 15 nt, Human herpesvirus 2
gcugcugccccgcgu

SEQ ID NO: 3959712 - RNA, 18 nt, Human herpesvirus 2
gcuggagcgcugguggga

SEQ ID NO: 3959713 - RNA, 13 nt, Human herpesvirus 2
gcuggccccucug

SEQ ID NO: 3959714 - RNA, 14 nt, Human herpesvirus 2
gcuggcgccgccgg

SEQ ID NO: 3959715 - RNA, 20 nt, Human herpesvirus 2
gcuguuguuucugggcccgc

SEQ ID NO: 3959716 - RNA, 18 nt, Human herpesvirus 2
gcuuagggugugaccccc

SEQ ID NO: 3959717 - RNA, 16 nt, Human herpesvirus 2
gcuucgggacccgccu

SEQ ID NO: 3959718 - RNA, 17 nt, Human herpesvirus 2
gcuucgucaacagggcg

SEQ ID NO: 3959719 - RNA, 23 nt, Human herpesvirus 2
gcuucucgccucucuucuucccc

SEQ ID NO: 3959720 - RNA, 23 nt, Human herpesvirus 2
ggaaaucuauugaacucucccgg

SEQ ID NO: 3959721 - RNA, 18 nt, Human herpesvirus 2
ggaacugggguacugcac

SEQ ID NO: 3959722 - RNA, 19 nt, Human herpesvirus 2
ggaacuguguuuccccccc

SEQ ID NO: 3959723 - RNA, 21 nt, Human herpesvirus 2
ggaacuguguuucccccccua

SEQ ID NO: 3959724 - RNA, 18 nt, Human herpesvirus 2
ggaagaggcggacccagu

SEQ ID NO: 3959725 - RNA, 19 nt, Human herpesvirus 2
ggacagccagggcugggag

SEQ ID NO: 3959726 - RNA, 15 nt, Human herpesvirus 2
ggacgcagcggcguc

SEQ ID NO: 3959727 - RNA, 11 nt, Human herpesvirus 2
ggacgcccccu

SEQ ID NO: 3959728 - RNA, 14 nt, Human herpesvirus 2
ggacgcccccuccc

SEQ ID NO: 3959729 - RNA, 19 nt, Human herpesvirus 2
ggagagggggaaggaaucg

SEQ ID NO: 3959730 - RNA, 14 nt, Human herpesvirus 2
ggagauggggagag

SEQ ID NO: 3959731 - RNA, 17 nt, Human herpesvirus 2
ggagccgcggccccgcc

SEQ ID NO: 3959732 - RNA, 11 nt, Human herpesvirus 2
ggagccucuuu

SEQ ID NO: 3959733 - RNA, 14 nt, Human herpesvirus 2
ggagcggcgaacac

SEQ ID NO: 3959734 - RNA, 18 nt, Human herpesvirus 2
ggaggaaacgcgcgcccc

SEQ ID NO: 3959735 - RNA, 19 nt, Human herpesvirus 2
ggaggggaugggggcgcgc

SEQ ID NO: 3959736 - RNA, 13 nt, Human herpesvirus 2
ggaggggcgggag

SEQ ID NO: 3959737 - RNA, 18 nt, Human herpesvirus 2
ggaggggggcagugcagu

SEQ ID NO: 3959738 - RNA, 14 nt, Human herpesvirus 2
ggagucccccggcu

SEQ ID NO: 3959739 - RNA, 17 nt, Human herpesvirus 2
ggaugcccgccagggcc

SEQ ID NO: 3959740 - RNA, 16 nt, Human herpesvirus 2
ggauguguucuccugg

SEQ ID NO: 3959741 - RNA, 22 nt, Human herpesvirus 2
ggauguguucuccuggacgcgg

SEQ ID NO: 3959742 - RNA, 17 nt, Human herpesvirus 2
ggcaacccccgggcguc

SEQ ID NO: 3959743 - RNA, 12 nt, Human herpesvirus 2
ggcaagugcagu

SEQ ID NO: 3959744 - RNA, 18 nt, Human herpesvirus 2
ggcaccgcgcggaccggc

SEQ ID NO: 3959745 - RNA, 19 nt, Human herpesvirus 2
ggcaccgcgggaggaaggc

SEQ ID NO: 3959746 - RNA, 20 nt, Human herpesvirus 2
ggcacgagaagccgccccca

SEQ ID NO: 3959747 - RNA, 15 nt, Human herpesvirus 2
ggcagcucgcccccg

SEQ ID NO: 3959748 - RNA, 22 nt, Human herpesvirus 2
ggcagcucgcccccgugccugu

SEQ ID NO: 3959749 - RNA, 14 nt, Human herpesvirus 2
ggcaggcgacccgc

SEQ ID NO: 3959750 - RNA, 22 nt, Human herpesvirus 2
ggccaauucuucccggagcgcc

SEQ ID NO: 3959751 - RNA, 13 nt, Human herpesvirus 2
ggccacacagaga

SEQ ID NO: 3959752 - RNA, 13 nt, Human herpesvirus 2
ggccaccccgccg

SEQ ID NO: 3959753 - RNA, 15 nt, Human herpesvirus 2
ggccacucgucgcca

SEQ ID NO: 3959754 - RNA, 15 nt, Human herpesvirus 2
ggccagauggggccc

SEQ ID NO: 3959755 - RNA, 20 nt, Human herpesvirus 2
ggccagccgcccccgccggc

SEQ ID NO: 3959756 - RNA, 12 nt, Human herpesvirus 2
ggccagcggggg

SEQ ID NO: 3959757 - RNA, 22 nt, Human herpesvirus 2
ggccaggggggcaggcgggccc

SEQ ID NO: 3959758 - RNA, 18 nt, Human herpesvirus 2
ggccauccccggcgccau

SEQ ID NO: 3959759 - RNA, 22 nt, Human herpesvirus 2
ggccaucgccggggaccgcagu

SEQ ID NO: 3959760 - RNA, 22 nt, Human herpesvirus 2
ggcccaaggcgcugcgccugcc

SEQ ID NO: 3959761 - RNA, 14 nt, Human herpesvirus 2
gggggcugcugccc

SEQ ID NO: 3959762 - RNA, 11 nt, Human herpesvirus 2
ggggggccucg

SEQ ID NO: 3959763 - RNA, 12 nt, Human herpesvirus 2
ggggggggcuug

SEQ ID NO: 3959764 - RNA, 12 nt, Human herpesvirus 2
gggggguggugg

SEQ ID NO: 3959765 - RNA, 21 nt, Human herpesvirus 2
ggguaauggaugggcggggcc

SEQ ID NO: 3959766 - RNA, 22 nt, Human herpesvirus 2
ggguaauggaugggcggggccc

SEQ ID NO: 3959767 - RNA, 19 nt, Human herpesvirus 2
ggguacggcgaggugcagu

SEQ ID NO: 3959768 - RNA, 21 nt, Human herpesvirus 2
gggucccgccucccggccgcc

SEQ ID NO: 3959769 - RNA, 12 nt, Human herpesvirus 2
gggucgagcgcg

SEQ ID NO: 3959770 - RNA, 13 nt, Human herpesvirus 2
gggucgggcgggc

SEQ ID NO: 3959771 - RNA, 14 nt, Human herpesvirus 2
gggucgggcgggcg

SEQ ID NO: 3959772 - RNA, 12 nt, Human herpesvirus 2
gggugggacuug

SEQ ID NO: 3959773 - RNA, 13 nt, Human herpesvirus 2
gggugucgaccgc

SEQ ID NO: 3959774 - RNA, 13 nt, Human herpesvirus 2
ggguguggucgug

SEQ ID NO: 3959775 - RNA, 17 nt, Human herpesvirus 2
ggguuccccgagagccc

SEQ ID NO: 3959776 - RNA, 19 nt, Human herpesvirus 2
gguaauuagaaacuuuuaa

SEQ ID NO: 3959777 - RNA, 18 nt, Human herpesvirus 2
gguacugcacugcccccc

SEQ ID NO: 3959778 - RNA, 13 nt, Human herpesvirus 2
gguauggcugccc

SEQ ID NO: 3959779 - RNA, 18 nt, Human herpesvirus 2
gguauuugggugggacuu

SEQ ID NO: 3959780 - RNA, 21 nt, Human herpesvirus 2
ggucacaaaaggcacggcgcc

SEQ ID NO: 3959781 - RNA, 18 nt, Human herpesvirus 2
gguccaauauggcccagc

SEQ ID NO: 3959782 - RNA, 16 nt, Human herpesvirus 2
gguccgcggggggcac

SEQ ID NO: 3959783 - RNA, 21 nt, Human herpesvirus 2
gguccgcguauaaaggcaggc

SEQ ID NO: 3959784 - RNA, 15 nt, Human herpesvirus 2
gguccgcugcagcug

SEQ ID NO: 3959785 - RNA, 17 nt, Human herpesvirus 2
gguccggguaaaaaaga

SEQ ID NO: 3959786 - RNA, 20 nt, Human herpesvirus 2
ggucgaucucggggagggcg

SEQ ID NO: 3959787 - RNA, 23 nt, Human herpesvirus 2
ggucgggggccacuucgucguag

SEQ ID NO: 3959788 - RNA, 16 nt, Human herpesvirus 2
ggucgugggggcgcug

SEQ ID NO: 3959789 - RNA, 20 nt, Human herpesvirus 2
ggucuagaugccaguggagc

SEQ ID NO: 3959790 - RNA, 14 nt, Human herpesvirus 2
ggucuguggguggu

SEQ ID NO: 3959791 - RNA, 13 nt, Human herpesvirus 2
ggugacugggacc

SEQ ID NO: 3959792 - RNA, 21 nt, Human herpesvirus 2
ggugccguacgucugcccgug

SEQ ID NO: 3959793 - RNA, 16 nt, Human herpesvirus 2
ggugcgccccgccggg

SEQ ID NO: 3959794 - RNA, 16 nt, Human herpesvirus 2
ggugcgugcggcccug

SEQ ID NO: 3959795 - RNA, 16 nt, Human herpesvirus 2
ggugcguuccagcgcg

SEQ ID NO: 3959796 - RNA, 21 nt, Human herpesvirus 2
gguggguguggucguggugcu

SEQ ID NO: 3959797 - RNA, 15 nt, Human herpesvirus 2
ggugugaccccccca

SEQ ID NO: 3959798 - RNA, 21 nt, Human herpesvirus 2
gguguuuuuggcaccuugccg

SEQ ID NO: 3959799 - RNA, 13 nt, Human herpesvirus 2
gguuacugcacuu

SEQ ID NO: 3959800 - RNA, 19 nt, Human herpesvirus 2
gguuacugcacuugccccc

SEQ ID NO: 3959801 - RNA, 19 nt, Human herpesvirus 2
gguuccccgagagcccagg

SEQ ID NO: 3959802 - RNA, 18 nt, Human herpesvirus 2
gguuccuauaacccacaa

SEQ ID NO: 3959803 - RNA, 22 nt, Human herpesvirus 2
gguucgcgugcggccagccgcc

SEQ ID NO: 3959804 - RNA, 13 nt, Human herpesvirus 2
gguuguguuuugu

SEQ ID NO: 3959805 - RNA, 18 nt, Human herpesvirus 2
guacccaccacaccccac

SEQ ID NO: 3959806 - RNA, 22 nt, Human herpesvirus 2
guaccggcgcgcaucggacccc

SEQ ID NO: 3959807 - RNA, 14 nt, Human herpesvirus 2
guaggcccgggggg

SEQ ID NO: 3959808 - RNA, 14 nt, Human herpesvirus 2
guaguguguccccc

SEQ ID NO: 3959809 - RNA, 15 nt, Human herpesvirus 2
gucaaaggccagcag

SEQ ID NO: 3959810 - RNA, 16 nt, Human herpesvirus 2
gucaauagauuucccc

SEQ ID NO: 3959811 - RNA, 19 nt, Human herpesvirus 2
gucacgcaggccgccccca

SEQ ID NO: 3959812 - RNA, 14 nt, Human herpesvirus 2
gucaggcccgccga

SEQ ID NO: 3959813 - RNA, 21 nt, Human herpesvirus 2
gucccccgggcagccgggccc

SEQ ID NO: 3959814 - RNA, 14 nt, Human herpesvirus 2
guccccgagcggcg

SEQ ID NO: 3959815 - RNA, 10 nt, Human herpesvirus 2
guccccuuuc

SEQ ID NO: 3959816 - RNA, 15 nt, Human herpesvirus 2
gucccgccugugugc

SEQ ID NO: 3959817 - RNA, 21 nt, Human herpesvirus 2
gucccgccugugugcucucaa

SEQ ID NO: 3959818 - RNA, 14 nt, Human herpesvirus 2
guccgcgcggggcg

SEQ ID NO: 3959819 - RNA, 17 nt, Human herpesvirus 2
guccgcgcggggcgcgc

SEQ ID NO: 3959820 - RNA, 20 nt, Human herpesvirus 2
guccgcgggaagcgccgcgc

SEQ ID NO: 3959821 - RNA, 21 nt, Human herpesvirus 2
guccgcuaccgccucuguucc

SEQ ID NO: 3959822 - RNA, 20 nt, Human herpesvirus 2
guccggcggccaccccgccg

SEQ ID NO: 3959823 - RNA, 23 nt, Human herpesvirus 2
guccggcggccaccccgccgcag

SEQ ID NO: 3959824 - RNA, 13 nt, Human herpesvirus 2
guccggggggacg

SEQ ID NO: 3959825 - RNA, 17 nt, Human herpesvirus 2
guccucaccgagccgcu

SEQ ID NO: 3959826 - RNA, 22 nt, Human herpesvirus 2
guccucaccgagccgcugugcc

SEQ ID NO: 3959827 - RNA, 23 nt, Human herpesvirus 2
guccucgccgcuguggcccuggc

SEQ ID NO: 3959828 - RNA, 18 nt, Human herpesvirus 2
guccugcggcagcgcgcc

SEQ ID NO: 3959829 - RNA, 20 nt, Human herpesvirus 2
guccugcggcagcgcgccga

SEQ ID NO: 3959830 - RNA, 20 nt, Human herpesvirus 2
guccuucgcgggggccgggg

SEQ ID NO: 3959831 - RNA, 19 nt, Human herpesvirus 2
gucgccgacuccaggagcu

SEQ ID NO: 3959832 - RNA, 19 nt, Human herpesvirus 2
gucgcgcuuuuccgccgcc

SEQ ID NO: 3959833 - RNA, 20 nt, Human herpesvirus 2
gucgcggggacagccccggg

SEQ ID NO: 3959834 - RNA, 18 nt, Human herpesvirus 2
gucgcuaacgagcgcgcu

SEQ ID NO: 3959835 - RNA, 15 nt, Human herpesvirus 2
gucgcuccccuucag

SEQ ID NO: 3959836 - RNA, 19 nt, Human herpesvirus 2
gucgcucugucccccgggc

SEQ ID NO: 3959837 - RNA, 20 nt, Human herpesvirus 2
gucggcggccccggcggccc

SEQ ID NO: 3959838 - RNA, 17 nt, Human herpesvirus 2
gucgggagcaggacagc

SEQ ID NO: 3959839 - RNA, 18 nt, Human herpesvirus 2
gucgguugguuucuguau

SEQ ID NO: 3959840 - RNA, 16 nt, Human herpesvirus 2
gucguuggccagcgcg

SEQ ID NO: 3959841 - RNA, 14 nt, Human herpesvirus 2
gucugcggccgaca

SEQ ID NO: 3959842 - RNA, 19 nt, Human herpesvirus 2
gucugcgucguccagggug

SEQ ID NO: 3959843 - RNA, 15 nt, Human herpesvirus 2
gucugugggugguga

SEQ ID NO: 3959844 - RNA, 23 nt, Human herpesvirus 2
gucuucccgggaaaccacacaca

SEQ ID NO: 3959845 - RNA, 19 nt, Human herpesvirus 2
gucuugauuuacgaggggg

SEQ ID NO: 3959846 - RNA, 15 nt, Human herpesvirus 2
gugaccacgcgcacg

SEQ ID NO: 3959847 - RNA, 19 nt, Human herpesvirus 2
gugacuuggugcgccgccg

SEQ ID NO: 3959848 - RNA, 22 nt, Human herpesvirus 2
gugaucuuggcguuauuuccaa

SEQ ID NO: 3959849 - RNA, 13 nt, Human herpesvirus 2
gugcagggccuga

SEQ ID NO: 3959850 - RNA, 19 nt, Human herpesvirus 2
gugccaacucgcggcaccg

SEQ ID NO: 3959851 - RNA, 17 nt, Human herpesvirus 2
gugccccacccccgagc

SEQ ID NO: 3959852 - RNA, 14 nt, Human herpesvirus 2
gugccccuggacug

SEQ ID NO: 3959853 - RNA, 13 nt, Human herpesvirus 2
gugcccgcccccg

SEQ ID NO: 3959854 - RNA, 20 nt, Human herpesvirus 2
gugcccuggguccgggggcc

SEQ ID NO: 3959855 - RNA, 20 nt, Human herpesvirus 2
gugccggggauaaaagccaa

SEQ ID NO: 3959856 - RNA, 17 nt, Human herpesvirus 2
gugcgaccgggcggcgc

SEQ ID NO: 3959857 - RNA, 20 nt, Human herpesvirus 2
gugcgaccgggcggcgcgcc

SEQ ID NO: 3959858 - RNA, 22 nt, Human herpesvirus 2
gugcgcucuucgcggcggccgc

SEQ ID NO: 3959859 - RNA, 22 nt, Human herpesvirus 2
gugcgggaugugucgcggggac

SEQ ID NO: 3959860 - RNA, 15 nt, Human herpesvirus 2
gugcugcgcgagccg

SEQ ID NO: 3959861 - RNA, 17 nt, Human herpesvirus 2
gugcugcugagcccugc

SEQ ID NO: 3959862 - RNA, 20 nt, Human herpesvirus 2
gugcugggcgcgagccaggc

SEQ ID NO: 3959863 - RNA, 16 nt, Human herpesvirus 2
guggcccuuccggacc

SEQ ID NO: 3959864 - RNA, 14 nt, Human herpesvirus 2
guggcggaggccug

SEQ ID NO: 3959865 - RNA, 17 nt, Human herpesvirus 2
gugggccgacgugccgg

SEQ ID NO: 3959866 - RNA, 19 nt, Human herpesvirus 2
gugggcguugccgggggcc

SEQ ID NO: 3959867 - RNA, 15 nt, Human herpesvirus 2
guggggugggucgcc

SEQ ID NO: 3959868 - RNA, 19 nt, Human herpesvirus 2
guggucguggugcuggcca

SEQ ID NO: 3959869 - RNA, 20 nt, Human herpesvirus 2
gugucgaccgcugucgcccc

SEQ ID NO: 3959870 - RNA, 21 nt, Human herpesvirus 2
gugucuucccgggaaaccaca

SEQ ID NO: 3959871 - RNA, 15 nt, Human herpesvirus 2
gugugcccgcccccg

SEQ ID NO: 3959872 - RNA, 21 nt, Human herpesvirus 2
gugugggaggguggcuggggu

SEQ ID NO: 3959873 - RNA, 13 nt, Human herpesvirus 2
guguucuccugga

SEQ ID NO: 3959874 - RNA, 16 nt, Human herpesvirus 2
guucggcaggcccgcc

SEQ ID NO: 3959875 - RNA, 13 nt, Human herpesvirus 2
guucggggccagg

SEQ ID NO: 3959876 - RNA, 18 nt, Human herpesvirus 2
ugccccgcccccucuccc

SEQ ID NO: 3959877 - RNA, 15 nt, Human herpesvirus 2
ugcccgaccuguuaa

SEQ ID NO: 3959878 - RNA, 14 nt, Human herpesvirus 2
ugcccgcgggucug

SEQ ID NO: 3959879 - RNA, 16 nt, Human herpesvirus 2
ugccgcagaccaccuc

SEQ ID NO: 3959880 - RNA, 18 nt, Human herpesvirus 2
ugccguucggaccugggg

SEQ ID NO: 3959881 - RNA, 13 nt, Human herpesvirus 2
ugccuccacgccc

SEQ ID NO: 3959882 - RNA, 19 nt, Human herpesvirus 2
ugccuccacgcccugcugu

SEQ ID NO: 3959883 - RNA, 22 nt, Human herpesvirus 2
ugccucuguuucuccaggcgcu

SEQ ID NO: 3959884 - RNA, 14 nt, Human herpesvirus 2
ugccugacccucuc

SEQ ID NO: 3959885 - RNA, 16 nt, Human herpesvirus 2
ugcgcagguccgagac

SEQ ID NO: 3959886 - RNA, 17 nt, Human herpesvirus 2
ugcgccccgccggggcg

SEQ ID NO: 3959887 - RNA, 13 nt, Human herpesvirus 2
ugcgccggcacca

SEQ ID NO: 3959888 - RNA, 21 nt, Human herpesvirus 2
ugcgcgcggcgacggcaccgc

SEQ ID NO: 3959889 - RNA, 15 nt, Human herpesvirus 2
ugcgcucgcucuccg

SEQ ID NO: 3959890 - RNA, 20 nt, Human herpesvirus 2
ugcgcuuuccggcccucccg

SEQ ID NO: 3959891 - RNA, 23 nt, Human herpesvirus 2
ugcggccgacacggucggaauuu

SEQ ID NO: 3959892 - RNA, 23 nt, Human herpesvirus 2
ugcguccgucucaauaaagccag

SEQ ID NO: 3959893 - RNA, 14 nt, Human herpesvirus 2
ugcgucguccaggg

SEQ ID NO: 3959894 - RNA, 19 nt, Human herpesvirus 2
ugcucgaccagcggcccca

SEQ ID NO: 3959895 - RNA, 19 nt, Human herpesvirus 2
ugcugggcgcgagccaggc

SEQ ID NO: 3959896 - RNA, 18 nt, Human herpesvirus 2
ugcuggugguggaaagac

SEQ ID NO: 3959897 - RNA, 14 nt, Human herpesvirus 2
ugcuucccccgccc

SEQ ID NO: 3959898 - RNA, 23 nt, Human herpesvirus 2
uggacauguuacaccccccugac

SEQ ID NO: 3959899 - RNA, 15 nt, Human herpesvirus 2
uggaccccccacgcc

SEQ ID NO: 3959900 - RNA, 16 nt, Human herpesvirus 2
uggaccccccacgccc

SEQ ID NO: 3959901 - RNA, 16 nt, Human herpesvirus 2
uggacgcgccucccgg

SEQ ID NO: 3959902 - RNA, 22 nt, Human herpesvirus 2
uggagaagggaaaggaacagag

SEQ ID NO: 3959903 - RNA, 19 nt, Human herpesvirus 2
uggagcucugccugcacga

SEQ ID NO: 3959904 - RNA, 17 nt, Human herpesvirus 2
uggaggggggggcuggu

SEQ ID NO: 3959905 - RNA, 21 nt, Human herpesvirus 2
uggcacaaaaagcgacacucc

SEQ ID NO: 3959906 - RNA, 17 nt, Human herpesvirus 2
uggccagagccucaucg

SEQ ID NO: 3959907 - RNA, 15 nt, Human herpesvirus 2
uggccggggagggca

SEQ ID NO: 3959908 - RNA, 15 nt, Human herpesvirus 2
uggccgugcgcggcc

SEQ ID NO: 3959909 - RNA, 13 nt, Human herpesvirus 2
uggcggaagugcc

SEQ ID NO: 3959910 - RNA, 13 nt, Human herpesvirus 2
uggcggccgccgc

SEQ ID NO: 3959911 - RNA, 13 nt, Human herpesvirus 2
uggcggcugggga

SEQ ID NO: 3959912 - RNA, 19 nt, Human herpesvirus 2
uggcguccccaggcgacgc

SEQ ID NO: 3959913 - RNA, 18 nt, Human herpesvirus 2
uggcuggaggcaaacacg

SEQ ID NO: 3959914 - RNA, 14 nt, Human herpesvirus 2
ugggaaaucuauug

SEQ ID NO: 3959915 - RNA, 12 nt, Human herpesvirus 2
ugggagccccgc

SEQ ID NO: 3959916 - RNA, 12 nt, Human herpesvirus 2
ugggcacagugg

SEQ ID NO: 3959917 - RNA, 11 nt, Human herpesvirus 2
ugggccgacgu

SEQ ID NO: 3959918 - RNA, 19 nt, Human herpesvirus 2
uggggaggggggggugagg

SEQ ID NO: 3959919 - RNA, 16 nt, Human herpesvirus 2
uggggagucgggcccc

SEQ ID NO: 3959920 - RNA, 16 nt, Human herpesvirus 2
ugggggaacgcgcacc

SEQ ID NO: 3959921 - RNA, 11 nt, Human herpesvirus 2
ugggggaagaa

SEQ ID NO: 3959922 - RNA, 17 nt, Human herpesvirus 2
ugggggcccaggucccc

SEQ ID NO: 3959923 - RNA, 17 nt, Human herpesvirus 2
ugggggcgcugguggcc

SEQ ID NO: 3959924 - RNA, 15 nt, Human herpesvirus 2
ugggugacugggacc

SEQ ID NO: 3959925 - RNA, 23 nt, Human herpesvirus 2
uggugcgucuccggucccuuccc

SEQ ID NO: 3959926 - RNA, 22 nt, Human herpesvirus 2
uguacccucucaacgcccaggc

SEQ ID NO: 3959927 - RNA, 21 nt, Human herpesvirus 2
uguacgacagcggggacccgg

SEQ ID NO: 3959928 - RNA, 19 nt, Human herpesvirus 2
ugugcaccgaaggaggaaa

SEQ ID NO: 3959929 - RNA, 11 nt, Human herpesvirus 2
ugugccaggug

SEQ ID NO: 3959930 - RNA, 15 nt, Human herpesvirus 2
ugugcguaugugaua

SEQ ID NO: 3959931 - RNA, 14 nt, Human herpesvirus 2
uguguuuuguggga

SEQ ID NO: 3959932 - RNA, 12 nt, Human herpesvirus 2
uguuccaccgcu

SEQ ID NO: 3959933 - RNA, 22 nt, Human herpesvirus 2
uguuguggcuggaggcaaacac

SEQ ID NO: 3959934 - RNA, 14 nt, Human herpesvirus 2
uguuguuucugggc

SEQ ID NO: 3959935 - RNA, 14 nt, Human herpesvirus 2
uguuuugguugguu

SEQ ID NO: 3959936 - RNA, 16 nt, Human herpesvirus 2
uuacgcaggcccucgc

SEQ ID NO: 3959937 - RNA, 14 nt, Human herpesvirus 2
uuacgugacgucaa

SEQ ID NO: 3959938 - RNA, 13 nt, Human herpesvirus 2
uuagcaacuuuua

SEQ ID NO: 3959939 - RNA, 20 nt, Human herpesvirus 2
uuagucccggguccggggcg

SEQ ID NO: 3959940 - RNA, 19 nt, Human herpesvirus 2
uucaccgaccccccccucg

SEQ ID NO: 3959941 - RNA, 22 nt, Human herpesvirus 2
uucccaaacacugaggaacugg

SEQ ID NO: 3959942 - RNA, 21 nt, Human herpesvirus 2
uucccaacacgccugcccccg

SEQ ID NO: 3959943 - RNA, 11 nt, Human herpesvirus 2
uucccccggga

SEQ ID NO: 3959944 - RNA, 16 nt, Human herpesvirus 2
uucccuuuugguccuu

SEQ ID NO: 3959945 - RNA, 17 nt, Human herpesvirus 2
uuccgcggacgccgggc

SEQ ID NO: 3959946 - RNA, 15 nt, Human herpesvirus 2
uuccgcguccgcugg

SEQ ID NO: 3959947 - RNA, 20 nt, Human herpesvirus 2
uuccucaguguuugggaaau

SEQ ID NO: 3959948 - RNA, 11 nt, Human herpesvirus 2
uucucuucccc

SEQ ID NO: 3959949 - RNA, 21 nt, Human herpesvirus 2
uucuggccaagcauccucacc

SEQ ID NO: 3959950 - RNA, 12 nt, Human herpesvirus 2
uugaacucuccc

SEQ ID NO: 3959951 - RNA, 15 nt, Human herpesvirus 2
uugcgcucgucgccg

SEQ ID NO: 3959952 - RNA, 20 nt, Human herpesvirus 2
uuggaggcccucugggacac

SEQ ID NO: 3959953 - RNA, 16 nt, Human herpesvirus 2
uugggcggcccccggc

SEQ ID NO: 3959954 - RNA, 14 nt, Human herpesvirus 2
uugggggggggugg

SEQ ID NO: 3959955 - RNA, 14 nt, Human herpesvirus 2
uuggggggggugug

SEQ ID NO: 3959956 - RNA, 14 nt, Human herpesvirus 2
uugguccgggggcg

SEQ ID NO: 3959957 - RNA, 19 nt, Human herpesvirus 2
uugugcuuuuacccucacc

SEQ ID NO: 3959958 - RNA, 12 nt, Human herpesvirus 2
uuguuggaugau

SEQ ID NO: 3959959 - RNA, 14 nt, Human herpesvirus 2
uuucagguuccggg

SEQ ID NO: 3959960 - RNA, 12 nt, Human herpesvirus 2
uuuccgccgccg

SEQ ID NO: 3959961 - RNA, 16 nt, Human herpesvirus 2
uuuccgccgccgggaa

SEQ ID NO: 3959962 - RNA, 18 nt, Human herpesvirus 2
uuuugcuggcgccgccgg

SEQ ID NO: 3959963 - RNA, 20 nt, Human herpesvirus 2
ucgcggacgcacgcggggac

SEQ ID NO: 3959964 - RNA, 19 nt, Human herpesvirus 2
ucgcggccgcccgcgccgc

SEQ ID NO: 3959965 - RNA, 21 nt, Human herpesvirus 2
ucgcgugcggccagccgcccc

SEQ ID NO: 3959966 - RNA, 15 nt, Human herpesvirus 2
ucgcucccucagcau

SEQ ID NO: 3959967 - RNA, 18 nt, Human herpesvirus 2
ucgcucucggucccgcau

SEQ ID NO: 3959968 - RNA, 15 nt, Human herpesvirus 2
ucggacaccagcagc

SEQ ID NO: 3959969 - RNA, 17 nt, Human herpesvirus 2
ucggagaggcccgccgc

SEQ ID NO: 3959970 - RNA, 14 nt, Human herpesvirus 2
ucggaggggugagg

SEQ ID NO: 3959971 - RNA, 13 nt, Human herpesvirus 2
ucggcaggcccgc

SEQ ID NO: 3959972 - RNA, 18 nt, Human herpesvirus 2
ucggccggcggagccccg

SEQ ID NO: 3959973 - RNA, 19 nt, Human herpesvirus 2
ucggccggcggagccccgg

SEQ ID NO: 3959974 - RNA, 20 nt, Human herpesvirus 2
ucggcgauguccggggcggu

SEQ ID NO: 3959975 - RNA, 21 nt, Human herpesvirus 2
ucgggaggggaugggggcgcg

SEQ ID NO: 3959976 - RNA, 20 nt, Human herpesvirus 2
ucgggauccauaacgcgccc

SEQ ID NO: 3959977 - RNA, 23 nt, Human herpesvirus 2
ucgggcggacguccaggggugcg

SEQ ID NO: 3959978 - RNA, 15 nt, Human herpesvirus 2
ucgggcgucugugcg

SEQ ID NO: 3959979 - RNA, 12 nt, Human herpesvirus 2
ucgggcugcugg

SEQ ID NO: 3959980 - RNA, 12 nt, Human herpesvirus 2
ucggggccaggg

SEQ ID NO: 3959981 - RNA, 14 nt, Human herpesvirus 2
ucgggggccaggaa

SEQ ID NO: 3959982 - RNA, 17 nt, Human herpesvirus 2
ucggucgacgaggccug

SEQ ID NO: 3959983 - RNA, 13 nt, Human herpesvirus 2
ucgugcacagagc

SEQ ID NO: 3959984 - RNA, 18 nt, Human herpesvirus 2
ucguggugcuggccaaug

SEQ ID NO: 3959985 - RNA, 15 nt, Human herpesvirus 2
ucucccgggggcgcu

SEQ ID NO: 3959986 - RNA, 12 nt, Human herpesvirus 2
ucucggggaggg

SEQ ID NO: 3959987 - RNA, 13 nt, Human herpesvirus 2
ucucugccuccuu

SEQ ID NO: 3959988 - RNA, 23 nt, Human herpesvirus 2
ucucuucuuuccccccccccucc

SEQ ID NO: 3959989 - RNA, 19 nt, Human herpesvirus 2
ucugcccguggguggccac

SEQ ID NO: 3959990 - RNA, 19 nt, Human herpesvirus 2
ucugcgucguccagggugg

SEQ ID NO: 3959991 - RNA, 14 nt, Human herpesvirus 2
ucuggaagagcucc

SEQ ID NO: 3959992 - RNA, 19 nt, Human herpesvirus 2
ucuguuuugguugguucuc

SEQ ID NO: 3959993 - RNA, 20 nt, Human herpesvirus 2
ucuuacccuuuucugcauuu

SEQ ID NO: 3959994 - RNA, 21 nt, Human herpesvirus 2
ucuucgcgggcaggccgcggc

SEQ ID NO: 3959995 - RNA, 14 nt, Human herpesvirus 2
ucuuguagggcguu

SEQ ID NO: 3959996 - RNA, 23 nt, Human herpesvirus 2
ucuuucggccaccaccccccucc

SEQ ID NO: 3959997 - RNA, 12 nt, Human herpesvirus 2
ugaagggcacuc

SEQ ID NO: 3959998 - RNA, 16 nt, Human herpesvirus 2
ugacgacggccccggc

SEQ ID NO: 3959999 - RNA, 20 nt, Human herpesvirus 2
ugacggucgccacucuccug

SEQ ID NO: 3960000 - RNA, 11 nt, Human herpesvirus 2
ugacuccuggg

SEQ ID NO: 3960001 - RNA, 14 nt, Human herpesvirus 2
ugacuccuggguca

SEQ ID NO: 3960002 - RNA, 20 nt, Human herpesvirus 2
ugagagggggggguggagug

SEQ ID NO: 3960003 - RNA, 24 nt, Human herpesvirus 2
ugaggaacuggguuacugcacuug

SEQ ID NO: 3960004 - RNA, 14 nt, Human herpesvirus 2
ugauacuuaaaugc

SEQ ID NO: 3960005 - RNA, 19 nt, Human herpesvirus 2
ugauggggacgacgggcgc

SEQ ID NO: 3960006 - RNA, 14 nt, Human herpesvirus 2
ugauggggguccug

SEQ ID NO: 3960007 - RNA, 14 nt, Human herpesvirus 2
ugcaagcgggcggg

SEQ ID NO: 3960008 - RNA, 23 nt, Human herpesvirus 2
ugcaagcgggcgggguggggagg

SEQ ID NO: 3960009 - RNA, 15 nt, Human herpesvirus 2
ugcacuugccccccc

SEQ ID NO: 3960010 - RNA, 20 nt, Human herpesvirus 2
ugcacuugcccccccccggg

SEQ ID NO: 3960011 - RNA, 12 nt, Human herpesvirus 2
ugcagccccggu

SEQ ID NO: 3960012 - RNA, 11 nt, Human herpesvirus 2
ugcagggccug

SEQ ID NO: 3960013 - RNA, 21 nt, Human herpesvirus 2
ugcaguaacccaguuccucag

SEQ ID NO: 3960014 - RNA, 18 nt, Human herpesvirus 2
ugcccaucuacguggccg

SEQ ID NO: 3960015 - RNA, 14 nt, Human herpesvirus 2
ugcccccccccggg

SEQ ID NO: 3960016 - RNA, 13 nt, Human herpesvirus 2
ugccccgcccccu

SEQ ID NO: 3960017 - RNA, 14 nt, Human herpesvirus 2
ugcccgccagggcc

SEQ ID NO: 3960018 - RNA, 15 nt, Human herpesvirus 2
ugcccgcuuccaccc

SEQ ID NO: 3960019 - RNA, 12 nt, Human herpesvirus 2
ugccgcagacca

SEQ ID NO: 3960020 - RNA, 15 nt, Human herpesvirus 2
ugccgggggccauga

SEQ ID NO: 3960021 - RNA, 22 nt, Human herpesvirus 2
ugccugacccucucgggcaugg

SEQ ID NO: 3960022 - RNA, 13 nt, Human herpesvirus 2
guccccuggggcg

SEQ ID NO: 3960023 - RNA, 13 nt, Human herpesvirus 2
gucccgacgcccg

SEQ ID NO: 3960024 - RNA, 19 nt, Human herpesvirus 2
gucccgccucccggccgcc

SEQ ID NO: 3960025 - RNA, 12 nt, Human herpesvirus 2
gucccggccgcc

SEQ ID NO: 3960026 - RNA, 14 nt, Human herpesvirus 2
gucccugcgucgcc

SEQ ID NO: 3960027 - RNA, 14 nt, Human herpesvirus 2
gucccuuccccacc

SEQ ID NO: 3960028 - RNA, 14 nt, Human herpesvirus 2
guccgaccugcagg

SEQ ID NO: 3960029 - RNA, 15 nt, Human herpesvirus 2
guccgaccugcagga

SEQ ID NO: 3960030 - RNA, 20 nt, Human herpesvirus 2
guccgacgaggccuucccga

SEQ ID NO: 3960031 - RNA, 22 nt, Human herpesvirus 2
guccgcgggaagcgccgcgcgg

SEQ ID NO: 3960032 - RNA, 19 nt, Human herpesvirus 2
gucgcccauacaaauuaaa

SEQ ID NO: 3960033 - RNA, 20 nt, Human herpesvirus 2
gucgcccuagaggcuguccg

SEQ ID NO: 3960034 - RNA, 14 nt, Human herpesvirus 2
gucgcccuucacca

SEQ ID NO: 3960035 - RNA, 20 nt, Human herpesvirus 2
gucgccgccggccacgccac

SEQ ID NO: 3960036 - RNA, 19 nt, Human herpesvirus 2
gucgccggcgacacccacc

SEQ ID NO: 3960037 - RNA, 19 nt, Human herpesvirus 2
gucgcuaaacagggggauc

SEQ ID NO: 3960038 - RNA, 19 nt, Human herpesvirus 2
gucgggccagauggggccc

SEQ ID NO: 3960039 - RNA, 13 nt, Human herpesvirus 2
gucgggccccggg

SEQ ID NO: 3960040 - RNA, 18 nt, Human herpesvirus 2
gucgggcgugggggaaga

SEQ ID NO: 3960041 - RNA, 20 nt, Human herpesvirus 2
gucgggggggauccagggga

SEQ ID NO: 3960042 - RNA, 17 nt, Human herpesvirus 2
gucguugggcggccccc

SEQ ID NO: 3960043 - RNA, 16 nt, Human herpesvirus 2
gucucaauaaagccag

SEQ ID NO: 3960044 - RNA, 12 nt, Human herpesvirus 2
gucucggccccc

SEQ ID NO: 3960045 - RNA, 19 nt, Human herpesvirus 2
gucugcgccaccggccugg

SEQ ID NO: 3960046 - RNA, 17 nt, Human herpesvirus 2
gucugguuuuucugggg

SEQ ID NO: 3960047 - RNA, 14 nt, Human herpesvirus 2
gucugucugcccgg

SEQ ID NO: 3960048 - RNA, 18 nt, Human herpesvirus 2
gugacccccccauggcau

SEQ ID NO: 3960049 - RNA, 17 nt, Human herpesvirus 2
gugagucacggcaaccc

SEQ ID NO: 3960050 - RNA, 18 nt, Human herpesvirus 2
gugcacagccuggccgug

SEQ ID NO: 3960051 - RNA, 14 nt, Human herpesvirus 2
gugccaguccgcuc

SEQ ID NO: 3960052 - RNA, 23 nt, Human herpesvirus 2
gugcccccccucguucugcugca

SEQ ID NO: 3960053 - RNA, 16 nt, Human herpesvirus 2
gugcccuggguccggg

SEQ ID NO: 3960054 - RNA, 23 nt, Human herpesvirus 2
gugccgcuuuaccccgcggccuc

SEQ ID NO: 3960055 - RNA, 18 nt, Human herpesvirus 2
gugccucacgguccucac

SEQ ID NO: 3960056 - RNA, 17 nt, Human herpesvirus 2
gugcgcaugggccgcca

SEQ ID NO: 3960057 - RNA, 14 nt, Human herpesvirus 2
gugcucgcagcagu

SEQ ID NO: 3960058 - RNA, 21 nt, Human herpesvirus 2
gugcugcgcgagccguccggg

SEQ ID NO: 3960059 - RNA, 15 nt, Human herpesvirus 2
guggcccuccacgcc

SEQ ID NO: 3960060 - RNA, 20 nt, Human herpesvirus 2
guggcggaggccugucccug

SEQ ID NO: 3960061 - RNA, 14 nt, Human herpesvirus 2
gugguuagggggac

SEQ ID NO: 3960062 - RNA, 18 nt, Human herpesvirus 2
gugucgaaucugggaaga

SEQ ID NO: 3960063 - RNA, 21 nt, Human herpesvirus 2
gugucgcuccccuucagccug

SEQ ID NO: 3960064 - RNA, 16 nt, Human herpesvirus 2
gugucggagaggcccg

SEQ ID NO: 3960065 - RNA, 15 nt, Human herpesvirus 2
gugucucgcggcccg

SEQ ID NO: 3960066 - RNA, 18 nt, Human herpesvirus 2
guuagguugggagguggc

SEQ ID NO: 3960067 - RNA, 19 nt, Human herpesvirus 2
guuauaggccacacagucc

SEQ ID NO: 3960068 - RNA, 13 nt, Human herpesvirus 2
guuauccugcggc

SEQ ID NO: 3960069 - RNA, 16 nt, Human herpesvirus 2
guucgcgggcgacgcc

SEQ ID NO: 3960070 - RNA, 12 nt, Human herpesvirus 2
guucggcaggcc

SEQ ID NO: 3960071 - RNA, 14 nt, Human herpesvirus 2
guucggcaggcccg

SEQ ID NO: 3960072 - RNA, 21 nt, Human herpesvirus 2
guucgggcggcggaaacaaca

SEQ ID NO: 3960073 - RNA, 13 nt, Human herpesvirus 2
guucuccuggacg

SEQ ID NO: 3960074 - RNA, 19 nt, Human herpesvirus 2
guugcguuggggcacggcg

SEQ ID NO: 3960075 - RNA, 15 nt, Human herpesvirus 2
guuguagggccgcgg

SEQ ID NO: 3960076 - RNA, 11 nt, Human herpesvirus 2
guuuuucuguu

SEQ ID NO: 3960077 - RNA, 15 nt, Human herpesvirus 2
uaaauaaacaaacaa

SEQ ID NO: 3960078 - RNA, 18 nt, Human herpesvirus 2
uaacagcuacccgcaucc

SEQ ID NO: 3960079 - RNA, 21 nt, Human herpesvirus 2
uaacagcuacccgcauccgca

SEQ ID NO: 3960080 - RNA, 22 nt, Human herpesvirus 2
uaacuaaaccacagcacggccg

SEQ ID NO: 3960081 - RNA, 16 nt, Human herpesvirus 2
uaagcgcugcggggac

SEQ ID NO: 3960082 - RNA, 17 nt, Human herpesvirus 2
uaagcgcugcggggacc

SEQ ID NO: 3960083 - RNA, 10 nt, Human herpesvirus 2
uaaggcaggg

SEQ ID NO: 3960084 - RNA, 22 nt, Human herpesvirus 2
uaauaggcggucccggccgcca

SEQ ID NO: 3960085 - RNA, 12 nt, Human herpesvirus 2
uacaccccaccc

SEQ ID NO: 3960086 - RNA, 12 nt, Human herpesvirus 2
uaccagccccuc

SEQ ID NO: 3960087 - RNA, 15 nt, Human herpesvirus 2
uacccggcagagaga

SEQ ID NO: 3960088 - RNA, 15 nt, Human herpesvirus 2
cagcaaccaggcgcu

SEQ ID NO: 3960089 - RNA, 12 nt, Human herpesvirus 2
cagcaccccacc

SEQ ID NO: 3960090 - RNA, 22 nt, Human herpesvirus 2
cagcauccgaucgaugagccgg

SEQ ID NO: 3960091 - RNA, 16 nt, Human herpesvirus 2
cagccccgcaggcagg

SEQ ID NO: 3960092 - RNA, 21 nt, Human herpesvirus 2
cagccccucgcccccgcggcc

SEQ ID NO: 3960093 - RNA, 17 nt, Human herpesvirus 2
cagccgcccccgccggc

SEQ ID NO: 3960094 - RNA, 19 nt, Human herpesvirus 2
cagccuggaccagaccgug

SEQ ID NO: 3960095 - RNA, 24 nt, Human herpesvirus 2
cagcucucgcgaauugacaagcgg

SEQ ID NO: 3960096 - RNA, 21 nt, Human herpesvirus 2
cagcuuggccguguggucgcc

SEQ ID NO: 3960097 - RNA, 18 nt, Human herpesvirus 2
cagcuuuuaacgggccgc

SEQ ID NO: 3960098 - RNA, 21 nt, Human herpesvirus 2
caggagggcgggccacgucgg

SEQ ID NO: 3960099 - RNA, 23 nt, Human herpesvirus 2
caggcaggcgucgaucucaucaa

SEQ ID NO: 3960100 - RNA, 17 nt, Human herpesvirus 2
caggccaucgccgggga

SEQ ID NO: 3960101 - RNA, 14 nt, Human herpesvirus 2
caggccccccggga

SEQ ID NO: 3960102 - RNA, 15 nt, Human herpesvirus 2
caggcccucgcugcu

SEQ ID NO: 3960103 - RNA, 21 nt, Human herpesvirus 2
caggcgcuccagguacugcug

SEQ ID NO: 3960104 - RNA, 17 nt, Human herpesvirus 2
caggcguguugggaagg

SEQ ID NO: 3960105 - RNA, 13 nt, Human herpesvirus 2
caggcuggagcuc

SEQ ID NO: 3960106 - RNA, 17 nt, Human herpesvirus 2
caggcuggagcucugcc

SEQ ID NO: 3960107 - RNA, 23 nt, Human herpesvirus 2
cagggacgucacgcccgucaggc

SEQ ID NO: 3960108 - RNA, 17 nt, Human herpesvirus 2
cagggaguccucgccgc

SEQ ID NO: 3960109 - RNA, 23 nt, Human herpesvirus 2
cagggaguccucgccgcuguggc

SEQ ID NO: 3960110 - RNA, 18 nt, Human herpesvirus 2
cagggggcggcgccggcc

SEQ ID NO: 3960111 - RNA, 15 nt, Human herpesvirus 2
cagguggcccuuccg

SEQ ID NO: 3960112 - RNA, 20 nt, Human herpesvirus 2
caggugggccgacgugccgg

SEQ ID NO: 3960113 - RNA, 22 nt, Human herpesvirus 2
caggugggugcuucggggacuu

SEQ ID NO: 3960114 - RNA, 17 nt, Human herpesvirus 2
cagugcaguaccccagu

SEQ ID NO: 3960115 - RNA, 21 nt, Human herpesvirus 2
cauaggccgggagcguggggc

SEQ ID NO: 3960116 - RNA, 13 nt, Human herpesvirus 2
caucaccccaggg

SEQ ID NO: 3960117 - RNA, 12 nt, Human herpesvirus 2
caucaggcucau

SEQ ID NO: 3960118 - RNA, 15 nt, Human herpesvirus 2
caucccacaaugggg

SEQ ID NO: 3960119 - RNA, 17 nt, Human herpesvirus 2
cauccgacggcaugcag

SEQ ID NO: 3960120 - RNA, 18 nt, Human herpesvirus 2
cauccgacggcaugcagc

SEQ ID NO: 3960121 - RNA, 12 nt, Human herpesvirus 2
caucgccgggga

SEQ ID NO: 3960122 - RNA, 15 nt, Human herpesvirus 2
caucgcguacagccu

SEQ ID NO: 3960123 - RNA, 14 nt, Human herpesvirus 2
caucgggcugcugg

SEQ ID NO: 3960124 - RNA, 13 nt, Human herpesvirus 2
caucucuguuuca

SEQ ID NO: 3960125 - RNA, 21 nt, Human herpesvirus 2
caugacgacacgucccgccac

SEQ ID NO: 3960126 - RNA, 15 nt, Human herpesvirus 2
caugagccgccgggu

SEQ ID NO: 3960127 - RNA, 17 nt, Human herpesvirus 2
cauggaagcccccggca

SEQ ID NO: 3960128 - RNA, 23 nt, Human herpesvirus 2
cauggcauccgggguuuccccgg

SEQ ID NO: 3960129 - RNA, 15 nt, Human herpesvirus 2
caugucuuuccacca

SEQ ID NO: 3960130 - RNA, 19 nt, Human herpesvirus 2
caugucuuuccaccaccag

SEQ ID NO: 3960131 - RNA, 21 nt, Human herpesvirus 2
caugugcuaacgggaaaacca

SEQ ID NO: 3960132 - RNA, 14 nt, Human herpesvirus 2
cauguucggcgucg

SEQ ID NO: 3960133 - RNA, 21 nt, Human herpesvirus 2
cauuguugucguguggugugu

SEQ ID NO: 3960134 - RNA, 11 nt, Human herpesvirus 2
ccaaaaaccag

SEQ ID NO: 3960135 - RNA, 14 nt, Human herpesvirus 2
ccaacgacggcguu

SEQ ID NO: 3960136 - RNA, 18 nt, Human herpesvirus 2
ccaacucgcggcaccgcg

SEQ ID NO: 3960137 - RNA, 21 nt, Human herpesvirus 2
ccaacucgcggcaccgcgcgg

SEQ ID NO: 3960138 - RNA, 12 nt, Human herpesvirus 2
ccacacccccuc

SEQ ID NO: 3960139 - RNA, 24 nt, Human herpesvirus 2
ccacagcaauaaacauuggcaagc

SEQ ID NO: 3960140 - RNA, 17 nt, Human herpesvirus 2
ccacagcacggccgggu

SEQ ID NO: 3960141 - RNA, 17 nt, Human herpesvirus 2
ccacaucgauuccgcca

SEQ ID NO: 3960142 - RNA, 18 nt, Human herpesvirus 2
ccaccccccccccccuuc

SEQ ID NO: 3960143 - RNA, 21 nt, Human herpesvirus 2
ccaccgcccccgcuggcggga

SEQ ID NO: 3960144 - RNA, 14 nt, Human herpesvirus 2
ccaccgucagccgc

SEQ ID NO: 3960145 - RNA, 17 nt, Human herpesvirus 2
ccaccuggaagcugccu

SEQ ID NO: 3960146 - RNA, 20 nt, Human herpesvirus 2
ccaccuucgcucccucagca

SEQ ID NO: 3960147 - RNA, 13 nt, Human herpesvirus 2
ccacguccaccuu

SEQ ID NO: 3960148 - RNA, 19 nt, Human herpesvirus 2
ccacguccaccuuggcccg

SEQ ID NO: 3960149 - RNA, 17 nt, Human herpesvirus 2
ccacguguccccaggga

SEQ ID NO: 3960150 - RNA, 18 nt, Human herpesvirus 2
ccacuccaccccccccuc

SEQ ID NO: 3960151 - RNA, 18 nt, Human herpesvirus 2
ccagaccgaagaggugcu

SEQ ID NO: 3960152 - RNA, 16 nt, Human herpesvirus 2
ccagacggcgggaccc

SEQ ID NO: 3960153 - RNA, 11 nt, Human herpesvirus 2
ccagagccuca

SEQ ID NO: 3960154 - RNA, 15 nt, Human herpesvirus 2
ccagauggggccccg

SEQ ID NO: 3960155 - RNA, 22 nt, Human herpesvirus 2
ccagcauguguguuaacgcaac

SEQ ID NO: 3960156 - RNA, 12 nt, Human herpesvirus 2
ccagccccgcag

SEQ ID NO: 3960157 - RNA, 14 nt, Human herpesvirus 2
ccagcuuucccucc

SEQ ID NO: 3960158 - RNA, 22 nt, Human herpesvirus 2
ccaggaggggggcagugcagua

SEQ ID NO: 3960159 - RNA, 17 nt, Human herpesvirus 2
ccaggauuaccgacccc

SEQ ID NO: 3960160 - RNA, 14 nt, Human herpesvirus 2
ccaggcgcugcugc

SEQ ID NO: 3960161 - RNA, 17 nt, Human herpesvirus 2
ccaggcuauuaaacagc

SEQ ID NO: 3960162 - RNA, 17 nt, Human herpesvirus 2
ccagggcugggagcccu

SEQ ID NO: 3960163 - RNA, 16 nt, Human herpesvirus 2
ccagggggcggcgccg

SEQ ID NO: 3960164 - RNA, 17 nt, Human herpesvirus 2
ccaggucuuuccguggc

SEQ ID NO: 3960165 - RNA, 13 nt, Human herpesvirus 2
ccaguuccucagu

SEQ ID NO: 3960166 - RNA, 16 nt, Human herpesvirus 2
ccauaaacaggccccg

SEQ ID NO: 3960167 - RNA, 17 nt, Human herpesvirus 2
ccaucgacccggacugc

SEQ ID NO: 3960168 - RNA, 12 nt, Human herpesvirus 2
ccaucgccgggg

SEQ ID NO: 3960169 - RNA, 17 nt, Human herpesvirus 2
ccaucgccggggaccgc

SEQ ID NO: 3960170 - RNA, 16 nt, Human herpesvirus 2
ccaugagccgccgggu

SEQ ID NO: 3960171 - RNA, 13 nt, Human herpesvirus 2
cccacccccgagg

SEQ ID NO: 3960172 - RNA, 17 nt, Human herpesvirus 2
cccacccccgcacccca

SEQ ID NO: 3960173 - RNA, 16 nt, Human herpesvirus 2
cccaccgcccccgcug

SEQ ID NO: 3960174 - RNA, 20 nt, Human herpesvirus 2
cccacgacauccgcggcuuu

SEQ ID NO: 3960175 - RNA, 12 nt, Human herpesvirus 2
ggccggggcggc

SEQ ID NO: 3960176 - RNA, 18 nt, Human herpesvirus 2
ggccgggucggcugucca

SEQ ID NO: 3960177 - RNA, 19 nt, Human herpesvirus 2
ggccggguuuuuggcccug

SEQ ID NO: 3960178 - RNA, 11 nt, Human herpesvirus 2
ggccugguggc

SEQ ID NO: 3960179 - RNA, 15 nt, Human herpesvirus 2
ggcgacccgccgccc

SEQ ID NO: 3960180 - RNA, 14 nt, Human herpesvirus 2
ggcgaccgccccgc

SEQ ID NO: 3960181 - RNA, 20 nt, Human herpesvirus 2
ggcgacgccaggccccccgg

SEQ ID NO: 3960182 - RNA, 15 nt, Human herpesvirus 2
ggcgagcuggcccug

SEQ ID NO: 3960183 - RNA, 17 nt, Human herpesvirus 2
ggcgagcuggcccugga

SEQ ID NO: 3960184 - RNA, 22 nt, Human herpesvirus 2
ggcgagcuggcccuggacccag

SEQ ID NO: 3960185 - RNA, 14 nt, Human herpesvirus 2
ggcgaggggcggga

SEQ ID NO: 3960186 - RNA, 14 nt, Human herpesvirus 2
ggcgccccccccga

SEQ ID NO: 3960187 - RNA, 18 nt, Human herpesvirus 2
ggcgccccgaaacgcggg

SEQ ID NO: 3960188 - RNA, 14 nt, Human herpesvirus 2
ggcgccggccaacc

SEQ ID NO: 3960189 - RNA, 20 nt, Human herpesvirus 2
ggcgccuaccugguacccac

SEQ ID NO: 3960190 - RNA, 20 nt, Human herpesvirus 2
ggcgcgcggcgcgagcuccc

SEQ ID NO: 3960191 - RNA, 15 nt, Human herpesvirus 2
ggcgcgcuggcggaa

SEQ ID NO: 3960192 - RNA, 12 nt, Human herpesvirus 2
ggcgcgggcggc

SEQ ID NO: 3960193 - RNA, 23 nt, Human herpesvirus 2
ggcgcggugccugacgccggcca

SEQ ID NO: 3960194 - RNA, 22 nt, Human herpesvirus 2
ggcgcucgguuguccguucugu

SEQ ID NO: 3960195 - RNA, 15 nt, Human herpesvirus 2
ggcgcugagggcggc

SEQ ID NO: 3960196 - RNA, 14 nt, Human herpesvirus 2
ggcgcugcgccugc

SEQ ID NO: 3960197 - RNA, 14 nt, Human herpesvirus 2
ggcggaagugccgc

SEQ ID NO: 3960198 - RNA, 17 nt, Human herpesvirus 2
ggcggacguccaggggu

SEQ ID NO: 3960199 - RNA, 13 nt, Human herpesvirus 2
ggcggaggccugu

SEQ ID NO: 3960200 - RNA, 14 nt, Human herpesvirus 2
ggcggcccuggagc

SEQ ID NO: 3960201 - RNA, 23 nt, Human herpesvirus 2
ggcgggaccccgacguggcccgc

SEQ ID NO: 3960202 - RNA, 11 nt, Human herpesvirus 2
ggcgggagcca

SEQ ID NO: 3960203 - RNA, 19 nt, Human herpesvirus 2
ggcgggccccguggguggg

SEQ ID NO: 3960204 - RNA, 12 nt, Human herpesvirus 2
ggcggggcaugg

SEQ ID NO: 3960205 - RNA, 16 nt, Human herpesvirus 2
ggcgugcugugcccug

SEQ ID NO: 3960206 - RNA, 13 nt, Human herpesvirus 2
ggcguggacgccg

SEQ ID NO: 3960207 - RNA, 17 nt, Human herpesvirus 2
ggcguuccuucccuuuc

SEQ ID NO: 3960208 - RNA, 21 nt, Human herpesvirus 2
ggcguuucugaccggcgccga

SEQ ID NO: 3960209 - RNA, 14 nt, Human herpesvirus 2
ggcuccaggccgcc

SEQ ID NO: 3960210 - RNA, 15 nt, Human herpesvirus 2
ggcuggcgcggugcc

SEQ ID NO: 3960211 - RNA, 12 nt, Human herpesvirus 2
ggcuggcggcgc

SEQ ID NO: 3960212 - RNA, 23 nt, Human herpesvirus 2
gggaaacacaguuccgggaaggc

SEQ ID NO: 3960213 - RNA, 12 nt, Human herpesvirus 2
gggacgaacagg

SEQ ID NO: 3960214 - RNA, 15 nt, Human herpesvirus 2
gggacuccccucuac

SEQ ID NO: 3960215 - RNA, 13 nt, Human herpesvirus 2
gggaggagacagg

SEQ ID NO: 3960216 - RNA, 14 nt, Human herpesvirus 2
gggaggagacagga

SEQ ID NO: 3960217 - RNA, 22 nt, Human herpesvirus 2
gggaggaggggggugguggccg

SEQ ID NO: 3960218 - RNA, 11 nt, Human herpesvirus 2
gggaugugucu

SEQ ID NO: 3960219 - RNA, 14 nt, Human herpesvirus 2
gggcaagugcagua

SEQ ID NO: 3960220 - RNA, 23 nt, Human herpesvirus 2
gggcaagugcaguaacccaguuc

SEQ ID NO: 3960221 - RNA, 20 nt, Human herpesvirus 2
gggcaccaaaaaccaggucu

SEQ ID NO: 3960222 - RNA, 12 nt, Human herpesvirus 2
gggcagugcagu

SEQ ID NO: 3960223 - RNA, 21 nt, Human herpesvirus 2
gggcaugggcuacuaccuggg

SEQ ID NO: 3960224 - RNA, 18 nt, Human herpesvirus 2
gggccaacagggaguccu

SEQ ID NO: 3960225 - RNA, 14 nt, Human herpesvirus 2
gggcccguguggga

SEQ ID NO: 3960226 - RNA, 16 nt, Human herpesvirus 2
gggccgacgugccggg

SEQ ID NO: 3960227 - RNA, 13 nt, Human herpesvirus 2
gggccgcccggag

SEQ ID NO: 3960228 - RNA, 17 nt, Human herpesvirus 2
gggccgcugggggggcg

SEQ ID NO: 3960229 - RNA, 12 nt, Human herpesvirus 2
gggccgggugac

SEQ ID NO: 3960230 - RNA, 17 nt, Human herpesvirus 2
gggccggguugguguuu

SEQ ID NO: 3960231 - RNA, 20 nt, Human herpesvirus 2
gggccguggggccccagggc

SEQ ID NO: 3960232 - RNA, 15 nt, Human herpesvirus 2
gggccgugucccucc

SEQ ID NO: 3960233 - RNA, 20 nt, Human herpesvirus 2
gggccucccgcaagagccug

SEQ ID NO: 3960234 - RNA, 14 nt, Human herpesvirus 2
gggcggcgaaccgg

SEQ ID NO: 3960235 - RNA, 20 nt, Human herpesvirus 2
gggcguagagcucggccucg

SEQ ID NO: 3960236 - RNA, 14 nt, Human herpesvirus 2
gggcguccugcggc

SEQ ID NO: 3960237 - RNA, 22 nt, Human herpesvirus 2
gggcgugauguuuuccgcaucu

SEQ ID NO: 3960238 - RNA, 17 nt, Human herpesvirus 2
gggcgugcugugcccug

SEQ ID NO: 3960239 - RNA, 13 nt, Human herpesvirus 2
gggcgugugacua

SEQ ID NO: 3960240 - RNA, 22 nt, Human herpesvirus 2
gggcuuguguauaaauaaaaag

SEQ ID NO: 3960241 - RNA, 19 nt, Human herpesvirus 2
gggcuuuagucccggcccg

SEQ ID NO: 3960242 - RNA, 20 nt, Human herpesvirus 2
ggggaagcccuacggcggcc

SEQ ID NO: 3960243 - RNA, 22 nt, Human herpesvirus 2
ggggacccgggcgagcuggccc

SEQ ID NO: 3960244 - RNA, 16 nt, Human herpesvirus 2
ggggaugggggggaag

SEQ ID NO: 3960245 - RNA, 14 nt, Human herpesvirus 2
ggggaugguggugg

SEQ ID NO: 3960246 - RNA, 15 nt, Human herpesvirus 2
ggggcaccggcaccg

SEQ ID NO: 3960247 - RNA, 15 nt, Human herpesvirus 2
ggggccccagggcuu

SEQ ID NO: 3960248 - RNA, 12 nt, Human herpesvirus 2
ggggcccccgac

SEQ ID NO: 3960249 - RNA, 17 nt, Human herpesvirus 2
ggggccgucgcggccgc

SEQ ID NO: 3960250 - RNA, 14 nt, Human herpesvirus 2
ggggccugcugugg

SEQ ID NO: 3960251 - RNA, 18 nt, Human herpesvirus 2
ggggcgcugguggccgcg

SEQ ID NO: 3960252 - RNA, 22 nt, Human herpesvirus 2
ggggcugguuggauguuuuugc

SEQ ID NO: 3960253 - RNA, 19 nt, Human herpesvirus 2
ggggcuugugcccucguag

SEQ ID NO: 3960254 - RNA, 17 nt, Human herpesvirus 2
gggggcaagugcaguaa

SEQ ID NO: 3960255 - RNA, 14 nt, Human herpesvirus 2
gggggcaggcgggc

SEQ ID NO: 3960256 - RNA, 16 nt, Human herpesvirus 2
gggggccggggcucuu

SEQ ID NO: 3960257 - RNA, 14 nt, Human herpesvirus 2
gggggcggcgccgg

SEQ ID NO: 3960258 - RNA, 14 nt, Human herpesvirus 2
gggggcgggggugc

SEQ ID NO: 3960259 - RNA, 12 nt, Human herpesvirus 2
gggggggcuggu

SEQ ID NO: 3960260 - RNA, 13 nt, Human herpesvirus 2
ggggggggugugu

SEQ ID NO: 3960261 - RNA, 12 nt, Human herpesvirus 2
ggggguggcggc

SEQ ID NO: 3960262 - RNA, 15 nt, Human herpesvirus 2
gggggugguggugcu

SEQ ID NO: 3960263 - RNA, 14 nt, Human herpesvirus 2
ggggugaggaagaa

SEQ ID NO: 3960264 - RNA, 12 nt, Human herpesvirus 2
gggucgcacgcc

SEQ ID NO: 3960265 - RNA, 19 nt, Human herpesvirus 2
gggucugcgucguccaggg

SEQ ID NO: 3960266 - RNA, 13 nt, Human herpesvirus 2
ggguucggggcca

SEQ ID NO: 3960267 - RNA, 21 nt, Human herpesvirus 2
gguaacuucuacgugcccccc

SEQ ID NO: 3960268 - RNA, 19 nt, Human herpesvirus 2
gguaauuagcagcuuuuaa

SEQ ID NO: 3960269 - RNA, 19 nt, Human herpesvirus 2
ggucaauaaagagcucugu

SEQ ID NO: 3960270 - RNA, 15 nt, Human herpesvirus 2
ggucaccggggcgcc

SEQ ID NO: 3960271 - RNA, 22 nt, Human herpesvirus 2
ggucaccgguguucggaaccag

SEQ ID NO: 3960272 - RNA, 22 nt, Human herpesvirus 2
ggucccgcgcucauggccggag

SEQ ID NO: 3960273 - RNA, 22 nt, Human herpesvirus 2
ggucccuuccccaccaccaacc

SEQ ID NO: 3960274 - RNA, 17 nt, Human herpesvirus 2
ggucggguguccccgga

SEQ ID NO: 3960275 - RNA, 14 nt, Human herpesvirus 2
ggucggugcccccc

SEQ ID NO: 3960276 - RNA, 21 nt, Human herpesvirus 2
ggugcccaucuacguggccgg

SEQ ID NO: 3960277 - RNA, 18 nt, Human herpesvirus 2
gguggcaaaauccaaaaa

SEQ ID NO: 3960278 - RNA, 13 nt, Human herpesvirus 2
gguggggggcgag

SEQ ID NO: 3960279 - RNA, 17 nt, Human herpesvirus 2
gguuggggcgggcagcc

SEQ ID NO: 3960280 - RNA, 14 nt, Human herpesvirus 2
gguuuccggccccu

SEQ ID NO: 3960281 - RNA, 17 nt, Human herpesvirus 2
gguuucgguuccacucu

SEQ ID NO: 3960282 - RNA, 11 nt, Human herpesvirus 2
guaaaaaagaa

SEQ ID NO: 3960283 - RNA, 20 nt, Human herpesvirus 2
guagacgggcucgccagcga

SEQ ID NO: 3960284 - RNA, 23 nt, Human herpesvirus 2
guagccuaucuugaucccccgga

SEQ ID NO: 3960285 - RNA, 22 nt, Human herpesvirus 2
guaugucuguuucaauaaaaag

SEQ ID NO: 3960286 - RNA, 18 nt, Human herpesvirus 2
gucaccggggcgcccccc

SEQ ID NO: 3960287 - RNA, 22 nt, Human herpesvirus 2
gucacgagccccugggccgcuc

SEQ ID NO: 3960288 - RNA, 21 nt, Human herpesvirus 2
gucccccgaagcggccccgac

SEQ ID NO: 3960289 - RNA, 14 nt, Human herpesvirus 2
gucccccggacccc

SEQ ID NO: 3960290 - RNA, 19 nt, Human herpesvirus 2
gucccccggaccccgaccc

SEQ ID NO: 3960291 - RNA, 23 nt, Human herpesvirus 2
gucccgacgauuagccaccgcgc

SEQ ID NO: 3960292 - RNA, 12 nt, Human herpesvirus 2
gucccgcccgcc

SEQ ID NO: 3960293 - RNA, 18 nt, Human herpesvirus 2
cuugccccucccccggcc

SEQ ID NO: 3960294 - RNA, 19 nt, Human herpesvirus 2
cuuggccguguggucgccc

SEQ ID NO: 3960295 - RNA, 13 nt, Human herpesvirus 2
cuuggccuucccg

SEQ ID NO: 3960296 - RNA, 15 nt, Human herpesvirus 2
cuugggggggcgucc

SEQ ID NO: 3960297 - RNA, 15 nt, Human herpesvirus 2
cuuuccaccccccuu

SEQ ID NO: 3960298 - RNA, 21 nt, Human herpesvirus 2
cuuucccccccacuccacccc

SEQ ID NO: 3960299 - RNA, 13 nt, Human herpesvirus 2
cuuugacuccugg

SEQ ID NO: 3960300 - RNA, 16 nt, Human herpesvirus 2
gaaaaggcccggcccg

SEQ ID NO: 3960301 - RNA, 15 nt, Human herpesvirus 2
gaaaccgcaggcgcg

SEQ ID NO: 3960302 - RNA, 19 nt, Human herpesvirus 2
gaaagacggggaggagaca

SEQ ID NO: 3960303 - RNA, 16 nt, Human herpesvirus 2
gaacacgagccgcagg

SEQ ID NO: 3960304 - RNA, 17 nt, Human herpesvirus 2
gaaccaacugccgaaag

SEQ ID NO: 3960305 - RNA, 16 nt, Human herpesvirus 2
gaacgccucaccgcgc

SEQ ID NO: 3960306 - RNA, 15 nt, Human herpesvirus 2
gaacgggggucccgc

SEQ ID NO: 3960307 - RNA, 19 nt, Human herpesvirus 2
gaacucucccggcuccucc

SEQ ID NO: 3960308 - RNA, 20 nt, Human herpesvirus 2
gaagcugccucccccccgga

SEQ ID NO: 3960309 - RNA, 22 nt, Human herpesvirus 2
gaaggcguuuauugcggagaga

SEQ ID NO: 3960310 - RNA, 16 nt, Human herpesvirus 2
gaagggaaaggaacag

SEQ ID NO: 3960311 - RNA, 20 nt, Human herpesvirus 2
gaagucucuuggggaaaucu

SEQ ID NO: 3960312 - RNA, 19 nt, Human herpesvirus 2
gaagugccgcacggccgug

SEQ ID NO: 3960313 - RNA, 16 nt, Human herpesvirus 2
gacaacugccugaccc

SEQ ID NO: 3960314 - RNA, 14 nt, Human herpesvirus 2
gacacacacacccc

SEQ ID NO: 3960315 - RNA, 15 nt, Human herpesvirus 2
gacacgcggcggguc

SEQ ID NO: 3960316 - RNA, 21 nt, Human herpesvirus 2
gacagcgcgaugaggggcacc

SEQ ID NO: 3960317 - RNA, 14 nt, Human herpesvirus 2
gacaggaggcgcag

SEQ ID NO: 3960318 - RNA, 18 nt, Human herpesvirus 2
gaccaccgcgaccacccc

SEQ ID NO: 3960319 - RNA, 22 nt, Human herpesvirus 2
gaccaccucgcggcggcucccc

SEQ ID NO: 3960320 - RNA, 22 nt, Human herpesvirus 2
gaccacgcgcacgucggggggc

SEQ ID NO: 3960321 - RNA, 15 nt, Human herpesvirus 2
gacccaacagccuag

SEQ ID NO: 3960322 - RNA, 13 nt, Human herpesvirus 2
gacccccagcgcg

SEQ ID NO: 3960323 - RNA, 16 nt, Human herpesvirus 2
gaccccccgggaggag

SEQ ID NO: 3960324 - RNA, 22 nt, Human herpesvirus 2
gacccccgaacagccccugggg

SEQ ID NO: 3960325 - RNA, 17 nt, Human herpesvirus 2
gaccccgauaguccccc

SEQ ID NO: 3960326 - RNA, 15 nt, Human herpesvirus 2
gacccgccgggggcg

SEQ ID NO: 3960327 - RNA, 19 nt, Human herpesvirus 2
gacccggacugcagccccg

SEQ ID NO: 3960328 - RNA, 11 nt, Human herpesvirus 2
gacccggggcc

SEQ ID NO: 3960329 - RNA, 16 nt, Human herpesvirus 2
gacccggggcccgaag

SEQ ID NO: 3960330 - RNA, 20 nt, Human herpesvirus 2
gaccgccugccccgcggagg

SEQ ID NO: 3960331 - RNA, 14 nt, Human herpesvirus 2
gaccggggacuccc

SEQ ID NO: 3960332 - RNA, 15 nt, Human herpesvirus 2
gaccugcagccggcg

SEQ ID NO: 3960333 - RNA, 11 nt, Human herpesvirus 2
gaccugcagga

SEQ ID NO: 3960334 - RNA, 23 nt, Human herpesvirus 2
gacgacagacaauaaagcaucac

SEQ ID NO: 3960335 - RNA, 19 nt, Human herpesvirus 2
gacgacgaccaugggcccc

SEQ ID NO: 3960336 - RNA, 14 nt, Human herpesvirus 2
gacgauuagccacc

SEQ ID NO: 3960337 - RNA, 18 nt, Human herpesvirus 2
gacgccaacgcgaccguc

SEQ ID NO: 3960338 - RNA, 14 nt, Human herpesvirus 2
gacgcccggcccau

SEQ ID NO: 3960339 - RNA, 13 nt, Human herpesvirus 2
gacgcggccagaa

SEQ ID NO: 3960340 - RNA, 16 nt, Human herpesvirus 2
gacgcggcgauggccg

SEQ ID NO: 3960341 - RNA, 19 nt, Human herpesvirus 2
gacgcuguuguuucugggc

SEQ ID NO: 3960342 - RNA, 19 nt, Human herpesvirus 2
gacggcaauaaaagaacag

SEQ ID NO: 3960343 - RNA, 18 nt, Human herpesvirus 2
gacggcaugcagcccaga

SEQ ID NO: 3960344 - RNA, 17 nt, Human herpesvirus 2
gacgggccggugggccc

SEQ ID NO: 3960345 - RNA, 13 nt, Human herpesvirus 2
gacgggcucgcca

SEQ ID NO: 3960346 - RNA, 18 nt, Human herpesvirus 2
gacgucaaauucgugggc

SEQ ID NO: 3960347 - RNA, 17 nt, Human herpesvirus 2
gacgucaaucgcccgag

SEQ ID NO: 3960348 - RNA, 24 nt, Human herpesvirus 2
gacgucccccacggucaggaccag

SEQ ID NO: 3960349 - RNA, 18 nt, Human herpesvirus 2
gagaagccgcccccaccc

SEQ ID NO: 3960350 - RNA, 21 nt, Human herpesvirus 2
gagacggccaugaccucgccc

SEQ ID NO: 3960351 - RNA, 13 nt, Human herpesvirus 2
gagagcccaggga

SEQ ID NO: 3960352 - RNA, 17 nt, Human herpesvirus 2
gagaggcccgccgcgca

SEQ ID NO: 3960353 - RNA, 12 nt, Human herpesvirus 2
gagauggggaga

SEQ ID NO: 3960354 - RNA, 12 nt, Human herpesvirus 2
gagaugugccuu

SEQ ID NO: 3960355 - RNA, 15 nt, Human herpesvirus 2
gagaugugccuucca

SEQ ID NO: 3960356 - RNA, 16 nt, Human herpesvirus 2
gagaugugccuuccag

SEQ ID NO: 3960357 - RNA, 19 nt, Human herpesvirus 2
gagcagcacggcggccaga

SEQ ID NO: 3960358 - RNA, 20 nt, Human herpesvirus 2
gagccaaaccagccccgcag

SEQ ID NO: 3960359 - RNA, 18 nt, Human herpesvirus 2
gagccaccgucccgcccg

SEQ ID NO: 3960360 - RNA, 12 nt, Human herpesvirus 2
gagcccagggaa

SEQ ID NO: 3960361 - RNA, 22 nt, Human herpesvirus 2
gagccccgcgaccaccaaggcc

SEQ ID NO: 3960362 - RNA, 16 nt, Human herpesvirus 2
gagccccugggggacc

SEQ ID NO: 3960363 - RNA, 17 nt, Human herpesvirus 2
gagcccguggcccacga

SEQ ID NO: 3960364 - RNA, 14 nt, Human herpesvirus 2
gagcccugccccgc

SEQ ID NO: 3960365 - RNA, 13 nt, Human herpesvirus 2
gagccgcaggaac

SEQ ID NO: 3960366 - RNA, 15 nt, Human herpesvirus 2
gagccgcugugccag

SEQ ID NO: 3960367 - RNA, 16 nt, Human herpesvirus 2
gagccgcugugccagg

SEQ ID NO: 3960368 - RNA, 14 nt, Human herpesvirus 2
gagccucuuugggc

SEQ ID NO: 3960369 - RNA, 18 nt, Human herpesvirus 2
gagcggacacgcuugaag

SEQ ID NO: 3960370 - RNA, 18 nt, Human herpesvirus 2
gagcguaucggccaggag

SEQ ID NO: 3960371 - RNA, 18 nt, Human herpesvirus 2
gaggagacaggaaguggg

SEQ ID NO: 3960372 - RNA, 14 nt, Human herpesvirus 2
gaggagccgggaga

SEQ ID NO: 3960373 - RNA, 15 nt, Human herpesvirus 2
gaggaggaggagggg

SEQ ID NO: 3960374 - RNA, 18 nt, Human herpesvirus 2
gaggauguguucuccugg

SEQ ID NO: 3960375 - RNA, 12 nt, Human herpesvirus 2
gaggauuacuuu

SEQ ID NO: 3960376 - RNA, 16 nt, Human herpesvirus 2
gaggcccucugggaca

SEQ ID NO: 3960377 - RNA, 21 nt, Human herpesvirus 2
gaggccucauccggcccgcca

SEQ ID NO: 3960378 - RNA, 23 nt, Human herpesvirus 2
gaggccugucccugcgucgcccc

SEQ ID NO: 3960379 - RNA, 13 nt, Human herpesvirus 2
gaggcggacccag

SEQ ID NO: 3960380 - RNA, 17 nt, Human herpesvirus 2
gaggggaugggggcgcg

SEQ ID NO: 3960381 - RNA, 15 nt, Human herpesvirus 2
gaggggggcagugca

SEQ ID NO: 3960382 - RNA, 18 nt, Human herpesvirus 2
gaggucaauagauuuccc

SEQ ID NO: 3960383 - RNA, 21 nt, Human herpesvirus 2
gaggucaauagauuuccccaa

SEQ ID NO: 3960384 - RNA, 21 nt, Human herpesvirus 2
gaguucaauagauuucccaaa

SEQ ID NO: 3960385 - RNA, 23 nt, Human herpesvirus 2
gaguuucggaaagccggccccgg

SEQ ID NO: 3960386 - RNA, 22 nt, Human herpesvirus 2
gauagucccccgaagcggcccc

SEQ ID NO: 3960387 - RNA, 13 nt, Human herpesvirus 2
gaucccccggaag

SEQ ID NO: 3960388 - RNA, 14 nt, Human herpesvirus 2
gauccugggccugu

SEQ ID NO: 3960389 - RNA, 22 nt, Human herpesvirus 2
gaucucggggagggcggcaccg

SEQ ID NO: 3960390 - RNA, 20 nt, Human herpesvirus 2
gaugauggggacgacgggcg

SEQ ID NO: 3960391 - RNA, 13 nt, Human herpesvirus 2
gaugcgacgccgc

SEQ ID NO: 3960392 - RNA, 23 nt, Human herpesvirus 2
gauggccgcgcgcgugugugaga

SEQ ID NO: 3960393 - RNA, 15 nt, Human herpesvirus 2
gauggcggggauggg

SEQ ID NO: 3960394 - RNA, 22 nt, Human herpesvirus 2
gauggggagagggggaaggaau

SEQ ID NO: 3960395 - RNA, 15 nt, Human herpesvirus 2
gauguauggcgccuu

SEQ ID NO: 3960396 - RNA, 17 nt, Human herpesvirus 2
gauuccggugugcccca

SEQ ID NO: 3960397 - RNA, 15 nt, Human herpesvirus 2
gcaagccacccuggg

SEQ ID NO: 3960398 - RNA, 15 nt, Human herpesvirus 2
gcacacgccaucgac

SEQ ID NO: 3960399 - RNA, 17 nt, Human herpesvirus 2
gcacccacgacauccgc

SEQ ID NO: 3960400 - RNA, 19 nt, Human herpesvirus 2
gcacccauccaucugggag

SEQ ID NO: 3960401 - RNA, 16 nt, Human herpesvirus 2
gcacccccgcgccgcc

SEQ ID NO: 3960402 - RNA, 21 nt, Human herpesvirus 2
gcgcuccgaucggggucaggc

SEQ ID NO: 3960403 - RNA, 20 nt, Human herpesvirus 2
gcgcugcugcgcauggccug

SEQ ID NO: 3960404 - RNA, 11 nt, Human herpesvirus 2
gcgcugguggc

SEQ ID NO: 3960405 - RNA, 18 nt, Human herpesvirus 2
gcgcuggugggacgccca

SEQ ID NO: 3960406 - RNA, 15 nt, Human herpesvirus 2
gcgcuuggccgggga

SEQ ID NO: 3960407 - RNA, 21 nt, Human herpesvirus 2
gcgcuuuccggcccucccgca

SEQ ID NO: 3960408 - RNA, 20 nt, Human herpesvirus 2
gcggacaaacccgccggggc

SEQ ID NO: 3960409 - RNA, 13 nt, Human herpesvirus 2
gcggaccccgccc

SEQ ID NO: 3960410 - RNA, 19 nt, Human herpesvirus 2
gcggaccccgcccgcgacc

SEQ ID NO: 3960411 - RNA, 12 nt, Human herpesvirus 2
gcggaggcgugg

SEQ ID NO: 3960412 - RNA, 12 nt, Human herpesvirus 2
gcggaugugggc

SEQ ID NO: 3960413 - RNA, 23 nt, Human herpesvirus 2
gcggccccuguuggagccggagc

SEQ ID NO: 3960414 - RNA, 21 nt, Human herpesvirus 2
gcgggaugugucgcggggaca

SEQ ID NO: 3960415 - RNA, 18 nt, Human herpesvirus 2
gcgggcaggccgcggcgc

SEQ ID NO: 3960416 - RNA, 15 nt, Human herpesvirus 2
gcgggcccggggccc

SEQ ID NO: 3960417 - RNA, 21 nt, Human herpesvirus 2
gcgggcgggaugaugcggggc

SEQ ID NO: 3960418 - RNA, 15 nt, Human herpesvirus 2
gcgggcgggggcgcg

SEQ ID NO: 3960419 - RNA, 12 nt, Human herpesvirus 2
gcggggccccgg

SEQ ID NO: 3960420 - RNA, 22 nt, Human herpesvirus 2
gcggggguucggggccagggcu

SEQ ID NO: 3960421 - RNA, 22 nt, Human herpesvirus 2
gcggggucgagcgcgccaggac

SEQ ID NO: 3960422 - RNA, 16 nt, Human herpesvirus 2
gcggguaggccagagc

SEQ ID NO: 3960423 - RNA, 16 nt, Human herpesvirus 2
gcgggucccuucccaa

SEQ ID NO: 3960424 - RNA, 18 nt, Human herpesvirus 2
gcgguaauuagcagcuuu

SEQ ID NO: 3960425 - RNA, 14 nt, Human herpesvirus 2
gcggugcagggccu

SEQ ID NO: 3960426 - RNA, 23 nt, Human herpesvirus 2
gcggugcgagaguuucuucgcgg

SEQ ID NO: 3960427 - RNA, 15 nt, Human herpesvirus 2
gcgguucguucugga

SEQ ID NO: 3960428 - RNA, 20 nt, Human herpesvirus 2
gcguacagccuacaucaccc

SEQ ID NO: 3960429 - RNA, 16 nt, Human herpesvirus 2
gcguccgacacccggg

SEQ ID NO: 3960430 - RNA, 15 nt, Human herpesvirus 2
gcgucggcggccccg

SEQ ID NO: 3960431 - RNA, 23 nt, Human herpesvirus 2
gcgucguggcauggaagcccccg

SEQ ID NO: 3960432 - RNA, 14 nt, Human herpesvirus 2
gcgugcggcccugc

SEQ ID NO: 3960433 - RNA, 21 nt, Human herpesvirus 2
gcgugcggcccugccuccgga

SEQ ID NO: 3960434 - RNA, 21 nt, Human herpesvirus 2
gcguggucacccgggcgccgg

SEQ ID NO: 3960435 - RNA, 21 nt, Human herpesvirus 2
gcgugucguugggcggccccc

SEQ ID NO: 3960436 - RNA, 20 nt, Human herpesvirus 2
gcgugugugagaaauaaaga

SEQ ID NO: 3960437 - RNA, 19 nt, Human herpesvirus 2
gcguuccuucccuuucccc

SEQ ID NO: 3960438 - RNA, 17 nt, Human herpesvirus 2
gcguucuggcggcccug

SEQ ID NO: 3960439 - RNA, 18 nt, Human herpesvirus 2
gcuacacgacccuggaga

SEQ ID NO: 3960440 - RNA, 19 nt, Human herpesvirus 2
gcuccagguacugcugcac

SEQ ID NO: 3960441 - RNA, 17 nt, Human herpesvirus 2
gcucccggcccgggccc

SEQ ID NO: 3960442 - RNA, 22 nt, Human herpesvirus 2
gcucccguguaccucugggccc

SEQ ID NO: 3960443 - RNA, 14 nt, Human herpesvirus 2
gcucgccagcgacc

SEQ ID NO: 3960444 - RNA, 19 nt, Human herpesvirus 2
gcucgcugcagggccuggc

SEQ ID NO: 3960445 - RNA, 13 nt, Human herpesvirus 2
gcucguggcgggc

SEQ ID NO: 3960446 - RNA, 15 nt, Human herpesvirus 2
gcucugccugcacga

SEQ ID NO: 3960447 - RNA, 13 nt, Human herpesvirus 2
gcugcugccccgc

SEQ ID NO: 3960448 - RNA, 21 nt, Human herpesvirus 2
gcuggcaccguaucagcaccc

SEQ ID NO: 3960449 - RNA, 23 nt, Human herpesvirus 2
gcuggcugcggggggcggugggu

SEQ ID NO: 3960450 - RNA, 22 nt, Human herpesvirus 2
gcugggcuuguguauaaauaaa

SEQ ID NO: 3960451 - RNA, 18 nt, Human herpesvirus 2
gcuguauucccuugcccg

SEQ ID NO: 3960452 - RNA, 16 nt, Human herpesvirus 2
gcuguucugccgcgcg

SEQ ID NO: 3960453 - RNA, 19 nt, Human herpesvirus 2
gcuguuuauuacgggacca

SEQ ID NO: 3960454 - RNA, 23 nt, Human herpesvirus 2
gcuucaccgagagcgccgucggg

SEQ ID NO: 3960455 - RNA, 14 nt, Human herpesvirus 2
gcuucaucaccccc

SEQ ID NO: 3960456 - RNA, 15 nt, Human herpesvirus 2
gcuucuucgccgccc

SEQ ID NO: 3960457 - RNA, 12 nt, Human herpesvirus 2
ggaaagaaagaa

SEQ ID NO: 3960458 - RNA, 23 nt, Human herpesvirus 2
ggaaagcgucauccgcccgacca

SEQ ID NO: 3960459 - RNA, 17 nt, Human herpesvirus 2
ggaaaggaaaggaaaca

SEQ ID NO: 3960460 - RNA, 14 nt, Human herpesvirus 2
ggaacgacaaaaaa

SEQ ID NO: 3960461 - RNA, 18 nt, Human herpesvirus 2
ggaacuguguuucccccc

SEQ ID NO: 3960462 - RNA, 17 nt, Human herpesvirus 2
ggaagaggcggacccag

SEQ ID NO: 3960463 - RNA, 13 nt, Human herpesvirus 2
ggaaggaaauggg

SEQ ID NO: 3960464 - RNA, 21 nt, Human herpesvirus 2
ggaagggacccgcggaggaaa

SEQ ID NO: 3960465 - RNA, 20 nt, Human herpesvirus 2
ggaagggugggggugguggu

SEQ ID NO: 3960466 - RNA, 16 nt, Human herpesvirus 2
ggacaaacccgccggg

SEQ ID NO: 3960467 - RNA, 16 nt, Human herpesvirus 2
ggacacgcggcggguc

SEQ ID NO: 3960468 - RNA, 12 nt, Human herpesvirus 2
ggaccacgugca

SEQ ID NO: 3960469 - RNA, 19 nt, Human herpesvirus 2
ggaccacgugcacagccug

SEQ ID NO: 3960470 - RNA, 14 nt, Human herpesvirus 2
ggaccgcagucugg

SEQ ID NO: 3960471 - RNA, 20 nt, Human herpesvirus 2
ggacgacgaccaugggcccc

SEQ ID NO: 3960472 - RNA, 22 nt, Human herpesvirus 2
ggacgagccaaaccagccccgc

SEQ ID NO: 3960473 - RNA, 11 nt, Human herpesvirus 2
ggacgcgcagc

SEQ ID NO: 3960474 - RNA, 18 nt, Human herpesvirus 2
ggacgcggcauaccuccg

SEQ ID NO: 3960475 - RNA, 20 nt, Human herpesvirus 2
ggacgcggccagaaacccgg

SEQ ID NO: 3960476 - RNA, 17 nt, Human herpesvirus 2
ggacuggcagccgggac

SEQ ID NO: 3960477 - RNA, 21 nt, Human herpesvirus 2
ggagaguucaauagauuuccc

SEQ ID NO: 3960478 - RNA, 18 nt, Human herpesvirus 2
ggagauggggagaggggg

SEQ ID NO: 3960479 - RNA, 14 nt, Human herpesvirus 2
ggagccacucccgc

SEQ ID NO: 3960480 - RNA, 18 nt, Human herpesvirus 2
ggagccccggagcuccga

SEQ ID NO: 3960481 - RNA, 23 nt, Human herpesvirus 2
ggagcgggggaggggggagaugg

SEQ ID NO: 3960482 - RNA, 13 nt, Human herpesvirus 2
ggagcgucccgac

SEQ ID NO: 3960483 - RNA, 23 nt, Human herpesvirus 2
ggaggcccucugggacacccaga

SEQ ID NO: 3960484 - RNA, 16 nt, Human herpesvirus 2
ggaggcgccucugccc

SEQ ID NO: 3960485 - RNA, 21 nt, Human herpesvirus 2
ggaggggcuccucagcgcggc

SEQ ID NO: 3960486 - RNA, 13 nt, Human herpesvirus 2
ggaggggggagau

SEQ ID NO: 3960487 - RNA, 16 nt, Human herpesvirus 2
ggaggggggagauggg

SEQ ID NO: 3960488 - RNA, 15 nt, Human herpesvirus 2
ggaggguucggggca

SEQ ID NO: 3960489 - RNA, 19 nt, Human herpesvirus 2
ggagguggucggcggccaa

SEQ ID NO: 3960490 - RNA, 13 nt, Human herpesvirus 2
ggagucgccgccc

SEQ ID NO: 3960491 - RNA, 16 nt, Human herpesvirus 2
ggagugcgcucuucgc

SEQ ID NO: 3960492 - RNA, 24 nt, Human herpesvirus 2
ggaguuccgacgacgcguacgugg

SEQ ID NO: 3960493 - RNA, 19 nt, Human herpesvirus 2
ggauccuccgccagcucgg

SEQ ID NO: 3960494 - RNA, 16 nt, Human herpesvirus 2
ggaucgggggcugcug

SEQ ID NO: 3960495 - RNA, 14 nt, Human herpesvirus 2
ggaugauggggacg

SEQ ID NO: 3960496 - RNA, 21 nt, Human herpesvirus 2
ggaugccccgagccagcaggu

SEQ ID NO: 3960497 - RNA, 19 nt, Human herpesvirus 2
ggaugugucgcggggacag

SEQ ID NO: 3960498 - RNA, 17 nt, Human herpesvirus 2
ggauguguucuccugga

SEQ ID NO: 3960499 - RNA, 20 nt, Human herpesvirus 2
ggcaaacacgaucgugcugc

SEQ ID NO: 3960500 - RNA, 13 nt, Human herpesvirus 2
ggcaagugcagua

SEQ ID NO: 3960501 - RNA, 19 nt, Human herpesvirus 2
ggcacagugggugcucggg

SEQ ID NO: 3960502 - RNA, 10 nt, Human herpesvirus 2
ggcaccccau

SEQ ID NO: 3960503 - RNA, 21 nt, Human herpesvirus 2
ggcaccguaucagcaccccac

SEQ ID NO: 3960504 - RNA, 17 nt, Human herpesvirus 2
ggcacgggcccggggcg

SEQ ID NO: 3960505 - RNA, 19 nt, Human herpesvirus 2
ggcacgggcccggggcgaa

SEQ ID NO: 3960506 - RNA, 23 nt, Human herpesvirus 2
ggcagcgcgccgacgaccugcag

SEQ ID NO: 3960507 - RNA, 21 nt, Human herpesvirus 2
ggcaucguuuggguggaggag

SEQ ID NO: 3960508 - RNA, 16 nt, Human herpesvirus 2
ggccagcacgaccagg

SEQ ID NO: 3960509 - RNA, 12 nt, Human herpesvirus 2
ggccaggggggc

SEQ ID NO: 3960510 - RNA, 14 nt, Human herpesvirus 2
ggccauccugccca

SEQ ID NO: 3960511 - RNA, 14 nt, Human herpesvirus 2
ggcccacccccaaa

SEQ ID NO: 3960512 - RNA, 13 nt, Human herpesvirus 2
ggcccaccugcac

SEQ ID NO: 3960513 - RNA, 20 nt, Human herpesvirus 2
ggcccccgcaccggggcggc

SEQ ID NO: 3960514 - RNA, 18 nt, Human herpesvirus 2
ggccccgacuccgcgaau

SEQ ID NO: 3960515 - RNA, 17 nt, Human herpesvirus 2
ggccccgccccgcccca

SEQ ID NO: 3960516 - RNA, 22 nt, Human herpesvirus 2
cccacggucagucuggucucag

SEQ ID NO: 3960517 - RNA, 12 nt, Human herpesvirus 2
cccagcuuuccc

SEQ ID NO: 3960518 - RNA, 13 nt, Human herpesvirus 2
cccaggcccuggc

SEQ ID NO: 3960519 - RNA, 12 nt, Human herpesvirus 2
cccagggcacca

SEQ ID NO: 3960520 - RNA, 21 nt, Human herpesvirus 2
cccagggggcggcgccggcca

SEQ ID NO: 3960521 - RNA, 16 nt, Human herpesvirus 2
cccaggucccccauac

SEQ ID NO: 3960522 - RNA, 16 nt, Human herpesvirus 2
cccaguaccggcgcgc

SEQ ID NO: 3960523 - RNA, 15 nt, Human herpesvirus 2
cccaguuccucagug

SEQ ID NO: 3960524 - RNA, 15 nt, Human herpesvirus 2
cccaguuccuccgug

SEQ ID NO: 3960525 - RNA, 14 nt, Human herpesvirus 2
cccauccccucccg

SEQ ID NO: 3960526 - RNA, 20 nt, Human herpesvirus 2
ccccaacucauacacgcgcu

SEQ ID NO: 3960527 - RNA, 14 nt, Human herpesvirus 2
ccccagcuuucccu

SEQ ID NO: 3960528 - RNA, 17 nt, Human herpesvirus 2
ccccagggagccccggg

SEQ ID NO: 3960529 - RNA, 13 nt, Human herpesvirus 2
cccccaccccauc

SEQ ID NO: 3960530 - RNA, 22 nt, Human herpesvirus 2
cccccggaccccgcugcugugc

SEQ ID NO: 3960531 - RNA, 17 nt, Human herpesvirus 2
cccccgggacuucugga

SEQ ID NO: 3960532 - RNA, 22 nt, Human herpesvirus 2
cccccuuuacgccuuuccuccc

SEQ ID NO: 3960533 - RNA, 19 nt, Human herpesvirus 2
ccccgaauaccaccggcgu

SEQ ID NO: 3960534 - RNA, 23 nt, Human herpesvirus 2
ccccgaauaccaccggcguguga

SEQ ID NO: 3960535 - RNA, 14 nt, Human herpesvirus 2
ccccgacgcgcgcg

SEQ ID NO: 3960536 - RNA, 21 nt, Human herpesvirus 2
ccccgauuccggugugcccca

SEQ ID NO: 3960537 - RNA, 13 nt, Human herpesvirus 2
ccccgcgcacgcg

SEQ ID NO: 3960538 - RNA, 15 nt, Human herpesvirus 2
ccccgcgcacgcgcg

SEQ ID NO: 3960539 - RNA, 12 nt, Human herpesvirus 2
ccccgcgccgcc

SEQ ID NO: 3960540 - RNA, 14 nt, Human herpesvirus 2
ccccgcggaccccg

SEQ ID NO: 3960541 - RNA, 14 nt, Human herpesvirus 2
ccccgcuggcggga

SEQ ID NO: 3960542 - RNA, 22 nt, Human herpesvirus 2
ccccggcggggcauggaccccc

SEQ ID NO: 3960543 - RNA, 17 nt, Human herpesvirus 2
aaaagggacgcgcagcg

SEQ ID NO: 3960544 - RNA, 18 nt, Human herpesvirus 2
aaacacaaaccacacgcu

SEQ ID NO: 3960545 - RNA, 11 nt, Human herpesvirus 2
aaaccacacac

SEQ ID NO: 3960546 - RNA, 22 nt, Human herpesvirus 2
aaacgcgcgcccccauccccuc

SEQ ID NO: 3960547 - RNA, 17 nt, Human herpesvirus 2
aaaucgugcacagagcc

SEQ ID NO: 3960548 - RNA, 14 nt, Human herpesvirus 2
aaaucuauugaacu

SEQ ID NO: 3960549 - RNA, 14 nt, Human herpesvirus 2
aacaccguccccga

SEQ ID NO: 3960550 - RNA, 18 nt, Human herpesvirus 2
aacacgagccgcaggaac

SEQ ID NO: 3960551 - RNA, 20 nt, Human herpesvirus 2
aacacguucgccccgcagcc

SEQ ID NO: 3960552 - RNA, 21 nt, Human herpesvirus 2
aacaugacaacgacgccccuc

SEQ ID NO: 3960553 - RNA, 18 nt, Human herpesvirus 2
aaccacccaaccaacgga

SEQ ID NO: 3960554 - RNA, 21 nt, Human herpesvirus 2
aacccaagugguuccguguga

SEQ ID NO: 3960555 - RNA, 18 nt, Human herpesvirus 2
aaccccgcggcccugagc

SEQ ID NO: 3960556 - RNA, 23 nt, Human herpesvirus 2
aacgguaagcagcgcguccaggu

SEQ ID NO: 3960557 - RNA, 17 nt, Human herpesvirus 2
aacucgcggcaccgcgc

SEQ ID NO: 3960558 - RNA, 14 nt, Human herpesvirus 2
aacuguguuucccc

SEQ ID NO: 3960559 - RNA, 23 nt, Human herpesvirus 2
aagacucggugcguuccagcgcg

SEQ ID NO: 3960560 - RNA, 17 nt, Human herpesvirus 2
aagagacgaugggagcc

SEQ ID NO: 3960561 - RNA, 22 nt, Human herpesvirus 2
aagagugguuugccguggagcu

SEQ ID NO: 3960562 - RNA, 19 nt, Human herpesvirus 2
aaggaacgcccgaaaccag

SEQ ID NO: 3960563 - RNA, 13 nt, Human herpesvirus 2
aaggcgcugcgcc

SEQ ID NO: 3960564 - RNA, 17 nt, Human herpesvirus 2
aagugcaguaacccagu

SEQ ID NO: 3960565 - RNA, 19 nt, Human herpesvirus 2
aagugggggggugguggug

SEQ ID NO: 3960566 - RNA, 12 nt, Human herpesvirus 2
aauaaacacaaa

SEQ ID NO: 3960567 - RNA, 12 nt, Human herpesvirus 2
acaacugccuga

SEQ ID NO: 3960568 - RNA, 21 nt, Human herpesvirus 2
acacacaccagcauuuuguua

SEQ ID NO: 3960569 - RNA, 17 nt, Human herpesvirus 2
acacaggcccaccacca

SEQ ID NO: 3960570 - RNA, 16 nt, Human herpesvirus 2
acacgacccgccucgg

SEQ ID NO: 3960571 - RNA, 20 nt, Human herpesvirus 2
acacgcgcuggccccucugc

SEQ ID NO: 3960572 - RNA, 22 nt, Human herpesvirus 2
gcaccggacgcgcacguggggc

SEQ ID NO: 3960573 - RNA, 13 nt, Human herpesvirus 2
gcaccggggcggc

SEQ ID NO: 3960574 - RNA, 19 nt, Human herpesvirus 2
gcaccugcagaugcugccc

SEQ ID NO: 3960575 - RNA, 14 nt, Human herpesvirus 2
gcacgcggucagca

SEQ ID NO: 3960576 - RNA, 15 nt, Human herpesvirus 2
gcacggcggacacaa

SEQ ID NO: 3960577 - RNA, 18 nt, Human herpesvirus 2
gcacgggcccggggcgaa

SEQ ID NO: 3960578 - RNA, 17 nt, Human herpesvirus 2
gcacguacguucugccc

SEQ ID NO: 3960579 - RNA, 20 nt, Human herpesvirus 2
gcacucccgaaaccgcaggc

SEQ ID NO: 3960580 - RNA, 19 nt, Human herpesvirus 2
gcacuggggugauacuuaa

SEQ ID NO: 3960581 - RNA, 20 nt, Human herpesvirus 2
gcagcagucguggagcgucc

SEQ ID NO: 3960582 - RNA, 15 nt, Human herpesvirus 2
gcagccccggucccc

SEQ ID NO: 3960583 - RNA, 12 nt, Human herpesvirus 2
gcagccgggccc

SEQ ID NO: 3960584 - RNA, 17 nt, Human herpesvirus 2
gcagccuauguucgcgg

SEQ ID NO: 3960585 - RNA, 12 nt, Human herpesvirus 2
gcagcgcgccga

SEQ ID NO: 3960586 - RNA, 22 nt, Human herpesvirus 2
gcagcgugucaaaggccagcag

SEQ ID NO: 3960587 - RNA, 15 nt, Human herpesvirus 2
gcagcuucaccgaga

SEQ ID NO: 3960588 - RNA, 13 nt, Human herpesvirus 2
gcaggcaggcguc

SEQ ID NO: 3960589 - RNA, 21 nt, Human herpesvirus 2
gcaggcccucgcugcucuccc

SEQ ID NO: 3960590 - RNA, 12 nt, Human herpesvirus 2
gcagggccuggc

SEQ ID NO: 3960591 - RNA, 12 nt, Human herpesvirus 2
gcaggggagggg

SEQ ID NO: 3960592 - RNA, 15 nt, Human herpesvirus 2
gcagggggagguggg

SEQ ID NO: 3960593 - RNA, 20 nt, Human herpesvirus 2
gcaggggggccggggauggg

SEQ ID NO: 3960594 - RNA, 19 nt, Human herpesvirus 2
gcagucuggucgagguggc

SEQ ID NO: 3960595 - RNA, 18 nt, Human herpesvirus 2
gcagugcaguaccccagu

SEQ ID NO: 3960596 - RNA, 15 nt, Human herpesvirus 2
gcaguugauucgcga

SEQ ID NO: 3960597 - RNA, 18 nt, Human herpesvirus 2
gcaucccagacgcccgcg

SEQ ID NO: 3960598 - RNA, 11 nt, Human herpesvirus 2
gcaucgcugua

SEQ ID NO: 3960599 - RNA, 20 nt, Human herpesvirus 2
gcaugguaauuagcaacuuu

SEQ ID NO: 3960600 - RNA, 18 nt, Human herpesvirus 2
gccaaaccagccccgcag

SEQ ID NO: 3960601 - RNA, 19 nt, Human herpesvirus 2
gccaaaccagccccgcagg

SEQ ID NO: 3960602 - RNA, 13 nt, Human herpesvirus 2
gccaacagggagu

SEQ ID NO: 3960603 - RNA, 22 nt, Human herpesvirus 2
gccaacucgcggcaccgcgcgg

SEQ ID NO: 3960604 - RNA, 20 nt, Human herpesvirus 2
gccacccgaacauggcucgc

SEQ ID NO: 3960605 - RNA, 13 nt, Human herpesvirus 2
gccaccggccugg

SEQ ID NO: 3960606 - RNA, 21 nt, Human herpesvirus 2
gccaccgucccgcccgccagu

SEQ ID NO: 3960607 - RNA, 20 nt, Human herpesvirus 2
gccacguccaccuuggcccg

SEQ ID NO: 3960608 - RNA, 21 nt, Human herpesvirus 2
gccagagacccugccccccgg

SEQ ID NO: 3960609 - RNA, 20 nt, Human herpesvirus 2
gccagcacgaccagggaggc

SEQ ID NO: 3960610 - RNA, 13 nt, Human herpesvirus 2
gccagcgcccuuc

SEQ ID NO: 3960611 - RNA, 14 nt, Human herpesvirus 2
gccaggccccccgg

SEQ ID NO: 3960612 - RNA, 14 nt, Human herpesvirus 2
gccaggggggcagg

SEQ ID NO: 3960613 - RNA, 21 nt, Human herpesvirus 2
gccauccccggcgccaugagc

SEQ ID NO: 3960614 - RNA, 16 nt, Human herpesvirus 2
gccaugagccgccggg

SEQ ID NO: 3960615 - RNA, 16 nt, Human herpesvirus 2
gccauggcggccgcgc

SEQ ID NO: 3960616 - RNA, 14 nt, Human herpesvirus 2
gcccaccggcucca

SEQ ID NO: 3960617 - RNA, 19 nt, Human herpesvirus 2
gccccacgucaccgggggc

SEQ ID NO: 3960618 - RNA, 15 nt, Human herpesvirus 2
gccccagagcccccc

SEQ ID NO: 3960619 - RNA, 18 nt, Human herpesvirus 2
gccccagggggcggcgcc

SEQ ID NO: 3960620 - RNA, 13 nt, Human herpesvirus 2
gcccccagcaggu

SEQ ID NO: 3960621 - RNA, 16 nt, Human herpesvirus 2
gcccccauccccuccc

SEQ ID NO: 3960622 - RNA, 14 nt, Human herpesvirus 2
gccccccccccacc

SEQ ID NO: 3960623 - RNA, 18 nt, Human herpesvirus 2
gccccccgucccgagccc

SEQ ID NO: 3960624 - RNA, 15 nt, Human herpesvirus 2
gcccccgacgggcgc

SEQ ID NO: 3960625 - RNA, 12 nt, Human herpesvirus 2
gcccccggggcc

SEQ ID NO: 3960626 - RNA, 21 nt, Human herpesvirus 2
gccccgauauucaagcccgcg

SEQ ID NO: 3960627 - RNA, 22 nt, Human herpesvirus 2
gccccgauauucaagcccgcgg

SEQ ID NO: 3960628 - RNA, 13 nt, Human herpesvirus 2
gccccgccccacc

SEQ ID NO: 3960629 - RNA, 16 nt, Human herpesvirus 2
gccccgccgggucacc

SEQ ID NO: 3960630 - RNA, 20 nt, Human herpesvirus 2
gccccgccucaccuccgucu

SEQ ID NO: 3960631 - RNA, 14 nt, Human herpesvirus 2
gccccgcgugcagc

SEQ ID NO: 3960632 - RNA, 17 nt, Human herpesvirus 2
gccccgcgugcagcgcg

SEQ ID NO: 3960633 - RNA, 17 nt, Human herpesvirus 2
gccccucgcuccccgcg

SEQ ID NO: 3960634 - RNA, 17 nt, Human herpesvirus 2
gcccgaaccccgcggcc

SEQ ID NO: 3960635 - RNA, 17 nt, Human herpesvirus 2
gcccgaaggaagccgcc

SEQ ID NO: 3960636 - RNA, 21 nt, Human herpesvirus 2
gcccgacggggagggacaagg

SEQ ID NO: 3960637 - RNA, 19 nt, Human herpesvirus 2
gcccgcagcuucgggggcu

SEQ ID NO: 3960638 - RNA, 14 nt, Human herpesvirus 2
gcccgccagggccg

SEQ ID NO: 3960639 - RNA, 22 nt, Human herpesvirus 2
gcccgccaugcgcggggggggc

SEQ ID NO: 3960640 - RNA, 17 nt, Human herpesvirus 2
gcccgcccccgacgggc

SEQ ID NO: 3960641 - RNA, 15 nt, Human herpesvirus 2
gcccgcgaccccccg

SEQ ID NO: 3960642 - RNA, 20 nt, Human herpesvirus 2
gcccgcgccgcgacggcccc

SEQ ID NO: 3960643 - RNA, 23 nt, Human herpesvirus 2
gcccggaccccucaucgccgcgc

SEQ ID NO: 3960644 - RNA, 19 nt, Human herpesvirus 2
gcccggcccauaaacaggc

SEQ ID NO: 3960645 - RNA, 19 nt, Human herpesvirus 2
gcccggcgccgccccgccg

SEQ ID NO: 3960646 - RNA, 21 nt, Human herpesvirus 2
gcccgggugaccacgcgcacg

SEQ ID NO: 3960647 - RNA, 15 nt, Human herpesvirus 2
gccgacaacugccug

SEQ ID NO: 3960648 - RNA, 16 nt, Human herpesvirus 2
gccgacggcggcgcac

SEQ ID NO: 3960649 - RNA, 13 nt, Human herpesvirus 2
gccgacuuccgug

SEQ ID NO: 3960650 - RNA, 21 nt, Human herpesvirus 2
gccgacuuccgugccccugga

SEQ ID NO: 3960651 - RNA, 18 nt, Human herpesvirus 2
gccgagcgucaggcccgc

SEQ ID NO: 3960652 - RNA, 22 nt, Human herpesvirus 2
gccgcauauacugcugggccau

SEQ ID NO: 3960653 - RNA, 14 nt, Human herpesvirus 2
gccgccauccccgc

SEQ ID NO: 3960654 - RNA, 15 nt, Human herpesvirus 2
gccgccauccccgcg

SEQ ID NO: 3960655 - RNA, 18 nt, Human herpesvirus 2
gccgcccaagcggcccga

SEQ ID NO: 3960656 - RNA, 20 nt, Human herpesvirus 2
gccgcccccgccggcccgcg

SEQ ID NO: 3960657 - RNA, 22 nt, Human herpesvirus 2
gccgccgagcgucaggcccgcc

SEQ ID NO: 3960658 - RNA, 16 nt, Human herpesvirus 2
gccgccgcgcgggccc

SEQ ID NO: 3960659 - RNA, 22 nt, Human herpesvirus 2
gccgcgacaagacccggcggcg

SEQ ID NO: 3960660 - RNA, 13 nt, Human herpesvirus 2
gccgcgacccacg

SEQ ID NO: 3960661 - RNA, 17 nt, Human herpesvirus 2
gccgcgccgcugcccga

SEQ ID NO: 3960662 - RNA, 14 nt, Human herpesvirus 2
gccgcggccauccu

SEQ ID NO: 3960663 - RNA, 13 nt, Human herpesvirus 2
gccgcggccccgc

SEQ ID NO: 3960664 - RNA, 21 nt, Human herpesvirus 2
gccgcucgcugcagggccugg

SEQ ID NO: 3960665 - RNA, 20 nt, Human herpesvirus 2
gccgcugugccagguggccc

SEQ ID NO: 3960666 - RNA, 13 nt, Human herpesvirus 2
gccgcuguggccc

SEQ ID NO: 3960667 - RNA, 17 nt, Human herpesvirus 2
gccgcuguggcccuggc

SEQ ID NO: 3960668 - RNA, 13 nt, Human herpesvirus 2
gccggaccgggau

SEQ ID NO: 3960669 - RNA, 22 nt, Human herpesvirus 2
gccggcggagccccggagcucc

SEQ ID NO: 3960670 - RNA, 20 nt, Human herpesvirus 2
gccggggagggcagggccgc

SEQ ID NO: 3960671 - RNA, 17 nt, Human herpesvirus 2
gccggggcggccccgau

SEQ ID NO: 3960672 - RNA, 21 nt, Human herpesvirus 2
gccgguagugcaggugggccg

SEQ ID NO: 3960673 - RNA, 16 nt, Human herpesvirus 2
gccguacgucugcccg

SEQ ID NO: 3960674 - RNA, 17 nt, Human herpesvirus 2
gccgucgcacgcgcgca

SEQ ID NO: 3960675 - RNA, 15 nt, Human herpesvirus 2
gccgucuuggccgug

SEQ ID NO: 3960676 - RNA, 18 nt, Human herpesvirus 2
gccguggggccccagggc

SEQ ID NO: 3960677 - RNA, 22 nt, Human herpesvirus 2
gccuagccgugggccugugggg

SEQ ID NO: 3960678 - RNA, 17 nt, Human herpesvirus 2
gccucauccggcccgcc

SEQ ID NO: 3960679 - RNA, 22 nt, Human herpesvirus 2
gccucccgcaagagccugccgu

SEQ ID NO: 3960680 - RNA, 21 nt, Human herpesvirus 2
gccuccggaagagagcgcccc

SEQ ID NO: 3960681 - RNA, 23 nt, Human herpesvirus 2
gccucggccggcggagccccgga

SEQ ID NO: 3960682 - RNA, 13 nt, Human herpesvirus 2
gccugcacgagcg

SEQ ID NO: 3960683 - RNA, 14 nt, Human herpesvirus 2
gccugcccccgccu

SEQ ID NO: 3960684 - RNA, 16 nt, Human herpesvirus 2
gccugcgccccgacgg

SEQ ID NO: 3960685 - RNA, 20 nt, Human herpesvirus 2
gccugugggucugcgccacc

SEQ ID NO: 3960686 - RNA, 14 nt, Human herpesvirus 2
gccugugucagcuc

SEQ ID NO: 3960687 - RNA, 17 nt, Human herpesvirus 2
gccuguucggggcgugu

SEQ ID NO: 3960688 - RNA, 20 nt, Human herpesvirus 2
gccuugcggaugugggccgu

SEQ ID NO: 3960689 - RNA, 19 nt, Human herpesvirus 2
gcgaaccgguagccggggc

SEQ ID NO: 3960690 - RNA, 22 nt, Human herpesvirus 2
gcgaccccgccccccgacgcca

SEQ ID NO: 3960691 - RNA, 20 nt, Human herpesvirus 2
gcgaccgggcggcgcgcccc

SEQ ID NO: 3960692 - RNA, 18 nt, Human herpesvirus 2
gcgacgccgccccugccg

SEQ ID NO: 3960693 - RNA, 11 nt, Human herpesvirus 2
gcgagccaggc

SEQ ID NO: 3960694 - RNA, 12 nt, Human herpesvirus 2
gcgagcgacagc

SEQ ID NO: 3960695 - RNA, 18 nt, Human herpesvirus 2
gcgagcgguuggaggcgc

SEQ ID NO: 3960696 - RNA, 16 nt, Human herpesvirus 2
gcgaggccgcucuccg

SEQ ID NO: 3960697 - RNA, 17 nt, Human herpesvirus 2
gcgagggcccggcgccg

SEQ ID NO: 3960698 - RNA, 20 nt, Human herpesvirus 2
gcgaugacggcaauaaaaga

SEQ ID NO: 3960699 - RNA, 18 nt, Human herpesvirus 2
gcgcacacgccaucgacc

SEQ ID NO: 3960700 - RNA, 16 nt, Human herpesvirus 2
gcgcagcgcaucgccg

SEQ ID NO: 3960701 - RNA, 20 nt, Human herpesvirus 2
gcgcagcgcaucgccgccga

SEQ ID NO: 3960702 - RNA, 16 nt, Human herpesvirus 2
gcgcaggcuggagcuc

SEQ ID NO: 3960703 - RNA, 12 nt, Human herpesvirus 2
gcgcauaaaggu

SEQ ID NO: 3960704 - RNA, 17 nt, Human herpesvirus 2
gcgccaacgcgggcguc

SEQ ID NO: 3960705 - RNA, 18 nt, Human herpesvirus 2
ucggggggguacggcgag

SEQ ID NO: 3960706 - RNA, 15 nt, Human herpesvirus 2
ucguccucacggcca

SEQ ID NO: 3960707 - RNA, 13 nt, Human herpesvirus 2
ucguggcccuccu

SEQ ID NO: 3960708 - RNA, 14 nt, Human herpesvirus 2
ucguguucgugggg

SEQ ID NO: 3960709 - RNA, 19 nt, Human herpesvirus 2
ucucaaacaaaaacacaag

SEQ ID NO: 3960710 - RNA, 17 nt, Human herpesvirus 2
ucuccauuccuguuucc

SEQ ID NO: 3960711 - RNA, 11 nt, Human herpesvirus 2
ucucccacacg

SEQ ID NO: 3960712 - RNA, 21 nt, Human herpesvirus 2
ucucccucuuucccucccucg

SEQ ID NO: 3960713 - RNA, 13 nt, Human herpesvirus 2
ucucgaaggaggg

SEQ ID NO: 3960714 - RNA, 15 nt, Human herpesvirus 2
ucugcuugccccucc

SEQ ID NO: 3960715 - RNA, 18 nt, Human herpesvirus 2
ucuggcguccccaggcga

SEQ ID NO: 3960716 - RNA, 16 nt, Human herpesvirus 2
ucugugcggcccucuc

SEQ ID NO: 3960717 - RNA, 13 nt, Human herpesvirus 2
ucuuccccagcuu

SEQ ID NO: 3960718 - RNA, 12 nt, Human herpesvirus 2
ucuuuuugccuc

SEQ ID NO: 3960719 - RNA, 16 nt, Human herpesvirus 2
ugaacucucccggcuc

SEQ ID NO: 3960720 - RNA, 14 nt, Human herpesvirus 2
ugaccggcgccgau

SEQ ID NO: 3960721 - RNA, 13 nt, Human herpesvirus 2
ugacgacggcccc

SEQ ID NO: 3960722 - RNA, 14 nt, Human herpesvirus 2
ugcacgaaaaagag

SEQ ID NO: 3960723 - RNA, 20 nt, Human herpesvirus 2
ugcacgccaucgcucccagg

SEQ ID NO: 3960724 - RNA, 20 nt, Human herpesvirus 2
ugcacugccccccuccuggg

SEQ ID NO: 3960725 - RNA, 17 nt, Human herpesvirus 2
ugcaguaacccaguucc

SEQ ID NO: 3960726 - RNA, 20 nt, Human herpesvirus 2
ugcaucccagacgcccgcga

SEQ ID NO: 3960727 - RNA, 15 nt, Human herpesvirus 2
ugccacacgugggcg

SEQ ID NO: 3960728 - RNA, 18 nt, Human herpesvirus 2
ugccagguggcccuuccg

SEQ ID NO: 3960729 - RNA, 14 nt, Human herpesvirus 2
ugccaguggagcca

SEQ ID NO: 3960730 - RNA, 12 nt, Human herpesvirus 2
ugccccgaccga

SEQ ID NO: 3960731 - RNA, 15 nt, Human herpesvirus 2
ugccccucccccggc

SEQ ID NO: 3960732 - RNA, 13 nt, Human herpesvirus 2
ugcgagaucuucc

SEQ ID NO: 3960733 - RNA, 19 nt, Human herpesvirus 2
ugcgcacgacagaccuccc

SEQ ID NO: 3960734 - RNA, 21 nt, Human herpesvirus 2
ugcgcacgacagaccuccccg

SEQ ID NO: 3960735 - RNA, 16 nt, Human herpesvirus 2
ugcgccguccucgugg

SEQ ID NO: 3960736 - RNA, 21 nt, Human herpesvirus 2
ugcgggaugugucgcggggac

SEQ ID NO: 3960737 - RNA, 11 nt, Human herpesvirus 2
ugcggggaccg

SEQ ID NO: 3960738 - RNA, 18 nt, Human herpesvirus 2
ugcugcugagcccugccc

SEQ ID NO: 3960739 - RNA, 18 nt, Human herpesvirus 2
ugcugggcgcgagccagg

SEQ ID NO: 3960740 - RNA, 15 nt, Human herpesvirus 2
uggacgaucccgggc

SEQ ID NO: 3960741 - RNA, 23 nt, Human herpesvirus 2
uggacgcagcggcguccacgccc

SEQ ID NO: 3960742 - RNA, 15 nt, Human herpesvirus 2
uggacgcgccucccg

SEQ ID NO: 3960743 - RNA, 13 nt, Human herpesvirus 2
uggacugggccgc

SEQ ID NO: 3960744 - RNA, 17 nt, Human herpesvirus 2
uggagaagggaaaggaa

SEQ ID NO: 3960745 - RNA, 19 nt, Human herpesvirus 2
uggagaagggaaaggaaca

SEQ ID NO: 3960746 - RNA, 19 nt, Human herpesvirus 2
uggauaacagcuacccgca

SEQ ID NO: 3960747 - RNA, 17 nt, Human herpesvirus 2
uggcaccguaucagcac

SEQ ID NO: 3960748 - RNA, 15 nt, Human herpesvirus 2
uggcccuccacgccg

SEQ ID NO: 3960749 - RNA, 20 nt, Human herpesvirus 2
uggccggguuuuuggcccug

SEQ ID NO: 3960750 - RNA, 20 nt, Human herpesvirus 2
uggcgaguccugggugggug

SEQ ID NO: 3960751 - RNA, 13 nt, Human herpesvirus 2
uggcgccucugcg

SEQ ID NO: 3960752 - RNA, 22 nt, Human herpesvirus 2
uggcgcgucguucggggggacg

SEQ ID NO: 3960753 - RNA, 19 nt, Human herpesvirus 2
uggcgucggcggccccggc

SEQ ID NO: 3960754 - RNA, 16 nt, Human herpesvirus 2
uggcgugugucucuga

SEQ ID NO: 3960755 - RNA, 14 nt, Human herpesvirus 2
uggcugucgugugu

SEQ ID NO: 3960756 - RNA, 20 nt, Human herpesvirus 2
ugggccgacgugccggggaa

SEQ ID NO: 3960757 - RNA, 16 nt, Human herpesvirus 2
ugggcggcccccggcc

SEQ ID NO: 3960758 - RNA, 20 nt, Human herpesvirus 2
ugggcggggggguucgggcg

SEQ ID NO: 3960759 - RNA, 22 nt, Human herpesvirus 2
ugggcgugucguugggcggccc

SEQ ID NO: 3960760 - RNA, 17 nt, Human herpesvirus 2
ugggugcucggggacag

SEQ ID NO: 3960761 - RNA, 16 nt, Human herpesvirus 2
uggucgugggggcgcu

SEQ ID NO: 3960762 - RNA, 21 nt, Human herpesvirus 2
uggugacggaaaaccugggcg

SEQ ID NO: 3960763 - RNA, 14 nt, Human herpesvirus 2
uggugguggggugu

SEQ ID NO: 3960764 - RNA, 13 nt, Human herpesvirus 2
uguaccucugggc

SEQ ID NO: 3960765 - RNA, 17 nt, Human herpesvirus 2
ugucgaaucugggaaga

SEQ ID NO: 3960766 - RNA, 16 nt, Human herpesvirus 2
ugucugucugcccggc

SEQ ID NO: 3960767 - RNA, 21 nt, Human herpesvirus 2
ugugcgggaggggcuuggccu

SEQ ID NO: 3960768 - RNA, 15 nt, Human herpesvirus 2
uguggcuggaggcaa

SEQ ID NO: 3960769 - RNA, 15 nt, Human herpesvirus 2
ugugggacugggggc

SEQ ID NO: 3960770 - RNA, 12 nt, Human herpesvirus 2
uguucuccugga

SEQ ID NO: 3960771 - RNA, 11 nt, Human herpesvirus 2
uguugggaagg

SEQ ID NO: 3960772 - RNA, 13 nt, Human herpesvirus 2
uguugucugucug

SEQ ID NO: 3960773 - RNA, 15 nt, Human herpesvirus 2
uguuguuuucccggg

SEQ ID NO: 3960774 - RNA, 19 nt, Human herpesvirus 2
uguuuuuacgggccccgga

SEQ ID NO: 3960775 - RNA, 19 nt, Human herpesvirus 2
uuaagcggaacccgcgggc

SEQ ID NO: 3960776 - RNA, 13 nt, Human herpesvirus 2
uuagaaacuuuua

SEQ ID NO: 3960777 - RNA, 17 nt, Human herpesvirus 2
uuagccaccgcgcccac

SEQ ID NO: 3960778 - RNA, 13 nt, Human herpesvirus 2
uucagggaaacag

SEQ ID NO: 3960779 - RNA, 16 nt, Human herpesvirus 2
uuccccccccccuccc

SEQ ID NO: 3960780 - RNA, 13 nt, Human herpesvirus 2
uucccucccucgc

SEQ ID NO: 3960781 - RNA, 22 nt, Human herpesvirus 2
uucccuccgaguccguaugcaa

SEQ ID NO: 3960782 - RNA, 14 nt, Human herpesvirus 2
uuccgugccccugg

SEQ ID NO: 3960783 - RNA, 20 nt, Human herpesvirus 2
uucgccgacgccuucccugu

SEQ ID NO: 3960784 - RNA, 18 nt, Human herpesvirus 2
uucuggcggcccuggagc

SEQ ID NO: 3960785 - RNA, 17 nt, Human herpesvirus 2
uucuggucauggcccuu

SEQ ID NO: 3960786 - RNA, 17 nt, Human herpesvirus 2
uucuucgccgcccucgc

SEQ ID NO: 3960787 - RNA, 14 nt, Human herpesvirus 2
uugcccccccgggg

SEQ ID NO: 3960788 - RNA, 13 nt, Human herpesvirus 2
uuggggaaaucua

SEQ ID NO: 3960789 - RNA, 17 nt, Human herpesvirus 2
uugggucugcgucgucc

SEQ ID NO: 3960790 - RNA, 19 nt, Human herpesvirus 2
uugguuguguuuuguggga

SEQ ID NO: 3960791 - RNA, 21 nt, Human herpesvirus 2
uuguuauggacuuucuggccu

SEQ ID NO: 3960792 - RNA, 13 nt, Human herpesvirus 2
uuguuguuggccu

SEQ ID NO: 3960793 - RNA, 13 nt, Human herpesvirus 2
uuuaagcgcugcg

SEQ ID NO: 3960794 - RNA, 19 nt, Human herpesvirus 2
uuuacgccuuuccuccccu

SEQ ID NO: 3960795 - RNA, 21 nt, Human herpesvirus 2
uuucggaaagccggccccggu

SEQ ID NO: 3960796 - RNA, 18 nt, Human herpesvirus 2
uuucggcacccguccucg

SEQ ID NO: 3960797 - RNA, 12 nt, Human herpesvirus 2
uuucucuucccc

SEQ ID NO: 3960798 - RNA, 20 nt, Human herpesvirus 2
uuucugggcccgccgaccgc

SEQ ID NO: 3960799 - RNA, 22 nt, Human herpesvirus 2
uuuugccucccaacgcccccuu

SEQ ID NO: 3960800 - RNA, 14 nt, Human herpesvirus 2
uuuuguuuguuugu

SEQ ID NO: 3960801 - RNA, 20 nt, Human herpesvirus 2
uuuuuggcaccuugccgccc

SEQ ID NO: 3960802 - RNA, 19 nt, Human herpesvirus 2
caacgccgggcgcgcggcg

SEQ ID NO: 3960803 - RNA, 16 nt, Human herpesvirus 2
caagcuaagcgagaag

SEQ ID NO: 3960804 - RNA, 17 nt, Human herpesvirus 2
caauaaaccugugacgu

SEQ ID NO: 3960805 - RNA, 14 nt, Human herpesvirus 2
caaucgcccgaggc

SEQ ID NO: 3960806 - RNA, 18 nt, Human herpesvirus 2
caauucgucaccuggcuc

SEQ ID NO: 3960807 - RNA, 20 nt, Human herpesvirus 2
cacaagacacacacacaggc

SEQ ID NO: 3960808 - RNA, 14 nt, Human herpesvirus 2
cacacccccugucc

SEQ ID NO: 3960809 - RNA, 17 nt, Human herpesvirus 2
cacaggcccaccaccau

SEQ ID NO: 3960810 - RNA, 17 nt, Human herpesvirus 2
cacagguggugcacgug

SEQ ID NO: 3960811 - RNA, 16 nt, Human herpesvirus 2
caccaaccuggcacag

SEQ ID NO: 3960812 - RNA, 23 nt, Human herpesvirus 2
caccagacggcgggaccccgacg

SEQ ID NO: 3960813 - RNA, 21 nt, Human herpesvirus 2
cacccaccccccccccaacuc

SEQ ID NO: 3960814 - RNA, 12 nt, Human herpesvirus 2
caccccacccua

SEQ ID NO: 3960815 - RNA, 16 nt, Human herpesvirus 2
cacccccccacuuucc

SEQ ID NO: 3960816 - RNA, 12 nt, Human herpesvirus 2
caccccccuucu

SEQ ID NO: 3960817 - RNA, 21 nt, Human herpesvirus 2
cacccuaaggaugcccgccag

SEQ ID NO: 3960818 - RNA, 21 nt, Human herpesvirus 2
caccgagccgcugugccaggu

SEQ ID NO: 3960819 - RNA, 13 nt, Human herpesvirus 2
caccgcacccggg

SEQ ID NO: 3960820 - RNA, 15 nt, Human herpesvirus 2
caccgccccagcacc

SEQ ID NO: 3960821 - RNA, 13 nt, Human herpesvirus 2
caccgggcugggg

SEQ ID NO: 3960822 - RNA, 17 nt, Human herpesvirus 2
caccgguccuucgcggg

SEQ ID NO: 3960823 - RNA, 18 nt, Human herpesvirus 2
cacgaaaaagagcucggg

SEQ ID NO: 3960824 - RNA, 14 nt, Human herpesvirus 2
cacgacccgccucg

SEQ ID NO: 3960825 - RNA, 19 nt, Human herpesvirus 2
cacgaggccguaaacugcu

SEQ ID NO: 3960826 - RNA, 22 nt, Human herpesvirus 2
cacgcaggccgcccccagcagg

SEQ ID NO: 3960827 - RNA, 13 nt, Human herpesvirus 2
cacggacccgccc

SEQ ID NO: 3960828 - RNA, 18 nt, Human herpesvirus 2
cacggcaaccccaccuuc

SEQ ID NO: 3960829 - RNA, 19 nt, Human herpesvirus 2
cacggcaaccccagggcgu

SEQ ID NO: 3960830 - RNA, 21 nt, Human herpesvirus 2
cacggcacaccggcggggcgg

SEQ ID NO: 3960831 - RNA, 23 nt, Human herpesvirus 2
cacggcacccccggcgauucccu

SEQ ID NO: 3960832 - RNA, 13 nt, Human herpesvirus 2
cacgggcgucccc

SEQ ID NO: 3960833 - RNA, 23 nt, Human herpesvirus 2
cacguccguauguuaauugcaau

SEQ ID NO: 3960834 - RNA, 19 nt, Human herpesvirus 2
cacgugggcggcgaaccgg

SEQ ID NO: 3960835 - RNA, 18 nt, Human herpesvirus 2
cacguucgccccgcagcc

SEQ ID NO: 3960836 - RNA, 21 nt, Human herpesvirus 2
cacucgaagaaguuggugugu

SEQ ID NO: 3960837 - RNA, 19 nt, Human herpesvirus 2
cacucguggaugccggggc

SEQ ID NO: 3960838 - RNA, 20 nt, Human herpesvirus 2
cacuuccuauaaacucuccc

SEQ ID NO: 3960839 - RNA, 22 nt, Human herpesvirus 2
cagagacccugccccccggcgc

SEQ ID NO: 3960840 - RNA, 21 nt, Human herpesvirus 2
cagaggcuggagcgcuggugg

SEQ ID NO: 3960841 - RNA, 12 nt, Human herpesvirus 2
cagaugcugccc

SEQ ID NO: 3960842 - RNA, 18 nt, Human herpesvirus 2
cagcacggaggaacuggg

SEQ ID NO: 3960843 - RNA, 16 nt, Human herpesvirus 2
cagcacggccggguga

SEQ ID NO: 3960844 - RNA, 14 nt, Human herpesvirus 2
cagccccuggggcu

SEQ ID NO: 3960845 - RNA, 13 nt, Human herpesvirus 2
cagccgcgccgcu

SEQ ID NO: 3960846 - RNA, 14 nt, Human herpesvirus 2
cagccgcgccgcug

SEQ ID NO: 3960847 - RNA, 15 nt, Human herpesvirus 2
cagcgcacccuggcc

SEQ ID NO: 3960848 - RNA, 17 nt, Human herpesvirus 2
cagcgccggguggcgcc

SEQ ID NO: 3960849 - RNA, 18 nt, Human herpesvirus 2
cagcgcgaugaggggcac

SEQ ID NO: 3960850 - RNA, 21 nt, Human herpesvirus 2
cagcguaacgcacccccggac

SEQ ID NO: 3960851 - RNA, 21 nt, Human herpesvirus 2
cagcguccggcuggcggcgcg

SEQ ID NO: 3960852 - RNA, 17 nt, Human herpesvirus 2
cagcucgggggccagga

SEQ ID NO: 3960853 - RNA, 14 nt, Human herpesvirus 2
cagcugcuggccaa

SEQ ID NO: 3960854 - RNA, 23 nt, Human herpesvirus 2
cagcugguucauacccaauggcu

SEQ ID NO: 3960855 - RNA, 21 nt, Human herpesvirus 2
cagcuuucccuccacccgccc

SEQ ID NO: 3960856 - RNA, 20 nt, Human herpesvirus 2
caggaggggggcagugcagu

SEQ ID NO: 3960857 - RNA, 14 nt, Human herpesvirus 2
caggcccaccacca

SEQ ID NO: 3960858 - RNA, 22 nt, Human herpesvirus 2
cagggccuggcgauccugggcc

SEQ ID NO: 3960859 - RNA, 20 nt, Human herpesvirus 2
cagggcuucguggaagagga

SEQ ID NO: 3960860 - RNA, 23 nt, Human herpesvirus 2
caggggcagcucgcccccgugcc

SEQ ID NO: 3960861 - RNA, 17 nt, Human herpesvirus 2
cagggggcggcgccggc

SEQ ID NO: 3960862 - RNA, 15 nt, Human herpesvirus 2
cagugccccgacauc

SEQ ID NO: 3960863 - RNA, 17 nt, Human herpesvirus 2
caguguuugggaaaucu

SEQ ID NO: 3960864 - RNA, 15 nt, Human herpesvirus 2
cauauacugcugggc

SEQ ID NO: 3960865 - RNA, 12 nt, Human herpesvirus 2
cauaugcccugg

SEQ ID NO: 3960866 - RNA, 16 nt, Human herpesvirus 2
caucaucgucccgguu

SEQ ID NO: 3960867 - RNA, 14 nt, Human herpesvirus 2
cauccuuuggcccg

SEQ ID NO: 3960868 - RNA, 17 nt, Human herpesvirus 2
caucgccaacucugucu

SEQ ID NO: 3960869 - RNA, 20 nt, Human herpesvirus 2
caucgucgccgacuccagga

SEQ ID NO: 3960870 - RNA, 15 nt, Human herpesvirus 2
caugacaacgacgcc

SEQ ID NO: 3960871 - RNA, 15 nt, Human herpesvirus 2
caugcaacgccgggc

SEQ ID NO: 3960872 - RNA, 22 nt, Human herpesvirus 2
gaccaccgcggacagccagggc

SEQ ID NO: 3960873 - RNA, 16 nt, Human herpesvirus 2
gaccaccggccgaggc

SEQ ID NO: 3960874 - RNA, 12 nt, Human herpesvirus 2
gaccaccgggcc

SEQ ID NO: 3960875 - RNA, 15 nt, Human herpesvirus 2
gaccacgugcacagc

SEQ ID NO: 3960876 - RNA, 16 nt, Human herpesvirus 2
gaccccgaccccgagc

SEQ ID NO: 3960877 - RNA, 12 nt, Human herpesvirus 2
gaccccgcgugc

SEQ ID NO: 3960878 - RNA, 18 nt, Human herpesvirus 2
gacccuguggcgggcgcu

SEQ ID NO: 3960879 - RNA, 14 nt, Human herpesvirus 2
gaccgacgggcccc

SEQ ID NO: 3960880 - RNA, 13 nt, Human herpesvirus 2
gaccgaucuggag

SEQ ID NO: 3960881 - RNA, 23 nt, Human herpesvirus 2
gaccggcgccgaucgcagcgucc

SEQ ID NO: 3960882 - RNA, 15 nt, Human herpesvirus 2
gaccggcggggcccc

SEQ ID NO: 3960883 - RNA, 13 nt, Human herpesvirus 2
gaccuuccccucc

SEQ ID NO: 3960884 - RNA, 12 nt, Human herpesvirus 2
gacgaaaacgua

SEQ ID NO: 3960885 - RNA, 17 nt, Human herpesvirus 2
gacgaacuggggcgccg

SEQ ID NO: 3960886 - RNA, 22 nt, Human herpesvirus 2
gacgaugcauguucggcgucgu

SEQ ID NO: 3960887 - RNA, 12 nt, Human herpesvirus 2
gacgcagcggcg

SEQ ID NO: 3960888 - RNA, 20 nt, Human herpesvirus 2
gacgcccggcccauaaacag

SEQ ID NO: 3960889 - RNA, 23 nt, Human herpesvirus 2
gacgcgcgcgcccccgacccggg

SEQ ID NO: 3960890 - RNA, 23 nt, Human herpesvirus 2
gacgcgcuaguacccagaggcug

SEQ ID NO: 3960891 - RNA, 14 nt, Human herpesvirus 2
gacgcggccagaaa

SEQ ID NO: 3960892 - RNA, 18 nt, Human herpesvirus 2
gacgcggggucgagcgcg

SEQ ID NO: 3960893 - RNA, 23 nt, Human herpesvirus 2
gacgcggggucgagcgcgccagg

SEQ ID NO: 3960894 - RNA, 22 nt, Human herpesvirus 2
gacgcgguuauccugcggcagg

SEQ ID NO: 3960895 - RNA, 21 nt, Human herpesvirus 2
gacgcuguuguuucugggccc

SEQ ID NO: 3960896 - RNA, 16 nt, Human herpesvirus 2
gacggcaccgccgggc

SEQ ID NO: 3960897 - RNA, 20 nt, Human herpesvirus 2
gacggccccucgcuccccgc

SEQ ID NO: 3960898 - RNA, 13 nt, Human herpesvirus 2
gacggcgggaccc

SEQ ID NO: 3960899 - RNA, 14 nt, Human herpesvirus 2
gacggggaggagac

SEQ ID NO: 3960900 - RNA, 19 nt, Human herpesvirus 2
gacgugcgaugacgugggu

SEQ ID NO: 3960901 - RNA, 22 nt, Human herpesvirus 2
gacuccccucuacccccaccca

SEQ ID NO: 3960902 - RNA, 14 nt, Human herpesvirus 2
gacuccgccccggc

SEQ ID NO: 3960903 - RNA, 21 nt, Human herpesvirus 2
gacucggugcguuccagcgcg

SEQ ID NO: 3960904 - RNA, 11 nt, Human herpesvirus 2
gacuggccgug

SEQ ID NO: 3960905 - RNA, 22 nt, Human herpesvirus 2
gacuugacggucgccacucucc

SEQ ID NO: 3960906 - RNA, 14 nt, Human herpesvirus 2
gacuuucuggccuu

SEQ ID NO: 3960907 - RNA, 17 nt, Human herpesvirus 2
gagacccugccccccgg

SEQ ID NO: 3960908 - RNA, 21 nt, Human herpesvirus 2
gagacccugccccccggcgcg

SEQ ID NO: 3960909 - RNA, 18 nt, Human herpesvirus 2
gagagaugacacgacagg

SEQ ID NO: 3960910 - RNA, 15 nt, Human herpesvirus 2
gagagccggaccggg

SEQ ID NO: 3960911 - RNA, 20 nt, Human herpesvirus 2
gagaggucaauagauuuccc

SEQ ID NO: 3960912 - RNA, 20 nt, Human herpesvirus 2
gagaguuucuucgcgggcag

SEQ ID NO: 3960913 - RNA, 14 nt, Human herpesvirus 2
gagcaggacagccg

SEQ ID NO: 3960914 - RNA, 11 nt, Human herpesvirus 2
gagccccgcgu

SEQ ID NO: 3960915 - RNA, 20 nt, Human herpesvirus 2
gagccccggguuccccgaga

SEQ ID NO: 3960916 - RNA, 19 nt, Human herpesvirus 2
gagcccugccccgcccccu

SEQ ID NO: 3960917 - RNA, 15 nt, Human herpesvirus 2
gagccgcggccccgc

SEQ ID NO: 3960918 - RNA, 13 nt, Human herpesvirus 2
gagcgcgccagga

SEQ ID NO: 3960919 - RNA, 21 nt, Human herpesvirus 2
gagcucggcuugauggagccu

SEQ ID NO: 3960920 - RNA, 18 nt, Human herpesvirus 2
gagcugggcuuguguaua

SEQ ID NO: 3960921 - RNA, 16 nt, Human herpesvirus 2
gaggaggaggaggggg

SEQ ID NO: 3960922 - RNA, 13 nt, Human herpesvirus 2
gaggcccccggcc

SEQ ID NO: 3960923 - RNA, 21 nt, Human herpesvirus 2
gaggccuggcguuugggggcg

SEQ ID NO: 3960924 - RNA, 14 nt, Human herpesvirus 2
gaggcgaccccgcc

SEQ ID NO: 3960925 - RNA, 18 nt, Human herpesvirus 2
gaggcgccucgggggcag

SEQ ID NO: 3960926 - RNA, 17 nt, Human herpesvirus 2
gaggcuguccgccgggc

SEQ ID NO: 3960927 - RNA, 16 nt, Human herpesvirus 2
gagggcccggcgccgc

SEQ ID NO: 3960928 - RNA, 18 nt, Human herpesvirus 2
gagggcccggcgccgccc

SEQ ID NO: 3960929 - RNA, 11 nt, Human herpesvirus 2
gaggggggcag

SEQ ID NO: 3960930 - RNA, 18 nt, Human herpesvirus 2
gaggggggcagugcagua

SEQ ID NO: 3960931 - RNA, 12 nt, Human herpesvirus 2
gagggggggcgg

SEQ ID NO: 3960932 - RNA, 14 nt, Human herpesvirus 2
gaggggggggugag

SEQ ID NO: 3960933 - RNA, 22 nt, Human herpesvirus 2
gaggugcgccaggucagcgauc

SEQ ID NO: 3960934 - RNA, 21 nt, Human herpesvirus 2
gaguaugaccgucggugccag

SEQ ID NO: 3960935 - RNA, 18 nt, Human herpesvirus 2
gaguucaauagauuuccc

SEQ ID NO: 3960936 - RNA, 20 nt, Human herpesvirus 2
gaguucaauagauuucccaa

SEQ ID NO: 3960937 - RNA, 18 nt, Human herpesvirus 2
gauccugggccugugggu

SEQ ID NO: 3960938 - RNA, 18 nt, Human herpesvirus 2
gaucgcagcguccggcug

SEQ ID NO: 3960939 - RNA, 21 nt, Human herpesvirus 2
gaugcagcucccccgcgcagg

SEQ ID NO: 3960940 - RNA, 15 nt, Human herpesvirus 2
gaugcggggcggggu

SEQ ID NO: 3960941 - RNA, 10 nt, Human herpesvirus 2
gauggggaga

SEQ ID NO: 3960942 - RNA, 22 nt, Human herpesvirus 2
gauguugucgggggggauccag

SEQ ID NO: 3960943 - RNA, 18 nt, Human herpesvirus 2
gauucucaccuggggcuc

SEQ ID NO: 3960944 - RNA, 17 nt, Human herpesvirus 2
gcaaacgguaagcagcg

SEQ ID NO: 3960945 - RNA, 15 nt, Human herpesvirus 2
gcaacacccggcgcc

SEQ ID NO: 3960946 - RNA, 20 nt, Human herpesvirus 2
gcaaccaggcgcugcugcgc

SEQ ID NO: 3960947 - RNA, 22 nt, Human herpesvirus 2
gcaaccccaccuucgccuccgc

SEQ ID NO: 3960948 - RNA, 20 nt, Human herpesvirus 2
gcaacccgacggcggggccc

SEQ ID NO: 3960949 - RNA, 15 nt, Human herpesvirus 2
gcaaccuccggggcu

SEQ ID NO: 3960950 - RNA, 18 nt, Human herpesvirus 2
gcaacuuuuaaugggccg

SEQ ID NO: 3960951 - RNA, 21 nt, Human herpesvirus 2
gcaagagccugccgucgcacg

SEQ ID NO: 3960952 - RNA, 22 nt, Human herpesvirus 2
gcaagcgggcgggguggggagg

SEQ ID NO: 3960953 - RNA, 12 nt, Human herpesvirus 2
gcaagugcagua

SEQ ID NO: 3960954 - RNA, 19 nt, Human herpesvirus 2
gcacaaacgugcucugcca

SEQ ID NO: 3960955 - RNA, 20 nt, Human herpesvirus 2
gcacaagacacacacacagg

SEQ ID NO: 3960956 - RNA, 11 nt, Human herpesvirus 2
gcacacaugau

SEQ ID NO: 3960957 - RNA, 21 nt, Human herpesvirus 2
gcaccacguguccccagggag

SEQ ID NO: 3960958 - RNA, 11 nt, Human herpesvirus 2
gcaccccaccg

SEQ ID NO: 3960959 - RNA, 20 nt, Human herpesvirus 2
gcaccgcgcggaccggcccc

SEQ ID NO: 3960960 - RNA, 13 nt, Human herpesvirus 2
agagcccagggaa

SEQ ID NO: 3960961 - RNA, 14 nt, Human herpesvirus 2
agagccgauccggc

SEQ ID NO: 3960962 - RNA, 15 nt, Human herpesvirus 2
agagcgccgucgggc

SEQ ID NO: 3960963 - RNA, 11 nt, Human herpesvirus 2
agaggcugucc

SEQ ID NO: 3960964 - RNA, 20 nt, Human herpesvirus 2
agaguucaauagauuuccca

SEQ ID NO: 3960965 - RNA, 14 nt, Human herpesvirus 2
agccaaaccagccc

SEQ ID NO: 3960966 - RNA, 22 nt, Human herpesvirus 2
agccacccugggucgggagcag

SEQ ID NO: 3960967 - RNA, 18 nt, Human herpesvirus 2
agccaccgucccgcccgc

SEQ ID NO: 3960968 - RNA, 14 nt, Human herpesvirus 2
agccagggcuggga

SEQ ID NO: 3960969 - RNA, 15 nt, Human herpesvirus 2
agccagggcugggag

SEQ ID NO: 3960970 - RNA, 13 nt, Human herpesvirus 2
agccccccccccu

SEQ ID NO: 3960971 - RNA, 21 nt, Human herpesvirus 2
agccccgcgaccaccaaggcc

SEQ ID NO: 3960972 - RNA, 14 nt, Human herpesvirus 2
agccccuggggcug

SEQ ID NO: 3960973 - RNA, 22 nt, Human herpesvirus 2
agcccugccccgcccccucucc

SEQ ID NO: 3960974 - RNA, 17 nt, Human herpesvirus 2
agccgauccggccucgg

SEQ ID NO: 3960975 - RNA, 12 nt, Human herpesvirus 2
agccgcccaagc

SEQ ID NO: 3960976 - RNA, 12 nt, Human herpesvirus 2
agccgcgcgacc

SEQ ID NO: 3960977 - RNA, 13 nt, Human herpesvirus 2
agccgcugugcca

SEQ ID NO: 3960978 - RNA, 14 nt, Human herpesvirus 2
agccuucggccacc

SEQ ID NO: 3960979 - RNA, 20 nt, Human herpesvirus 2
agcgaccggucgcagggaga

SEQ ID NO: 3960980 - RNA, 17 nt, Human herpesvirus 2
agcgccagacgggccgg

SEQ ID NO: 3960981 - RNA, 16 nt, Human herpesvirus 2
agcgccgggccucccg

SEQ ID NO: 3960982 - RNA, 17 nt, Human herpesvirus 2
agcgccggguggcgccu

SEQ ID NO: 3960983 - RNA, 17 nt, Human herpesvirus 2
agcggcccgaggcgacc

SEQ ID NO: 3960984 - RNA, 23 nt, Human herpesvirus 2
agcggcuuaagauuuuucggugc

SEQ ID NO: 3960985 - RNA, 16 nt, Human herpesvirus 2
agcguaucggccagga

SEQ ID NO: 3960986 - RNA, 17 nt, Human herpesvirus 2
agcguggggcgcgcacc

SEQ ID NO: 3960987 - RNA, 13 nt, Human herpesvirus 2
agcucccugcggc

SEQ ID NO: 3960988 - RNA, 15 nt, Human herpesvirus 2
agcucgccgugaaga

SEQ ID NO: 3960989 - RNA, 18 nt, Human herpesvirus 2
agcugaugucccgcaucu

SEQ ID NO: 3960990 - RNA, 17 nt, Human herpesvirus 2
agcugccucccccccgg

SEQ ID NO: 3960991 - RNA, 11 nt, Human herpesvirus 2
agcuggcccug

SEQ ID NO: 3960992 - RNA, 17 nt, Human herpesvirus 2
agcugguaucggcgacc

SEQ ID NO: 3960993 - RNA, 23 nt, Human herpesvirus 2
aggacaguucauaggccgggagc

SEQ ID NO: 3960994 - RNA, 16 nt, Human herpesvirus 2
aggaccaaaagggaaa

SEQ ID NO: 3960995 - RNA, 18 nt, Human herpesvirus 2
aggacccauacauuuccc

SEQ ID NO: 3960996 - RNA, 19 nt, Human herpesvirus 2
aggagggaaacuaggacag

SEQ ID NO: 3960997 - RNA, 14 nt, Human herpesvirus 2
aggaggggggccuc

SEQ ID NO: 3960998 - RNA, 18 nt, Human herpesvirus 2
aggauguguucuccugga

SEQ ID NO: 3960999 - RNA, 15 nt, Human herpesvirus 2
aggcaccccauccga

SEQ ID NO: 3961000 - RNA, 15 nt, Human herpesvirus 2
aggcccaccaccauc

SEQ ID NO: 3961001 - RNA, 12 nt, Human herpesvirus 2
aggcccccggcc

SEQ ID NO: 3961002 - RNA, 21 nt, Human herpesvirus 2
aggcccgccccaccgccccca

SEQ ID NO: 3961003 - RNA, 23 nt, Human herpesvirus 2
aggccgggagcguggggcgcgca

SEQ ID NO: 3961004 - RNA, 19 nt, Human herpesvirus 2
aggccucauccggcccgcc

SEQ ID NO: 3961005 - RNA, 19 nt, Human herpesvirus 2
aggcgacgccaggcccccc

SEQ ID NO: 3961006 - RNA, 15 nt, Human herpesvirus 2
aggcgcccgccccug

SEQ ID NO: 3961007 - RNA, 16 nt, Human herpesvirus 2
aggcgcgccaccgccc

SEQ ID NO: 3961008 - RNA, 20 nt, Human herpesvirus 2
aggcggucccggccgccauc

SEQ ID NO: 3961009 - RNA, 18 nt, Human herpesvirus 2
aggcuggagcucugccug

SEQ ID NO: 3961010 - RNA, 11 nt, Human herpesvirus 2
agggcaggucc

SEQ ID NO: 3961011 - RNA, 22 nt, Human herpesvirus 2
agggccuggcgauccugggccu

SEQ ID NO: 3961012 - RNA, 21 nt, Human herpesvirus 2
agggcgucgcuaacgagcgcg

SEQ ID NO: 3961013 - RNA, 15 nt, Human herpesvirus 2
aggggcgggaggggc

SEQ ID NO: 3961014 - RNA, 14 nt, Human herpesvirus 2
aggggggggcuggu

SEQ ID NO: 3961015 - RNA, 13 nt, Human herpesvirus 2
agggucggacagg

SEQ ID NO: 3961016 - RNA, 13 nt, Human herpesvirus 2
aggguggggcuga

SEQ ID NO: 3961017 - RNA, 13 nt, Human herpesvirus 2
aguaccccaguuc

SEQ ID NO: 3961018 - RNA, 21 nt, Human herpesvirus 2
agucgcccauacaaauuaaau

SEQ ID NO: 3961019 - RNA, 15 nt, Human herpesvirus 2
agucucuuggggaaa

SEQ ID NO: 3961020 - RNA, 20 nt, Human herpesvirus 2
agugggggggggggacggac

SEQ ID NO: 3961021 - RNA, 20 nt, Human herpesvirus 2
aguuccuccgugcuggggaa

SEQ ID NO: 3961022 - RNA, 15 nt, Human herpesvirus 2
aguuugagcagccgc

SEQ ID NO: 3961023 - RNA, 11 nt, Human herpesvirus 2
auaaacaggcc

SEQ ID NO: 3961024 - RNA, 19 nt, Human herpesvirus 2
auaaccgcccgcagcugcu

SEQ ID NO: 3961025 - RNA, 15 nt, Human herpesvirus 2
auacaaauuaaauac

SEQ ID NO: 3961026 - RNA, 14 nt, Human herpesvirus 2
auaggccacacagu

SEQ ID NO: 3961027 - RNA, 21 nt, Human herpesvirus 2
auagucccccguauaggcaua

SEQ ID NO: 3961028 - RNA, 20 nt, Human herpesvirus 2
aucaucgaaggucgggccgu

SEQ ID NO: 3961029 - RNA, 15 nt, Human herpesvirus 2
aucccccggaaggac

SEQ ID NO: 3961030 - RNA, 20 nt, Human herpesvirus 2
auccgaucgaugagccggua

SEQ ID NO: 3961031 - RNA, 21 nt, Human herpesvirus 2
auccugggccugugggucugc

SEQ ID NO: 3961032 - RNA, 13 nt, Human herpesvirus 2
aucgacccggacu

SEQ ID NO: 3961033 - RNA, 18 nt, Human herpesvirus 2
aucgaguccgaagaagag

SEQ ID NO: 3961034 - RNA, 24 nt, Human herpesvirus 2
aucgccaacucugucuucgugugg

SEQ ID NO: 3961035 - RNA, 16 nt, Human herpesvirus 2
aucgcuguauucccuu

SEQ ID NO: 3961036 - RNA, 19 nt, Human herpesvirus 2
aucuuggcguuauuuccaa

SEQ ID NO: 3961037 - RNA, 20 nt, Human herpesvirus 2
augaccucccggcccgccga

SEQ ID NO: 3961038 - RNA, 12 nt, Human herpesvirus 2
augagccgccgg

SEQ ID NO: 3961039 - RNA, 22 nt, Human herpesvirus 2
augaggggcaccaaaaaccagg

SEQ ID NO: 3961040 - RNA, 15 nt, Human herpesvirus 2
augcaacgccgggcg

SEQ ID NO: 3961041 - RNA, 13 nt, Human herpesvirus 2
augcaagcgggcg

SEQ ID NO: 3961042 - RNA, 16 nt, Human herpesvirus 2
augcuaauuaaauaca

SEQ ID NO: 3961043 - RNA, 16 nt, Human herpesvirus 2
auggagaagggaaagg

SEQ ID NO: 3961044 - RNA, 16 nt, Human herpesvirus 2
auggccgcuccugccc

SEQ ID NO: 3961045 - RNA, 17 nt, Human herpesvirus 2
auggccgcuccugcccg

SEQ ID NO: 3961046 - RNA, 23 nt, Human herpesvirus 2
augucuguuucaauaaaaaguaa

SEQ ID NO: 3961047 - RNA, 15 nt, Human herpesvirus 2
auucgucaccuggcu

SEQ ID NO: 3961048 - RNA, 18 nt, Human herpesvirus 2
auugaccucucgcccccc

SEQ ID NO: 3961049 - RNA, 16 nt, Human herpesvirus 2
auugccaucgcggacg

SEQ ID NO: 3961050 - RNA, 23 nt, Human herpesvirus 2
auuuacgcggugcgccccgccgg

SEQ ID NO: 3961051 - RNA, 15 nt, Human herpesvirus 2
auuuccaaacagggc

SEQ ID NO: 3961052 - RNA, 22 nt, Human herpesvirus 2
auuuccccagcacggaggaacu

SEQ ID NO: 3961053 - RNA, 12 nt, Human herpesvirus 2
caaaaacacaag

SEQ ID NO: 3961054 - RNA, 13 nt, Human herpesvirus 2
caaaaaccagguc

SEQ ID NO: 3961055 - RNA, 22 nt, Human herpesvirus 2
caaaaauacacaugacuucugg

SEQ ID NO: 3961056 - RNA, 20 nt, Human herpesvirus 2
caaaccccgguuggggcggg

SEQ ID NO: 3961057 - RNA, 17 nt, Human herpesvirus 2
caaagaaauagaagaaa

SEQ ID NO: 3961058 - RNA, 18 nt, Human herpesvirus 2
caaccaggcgcugcugcg

SEQ ID NO: 3961059 - RNA, 17 nt, Human herpesvirus 2
caacccaucccacaaug

SEQ ID NO: 3961060 - RNA, 23 nt, Human herpesvirus 2
caacgcgaccgucgccgccggcc

SEQ ID NO: 3961061 - RNA, 15 nt, Human herpesvirus 2
caacggcgggccccg

SEQ ID NO: 3961062 - RNA, 14 nt, Human herpesvirus 2
caagccacccuggg

SEQ ID NO: 3961063 - RNA, 20 nt, Human herpesvirus 2
caagugcaguaacccaguuc

SEQ ID NO: 3961064 - RNA, 13 nt, Human herpesvirus 2
caauaauaaagcu

SEQ ID NO: 3961065 - RNA, 13 nt, Human herpesvirus 2
caauauggcccag

SEQ ID NO: 3961066 - RNA, 18 nt, Human herpesvirus 2
caauggccgcuccugccc

SEQ ID NO: 3961067 - RNA, 14 nt, Human herpesvirus 2
caauuagcuguuua

SEQ ID NO: 3961068 - RNA, 12 nt, Human herpesvirus 2
cacacacccccu

SEQ ID NO: 3961069 - RNA, 21 nt, Human herpesvirus 2
cacacaggcccaccaccaucc

SEQ ID NO: 3961070 - RNA, 17 nt, Human herpesvirus 2
cacaccagacggcggga

SEQ ID NO: 3961071 - RNA, 21 nt, Human herpesvirus 2
caccagagccgaacgcagguc

SEQ ID NO: 3961072 - RNA, 22 nt, Human herpesvirus 2
caccagagccgaacgcaggucc

SEQ ID NO: 3961073 - RNA, 18 nt, Human herpesvirus 2
caccagcucgggggccag

SEQ ID NO: 3961074 - RNA, 21 nt, Human herpesvirus 2
cacccccgaguucccccggga

SEQ ID NO: 3961075 - RNA, 15 nt, Human herpesvirus 2
cgccgcaacacccgg

SEQ ID NO: 3961076 - RNA, 17 nt, Human herpesvirus 2
cgccgcgggggaggcgc

SEQ ID NO: 3961077 - RNA, 15 nt, Human herpesvirus 2
cgccgcgugggcucc

SEQ ID NO: 3961078 - RNA, 16 nt, Human herpesvirus 2
cgccgcuacugcgcca

SEQ ID NO: 3961079 - RNA, 21 nt, Human herpesvirus 2
cgccgcucgucccccgaggcc

SEQ ID NO: 3961080 - RNA, 21 nt, Human herpesvirus 2
cgccgcuguggcccuggcgga

SEQ ID NO: 3961081 - RNA, 22 nt, Human herpesvirus 2
cgccgcuguggcccuggcggac

SEQ ID NO: 3961082 - RNA, 22 nt, Human herpesvirus 2
cgccggcccgaaccccgcggcc

SEQ ID NO: 3961083 - RNA, 23 nt, Human herpesvirus 2
cgccggccgguccucgggccuac

SEQ ID NO: 3961084 - RNA, 20 nt, Human herpesvirus 2
cgccgggcgcgcccaccggu

SEQ ID NO: 3961085 - RNA, 22 nt, Human herpesvirus 2
cgccgucaaccccgcccuccgc

SEQ ID NO: 3961086 - RNA, 19 nt, Human herpesvirus 2
cgccgucgcuaccgcggcu

SEQ ID NO: 3961087 - RNA, 15 nt, Human herpesvirus 2
cgccucccggccgcc

SEQ ID NO: 3961088 - RNA, 18 nt, Human herpesvirus 2
cgccucccggggggucgg

SEQ ID NO: 3961089 - RNA, 21 nt, Human herpesvirus 2
cgccucgcgucgggccagaug

SEQ ID NO: 3961090 - RNA, 21 nt, Human herpesvirus 2
cgccucucccuuuuuuccccc

SEQ ID NO: 3961091 - RNA, 15 nt, Human herpesvirus 2
cgccugcgccccgac

SEQ ID NO: 3961092 - RNA, 22 nt, Human herpesvirus 2
cgccuuuccuccccucgccugu

SEQ ID NO: 3961093 - RNA, 22 nt, Human herpesvirus 2
cgcgagcucccugcggcuggcg

SEQ ID NO: 3961094 - RNA, 18 nt, Human herpesvirus 2
cgcgagggcccggcgccg

SEQ ID NO: 3961095 - RNA, 11 nt, Human herpesvirus 2
cgcgcagcgca

SEQ ID NO: 3961096 - RNA, 17 nt, Human herpesvirus 2
cgcgcaggcuggagcuc

SEQ ID NO: 3961097 - RNA, 15 nt, Human herpesvirus 2
cgcgcaucacggccc

SEQ ID NO: 3961098 - RNA, 21 nt, Human herpesvirus 2
cgcgccgccgcgcgggcccgg

SEQ ID NO: 3961099 - RNA, 23 nt, Human herpesvirus 2
cgcgccuacgagcccgcggucgu

SEQ ID NO: 3961100 - RNA, 12 nt, Human herpesvirus 2
cgcgccucccgg

SEQ ID NO: 3961101 - RNA, 23 nt, Human herpesvirus 2
cgcgcgcccccgacccggggccc

SEQ ID NO: 3961102 - RNA, 19 nt, Human herpesvirus 2
cgcgcggcgcgagcucccu

SEQ ID NO: 3961103 - RNA, 20 nt, Human herpesvirus 2
cgcggaccccgcccgcgacc

SEQ ID NO: 3961104 - RNA, 15 nt, Human herpesvirus 2
cgcggacgccgggcg

SEQ ID NO: 3961105 - RNA, 17 nt, Human herpesvirus 2
cgcggccgugggcgucc

SEQ ID NO: 3961106 - RNA, 11 nt, Human herpesvirus 2
cgcggcgccaa

SEQ ID NO: 3961107 - RNA, 13 nt, Human herpesvirus 2
cgcggcggcuccc

SEQ ID NO: 3961108 - RNA, 13 nt, Human herpesvirus 2
cgcgggcggcgcc

SEQ ID NO: 3961109 - RNA, 18 nt, Human herpesvirus 2
cgcgggcggcgccgcgcc

SEQ ID NO: 3961110 - RNA, 23 nt, Human herpesvirus 2
cgcggggacccgccagagacccu

SEQ ID NO: 3961111 - RNA, 20 nt, Human herpesvirus 2
cgcggggguucggggccagg

SEQ ID NO: 3961112 - RNA, 23 nt, Human herpesvirus 2
cgcggugcgccccgccggggcgc

SEQ ID NO: 3961113 - RNA, 22 nt, Human herpesvirus 2
cgcgguucugacgcggggucga

SEQ ID NO: 3961114 - RNA, 17 nt, Human herpesvirus 2
cgcuacacgacccugga

SEQ ID NO: 3961115 - RNA, 22 nt, Human herpesvirus 2
cgcucugucccccgggcagccg

SEQ ID NO: 3961116 - RNA, 16 nt, Human herpesvirus 2
cgcugcagggccuggc

SEQ ID NO: 3961117 - RNA, 19 nt, Human herpesvirus 2
cgcugcucucccguacccc

SEQ ID NO: 3961118 - RNA, 12 nt, Human herpesvirus 2
cgcuggccccuc

SEQ ID NO: 3961119 - RNA, 19 nt, Human herpesvirus 2
cgcuggcggaagugccgca

SEQ ID NO: 3961120 - RNA, 15 nt, Human herpesvirus 2
cgcuggugggacgcc

SEQ ID NO: 3961121 - RNA, 20 nt, Human herpesvirus 2
cgcuuauaagagcgggcccg

SEQ ID NO: 3961122 - RNA, 23 nt, Human herpesvirus 2
cgcuuauaagagcgggcccgggg

SEQ ID NO: 3961123 - RNA, 16 nt, Human herpesvirus 2
cgcuuuauaggacgcg

SEQ ID NO: 3961124 - RNA, 13 nt, Human herpesvirus 2
cggaccccgaccc

SEQ ID NO: 3961125 - RNA, 15 nt, Human herpesvirus 2
cggacgagcccgugg

SEQ ID NO: 3961126 - RNA, 21 nt, Human herpesvirus 2
cggacgcacgcggggacccgc

SEQ ID NO: 3961127 - RNA, 17 nt, Human herpesvirus 2
cggacgcggcacaggug

SEQ ID NO: 3961128 - RNA, 10 nt, Human herpesvirus 2
cggagaccca

SEQ ID NO: 3961129 - RNA, 14 nt, Human herpesvirus 2
cggagaggcccgcc

SEQ ID NO: 3961130 - RNA, 19 nt, Human herpesvirus 2
cggagcgccgucgucgccc

SEQ ID NO: 3961131 - RNA, 19 nt, Human herpesvirus 2
cggagcucgacgcacagcg

SEQ ID NO: 3961132 - RNA, 19 nt, Human herpesvirus 2
cggaggaaacccccgaccc

SEQ ID NO: 3961133 - RNA, 19 nt, Human herpesvirus 2
cggauaccgacagugacag

SEQ ID NO: 3961134 - RNA, 18 nt, Human herpesvirus 2
cggcaacaaagggccucc

SEQ ID NO: 3961135 - RNA, 17 nt, Human herpesvirus 2
cggcaaccccaccuucg

SEQ ID NO: 3961136 - RNA, 17 nt, Human herpesvirus 2
cggcaaccccagggcgu

SEQ ID NO: 3961137 - RNA, 13 nt, Human herpesvirus 2
cggcaacccuccu

SEQ ID NO: 3961138 - RNA, 14 nt, Human herpesvirus 2
cggcaauaaaagaa

SEQ ID NO: 3961139 - RNA, 19 nt, Human herpesvirus 2
cggcaauaaaagaacagaa

SEQ ID NO: 3961140 - RNA, 23 nt, Human herpesvirus 2
cggcaauaaaagaacagaauaaa

SEQ ID NO: 3961141 - RNA, 18 nt, Human herpesvirus 2
cggccaacgaggaccacg

SEQ ID NO: 3961142 - RNA, 24 nt, Human herpesvirus 2
cggccaauucuucccggagcgccg

SEQ ID NO: 3961143 - RNA, 17 nt, Human herpesvirus 2
cggccaccccgccgcag

SEQ ID NO: 3961144 - RNA, 17 nt, Human herpesvirus 2
cggccagcacgaccagg

SEQ ID NO: 3961145 - RNA, 15 nt, Human herpesvirus 2
cggccccacggucag

SEQ ID NO: 3961146 - RNA, 14 nt, Human herpesvirus 2
cggcccgccaaccc

SEQ ID NO: 3961147 - RNA, 15 nt, Human herpesvirus 2
cggcccugcggccaa

SEQ ID NO: 3961148 - RNA, 13 nt, Human herpesvirus 2
cggcccuggagcg

SEQ ID NO: 3961149 - RNA, 13 nt, Human herpesvirus 2
cggccgccccccg

SEQ ID NO: 3961150 - RNA, 16 nt, Human herpesvirus 2
cggccgcucgcugcag

SEQ ID NO: 3961151 - RNA, 12 nt, Human herpesvirus 2
cggccucuccgg

SEQ ID NO: 3961152 - RNA, 21 nt, Human herpesvirus 2
cggcgauggccgcgcgcgugu

SEQ ID NO: 3961153 - RNA, 18 nt, Human herpesvirus 2
cggcgccaagcgccccgc

SEQ ID NO: 3961154 - RNA, 22 nt, Human herpesvirus 2
cggcgccgccccgccgcuccgc

SEQ ID NO: 3961155 - RNA, 21 nt, Human herpesvirus 2
cggcgcgcguuucugaucgac

SEQ ID NO: 3961156 - RNA, 18 nt, Human herpesvirus 2
cggcgcgggcggcgccgc

SEQ ID NO: 3961157 - RNA, 20 nt, Human herpesvirus 2
cggcggccaccccgccgcag

SEQ ID NO: 3961158 - RNA, 23 nt, Human herpesvirus 2
cggcggccaccccgccgcagcuc

SEQ ID NO: 3961159 - RNA, 19 nt, Human herpesvirus 2
cggcggcucccccgcggcc

SEQ ID NO: 3961160 - RNA, 16 nt, Human herpesvirus 2
cggcggggccccgggc

SEQ ID NO: 3961161 - RNA, 20 nt, Human herpesvirus 2
cggcgggucccuccgcggcc

SEQ ID NO: 3961162 - RNA, 19 nt, Human herpesvirus 2
cggcgugcgcgugggagga

SEQ ID NO: 3961163 - RNA, 12 nt, Human herpesvirus 2
cgggacgcccgg

SEQ ID NO: 3961164 - RNA, 19 nt, Human herpesvirus 2
cgggacgcccggcccauaa

SEQ ID NO: 3961165 - RNA, 12 nt, Human herpesvirus 2
cgggagcaggac

SEQ ID NO: 3961166 - RNA, 14 nt, Human herpesvirus 2
cgggagcaggacag

SEQ ID NO: 3961167 - RNA, 14 nt, Human herpesvirus 2
cgggagccgcggcc

SEQ ID NO: 3961168 - RNA, 20 nt, Human herpesvirus 2
cgggaggggcgggaggggcg

SEQ ID NO: 3961169 - RNA, 19 nt, Human herpesvirus 2
cgggaggggcuuggccuuc

SEQ ID NO: 3961170 - RNA, 19 nt, Human herpesvirus 2
cgggauccuccgccagcuc

SEQ ID NO: 3961171 - RNA, 23 nt, Human herpesvirus 2
cgggcacucuggcguccccaggc

SEQ ID NO: 3961172 - RNA, 18 nt, Human herpesvirus 2
cgggccagauggggcccc

SEQ ID NO: 3961173 - RNA, 21 nt, Human herpesvirus 2
cgggcggacguccaggggugc

SEQ ID NO: 3961174 - RNA, 23 nt, Human herpesvirus 2
cgggcgggguggggaggaaagaa

SEQ ID NO: 3961175 - RNA, 23 nt, Human herpesvirus 2
cgggcggugcccaucuacguggc

SEQ ID NO: 3961176 - RNA, 21 nt, Human herpesvirus 2
cggggaagaugacguacagca

SEQ ID NO: 3961177 - RNA, 16 nt, Human herpesvirus 2
cggggauaaaagccaa

SEQ ID NO: 3961178 - RNA, 12 nt, Human herpesvirus 2
cggggcccgcag

SEQ ID NO: 3961179 - RNA, 18 nt, Human herpesvirus 2
cggggccguggggcccca

SEQ ID NO: 3961180 - RNA, 18 nt, Human herpesvirus 2
cgggggcggugacgcccg

SEQ ID NO: 3961181 - RNA, 14 nt, Human herpesvirus 2
cggggggggccucg

SEQ ID NO: 3961182 - RNA, 19 nt, Human herpesvirus 2
cggggugguggacgcgaga

SEQ ID NO: 3961183 - RNA, 16 nt, Human herpesvirus 2
cggguggcgccucugc

SEQ ID NO: 3961184 - RNA, 13 nt, Human herpesvirus 2
cggguggggcgga

SEQ ID NO: 3961185 - RNA, 14 nt, Human herpesvirus 2
cggucaggaccagg

SEQ ID NO: 3961186 - RNA, 17 nt, Human herpesvirus 2
cggucgcuuuccacacc

SEQ ID NO: 3961187 - RNA, 18 nt, Human herpesvirus 2
cggucggccagcacgacc

SEQ ID NO: 3961188 - RNA, 19 nt, Human herpesvirus 2
cggugccucacgguccuca

SEQ ID NO: 3961189 - RNA, 22 nt, Human herpesvirus 2
cgguggcgucggcggccccggc

SEQ ID NO: 3961190 - RNA, 20 nt, Human herpesvirus 2
cgguuggaggcgccucugcc

SEQ ID NO: 3961191 - RNA, 15 nt, Human herpesvirus 2
cgguuuugcggucgu

SEQ ID NO: 3961192 - RNA, 12 nt, Human herpesvirus 2
cguaaacaccaa

SEQ ID NO: 3961193 - RNA, 13 nt, Human herpesvirus 2
cguaccccgccgg

SEQ ID NO: 3961194 - RNA, 17 nt, Human herpesvirus 2
cguacgucugcccgugg

SEQ ID NO: 3961195 - RNA, 14 nt, Human herpesvirus 2
cguaucggccagga

SEQ ID NO: 3961196 - RNA, 17 nt, Human herpesvirus 2
cgucaccgggggccccg

SEQ ID NO: 3961197 - RNA, 22 nt, Human herpesvirus 2
cgucacgagccccugggccgcu

SEQ ID NO: 3961198 - RNA, 22 nt, Human herpesvirus 2
cgucacgcccgucaggcgcgcg

SEQ ID NO: 3961199 - RNA, 14 nt, Human herpesvirus 2
cguccccuggggcg

SEQ ID NO: 3961200 - RNA, 12 nt, Human herpesvirus 2
cguccgacaccc

SEQ ID NO: 3961201 - RNA, 15 nt, Human herpesvirus 2
cguccgaccugcagg

SEQ ID NO: 3961202 - RNA, 15 nt, Human herpesvirus 2
cguccucacggccaa

SEQ ID NO: 3961203 - RNA, 22 nt, Human herpesvirus 2
cguccucacggccaacgaggac

SEQ ID NO: 3961204 - RNA, 15 nt, Human herpesvirus 2
cgucgcccuagaggc

SEQ ID NO: 3961205 - RNA, 20 nt, Human herpesvirus 2
cgucgcuccggcucccggcc

SEQ ID NO: 3961206 - RNA, 21 nt, Human herpesvirus 2
cgucgcucucggucccgcaua

SEQ ID NO: 3961207 - RNA, 18 nt, Human herpesvirus 2
cgugccaacucgcggcac

SEQ ID NO: 3961208 - RNA, 14 nt, Human herpesvirus 2
cgugccccuggacu

SEQ ID NO: 3961209 - RNA, 15 nt, Human herpesvirus 2
cgugcgcgugggagg

SEQ ID NO: 3961210 - RNA, 20 nt, Human herpesvirus 2
cgugcgugcugcugagcccu

SEQ ID NO: 3961211 - RNA, 22 nt, Human herpesvirus 2
cgugcuuccgcacccccgccua

SEQ ID NO: 3961212 - RNA, 20 nt, Human herpesvirus 2
cguggaugccggggccgugg

SEQ ID NO: 3961213 - RNA, 16 nt, Human herpesvirus 2
cguggccagagccuca

SEQ ID NO: 3961214 - RNA, 22 nt, Human herpesvirus 2
cguggugauacaacacaccccc

SEQ ID NO: 3961215 - RNA, 18 nt, Human herpesvirus 2
cguguacaaacacgggga

SEQ ID NO: 3961216 - RNA, 21 nt, Human herpesvirus 2
cgugugugagaaauaaagaac

SEQ ID NO: 3961217 - RNA, 18 nt, Human herpesvirus 2
cguguuguggcuggaggc

SEQ ID NO: 3961218 - RNA, 20 nt, Human herpesvirus 2
cguucagcgcaucaggcuca

SEQ ID NO: 3961219 - RNA, 16 nt, Human herpesvirus 2
cguucggaccuggggg

SEQ ID NO: 3961220 - RNA, 13 nt, Human herpesvirus 2
cguucggacggcc

SEQ ID NO: 3961221 - RNA, 20 nt, Human herpesvirus 2
cguugccgggggccaugaca

SEQ ID NO: 3961222 - RNA, 23 nt, Human herpesvirus 2
cguuggccagcgcguugguccgg

SEQ ID NO: 3961223 - RNA, 11 nt, Human herpesvirus 2
cguuuggccaa

SEQ ID NO: 3961224 - RNA, 19 nt, Human herpesvirus 2
cuaaccgcgcgccuccucg

SEQ ID NO: 3961225 - RNA, 17 nt, Human herpesvirus 2
cuacgugccccccgacg

SEQ ID NO: 3961226 - RNA, 17 nt, Human herpesvirus 2
cuagucacacgcccccc

SEQ ID NO: 3961227 - RNA, 17 nt, Human herpesvirus 2
cucaaacaaaaacacaa

SEQ ID NO: 3961228 - RNA, 18 nt, Human herpesvirus 2
cucacaccgcgucuguuu

SEQ ID NO: 3961229 - RNA, 18 nt, Human herpesvirus 2
cucaccgagccgcugugc

SEQ ID NO: 3961230 - RNA, 16 nt, Human herpesvirus 2
cucaccgcgcccgggc

SEQ ID NO: 3961231 - RNA, 21 nt, Human herpesvirus 2
cucacgucuucgcccaccgau

SEQ ID NO: 3961232 - RNA, 16 nt, Human herpesvirus 2
cucccagugccccgac

SEQ ID NO: 3961233 - RNA, 14 nt, Human herpesvirus 2
cuccccgcuggagc

SEQ ID NO: 3961234 - RNA, 16 nt, Human herpesvirus 2
cucccggcccgccgac

SEQ ID NO: 3961235 - RNA, 16 nt, Human herpesvirus 2
cucccggcccgggccc

SEQ ID NO: 3961236 - RNA, 20 nt, Human herpesvirus 2
cucccuuuuuucccccccuc

SEQ ID NO: 3961237 - RNA, 22 nt, Human herpesvirus 2
cuccgaagagacgaugggagcc

SEQ ID NO: 3961238 - RNA, 18 nt, Human herpesvirus 2
cuccgcaauaaacgccuu

SEQ ID NO: 3961239 - RNA, 17 nt, Human herpesvirus 2
cuccgcgggucccuucc

SEQ ID NO: 3961240 - RNA, 19 nt, Human herpesvirus 2
cuccgcgggucccuuccca

SEQ ID NO: 3961241 - RNA, 19 nt, Human herpesvirus 2
cuccgugcuggggaaaucu

SEQ ID NO: 3961242 - RNA, 19 nt, Human herpesvirus 2
cuccucgcggaguaugacc

SEQ ID NO: 3961243 - RNA, 18 nt, Human herpesvirus 2
cuccugcgagcccucacg

SEQ ID NO: 3961244 - RNA, 16 nt, Human herpesvirus 2
cucgaacacgagccgc

SEQ ID NO: 3961245 - RNA, 17 nt, Human herpesvirus 2
cucgaacacgagccgca

SEQ ID NO: 3961246 - RNA, 23 nt, Human herpesvirus 2
cucgaacacgagccgcaggaacg

SEQ ID NO: 3961247 - RNA, 16 nt, Human herpesvirus 2
cucgaacauggacccg

SEQ ID NO: 3961248 - RNA, 16 nt, Human herpesvirus 2
cucgaccagcggcccc

SEQ ID NO: 3961249 - RNA, 17 nt, Human herpesvirus 2
cucgcugcagggccugg

SEQ ID NO: 3961250 - RNA, 19 nt, Human herpesvirus 2
cucggggacagaggacgcc

SEQ ID NO: 3961251 - RNA, 18 nt, Human herpesvirus 2
cucguccccuggggcggc

SEQ ID NO: 3961252 - RNA, 20 nt, Human herpesvirus 2
cucguccccuggggcggcgg

SEQ ID NO: 3961253 - RNA, 19 nt, Human herpesvirus 2
cucgugcucgcgugguaca

SEQ ID NO: 3961254 - RNA, 15 nt, Human herpesvirus 2
cucguggugcugggg

SEQ ID NO: 3961255 - RNA, 23 nt, Human herpesvirus 2
cucguuuuguuuucucuucuuuc

SEQ ID NO: 3961256 - RNA, 18 nt, Human herpesvirus 2
cucucccuuuuuuccccc

SEQ ID NO: 3961257 - RNA, 17 nt, Human herpesvirus 2
cucugccugcacgagcg

SEQ ID NO: 3961258 - RNA, 15 nt, Human herpesvirus 2
cucuggcguccccag

SEQ ID NO: 3961259 - RNA, 14 nt, Human herpesvirus 2
cucuggcuccaggc

SEQ ID NO: 3961260 - RNA, 16 nt, Human herpesvirus 2
cucuucgggcaccccg

SEQ ID NO: 3961261 - RNA, 15 nt, Human herpesvirus 2
cucuuggggaaaucu

SEQ ID NO: 3961262 - RNA, 20 nt, Human herpesvirus 2
cucuuuauugaccggggccc

SEQ ID NO: 3961263 - RNA, 20 nt, Human herpesvirus 2
cugaucgacgacgccuggcg

SEQ ID NO: 3961264 - RNA, 21 nt, Human herpesvirus 2
cugaucgacgacgccuggcgg

SEQ ID NO: 3961265 - RNA, 12 nt, Human herpesvirus 2
cugcacgagguc

SEQ ID NO: 3961266 - RNA, 15 nt, Human herpesvirus 2
cugcagggccuggcg

SEQ ID NO: 3961267 - RNA, 22 nt, Human herpesvirus 2
cugccccgcggaggcgugguga

SEQ ID NO: 3961268 - RNA, 17 nt, Human herpesvirus 2
cugcccgcggaccaccg

SEQ ID NO: 3961269 - RNA, 18 nt, Human herpesvirus 2
cugcccguggguggccac

SEQ ID NO: 3961270 - RNA, 16 nt, Human herpesvirus 2
cugccggacgcggcac

SEQ ID NO: 3961271 - RNA, 18 nt, Human herpesvirus 2
cugccguaugcuaauuaa

SEQ ID NO: 3961272 - RNA, 14 nt, Human herpesvirus 2
cugcgcgaggccgc

SEQ ID NO: 3961273 - RNA, 14 nt, Human herpesvirus 2
cugcggggaccagc

SEQ ID NO: 3961274 - RNA, 18 nt, Human herpesvirus 2
cugcgucguccagggugg

SEQ ID NO: 3961275 - RNA, 13 nt, Human herpesvirus 2
cugcugggccaug

SEQ ID NO: 3961276 - RNA, 20 nt, Human herpesvirus 2
cuggagccccugggggaccc

SEQ ID NO: 3961277 - RNA, 15 nt, Human herpesvirus 2
cuggccgugcugggc

SEQ ID NO: 3961278 - RNA, 14 nt, Human herpesvirus 2
cuggcgauccuggg

SEQ ID NO: 3961279 - RNA, 16 nt, Human herpesvirus 2
cuggcgauccugggcc

SEQ ID NO: 3961280 - RNA, 21 nt, Human herpesvirus 2
cuggcggaagugccgcacggc

SEQ ID NO: 3961281 - RNA, 21 nt, Human herpesvirus 2
cugggacacccagaugcgccu

SEQ ID NO: 3961282 - RNA, 16 nt, Human herpesvirus 2
cugggagcccuccucg

SEQ ID NO: 3961283 - RNA, 19 nt, Human herpesvirus 2
cugggcgaagucccgcacg

SEQ ID NO: 3961284 - RNA, 15 nt, Human herpesvirus 2
cugggcgcgagccag

SEQ ID NO: 3961285 - RNA, 22 nt, Human herpesvirus 2
cuggggcuuccguugcgcgaca

SEQ ID NO: 3961286 - RNA, 18 nt, Human herpesvirus 2
cuggguccgggggccugg

SEQ ID NO: 3961287 - RNA, 19 nt, Human herpesvirus 2
cuggguuacugcacuugcc

SEQ ID NO: 3961288 - RNA, 15 nt, Human herpesvirus 2
cugguacccacggac

SEQ ID NO: 3961289 - RNA, 22 nt, Human herpesvirus 2
cuggugacggaaaaccugggcg

SEQ ID NO: 3961290 - RNA, 22 nt, Human herpesvirus 2
cugucaucguauaccagccgcc

SEQ ID NO: 3961291 - RNA, 11 nt, Human herpesvirus 2
cuguccccgcc

SEQ ID NO: 3961292 - RNA, 22 nt, Human herpesvirus 2
cugucccgacgauuagccaccg

SEQ ID NO: 3961293 - RNA, 14 nt, Human herpesvirus 2
cuguccgccgggcg

SEQ ID NO: 3961294 - RNA, 13 nt, Human herpesvirus 2
cuguggcggucgg

SEQ ID NO: 3961295 - RNA, 15 nt, Human herpesvirus 2
cuucagccuggacca

SEQ ID NO: 3961296 - RNA, 15 nt, Human herpesvirus 2
cuucccccccccuac

SEQ ID NO: 3961297 - RNA, 20 nt, Human herpesvirus 2
cuucccgggaaaccacacac

SEQ ID NO: 3961298 - RNA, 16 nt, Human herpesvirus 2
cuuccuguaccugacg

SEQ ID NO: 3961299 - RNA, 22 nt, Human herpesvirus 2
cuucgaucgacgaacuggggcg

SEQ ID NO: 3961300 - RNA, 18 nt, Human herpesvirus 2
cuucgcugucagcacgcg

SEQ ID NO: 3961301 - RNA, 18 nt, Human herpesvirus 2
cuugcuugggggggcguc

SEQ ID NO: 3961302 - RNA, 18 nt, Human herpesvirus 2
cuuggccggggagggcag

SEQ ID NO: 3961303 - RNA, 17 nt, Human herpesvirus 2
gcagccgcgccgcugcc

SEQ ID NO: 3961304 - RNA, 21 nt, Human herpesvirus 2
gcagcgugucaaaggccagca

SEQ ID NO: 3961305 - RNA, 19 nt, Human herpesvirus 2
gcagcuuuuaacgggccgc

SEQ ID NO: 3961306 - RNA, 11 nt, Human herpesvirus 2
gcagggccuga

SEQ ID NO: 3961307 - RNA, 13 nt, Human herpesvirus 2
gcauaaagggagu

SEQ ID NO: 3961308 - RNA, 17 nt, Human herpesvirus 2
gcauacaccccacccua

SEQ ID NO: 3961309 - RNA, 23 nt, Human herpesvirus 2
gcauccgaucgaugagccgguag

SEQ ID NO: 3961310 - RNA, 18 nt, Human herpesvirus 2
gcaucgcaagccacccug

SEQ ID NO: 3961311 - RNA, 16 nt, Human herpesvirus 2
gcaucucuggcuccag

SEQ ID NO: 3961312 - RNA, 14 nt, Human herpesvirus 2
gcaugcaaauuaaa

SEQ ID NO: 3961313 - RNA, 17 nt, Human herpesvirus 2
gcaugcgacggcgucuc

SEQ ID NO: 3961314 - RNA, 12 nt, Human herpesvirus 2
gccaacaccagg

SEQ ID NO: 3961315 - RNA, 16 nt, Human herpesvirus 2
gccaacgcgaccgucg

SEQ ID NO: 3961316 - RNA, 16 nt, Human herpesvirus 2
gccaagcgccccgcgg

SEQ ID NO: 3961317 - RNA, 15 nt, Human herpesvirus 2
gccacacaguccgug

SEQ ID NO: 3961318 - RNA, 13 nt, Human herpesvirus 2
gccacaccacccu

SEQ ID NO: 3961319 - RNA, 9 nt, Human herpesvirus 2
gccagcgcc

SEQ ID NO: 3961320 - RNA, 20 nt, Human herpesvirus 2
gccagcucggacaccagcag

SEQ ID NO: 3961321 - RNA, 19 nt, Human herpesvirus 2
gccaggagguccuggaggg

SEQ ID NO: 3961322 - RNA, 21 nt, Human herpesvirus 2
gccagguggcccuuccggacc

SEQ ID NO: 3961323 - RNA, 18 nt, Human herpesvirus 2
gccagugcaucccagacg

SEQ ID NO: 3961324 - RNA, 14 nt, Human herpesvirus 2
gccaguggagccaa

SEQ ID NO: 3961325 - RNA, 21 nt, Human herpesvirus 2
gccauccucaaacaggccauc

SEQ ID NO: 3961326 - RNA, 15 nt, Human herpesvirus 2
gccaucgccggggac

SEQ ID NO: 3961327 - RNA, 15 nt, Human herpesvirus 2
gcccacccccccacc

SEQ ID NO: 3961328 - RNA, 21 nt, Human herpesvirus 2
gcccacgaauuugacgucgug

SEQ ID NO: 3961329 - RNA, 24 nt, Human herpesvirus 2
gcccacuuucccccccacuccacc

SEQ ID NO: 3961330 - RNA, 12 nt, Human herpesvirus 2
gcccagcacagg

SEQ ID NO: 3961331 - RNA, 14 nt, Human herpesvirus 2
gcccagcacaggca

SEQ ID NO: 3961332 - RNA, 17 nt, Human herpesvirus 2
gcccagcacaggcaggc

SEQ ID NO: 3961333 - RNA, 15 nt, Human herpesvirus 2
gcccaggcccuggcg

SEQ ID NO: 3961334 - RNA, 10 nt, Human herpesvirus 2
gccccacgga

SEQ ID NO: 3961335 - RNA, 18 nt, Human herpesvirus 2
gcccccgccguggcggag

SEQ ID NO: 3961336 - RNA, 18 nt, Human herpesvirus 2
gcccccggagucccccgg

SEQ ID NO: 3961337 - RNA, 17 nt, Human herpesvirus 2
gcccccggcccugcggc

SEQ ID NO: 3961338 - RNA, 20 nt, Human herpesvirus 2
gcccccggccuuugcuuccu

SEQ ID NO: 3961339 - RNA, 24 nt, Human herpesvirus 2
gcccccggggccgucgcggccgcc

SEQ ID NO: 3961340 - RNA, 16 nt, Human herpesvirus 2
gccccgacggcccaca

SEQ ID NO: 3961341 - RNA, 15 nt, Human herpesvirus 2
gccccgcaggcaggc

SEQ ID NO: 3961342 - RNA, 14 nt, Human herpesvirus 2
gccccgccgcuccg

SEQ ID NO: 3961343 - RNA, 22 nt, Human herpesvirus 2
gccccgccgggucaccggggcg

SEQ ID NO: 3961344 - RNA, 23 nt, Human herpesvirus 2
gccccggccgccuccccgcugga

SEQ ID NO: 3961345 - RNA, 23 nt, Human herpesvirus 2
gccccggguuccccgagagccca

SEQ ID NO: 3961346 - RNA, 18 nt, Human herpesvirus 2
gccccggucccccggacc

SEQ ID NO: 3961347 - RNA, 20 nt, Human herpesvirus 2
gcccgaacggaaggccuccc

SEQ ID NO: 3961348 - RNA, 23 nt, Human herpesvirus 2
gcccgaccagcgccggguggcgc

SEQ ID NO: 3961349 - RNA, 22 nt, Human herpesvirus 2
gcccgccauuuaggauggcugc

SEQ ID NO: 3961350 - RNA, 18 nt, Human herpesvirus 2
gcccgcccccgacgggcg

SEQ ID NO: 3961351 - RNA, 14 nt, Human herpesvirus 2
gcccgccccugcgc

SEQ ID NO: 3961352 - RNA, 15 nt, Human herpesvirus 2
gcccggaacgagguu

SEQ ID NO: 3961353 - RNA, 12 nt, Human herpesvirus 2
gcccggcgccgc

SEQ ID NO: 3961354 - RNA, 16 nt, Human herpesvirus 2
gcccgggguucugggg

SEQ ID NO: 3961355 - RNA, 17 nt, Human herpesvirus 2
gcccgggguucuggggg

SEQ ID NO: 3961356 - RNA, 15 nt, Human herpesvirus 2
gcccguggcccacga

SEQ ID NO: 3961357 - RNA, 21 nt, Human herpesvirus 2
gcccuggguccgggggccugg

SEQ ID NO: 3961358 - RNA, 21 nt, Human herpesvirus 2
gccgacccgucuagcggccgg

SEQ ID NO: 3961359 - RNA, 22 nt, Human herpesvirus 2
gccgacuuccgugccccuggac

SEQ ID NO: 3961360 - RNA, 17 nt, Human herpesvirus 2
gccgcacauccccuccg

SEQ ID NO: 3961361 - RNA, 13 nt, Human herpesvirus 2
gccgcacccacga

SEQ ID NO: 3961362 - RNA, 19 nt, Human herpesvirus 2
gccgcacggccgugucgcu

SEQ ID NO: 3961363 - RNA, 19 nt, Human herpesvirus 2
gccgcaucaguccgcgcgg

SEQ ID NO: 3961364 - RNA, 19 nt, Human herpesvirus 2
gccgccaccccccuccccu

SEQ ID NO: 3961365 - RNA, 17 nt, Human herpesvirus 2
gccgccccccgucccga

SEQ ID NO: 3961366 - RNA, 23 nt, Human herpesvirus 2
gccgccccgcaguuucaccgccc

SEQ ID NO: 3961367 - RNA, 14 nt, Human herpesvirus 2
gccgccgcgcgggc

SEQ ID NO: 3961368 - RNA, 13 nt, Human herpesvirus 2
gccgccggggggc

SEQ ID NO: 3961369 - RNA, 20 nt, Human herpesvirus 2
gccgcgacaagacccggcgg

SEQ ID NO: 3961370 - RNA, 19 nt, Human herpesvirus 2
gccgcgaccgucgcggcga

SEQ ID NO: 3961371 - RNA, 16 nt, Human herpesvirus 2
gccgcgacggccccgg

SEQ ID NO: 3961372 - RNA, 17 nt, Human herpesvirus 2
gccgcgacggccccggc

SEQ ID NO: 3961373 - RNA, 22 nt, Human herpesvirus 2
gccgcgcggccacgucguccgg

SEQ ID NO: 3961374 - RNA, 16 nt, Human herpesvirus 2
gccgcgguggcgucgg

SEQ ID NO: 3961375 - RNA, 22 nt, Human herpesvirus 2
gccgcgguggcgucggcggccc

SEQ ID NO: 3961376 - RNA, 14 nt, Human herpesvirus 2
gccgcugugccagg

SEQ ID NO: 3961377 - RNA, 16 nt, Human herpesvirus 2
gccgcuuuaccccgcg

SEQ ID NO: 3961378 - RNA, 23 nt, Human herpesvirus 2
gccgcuuuaccccgcggccucgc

SEQ ID NO: 3961379 - RNA, 19 nt, Human herpesvirus 2
gccggaaaccgagacggug

SEQ ID NO: 3961380 - RNA, 17 nt, Human herpesvirus 2
gccggcggagccccgga

SEQ ID NO: 3961381 - RNA, 23 nt, Human herpesvirus 2
gccggcgugggugacugggaccg

SEQ ID NO: 3961382 - RNA, 19 nt, Human herpesvirus 2
gccgggaaccccggcgugg

SEQ ID NO: 3961383 - RNA, 23 nt, Human herpesvirus 2
gccgggacgacgaccaugggccc

SEQ ID NO: 3961384 - RNA, 12 nt, Human herpesvirus 2
gccgggcagaca

SEQ ID NO: 3961385 - RNA, 16 nt, Human herpesvirus 2
gccgggccucccgcaa

SEQ ID NO: 3961386 - RNA, 19 nt, Human herpesvirus 2
gccggggagggcagggccg

SEQ ID NO: 3961387 - RNA, 12 nt, Human herpesvirus 2
gccgggggccau

SEQ ID NO: 3961388 - RNA, 14 nt, Human herpesvirus 2
gccgggggcggacg

SEQ ID NO: 3961389 - RNA, 16 nt, Human herpesvirus 2
gccgucaaccccgccc

SEQ ID NO: 3961390 - RNA, 23 nt, Human herpesvirus 2
gccgucgcacgcgcgcaggcugg

SEQ ID NO: 3961391 - RNA, 15 nt, Human herpesvirus 2
gccgugcgcggcccc

SEQ ID NO: 3961392 - RNA, 12 nt, Human herpesvirus 2
gccguggccaga

SEQ ID NO: 3961393 - RNA, 21 nt, Human herpesvirus 2
gccguggggccccagggcuuc

SEQ ID NO: 3961394 - RNA, 19 nt, Human herpesvirus 2
gccgugucgcuaaacaggg

SEQ ID NO: 3961395 - RNA, 18 nt, Human herpesvirus 2
gccguucggaccuggggg

SEQ ID NO: 3961396 - RNA, 20 nt, Human herpesvirus 2
gccguuggggauacgggggc

SEQ ID NO: 3961397 - RNA, 19 nt, Human herpesvirus 2
gccuaucuugaucccccgg

SEQ ID NO: 3961398 - RNA, 21 nt, Human herpesvirus 2
gccuccgcccuccgccagcgc

SEQ ID NO: 3961399 - RNA, 17 nt, Human herpesvirus 2
gccucugcccgaccggg

SEQ ID NO: 3961400 - RNA, 12 nt, Human herpesvirus 2
gccugcacgagc

SEQ ID NO: 3961401 - RNA, 13 nt, Human herpesvirus 2
gccugcugugggu

SEQ ID NO: 3961402 - RNA, 17 nt, Human herpesvirus 2
gccuggaucggcgucgg

SEQ ID NO: 3961403 - RNA, 14 nt, Human herpesvirus 2
gccuggcggcagca

SEQ ID NO: 3961404 - RNA, 19 nt, Human herpesvirus 2
gccuggcguuugggggcgg

SEQ ID NO: 3961405 - RNA, 20 nt, Human herpesvirus 2
gccuguuugcaacgagcugc

SEQ ID NO: 3961406 - RNA, 18 nt, Human herpesvirus 2
gcgaacacaagcucgccg

SEQ ID NO: 3961407 - RNA, 16 nt, Human herpesvirus 2
gcgaacccccuaaccg

SEQ ID NO: 3961408 - RNA, 20 nt, Human herpesvirus 2
gcgaagguguuguagggccg

SEQ ID NO: 3961409 - RNA, 13 nt, Human herpesvirus 2
gcgacgccgcggc

SEQ ID NO: 3961410 - RNA, 22 nt, Human herpesvirus 2
gcgagaaggaggggggccucgg

SEQ ID NO: 3961411 - RNA, 23 nt, Human herpesvirus 2
gcgagaugucaguccucggggac

SEQ ID NO: 3961412 - RNA, 14 nt, Human herpesvirus 2
gcgagcuggcccug

SEQ ID NO: 3961413 - RNA, 13 nt, Human herpesvirus 2
gcgauccccaagc

SEQ ID NO: 3961414 - RNA, 16 nt, Human herpesvirus 2
gcgcacccuggccguc

SEQ ID NO: 3961415 - RNA, 20 nt, Human herpesvirus 2
gcgcacccuggccguccggg

SEQ ID NO: 3961416 - RNA, 16 nt, Human herpesvirus 2
gcgcaucgccaacucu

SEQ ID NO: 3961417 - RNA, 23 nt, Human herpesvirus 2
gcgcaucuucgccgggugucugc

SEQ ID NO: 3961418 - RNA, 19 nt, Human herpesvirus 2
ggcccaccugcacgagguc

SEQ ID NO: 3961419 - RNA, 22 nt, Human herpesvirus 2
ggccccccgcgccucgggcggc

SEQ ID NO: 3961420 - RNA, 19 nt, Human herpesvirus 2
ggcccccgaauccggggcg

SEQ ID NO: 3961421 - RNA, 12 nt, Human herpesvirus 2
ggccccucugcu

SEQ ID NO: 3961422 - RNA, 14 nt, Human herpesvirus 2
ggcccgaggcgacc

SEQ ID NO: 3961423 - RNA, 21 nt, Human herpesvirus 2
ggcccgcuucauagcgcgucc

SEQ ID NO: 3961424 - RNA, 13 nt, Human herpesvirus 2
ggcccggccgccg

SEQ ID NO: 3961425 - RNA, 14 nt, Human herpesvirus 2
ggcccggcgccgcc

SEQ ID NO: 3961426 - RNA, 23 nt, Human herpesvirus 2
ggcccggggcccuucgcagcuuc

SEQ ID NO: 3961427 - RNA, 16 nt, Human herpesvirus 2
ggcccuggcggacggc

SEQ ID NO: 3961428 - RNA, 22 nt, Human herpesvirus 2
ggccgaacgccucaccgcgccc

SEQ ID NO: 3961429 - RNA, 14 nt, Human herpesvirus 2
ggccgagaagagcg

SEQ ID NO: 3961430 - RNA, 23 nt, Human herpesvirus 2
ggccgcacccacgacauccgcgg

SEQ ID NO: 3961431 - RNA, 16 nt, Human herpesvirus 2
ggccgccauucccgcu

SEQ ID NO: 3961432 - RNA, 21 nt, Human herpesvirus 2
ggccgcccaacccgagcgacc

SEQ ID NO: 3961433 - RNA, 19 nt, Human herpesvirus 2
ggccgcugggggggcgggc

SEQ ID NO: 3961434 - RNA, 13 nt, Human herpesvirus 2
ggccgugcccccc

SEQ ID NO: 3961435 - RNA, 19 nt, Human herpesvirus 2
ggccguguggucgccccca

SEQ ID NO: 3961436 - RNA, 16 nt, Human herpesvirus 2
ggccucauccggcccg

SEQ ID NO: 3961437 - RNA, 15 nt, Human herpesvirus 2
ggccucguggucggg

SEQ ID NO: 3961438 - RNA, 20 nt, Human herpesvirus 2
ggccuggcguuugggggcgg

SEQ ID NO: 3961439 - RNA, 22 nt, Human herpesvirus 2
ggccuggcguuugggggcggac

SEQ ID NO: 3961440 - RNA, 11 nt, Human herpesvirus 2
ggccuucccga

SEQ ID NO: 3961441 - RNA, 14 nt, Human herpesvirus 2
ggcgaccccgcccc

SEQ ID NO: 3961442 - RNA, 20 nt, Human herpesvirus 2
ggcgacccgccgggggcgga

SEQ ID NO: 3961443 - RNA, 16 nt, Human herpesvirus 2
ggcgaccgccccgcgc

SEQ ID NO: 3961444 - RNA, 22 nt, Human herpesvirus 2
ggcgagaagcgggaccgucgga

SEQ ID NO: 3961445 - RNA, 15 nt, Human herpesvirus 2
ggcgauccugggccu

SEQ ID NO: 3961446 - RNA, 17 nt, Human herpesvirus 2
ggcgccacgguggugca

SEQ ID NO: 3961447 - RNA, 12 nt, Human herpesvirus 2
ggcgccgaucgc

SEQ ID NO: 3961448 - RNA, 22 nt, Human herpesvirus 2
ggcgccggccaaccgcgcgccg

SEQ ID NO: 3961449 - RNA, 14 nt, Human herpesvirus 2
ggcgcgagccaggc

SEQ ID NO: 3961450 - RNA, 15 nt, Human herpesvirus 2
ggcgcgagccaggca

SEQ ID NO: 3961451 - RNA, 12 nt, Human herpesvirus 2
ggcggacccaga

SEQ ID NO: 3961452 - RNA, 18 nt, Human herpesvirus 2
ggcggacguccaggggug

SEQ ID NO: 3961453 - RNA, 19 nt, Human herpesvirus 2
ggcggaggccugucccugc

SEQ ID NO: 3961454 - RNA, 12 nt, Human herpesvirus 2
ggcggccagaaa

SEQ ID NO: 3961455 - RNA, 15 nt, Human herpesvirus 2
ggcggccccccgcgc

SEQ ID NO: 3961456 - RNA, 14 nt, Human herpesvirus 2
ggcggcccccggcc

SEQ ID NO: 3961457 - RNA, 21 nt, Human herpesvirus 2
ggcggccgcacccacgacauc

SEQ ID NO: 3961458 - RNA, 15 nt, Human herpesvirus 2
ggcggcgccgcgccc

SEQ ID NO: 3961459 - RNA, 12 nt, Human herpesvirus 2
ggcggcggcguc

SEQ ID NO: 3961460 - RNA, 13 nt, Human herpesvirus 2
ggcggcggggaag

SEQ ID NO: 3961461 - RNA, 13 nt, Human herpesvirus 2
ggcggcguggccg

SEQ ID NO: 3961462 - RNA, 15 nt, Human herpesvirus 2
ggcggcguggccgcg

SEQ ID NO: 3961463 - RNA, 14 nt, Human herpesvirus 2
ggcggggggugugg

SEQ ID NO: 3961464 - RNA, 21 nt, Human herpesvirus 2
ggcgugauguuuuccgcaucu

SEQ ID NO: 3961465 - RNA, 15 nt, Human herpesvirus 2
ggcguugcugcgcug

SEQ ID NO: 3961466 - RNA, 13 nt, Human herpesvirus 2
ggcguuuggccaa

SEQ ID NO: 3961467 - RNA, 19 nt, Human herpesvirus 2
ggcuccaaacgccuccgga

SEQ ID NO: 3961468 - RNA, 17 nt, Human herpesvirus 2
ggcucccccgcggccuu

SEQ ID NO: 3961469 - RNA, 21 nt, Human herpesvirus 2
ggcuccuagccccccccccuc

SEQ ID NO: 3961470 - RNA, 22 nt, Human herpesvirus 2
ggcucucgccuccuuguggugg

SEQ ID NO: 3961471 - RNA, 13 nt, Human herpesvirus 2
ggcugcgggcgug

SEQ ID NO: 3961472 - RNA, 15 nt, Human herpesvirus 2
ggcuggagcucugcc

SEQ ID NO: 3961473 - RNA, 15 nt, Human herpesvirus 2
ggcuggcggcgcggc

SEQ ID NO: 3961474 - RNA, 15 nt, Human herpesvirus 2
ggcuucgggccaaca

SEQ ID NO: 3961475 - RNA, 21 nt, Human herpesvirus 2
ggcuucuucuuccccagcuuu

SEQ ID NO: 3961476 - RNA, 19 nt, Human herpesvirus 2
ggcuuugguguuuuuggca

SEQ ID NO: 3961477 - RNA, 21 nt, Human herpesvirus 2
gggaaggaaaugggggcgggg

SEQ ID NO: 3961478 - RNA, 18 nt, Human herpesvirus 2
gggaaucucgggucgccc

SEQ ID NO: 3961479 - RNA, 13 nt, Human herpesvirus 2
gggacgcgagccu

SEQ ID NO: 3961480 - RNA, 9 nt, Human herpesvirus 2
gggacggcg

SEQ ID NO: 3961481 - RNA, 16 nt, Human herpesvirus 2
gggagagggggaagga

SEQ ID NO: 3961482 - RNA, 21 nt, Human herpesvirus 2
gggagauggggagagggggaa

SEQ ID NO: 3961483 - RNA, 22 nt, Human herpesvirus 2
gggagccacucccgcggccccc

SEQ ID NO: 3961484 - RNA, 15 nt, Human herpesvirus 2
gggagggcagggccg

SEQ ID NO: 3961485 - RNA, 23 nt, Human herpesvirus 2
gggagucgggccccuacucgcca

SEQ ID NO: 3961486 - RNA, 20 nt, Human herpesvirus 2
gggagugggggggggggacg

SEQ ID NO: 3961487 - RNA, 12 nt, Human herpesvirus 2
gggaucagcaac

SEQ ID NO: 3961488 - RNA, 13 nt, Human herpesvirus 2
gggcagugcagua

SEQ ID NO: 3961489 - RNA, 16 nt, Human herpesvirus 2
gggcauggacccccca

SEQ ID NO: 3961490 - RNA, 12 nt, Human herpesvirus 2
gggcccaggucc

SEQ ID NO: 3961491 - RNA, 13 nt, Human herpesvirus 2
gggccccagggcu

SEQ ID NO: 3961492 - RNA, 16 nt, Human herpesvirus 2
gggcccgaagccgacc

SEQ ID NO: 3961493 - RNA, 17 nt, Human herpesvirus 2
gggccgacgugccgggg

SEQ ID NO: 3961494 - RNA, 14 nt, Human herpesvirus 2
gggccguggggccc

SEQ ID NO: 3961495 - RNA, 17 nt, Human herpesvirus 2
gggccguucggcaggcc

SEQ ID NO: 3961496 - RNA, 19 nt, Human herpesvirus 2
gggccuuuuuucggacggu

SEQ ID NO: 3961497 - RNA, 17 nt, Human herpesvirus 2
gggcgcgcggcgcgagc

SEQ ID NO: 3961498 - RNA, 14 nt, Human herpesvirus 2
gggcgcugagggcg

SEQ ID NO: 3961499 - RNA, 22 nt, Human herpesvirus 2
gggcguccugcggcagcgcgcc

SEQ ID NO: 3961500 - RNA, 14 nt, Human herpesvirus 2
gggcgugcugugcc

SEQ ID NO: 3961501 - RNA, 14 nt, Human herpesvirus 2
gggcguugccgggg

SEQ ID NO: 3961502 - RNA, 15 nt, Human herpesvirus 2
gggcguugccggggg

SEQ ID NO: 3961503 - RNA, 19 nt, Human herpesvirus 2
gggcucgccagcgacccgc

SEQ ID NO: 3961504 - RNA, 15 nt, Human herpesvirus 2
gggcucguccccugg

SEQ ID NO: 3961505 - RNA, 18 nt, Human herpesvirus 2
gggcuucguggaagagga

SEQ ID NO: 3961506 - RNA, 22 nt, Human herpesvirus 2
gggcuucguggaagaggaccug

SEQ ID NO: 3961507 - RNA, 13 nt, Human herpesvirus 2
ggggaaagaaaga

SEQ ID NO: 3961508 - RNA, 18 nt, Human herpesvirus 2
ggggaaagcuggcgucgg

SEQ ID NO: 3961509 - RNA, 23 nt, Human herpesvirus 2
ggggacccgacccuguggcgggc

SEQ ID NO: 3961510 - RNA, 21 nt, Human herpesvirus 2
ggggacccgccagagacccug

SEQ ID NO: 3961511 - RNA, 21 nt, Human herpesvirus 2
ggggacgaggcccaccccccc

SEQ ID NO: 3961512 - RNA, 21 nt, Human herpesvirus 2
ggggacuccccucuaccccca

SEQ ID NO: 3961513 - RNA, 23 nt, Human herpesvirus 2
ggggagcuucauuuugugggggc

SEQ ID NO: 3961514 - RNA, 13 nt, Human herpesvirus 2
ggggagggcggca

SEQ ID NO: 3961515 - RNA, 14 nt, Human herpesvirus 2
ggggagggcggcac

SEQ ID NO: 3961516 - RNA, 16 nt, Human herpesvirus 2
ggggaugguggugggc

SEQ ID NO: 3961517 - RNA, 18 nt, Human herpesvirus 2
ggggcaccggcaccggga

SEQ ID NO: 3961518 - RNA, 13 nt, Human herpesvirus 2
ggggcagugcagu

SEQ ID NO: 3961519 - RNA, 14 nt, Human herpesvirus 2
ggggcagugcagua

SEQ ID NO: 3961520 - RNA, 13 nt, Human herpesvirus 2
ggggcauggaccc

SEQ ID NO: 3961521 - RNA, 21 nt, Human herpesvirus 2
ggggccccaguaccggcgcgc

SEQ ID NO: 3961522 - RNA, 14 nt, Human herpesvirus 2
ggggccccggcccg

SEQ ID NO: 3961523 - RNA, 11 nt, Human herpesvirus 2
ggggcgccccc

SEQ ID NO: 3961524 - RNA, 13 nt, Human herpesvirus 2
ggggcgccccccc

SEQ ID NO: 3961525 - RNA, 19 nt, Human herpesvirus 2
ggggcgcgcaccgcugucc

SEQ ID NO: 3961526 - RNA, 21 nt, Human herpesvirus 2
ggggcgugccuguuguuuugg

SEQ ID NO: 3961527 - RNA, 20 nt, Human herpesvirus 2
ggggcgugugacuagaaaaa

SEQ ID NO: 3961528 - RNA, 21 nt, Human herpesvirus 2
ggggcugcgggcgugucgucc

SEQ ID NO: 3961529 - RNA, 14 nt, Human herpesvirus 2
ggggcugguuuugc

SEQ ID NO: 3961530 - RNA, 16 nt, Human herpesvirus 2
gggggaucucgaacac

SEQ ID NO: 3961531 - RNA, 19 nt, Human herpesvirus 2
gggggaugguggugggccu

SEQ ID NO: 3961532 - RNA, 18 nt, Human herpesvirus 2
gggggcgggggugccgug

SEQ ID NO: 3961533 - RNA, 14 nt, Human herpesvirus 2
gggggcuaggagcc

SEQ ID NO: 3961534 - RNA, 16 nt, Human herpesvirus 2
guugacgacggccccg

SEQ ID NO: 3961535 - RNA, 18 nt, Human herpesvirus 2
guugcgcuuuccggcccu

SEQ ID NO: 3961536 - RNA, 15 nt, Human herpesvirus 2
guuggaagaggcgga

SEQ ID NO: 3961537 - RNA, 22 nt, Human herpesvirus 2
guugguucguccgaccugcagg

SEQ ID NO: 3961538 - RNA, 18 nt, Human herpesvirus 2
guuguaguuguccgcggg

SEQ ID NO: 3961539 - RNA, 20 nt, Human herpesvirus 2
guuuccccggcccaccccca

SEQ ID NO: 3961540 - RNA, 13 nt, Human herpesvirus 2
guuucgccccacg

SEQ ID NO: 3961541 - RNA, 20 nt, Human herpesvirus 2
guuucucuuucuuucccccc

SEQ ID NO: 3961542 - RNA, 20 nt, Human herpesvirus 2
guuugagcagccgcgccgcu

SEQ ID NO: 3961543 - RNA, 11 nt, Human herpesvirus 2
guuuggggcau

SEQ ID NO: 3961544 - RNA, 19 nt, Human herpesvirus 2
guuuggggcggcacugggg

SEQ ID NO: 3961545 - RNA, 17 nt, Human herpesvirus 2
uaaccgcgagcgccgcu

SEQ ID NO: 3961546 - RNA, 18 nt, Human herpesvirus 2
uaaccgcgcgccuccucg

SEQ ID NO: 3961547 - RNA, 15 nt, Human herpesvirus 2
uacacgacccgccuc

SEQ ID NO: 3961548 - RNA, 19 nt, Human herpesvirus 2
uacacggcaacccccgggc

SEQ ID NO: 3961549 - RNA, 12 nt, Human herpesvirus 2
uacauuucccca

SEQ ID NO: 3961550 - RNA, 13 nt, Human herpesvirus 2
uaccacggggagg

SEQ ID NO: 3961551 - RNA, 23 nt, Human herpesvirus 2
uacguggccggguuuuuggcccu

SEQ ID NO: 3961552 - RNA, 15 nt, Human herpesvirus 2
uacgugugcccgccc

SEQ ID NO: 3961553 - RNA, 14 nt, Human herpesvirus 2
uagaagaaaaccac

SEQ ID NO: 3961554 - RNA, 18 nt, Human herpesvirus 2
uagaaguuacccucuucu

SEQ ID NO: 3961555 - RNA, 20 nt, Human herpesvirus 2
uaggcguugcguuggggcac

SEQ ID NO: 3961556 - RNA, 23 nt, Human herpesvirus 2
uaguccgcgccuccugcucgacc

SEQ ID NO: 3961557 - RNA, 19 nt, Human herpesvirus 2
uaugcguguguuggauccc

SEQ ID NO: 3961558 - RNA, 21 nt, Human herpesvirus 2
uauucaccacacagaaacaca

SEQ ID NO: 3961559 - RNA, 13 nt, Human herpesvirus 2
ucaaacgcggaca

SEQ ID NO: 3961560 - RNA, 15 nt, Human herpesvirus 2
ucaauagauuucccc

SEQ ID NO: 3961561 - RNA, 17 nt, Human herpesvirus 2
ucaccgagccgcugugc

SEQ ID NO: 3961562 - RNA, 22 nt, Human herpesvirus 2
ucaccgagccgcugugccaggu

SEQ ID NO: 3961563 - RNA, 16 nt, Human herpesvirus 2
ucaccgccccagcacc

SEQ ID NO: 3961564 - RNA, 19 nt, Human herpesvirus 2
ucaugucuuuccaccacca

SEQ ID NO: 3961565 - RNA, 22 nt, Human herpesvirus 2
uccacgccguggacgcccccuc

SEQ ID NO: 3961566 - RNA, 18 nt, Human herpesvirus 2
uccagcagcuucccauga

SEQ ID NO: 3961567 - RNA, 22 nt, Human herpesvirus 2
ucccacacucgcgucuggcugu

SEQ ID NO: 3961568 - RNA, 14 nt, Human herpesvirus 2
ucccauuggcccca

SEQ ID NO: 3961569 - RNA, 17 nt, Human herpesvirus 2
uccccagggagccccgg

SEQ ID NO: 3961570 - RNA, 12 nt, Human herpesvirus 2
ucccccccucaa

SEQ ID NO: 3961571 - RNA, 13 nt, Human herpesvirus 2
uccccgccccccc

SEQ ID NO: 3961572 - RNA, 17 nt, Human herpesvirus 2
uccccgcuggagccccu

SEQ ID NO: 3961573 - RNA, 15 nt, Human herpesvirus 2
uccccggcccucucu

SEQ ID NO: 3961574 - RNA, 12 nt, Human herpesvirus 2
uccccugcguaa

SEQ ID NO: 3961575 - RNA, 21 nt, Human herpesvirus 2
ucccgaaaccgcaggcgcgcc

SEQ ID NO: 3961576 - RNA, 20 nt, Human herpesvirus 2
ucccgacgauuagccaccgc

SEQ ID NO: 3961577 - RNA, 15 nt, Human herpesvirus 2
ucccgcacccccgcg

SEQ ID NO: 3961578 - RNA, 15 nt, Human herpesvirus 2
ucccgcagaaccucg

SEQ ID NO: 3961579 - RNA, 19 nt, Human herpesvirus 2
ucccgcucgcgguaauuag

SEQ ID NO: 3961580 - RNA, 15 nt, Human herpesvirus 2
ucccggcccgggccc

SEQ ID NO: 3961581 - RNA, 13 nt, Human herpesvirus 2
ucccguggcccuc

SEQ ID NO: 3961582 - RNA, 18 nt, Human herpesvirus 2
ucccugcggcuggcgcgg

SEQ ID NO: 3961583 - RNA, 19 nt, Human herpesvirus 2
ucccugcggcuggcgcggu

SEQ ID NO: 3961584 - RNA, 17 nt, Human herpesvirus 2
ucccuucuccauuccug

SEQ ID NO: 3961585 - RNA, 14 nt, Human herpesvirus 2
uccgaccugcagga

SEQ ID NO: 3961586 - RNA, 18 nt, Human herpesvirus 2
uccgacgaggccuucccg

SEQ ID NO: 3961587 - RNA, 17 nt, Human herpesvirus 2
uccgacuuccgcauaca

SEQ ID NO: 3961588 - RNA, 22 nt, Human herpesvirus 2
uccggcggccaccccgccgcag

SEQ ID NO: 3961589 - RNA, 13 nt, Human herpesvirus 2
uccggcuggcggc

SEQ ID NO: 3961590 - RNA, 18 nt, Human herpesvirus 2
uccggggguugggucugc

SEQ ID NO: 3961591 - RNA, 23 nt, Human herpesvirus 2
uccgggguuuccccggcccaccc

SEQ ID NO: 3961592 - RNA, 22 nt, Human herpesvirus 2
uccggugugccccacccccgag

SEQ ID NO: 3961593 - RNA, 22 nt, Human herpesvirus 2
uccguguccgcggucuguuugu

SEQ ID NO: 3961594 - RNA, 23 nt, Human herpesvirus 2
uccgugugauguucuuggcgcgc

SEQ ID NO: 3961595 - RNA, 21 nt, Human herpesvirus 2
uccuagccccccccccucacc

SEQ ID NO: 3961596 - RNA, 22 nt, Human herpesvirus 2
uccuauaaacucucccccgcaa

SEQ ID NO: 3961597 - RNA, 19 nt, Human herpesvirus 2
uccugcgcacgacagaccu

SEQ ID NO: 3961598 - RNA, 15 nt, Human herpesvirus 2
uccuugaugguuccg

SEQ ID NO: 3961599 - RNA, 16 nt, Human herpesvirus 2
ucgccaucgugcgcuc

SEQ ID NO: 3961600 - RNA, 20 nt, Human herpesvirus 2
ucgccccacacgccuuccag

SEQ ID NO: 3961601 - RNA, 17 nt, Human herpesvirus 2
ucgcccuaccgcuccga

SEQ ID NO: 3961602 - RNA, 16 nt, Human herpesvirus 2
ucgcccuagaggcugu

SEQ ID NO: 3961603 - RNA, 18 nt, Human herpesvirus 2
ucgccgacuccaggagcu

SEQ ID NO: 3961604 - RNA, 13 nt, Human herpesvirus 2
ucgccggggaccg

SEQ ID NO: 3961605 - RNA, 21 nt, Human herpesvirus 2
ucgccgggugucugcucccca

SEQ ID NO: 3961606 - RNA, 23 nt, Human herpesvirus 2
ucgcggacgagcccguggcccac

SEQ ID NO: 3961607 - RNA, 15 nt, Human herpesvirus 2
ucgcgucgggccaga

SEQ ID NO: 3961608 - RNA, 12 nt, Human herpesvirus 2
ucgcuccccgcg

SEQ ID NO: 3961609 - RNA, 20 nt, Human herpesvirus 2
ucgcuuuccacacccccucc

SEQ ID NO: 3961610 - RNA, 15 nt, Human herpesvirus 2
ucggaauuucacccc

SEQ ID NO: 3961611 - RNA, 23 nt, Human herpesvirus 2
ucggccaccuggaagcugccucc

SEQ ID NO: 3961612 - RNA, 18 nt, Human herpesvirus 2
ucgggagcaggacagccg

SEQ ID NO: 3961613 - RNA, 10 nt, Human herpesvirus 2
ucgggccccu

SEQ ID NO: 3961614 - RNA, 15 nt, Human herpesvirus 2
ucgggcugcugguga

SEQ ID NO: 3961615 - RNA, 17 nt, Human herpesvirus 2
ucggggccagggcuggc

SEQ ID NO: 3961616 - RNA, 15 nt, Human herpesvirus 2
ucgggggccggggcg

SEQ ID NO: 3961617 - RNA, 20 nt, Human herpesvirus 2
ucggugccccccaucucugu

SEQ ID NO: 3961618 - RNA, 20 nt, Human herpesvirus 2
ucggugccgcuuuaccccgc

SEQ ID NO: 3961619 - RNA, 22 nt, Human herpesvirus 2
ucgucgggccgucguuggccag

SEQ ID NO: 3961620 - RNA, 21 nt, Human herpesvirus 2
ucgucuggagcccguacccgg

SEQ ID NO: 3961621 - RNA, 18 nt, Human herpesvirus 2
ucguggcauggaagcccc

SEQ ID NO: 3961622 - RNA, 15 nt, Human herpesvirus 2
ucgugggggagugcg

SEQ ID NO: 3961623 - RNA, 21 nt, Human herpesvirus 2
ucuccgcaauaaacgccuucc

SEQ ID NO: 3961624 - RNA, 16 nt, Human herpesvirus 2
ucucugguuucgggcg

SEQ ID NO: 3961625 - RNA, 12 nt, Human herpesvirus 2
ucugaggccuca

SEQ ID NO: 3961626 - RNA, 13 nt, Human herpesvirus 2
ucugccaggaggg

SEQ ID NO: 3961627 - RNA, 20 nt, Human herpesvirus 2
ucugccccgcgucgggaucc

SEQ ID NO: 3961628 - RNA, 21 nt, Human herpesvirus 2
ucugcuuuuggugcgucuccg

SEQ ID NO: 3961629 - RNA, 21 nt, Human herpesvirus 2
ucuggaggguucggggcacuu

SEQ ID NO: 3961630 - RNA, 11 nt, Human herpesvirus 2
ucuucuucccc

SEQ ID NO: 3961631 - RNA, 15 nt, Human herpesvirus 2
ucuuuccguggcgcc

SEQ ID NO: 3961632 - RNA, 18 nt, Human herpesvirus 2
ucuuucggccaccacccc

SEQ ID NO: 3961633 - RNA, 20 nt, Human herpesvirus 2
ugaacugauugccaucgcgg

SEQ ID NO: 3961634 - RNA, 21 nt, Human herpesvirus 2
ugacgcggcccaaggcgcugc

SEQ ID NO: 3961635 - RNA, 13 nt, Human herpesvirus 2
ugacuccuggguc

SEQ ID NO: 3961636 - RNA, 14 nt, Human herpesvirus 2
ugaggaacuggguu

SEQ ID NO: 3961637 - RNA, 13 nt, Human herpesvirus 2
ugaggaagaaaga

SEQ ID NO: 3961638 - RNA, 17 nt, Human herpesvirus 2
ugaggggaaagcuggcg

SEQ ID NO: 3961639 - RNA, 21 nt, Human herpesvirus 2
ugaggggcaccaaaaaccagg

SEQ ID NO: 3961640 - RNA, 13 nt, Human herpesvirus 2
ugaucccccggaa

SEQ ID NO: 3961641 - RNA, 10 nt, Human herpesvirus 2
ugauccuggc

SEQ ID NO: 3961642 - RNA, 20 nt, Human herpesvirus 2
ugaucuuggcguuauuucca

SEQ ID NO: 3961643 - RNA, 17 nt, Human herpesvirus 2
ugauucucaccuggggc

SEQ ID NO: 3961644 - RNA, 21 nt, Human herpesvirus 2
ugcagcgcgggcgacgggcgg

SEQ ID NO: 3961645 - RNA, 15 nt, Human herpesvirus 2
ugccagguggcccuu

SEQ ID NO: 3961646 - RNA, 17 nt, Human herpesvirus 2
ugccaucgcucgggggu

SEQ ID NO: 3961647 - RNA, 23 nt, Human herpesvirus 2
ugcccccccucguucugcugcac

SEQ ID NO: 3961648 - RNA, 15 nt, Human herpesvirus 2
ugccccccuccuggg

SEQ ID NO: 3961649 - RNA, 19 nt, Human herpesvirus 2
aaaagacaccgauguucaa

SEQ ID NO: 3961650 - RNA, 14 nt, Human herpesvirus 2
aaaaucguuauuau

SEQ ID NO: 3961651 - RNA, 17 nt, Human herpesvirus 2
aaacaggaauggagaag

SEQ ID NO: 3961652 - RNA, 12 nt, Human herpesvirus 2
aaacaggcaccg

SEQ ID NO: 3961653 - RNA, 22 nt, Human herpesvirus 2
aaacaggcaccgcgggaggaag

SEQ ID NO: 3961654 - RNA, 20 nt, Human herpesvirus 2
aaacccgccggggcuucgug

SEQ ID NO: 3961655 - RNA, 22 nt, Human herpesvirus 2
aacagcucgcggacgagcccgu

SEQ ID NO: 3961656 - RNA, 13 nt, Human herpesvirus 2
aacgacugcacuu

SEQ ID NO: 3961657 - RNA, 10 nt, Human herpesvirus 2
aacgcccccu

SEQ ID NO: 3961658 - RNA, 17 nt, Human herpesvirus 2
aacgcgaccgucgccgc

SEQ ID NO: 3961659 - RNA, 23 nt, Human herpesvirus 2
aacgcgcuguggcgcgcccccgc

SEQ ID NO: 3961660 - RNA, 17 nt, Human herpesvirus 2
aacgcgggcguccccga

SEQ ID NO: 3961661 - RNA, 16 nt, Human herpesvirus 2
aacuaggacaguucau

SEQ ID NO: 3961662 - RNA, 23 nt, Human herpesvirus 2
aacuggguuacugcacuugcccc

SEQ ID NO: 3961663 - RNA, 23 nt, Human herpesvirus 2
aagccacccugggucgggagcag

SEQ ID NO: 3961664 - RNA, 23 nt, Human herpesvirus 2
aaggcaggggcagcucgcccccg

SEQ ID NO: 3961665 - RNA, 23 nt, Human herpesvirus 2
aaggcauuguugucguguggugu

SEQ ID NO: 3961666 - RNA, 22 nt, Human herpesvirus 2
aaggggguagugucggagaggc

SEQ ID NO: 3961667 - RNA, 14 nt, Human herpesvirus 2
aauacaccagagcc

SEQ ID NO: 3961668 - RNA, 13 nt, Human herpesvirus 2
aauuccagcagcu

SEQ ID NO: 3961669 - RNA, 14 nt, Human herpesvirus 2
aauugaaaucgcuu

SEQ ID NO: 3961670 - RNA, 14 nt, Human herpesvirus 2
aauuuuugugucau

SEQ ID NO: 3961671 - RNA, 17 nt, Human herpesvirus 2
acaaaaaugggacgcac

SEQ ID NO: 3961672 - RNA, 13 nt, Human herpesvirus 2
acacacacacagg

SEQ ID NO: 3961673 - RNA, 17 nt, Human herpesvirus 2
acacaccccccuucucc

SEQ ID NO: 3961674 - RNA, 15 nt, Human herpesvirus 2
acacacccccugucc

SEQ ID NO: 3961675 - RNA, 17 nt, Human herpesvirus 2
acacaccgggcuggggg

SEQ ID NO: 3961676 - RNA, 14 nt, Human herpesvirus 2
acacagacuggccg

SEQ ID NO: 3961677 - RNA, 20 nt, Human herpesvirus 2
acaccagacggcgggacccc

SEQ ID NO: 3961678 - RNA, 21 nt, Human herpesvirus 2
acaccagcagcuugcggggcu

SEQ ID NO: 3961679 - RNA, 22 nt, Human herpesvirus 2
acacccccuguccccgcccccc

SEQ ID NO: 3961680 - RNA, 18 nt, Human herpesvirus 2
acacgccugcccccgccu

SEQ ID NO: 3961681 - RNA, 13 nt, Human herpesvirus 2
acagcaacacaca

SEQ ID NO: 3961682 - RNA, 19 nt, Human herpesvirus 2
acagccccuggggcugucg

SEQ ID NO: 3961683 - RNA, 22 nt, Human herpesvirus 2
acaggccaucgccggggaccgc

SEQ ID NO: 3961684 - RNA, 14 nt, Human herpesvirus 2
acauuccccucucg

SEQ ID NO: 3961685 - RNA, 19 nt, Human herpesvirus 2
accacggucugguggcgcu

SEQ ID NO: 3961686 - RNA, 21 nt, Human herpesvirus 2
accaggucuuuccguggcgcc

SEQ ID NO: 3961687 - RNA, 22 nt, Human herpesvirus 2
accaggucuuuccguggcgccu

SEQ ID NO: 3961688 - RNA, 14 nt, Human herpesvirus 2
acccacacacaccc

SEQ ID NO: 3961689 - RNA, 15 nt, Human herpesvirus 2
accccaccuucgccu

SEQ ID NO: 3961690 - RNA, 16 nt, Human herpesvirus 2
acccccaucgggcugc

SEQ ID NO: 3961691 - RNA, 12 nt, Human herpesvirus 2
acccccccgccg

SEQ ID NO: 3961692 - RNA, 18 nt, Human herpesvirus 2
accccccuucccccuccu

SEQ ID NO: 3961693 - RNA, 18 nt, Human herpesvirus 2
acccccgggggggggcaa

SEQ ID NO: 3961694 - RNA, 13 nt, Human herpesvirus 2
acccccuccccgu

SEQ ID NO: 3961695 - RNA, 21 nt, Human herpesvirus 2
accccuaccugcgcgugcaga

SEQ ID NO: 3961696 - RNA, 17 nt, Human herpesvirus 2
acccgacaacagccccu

SEQ ID NO: 3961697 - RNA, 20 nt, Human herpesvirus 2
acccgccuaccagccccucg

SEQ ID NO: 3961698 - RNA, 19 nt, Human herpesvirus 2
acccgggcgagcuggcccu

SEQ ID NO: 3961699 - RNA, 20 nt, Human herpesvirus 2
acccucaccccaccccaucc

SEQ ID NO: 3961700 - RNA, 20 nt, Human herpesvirus 2
accgcacccgggccggguga

SEQ ID NO: 3961701 - RNA, 18 nt, Human herpesvirus 2
accgcaccggacgcgcac

SEQ ID NO: 3961702 - RNA, 21 nt, Human herpesvirus 2
accgcagucuggucgaggugg

SEQ ID NO: 3961703 - RNA, 21 nt, Human herpesvirus 2
accgccucuguuccuuucccu

SEQ ID NO: 3961704 - RNA, 14 nt, Human herpesvirus 2
accgcgcgccgccg

SEQ ID NO: 3961705 - RNA, 21 nt, Human herpesvirus 2
accgcgcgccgccgcgcgggc

SEQ ID NO: 3961706 - RNA, 12 nt, Human herpesvirus 2
accggggcggcg

SEQ ID NO: 3961707 - RNA, 20 nt, Human herpesvirus 2
accggucgcuuuccacaccc

SEQ ID NO: 3961708 - RNA, 21 nt, Human herpesvirus 2
accguggccgacaacugccug

SEQ ID NO: 3961709 - RNA, 21 nt, Human herpesvirus 2
accucgucgcgcgcaucgcca

SEQ ID NO: 3961710 - RNA, 22 nt, Human herpesvirus 2
accugccguaugcuaauuaaau

SEQ ID NO: 3961711 - RNA, 18 nt, Human herpesvirus 2
accuguuuuuacgggccc

SEQ ID NO: 3961712 - RNA, 21 nt, Human herpesvirus 2
acgacagcggggacccgggcg

SEQ ID NO: 3961713 - RNA, 18 nt, Human herpesvirus 2
acgaccaucgcguacagc

SEQ ID NO: 3961714 - RNA, 23 nt, Human herpesvirus 2
acgacccccgaacagccccuggg

SEQ ID NO: 3961715 - RNA, 17 nt, Human herpesvirus 2
acgacccgccucgggcc

SEQ ID NO: 3961716 - RNA, 17 nt, Human herpesvirus 2
acgagaagccgccccca

SEQ ID NO: 3961717 - RNA, 20 nt, Human herpesvirus 2
acgagccaaaccagccccgc

SEQ ID NO: 3961718 - RNA, 15 nt, Human herpesvirus 2
acgagcgcgcugccg

SEQ ID NO: 3961719 - RNA, 24 nt, Human herpesvirus 2
acgaggccgccaacgacuuccucg

SEQ ID NO: 3961720 - RNA, 20 nt, Human herpesvirus 2
acgaugggagccccgcguau

SEQ ID NO: 3961721 - RNA, 14 nt, Human herpesvirus 2
acgccagcugcugg

SEQ ID NO: 3961722 - RNA, 21 nt, Human herpesvirus 2
acgccgcggccauccugccca

SEQ ID NO: 3961723 - RNA, 19 nt, Human herpesvirus 2
acgcgcacguggggccucu

SEQ ID NO: 3961724 - RNA, 19 nt, Human herpesvirus 2
acgcgcgcaggcuggagcu

SEQ ID NO: 3961725 - RNA, 15 nt, Human herpesvirus 2
acgcgcgcgcccccg

SEQ ID NO: 3961726 - RNA, 21 nt, Human herpesvirus 2
acgcgcuguggcgcgcccccg

SEQ ID NO: 3961727 - RNA, 22 nt, Human herpesvirus 2
acgcgggcguccccgagcggcg

SEQ ID NO: 3961728 - RNA, 20 nt, Human herpesvirus 2
acgcgucgggggccggggcg

SEQ ID NO: 3961729 - RNA, 22 nt, Human herpesvirus 2
acggacaaccgagcgccgggca

SEQ ID NO: 3961730 - RNA, 20 nt, Human herpesvirus 2
acggacacccccccccaucu

SEQ ID NO: 3961731 - RNA, 15 nt, Human herpesvirus 2
acggccaggaugggu

SEQ ID NO: 3961732 - RNA, 15 nt, Human herpesvirus 2
acggccucgugcucg

SEQ ID NO: 3961733 - RNA, 15 nt, Human herpesvirus 2
acggcgucucccggg

SEQ ID NO: 3961734 - RNA, 17 nt, Human herpesvirus 2
acgggggucccgccucc

SEQ ID NO: 3961735 - RNA, 13 nt, Human herpesvirus 2
acgguccucaccg

SEQ ID NO: 3961736 - RNA, 17 nt, Human herpesvirus 2
acggucgccacucuccu

SEQ ID NO: 3961737 - RNA, 17 nt, Human herpesvirus 2
acgucacgcaggccgcc

SEQ ID NO: 3961738 - RNA, 15 nt, Human herpesvirus 2
acguccaccuuggcc

SEQ ID NO: 3961739 - RNA, 17 nt, Human herpesvirus 2
acgucgcaugcaaauua

SEQ ID NO: 3961740 - RNA, 18 nt, Human herpesvirus 2
acgugcacagccuggccg

SEQ ID NO: 3961741 - RNA, 15 nt, Human herpesvirus 2
acgugcgucuuccca

SEQ ID NO: 3961742 - RNA, 13 nt, Human herpesvirus 2
acgugugcccgcc

SEQ ID NO: 3961743 - RNA, 19 nt, Human herpesvirus 2
acguucggacggccccucg

SEQ ID NO: 3961744 - RNA, 19 nt, Human herpesvirus 2
acuacucggaaagcgaaga

SEQ ID NO: 3961745 - RNA, 14 nt, Human herpesvirus 2
acuagaaaaacaaa

SEQ ID NO: 3961746 - RNA, 22 nt, Human herpesvirus 2
acuauccuugccucguggggcu

SEQ ID NO: 3961747 - RNA, 22 nt, Human herpesvirus 2
acucccuccguguccgcggucu

SEQ ID NO: 3961748 - RNA, 20 nt, Human herpesvirus 2
acucuccugcgagcccucac

SEQ ID NO: 3961749 - RNA, 20 nt, Human herpesvirus 2
acugcacugccccccuccug

SEQ ID NO: 3961750 - RNA, 13 nt, Human herpesvirus 2
acugcacuugccc

SEQ ID NO: 3961751 - RNA, 23 nt, Human herpesvirus 2
acugcacuugcccccccccgggg

SEQ ID NO: 3961752 - RNA, 15 nt, Human herpesvirus 2
acugccuccacgccc

SEQ ID NO: 3961753 - RNA, 17 nt, Human herpesvirus 2
acuggcagccgggacga

SEQ ID NO: 3961754 - RNA, 23 nt, Human herpesvirus 2
acuuccuauaaacucucccccgc

SEQ ID NO: 3961755 - RNA, 15 nt, Human herpesvirus 2
acuuggacuccgcau

SEQ ID NO: 3961756 - RNA, 14 nt, Human herpesvirus 2
agaaauaaagaacg

SEQ ID NO: 3961757 - RNA, 23 nt, Human herpesvirus 2
agaacggacaaccgagcgccggg

SEQ ID NO: 3961758 - RNA, 19 nt, Human herpesvirus 2
agacacggugcgugcggcc

SEQ ID NO: 3961759 - RNA, 20 nt, Human herpesvirus 2
agacauggggaacccccaga

SEQ ID NO: 3961760 - RNA, 19 nt, Human herpesvirus 2
agaccaccucgcggcggcu

SEQ ID NO: 3961761 - RNA, 20 nt, Human herpesvirus 2
agacgcccgcgagccgcaca

SEQ ID NO: 3961762 - RNA, 20 nt, Human herpesvirus 2
agagaaaaagaaaaaaggag

SEQ ID NO: 3961763 - RNA, 19 nt, Human herpesvirus 2
agagacgaugggagccccg

SEQ ID NO: 3961764 - RNA, 16 nt, Human herpesvirus 2
agagcgggcccggggc

SEQ ID NO: 3961765 - RNA, 17 nt, Human herpesvirus 2
agaggcccggaacgagg

SEQ ID NO: 3961766 - RNA, 19 nt, Human herpesvirus 2
agagggggggaaagaaaga

SEQ ID NO: 3961767 - RNA, 14 nt, Human herpesvirus 2
agauggggagaggg

SEQ ID NO: 3961768 - RNA, 22 nt, Human herpesvirus 2
agauggggagagggggaaggaa

SEQ ID NO: 3961769 - RNA, 23 nt, Human herpesvirus 2
agcacggaggaacugggguacug

SEQ ID NO: 3961770 - RNA, 19 nt, Human herpesvirus 2
agccaccgucccgcccgcc

SEQ ID NO: 3961771 - RNA, 20 nt, Human herpesvirus 2
agccagggucggacaggagg

SEQ ID NO: 3961772 - RNA, 18 nt, Human herpesvirus 2
agccccccccccucaccc

SEQ ID NO: 3961773 - RNA, 20 nt, Human herpesvirus 2
agccccccccccucaccccu

SEQ ID NO: 3961774 - RNA, 13 nt, Human herpesvirus 2
agccccuggggcu

SEQ ID NO: 3961775 - RNA, 22 nt, Human herpesvirus 2
agccgacccgucuagcggccgg

SEQ ID NO: 3961776 - RNA, 21 nt, Human herpesvirus 2
agccuaucuugaucccccgga

SEQ ID NO: 3961777 - RNA, 23 nt, Human herpesvirus 2
agccuccgaggugcggagccucu

SEQ ID NO: 3961778 - RNA, 17 nt, Human herpesvirus 2
agcgccccgcggacccc

SEQ ID NO: 3961779 - RNA, 15 nt, Human herpesvirus 2
agcgcggccgugggc

SEQ ID NO: 3961780 - RNA, 13 nt, Human herpesvirus 2
agcggcgagugcu

SEQ ID NO: 3961781 - RNA, 21 nt, Human herpesvirus 2
agcgggggaggggggagaugg

SEQ ID NO: 3961782 - RNA, 17 nt, Human herpesvirus 2
agcguccggcuggcggc

SEQ ID NO: 3961783 - RNA, 12 nt, Human herpesvirus 2
agcguggggcgc

SEQ ID NO: 3961784 - RNA, 15 nt, Human herpesvirus 2
agcuaaggcgcccgc

SEQ ID NO: 3961785 - RNA, 23 nt, Human herpesvirus 2
agcucgcggacgagcccguggcc

SEQ ID NO: 3961786 - RNA, 13 nt, Human herpesvirus 2
agcucgggggcca

SEQ ID NO: 3961787 - RNA, 13 nt, Human herpesvirus 2
agcucugccugca

SEQ ID NO: 3961788 - RNA, 15 nt, Human herpesvirus 2
agcugcucgcgcacc

SEQ ID NO: 3961789 - RNA, 17 nt, Human herpesvirus 2
agcugcuggccaaacau

SEQ ID NO: 3961790 - RNA, 14 nt, Human herpesvirus 2
aggaaacgcaaaaa

SEQ ID NO: 3961791 - RNA, 13 nt, Human herpesvirus 2
aggaacagaggcg

SEQ ID NO: 3961792 - RNA, 21 nt, Human herpesvirus 2
aggaacccaauggccgcuccu

SEQ ID NO: 3961793 - RNA, 21 nt, Human herpesvirus 2
aggaacugggguacugcacug

SEQ ID NO: 3961794 - RNA, 22 nt, Human herpesvirus 2
aggaggcggcgccugcgccccg

SEQ ID NO: 3961795 - RNA, 12 nt, Human herpesvirus 2
aggagggcgggc

SEQ ID NO: 3961796 - RNA, 20 nt, Human herpesvirus 2
aggaggggggcagugcagua

SEQ ID NO: 3961797 - RNA, 12 nt, Human herpesvirus 2
aggcacggcgcc

SEQ ID NO: 3961798 - RNA, 14 nt, Human herpesvirus 2
aggcccggcccgcg

SEQ ID NO: 3961799 - RNA, 21 nt, Human herpesvirus 2
aggcccuggcgcaccugcaga

SEQ ID NO: 3961800 - RNA, 16 nt, Human herpesvirus 2
aggccucauccggccc

SEQ ID NO: 3961801 - RNA, 13 nt, Human herpesvirus 2
aggcgaccccgcc

SEQ ID NO: 3961802 - RNA, 23 nt, Human herpesvirus 2
aggcgcauaaagguccggcggcc

SEQ ID NO: 3961803 - RNA, 14 nt, Human herpesvirus 2
aggcgcugcgccug

SEQ ID NO: 3961804 - RNA, 13 nt, Human herpesvirus 2
aggcgcugcugcg

SEQ ID NO: 3961805 - RNA, 15 nt, Human herpesvirus 2
aggcuucccccccgc

SEQ ID NO: 3961806 - RNA, 17 nt, Human herpesvirus 2
aggcuucccccccgcca

SEQ ID NO: 3961807 - RNA, 23 nt, Human herpesvirus 2
agggccuggcgauccugggccug

SEQ ID NO: 3961808 - RNA, 15 nt, Human herpesvirus 2
agggcgagcucggcu

SEQ ID NO: 3961809 - RNA, 23 nt, Human herpesvirus 2
agggcggccucggccggcggagc

SEQ ID NO: 3961810 - RNA, 17 nt, Human herpesvirus 2
agggcuucguggaagag

SEQ ID NO: 3961811 - RNA, 15 nt, Human herpesvirus 2
aggggggcagugcag

SEQ ID NO: 3961812 - RNA, 19 nt, Human herpesvirus 2
aggggggcuuggacuggga

SEQ ID NO: 3961813 - RNA, 14 nt, Human herpesvirus 2
aggggugggcgugu

SEQ ID NO: 3961814 - RNA, 14 nt, Human herpesvirus 2
aggucaauagauuu

SEQ ID NO: 3961815 - RNA, 19 nt, Human herpesvirus 2
aggucugcgcgaggccgcu

SEQ ID NO: 3961816 - RNA, 21 nt, Human herpesvirus 2
aggucugcgcgaggccgcucu

SEQ ID NO: 3961817 - RNA, 16 nt, Human herpesvirus 2
aggugcaguugauucg

SEQ ID NO: 3961818 - RNA, 12 nt, Human herpesvirus 2
aggugcggagcc

SEQ ID NO: 3961819 - RNA, 13 nt, Human herpesvirus 2
aguaacccaguuc

SEQ ID NO: 3961820 - RNA, 14 nt, Human herpesvirus 2
aguaacccaguucc

SEQ ID NO: 3961821 - RNA, 21 nt, Human herpesvirus 2
agucacgcccccugaguugcg

SEQ ID NO: 3961822 - RNA, 20 nt, Human herpesvirus 2
aguccucggggacgcacggc

SEQ ID NO: 3961823 - RNA, 18 nt, Human herpesvirus 2
agucgcccauacaaauua

SEQ ID NO: 3961824 - RNA, 13 nt, Human herpesvirus 2
aguuugagcagcc

SEQ ID NO: 3961825 - RNA, 11 nt, Human herpesvirus 2
auaaaagccaa

SEQ ID NO: 3961826 - RNA, 23 nt, Human herpesvirus 2
auaacuuugguugucgccacacg

SEQ ID NO: 3961827 - RNA, 20 nt, Human herpesvirus 2
auaccggucgaucucggcgu

SEQ ID NO: 3961828 - RNA, 13 nt, Human herpesvirus 2
auauaaggcaggg

SEQ ID NO: 3961829 - RNA, 20 nt, Human herpesvirus 2
auaugcggaucgcgagcucc

SEQ ID NO: 3961830 - RNA, 21 nt, Human herpesvirus 2
aucacaguuccguuggggaac

SEQ ID NO: 3961831 - RNA, 12 nt, Human herpesvirus 2
aucauuucuguc

SEQ ID NO: 3961832 - RNA, 17 nt, Human herpesvirus 2
auccguggguuagaaaa

SEQ ID NO: 3961833 - RNA, 11 nt, Human herpesvirus 2
aucggaccccc

SEQ ID NO: 3961834 - RNA, 15 nt, Human herpesvirus 2
aucucaucaaacacg

SEQ ID NO: 3961835 - RNA, 17 nt, Human herpesvirus 2
aucucuggcuccaggcc

SEQ ID NO: 3961836 - RNA, 20 nt, Human herpesvirus 2
augcacguaaaacacgggcg

SEQ ID NO: 3961837 - RNA, 14 nt, Human herpesvirus 2
augcgacgccgccc

SEQ ID NO: 3961838 - RNA, 18 nt, Human herpesvirus 2
augcgacgccgccccugc

SEQ ID NO: 3961839 - RNA, 15 nt, Human herpesvirus 2
augcggggcgggguu

SEQ ID NO: 3961840 - RNA, 21 nt, Human herpesvirus 2
auggcgccuucuucgccccca

SEQ ID NO: 3961841 - RNA, 14 nt, Human herpesvirus 2
auggcggccgccgc

SEQ ID NO: 3961842 - RNA, 16 nt, Human herpesvirus 2
auggggggggaaagga

SEQ ID NO: 3961843 - RNA, 16 nt, Human herpesvirus 2
auguguucuccuggac

SEQ ID NO: 3961844 - RNA, 23 nt, Human herpesvirus 2
auuaauaaagagugagaaccaac

SEQ ID NO: 3961845 - RNA, 20 nt, Human herpesvirus 2
auuagcagcuuuuaacgggc

SEQ ID NO: 3961846 - RNA, 21 nt, Human herpesvirus 2
auucccgcuuaugguaauuaa

SEQ ID NO: 3961847 - RNA, 19 nt, Human herpesvirus 2
auuccgagggcagguccca

SEQ ID NO: 3961848 - RNA, 16 nt, Human herpesvirus 2
auucgggggucgggcg

SEQ ID NO: 3961849 - RNA, 16 nt, Human herpesvirus 2
auucucaccuggggcu

SEQ ID NO: 3961850 - RNA, 16 nt, Human herpesvirus 2
auugggauaucucaca

SEQ ID NO: 3961851 - RNA, 19 nt, Human herpesvirus 2
auugugggaauccucgggu

SEQ ID NO: 3961852 - RNA, 17 nt, Human herpesvirus 2
auuucuuuguucccucu

SEQ ID NO: 3961853 - RNA, 19 nt, Human herpesvirus 2
auuuuaaauaaacaaacaa

SEQ ID NO: 3961854 - RNA, 22 nt, Human herpesvirus 2
caaccccuaccugcgcgugcag

SEQ ID NO: 3961855 - RNA, 20 nt, Human herpesvirus 2
caacgagcugccccgcgguc

SEQ ID NO: 3961856 - RNA, 20 nt, Human herpesvirus 2
caagcgggcgggguggggag

SEQ ID NO: 3961857 - RNA, 21 nt, Human herpesvirus 2
caaggaacccaauggccgcuc

SEQ ID NO: 3961858 - RNA, 14 nt, Human herpesvirus 2
cacaaacacacggg

SEQ ID NO: 3961859 - RNA, 13 nt, Human herpesvirus 2
cacacacaggccc

SEQ ID NO: 3961860 - RNA, 23 nt, Human herpesvirus 2
cacacggucggugccccccaucu

SEQ ID NO: 3961861 - RNA, 12 nt, Human herpesvirus 2
cacaggcccacc

SEQ ID NO: 3961862 - RNA, 16 nt, Human herpesvirus 2
cacaggcccaccacca

SEQ ID NO: 3961863 - RNA, 15 nt, Human herpesvirus 2
cacaugacuucuggu

SEQ ID NO: 3961864 - RNA, 16 nt, Human herpesvirus 2
caccaacuccgcccuc

SEQ ID NO: 3961865 - RNA, 13 nt, Human herpesvirus 2
caccaccaaccug

SEQ ID NO: 3961866 - RNA, 21 nt, Human herpesvirus 2
caccacguguccccagggagc

SEQ ID NO: 3961867 - RNA, 20 nt, Human herpesvirus 2
caccagacggcgggaccccg

SEQ ID NO: 3961868 - RNA, 23 nt, Human herpesvirus 2
caccagagccgaacgcagguccu

SEQ ID NO: 3961869 - RNA, 18 nt, Human herpesvirus 2
cacccagaugcgccuggu

SEQ ID NO: 3961870 - RNA, 18 nt, Human herpesvirus 2
cacccccaaaccccgguu

SEQ ID NO: 3961871 - RNA, 14 nt, Human herpesvirus 2
cacccccagagggg

SEQ ID NO: 3961872 - RNA, 12 nt, Human herpesvirus 2
caccccccccuc

SEQ ID NO: 3961873 - RNA, 14 nt, Human herpesvirus 2
caccccccuccccu

SEQ ID NO: 3961874 - RNA, 13 nt, Human herpesvirus 2
caccccccugacu

SEQ ID NO: 3961875 - RNA, 15 nt, Human herpesvirus 2
cacccccgcgccgcc

SEQ ID NO: 3961876 - RNA, 12 nt, Human herpesvirus 2
cacccgcccguc

SEQ ID NO: 3961877 - RNA, 14 nt, Human herpesvirus 2
caccgaaggaggaa

SEQ ID NO: 3961878 - RNA, 13 nt, Human herpesvirus 2
caccgcaccacca

SEQ ID NO: 3961879 - RNA, 16 nt, Human herpesvirus 2
caccgcccccgcuggc

SEQ ID NO: 3961880 - RNA, 19 nt, Human herpesvirus 2
caccggaaaauccucggcc

SEQ ID NO: 3961881 - RNA, 18 nt, Human herpesvirus 2
cgguucgcgugcggccag

SEQ ID NO: 3961882 - RNA, 21 nt, Human herpesvirus 2
cgguuggacgaucccgggccc

SEQ ID NO: 3961883 - RNA, 15 nt, Human herpesvirus 2
cgucaacagggcgcu

SEQ ID NO: 3961884 - RNA, 12 nt, Human herpesvirus 2
cguccggcuggc

SEQ ID NO: 3961885 - RNA, 21 nt, Human herpesvirus 2
cguccggcuggcggcgcggca

SEQ ID NO: 3961886 - RNA, 14 nt, Human herpesvirus 2
cgucgcuaucacau

SEQ ID NO: 3961887 - RNA, 10 nt, Human herpesvirus 2
cgucgcuguu

SEQ ID NO: 3961888 - RNA, 20 nt, Human herpesvirus 2
cgucguggcauggaagcccc

SEQ ID NO: 3961889 - RNA, 19 nt, Human herpesvirus 2
cgucugcccguggguggcc

SEQ ID NO: 3961890 - RNA, 17 nt, Human herpesvirus 2
cgugccgcagaccaccu

SEQ ID NO: 3961891 - RNA, 19 nt, Human herpesvirus 2
cgugcuuuuguuccaccgc

SEQ ID NO: 3961892 - RNA, 21 nt, Human herpesvirus 2
cguggaugccggggccguggg

SEQ ID NO: 3961893 - RNA, 19 nt, Human herpesvirus 2
cguggccgacaacugccug

SEQ ID NO: 3961894 - RNA, 22 nt, Human herpesvirus 2
cguggccggguuuuuggcccug

SEQ ID NO: 3961895 - RNA, 17 nt, Human herpesvirus 2
cguggggccccagggcu

SEQ ID NO: 3961896 - RNA, 13 nt, Human herpesvirus 2
cgugguccacccg

SEQ ID NO: 3961897 - RNA, 21 nt, Human herpesvirus 2
cgugguccccgagcagcacgg

SEQ ID NO: 3961898 - RNA, 16 nt, Human herpesvirus 2
cguguccccagggagc

SEQ ID NO: 3961899 - RNA, 17 nt, Human herpesvirus 2
cgugucccucccggcca

SEQ ID NO: 3961900 - RNA, 18 nt, Human herpesvirus 2
cguguuugagucagggac

SEQ ID NO: 3961901 - RNA, 12 nt, Human herpesvirus 2
cguuauuuccaa

SEQ ID NO: 3961902 - RNA, 21 nt, Human herpesvirus 2
cguuauuuccaaacagggccu

SEQ ID NO: 3961903 - RNA, 14 nt, Human herpesvirus 2
cguucccaccgcac

SEQ ID NO: 3961904 - RNA, 16 nt, Human herpesvirus 2
cguucggcaggcccgc

SEQ ID NO: 3961905 - RNA, 12 nt, Human herpesvirus 2
cguucugcugca

SEQ ID NO: 3961906 - RNA, 18 nt, Human herpesvirus 2
cguuugggggcggacgug

SEQ ID NO: 3961907 - RNA, 21 nt, Human herpesvirus 2
cuaaccgcgcgccuccucgcg

SEQ ID NO: 3961908 - RNA, 15 nt, Human herpesvirus 2
cuaaggcgccgacgg

SEQ ID NO: 3961909 - RNA, 22 nt, Human herpesvirus 2
cuaccgcggcuucuucgccgcc

SEQ ID NO: 3961910 - RNA, 20 nt, Human herpesvirus 2
cuacgccccccucggcagcc

SEQ ID NO: 3961911 - RNA, 22 nt, Human herpesvirus 2
cuacugcgccaccguccaccuc

SEQ ID NO: 3961912 - RNA, 20 nt, Human herpesvirus 2
cuagccccccccccucaccc

SEQ ID NO: 3961913 - RNA, 23 nt, Human herpesvirus 2
cuagcggccgggucggcugucca

SEQ ID NO: 3961914 - RNA, 22 nt, Human herpesvirus 2
cuagcucgcggagggcggccag

SEQ ID NO: 3961915 - RNA, 22 nt, Human herpesvirus 2
cuagucuccgaucugccccgac

SEQ ID NO: 3961916 - RNA, 15 nt, Human herpesvirus 2
cuauaaacucucccc

SEQ ID NO: 3961917 - RNA, 12 nt, Human herpesvirus 2
cucaccccaccc

SEQ ID NO: 3961918 - RNA, 15 nt, Human herpesvirus 2
cucaccccaccccau

SEQ ID NO: 3961919 - RNA, 19 nt, Human herpesvirus 2
cucaccuggggcuccugcg

SEQ ID NO: 3961920 - RNA, 19 nt, Human herpesvirus 2
cucaguguuugggaaaucu

SEQ ID NO: 3961921 - RNA, 20 nt, Human herpesvirus 2
cucauaaaaaucgugaguca

SEQ ID NO: 3961922 - RNA, 19 nt, Human herpesvirus 2
cucaucgggacgcccggcc

SEQ ID NO: 3961923 - RNA, 16 nt, Human herpesvirus 2
cuccacccgcccgucu

SEQ ID NO: 3961924 - RNA, 22 nt, Human herpesvirus 2
cuccacgcccugcuguaucugg

SEQ ID NO: 3961925 - RNA, 17 nt, Human herpesvirus 2
cuccagguacugcugca

SEQ ID NO: 3961926 - RNA, 17 nt, Human herpesvirus 2
cucccccgacgucucgg

SEQ ID NO: 3961927 - RNA, 20 nt, Human herpesvirus 2
cuccccuucagccuggacca

SEQ ID NO: 3961928 - RNA, 18 nt, Human herpesvirus 2
cucccgaaaccgcaggcg

SEQ ID NO: 3961929 - RNA, 13 nt, Human herpesvirus 2
cucccgcaccccc

SEQ ID NO: 3961930 - RNA, 13 nt, Human herpesvirus 2
cucccggcuccuc

SEQ ID NO: 3961931 - RNA, 18 nt, Human herpesvirus 2
cucccguguaccucuggg

SEQ ID NO: 3961932 - RNA, 15 nt, Human herpesvirus 2
cucccugcggcuggc

SEQ ID NO: 3961933 - RNA, 22 nt, Human herpesvirus 2
cuccgcagcguaacgcaccccc

SEQ ID NO: 3961934 - RNA, 18 nt, Human herpesvirus 2
cuccgccagcgcccuucc

SEQ ID NO: 3961935 - RNA, 20 nt, Human herpesvirus 2
cuccgcccucgccgucuugg

SEQ ID NO: 3961936 - RNA, 15 nt, Human herpesvirus 2
cuccggucccuuccc

SEQ ID NO: 3961937 - RNA, 17 nt, Human herpesvirus 2
cucgaccagcggcccca

SEQ ID NO: 3961938 - RNA, 18 nt, Human herpesvirus 2
cucgacggagagccggac

SEQ ID NO: 3961939 - RNA, 17 nt, Human herpesvirus 2
cucgccagcgacccgca

SEQ ID NO: 3961940 - RNA, 14 nt, Human herpesvirus 2
cucgcggcaccgcg

SEQ ID NO: 3961941 - RNA, 14 nt, Human herpesvirus 2
cucgcggcggcucc

SEQ ID NO: 3961942 - RNA, 13 nt, Human herpesvirus 2
cucgcgguaauua

SEQ ID NO: 3961943 - RNA, 21 nt, Human herpesvirus 2
cucggccggcggagccccgga

SEQ ID NO: 3961944 - RNA, 17 nt, Human herpesvirus 2
cucgggggccaggaacu

SEQ ID NO: 3961945 - RNA, 14 nt, Human herpesvirus 2
cucggucgacgagg

SEQ ID NO: 3961946 - RNA, 14 nt, Human herpesvirus 2
cucguggggcugga

SEQ ID NO: 3961947 - RNA, 18 nt, Human herpesvirus 2
cucucaaacaaaaacaca

SEQ ID NO: 3961948 - RNA, 22 nt, Human herpesvirus 2
cucuccgcaauaaacgccuucc

SEQ ID NO: 3961949 - RNA, 15 nt, Human herpesvirus 2
cucugccacacgugg

SEQ ID NO: 3961950 - RNA, 16 nt, Human herpesvirus 2
cucuggcguccccagg

SEQ ID NO: 3961951 - RNA, 13 nt, Human herpesvirus 2
cucuggcuccagg

SEQ ID NO: 3961952 - RNA, 17 nt, Human herpesvirus 2
cucuggcuccaggccgc

SEQ ID NO: 3961953 - RNA, 19 nt, Human herpesvirus 2
cugaaccgcuggcuggaga

SEQ ID NO: 3961954 - RNA, 15 nt, Human herpesvirus 2
cugacggaccucggg

SEQ ID NO: 3961955 - RNA, 20 nt, Human herpesvirus 2
cugcacugccccccuccugg

SEQ ID NO: 3961956 - RNA, 20 nt, Human herpesvirus 2
cugcacuugcccccccccgg

SEQ ID NO: 3961957 - RNA, 13 nt, Human herpesvirus 2
cugcacuuuauug

SEQ ID NO: 3961958 - RNA, 15 nt, Human herpesvirus 2
cugcagaugcugccc

SEQ ID NO: 3961959 - RNA, 14 nt, Human herpesvirus 2
cugcagccccgguc

SEQ ID NO: 3961960 - RNA, 23 nt, Human herpesvirus 2
cugcccaccggcuccauccugag

SEQ ID NO: 3961961 - RNA, 19 nt, Human herpesvirus 2
cugcccgcggaccaccggg

SEQ ID NO: 3961962 - RNA, 19 nt, Human herpesvirus 2
cugcgcauggccugcgagg

SEQ ID NO: 3961963 - RNA, 20 nt, Human herpesvirus 2
cugcgccaccggccuggucg

SEQ ID NO: 3961964 - RNA, 20 nt, Human herpesvirus 2
cugcggcagcgcgccgacga

SEQ ID NO: 3961965 - RNA, 12 nt, Human herpesvirus 2
cugcggccgaca

SEQ ID NO: 3961966 - RNA, 19 nt, Human herpesvirus 2
cugcggccgacacggucgg

SEQ ID NO: 3961967 - RNA, 15 nt, Human herpesvirus 2
cugcgucguccaggg

SEQ ID NO: 3961968 - RNA, 19 nt, Human herpesvirus 2
cugcucgcgcaccugcgcg

SEQ ID NO: 3961969 - RNA, 18 nt, Human herpesvirus 2
cugcuuaagcggaacccg

SEQ ID NO: 3961970 - RNA, 20 nt, Human herpesvirus 2
cuggagauccccggggcccg

SEQ ID NO: 3961971 - RNA, 15 nt, Human herpesvirus 2
cuggccccucugcuu

SEQ ID NO: 3961972 - RNA, 19 nt, Human herpesvirus 2
cuggccuugcccccacccc

SEQ ID NO: 3961973 - RNA, 12 nt, Human herpesvirus 2
cuggcgggagcc

SEQ ID NO: 3961974 - RNA, 22 nt, Human herpesvirus 2
cuggcuggagaccgagcucgug

SEQ ID NO: 3961975 - RNA, 22 nt, Human herpesvirus 2
cugggcccgccgaccgcccccc

SEQ ID NO: 3961976 - RNA, 16 nt, Human herpesvirus 2
cugggggauuguggga

SEQ ID NO: 3961977 - RNA, 14 nt, Human herpesvirus 2
cugggucagcucau

SEQ ID NO: 3961978 - RNA, 15 nt, Human herpesvirus 2
cugggucgggagcag

SEQ ID NO: 3961979 - RNA, 20 nt, Human herpesvirus 2
cugggucgggagcaggacag

SEQ ID NO: 3961980 - RNA, 13 nt, Human herpesvirus 2
cugggugucgacc

SEQ ID NO: 3961981 - RNA, 14 nt, Human herpesvirus 2
cuggguuacugcac

SEQ ID NO: 3961982 - RNA, 19 nt, Human herpesvirus 2
cuguccagcgucgucgccc

SEQ ID NO: 3961983 - RNA, 20 nt, Human herpesvirus 2
cugugccagguggcccuucc

SEQ ID NO: 3961984 - RNA, 13 nt, Human herpesvirus 2
cuguggcgggcgc

SEQ ID NO: 3961985 - RNA, 16 nt, Human herpesvirus 2
cuguggguggugaugg

SEQ ID NO: 3961986 - RNA, 15 nt, Human herpesvirus 2
cuguuccuuucccuu

SEQ ID NO: 3961987 - RNA, 17 nt, Human herpesvirus 2
cuguuguuucugggccc

SEQ ID NO: 3961988 - RNA, 13 nt, Human herpesvirus 2
cuuaugguaauua

SEQ ID NO: 3961989 - RNA, 21 nt, Human herpesvirus 2
cuucauuuugugggggcccag

SEQ ID NO: 3961990 - RNA, 14 nt, Human herpesvirus 2
cuucccccgcccac

SEQ ID NO: 3961991 - RNA, 22 nt, Human herpesvirus 2
cuuccggaccccgaccccgagc

SEQ ID NO: 3961992 - RNA, 16 nt, Human herpesvirus 2
cuuccgugccccugga

SEQ ID NO: 3961993 - RNA, 21 nt, Human herpesvirus 2
cuucgaucgacgaacuggggc

SEQ ID NO: 3961994 - RNA, 17 nt, Human herpesvirus 2
cuucgccuccgcccucc

SEQ ID NO: 3961995 - RNA, 16 nt, Human herpesvirus 2
cuucggcggggcaccg

SEQ ID NO: 3961996 - RNA, 17 nt, Human herpesvirus 2
cuucucgccucucuucu

SEQ ID NO: 3961997 - RNA, 14 nt, Human herpesvirus 2
cuucuucgccgccc

SEQ ID NO: 3961998 - RNA, 20 nt, Human herpesvirus 2
cgcgaccaccaaggcccgga

SEQ ID NO: 3961999 - RNA, 17 nt, Human herpesvirus 2
cgcgacccaaggucccg

SEQ ID NO: 3962000 - RNA, 16 nt, Human herpesvirus 2
cgcgacggccccggcc

SEQ ID NO: 3962001 - RNA, 18 nt, Human herpesvirus 2
cgcgaugaccucccggcc

SEQ ID NO: 3962002 - RNA, 22 nt, Human herpesvirus 2
cgcgcaggcuggagcucugccu

SEQ ID NO: 3962003 - RNA, 20 nt, Human herpesvirus 2
cgcgcaucggaccccccauc

SEQ ID NO: 3962004 - RNA, 20 nt, Human herpesvirus 2
cgcgcaucucuggcuccagg

SEQ ID NO: 3962005 - RNA, 19 nt, Human herpesvirus 2
cgcgccaccgcccgcacca

SEQ ID NO: 3962006 - RNA, 21 nt, Human herpesvirus 2
cgcgcccccgacccggggccc

SEQ ID NO: 3962007 - RNA, 22 nt, Human herpesvirus 2
cgcgcgcccccgacccggggcc

SEQ ID NO: 3962008 - RNA, 18 nt, Human herpesvirus 2
cgcgcgguucugacgcgg

SEQ ID NO: 3962009 - RNA, 17 nt, Human herpesvirus 2
cgcgcuggcggaagugc

SEQ ID NO: 3962010 - RNA, 19 nt, Human herpesvirus 2
cgcggacgagcccguggcc

SEQ ID NO: 3962011 - RNA, 15 nt, Human herpesvirus 2
cgcggaguaugaccg

SEQ ID NO: 3962012 - RNA, 13 nt, Human herpesvirus 2
cgcggccccacgg

SEQ ID NO: 3962013 - RNA, 18 nt, Human herpesvirus 2
cgcgggcgacgccgcggc

SEQ ID NO: 3962014 - RNA, 17 nt, Human herpesvirus 2
cgcgggcgacgggcggc

SEQ ID NO: 3962015 - RNA, 16 nt, Human herpesvirus 2
cgcgggggacgggccg

SEQ ID NO: 3962016 - RNA, 17 nt, Human herpesvirus 2
cgcgggggacgggccgc

SEQ ID NO: 3962017 - RNA, 12 nt, Human herpesvirus 2
cgcgggggccgg

SEQ ID NO: 3962018 - RNA, 20 nt, Human herpesvirus 2
cgcggggggcacgggcccgg

SEQ ID NO: 3962019 - RNA, 21 nt, Human herpesvirus 2
cgcggggucgagcgcgccagg

SEQ ID NO: 3962020 - RNA, 18 nt, Human herpesvirus 2
cgcguccagguacccggc

SEQ ID NO: 3962021 - RNA, 15 nt, Human herpesvirus 2
cgcgucgggggccgg

SEQ ID NO: 3962022 - RNA, 17 nt, Human herpesvirus 2
cgcgugcagcgcgggcg

SEQ ID NO: 3962023 - RNA, 17 nt, Human herpesvirus 2
cgcgugccgcagaccac

SEQ ID NO: 3962024 - RNA, 15 nt, Human herpesvirus 2
cgcgugcggccagcc

SEQ ID NO: 3962025 - RNA, 23 nt, Human herpesvirus 2
cgcguugguccgggggcgggcgg

SEQ ID NO: 3962026 - RNA, 21 nt, Human herpesvirus 2
cgcucgcugcagggccuggcg

SEQ ID NO: 3962027 - RNA, 21 nt, Human herpesvirus 2
cgcucuccgugccccugguga

SEQ ID NO: 3962028 - RNA, 15 nt, Human herpesvirus 2
cgcugccggacgcgg

SEQ ID NO: 3962029 - RNA, 18 nt, Human herpesvirus 2
cgcugcgcgcgcaccugc

SEQ ID NO: 3962030 - RNA, 18 nt, Human herpesvirus 2
cgcuuacggcaacaaagg

SEQ ID NO: 3962031 - RNA, 19 nt, Human herpesvirus 2
cgcuuuccacacccccucc

SEQ ID NO: 3962032 - RNA, 16 nt, Human herpesvirus 2
cggaaaauccucggcc

SEQ ID NO: 3962033 - RNA, 19 nt, Human herpesvirus 2
cggaaagccggccccgguc

SEQ ID NO: 3962034 - RNA, 14 nt, Human herpesvirus 2
cggaacgccccggg

SEQ ID NO: 3962035 - RNA, 17 nt, Human herpesvirus 2
cggacagccagggcugg

SEQ ID NO: 3962036 - RNA, 20 nt, Human herpesvirus 2
cggacaggaggcgcagcugg

SEQ ID NO: 3962037 - RNA, 16 nt, Human herpesvirus 2
cggacaucacccacgu

SEQ ID NO: 3962038 - RNA, 16 nt, Human herpesvirus 2
cggacgucggcgauga

SEQ ID NO: 3962039 - RNA, 16 nt, Human herpesvirus 2
cggacuccgccccggc

SEQ ID NO: 3962040 - RNA, 17 nt, Human herpesvirus 2
cggacuccgccccggcg

SEQ ID NO: 3962041 - RNA, 16 nt, Human herpesvirus 2
cggacucggagggaag

SEQ ID NO: 3962042 - RNA, 16 nt, Human herpesvirus 2
cggacugcagccccgg

SEQ ID NO: 3962043 - RNA, 16 nt, Human herpesvirus 2
cggagaggcccgccgc

SEQ ID NO: 3962044 - RNA, 18 nt, Human herpesvirus 2
cggagcggugcagggccu

SEQ ID NO: 3962045 - RNA, 20 nt, Human herpesvirus 2
cggagcucgacgcacagcgg

SEQ ID NO: 3962046 - RNA, 16 nt, Human herpesvirus 2
cggaggaacuggggua

SEQ ID NO: 3962047 - RNA, 14 nt, Human herpesvirus 2
cggaggggcuccuc

SEQ ID NO: 3962048 - RNA, 23 nt, Human herpesvirus 2
cggagucccccggcuccgaguug

SEQ ID NO: 3962049 - RNA, 19 nt, Human herpesvirus 2
cggcaagaccugccccggc

SEQ ID NO: 3962050 - RNA, 18 nt, Human herpesvirus 2
cggcacaccggcggggcg

SEQ ID NO: 3962051 - RNA, 14 nt, Human herpesvirus 2
cggcacugggguga

SEQ ID NO: 3962052 - RNA, 20 nt, Human herpesvirus 2
cggcaggcgacccgccgccc

SEQ ID NO: 3962053 - RNA, 21 nt, Human herpesvirus 2
cggcaucguuuggguggagga

SEQ ID NO: 3962054 - RNA, 16 nt, Human herpesvirus 2
cggccaacgaggacca

SEQ ID NO: 3962055 - RNA, 23 nt, Human herpesvirus 2
cggccaccaccccccuccucccc

SEQ ID NO: 3962056 - RNA, 16 nt, Human herpesvirus 2
cggccacgccacgcug

SEQ ID NO: 3962057 - RNA, 22 nt, Human herpesvirus 2
cggccagcgggggcccgggguu

SEQ ID NO: 3962058 - RNA, 22 nt, Human herpesvirus 2
cggcccaaggcgcugcgccugc

SEQ ID NO: 3962059 - RNA, 12 nt, Human herpesvirus 2
cggcccccggcc

SEQ ID NO: 3962060 - RNA, 21 nt, Human herpesvirus 2
cggccccgccgggucaccggg

SEQ ID NO: 3962061 - RNA, 21 nt, Human herpesvirus 2
cggccccuguuggagccggag

SEQ ID NO: 3962062 - RNA, 21 nt, Human herpesvirus 2
cggcccgauucuuacggcgcg

SEQ ID NO: 3962063 - RNA, 12 nt, Human herpesvirus 2
cggcccuggagc

SEQ ID NO: 3962064 - RNA, 15 nt, Human herpesvirus 2
cggccgaauggcugc

SEQ ID NO: 3962065 - RNA, 22 nt, Human herpesvirus 2
cggccgccuccccgcuggagcc

SEQ ID NO: 3962066 - RNA, 14 nt, Human herpesvirus 2
cggccgggcagagc

SEQ ID NO: 3962067 - RNA, 14 nt, Human herpesvirus 2
cggccuggucgucc

SEQ ID NO: 3962068 - RNA, 16 nt, Human herpesvirus 2
cggccuuucccguggc

SEQ ID NO: 3962069 - RNA, 15 nt, Human herpesvirus 2
cggcgaacacugccu

SEQ ID NO: 3962070 - RNA, 14 nt, Human herpesvirus 2
cggcgaccaccgcg

SEQ ID NO: 3962071 - RNA, 14 nt, Human herpesvirus 2
cggcgagggcggcc

SEQ ID NO: 3962072 - RNA, 15 nt, Human herpesvirus 2
cggcgccgccccgcc

SEQ ID NO: 3962073 - RNA, 17 nt, Human herpesvirus 2
cggcgccgccccgccgc

SEQ ID NO: 3962074 - RNA, 16 nt, Human herpesvirus 2
cggcgcgagcucccug

SEQ ID NO: 3962075 - RNA, 12 nt, Human herpesvirus 2
cggcggccaccc

SEQ ID NO: 3962076 - RNA, 17 nt, Human herpesvirus 2
cggcggccccggcggcc

SEQ ID NO: 3962077 - RNA, 23 nt, Human herpesvirus 2
cggcgggucggguguccccggac

SEQ ID NO: 3962078 - RNA, 16 nt, Human herpesvirus 2
cggcguggccgcgacc

SEQ ID NO: 3962079 - RNA, 15 nt, Human herpesvirus 2
cggcuggcgcggugc

SEQ ID NO: 3962080 - RNA, 22 nt, Human herpesvirus 2
cgggaccacggucugguggcgc

SEQ ID NO: 3962081 - RNA, 14 nt, Human herpesvirus 2
cgggacgcccggcc

SEQ ID NO: 3962082 - RNA, 16 nt, Human herpesvirus 2
cgggaggggcuuggcc

SEQ ID NO: 3962083 - RNA, 16 nt, Human herpesvirus 2
cgggaguuccgacgac

SEQ ID NO: 3962084 - RNA, 17 nt, Human herpesvirus 2
cgggauccuccgccagc

SEQ ID NO: 3962085 - RNA, 12 nt, Human herpesvirus 2
cgggccucccgc

SEQ ID NO: 3962086 - RNA, 17 nt, Human herpesvirus 2
cgggcgaaaaggcccgg

SEQ ID NO: 3962087 - RNA, 19 nt, Human herpesvirus 2
cgggcgaaaaggcccggcc

SEQ ID NO: 3962088 - RNA, 15 nt, Human herpesvirus 2
cgggcgacgccgcgg

SEQ ID NO: 3962089 - RNA, 14 nt, Human herpesvirus 2
cgggcgggggcgcg

SEQ ID NO: 3962090 - RNA, 20 nt, Human herpesvirus 2
cgggcgggggucgggcgggc

SEQ ID NO: 3962091 - RNA, 12 nt, Human herpesvirus 2
cgggcggugccc

SEQ ID NO: 3962092 - RNA, 14 nt, Human herpesvirus 2
cgggcugcugguga

SEQ ID NO: 3962093 - RNA, 11 nt, Human herpesvirus 2
cggggaaacag

SEQ ID NO: 3962094 - RNA, 22 nt, Human herpesvirus 2
cggggaccgcaccggacgcgca

SEQ ID NO: 3962095 - RNA, 13 nt, Human herpesvirus 2
cggggacgcacgg

SEQ ID NO: 3962096 - RNA, 15 nt, Human herpesvirus 2
cggggacuccccucu

SEQ ID NO: 3962097 - RNA, 19 nt, Human herpesvirus 2
cggggaugggggggaaggg

SEQ ID NO: 3962098 - RNA, 14 nt, Human herpesvirus 2
cggggcauggaccc

SEQ ID NO: 3962099 - RNA, 19 nt, Human herpesvirus 2
cggggccguggggccccag

SEQ ID NO: 3962100 - RNA, 20 nt, Human herpesvirus 2
cggggcgcgccucugaccca

SEQ ID NO: 3962101 - RNA, 19 nt, Human herpesvirus 2
cgggggacgggccgcccgg

SEQ ID NO: 3962102 - RNA, 17 nt, Human herpesvirus 2
cgggggaggggggagau

SEQ ID NO: 3962103 - RNA, 14 nt, Human herpesvirus 2
cgggggcugcugcc

SEQ ID NO: 3962104 - RNA, 20 nt, Human herpesvirus 2
cgggggggggcaagugcagu

SEQ ID NO: 3962105 - RNA, 15 nt, Human herpesvirus 2
cgggggucccgccuc

SEQ ID NO: 3962106 - RNA, 15 nt, Human herpesvirus 2
cgggguucugggggu

SEQ ID NO: 3962107 - RNA, 15 nt, Human herpesvirus 2
cggguauaagggcag

SEQ ID NO: 3962108 - RNA, 16 nt, Human herpesvirus 2
cggguauaagggcagc

SEQ ID NO: 3962109 - RNA, 14 nt, Human herpesvirus 2
cgguaugcguggcc

SEQ ID NO: 3962110 - RNA, 12 nt, Human herpesvirus 2
cggucaggacca

SEQ ID NO: 3962111 - RNA, 12 nt, Human herpesvirus 2
cgguggacauga

SEQ ID NO: 3962112 - RNA, 13 nt, Human herpesvirus 2
cgguggacaugag

SEQ ID NO: 3962113 - RNA, 13 nt, Human herpesvirus 2
cgguggggccggc

SEQ ID NO: 3962114 - RNA, 19 nt, Human herpesvirus 2
cgguggggccggcggucgc

SEQ ID NO: 3962115 - RNA, 23 nt, Human herpesvirus 2
uuccuccgugcuggggaaaucuc

SEQ ID NO: 3962116 - RNA, 20 nt, Human herpesvirus 2
uugaccgccgccggggggcg

SEQ ID NO: 3962117 - RNA, 20 nt, Human herpesvirus 2
uugagcggaacgccccgggc

SEQ ID NO: 3962118 - RNA, 20 nt, Human herpesvirus 2
uugaugggcggggggguucg

SEQ ID NO: 3962119 - RNA, 22 nt, Human herpesvirus 2
uugcacaaaaagacgcggcccu

SEQ ID NO: 3962120 - RNA, 22 nt, Human herpesvirus 2
uugcgcgacacgcgcccggggc

SEQ ID NO: 3962121 - RNA, 22 nt, Human herpesvirus 2
uuggccggggagggcagggccg

SEQ ID NO: 3962122 - RNA, 17 nt, Human herpesvirus 2
uuggggauacgggggcg

SEQ ID NO: 3962123 - RNA, 18 nt, Human herpesvirus 2
uugggggggggggaagag

SEQ ID NO: 3962124 - RNA, 15 nt, Human herpesvirus 2
uuggugcgccgccgu

SEQ ID NO: 3962125 - RNA, 21 nt, Human herpesvirus 2
uugucgccggcgacacccacc

SEQ ID NO: 3962126 - RNA, 22 nt, Human herpesvirus 2
uugugcgggaggggcuuggccu

SEQ ID NO: 3962127 - RNA, 17 nt, Human herpesvirus 2
uugugggacugggggcg

SEQ ID NO: 3962128 - RNA, 15 nt, Human herpesvirus 2
uuuccguggcgccug

SEQ ID NO: 3962129 - RNA, 11 nt, Human herpesvirus 2
uuuccuccccu

SEQ ID NO: 3962130 - RNA, 17 nt, Human herpesvirus 2
uuucggcacccguccuc

SEQ ID NO: 3962131 - RNA, 16 nt, Human herpesvirus 2
uuucuggucuuccggg

SEQ ID NO: 3962132 - RNA, 22 nt, Human herpesvirus 2
uuugugaugcuuuugacacacu

SEQ ID NO: 3962133 - RNA, 13 nt, Human herpesvirus 2
uuuucggacggug

SEQ ID NO: 3962134 - RNA, 11 nt, Human herpesvirus 2
uuuuggcccug

SEQ ID NO: 3962135 - RNA, 15 nt, Human herpesvirus 2
guccgacacccgggc

SEQ ID NO: 3962136 - RNA, 13 nt, Human herpesvirus 2
guccgacgaggcc

SEQ ID NO: 3962137 - RNA, 13 nt, Human herpesvirus 2
guccgcggggggc

SEQ ID NO: 3962138 - RNA, 14 nt, Human herpesvirus 2
guccgggggcgggc

SEQ ID NO: 3962139 - RNA, 14 nt, Human herpesvirus 2
guccucaccgagcc

SEQ ID NO: 3962140 - RNA, 14 nt, Human herpesvirus 2
guccucacggccaa

SEQ ID NO: 3962141 - RNA, 16 nt, Human herpesvirus 2
guccucgggccuacgu

SEQ ID NO: 3962142 - RNA, 20 nt, Human herpesvirus 2
gucgcccccaaagucacgcc

SEQ ID NO: 3962143 - RNA, 20 nt, Human herpesvirus 2
gucgcccccgucugucgccu

SEQ ID NO: 3962144 - RNA, 17 nt, Human herpesvirus 2
gucgccggaugcgggcg

SEQ ID NO: 3962145 - RNA, 15 nt, Human herpesvirus 2
gucgccggcgugggu

SEQ ID NO: 3962146 - RNA, 14 nt, Human herpesvirus 2
gucgcgacccugcu

SEQ ID NO: 3962147 - RNA, 19 nt, Human herpesvirus 2
gucgcgggcgggagcggcg

SEQ ID NO: 3962148 - RNA, 21 nt, Human herpesvirus 2
gucgcuccccuucagccugga

SEQ ID NO: 3962149 - RNA, 20 nt, Human herpesvirus 2
gucggacgccagcugcuggc

SEQ ID NO: 3962150 - RNA, 16 nt, Human herpesvirus 2
gucgggcacaggcccg

SEQ ID NO: 3962151 - RNA, 14 nt, Human herpesvirus 2
gucgggcguggggg

SEQ ID NO: 3962152 - RNA, 18 nt, Human herpesvirus 2
gucguccgcggccccacg

SEQ ID NO: 3962153 - RNA, 12 nt, Human herpesvirus 2
gucguuggccag

SEQ ID NO: 3962154 - RNA, 17 nt, Human herpesvirus 2
gucugaccacgagcaca

SEQ ID NO: 3962155 - RNA, 14 nt, Human herpesvirus 2
gucugcgcgaggcc

SEQ ID NO: 3962156 - RNA, 19 nt, Human herpesvirus 2
gucugcguggggacgaggc

SEQ ID NO: 3962157 - RNA, 21 nt, Human herpesvirus 2
gucuggugugacgcgaugggg

SEQ ID NO: 3962158 - RNA, 15 nt, Human herpesvirus 2
gucugucgcgacgcc

SEQ ID NO: 3962159 - RNA, 19 nt, Human herpesvirus 2
gucugucgcgacgccgcgg

SEQ ID NO: 3962160 - RNA, 23 nt, Human herpesvirus 2
gucuuccggggacacgcggcggg

SEQ ID NO: 3962161 - RNA, 15 nt, Human herpesvirus 2
gucuuugggccccgc

SEQ ID NO: 3962162 - RNA, 16 nt, Human herpesvirus 2
gucuuugggccccgcc

SEQ ID NO: 3962163 - RNA, 17 nt, Human herpesvirus 2
gucuuuuuuuuuccugu

SEQ ID NO: 3962164 - RNA, 21 nt, Human herpesvirus 2
gugaaauuccgagaauuucuu

SEQ ID NO: 3962165 - RNA, 17 nt, Human herpesvirus 2
gugaggcguugugcggg

SEQ ID NO: 3962166 - RNA, 16 nt, Human herpesvirus 2
gugauggggguccugg

SEQ ID NO: 3962167 - RNA, 23 nt, Human herpesvirus 2
gugcacguguuugagucagggac

SEQ ID NO: 3962168 - RNA, 13 nt, Human herpesvirus 2
gugccgcacggcc

SEQ ID NO: 3962169 - RNA, 15 nt, Human herpesvirus 2
gugccgucgccgcgc

SEQ ID NO: 3962170 - RNA, 23 nt, Human herpesvirus 2
gugccucacgguccucaccgagc

SEQ ID NO: 3962171 - RNA, 15 nt, Human herpesvirus 2
gugcgccuuuaagac

SEQ ID NO: 3962172 - RNA, 18 nt, Human herpesvirus 2
gugcucgcagcagucgug

SEQ ID NO: 3962173 - RNA, 21 nt, Human herpesvirus 2
gugcugggcgcgagccaggca

SEQ ID NO: 3962174 - RNA, 22 nt, Human herpesvirus 2
gugcuguggcggucggccagca

SEQ ID NO: 3962175 - RNA, 21 nt, Human herpesvirus 2
gugcuuuuacccucaccccac

SEQ ID NO: 3962176 - RNA, 20 nt, Human herpesvirus 2
guggagcgccgggccucccg

SEQ ID NO: 3962177 - RNA, 19 nt, Human herpesvirus 2
guggaugccggggccgugg

SEQ ID NO: 3962178 - RNA, 21 nt, Human herpesvirus 2
guggccggguuuuuggcccug

SEQ ID NO: 3962179 - RNA, 13 nt, Human herpesvirus 2
guggcgcgccccc

SEQ ID NO: 3962180 - RNA, 12 nt, Human herpesvirus 2
guggcuggaggc

SEQ ID NO: 3962181 - RNA, 12 nt, Human herpesvirus 2
gugggggcccag

SEQ ID NO: 3962182 - RNA, 15 nt, Human herpesvirus 2
guggggggguggugg

SEQ ID NO: 3962183 - RNA, 15 nt, Human herpesvirus 2
gugggucucggggcc

SEQ ID NO: 3962184 - RNA, 23 nt, Human herpesvirus 2
guggugauggggguccugguggg

SEQ ID NO: 3962185 - RNA, 22 nt, Human herpesvirus 2
guggugcaguuugagcagccgc

SEQ ID NO: 3962186 - RNA, 21 nt, Human herpesvirus 2
gugguggccgaaagaaaagga

SEQ ID NO: 3962187 - RNA, 20 nt, Human herpesvirus 2
gugucugguuuuucuggggg

SEQ ID NO: 3962188 - RNA, 19 nt, Human herpesvirus 2
guucagcgcaucaggcuca

SEQ ID NO: 3962189 - RNA, 14 nt, Human herpesvirus 2
guuccguagacagc

SEQ ID NO: 3962190 - RNA, 17 nt, Human herpesvirus 2
guucgcgcaucucuggc

SEQ ID NO: 3962191 - RNA, 14 nt, Human herpesvirus 2
guucggaccugggg

SEQ ID NO: 3962192 - RNA, 13 nt, Human herpesvirus 2
guucggggggacg

SEQ ID NO: 3962193 - RNA, 18 nt, Human herpesvirus 2
guucguguuguggcugga

SEQ ID NO: 3962194 - RNA, 12 nt, Human herpesvirus 2
guucugccccgc

SEQ ID NO: 3962195 - RNA, 17 nt, Human herpesvirus 2
guucuggcggcccugga

SEQ ID NO: 3962196 - RNA, 23 nt, Human herpesvirus 2
guugaaccggcgagggcggccuc

SEQ ID NO: 3962197 - RNA, 16 nt, Human herpesvirus 2
guuucugaccggcgcc

SEQ ID NO: 3962198 - RNA, 15 nt, Human herpesvirus 2
guuucugggcccgcc

SEQ ID NO: 3962199 - RNA, 19 nt, Human herpesvirus 2
guuugugcgggugcccaug

SEQ ID NO: 3962200 - RNA, 14 nt, Human herpesvirus 2
uaaaacccacccuc

SEQ ID NO: 3962201 - RNA, 19 nt, Human herpesvirus 2
uaaaacccagacccgagcu

SEQ ID NO: 3962202 - RNA, 12 nt, Human herpesvirus 2
uaaaggcaggcg

SEQ ID NO: 3962203 - RNA, 13 nt, Human herpesvirus 2
uaacgggccgcca

SEQ ID NO: 3962204 - RNA, 12 nt, Human herpesvirus 2
uaagacagacgc

SEQ ID NO: 3962205 - RNA, 14 nt, Human herpesvirus 2
uacaccccacccua

SEQ ID NO: 3962206 - RNA, 15 nt, Human herpesvirus 2
uaccccaguuccucc

SEQ ID NO: 3962207 - RNA, 19 nt, Human herpesvirus 2
uacgacccccgaacagccc

SEQ ID NO: 3962208 - RNA, 12 nt, Human herpesvirus 2
uacgggggcggg

SEQ ID NO: 3962209 - RNA, 23 nt, Human herpesvirus 2
uagaggguucgcaaccacagcaa

SEQ ID NO: 3962210 - RNA, 15 nt, Human herpesvirus 2
uagccccccccccuc

SEQ ID NO: 3962211 - RNA, 16 nt, Human herpesvirus 2
uaggcauauccuccuu

SEQ ID NO: 3962212 - RNA, 14 nt, Human herpesvirus 2
uaggccagagcguu

SEQ ID NO: 3962213 - RNA, 19 nt, Human herpesvirus 2
uaggcccggggggggccuc

SEQ ID NO: 3962214 - RNA, 22 nt, Human herpesvirus 2
uagugucggagaggcccgccgc

SEQ ID NO: 3962215 - RNA, 13 nt, Human herpesvirus 2
uauaaaggccagg

SEQ ID NO: 3962216 - RNA, 20 nt, Human herpesvirus 2
uaugcaagcgggcggggugg

SEQ ID NO: 3962217 - RNA, 21 nt, Human herpesvirus 2
uauuuuccccccaccccuucc

SEQ ID NO: 3962218 - RNA, 13 nt, Human herpesvirus 2
ucaauagauuucc

SEQ ID NO: 3962219 - RNA, 17 nt, Human herpesvirus 2
ucaccgagagcgccguc

SEQ ID NO: 3962220 - RNA, 20 nt, Human herpesvirus 2
ucacggcaaccccagggcgu

SEQ ID NO: 3962221 - RNA, 13 nt, Human herpesvirus 2
ucagcaccccacc

SEQ ID NO: 3962222 - RNA, 23 nt, Human herpesvirus 2
ucagcaccccaccgaaaaacgga

SEQ ID NO: 3962223 - RNA, 13 nt, Human herpesvirus 2
ucagccuggacca

SEQ ID NO: 3962224 - RNA, 21 nt, Human herpesvirus 2
ucagcuccucuucgggcaccc

SEQ ID NO: 3962225 - RNA, 13 nt, Human herpesvirus 2
ucaggaccaggga

SEQ ID NO: 3962226 - RNA, 12 nt, Human herpesvirus 2
uccacacccccu

SEQ ID NO: 3962227 - RNA, 16 nt, Human herpesvirus 2
uccacccgggacgagc

SEQ ID NO: 3962228 - RNA, 19 nt, Human herpesvirus 2
uccagcgcgucggugccgc

SEQ ID NO: 3962229 - RNA, 23 nt, Human herpesvirus 2
ucccacacggucggugcccccca

SEQ ID NO: 3962230 - RNA, 13 nt, Human herpesvirus 2
ucccagggcacca

SEQ ID NO: 3962231 - RNA, 21 nt, Human herpesvirus 2
uccccggauggcaugggaggc

SEQ ID NO: 3962232 - RNA, 13 nt, Human herpesvirus 2
ucccgagccccgc

SEQ ID NO: 3962233 - RNA, 20 nt, Human herpesvirus 2
ucccgauggccgccccgcag

SEQ ID NO: 3962234 - RNA, 19 nt, Human herpesvirus 2
ucccgcaagagccugccgu

SEQ ID NO: 3962235 - RNA, 20 nt, Human herpesvirus 2
ucccggccgccauccccgcg

SEQ ID NO: 3962236 - RNA, 18 nt, Human herpesvirus 2
ucccgguaugguaauuag

SEQ ID NO: 3962237 - RNA, 15 nt, Human herpesvirus 2
ucccguaccccgccg

SEQ ID NO: 3962238 - RNA, 15 nt, Human herpesvirus 2
ucccguggcccucca

SEQ ID NO: 3962239 - RNA, 16 nt, Human herpesvirus 2
uccgacacccgggccc

SEQ ID NO: 3962240 - RNA, 19 nt, Human herpesvirus 2
uccgaggugcggagccucu

SEQ ID NO: 3962241 - RNA, 19 nt, Human herpesvirus 2
uccgcacgggcguccccgg

SEQ ID NO: 3962242 - RNA, 18 nt, Human herpesvirus 2
uccgccagcgcccuuccg

SEQ ID NO: 3962243 - RNA, 13 nt, Human herpesvirus 2
uccgcgagggccc

SEQ ID NO: 3962244 - RNA, 22 nt, Human herpesvirus 2
uccgcggcuuuaucaccccgcu

SEQ ID NO: 3962245 - RNA, 14 nt, Human herpesvirus 2
uccgcuaccgccuc

SEQ ID NO: 3962246 - RNA, 17 nt, Human herpesvirus 2
uccggaguuagcaaaac

SEQ ID NO: 3962247 - RNA, 14 nt, Human herpesvirus 2
uccggcggccaccc

SEQ ID NO: 3962248 - RNA, 22 nt, Human herpesvirus 2
uccgggggccugguggcaccuc

SEQ ID NO: 3962249 - RNA, 18 nt, Human herpesvirus 2
uccguuucgaccccuuua

SEQ ID NO: 3962250 - RNA, 16 nt, Human herpesvirus 2
uccucaccgagccgcu

SEQ ID NO: 3962251 - RNA, 19 nt, Human herpesvirus 2
uccuccgugcuggggaaau

SEQ ID NO: 3962252 - RNA, 14 nt, Human herpesvirus 2
uccugcggcucaug

SEQ ID NO: 3962253 - RNA, 18 nt, Human herpesvirus 2
uccuuggaauuccagcag

SEQ ID NO: 3962254 - RNA, 20 nt, Human herpesvirus 2
uccuuggaauuccagcagcu

SEQ ID NO: 3962255 - RNA, 18 nt, Human herpesvirus 2
uccuuuccaccccccuuc

SEQ ID NO: 3962256 - RNA, 23 nt, Human herpesvirus 2
ucgagguggcggaggggaucagc

SEQ ID NO: 3962257 - RNA, 15 nt, Human herpesvirus 2
ucgauugcggggacc

SEQ ID NO: 3962258 - RNA, 19 nt, Human herpesvirus 2
ucgcacgcgcgcaggcugg

SEQ ID NO: 3962259 - RNA, 22 nt, Human herpesvirus 2
ucgccccacggaccuccgggac

SEQ ID NO: 3962260 - RNA, 13 nt, Human herpesvirus 2
ucgcggcggcucc

SEQ ID NO: 3962261 - RNA, 13 nt, Human herpesvirus 2
ucgcggggacagc

SEQ ID NO: 3962262 - RNA, 13 nt, Human herpesvirus 2
ucgcgucacagaa

SEQ ID NO: 3962263 - RNA, 22 nt, Human herpesvirus 2
ucgcugcucucccguaccccgc

SEQ ID NO: 3962264 - RNA, 14 nt, Human herpesvirus 2
ucggagaggcccgc

SEQ ID NO: 3962265 - RNA, 19 nt, Human herpesvirus 2
ucgggaaucucgggucgcc

SEQ ID NO: 3962266 - RNA, 18 nt, Human herpesvirus 2
ucgggccgugucccuccc

SEQ ID NO: 3962267 - RNA, 14 nt, Human herpesvirus 2
ucgggcggacgucc

SEQ ID NO: 3962268 - RNA, 22 nt, Human herpesvirus 2
ucgggggguggcggucgcgucc

SEQ ID NO: 3962269 - RNA, 21 nt, Human herpesvirus 2
ucgggugacuuggugcgccgc

SEQ ID NO: 3962270 - RNA, 19 nt, Human herpesvirus 2
ucgguggacaugaggcuga

SEQ ID NO: 3962271 - RNA, 22 nt, Human herpesvirus 2
ucgugggggagugcgcucuucg

SEQ ID NO: 3962272 - RNA, 16 nt, Human herpesvirus 2
ucucaauaaagccagg

SEQ ID NO: 3962273 - RNA, 15 nt, Human herpesvirus 2
ucucugccuccuucg

SEQ ID NO: 3962274 - RNA, 17 nt, Human herpesvirus 2
ucugaucgacgacgccu

SEQ ID NO: 3962275 - RNA, 20 nt, Human herpesvirus 2
ucugcgcgaggccgcucucc

SEQ ID NO: 3962276 - RNA, 12 nt, Human herpesvirus 2
ucuggaagagcu

SEQ ID NO: 3962277 - RNA, 18 nt, Human herpesvirus 2
ucuggcggcccuggagcg

SEQ ID NO: 3962278 - RNA, 21 nt, Human herpesvirus 2
ucuggcggcccuggagcgcca

SEQ ID NO: 3962279 - RNA, 14 nt, Human herpesvirus 2
ucuuccuguaccug

SEQ ID NO: 3962280 - RNA, 15 nt, Human herpesvirus 2
ucuucuuccccagcu

SEQ ID NO: 3962281 - RNA, 20 nt, Human herpesvirus 2
ucuuuccaccaccagcacca

SEQ ID NO: 3962282 - RNA, 14 nt, Human herpesvirus 2
ucuuugggccccgc

SEQ ID NO: 3962283 - RNA, 18 nt, Human herpesvirus 2
ugaagccguccgaccauc

SEQ ID NO: 3962284 - RNA, 13 nt, Human herpesvirus 2
ugacauucacccc

SEQ ID NO: 3962285 - RNA, 13 nt, Human herpesvirus 2
ugacccucucggg

SEQ ID NO: 3962286 - RNA, 19 nt, Human herpesvirus 2
ugagcagccgcgccgcugc

SEQ ID NO: 3962287 - RNA, 14 nt, Human herpesvirus 2
ugagccgcgcggcc

SEQ ID NO: 3962288 - RNA, 18 nt, Human herpesvirus 2
ugagcggaacgccccggg

SEQ ID NO: 3962289 - RNA, 15 nt, Human herpesvirus 2
ugaucgacgacgccu

SEQ ID NO: 3962290 - RNA, 20 nt, Human herpesvirus 2
ugauuucgcccuaccgcucc

SEQ ID NO: 3962291 - RNA, 14 nt, Human herpesvirus 2
ugcaacgagcugcc

SEQ ID NO: 3962292 - RNA, 14 nt, Human herpesvirus 2
ugcacugccccccu

SEQ ID NO: 3962293 - RNA, 12 nt, Human herpesvirus 2
ugcagggccugg

SEQ ID NO: 3962294 - RNA, 17 nt, Human herpesvirus 2
ugcaguaccccaguucc

SEQ ID NO: 3962295 - RNA, 21 nt, Human herpesvirus 2
ugcaguaccccaguuccuccg

SEQ ID NO: 3962296 - RNA, 21 nt, Human herpesvirus 2
ugcaucgcaagccacccuggg

SEQ ID NO: 3962297 - RNA, 14 nt, Human herpesvirus 2
ugccagguggcccu

SEQ ID NO: 3962298 - RNA, 17 nt, Human herpesvirus 2
ugcccauggcgucggcg

SEQ ID NO: 3962299 - RNA, 13 nt, Human herpesvirus 2
ugccccccaucuc

SEQ ID NO: 3962300 - RNA, 18 nt, Human herpesvirus 2
ugccccccggcgcgggcg

SEQ ID NO: 3962301 - RNA, 21 nt, Human herpesvirus 2
ugcccgcgggucugcgugggg

SEQ ID NO: 3962302 - RNA, 17 nt, Human herpesvirus 2
ugccugacccucucggg

SEQ ID NO: 3962303 - RNA, 12 nt, Human herpesvirus 2
ugcgaaacagag

SEQ ID NO: 3962304 - RNA, 14 nt, Human herpesvirus 2
ugcgcaugggccgc

SEQ ID NO: 3962305 - RNA, 19 nt, Human herpesvirus 2
ugcgccuccguccuuucca

SEQ ID NO: 3962306 - RNA, 18 nt, Human herpesvirus 2
ugcgcggcguuggcgcgc

SEQ ID NO: 3962307 - RNA, 21 nt, Human herpesvirus 2
ugcgcuuauaagagcgggccc

SEQ ID NO: 3962308 - RNA, 19 nt, Human herpesvirus 2
ugcgcuuuccggcccuccc

SEQ ID NO: 3962309 - RNA, 12 nt, Human herpesvirus 2
ugcggcaggcga

SEQ ID NO: 3962310 - RNA, 19 nt, Human herpesvirus 2
ugcggggaccgcaccggac

SEQ ID NO: 3962311 - RNA, 22 nt, Human herpesvirus 2
ugcucguaaaaauggcggccgc

SEQ ID NO: 3962312 - RNA, 17 nt, Human herpesvirus 2
ugcucucccguaccccg

SEQ ID NO: 3962313 - RNA, 21 nt, Human herpesvirus 2
ugcugcugagcccugccccgc

SEQ ID NO: 3962314 - RNA, 12 nt, Human herpesvirus 2
ugcugggguccg

SEQ ID NO: 3962315 - RNA, 20 nt, Human herpesvirus 2
ugcuuggaggcccucuggga

SEQ ID NO: 3962316 - RNA, 23 nt, Human herpesvirus 2
uggaagaggaccugcguguuuuc

SEQ ID NO: 3962317 - RNA, 15 nt, Human herpesvirus 2
uggaagcccccggca

SEQ ID NO: 3962318 - RNA, 16 nt, Human herpesvirus 2
uggacgaucccgggcc

SEQ ID NO: 3962319 - RNA, 17 nt, Human herpesvirus 2
uggacgcgccucccggg

SEQ ID NO: 3962320 - RNA, 15 nt, Human herpesvirus 2
uggacugggagccgc

SEQ ID NO: 3962321 - RNA, 20 nt, Human herpesvirus 2
uggagaacggauaccgacag

SEQ ID NO: 3962322 - RNA, 17 nt, Human herpesvirus 2
uggaggggggugcugug

SEQ ID NO: 3962323 - RNA, 13 nt, Human herpesvirus 2
uggcccagcgcac

SEQ ID NO: 3962324 - RNA, 23 nt, Human herpesvirus 2
uggcccguuucuucggggggccc

SEQ ID NO: 3962325 - RNA, 15 nt, Human herpesvirus 2
uggccgcuccugccc

SEQ ID NO: 3962326 - RNA, 16 nt, Human herpesvirus 2
uggccgcuccugcccg

SEQ ID NO: 3962327 - RNA, 14 nt, Human herpesvirus 2
uggcgaggggcggg

SEQ ID NO: 3962328 - RNA, 17 nt, Human herpesvirus 2
uggcgcuugggcgucgc

SEQ ID NO: 3962329 - RNA, 18 nt, Human herpesvirus 2
uggcggucgcguccggaa

SEQ ID NO: 3962330 - RNA, 12 nt, Human herpesvirus 2
uggcguccccag

SEQ ID NO: 3962331 - RNA, 11 nt, Human herpesvirus 2
uggcgucggag

SEQ ID NO: 3962332 - RNA, 16 nt, Human herpesvirus 2
uggcuucgggccaaca

SEQ ID NO: 3962333 - RNA, 16 nt, Human herpesvirus 2
ugggaaaucuauugaa

SEQ ID NO: 3962334 - RNA, 16 nt, Human herpesvirus 2
ugggcccgccgaccgc

SEQ ID NO: 3962335 - RNA, 23 nt, Human herpesvirus 2
ugggcccgugugggaggguggcu

SEQ ID NO: 3962336 - RNA, 23 nt, Human herpesvirus 2
ugggccugugggucugcgccacc

SEQ ID NO: 3962337 - RNA, 17 nt, Human herpesvirus 2
ugggcgcgagccaggca

SEQ ID NO: 3962338 - RNA, 14 nt, Human herpesvirus 2
uggggaaagggaag

SEQ ID NO: 3962339 - RNA, 20 nt, Human herpesvirus 2
uggggacgacgggcgccccc

SEQ ID NO: 3962340 - RNA, 11 nt, Human herpesvirus 2
uggggagaggg

SEQ ID NO: 3962341 - RNA, 20 nt, Human herpesvirus 2
uggggccucucgacggagag

SEQ ID NO: 3962342 - RNA, 15 nt, Human herpesvirus 2
ugggggauuguggga

SEQ ID NO: 3962343 - RNA, 17 nt, Human herpesvirus 2
ugggggggggggaagag

SEQ ID NO: 3962344 - RNA, 16 nt, Human herpesvirus 2
ugggggggggggggcg

SEQ ID NO: 3962345 - RNA, 17 nt, Human herpesvirus 2
uggggugggggaagaag

SEQ ID NO: 3962346 - RNA, 16 nt, Human herpesvirus 2
ugggguuuuggcggcc

SEQ ID NO: 3962347 - RNA, 24 nt, Human herpesvirus 2
ugguggcaccuccccggcggccgc

SEQ ID NO: 3962348 - RNA, 19 nt, Human herpesvirus 2
ugguguguuuggcgugugu

SEQ ID NO: 3962349 - RNA, 23 nt, Human herpesvirus 2
uguaauggggccgcaguguuuuu

SEQ ID NO: 3962350 - RNA, 21 nt, Human herpesvirus 2
uguacaaacacggggacggcc

SEQ ID NO: 3962351 - RNA, 16 nt, Human herpesvirus 2
ugucggagaggcccgc

SEQ ID NO: 3962352 - RNA, 16 nt, Human herpesvirus 2
ugucucgcggcccggc

SEQ ID NO: 3962353 - RNA, 20 nt, Human herpesvirus 2
ugugccagguggcccuuccg

SEQ ID NO: 3962354 - RNA, 17 nt, Human herpesvirus 2
uguggcggucggccagc

SEQ ID NO: 3962355 - RNA, 14 nt, Human herpesvirus 2
uguggggccccggc

SEQ ID NO: 3962356 - RNA, 16 nt, Human herpesvirus 2
ugugucgcggggacag

SEQ ID NO: 3962357 - RNA, 13 nt, Human herpesvirus 2
uguguuaacgcaa

SEQ ID NO: 3962358 - RNA, 20 nt, Human herpesvirus 2
uguguuuugugggacugggg

SEQ ID NO: 3962359 - RNA, 22 nt, Human herpesvirus 2
uguuacaccccccugacucagg

SEQ ID NO: 3962360 - RNA, 22 nt, Human herpesvirus 2
uguucgcgggcgacgccgcggc

SEQ ID NO: 3962361 - RNA, 17 nt, Human herpesvirus 2
uguuggaucccuuugug

SEQ ID NO: 3962362 - RNA, 16 nt, Human herpesvirus 2
uguuguguuugcuggg

SEQ ID NO: 3962363 - RNA, 11 nt, Human herpesvirus 2
uguuucaucau

SEQ ID NO: 3962364 - RNA, 11 nt, Human herpesvirus 2
uuacccacaca

SEQ ID NO: 3962365 - RNA, 12 nt, Human herpesvirus 2
uuacccacacac

SEQ ID NO: 3962366 - RNA, 16 nt, Human herpesvirus 2
uucaauagauuuccca

SEQ ID NO: 3962367 - RNA, 23 nt, Human herpesvirus 2
uuccccgcucccguguaccucug

SEQ ID NO: 3962368 - RNA, 16 nt, Human herpesvirus 2
uuccuccccucgccug

SEQ ID NO: 3962369 - RNA, 20 nt, Human herpesvirus 2
aaaccccgguuggggcgggc

SEQ ID NO: 3962370 - RNA, 16 nt, Human herpesvirus 2
aaacguucggacggcc

SEQ ID NO: 3962371 - RNA, 14 nt, Human herpesvirus 2
aaagaacguggugu

SEQ ID NO: 3962372 - RNA, 13 nt, Human herpesvirus 2
aaaggccagcaga

SEQ ID NO: 3962373 - RNA, 12 nt, Human herpesvirus 2
aaagguuggugu

SEQ ID NO: 3962374 - RNA, 13 nt, Human herpesvirus 2
aacacaccgggcu

SEQ ID NO: 3962375 - RNA, 13 nt, Human herpesvirus 2
aacacccggcgcc

SEQ ID NO: 3962376 - RNA, 23 nt, Human herpesvirus 2
aacaccguccccgagagccugau

SEQ ID NO: 3962377 - RNA, 13 nt, Human herpesvirus 2
aacagagcucuuu

SEQ ID NO: 3962378 - RNA, 21 nt, Human herpesvirus 2
aacaguccguuucgaccccuu

SEQ ID NO: 3962379 - RNA, 17 nt, Human herpesvirus 2
aacaucgggaaaacgga

SEQ ID NO: 3962380 - RNA, 22 nt, Human herpesvirus 2
aacaugacaacgacgccccucu

SEQ ID NO: 3962381 - RNA, 14 nt, Human herpesvirus 2
aacauuggcaagca

SEQ ID NO: 3962382 - RNA, 18 nt, Human herpesvirus 2
aaccggcgagggcggccu

SEQ ID NO: 3962383 - RNA, 15 nt, Human herpesvirus 2
aacgagcgugugguu

SEQ ID NO: 3962384 - RNA, 21 nt, Human herpesvirus 2
aacgcacccccggaccccgcu

SEQ ID NO: 3962385 - RNA, 15 nt, Human herpesvirus 2
aacgcgggcgggggc

SEQ ID NO: 3962386 - RNA, 11 nt, Human herpesvirus 2
aagaagguuuc

SEQ ID NO: 3962387 - RNA, 15 nt, Human herpesvirus 2
aagagagcgccccgc

SEQ ID NO: 3962388 - RNA, 16 nt, Human herpesvirus 2
aagaggcggacccagu

SEQ ID NO: 3962389 - RNA, 19 nt, Human herpesvirus 2
aagcgaagacgaggccgcc

SEQ ID NO: 3962390 - RNA, 20 nt, Human herpesvirus 2
aagcgggccguucggcaggc

SEQ ID NO: 3962391 - RNA, 22 nt, Human herpesvirus 2
aaggucccgauggccgccccgc

SEQ ID NO: 3962392 - RNA, 19 nt, Human herpesvirus 2
aagucucuuggggaaaucu

SEQ ID NO: 3962393 - RNA, 21 nt, Human herpesvirus 2
aagugcaguaacccaguuccu

SEQ ID NO: 3962394 - RNA, 12 nt, Human herpesvirus 2
aauagauuuccc

SEQ ID NO: 3962395 - RNA, 18 nt, Human herpesvirus 2
aauguggggccccggccc

SEQ ID NO: 3962396 - RNA, 15 nt, Human herpesvirus 2
aauuagaaacuuuua

SEQ ID NO: 3962397 - RNA, 19 nt, Human herpesvirus 2
acaacaguacucaucggga

SEQ ID NO: 3962398 - RNA, 14 nt, Human herpesvirus 2
acacacaccccccu

SEQ ID NO: 3962399 - RNA, 20 nt, Human herpesvirus 2
acacacaggcccaccaccau

SEQ ID NO: 3962400 - RNA, 15 nt, Human herpesvirus 2
acacaccgggcuggg

SEQ ID NO: 3962401 - RNA, 21 nt, Human herpesvirus 2
acaccagacggcgggaccccg

SEQ ID NO: 3962402 - RNA, 12 nt, Human herpesvirus 2
acacccccuccc

SEQ ID NO: 3962403 - RNA, 18 nt, Human herpesvirus 2
acaccucccagugccccg

SEQ ID NO: 3962404 - RNA, 19 nt, Human herpesvirus 2
acacggugcgugcggcccu

SEQ ID NO: 3962405 - RNA, 22 nt, Human herpesvirus 2
acacucgcgucuggcuguguuu

SEQ ID NO: 3962406 - RNA, 20 nt, Human herpesvirus 2
acagagaaaggcccccagac

SEQ ID NO: 3962407 - RNA, 16 nt, Human herpesvirus 2
acagcacggccgggug

SEQ ID NO: 3962408 - RNA, 16 nt, Human herpesvirus 2
acagccccuggggcug

SEQ ID NO: 3962409 - RNA, 14 nt, Human herpesvirus 2
acaucaagcccaca

SEQ ID NO: 3962410 - RNA, 11 nt, Human herpesvirus 2
accaaccuggc

SEQ ID NO: 3962411 - RNA, 11 nt, Human herpesvirus 2
accaccaaggc

SEQ ID NO: 3962412 - RNA, 13 nt, Human herpesvirus 2
accaccaaggccc

SEQ ID NO: 3962413 - RNA, 21 nt, Human herpesvirus 2
accacccccccacuuuccucc

SEQ ID NO: 3962414 - RNA, 15 nt, Human herpesvirus 2
accaccgccccgccu

SEQ ID NO: 3962415 - RNA, 16 nt, Human herpesvirus 2
accacguguccccagg

SEQ ID NO: 3962416 - RNA, 18 nt, Human herpesvirus 2
accagccccucgcccccg

SEQ ID NO: 3962417 - RNA, 13 nt, Human herpesvirus 2
accccccacgccc

SEQ ID NO: 3962418 - RNA, 17 nt, Human herpesvirus 2
accccccggccccccgc

SEQ ID NO: 3962419 - RNA, 18 nt, Human herpesvirus 2
acccccggcgauucccuu

SEQ ID NO: 3962420 - RNA, 18 nt, Human herpesvirus 2
acccgacaacagccccug

SEQ ID NO: 3962421 - RNA, 17 nt, Human herpesvirus 2
acccguccgaucccggu

SEQ ID NO: 3962422 - RNA, 19 nt, Human herpesvirus 2
acccucaccccaccccauc

SEQ ID NO: 3962423 - RNA, 13 nt, Human herpesvirus 2
accgaagaggugc

SEQ ID NO: 3962424 - RNA, 16 nt, Human herpesvirus 2
accgagccgcugugcc

SEQ ID NO: 3962425 - RNA, 16 nt, Human herpesvirus 2
accgcacccgggccgg

SEQ ID NO: 3962426 - RNA, 18 nt, Human herpesvirus 2
accgccaacaccagggca

SEQ ID NO: 3962427 - RNA, 20 nt, Human herpesvirus 2
accgcgccucgcgucgggcc

SEQ ID NO: 3962428 - RNA, 13 nt, Human herpesvirus 2
accgcgcgccucc

SEQ ID NO: 3962429 - RNA, 19 nt, Human herpesvirus 2
accgcgcgccuccucgcgg

SEQ ID NO: 3962430 - RNA, 16 nt, Human herpesvirus 2
accggggaaacaggca

SEQ ID NO: 3962431 - RNA, 12 nt, Human herpesvirus 2
accgguagccgg

SEQ ID NO: 3962432 - RNA, 13 nt, Human herpesvirus 2
accguccaccucc

SEQ ID NO: 3962433 - RNA, 14 nt, Human herpesvirus 2
accucgcggcggcu

SEQ ID NO: 3962434 - RNA, 20 nt, Human herpesvirus 2
accucggggugacccacgcc

SEQ ID NO: 3962435 - RNA, 20 nt, Human herpesvirus 2
accugggggauugugggaau

SEQ ID NO: 3962436 - RNA, 20 nt, Human herpesvirus 2
accuuccccucccacuuccc

SEQ ID NO: 3962437 - RNA, 20 nt, Human herpesvirus 2
accuucgccuccgcccuccg

SEQ ID NO: 3962438 - RNA, 15 nt, Human herpesvirus 2
acgacccgccucggg

SEQ ID NO: 3962439 - RNA, 15 nt, Human herpesvirus 2
acgagccaaaccagc

SEQ ID NO: 3962440 - RNA, 16 nt, Human herpesvirus 2
acgaggcccacccccc

SEQ ID NO: 3962441 - RNA, 16 nt, Human herpesvirus 2
acgccaggccccccgg

SEQ ID NO: 3962442 - RNA, 14 nt, Human herpesvirus 2
acgcccauauguac

SEQ ID NO: 3962443 - RNA, 15 nt, Human herpesvirus 2
acgccccccucggca

SEQ ID NO: 3962444 - RNA, 12 nt, Human herpesvirus 2
acgcccgcgucu

SEQ ID NO: 3962445 - RNA, 16 nt, Human herpesvirus 2
acgcccuacaagaaag

SEQ ID NO: 3962446 - RNA, 19 nt, Human herpesvirus 2
acgccuuuccuccccucgc

SEQ ID NO: 3962447 - RNA, 14 nt, Human herpesvirus 2
acgcgcccgcgucc

SEQ ID NO: 3962448 - RNA, 15 nt, Human herpesvirus 2
acgcgcuggccccuc

SEQ ID NO: 3962449 - RNA, 18 nt, Human herpesvirus 2
acgcucucugccuccuuc

SEQ ID NO: 3962450 - RNA, 16 nt, Human herpesvirus 2
acggcaccgccgggcg

SEQ ID NO: 3962451 - RNA, 15 nt, Human herpesvirus 2
acggccagcgggggc

SEQ ID NO: 3962452 - RNA, 21 nt, Human herpesvirus 2
acggcccaccugcacgagguc

SEQ ID NO: 3962453 - RNA, 18 nt, Human herpesvirus 2
acggccccggccgccucc

SEQ ID NO: 3962454 - RNA, 15 nt, Human herpesvirus 2
acggccccucgcucc

SEQ ID NO: 3962455 - RNA, 17 nt, Human herpesvirus 2
acggcgccuaccuggua

SEQ ID NO: 3962456 - RNA, 18 nt, Human herpesvirus 2
acggucggcgaacacaac

SEQ ID NO: 3962457 - RNA, 14 nt, Human herpesvirus 2
acggucuccgccau

SEQ ID NO: 3962458 - RNA, 21 nt, Human herpesvirus 2
acgucgguuuauuaaaacgaa

SEQ ID NO: 3962459 - RNA, 21 nt, Human herpesvirus 2
acgucguccggggggugccac

SEQ ID NO: 3962460 - RNA, 16 nt, Human herpesvirus 2
acuagaaaaacaaaug

SEQ ID NO: 3962461 - RNA, 20 nt, Human herpesvirus 2
acuauggggggggaaaggaa

SEQ ID NO: 3962462 - RNA, 13 nt, Human herpesvirus 2
acucggagggaag

SEQ ID NO: 3962463 - RNA, 17 nt, Human herpesvirus 2
acugcacugccccccuc

SEQ ID NO: 3962464 - RNA, 20 nt, Human herpesvirus 2
acugggguacugcacugccc

SEQ ID NO: 3962465 - RNA, 15 nt, Human herpesvirus 2
acuuccgggagcggg

SEQ ID NO: 3962466 - RNA, 19 nt, Human herpesvirus 2
acuuccgugccccuggacu

SEQ ID NO: 3962467 - RNA, 23 nt, Human herpesvirus 2
acuugacggucgccacucuccug

SEQ ID NO: 3962468 - RNA, 21 nt, Human herpesvirus 2
acuuucuggccuuguugaaaa

SEQ ID NO: 3962469 - RNA, 18 nt, Human herpesvirus 2
agaaaagcgacgaggucc

SEQ ID NO: 3962470 - RNA, 16 nt, Human herpesvirus 2
agaaggaggggggccu

SEQ ID NO: 3962471 - RNA, 16 nt, Human herpesvirus 2
agaagggaaaggaaca

SEQ ID NO: 3962472 - RNA, 18 nt, Human herpesvirus 2
agaauucccagggcacca

SEQ ID NO: 3962473 - RNA, 18 nt, Human herpesvirus 2
agacaauaaagcaucacg

SEQ ID NO: 3962474 - RNA, 23 nt, Human herpesvirus 2
agacccugccccccggcgcgggc

SEQ ID NO: 3962475 - RNA, 14 nt, Human herpesvirus 2
agacgaggccgcca

SEQ ID NO: 3962476 - RNA, 19 nt, Human herpesvirus 2
agacgcccgcgagccgcac

SEQ ID NO: 3962477 - RNA, 19 nt, Human herpesvirus 2
agacuggccgugcugggcg

SEQ ID NO: 3962478 - RNA, 16 nt, Human herpesvirus 2
ccguguggucgccccc

SEQ ID NO: 3962479 - RNA, 18 nt, Human herpesvirus 2
ccguuucuucggggggcc

SEQ ID NO: 3962480 - RNA, 23 nt, Human herpesvirus 2
ccuacgccccccucggcagcccg

SEQ ID NO: 3962481 - RNA, 14 nt, Human herpesvirus 2
ccuagaggcugucc

SEQ ID NO: 3962482 - RNA, 17 nt, Human herpesvirus 2
ccuagccccccccccuc

SEQ ID NO: 3962483 - RNA, 20 nt, Human herpesvirus 2
ccuagccuucggccaccugg

SEQ ID NO: 3962484 - RNA, 19 nt, Human herpesvirus 2
ccucagcauccugaaccgc

SEQ ID NO: 3962485 - RNA, 17 nt, Human herpesvirus 2
ccuccacgcccugcugu

SEQ ID NO: 3962486 - RNA, 12 nt, Human herpesvirus 2
ccucccacuucc

SEQ ID NO: 3962487 - RNA, 18 nt, Human herpesvirus 2
ccucccucgccgccuucc

SEQ ID NO: 3962488 - RNA, 23 nt, Human herpesvirus 2
ccuccgcagcguaacgcaccccc

SEQ ID NO: 3962489 - RNA, 12 nt, Human herpesvirus 2
ccuccgcggccg

SEQ ID NO: 3962490 - RNA, 21 nt, Human herpesvirus 2
ccuccggaagagagcgccccg

SEQ ID NO: 3962491 - RNA, 13 nt, Human herpesvirus 2
ccucgacccgucc

SEQ ID NO: 3962492 - RNA, 20 nt, Human herpesvirus 2
ccucgcccagacgcccuccg

SEQ ID NO: 3962493 - RNA, 13 nt, Human herpesvirus 2
ccucgccgccuuc

SEQ ID NO: 3962494 - RNA, 19 nt, Human herpesvirus 2
ccucggccggcggagcccc

SEQ ID NO: 3962495 - RNA, 24 nt, Human herpesvirus 2
ccucgugcgcaugggccgccagca

SEQ ID NO: 3962496 - RNA, 21 nt, Human herpesvirus 2
ccucguuuuguuuucucuucu

SEQ ID NO: 3962497 - RNA, 12 nt, Human herpesvirus 2
ccucuaccccca

SEQ ID NO: 3962498 - RNA, 21 nt, Human herpesvirus 2
ccucucgaucccgaagccauc

SEQ ID NO: 3962499 - RNA, 13 nt, Human herpesvirus 2
ccucugggcccgu

SEQ ID NO: 3962500 - RNA, 19 nt, Human herpesvirus 2
ccucuguuucuccaggcgc

SEQ ID NO: 3962501 - RNA, 17 nt, Human herpesvirus 2
ccugaguugcgccggca

SEQ ID NO: 3962502 - RNA, 18 nt, Human herpesvirus 2
ccugcagaugcugcccgc

SEQ ID NO: 3962503 - RNA, 23 nt, Human herpesvirus 2
ccugccacccgaacauggcucgc

SEQ ID NO: 3962504 - RNA, 21 nt, Human herpesvirus 2
ccugccgacuuccgugccccu

SEQ ID NO: 3962505 - RNA, 20 nt, Human herpesvirus 2
ccugcgaaucccccaaggaa

SEQ ID NO: 3962506 - RNA, 16 nt, Human herpesvirus 2
ccuggcgauccugggc

SEQ ID NO: 3962507 - RNA, 18 nt, Human herpesvirus 2
ccuggcgauccugggccu

SEQ ID NO: 3962508 - RNA, 14 nt, Human herpesvirus 2
ccuggcucgccgug

SEQ ID NO: 3962509 - RNA, 15 nt, Human herpesvirus 2
ccuggcucgccgugc

SEQ ID NO: 3962510 - RNA, 15 nt, Human herpesvirus 2
ccuguggggccugcu

SEQ ID NO: 3962511 - RNA, 19 nt, Human herpesvirus 2
ccuguuuuuacgggccccg

SEQ ID NO: 3962512 - RNA, 18 nt, Human herpesvirus 2
ccuucgccgacgccuucc

SEQ ID NO: 3962513 - RNA, 13 nt, Human herpesvirus 2
ccuucgucuggag

SEQ ID NO: 3962514 - RNA, 16 nt, Human herpesvirus 2
ccuugcccccacccca

SEQ ID NO: 3962515 - RNA, 16 nt, Human herpesvirus 2
ccuugcggaugugggc

SEQ ID NO: 3962516 - RNA, 20 nt, Human herpesvirus 2
ccuuggguuccgcggacgcc

SEQ ID NO: 3962517 - RNA, 17 nt, Human herpesvirus 2
ccuuguuuucggucugg

SEQ ID NO: 3962518 - RNA, 15 nt, Human herpesvirus 2
ccuuuaagacagacg

SEQ ID NO: 3962519 - RNA, 19 nt, Human herpesvirus 2
ccuuucccguggcccucca

SEQ ID NO: 3962520 - RNA, 16 nt, Human herpesvirus 2
cgaacagccccugggg

SEQ ID NO: 3962521 - RNA, 23 nt, Human herpesvirus 2
cgaacgggggucccgccucccgg

SEQ ID NO: 3962522 - RNA, 21 nt, Human herpesvirus 2
cgaagagacgaugggagcccc

SEQ ID NO: 3962523 - RNA, 17 nt, Human herpesvirus 2
cgaagcggccccgaccc

SEQ ID NO: 3962524 - RNA, 15 nt, Human herpesvirus 2
cgaaggaagccgccc

SEQ ID NO: 3962525 - RNA, 13 nt, Human herpesvirus 2
cgaaggucugcgc

SEQ ID NO: 3962526 - RNA, 16 nt, Human herpesvirus 2
cgaaucccccaaggaa

SEQ ID NO: 3962527 - RNA, 14 nt, Human herpesvirus 2
cgaaucugggaaga

SEQ ID NO: 3962528 - RNA, 13 nt, Human herpesvirus 2
cgacaacagcccc

SEQ ID NO: 3962529 - RNA, 15 nt, Human herpesvirus 2
cgacacccgggcccc

SEQ ID NO: 3962530 - RNA, 15 nt, Human herpesvirus 2
cgacagcggggaccc

SEQ ID NO: 3962531 - RNA, 20 nt, Human herpesvirus 2
cgacagcggggacccgggcg

SEQ ID NO: 3962532 - RNA, 14 nt, Human herpesvirus 2
cgaccaccaaggcc

SEQ ID NO: 3962533 - RNA, 13 nt, Human herpesvirus 2
cgaccagcggccc

SEQ ID NO: 3962534 - RNA, 14 nt, Human herpesvirus 2
cgaccaugggcccc

SEQ ID NO: 3962535 - RNA, 15 nt, Human herpesvirus 2
cgacccccgaacagc

SEQ ID NO: 3962536 - RNA, 16 nt, Human herpesvirus 2
cgaccggcggggcccc

SEQ ID NO: 3962537 - RNA, 23 nt, Human herpesvirus 2
cgaccgguuucgguuccacucua

SEQ ID NO: 3962538 - RNA, 18 nt, Human herpesvirus 2
cgaccgucgccgccggcc

SEQ ID NO: 3962539 - RNA, 18 nt, Human herpesvirus 2
cgaccgucuuugggcccc

SEQ ID NO: 3962540 - RNA, 13 nt, Human herpesvirus 2
cgaccucgucgcg

SEQ ID NO: 3962541 - RNA, 12 nt, Human herpesvirus 2
cgaccugcagga

SEQ ID NO: 3962542 - RNA, 20 nt, Human herpesvirus 2
cgacgacgccuggcggcccc

SEQ ID NO: 3962543 - RNA, 20 nt, Human herpesvirus 2
cgacgauuagccaccgcgcc

SEQ ID NO: 3962544 - RNA, 16 nt, Human herpesvirus 2
cgacgcguacguggcg

SEQ ID NO: 3962545 - RNA, 22 nt, Human herpesvirus 2
cgacggcaugcagcccagagga

SEQ ID NO: 3962546 - RNA, 15 nt, Human herpesvirus 2
cgacggcggggcccc

SEQ ID NO: 3962547 - RNA, 17 nt, Human herpesvirus 2
cgacggcgucucccggg

SEQ ID NO: 3962548 - RNA, 14 nt, Human herpesvirus 2
cgacugucgugccg

SEQ ID NO: 3962549 - RNA, 17 nt, Human herpesvirus 2
cgacuuccucgugcgca

SEQ ID NO: 3962550 - RNA, 13 nt, Human herpesvirus 2
cgagaagccgccc

SEQ ID NO: 3962551 - RNA, 15 nt, Human herpesvirus 2
cgagaagccgccccc

SEQ ID NO: 3962552 - RNA, 18 nt, Human herpesvirus 2
cgagaagcgggaccgucg

SEQ ID NO: 3962553 - RNA, 11 nt, Human herpesvirus 2
cgagacagacg

SEQ ID NO: 3962554 - RNA, 15 nt, Human herpesvirus 2
cgagagcccagggaa

SEQ ID NO: 3962555 - RNA, 21 nt, Human herpesvirus 2
cgagagcgccgucgggccccg

SEQ ID NO: 3962556 - RNA, 16 nt, Human herpesvirus 2
cgagcaccgacccccu

SEQ ID NO: 3962557 - RNA, 17 nt, Human herpesvirus 2
cgagccaccgucccgcc

SEQ ID NO: 3962558 - RNA, 14 nt, Human herpesvirus 2
cgaggcccccggcc

SEQ ID NO: 3962559 - RNA, 17 nt, Human herpesvirus 2
cgagggcggccucggcc

SEQ ID NO: 3962560 - RNA, 16 nt, Human herpesvirus 2
cgagugcucgcagcag

SEQ ID NO: 3962561 - RNA, 23 nt, Human herpesvirus 2
cgaguucccccgggacuucugga

SEQ ID NO: 3962562 - RNA, 17 nt, Human herpesvirus 2
cgauagccuccgaggug

SEQ ID NO: 3962563 - RNA, 14 nt, Human herpesvirus 2
cgaucugccccgac

SEQ ID NO: 3962564 - RNA, 20 nt, Human herpesvirus 2
cgaugcgacgccgccccugc

SEQ ID NO: 3962565 - RNA, 19 nt, Human herpesvirus 2
cgcaacaacggcgggcccc

SEQ ID NO: 3962566 - RNA, 14 nt, Human herpesvirus 2
cgcaccccaccccu

SEQ ID NO: 3962567 - RNA, 23 nt, Human herpesvirus 2
cgcacccccgcgccgccucgggg

SEQ ID NO: 3962568 - RNA, 18 nt, Human herpesvirus 2
cgcacccgggccggguga

SEQ ID NO: 3962569 - RNA, 13 nt, Human herpesvirus 2
cgcacgcggugcg

SEQ ID NO: 3962570 - RNA, 21 nt, Human herpesvirus 2
cgcacguacguucugccccgc

SEQ ID NO: 3962571 - RNA, 12 nt, Human herpesvirus 2
cgcagaccaccu

SEQ ID NO: 3962572 - RNA, 16 nt, Human herpesvirus 2
cgcagaccaccucgcg

SEQ ID NO: 3962573 - RNA, 13 nt, Human herpesvirus 2
cgcagcggcgucc

SEQ ID NO: 3962574 - RNA, 22 nt, Human herpesvirus 2
cgcaggcccucgcugcucuccc

SEQ ID NO: 3962575 - RNA, 19 nt, Human herpesvirus 2
cgcauauacugcugggcca

SEQ ID NO: 3962576 - RNA, 16 nt, Human herpesvirus 2
cgcaucuucgccgggu

SEQ ID NO: 3962577 - RNA, 22 nt, Human herpesvirus 2
cgccacucuccugcgagcccuc

SEQ ID NO: 3962578 - RNA, 14 nt, Human herpesvirus 2
cgccaucgugcgcu

SEQ ID NO: 3962579 - RNA, 22 nt, Human herpesvirus 2
cgcccaacccaaccgacucccu

SEQ ID NO: 3962580 - RNA, 22 nt, Human herpesvirus 2
cgcccaacccgagcgaccuucc

SEQ ID NO: 3962581 - RNA, 15 nt, Human herpesvirus 2
cgcccaggcccuggc

SEQ ID NO: 3962582 - RNA, 19 nt, Human herpesvirus 2
cgcccaggcccuggcgcac

SEQ ID NO: 3962583 - RNA, 17 nt, Human herpesvirus 2
cgcccauacaaauuaaa

SEQ ID NO: 3962584 - RNA, 12 nt, Human herpesvirus 2
cgccccccccga

SEQ ID NO: 3962585 - RNA, 13 nt, Human herpesvirus 2
cgccccccucggc

SEQ ID NO: 3962586 - RNA, 14 nt, Human herpesvirus 2
cgcccccgccucgc

SEQ ID NO: 3962587 - RNA, 18 nt, Human herpesvirus 2
cgcccccucucccacacg

SEQ ID NO: 3962588 - RNA, 16 nt, Human herpesvirus 2
cgcccgccgcccucga

SEQ ID NO: 3962589 - RNA, 22 nt, Human herpesvirus 2
cgcccucgcccagacgcccucc

SEQ ID NO: 3962590 - RNA, 12 nt, Human herpesvirus 2
cgccgaccagaa

SEQ ID NO: 3962591 - RNA, 17 nt, Human herpesvirus 2
cgccgacggcggcgcac

SEQ ID NO: 3962592 - RNA, 17 nt, Human herpesvirus 2
cgccgagcgucaggccc

SEQ ID NO: 3962593 - RNA, 16 nt, Human herpesvirus 2
cgggcgcccccgccuc

SEQ ID NO: 3962594 - RNA, 14 nt, Human herpesvirus 2
cgggcgggggucgg

SEQ ID NO: 3962595 - RNA, 22 nt, Human herpesvirus 2
cgggcguuauaagccgccgcac

SEQ ID NO: 3962596 - RNA, 16 nt, Human herpesvirus 2
cgggcguuccuucccu

SEQ ID NO: 3962597 - RNA, 19 nt, Human herpesvirus 2
cgggcugguuaucgccugu

SEQ ID NO: 3962598 - RNA, 24 nt, Human herpesvirus 2
cggggacuugacggucgccacucu

SEQ ID NO: 3962599 - RNA, 13 nt, Human herpesvirus 2
cggggagcuucau

SEQ ID NO: 3962600 - RNA, 9 nt, Human herpesvirus 2
cggggagga

SEQ ID NO: 3962601 - RNA, 14 nt, Human herpesvirus 2
cggggccagggcug

SEQ ID NO: 3962602 - RNA, 16 nt, Human herpesvirus 2
cggggcgugcugugcc

SEQ ID NO: 3962603 - RNA, 16 nt, Human herpesvirus 2
cggggcgugucugucc

SEQ ID NO: 3962604 - RNA, 21 nt, Human herpesvirus 2
cggggcuuggacgcgccuccc

SEQ ID NO: 3962605 - RNA, 15 nt, Human herpesvirus 2
cgggggcgggcgggc

SEQ ID NO: 3962606 - RNA, 13 nt, Human herpesvirus 2
cggggggcggugg

SEQ ID NO: 3962607 - RNA, 10 nt, Human herpesvirus 2
cgggggucgg

SEQ ID NO: 3962608 - RNA, 17 nt, Human herpesvirus 2
cgggggucgggcgggcg

SEQ ID NO: 3962609 - RNA, 18 nt, Human herpesvirus 2
cgggugucugcuccccac

SEQ ID NO: 3962610 - RNA, 20 nt, Human herpesvirus 2
cggguuccccgagagcccag

SEQ ID NO: 3962611 - RNA, 19 nt, Human herpesvirus 2
cgguccuaaggcgccgacg

SEQ ID NO: 3962612 - RNA, 16 nt, Human herpesvirus 2
cggucggccagcacga

SEQ ID NO: 3962613 - RNA, 18 nt, Human herpesvirus 2
cggugcgugcggcccugc

SEQ ID NO: 3962614 - RNA, 17 nt, Human herpesvirus 2
cgguggggccggcgguc

SEQ ID NO: 3962615 - RNA, 23 nt, Human herpesvirus 2
cgguuuuuuuuuguugucugucu

SEQ ID NO: 3962616 - RNA, 13 nt, Human herpesvirus 2
cguacgaggugcu

SEQ ID NO: 3962617 - RNA, 15 nt, Human herpesvirus 2
cguaugucuguuuca

SEQ ID NO: 3962618 - RNA, 19 nt, Human herpesvirus 2
cguauucaccgaccccccc

SEQ ID NO: 3962619 - RNA, 15 nt, Human herpesvirus 2
cgucacgcaggccgc

SEQ ID NO: 3962620 - RNA, 15 nt, Human herpesvirus 2
cguccaccuuggccc

SEQ ID NO: 3962621 - RNA, 18 nt, Human herpesvirus 2
cgucccccacggucagga

SEQ ID NO: 3962622 - RNA, 20 nt, Human herpesvirus 2
cguccccuuucuuuuccccc

SEQ ID NO: 3962623 - RNA, 15 nt, Human herpesvirus 2
cguccgcggccccac

SEQ ID NO: 3962624 - RNA, 22 nt, Human herpesvirus 2
cguccggcuggcggcgcggcac

SEQ ID NO: 3962625 - RNA, 22 nt, Human herpesvirus 2
cguccugcggcagcgcgccgac

SEQ ID NO: 3962626 - RNA, 14 nt, Human herpesvirus 2
cguccugcggcuca

SEQ ID NO: 3962627 - RNA, 18 nt, Human herpesvirus 2
cgucuccggucccuuccc

SEQ ID NO: 3962628 - RNA, 18 nt, Human herpesvirus 2
cgucugucgccucucccu

SEQ ID NO: 3962629 - RNA, 22 nt, Human herpesvirus 2
cgugcgcaugggccgccagcag

SEQ ID NO: 3962630 - RNA, 16 nt, Human herpesvirus 2
cgugcgcucgcucucc

SEQ ID NO: 3962631 - RNA, 15 nt, Human herpesvirus 2
cgugcgucuucccag

SEQ ID NO: 3962632 - RNA, 12 nt, Human herpesvirus 2
cgugcucugcca

SEQ ID NO: 3962633 - RNA, 16 nt, Human herpesvirus 2
cgugcuuccgcacccc

SEQ ID NO: 3962634 - RNA, 17 nt, Human herpesvirus 2
cguggagcgccgggccu

SEQ ID NO: 3962635 - RNA, 18 nt, Human herpesvirus 2
cguggagcgccgggccuc

SEQ ID NO: 3962636 - RNA, 12 nt, Human herpesvirus 2
cguggcccucca

SEQ ID NO: 3962637 - RNA, 18 nt, Human herpesvirus 2
cguggccggcgacccgcc

SEQ ID NO: 3962638 - RNA, 14 nt, Human herpesvirus 2
cgugggugacuggg

SEQ ID NO: 3962639 - RNA, 22 nt, Human herpesvirus 2
cguguccgcgggaagcgccgcg

SEQ ID NO: 3962640 - RNA, 20 nt, Human herpesvirus 2
cgugucggagcucgacgcac

SEQ ID NO: 3962641 - RNA, 14 nt, Human herpesvirus 2
cguuacugaugugu

SEQ ID NO: 3962642 - RNA, 15 nt, Human herpesvirus 2
cguucgucgggccgu

SEQ ID NO: 3962643 - RNA, 23 nt, Human herpesvirus 2
cguuuccuccgcgggucccuucc

SEQ ID NO: 3962644 - RNA, 12 nt, Human herpesvirus 2
cuacccccaccc

SEQ ID NO: 3962645 - RNA, 17 nt, Human herpesvirus 2
cuaguacccagaggcug

SEQ ID NO: 3962646 - RNA, 19 nt, Human herpesvirus 2
cuauggggggggaaaggaa

SEQ ID NO: 3962647 - RNA, 19 nt, Human herpesvirus 2
cucaccgagccgcugugcc

SEQ ID NO: 3962648 - RNA, 13 nt, Human herpesvirus 2
cucacucuuuauu

SEQ ID NO: 3962649 - RNA, 14 nt, Human herpesvirus 2
cuccagcuuggccg

SEQ ID NO: 3962650 - RNA, 20 nt, Human herpesvirus 2
cucccaauucgucaccuggc

SEQ ID NO: 3962651 - RNA, 20 nt, Human herpesvirus 2
cucccccgcgagcaccgacc

SEQ ID NO: 3962652 - RNA, 16 nt, Human herpesvirus 2
cucccccgcuucuggc

SEQ ID NO: 3962653 - RNA, 17 nt, Human herpesvirus 2
cuccccgaaagccacca

SEQ ID NO: 3962654 - RNA, 21 nt, Human herpesvirus 2
cuccccgaaagccaccaauac

SEQ ID NO: 3962655 - RNA, 15 nt, Human herpesvirus 2
cuccccgcuggagcc

SEQ ID NO: 3962656 - RNA, 14 nt, Human herpesvirus 2
cucccgccuccggc

SEQ ID NO: 3962657 - RNA, 18 nt, Human herpesvirus 2
cucccggcccgccgacca

SEQ ID NO: 3962658 - RNA, 17 nt, Human herpesvirus 2
cucccucuuucccuccc

SEQ ID NO: 3962659 - RNA, 16 nt, Human herpesvirus 2
cuccgaccggcggggc

SEQ ID NO: 3962660 - RNA, 22 nt, Human herpesvirus 2
cuccgccaugcaacgccgggcg

SEQ ID NO: 3962661 - RNA, 21 nt, Human herpesvirus 2
cuccugcccgcgaccccccgg

SEQ ID NO: 3962662 - RNA, 20 nt, Human herpesvirus 2
cuccuuuuuucuuuuucucu

SEQ ID NO: 3962663 - RNA, 12 nt, Human herpesvirus 2
cucgaaggaggg

SEQ ID NO: 3962664 - RNA, 17 nt, Human herpesvirus 2
cucgcggcggcuccccc

SEQ ID NO: 3962665 - RNA, 20 nt, Human herpesvirus 2
cucgcugcgccgggcgcgcc

SEQ ID NO: 3962666 - RNA, 18 nt, Human herpesvirus 2
cucgucgccaacggccag

SEQ ID NO: 3962667 - RNA, 24 nt, Human herpesvirus 2
cucgucgcgcgcaucgccaacucu

SEQ ID NO: 3962668 - RNA, 14 nt, Human herpesvirus 2
cucgucguggcccu

SEQ ID NO: 3962669 - RNA, 17 nt, Human herpesvirus 2
cucgucguggcccuccu

SEQ ID NO: 3962670 - RNA, 16 nt, Human herpesvirus 2
cucguuccucacgggg

SEQ ID NO: 3962671 - RNA, 14 nt, Human herpesvirus 2
cucguucugcugca

SEQ ID NO: 3962672 - RNA, 20 nt, Human herpesvirus 2
cucucgggggaugguggugg

SEQ ID NO: 3962673 - RNA, 17 nt, Human herpesvirus 2
cucugcccgaccgggcg

SEQ ID NO: 3962674 - RNA, 14 nt, Human herpesvirus 2
cucuguuccuuucc

SEQ ID NO: 3962675 - RNA, 21 nt, Human herpesvirus 2
cucuguuccuuucccuucucc

SEQ ID NO: 3962676 - RNA, 18 nt, Human herpesvirus 2
cugcaucgcaagccaccc

SEQ ID NO: 3962677 - RNA, 15 nt, Human herpesvirus 2
cugcccgcgaccccc

SEQ ID NO: 3962678 - RNA, 11 nt, Human herpesvirus 2
cugcgaggugc

SEQ ID NO: 3962679 - RNA, 23 nt, Human herpesvirus 2
cugcgcacgacagaccuccccgu

SEQ ID NO: 3962680 - RNA, 12 nt, Human herpesvirus 2
cugcgcaggucc

SEQ ID NO: 3962681 - RNA, 16 nt, Human herpesvirus 2
cugcgccaccggccug

SEQ ID NO: 3962682 - RNA, 19 nt, Human herpesvirus 2
cugcgcgcgcaccugcggg

SEQ ID NO: 3962683 - RNA, 16 nt, Human herpesvirus 2
cugcggacuggcagcc

SEQ ID NO: 3962684 - RNA, 16 nt, Human herpesvirus 2
cugcggcaggcgaccc

SEQ ID NO: 3962685 - RNA, 20 nt, Human herpesvirus 2
cugcggggaccagccgacgu

SEQ ID NO: 3962686 - RNA, 20 nt, Human herpesvirus 2
cuggacccagacacggugcg

SEQ ID NO: 3962687 - RNA, 14 nt, Human herpesvirus 2
cuggaggcaaacac

SEQ ID NO: 3962688 - RNA, 17 nt, Human herpesvirus 2
cuggaggggggugcugu

SEQ ID NO: 3962689 - RNA, 22 nt, Human herpesvirus 2
cuggccgagcguaucggccagg

SEQ ID NO: 3962690 - RNA, 13 nt, Human herpesvirus 2
cuggcgcaccugc

SEQ ID NO: 3962691 - RNA, 19 nt, Human herpesvirus 2
cuggcggaagugccgcacg

SEQ ID NO: 3962692 - RNA, 14 nt, Human herpesvirus 2
cuggcggccccugu

SEQ ID NO: 3962693 - RNA, 16 nt, Human herpesvirus 2
cugggaacucgcccgc

SEQ ID NO: 3962694 - RNA, 16 nt, Human herpesvirus 2
cugggcgcgagccagg

SEQ ID NO: 3962695 - RNA, 17 nt, Human herpesvirus 2
cuggggcggcggcgucu

SEQ ID NO: 3962696 - RNA, 14 nt, Human herpesvirus 2
cugggguacugcac

SEQ ID NO: 3962697 - RNA, 18 nt, Human herpesvirus 2
cugggguacugcacugcc

SEQ ID NO: 3962698 - RNA, 22 nt, Human herpesvirus 2
cugggguauuugggugggacuu

SEQ ID NO: 3962699 - RNA, 17 nt, Human herpesvirus 2
cugggucgggagcagga

SEQ ID NO: 3962700 - RNA, 21 nt, Human herpesvirus 2
cugguacucccuuugugcuuu

SEQ ID NO: 3962701 - RNA, 15 nt, Human herpesvirus 2
cugguggcaccuccc

SEQ ID NO: 3962702 - RNA, 11 nt, Human herpesvirus 2
cugguggugga

SEQ ID NO: 3962703 - RNA, 14 nt, Human herpesvirus 2
cuguacgacagcgg

SEQ ID NO: 3962704 - RNA, 23 nt, Human herpesvirus 2
cuguccccgccccccccaggggg

SEQ ID NO: 3962705 - RNA, 16 nt, Human herpesvirus 2
cugugccagguggccc

SEQ ID NO: 3962706 - RNA, 19 nt, Human herpesvirus 2
cuguuuuuacgggccccgg

SEQ ID NO: 3962707 - RNA, 21 nt, Human herpesvirus 2
cuucccgguaugguaauuaga

SEQ ID NO: 3962708 - RNA, 16 nt, Human herpesvirus 2
cuucgccgacgccuuc

SEQ ID NO: 3962709 - RNA, 21 nt, Human herpesvirus 2
cuucggggacuugacggucgc

SEQ ID NO: 3962710 - RNA, 17 nt, Human herpesvirus 2
cuucuuuaaccgcgagc

SEQ ID NO: 3962711 - RNA, 12 nt, Human herpesvirus 2
cuucuuuccccc

SEQ ID NO: 3962712 - RNA, 17 nt, Human herpesvirus 2
cuuggaggcccucuggg

SEQ ID NO: 3962713 - RNA, 19 nt, Human herpesvirus 2
cuuggggaaaucuauugac

SEQ ID NO: 3962714 - RNA, 19 nt, Human herpesvirus 2
cuuuccaccccccuucccc

SEQ ID NO: 3962715 - RNA, 20 nt, Human herpesvirus 2
cuuucggccaccaccccccu

SEQ ID NO: 3962716 - RNA, 14 nt, Human herpesvirus 2
cuuucuuucccccc

SEQ ID NO: 3962717 - RNA, 11 nt, Human herpesvirus 2
cuuugacuccu

SEQ ID NO: 3962718 - RNA, 17 nt, Human herpesvirus 2
cuuuuaaugggccggcg

SEQ ID NO: 3962719 - RNA, 20 nt, Human herpesvirus 2
cuuuucccccuacccuuccc

SEQ ID NO: 3962720 - RNA, 15 nt, Human herpesvirus 2
gaaaacuugaggaaa

SEQ ID NO: 3962721 - RNA, 15 nt, Human herpesvirus 2
gaaacggcaagaaag

SEQ ID NO: 3962722 - RNA, 20 nt, Human herpesvirus 2
gaaacuuccgggagcggggg

SEQ ID NO: 3962723 - RNA, 16 nt, Human herpesvirus 2
gaaagaaagagaaaca

SEQ ID NO: 3962724 - RNA, 17 nt, Human herpesvirus 2
gaaaggaaaggaaacag

SEQ ID NO: 3962725 - RNA, 18 nt, Human herpesvirus 2
gaacccgguaaauaccac

SEQ ID NO: 3962726 - RNA, 13 nt, Human herpesvirus 2
gaacggucuccgc

SEQ ID NO: 3962727 - RNA, 17 nt, Human herpesvirus 2
gaacucucccggcuccu

SEQ ID NO: 3962728 - RNA, 16 nt, Human herpesvirus 2
gaacuguguuuccccc

SEQ ID NO: 3962729 - RNA, 12 nt, Human herpesvirus 2
gaagagcuccaa

SEQ ID NO: 3962730 - RNA, 14 nt, Human herpesvirus 2
gaaggcggacccag

SEQ ID NO: 3962731 - RNA, 15 nt, Human herpesvirus 2
gaagggacccgcgga

SEQ ID NO: 3962732 - RNA, 14 nt, Human herpesvirus 2
gaagucacccgggu

SEQ ID NO: 3962733 - RNA, 15 nt, Human herpesvirus 2
gaaugacacaaaaau

SEQ ID NO: 3962734 - RNA, 19 nt, Human herpesvirus 2
gacacaauaacaaacagac

SEQ ID NO: 3962735 - RNA, 18 nt, Human herpesvirus 2
gacacacacaccccccuu

SEQ ID NO: 3962736 - RNA, 16 nt, Human herpesvirus 2
gacacgcgcccggggc

SEQ ID NO: 3962737 - RNA, 17 nt, Human herpesvirus 2
gacagacaauaaagcau

SEQ ID NO: 3962738 - RNA, 17 nt, Human herpesvirus 2
gacaugauagagggaac

SEQ ID NO: 3962739 - RNA, 17 nt, Human herpesvirus 2
aggucccgauggccgcc

SEQ ID NO: 3962740 - RNA, 15 nt, Human herpesvirus 2
aggugcugccgccgc

SEQ ID NO: 3962741 - RNA, 14 nt, Human herpesvirus 2
aguaccccaguucc

SEQ ID NO: 3962742 - RNA, 18 nt, Human herpesvirus 2
agucaaacgucccaaacu

SEQ ID NO: 3962743 - RNA, 13 nt, Human herpesvirus 2
agucucgaaggag

SEQ ID NO: 3962744 - RNA, 13 nt, Human herpesvirus 2
agugccgcacggc

SEQ ID NO: 3962745 - RNA, 14 nt, Human herpesvirus 2
aguucaauagauuu

SEQ ID NO: 3962746 - RNA, 15 nt, Human herpesvirus 2
auaaagacuguugau

SEQ ID NO: 3962747 - RNA, 15 nt, Human herpesvirus 2
auaacgcgcccgcgu

SEQ ID NO: 3962748 - RNA, 13 nt, Human herpesvirus 2
auacucuguuuau

SEQ ID NO: 3962749 - RNA, 18 nt, Human herpesvirus 2
auacuugcgcggcuugcg

SEQ ID NO: 3962750 - RNA, 18 nt, Human herpesvirus 2
auccaggauuaccgaccc

SEQ ID NO: 3962751 - RNA, 23 nt, Human herpesvirus 2
aucccgaagccaucugaagccgu

SEQ ID NO: 3962752 - RNA, 22 nt, Human herpesvirus 2
auccgacggcaugcagcccaga

SEQ ID NO: 3962753 - RNA, 22 nt, Human herpesvirus 2
auccgcgagggcccggcgccgc

SEQ ID NO: 3962754 - RNA, 23 nt, Human herpesvirus 2
auccgcgagggcccggcgccgcc

SEQ ID NO: 3962755 - RNA, 20 nt, Human herpesvirus 2
auccggcggcggggaaacgu

SEQ ID NO: 3962756 - RNA, 21 nt, Human herpesvirus 2
aucgcacccauccaucuggga

SEQ ID NO: 3962757 - RNA, 21 nt, Human herpesvirus 2
aucggccaggagguccuggag

SEQ ID NO: 3962758 - RNA, 19 nt, Human herpesvirus 2
aucgucccgguugcguugc

SEQ ID NO: 3962759 - RNA, 18 nt, Human herpesvirus 2
aucuuggcguuauuucca

SEQ ID NO: 3962760 - RNA, 13 nt, Human herpesvirus 2
augacacaaaaau

SEQ ID NO: 3962761 - RNA, 13 nt, Human herpesvirus 2
augcaaauuaaaa

SEQ ID NO: 3962762 - RNA, 19 nt, Human herpesvirus 2
augccguucggaccugggg

SEQ ID NO: 3962763 - RNA, 16 nt, Human herpesvirus 2
augcgccugguggucg

SEQ ID NO: 3962764 - RNA, 15 nt, Human herpesvirus 2
augcuaauuaaauac

SEQ ID NO: 3962765 - RNA, 17 nt, Human herpesvirus 2
auggagaagggaaagga

SEQ ID NO: 3962766 - RNA, 14 nt, Human herpesvirus 2
auggccgccccgca

SEQ ID NO: 3962767 - RNA, 15 nt, Human herpesvirus 2
auggcggccgcgccc

SEQ ID NO: 3962768 - RNA, 14 nt, Human herpesvirus 2
auggcguacccggg

SEQ ID NO: 3962769 - RNA, 22 nt, Human herpesvirus 2
augggccggcguucccgcucgc

SEQ ID NO: 3962770 - RNA, 19 nt, Human herpesvirus 2
auggggggggaaaggaaag

SEQ ID NO: 3962771 - RNA, 19 nt, Human herpesvirus 2
augucaggggcccgccgcc

SEQ ID NO: 3962772 - RNA, 16 nt, Human herpesvirus 2
augucaguccucgggg

SEQ ID NO: 3962773 - RNA, 15 nt, Human herpesvirus 2
auguguucuccugga

SEQ ID NO: 3962774 - RNA, 16 nt, Human herpesvirus 2
auuaccgaccccccgg

SEQ ID NO: 3962775 - RNA, 20 nt, Human herpesvirus 2
auuagcaacuuuuaaugggc

SEQ ID NO: 3962776 - RNA, 15 nt, Human herpesvirus 2
auuccagcagcuucc

SEQ ID NO: 3962777 - RNA, 19 nt, Human herpesvirus 2
auugaccggggccccaucu

SEQ ID NO: 3962778 - RNA, 17 nt, Human herpesvirus 2
auuuaaggagucgccgc

SEQ ID NO: 3962779 - RNA, 20 nt, Human herpesvirus 2
auuuacgcggugcgccccgc

SEQ ID NO: 3962780 - RNA, 22 nt, Human herpesvirus 2
auuucccaaacacugaggaacu

SEQ ID NO: 3962781 - RNA, 17 nt, Human herpesvirus 2
auuuuccccccaccccu

SEQ ID NO: 3962782 - RNA, 15 nt, Human herpesvirus 2
caaaaaaaagaaaca

SEQ ID NO: 3962783 - RNA, 18 nt, Human herpesvirus 2
caaaagaaacggcaagaa

SEQ ID NO: 3962784 - RNA, 14 nt, Human herpesvirus 2
caaacaaaaacaca

SEQ ID NO: 3962785 - RNA, 14 nt, Human herpesvirus 2
caaccuggcacagc

SEQ ID NO: 3962786 - RNA, 16 nt, Human herpesvirus 2
acacugaggaacuggg

SEQ ID NO: 3962787 - RNA, 15 nt, Human herpesvirus 2
acagacaauaaagca

SEQ ID NO: 3962788 - RNA, 13 nt, Human herpesvirus 2
acagccccugggg

SEQ ID NO: 3962789 - RNA, 17 nt, Human herpesvirus 2
acagcgggcacucuggc

SEQ ID NO: 3962790 - RNA, 23 nt, Human herpesvirus 2
acagcggggacccgggcgagcug

SEQ ID NO: 3962791 - RNA, 12 nt, Human herpesvirus 2
accaaaagggaa

SEQ ID NO: 3962792 - RNA, 13 nt, Human herpesvirus 2
accaaaagggaaa

SEQ ID NO: 3962793 - RNA, 16 nt, Human herpesvirus 2
accaccccccuccucc

SEQ ID NO: 3962794 - RNA, 11 nt, Human herpesvirus 2
accagccgccu

SEQ ID NO: 3962795 - RNA, 16 nt, Human herpesvirus 2
accagcggccccaucc

SEQ ID NO: 3962796 - RNA, 17 nt, Human herpesvirus 2
accaucgcguacagccu

SEQ ID NO: 3962797 - RNA, 18 nt, Human herpesvirus 2
acccaaccgacucccucc

SEQ ID NO: 3962798 - RNA, 14 nt, Human herpesvirus 2
acccacccucggug

SEQ ID NO: 3962799 - RNA, 13 nt, Human herpesvirus 2
acccagaggcugg

SEQ ID NO: 3962800 - RNA, 13 nt, Human herpesvirus 2
accccaaaccaac

SEQ ID NO: 3962801 - RNA, 16 nt, Human herpesvirus 2
acccccagcgcggacg

SEQ ID NO: 3962802 - RNA, 19 nt, Human herpesvirus 2
acccccaucgggcugcugg

SEQ ID NO: 3962803 - RNA, 12 nt, Human herpesvirus 2
accccccccucu

SEQ ID NO: 3962804 - RNA, 16 nt, Human herpesvirus 2
acccccgaacagcccc

SEQ ID NO: 3962805 - RNA, 24 nt, Human herpesvirus 2
acccccgaacagccccuggggcug

SEQ ID NO: 3962806 - RNA, 15 nt, Human herpesvirus 2
acccccuguccccgc

SEQ ID NO: 3962807 - RNA, 16 nt, Human herpesvirus 2
accccgccgcagcuca

SEQ ID NO: 3962808 - RNA, 15 nt, Human herpesvirus 2
accccuuugacuccu

SEQ ID NO: 3962809 - RNA, 16 nt, Human herpesvirus 2
acccuagccuucggcc

SEQ ID NO: 3962810 - RNA, 15 nt, Human herpesvirus 2
accgaaggaggaaag

SEQ ID NO: 3962811 - RNA, 19 nt, Human herpesvirus 2
accgcacccgggccgggug

SEQ ID NO: 3962812 - RNA, 22 nt, Human herpesvirus 2
accgcgaccagcguccugcgcg

SEQ ID NO: 3962813 - RNA, 15 nt, Human herpesvirus 2
accgcgcccacagcc

SEQ ID NO: 3962814 - RNA, 15 nt, Human herpesvirus 2
accgcgcggaccggc

SEQ ID NO: 3962815 - RNA, 17 nt, Human herpesvirus 2
accggcccccggagucc

SEQ ID NO: 3962816 - RNA, 15 nt, Human herpesvirus 2
accggggacuccccu

SEQ ID NO: 3962817 - RNA, 14 nt, Human herpesvirus 2
accgucgccgccgg

SEQ ID NO: 3962818 - RNA, 15 nt, Human herpesvirus 2
accucgcggcggcuc

SEQ ID NO: 3962819 - RNA, 14 nt, Human herpesvirus 2
acgacgaugcaugu

SEQ ID NO: 3962820 - RNA, 13 nt, Human herpesvirus 2
acgagacagacga

SEQ ID NO: 3962821 - RNA, 14 nt, Human herpesvirus 2
acgagcugccccgc

SEQ ID NO: 3962822 - RNA, 16 nt, Human herpesvirus 2
acgccaauaucaucga

SEQ ID NO: 3962823 - RNA, 19 nt, Human herpesvirus 2
acgcccaggcccuggcgca

SEQ ID NO: 3962824 - RNA, 17 nt, Human herpesvirus 2
acgccuggcggccccug

SEQ ID NO: 3962825 - RNA, 17 nt, Human herpesvirus 2
acgcgaccgucgccgcc

SEQ ID NO: 3962826 - RNA, 19 nt, Human herpesvirus 2
acgcgguauuguacccccg

SEQ ID NO: 3962827 - RNA, 13 nt, Human herpesvirus 2
acgcguuucccuu

SEQ ID NO: 3962828 - RNA, 14 nt, Human herpesvirus 2
acgcucucugccuc

SEQ ID NO: 3962829 - RNA, 13 nt, Human herpesvirus 2
acggcaagaaaga

SEQ ID NO: 3962830 - RNA, 15 nt, Human herpesvirus 2
acggccccgaacagc

SEQ ID NO: 3962831 - RNA, 12 nt, Human herpesvirus 2
acggucagucug

SEQ ID NO: 3962832 - RNA, 19 nt, Human herpesvirus 2
acgguccucaccgagccgc

SEQ ID NO: 3962833 - RNA, 16 nt, Human herpesvirus 2
acggucgauuuaacca

SEQ ID NO: 3962834 - RNA, 22 nt, Human herpesvirus 2
acggugcgugcggcccugccuc

SEQ ID NO: 3962835 - RNA, 22 nt, Human herpesvirus 2
acguacguucugccccgcgucg

SEQ ID NO: 3962836 - RNA, 16 nt, Human herpesvirus 2
acguccugcggcucau

SEQ ID NO: 3962837 - RNA, 13 nt, Human herpesvirus 2
acgucgccccccc

SEQ ID NO: 3962838 - RNA, 18 nt, Human herpesvirus 2
acgugggaugacggaggc

SEQ ID NO: 3962839 - RNA, 23 nt, Human herpesvirus 2
acucacucguggaugccggggcc

SEQ ID NO: 3962840 - RNA, 19 nt, Human herpesvirus 2
acuccaccccccccucuca

SEQ ID NO: 3962841 - RNA, 17 nt, Human herpesvirus 2
acugcacuugccccccc

SEQ ID NO: 3962842 - RNA, 17 nt, Human herpesvirus 2
acugccugacccucucg

SEQ ID NO: 3962843 - RNA, 22 nt, Human herpesvirus 2
acuggagguggucggcggccaa

SEQ ID NO: 3962844 - RNA, 21 nt, Human herpesvirus 2
acuuccgugccccuggacugg

SEQ ID NO: 3962845 - RNA, 16 nt, Human herpesvirus 2
agaaauaaagaacgag

SEQ ID NO: 3962846 - RNA, 13 nt, Human herpesvirus 2
agaacgagacaga

SEQ ID NO: 3962847 - RNA, 16 nt, Human herpesvirus 2
agaagccuacuacucg

SEQ ID NO: 3962848 - RNA, 11 nt, Human herpesvirus 2
agaauaaaagg

SEQ ID NO: 3962849 - RNA, 13 nt, Human herpesvirus 2
agacacaaaagcu

SEQ ID NO: 3962850 - RNA, 13 nt, Human herpesvirus 2
agaccuccccgug

SEQ ID NO: 3962851 - RNA, 23 nt, Human herpesvirus 2
agaccuccccgugcgugcugcug

SEQ ID NO: 3962852 - RNA, 16 nt, Human herpesvirus 2
agagacccugcccccc

SEQ ID NO: 3962853 - RNA, 12 nt, Human herpesvirus 2
agagauuucccc

SEQ ID NO: 3962854 - RNA, 18 nt, Human herpesvirus 2
agagcggcgagugcucgc

SEQ ID NO: 3962855 - RNA, 19 nt, Human herpesvirus 2
agaggcccggaacgagguu

SEQ ID NO: 3962856 - RNA, 16 nt, Human herpesvirus 2
agagggggggaaagaa

SEQ ID NO: 3962857 - RNA, 20 nt, Human herpesvirus 2
agaggucaauagauuucccc

SEQ ID NO: 3962858 - RNA, 21 nt, Human herpesvirus 2
agaguucaauagauuucccaa

SEQ ID NO: 3962859 - RNA, 18 nt, Human herpesvirus 2
agauccccggggcccgca

SEQ ID NO: 3962860 - RNA, 13 nt, Human herpesvirus 2
agaugccagugga

SEQ ID NO: 3962861 - RNA, 16 nt, Human herpesvirus 2
agauggggagaggggg

SEQ ID NO: 3962862 - RNA, 20 nt, Human herpesvirus 2
agcaaccgccgcgcgacggc

SEQ ID NO: 3962863 - RNA, 14 nt, Human herpesvirus 2
agcacgaccaggga

SEQ ID NO: 3962864 - RNA, 15 nt, Human herpesvirus 2
agcacgaccagggag

SEQ ID NO: 3962865 - RNA, 13 nt, Human herpesvirus 2
agccacccugggu

SEQ ID NO: 3962866 - RNA, 22 nt, Human herpesvirus 2
agccaggcaaacgguaagcagc

SEQ ID NO: 3962867 - RNA, 21 nt, Human herpesvirus 2
agcccgaacggaaggccuccc

SEQ ID NO: 3962868 - RNA, 14 nt, Human herpesvirus 2
agcccguggcccac

SEQ ID NO: 3962869 - RNA, 21 nt, Human herpesvirus 2
agccgcgccgcugcccgacgc

SEQ ID NO: 3962870 - RNA, 20 nt, Human herpesvirus 2
agccugcgaaucccccaagg

SEQ ID NO: 3962871 - RNA, 24 nt, Human herpesvirus 2
agcgcccuuccgcguccgcgauga

SEQ ID NO: 3962872 - RNA, 19 nt, Human herpesvirus 2
agcgccgcuacugcgccac

SEQ ID NO: 3962873 - RNA, 19 nt, Human herpesvirus 2
agcgcgggggacgggccgc

SEQ ID NO: 3962874 - RNA, 14 nt, Human herpesvirus 2
agcggccccgaccc

SEQ ID NO: 3962875 - RNA, 17 nt, Human herpesvirus 2
agcggcgaacacugccu

SEQ ID NO: 3962876 - RNA, 16 nt, Human herpesvirus 2
agcggcguccacgccc

SEQ ID NO: 3962877 - RNA, 20 nt, Human herpesvirus 2
agcguaacgcacccccggac

SEQ ID NO: 3962878 - RNA, 14 nt, Human herpesvirus 2
agcgucaggcccgc

SEQ ID NO: 3962879 - RNA, 18 nt, Human herpesvirus 2
agcguccggcuggcggcg

SEQ ID NO: 3962880 - RNA, 15 nt, Human herpesvirus 2
agcucaucgcacggc

SEQ ID NO: 3962881 - RNA, 18 nt, Human herpesvirus 2
agcuccucuucgggcacc

SEQ ID NO: 3962882 - RNA, 18 nt, Human herpesvirus 2
agcucgcggagggcggcc

SEQ ID NO: 3962883 - RNA, 22 nt, Human herpesvirus 2
agcuuggccguguggucgcccc

SEQ ID NO: 3962884 - RNA, 21 nt, Human herpesvirus 2
aggaacuggguuacugcacuu

SEQ ID NO: 3962885 - RNA, 18 nt, Human herpesvirus 2
aggacagccgacccgucu

SEQ ID NO: 3962886 - RNA, 18 nt, Human herpesvirus 2
aggacgcgagcgacagcg

SEQ ID NO: 3962887 - RNA, 20 nt, Human herpesvirus 2
aggacgcgcuaguacccaga

SEQ ID NO: 3962888 - RNA, 21 nt, Human herpesvirus 2
aggauggguccgacgaggccu

SEQ ID NO: 3962889 - RNA, 15 nt, Human herpesvirus 2
aggcccccggcccug

SEQ ID NO: 3962890 - RNA, 14 nt, Human herpesvirus 2
aggcggucccggcc

SEQ ID NO: 3962891 - RNA, 17 nt, Human herpesvirus 2
aggcggucccggccgcc

SEQ ID NO: 3962892 - RNA, 23 nt, Human herpesvirus 2
aggcguggugauacaacacaccc

SEQ ID NO: 3962893 - RNA, 14 nt, Human herpesvirus 2
aggcuggagcucug

SEQ ID NO: 3962894 - RNA, 20 nt, Human herpesvirus 2
aggcuguccgccgggcguga

SEQ ID NO: 3962895 - RNA, 12 nt, Human herpesvirus 2
agggcagggccg

SEQ ID NO: 3962896 - RNA, 17 nt, Human herpesvirus 2
agggcccggcgccgccc

SEQ ID NO: 3962897 - RNA, 18 nt, Human herpesvirus 2
agggcuucguggaagagg

SEQ ID NO: 3962898 - RNA, 12 nt, Human herpesvirus 2
agggggaaggaa

SEQ ID NO: 3962899 - RNA, 23 nt, Human herpesvirus 2
agggggcaauuaauaaagacugu

SEQ ID NO: 3962900 - RNA, 12 nt, Human herpesvirus 2
agggggcggcgc

SEQ ID NO: 3962901 - RNA, 14 nt, Human herpesvirus 2
aggguggcuggggu

SEQ ID NO: 3962902 - RNA, 12 nt, Human herpesvirus 2
aggguggggcug

SEQ ID NO: 3962903 - RNA, 18 nt, Human herpesvirus 2
agggugugacccccccau

SEQ ID NO: 3962904 - RNA, 13 nt, Human herpesvirus 2
caccgggggcccc

SEQ ID NO: 3962905 - RNA, 15 nt, Human herpesvirus 2
caccguccaccuccg

SEQ ID NO: 3962906 - RNA, 17 nt, Human herpesvirus 2
caccuccccggcggccg

SEQ ID NO: 3962907 - RNA, 19 nt, Human herpesvirus 2
caccucgcggcggcucccc

SEQ ID NO: 3962908 - RNA, 14 nt, Human herpesvirus 2
cacgacaggugggg

SEQ ID NO: 3962909 - RNA, 19 nt, Human herpesvirus 2
cacgaccaaaacggacccc

SEQ ID NO: 3962910 - RNA, 20 nt, Human herpesvirus 2
cacgagcacaaacgugcucu

SEQ ID NO: 3962911 - RNA, 21 nt, Human herpesvirus 2
cacgauaccguuuaucgugua

SEQ ID NO: 3962912 - RNA, 20 nt, Human herpesvirus 2
cacgcaacaacggcgggccc

SEQ ID NO: 3962913 - RNA, 20 nt, Human herpesvirus 2
cacgcaggccgcccccagca

SEQ ID NO: 3962914 - RNA, 17 nt, Human herpesvirus 2
cacgccguggacgcccc

SEQ ID NO: 3962915 - RNA, 12 nt, Human herpesvirus 2
cacgcgcuggcc

SEQ ID NO: 3962916 - RNA, 15 nt, Human herpesvirus 2
cacgcgcuggccccu

SEQ ID NO: 3962917 - RNA, 22 nt, Human herpesvirus 2
cacgcggggacccgccagagac

SEQ ID NO: 3962918 - RNA, 21 nt, Human herpesvirus 2
cacgcugcgcgcgcaccugcg

SEQ ID NO: 3962919 - RNA, 14 nt, Human herpesvirus 2
cacggacacggccc

SEQ ID NO: 3962920 - RNA, 22 nt, Human herpesvirus 2
cacggccgugucgcuaaacagg

SEQ ID NO: 3962921 - RNA, 18 nt, Human herpesvirus 2
cacggucggugcccccca

SEQ ID NO: 3962922 - RNA, 14 nt, Human herpesvirus 2
cacggucugguggc

SEQ ID NO: 3962923 - RNA, 17 nt, Human herpesvirus 2
cacggucugguggcgcu

SEQ ID NO: 3962924 - RNA, 13 nt, Human herpesvirus 2
cacgucgcaugca

SEQ ID NO: 3962925 - RNA, 19 nt, Human herpesvirus 2
cacgucggacgccagcugc

SEQ ID NO: 3962926 - RNA, 18 nt, Human herpesvirus 2
cacugccccccuccuggg

SEQ ID NO: 3962927 - RNA, 21 nt, Human herpesvirus 2
cagaacccccguaaacaccag

SEQ ID NO: 3962928 - RNA, 16 nt, Human herpesvirus 2
cagaauaaaaggcauu

SEQ ID NO: 3962929 - RNA, 20 nt, Human herpesvirus 2
cagacccgagcuccggggga

SEQ ID NO: 3962930 - RNA, 21 nt, Human herpesvirus 2
cagaccgaagaggugcugccg

SEQ ID NO: 3962931 - RNA, 13 nt, Human herpesvirus 2
cagacgacagaca

SEQ ID NO: 3962932 - RNA, 19 nt, Human herpesvirus 2
cagacuggccgugcugggc

SEQ ID NO: 3962933 - RNA, 22 nt, Human herpesvirus 2
cagaugcugcccgcggaccacc

SEQ ID NO: 3962934 - RNA, 19 nt, Human herpesvirus 3
cggucgcguguacgaaaac

SEQ ID NO: 3962935 - RNA, 16 nt, Human herpesvirus 3
cguaauacaugcuuug

SEQ ID NO: 3962936 - RNA, 22 nt, Human herpesvirus 3
cguacaaucgaaaaaaggugua

SEQ ID NO: 3962937 - RNA, 20 nt, Human herpesvirus 3
cguauuuuuauuuaaaugug

SEQ ID NO: 3962938 - RNA, 18 nt, Human herpesvirus 3
cgucaacugcaacaugca

SEQ ID NO: 3962939 - RNA, 14 nt, Human herpesvirus 3
cguguauacaauua

SEQ ID NO: 3962940 - RNA, 15 nt, Human herpesvirus 3
cguguuaaacacugu

SEQ ID NO: 3962941 - RNA, 17 nt, Human herpesvirus 3
cguguuuuuaauagaga

SEQ ID NO: 3962942 - RNA, 16 nt, Human herpesvirus 3
cguuacgggggugugg

SEQ ID NO: 3962943 - RNA, 16 nt, Human herpesvirus 3
cguuauacaagguguu

SEQ ID NO: 3962944 - RNA, 22 nt, Human herpesvirus 3
cguuauagcaggggucuccaga

SEQ ID NO: 3962945 - RNA, 16 nt, Human herpesvirus 3
cguuauggaguucaaa

SEQ ID NO: 3962946 - RNA, 15 nt, Human herpesvirus 3
cuaacaacucuggag

SEQ ID NO: 3962947 - RNA, 22 nt, Human herpesvirus 3
cuacuauuugugaagacuuuau

SEQ ID NO: 3962948 - RNA, 18 nt, Human herpesvirus 3
cuacuuagcggacaugcu

SEQ ID NO: 3962949 - RNA, 14 nt, Human herpesvirus 3
cuauacgcauuucg

SEQ ID NO: 3962950 - RNA, 19 nt, Human herpesvirus 3
cuauauaacgccucccagc

SEQ ID NO: 3962951 - RNA, 21 nt, Human herpesvirus 3
cucacugcuauagccgucaga

SEQ ID NO: 3962952 - RNA, 13 nt, Human herpesvirus 3
cucacuguuuucg

SEQ ID NO: 3962953 - RNA, 19 nt, Human herpesvirus 3
cuccaagcucguuuuauga

SEQ ID NO: 3962954 - RNA, 17 nt, Human herpesvirus 3
cuccacuucgucugugg

SEQ ID NO: 3962955 - RNA, 14 nt, Human herpesvirus 3
cucccacccacugu

SEQ ID NO: 3962956 - RNA, 16 nt, Human herpesvirus 3
cuccgcgccuguuaau

SEQ ID NO: 3962957 - RNA, 16 nt, Human herpesvirus 3
cuccucagccaugcgg

SEQ ID NO: 3962958 - RNA, 15 nt, Human herpesvirus 3
cuccuuuucucguga

SEQ ID NO: 3962959 - RNA, 19 nt, Human herpesvirus 3
cucgaacccccgugacucc

SEQ ID NO: 3962960 - RNA, 20 nt, Human herpesvirus 3
cucgcaguuuucuuguuccc

SEQ ID NO: 3962961 - RNA, 12 nt, Human herpesvirus 3
cucguauauaca

SEQ ID NO: 3962962 - RNA, 12 nt, Human herpesvirus 3
cucgugagcgcc

SEQ ID NO: 3962963 - RNA, 18 nt, Human herpesvirus 3
cucgugagcgccacuggc

SEQ ID NO: 3962964 - RNA, 18 nt, Human herpesvirus 3
cucuggagucuccaaaug

SEQ ID NO: 3962965 - RNA, 13 nt, Human herpesvirus 3
cucuguuacauuc

SEQ ID NO: 3962966 - RNA, 18 nt, Human herpesvirus 3
cugcauaagcucuguaug

SEQ ID NO: 3962967 - RNA, 17 nt, Human herpesvirus 3
cugccacggccucggcg

SEQ ID NO: 3962968 - RNA, 21 nt, Human herpesvirus 3
cugccuuuggggguuaagcua

SEQ ID NO: 3962969 - RNA, 21 nt, Human herpesvirus 3
cugcuaaccauagacuguucu

SEQ ID NO: 3962970 - RNA, 22 nt, Human herpesvirus 3
cugcugaagcugacgaagagaa

SEQ ID NO: 3962971 - RNA, 23 nt, Human herpesvirus 3
cuggaauaaaacguuuuaaaagc

SEQ ID NO: 3962972 - RNA, 21 nt, Human herpesvirus 3
cuggcuggcgugguuauuaca

SEQ ID NO: 3962973 - RNA, 20 nt, Human herpesvirus 3
cuggucaccguguggacauc

SEQ ID NO: 3962974 - RNA, 23 nt, Human herpesvirus 3
cuguaagacccgucgguaaauga

SEQ ID NO: 3962975 - RNA, 21 nt, Human herpesvirus 3
cugugcgggcgggcgacgggc

SEQ ID NO: 3962976 - RNA, 15 nt, Human herpesvirus 3
cuguuacauuucgaa

SEQ ID NO: 3962977 - RNA, 20 nt, Human herpesvirus 3
cuuaaaccgugugugcggag

SEQ ID NO: 3962978 - RNA, 20 nt, Human herpesvirus 3
cuuaaugguucauuguuuua

SEQ ID NO: 3962979 - RNA, 19 nt, Human herpesvirus 3
cuucugucaaguugcaugu

SEQ ID NO: 3962980 - RNA, 19 nt, Human herpesvirus 3
cuugacgcgaacaccgcug

SEQ ID NO: 3962981 - RNA, 14 nt, Human herpesvirus 3
cuuucaauauucca

SEQ ID NO: 3962982 - RNA, 19 nt, Human herpesvirus 3
gaaaauagcguugaugcaa

SEQ ID NO: 3962983 - RNA, 19 nt, Human herpesvirus 3
gaaaaucuauuaucaggag

SEQ ID NO: 3962984 - RNA, 15 nt, Human herpesvirus 3
gaaauacuaauauaa

SEQ ID NO: 3962985 - RNA, 14 nt, Human herpesvirus 3
gaaaugugcuguca

SEQ ID NO: 3962986 - RNA, 20 nt, Human herpesvirus 3
gaacuaauauucuacagauu

SEQ ID NO: 3962987 - RNA, 21 nt, Human herpesvirus 3
gaauaauuuuaaggcaaggaa

SEQ ID NO: 3962988 - RNA, 22 nt, Human herpesvirus 3
gaaucacggccgugcggucucc

SEQ ID NO: 3962989 - RNA, 15 nt, Human herpesvirus 3
gaauuacuccuuuaa

SEQ ID NO: 3962990 - RNA, 15 nt, Human herpesvirus 3
gacaauuaacacaga

SEQ ID NO: 3962991 - RNA, 19 nt, Human herpesvirus 3
gacaucaaccaguggaaua

SEQ ID NO: 3962992 - RNA, 18 nt, Human herpesvirus 3
gacaucguuuguuucuuu

SEQ ID NO: 3962993 - RNA, 12 nt, Human herpesvirus 3
gacaugcacugc

SEQ ID NO: 3962994 - RNA, 12 nt, Human herpesvirus 3
gacccaccccac

SEQ ID NO: 3962995 - RNA, 13 nt, Human herpesvirus 3
gacccccccccga

SEQ ID NO: 3962996 - RNA, 20 nt, Human herpesvirus 3
gacgacauuaaacguauucu

SEQ ID NO: 3962997 - RNA, 17 nt, Human herpesvirus 3
gacgccuuucuccggga

SEQ ID NO: 3962998 - RNA, 21 nt, Human herpesvirus 3
gacgcgugaaauguaacuaga

SEQ ID NO: 3962999 - RNA, 19 nt, Human herpesvirus 3
gacggaugugcggggagcu

SEQ ID NO: 3963000 - RNA, 22 nt, Human herpesvirus 3
gacguccacacagccucaggag

SEQ ID NO: 3963001 - RNA, 17 nt, Human herpesvirus 3
gacuguuuguuguuaau

SEQ ID NO: 3963002 - RNA, 18 nt, Human herpesvirus 3
gacuugacgcgaacaccg

SEQ ID NO: 3963003 - RNA, 13 nt, Human herpesvirus 3
gagacauaaaagu

SEQ ID NO: 3963004 - RNA, 14 nt, Human herpesvirus 3
gagacguauguucu

SEQ ID NO: 3963005 - RNA, 23 nt, Human herpesvirus 3
gagcaucucuggacccccaacga

SEQ ID NO: 3963006 - RNA, 17 nt, Human herpesvirus 3
gagcauuucgaaucguu

SEQ ID NO: 3963007 - RNA, 16 nt, Human herpesvirus 3
gagccgcggccagugc

SEQ ID NO: 3963008 - RNA, 20 nt, Human herpesvirus 3
gaggguccaucaaacacaca

SEQ ID NO: 3963009 - RNA, 19 nt, Human herpesvirus 3
gagugaaucuuaaaccuga

SEQ ID NO: 3963010 - RNA, 22 nt, Human herpesvirus 3
gaucccgccgucgcgcccaccu

SEQ ID NO: 3963011 - RNA, 23 nt, Human herpesvirus 3
gaucgguuagaugcauauuugga

SEQ ID NO: 3963012 - RNA, 21 nt, Human herpesvirus 3
gaugguaguuaccaaaguuuu

SEQ ID NO: 3963013 - RNA, 22 nt, Human herpesvirus 3
gauguuuuuaauccaauguuug

SEQ ID NO: 3963014 - RNA, 20 nt, Human herpesvirus 3
gauucaagugagguguccug

SEQ ID NO: 3963015 - RNA, 14 nt, Human herpesvirus 3
gauucuauauuaau

SEQ ID NO: 3963016 - RNA, 20 nt, Human herpesvirus 3
gauuuuaucauugaagauga

SEQ ID NO: 3963017 - RNA, 19 nt, Human herpesvirus 3
gauuuuuuuaaacaaauac

SEQ ID NO: 3963018 - RNA, 18 nt, Human herpesvirus 3
gcaacugcaaacacgcaa

SEQ ID NO: 3963019 - RNA, 23 nt, Human herpesvirus 3
gcacuaucgucucaaaacuuaag

SEQ ID NO: 3963020 - RNA, 16 nt, Human herpesvirus 3
gcaguccaugguuuua

SEQ ID NO: 3963021 - RNA, 21 nt, Human herpesvirus 3
gcaucccccauuguaugaauu

SEQ ID NO: 3963022 - RNA, 13 nt, Human herpesvirus 3
gcccacaccuacc

SEQ ID NO: 3963023 - RNA, 17 nt, Human herpesvirus 3
gcccggcggaccccggg

SEQ ID NO: 3963024 - RNA, 21 nt, Human herpesvirus 3
gccgagaagggggauuuacaa

SEQ ID NO: 3963025 - RNA, 13 nt, Human herpesvirus 3
gccgcgcuaugcg

SEQ ID NO: 3963026 - RNA, 14 nt, Human herpesvirus 3
gccgcuacccgaaa

SEQ ID NO: 3963027 - RNA, 20 nt, Human herpesvirus 3
gccggacuuuacugcacacg

SEQ ID NO: 3963028 - RNA, 18 nt, Human herpesvirus 3
gccgucgcgcccaccucg

SEQ ID NO: 3963029 - RNA, 16 nt, Human herpesvirus 3
gcgagcgcgugaggga

SEQ ID NO: 3963030 - RNA, 13 nt, Human herpesvirus 3
gcgaucgaacagg

SEQ ID NO: 3963031 - RNA, 12 nt, Human herpesvirus 3
gcgcauggccaa

SEQ ID NO: 3963032 - RNA, 15 nt, Human herpesvirus 3
gcggaccccgggaga

SEQ ID NO: 3963033 - RNA, 16 nt, Human herpesvirus 3
gcguccucuguuacau

SEQ ID NO: 3963034 - RNA, 13 nt, Human herpesvirus 3
gcugaagggugca

SEQ ID NO: 3963035 - RNA, 15 nt, Human herpesvirus 3
gcugcaagcccuccg

SEQ ID NO: 3963036 - RNA, 18 nt, Human herpesvirus 3
gcuguaggucaacauaca

SEQ ID NO: 3963037 - RNA, 16 nt, Human herpesvirus 3
gcuguccaugaugaaa

SEQ ID NO: 3963038 - RNA, 22 nt, Human herpesvirus 3
gcuucaagucucaaugaaacag

SEQ ID NO: 3963039 - RNA, 18 nt, Human herpesvirus 3
gcuucccgaaagcccgau

SEQ ID NO: 3963040 - RNA, 23 nt, Human herpesvirus 3
ggaacccaagguguaaauacugc

SEQ ID NO: 3963041 - RNA, 14 nt, Human herpesvirus 3
ggacauaugucugc

SEQ ID NO: 3963042 - RNA, 18 nt, Human herpesvirus 3
ggacuaacaaaguuggaa

SEQ ID NO: 3963043 - RNA, 20 nt, Human herpesvirus 3
ggacuaggcacuuuggcggu

SEQ ID NO: 3963044 - RNA, 23 nt, Human herpesvirus 3
ggccgugugguaugaaucucugc

SEQ ID NO: 3963045 - RNA, 17 nt, Human herpesvirus 3
ggcgacgggcgggcugg

SEQ ID NO: 3963046 - RNA, 18 nt, Human herpesvirus 3
ggcuguaggucaacauac

SEQ ID NO: 3963047 - RNA, 21 nt, Human herpesvirus 3
gggguacuugcaccacaccau

SEQ ID NO: 3963048 - RNA, 22 nt, Human herpesvirus 3
ggguacaaacgcgcaauguuuu

SEQ ID NO: 3963049 - RNA, 23 nt, Human herpesvirus 3
gggucagaaccgacccaggacau

SEQ ID NO: 3963050 - RNA, 20 nt, Human herpesvirus 3
gguagacaacugacagaaac

SEQ ID NO: 3963051 - RNA, 14 nt, Human herpesvirus 3
gguauacacaccca

SEQ ID NO: 3963052 - RNA, 18 nt, Human herpesvirus 3
gguggacguuuuuccaca

SEQ ID NO: 3963053 - RNA, 12 nt, Human herpesvirus 3
guacacccagcu

SEQ ID NO: 3963054 - RNA, 14 nt, Human herpesvirus 3
guacacccagcugu

SEQ ID NO: 3963055 - RNA, 13 nt, Human herpesvirus 3
guacgauuagaac

SEQ ID NO: 3963056 - RNA, 19 nt, Human herpesvirus 3
guacguaaccauauauaag

SEQ ID NO: 3963057 - RNA, 17 nt, Human herpesvirus 3
guagaggguccaucaaa

SEQ ID NO: 3963058 - RNA, 20 nt, Human herpesvirus 3
guauacacacccaccccaga

SEQ ID NO: 3963059 - RNA, 23 nt, Human herpesvirus 3
guauauaaaauuaaaacauugcu

SEQ ID NO: 3963060 - RNA, 12 nt, Human herpesvirus 3
gucagaaacacu

SEQ ID NO: 3963061 - RNA, 13 nt, Human herpesvirus 3
gucgggucauuau

SEQ ID NO: 3963062 - RNA, 17 nt, Human herpesvirus 3
gucgugugcuccuugga

SEQ ID NO: 3963063 - RNA, 12 nt, Human herpesvirus 3
gucugcccaccg

SEQ ID NO: 3963064 - RNA, 19 nt, Human herpesvirus 3
gucuuuuuuugaugucugu

SEQ ID NO: 3963065 - RNA, 21 nt, Human herpesvirus 3
gugagggugaccggcgggguc

SEQ ID NO: 3963066 - RNA, 18 nt, Human herpesvirus 3
gugcgacaaaggcauuug

SEQ ID NO: 3963067 - RNA, 17 nt, Human herpesvirus 3
gugguaccaaaaacaca

SEQ ID NO: 3963068 - RNA, 17 nt, Human herpesvirus 3
guggugaagaaggacag

SEQ ID NO: 3963069 - RNA, 13 nt, Human herpesvirus 3
guguuaaacacug

SEQ ID NO: 3963070 - RNA, 16 nt, Human herpesvirus 3
guuaauaaaagcggaa

SEQ ID NO: 3963071 - RNA, 15 nt, Human herpesvirus 3
guuacaucuauagca

SEQ ID NO: 3963072 - RNA, 15 nt, Human herpesvirus 3
guuacucaugugucu

SEQ ID NO: 3963073 - RNA, 20 nt, Human herpesvirus 3
guuaucuuuauuuggaaugc

SEQ ID NO: 3963074 - RNA, 22 nt, Human herpesvirus 3
guugcacguaacaagcucguug

SEQ ID NO: 3963075 - RNA, 17 nt, Human herpesvirus 3
guugguuacugugaaug

SEQ ID NO: 3963076 - RNA, 13 nt, Human herpesvirus 3
guuucccagagac

SEQ ID NO: 3963077 - RNA, 21 nt, Human herpesvirus 3
guuuucguuuugguguuacau

SEQ ID NO: 3963078 - RNA, 19 nt, Human herpesvirus 3
guuuuucuaaauuacagau

SEQ ID NO: 3963079 - RNA, 17 nt, Human herpesvirus 3
uaaaacaaguggaugau

SEQ ID NO: 3963080 - RNA, 17 nt, Human herpesvirus 3
uaaacagagaucucugu

SEQ ID NO: 3963081 - RNA, 19 nt, Human herpesvirus 3
uaaagucguuuauaucugu

SEQ ID NO: 3963082 - RNA, 16 nt, Human herpesvirus 3
uaaauaacauaaccaa

SEQ ID NO: 3963083 - RNA, 17 nt, Human herpesvirus 3
uaaccauagacuguucu

SEQ ID NO: 3963084 - RNA, 16 nt, Human herpesvirus 3
uaauaaaucuuacgua

SEQ ID NO: 3963085 - RNA, 21 nt, Human herpesvirus 3
uaauauuaacaggauuugcuu

SEQ ID NO: 3963086 - RNA, 11 nt, Human herpesvirus 3
uaaucuuuuau

SEQ ID NO: 3963087 - RNA, 22 nt, Human herpesvirus 3
uaauuccaauauuuuguuaaua

SEQ ID NO: 3963088 - RNA, 21 nt, Human herpesvirus 3
uacacauccuggacacagucc

SEQ ID NO: 3963089 - RNA, 18 nt, Human herpesvirus 3
uacacauuuaaauaaaaa

SEQ ID NO: 3963090 - RNA, 18 nt, Human herpesvirus 3
uacaccagaaacguuuuu

SEQ ID NO: 3963091 - RNA, 16 nt, Human herpesvirus 3
uacaccggauaaaagc

SEQ ID NO: 3963092 - RNA, 18 nt, Human herpesvirus 3
uacacugguaaaugguca

SEQ ID NO: 3963093 - RNA, 17 nt, Human herpesvirus 3
uacaggcaacugcaaac

SEQ ID NO: 3963094 - RNA, 20 nt, Human herpesvirus 3
uacuccacggggucuacacc

SEQ ID NO: 3963095 - RNA, 13 nt, Human herpesvirus 3
uacuuggacuguu

SEQ ID NO: 3963096 - RNA, 20 nt, Human herpesvirus 3
uagcauccaaauuaacccaa

SEQ ID NO: 3963097 - RNA, 22 nt, Human herpesvirus 3
uaggcgaccgcgggucaaugga

SEQ ID NO: 3963098 - RNA, 22 nt, Human herpesvirus 3
uaggcggguucuucacuggacu

SEQ ID NO: 3963099 - RNA, 16 nt, Human herpesvirus 3
uaguaccacgugguau

SEQ ID NO: 3963100 - RNA, 13 nt, Human herpesvirus 3
uaguauuuacgua

SEQ ID NO: 3963101 - RNA, 20 nt, Human herpesvirus 3
uauaaauccguaucucggag

SEQ ID NO: 3963102 - RNA, 22 nt, Human herpesvirus 3
uauaauaaaaagucacuauaaa

SEQ ID NO: 3963103 - RNA, 19 nt, Human herpesvirus 3
uauaucauuuuauuacauu

SEQ ID NO: 3963104 - RNA, 20 nt, Human herpesvirus 3
uauaugggcgggauuacauu

SEQ ID NO: 3963105 - RNA, 16 nt, Human herpesvirus 3
uauauuuuuaaucauu

SEQ ID NO: 3963106 - RNA, 15 nt, Human herpesvirus 3
uauccucuuaacguu

SEQ ID NO: 3963107 - RNA, 13 nt, Human herpesvirus 3
uaugaaucucugc

SEQ ID NO: 3963108 - RNA, 20 nt, Human herpesvirus 3
uaugaucauuaaacgugcau

SEQ ID NO: 3963109 - RNA, 20 nt, Human herpesvirus 3
uaugaucguccuucaacaca

SEQ ID NO: 3963110 - RNA, 22 nt, Human herpesvirus 3
uaugguauaccgcucguguaaa

SEQ ID NO: 3963111 - RNA, 16 nt, Human herpesvirus 3
uauguuuuuauuuugu

SEQ ID NO: 3963112 - RNA, 15 nt, Human herpesvirus 3
uauuaccaacuguau

SEQ ID NO: 3963113 - RNA, 15 nt, Human herpesvirus 3
uauucuauuaacaau

SEQ ID NO: 3963114 - RNA, 16 nt, Human herpesvirus 3
uauucucccaaaacau

SEQ ID NO: 3963115 - RNA, 14 nt, Human herpesvirus 3
uauuuaaauuuaca

SEQ ID NO: 3963116 - RNA, 15 nt, Human herpesvirus 3
uauuuaauaggcaua

SEQ ID NO: 3963117 - RNA, 23 nt, Human herpesvirus 3
uauuucccaacgcauaaccagcg

SEQ ID NO: 3963118 - RNA, 16 nt, Human herpesvirus 3
uauuugugaagacuuu

SEQ ID NO: 3963119 - RNA, 13 nt, Human herpesvirus 3
ucaacugcuuuua

SEQ ID NO: 3963120 - RNA, 21 nt, Human herpesvirus 3
ucagaaagauugcagucauuu

SEQ ID NO: 3963121 - RNA, 14 nt, Human herpesvirus 3
ucagauauuuugca

SEQ ID NO: 3963122 - RNA, 23 nt, Human herpesvirus 3
ucagguuauccaacuguuuacau

SEQ ID NO: 3963123 - RNA, 19 nt, Human herpesvirus 3
ucauacgccgacaugccug

SEQ ID NO: 3963124 - RNA, 16 nt, Human herpesvirus 3
ucauguaauuguaaau

SEQ ID NO: 3963125 - RNA, 13 nt, Human herpesvirus 3
ucauuuauuacca

SEQ ID NO: 3963126 - RNA, 18 nt, Human herpesvirus 3
uccauaucgcaauguuuu

SEQ ID NO: 3963127 - RNA, 14 nt, Human herpesvirus 3
ucccgauuuggaaa

SEQ ID NO: 3963128 - RNA, 14 nt, Human herpesvirus 3
uccgaauaaaugug

SEQ ID NO: 3963129 - RNA, 18 nt, Human herpesvirus 3
uccgccuauagcugucac

SEQ ID NO: 3963130 - RNA, 13 nt, Human herpesvirus 3
uccgcgcucaauc

SEQ ID NO: 3963131 - RNA, 14 nt, Human herpesvirus 3
ucgauguaacacca

SEQ ID NO: 3963132 - RNA, 23 nt, Human herpesvirus 3
ucgcgcccaccucggccgcuucc

SEQ ID NO: 3963133 - RNA, 15 nt, Human herpesvirus 3
ucgcguacccccuuc

SEQ ID NO: 3963134 - RNA, 14 nt, Human herpesvirus 3
ucgcuacuccaggc

SEQ ID NO: 3963135 - RNA, 22 nt, Human herpesvirus 3
ucggacccccccccgaaaauaa

SEQ ID NO: 3963136 - RNA, 19 nt, Human herpesvirus 3
ucgucguuuaaagccccuc

SEQ ID NO: 3963137 - RNA, 15 nt, Human herpesvirus 3
ucgugagcgccacug

SEQ ID NO: 3963138 - RNA, 23 nt, Human herpesvirus 3
ucguuuaaagccccucgaagaac

SEQ ID NO: 3963139 - RNA, 23 nt, Human herpesvirus 3
ucuaucggacauaugucugcucu

SEQ ID NO: 3963140 - RNA, 18 nt, Human herpesvirus 3
ucucgugagcgccacugg

SEQ ID NO: 3963141 - RNA, 14 nt, Human herpesvirus 3
ucugauugguugau

SEQ ID NO: 3963142 - RNA, 24 nt, Human herpesvirus 3
ucugucgaugauacacauaugcac

SEQ ID NO: 3963143 - RNA, 16 nt, Human herpesvirus 3
ucuucaaauuaaaagc

SEQ ID NO: 3963144 - RNA, 14 nt, Human herpesvirus 3
ucuuccgugugguc

SEQ ID NO: 3963145 - RNA, 12 nt, Human herpesvirus 3
ugaaagcuacca

SEQ ID NO: 3963146 - RNA, 22 nt, Human herpesvirus 3
ugaacuuaccuccgaagacuuu

SEQ ID NO: 3963147 - RNA, 13 nt, Human herpesvirus 3
ugaccauuuacca

SEQ ID NO: 3963148 - RNA, 19 nt, Human herpesvirus 3
ugacggcgacuuuaagaau

SEQ ID NO: 3963149 - RNA, 14 nt, Human herpesvirus 3
ugaguuuaggguuu

SEQ ID NO: 3963150 - RNA, 15 nt, Human herpesvirus 3
ugauauaagguguua

SEQ ID NO: 3963151 - RNA, 22 nt, Human herpesvirus 3
uggaaacacccauacauauguu

SEQ ID NO: 3963152 - RNA, 19 nt, Human herpesvirus 3
uggacaucgcugaugccag

SEQ ID NO: 3963153 - RNA, 18 nt, Human herpesvirus 3
uggauggccuaucuggau

SEQ ID NO: 3963154 - RNA, 16 nt, Human herpesvirus 3
uggcaacgcuggcauu

SEQ ID NO: 3963155 - RNA, 16 nt, Human herpesvirus 3
uggcgcgcggacuguu

SEQ ID NO: 3963156 - RNA, 17 nt, Human herpesvirus 3
uggcgcgcggacuguuu

SEQ ID NO: 3963157 - RNA, 13 nt, Human herpesvirus 3
ugggucagacagu

SEQ ID NO: 3963158 - RNA, 12 nt, Human herpesvirus 3
ugguaagguuuu

SEQ ID NO: 3963159 - RNA, 18 nt, Human herpesvirus 3
uguagucuuugaucccag

SEQ ID NO: 3963160 - RNA, 15 nt, Human herpesvirus 3
uguccggacuccagc

SEQ ID NO: 3963161 - RNA, 23 nt, Human herpesvirus 3
uguucauuuuauuaucccagcac

SEQ ID NO: 3963162 - RNA, 15 nt, Human herpesvirus 3
uguuggcucggucug

SEQ ID NO: 3963163 - RNA, 21 nt, Human herpesvirus 3
uguuguagccacaauuuacau

SEQ ID NO: 3963164 - RNA, 21 nt, Human herpesvirus 3
uuaaagccccucgaagaacaa

SEQ ID NO: 3963165 - RNA, 20 nt, Human herpesvirus 3
uuaacaacucgugucucugg

SEQ ID NO: 3963166 - RNA, 22 nt, Human herpesvirus 3
uuaagaccaacgguuggcuuaa

SEQ ID NO: 3963167 - RNA, 14 nt, Human herpesvirus 3
uuaaguguauuugg

SEQ ID NO: 3963168 - RNA, 18 nt, Human herpesvirus 3
uuacaggacaaaccccac

SEQ ID NO: 3963169 - RNA, 16 nt, Human herpesvirus 3
uuacauugcuuucaaa

SEQ ID NO: 3963170 - RNA, 19 nt, Human herpesvirus 3
uuagacguucaaaauaucu

SEQ ID NO: 3963171 - RNA, 19 nt, Human herpesvirus 3
uuagcggugguaauucuuc

SEQ ID NO: 3963172 - RNA, 19 nt, Human herpesvirus 3
uuaugaaaaaagugucugu

SEQ ID NO: 3963173 - RNA, 15 nt, Human herpesvirus 3
uuauuagaacguuua

SEQ ID NO: 3963174 - RNA, 17 nt, Human herpesvirus 3
uucaaaccaauaucuuu

SEQ ID NO: 3963175 - RNA, 18 nt, Human herpesvirus 3
uucagcaaguuuaacauu

SEQ ID NO: 3963176 - RNA, 15 nt, Human herpesvirus 3
uuccacacucuucaa

SEQ ID NO: 3963177 - RNA, 16 nt, Human herpesvirus 3
uuccacacucuucaau

SEQ ID NO: 3963178 - RNA, 14 nt, Human herpesvirus 3
uucuacaccuuugc

SEQ ID NO: 3963179 - RNA, 16 nt, Human herpesvirus 3
uugacuuuguuugcug

SEQ ID NO: 3963180 - RNA, 19 nt, Human herpesvirus 3
uugcugcagacaccaugac

SEQ ID NO: 3963181 - RNA, 14 nt, Human herpesvirus 3
uuggagaaacauua

SEQ ID NO: 3963182 - RNA, 16 nt, Human herpesvirus 3
uugucgaucauacgcc

SEQ ID NO: 3963183 - RNA, 17 nt, Human herpesvirus 3
uugugaucuauuaacag

SEQ ID NO: 3963184 - RNA, 23 nt, Human herpesvirus 3
uuguguuuauaacguauaacccg

SEQ ID NO: 3963185 - RNA, 20 nt, Human herpesvirus 3
uuuacggcagucugaccauu

SEQ ID NO: 3963186 - RNA, 15 nt, Human herpesvirus 3
uuuaggaaucaagac

SEQ ID NO: 3963187 - RNA, 12 nt, Human herpesvirus 3
uuuaucccccuu

SEQ ID NO: 3963188 - RNA, 18 nt, Human herpesvirus 3
uuuaugaaaaaagugucu

SEQ ID NO: 3963189 - RNA, 22 nt, Human herpesvirus 3
uuuauuuugcucguauauacau

SEQ ID NO: 3963190 - RNA, 16 nt, Human herpesvirus 3
uuucugggcgcccggc

SEQ ID NO: 3963191 - RNA, 20 nt, Human herpesvirus 3
uuuuuaugaaaaaagugucu

SEQ ID NO: 3963192 - RNA, 18 nt, Human herpesvirus 3
acucaugugucuccauua

SEQ ID NO: 3963193 - RNA, 16 nt, Human herpesvirus 3
acucuacgcauuuacg

SEQ ID NO: 3963194 - RNA, 19 nt, Human herpesvirus 3
acuuggcguguuaaacacu

SEQ ID NO: 3963195 - RNA, 24 nt, Human herpesvirus 3
acuugggcggagacaauuaaccga

SEQ ID NO: 3963196 - RNA, 18 nt, Human herpesvirus 3
acuuguguguaccauaga

SEQ ID NO: 3963197 - RNA, 14 nt, Human herpesvirus 3
agaaacuuaauaca

SEQ ID NO: 3963198 - RNA, 16 nt, Human herpesvirus 3
agaauaccaaaaagaa

SEQ ID NO: 3963199 - RNA, 18 nt, Human herpesvirus 3
agaaucuccuaacuauaa

SEQ ID NO: 3963200 - RNA, 16 nt, Human herpesvirus 3
agaauuaaaaaagccg

SEQ ID NO: 3963201 - RNA, 22 nt, Human herpesvirus 3
agacuugauacccucaaacacg

SEQ ID NO: 3963202 - RNA, 16 nt, Human herpesvirus 3
agaucaauggcgguga

SEQ ID NO: 3963203 - RNA, 21 nt, Human herpesvirus 3
agaucgucguuuaaagccccu

SEQ ID NO: 3963204 - RNA, 12 nt, Human herpesvirus 3
agaucuuacacc

SEQ ID NO: 3963205 - RNA, 15 nt, Human herpesvirus 3
agaugagaaaaauaa

SEQ ID NO: 3963206 - RNA, 14 nt, Human herpesvirus 3
agauguguuauuau

SEQ ID NO: 3963207 - RNA, 19 nt, Human herpesvirus 3
agauucaagacuaacauuu

SEQ ID NO: 3963208 - RNA, 15 nt, Human herpesvirus 3
agauuccgaguccuc

SEQ ID NO: 3963209 - RNA, 17 nt, Human herpesvirus 3
agcacccuuuuguaaaa

SEQ ID NO: 3963210 - RNA, 15 nt, Human herpesvirus 3
agcaucuauaugauu

SEQ ID NO: 3963211 - RNA, 12 nt, Human herpesvirus 3
agcccgaucccg

SEQ ID NO: 3963212 - RNA, 20 nt, Human herpesvirus 3
agccgcucgcugagcuccag

SEQ ID NO: 3963213 - RNA, 16 nt, Human herpesvirus 3
agcuguccaugaugaa

SEQ ID NO: 3963214 - RNA, 18 nt, Human herpesvirus 3
aggauaggugucuucaaa

SEQ ID NO: 3963215 - RNA, 18 nt, Human herpesvirus 3
aggaucauuuuuugaaac

SEQ ID NO: 3963216 - RNA, 16 nt, Human herpesvirus 3
aggcauuuguguccca

SEQ ID NO: 3963217 - RNA, 18 nt, Human herpesvirus 3
aggcgugaaagcuaccac

SEQ ID NO: 3963218 - RNA, 13 nt, Human herpesvirus 3
aggggagcgugga

SEQ ID NO: 3963219 - RNA, 21 nt, Human herpesvirus 3
aggggguauuuauacccgaua

SEQ ID NO: 3963220 - RNA, 18 nt, Human herpesvirus 3
agguacgcgucaaaaagc

SEQ ID NO: 3963221 - RNA, 21 nt, Human herpesvirus 3
agguguuaauaaaaacacaac

SEQ ID NO: 3963222 - RNA, 15 nt, Human herpesvirus 3
agguuagauguguua

SEQ ID NO: 3963223 - RNA, 23 nt, Human herpesvirus 3
agguuuauuuacuuuacaacccg

SEQ ID NO: 3963224 - RNA, 13 nt, Human herpesvirus 3
agucauuuucaua

SEQ ID NO: 3963225 - RNA, 18 nt, Human herpesvirus 3
auacaccguguaacucga

SEQ ID NO: 3963226 - RNA, 23 nt, Human herpesvirus 3
auagagguauuguuaccaggaga

SEQ ID NO: 3963227 - RNA, 14 nt, Human herpesvirus 3
auaguaaauaccua

SEQ ID NO: 3963228 - RNA, 17 nt, Human herpesvirus 3
auauacacggacauaau

SEQ ID NO: 3963229 - RNA, 16 nt, Human herpesvirus 3
auauacgagcaaaaua

SEQ ID NO: 3963230 - RNA, 13 nt, Human herpesvirus 3
auauauucacaac

SEQ ID NO: 3963231 - RNA, 15 nt, Human herpesvirus 3
auaucauaaauauua

SEQ ID NO: 3963232 - RNA, 17 nt, Human herpesvirus 3
auaucucauacucaugc

SEQ ID NO: 3963233 - RNA, 21 nt, Human herpesvirus 3
auaugagccguauaacccacu

SEQ ID NO: 3963234 - RNA, 14 nt, Human herpesvirus 3
aucaaacacacaga

SEQ ID NO: 3963235 - RNA, 12 nt, Human herpesvirus 3
aucagaagauau

SEQ ID NO: 3963236 - RNA, 16 nt, Human herpesvirus 3
aucauacgcauuuacg

SEQ ID NO: 3963237 - RNA, 21 nt, Human herpesvirus 3
aucaugguugguuacugugaa

SEQ ID NO: 3963238 - RNA, 15 nt, Human herpesvirus 3
aucauuuuauuacau

SEQ ID NO: 3963239 - RNA, 15 nt, Human herpesvirus 3
auccaauuaaagccc

SEQ ID NO: 3963240 - RNA, 17 nt, Human herpesvirus 3
aucccgccgacagcgga

SEQ ID NO: 3963241 - RNA, 22 nt, Human herpesvirus 3
aucccgccgucgcgcccaccuc

SEQ ID NO: 3963242 - RNA, 15 nt, Human herpesvirus 3
aucggcauuaacaac

SEQ ID NO: 3963243 - RNA, 15 nt, Human herpesvirus 3
aucuaauaacaauuu

SEQ ID NO: 3963244 - RNA, 18 nt, Human herpesvirus 3
augaacugccaauauaca

SEQ ID NO: 3963245 - RNA, 19 nt, Human herpesvirus 3
augacggcgacuuuaagaa

SEQ ID NO: 3963246 - RNA, 23 nt, Human herpesvirus 3
augauucaaguaaauaugugcau

SEQ ID NO: 3963247 - RNA, 15 nt, Human herpesvirus 3
augcacugaaccaca

SEQ ID NO: 3963248 - RNA, 13 nt, Human herpesvirus 3
augccagaagcau

SEQ ID NO: 3963249 - RNA, 14 nt, Human herpesvirus 3
augcuuguaaaaca

SEQ ID NO: 3963250 - RNA, 18 nt, Human herpesvirus 3
auggguuuuuagaauuuc

SEQ ID NO: 3963251 - RNA, 17 nt, Human herpesvirus 3
auggugcgauuuaacca

SEQ ID NO: 3963252 - RNA, 14 nt, Human herpesvirus 3
auguaauuguaaau

SEQ ID NO: 3963253 - RNA, 19 nt, Human herpesvirus 3
auguacugugucucucaaa

SEQ ID NO: 3963254 - RNA, 17 nt, Human herpesvirus 3
auguuuuucuaaauuac

SEQ ID NO: 3963255 - RNA, 15 nt, Human herpesvirus 3
auuaaagguuaaauu

SEQ ID NO: 3963256 - RNA, 16 nt, Human herpesvirus 3
auuacgaguacuaaaa

SEQ ID NO: 3963257 - RNA, 22 nt, Human herpesvirus 3
auuauuaagacgaccccuguca

SEQ ID NO: 3963258 - RNA, 19 nt, Human herpesvirus 3
auucccaguaaacaacagu

SEQ ID NO: 3963259 - RNA, 17 nt, Human herpesvirus 3
auucgacgcaaaaauuc

SEQ ID NO: 3963260 - RNA, 13 nt, Human herpesvirus 3
auuguauauacaa

SEQ ID NO: 3963261 - RNA, 22 nt, Human herpesvirus 3
auuuaaaaauccauuaaagagc

SEQ ID NO: 3963262 - RNA, 21 nt, Human herpesvirus 3
auuuauaaaacacucacguuu

SEQ ID NO: 3963263 - RNA, 20 nt, Human herpesvirus 3
auuuccacaaccagguuaaa

SEQ ID NO: 3963264 - RNA, 15 nt, Human herpesvirus 3
auuugcauuuucagu

SEQ ID NO: 3963265 - RNA, 12 nt, Human herpesvirus 3
auuuucauagac

SEQ ID NO: 3963266 - RNA, 18 nt, Human herpesvirus 3
auuuucgguggaagcaau

SEQ ID NO: 3963267 - RNA, 17 nt, Human herpesvirus 3
auuuuuauuuaaaugug

SEQ ID NO: 3963268 - RNA, 16 nt, Human herpesvirus 3
caaaauaaaaacauac

SEQ ID NO: 3963269 - RNA, 20 nt, Human herpesvirus 3
caaauuaacccaagacgaca

SEQ ID NO: 3963270 - RNA, 17 nt, Human herpesvirus 3
caacacacccauacagu

SEQ ID NO: 3963271 - RNA, 17 nt, Human herpesvirus 3
caacugauuacauuuca

SEQ ID NO: 3963272 - RNA, 17 nt, Human herpesvirus 3
caacuggaaaugugcug

SEQ ID NO: 3963273 - RNA, 16 nt, Human herpesvirus 3
caagguguaaauacug

SEQ ID NO: 3963274 - RNA, 14 nt, Human herpesvirus 3
caauacguaaaugu

SEQ ID NO: 3963275 - RNA, 20 nt, Human herpesvirus 3
caauaucagccgcucgcuga

SEQ ID NO: 3963276 - RNA, 15 nt, Human herpesvirus 3
caauuguuuauguga

SEQ ID NO: 3963277 - RNA, 19 nt, Human herpesvirus 3
cacaucuacugucuugaca

SEQ ID NO: 3963278 - RNA, 18 nt, Human herpesvirus 3
cacccauaaaaacgccuu

SEQ ID NO: 3963279 - RNA, 21 nt, Human herpesvirus 3
caccucggccgcuucccgaaa

SEQ ID NO: 3963280 - RNA, 20 nt, Human herpesvirus 3
cacggaaggcgugaaagcua

SEQ ID NO: 3963281 - RNA, 18 nt, Human herpesvirus 3
cacgggguccccacacgg

SEQ ID NO: 3963282 - RNA, 18 nt, Human herpesvirus 3
cacuaaaaucacuuugau

SEQ ID NO: 3963283 - RNA, 14 nt, Human herpesvirus 3
cacucuacgcauuu

SEQ ID NO: 3963284 - RNA, 22 nt, Human herpesvirus 3
cacuuuaauuccucuaaacgug

SEQ ID NO: 3963285 - RNA, 15 nt, Human herpesvirus 3
cagagaagcuauaca

SEQ ID NO: 3963286 - RNA, 13 nt, Human herpesvirus 3
cagauucuucacc

SEQ ID NO: 3963287 - RNA, 18 nt, Human herpesvirus 3
cagcccgauaacauggaa

SEQ ID NO: 3963288 - RNA, 14 nt, Human herpesvirus 3
cagcgccaauaaaa

SEQ ID NO: 3963289 - RNA, 15 nt, Human herpesvirus 3
caggagggguugcgg

SEQ ID NO: 3963290 - RNA, 15 nt, Human herpesvirus 3
cauaguccgccgaca

SEQ ID NO: 3963291 - RNA, 16 nt, Human herpesvirus 3
caucucuggaccccca

SEQ ID NO: 3963292 - RNA, 19 nt, Human herpesvirus 3
cauggccgugaauggugaa

SEQ ID NO: 3963293 - RNA, 18 nt, Human herpesvirus 3
caugggccaauccgucaa

SEQ ID NO: 3963294 - RNA, 22 nt, Human herpesvirus 3
cauggugcgauuuaaccaccaa

SEQ ID NO: 3963295 - RNA, 17 nt, Human herpesvirus 3
cauuaggaugaaaagaa

SEQ ID NO: 3963296 - RNA, 21 nt, Human herpesvirus 3
cauucagcuuacaguccagug

SEQ ID NO: 3963297 - RNA, 13 nt, Human herpesvirus 3
cauuuggacacua

SEQ ID NO: 3963298 - RNA, 17 nt, Human herpesvirus 3
cauuuuaaaaauaccug

SEQ ID NO: 3963299 - RNA, 16 nt, Human herpesvirus 3
ccaaacacgccuuuua

SEQ ID NO: 3963300 - RNA, 16 nt, Human herpesvirus 3
ccaccucggccgcuuc

SEQ ID NO: 3963301 - RNA, 17 nt, Human herpesvirus 3
ccacgugagcuugcaag

SEQ ID NO: 3963302 - RNA, 23 nt, Human herpesvirus 3
ccagacucucgcggcuucuguaa

SEQ ID NO: 3963303 - RNA, 12 nt, Human herpesvirus 3
ccagaguacagg

SEQ ID NO: 3963304 - RNA, 21 nt, Human herpesvirus 3
ccagaguacaggguaucuaag

SEQ ID NO: 3963305 - RNA, 17 nt, Human herpesvirus 3
ccagcuaaaauuuggaa

SEQ ID NO: 3963306 - RNA, 15 nt, Human herpesvirus 3
ccaucauuuaaauuc

SEQ ID NO: 3963307 - RNA, 15 nt, Human herpesvirus 3
ccauccgccgcagcu

SEQ ID NO: 3963308 - RNA, 18 nt, Human herpesvirus 3
ccauuacaacaaggauaa

SEQ ID NO: 3963309 - RNA, 14 nt, Human herpesvirus 3
cccaauagccgcca

SEQ ID NO: 3963310 - RNA, 16 nt, Human herpesvirus 3
cccaccucggccgcuu

SEQ ID NO: 3963311 - RNA, 20 nt, Human herpesvirus 3
cccacgggguccccacacgg

SEQ ID NO: 3963312 - RNA, 22 nt, Human herpesvirus 3
cccagcuguccggacuccagca

SEQ ID NO: 3963313 - RNA, 22 nt, Human herpesvirus 3
ccccauacuccgauacccugga

SEQ ID NO: 3963314 - RNA, 14 nt, Human herpesvirus 3
cccgaaagcccgau

SEQ ID NO: 3963315 - RNA, 19 nt, Human herpesvirus 3
cccgcggugagcacccggg

SEQ ID NO: 3963316 - RNA, 14 nt, Human herpesvirus 3
cccgguuucugggc

SEQ ID NO: 3963317 - RNA, 22 nt, Human herpesvirus 3
cccuccuuuucucgugagcgcc

SEQ ID NO: 3963318 - RNA, 23 nt, Human herpesvirus 3
cccucuuuauccaauuaaagccc

SEQ ID NO: 3963319 - RNA, 21 nt, Human herpesvirus 3
ccgaaaauaacccccccccgg

SEQ ID NO: 3963320 - RNA, 18 nt, Human herpesvirus 3
ccgcgcguuugcggggcg

SEQ ID NO: 3963321 - RNA, 13 nt, Human herpesvirus 3
ccgcggccagugc

SEQ ID NO: 3963322 - RNA, 23 nt, Human herpesvirus 3
ccgcuagacuguuuuucugcuca

SEQ ID NO: 3963323 - RNA, 16 nt, Human herpesvirus 3
ccggcggaccccggga

SEQ ID NO: 3963324 - RNA, 24 nt, Human herpesvirus 3
ccgguucggugaucaccgggucuu

SEQ ID NO: 3963325 - RNA, 22 nt, Human herpesvirus 3
ccgucucugauucggguaaaac

SEQ ID NO: 3963326 - RNA, 12 nt, Human herpesvirus 3
ccguuaaggcaa

SEQ ID NO: 3963327 - RNA, 19 nt, Human herpesvirus 3
ccguuuccacccccucuua

SEQ ID NO: 3963328 - RNA, 14 nt, Human herpesvirus 3
ccuacacaacaccc

SEQ ID NO: 3963329 - RNA, 13 nt, Human herpesvirus 3
ccucaaacacggg

SEQ ID NO: 3963330 - RNA, 20 nt, Human herpesvirus 3
ccuccucgaccgcuggauga

SEQ ID NO: 3963331 - RNA, 17 nt, Human herpesvirus 3
ccuccuuuucucgugag

SEQ ID NO: 3963332 - RNA, 12 nt, Human herpesvirus 3
ccugaugauggu

SEQ ID NO: 3963333 - RNA, 13 nt, Human herpesvirus 3
ccuuaaaauuugu

SEQ ID NO: 3963334 - RNA, 18 nt, Human herpesvirus 3
cgaaaacgugcaugcguu

SEQ ID NO: 3963335 - RNA, 20 nt, Human herpesvirus 3
cgaaccuucggaugacuuug

SEQ ID NO: 3963336 - RNA, 14 nt, Human herpesvirus 3
cgauaacugcgaua

SEQ ID NO: 3963337 - RNA, 23 nt, Human herpesvirus 3
cgaugcguguacgcuccagaacg

SEQ ID NO: 3963338 - RNA, 18 nt, Human herpesvirus 3
cgcccggcggaccccggg

SEQ ID NO: 3963339 - RNA, 17 nt, Human herpesvirus 3
cgccgucgcgcccaccu

SEQ ID NO: 3963340 - RNA, 13 nt, Human herpesvirus 3
cgcgauauucucc

SEQ ID NO: 3963341 - RNA, 12 nt, Human herpesvirus 3
cgcgcaccaggc

SEQ ID NO: 3963342 - RNA, 22 nt, Human herpesvirus 3
cgcguguacgaaaaccgcagcc

SEQ ID NO: 3963343 - RNA, 22 nt, Human herpesvirus 3
cgcucgaugugauacaaugagc

SEQ ID NO: 3963344 - RNA, 14 nt, Human herpesvirus 3
cggauaucgucuaa

SEQ ID NO: 3963345 - RNA, 14 nt, Human herpesvirus 3
cggaucaugaacaa

SEQ ID NO: 3963346 - RNA, 12 nt, Human herpesvirus 3
cggccgcuuccc

SEQ ID NO: 3963347 - RNA, 13 nt, Human herpesvirus 3
cggccgcuucccg

SEQ ID NO: 3963348 - RNA, 22 nt, Human herpesvirus 3
cggcuuuuaauuugaagacacc

SEQ ID NO: 3963349 - RNA, 15 nt, Human herpesvirus 3
cgggucuuaucuaua

SEQ ID NO: 3963350 - RNA, 17 nt, Human herpesvirus 3
cgguaugccacauuuac

SEQ ID NO: 3963351 - RNA, 14 nt, Human herpesvirus 3
auuuggacacuacu

SEQ ID NO: 3963352 - RNA, 23 nt, Human herpesvirus 3
auuuuaauguaucuggaaggcau

SEQ ID NO: 3963353 - RNA, 21 nt, Human herpesvirus 3
auuuuauauuaaauaaacuau

SEQ ID NO: 3963354 - RNA, 21 nt, Human herpesvirus 3
caaaaagaauuaaaaaagccg

SEQ ID NO: 3963355 - RNA, 15 nt, Human herpesvirus 3
caaaauucgaauugu

SEQ ID NO: 3963356 - RNA, 19 nt, Human herpesvirus 3
caaaccauucgaggaaaac

SEQ ID NO: 3963357 - RNA, 16 nt, Human herpesvirus 3
caaauaacugaacauu

SEQ ID NO: 3963358 - RNA, 15 nt, Human herpesvirus 3
caaaugaugaagcua

SEQ ID NO: 3963359 - RNA, 14 nt, Human herpesvirus 3
caacgaguguaugc

SEQ ID NO: 3963360 - RNA, 18 nt, Human herpesvirus 3
caacgaguguaugcguau

SEQ ID NO: 3963361 - RNA, 19 nt, Human herpesvirus 3
caacgccgagcguguaaau

SEQ ID NO: 3963362 - RNA, 19 nt, Human herpesvirus 3
caacguauccgaagccuuu

SEQ ID NO: 3963363 - RNA, 20 nt, Human herpesvirus 3
caacuguauguaaauuauga

SEQ ID NO: 3963364 - RNA, 13 nt, Human herpesvirus 3
caaggcguaaaau

SEQ ID NO: 3963365 - RNA, 19 nt, Human herpesvirus 3
caaugcgccguauauggua

SEQ ID NO: 3963366 - RNA, 21 nt, Human herpesvirus 3
caauuggccguuuguaucaau

SEQ ID NO: 3963367 - RNA, 16 nt, Human herpesvirus 3
cacaauccacagauuc

SEQ ID NO: 3963368 - RNA, 15 nt, Human herpesvirus 3
cacagagucuguauc

SEQ ID NO: 3963369 - RNA, 22 nt, Human herpesvirus 3
cacauuugggcggggauguuuu

SEQ ID NO: 3963370 - RNA, 14 nt, Human herpesvirus 3
cacgcgggugagug

SEQ ID NO: 3963371 - RNA, 12 nt, Human herpesvirus 3
cacgguguauau

SEQ ID NO: 3963372 - RNA, 23 nt, Human herpesvirus 3
cacugcauuuacaucuuguccaa

SEQ ID NO: 3963373 - RNA, 17 nt, Human herpesvirus 3
cacuuacaggacaaacc

SEQ ID NO: 3963374 - RNA, 11 nt, Human herpesvirus 3
cagauauuguc

SEQ ID NO: 3963375 - RNA, 13 nt, Human herpesvirus 3
cagaucccacccc

SEQ ID NO: 3963376 - RNA, 19 nt, Human herpesvirus 3
caggcuguacguaaccaua

SEQ ID NO: 3963377 - RNA, 16 nt, Human herpesvirus 3
caguaagggugagaau

SEQ ID NO: 3963378 - RNA, 20 nt, Human herpesvirus 3
cauacuaauuuguauuuuua

SEQ ID NO: 3963379 - RNA, 13 nt, Human herpesvirus 3
cauauuacauuaa

SEQ ID NO: 3963380 - RNA, 14 nt, Human herpesvirus 3
caucauacgcauuu

SEQ ID NO: 3963381 - RNA, 15 nt, Human herpesvirus 3
caucugauuugcaaa

SEQ ID NO: 3963382 - RNA, 21 nt, Human herpesvirus 3
caucuggaguacuacacccag

SEQ ID NO: 3963383 - RNA, 19 nt, Human herpesvirus 3
caugacaacggaaaacacg

SEQ ID NO: 3963384 - RNA, 14 nt, Human herpesvirus 3
caugcuuguaaaac

SEQ ID NO: 3963385 - RNA, 17 nt, Human herpesvirus 3
cauucagcuuacagucc

SEQ ID NO: 3963386 - RNA, 19 nt, Human herpesvirus 3
cauuucgaauaauuuuaag

SEQ ID NO: 3963387 - RNA, 19 nt, Human herpesvirus 3
cauuuugcgcauuuggaau

SEQ ID NO: 3963388 - RNA, 19 nt, Human herpesvirus 3
ccaccucggccgcuucccg

SEQ ID NO: 3963389 - RNA, 20 nt, Human herpesvirus 3
ccacgcccacauacccacuc

SEQ ID NO: 3963390 - RNA, 21 nt, Human herpesvirus 3
ccacuaagaacuuuauagccc

SEQ ID NO: 3963391 - RNA, 18 nt, Human herpesvirus 3
ccauagaggugugugcac

SEQ ID NO: 3963392 - RNA, 21 nt, Human herpesvirus 3
ccauuaaagagccauuuccau

SEQ ID NO: 3963393 - RNA, 21 nt, Human herpesvirus 3
cccaugucacaaaucaugcgg

SEQ ID NO: 3963394 - RNA, 15 nt, Human herpesvirus 3
ccccaggccuugaaa

SEQ ID NO: 3963395 - RNA, 14 nt, Human herpesvirus 3
cccccgaaaauaac

SEQ ID NO: 3963396 - RNA, 17 nt, Human herpesvirus 3
ccccgguuucugggcgc

SEQ ID NO: 3963397 - RNA, 12 nt, Human herpesvirus 3
cccgccaugagc

SEQ ID NO: 3963398 - RNA, 22 nt, Human herpesvirus 3
cccgccgucgcgcccaccucgg

SEQ ID NO: 3963399 - RNA, 17 nt, Human herpesvirus 3
cccgugacucccuccaa

SEQ ID NO: 3963400 - RNA, 23 nt, Human herpesvirus 3
ccgauauuguauuguaguacagg

SEQ ID NO: 3963401 - RNA, 21 nt, Human herpesvirus 3
ccgaucccgccgucgcgccca

SEQ ID NO: 3963402 - RNA, 15 nt, Human herpesvirus 3
ccgaucgcguacccc

SEQ ID NO: 3963403 - RNA, 16 nt, Human herpesvirus 3
ccgcacacguuuacac

SEQ ID NO: 3963404 - RNA, 17 nt, Human herpesvirus 3
ccgcuucccgaaagccc

SEQ ID NO: 3963405 - RNA, 20 nt, Human herpesvirus 3
ccgggauuuccacuuacagg

SEQ ID NO: 3963406 - RNA, 19 nt, Human herpesvirus 3
ccggguggguggcauuaaa

SEQ ID NO: 3963407 - RNA, 22 nt, Human herpesvirus 3
ccgucgcgcccaccucggccgc

SEQ ID NO: 3963408 - RNA, 14 nt, Human herpesvirus 3
ccguggaccccugu

SEQ ID NO: 3963409 - RNA, 21 nt, Human herpesvirus 3
ccugcaagcgguuuagcauuu

SEQ ID NO: 3963410 - RNA, 16 nt, Human herpesvirus 3
ccuuaaacaacauggc

SEQ ID NO: 3963411 - RNA, 13 nt, Human herpesvirus 3
ccuuaaacaucca

SEQ ID NO: 3963412 - RNA, 14 nt, Human herpesvirus 3
cgaaaagacugugu

SEQ ID NO: 3963413 - RNA, 13 nt, Human herpesvirus 3
cgaaacgcuuuga

SEQ ID NO: 3963414 - RNA, 22 nt, Human herpesvirus 3
cgaacgugauuugcccacaccu

SEQ ID NO: 3963415 - RNA, 15 nt, Human herpesvirus 3
cgaauaaacgacaca

SEQ ID NO: 3963416 - RNA, 14 nt, Human herpesvirus 3
cgaauaucgccaug

SEQ ID NO: 3963417 - RNA, 18 nt, Human herpesvirus 3
cgacaucguuuguuucuu

SEQ ID NO: 3963418 - RNA, 16 nt, Human herpesvirus 3
cgacuccucagccaug

SEQ ID NO: 3963419 - RNA, 15 nt, Human herpesvirus 3
cgaucaacugcuuuu

SEQ ID NO: 3963420 - RNA, 21 nt, Human herpesvirus 3
cgcaaggucccccccagaaga

SEQ ID NO: 3963421 - RNA, 22 nt, Human herpesvirus 3
cgcagucuauggggggaauaca

SEQ ID NO: 3963422 - RNA, 19 nt, Human herpesvirus 3
cgcaugccccccucccuca

SEQ ID NO: 3963423 - RNA, 22 nt, Human herpesvirus 3
cgccaaaauggaugcaagaaac

SEQ ID NO: 3963424 - RNA, 13 nt, Human herpesvirus 3
cgccacuggcgcg

SEQ ID NO: 3963425 - RNA, 23 nt, Human herpesvirus 3
cgccaguugacuuuguuugcugc

SEQ ID NO: 3963426 - RNA, 14 nt, Human herpesvirus 3
cgcccaccucggcc

SEQ ID NO: 3963427 - RNA, 19 nt, Human herpesvirus 3
cgcccggcggaccccggga

SEQ ID NO: 3963428 - RNA, 12 nt, Human herpesvirus 3
cgcgccaaacau

SEQ ID NO: 3963429 - RNA, 19 nt, Human herpesvirus 3
cgcguuccaaauuauccaa

SEQ ID NO: 3963430 - RNA, 17 nt, Human herpesvirus 3
cgcguuugcggggcgac

SEQ ID NO: 3963431 - RNA, 13 nt, Human herpesvirus 3
cgcuggcauuucc

SEQ ID NO: 3963432 - RNA, 15 nt, Human herpesvirus 3
cggacccccccccga

SEQ ID NO: 3963433 - RNA, 22 nt, Human herpesvirus 3
cggcaauccgcuagacuguuuu

SEQ ID NO: 3963434 - RNA, 14 nt, Human herpesvirus 3
cgggcgggcugguc

SEQ ID NO: 3963435 - RNA, 17 nt, Human herpesvirus 3
cgggcuggucggacccc

SEQ ID NO: 3963436 - RNA, 16 nt, Human herpesvirus 3
cgucauagcaaauaca

SEQ ID NO: 3963437 - RNA, 20 nt, Human herpesvirus 3
cgucaucgagcuucacuggu

SEQ ID NO: 3963438 - RNA, 16 nt, Human herpesvirus 3
cguccuucaacacacc

SEQ ID NO: 3963439 - RNA, 21 nt, Human herpesvirus 3
cgucuugcgauacgaugauuu

SEQ ID NO: 3963440 - RNA, 17 nt, Human herpesvirus 3
cguguuacuuggaaaca

SEQ ID NO: 3963441 - RNA, 12 nt, Human herpesvirus 3
cguuuaaagccc

SEQ ID NO: 3963442 - RNA, 21 nt, Human herpesvirus 3
cguuuagccguacagauuaaa

SEQ ID NO: 3963443 - RNA, 15 nt, Human herpesvirus 3
cuaaaaacguuucug

SEQ ID NO: 3963444 - RNA, 21 nt, Human herpesvirus 3
cuaacauuaacgcgcuacaac

SEQ ID NO: 3963445 - RNA, 23 nt, Human herpesvirus 3
cuaauaaaaauguaauauugugg

SEQ ID NO: 3963446 - RNA, 14 nt, Human herpesvirus 3
cuccagaguacagg

SEQ ID NO: 3963447 - RNA, 21 nt, Human herpesvirus 3
cuccaucgcuguuuguacaau

SEQ ID NO: 3963448 - RNA, 12 nt, Human herpesvirus 3
cuccccccgcga

SEQ ID NO: 3963449 - RNA, 19 nt, Human herpesvirus 3
cuccguaucccugucuuca

SEQ ID NO: 3963450 - RNA, 21 nt, Human herpesvirus 3
cuccguuuaucccccuucaaa

SEQ ID NO: 3963451 - RNA, 14 nt, Human herpesvirus 3
cucgugagcgccac

SEQ ID NO: 3963452 - RNA, 21 nt, Human herpesvirus 3
cugcagggcggcguccucggc

SEQ ID NO: 3963453 - RNA, 18 nt, Human herpesvirus 3
cugcguuagacgccuggc

SEQ ID NO: 3963454 - RNA, 21 nt, Human herpesvirus 3
cuggaaggccagcguaauaca

SEQ ID NO: 3963455 - RNA, 18 nt, Human herpesvirus 3
cuggcauuuccaaacaca

SEQ ID NO: 3963456 - RNA, 22 nt, Human herpesvirus 3
cuggcuauggaaccuaauuuaa

SEQ ID NO: 3963457 - RNA, 20 nt, Human herpesvirus 3
cuguaucgcuaucagauucc

SEQ ID NO: 3963458 - RNA, 22 nt, Human herpesvirus 3
cuguaugcguuaccccauguca

SEQ ID NO: 3963459 - RNA, 20 nt, Human herpesvirus 3
cugucuugacaacauuuaaa

SEQ ID NO: 3963460 - RNA, 17 nt, Human herpesvirus 3
cuguuacuuaaaccgug

SEQ ID NO: 3963461 - RNA, 19 nt, Human herpesvirus 3
cuguuguugcuaguauuuu

SEQ ID NO: 3963462 - RNA, 16 nt, Human herpesvirus 3
cuguuuaugaacagca

SEQ ID NO: 3963463 - RNA, 13 nt, Human herpesvirus 3
cuuaaaauaaaag

SEQ ID NO: 3963464 - RNA, 14 nt, Human herpesvirus 3
cuuagaaaagccag

SEQ ID NO: 3963465 - RNA, 18 nt, Human herpesvirus 3
aaaaagaggcggggagaa

SEQ ID NO: 3963466 - RNA, 22 nt, Human herpesvirus 3
aaaacacugucagaaacacuug

SEQ ID NO: 3963467 - RNA, 11 nt, Human herpesvirus 3
aaacacgcaug

SEQ ID NO: 3963468 - RNA, 23 nt, Human herpesvirus 3
aaacaucaaccggaacaguaucc

SEQ ID NO: 3963469 - RNA, 22 nt, Human herpesvirus 3
aaacauguauaauaaaaaguca

SEQ ID NO: 3963470 - RNA, 20 nt, Human herpesvirus 3
aaacauugcagcguacaagu

SEQ ID NO: 3963471 - RNA, 14 nt, Human herpesvirus 3
aaacuuuacagagg

SEQ ID NO: 3963472 - RNA, 22 nt, Human herpesvirus 3
aaagaacucugaguucaaagca

SEQ ID NO: 3963473 - RNA, 21 nt, Human herpesvirus 3
aaagaauuuuuaauacgguuc

SEQ ID NO: 3963474 - RNA, 15 nt, Human herpesvirus 3
aaaguuugaacauga

SEQ ID NO: 3963475 - RNA, 18 nt, Human herpesvirus 3
aaauacgguucaaaggca

SEQ ID NO: 3963476 - RNA, 23 nt, Human herpesvirus 3
aaauagcuguaaaaaccauggac

SEQ ID NO: 3963477 - RNA, 19 nt, Human herpesvirus 3
aacauacauuggggauuca

SEQ ID NO: 3963478 - RNA, 16 nt, Human herpesvirus 3
aaccaauaucuuugca

SEQ ID NO: 3963479 - RNA, 17 nt, Human herpesvirus 3
aaccggguggguggcau

SEQ ID NO: 3963480 - RNA, 17 nt, Human herpesvirus 3
aaccuucggaugacuuu

SEQ ID NO: 3963481 - RNA, 19 nt, Human herpesvirus 3
aacgugauuugcccacacc

SEQ ID NO: 3963482 - RNA, 22 nt, Human herpesvirus 3
aagaauuuauccgguugaaaac

SEQ ID NO: 3963483 - RNA, 23 nt, Human herpesvirus 3
aagaggccccaagguauuguccc

SEQ ID NO: 3963484 - RNA, 23 nt, Human herpesvirus 3
aagcauauacacauccuggacac

SEQ ID NO: 3963485 - RNA, 14 nt, Human herpesvirus 3
aagccucuguacaa

SEQ ID NO: 3963486 - RNA, 20 nt, Human herpesvirus 3
aagucgcaacgcugcugaca

SEQ ID NO: 3963487 - RNA, 18 nt, Human herpesvirus 3
aagucuucaaagaacucu

SEQ ID NO: 3963488 - RNA, 19 nt, Human herpesvirus 3
aauaaaacguuuuaaaagc

SEQ ID NO: 3963489 - RNA, 19 nt, Human herpesvirus 3
aauaccuauuucaugcuug

SEQ ID NO: 3963490 - RNA, 15 nt, Human herpesvirus 3
aauacuuuuauuugu

SEQ ID NO: 3963491 - RNA, 20 nt, Human herpesvirus 3
aauaguaaauaccuauuuca

SEQ ID NO: 3963492 - RNA, 22 nt, Human herpesvirus 3
aaucaaccacaccgguggaauu

SEQ ID NO: 3963493 - RNA, 20 nt, Human herpesvirus 3
aaugggguuggggauugcau

SEQ ID NO: 3963494 - RNA, 16 nt, Human herpesvirus 3
aauggucuaaauacuu

SEQ ID NO: 3963495 - RNA, 14 nt, Human herpesvirus 3
aauuaucgacugaa

SEQ ID NO: 3963496 - RNA, 19 nt, Human herpesvirus 3
acaaaggugccggguuuua

SEQ ID NO: 3963497 - RNA, 13 nt, Human herpesvirus 3
acaacccacgcua

SEQ ID NO: 3963498 - RNA, 20 nt, Human herpesvirus 3
acaaucgcccgaaaacuuug

SEQ ID NO: 3963499 - RNA, 18 nt, Human herpesvirus 3
acaccuuccgguacccca

SEQ ID NO: 3963500 - RNA, 13 nt, Human herpesvirus 3
acacgcggccugu

SEQ ID NO: 3963501 - RNA, 22 nt, Human herpesvirus 3
acaguggcggauaacugccugu

SEQ ID NO: 3963502 - RNA, 19 nt, Human herpesvirus 3
acauggccgugaaugguga

SEQ ID NO: 3963503 - RNA, 20 nt, Human herpesvirus 3
accaagcguacgaccaaaca

SEQ ID NO: 3963504 - RNA, 19 nt, Human herpesvirus 3
accaauaugccaucaauau

SEQ ID NO: 3963505 - RNA, 12 nt, Human herpesvirus 3
acccccccccgg

SEQ ID NO: 3963506 - RNA, 12 nt, Human herpesvirus 3
accucggccgcu

SEQ ID NO: 3963507 - RNA, 18 nt, Human herpesvirus 3
accucggccgcuucccga

SEQ ID NO: 3963508 - RNA, 22 nt, Human herpesvirus 3
accuguuagaauaguaaauacc

SEQ ID NO: 3963509 - RNA, 16 nt, Human herpesvirus 3
acgccgcaacaaccca

SEQ ID NO: 3963510 - RNA, 19 nt, Human herpesvirus 3
acgcgucaaaaagccugug

SEQ ID NO: 3963511 - RNA, 17 nt, Human herpesvirus 3
acggcuguggucugcuu

SEQ ID NO: 3963512 - RNA, 13 nt, Human herpesvirus 3
acgggccgugugg

SEQ ID NO: 3963513 - RNA, 19 nt, Human herpesvirus 3
acgggcgggcuggucggac

SEQ ID NO: 3963514 - RNA, 23 nt, Human herpesvirus 3
acguaauuugccccaaaccacug

SEQ ID NO: 3963515 - RNA, 20 nt, Human herpesvirus 3
acguagcaaagcuacacuuu

SEQ ID NO: 3963516 - RNA, 21 nt, Human herpesvirus 3
acgugguaccaaaaacacagu

SEQ ID NO: 3963517 - RNA, 15 nt, Human herpesvirus 3
acguuugcauuuacc

SEQ ID NO: 3963518 - RNA, 13 nt, Human herpesvirus 3
acuauaugcguuu

SEQ ID NO: 3963519 - RNA, 18 nt, Human herpesvirus 3
cuugauacccucaaacac

SEQ ID NO: 3963520 - RNA, 22 nt, Human herpesvirus 3
cuugggcuguuaggguugggag

SEQ ID NO: 3963521 - RNA, 16 nt, Human herpesvirus 3
cuuuaucugaaaagac

SEQ ID NO: 3963522 - RNA, 19 nt, Human herpesvirus 3
cuuugcauuggaagucacc

SEQ ID NO: 3963523 - RNA, 17 nt, Human herpesvirus 3
cuuugguuauacgggga

SEQ ID NO: 3963524 - RNA, 22 nt, Human herpesvirus 3
cuuuuaaacgccaguggaccuu

SEQ ID NO: 3963525 - RNA, 18 nt, Human herpesvirus 3
gaaaacgcgcgaaaugug

SEQ ID NO: 3963526 - RNA, 16 nt, Human herpesvirus 3
gaaagagcuguccaug

SEQ ID NO: 3963527 - RNA, 19 nt, Human herpesvirus 3
gaacauccuaguacagaua

SEQ ID NO: 3963528 - RNA, 21 nt, Human herpesvirus 3
gaagcugacgaagagaacugu

SEQ ID NO: 3963529 - RNA, 16 nt, Human herpesvirus 3
gaaguguucuaaaaca

SEQ ID NO: 3963530 - RNA, 23 nt, Human herpesvirus 3
gacaaaauuaacucgcguacaaa

SEQ ID NO: 3963531 - RNA, 14 nt, Human herpesvirus 3
gacaaaccccacgc

SEQ ID NO: 3963532 - RNA, 16 nt, Human herpesvirus 3
gacagucguguuuuua

SEQ ID NO: 3963533 - RNA, 18 nt, Human herpesvirus 3
gacauaauuaaugcaacc

SEQ ID NO: 3963534 - RNA, 16 nt, Human herpesvirus 3
gacauggccgugaaug

SEQ ID NO: 3963535 - RNA, 22 nt, Human herpesvirus 3
gacgcgaacaccgcugugcugu

SEQ ID NO: 3963536 - RNA, 22 nt, Human herpesvirus 3
gacgggcgggcuggucggaccc

SEQ ID NO: 3963537 - RNA, 15 nt, Human herpesvirus 3
gacguccaaguccaa

SEQ ID NO: 3963538 - RNA, 22 nt, Human herpesvirus 3
gacuccaagggacccgcagccc

SEQ ID NO: 3963539 - RNA, 19 nt, Human herpesvirus 3
gacucugcgaugcauuaac

SEQ ID NO: 3963540 - RNA, 14 nt, Human herpesvirus 3
gagcgccacuggcg

SEQ ID NO: 3963541 - RNA, 17 nt, Human herpesvirus 3
gagcugguauacacgag

SEQ ID NO: 3963542 - RNA, 22 nt, Human herpesvirus 3
gagcugguauacacgagagcag

SEQ ID NO: 3963543 - RNA, 16 nt, Human herpesvirus 3
gaggggaugaaucguu

SEQ ID NO: 3963544 - RNA, 21 nt, Human herpesvirus 3
gauauaacccggucugcucau

SEQ ID NO: 3963545 - RNA, 15 nt, Human herpesvirus 3
gauauaauuugucca

SEQ ID NO: 3963546 - RNA, 17 nt, Human herpesvirus 3
gaucauuuuuugaaaca

SEQ ID NO: 3963547 - RNA, 16 nt, Human herpesvirus 3
gaugguaguuaccaaa

SEQ ID NO: 3963548 - RNA, 19 nt, Human herpesvirus 3
gauguuuuuauuagaacgu

SEQ ID NO: 3963549 - RNA, 20 nt, Human herpesvirus 3
gauuccaucauaagcgcagu

SEQ ID NO: 3963550 - RNA, 16 nt, Human herpesvirus 3
gcaauucccaguaaac

SEQ ID NO: 3963551 - RNA, 16 nt, Human herpesvirus 3
gcaccacagucucugu

SEQ ID NO: 3963552 - RNA, 16 nt, Human herpesvirus 3
gcaguuauaacacggg

SEQ ID NO: 3963553 - RNA, 18 nt, Human herpesvirus 3
gcauagacccgaaacgcu

SEQ ID NO: 3963554 - RNA, 23 nt, Human herpesvirus 3
gcauauacacauccuggacacag

SEQ ID NO: 3963555 - RNA, 22 nt, Human herpesvirus 3
gcaucuggagaaccgcgucuau

SEQ ID NO: 3963556 - RNA, 23 nt, Human herpesvirus 3
gcaucuuccgacggugacagacu

SEQ ID NO: 3963557 - RNA, 12 nt, Human herpesvirus 3
gccacacccaca

SEQ ID NO: 3963558 - RNA, 16 nt, Human herpesvirus 3
gccaugguuucaaaac

SEQ ID NO: 3963559 - RNA, 16 nt, Human herpesvirus 3
gccgugugguaugaau

SEQ ID NO: 3963560 - RNA, 17 nt, Human herpesvirus 3
gccuguuggugggugag

SEQ ID NO: 3963561 - RNA, 17 nt, Human herpesvirus 3
gcgauacgaugauuuuc

SEQ ID NO: 3963562 - RNA, 22 nt, Human herpesvirus 3
gcgauggugaugaaaucagaga

SEQ ID NO: 3963563 - RNA, 17 nt, Human herpesvirus 3
gcgcccaccucggccgc

SEQ ID NO: 3963564 - RNA, 21 nt, Human herpesvirus 3
gcgcccggcggaccccgggag

SEQ ID NO: 3963565 - RNA, 17 nt, Human herpesvirus 3
gcgcguguaugcacaac

SEQ ID NO: 3963566 - RNA, 16 nt, Human herpesvirus 3
gcggaccccgggagag

SEQ ID NO: 3963567 - RNA, 14 nt, Human herpesvirus 3
gcucgcugagcucc

SEQ ID NO: 3963568 - RNA, 14 nt, Human herpesvirus 3
gcucugcaaauaca

SEQ ID NO: 3963569 - RNA, 21 nt, Human herpesvirus 3
gcuuacguuugcauuuaccga

SEQ ID NO: 3963570 - RNA, 22 nt, Human herpesvirus 3
gcuucccgaaagcccgaucccg

SEQ ID NO: 3963571 - RNA, 14 nt, Human herpesvirus 3
ggaaggauuaagaa

SEQ ID NO: 3963572 - RNA, 12 nt, Human herpesvirus 3
ggaauacaggca

SEQ ID NO: 3963573 - RNA, 18 nt, Human herpesvirus 3
ggaauuguggaguuuccc

SEQ ID NO: 3963574 - RNA, 19 nt, Human herpesvirus 3
ggagcguacugcagauaca

SEQ ID NO: 3963575 - RNA, 21 nt, Human herpesvirus 3
ggauaaauguuagucuugaau

SEQ ID NO: 3963576 - RNA, 14 nt, Human herpesvirus 3
ggauccucgagcag

SEQ ID NO: 3963577 - RNA, 14 nt, Human herpesvirus 3
ggaugauauuuuaa

SEQ ID NO: 3963578 - RNA, 14 nt, Human herpesvirus 3
ggcaguucagagac

SEQ ID NO: 3963579 - RNA, 12 nt, Human herpesvirus 3
ggcauugcuuca

SEQ ID NO: 3963580 - RNA, 18 nt, Human herpesvirus 3
ggcgugaaagcuaccacc

SEQ ID NO: 3963581 - RNA, 19 nt, Human herpesvirus 3
gggaauuuaggaggcugca

SEQ ID NO: 3963582 - RNA, 16 nt, Human herpesvirus 3
gggacccgcagcccag

SEQ ID NO: 3963583 - RNA, 18 nt, Human herpesvirus 3
gggucugccguauuuugc

SEQ ID NO: 3963584 - RNA, 12 nt, Human herpesvirus 3
gggugaaguaau

SEQ ID NO: 3963585 - RNA, 16 nt, Human herpesvirus 3
ggugaugaaaucagag

SEQ ID NO: 3963586 - RNA, 21 nt, Human herpesvirus 3
gguggauauagcgcugucguc

SEQ ID NO: 3963587 - RNA, 15 nt, Human herpesvirus 3
gguggucagacgaac

SEQ ID NO: 3963588 - RNA, 13 nt, Human herpesvirus 3
gguuaugcuuuuu

SEQ ID NO: 3963589 - RNA, 17 nt, Human herpesvirus 3
gguucuucacuggacuu

SEQ ID NO: 3963590 - RNA, 19 nt, Human herpesvirus 3
gguuuuuagaauuuccaaa

SEQ ID NO: 3963591 - RNA, 13 nt, Human herpesvirus 3
guaacugucccaa

SEQ ID NO: 3963592 - RNA, 21 nt, Human herpesvirus 3
guacagauacguggaaucgua

SEQ ID NO: 3963593 - RNA, 22 nt, Human herpesvirus 3
guacauaguuauuguauauaca

SEQ ID NO: 3963594 - RNA, 16 nt, Human herpesvirus 3
guaggagguccaugug

SEQ ID NO: 3963595 - RNA, 19 nt, Human herpesvirus 3
guaggggaugggggucgca

SEQ ID NO: 3963596 - RNA, 21 nt, Human herpesvirus 3
guauugcguaccgcgacccug

SEQ ID NO: 3963597 - RNA, 14 nt, Human herpesvirus 3
guauuguguaauug

SEQ ID NO: 3963598 - RNA, 17 nt, Human herpesvirus 3
guccaaguccaaucaaa

SEQ ID NO: 3963599 - RNA, 17 nt, Human herpesvirus 3
guccgccgacagccgcu

SEQ ID NO: 3963600 - RNA, 15 nt, Human herpesvirus 3
guccggacuccagca

SEQ ID NO: 3963601 - RNA, 17 nt, Human herpesvirus 3
gucugucugucugugcg

SEQ ID NO: 3963602 - RNA, 15 nt, Human herpesvirus 3
gugagcgccacuggc

SEQ ID NO: 3963603 - RNA, 16 nt, Human herpesvirus 3
gugauauuauauacug

SEQ ID NO: 3963604 - RNA, 24 nt, Human herpesvirus 3
guggacaucgcugaugccagaagc

SEQ ID NO: 3963605 - RNA, 15 nt, Human herpesvirus 3
guguguugugugggg

SEQ ID NO: 3963606 - RNA, 15 nt, Human herpesvirus 3
guguuacuuggaaac

SEQ ID NO: 3963607 - RNA, 12 nt, Human herpesvirus 3
guuaauuuuaca

SEQ ID NO: 3963608 - RNA, 21 nt, Human herpesvirus 3
guuacuacauggaguguguua

SEQ ID NO: 3963609 - RNA, 14 nt, Human herpesvirus 3
guugcaaaagccgu

SEQ ID NO: 3963610 - RNA, 18 nt, Human herpesvirus 3
guugcuuugcguauauga

SEQ ID NO: 3963611 - RNA, 15 nt, Human herpesvirus 3
guuggacaaaggugc

SEQ ID NO: 3963612 - RNA, 19 nt, Human herpesvirus 3
guuguuaauaaaagcggaa

SEQ ID NO: 3963613 - RNA, 16 nt, Human herpesvirus 3
guuucaaauaacugaa

SEQ ID NO: 3963614 - RNA, 19 nt, Human herpesvirus 3
guuugaaguguucuaaaac

SEQ ID NO: 3963615 - RNA, 19 nt, Human herpesvirus 3
uaaaauucuaacaacucug

SEQ ID NO: 3963616 - RNA, 14 nt, Human herpesvirus 3
uaacaacucuggag

SEQ ID NO: 3963617 - RNA, 19 nt, Human herpesvirus 3
uaacgaucgcguguauaca

SEQ ID NO: 3963618 - RNA, 17 nt, Human herpesvirus 3
uaacgugauuacuacaa

SEQ ID NO: 3963619 - RNA, 21 nt, Human herpesvirus 3
uaacguuuuaguaaaauacca

SEQ ID NO: 3963620 - RNA, 17 nt, Human herpesvirus 3
uaagcaacuacuuacaa

SEQ ID NO: 3963621 - RNA, 21 nt, Human herpesvirus 3
uaaucaguugggauaaauguu

SEQ ID NO: 3963622 - RNA, 15 nt, Human herpesvirus 3
uacaccgcuacgggu

SEQ ID NO: 3963623 - RNA, 20 nt, Human herpesvirus 3
uacauuucacgcgucuuguu

SEQ ID NO: 3963624 - RNA, 16 nt, Human herpesvirus 3
uaccuauuucaugcuu

SEQ ID NO: 3963625 - RNA, 15 nt, Human herpesvirus 3
uacgaccaaacauua

SEQ ID NO: 3963626 - RNA, 21 nt, Human herpesvirus 3
uagaaaaucgacaucguuugu

SEQ ID NO: 3963627 - RNA, 21 nt, Human herpesvirus 3
uagauaucacaccaauuauaa

SEQ ID NO: 3963628 - RNA, 22 nt, Human herpesvirus 3
uagaugacacgaauaggugaua

SEQ ID NO: 3963629 - RNA, 18 nt, Human herpesvirus 3
uauaacugcuacaacgga

SEQ ID NO: 3963630 - RNA, 14 nt, Human herpesvirus 3
uauauucucgaagg

SEQ ID NO: 3963631 - RNA, 11 nt, Human herpesvirus 3
uaucaauaaau

SEQ ID NO: 3963632 - RNA, 18 nt, Human herpesvirus 3
uaucuguuacauuucgaa

SEQ ID NO: 3963633 - RNA, 15 nt, Human herpesvirus 3
aaaaagugucugucu

SEQ ID NO: 3963634 - RNA, 15 nt, Human herpesvirus 3
aaacaaauacgauca

SEQ ID NO: 3963635 - RNA, 16 nt, Human herpesvirus 3
aaacaggcguguuuau

SEQ ID NO: 3963636 - RNA, 17 nt, Human herpesvirus 3
aaacgcgccaaacauug

SEQ ID NO: 3963637 - RNA, 13 nt, Human herpesvirus 3
aaacuauuccaaa

SEQ ID NO: 3963638 - RNA, 14 nt, Human herpesvirus 3
aaacucuguuguau

SEQ ID NO: 3963639 - RNA, 14 nt, Human herpesvirus 3
aaauaaacugaauu

SEQ ID NO: 3963640 - RNA, 18 nt, Human herpesvirus 3
aaauauaacauacaucau

SEQ ID NO: 3963641 - RNA, 22 nt, Human herpesvirus 3
aaaucguuuaacaaaauagucu

SEQ ID NO: 3963642 - RNA, 18 nt, Human herpesvirus 3
aaauguguauuauauguc

SEQ ID NO: 3963643 - RNA, 21 nt, Human herpesvirus 3
aaauucaucugccguuucauu

SEQ ID NO: 3963644 - RNA, 21 nt, Human herpesvirus 3
aaauugggggauuugggagaa

SEQ ID NO: 3963645 - RNA, 16 nt, Human herpesvirus 3
aacaacaguaggaggu

SEQ ID NO: 3963646 - RNA, 14 nt, Human herpesvirus 3
aacacugucagaaa

SEQ ID NO: 3963647 - RNA, 20 nt, Human herpesvirus 3
aacauccacagucugcuuua

SEQ ID NO: 3963648 - RNA, 17 nt, Human herpesvirus 3
aaccauucagcuuacag

SEQ ID NO: 3963649 - RNA, 15 nt, Human herpesvirus 3
aacgcgcaauguuuu

SEQ ID NO: 3963650 - RNA, 15 nt, Human herpesvirus 3
aacgcugcugacaaa

SEQ ID NO: 3963651 - RNA, 17 nt, Human herpesvirus 3
aacgcugcugacaaaau

SEQ ID NO: 3963652 - RNA, 15 nt, Human herpesvirus 3
aacgcuguuguugcu

SEQ ID NO: 3963653 - RNA, 22 nt, Human herpesvirus 3
aacucaaccgccguuguggaaa

SEQ ID NO: 3963654 - RNA, 22 nt, Human herpesvirus 3
aacuguauguaaauuaugauca

SEQ ID NO: 3963655 - RNA, 19 nt, Human herpesvirus 3
aacuuuacuguuagggaua

SEQ ID NO: 3963656 - RNA, 16 nt, Human herpesvirus 3
aagcagacaucccucg

SEQ ID NO: 3963657 - RNA, 21 nt, Human herpesvirus 3
aagcgcuccgcccuaaauuac

SEQ ID NO: 3963658 - RNA, 19 nt, Human herpesvirus 3
aagcguacgaccaaacauu

SEQ ID NO: 3963659 - RNA, 19 nt, Human herpesvirus 3
aagguagacaacugacaga

SEQ ID NO: 3963660 - RNA, 14 nt, Human herpesvirus 3
aagguaucccccag

SEQ ID NO: 3963661 - RNA, 15 nt, Human herpesvirus 3
aagguccauuuaaca

SEQ ID NO: 3963662 - RNA, 13 nt, Human herpesvirus 3
aaguauaacugaa

SEQ ID NO: 3963663 - RNA, 15 nt, Human herpesvirus 3
aaguguucuaaaaca

SEQ ID NO: 3963664 - RNA, 19 nt, Human herpesvirus 3
aaguguucuaaaacacugu

SEQ ID NO: 3963665 - RNA, 15 nt, Human herpesvirus 3
aauaaauguacuaua

SEQ ID NO: 3963666 - RNA, 21 nt, Human herpesvirus 3
aauagauaguuauggacuagg

SEQ ID NO: 3963667 - RNA, 13 nt, Human herpesvirus 3
aaucuuuuacaac

SEQ ID NO: 3963668 - RNA, 13 nt, Human herpesvirus 3
aauucaaaauacg

SEQ ID NO: 3963669 - RNA, 23 nt, Human herpesvirus 3
acaauggcgaccacgacagcagu

SEQ ID NO: 3963670 - RNA, 14 nt, Human herpesvirus 3
acaauuaacacaga

SEQ ID NO: 3963671 - RNA, 18 nt, Human herpesvirus 3
acacccauacagugaccc

SEQ ID NO: 3963672 - RNA, 19 nt, Human herpesvirus 3
acagcaguaagggugagaa

SEQ ID NO: 3963673 - RNA, 20 nt, Human herpesvirus 3
acagccuuuacucggcucaa

SEQ ID NO: 3963674 - RNA, 20 nt, Human herpesvirus 3
acagugauacccaauagccg

SEQ ID NO: 3963675 - RNA, 21 nt, Human herpesvirus 3
acaucauccguccaaacagug

SEQ ID NO: 3963676 - RNA, 20 nt, Human herpesvirus 3
acauuagaguguuuaacaac

SEQ ID NO: 3963677 - RNA, 22 nt, Human herpesvirus 3
accagaaacguuuuuaguuuuu

SEQ ID NO: 3963678 - RNA, 12 nt, Human herpesvirus 3
accaugggagac

SEQ ID NO: 3963679 - RNA, 22 nt, Human herpesvirus 3
acccacgggguccccacacggg

SEQ ID NO: 3963680 - RNA, 13 nt, Human herpesvirus 3
accgcacccgaua

SEQ ID NO: 3963681 - RNA, 14 nt, Human herpesvirus 3
accuuuucgccuua

SEQ ID NO: 3963682 - RNA, 21 nt, Human herpesvirus 3
acgacauacauuagaguguuu

SEQ ID NO: 3963683 - RNA, 19 nt, Human herpesvirus 3
acgacucguuggguuacau

SEQ ID NO: 3963684 - RNA, 20 nt, Human herpesvirus 3
acgagagcaguccaugguuu

SEQ ID NO: 3963685 - RNA, 17 nt, Human herpesvirus 3
acgccaguggucucucu

SEQ ID NO: 3963686 - RNA, 13 nt, Human herpesvirus 3
acgcgggugagug

SEQ ID NO: 3963687 - RNA, 16 nt, Human herpesvirus 3
acggcccccuggacau

SEQ ID NO: 3963688 - RNA, 14 nt, Human herpesvirus 3
acgggcgggcuggu

SEQ ID NO: 3963689 - RNA, 23 nt, Human herpesvirus 3
acguauguucugugggacagcua

SEQ ID NO: 3963690 - RNA, 13 nt, Human herpesvirus 3
acguuccgggguu

SEQ ID NO: 3963691 - RNA, 15 nt, Human herpesvirus 3
acuaaaaacguuucu

SEQ ID NO: 3963692 - RNA, 21 nt, Human herpesvirus 3
acuacauuggggguacaguug

SEQ ID NO: 3963693 - RNA, 14 nt, Human herpesvirus 3
acuauaauuguuca

SEQ ID NO: 3963694 - RNA, 17 nt, Human herpesvirus 3
acugcagauacagcaua

SEQ ID NO: 3963695 - RNA, 16 nt, Human herpesvirus 3
acugcuuuuauaacuu

SEQ ID NO: 3963696 - RNA, 17 nt, Human herpesvirus 3
acugcuuuuauaacuuu

SEQ ID NO: 3963697 - RNA, 20 nt, Human herpesvirus 3
agaccauguuuuuggagcaa

SEQ ID NO: 3963698 - RNA, 13 nt, Human herpesvirus 3
agagaccgugcgc

SEQ ID NO: 3963699 - RNA, 17 nt, Human herpesvirus 3
agaugccgguauugcuu

SEQ ID NO: 3963700 - RNA, 23 nt, Human herpesvirus 3
agauucgccuuuuacaugaucca

SEQ ID NO: 3963701 - RNA, 15 nt, Human herpesvirus 3
agauugucccaucgc

SEQ ID NO: 3963702 - RNA, 15 nt, Human herpesvirus 3
agcaaaauaaaacaa

SEQ ID NO: 3963703 - RNA, 14 nt, Human herpesvirus 3
agcaacguuuaaga

SEQ ID NO: 3963704 - RNA, 14 nt, Human herpesvirus 3
agccagccaaaaaa

SEQ ID NO: 3963705 - RNA, 18 nt, Human herpesvirus 3
agccucuguacaacacaa

SEQ ID NO: 3963706 - RNA, 22 nt, Human herpesvirus 3
agcggaacgguuuuuaugaaaa

SEQ ID NO: 3963707 - RNA, 19 nt, Human herpesvirus 3
aggacgaaggggaauuaaa

SEQ ID NO: 3963708 - RNA, 16 nt, Human herpesvirus 3
aggaucccgugucccc

SEQ ID NO: 3963709 - RNA, 20 nt, Human herpesvirus 3
aggcugccgccuuugcgaug

SEQ ID NO: 3963710 - RNA, 21 nt, Human herpesvirus 3
aggguggacguuuuuccacaa

SEQ ID NO: 3963711 - RNA, 17 nt, Human herpesvirus 3
agguauuguuaccagga

SEQ ID NO: 3963712 - RNA, 16 nt, Human herpesvirus 3
agguccauuuaacaau

SEQ ID NO: 3963713 - RNA, 21 nt, Human herpesvirus 3
aguacaggguaucuaaguacc

SEQ ID NO: 3963714 - RNA, 18 nt, Human herpesvirus 3
agucuaguuacauuucac

SEQ ID NO: 3963715 - RNA, 23 nt, Human herpesvirus 3
aguuuagugucguuuccaaauaa

SEQ ID NO: 3963716 - RNA, 20 nt, Human herpesvirus 3
auaaacaagucaauauuaca

SEQ ID NO: 3963717 - RNA, 16 nt, Human herpesvirus 3
auaaaccaacuccugu

SEQ ID NO: 3963718 - RNA, 17 nt, Human herpesvirus 3
auaaauucuacaacauu

SEQ ID NO: 3963719 - RNA, 14 nt, Human herpesvirus 3
auaacgcuguuguu

SEQ ID NO: 3963720 - RNA, 22 nt, Human herpesvirus 3
auaauucggcgcggaugcauuu

SEQ ID NO: 3963721 - RNA, 12 nt, Human herpesvirus 3
auaccccaggcc

SEQ ID NO: 3963722 - RNA, 19 nt, Human herpesvirus 3
auaucucauacucaugccu

SEQ ID NO: 3963723 - RNA, 14 nt, Human herpesvirus 3
auaucuguuacauu

SEQ ID NO: 3963724 - RNA, 15 nt, Human herpesvirus 3
auaugucaacauuua

SEQ ID NO: 3963725 - RNA, 21 nt, Human herpesvirus 3
auaugucaacauuuacaguaa

SEQ ID NO: 3963726 - RNA, 22 nt, Human herpesvirus 3
auauuuacacguuucauuaacu

SEQ ID NO: 3963727 - RNA, 13 nt, Human herpesvirus 3
aucaaucugagaa

SEQ ID NO: 3963728 - RNA, 14 nt, Human herpesvirus 3
aucagagaagcuau

SEQ ID NO: 3963729 - RNA, 16 nt, Human herpesvirus 3
aucagaucaucugaca

SEQ ID NO: 3963730 - RNA, 23 nt, Human herpesvirus 3
aucagccgcucgcugagcuccag

SEQ ID NO: 3963731 - RNA, 21 nt, Human herpesvirus 3
aucagcgccaauaaaagcaga

SEQ ID NO: 3963732 - RNA, 14 nt, Human herpesvirus 3
aucaggacagcagu

SEQ ID NO: 3963733 - RNA, 22 nt, Human herpesvirus 3
aucauuuaaauuccgcgguggg

SEQ ID NO: 3963734 - RNA, 16 nt, Human herpesvirus 3
aucccacauguauaaa

SEQ ID NO: 3963735 - RNA, 21 nt, Human herpesvirus 3
aucccgcggugagcacccggg

SEQ ID NO: 3963736 - RNA, 15 nt, Human herpesvirus 3
auccucuuaacguug

SEQ ID NO: 3963737 - RNA, 12 nt, Human herpesvirus 3
aucguaugccuc

SEQ ID NO: 3963738 - RNA, 13 nt, Human herpesvirus 3
aucuauagcaaaa

SEQ ID NO: 3963739 - RNA, 20 nt, Human herpesvirus 3
aucugaaaagaccgacagcc

SEQ ID NO: 3963740 - RNA, 19 nt, Human herpesvirus 3
aucuucacgcucaaugaac

SEQ ID NO: 3963741 - RNA, 21 nt, Human herpesvirus 3
aucuuguccaacuguaucugu

SEQ ID NO: 3963742 - RNA, 20 nt, Human herpesvirus 3
augaaaaaagugucugucug

SEQ ID NO: 3963743 - RNA, 16 nt, Human herpesvirus 3
augaccgcuauuuuca

SEQ ID NO: 3963744 - RNA, 17 nt, Human herpesvirus 3
augcacugcaucuggag

SEQ ID NO: 3963745 - RNA, 22 nt, Human herpesvirus 3
augcggugcuguuugaagcggc

SEQ ID NO: 3963746 - RNA, 22 nt, Human herpesvirus 3
auuaccccgccauaaacagaga

SEQ ID NO: 3963747 - RNA, 22 nt, Human herpesvirus 3
auuauuagcguaauauaacaga

SEQ ID NO: 3963748 - RNA, 18 nt, Human herpesvirus 3
auucaaguaaauaugugc

SEQ ID NO: 3963749 - RNA, 22 nt, Human herpesvirus 3
auucuacagauuuauuuuuaca

SEQ ID NO: 3963750 - RNA, 12 nt, Human herpesvirus 3
auucuauuaaca

SEQ ID NO: 3963751 - RNA, 21 nt, Human herpesvirus 3
auugcagucauuuuuuuuaca

SEQ ID NO: 3963752 - RNA, 21 nt, Human herpesvirus 3
auugguugauuggguuauaaa

SEQ ID NO: 3963753 - RNA, 18 nt, Human herpesvirus 3
auuguauuguaguacagg

SEQ ID NO: 3963754 - RNA, 19 nt, Human herpesvirus 3
auuuaggucucggagguua

SEQ ID NO: 3963755 - RNA, 14 nt, Human herpesvirus 3
auuuauaaaacacu

SEQ ID NO: 3963756 - RNA, 13 nt, Human herpesvirus 3
auuuuauuacauu

SEQ ID NO: 3963757 - RNA, 12 nt, Human herpesvirus 3
caaacagcacca

SEQ ID NO: 3963758 - RNA, 23 nt, Human herpesvirus 3
caaagaacucugaguucaaagca

SEQ ID NO: 3963759 - RNA, 15 nt, Human herpesvirus 3
caaagcaacgguuuc

SEQ ID NO: 3963760 - RNA, 23 nt, Human herpesvirus 3
caaaggcauuacccgauauugua

SEQ ID NO: 3963761 - RNA, 15 nt, Human herpesvirus 3
caacacaaagggccu

SEQ ID NO: 3963762 - RNA, 20 nt, Human herpesvirus 3
caacccccgcggcuuccgaa

SEQ ID NO: 3963763 - RNA, 18 nt, Human herpesvirus 3
caacguauucgguuggug

SEQ ID NO: 3963764 - RNA, 15 nt, Human herpesvirus 3
caacugacagaaacu

SEQ ID NO: 3963765 - RNA, 19 nt, Human herpesvirus 3
caauaaaauggauauaauu

SEQ ID NO: 3963766 - RNA, 15 nt, Human herpesvirus 3
caauauuuauacaag

SEQ ID NO: 3963767 - RNA, 15 nt, Human herpesvirus 3
caauuauaacugcua

SEQ ID NO: 3963768 - RNA, 19 nt, Human herpesvirus 3
cacacauuuuacaguaaac

SEQ ID NO: 3963769 - RNA, 15 nt, Human herpesvirus 3
caccaaaaauauacg

SEQ ID NO: 3963770 - RNA, 17 nt, Human herpesvirus 3
caccaauuauaacugcu

SEQ ID NO: 3963771 - RNA, 12 nt, Human herpesvirus 3
caccgcucugcg

SEQ ID NO: 3963772 - RNA, 20 nt, Human herpesvirus 3
caccugcauucgaauuacga

SEQ ID NO: 3963773 - RNA, 16 nt, Human herpesvirus 3
cacgccgcaacaaccc

SEQ ID NO: 3963774 - RNA, 12 nt, Human herpesvirus 3
cacgugaggaaa

SEQ ID NO: 3963775 - RNA, 13 nt, Human herpesvirus 3
cacuacugacagc

SEQ ID NO: 3963776 - RNA, 23 nt, Human herpesvirus 3
cacugguggauauagcgcugucg

SEQ ID NO: 3963777 - RNA, 18 nt, Human herpesvirus 3
cacuguacgcagaaagca

SEQ ID NO: 3963778 - RNA, 23 nt, Human herpesvirus 3
cagaaacauuaguugcgguucaa

SEQ ID NO: 3963779 - RNA, 15 nt, Human herpesvirus 3
cagacaccaugacgg

SEQ ID NO: 3963780 - RNA, 14 nt, Human herpesvirus 3
cagacgugucuacu

SEQ ID NO: 3963781 - RNA, 22 nt, Human herpesvirus 3
cagagaaaacgcgcgaaaugug

SEQ ID NO: 3963782 - RNA, 19 nt, Human herpesvirus 3
cagauguacacccagcugu

SEQ ID NO: 3963783 - RNA, 17 nt, Human herpesvirus 3
cagcaaguuuaacauuu

SEQ ID NO: 3963784 - RNA, 19 nt, Human herpesvirus 3
cagcaaguuuaacauuucc

SEQ ID NO: 3963785 - RNA, 21 nt, Human herpesvirus 3
cagcgccaauaaaagcagaca

SEQ ID NO: 3963786 - RNA, 23 nt, Human herpesvirus 3
caggucaaaacgcugacccaccc

SEQ ID NO: 3963787 - RNA, 14 nt, Human herpesvirus 3
caguaacgguuuac

SEQ ID NO: 3963788 - RNA, 20 nt, Human herpesvirus 3
caguguucuccugcaggcca

SEQ ID NO: 3963789 - RNA, 18 nt, Human herpesvirus 3
caguugaaccaaauccac

SEQ ID NO: 3963790 - RNA, 13 nt, Human herpesvirus 3
cauaaaaacgccu

SEQ ID NO: 3963791 - RNA, 12 nt, Human herpesvirus 3
cauaaaacugua

SEQ ID NO: 3963792 - RNA, 22 nt, Human herpesvirus 3
cauaguccgccgacagccgcuc

SEQ ID NO: 3963793 - RNA, 19 nt, Human herpesvirus 3
cauaguuauuguauauaca

SEQ ID NO: 3963794 - RNA, 22 nt, Human herpesvirus 3
caucgugcuugaauugccaucu

SEQ ID NO: 3963795 - RNA, 16 nt, Human herpesvirus 3
caucuucacgcucaau

SEQ ID NO: 3963796 - RNA, 21 nt, Human herpesvirus 3
caugacuuccacacucuucaa

SEQ ID NO: 3963797 - RNA, 19 nt, Human herpesvirus 3
caugaucgcccaauagcac

SEQ ID NO: 3963798 - RNA, 18 nt, Human herpesvirus 3
cauguuuucccaugucua

SEQ ID NO: 3963799 - RNA, 16 nt, Human herpesvirus 3
cauuccaacuggaaau

SEQ ID NO: 3963800 - RNA, 22 nt, Human herpesvirus 3
cauucgcaacacaucuacuguc

SEQ ID NO: 3963801 - RNA, 19 nt, Human herpesvirus 3
cauuguauaaaaacacgca

SEQ ID NO: 3963802 - RNA, 15 nt, Human herpesvirus 3
cauuuccauuuuuag

SEQ ID NO: 3963803 - RNA, 19 nt, Human herpesvirus 3
cauuuucgguggaagcaau

SEQ ID NO: 3963804 - RNA, 20 nt, Human herpesvirus 3
ccaaauaacgccuuaaaagu

SEQ ID NO: 3963805 - RNA, 19 nt, Human herpesvirus 3
ccaaccuucaaguuaaaua

SEQ ID NO: 3963806 - RNA, 22 nt, Human herpesvirus 3
ccaacuggaaaugugcugucaa

SEQ ID NO: 3963807 - RNA, 20 nt, Human herpesvirus 3
ccacacaacgccgcccacga

SEQ ID NO: 3963808 - RNA, 14 nt, Human herpesvirus 3
ccacauacaacaug

SEQ ID NO: 3963809 - RNA, 23 nt, Human herpesvirus 3
ccacguaauuugccccaaaccac

SEQ ID NO: 3963810 - RNA, 22 nt, Human herpesvirus 3
ccacguagcaaagcuacacuuu

SEQ ID NO: 3963811 - RNA, 15 nt, Human herpesvirus 3
ccacuggcgcgcgga

SEQ ID NO: 3963812 - RNA, 21 nt, Human herpesvirus 3
ccacuggcgcgcggacuguuu

SEQ ID NO: 3963813 - RNA, 20 nt, Human herpesvirus 3
ccagguacgcgucaaaaagc

SEQ ID NO: 3963814 - RNA, 20 nt, Human herpesvirus 3
ccauguggguugggauuacg

SEQ ID NO: 3963815 - RNA, 18 nt, Human herpesvirus 3
cccacgguuugugcacug

SEQ ID NO: 3963816 - RNA, 15 nt, Human herpesvirus 3
cccagcaaccccacc

SEQ ID NO: 3963817 - RNA, 21 nt, Human herpesvirus 3
cccauccgagugaaucuuaaa

SEQ ID NO: 3963818 - RNA, 19 nt, Human herpesvirus 3
cccaugucuacgugguacc

SEQ ID NO: 3963819 - RNA, 17 nt, Human herpesvirus 3
ccccaaggcccauaucc

SEQ ID NO: 3963820 - RNA, 17 nt, Human herpesvirus 3
cccggcggaccccggga

SEQ ID NO: 3963821 - RNA, 13 nt, Human herpesvirus 3
cccggucugcuca

SEQ ID NO: 3963822 - RNA, 15 nt, Human herpesvirus 3
cccugucaucagaca

SEQ ID NO: 3963823 - RNA, 14 nt, Human herpesvirus 3
ccgaaccggggcaa

SEQ ID NO: 3963824 - RNA, 16 nt, Human herpesvirus 3
ccgacaugcacugcau

SEQ ID NO: 3963825 - RNA, 17 nt, Human herpesvirus 3
ccgauguucgucgagac

SEQ ID NO: 3963826 - RNA, 17 nt, Human herpesvirus 3
ccguuuggaaacaacaa

SEQ ID NO: 3963827 - RNA, 13 nt, Human herpesvirus 3
ccuauaggcuuua

SEQ ID NO: 3963828 - RNA, 21 nt, Human herpesvirus 3
ccuugccgcguggaacacggg

SEQ ID NO: 3963829 - RNA, 14 nt, Human herpesvirus 3
ccuugguuugcaac

SEQ ID NO: 3963830 - RNA, 18 nt, Human herpesvirus 3
ccuugguuugcaaccuua

SEQ ID NO: 3963831 - RNA, 16 nt, Human herpesvirus 3
cgaagagaacugugaa

SEQ ID NO: 3963832 - RNA, 18 nt, Human herpesvirus 3
cgaauguuggaaacuguu

SEQ ID NO: 3963833 - RNA, 16 nt, Human herpesvirus 3
cgaauuguucugggaa

SEQ ID NO: 3963834 - RNA, 18 nt, Human herpesvirus 3
cgacagcaguaaggguga

SEQ ID NO: 3963835 - RNA, 18 nt, Human herpesvirus 3
cgacagcggauaucgucu

SEQ ID NO: 3963836 - RNA, 23 nt, Human herpesvirus 3
cgaccacgacagcaguaagggug

SEQ ID NO: 3963837 - RNA, 13 nt, Human herpesvirus 3
cgacgugagggug

SEQ ID NO: 3963838 - RNA, 15 nt, Human herpesvirus 3
cgaucacaacagaca

SEQ ID NO: 3963839 - RNA, 15 nt, Human herpesvirus 3
cgccgucgcgcccac

SEQ ID NO: 3963840 - RNA, 21 nt, Human herpesvirus 3
cgccgucgcgcccaccucggc

SEQ ID NO: 3963841 - RNA, 12 nt, Human herpesvirus 3
cgcgggugagug

SEQ ID NO: 3963842 - RNA, 13 nt, Human herpesvirus 3
cgcucucgcuguu

SEQ ID NO: 3963843 - RNA, 16 nt, Human herpesvirus 3
cgcuucccgaaagccc

SEQ ID NO: 3963844 - RNA, 23 nt, Human herpesvirus 3
cggcagaugaucugguaaauguu

SEQ ID NO: 3963845 - RNA, 15 nt, Human herpesvirus 3
cgggcuugcuguucu

SEQ ID NO: 3963846 - RNA, 16 nt, Human herpesvirus 3
cggugagcacccgggc

SEQ ID NO: 3963847 - RNA, 17 nt, Human herpesvirus 3
cguacauauccugcgca

SEQ ID NO: 3963848 - RNA, 15 nt, Human herpesvirus 3
cguacgaccaaacau

SEQ ID NO: 3963849 - RNA, 18 nt, Human herpesvirus 3
cguagauuccgaguccuc

SEQ ID NO: 3963850 - RNA, 20 nt, Human herpesvirus 3
cgucauauuacauuaacggu

SEQ ID NO: 3963851 - RNA, 16 nt, Human herpesvirus 3
cgugagcgccacuggc

SEQ ID NO: 3963852 - RNA, 17 nt, Human herpesvirus 3
cgugagcgccacuggcg

SEQ ID NO: 3963853 - RNA, 15 nt, Human herpesvirus 3
cgugguaagugcggc

SEQ ID NO: 3963854 - RNA, 14 nt, Human herpesvirus 3
cguguccccucugg

SEQ ID NO: 3963855 - RNA, 13 nt, Human herpesvirus 3
cguuaucggucaa

SEQ ID NO: 3963856 - RNA, 16 nt, Human herpesvirus 3
cguucuaauaaaaaca

SEQ ID NO: 3963857 - RNA, 20 nt, Human herpesvirus 3
cuaacaaugcacugaaccac

SEQ ID NO: 3963858 - RNA, 18 nt, Human herpesvirus 3
cuacugcugcaagcccuc

SEQ ID NO: 3963859 - RNA, 12 nt, Human herpesvirus 3
cuagccacaccc

SEQ ID NO: 3963860 - RNA, 22 nt, Human herpesvirus 3
cuaggcacuuuggcggucauuu

SEQ ID NO: 3963861 - RNA, 20 nt, Human herpesvirus 3
cuauagcugucacuguugcg

SEQ ID NO: 3963862 - RNA, 22 nt, Human herpesvirus 3
cucacugcuauagccgucagaa

SEQ ID NO: 3963863 - RNA, 16 nt, Human herpesvirus 3
cuccaagggacccgca

SEQ ID NO: 3963864 - RNA, 15 nt, Human herpesvirus 3
cuccaucacgauaaa

SEQ ID NO: 3963865 - RNA, 21 nt, Human herpesvirus 3
cucccaaggcggucccucgga

SEQ ID NO: 3963866 - RNA, 20 nt, Human herpesvirus 3
cucccucauaauaugauaca

SEQ ID NO: 3963867 - RNA, 17 nt, Human herpesvirus 3
aaaaacacaguugauuu

SEQ ID NO: 3963868 - RNA, 14 nt, Human herpesvirus 3
aaaacguuguguuu

SEQ ID NO: 3963869 - RNA, 19 nt, Human herpesvirus 3
aaaacuuugguuguuguau

SEQ ID NO: 3963870 - RNA, 20 nt, Human herpesvirus 3
aaaagcggaacgguuuuuau

SEQ ID NO: 3963871 - RNA, 17 nt, Human herpesvirus 3
aaaauguuaaacccuga

SEQ ID NO: 3963872 - RNA, 12 nt, Human herpesvirus 3
aaaauuugagau

SEQ ID NO: 3963873 - RNA, 16 nt, Human herpesvirus 3
aaacagguagccagcc

SEQ ID NO: 3963874 - RNA, 15 nt, Human herpesvirus 3
aaaccaaacacgccu

SEQ ID NO: 3963875 - RNA, 18 nt, Human herpesvirus 3
aaacuguuuaaauaguac

SEQ ID NO: 3963876 - RNA, 18 nt, Human herpesvirus 3
aaagguauacuuggagau

SEQ ID NO: 3963877 - RNA, 21 nt, Human herpesvirus 3
aaagguuuauuccggagccua

SEQ ID NO: 3963878 - RNA, 13 nt, Human herpesvirus 3
aaauaaacuauau

SEQ ID NO: 3963879 - RNA, 22 nt, Human herpesvirus 3
aaauaacgccuuaaaaguuaca

SEQ ID NO: 3963880 - RNA, 16 nt, Human herpesvirus 3
aaauucuacaacauug

SEQ ID NO: 3963881 - RNA, 15 nt, Human herpesvirus 3
aaauugggggauuug

SEQ ID NO: 3963882 - RNA, 17 nt, Human herpesvirus 3
aaauuuauaaaacacuc

SEQ ID NO: 3963883 - RNA, 23 nt, Human herpesvirus 3
aacaacgcguacgugccuaggaa

SEQ ID NO: 3963884 - RNA, 15 nt, Human herpesvirus 3
aacacugucagaaac

SEQ ID NO: 3963885 - RNA, 19 nt, Human herpesvirus 3
aacagucguugggaauuua

SEQ ID NO: 3963886 - RNA, 14 nt, Human herpesvirus 3
aacaguuauguuuu

SEQ ID NO: 3963887 - RNA, 20 nt, Human herpesvirus 3
aacauaccccaggccuugaa

SEQ ID NO: 3963888 - RNA, 23 nt, Human herpesvirus 3
aaccauagacuguucuacugacu

SEQ ID NO: 3963889 - RNA, 12 nt, Human herpesvirus 3
aaccgagggugg

SEQ ID NO: 3963890 - RNA, 16 nt, Human herpesvirus 3
aacgaaggcacggaag

SEQ ID NO: 3963891 - RNA, 18 nt, Human herpesvirus 3
aacgccucccagcaaaau

SEQ ID NO: 3963892 - RNA, 21 nt, Human herpesvirus 3
aacuuuugcuuauauuuuaca

SEQ ID NO: 3963893 - RNA, 22 nt, Human herpesvirus 3
aagcgcuccgcccuaaauuaca

SEQ ID NO: 3963894 - RNA, 12 nt, Human herpesvirus 3
aaggaaaugccu

SEQ ID NO: 3963895 - RNA, 14 nt, Human herpesvirus 3
aagguguaaauacu

SEQ ID NO: 3963896 - RNA, 17 nt, Human herpesvirus 3
cuccgcccuaaauuaca

SEQ ID NO: 3963897 - RNA, 17 nt, Human herpesvirus 3
cucgccuccacugcauu

SEQ ID NO: 3963898 - RNA, 13 nt, Human herpesvirus 3
cucgugucucugg

SEQ ID NO: 3963899 - RNA, 22 nt, Human herpesvirus 3
cucuguucggugaguuaaacgg

SEQ ID NO: 3963900 - RNA, 15 nt, Human herpesvirus 3
cugaucguauugcug

SEQ ID NO: 3963901 - RNA, 14 nt, Human herpesvirus 3
cugauuacauuuca

SEQ ID NO: 3963902 - RNA, 17 nt, Human herpesvirus 3
cugauucggguaaaaca

SEQ ID NO: 3963903 - RNA, 14 nt, Human herpesvirus 3
cugccguauuuugc

SEQ ID NO: 3963904 - RNA, 15 nt, Human herpesvirus 3
cugcuuuauuaccaa

SEQ ID NO: 3963905 - RNA, 19 nt, Human herpesvirus 3
cuggacauguguuuaagua

SEQ ID NO: 3963906 - RNA, 22 nt, Human herpesvirus 3
cuggcgugguuauuacauuuaa

SEQ ID NO: 3963907 - RNA, 19 nt, Human herpesvirus 3
cugggcgcccggcggaccc

SEQ ID NO: 3963908 - RNA, 14 nt, Human herpesvirus 3
cuggucggaccccc

SEQ ID NO: 3963909 - RNA, 21 nt, Human herpesvirus 3
cuguacgcagaaagcagucaa

SEQ ID NO: 3963910 - RNA, 12 nt, Human herpesvirus 3
cugucugucugu

SEQ ID NO: 3963911 - RNA, 21 nt, Human herpesvirus 3
cuuacacccccguugcuuuaa

SEQ ID NO: 3963912 - RNA, 16 nt, Human herpesvirus 3
cuuacguuugcauuua

SEQ ID NO: 3963913 - RNA, 21 nt, Human herpesvirus 3
cuucaaguuaaauaacauguc

SEQ ID NO: 3963914 - RNA, 22 nt, Human herpesvirus 3
cuucaaguuaaauaacauguca

SEQ ID NO: 3963915 - RNA, 14 nt, Human herpesvirus 3
cuugacaacauuua

SEQ ID NO: 3963916 - RNA, 14 nt, Human herpesvirus 3
cuugucaaaacaua

SEQ ID NO: 3963917 - RNA, 21 nt, Human herpesvirus 3
cuuguuuuuauuuaauaggca

SEQ ID NO: 3963918 - RNA, 18 nt, Human herpesvirus 3
cuuuaugaauuugcuacc

SEQ ID NO: 3963919 - RNA, 15 nt, Human herpesvirus 3
cuuuuaaagcaguac

SEQ ID NO: 3963920 - RNA, 11 nt, Human herpesvirus 3
cuuuuuaugca

SEQ ID NO: 3963921 - RNA, 14 nt, Human herpesvirus 3
gaaagcggacacau

SEQ ID NO: 3963922 - RNA, 15 nt, Human herpesvirus 3
gaacguuuaauuaau

SEQ ID NO: 3963923 - RNA, 12 nt, Human herpesvirus 3
gaacuaacucag

SEQ ID NO: 3963924 - RNA, 13 nt, Human herpesvirus 3
gaagacuccagua

SEQ ID NO: 3963925 - RNA, 17 nt, Human herpesvirus 3
gaagcuauuggcuccac

SEQ ID NO: 3963926 - RNA, 19 nt, Human herpesvirus 3
gaagcugacgaagagaacu

SEQ ID NO: 3963927 - RNA, 21 nt, Human herpesvirus 3
gaagggggauuuacaaugaca

SEQ ID NO: 3963928 - RNA, 17 nt, Human herpesvirus 3
gaauccggucagagcau

SEQ ID NO: 3963929 - RNA, 21 nt, Human herpesvirus 3
gaauuuauccgguugaaaaca

SEQ ID NO: 3963930 - RNA, 14 nt, Human herpesvirus 3
gacaugcacugcau

SEQ ID NO: 3963931 - RNA, 14 nt, Human herpesvirus 3
gacccgcagcccag

SEQ ID NO: 3963932 - RNA, 20 nt, Human herpesvirus 3
gacgcauuugaugaaucguu

SEQ ID NO: 3963933 - RNA, 18 nt, Human herpesvirus 3
gacgccgauaaauccaca

SEQ ID NO: 3963934 - RNA, 17 nt, Human herpesvirus 3
gacgggcgggcuggucg

SEQ ID NO: 3963935 - RNA, 20 nt, Human herpesvirus 3
gacuccagcaucaucugcug

SEQ ID NO: 3963936 - RNA, 16 nt, Human herpesvirus 3
gagauauggguucgga

SEQ ID NO: 3963937 - RNA, 18 nt, Human herpesvirus 3
gagcaaacuaaagguaua

SEQ ID NO: 3963938 - RNA, 20 nt, Human herpesvirus 3
gagcgccacuggcgcgcgga

SEQ ID NO: 3963939 - RNA, 15 nt, Human herpesvirus 3
gagcucccauuccaa

SEQ ID NO: 3963940 - RNA, 18 nt, Human herpesvirus 3
gauaaauaaaguuuuuaa

SEQ ID NO: 3963941 - RNA, 22 nt, Human herpesvirus 3
gauauaaauccguaucucggag

SEQ ID NO: 3963942 - RNA, 14 nt, Human herpesvirus 3
gaucgucaguaaau

SEQ ID NO: 3963943 - RNA, 19 nt, Human herpesvirus 3
gauggugaugaaaucagag

SEQ ID NO: 3963944 - RNA, 17 nt, Human herpesvirus 3
gauuacgcguugugaua

SEQ ID NO: 3963945 - RNA, 16 nt, Human herpesvirus 3
gauuuuacagaaaaua

SEQ ID NO: 3963946 - RNA, 13 nt, Human herpesvirus 3
gcaauuggccguu

SEQ ID NO: 3963947 - RNA, 21 nt, Human herpesvirus 3
gcacaucauccguccaaacag

SEQ ID NO: 3963948 - RNA, 14 nt, Human herpesvirus 3
gcagauacagcaua

SEQ ID NO: 3963949 - RNA, 20 nt, Human herpesvirus 3
gccacaauaacauaagggau

SEQ ID NO: 3963950 - RNA, 19 nt, Human herpesvirus 3
gccagauguacacccagcu

SEQ ID NO: 3963951 - RNA, 19 nt, Human herpesvirus 3
gccagugaaauaugacggc

SEQ ID NO: 3963952 - RNA, 23 nt, Human herpesvirus 3
gccaguggaccuuugcaaccugg

SEQ ID NO: 3963953 - RNA, 17 nt, Human herpesvirus 3
gcccacacaaucagaag

SEQ ID NO: 3963954 - RNA, 15 nt, Human herpesvirus 3
gccccaaaccacugu

SEQ ID NO: 3963955 - RNA, 14 nt, Human herpesvirus 3
gccgagaacagugg

SEQ ID NO: 3963956 - RNA, 21 nt, Human herpesvirus 3
gccgguacaauuaccccgcga

SEQ ID NO: 3963957 - RNA, 12 nt, Human herpesvirus 3
gccgucgcgccc

SEQ ID NO: 3963958 - RNA, 14 nt, Human herpesvirus 3
gcgaacaccgcugu

SEQ ID NO: 3963959 - RNA, 18 nt, Human herpesvirus 3
gcgaagcugccgucaaug

SEQ ID NO: 3963960 - RNA, 22 nt, Human herpesvirus 3
gcgcgcaaauuaacccccgagg

SEQ ID NO: 3963961 - RNA, 24 nt, Human herpesvirus 3
gcgcucaaucaauccaaggaugug

SEQ ID NO: 3963962 - RNA, 20 nt, Human herpesvirus 3
gcgcugguauguauggcuuc

SEQ ID NO: 3963963 - RNA, 19 nt, Human herpesvirus 3
gcggaucccgcggugagca

SEQ ID NO: 3963964 - RNA, 20 nt, Human herpesvirus 3
gcggccguugccgcauuaga

SEQ ID NO: 3963965 - RNA, 21 nt, Human herpesvirus 3
gcgguauauuaauuaacuggc

SEQ ID NO: 3963966 - RNA, 17 nt, Human herpesvirus 3
gcuacucccacccacug

SEQ ID NO: 3963967 - RNA, 13 nt, Human herpesvirus 3
gcucaaugaacag

SEQ ID NO: 3963968 - RNA, 15 nt, Human herpesvirus 3
gcugccgucaaugca

SEQ ID NO: 3963969 - RNA, 15 nt, Human herpesvirus 3
gcuggucggaccccc

SEQ ID NO: 3963970 - RNA, 18 nt, Human herpesvirus 3
ggaagaguuagcauccaa

SEQ ID NO: 3963971 - RNA, 18 nt, Human herpesvirus 3
ggaccuuugcaaccuggu

SEQ ID NO: 3963972 - RNA, 21 nt, Human herpesvirus 3
ggacuguuuaacggaagauga

SEQ ID NO: 3963973 - RNA, 23 nt, Human herpesvirus 3
ggccaagguuuuggauucccugg

SEQ ID NO: 3963974 - RNA, 13 nt, Human herpesvirus 3
ggccgcuucccga

SEQ ID NO: 3963975 - RNA, 13 nt, Human herpesvirus 3
ggcgcccggcgga

SEQ ID NO: 3963976 - RNA, 17 nt, Human herpesvirus 3
ggcgcugaagggugcau

SEQ ID NO: 3963977 - RNA, 13 nt, Human herpesvirus 3
ggucaucccggga

SEQ ID NO: 3963978 - RNA, 20 nt, Human herpesvirus 3
gguuaaggcgaaaagguuuc

SEQ ID NO: 3963979 - RNA, 17 nt, Human herpesvirus 3
gguucagcggacgcugc

SEQ ID NO: 3963980 - RNA, 12 nt, Human herpesvirus 3
guacaacacaaa

SEQ ID NO: 3963981 - RNA, 18 nt, Human herpesvirus 3
guacaauacguaaauguc

SEQ ID NO: 3963982 - RNA, 21 nt, Human herpesvirus 3
guacacgauucggaaugcccg

SEQ ID NO: 3963983 - RNA, 13 nt, Human herpesvirus 3
guacagauuaaaa

SEQ ID NO: 3963984 - RNA, 22 nt, Human herpesvirus 3
guccaguggacaguaacagccc

SEQ ID NO: 3963985 - RNA, 17 nt, Human herpesvirus 3
gucgaaccgaucgggcg

SEQ ID NO: 3963986 - RNA, 14 nt, Human herpesvirus 3
gucguuuaaagccc

SEQ ID NO: 3963987 - RNA, 14 nt, Human herpesvirus 3
gucugcgaagcugc

SEQ ID NO: 3963988 - RNA, 19 nt, Human herpesvirus 3
gucugugcgggcgggcgac

SEQ ID NO: 3963989 - RNA, 14 nt, Human herpesvirus 3
gugagcacccgggc

SEQ ID NO: 3963990 - RNA, 22 nt, Human herpesvirus 3
gugaggaaaaagaggcggggag

SEQ ID NO: 3963991 - RNA, 23 nt, Human herpesvirus 3
gugcaucgcauaggguguuauaa

SEQ ID NO: 3963992 - RNA, 14 nt, Human herpesvirus 3
guggguagguaggg

SEQ ID NO: 3963993 - RNA, 23 nt, Human herpesvirus 3
gugguuauuacauuuaauguuuu

SEQ ID NO: 3963994 - RNA, 10 nt, Human herpesvirus 3
gugucugucu

SEQ ID NO: 3963995 - RNA, 18 nt, Human herpesvirus 3
guguuuuuaauagagagu

SEQ ID NO: 3963996 - RNA, 12 nt, Human herpesvirus 3
guuaauaaaagc

SEQ ID NO: 3963997 - RNA, 21 nt, Human herpesvirus 3
guuaauaccauauauggacau

SEQ ID NO: 3963998 - RNA, 19 nt, Human herpesvirus 3
guuaauuaacgcgauuuua

SEQ ID NO: 3963999 - RNA, 23 nt, Human herpesvirus 3
guuacauaaauacuaagccucug

SEQ ID NO: 3964000 - RNA, 14 nt, Human herpesvirus 3
guucaguaacuuaa

SEQ ID NO: 3964001 - RNA, 22 nt, Human herpesvirus 3
guucauaacaccgcuauacgca

SEQ ID NO: 3964002 - RNA, 12 nt, Human herpesvirus 3
guuucugggcgc

SEQ ID NO: 3964003 - RNA, 20 nt, Human herpesvirus 3
uaaaaacggauauuaacacg

SEQ ID NO: 3964004 - RNA, 16 nt, Human herpesvirus 3
uaaaacauaucaauuu

SEQ ID NO: 3964005 - RNA, 13 nt, Human herpesvirus 3
uaaauauaaauuu

SEQ ID NO: 3964006 - RNA, 17 nt, Human herpesvirus 3
uaacaauagaaucggag

SEQ ID NO: 3964007 - RNA, 16 nt, Human herpesvirus 3
uaacccccccccgguu

SEQ ID NO: 3964008 - RNA, 14 nt, Human herpesvirus 3
uaagacguugcaua

SEQ ID NO: 3964009 - RNA, 22 nt, Human herpesvirus 3
uaaggggagcguggauguguca

SEQ ID NO: 3964010 - RNA, 13 nt, Human herpesvirus 3
uaagguguuaaua

SEQ ID NO: 3964011 - RNA, 14 nt, Human herpesvirus 3
uaauauggggacag

SEQ ID NO: 3964012 - RNA, 15 nt, Human herpesvirus 3
uaauugucacgcuua

SEQ ID NO: 3964013 - RNA, 21 nt, Human herpesvirus 3
uacaaacgcgcaauguuuuga

SEQ ID NO: 3964014 - RNA, 17 nt, Human herpesvirus 3
uacaauacguaaauguc

SEQ ID NO: 3964015 - RNA, 19 nt, Human herpesvirus 3
uacacgauucggaaugccc

SEQ ID NO: 3964016 - RNA, 16 nt, Human herpesvirus 3
uacagaagacaucacc

SEQ ID NO: 3964017 - RNA, 21 nt, Human herpesvirus 3
uacauauguuccacucuacau

SEQ ID NO: 3964018 - RNA, 17 nt, Human herpesvirus 3
uacgccacgcuacaucc

SEQ ID NO: 3964019 - RNA, 17 nt, Human herpesvirus 3
uacguaaaugucacuau

SEQ ID NO: 3964020 - RNA, 24 nt, Human herpesvirus 3
uacuaauuuguauuuuuaaucauu

SEQ ID NO: 3964021 - RNA, 22 nt, Human herpesvirus 3
uagacguucaaaauaucuuaca

SEQ ID NO: 3964022 - RNA, 20 nt, Human herpesvirus 3
uagauguguugcgaauguaa

SEQ ID NO: 3964023 - RNA, 22 nt, Human herpesvirus 3
uagauguguugcgaauguaaua

SEQ ID NO: 3964024 - RNA, 18 nt, Human herpesvirus 3
uagcauauguucagcagc

SEQ ID NO: 3964025 - RNA, 16 nt, Human herpesvirus 3
uagguucggcaaaucu

SEQ ID NO: 3964026 - RNA, 16 nt, Human herpesvirus 3
uaguuaccaaaguuuu

SEQ ID NO: 3964027 - RNA, 15 nt, Human herpesvirus 3
uauaucuguuacauu

SEQ ID NO: 3964028 - RNA, 18 nt, Human herpesvirus 3
uauauuaaagguuaaauu

SEQ ID NO: 3964029 - RNA, 11 nt, Human herpesvirus 3
uauccaauggg

SEQ ID NO: 3964030 - RNA, 15 nt, Human herpesvirus 3
uauccgacagagaaa

SEQ ID NO: 3964031 - RNA, 17 nt, Human herpesvirus 3
uauggaaucgucuaaca

SEQ ID NO: 3964032 - RNA, 16 nt, Human herpesvirus 3
uauuauaaauguguau

SEQ ID NO: 3964033 - RNA, 13 nt, Human herpesvirus 3
uauucuacagauu

SEQ ID NO: 3964034 - RNA, 20 nt, Human herpesvirus 3
uauucucgcuugcagcuugu

SEQ ID NO: 3964035 - RNA, 17 nt, Human herpesvirus 3
uauuuacguauguacca

SEQ ID NO: 3964036 - RNA, 20 nt, Human herpesvirus 3
ucaaaaaagcguguaaauca

SEQ ID NO: 3964037 - RNA, 13 nt, Human herpesvirus 3
ucaaguugcaugu

SEQ ID NO: 3964038 - RNA, 23 nt, Human herpesvirus 3
ucaauaugucacggagaacguau

SEQ ID NO: 3964039 - RNA, 24 nt, Human herpesvirus 3
ucaccaaacggguuuugggugcau

SEQ ID NO: 3964040 - RNA, 14 nt, Human herpesvirus 3
ucagcgccaauaaa

SEQ ID NO: 3964041 - RNA, 18 nt, Human herpesvirus 3
ucauaaaaacaagaaguu

SEQ ID NO: 3964042 - RNA, 12 nt, Human herpesvirus 3
ucauaacaccgc

SEQ ID NO: 3964043 - RNA, 14 nt, Human herpesvirus 3
ucauacgcauuuac

SEQ ID NO: 3964044 - RNA, 21 nt, Human herpesvirus 3
ucauacgccgacaugccuggc

SEQ ID NO: 3964045 - RNA, 17 nt, Human herpesvirus 3
ucaugaacaaacacucu

SEQ ID NO: 3964046 - RNA, 19 nt, Human herpesvirus 3
ucaugcuuguaaaacauau

SEQ ID NO: 3964047 - RNA, 22 nt, Human herpesvirus 3
ucauuaugagcaucuagaagau

SEQ ID NO: 3964048 - RNA, 22 nt, Human herpesvirus 3
uccccuccuuuucucgugagcg

SEQ ID NO: 3964049 - RNA, 14 nt, Human herpesvirus 3
ucgcccgaaaacuu

SEQ ID NO: 3964050 - RNA, 13 nt, Human herpesvirus 3
ucgcgcccaccuc

SEQ ID NO: 3964051 - RNA, 10 nt, Human herpesvirus 3
ucggaccccc

SEQ ID NO: 3964052 - RNA, 15 nt, Human herpesvirus 3
ucuaaaaauaauguu

SEQ ID NO: 3964053 - RNA, 16 nt, Human herpesvirus 3
ucuaacguugucgauc

SEQ ID NO: 3964054 - RNA, 14 nt, Human herpesvirus 3
ucugaccauuuacc

SEQ ID NO: 3964055 - RNA, 18 nt, Human herpesvirus 3
ucugcaaucauaaaugca

SEQ ID NO: 3964056 - RNA, 21 nt, Human herpesvirus 3
ucugcgaagcugccgucaaug

SEQ ID NO: 3964057 - RNA, 13 nt, Human herpesvirus 3
ucuggagucucca

SEQ ID NO: 3964058 - RNA, 17 nt, Human herpesvirus 3
ucuuucccgaagguuuu

SEQ ID NO: 3964059 - RNA, 20 nt, Human herpesvirus 3
ugacaaauucccccggggcg

SEQ ID NO: 3964060 - RNA, 17 nt, Human herpesvirus 3
ugacuuugaugagaaug

SEQ ID NO: 3964061 - RNA, 16 nt, Human herpesvirus 3
ugagguuuagcaacga

SEQ ID NO: 3964062 - RNA, 20 nt, Human herpesvirus 3
ugaguugcggcgcugaaggg

SEQ ID NO: 3964063 - RNA, 19 nt, Human herpesvirus 3
ugauagaacgcguaaaucu

SEQ ID NO: 3964064 - RNA, 17 nt, Human herpesvirus 3
ugaucugguaaauguua

SEQ ID NO: 3964065 - RNA, 12 nt, Human herpesvirus 3
ugcaagcucgau

SEQ ID NO: 3964066 - RNA, 16 nt, Human herpesvirus 3
ugcacugcaucuggag

SEQ ID NO: 3964067 - RNA, 19 nt, Human herpesvirus 3
ugcaucguagguauaaacg

SEQ ID NO: 3964068 - RNA, 19 nt, Human herpesvirus 3
ugcgaagcugccgucaaug

SEQ ID NO: 3964069 - RNA, 17 nt, Human herpesvirus 3
ugcgucuaucugcaggg

SEQ ID NO: 3964070 - RNA, 23 nt, Human herpesvirus 3
ugcugaguugcggcgcugaaggg

SEQ ID NO: 3964071 - RNA, 20 nt, Human herpesvirus 3
uggacguuuuuccacaauuu

SEQ ID NO: 3964072 - RNA, 19 nt, Human herpesvirus 3
uggagcaacguuuaagaac

SEQ ID NO: 3964073 - RNA, 14 nt, Human herpesvirus 3
uggauaggucaucu

SEQ ID NO: 3964074 - RNA, 14 nt, Human herpesvirus 3
uggcagaagguuua

SEQ ID NO: 3964075 - RNA, 15 nt, Human herpesvirus 3
uggcauuaaacccac

SEQ ID NO: 3964076 - RNA, 15 nt, Human herpesvirus 3
uggcgcgcggacugu

SEQ ID NO: 3964077 - RNA, 19 nt, Human herpesvirus 3
ugggcaaaugaugaagcua

SEQ ID NO: 3964078 - RNA, 21 nt, Human herpesvirus 3
ugggguucggaauuaucacgg

SEQ ID NO: 3964079 - RNA, 18 nt, Human herpesvirus 3
ugguccauuaaaaguuua

SEQ ID NO: 3964080 - RNA, 15 nt, Human herpesvirus 3
uggugaagaaggaca

SEQ ID NO: 3964081 - RNA, 16 nt, Human herpesvirus 3
uguaaccuacacaaca

SEQ ID NO: 3964082 - RNA, 11 nt, Human herpesvirus 3
uguaauuguaa

SEQ ID NO: 3964083 - RNA, 15 nt, Human herpesvirus 3
uguacaauugucugu

SEQ ID NO: 3964084 - RNA, 17 nt, Human herpesvirus 3
ugucaucagacaugauu

SEQ ID NO: 3964085 - RNA, 14 nt, Human herpesvirus 3
uguccggacuccag

SEQ ID NO: 3964086 - RNA, 18 nt, Human herpesvirus 3
ugucuacgugguaccaaa

SEQ ID NO: 3964087 - RNA, 19 nt, Human herpesvirus 3
ugucuacgugguaccaaaa

SEQ ID NO: 3964088 - RNA, 21 nt, Human herpesvirus 3
ugucuacuauuugugaagacu

SEQ ID NO: 3964089 - RNA, 14 nt, Human herpesvirus 3
ugugaugaauguaa

SEQ ID NO: 3964090 - RNA, 15 nt, Human herpesvirus 3
ugugggaggucuaca

SEQ ID NO: 3964091 - RNA, 21 nt, Human herpesvirus 3
ugugggaggucuacagcaccc

SEQ ID NO: 3964092 - RNA, 17 nt, Human herpesvirus 3
uguguuuuuaucugcaa

SEQ ID NO: 3964093 - RNA, 14 nt, Human herpesvirus 3
uguucuaaaacacu

SEQ ID NO: 3964094 - RNA, 19 nt, Human herpesvirus 3
uguucugcauaagcucugu

SEQ ID NO: 3964095 - RNA, 22 nt, Human herpesvirus 3
uguugggucagaaccgacccag

SEQ ID NO: 3964096 - RNA, 21 nt, Human herpesvirus 3
uguuuggugcacucuaccaaa

SEQ ID NO: 3964097 - RNA, 19 nt, Human herpesvirus 3
uguuuucggaguugccucc

SEQ ID NO: 3964098 - RNA, 16 nt, Human herpesvirus 3
uguuuuuaucugcaau

SEQ ID NO: 3964099 - RNA, 19 nt, Human herpesvirus 3
uuaagacguccacacagcc

SEQ ID NO: 3964100 - RNA, 19 nt, Human herpesvirus 3
uuaccccgccauaaacaga

SEQ ID NO: 3964101 - RNA, 19 nt, Human herpesvirus 3
uuauaucuguuacauuucg

SEQ ID NO: 3964102 - RNA, 22 nt, Human herpesvirus 3
uuaugaaaaaagugucugucug

SEQ ID NO: 3964103 - RNA, 13 nt, Human herpesvirus 3
uuauuuugaacau

SEQ ID NO: 3964104 - RNA, 14 nt, Human herpesvirus 3
uucaacacacccau

SEQ ID NO: 3964105 - RNA, 20 nt, Human herpesvirus 3
uucaaguuaaauaacauguc

SEQ ID NO: 3964106 - RNA, 23 nt, Human herpesvirus 3
uucaugguaucaucuauugacga

SEQ ID NO: 3964107 - RNA, 21 nt, Human herpesvirus 3
uucccaaaaggauauucacca

SEQ ID NO: 3964108 - RNA, 15 nt, Human herpesvirus 3
uuccuuuuccagcga

SEQ ID NO: 3964109 - RNA, 18 nt, Human herpesvirus 3
uucuauauuaauaaaaga

SEQ ID NO: 3964110 - RNA, 21 nt, Human herpesvirus 3
uugaaacgucguuauauucac

SEQ ID NO: 3964111 - RNA, 14 nt, Human herpesvirus 3
uugcauaugcauau

SEQ ID NO: 3964112 - RNA, 12 nt, Human herpesvirus 3
uuguaguacagg

SEQ ID NO: 3964113 - RNA, 12 nt, Human herpesvirus 3
uuguauauacaa

SEQ ID NO: 3964114 - RNA, 17 nt, Human herpesvirus 3
uuuaaaagccguucugu

SEQ ID NO: 3964115 - RNA, 16 nt, Human herpesvirus 3
uuucucuaacgcaauu

SEQ ID NO: 3964116 - RNA, 13 nt, Human herpesvirus 3
uuuuaaagcaucu

SEQ ID NO: 3964117 - RNA, 12 nt, Human herpesvirus 3
uuuuuaaucauu

SEQ ID NO: 3964118 - RNA, 23 nt, Human herpesvirus 3
aaaaacguuucugguguauguuu

SEQ ID NO: 3964119 - RNA, 20 nt, Human herpesvirus 3
aaaacacgggaucauuuucu

SEQ ID NO: 3964120 - RNA, 23 nt, Human herpesvirus 3
aaaagcggaacgguuuuuaugaa

SEQ ID NO: 3964121 - RNA, 23 nt, Human herpesvirus 3
aaaauauacgcucuucugauauu

SEQ ID NO: 3964122 - RNA, 16 nt, Human herpesvirus 3
aaacgcgccaaacauu

SEQ ID NO: 3964123 - RNA, 19 nt, Human herpesvirus 3
aaagccgguacacagcauu

SEQ ID NO: 3964124 - RNA, 20 nt, Human herpesvirus 3
aaauuaacucgcguacaaau

SEQ ID NO: 3964125 - RNA, 22 nt, Human herpesvirus 3
aaauuuguguuuuuaucugcaa

SEQ ID NO: 3964126 - RNA, 17 nt, Human herpesvirus 3
aacaaacauucacagua

SEQ ID NO: 3964127 - RNA, 14 nt, Human herpesvirus 3
aacaccgcugugcu

SEQ ID NO: 3964128 - RNA, 15 nt, Human herpesvirus 3
aacaccgcugugcug

SEQ ID NO: 3964129 - RNA, 18 nt, Human herpesvirus 3
aacacggguuccguugcu

SEQ ID NO: 3964130 - RNA, 23 nt, Human herpesvirus 3
aacacuuggcguguuaaacacug

SEQ ID NO: 3964131 - RNA, 14 nt, Human herpesvirus 3
aacauuggcggaag

SEQ ID NO: 3964132 - RNA, 17 nt, Human herpesvirus 3
aacccaagguguaaaua

SEQ ID NO: 3964133 - RNA, 15 nt, Human herpesvirus 3
aacccccccccgguu

SEQ ID NO: 3964134 - RNA, 22 nt, Human herpesvirus 3
aaccuuuuauuuuaaggauggg

SEQ ID NO: 3964135 - RNA, 19 nt, Human herpesvirus 3
aacgucuagaacuguguau

SEQ ID NO: 3964136 - RNA, 18 nt, Human herpesvirus 3
aacucgccuccacugcau

SEQ ID NO: 3964137 - RNA, 21 nt, Human herpesvirus 3
aagaaaacauugcagcguaca

SEQ ID NO: 3964138 - RNA, 14 nt, Human herpesvirus 3
aagacauggccgug

SEQ ID NO: 3964139 - RNA, 14 nt, Human herpesvirus 3
aagauaggguguau

SEQ ID NO: 3964140 - RNA, 21 nt, Human herpesvirus 3
aagauguacugugucucucaa

SEQ ID NO: 3964141 - RNA, 14 nt, Human herpesvirus 3
aagauguuuccaca

SEQ ID NO: 3964142 - RNA, 22 nt, Human herpesvirus 3
aagcgauuuuaucauugaagau

SEQ ID NO: 3964143 - RNA, 15 nt, Human herpesvirus 3
aagcuauacacaagu

SEQ ID NO: 3964144 - RNA, 17 nt, Human herpesvirus 3
aagcuauuaaugguaca

SEQ ID NO: 3964145 - RNA, 21 nt, Human herpesvirus 3
aagguguauuuuauuuaguga

SEQ ID NO: 3964146 - RNA, 15 nt, Human herpesvirus 3
aagguguuucagugg

SEQ ID NO: 3964147 - RNA, 20 nt, Human herpesvirus 3
aagguuaaauuuauaaaaca

SEQ ID NO: 3964148 - RNA, 17 nt, Human herpesvirus 3
aauaacgccuuaaaagu

SEQ ID NO: 3964149 - RNA, 19 nt, Human herpesvirus 3
aauaccuuuuucaugcuug

SEQ ID NO: 3964150 - RNA, 16 nt, Human herpesvirus 3
aauaucuuugcaauuc

SEQ ID NO: 3964151 - RNA, 17 nt, Human herpesvirus 3
cauaguuauuguauaua

SEQ ID NO: 3964152 - RNA, 20 nt, Human herpesvirus 3
cauaucaauuuauauuuuua

SEQ ID NO: 3964153 - RNA, 14 nt, Human herpesvirus 3
caucagacaugauu

SEQ ID NO: 3964154 - RNA, 16 nt, Human herpesvirus 3
caucugcauuacagaa

SEQ ID NO: 3964155 - RNA, 17 nt, Human herpesvirus 3
caugcauugcucgcgua

SEQ ID NO: 3964156 - RNA, 17 nt, Human herpesvirus 3
caugcuuguaaaacaua

SEQ ID NO: 3964157 - RNA, 20 nt, Human herpesvirus 3
caugguugugggaaacauca

SEQ ID NO: 3964158 - RNA, 14 nt, Human herpesvirus 3
cauuaaaguauuug

SEQ ID NO: 3964159 - RNA, 15 nt, Human herpesvirus 3
cauuaacccacgggg

SEQ ID NO: 3964160 - RNA, 22 nt, Human herpesvirus 3
cauuguacacccgguaugccac

SEQ ID NO: 3964161 - RNA, 19 nt, Human herpesvirus 3
cauuuccaaacacauuacg

SEQ ID NO: 3964162 - RNA, 17 nt, Human herpesvirus 3
cauuugcgaauucuuag

SEQ ID NO: 3964163 - RNA, 18 nt, Human herpesvirus 3
cauuuuauagacacgcua

SEQ ID NO: 3964164 - RNA, 16 nt, Human herpesvirus 3
ccaagguuuuggauuc

SEQ ID NO: 3964165 - RNA, 12 nt, Human herpesvirus 3
ccaccacauuuu

SEQ ID NO: 3964166 - RNA, 15 nt, Human herpesvirus 3
ccaccagacacgcuc

SEQ ID NO: 3964167 - RNA, 21 nt, Human herpesvirus 3
ccacguaauuugccccaaacc

SEQ ID NO: 3964168 - RNA, 20 nt, Human herpesvirus 3
ccacguuuuacgucugccca

SEQ ID NO: 3964169 - RNA, 12 nt, Human herpesvirus 3
ccacuuauccaa

SEQ ID NO: 3964170 - RNA, 20 nt, Human herpesvirus 3
ccagauguacacccagcugu

SEQ ID NO: 3964171 - RNA, 14 nt, Human herpesvirus 3
ccaggcucucauga

SEQ ID NO: 3964172 - RNA, 15 nt, Human herpesvirus 3
ccagguacgcgucaa

SEQ ID NO: 3964173 - RNA, 13 nt, Human herpesvirus 3
cccacccccgcag

SEQ ID NO: 3964174 - RNA, 15 nt, Human herpesvirus 3
cccaccuccccgcgc

SEQ ID NO: 3964175 - RNA, 19 nt, Human herpesvirus 3
ccccaguaaucucacuguu

SEQ ID NO: 3964176 - RNA, 15 nt, Human herpesvirus 3
cccccgguuucuggg

SEQ ID NO: 3964177 - RNA, 16 nt, Human herpesvirus 3
ccccuccuuuucucgu

SEQ ID NO: 3964178 - RNA, 19 nt, Human herpesvirus 3
cccgccgucgcgcccaccu

SEQ ID NO: 3964179 - RNA, 18 nt, Human herpesvirus 3
cccgcgcguuugcggggc

SEQ ID NO: 3964180 - RNA, 14 nt, Human herpesvirus 3
cccggcggaccccg

SEQ ID NO: 3964181 - RNA, 19 nt, Human herpesvirus 3
cccuggagacggcugcugc

SEQ ID NO: 3964182 - RNA, 23 nt, Human herpesvirus 3
cccuggagacggcugcugccgag

SEQ ID NO: 3964183 - RNA, 13 nt, Human herpesvirus 3
ccgcgcucaauca

SEQ ID NO: 3964184 - RNA, 14 nt, Human herpesvirus 3
ccgggauaucucau

SEQ ID NO: 3964185 - RNA, 14 nt, Human herpesvirus 3
ccgggaucguggcc

SEQ ID NO: 3964186 - RNA, 13 nt, Human herpesvirus 3
ccgguuuauauuc

SEQ ID NO: 3964187 - RNA, 13 nt, Human herpesvirus 3
ccgguuucugggc

SEQ ID NO: 3964188 - RNA, 16 nt, Human herpesvirus 3
ccgguuucugggcgcc

SEQ ID NO: 3964189 - RNA, 12 nt, Human herpesvirus 3
ccguucugugag

SEQ ID NO: 3964190 - RNA, 11 nt, Human herpesvirus 3
ccguugccgca

SEQ ID NO: 3964191 - RNA, 20 nt, Human herpesvirus 3
ccuaggaacgcgacaugacc

SEQ ID NO: 3964192 - RNA, 22 nt, Human herpesvirus 3
ccuccuuuucucgugagcgcca

SEQ ID NO: 3964193 - RNA, 18 nt, Human herpesvirus 3
ccuggccccuugaaccac

SEQ ID NO: 3964194 - RNA, 17 nt, Human herpesvirus 3
ccuggcuuaacagugcc

SEQ ID NO: 3964195 - RNA, 18 nt, Human herpesvirus 3
ccuuaaccgcgacagcca

SEQ ID NO: 3964196 - RNA, 15 nt, Human herpesvirus 3
ccuucaacacaccca

SEQ ID NO: 3964197 - RNA, 15 nt, Human herpesvirus 3
ccuucaaguuaaaua

SEQ ID NO: 3964198 - RNA, 18 nt, Human herpesvirus 3
ccuugggacaucaaccag

SEQ ID NO: 3964199 - RNA, 21 nt, Human herpesvirus 3
ccuuuacaagauauaauuugu

SEQ ID NO: 3964200 - RNA, 16 nt, Human herpesvirus 3
ccuuuucucgugagcg

SEQ ID NO: 3964201 - RNA, 21 nt, Human herpesvirus 3
cgagaagggggauuuacaaug

SEQ ID NO: 3964202 - RNA, 14 nt, Human herpesvirus 3
cgagcaugugcaac

SEQ ID NO: 3964203 - RNA, 22 nt, Human herpesvirus 3
cgauauuguauuguaguacagg

SEQ ID NO: 3964204 - RNA, 21 nt, Human herpesvirus 3
cgaucucugguauacuuggca

SEQ ID NO: 3964205 - RNA, 12 nt, Human herpesvirus 3
cgauggugauga

SEQ ID NO: 3964206 - RNA, 20 nt, Human herpesvirus 3
cgauuacagcugccgggaaa

SEQ ID NO: 3964207 - RNA, 12 nt, Human herpesvirus 3
cgcccaccucgg

SEQ ID NO: 3964208 - RNA, 16 nt, Human herpesvirus 3
cgcgcaauguuuugaa

SEQ ID NO: 3964209 - RNA, 16 nt, Human herpesvirus 3
cgcuacccgaaagccc

SEQ ID NO: 3964210 - RNA, 20 nt, Human herpesvirus 3
cgcuggguguggcuauuaga

SEQ ID NO: 3964211 - RNA, 15 nt, Human herpesvirus 3
cggcuuaacgagaga

SEQ ID NO: 3964212 - RNA, 21 nt, Human herpesvirus 3
cggcuuaacgagagauccaau

SEQ ID NO: 3964213 - RNA, 20 nt, Human herpesvirus 3
cgggcgggcgacgggcgggc

SEQ ID NO: 3964214 - RNA, 19 nt, Human herpesvirus 3
cgggucuuaucuauauaca

SEQ ID NO: 3964215 - RNA, 11 nt, Human herpesvirus 3
cggucauauaa

SEQ ID NO: 3964216 - RNA, 13 nt, Human herpesvirus 3
cguauuguguaau

SEQ ID NO: 3964217 - RNA, 21 nt, Human herpesvirus 3
cguccccuuauaucugccaua

SEQ ID NO: 3964218 - RNA, 18 nt, Human herpesvirus 3
cgugguaccaaaaacaca

SEQ ID NO: 3964219 - RNA, 17 nt, Human herpesvirus 3
cgugucacgacaaaaac

SEQ ID NO: 3964220 - RNA, 13 nt, Human herpesvirus 3
cguugaacaccau

SEQ ID NO: 3964221 - RNA, 20 nt, Human herpesvirus 3
cuauaaaaacauaacaccag

SEQ ID NO: 3964222 - RNA, 23 nt, Human herpesvirus 3
cuauuccgcccggauaauguccu

SEQ ID NO: 3964223 - RNA, 21 nt, Human herpesvirus 3
cuauuucaugcuuguaaaaca

SEQ ID NO: 3964224 - RNA, 18 nt, Human herpesvirus 3
cucaucaacguuaagagg

SEQ ID NO: 3964225 - RNA, 16 nt, Human herpesvirus 3
cuccagcaucaucugc

SEQ ID NO: 3964226 - RNA, 20 nt, Human herpesvirus 3
cucccacgguuugugcacug

SEQ ID NO: 3964227 - RNA, 17 nt, Human herpesvirus 3
cuccggcaucuccauca

SEQ ID NO: 3964228 - RNA, 19 nt, Human herpesvirus 3
cuccucgaccgcuggauga

SEQ ID NO: 3964229 - RNA, 17 nt, Human herpesvirus 3
cucgugagcgccacugg

SEQ ID NO: 3964230 - RNA, 22 nt, Human herpesvirus 3
cugauacauaaacacagagucu

SEQ ID NO: 3964231 - RNA, 17 nt, Human herpesvirus 3
cugaucgucaggucugu

SEQ ID NO: 3964232 - RNA, 19 nt, Human herpesvirus 3
cugauucggguaaaacaca

SEQ ID NO: 3964233 - RNA, 13 nt, Human herpesvirus 3
cugcaucuggaga

SEQ ID NO: 3964234 - RNA, 22 nt, Human herpesvirus 3
cugcguuauuuaaaggucugau

SEQ ID NO: 3964235 - RNA, 13 nt, Human herpesvirus 3
cuguacaccgcua

SEQ ID NO: 3964236 - RNA, 18 nt, Human herpesvirus 3
cugucauguuuaagaaca

SEQ ID NO: 3964237 - RNA, 16 nt, Human herpesvirus 3
cuguuuguuguuaaua

SEQ ID NO: 3964238 - RNA, 13 nt, Human herpesvirus 3
cuuacuugagauu

SEQ ID NO: 3964239 - RNA, 13 nt, Human herpesvirus 3
cuuauccaacaaa

SEQ ID NO: 3964240 - RNA, 21 nt, Human herpesvirus 3
cuuccaacaucuauuccggau

SEQ ID NO: 3964241 - RNA, 16 nt, Human herpesvirus 3
cuugaaucugucuuua

SEQ ID NO: 3964242 - RNA, 18 nt, Human herpesvirus 3
cuugagaugagcagcgca

SEQ ID NO: 3964243 - RNA, 23 nt, Human herpesvirus 3
cuuuaauaggcgcuacuuuauau

SEQ ID NO: 3964244 - RNA, 14 nt, Human herpesvirus 3
cuuugcguauauga

SEQ ID NO: 3964245 - RNA, 19 nt, Human herpesvirus 3
cuuuguuugcugcagacac

SEQ ID NO: 3964246 - RNA, 18 nt, Human herpesvirus 3
cuuuuaaagcaguaccgg

SEQ ID NO: 3964247 - RNA, 13 nt, Human herpesvirus 3
cuuuuaaagcauc

SEQ ID NO: 3964248 - RNA, 15 nt, Human herpesvirus 3
gaaaaaagugucugu

SEQ ID NO: 3964249 - RNA, 22 nt, Human herpesvirus 3
gaaaauaacccccccccgguuu

SEQ ID NO: 3964250 - RNA, 16 nt, Human herpesvirus 3
gaauaaacgacacaaa

SEQ ID NO: 3964251 - RNA, 19 nt, Human herpesvirus 3
gaauauucauaaaacugua

SEQ ID NO: 3964252 - RNA, 20 nt, Human herpesvirus 3
gaaucguugcggguacaaua

SEQ ID NO: 3964253 - RNA, 23 nt, Human herpesvirus 3
gaaucucuucauauguaauuuua

SEQ ID NO: 3964254 - RNA, 21 nt, Human herpesvirus 3
gaauguaauucgugugcaaua

SEQ ID NO: 3964255 - RNA, 18 nt, Human herpesvirus 3
gaauucuuagaaaagcca

SEQ ID NO: 3964256 - RNA, 20 nt, Human herpesvirus 3
gaauucuuagaaaagccagc

SEQ ID NO: 3964257 - RNA, 11 nt, Human herpesvirus 3
gaauuuugcuc

SEQ ID NO: 3964258 - RNA, 16 nt, Human herpesvirus 3
gacaaaccccacgcaa

SEQ ID NO: 3964259 - RNA, 18 nt, Human herpesvirus 3
gacauaccgacaguaaaa

SEQ ID NO: 3964260 - RNA, 16 nt, Human herpesvirus 3
gaccguaauaugucuc

SEQ ID NO: 3964261 - RNA, 18 nt, Human herpesvirus 3
gacguuauacaagguguu

SEQ ID NO: 3964262 - RNA, 20 nt, Human herpesvirus 3
gacuccccccgucacacaca

SEQ ID NO: 3964263 - RNA, 21 nt, Human herpesvirus 3
gacugcguuauuuaaaggucu

SEQ ID NO: 3964264 - RNA, 15 nt, Human herpesvirus 3
gagacggcugcugcc

SEQ ID NO: 3964265 - RNA, 19 nt, Human herpesvirus 3
gagugggguguuguggaua

SEQ ID NO: 3964266 - RNA, 15 nt, Human herpesvirus 3
ucaaaguauuuuccu

SEQ ID NO: 3964267 - RNA, 13 nt, Human herpesvirus 3
ucaugcaggcuuu

SEQ ID NO: 3964268 - RNA, 13 nt, Human herpesvirus 3
ucaugcuugucaa

SEQ ID NO: 3964269 - RNA, 21 nt, Human herpesvirus 3
ucaugcuugucaaaacauacu

SEQ ID NO: 3964270 - RNA, 13 nt, Human herpesvirus 3
ucaugugucucca

SEQ ID NO: 3964271 - RNA, 12 nt, Human herpesvirus 3
uccaauguuuga

SEQ ID NO: 3964272 - RNA, 13 nt, Human herpesvirus 3
uccagaguacagg

SEQ ID NO: 3964273 - RNA, 19 nt, Human herpesvirus 3
ucccccacauacaacauga

SEQ ID NO: 3964274 - RNA, 19 nt, Human herpesvirus 3
uccccuccuuuucucguga

SEQ ID NO: 3964275 - RNA, 20 nt, Human herpesvirus 3
uccccuccuuuucucgugag

SEQ ID NO: 3964276 - RNA, 22 nt, Human herpesvirus 3
uccgggaucguggccuugggac

SEQ ID NO: 3964277 - RNA, 15 nt, Human herpesvirus 3
ucguauaacagcuca

SEQ ID NO: 3964278 - RNA, 19 nt, Human herpesvirus 3
ucgucguucgaauccuaga

SEQ ID NO: 3964279 - RNA, 13 nt, Human herpesvirus 3
ucguguaaaguuu

SEQ ID NO: 3964280 - RNA, 19 nt, Human herpesvirus 3
ucguucgaauccuagaagc

SEQ ID NO: 3964281 - RNA, 13 nt, Human herpesvirus 3
ucguuuaucccac

SEQ ID NO: 3964282 - RNA, 17 nt, Human herpesvirus 3
ucguuuugguguuacau

SEQ ID NO: 3964283 - RNA, 17 nt, Human herpesvirus 3
ucuaaaacacugucaga

SEQ ID NO: 3964284 - RNA, 18 nt, Human herpesvirus 3
ucuauagcaaaauucaga

SEQ ID NO: 3964285 - RNA, 21 nt, Human herpesvirus 3
ucugccguggaccccuguauu

SEQ ID NO: 3964286 - RNA, 13 nt, Human herpesvirus 3
ucuuuuuguagau

SEQ ID NO: 3964287 - RNA, 18 nt, Human herpesvirus 3
ugaaccggaaccuacaac

SEQ ID NO: 3964288 - RNA, 13 nt, Human herpesvirus 3
ugacuuugaagac

SEQ ID NO: 3964289 - RNA, 13 nt, Human herpesvirus 3
ugagcgccacugg

SEQ ID NO: 3964290 - RNA, 22 nt, Human herpesvirus 3
ugaguugggagguuccucggga

SEQ ID NO: 3964291 - RNA, 15 nt, Human herpesvirus 3
ugauaugaggggaag

SEQ ID NO: 3964292 - RNA, 15 nt, Human herpesvirus 3
ugaugguaguuacca

SEQ ID NO: 3964293 - RNA, 13 nt, Human herpesvirus 3
ugcagguuuuacu

SEQ ID NO: 3964294 - RNA, 22 nt, Human herpesvirus 3
ugcauaaccuguccauuugcau

SEQ ID NO: 3964295 - RNA, 19 nt, Human herpesvirus 3
ugcauaacguugcggugau

SEQ ID NO: 3964296 - RNA, 17 nt, Human herpesvirus 3
ugcaucguagguauaaa

SEQ ID NO: 3964297 - RNA, 18 nt, Human herpesvirus 3
ugcauuacccuaucccag

SEQ ID NO: 3964298 - RNA, 19 nt, Human herpesvirus 3
ugcgauaacugcgauaaga

SEQ ID NO: 3964299 - RNA, 13 nt, Human herpesvirus 3
uggacggcucccg

SEQ ID NO: 3964300 - RNA, 15 nt, Human herpesvirus 3
uggauucccuggaga

SEQ ID NO: 3964301 - RNA, 19 nt, Human herpesvirus 3
uggcgcgcggacuguuugu

SEQ ID NO: 3964302 - RNA, 21 nt, Human herpesvirus 3
ugguaagguuuuauuuaaguu

SEQ ID NO: 3964303 - RNA, 21 nt, Human herpesvirus 3
uguaaaguuauuucuccggga

SEQ ID NO: 3964304 - RNA, 22 nt, Human herpesvirus 3
uguaagacccgucgguaaauga

SEQ ID NO: 3964305 - RNA, 18 nt, Human herpesvirus 3
uguaauucgugugcaaua

SEQ ID NO: 3964306 - RNA, 19 nt, Human herpesvirus 3
ugucuacuauuugugaaga

SEQ ID NO: 3964307 - RNA, 15 nt, Human herpesvirus 3
ugugcgggcgggcga

SEQ ID NO: 3964308 - RNA, 18 nt, Human herpesvirus 3
uguguuuuuaucugcaau

SEQ ID NO: 3964309 - RNA, 14 nt, Human herpesvirus 3
uguuauacuacuua

SEQ ID NO: 3964310 - RNA, 19 nt, Human herpesvirus 3
uguucaauaauuggacugc

SEQ ID NO: 3964311 - RNA, 17 nt, Human herpesvirus 3
uguugagucauuuucau

SEQ ID NO: 3964312 - RNA, 12 nt, Human herpesvirus 3
uuaaaacauaca

SEQ ID NO: 3964313 - RNA, 17 nt, Human herpesvirus 3
uuaacacgauuaacguu

SEQ ID NO: 3964314 - RNA, 22 nt, Human herpesvirus 3
uuaauaaaaacacaaccagucu

SEQ ID NO: 3964315 - RNA, 22 nt, Human herpesvirus 3
uuaaucccgccuuuaucucccu

SEQ ID NO: 3964316 - RNA, 15 nt, Human herpesvirus 3
uuaaugcaaccauca

SEQ ID NO: 3964317 - RNA, 12 nt, Human herpesvirus 3
uuaccguacaac

SEQ ID NO: 3964318 - RNA, 14 nt, Human herpesvirus 3
uuagcauccaaauu

SEQ ID NO: 3964319 - RNA, 21 nt, Human herpesvirus 3
uuauauacguagaauuuacag

SEQ ID NO: 3964320 - RNA, 22 nt, Human herpesvirus 3
uuauccaacuguuuacauagau

SEQ ID NO: 3964321 - RNA, 14 nt, Human herpesvirus 3
uuauuuuaauguau

SEQ ID NO: 3964322 - RNA, 18 nt, Human herpesvirus 3
uucaaaauaucuuacaga

SEQ ID NO: 3964323 - RNA, 18 nt, Human herpesvirus 3
uucaaaggacgaagggga

SEQ ID NO: 3964324 - RNA, 18 nt, Human herpesvirus 3
uuccacaagguacgaaaa

SEQ ID NO: 3964325 - RNA, 16 nt, Human herpesvirus 3
uucuacgagaauauuc

SEQ ID NO: 3964326 - RNA, 19 nt, Human herpesvirus 3
uucucgugagcgccacugg

SEQ ID NO: 3964327 - RNA, 16 nt, Human herpesvirus 3
uucugggcgcccggcg

SEQ ID NO: 3964328 - RNA, 18 nt, Human herpesvirus 3
uugagaaaaccaaagacg

SEQ ID NO: 3964329 - RNA, 22 nt, Human herpesvirus 3
uugauuuuuuuaaacaaauacg

SEQ ID NO: 3964330 - RNA, 17 nt, Human herpesvirus 3
uugccaugacuuccaca

SEQ ID NO: 3964331 - RNA, 23 nt, Human herpesvirus 3
uugggagggggaaggaaaugccu

SEQ ID NO: 3964332 - RNA, 16 nt, Human herpesvirus 3
uuguaaaacauaucaa

SEQ ID NO: 3964333 - RNA, 22 nt, Human herpesvirus 3
uugucuaccacuaagaacuuua

SEQ ID NO: 3964334 - RNA, 13 nt, Human herpesvirus 3
uuuaaaaauaccu

SEQ ID NO: 3964335 - RNA, 18 nt, Human herpesvirus 3
uuuaacggaagaugaacu

SEQ ID NO: 3964336 - RNA, 15 nt, Human herpesvirus 3
uuuaagguauggagu

SEQ ID NO: 3964337 - RNA, 17 nt, Human herpesvirus 3
uuuaauccaauguuuga

SEQ ID NO: 3964338 - RNA, 12 nt, Human herpesvirus 3
uuuacaguaaac

SEQ ID NO: 3964339 - RNA, 16 nt, Human herpesvirus 3
uuuaucccccuucaaa

SEQ ID NO: 3964340 - RNA, 14 nt, Human herpesvirus 3
uuuaucugaaaaga

SEQ ID NO: 3964341 - RNA, 23 nt, Human herpesvirus 3
uuuauuacauucgcaacacaucu

SEQ ID NO: 3964342 - RNA, 22 nt, Human herpesvirus 3
uuucucgugagcgccacuggcg

SEQ ID NO: 3964343 - RNA, 21 nt, Human herpesvirus 3
uuuuacgucauuucucccguu

SEQ ID NO: 3964344 - RNA, 13 nt, Human herpesvirus 3
aauccaauguuug

SEQ ID NO: 3964345 - RNA, 15 nt, Human herpesvirus 3
aaucgucuaacauua

SEQ ID NO: 3964346 - RNA, 17 nt, Human herpesvirus 3
aauucuuagaaaagcca

SEQ ID NO: 3964347 - RNA, 20 nt, Human herpesvirus 3
aauugggggauuugggagaa

SEQ ID NO: 3964348 - RNA, 20 nt, Human herpesvirus 3
aauuguucugggaacacgua

SEQ ID NO: 3964349 - RNA, 13 nt, Human herpesvirus 3
acaagaaaccaug

SEQ ID NO: 3964350 - RNA, 19 nt, Human herpesvirus 3
acacgcgggugaguguacg

SEQ ID NO: 3964351 - RNA, 21 nt, Human herpesvirus 3
acacucgauuucaacggcuuc

SEQ ID NO: 3964352 - RNA, 22 nt, Human herpesvirus 3
acaugcauggaaucaccagaac

SEQ ID NO: 3964353 - RNA, 18 nt, Human herpesvirus 3
acaugccuggcuuaacag

SEQ ID NO: 3964354 - RNA, 12 nt, Human herpesvirus 3
acccaaggugua

SEQ ID NO: 3964355 - RNA, 23 nt, Human herpesvirus 3
acccaagguguaaauacugcccc

SEQ ID NO: 3964356 - RNA, 18 nt, Human herpesvirus 3
accgguaccaugggagac

SEQ ID NO: 3964357 - RNA, 18 nt, Human herpesvirus 3
accugcgguauucuguaa

SEQ ID NO: 3964358 - RNA, 12 nt, Human herpesvirus 3
acggcugcugcc

SEQ ID NO: 3964359 - RNA, 23 nt, Human herpesvirus 3
acguacaaucgaaaaaaggugua

SEQ ID NO: 3964360 - RNA, 20 nt, Human herpesvirus 3
acguauuuuuauuuaaaugu

SEQ ID NO: 3964361 - RNA, 22 nt, Human herpesvirus 3
acuagcuaccguuagaggcuua

SEQ ID NO: 3964362 - RNA, 22 nt, Human herpesvirus 3
acucacguuuguguugugacuu

SEQ ID NO: 3964363 - RNA, 14 nt, Human herpesvirus 3
acucugcgaugcau

SEQ ID NO: 3964364 - RNA, 23 nt, Human herpesvirus 3
acugaauuauauaccucggccgc

SEQ ID NO: 3964365 - RNA, 16 nt, Human herpesvirus 3
acuguauguaaauuau

SEQ ID NO: 3964366 - RNA, 18 nt, Human herpesvirus 3
acuguuuguuguuaauaa

SEQ ID NO: 3964367 - RNA, 17 nt, Human herpesvirus 3
acuguuuuuuauuuaaa

SEQ ID NO: 3964368 - RNA, 11 nt, Human herpesvirus 3
acuuauccauu

SEQ ID NO: 3964369 - RNA, 18 nt, Human herpesvirus 3
acuugacgcgaacaccgc

SEQ ID NO: 3964370 - RNA, 22 nt, Human herpesvirus 3
agacacgcuacagaagacauca

SEQ ID NO: 3964371 - RNA, 20 nt, Human herpesvirus 3
agacaucaccgaacauggac

SEQ ID NO: 3964372 - RNA, 20 nt, Human herpesvirus 3
agacgaucucccguuuuuau

SEQ ID NO: 3964373 - RNA, 23 nt, Human herpesvirus 3
agacuuuaugaauuugcuaccag

SEQ ID NO: 3964374 - RNA, 14 nt, Human herpesvirus 3
agaucuaacguuuu

SEQ ID NO: 3964375 - RNA, 12 nt, Human herpesvirus 3
agaugacuuuga

SEQ ID NO: 3964376 - RNA, 16 nt, Human herpesvirus 3
agcaaaauucagaaac

SEQ ID NO: 3964377 - RNA, 21 nt, Human herpesvirus 3
agcaauaaaauggauauaauu

SEQ ID NO: 3964378 - RNA, 16 nt, Human herpesvirus 3
agcaucucuggacccc

SEQ ID NO: 3964379 - RNA, 23 nt, Human herpesvirus 3
agcgccacuggcgcgcggacugu

SEQ ID NO: 3964380 - RNA, 23 nt, Human herpesvirus 3
agcugaaaaucgucccauuuaaa

SEQ ID NO: 3964381 - RNA, 13 nt, Human herpesvirus 3
aggacgaagggga

SEQ ID NO: 3964382 - RNA, 15 nt, Human herpesvirus 3
aggcaacugcaaaca

SEQ ID NO: 3964383 - RNA, 15 nt, Human herpesvirus 3
aggcgaaaagguuuc

SEQ ID NO: 3964384 - RNA, 14 nt, Human herpesvirus 3
aggcuuuaucugaa

SEQ ID NO: 3964385 - RNA, 16 nt, Human herpesvirus 3
agggacccgcagccca

SEQ ID NO: 3964386 - RNA, 17 nt, Human herpesvirus 3
agggacccgcagcccag

SEQ ID NO: 3964387 - RNA, 23 nt, Human herpesvirus 3
agguauaugucaacauuuacagu

SEQ ID NO: 3964388 - RNA, 13 nt, Human herpesvirus 3
aggucuacagcac

SEQ ID NO: 3964389 - RNA, 19 nt, Human herpesvirus 3
aguaccacgugguauuaug

SEQ ID NO: 3964390 - RNA, 15 nt, Human herpesvirus 3
aguacuaaaaauccu

SEQ ID NO: 3964391 - RNA, 21 nt, Human herpesvirus 3
agucaauguuuaaagacagcc

SEQ ID NO: 3964392 - RNA, 15 nt, Human herpesvirus 3
agucugaccauuuac

SEQ ID NO: 3964393 - RNA, 18 nt, Human herpesvirus 3
aguguucuaaaacacugu

SEQ ID NO: 3964394 - RNA, 16 nt, Human herpesvirus 3
aguuaaaucguuuaac

SEQ ID NO: 3964395 - RNA, 13 nt, Human herpesvirus 3
aguuaauaaaccu

SEQ ID NO: 3964396 - RNA, 15 nt, Human herpesvirus 3
aguuuaggguuuaaa

SEQ ID NO: 3964397 - RNA, 14 nt, Human herpesvirus 3
auaaaccaacuccu

SEQ ID NO: 3964398 - RNA, 18 nt, Human herpesvirus 3
auacauaaccgauuuacc

SEQ ID NO: 3964399 - RNA, 20 nt, Human herpesvirus 3
auagaaucggagacucgugg

SEQ ID NO: 3964400 - RNA, 16 nt, Human herpesvirus 3
auauaaaauuaaaaca

SEQ ID NO: 3964401 - RNA, 24 nt, Human herpesvirus 3
auaucuuacagauucuucaccaag

SEQ ID NO: 3964402 - RNA, 17 nt, Human herpesvirus 3
auaugucaacauuuaca

SEQ ID NO: 3964403 - RNA, 18 nt, Human herpesvirus 3
auauguucagcagcuuaa

SEQ ID NO: 3964404 - RNA, 14 nt, Human herpesvirus 3
auauuaacacgauu

SEQ ID NO: 3964405 - RNA, 17 nt, Human herpesvirus 3
auauuaauaaaagacua

SEQ ID NO: 3964406 - RNA, 15 nt, Human herpesvirus 3
auauuacuuaaaacg

SEQ ID NO: 3964407 - RNA, 16 nt, Human herpesvirus 3
auauucacaacaguug

SEQ ID NO: 3964408 - RNA, 19 nt, Human herpesvirus 3
aucauuaaacgugcauuuu

SEQ ID NO: 3964409 - RNA, 22 nt, Human herpesvirus 3
aucgcugaugccagaagcauuu

SEQ ID NO: 3964410 - RNA, 15 nt, Human herpesvirus 3
aucucggagcgggcc

SEQ ID NO: 3964411 - RNA, 15 nt, Human herpesvirus 3
augaaaaccugggug

SEQ ID NO: 3964412 - RNA, 12 nt, Human herpesvirus 3
augacuuccaca

SEQ ID NO: 3964413 - RNA, 12 nt, Human herpesvirus 3
augauauacaca

SEQ ID NO: 3964414 - RNA, 14 nt, Human herpesvirus 3
augccacauuuacc

SEQ ID NO: 3964415 - RNA, 17 nt, Human herpesvirus 3
augcgcguuccaaauua

SEQ ID NO: 3964416 - RNA, 20 nt, Human herpesvirus 3
augcuugucaaaacauacua

SEQ ID NO: 3964417 - RNA, 23 nt, Human herpesvirus 3
auggcaucuuccgacggugacag

SEQ ID NO: 3964418 - RNA, 16 nt, Human herpesvirus 3
auggccgucuugaauc

SEQ ID NO: 3964419 - RNA, 14 nt, Human herpesvirus 3
auggcuacaaggaa

SEQ ID NO: 3964420 - RNA, 17 nt, Human herpesvirus 3
augggugguaagguuuu

SEQ ID NO: 3964421 - RNA, 18 nt, Human herpesvirus 3
auguaaaauaaacugaau

SEQ ID NO: 3964422 - RNA, 16 nt, Human herpesvirus 3
auuacauuuaauguuu

SEQ ID NO: 3964423 - RNA, 21 nt, Human herpesvirus 3
auuaccaacuguauguaaauu

SEQ ID NO: 3964424 - RNA, 17 nt, Human herpesvirus 3
auuagugucacuauaaa

SEQ ID NO: 3964425 - RNA, 12 nt, Human herpesvirus 3
auuauacauaac

SEQ ID NO: 3964426 - RNA, 16 nt, Human herpesvirus 3
auuaugaacaguuuau

SEQ ID NO: 3964427 - RNA, 20 nt, Human herpesvirus 3
auucaagacuaacauuuauc

SEQ ID NO: 3964428 - RNA, 16 nt, Human herpesvirus 3
auucucaucaaaguca

SEQ ID NO: 3964429 - RNA, 20 nt, Human herpesvirus 3
auuguaaauuuuaauuacga

SEQ ID NO: 3964430 - RNA, 18 nt, Human herpesvirus 3
auugucccguaaacuaau

SEQ ID NO: 3964431 - RNA, 22 nt, Human herpesvirus 3
auuguggauccggcaugcauug

SEQ ID NO: 3964432 - RNA, 14 nt, Human herpesvirus 3
auuuaggaggcugc

SEQ ID NO: 3964433 - RNA, 20 nt, Human herpesvirus 3
auuuauucucgcuugcagcu

SEQ ID NO: 3964434 - RNA, 16 nt, Human herpesvirus 3
auuuuacgucauuucu

SEQ ID NO: 3964435 - RNA, 14 nt, Human herpesvirus 3
auuuuauauacaaa

SEQ ID NO: 3964436 - RNA, 22 nt, Human herpesvirus 3
auuuuugauuuuuuuaaacaaa

SEQ ID NO: 3964437 - RNA, 22 nt, Human herpesvirus 3
caaacacacagacgcguaaaau

SEQ ID NO: 3964438 - RNA, 13 nt, Human herpesvirus 3
caaacagcaccaa

SEQ ID NO: 3964439 - RNA, 17 nt, Human herpesvirus 3
caaaccguuuguuuuga

SEQ ID NO: 3964440 - RNA, 22 nt, Human herpesvirus 3
caaccaauugguauacacaccc

SEQ ID NO: 3964441 - RNA, 19 nt, Human herpesvirus 3
caacgcuuugaucuucaag

SEQ ID NO: 3964442 - RNA, 15 nt, Human herpesvirus 3
caacgucccaaagcg

SEQ ID NO: 3964443 - RNA, 16 nt, Human herpesvirus 3
caacucuuuucccaaa

SEQ ID NO: 3964444 - RNA, 15 nt, Human herpesvirus 3
caagaaaccauguuu

SEQ ID NO: 3964445 - RNA, 13 nt, Human herpesvirus 3
caaugaaacagua

SEQ ID NO: 3964446 - RNA, 12 nt, Human herpesvirus 3
caauuaaagccc

SEQ ID NO: 3964447 - RNA, 15 nt, Human herpesvirus 3
caauugucuguauau

SEQ ID NO: 3964448 - RNA, 13 nt, Human herpesvirus 3
cacagaacggucu

SEQ ID NO: 3964449 - RNA, 13 nt, Human herpesvirus 3
caccucggccgcu

SEQ ID NO: 3964450 - RNA, 18 nt, Human herpesvirus 3
cagacaagcuuauuuuua

SEQ ID NO: 3964451 - RNA, 23 nt, Human herpesvirus 3
cagacaguggcggauaacugccu

SEQ ID NO: 3964452 - RNA, 23 nt, Human herpesvirus 3
cagacuccccccgucacacacac

SEQ ID NO: 3964453 - RNA, 16 nt, Human herpesvirus 3
cagagacucugcgaug

SEQ ID NO: 3964454 - RNA, 20 nt, Human herpesvirus 3
cagauguacacccagcuguc

SEQ ID NO: 3964455 - RNA, 12 nt, Human herpesvirus 3
cagccgcucgcu

SEQ ID NO: 3964456 - RNA, 18 nt, Human herpesvirus 3
caggcgcguuuguuuguc

SEQ ID NO: 3964457 - RNA, 14 nt, Human herpesvirus 3
cagguuauccaacu

SEQ ID NO: 3964458 - RNA, 13 nt, Human herpesvirus 3
cauaacaccgcua

SEQ ID NO: 3964459 - RNA, 13 nt, Human herpesvirus 3
gauaauguccuag

SEQ ID NO: 3964460 - RNA, 20 nt, Human herpesvirus 3
gauacacauaugcacgcauc

SEQ ID NO: 3964461 - RNA, 21 nt, Human herpesvirus 3
gaucccgccgucgcgcccacc

SEQ ID NO: 3964462 - RNA, 21 nt, Human herpesvirus 3
gaucgucguuuaaagccccuc

SEQ ID NO: 3964463 - RNA, 16 nt, Human herpesvirus 3
gaugaaauaguuucau

SEQ ID NO: 3964464 - RNA, 16 nt, Human herpesvirus 3
gaugauucagacgacu

SEQ ID NO: 3964465 - RNA, 23 nt, Human herpesvirus 3
gauggcaccacagucucuguuug

SEQ ID NO: 3964466 - RNA, 22 nt, Human herpesvirus 3
gauuauauacguagaauuuaca

SEQ ID NO: 3964467 - RNA, 20 nt, Human herpesvirus 3
gauucaaguaaauaugugca

SEQ ID NO: 3964468 - RNA, 21 nt, Human herpesvirus 3
gauuuucacaccgaugaagac

SEQ ID NO: 3964469 - RNA, 23 nt, Human herpesvirus 3
gcaacuacuuacaacccccgcgg

SEQ ID NO: 3964470 - RNA, 20 nt, Human herpesvirus 3
gcauuaccgcaaaucuuggc

SEQ ID NO: 3964471 - RNA, 16 nt, Human herpesvirus 3
gcccacacaaucagaa

SEQ ID NO: 3964472 - RNA, 19 nt, Human herpesvirus 3
gcccacacgcgggugagug

SEQ ID NO: 3964473 - RNA, 19 nt, Human herpesvirus 3
gccgcucgcugagcuccag

SEQ ID NO: 3964474 - RNA, 14 nt, Human herpesvirus 3
gccgcuucccgaaa

SEQ ID NO: 3964475 - RNA, 21 nt, Human herpesvirus 3
gccgucgcgcccaccucggcc

SEQ ID NO: 3964476 - RNA, 18 nt, Human herpesvirus 3
gccgugcggucucccgga

SEQ ID NO: 3964477 - RNA, 13 nt, Human herpesvirus 3
gccugcaagcggu

SEQ ID NO: 3964478 - RNA, 19 nt, Human herpesvirus 3
gccuucggacggaugugcg

SEQ ID NO: 3964479 - RNA, 21 nt, Human herpesvirus 3
gccuucuguuuguuuaacacg

SEQ ID NO: 3964480 - RNA, 18 nt, Human herpesvirus 3
gcgaacgugauuugccca

SEQ ID NO: 3964481 - RNA, 20 nt, Human herpesvirus 3
gcgacgguauauuacaaaga

SEQ ID NO: 3964482 - RNA, 15 nt, Human herpesvirus 3
gcgcccaccucggcc

SEQ ID NO: 3964483 - RNA, 23 nt, Human herpesvirus 3
gcgcguuuguuugucucgguuau

SEQ ID NO: 3964484 - RNA, 19 nt, Human herpesvirus 3
gcggaacgguuuuuaugaa

SEQ ID NO: 3964485 - RNA, 13 nt, Human herpesvirus 3
gcgugguuauuac

SEQ ID NO: 3964486 - RNA, 16 nt, Human herpesvirus 3
gcguguuaaacacugu

SEQ ID NO: 3964487 - RNA, 12 nt, Human herpesvirus 3
gcucaauacuug

SEQ ID NO: 3964488 - RNA, 12 nt, Human herpesvirus 3
gcucacagagcu

SEQ ID NO: 3964489 - RNA, 13 nt, Human herpesvirus 3
gcuccguguaugu

SEQ ID NO: 3964490 - RNA, 12 nt, Human herpesvirus 3
gcucucaugaac

SEQ ID NO: 3964491 - RNA, 12 nt, Human herpesvirus 3
gcugagcuccag

SEQ ID NO: 3964492 - RNA, 16 nt, Human herpesvirus 3
gcuguauugagaaaac

SEQ ID NO: 3964493 - RNA, 15 nt, Human herpesvirus 3
gcuucccgaaagccc

SEQ ID NO: 3964494 - RNA, 23 nt, Human herpesvirus 3
ggaccggcgucaggucugucaug

SEQ ID NO: 3964495 - RNA, 19 nt, Human herpesvirus 3
ggacuguuuguuguuaaua

SEQ ID NO: 3964496 - RNA, 19 nt, Human herpesvirus 3
ggcaccguagaaccgacug

SEQ ID NO: 3964497 - RNA, 19 nt, Human herpesvirus 3
ggccgcuacccgaaagccc

SEQ ID NO: 3964498 - RNA, 19 nt, Human herpesvirus 3
ggccgcuucccgaaagccc

SEQ ID NO: 3964499 - RNA, 15 nt, Human herpesvirus 3
ggcgaggacuccaca

SEQ ID NO: 3964500 - RNA, 13 nt, Human herpesvirus 3
ggcgauggccguc

SEQ ID NO: 3964501 - RNA, 22 nt, Human herpesvirus 3
ggcgcccggcggaccccgggag

SEQ ID NO: 3964502 - RNA, 18 nt, Human herpesvirus 3
ggcggaagauacaggcaa

SEQ ID NO: 3964503 - RNA, 13 nt, Human herpesvirus 3
ggcggaccccggg

SEQ ID NO: 3964504 - RNA, 22 nt, Human herpesvirus 3
ggcgggcuggucggaccccccc

SEQ ID NO: 3964505 - RNA, 14 nt, Human herpesvirus 3
ggcuucaccagagu

SEQ ID NO: 3964506 - RNA, 13 nt, Human herpesvirus 3
ggggguacaguug

SEQ ID NO: 3964507 - RNA, 19 nt, Human herpesvirus 3
ggguaaaacacacaccaga

SEQ ID NO: 3964508 - RNA, 19 nt, Human herpesvirus 3
ggucauuuccacaaccagg

SEQ ID NO: 3964509 - RNA, 14 nt, Human herpesvirus 3
ggucgccuguaaua

SEQ ID NO: 3964510 - RNA, 19 nt, Human herpesvirus 3
ggucucuccaagcucguuu

SEQ ID NO: 3964511 - RNA, 16 nt, Human herpesvirus 3
ggugacguuccggggu

SEQ ID NO: 3964512 - RNA, 23 nt, Human herpesvirus 3
ggugagcacccgggcggugaaua

SEQ ID NO: 3964513 - RNA, 17 nt, Human herpesvirus 3
gguguucuauuucccaa

SEQ ID NO: 3964514 - RNA, 13 nt, Human herpesvirus 3
gguucggugauca

SEQ ID NO: 3964515 - RNA, 19 nt, Human herpesvirus 3
gguugcguuucccagagac

SEQ ID NO: 3964516 - RNA, 21 nt, Human herpesvirus 3
guacaauacguaaaugucacu

SEQ ID NO: 3964517 - RNA, 12 nt, Human herpesvirus 3
guagagcccaca

SEQ ID NO: 3964518 - RNA, 13 nt, Human herpesvirus 3
gucccaggucggc

SEQ ID NO: 3964519 - RNA, 13 nt, Human herpesvirus 3
gucgcgcccaccu

SEQ ID NO: 3964520 - RNA, 13 nt, Human herpesvirus 3
gugaaagagcugu

SEQ ID NO: 3964521 - RNA, 14 nt, Human herpesvirus 3
gugacagacuuugu

SEQ ID NO: 3964522 - RNA, 23 nt, Human herpesvirus 3
gugagcgccacuggcgcgcggac

SEQ ID NO: 3964523 - RNA, 19 nt, Human herpesvirus 3
gugcauaacguugcgguga

SEQ ID NO: 3964524 - RNA, 16 nt, Human herpesvirus 3
guguggauuauaucca

SEQ ID NO: 3964525 - RNA, 15 nt, Human herpesvirus 3
guguucauaacaccg

SEQ ID NO: 3964526 - RNA, 16 nt, Human herpesvirus 3
guguucuaaaacacug

SEQ ID NO: 3964527 - RNA, 12 nt, Human herpesvirus 3
guuagacagaga

SEQ ID NO: 3964528 - RNA, 15 nt, Human herpesvirus 3
guuauacuacuuauu

SEQ ID NO: 3964529 - RNA, 17 nt, Human herpesvirus 3
guuauuguauauacaac

SEQ ID NO: 3964530 - RNA, 14 nt, Human herpesvirus 3
guuccguuuggaaa

SEQ ID NO: 3964531 - RNA, 18 nt, Human herpesvirus 3
guuuaucccccuucaaac

SEQ ID NO: 3964532 - RNA, 17 nt, Human herpesvirus 3
guuuccgaauaaaugug

SEQ ID NO: 3964533 - RNA, 18 nt, Human herpesvirus 3
guuucugggcgcccggcg

SEQ ID NO: 3964534 - RNA, 17 nt, Human herpesvirus 3
guuuuacgucugcccac

SEQ ID NO: 3964535 - RNA, 23 nt, Human herpesvirus 3
uaaaaaauaccuuuuucaugcuu

SEQ ID NO: 3964536 - RNA, 21 nt, Human herpesvirus 3
uaaacguauucuauuaacaau

SEQ ID NO: 3964537 - RNA, 15 nt, Human herpesvirus 3
uaaagguuaaauuua

SEQ ID NO: 3964538 - RNA, 19 nt, Human herpesvirus 3
uaaauccguaucucggagc

SEQ ID NO: 3964539 - RNA, 15 nt, Human herpesvirus 3
uaacagugccagugc

SEQ ID NO: 3964540 - RNA, 16 nt, Human herpesvirus 3
uaagccucuguacaac

SEQ ID NO: 3964541 - RNA, 15 nt, Human herpesvirus 3
uaaggggggggcgcg

SEQ ID NO: 3964542 - RNA, 17 nt, Human herpesvirus 3
uaauaaaaagucacuau

SEQ ID NO: 3964543 - RNA, 18 nt, Human herpesvirus 3
uaaugcaacccugucauc

SEQ ID NO: 3964544 - RNA, 14 nt, Human herpesvirus 3
uacaaguacaaccc

SEQ ID NO: 3964545 - RNA, 19 nt, Human herpesvirus 3
uacaaucgucuuuuaaauu

SEQ ID NO: 3964546 - RNA, 11 nt, Human herpesvirus 3
uacacaacacc

SEQ ID NO: 3964547 - RNA, 13 nt, Human herpesvirus 3
uacauaaauacua

SEQ ID NO: 3964548 - RNA, 21 nt, Human herpesvirus 3
uacaucggcauuaacaacgcg

SEQ ID NO: 3964549 - RNA, 18 nt, Human herpesvirus 3
uaccauauauggacaucc

SEQ ID NO: 3964550 - RNA, 15 nt, Human herpesvirus 3
uaccucugucagguu

SEQ ID NO: 3964551 - RNA, 14 nt, Human herpesvirus 3
uacgaccaaacauu

SEQ ID NO: 3964552 - RNA, 22 nt, Human herpesvirus 3
uacgacuuuuaaacgccagugg

SEQ ID NO: 3964553 - RNA, 14 nt, Human herpesvirus 3
uacuacauugaaca

SEQ ID NO: 3964554 - RNA, 20 nt, Human herpesvirus 3
uagaaacgcgccaaacauug

SEQ ID NO: 3964555 - RNA, 19 nt, Human herpesvirus 3
uagacuguucuacugacuu

SEQ ID NO: 3964556 - RNA, 16 nt, Human herpesvirus 3
uagauuuaaaaccaau

SEQ ID NO: 3964557 - RNA, 16 nt, Human herpesvirus 3
uaggggaugggggucg

SEQ ID NO: 3964558 - RNA, 17 nt, Human herpesvirus 3
uagguucggcaaaucua

SEQ ID NO: 3964559 - RNA, 20 nt, Human herpesvirus 3
uaguccuuacccauaugacc

SEQ ID NO: 3964560 - RNA, 22 nt, Human herpesvirus 3
uauaaaccgauuaugucaacau

SEQ ID NO: 3964561 - RNA, 20 nt, Human herpesvirus 3
uauaaacggccgaaaacgga

SEQ ID NO: 3964562 - RNA, 13 nt, Human herpesvirus 3
uauaacugcuaca

SEQ ID NO: 3964563 - RNA, 18 nt, Human herpesvirus 3
uauaagggagucuacaau

SEQ ID NO: 3964564 - RNA, 17 nt, Human herpesvirus 3
uauaccuuaacucaacc

SEQ ID NO: 3964565 - RNA, 14 nt, Human herpesvirus 3
uauagucaaauuca

SEQ ID NO: 3964566 - RNA, 14 nt, Human herpesvirus 3
uauaugucaacauu

SEQ ID NO: 3964567 - RNA, 16 nt, Human herpesvirus 3
uaucaaguggucguuu

SEQ ID NO: 3964568 - RNA, 14 nt, Human herpesvirus 3
uaucaauuguuuau

SEQ ID NO: 3964569 - RNA, 20 nt, Human herpesvirus 3
uaucaguugaaccaaaucca

SEQ ID NO: 3964570 - RNA, 17 nt, Human herpesvirus 3
uauuacauucauaaaag

SEQ ID NO: 3964571 - RNA, 23 nt, Human herpesvirus 3
uauuauacauaaccgauuuaccg

SEQ ID NO: 3964572 - RNA, 14 nt, Human herpesvirus 3
uauuuuugucuacc

SEQ ID NO: 3964573 - RNA, 22 nt, Human herpesvirus 3
ucaaaacauacuaauuuguauu

SEQ ID NO: 3964574 - RNA, 23 nt, Human herpesvirus 3
aagguuaaauuuauaaaacacuc

SEQ ID NO: 3964575 - RNA, 19 nt, Human herpesvirus 3
aaguaugcagucgggucau

SEQ ID NO: 3964576 - RNA, 22 nt, Human herpesvirus 3
aagucgcaacgcugcugacaaa

SEQ ID NO: 3964577 - RNA, 19 nt, Human herpesvirus 3
aagucucaaugaaacagua

SEQ ID NO: 3964578 - RNA, 18 nt, Human herpesvirus 3
aaguguucuaaaacacug

SEQ ID NO: 3964579 - RNA, 23 nt, Human herpesvirus 3
aaguuuauacguacaucuuucag

SEQ ID NO: 3964580 - RNA, 13 nt, Human herpesvirus 3
aauaaaaaacagu

SEQ ID NO: 3964581 - RNA, 20 nt, Human herpesvirus 3
aauaaaacguuuuaaaagcc

SEQ ID NO: 3964582 - RNA, 14 nt, Human herpesvirus 3
aauaaccccccccc

SEQ ID NO: 3964583 - RNA, 18 nt, Human herpesvirus 3
aauacuaagccucuguac

SEQ ID NO: 3964584 - RNA, 19 nt, Human herpesvirus 3
aauaugcuauauaacgccu

SEQ ID NO: 3964585 - RNA, 18 nt, Human herpesvirus 3
aauauuuuguuaauacag

SEQ ID NO: 3964586 - RNA, 20 nt, Human herpesvirus 3
aaucggagacucguggucag

SEQ ID NO: 3964587 - RNA, 16 nt, Human herpesvirus 3
aaugguucauuguuuu

SEQ ID NO: 3964588 - RNA, 16 nt, Human herpesvirus 3
aauucgugugcaauaa

SEQ ID NO: 3964589 - RNA, 15 nt, Human herpesvirus 3
aauugcgcgaguucc

SEQ ID NO: 3964590 - RNA, 15 nt, Human herpesvirus 3
aauugggggauuugg

SEQ ID NO: 3964591 - RNA, 19 nt, Human herpesvirus 3
acaaauuucugauguuccc

SEQ ID NO: 3964592 - RNA, 12 nt, Human herpesvirus 3
acaacauuuaaa

SEQ ID NO: 3964593 - RNA, 19 nt, Human herpesvirus 3
acacuuggcguguuaaaca

SEQ ID NO: 3964594 - RNA, 23 nt, Human herpesvirus 3
acacuuggcguguuaaacacugu

SEQ ID NO: 3964595 - RNA, 21 nt, Human herpesvirus 3
acaucgaucaucgaaaagacu

SEQ ID NO: 3964596 - RNA, 18 nt, Human herpesvirus 3
acaucgugcuugaauugc

SEQ ID NO: 3964597 - RNA, 22 nt, Human herpesvirus 3
acaugcacugcaucuggagaac

SEQ ID NO: 3964598 - RNA, 19 nt, Human herpesvirus 3
acccaguacguugcauaac

SEQ ID NO: 3964599 - RNA, 13 nt, Human herpesvirus 3
acccgguauuaug

SEQ ID NO: 3964600 - RNA, 22 nt, Human herpesvirus 3
acccuggacauugcggauccca

SEQ ID NO: 3964601 - RNA, 19 nt, Human herpesvirus 3
acccuugccgcguggaaca

SEQ ID NO: 3964602 - RNA, 18 nt, Human herpesvirus 3
accgaacauggacugucg

SEQ ID NO: 3964603 - RNA, 20 nt, Human herpesvirus 3
acgccagccagcaauguuuu

SEQ ID NO: 3964604 - RNA, 14 nt, Human herpesvirus 3
acgccgagcgugua

SEQ ID NO: 3964605 - RNA, 23 nt, Human herpesvirus 3
acggauauuaacacgauuaacgu

SEQ ID NO: 3964606 - RNA, 22 nt, Human herpesvirus 3
acguaauuugccccaaaccacu

SEQ ID NO: 3964607 - RNA, 16 nt, Human herpesvirus 3
acguagcaaagcuaca

SEQ ID NO: 3964608 - RNA, 16 nt, Human herpesvirus 3
acgugaggaaaaagag

SEQ ID NO: 3964609 - RNA, 23 nt, Human herpesvirus 3
acuagcuaccguuagaggcuuaa

SEQ ID NO: 3964610 - RNA, 17 nt, Human herpesvirus 3
acucacguuuguguugu

SEQ ID NO: 3964611 - RNA, 21 nt, Human herpesvirus 3
acugaauuauauaccucggcc

SEQ ID NO: 3964612 - RNA, 16 nt, Human herpesvirus 3
acugcagauacagcau

SEQ ID NO: 3964613 - RNA, 17 nt, Human herpesvirus 3
acuguacagcugagaug

SEQ ID NO: 3964614 - RNA, 17 nt, Human herpesvirus 3
acuuauccaacaaauug

SEQ ID NO: 3964615 - RNA, 18 nt, Human herpesvirus 3
acuuggucacaaauuacu

SEQ ID NO: 3964616 - RNA, 18 nt, Human herpesvirus 3
acuuguaaacccccaagc

SEQ ID NO: 3964617 - RNA, 18 nt, Human herpesvirus 3
acuuuguuugcugcagac

SEQ ID NO: 3964618 - RNA, 21 nt, Human herpesvirus 3
agaaacguuuuuaguuuuuau

SEQ ID NO: 3964619 - RNA, 20 nt, Human herpesvirus 3
agaaacuauccgacagagaa

SEQ ID NO: 3964620 - RNA, 20 nt, Human herpesvirus 3
agaaacuuaauacagaguca

SEQ ID NO: 3964621 - RNA, 14 nt, Human herpesvirus 3
agaagggggauuua

SEQ ID NO: 3964622 - RNA, 22 nt, Human herpesvirus 3
agacaguggcggauaacugccu

SEQ ID NO: 3964623 - RNA, 21 nt, Human herpesvirus 3
agacaucccucguuuauggaa

SEQ ID NO: 3964624 - RNA, 21 nt, Human herpesvirus 3
agacuuaguacgauagaauuu

SEQ ID NO: 3964625 - RNA, 18 nt, Human herpesvirus 3
agaguguuuaacaaccau

SEQ ID NO: 3964626 - RNA, 22 nt, Human herpesvirus 3
agaguuuucuccaaaagaacaa

SEQ ID NO: 3964627 - RNA, 19 nt, Human herpesvirus 3
agaugaucugguaaauguu

SEQ ID NO: 3964628 - RNA, 22 nt, Human herpesvirus 3
agaugguuaauaauagugacaa

SEQ ID NO: 3964629 - RNA, 21 nt, Human herpesvirus 3
agauucaagacuaacauuuau

SEQ ID NO: 3964630 - RNA, 19 nt, Human herpesvirus 3
agauucgccuuuuacauga

SEQ ID NO: 3964631 - RNA, 15 nt, Human herpesvirus 3
agcaacguuuaagaa

SEQ ID NO: 3964632 - RNA, 23 nt, Human herpesvirus 3
agccaacgucgccaucuggagua

SEQ ID NO: 3964633 - RNA, 16 nt, Human herpesvirus 3
agccagcaauguuuua

SEQ ID NO: 3964634 - RNA, 22 nt, Human herpesvirus 3
agccgccagauguacacccagc

SEQ ID NO: 3964635 - RNA, 20 nt, Human herpesvirus 3
agcugccgucaaugcaacua

SEQ ID NO: 3964636 - RNA, 22 nt, Human herpesvirus 3
aggugggguguuaaauaguuuu

SEQ ID NO: 3964637 - RNA, 14 nt, Human herpesvirus 3
aguaacuuaacaaa

SEQ ID NO: 3964638 - RNA, 13 nt, Human herpesvirus 3
aguccaguggaca

SEQ ID NO: 3964639 - RNA, 16 nt, Human herpesvirus 3
aguccccuccuuuucu

SEQ ID NO: 3964640 - RNA, 19 nt, Human herpesvirus 3
aguccccuccuuuucucgu

SEQ ID NO: 3964641 - RNA, 23 nt, Human herpesvirus 3
aguggaccuuugcaaccugguca

SEQ ID NO: 3964642 - RNA, 18 nt, Human herpesvirus 3
aguuagcauccaaauuaa

SEQ ID NO: 3964643 - RNA, 15 nt, Human herpesvirus 3
aguuuuagcgguggu

SEQ ID NO: 3964644 - RNA, 12 nt, Human herpesvirus 3
auaaagggaugg

SEQ ID NO: 3964645 - RNA, 14 nt, Human herpesvirus 3
auaacugccugucg

SEQ ID NO: 3964646 - RNA, 13 nt, Human herpesvirus 3
auaagggagucua

SEQ ID NO: 3964647 - RNA, 17 nt, Human herpesvirus 3
auaauaugauacauaaa

SEQ ID NO: 3964648 - RNA, 20 nt, Human herpesvirus 3
auaauuuguccauaucgcaa

SEQ ID NO: 3964649 - RNA, 15 nt, Human herpesvirus 3
auacacauccuggac

SEQ ID NO: 3964650 - RNA, 17 nt, Human herpesvirus 3
auacacauccuggacac

SEQ ID NO: 3964651 - RNA, 15 nt, Human herpesvirus 3
auacaccggauaaaa

SEQ ID NO: 3964652 - RNA, 14 nt, Human herpesvirus 3
auacguaaauguca

SEQ ID NO: 3964653 - RNA, 14 nt, Human herpesvirus 3
auacuaauuuguau

SEQ ID NO: 3964654 - RNA, 17 nt, Human herpesvirus 3
auacuaauuuguauuuu

SEQ ID NO: 3964655 - RNA, 12 nt, Human herpesvirus 3
auagcugucacu

SEQ ID NO: 3964656 - RNA, 13 nt, Human herpesvirus 3
auaggugucuuca

SEQ ID NO: 3964657 - RNA, 21 nt, Human herpesvirus 3
auauaaaagaagccccaacga

SEQ ID NO: 3964658 - RNA, 15 nt, Human herpesvirus 3
auaucccaaggcaaa

SEQ ID NO: 3964659 - RNA, 14 nt, Human herpesvirus 3
auaucgcaauguuu

SEQ ID NO: 3964660 - RNA, 15 nt, Human herpesvirus 3
auaugauucaaguaa

SEQ ID NO: 3964661 - RNA, 21 nt, Human herpesvirus 3
auauuaacacgauuaacguug

SEQ ID NO: 3964662 - RNA, 14 nt, Human herpesvirus 3
aucacguccggguu

SEQ ID NO: 3964663 - RNA, 21 nt, Human herpesvirus 3
auccauuaaagagccauuucc

SEQ ID NO: 3964664 - RNA, 21 nt, Human herpesvirus 3
auccucgcgguccguuucaua

SEQ ID NO: 3964665 - RNA, 20 nt, Human herpesvirus 3
aucggccguuauauuuuaca

SEQ ID NO: 3964666 - RNA, 18 nt, Human herpesvirus 3
aucguaguaaaacggaac

SEQ ID NO: 3964667 - RNA, 14 nt, Human herpesvirus 3
aucguuuaacaaaa

SEQ ID NO: 3964668 - RNA, 17 nt, Human herpesvirus 3
aucuauuaacaggaccu

SEQ ID NO: 3964669 - RNA, 18 nt, Human herpesvirus 3
aucucuucauauguaauu

SEQ ID NO: 3964670 - RNA, 13 nt, Human herpesvirus 3
aucugguaaaugu

SEQ ID NO: 3964671 - RNA, 14 nt, Human herpesvirus 3
augaaaucagagaa

SEQ ID NO: 3964672 - RNA, 17 nt, Human herpesvirus 3
augcaacccugucauca

SEQ ID NO: 3964673 - RNA, 22 nt, Human herpesvirus 3
augcaccgguccaacacuccgc

SEQ ID NO: 3964674 - RNA, 15 nt, Human herpesvirus 3
augccauuugagaua

SEQ ID NO: 3964675 - RNA, 20 nt, Human herpesvirus 3
augccuggcuuaacagugcc

SEQ ID NO: 3964676 - RNA, 15 nt, Human herpesvirus 3
augcuuguaaaacau

SEQ ID NO: 3964677 - RNA, 16 nt, Human herpesvirus 3
augcuugucaaaacau

SEQ ID NO: 3964678 - RNA, 16 nt, Human herpesvirus 3
auggaguucaaaagaa

SEQ ID NO: 3964679 - RNA, 13 nt, Human herpesvirus 3
auguacacccagc

SEQ ID NO: 3964680 - RNA, 14 nt, Human herpesvirus 3
augucacaaaucau

SEQ ID NO: 3964681 - RNA, 22 nt, Human herpesvirus 3
augugauacaaugagcgguggu

SEQ ID NO: 3964682 - RNA, 20 nt, Human herpesvirus 3
auguuuuuggagcaacguuu

SEQ ID NO: 3964683 - RNA, 15 nt, Human herpesvirus 3
auuagaucuaacguu

SEQ ID NO: 3964684 - RNA, 15 nt, Human herpesvirus 3
auuuaaauaaaaaac

SEQ ID NO: 3964685 - RNA, 15 nt, Human herpesvirus 3
auuuaggaaccgaac

SEQ ID NO: 3964686 - RNA, 17 nt, Human herpesvirus 3
auuugccccaaaccacu

SEQ ID NO: 3964687 - RNA, 20 nt, Human herpesvirus 3
auuuggaaugggagcucuuu

SEQ ID NO: 3964688 - RNA, 21 nt, Human herpesvirus 3
uaugaaaaaagugucugucug

SEQ ID NO: 3964689 - RNA, 16 nt, Human herpesvirus 3
uaugccacauuuaccg

SEQ ID NO: 3964690 - RNA, 19 nt, Human herpesvirus 3
uaugcgcauggaauuaaug

SEQ ID NO: 3964691 - RNA, 17 nt, Human herpesvirus 3
uauguaacguuuguaaa

SEQ ID NO: 3964692 - RNA, 14 nt, Human herpesvirus 3
uauguacauuaaag

SEQ ID NO: 3964693 - RNA, 23 nt, Human herpesvirus 3
uauguggggugcuuguuguauuu

SEQ ID NO: 3964694 - RNA, 13 nt, Human herpesvirus 3
uauuacauuuaau

SEQ ID NO: 3964695 - RNA, 18 nt, Human herpesvirus 3
uauuaucgggcgacaauc

SEQ ID NO: 3964696 - RNA, 19 nt, Human herpesvirus 3
uauucgcguaugaaaugua

SEQ ID NO: 3964697 - RNA, 13 nt, Human herpesvirus 3
uauuucuccggga

SEQ ID NO: 3964698 - RNA, 22 nt, Human herpesvirus 3
ucaaaccaauaucuuugcaauu

SEQ ID NO: 3964699 - RNA, 19 nt, Human herpesvirus 3
ucacgcgucuuguuuuuau

SEQ ID NO: 3964700 - RNA, 16 nt, Human herpesvirus 3
ucaggguuuaacauuu

SEQ ID NO: 3964701 - RNA, 13 nt, Human herpesvirus 3
ucaggucugucau

SEQ ID NO: 3964702 - RNA, 16 nt, Human herpesvirus 3
ucaucuggguggcagc

SEQ ID NO: 3964703 - RNA, 13 nt, Human herpesvirus 3
uccacacaacgcc

SEQ ID NO: 3964704 - RNA, 14 nt, Human herpesvirus 3
uccacugcauuuac

SEQ ID NO: 3964705 - RNA, 23 nt, Human herpesvirus 3
uccauccugaccgauccccgggu

SEQ ID NO: 3964706 - RNA, 15 nt, Human herpesvirus 3
ucccccgaucucugg

SEQ ID NO: 3964707 - RNA, 18 nt, Human herpesvirus 3
uccccguucgcugggugu

SEQ ID NO: 3964708 - RNA, 21 nt, Human herpesvirus 3
ucccgccgucgcgcccaccuc

SEQ ID NO: 3964709 - RNA, 22 nt, Human herpesvirus 3
ucccgccgucgcgcccaccucg

SEQ ID NO: 3964710 - RNA, 15 nt, Human herpesvirus 3
uccgauacccuggac

SEQ ID NO: 3964711 - RNA, 17 nt, Human herpesvirus 3
uccguuuaucccccuuc

SEQ ID NO: 3964712 - RNA, 17 nt, Human herpesvirus 3
uccuauauacagugcuu

SEQ ID NO: 3964713 - RNA, 16 nt, Human herpesvirus 3
ucgccaugguuucaaa

SEQ ID NO: 3964714 - RNA, 15 nt, Human herpesvirus 3
ucggaugacuuugca

SEQ ID NO: 3964715 - RNA, 13 nt, Human herpesvirus 3
ucguauauacaug

SEQ ID NO: 3964716 - RNA, 17 nt, Human herpesvirus 3
ucuaacccggugacaga

SEQ ID NO: 3964717 - RNA, 22 nt, Human herpesvirus 3
ucuacaauauuguagaacuaac

SEQ ID NO: 3964718 - RNA, 13 nt, Human herpesvirus 3
ucuacgcauuuac

SEQ ID NO: 3964719 - RNA, 21 nt, Human herpesvirus 3
ucucaucaaagucaaagucuu

SEQ ID NO: 3964720 - RNA, 23 nt, Human herpesvirus 3
ucucuuauauauguaacguuugu

SEQ ID NO: 3964721 - RNA, 12 nt, Human herpesvirus 3
ugaaaaaagugu

SEQ ID NO: 3964722 - RNA, 18 nt, Human herpesvirus 3
ugaagauaggguguauac

SEQ ID NO: 3964723 - RNA, 21 nt, Human herpesvirus 3
ugaaucguugcggguacaaua

SEQ ID NO: 3964724 - RNA, 14 nt, Human herpesvirus 3
ugaauuugcuacca

SEQ ID NO: 3964725 - RNA, 13 nt, Human herpesvirus 3
ugacaaaaugaca

SEQ ID NO: 3964726 - RNA, 16 nt, Human herpesvirus 3
ugaccgauccccgggu

SEQ ID NO: 3964727 - RNA, 23 nt, Human herpesvirus 3
ugagggugaccggcgggguccca

SEQ ID NO: 3964728 - RNA, 19 nt, Human herpesvirus 3
ugaucaccgaaccggggca

SEQ ID NO: 3964729 - RNA, 22 nt, Human herpesvirus 3
ugauucaagugagguguccugu

SEQ ID NO: 3964730 - RNA, 12 nt, Human herpesvirus 3
ugcauuggaagu

SEQ ID NO: 3964731 - RNA, 23 nt, Human herpesvirus 3
ugcuauagccgucagaagguuca

SEQ ID NO: 3964732 - RNA, 15 nt, Human herpesvirus 3
uggaucagaaagauu

SEQ ID NO: 3964733 - RNA, 23 nt, Human herpesvirus 3
ugggucagaaccgacccaggaca

SEQ ID NO: 3964734 - RNA, 16 nt, Human herpesvirus 3
uggguuuuuagaauuu

SEQ ID NO: 3964735 - RNA, 11 nt, Human herpesvirus 3
ugguuaacacc

SEQ ID NO: 3964736 - RNA, 18 nt, Human herpesvirus 3
uguaaaaaccauggacag

SEQ ID NO: 3964737 - RNA, 15 nt, Human herpesvirus 3
uguaaaauaaaaucu

SEQ ID NO: 3964738 - RNA, 22 nt, Human herpesvirus 3
uguacaacacaaagggccucua

SEQ ID NO: 3964739 - RNA, 23 nt, Human herpesvirus 3
uguauguggagcguacugcagau

SEQ ID NO: 3964740 - RNA, 12 nt, Human herpesvirus 3
uguauguuuuua

SEQ ID NO: 3964741 - RNA, 15 nt, Human herpesvirus 3
uguauuaaaucgacu

SEQ ID NO: 3964742 - RNA, 15 nt, Human herpesvirus 3
uguauuauaugucac

SEQ ID NO: 3964743 - RNA, 14 nt, Human herpesvirus 3
uguauucuggugau

SEQ ID NO: 3964744 - RNA, 14 nt, Human herpesvirus 3
ugucugucugugcg

SEQ ID NO: 3964745 - RNA, 11 nt, Human herpesvirus 3
ugugacaaauu

SEQ ID NO: 3964746 - RNA, 17 nt, Human herpesvirus 3
ugugguccauuaaaagu

SEQ ID NO: 3964747 - RNA, 14 nt, Human herpesvirus 3
uguuaaacaaacag

SEQ ID NO: 3964748 - RNA, 14 nt, Human herpesvirus 3
uguucuauuuccca

SEQ ID NO: 3964749 - RNA, 17 nt, Human herpesvirus 3
uguucucggucuggaau

SEQ ID NO: 3964750 - RNA, 15 nt, Human herpesvirus 3
uguugauauuuucca

SEQ ID NO: 3964751 - RNA, 16 nt, Human herpesvirus 3
uguuuaagaacaucuu

SEQ ID NO: 3964752 - RNA, 14 nt, Human herpesvirus 3
uguuuuaauuccaa

SEQ ID NO: 3964753 - RNA, 14 nt, Human herpesvirus 3
uuaaauacacccgc

SEQ ID NO: 3964754 - RNA, 21 nt, Human herpesvirus 3
uuaaauaguuuugguacauua

SEQ ID NO: 3964755 - RNA, 19 nt, Human herpesvirus 3
uuaacauaccccaggccuu

SEQ ID NO: 3964756 - RNA, 14 nt, Human herpesvirus 3
uuaaugguucauug

SEQ ID NO: 3964757 - RNA, 20 nt, Human herpesvirus 3
uuaauucagggcuuacguuu

SEQ ID NO: 3964758 - RNA, 18 nt, Human herpesvirus 3
uuaauuccaauauuuugu

SEQ ID NO: 3964759 - RNA, 20 nt, Human herpesvirus 3
uuacacgggaaacuauucca

SEQ ID NO: 3964760 - RNA, 15 nt, Human herpesvirus 3
uuaccuuauguguua

SEQ ID NO: 3964761 - RNA, 21 nt, Human herpesvirus 3
uuaggguugggagaguggguc

SEQ ID NO: 3964762 - RNA, 20 nt, Human herpesvirus 3
uuaucccaacugauuacauu

SEQ ID NO: 3964763 - RNA, 23 nt, Human herpesvirus 3
uuaugaacgccugugaaauaacg

SEQ ID NO: 3964764 - RNA, 22 nt, Human herpesvirus 3
uuauuaccgguaccaugggaga

SEQ ID NO: 3964765 - RNA, 18 nt, Human herpesvirus 3
uucaugcuugucaaaaca

SEQ ID NO: 3964766 - RNA, 17 nt, Human herpesvirus 3
uuccacccccucuuaaa

SEQ ID NO: 3964767 - RNA, 21 nt, Human herpesvirus 3
uucccaacgcauaaccagcga

SEQ ID NO: 3964768 - RNA, 19 nt, Human herpesvirus 3
uucuacaccuuugcaugac

SEQ ID NO: 3964769 - RNA, 21 nt, Human herpesvirus 3
uugaaaacauagaccauguuu

SEQ ID NO: 3964770 - RNA, 10 nt, Human herpesvirus 3
uugaaccacu

SEQ ID NO: 3964771 - RNA, 15 nt, Human herpesvirus 3
uugcauuggaaguca

SEQ ID NO: 3964772 - RNA, 14 nt, Human herpesvirus 3
uugcgucuguuuug

SEQ ID NO: 3964773 - RNA, 11 nt, Human herpesvirus 3
uugcuggcugg

SEQ ID NO: 3964774 - RNA, 17 nt, Human herpesvirus 3
uugggggauuugggaga

SEQ ID NO: 3964775 - RNA, 21 nt, Human herpesvirus 3
uuguaaaccacucaacguuuu

SEQ ID NO: 3964776 - RNA, 20 nt, Human herpesvirus 3
uugucauaaaaacaagaagu

SEQ ID NO: 3964777 - RNA, 14 nt, Human herpesvirus 3
uuuacacuugaauc

SEQ ID NO: 3964778 - RNA, 18 nt, Human herpesvirus 3
uuuacaggccggaguguc

SEQ ID NO: 3964779 - RNA, 16 nt, Human herpesvirus 3
uuuagacguucaaaau

SEQ ID NO: 3964780 - RNA, 19 nt, Human herpesvirus 3
uuuaugaaaaaagugucug

SEQ ID NO: 3964781 - RNA, 20 nt, Human herpesvirus 3
uuuaugaaaaaagugucugu

SEQ ID NO: 3964782 - RNA, 21 nt, Human herpesvirus 3
uuucagcaaguuuaacauuuc

SEQ ID NO: 3964783 - RNA, 19 nt, Human herpesvirus 3
uuucauuaggaugaaaaga

SEQ ID NO: 3964784 - RNA, 11 nt, Human herpesvirus 3
uuucugggcgc

SEQ ID NO: 3964785 - RNA, 11 nt, Human herpesvirus 3
uuugaagccac

SEQ ID NO: 3964786 - RNA, 21 nt, Human herpesvirus 3
uuugaaguguucuaaaacacu

SEQ ID NO: 3964787 - RNA, 15 nt, Human herpesvirus 3
uuugcuuccccacac

SEQ ID NO: 3964788 - RNA, 19 nt, Human herpesvirus 3
uuugucuaccacuaagaac

SEQ ID NO: 3964789 - RNA, 13 nt, Human herpesvirus 3
uuuuuaauucagg

SEQ ID NO: 3964790 - RNA, 10 nt, Human herpesvirus 4 (Epstein-Barr virus)
aaaauucagu

SEQ ID NO: 3964791 - RNA, 14 nt, Human herpesvirus 4 (Epstein-Barr virus)
aaacaauuacagau

SEQ ID NO: 3964792 - RNA, 16 nt, Human herpesvirus 4 (Epstein-Barr virus)
aaaccagucuacgacc

SEQ ID NO: 3964793 - RNA, 15 nt, Human herpesvirus 4 (Epstein-Barr virus)
aaacucgacuucuga

SEQ ID NO: 3964794 - RNA, 15 nt, Human herpesvirus 4 (Epstein-Barr virus)
aaaggaagggggccc

SEQ ID NO: 3964795 - RNA, 10 nt, Human herpesvirus 4 (Epstein-Barr virus)
aaaggagaaa

SEQ ID NO: 3964796 - RNA, 16 nt, Human herpesvirus 4 (Epstein-Barr virus)
aaagggcauguggugg

SEQ ID NO: 3964797 - RNA, 16 nt, Human herpesvirus 4 (Epstein-Barr virus)
aaagucccgagcggcc

SEQ ID NO: 3964798 - RNA, 23 nt, Human herpesvirus 4 (Epstein-Barr virus)
aaaguguaacauuuaauguggga

SEQ ID NO: 3964799 - RNA, 16 nt, Human herpesvirus 4 (Epstein-Barr virus)
aacacucuuuuuucaa

SEQ ID NO: 3964800 - RNA, 11 nt, Human herpesvirus 4 (Epstein-Barr virus)
caccaccccac

SEQ ID NO: 3964801 - RNA, 17 nt, Human herpesvirus 4 (Epstein-Barr virus)
caccagucccaacaacu

SEQ ID NO: 3964802 - RNA, 13 nt, Human herpesvirus 4 (Epstein-Barr virus)
cacccaggcagcc

SEQ ID NO: 3964803 - RNA, 13 nt, Human herpesvirus 4 (Epstein-Barr virus)
caccccugugcag

SEQ ID NO: 3964804 - RNA, 17 nt, Human herpesvirus 4 (Epstein-Barr virus)
cacccgucccggguaca

SEQ ID NO: 3964805 - RNA, 21 nt, Human herpesvirus 4 (Epstein-Barr virus)
cacccuaaaacguaugaccuc

SEQ ID NO: 3964806 - RNA, 16 nt, Human herpesvirus 4 (Epstein-Barr virus)
caccggggaggccagg

SEQ ID NO: 3964807 - RNA, 16 nt, Human herpesvirus 4 (Epstein-Barr virus)
caccugcacagaucug

SEQ ID NO: 3964808 - RNA, 23 nt, Human herpesvirus 4 (Epstein-Barr virus)
caccugcacgagaccccugggcu

SEQ ID NO: 3964809 - RNA, 21 nt, Human herpesvirus 4 (Epstein-Barr virus)
cacgaccucgggagggacggg

SEQ ID NO: 3964810 - RNA, 15 nt, Human herpesvirus 4 (Epstein-Barr virus)
cacgagauggcccag

SEQ ID NO: 3964811 - RNA, 13 nt, Human herpesvirus 4 (Epstein-Barr virus)
cacgggccugggg

SEQ ID NO: 3964812 - RNA, 20 nt, Human herpesvirus 4 (Epstein-Barr virus)
cacguccccggccucccgcu

SEQ ID NO: 3964813 - RNA, 13 nt, Human herpesvirus 4 (Epstein-Barr virus)
cacuauauucucc

SEQ ID NO: 3964814 - RNA, 19 nt, Human herpesvirus 4 (Epstein-Barr virus)
cacucaggaagcuggccag

SEQ ID NO: 3964815 - RNA, 18 nt, Human herpesvirus 4 (Epstein-Barr virus)
cacucuggggucucaggc

SEQ ID NO: 3964816 - RNA, 20 nt, Human herpesvirus 4 (Epstein-Barr virus)
cacucuggggucucaggccu

SEQ ID NO: 3964817 - RNA, 21 nt, Human herpesvirus 4 (Epstein-Barr virus)
cacugauaauacgcccgacaa

SEQ ID NO: 3964818 - RNA, 22 nt, Human herpesvirus 4 (Epstein-Barr virus)
cacuggaugcaggaccuagaau

SEQ ID NO: 3964819 - RNA, 14 nt, Human herpesvirus 4 (Epstein-Barr virus)
cacugggacggggu

SEQ ID NO: 3964820 - RNA, 21 nt, Human herpesvirus 4 (Epstein-Barr virus)
cacugugcacucucucccccg

SEQ ID NO: 3964821 - RNA, 19 nt, Human herpesvirus 4 (Epstein-Barr virus)
cacuugugguucuccugau

SEQ ID NO: 3964822 - RNA, 16 nt, Human herpesvirus 4 (Epstein-Barr virus)
cagaaaaucgcagcag

SEQ ID NO: 3964823 - RNA, 13 nt, Human herpesvirus 4 (Epstein-Barr virus)
cagaagcccccaa

SEQ ID NO: 3964824 - RNA, 23 nt, Human herpesvirus 4 (Epstein-Barr virus)
cagacaugguguagacagauccc

SEQ ID NO: 3964825 - RNA, 19 nt, Human herpesvirus 4 (Epstein-Barr virus)
cagaccucugcacaacaca

SEQ ID NO: 3964826 - RNA, 16 nt, Human herpesvirus 4 (Epstein-Barr virus)
cagaccugugugcugu

SEQ ID NO: 3964827 - RNA, 17 nt, Human herpesvirus 4 (Epstein-Barr virus)
cagacucugcuuucugc

SEQ ID NO: 3964828 - RNA, 18 nt, Human herpesvirus 4 (Epstein-Barr virus)
cagagagccacauucugg

SEQ ID NO: 3964829 - RNA, 23 nt, Human herpesvirus 4 (Epstein-Barr virus)
cagagaggcgggaauggccgcca

SEQ ID NO: 3964830 - RNA, 14 nt, Human herpesvirus 4 (Epstein-Barr virus)
cagagccucugcca

SEQ ID NO: 3964831 - RNA, 17 nt, Human herpesvirus 4 (Epstein-Barr virus)
cagaggacacgcugguc

SEQ ID NO: 3964832 - RNA, 17 nt, Human herpesvirus 4 (Epstein-Barr virus)
cagaggaggccccggcc

SEQ ID NO: 3964833 - RNA, 15 nt, Human herpesvirus 4 (Epstein-Barr virus)
cagauccagggcccg

SEQ ID NO: 3964834 - RNA, 12 nt, Human herpesvirus 4 (Epstein-Barr virus)
cagauuucuagu

SEQ ID NO: 3964835 - RNA, 20 nt, Human herpesvirus 4 (Epstein-Barr virus)
cagcaccucagcuguuccca

SEQ ID NO: 3964836 - RNA, 16 nt, Human herpesvirus 4 (Epstein-Barr virus)
cagcagacaaggacag

SEQ ID NO: 3964837 - RNA, 16 nt, Human herpesvirus 4 (Epstein-Barr virus)
cagcagcagugguguu

SEQ ID NO: 3964838 - RNA, 15 nt, Human herpesvirus 4 (Epstein-Barr virus)
cagcauggcagccgg

SEQ ID NO: 3964839 - RNA, 20 nt, Human herpesvirus 4 (Epstein-Barr virus)
cagccacacaaucagccggg

SEQ ID NO: 3964840 - RNA, 17 nt, Human herpesvirus 4 (Epstein-Barr virus)
cagcccgacccccgggc

SEQ ID NO: 3964841 - RNA, 18 nt, Human herpesvirus 4 (Epstein-Barr virus)
cagcccuuuuuccagugg

SEQ ID NO: 3964842 - RNA, 19 nt, Human herpesvirus 4 (Epstein-Barr virus)
cagcgccagcagggcacag

SEQ ID NO: 3964843 - RNA, 18 nt, Human herpesvirus 4 (Epstein-Barr virus)
cagcgcggcagaggccuc

SEQ ID NO: 3964844 - RNA, 14 nt, Human herpesvirus 4 (Epstein-Barr virus)
cagcgcuggcucca

SEQ ID NO: 3964845 - RNA, 17 nt, Human herpesvirus 4 (Epstein-Barr virus)
cagcuccagggacaggg

SEQ ID NO: 3964846 - RNA, 13 nt, Human herpesvirus 4 (Epstein-Barr virus)
cagcuggcccacc

SEQ ID NO: 3964847 - RNA, 22 nt, Human herpesvirus 4 (Epstein-Barr virus)
caggaccuggaaauggccuagg

SEQ ID NO: 3964848 - RNA, 16 nt, Human herpesvirus 4 (Epstein-Barr virus)
caggagacacacgugg

SEQ ID NO: 3964849 - RNA, 18 nt, Human herpesvirus 4 (Epstein-Barr virus)
caggagguacaugggcca

SEQ ID NO: 3964850 - RNA, 19 nt, Human herpesvirus 4 (Epstein-Barr virus)
caggccccccgcaccaggg

SEQ ID NO: 3964851 - RNA, 21 nt, Human herpesvirus 4 (Epstein-Barr virus)
caggccgccaugcucagggcc

SEQ ID NO: 3964852 - RNA, 22 nt, Human herpesvirus 4 (Epstein-Barr virus)
caggccucagcgucaggagagg

SEQ ID NO: 3964853 - RNA, 17 nt, Human herpesvirus 4 (Epstein-Barr virus)
caggcgacgcucccggg

SEQ ID NO: 3964854 - RNA, 19 nt, Human herpesvirus 4 (Epstein-Barr virus)
caggcuacaacaggcugcu

SEQ ID NO: 3964855 - RNA, 15 nt, Human herpesvirus 4 (Epstein-Barr virus)
cagggcccagugcac

SEQ ID NO: 3964856 - RNA, 23 nt, Human herpesvirus 4 (Epstein-Barr virus)
cagggccggaaccugagccugag

SEQ ID NO: 3964857 - RNA, 12 nt, Human herpesvirus 4 (Epstein-Barr virus)
cagggcggagga

SEQ ID NO: 3964858 - RNA, 18 nt, Human herpesvirus 4 (Epstein-Barr virus)
cagggcuucguccagggg

SEQ ID NO: 3964859 - RNA, 14 nt, Human herpesvirus 4 (Epstein-Barr virus)
caggguccaggaga

SEQ ID NO: 3964860 - RNA, 18 nt, Human herpesvirus 4 (Epstein-Barr virus)
cagggugcacagacuagc

SEQ ID NO: 3964861 - RNA, 22 nt, Human herpesvirus 4 (Epstein-Barr virus)
caggguuucuaggacgcugucc

SEQ ID NO: 3964862 - RNA, 12 nt, Human herpesvirus 4 (Epstein-Barr virus)
caggucaggucc

SEQ ID NO: 3964863 - RNA, 17 nt, Human herpesvirus 4 (Epstein-Barr virus)
caggucgcggaccaggg

SEQ ID NO: 3964864 - RNA, 21 nt, Human herpesvirus 4 (Epstein-Barr virus)
caggugcccgagccccgccug

SEQ ID NO: 3964865 - RNA, 18 nt, Human herpesvirus 4 (Epstein-Barr virus)
caguccacagccaccggc

SEQ ID NO: 3964866 - RNA, 18 nt, Human herpesvirus 4 (Epstein-Barr virus)
caguccaggggccacaca

SEQ ID NO: 3964867 - RNA, 18 nt, Human herpesvirus 4 (Epstein-Barr virus)
cagugccuccgccugagc

SEQ ID NO: 3964868 - RNA, 15 nt, Human herpesvirus 4 (Epstein-Barr virus)
cagugucuggcggcc

SEQ ID NO: 3964869 - RNA, 13 nt, Human herpesvirus 4 (Epstein-Barr virus)
caguguggcccga

SEQ ID NO: 3964870 - RNA, 23 nt, Human herpesvirus 4 (Epstein-Barr virus)
cauaacugagcagggcaaagcca

SEQ ID NO: 3964871 - RNA, 22 nt, Human herpesvirus 4 (Epstein-Barr virus)
cauauccagagcugagugccca

SEQ ID NO: 3964872 - RNA, 16 nt, Human herpesvirus 4 (Epstein-Barr virus)
caucaaccagugggua

SEQ ID NO: 3964873 - RNA, 14 nt, Human herpesvirus 4 (Epstein-Barr virus)
caucgccgccccag

SEQ ID NO: 3964874 - RNA, 15 nt, Human herpesvirus 4 (Epstein-Barr virus)
caucucauccccaga

SEQ ID NO: 3964875 - RNA, 22 nt, Human herpesvirus 4 (Epstein-Barr virus)
caucugaaaaugacaggcugcg

SEQ ID NO: 3964876 - RNA, 17 nt, Human herpesvirus 4 (Epstein-Barr virus)
caucuggaccagaaggc

SEQ ID NO: 3964877 - RNA, 15 nt, Human herpesvirus 4 (Epstein-Barr virus)
caugacgcugcugcu

SEQ ID NO: 3964878 - RNA, 20 nt, Human herpesvirus 4 (Epstein-Barr virus)
caugcaaguggaugcaucua

SEQ ID NO: 3964879 - RNA, 13 nt, Human herpesvirus 4 (Epstein-Barr virus)
caugcaggccugg

SEQ ID NO: 3964880 - RNA, 19 nt, Human herpesvirus 4 (Epstein-Barr virus)
caugcuauggugccggggc

SEQ ID NO: 3964881 - RNA, 18 nt, Human herpesvirus 4 (Epstein-Barr virus)
caugcuccuauggacacu

SEQ ID NO: 3964882 - RNA, 12 nt, Human herpesvirus 4 (Epstein-Barr virus)
cauggccugggc

SEQ ID NO: 3964883 - RNA, 12 nt, Human herpesvirus 4 (Epstein-Barr virus)
cauggggcucug

SEQ ID NO: 3964884 - RNA, 22 nt, Human herpesvirus 4 (Epstein-Barr virus)
cauguaacaagaacugggauga

SEQ ID NO: 3964885 - RNA, 22 nt, Human herpesvirus 4 (Epstein-Barr virus)
cauucccaaguguuuccagaca

SEQ ID NO: 3964886 - RNA, 17 nt, Human herpesvirus 4 (Epstein-Barr virus)
cauucgugaguccaggg

SEQ ID NO: 3964887 - RNA, 21 nt, Human herpesvirus 4 (Epstein-Barr virus)
cauucgugaguccagggcccu

SEQ ID NO: 3964888 - RNA, 22 nt, Human herpesvirus 4 (Epstein-Barr virus)
ccaaagcgggugcaguaacagg

SEQ ID NO: 3964889 - RNA, 19 nt, Human herpesvirus 4 (Epstein-Barr virus)
ccaacuccggcccacgcca

SEQ ID NO: 3964890 - RNA, 14 nt, Human herpesvirus 4 (Epstein-Barr virus)
ccaagcggcacaga

SEQ ID NO: 3964891 - RNA, 21 nt, Human herpesvirus 4 (Epstein-Barr virus)
ccaaggacccccgcgucacug

SEQ ID NO: 3964892 - RNA, 14 nt, Human herpesvirus 4 (Epstein-Barr virus)
ccaaugugcauggg

SEQ ID NO: 3964893 - RNA, 16 nt, Human herpesvirus 4 (Epstein-Barr virus)
ccacacucccuccaga

SEQ ID NO: 3964894 - RNA, 14 nt, Human herpesvirus 4 (Epstein-Barr virus)
ccacagccccacuc

SEQ ID NO: 3964895 - RNA, 14 nt, Human herpesvirus 4 (Epstein-Barr virus)
ccaccaccuccacc

SEQ ID NO: 3964896 - RNA, 15 nt, Human herpesvirus 4 (Epstein-Barr virus)
ccaccauaugaugac

SEQ ID NO: 3964897 - RNA, 21 nt, Human herpesvirus 4 (Epstein-Barr virus)
ccacggcccggggguggcagc

SEQ ID NO: 3964898 - RNA, 17 nt, Human herpesvirus 4 (Epstein-Barr virus)
ccacggccguagcccag

SEQ ID NO: 3964899 - RNA, 20 nt, Human herpesvirus 4 (Epstein-Barr virus)
ccagaaggcuccggcggcag

SEQ ID NO: 3964900 - RNA, 21 nt, Human herpesvirus 4 (Epstein-Barr virus)
ccagauguccagggguccccg

SEQ ID NO: 3964901 - RNA, 21 nt, Human herpesvirus 4 (Epstein-Barr virus)
ccagcaaaaccagcccgggga

SEQ ID NO: 3964902 - RNA, 22 nt, Human herpesvirus 4 (Epstein-Barr virus)
ccagcaggcucaggccgccgca

SEQ ID NO: 3964903 - RNA, 14 nt, Human herpesvirus 4 (Epstein-Barr virus)
ccagcauggcagcc

SEQ ID NO: 3964904 - RNA, 20 nt, Human herpesvirus 4 (Epstein-Barr virus)
ccagcccccucccgccccug

SEQ ID NO: 3964905 - RNA, 13 nt, Human herpesvirus 4 (Epstein-Barr virus)
ccagcccgacccc

SEQ ID NO: 3964906 - RNA, 23 nt, Human herpesvirus 4 (Epstein-Barr virus)
ccagcgccuccucgcaggccccc

SEQ ID NO: 3964907 - RNA, 23 nt, Human herpesvirus 4 (Epstein-Barr virus)
ccaggaccuggaugcuguagugg

SEQ ID NO: 3964908 - RNA, 22 nt, Human herpesvirus 4 (Epstein-Barr virus)
ccaggagccccgggcggcucag

SEQ ID NO: 3964909 - RNA, 19 nt, Human herpesvirus 4 (Epstein-Barr virus)
ccaggagucugcugcggcu

SEQ ID NO: 3964910 - RNA, 14 nt, Human herpesvirus 4 (Epstein-Barr virus)
ccaggcacaucugg

SEQ ID NO: 3964911 - RNA, 19 nt, Human herpesvirus 4 (Epstein-Barr virus)
ccaggcagaugaggccccu

SEQ ID NO: 3964912 - RNA, 19 nt, Human herpesvirus 4 (Epstein-Barr virus)
ccaggcccccgggugggcu

SEQ ID NO: 3964913 - RNA, 17 nt, Human herpesvirus 4 (Epstein-Barr virus)
ccaggccucagcgucag

SEQ ID NO: 3964914 - RNA, 15 nt, Human herpesvirus 4 (Epstein-Barr virus)
ccagggacagggcgc

SEQ ID NO: 3964915 - RNA, 13 nt, Human herpesvirus 4 (Epstein-Barr virus)
ccagggguccccg

SEQ ID NO: 3964916 - RNA, 18 nt, Human herpesvirus 4 (Epstein-Barr virus)
ccaggguuucuaggacgc

SEQ ID NO: 3964917 - RNA, 17 nt, Human herpesvirus 4 (Epstein-Barr virus)
ccaguuccccccagccu

SEQ ID NO: 3964918 - RNA, 18 nt, Human herpesvirus 4 (Epstein-Barr virus)
ccaucugcuucuggcucu

SEQ ID NO: 3964919 - RNA, 13 nt, Human herpesvirus 4 (Epstein-Barr virus)
ccaugcagcggcg

SEQ ID NO: 3964920 - RNA, 22 nt, Human herpesvirus 4 (Epstein-Barr virus)
ccaugcgcgcccugucaccagg

SEQ ID NO: 3964921 - RNA, 21 nt, Human herpesvirus 4 (Epstein-Barr virus)
ccaugucugggggacucuucu

SEQ ID NO: 3964922 - RNA, 13 nt, Human herpesvirus 4 (Epstein-Barr virus)
ccauucacagggg

SEQ ID NO: 3964923 - RNA, 17 nt, Human herpesvirus 4 (Epstein-Barr virus)
ccauucgugaguccagg

SEQ ID NO: 3964924 - RNA, 16 nt, Human herpesvirus 4 (Epstein-Barr virus)
cccaaagcgggugcag

SEQ ID NO: 3964925 - RNA, 15 nt, Human herpesvirus 4 (Epstein-Barr virus)
cccaccacccccacc

SEQ ID NO: 3964926 - RNA, 21 nt, Human herpesvirus 4 (Epstein-Barr virus)
cccaccagaucgccugccacu

SEQ ID NO: 3964927 - RNA, 18 nt, Human herpesvirus 4 (Epstein-Barr virus)
cccaccgacuccgaugcc

SEQ ID NO: 3964928 - RNA, 21 nt, Human herpesvirus 4 (Epstein-Barr virus)
cccacugaaaaaccagacacg

SEQ ID NO: 3964929 - RNA, 21 nt, Human herpesvirus 4 (Epstein-Barr virus)
cccagcuccgugguccugagg

SEQ ID NO: 3964930 - RNA, 20 nt, Human herpesvirus 4 (Epstein-Barr virus)
cccagggcagacugcacagg

SEQ ID NO: 3964931 - RNA, 14 nt, Human herpesvirus 4 (Epstein-Barr virus)
cccaguccgcgacc

SEQ ID NO: 3964932 - RNA, 19 nt, Human herpesvirus 4 (Epstein-Barr virus)
cccauccccagcccagccg

SEQ ID NO: 3964933 - RNA, 12 nt, Human herpesvirus 4 (Epstein-Barr virus)
ccccagccacag

SEQ ID NO: 3964934 - RNA, 20 nt, Human herpesvirus 4 (Epstein-Barr virus)
ccccagcgcuggcuccaggg

SEQ ID NO: 3964935 - RNA, 20 nt, Human herpesvirus 4 (Epstein-Barr virus)
cccccguaaaacuccacaga

SEQ ID NO: 3964936 - RNA, 21 nt, Human herpesvirus 4 (Epstein-Barr virus)
ccccgacaucgccgccccagg

SEQ ID NO: 3964937 - RNA, 19 nt, Human herpesvirus 4 (Epstein-Barr virus)
ccccgccuuugggcacccc

SEQ ID NO: 3964938 - RNA, 13 nt, Human herpesvirus 4 (Epstein-Barr virus)
ccccuccacggga

SEQ ID NO: 3964939 - RNA, 19 nt, Human herpesvirus 4 (Epstein-Barr virus)
ccccuccauuccacccacu

SEQ ID NO: 3964940 - RNA, 22 nt, Human herpesvirus 4 (Epstein-Barr virus)
cccgagaccggcuccggauuca

SEQ ID NO: 3964941 - RNA, 15 nt, Human herpesvirus 4 (Epstein-Barr virus)
cccgcccuccccauc

SEQ ID NO: 3964942 - RNA, 19 nt, Human herpesvirus 4 (Epstein-Barr virus)
cccggagucuggacguggc

SEQ ID NO: 3964943 - RNA, 15 nt, Human herpesvirus 4 (Epstein-Barr virus)
cccggcccucuuccg

SEQ ID NO: 3964944 - RNA, 16 nt, Human herpesvirus 4 (Epstein-Barr virus)
cccgggggaggagaag

SEQ ID NO: 3964945 - RNA, 22 nt, Human herpesvirus 4 (Epstein-Barr virus)
cccggggguggaggcugcgccu

SEQ ID NO: 3964946 - RNA, 20 nt, Human herpesvirus 4 (Epstein-Barr virus)
cccguugguggucagcagca

SEQ ID NO: 3964947 - RNA, 21 nt, Human herpesvirus 4 (Epstein-Barr virus)
cccuagccaccguggccaggc

SEQ ID NO: 3964948 - RNA, 16 nt, Human herpesvirus 4 (Epstein-Barr virus)
cccuccgcauccuagg

SEQ ID NO: 3964949 - RNA, 14 nt, Human herpesvirus 4 (Epstein-Barr virus)
cccucuccagcaac

SEQ ID NO: 3964950 - RNA, 22 nt, Human herpesvirus 4 (Epstein-Barr virus)
cccugcaaacugacacacaggc

SEQ ID NO: 3964951 - RNA, 14 nt, Human herpesvirus 4 (Epstein-Barr virus)
cccuggcugacgga

SEQ ID NO: 3964952 - RNA, 17 nt, Human herpesvirus 4 (Epstein-Barr virus)
cccuugcccucuccagc

SEQ ID NO: 3964953 - RNA, 13 nt, Human herpesvirus 4 (Epstein-Barr virus)
cccuuucuaccag

SEQ ID NO: 3964954 - RNA, 21 nt, Human herpesvirus 4 (Epstein-Barr virus)
cccuuucuaccaggggcgagc

SEQ ID NO: 3964955 - RNA, 15 nt, Human herpesvirus 4 (Epstein-Barr virus)
cccuuugccuggggc

SEQ ID NO: 3964956 - RNA, 13 nt, Human herpesvirus 4 (Epstein-Barr virus)
ccgaacaugggua

SEQ ID NO: 3964957 - RNA, 20 nt, Human herpesvirus 4 (Epstein-Barr virus)
ccgaggcagacaaggccccg

SEQ ID NO: 3964958 - RNA, 16 nt, Human herpesvirus 4 (Epstein-Barr virus)
ccgcaccagggccagg

SEQ ID NO: 3964959 - RNA, 15 nt, Human herpesvirus 4 (Epstein-Barr virus)
ccgcagggguggugg

SEQ ID NO: 3964960 - RNA, 12 nt, Human herpesvirus 4 (Epstein-Barr virus)
ccgccgccgcag

SEQ ID NO: 3964961 - RNA, 14 nt, Human herpesvirus 4 (Epstein-Barr virus)
ccggcauccagugc

SEQ ID NO: 3964962 - RNA, 18 nt, Human herpesvirus 4 (Epstein-Barr virus)
ccggcccuuugccugggg

SEQ ID NO: 3964963 - RNA, 18 nt, Human herpesvirus 4 (Epstein-Barr virus)
ccggcgcuguguggcuga

SEQ ID NO: 3964964 - RNA, 18 nt, Human herpesvirus 4 (Epstein-Barr virus)
ccggcuggccgccguggc

SEQ ID NO: 3964965 - RNA, 22 nt, Human herpesvirus 4 (Epstein-Barr virus)
ccgggagaggcagccccaaagc

SEQ ID NO: 3964966 - RNA, 12 nt, Human herpesvirus 4 (Epstein-Barr virus)
ccggggcccacg

SEQ ID NO: 3964967 - RNA, 22 nt, Human herpesvirus 4 (Epstein-Barr virus)
ccggguuugauguuucuguggc

SEQ ID NO: 3964968 - RNA, 19 nt, Human herpesvirus 4 (Epstein-Barr virus)
ccgguccccccagaagccc

SEQ ID NO: 3964969 - RNA, 22 nt, Human herpesvirus 4 (Epstein-Barr virus)
ccggucguagucauccgaggcu

SEQ ID NO: 3964970 - RNA, 15 nt, Human herpesvirus 4 (Epstein-Barr virus)
ccgucagccagggug

SEQ ID NO: 3964971 - RNA, 18 nt, Human herpesvirus 4 (Epstein-Barr virus)
ccguccuuguccaggaga

SEQ ID NO: 3964972 - RNA, 21 nt, Human herpesvirus 4 (Epstein-Barr virus)
ccgugcuuuuugccaggccug

SEQ ID NO: 3964973 - RNA, 10 nt, Human herpesvirus 4 (Epstein-Barr virus)
ccguggccuu

SEQ ID NO: 3964974 - RNA, 16 nt, Human herpesvirus 4 (Epstein-Barr virus)
ccguguuucucccacu

SEQ ID NO: 3964975 - RNA, 15 nt, Human herpesvirus 4 (Epstein-Barr virus)
ccucgguggugggcu

SEQ ID NO: 3964976 - RNA, 16 nt, Human herpesvirus 4 (Epstein-Barr virus)
ccucugaugguggccg

SEQ ID NO: 3964977 - RNA, 15 nt, Human herpesvirus 4 (Epstein-Barr virus)
ccucugcacaacaca

SEQ ID NO: 3964978 - RNA, 22 nt, Human herpesvirus 4 (Epstein-Barr virus)
ccucuggcacgccguggcccug

SEQ ID NO: 3964979 - RNA, 14 nt, Human herpesvirus 4 (Epstein-Barr virus)
ccugaccaucacau

SEQ ID NO: 3964980 - RNA, 16 nt, Human herpesvirus 4 (Epstein-Barr virus)
ccugacugacucuccc

SEQ ID NO: 3964981 - RNA, 16 nt, Human herpesvirus 4 (Epstein-Barr virus)
ccugagacuggacccu

SEQ ID NO: 3964982 - RNA, 20 nt, Human herpesvirus 4 (Epstein-Barr virus)
ccugagcauggcggccuggc

SEQ ID NO: 3964983 - RNA, 20 nt, Human herpesvirus 4 (Epstein-Barr virus)
ccugagccacacccaccuau

SEQ ID NO: 3964984 - RNA, 18 nt, Human herpesvirus 4 (Epstein-Barr virus)
ccugagccugagccacac

SEQ ID NO: 3964985 - RNA, 23 nt, Human herpesvirus 4 (Epstein-Barr virus)
ccugccucucuuaugccuguggc

SEQ ID NO: 3964986 - RNA, 13 nt, Human herpesvirus 4 (Epstein-Barr virus)
ccugcggcccacu

SEQ ID NO: 3964987 - RNA, 17 nt, Human herpesvirus 4 (Epstein-Barr virus)
ccugcucauaccuccac

SEQ ID NO: 3964988 - RNA, 14 nt, Human herpesvirus 4 (Epstein-Barr virus)
ccuggccagggcgg

SEQ ID NO: 3964989 - RNA, 20 nt, Human herpesvirus 4 (Epstein-Barr virus)
ccugggccccccggaggggc

SEQ ID NO: 3964990 - RNA, 13 nt, Human herpesvirus 4 (Epstein-Barr virus)
ccugggccuuggc

SEQ ID NO: 3964991 - RNA, 18 nt, Human herpesvirus 4 (Epstein-Barr virus)
ccugucaccaggccugcc

SEQ ID NO: 3964992 - RNA, 15 nt, Human herpesvirus 4 (Epstein-Barr virus)
ccugucucccaccca

SEQ ID NO: 3964993 - RNA, 13 nt, Human herpesvirus 4 (Epstein-Barr virus)
ccuugaucuucuu

SEQ ID NO: 3964994 - RNA, 19 nt, Human herpesvirus 4 (Epstein-Barr virus)
ccuugcccucuccagcaac

SEQ ID NO: 3964995 - RNA, 17 nt, Human herpesvirus 4 (Epstein-Barr virus)
ccuuggaacugacgggc

SEQ ID NO: 3964996 - RNA, 18 nt, Human herpesvirus 4 (Epstein-Barr virus)
ccuuggggguggugggcu

SEQ ID NO: 3964997 - RNA, 17 nt, Human herpesvirus 4 (Epstein-Barr virus)
ccuuguccacuggggug

SEQ ID NO: 3964998 - RNA, 15 nt, Human herpesvirus 4 (Epstein-Barr virus)
ccuuguccgcugggc

SEQ ID NO: 3964999 - RNA, 16 nt, Human herpesvirus 4 (Epstein-Barr virus)
ccuuguccgcugggcc

SEQ ID NO: 3965000 - RNA, 14 nt, Human herpesvirus 4 (Epstein-Barr virus)
ccuuuacccagccc

SEQ ID NO: 3965001 - RNA, 20 nt, Human herpesvirus 4 (Epstein-Barr virus)
ccuuugggcaccccacgggg

SEQ ID NO: 3965002 - RNA, 21 nt, Human herpesvirus 4 (Epstein-Barr virus)
ccuuuugucuccccucugcag

SEQ ID NO: 3965003 - RNA, 19 nt, Human herpesvirus 4 (Epstein-Barr virus)
cugccaacuuugagcuggg

SEQ ID NO: 3965004 - RNA, 22 nt, Human herpesvirus 4 (Epstein-Barr virus)
cugccagagccucugccacaag

SEQ ID NO: 3965005 - RNA, 20 nt, Human herpesvirus 4 (Epstein-Barr virus)
cugccccgguccccccagaa

SEQ ID NO: 3965006 - RNA, 16 nt, Human herpesvirus 4 (Epstein-Barr virus)
cugccccucagccugc

SEQ ID NO: 3965007 - RNA, 21 nt, Human herpesvirus 4 (Epstein-Barr virus)
cugccucgaguaggugccucc

SEQ ID NO: 3965008 - RNA, 15 nt, Human herpesvirus 4 (Epstein-Barr virus)
cugcuccagugccuc

SEQ ID NO: 3965009 - RNA, 13 nt, Human herpesvirus 4 (Epstein-Barr virus)
cuggaccagaagg

SEQ ID NO: 3965010 - RNA, 18 nt, Human herpesvirus 4 (Epstein-Barr virus)
cuggagaugauucauggg

SEQ ID NO: 3965011 - RNA, 14 nt, Human herpesvirus 4 (Epstein-Barr virus)
cuggagccagcgcu

SEQ ID NO: 3965012 - RNA, 13 nt, Human herpesvirus 4 (Epstein-Barr virus)
cuggaggccucag

SEQ ID NO: 3965013 - RNA, 19 nt, Human herpesvirus 4 (Epstein-Barr virus)
cuggaugcuguaguggccu

SEQ ID NO: 3965014 - RNA, 17 nt, Human herpesvirus 4 (Epstein-Barr virus)
cuggcacgacuguuccu

SEQ ID NO: 3965015 - RNA, 13 nt, Human herpesvirus 4 (Epstein-Barr virus)
cuggcagcggccu

SEQ ID NO: 3965016 - RNA, 17 nt, Human herpesvirus 4 (Epstein-Barr virus)
cuggccggccgcccccu

SEQ ID NO: 3965017 - RNA, 22 nt, Human herpesvirus 4 (Epstein-Barr virus)
cuggccggcuaucugcuucugg

SEQ ID NO: 3965018 - RNA, 12 nt, Human herpesvirus 4 (Epstein-Barr virus)
cuggcucagcuu

SEQ ID NO: 3965019 - RNA, 17 nt, Human herpesvirus 4 (Epstein-Barr virus)
cuggucgcccccucugc

SEQ ID NO: 3965020 - RNA, 18 nt, Human herpesvirus 4 (Epstein-Barr virus)
cugucucuuucuggccaa

SEQ ID NO: 3965021 - RNA, 14 nt, Human herpesvirus 4 (Epstein-Barr virus)
cuguguccugggca

SEQ ID NO: 3965022 - RNA, 18 nt, Human herpesvirus 4 (Epstein-Barr virus)
cuuagagucccugcgcca

SEQ ID NO: 3965023 - RNA, 19 nt, Human herpesvirus 4 (Epstein-Barr virus)
cuucacagagcagcagcua

SEQ ID NO: 3965024 - RNA, 20 nt, Human herpesvirus 4 (Epstein-Barr virus)
cuucuggcacgacuguuccu

SEQ ID NO: 3965025 - RNA, 14 nt, Human herpesvirus 4 (Epstein-Barr virus)
cuucuggcucuucu

SEQ ID NO: 3965026 - RNA, 19 nt, Human herpesvirus 4 (Epstein-Barr virus)
cuugccguggcgccugggg

SEQ ID NO: 3965027 - RNA, 13 nt, Human herpesvirus 4 (Epstein-Barr virus)
cuuggaggcugcu

SEQ ID NO: 3965028 - RNA, 21 nt, Human herpesvirus 4 (Epstein-Barr virus)
cuugguaaguuuucccuuccu

SEQ ID NO: 3965029 - RNA, 15 nt, Human herpesvirus 4 (Epstein-Barr virus)
cuugugcuccugaua

SEQ ID NO: 3965030 - RNA, 19 nt, Human herpesvirus 4 (Epstein-Barr virus)
cuuuguccagauguccagg

SEQ ID NO: 3965031 - RNA, 22 nt, Human herpesvirus 4 (Epstein-Barr virus)
cuuuguggccuuccucugccug

SEQ ID NO: 3965032 - RNA, 14 nt, Human herpesvirus 4 (Epstein-Barr virus)
cuuuugucugccug

SEQ ID NO: 3965033 - RNA, 12 nt, Human herpesvirus 4 (Epstein-Barr virus)
gaaaagagacug

SEQ ID NO: 3965034 - RNA, 22 nt, Human herpesvirus 4 (Epstein-Barr virus)
gaaaagagagcugauggaggcc

SEQ ID NO: 3965035 - RNA, 17 nt, Human herpesvirus 4 (Epstein-Barr virus)
gaaaaugagccaugacu

SEQ ID NO: 3965036 - RNA, 15 nt, Human herpesvirus 4 (Epstein-Barr virus)
gaaagugcuggccau

SEQ ID NO: 3965037 - RNA, 19 nt, Human herpesvirus 4 (Epstein-Barr virus)
gaaaguuguugggugaaag

SEQ ID NO: 3965038 - RNA, 22 nt, Human herpesvirus 4 (Epstein-Barr virus)
gaaauaucuagcacggcacccu

SEQ ID NO: 3965039 - RNA, 17 nt, Human herpesvirus 4 (Epstein-Barr virus)
gaacacuugggcacgga

SEQ ID NO: 3965040 - RNA, 15 nt, Human herpesvirus 4 (Epstein-Barr virus)
gaacaggagcaggag

SEQ ID NO: 3965041 - RNA, 13 nt, Human herpesvirus 4 (Epstein-Barr virus)
gaacccuggggca

SEQ ID NO: 3965042 - RNA, 12 nt, Human herpesvirus 4 (Epstein-Barr virus)
gaaccugagccu

SEQ ID NO: 3965043 - RNA, 14 nt, Human herpesvirus 4 (Epstein-Barr virus)
gaacgugacaggca

SEQ ID NO: 3965044 - RNA, 16 nt, Human herpesvirus 4 (Epstein-Barr virus)
gaacgugacaggcaca

SEQ ID NO: 3965045 - RNA, 13 nt, Human herpesvirus 4 (Epstein-Barr virus)
gaagaagauugaa

SEQ ID NO: 3965046 - RNA, 17 nt, Human herpesvirus 4 (Epstein-Barr virus)
gaagauugucacagcug

SEQ ID NO: 3965047 - RNA, 22 nt, Human herpesvirus 4 (Epstein-Barr virus)
gaagcagauagccggccaggca

SEQ ID NO: 3965048 - RNA, 23 nt, Human herpesvirus 4 (Epstein-Barr virus)
gaagcccaagaagaagcccaccu

SEQ ID NO: 3965049 - RNA, 21 nt, Human herpesvirus 4 (Epstein-Barr virus)
gaauccaguaugccugccugu

SEQ ID NO: 3965050 - RNA, 13 nt, Human herpesvirus 4 (Epstein-Barr virus)
gaauccgcgcagc

SEQ ID NO: 3965051 - RNA, 16 nt, Human herpesvirus 4 (Epstein-Barr virus)
gaaucuaguaugaagg

SEQ ID NO: 3965052 - RNA, 16 nt, Human herpesvirus 4 (Epstein-Barr virus)
gaaucugacauuucuc

SEQ ID NO: 3965053 - RNA, 17 nt, Human herpesvirus 4 (Epstein-Barr virus)
gaaugcccccgggggcg

SEQ ID NO: 3965054 - RNA, 18 nt, Human herpesvirus 4 (Epstein-Barr virus)
gacaauaaaguugaugau

SEQ ID NO: 3965055 - RNA, 18 nt, Human herpesvirus 4 (Epstein-Barr virus)
gacacuuuagagcucugg

SEQ ID NO: 3965056 - RNA, 19 nt, Human herpesvirus 4 (Epstein-Barr virus)
gacagguacuaacacgcaa

SEQ ID NO: 3965057 - RNA, 14 nt, Human herpesvirus 4 (Epstein-Barr virus)
gacccgucgggcca

SEQ ID NO: 3965058 - RNA, 17 nt, Human herpesvirus 4 (Epstein-Barr virus)
gacccuauggagggcag

SEQ ID NO: 3965059 - RNA, 14 nt, Human herpesvirus 4 (Epstein-Barr virus)
gaccuggaugcugu

SEQ ID NO: 3965060 - RNA, 16 nt, Human herpesvirus 4 (Epstein-Barr virus)
gacucaggcccucauu

SEQ ID NO: 3965061 - RNA, 21 nt, Human herpesvirus 4 (Epstein-Barr virus)
gacucuauugguugaucuccu

SEQ ID NO: 3965062 - RNA, 17 nt, Human herpesvirus 4 (Epstein-Barr virus)
gagacaaggcaggcgcu

SEQ ID NO: 3965063 - RNA, 17 nt, Human herpesvirus 4 (Epstein-Barr virus)
gagacucaggcccucau

SEQ ID NO: 3965064 - RNA, 20 nt, Human herpesvirus 4 (Epstein-Barr virus)
gcagcacacgaagccugccu

SEQ ID NO: 3965065 - RNA, 14 nt, Human herpesvirus 4 (Epstein-Barr virus)
gcagcaccuguccc

SEQ ID NO: 3965066 - RNA, 22 nt, Human herpesvirus 4 (Epstein-Barr virus)
gcagccacguccagacuccggg

SEQ ID NO: 3965067 - RNA, 18 nt, Human herpesvirus 4 (Epstein-Barr virus)
gcagcccccuccuccagg

SEQ ID NO: 3965068 - RNA, 23 nt, Human herpesvirus 4 (Epstein-Barr virus)
gcagccuugcguggugcuguccu

SEQ ID NO: 3965069 - RNA, 20 nt, Human herpesvirus 4 (Epstein-Barr virus)
gcagcucaccuauggucacu

SEQ ID NO: 3965070 - RNA, 17 nt, Human herpesvirus 4 (Epstein-Barr virus)
gcaggagcaggaggagg

SEQ ID NO: 3965071 - RNA, 17 nt, Human herpesvirus 4 (Epstein-Barr virus)
gcaggagcgggaggggc

SEQ ID NO: 3965072 - RNA, 14 nt, Human herpesvirus 4 (Epstein-Barr virus)
gcagucgcugcugc

SEQ ID NO: 3965073 - RNA, 21 nt, Human herpesvirus 4 (Epstein-Barr virus)
gcaucaugcgugaccaccugg

SEQ ID NO: 3965074 - RNA, 12 nt, Human herpesvirus 4 (Epstein-Barr virus)
gcaugugguggc

SEQ ID NO: 3965075 - RNA, 21 nt, Human herpesvirus 4 (Epstein-Barr virus)
gccaagguugaagagcagauu

SEQ ID NO: 3965076 - RNA, 17 nt, Human herpesvirus 4 (Epstein-Barr virus)
gccaccggcuuggcccu

SEQ ID NO: 3965077 - RNA, 21 nt, Human herpesvirus 4 (Epstein-Barr virus)
gccacgcugggaguccggccc

SEQ ID NO: 3965078 - RNA, 21 nt, Human herpesvirus 4 (Epstein-Barr virus)
gccagcgccuccucgcaggcc

SEQ ID NO: 3965079 - RNA, 13 nt, Human herpesvirus 4 (Epstein-Barr virus)
gccaggcucggca

SEQ ID NO: 3965080 - RNA, 18 nt, Human herpesvirus 4 (Epstein-Barr virus)
gccaguguggcuggggcu

SEQ ID NO: 3965081 - RNA, 21 nt, Human herpesvirus 4 (Epstein-Barr virus)
gccaucgcaagcuccuuugcc

SEQ ID NO: 3965082 - RNA, 16 nt, Human herpesvirus 4 (Epstein-Barr virus)
gccauucgacaggcca

SEQ ID NO: 3965083 - RNA, 16 nt, Human herpesvirus 4 (Epstein-Barr virus)
gcccacacagcgccag

SEQ ID NO: 3965084 - RNA, 22 nt, Human herpesvirus 4 (Epstein-Barr virus)
gcccaccccacacucccuccag

SEQ ID NO: 3965085 - RNA, 18 nt, Human herpesvirus 4 (Epstein-Barr virus)
gcccagcuccgugguccu

SEQ ID NO: 3965086 - RNA, 21 nt, Human herpesvirus 4 (Epstein-Barr virus)
gccccgaaagcggcccagcag

SEQ ID NO: 3965087 - RNA, 23 nt, Human herpesvirus 4 (Epstein-Barr virus)
gccccgguccccccagaagcccc

SEQ ID NO: 3965088 - RNA, 14 nt, Human herpesvirus 4 (Epstein-Barr virus)
gcccgagccccgcc

SEQ ID NO: 3965089 - RNA, 16 nt, Human herpesvirus 4 (Epstein-Barr virus)
gcccggccgaggccug

SEQ ID NO: 3965090 - RNA, 21 nt, Human herpesvirus 4 (Epstein-Barr virus)
gcccgucuuacugcccagccu

SEQ ID NO: 3965091 - RNA, 12 nt, Human herpesvirus 4 (Epstein-Barr virus)
gcccucuccagc

SEQ ID NO: 3965092 - RNA, 15 nt, Human herpesvirus 4 (Epstein-Barr virus)
gccuacgcagaggcc

SEQ ID NO: 3965093 - RNA, 23 nt, Human herpesvirus 4 (Epstein-Barr virus)
gccucgaguaggugccuccagag

SEQ ID NO: 3965094 - RNA, 15 nt, Human herpesvirus 4 (Epstein-Barr virus)
gccucggccuggggu

SEQ ID NO: 3965095 - RNA, 20 nt, Human herpesvirus 4 (Epstein-Barr virus)
gccucuggcacgccguggcc

SEQ ID NO: 3965096 - RNA, 16 nt, Human herpesvirus 4 (Epstein-Barr virus)
gccugaguccaacauu

SEQ ID NO: 3965097 - RNA, 19 nt, Human herpesvirus 4 (Epstein-Barr virus)
gccugauauugucccccua

SEQ ID NO: 3965098 - RNA, 22 nt, Human herpesvirus 4 (Epstein-Barr virus)
gccuguggccccggcuggccau

SEQ ID NO: 3965099 - RNA, 16 nt, Human herpesvirus 4 (Epstein-Barr virus)
gccuuccucugccugg

SEQ ID NO: 3965100 - RNA, 18 nt, Human herpesvirus 4 (Epstein-Barr virus)
gccuuccucugccuggcc

SEQ ID NO: 3965101 - RNA, 17 nt, Human herpesvirus 4 (Epstein-Barr virus)
gccuugguuucagccuc

SEQ ID NO: 3965102 - RNA, 14 nt, Human herpesvirus 4 (Epstein-Barr virus)
gcgacgcucccggg

SEQ ID NO: 3965103 - RNA, 14 nt, Human herpesvirus 4 (Epstein-Barr virus)
gcgagaaaaugagc

SEQ ID NO: 3965104 - RNA, 15 nt, Human herpesvirus 4 (Epstein-Barr virus)
gcgccagcagggcac

SEQ ID NO: 3965105 - RNA, 18 nt, Human herpesvirus 4 (Epstein-Barr virus)
gcgcccugucaccaggcc

SEQ ID NO: 3965106 - RNA, 12 nt, Human herpesvirus 4 (Epstein-Barr virus)
gcgcggcagagg

SEQ ID NO: 3965107 - RNA, 15 nt, Human herpesvirus 4 (Epstein-Barr virus)
gcgcuggcuccaggg

SEQ ID NO: 3965108 - RNA, 13 nt, Human herpesvirus 4 (Epstein-Barr virus)
gcggacugcgccu

SEQ ID NO: 3965109 - RNA, 12 nt, Human herpesvirus 4 (Epstein-Barr virus)
gcggagauggau

SEQ ID NO: 3965110 - RNA, 15 nt, Human herpesvirus 4 (Epstein-Barr virus)
gcggcacuguggggg

SEQ ID NO: 3965111 - RNA, 20 nt, Human herpesvirus 4 (Epstein-Barr virus)
gcggcccagcagauccaggg

SEQ ID NO: 3965112 - RNA, 15 nt, Human herpesvirus 4 (Epstein-Barr virus)
gcgggaggggcagga

SEQ ID NO: 3965113 - RNA, 21 nt, Human herpesvirus 4 (Epstein-Barr virus)
gcguaggucuauggggacccu

SEQ ID NO: 3965114 - RNA, 19 nt, Human herpesvirus 4 (Epstein-Barr virus)
gcgugaagucgguguccag

SEQ ID NO: 3965115 - RNA, 21 nt, Human herpesvirus 4 (Epstein-Barr virus)
gcuaaucgcugguggcaguau

SEQ ID NO: 3965116 - RNA, 15 nt, Human herpesvirus 4 (Epstein-Barr virus)
gcuacuugcucaggu

SEQ ID NO: 3965117 - RNA, 17 nt, Human herpesvirus 4 (Epstein-Barr virus)
gcucaccccugugcagg

SEQ ID NO: 3965118 - RNA, 22 nt, Human herpesvirus 4 (Epstein-Barr virus)
gcucagacuuagggccggggcc

SEQ ID NO: 3965119 - RNA, 19 nt, Human herpesvirus 4 (Epstein-Barr virus)
gcucaugcacaccuuggcg

SEQ ID NO: 3965120 - RNA, 20 nt, Human herpesvirus 4 (Epstein-Barr virus)
gcucccgggcaaacagggca

SEQ ID NO: 3965121 - RNA, 16 nt, Human herpesvirus 4 (Epstein-Barr virus)
gcucgaauaugaugag

SEQ ID NO: 3965122 - RNA, 19 nt, Human herpesvirus 4 (Epstein-Barr virus)
gcucuggucgcccccucug

SEQ ID NO: 3965123 - RNA, 17 nt, Human herpesvirus 4 (Epstein-Barr virus)
gcucuucaaccuuggca

SEQ ID NO: 3965124 - RNA, 13 nt, Human herpesvirus 4 (Epstein-Barr virus)
gcugacccuucug

SEQ ID NO: 3965125 - RNA, 18 nt, Human herpesvirus 4 (Epstein-Barr virus)
gcugaugugcugccccaa

SEQ ID NO: 3965126 - RNA, 14 nt, Human herpesvirus 4 (Epstein-Barr virus)
gcugcugcugguca

SEQ ID NO: 3965127 - RNA, 21 nt, Human herpesvirus 4 (Epstein-Barr virus)
gcuggacgugaaccucccccc

SEQ ID NO: 3965128 - RNA, 14 nt, Human herpesvirus 4 (Epstein-Barr virus)
aauggaauauuaau

SEQ ID NO: 3965129 - RNA, 22 nt, Human herpesvirus 4 (Epstein-Barr virus)
acaaaauggggguuggagaaag

SEQ ID NO: 3965130 - RNA, 23 nt, Human herpesvirus 4 (Epstein-Barr virus)
acaaacaccaguguccagagagg

SEQ ID NO: 3965131 - RNA, 13 nt, Human herpesvirus 4 (Epstein-Barr virus)
acaacggccgaga

SEQ ID NO: 3965132 - RNA, 22 nt, Human herpesvirus 4 (Epstein-Barr virus)
acaaggagugccucugggugcu

SEQ ID NO: 3965133 - RNA, 16 nt, Human herpesvirus 4 (Epstein-Barr virus)
acacagcgccagcagg

SEQ ID NO: 3965134 - RNA, 19 nt, Human herpesvirus 4 (Epstein-Barr virus)
acacaucuggaccagaagg

SEQ ID NO: 3965135 - RNA, 18 nt, Human herpesvirus 4 (Epstein-Barr virus)
acacccccacuuuuccaa

SEQ ID NO: 3965136 - RNA, 17 nt, Human herpesvirus 4 (Epstein-Barr virus)
acacuuuagagcucugg

SEQ ID NO: 3965137 - RNA, 18 nt, Human herpesvirus 4 (Epstein-Barr virus)
acagcagcguccuggccc

SEQ ID NO: 3965138 - RNA, 16 nt, Human herpesvirus 4 (Epstein-Barr virus)
acagcagcuggaugua

SEQ ID NO: 3965139 - RNA, 23 nt, Human herpesvirus 4 (Epstein-Barr virus)
acaggagacguggguccccucug

SEQ ID NO: 3965140 - RNA, 17 nt, Human herpesvirus 4 (Epstein-Barr virus)
acaggcugcugaaaacc

SEQ ID NO: 3965141 - RNA, 19 nt, Human herpesvirus 4 (Epstein-Barr virus)
acauuacggugcuggagau

SEQ ID NO: 3965142 - RNA, 23 nt, Human herpesvirus 4 (Epstein-Barr virus)
acauucguacaucuccaggcgac

SEQ ID NO: 3965143 - RNA, 14 nt, Human herpesvirus 4 (Epstein-Barr virus)
accaguggcugccc

SEQ ID NO: 3965144 - RNA, 13 nt, Human herpesvirus 4 (Epstein-Barr virus)
accauccacagcc

SEQ ID NO: 3965145 - RNA, 14 nt, Human herpesvirus 4 (Epstein-Barr virus)
acccaucugagggc

SEQ ID NO: 3965146 - RNA, 12 nt, Human herpesvirus 4 (Epstein-Barr virus)
accccccucuga

SEQ ID NO: 3965147 - RNA, 14 nt, Human herpesvirus 4 (Epstein-Barr virus)
acccgaucagagcc

SEQ ID NO: 3965148 - RNA, 18 nt, Human herpesvirus 4 (Epstein-Barr virus)
acccggguucgggcacgc

SEQ ID NO: 3965149 - RNA, 22 nt, Human herpesvirus 4 (Epstein-Barr virus)
acccucgcgccccaucuuggcc

SEQ ID NO: 3965150 - RNA, 16 nt, Human herpesvirus 4 (Epstein-Barr virus)
acccuucugcugcugc

SEQ ID NO: 3965151 - RNA, 18 nt, Human herpesvirus 4 (Epstein-Barr virus)
accgcgaccaagacucaa

SEQ ID NO: 3965152 - RNA, 18 nt, Human herpesvirus 4 (Epstein-Barr virus)
accggcaccgccaggugg

SEQ ID NO: 3965153 - RNA, 15 nt, Human herpesvirus 4 (Epstein-Barr virus)
accgucagccacaca

SEQ ID NO: 3965154 - RNA, 15 nt, Human herpesvirus 4 (Epstein-Barr virus)
accucuguuccuucu

SEQ ID NO: 3965155 - RNA, 15 nt, Human herpesvirus 4 (Epstein-Barr virus)
accuggacuggggug

SEQ ID NO: 3965156 - RNA, 20 nt, Human herpesvirus 4 (Epstein-Barr virus)
accuguccuugucugcugcc

SEQ ID NO: 3965157 - RNA, 19 nt, Human herpesvirus 4 (Epstein-Barr virus)
accuuaacuggcacacacu

SEQ ID NO: 3965158 - RNA, 20 nt, Human herpesvirus 4 (Epstein-Barr virus)
accuucugucuguaaacuau

SEQ ID NO: 3965159 - RNA, 19 nt, Human herpesvirus 4 (Epstein-Barr virus)
accuuuugucuccccucug

SEQ ID NO: 3965160 - RNA, 20 nt, Human herpesvirus 4 (Epstein-Barr virus)
acgcagaggccugcaccagu

SEQ ID NO: 3965161 - RNA, 21 nt, Human herpesvirus 4 (Epstein-Barr virus)
acgcccaguaugcagucucaa

SEQ ID NO: 3965162 - RNA, 17 nt, Human herpesvirus 4 (Epstein-Barr virus)
acgccugcuucacgccu

SEQ ID NO: 3965163 - RNA, 16 nt, Human herpesvirus 4 (Epstein-Barr virus)
acgcgcagugccaaga

SEQ ID NO: 3965164 - RNA, 16 nt, Human herpesvirus 4 (Epstein-Barr virus)
acgcuguccgccagga

SEQ ID NO: 3965165 - RNA, 23 nt, Human herpesvirus 4 (Epstein-Barr virus)
acgcuuuugucugccuggauucu

SEQ ID NO: 3965166 - RNA, 14 nt, Human herpesvirus 4 (Epstein-Barr virus)
acgggggucaagca

SEQ ID NO: 3965167 - RNA, 17 nt, Human herpesvirus 4 (Epstein-Barr virus)
acgucuuguaaaacuug

SEQ ID NO: 3965168 - RNA, 21 nt, Human herpesvirus 4 (Epstein-Barr virus)
acguggcugcgguggugcgca

SEQ ID NO: 3965169 - RNA, 17 nt, Human herpesvirus 4 (Epstein-Barr virus)
acguuggcgggacuggc

SEQ ID NO: 3965170 - RNA, 11 nt, Human herpesvirus 4 (Epstein-Barr virus)
acguuggcuuc

SEQ ID NO: 3965171 - RNA, 19 nt, Human herpesvirus 4 (Epstein-Barr virus)
acuaaaguuggucaggcug

SEQ ID NO: 3965172 - RNA, 14 nt, Human herpesvirus 4 (Epstein-Barr virus)
acucaucucaaggg

SEQ ID NO: 3965173 - RNA, 17 nt, Human herpesvirus 4 (Epstein-Barr virus)
acucccccaaacauguc

SEQ ID NO: 3965174 - RNA, 23 nt, Human herpesvirus 4 (Epstein-Barr virus)
acuccccucuccauucccagccc

SEQ ID NO: 3965175 - RNA, 18 nt, Human herpesvirus 4 (Epstein-Barr virus)
acuccggacgcagaggcc

SEQ ID NO: 3965176 - RNA, 17 nt, Human herpesvirus 4 (Epstein-Barr virus)
acuccggggguccagcc

SEQ ID NO: 3965177 - RNA, 14 nt, Human herpesvirus 4 (Epstein-Barr virus)
acuccucuuacacc

SEQ ID NO: 3965178 - RNA, 17 nt, Human herpesvirus 4 (Epstein-Barr virus)
acucucucccccgggcg

SEQ ID NO: 3965179 - RNA, 20 nt, Human herpesvirus 4 (Epstein-Barr virus)
acucuggggucucaggccuc

SEQ ID NO: 3965180 - RNA, 17 nt, Human herpesvirus 4 (Epstein-Barr virus)
acuggugcuuguggugu

SEQ ID NO: 3965181 - RNA, 13 nt, Human herpesvirus 4 (Epstein-Barr virus)
acuuagggccggg

SEQ ID NO: 3965182 - RNA, 20 nt, Human herpesvirus 4 (Epstein-Barr virus)
acuuauuggagaugcucugg

SEQ ID NO: 3965183 - RNA, 22 nt, Human herpesvirus 4 (Epstein-Barr virus)
acuucauucucaaacagucccg

SEQ ID NO: 3965184 - RNA, 16 nt, Human herpesvirus 4 (Epstein-Barr virus)
acuucuggaacauuug

SEQ ID NO: 3965185 - RNA, 18 nt, Human herpesvirus 4 (Epstein-Barr virus)
acuuuguuuagggacaga

SEQ ID NO: 3965186 - RNA, 17 nt, Human herpesvirus 4 (Epstein-Barr virus)
agaacggacugcggaga

SEQ ID NO: 3965187 - RNA, 13 nt, Human herpesvirus 4 (Epstein-Barr virus)
agaagcccaccua

SEQ ID NO: 3965188 - RNA, 21 nt, Human herpesvirus 4 (Epstein-Barr virus)
agaaguuaccugguauuucug

SEQ ID NO: 3965189 - RNA, 14 nt, Human herpesvirus 4 (Epstein-Barr virus)
agaccugaucaggg

SEQ ID NO: 3965190 - RNA, 23 nt, Human herpesvirus 4 (Epstein-Barr virus)
agacguguguggcuguagccacc

SEQ ID NO: 3965191 - RNA, 23 nt, Human herpesvirus 4 (Epstein-Barr virus)
agagauucgagaggaugaggcug

SEQ ID NO: 3965192 - RNA, 18 nt, Human herpesvirus 4 (Epstein-Barr virus)
agagauuucauccucaga

SEQ ID NO: 3965193 - RNA, 22 nt, Human herpesvirus 4 (Epstein-Barr virus)
agaggccucugggguccaggag

SEQ ID NO: 3965194 - RNA, 13 nt, Human herpesvirus 4 (Epstein-Barr virus)
agaggcucaggcc

SEQ ID NO: 3965195 - RNA, 23 nt, Human herpesvirus 4 (Epstein-Barr virus)
agaggcucaggccaugcgcgccc

SEQ ID NO: 3965196 - RNA, 16 nt, Human herpesvirus 4 (Epstein-Barr virus)
agaguaauugcagugg

SEQ ID NO: 3965197 - RNA, 20 nt, Human herpesvirus 4 (Epstein-Barr virus)
agagucuaucaggaccuggg

SEQ ID NO: 3965198 - RNA, 22 nt, Human herpesvirus 4 (Epstein-Barr virus)
agauccaacuccggcccacgcc

SEQ ID NO: 3965199 - RNA, 12 nt, Human herpesvirus 4 (Epstein-Barr virus)
agauccuucugg

SEQ ID NO: 3965200 - RNA, 13 nt, Human herpesvirus 4 (Epstein-Barr virus)
agaugcugccgcu

SEQ ID NO: 3965201 - RNA, 15 nt, Human herpesvirus 4 (Epstein-Barr virus)
agcaaacggccuggc

SEQ ID NO: 3965202 - RNA, 13 nt, Human herpesvirus 4 (Epstein-Barr virus)
agcaacugcugca

SEQ ID NO: 3965203 - RNA, 20 nt, Human herpesvirus 4 (Epstein-Barr virus)
agcacaagugauuaggagca

SEQ ID NO: 3965204 - RNA, 17 nt, Human herpesvirus 4 (Epstein-Barr virus)
agcagaaggccauggag

SEQ ID NO: 3965205 - RNA, 16 nt, Human herpesvirus 4 (Epstein-Barr virus)
agcaggacggggggcu

SEQ ID NO: 3965206 - RNA, 13 nt, Human herpesvirus 4 (Epstein-Barr virus)
agcaggaggaggg

SEQ ID NO: 3965207 - RNA, 16 nt, Human herpesvirus 4 (Epstein-Barr virus)
agcaggauuccugauu

SEQ ID NO: 3965208 - RNA, 13 nt, Human herpesvirus 4 (Epstein-Barr virus)
agcagggcccagu

SEQ ID NO: 3965209 - RNA, 15 nt, Human herpesvirus 4 (Epstein-Barr virus)
agccacauucuggaa

SEQ ID NO: 3965210 - RNA, 22 nt, Human herpesvirus 4 (Epstein-Barr virus)
agccacccgucccggguacaag

SEQ ID NO: 3965211 - RNA, 15 nt, Human herpesvirus 4 (Epstein-Barr virus)
agccagcgcacccgg

SEQ ID NO: 3965212 - RNA, 15 nt, Human herpesvirus 4 (Epstein-Barr virus)
agccccagccccucc

SEQ ID NO: 3965213 - RNA, 12 nt, Human herpesvirus 4 (Epstein-Barr virus)
agcccccucucg

SEQ ID NO: 3965214 - RNA, 22 nt, Human herpesvirus 4 (Epstein-Barr virus)
agcccgacccccgggcgccccc

SEQ ID NO: 3965215 - RNA, 15 nt, Human herpesvirus 4 (Epstein-Barr virus)
agccugagccacacc

SEQ ID NO: 3965216 - RNA, 23 nt, Human herpesvirus 4 (Epstein-Barr virus)
auagcgugaagucgguguccagg

SEQ ID NO: 3965217 - RNA, 15 nt, Human herpesvirus 4 (Epstein-Barr virus)
aucaauggaacccua

SEQ ID NO: 3965218 - RNA, 23 nt, Human herpesvirus 4 (Epstein-Barr virus)
aucaucucgcuggcucgccucau

SEQ ID NO: 3965219 - RNA, 12 nt, Human herpesvirus 4 (Epstein-Barr virus)
aucucagggaca

SEQ ID NO: 3965220 - RNA, 16 nt, Human herpesvirus 4 (Epstein-Barr virus)
aucucuugcgcccagg

SEQ ID NO: 3965221 - RNA, 14 nt, Human herpesvirus 4 (Epstein-Barr virus)
aucugaccacggcc

SEQ ID NO: 3965222 - RNA, 18 nt, Human herpesvirus 4 (Epstein-Barr virus)
augaccaacaugagggca

SEQ ID NO: 3965223 - RNA, 13 nt, Human herpesvirus 4 (Epstein-Barr virus)
augacgcugcugc

SEQ ID NO: 3965224 - RNA, 13 nt, Human herpesvirus 4 (Epstein-Barr virus)
augaggcugauga

SEQ ID NO: 3965225 - RNA, 17 nt, Human herpesvirus 4 (Epstein-Barr virus)
augcagaaggggcccug

SEQ ID NO: 3965226 - RNA, 23 nt, Human herpesvirus 4 (Epstein-Barr virus)
augccccccguaaaacuccacag

SEQ ID NO: 3965227 - RNA, 17 nt, Human herpesvirus 4 (Epstein-Barr virus)
auggagaggggaguggg

SEQ ID NO: 3965228 - RNA, 16 nt, Human herpesvirus 4 (Epstein-Barr virus)
auggcacgggcagagg

SEQ ID NO: 3965229 - RNA, 23 nt, Human herpesvirus 4 (Epstein-Barr virus)
auggccuauggguuaccaggcau

SEQ ID NO: 3965230 - RNA, 23 nt, Human herpesvirus 4 (Epstein-Barr virus)
augggggcucggggcuggggaga

SEQ ID NO: 3965231 - RNA, 18 nt, Human herpesvirus 4 (Epstein-Barr virus)
augguguccggagacccc

SEQ ID NO: 3965232 - RNA, 18 nt, Human herpesvirus 4 (Epstein-Barr virus)
auguaucccaaauaaaug

SEQ ID NO: 3965233 - RNA, 20 nt, Human herpesvirus 4 (Epstein-Barr virus)
auguaucccaaauaaauguu

SEQ ID NO: 3965234 - RNA, 17 nt, Human herpesvirus 4 (Epstein-Barr virus)
augucggggcugcuggc

SEQ ID NO: 3965235 - RNA, 16 nt, Human herpesvirus 4 (Epstein-Barr virus)
auucaucagaagcuac

SEQ ID NO: 3965236 - RNA, 22 nt, Human herpesvirus 4 (Epstein-Barr virus)
auuggacgucccuuuggaggac

SEQ ID NO: 3965237 - RNA, 17 nt, Human herpesvirus 4 (Epstein-Barr virus)
auugguguuccacagcc

SEQ ID NO: 3965238 - RNA, 15 nt, Human herpesvirus 4 (Epstein-Barr virus)
auugguugaucuccu

SEQ ID NO: 3965239 - RNA, 22 nt, Human herpesvirus 4 (Epstein-Barr virus)
caaaccaugacaucacagagga

SEQ ID NO: 3965240 - RNA, 22 nt, Human herpesvirus 4 (Epstein-Barr virus)
caaaccuccaaucaccagccac

SEQ ID NO: 3965241 - RNA, 18 nt, Human herpesvirus 4 (Epstein-Barr virus)
caaacugcgagggggccu

SEQ ID NO: 3965242 - RNA, 15 nt, Human herpesvirus 4 (Epstein-Barr virus)
caaauaaauguuacu

SEQ ID NO: 3965243 - RNA, 22 nt, Human herpesvirus 4 (Epstein-Barr virus)
caaauaaauguuacuucuuuug

SEQ ID NO: 3965244 - RNA, 16 nt, Human herpesvirus 4 (Epstein-Barr virus)
caacaggugcccgagc

SEQ ID NO: 3965245 - RNA, 21 nt, Human herpesvirus 4 (Epstein-Barr virus)
caacccccggcucucaggccu

SEQ ID NO: 3965246 - RNA, 19 nt, Human herpesvirus 4 (Epstein-Barr virus)
caaccugauucccccugcu

SEQ ID NO: 3965247 - RNA, 14 nt, Human herpesvirus 4 (Epstein-Barr virus)
caacugcgggcucc

SEQ ID NO: 3965248 - RNA, 14 nt, Human herpesvirus 4 (Epstein-Barr virus)
ggagucuggacgug

SEQ ID NO: 3965249 - RNA, 21 nt, Human herpesvirus 4 (Epstein-Barr virus)
ggcaccccacggggugcuccc

SEQ ID NO: 3965250 - RNA, 19 nt, Human herpesvirus 4 (Epstein-Barr virus)
ggcagacaccaccugcucg

SEQ ID NO: 3965251 - RNA, 18 nt, Human herpesvirus 4 (Epstein-Barr virus)
ggccaaccugccucucuu

SEQ ID NO: 3965252 - RNA, 21 nt, Human herpesvirus 4 (Epstein-Barr virus)
ggcccacgccauaccugcacg

SEQ ID NO: 3965253 - RNA, 17 nt, Human herpesvirus 4 (Epstein-Barr virus)
ggcccagugcacccagg

SEQ ID NO: 3965254 - RNA, 21 nt, Human herpesvirus 4 (Epstein-Barr virus)
ggccccccgcaccagggccag

SEQ ID NO: 3965255 - RNA, 22 nt, Human herpesvirus 4 (Epstein-Barr virus)
ggcccugaucugggagaugaga

SEQ ID NO: 3965256 - RNA, 18 nt, Human herpesvirus 4 (Epstein-Barr virus)
ggcccuuugccuggggcu

SEQ ID NO: 3965257 - RNA, 12 nt, Human herpesvirus 4 (Epstein-Barr virus)
ggccugagagcc

SEQ ID NO: 3965258 - RNA, 15 nt, Human herpesvirus 4 (Epstein-Barr virus)
ggccugcuggccgag

SEQ ID NO: 3965259 - RNA, 20 nt, Human herpesvirus 4 (Epstein-Barr virus)
ggccugggaggugcugaggc

SEQ ID NO: 3965260 - RNA, 11 nt, Human herpesvirus 4 (Epstein-Barr virus)
ggccuggugcc

SEQ ID NO: 3965261 - RNA, 17 nt, Human herpesvirus 4 (Epstein-Barr virus)
ggcggagaagacgggcu

SEQ ID NO: 3965262 - RNA, 23 nt, Human herpesvirus 4 (Epstein-Barr virus)
ggcguaacuugucuacaucccau

SEQ ID NO: 3965263 - RNA, 15 nt, Human herpesvirus 4 (Epstein-Barr virus)
ggcgucucaggcuau

SEQ ID NO: 3965264 - RNA, 18 nt, Human herpesvirus 4 (Epstein-Barr virus)
ggcuccuggaucuggggc

SEQ ID NO: 3965265 - RNA, 15 nt, Human herpesvirus 4 (Epstein-Barr virus)
ggcucgacgcgggcc

SEQ ID NO: 3965266 - RNA, 19 nt, Human herpesvirus 4 (Epstein-Barr virus)
ggcuggcaaagauccccag

SEQ ID NO: 3965267 - RNA, 21 nt, Human herpesvirus 4 (Epstein-Barr virus)
ggcuguacgccgccgccagca

SEQ ID NO: 3965268 - RNA, 16 nt, Human herpesvirus 4 (Epstein-Barr virus)
gggaacgugacaggca

SEQ ID NO: 3965269 - RNA, 12 nt, Human herpesvirus 4 (Epstein-Barr virus)
gggacugccugg

SEQ ID NO: 3965270 - RNA, 15 nt, Human herpesvirus 4 (Epstein-Barr virus)
gggaucaugaagccc

SEQ ID NO: 3965271 - RNA, 21 nt, Human herpesvirus 4 (Epstein-Barr virus)
gggaucuuuacguggguggau

SEQ ID NO: 3965272 - RNA, 21 nt, Human herpesvirus 4 (Epstein-Barr virus)
gggaugggcuugauggcccug

SEQ ID NO: 3965273 - RNA, 18 nt, Human herpesvirus 4 (Epstein-Barr virus)
gggccuagguacucuugg

SEQ ID NO: 3965274 - RNA, 17 nt, Human herpesvirus 4 (Epstein-Barr virus)
gggccuuccagagcucu

SEQ ID NO: 3965275 - RNA, 12 nt, Human herpesvirus 4 (Epstein-Barr virus)
ggggaagaggac

SEQ ID NO: 3965276 - RNA, 14 nt, Human herpesvirus 4 (Epstein-Barr virus)
ggggagggagcccg

SEQ ID NO: 3965277 - RNA, 22 nt, Human herpesvirus 4 (Epstein-Barr virus)
ggggaguaaggccgcugccagg

SEQ ID NO: 3965278 - RNA, 18 nt, Human herpesvirus 4 (Epstein-Barr virus)
ggggauuacccgacccag

SEQ ID NO: 3965279 - RNA, 19 nt, Human herpesvirus 4 (Epstein-Barr virus)
ggggcaggaggggcaggag

SEQ ID NO: 3965280 - RNA, 21 nt, Human herpesvirus 4 (Epstein-Barr virus)
ggggcgauaccuugggcauca

SEQ ID NO: 3965281 - RNA, 13 nt, Human herpesvirus 4 (Epstein-Barr virus)
gggggaaugaggg

SEQ ID NO: 3965282 - RNA, 13 nt, Human herpesvirus 4 (Epstein-Barr virus)
gggugggcugguu

SEQ ID NO: 3965283 - RNA, 21 nt, Human herpesvirus 4 (Epstein-Barr virus)
gguaaggcucuucgggcaaga

SEQ ID NO: 3965284 - RNA, 18 nt, Human herpesvirus 4 (Epstein-Barr virus)
gguagccuugggggccug

SEQ ID NO: 3965285 - RNA, 16 nt, Human herpesvirus 4 (Epstein-Barr virus)
ggucaccccagaugcc

SEQ ID NO: 3965286 - RNA, 19 nt, Human herpesvirus 4 (Epstein-Barr virus)
gguccaucuuaggagcccg

SEQ ID NO: 3965287 - RNA, 15 nt, Human herpesvirus 4 (Epstein-Barr virus)
gguccugaggggcgg

SEQ ID NO: 3965288 - RNA, 16 nt, Human herpesvirus 4 (Epstein-Barr virus)
ggugccuccagagccc

SEQ ID NO: 3965289 - RNA, 23 nt, Human herpesvirus 4 (Epstein-Barr virus)
ggugccugagacagaggugcuca

SEQ ID NO: 3965290 - RNA, 13 nt, Human herpesvirus 4 (Epstein-Barr virus)
ggugcucccccug

SEQ ID NO: 3965291 - RNA, 15 nt, Human herpesvirus 4 (Epstein-Barr virus)
ggugcuguccugcug

SEQ ID NO: 3965292 - RNA, 16 nt, Human herpesvirus 4 (Epstein-Barr virus)
gguggcuugggcugug

SEQ ID NO: 3965293 - RNA, 21 nt, Human herpesvirus 4 (Epstein-Barr virus)
ggugggacaaaauggggucug

SEQ ID NO: 3965294 - RNA, 17 nt, Human herpesvirus 4 (Epstein-Barr virus)
gguguagugggugggca

SEQ ID NO: 3965295 - RNA, 21 nt, Human herpesvirus 4 (Epstein-Barr virus)
gguuugcccaacucuuauucu

SEQ ID NO: 3965296 - RNA, 22 nt, Human herpesvirus 4 (Epstein-Barr virus)
guaaaauuuacaccugacccau

SEQ ID NO: 3965297 - RNA, 16 nt, Human herpesvirus 4 (Epstein-Barr virus)
guaacuugucuacauc

SEQ ID NO: 3965298 - RNA, 23 nt, Human herpesvirus 4 (Epstein-Barr virus)
guacccuuucuaccaggggcgag

SEQ ID NO: 3965299 - RNA, 17 nt, Human herpesvirus 4 (Epstein-Barr virus)
guagaggcgcgggucug

SEQ ID NO: 3965300 - RNA, 14 nt, Human herpesvirus 4 (Epstein-Barr virus)
guauccaccuagaa

SEQ ID NO: 3965301 - RNA, 14 nt, Human herpesvirus 4 (Epstein-Barr virus)
gucaccugcacaga

SEQ ID NO: 3965302 - RNA, 16 nt, Human herpesvirus 4 (Epstein-Barr virus)
gucaccugcacagauc

SEQ ID NO: 3965303 - RNA, 18 nt, Human herpesvirus 4 (Epstein-Barr virus)
gucacuaaaguuggucag

SEQ ID NO: 3965304 - RNA, 20 nt, Human herpesvirus 4 (Epstein-Barr virus)
gucauucuaucaauuaaaca

SEQ ID NO: 3965305 - RNA, 22 nt, Human herpesvirus 4 (Epstein-Barr virus)
gucauuuauuaggcacaaacuu

SEQ ID NO: 3965306 - RNA, 21 nt, Human herpesvirus 4 (Epstein-Barr virus)
guccagaagcagauagccggc

SEQ ID NO: 3965307 - RNA, 14 nt, Human herpesvirus 4 (Epstein-Barr virus)
guccaggagucugc

SEQ ID NO: 3965308 - RNA, 18 nt, Human herpesvirus 4 (Epstein-Barr virus)
guccaggggccacacagc

SEQ ID NO: 3965309 - RNA, 17 nt, Human herpesvirus 4 (Epstein-Barr virus)
guccaggguccaggaga

SEQ ID NO: 3965310 - RNA, 14 nt, Human herpesvirus 4 (Epstein-Barr virus)
guccgcugggccag

SEQ ID NO: 3965311 - RNA, 19 nt, Human herpesvirus 4 (Epstein-Barr virus)
guccugaauccgcgcagcc

SEQ ID NO: 3965312 - RNA, 21 nt, Human herpesvirus 4 (Epstein-Barr virus)
gucgaugggcagcuauauuca

SEQ ID NO: 3965313 - RNA, 16 nt, Human herpesvirus 4 (Epstein-Barr virus)
gucgcccccucugccu

SEQ ID NO: 3965314 - RNA, 19 nt, Human herpesvirus 4 (Epstein-Barr virus)
gucuagccacauagcaggu

SEQ ID NO: 3965315 - RNA, 14 nt, Human herpesvirus 4 (Epstein-Barr virus)
gucuccgggucagg

SEQ ID NO: 3965316 - RNA, 16 nt, Human herpesvirus 4 (Epstein-Barr virus)
gucucuuucuggccaa

SEQ ID NO: 3965317 - RNA, 15 nt, Human herpesvirus 4 (Epstein-Barr virus)
gucuggcagggggcc

SEQ ID NO: 3965318 - RNA, 22 nt, Human herpesvirus 4 (Epstein-Barr virus)
gucugugguugucuucccagac

SEQ ID NO: 3965319 - RNA, 23 nt, Human herpesvirus 4 (Epstein-Barr virus)
gucuucugucucggccuccuggc

SEQ ID NO: 3965320 - RNA, 21 nt, Human herpesvirus 4 (Epstein-Barr virus)
gugacgaagacccaucugagg

SEQ ID NO: 3965321 - RNA, 18 nt, Human herpesvirus 4 (Epstein-Barr virus)
gugaugaaaacagaggcu

SEQ ID NO: 3965322 - RNA, 15 nt, Human herpesvirus 4 (Epstein-Barr virus)
gugccucugggugcu

SEQ ID NO: 3965323 - RNA, 14 nt, Human herpesvirus 4 (Epstein-Barr virus)
guggaacaggagca

SEQ ID NO: 3965324 - RNA, 20 nt, Human herpesvirus 4 (Epstein-Barr virus)
guggccucuacgccaggcuc

SEQ ID NO: 3965325 - RNA, 13 nt, Human herpesvirus 4 (Epstein-Barr virus)
guggcugcggugg

SEQ ID NO: 3965326 - RNA, 19 nt, Human herpesvirus 4 (Epstein-Barr virus)
gugucuggcggccgcugcg

SEQ ID NO: 3965327 - RNA, 14 nt, Human herpesvirus 4 (Epstein-Barr virus)
gugucuguaaucuc

SEQ ID NO: 3965328 - RNA, 19 nt, Human herpesvirus 4 (Epstein-Barr virus)
guucacugcguagaugagc

SEQ ID NO: 3965329 - RNA, 17 nt, Human herpesvirus 4 (Epstein-Barr virus)
guucagggacuuguccu

SEQ ID NO: 3965330 - RNA, 23 nt, Human herpesvirus 4 (Epstein-Barr virus)
guugagcccgacgaacuccucca

SEQ ID NO: 3965331 - RNA, 22 nt, Human herpesvirus 4 (Epstein-Barr virus)
guuggcuucugcugcugcuugu

SEQ ID NO: 3965332 - RNA, 16 nt, Human herpesvirus 4 (Epstein-Barr virus)
guugucuucccagacu

SEQ ID NO: 3965333 - RNA, 23 nt, Human herpesvirus 4 (Epstein-Barr virus)
guuucggcgccgcccgggggcca

SEQ ID NO: 3965334 - RNA, 14 nt, Human herpesvirus 4 (Epstein-Barr virus)
guuugcauugcugg

SEQ ID NO: 3965335 - RNA, 13 nt, Human herpesvirus 4 (Epstein-Barr virus)
guuuuaacaccug

SEQ ID NO: 3965336 - RNA, 16 nt, Human herpesvirus 4 (Epstein-Barr virus)
uaacggguggaagcau

SEQ ID NO: 3965337 - RNA, 16 nt, Human herpesvirus 4 (Epstein-Barr virus)
uaagucaugacaauuu

SEQ ID NO: 3965338 - RNA, 14 nt, Human herpesvirus 4 (Epstein-Barr virus)
uaauacgcccgaca

SEQ ID NO: 3965339 - RNA, 20 nt, Human herpesvirus 4 (Epstein-Barr virus)
uaaugauucaucagaagcua

SEQ ID NO: 3965340 - RNA, 20 nt, Human herpesvirus 4 (Epstein-Barr virus)
uaauucucuucuguuugcau

SEQ ID NO: 3965341 - RNA, 21 nt, Human herpesvirus 4 (Epstein-Barr virus)
uacaacucagccccaucuucc

SEQ ID NO: 3965342 - RNA, 23 nt, Human herpesvirus 4 (Epstein-Barr virus)
uacagcuacaccgaucaccagac

SEQ ID NO: 3965343 - RNA, 15 nt, Human herpesvirus 4 (Epstein-Barr virus)
uacauuccaguuucc

SEQ ID NO: 3965344 - RNA, 17 nt, Human herpesvirus 4 (Epstein-Barr virus)
uacccggucgcauggug

SEQ ID NO: 3965345 - RNA, 23 nt, Human herpesvirus 4 (Epstein-Barr virus)
uacccucauugugcugaagccca

SEQ ID NO: 3965346 - RNA, 15 nt, Human herpesvirus 4 (Epstein-Barr virus)
uaccuggucaagagc

SEQ ID NO: 3965347 - RNA, 16 nt, Human herpesvirus 4 (Epstein-Barr virus)
uacgcugcccuagagg

SEQ ID NO: 3965348 - RNA, 23 nt, Human herpesvirus 4 (Epstein-Barr virus)
uacugcagugggccucucuggcu

SEQ ID NO: 3965349 - RNA, 23 nt, Human herpesvirus 4 (Epstein-Barr virus)
uagcccaggcacaucuggcaccu

SEQ ID NO: 3965350 - RNA, 13 nt, Human herpesvirus 4 (Epstein-Barr virus)
uagccccuaggcc

SEQ ID NO: 3965351 - RNA, 19 nt, Human herpesvirus 4 (Epstein-Barr virus)
uagccucgcgacucguggg

SEQ ID NO: 3965352 - RNA, 18 nt, Human herpesvirus 4 (Epstein-Barr virus)
uagccuugggggccugga

SEQ ID NO: 3965353 - RNA, 19 nt, Human herpesvirus 4 (Epstein-Barr virus)
uagcguagaauccagccag

SEQ ID NO: 3965354 - RNA, 16 nt, Human herpesvirus 4 (Epstein-Barr virus)
uaggagacgcccucaa

SEQ ID NO: 3965355 - RNA, 14 nt, Human herpesvirus 4 (Epstein-Barr virus)
uagugcagggggcu

SEQ ID NO: 3965356 - RNA, 21 nt, Human herpesvirus 4 (Epstein-Barr virus)
uaguggcaguucgacggccuc

SEQ ID NO: 3965357 - RNA, 17 nt, Human herpesvirus 4 (Epstein-Barr virus)
uaucccaaauaaauguu

SEQ ID NO: 3965358 - RNA, 16 nt, Human herpesvirus 4 (Epstein-Barr virus)
uaugcagaaggggccc

SEQ ID NO: 3965359 - RNA, 13 nt, Human herpesvirus 4 (Epstein-Barr virus)
uaugcagucucaa

SEQ ID NO: 3965360 - RNA, 23 nt, Human herpesvirus 4 (Epstein-Barr virus)
uaugguaaggcucuucgggcaag

SEQ ID NO: 3965361 - RNA, 15 nt, Human herpesvirus 4 (Epstein-Barr virus)
uauugccauguccaa

SEQ ID NO: 3965362 - RNA, 14 nt, Human herpesvirus 4 (Epstein-Barr virus)
uauuuacaaacacu

SEQ ID NO: 3965363 - RNA, 12 nt, Human herpesvirus 4 (Epstein-Barr virus)
uauuuacagcca

SEQ ID NO: 3965364 - RNA, 14 nt, Human herpesvirus 4 (Epstein-Barr virus)
ucaaaaucaaagua

SEQ ID NO: 3965365 - RNA, 16 nt, Human herpesvirus 4 (Epstein-Barr virus)
ucacagaccagccccu

SEQ ID NO: 3965366 - RNA, 23 nt, Human herpesvirus 4 (Epstein-Barr virus)
ucacagcugcugguuuggagaaa

SEQ ID NO: 3965367 - RNA, 17 nt, Human herpesvirus 4 (Epstein-Barr virus)
ucacauauccagagcug

SEQ ID NO: 3965368 - RNA, 17 nt, Human herpesvirus 4 (Epstein-Barr virus)
ucaccuuccagacuaug

SEQ ID NO: 3965369 - RNA, 11 nt, Human herpesvirus 4 (Epstein-Barr virus)
ucagagagcau

SEQ ID NO: 3965370 - RNA, 19 nt, Human herpesvirus 4 (Epstein-Barr virus)
ucagcacuuugccagcaac

SEQ ID NO: 3965371 - RNA, 21 nt, Human herpesvirus 4 (Epstein-Barr virus)
ucagccaccuccccuguggcc

SEQ ID NO: 3965372 - RNA, 23 nt, Human herpesvirus 4 (Epstein-Barr virus)
ucagcgagguuaagcugcaccug

SEQ ID NO: 3965373 - RNA, 12 nt, Human herpesvirus 4 (Epstein-Barr virus)
ucagcuccaggg

SEQ ID NO: 3965374 - RNA, 16 nt, Human herpesvirus 4 (Epstein-Barr virus)
ucagcuucgaggucuc

SEQ ID NO: 3965375 - RNA, 20 nt, Human herpesvirus 4 (Epstein-Barr virus)
ucaggagguacaugggccac

SEQ ID NO: 3965376 - RNA, 13 nt, Human herpesvirus 4 (Epstein-Barr virus)
ucaggccucccag

SEQ ID NO: 3965377 - RNA, 20 nt, Human herpesvirus 4 (Epstein-Barr virus)
ucagggaaaaacuggccaug

SEQ ID NO: 3965378 - RNA, 18 nt, Human herpesvirus 4 (Epstein-Barr virus)
ucaugcagggugcacaga

SEQ ID NO: 3965379 - RNA, 14 nt, Human herpesvirus 4 (Epstein-Barr virus)
ucaugcgugaccac

SEQ ID NO: 3965380 - RNA, 23 nt, Human herpesvirus 4 (Epstein-Barr virus)
ucaugcgugaccaccuggccagg

SEQ ID NO: 3965381 - RNA, 17 nt, Human herpesvirus 4 (Epstein-Barr virus)
ucaugggggaaugaggg

SEQ ID NO: 3965382 - RNA, 22 nt, Human herpesvirus 4 (Epstein-Barr virus)
uccaacauuaaagccuccucgc

SEQ ID NO: 3965383 - RNA, 15 nt, Human herpesvirus 4 (Epstein-Barr virus)
uccacucccagucca

SEQ ID NO: 3965384 - RNA, 21 nt, Human herpesvirus 4 (Epstein-Barr virus)
uccagagaggcgcagcccagc

SEQ ID NO: 3965385 - RNA, 18 nt, Human herpesvirus 4 (Epstein-Barr virus)
uccagggcccuggucagg

SEQ ID NO: 3965386 - RNA, 15 nt, Human herpesvirus 4 (Epstein-Barr virus)
uccaggugacagcag

SEQ ID NO: 3965387 - RNA, 22 nt, Human herpesvirus 4 (Epstein-Barr virus)
uccaugcaaguggaugcaucua

SEQ ID NO: 3965388 - RNA, 21 nt, Human herpesvirus 4 (Epstein-Barr virus)
ucccaaguguuuccagacacc

SEQ ID NO: 3965389 - RNA, 19 nt, Human herpesvirus 4 (Epstein-Barr virus)
ucccaccaccccccccacc

SEQ ID NO: 3965390 - RNA, 19 nt, Human herpesvirus 4 (Epstein-Barr virus)
uccccauagacucccaugu

SEQ ID NO: 3965391 - RNA, 18 nt, Human herpesvirus 4 (Epstein-Barr virus)
ucccgcgccgcaagcaug

SEQ ID NO: 3965392 - RNA, 16 nt, Human herpesvirus 4 (Epstein-Barr virus)
ucccggcacaccagac

SEQ ID NO: 3965393 - RNA, 18 nt, Human herpesvirus 4 (Epstein-Barr virus)
ucccgucauucuuucggg

SEQ ID NO: 3965394 - RNA, 16 nt, Human herpesvirus 4 (Epstein-Barr virus)
ucccucaccagggcug

SEQ ID NO: 3965395 - RNA, 15 nt, Human herpesvirus 4 (Epstein-Barr virus)
uccgaugcccaccag

SEQ ID NO: 3965396 - RNA, 19 nt, Human herpesvirus 4 (Epstein-Barr virus)
ucgagaaccccagcaacau

SEQ ID NO: 3965397 - RNA, 21 nt, Human herpesvirus 4 (Epstein-Barr virus)
ucgcacucuuguugcuagccu

SEQ ID NO: 3965398 - RNA, 22 nt, Human herpesvirus 4 (Epstein-Barr virus)
ucgcagcucuaacuuggcaucu

SEQ ID NO: 3965399 - RNA, 18 nt, Human herpesvirus 4 (Epstein-Barr virus)
ucgcagcuggaggaaugc

SEQ ID NO: 3965400 - RNA, 13 nt, Human herpesvirus 4 (Epstein-Barr virus)
ucgcaggcccccc

SEQ ID NO: 3965401 - RNA, 14 nt, Human herpesvirus 4 (Epstein-Barr virus)
ucgcccccucuuug

SEQ ID NO: 3965402 - RNA, 16 nt, Human herpesvirus 4 (Epstein-Barr virus)
uuauucuugauugccu

SEQ ID NO: 3965403 - RNA, 18 nt, Human herpesvirus 4 (Epstein-Barr virus)
uucagcuccagggccagc

SEQ ID NO: 3965404 - RNA, 20 nt, Human herpesvirus 4 (Epstein-Barr virus)
uuccacccccuggagccagc

SEQ ID NO: 3965405 - RNA, 16 nt, Human herpesvirus 4 (Epstein-Barr virus)
uuccccccagccugag

SEQ ID NO: 3965406 - RNA, 15 nt, Human herpesvirus 4 (Epstein-Barr virus)
uucccgacgccaaug

SEQ ID NO: 3965407 - RNA, 15 nt, Human herpesvirus 4 (Epstein-Barr virus)
uuccgucagccaggg

SEQ ID NO: 3965408 - RNA, 17 nt, Human herpesvirus 4 (Epstein-Barr virus)
uucuggccaaccugccu

SEQ ID NO: 3965409 - RNA, 21 nt, Human herpesvirus 4 (Epstein-Barr virus)
uucuggcgauuuuaaucugga

SEQ ID NO: 3965410 - RNA, 14 nt, Human herpesvirus 4 (Epstein-Barr virus)
uugaucuucuucuc

SEQ ID NO: 3965411 - RNA, 13 nt, Human herpesvirus 4 (Epstein-Barr virus)
uugcuagggagga

SEQ ID NO: 3965412 - RNA, 20 nt, Human herpesvirus 4 (Epstein-Barr virus)
uugcucuucgugcucuucau

SEQ ID NO: 3965413 - RNA, 22 nt, Human herpesvirus 4 (Epstein-Barr virus)
uuguauugugaggaaaggccuu

SEQ ID NO: 3965414 - RNA, 22 nt, Human herpesvirus 4 (Epstein-Barr virus)
uugucuucccagacucugcuuu

SEQ ID NO: 3965415 - RNA, 17 nt, Human herpesvirus 4 (Epstein-Barr virus)
aaagucccgagcggccu

SEQ ID NO: 3965416 - RNA, 14 nt, Human herpesvirus 4 (Epstein-Barr virus)
aacaagggaagagg

SEQ ID NO: 3965417 - RNA, 20 nt, Human herpesvirus 4 (Epstein-Barr virus)
aacccuugcccucuccagca

SEQ ID NO: 3965418 - RNA, 17 nt, Human herpesvirus 4 (Epstein-Barr virus)
aacgccggccugcuggc

SEQ ID NO: 3965419 - RNA, 17 nt, Human herpesvirus 4 (Epstein-Barr virus)
aacggcgagcaggguga

SEQ ID NO: 3965420 - RNA, 21 nt, Human herpesvirus 4 (Epstein-Barr virus)
aacucugcccuucagugucug

SEQ ID NO: 3965421 - RNA, 16 nt, Human herpesvirus 4 (Epstein-Barr virus)
aacugcgagggggccu

SEQ ID NO: 3965422 - RNA, 19 nt, Human herpesvirus 4 (Epstein-Barr virus)
aacuggccaugcaggccug

SEQ ID NO: 3965423 - RNA, 16 nt, Human herpesvirus 4 (Epstein-Barr virus)
aacugggcaucgggcu

SEQ ID NO: 3965424 - RNA, 21 nt, Human herpesvirus 4 (Epstein-Barr virus)
aacuggggcugguggccuggg

SEQ ID NO: 3965425 - RNA, 17 nt, Human herpesvirus 4 (Epstein-Barr virus)
aacugucacaccagucc

SEQ ID NO: 3965426 - RNA, 20 nt, Human herpesvirus 4 (Epstein-Barr virus)
aagaacacuccacagaugga

SEQ ID NO: 3965427 - RNA, 13 nt, Human herpesvirus 4 (Epstein-Barr virus)
aagacuccugccu

SEQ ID NO: 3965428 - RNA, 17 nt, Human herpesvirus 4 (Epstein-Barr virus)
aagaucgugaggccuga

SEQ ID NO: 3965429 - RNA, 13 nt, Human herpesvirus 4 (Epstein-Barr virus)
aagcaauaaagua

SEQ ID NO: 3965430 - RNA, 15 nt, Human herpesvirus 4 (Epstein-Barr virus)
aagccugccucaucc

SEQ ID NO: 3965431 - RNA, 22 nt, Human herpesvirus 4 (Epstein-Barr virus)
aagcuacaaacacgggccuggg

SEQ ID NO: 3965432 - RNA, 21 nt, Human herpesvirus 4 (Epstein-Barr virus)
aagcuggacgugaaccucccc

SEQ ID NO: 3965433 - RNA, 14 nt, Human herpesvirus 4 (Epstein-Barr virus)
aagcuugcuggggc

SEQ ID NO: 3965434 - RNA, 14 nt, Human herpesvirus 4 (Epstein-Barr virus)
aaggcaguccaggg

SEQ ID NO: 3965435 - RNA, 15 nt, Human herpesvirus 4 (Epstein-Barr virus)
aaggccacaaagagg

SEQ ID NO: 3965436 - RNA, 15 nt, Human herpesvirus 4 (Epstein-Barr virus)
aaggcggagaagacg

SEQ ID NO: 3965437 - RNA, 18 nt, Human herpesvirus 4 (Epstein-Barr virus)
aagucaggauucucuaau

SEQ ID NO: 3965438 - RNA, 20 nt, Human herpesvirus 4 (Epstein-Barr virus)
aagucuauacggccacaacc

SEQ ID NO: 3965439 - RNA, 15 nt, Human herpesvirus 4 (Epstein-Barr virus)
aagugauuaggagca

SEQ ID NO: 3965440 - RNA, 20 nt, Human herpesvirus 4 (Epstein-Barr virus)
aagugauuaggagcagggcc

SEQ ID NO: 3965441 - RNA, 16 nt, Human herpesvirus 4 (Epstein-Barr virus)
aaucaaaacuuuagag

SEQ ID NO: 3965442 - RNA, 12 nt, Human herpesvirus 4 (Epstein-Barr virus)
aaugaacacuca

SEQ ID NO: 3965443 - RNA, 16 nt, Human herpesvirus 4 (Epstein-Barr virus)
agccuuauuuggacau

SEQ ID NO: 3965444 - RNA, 19 nt, Human herpesvirus 4 (Epstein-Barr virus)
agcgaagcagcuccgcccu

SEQ ID NO: 3965445 - RNA, 18 nt, Human herpesvirus 4 (Epstein-Barr virus)
agcgaggauaaucugggc

SEQ ID NO: 3965446 - RNA, 21 nt, Human herpesvirus 4 (Epstein-Barr virus)
agcgcccugucccuggagcug

SEQ ID NO: 3965447 - RNA, 21 nt, Human herpesvirus 4 (Epstein-Barr virus)
agcgccucgcucagcccacua

SEQ ID NO: 3965448 - RNA, 15 nt, Human herpesvirus 4 (Epstein-Barr virus)
agcgcggcagaggcc

SEQ ID NO: 3965449 - RNA, 15 nt, Human herpesvirus 4 (Epstein-Barr virus)
agcggccuccgccgu

SEQ ID NO: 3965450 - RNA, 20 nt, Human herpesvirus 4 (Epstein-Barr virus)
agcucauaugccgcugcaca

SEQ ID NO: 3965451 - RNA, 15 nt, Human herpesvirus 4 (Epstein-Barr virus)
agcucuaacuuggca

SEQ ID NO: 3965452 - RNA, 21 nt, Human herpesvirus 4 (Epstein-Barr virus)
agcuggugguccgcauguuuu

SEQ ID NO: 3965453 - RNA, 16 nt, Human herpesvirus 4 (Epstein-Barr virus)
agcuuugaugaggcug

SEQ ID NO: 3965454 - RNA, 22 nt, Human herpesvirus 4 (Epstein-Barr virus)
agcuuuugaccaagcuaccaga

SEQ ID NO: 3965455 - RNA, 14 nt, Human herpesvirus 4 (Epstein-Barr virus)
aggaagcuggccag

SEQ ID NO: 3965456 - RNA, 19 nt, Human herpesvirus 4 (Epstein-Barr virus)
aggaaguuuuaacaccuga

SEQ ID NO: 3965457 - RNA, 18 nt, Human herpesvirus 4 (Epstein-Barr virus)
aggacacccaccaccagg

SEQ ID NO: 3965458 - RNA, 13 nt, Human herpesvirus 4 (Epstein-Barr virus)
aggacuaauguuc

SEQ ID NO: 3965459 - RNA, 15 nt, Human herpesvirus 4 (Epstein-Barr virus)
aggagaagagaggcu

SEQ ID NO: 3965460 - RNA, 12 nt, Human herpesvirus 4 (Epstein-Barr virus)
aggagagcugga

SEQ ID NO: 3965461 - RNA, 16 nt, Human herpesvirus 4 (Epstein-Barr virus)
aggagcaggaggggca

SEQ ID NO: 3965462 - RNA, 20 nt, Human herpesvirus 4 (Epstein-Barr virus)
aggauggcacgggcagagga

SEQ ID NO: 3965463 - RNA, 20 nt, Human herpesvirus 4 (Epstein-Barr virus)
aggauggcccugcaaacuga

SEQ ID NO: 3965464 - RNA, 19 nt, Human herpesvirus 4 (Epstein-Barr virus)
aggcaaacauacaggagga

SEQ ID NO: 3965465 - RNA, 15 nt, Human herpesvirus 4 (Epstein-Barr virus)
aggcacggccgggcu

SEQ ID NO: 3965466 - RNA, 18 nt, Human herpesvirus 4 (Epstein-Barr virus)
aggcacggccucgugcaa

SEQ ID NO: 3965467 - RNA, 20 nt, Human herpesvirus 4 (Epstein-Barr virus)
aggcagaugaggccccuuac

SEQ ID NO: 3965468 - RNA, 14 nt, Human herpesvirus 4 (Epstein-Barr virus)
aggccccggccgcc

SEQ ID NO: 3965469 - RNA, 16 nt, Human herpesvirus 4 (Epstein-Barr virus)
aggccccggccgccgu

SEQ ID NO: 3965470 - RNA, 19 nt, Human herpesvirus 4 (Epstein-Barr virus)
aggcccgggggccuugucc

SEQ ID NO: 3965471 - RNA, 14 nt, Human herpesvirus 4 (Epstein-Barr virus)
aggccucaggcaac

SEQ ID NO: 3965472 - RNA, 16 nt, Human herpesvirus 4 (Epstein-Barr virus)
aggcggcuguggccuc

SEQ ID NO: 3965473 - RNA, 23 nt, Human herpesvirus 4 (Epstein-Barr virus)
aggcuccuggaucuggggcuggc

SEQ ID NO: 3965474 - RNA, 17 nt, Human herpesvirus 4 (Epstein-Barr virus)
aggcuggugccuuggcu

SEQ ID NO: 3965475 - RNA, 22 nt, Human herpesvirus 4 (Epstein-Barr virus)
aggcuguugacaugagcaugga

SEQ ID NO: 3965476 - RNA, 11 nt, Human herpesvirus 4 (Epstein-Barr virus)
agggcaaagac

SEQ ID NO: 3965477 - RNA, 15 nt, Human herpesvirus 4 (Epstein-Barr virus)
agggcgccagggauc

SEQ ID NO: 3965478 - RNA, 22 nt, Human herpesvirus 4 (Epstein-Barr virus)
agggcucaccagggaggccugg

SEQ ID NO: 3965479 - RNA, 18 nt, Human herpesvirus 4 (Epstein-Barr virus)
agggcugguuggggagcu

SEQ ID NO: 3965480 - RNA, 16 nt, Human herpesvirus 4 (Epstein-Barr virus)
agggugagcccaccug

SEQ ID NO: 3965481 - RNA, 14 nt, Human herpesvirus 4 (Epstein-Barr virus)
agguccaucccgga

SEQ ID NO: 3965482 - RNA, 16 nt, Human herpesvirus 4 (Epstein-Barr virus)
aggucuccagagggca

SEQ ID NO: 3965483 - RNA, 12 nt, Human herpesvirus 4 (Epstein-Barr virus)
aggugccacaga

SEQ ID NO: 3965484 - RNA, 14 nt, Human herpesvirus 4 (Epstein-Barr virus)
agguguccagcgcu

SEQ ID NO: 3965485 - RNA, 22 nt, Human herpesvirus 4 (Epstein-Barr virus)
agguuugagaaucugggcuggg

SEQ ID NO: 3965486 - RNA, 18 nt, Human herpesvirus 4 (Epstein-Barr virus)
aguaagcauggggcucug

SEQ ID NO: 3965487 - RNA, 19 nt, Human herpesvirus 4 (Epstein-Barr virus)
agucaccuuccagacuaug

SEQ ID NO: 3965488 - RNA, 16 nt, Human herpesvirus 4 (Epstein-Barr virus)
agucagauugccuucu

SEQ ID NO: 3965489 - RNA, 15 nt, Human herpesvirus 4 (Epstein-Barr virus)
agucccuccucacca

SEQ ID NO: 3965490 - RNA, 15 nt, Human herpesvirus 4 (Epstein-Barr virus)
agugcuccggcugcc

SEQ ID NO: 3965491 - RNA, 15 nt, Human herpesvirus 4 (Epstein-Barr virus)
agugucccugcugcc

SEQ ID NO: 3965492 - RNA, 21 nt, Human herpesvirus 4 (Epstein-Barr virus)
aguugaugaaaggggccgagg

SEQ ID NO: 3965493 - RNA, 16 nt, Human herpesvirus 4 (Epstein-Barr virus)
auaaauaucuuccugu

SEQ ID NO: 3965494 - RNA, 20 nt, Human herpesvirus 4 (Epstein-Barr virus)
auacaggcccgcaauuucca

SEQ ID NO: 3965495 - RNA, 19 nt, Human herpesvirus 4 (Epstein-Barr virus)
uuucagacccaccauggaa

SEQ ID NO: 3965496 - RNA, 16 nt, Human herpesvirus 4 (Epstein-Barr virus)
ucgcucaccccugugc

SEQ ID NO: 3965497 - RNA, 14 nt, Human herpesvirus 4 (Epstein-Barr virus)
ucgcugucgagcug

SEQ ID NO: 3965498 - RNA, 19 nt, Human herpesvirus 4 (Epstein-Barr virus)
ucggcaccuagcccacucc

SEQ ID NO: 3965499 - RNA, 14 nt, Human herpesvirus 4 (Epstein-Barr virus)
ucggcccuccgcau

SEQ ID NO: 3965500 - RNA, 20 nt, Human herpesvirus 4 (Epstein-Barr virus)
ucgugcaaccaggcccacug

SEQ ID NO: 3965501 - RNA, 19 nt, Human herpesvirus 4 (Epstein-Barr virus)
ucuaaaaaucaaaacuuua

SEQ ID NO: 3965502 - RNA, 20 nt, Human herpesvirus 4 (Epstein-Barr virus)
ucuacugccuuguccacugg

SEQ ID NO: 3965503 - RNA, 18 nt, Human herpesvirus 4 (Epstein-Barr virus)
ucucaggcuaugaagaag

SEQ ID NO: 3965504 - RNA, 22 nt, Human herpesvirus 4 (Epstein-Barr virus)
ucuccagcgucauuucuuccaa

SEQ ID NO: 3965505 - RNA, 15 nt, Human herpesvirus 4 (Epstein-Barr virus)
ucuccaucagggcca

SEQ ID NO: 3965506 - RNA, 18 nt, Human herpesvirus 4 (Epstein-Barr virus)
ucucccccgggcgcugcc

SEQ ID NO: 3965507 - RNA, 14 nt, Human herpesvirus 4 (Epstein-Barr virus)
ucucccgcgccgca

SEQ ID NO: 3965508 - RNA, 14 nt, Human herpesvirus 4 (Epstein-Barr virus)
ucucucaucuccaa

SEQ ID NO: 3965509 - RNA, 21 nt, Human herpesvirus 4 (Epstein-Barr virus)
ucugagagauugguaccagaa

SEQ ID NO: 3965510 - RNA, 21 nt, Human herpesvirus 4 (Epstein-Barr virus)
ucugcacaggcuuggaaacac

SEQ ID NO: 3965511 - RNA, 21 nt, Human herpesvirus 4 (Epstein-Barr virus)
ucugcgccagccccgcccucc

SEQ ID NO: 3965512 - RNA, 11 nt, Human herpesvirus 4 (Epstein-Barr virus)
ucugcuucugg

SEQ ID NO: 3965513 - RNA, 20 nt, Human herpesvirus 4 (Epstein-Barr virus)
ucugggcagccagagccagc

SEQ ID NO: 3965514 - RNA, 18 nt, Human herpesvirus 4 (Epstein-Barr virus)
ucugggccgcccggccuc

SEQ ID NO: 3965515 - RNA, 23 nt, Human herpesvirus 4 (Epstein-Barr virus)
ucuggucacuaaaguuggucagg

SEQ ID NO: 3965516 - RNA, 13 nt, Human herpesvirus 4 (Epstein-Barr virus)
ucuggugaaacug

SEQ ID NO: 3965517 - RNA, 17 nt, Human herpesvirus 4 (Epstein-Barr virus)
ucuuacaccagaggcca

SEQ ID NO: 3965518 - RNA, 14 nt, Human herpesvirus 4 (Epstein-Barr virus)
ucuucugggaacac

SEQ ID NO: 3965519 - RNA, 21 nt, Human herpesvirus 4 (Epstein-Barr virus)
ucuugccguggcgccugggga

SEQ ID NO: 3965520 - RNA, 17 nt, Human herpesvirus 4 (Epstein-Barr virus)
ugaagauugucacagcu

SEQ ID NO: 3965521 - RNA, 12 nt, Human herpesvirus 4 (Epstein-Barr virus)
ugaaggagggcu

SEQ ID NO: 3965522 - RNA, 13 nt, Human herpesvirus 4 (Epstein-Barr virus)
ugacacagacuug

SEQ ID NO: 3965523 - RNA, 20 nt, Human herpesvirus 4 (Epstein-Barr virus)
ugacuguaaucacuggcaaa

SEQ ID NO: 3965524 - RNA, 14 nt, Human herpesvirus 4 (Epstein-Barr virus)
ugagccacacccac

SEQ ID NO: 3965525 - RNA, 15 nt, Human herpesvirus 4 (Epstein-Barr virus)
ugaggcccagccccc

SEQ ID NO: 3965526 - RNA, 12 nt, Human herpesvirus 4 (Epstein-Barr virus)
ugagggaaaagg

SEQ ID NO: 3965527 - RNA, 14 nt, Human herpesvirus 4 (Epstein-Barr virus)
ugaugguggccggc

SEQ ID NO: 3965528 - RNA, 17 nt, Human herpesvirus 4 (Epstein-Barr virus)
ugcacgagaccccuggg

SEQ ID NO: 3965529 - RNA, 17 nt, Human herpesvirus 4 (Epstein-Barr virus)
ugcacgccaacagcgac

SEQ ID NO: 3965530 - RNA, 14 nt, Human herpesvirus 4 (Epstein-Barr virus)
ugcacucugaccag

SEQ ID NO: 3965531 - RNA, 15 nt, Human herpesvirus 4 (Epstein-Barr virus)
ugcagcaccucagcu

SEQ ID NO: 3965532 - RNA, 22 nt, Human herpesvirus 4 (Epstein-Barr virus)
ugcagcugaguccccuccuugg

SEQ ID NO: 3965533 - RNA, 13 nt, Human herpesvirus 4 (Epstein-Barr virus)
ugcccaagccugg

SEQ ID NO: 3965534 - RNA, 16 nt, Human herpesvirus 4 (Epstein-Barr virus)
ugcccagggcagacug

SEQ ID NO: 3965535 - RNA, 20 nt, Human herpesvirus 4 (Epstein-Barr virus)
ugcccucaugcgccagagcg

SEQ ID NO: 3965536 - RNA, 14 nt, Human herpesvirus 4 (Epstein-Barr virus)
ugccggaguuuucu

SEQ ID NO: 3965537 - RNA, 16 nt, Human herpesvirus 4 (Epstein-Barr virus)
ugccgucccagggccg

SEQ ID NO: 3965538 - RNA, 19 nt, Human herpesvirus 4 (Epstein-Barr virus)
ugccuggggcucagacuua

SEQ ID NO: 3965539 - RNA, 13 nt, Human herpesvirus 4 (Epstein-Barr virus)
ugccugugccucg

SEQ ID NO: 3965540 - RNA, 17 nt, Human herpesvirus 4 (Epstein-Barr virus)
ugcgagcucuccagcca

SEQ ID NO: 3965541 - RNA, 20 nt, Human herpesvirus 4 (Epstein-Barr virus)
ugcgaggaacuggcucagcu

SEQ ID NO: 3965542 - RNA, 19 nt, Human herpesvirus 4 (Epstein-Barr virus)
ugcgaugaggcggugggug

SEQ ID NO: 3965543 - RNA, 17 nt, Human herpesvirus 4 (Epstein-Barr virus)
ugcgcaacgccggccug

SEQ ID NO: 3965544 - RNA, 23 nt, Human herpesvirus 4 (Epstein-Barr virus)
ugcucaaggcagucuccaccuuu

SEQ ID NO: 3965545 - RNA, 18 nt, Human herpesvirus 4 (Epstein-Barr virus)
ugcucuucaaccuuggca

SEQ ID NO: 3965546 - RNA, 20 nt, Human herpesvirus 4 (Epstein-Barr virus)
ugcugccagagccucugcca

SEQ ID NO: 3965547 - RNA, 15 nt, Human herpesvirus 4 (Epstein-Barr virus)
ugcugccgcuacugc

SEQ ID NO: 3965548 - RNA, 20 nt, Human herpesvirus 4 (Epstein-Barr virus)
ugcugcgauuuucugaccuu

SEQ ID NO: 3965549 - RNA, 20 nt, Human herpesvirus 4 (Epstein-Barr virus)
ugcugcuacuggcuuucguc

SEQ ID NO: 3965550 - RNA, 16 nt, Human herpesvirus 4 (Epstein-Barr virus)
ugcuggccgcagcugg

SEQ ID NO: 3965551 - RNA, 18 nt, Human herpesvirus 4 (Epstein-Barr virus)
ugcuguacaugggaccuc

SEQ ID NO: 3965552 - RNA, 22 nt, Human herpesvirus 4 (Epstein-Barr virus)
ugcuucgcauuacaccauccca

SEQ ID NO: 3965553 - RNA, 19 nt, Human herpesvirus 4 (Epstein-Barr virus)
uggacgagggggcgcggcu

SEQ ID NO: 3965554 - RNA, 23 nt, Human herpesvirus 4 (Epstein-Barr virus)
uggagagauuucauccucagagg

SEQ ID NO: 3965555 - RNA, 23 nt, Human herpesvirus 4 (Epstein-Barr virus)
uggcacacgccagagacaaggca

SEQ ID NO: 3965556 - RNA, 23 nt, Human herpesvirus 4 (Epstein-Barr virus)
uggcauacuuuuugccacccagg

SEQ ID NO: 3965557 - RNA, 16 nt, Human herpesvirus 4 (Epstein-Barr virus)
uggccggcagccuggc

SEQ ID NO: 3965558 - RNA, 14 nt, Human herpesvirus 4 (Epstein-Barr virus)
uggcuacuuugugu

SEQ ID NO: 3965559 - RNA, 18 nt, Human herpesvirus 4 (Epstein-Barr virus)
uggcuguagccacccguc

SEQ ID NO: 3965560 - RNA, 16 nt, Human herpesvirus 4 (Epstein-Barr virus)
ugggaggcgaauguag

SEQ ID NO: 3965561 - RNA, 14 nt, Human herpesvirus 4 (Epstein-Barr virus)
ugggccaggucaca

SEQ ID NO: 3965562 - RNA, 22 nt, Human herpesvirus 4 (Epstein-Barr virus)
ugggcuucgggggccugugugc

SEQ ID NO: 3965563 - RNA, 13 nt, Human herpesvirus 4 (Epstein-Barr virus)
uggggcaggcccc

SEQ ID NO: 3965564 - RNA, 15 nt, Human herpesvirus 4 (Epstein-Barr virus)
uggugcaccugcuag

SEQ ID NO: 3965565 - RNA, 14 nt, Human herpesvirus 4 (Epstein-Barr virus)
uggugggacugaga

SEQ ID NO: 3965566 - RNA, 18 nt, Human herpesvirus 4 (Epstein-Barr virus)
uggugggggcggaugagg

SEQ ID NO: 3965567 - RNA, 18 nt, Human herpesvirus 4 (Epstein-Barr virus)
uguacgugccucagauag

SEQ ID NO: 3965568 - RNA, 17 nt, Human herpesvirus 4 (Epstein-Barr virus)
ugucccuuucagugguc

SEQ ID NO: 3965569 - RNA, 20 nt, Human herpesvirus 4 (Epstein-Barr virus)
ugucggcucucuuugaagug

SEQ ID NO: 3965570 - RNA, 17 nt, Human herpesvirus 4 (Epstein-Barr virus)
ugucuccugacgccaau

SEQ ID NO: 3965571 - RNA, 22 nt, Human herpesvirus 4 (Epstein-Barr virus)
ugucucuuucuggccaaccugc

SEQ ID NO: 3965572 - RNA, 21 nt, Human herpesvirus 4 (Epstein-Barr virus)
ugucugugguugucuucccag

SEQ ID NO: 3965573 - RNA, 17 nt, Human herpesvirus 4 (Epstein-Barr virus)
ugucuuugccaaccugc

SEQ ID NO: 3965574 - RNA, 19 nt, Human herpesvirus 4 (Epstein-Barr virus)
uguucacugcguagaugag

SEQ ID NO: 3965575 - RNA, 15 nt, Human herpesvirus 4 (Epstein-Barr virus)
uguucuacuccuggc

SEQ ID NO: 3965576 - RNA, 22 nt, Human herpesvirus 4 (Epstein-Barr virus)
uguugagaugagucaucccgug

SEQ ID NO: 3965577 - RNA, 23 nt, Human herpesvirus 4 (Epstein-Barr virus)
uguugcgcccuaccucuuuuggc

SEQ ID NO: 3965578 - RNA, 17 nt, Human herpesvirus 4 (Epstein-Barr virus)
uguuucccgacgccaau

SEQ ID NO: 3965579 - RNA, 15 nt, Human herpesvirus 4 (Epstein-Barr virus)
uuaacauggacaugc

SEQ ID NO: 3965580 - RNA, 11 nt, Human herpesvirus 4 (Epstein-Barr virus)
uuaaucuggau

SEQ ID NO: 3965581 - RNA, 17 nt, Human herpesvirus 4 (Epstein-Barr virus)
uuaauguccaguggggu

SEQ ID NO: 3965582 - RNA, 18 nt, Human herpesvirus 4 (Epstein-Barr virus)
uuagcagccuccgggccg

SEQ ID NO: 3965583 - RNA, 14 nt, Human herpesvirus 4 (Epstein-Barr virus)
uuagguaucuggau

SEQ ID NO: 3965584 - RNA, 13 nt, Human herpesvirus 4 (Epstein-Barr virus)
gaugauauugaau

SEQ ID NO: 3965585 - RNA, 21 nt, Human herpesvirus 4 (Epstein-Barr virus)
gauuucaaauaccgagaugua

SEQ ID NO: 3965586 - RNA, 20 nt, Human herpesvirus 4 (Epstein-Barr virus)
gauuuugggcacacuuaacu

SEQ ID NO: 3965587 - RNA, 15 nt, Human herpesvirus 4 (Epstein-Barr virus)
gcaaagauccccagu

SEQ ID NO: 3965588 - RNA, 21 nt, Human herpesvirus 4 (Epstein-Barr virus)
gcaaccaauguaucccaaaua

SEQ ID NO: 3965589 - RNA, 19 nt, Human herpesvirus 4 (Epstein-Barr virus)
gcaacccccggcucucagg

SEQ ID NO: 3965590 - RNA, 18 nt, Human herpesvirus 4 (Epstein-Barr virus)
gcaagauccuucuggcac

SEQ ID NO: 3965591 - RNA, 19 nt, Human herpesvirus 4 (Epstein-Barr virus)
gcacaacggcugugacuac

SEQ ID NO: 3965592 - RNA, 13 nt, Human herpesvirus 4 (Epstein-Barr virus)
gcaccagcuccag

SEQ ID NO: 3965593 - RNA, 16 nt, Human herpesvirus 4 (Epstein-Barr virus)
gcacggucgccccucc

SEQ ID NO: 3965594 - RNA, 23 nt, Human herpesvirus 4 (Epstein-Barr virus)
gcacuuugaaagaugucaaacau

SEQ ID NO: 3965595 - RNA, 14 nt, Human herpesvirus 4 (Epstein-Barr virus)
gcagaaaggcuggc

SEQ ID NO: 3965596 - RNA, 18 nt, Human herpesvirus 4 (Epstein-Barr virus)
gcagcuacacucuggggu

SEQ ID NO: 3965597 - RNA, 13 nt, Human herpesvirus 4 (Epstein-Barr virus)
gcagcucuggcac

SEQ ID NO: 3965598 - RNA, 14 nt, Human herpesvirus 4 (Epstein-Barr virus)
gcaggaggaggggc

SEQ ID NO: 3965599 - RNA, 18 nt, Human herpesvirus 4 (Epstein-Barr virus)
gcaggaggaggggcagga

SEQ ID NO: 3965600 - RNA, 21 nt, Human herpesvirus 4 (Epstein-Barr virus)
gcaggaggaggggcaggagca

SEQ ID NO: 3965601 - RNA, 15 nt, Human herpesvirus 4 (Epstein-Barr virus)
gcaggaggggcagga

SEQ ID NO: 3965602 - RNA, 20 nt, Human herpesvirus 4 (Epstein-Barr virus)
gcaggaggggcaggaggggc

SEQ ID NO: 3965603 - RNA, 15 nt, Human herpesvirus 4 (Epstein-Barr virus)
gcaggguccaagguu

SEQ ID NO: 3965604 - RNA, 16 nt, Human herpesvirus 4 (Epstein-Barr virus)
gcaguccggagacuga

SEQ ID NO: 3965605 - RNA, 15 nt, Human herpesvirus 4 (Epstein-Barr virus)
gcaugaucaggaccc

SEQ ID NO: 3965606 - RNA, 18 nt, Human herpesvirus 4 (Epstein-Barr virus)
gcaugccaccgugaaguu

SEQ ID NO: 3965607 - RNA, 13 nt, Human herpesvirus 4 (Epstein-Barr virus)
gcauggcagccgg

SEQ ID NO: 3965608 - RNA, 13 nt, Human herpesvirus 4 (Epstein-Barr virus)
gcauggccaggcc

SEQ ID NO: 3965609 - RNA, 20 nt, Human herpesvirus 4 (Epstein-Barr virus)
gcauugcuggccgcagcugg

SEQ ID NO: 3965610 - RNA, 13 nt, Human herpesvirus 4 (Epstein-Barr virus)
gccaacuccccca

SEQ ID NO: 3965611 - RNA, 20 nt, Human herpesvirus 4 (Epstein-Barr virus)
aaaaaugugcagcuucucca

SEQ ID NO: 3965612 - RNA, 20 nt, Human herpesvirus 4 (Epstein-Barr virus)
aaaacucugcauggagaagc

SEQ ID NO: 3965613 - RNA, 19 nt, Human herpesvirus 4 (Epstein-Barr virus)
aaaauggggguuggagaaa

SEQ ID NO: 3965614 - RNA, 15 nt, Human herpesvirus 4 (Epstein-Barr virus)
aaacauacaggagga

SEQ ID NO: 3965615 - RNA, 17 nt, Human herpesvirus 4 (Epstein-Barr virus)
aaaccugcgaaacuugg

SEQ ID NO: 3965616 - RNA, 13 nt, Human herpesvirus 4 (Epstein-Barr virus)
aaacgcugcuugg

SEQ ID NO: 3965617 - RNA, 16 nt, Human herpesvirus 4 (Epstein-Barr virus)
aaaggcgcaguccgcc

SEQ ID NO: 3965618 - RNA, 21 nt, Human herpesvirus 4 (Epstein-Barr virus)
aaauacuucucuagagccagg

SEQ ID NO: 3965619 - RNA, 20 nt, Human herpesvirus 4 (Epstein-Barr virus)
aaauuugcugacauauguac

SEQ ID NO: 3965620 - RNA, 21 nt, Human herpesvirus 4 (Epstein-Barr virus)
aacacgcuuuugucugccugg

SEQ ID NO: 3965621 - RNA, 18 nt, Human herpesvirus 4 (Epstein-Barr virus)
aacagggguauguggugc

SEQ ID NO: 3965622 - RNA, 17 nt, Human herpesvirus 4 (Epstein-Barr virus)
aacaugagaaaauacuu

SEQ ID NO: 3965623 - RNA, 23 nt, Human herpesvirus 4 (Epstein-Barr virus)
aaccccagcaacauccggggcag

SEQ ID NO: 3965624 - RNA, 14 nt, Human herpesvirus 4 (Epstein-Barr virus)
aaccuugggggcaa

SEQ ID NO: 3965625 - RNA, 17 nt, Human herpesvirus 4 (Epstein-Barr virus)
aacggcccguggccugc

SEQ ID NO: 3965626 - RNA, 16 nt, Human herpesvirus 4 (Epstein-Barr virus)
aacguccaaguugcau

SEQ ID NO: 3965627 - RNA, 17 nt, Human herpesvirus 4 (Epstein-Barr virus)
aagaauaacaugccaau

SEQ ID NO: 3965628 - RNA, 18 nt, Human herpesvirus 4 (Epstein-Barr virus)
aagaccaauacccaggau

SEQ ID NO: 3965629 - RNA, 24 nt, Human herpesvirus 4 (Epstein-Barr virus)
aagagaggcuucccgccuagagca

SEQ ID NO: 3965630 - RNA, 15 nt, Human herpesvirus 4 (Epstein-Barr virus)
aagcaccacccagcc

SEQ ID NO: 3965631 - RNA, 12 nt, Human herpesvirus 4 (Epstein-Barr virus)
aagcgggccuga

SEQ ID NO: 3965632 - RNA, 19 nt, Human herpesvirus 4 (Epstein-Barr virus)
aaggcgacgcggagagguc

SEQ ID NO: 3965633 - RNA, 17 nt, Human herpesvirus 4 (Epstein-Barr virus)
aagggcaccgugggaaa

SEQ ID NO: 3965634 - RNA, 18 nt, Human herpesvirus 4 (Epstein-Barr virus)
aaguacgagaucuucccc

SEQ ID NO: 3965635 - RNA, 13 nt, Human herpesvirus 4 (Epstein-Barr virus)
aagucaggauucu

SEQ ID NO: 3965636 - RNA, 14 nt, Human herpesvirus 4 (Epstein-Barr virus)
aaucaccuuaacug

SEQ ID NO: 3965637 - RNA, 16 nt, Human herpesvirus 4 (Epstein-Barr virus)
aaucccucugggagaa

SEQ ID NO: 3965638 - RNA, 13 nt, Human herpesvirus 4 (Epstein-Barr virus)
aaucgcagcucua

SEQ ID NO: 3965639 - RNA, 14 nt, Human herpesvirus 4 (Epstein-Barr virus)
aaugacuaugagga

SEQ ID NO: 3965640 - RNA, 17 nt, Human herpesvirus 4 (Epstein-Barr virus)
acaacacauagaauugu

SEQ ID NO: 3965641 - RNA, 16 nt, Human herpesvirus 4 (Epstein-Barr virus)
acaagaacugggauga

SEQ ID NO: 3965642 - RNA, 12 nt, Human herpesvirus 4 (Epstein-Barr virus)
acaauaaaguug

SEQ ID NO: 3965643 - RNA, 16 nt, Human herpesvirus 4 (Epstein-Barr virus)
acaauugccaaguacu

SEQ ID NO: 3965644 - RNA, 13 nt, Human herpesvirus 4 (Epstein-Barr virus)
acacaaaaugagg

SEQ ID NO: 3965645 - RNA, 17 nt, Human herpesvirus 4 (Epstein-Barr virus)
acaccgagcagaaggcc

SEQ ID NO: 3965646 - RNA, 18 nt, Human herpesvirus 4 (Epstein-Barr virus)
acacgcuuuugucugccu

SEQ ID NO: 3965647 - RNA, 20 nt, Human herpesvirus 4 (Epstein-Barr virus)
acacuacuuguuucuggaau

SEQ ID NO: 3965648 - RNA, 17 nt, Human herpesvirus 4 (Epstein-Barr virus)
acacuugugguucuccu

SEQ ID NO: 3965649 - RNA, 20 nt, Human herpesvirus 4 (Epstein-Barr virus)
acagccagguguacgcccug

SEQ ID NO: 3965650 - RNA, 22 nt, Human herpesvirus 4 (Epstein-Barr virus)
acagccagguguacgcccuggc

SEQ ID NO: 3965651 - RNA, 15 nt, Human herpesvirus 4 (Epstein-Barr virus)
acaggaccuggaaau

SEQ ID NO: 3965652 - RNA, 14 nt, Human herpesvirus 4 (Epstein-Barr virus)
accaagcuaccaga

SEQ ID NO: 3965653 - RNA, 13 nt, Human herpesvirus 4 (Epstein-Barr virus)
accaaggcccuag

SEQ ID NO: 3965654 - RNA, 15 nt, Human herpesvirus 4 (Epstein-Barr virus)
accaaugccaaagcu

SEQ ID NO: 3965655 - RNA, 21 nt, Human herpesvirus 4 (Epstein-Barr virus)
accacucaggaagcuggccag

SEQ ID NO: 3965656 - RNA, 19 nt, Human herpesvirus 4 (Epstein-Barr virus)
accagagcccagaggaggc

SEQ ID NO: 3965657 - RNA, 20 nt, Human herpesvirus 4 (Epstein-Barr virus)
accagcccuuuuuccagugg

SEQ ID NO: 3965658 - RNA, 18 nt, Human herpesvirus 4 (Epstein-Barr virus)
accaggggcgagcagcgc

SEQ ID NO: 3965659 - RNA, 14 nt, Human herpesvirus 4 (Epstein-Barr virus)
acccaccacacagc

SEQ ID NO: 3965660 - RNA, 22 nt, Human herpesvirus 4 (Epstein-Barr virus)
acccaccccuccuacacacauc

SEQ ID NO: 3965661 - RNA, 14 nt, Human herpesvirus 4 (Epstein-Barr virus)
acccacuccagugc

SEQ ID NO: 3965662 - RNA, 20 nt, Human herpesvirus 4 (Epstein-Barr virus)
accccuguuagcuauuugau

SEQ ID NO: 3965663 - RNA, 18 nt, Human herpesvirus 4 (Epstein-Barr virus)
accgcagccacguccaga

SEQ ID NO: 3965664 - RNA, 22 nt, Human herpesvirus 4 (Epstein-Barr virus)
accggccaagguccugggccuc

SEQ ID NO: 3965665 - RNA, 15 nt, Human herpesvirus 4 (Epstein-Barr virus)
accggggccuuggca

SEQ ID NO: 3965666 - RNA, 17 nt, Human herpesvirus 4 (Epstein-Barr virus)
accugucuacuucgcca

SEQ ID NO: 3965667 - RNA, 18 nt, Human herpesvirus 4 (Epstein-Barr virus)
accuguuucggcgccgcc

SEQ ID NO: 3965668 - RNA, 15 nt, Human herpesvirus 4 (Epstein-Barr virus)
acgaugaaggagggc

SEQ ID NO: 3965669 - RNA, 16 nt, Human herpesvirus 4 (Epstein-Barr virus)
acgccggccugcuggc

SEQ ID NO: 3965670 - RNA, 18 nt, Human herpesvirus 4 (Epstein-Barr virus)
acgcuguuuugcagcuga

SEQ ID NO: 3965671 - RNA, 15 nt, Human herpesvirus 4 (Epstein-Barr virus)
acggaccccccucug

SEQ ID NO: 3965672 - RNA, 17 nt, Human herpesvirus 4 (Epstein-Barr virus)
acgggcucccucccccu

SEQ ID NO: 3965673 - RNA, 19 nt, Human herpesvirus 4 (Epstein-Barr virus)
acguacccauaacugggca

SEQ ID NO: 3965674 - RNA, 24 nt, Human herpesvirus 4 (Epstein-Barr virus)
acguggguggauguagggagcacu

SEQ ID NO: 3965675 - RNA, 13 nt, Human herpesvirus 4 (Epstein-Barr virus)
acuaauguggugg

SEQ ID NO: 3965676 - RNA, 23 nt, Human herpesvirus 4 (Epstein-Barr virus)
acuacuuguuucuggaaugcuuc

SEQ ID NO: 3965677 - RNA, 22 nt, Human herpesvirus 4 (Epstein-Barr virus)
acuaucacccauggccaggcuc

SEQ ID NO: 3965678 - RNA, 19 nt, Human herpesvirus 4 (Epstein-Barr virus)
acucacccccagccugugc

SEQ ID NO: 3965679 - RNA, 13 nt, Human herpesvirus 4 (Epstein-Barr virus)
acucggccacaca

SEQ ID NO: 3965680 - RNA, 19 nt, Human herpesvirus 4 (Epstein-Barr virus)
acucucccuccauuuacug

SEQ ID NO: 3965681 - RNA, 13 nt, Human herpesvirus 4 (Epstein-Barr virus)
acugcgaaaauuc

SEQ ID NO: 3965682 - RNA, 22 nt, Human herpesvirus 4 (Epstein-Barr virus)
acuggcacacacucccuuagcc

SEQ ID NO: 3965683 - RNA, 18 nt, Human herpesvirus 4 (Epstein-Barr virus)
acugggcaucgggcuuug

SEQ ID NO: 3965684 - RNA, 21 nt, Human herpesvirus 4 (Epstein-Barr virus)
acuuauguuucaagcagcuca

SEQ ID NO: 3965685 - RNA, 21 nt, Human herpesvirus 4 (Epstein-Barr virus)
acuugcucagguuucugggca

SEQ ID NO: 3965686 - RNA, 19 nt, Human herpesvirus 4 (Epstein-Barr virus)
agaacccccugcaggacac

SEQ ID NO: 3965687 - RNA, 21 nt, Human herpesvirus 4 (Epstein-Barr virus)
agaagcagauagccggccagg

SEQ ID NO: 3965688 - RNA, 13 nt, Human herpesvirus 4 (Epstein-Barr virus)
agaagugcuggga

SEQ ID NO: 3965689 - RNA, 16 nt, Human herpesvirus 4 (Epstein-Barr virus)
agaaucugggcuggga

SEQ ID NO: 3965690 - RNA, 17 nt, Human herpesvirus 4 (Epstein-Barr virus)
agaaugaugguggggga

SEQ ID NO: 3965691 - RNA, 14 nt, Human herpesvirus 4 (Epstein-Barr virus)
agacucuugaagau

SEQ ID NO: 3965692 - RNA, 12 nt, Human herpesvirus 4 (Epstein-Barr virus)
agagcggcgaga

SEQ ID NO: 3965693 - RNA, 16 nt, Human herpesvirus 4 (Epstein-Barr virus)
agagcggguggaggag

SEQ ID NO: 3965694 - RNA, 23 nt, Human herpesvirus 4 (Epstein-Barr virus)
agagcuccgccaccuccgggggc

SEQ ID NO: 3965695 - RNA, 14 nt, Human herpesvirus 4 (Epstein-Barr virus)
agagcucuggagga

SEQ ID NO: 3965696 - RNA, 18 nt, Human herpesvirus 4 (Epstein-Barr virus)
agaggaugaggcugauga

SEQ ID NO: 3965697 - RNA, 21 nt, Human herpesvirus 4 (Epstein-Barr virus)
agaggcaaacauacaggagga

SEQ ID NO: 3965698 - RNA, 16 nt, Human herpesvirus 4 (Epstein-Barr virus)
agaggcccgggggccu

SEQ ID NO: 3965699 - RNA, 15 nt, Human herpesvirus 4 (Epstein-Barr virus)
agagugcccuggagg

SEQ ID NO: 3965700 - RNA, 15 nt, Human herpesvirus 4 (Epstein-Barr virus)
agaucgccugccacu

SEQ ID NO: 3965701 - RNA, 21 nt, Human herpesvirus 4 (Epstein-Barr virus)
agaugauaaugaugaggagca

SEQ ID NO: 3965702 - RNA, 19 nt, Human herpesvirus 4 (Epstein-Barr virus)
agauuagggguaacccugu

SEQ ID NO: 3965703 - RNA, 18 nt, Human herpesvirus 4 (Epstein-Barr virus)
agauucagacgagucuga

SEQ ID NO: 3965704 - RNA, 14 nt, Human herpesvirus 4 (Epstein-Barr virus)
agauugucacagcu

SEQ ID NO: 3965705 - RNA, 13 nt, Human herpesvirus 4 (Epstein-Barr virus)
agcaccacccagc

SEQ ID NO: 3965706 - RNA, 16 nt, Human herpesvirus 4 (Epstein-Barr virus)
agcagcuggauguaca

SEQ ID NO: 3965707 - RNA, 17 nt, Human herpesvirus 4 (Epstein-Barr virus)
agcaggagcaggagcgg

SEQ ID NO: 3965708 - RNA, 16 nt, Human herpesvirus 4 (Epstein-Barr virus)
agcauggcggccuggc

SEQ ID NO: 3965709 - RNA, 21 nt, Human herpesvirus 4 (Epstein-Barr virus)
agcaugggcgaggggcgcccc

SEQ ID NO: 3965710 - RNA, 17 nt, Human herpesvirus 4 (Epstein-Barr virus)
agccacauucuggaacu

SEQ ID NO: 3965711 - RNA, 23 nt, Human herpesvirus 4 (Epstein-Barr virus)
agccacccgucccggguacaagu

SEQ ID NO: 3965712 - RNA, 14 nt, Human herpesvirus 4 (Epstein-Barr virus)
agccaguguggcug

SEQ ID NO: 3965713 - RNA, 16 nt, Human herpesvirus 4 (Epstein-Barr virus)
agcccaagaagaagcc

SEQ ID NO: 3965714 - RNA, 14 nt, Human herpesvirus 4 (Epstein-Barr virus)
agcccuuggaacug

SEQ ID NO: 3965715 - RNA, 21 nt, Human herpesvirus 4 (Epstein-Barr virus)
agccgcuucagacagccgcgg

SEQ ID NO: 3965716 - RNA, 13 nt, Human herpesvirus 4 (Epstein-Barr virus)
agccggccaggca

SEQ ID NO: 3965717 - RNA, 23 nt, Human herpesvirus 4 (Epstein-Barr virus)
agcgcucuggucgcccccucugc

SEQ ID NO: 3965718 - RNA, 17 nt, Human herpesvirus 4 (Epstein-Barr virus)
agcggacgguggggcuc

SEQ ID NO: 3965719 - RNA, 17 nt, Human herpesvirus 4 (Epstein-Barr virus)
agcggaugguggggcuu

SEQ ID NO: 3965720 - RNA, 22 nt, Human herpesvirus 4 (Epstein-Barr virus)
agcggcacagauuagaagauga

SEQ ID NO: 3965721 - RNA, 19 nt, Human herpesvirus 4 (Epstein-Barr virus)
agcgggaggggcaggagca

SEQ ID NO: 3965722 - RNA, 16 nt, Human herpesvirus 4 (Epstein-Barr virus)
agcggggguucuccag

SEQ ID NO: 3965723 - RNA, 12 nt, Human herpesvirus 4 (Epstein-Barr virus)
agcucaccuaug

SEQ ID NO: 3965724 - RNA, 16 nt, Human herpesvirus 4 (Epstein-Barr virus)
agcugaggggcaaccu

SEQ ID NO: 3965725 - RNA, 23 nt, Human herpesvirus 4 (Epstein-Barr virus)
ucucuggcugugcugacccuucu

SEQ ID NO: 3965726 - RNA, 21 nt, Human herpesvirus 4 (Epstein-Barr virus)
ucucuggugaaacuggcuucu

SEQ ID NO: 3965727 - RNA, 14 nt, Human herpesvirus 4 (Epstein-Barr virus)
ucugauggccugga

SEQ ID NO: 3965728 - RNA, 17 nt, Human herpesvirus 4 (Epstein-Barr virus)
ucuggcugugcugaccc

SEQ ID NO: 3965729 - RNA, 20 nt, Human herpesvirus 4 (Epstein-Barr virus)
ucuggucgcccccucugccu

SEQ ID NO: 3965730 - RNA, 16 nt, Human herpesvirus 4 (Epstein-Barr virus)
ucuuggguuccuagug

SEQ ID NO: 3965731 - RNA, 16 nt, Human herpesvirus 4 (Epstein-Barr virus)
ugaauuccgucaaggc

SEQ ID NO: 3965732 - RNA, 16 nt, Human herpesvirus 4 (Epstein-Barr virus)
ugacacccccagcgcu

SEQ ID NO: 3965733 - RNA, 20 nt, Human herpesvirus 4 (Epstein-Barr virus)
ugacagcugucacccaugcc

SEQ ID NO: 3965734 - RNA, 16 nt, Human herpesvirus 4 (Epstein-Barr virus)
ugacccuucugcugcu

SEQ ID NO: 3965735 - RNA, 17 nt, Human herpesvirus 4 (Epstein-Barr virus)
ugacccuucugcugcug

SEQ ID NO: 3965736 - RNA, 21 nt, Human herpesvirus 4 (Epstein-Barr virus)
ugacggugggcaugacacagg

SEQ ID NO: 3965737 - RNA, 22 nt, Human herpesvirus 4 (Epstein-Barr virus)
ugagaccgugucacucccgagg

SEQ ID NO: 3965738 - RNA, 14 nt, Human herpesvirus 4 (Epstein-Barr virus)
ugagcuggacgagg

SEQ ID NO: 3965739 - RNA, 21 nt, Human herpesvirus 4 (Epstein-Barr virus)
ugauggccuggagagcaugca

SEQ ID NO: 3965740 - RNA, 16 nt, Human herpesvirus 4 (Epstein-Barr virus)
ugauugagaucagaaa

SEQ ID NO: 3965741 - RNA, 17 nt, Human herpesvirus 4 (Epstein-Barr virus)
ugcaacagaggauuggc

SEQ ID NO: 3965742 - RNA, 12 nt, Human herpesvirus 4 (Epstein-Barr virus)
ugcaaggacggg

SEQ ID NO: 3965743 - RNA, 16 nt, Human herpesvirus 4 (Epstein-Barr virus)
ugcaccagcuccaggg

SEQ ID NO: 3965744 - RNA, 15 nt, Human herpesvirus 4 (Epstein-Barr virus)
ugcacccggacaugu

SEQ ID NO: 3965745 - RNA, 12 nt, Human herpesvirus 4 (Epstein-Barr virus)
ugcagacuccag

SEQ ID NO: 3965746 - RNA, 14 nt, Human herpesvirus 4 (Epstein-Barr virus)
ugcagacuccaggu

SEQ ID NO: 3965747 - RNA, 17 nt, Human herpesvirus 4 (Epstein-Barr virus)
ugcagggugcacagacu

SEQ ID NO: 3965748 - RNA, 16 nt, Human herpesvirus 4 (Epstein-Barr virus)
ugcauggagaagcugg

SEQ ID NO: 3965749 - RNA, 16 nt, Human herpesvirus 4 (Epstein-Barr virus)
ugccccucagccugcu

SEQ ID NO: 3965750 - RNA, 15 nt, Human herpesvirus 4 (Epstein-Barr virus)
ugcccucuccagcaa

SEQ ID NO: 3965751 - RNA, 14 nt, Human herpesvirus 4 (Epstein-Barr virus)
ugccgucccagggc

SEQ ID NO: 3965752 - RNA, 17 nt, Human herpesvirus 4 (Epstein-Barr virus)
ugccuccccagcaacag

SEQ ID NO: 3965753 - RNA, 19 nt, Human herpesvirus 4 (Epstein-Barr virus)
ugccucgggucucgccgcu

SEQ ID NO: 3965754 - RNA, 15 nt, Human herpesvirus 4 (Epstein-Barr virus)
ugccuggcgcuuugc

SEQ ID NO: 3965755 - RNA, 23 nt, Human herpesvirus 4 (Epstein-Barr virus)
ugccuguggccccggcuggccau

SEQ ID NO: 3965756 - RNA, 20 nt, Human herpesvirus 4 (Epstein-Barr virus)
ugcgacggcuuuagccuggc

SEQ ID NO: 3965757 - RNA, 21 nt, Human herpesvirus 4 (Epstein-Barr virus)
ugcgcaacgccggccugcugg

SEQ ID NO: 3965758 - RNA, 17 nt, Human herpesvirus 4 (Epstein-Barr virus)
ugcgcgccgccagcaug

SEQ ID NO: 3965759 - RNA, 18 nt, Human herpesvirus 4 (Epstein-Barr virus)
ugcggagggucagauuuu

SEQ ID NO: 3965760 - RNA, 23 nt, Human herpesvirus 4 (Epstein-Barr virus)
ugcuaugaccaugcccagacuca

SEQ ID NO: 3965761 - RNA, 15 nt, Human herpesvirus 4 (Epstein-Barr virus)
ugcugacccuucugc

SEQ ID NO: 3965762 - RNA, 19 nt, Human herpesvirus 4 (Epstein-Barr virus)
ugcugccagagccucugcc

SEQ ID NO: 3965763 - RNA, 13 nt, Human herpesvirus 4 (Epstein-Barr virus)
ugcugccuggggg

SEQ ID NO: 3965764 - RNA, 19 nt, Human herpesvirus 4 (Epstein-Barr virus)
ugcuucuggcucuucuggg

SEQ ID NO: 3965765 - RNA, 22 nt, Human herpesvirus 4 (Epstein-Barr virus)
uggaccaagggcagggcaaugg

SEQ ID NO: 3965766 - RNA, 18 nt, Human herpesvirus 4 (Epstein-Barr virus)
uggacccuauggagggca

SEQ ID NO: 3965767 - RNA, 21 nt, Human herpesvirus 4 (Epstein-Barr virus)
uggacuggggugugaagggca

SEQ ID NO: 3965768 - RNA, 15 nt, Human herpesvirus 4 (Epstein-Barr virus)
uggaggcccccggcu

SEQ ID NO: 3965769 - RNA, 19 nt, Human herpesvirus 4 (Epstein-Barr virus)
uggaguuuuacggggggca

SEQ ID NO: 3965770 - RNA, 20 nt, Human herpesvirus 4 (Epstein-Barr virus)
uggaucuacuuauuggagau

SEQ ID NO: 3965771 - RNA, 18 nt, Human herpesvirus 4 (Epstein-Barr virus)
uggcaucuuccuccuugu

SEQ ID NO: 3965772 - RNA, 18 nt, Human herpesvirus 4 (Epstein-Barr virus)
uggccgagcuggaggcca

SEQ ID NO: 3965773 - RNA, 18 nt, Human herpesvirus 4 (Epstein-Barr virus)
uggccugccuggaucuga

SEQ ID NO: 3965774 - RNA, 21 nt, Human herpesvirus 4 (Epstein-Barr virus)
uggcgccguuugacuguuugu

SEQ ID NO: 3965775 - RNA, 18 nt, Human herpesvirus 4 (Epstein-Barr virus)
uggcggcuauugccgccu

SEQ ID NO: 3965776 - RNA, 16 nt, Human herpesvirus 4 (Epstein-Barr virus)
uggcucuccuguguga

SEQ ID NO: 3965777 - RNA, 19 nt, Human herpesvirus 4 (Epstein-Barr virus)
ugggggcuacaggaggcca

SEQ ID NO: 3965778 - RNA, 20 nt, Human herpesvirus 4 (Epstein-Barr virus)
ugggggcuacaggaggccac

SEQ ID NO: 3965779 - RNA, 21 nt, Human herpesvirus 4 (Epstein-Barr virus)
uggggguggacaugaggaggu

SEQ ID NO: 3965780 - RNA, 20 nt, Human herpesvirus 4 (Epstein-Barr virus)
ugggguccucaaggauggca

SEQ ID NO: 3965781 - RNA, 15 nt, Human herpesvirus 4 (Epstein-Barr virus)
uggguccccucugcc

SEQ ID NO: 3965782 - RNA, 14 nt, Human herpesvirus 4 (Epstein-Barr virus)
uggucacucaggca

SEQ ID NO: 3965783 - RNA, 17 nt, Human herpesvirus 4 (Epstein-Barr virus)
uggucgcccccucugcc

SEQ ID NO: 3965784 - RNA, 13 nt, Human herpesvirus 4 (Epstein-Barr virus)
ugguggaggagga

SEQ ID NO: 3965785 - RNA, 21 nt, Human herpesvirus 4 (Epstein-Barr virus)
uggugggcuccuuagacugag

SEQ ID NO: 3965786 - RNA, 18 nt, Human herpesvirus 4 (Epstein-Barr virus)
uguacagaaacagagagu

SEQ ID NO: 3965787 - RNA, 19 nt, Human herpesvirus 4 (Epstein-Barr virus)
uguacugaccacucaggaa

SEQ ID NO: 3965788 - RNA, 19 nt, Human herpesvirus 4 (Epstein-Barr virus)
ugucuaacacgcuuuuguc

SEQ ID NO: 3965789 - RNA, 16 nt, Human herpesvirus 4 (Epstein-Barr virus)
ugucucggccuccugg

SEQ ID NO: 3965790 - RNA, 12 nt, Human herpesvirus 4 (Epstein-Barr virus)
ugucugacuugg

SEQ ID NO: 3965791 - RNA, 17 nt, Human herpesvirus 4 (Epstein-Barr virus)
uguguaaccucacugua

SEQ ID NO: 3965792 - RNA, 22 nt, Human herpesvirus 4 (Epstein-Barr virus)
ugugucccacuccaccugccgg

SEQ ID NO: 3965793 - RNA, 18 nt, Human herpesvirus 4 (Epstein-Barr virus)
uuaauggguaaaggggga

SEQ ID NO: 3965794 - RNA, 22 nt, Human herpesvirus 4 (Epstein-Barr virus)
uuaccaugucauaggcuugccu

SEQ ID NO: 3965795 - RNA, 16 nt, Human herpesvirus 4 (Epstein-Barr virus)
uuagcuauuccaccaa

SEQ ID NO: 3965796 - RNA, 16 nt, Human herpesvirus 4 (Epstein-Barr virus)
uuccugcccucccacu

SEQ ID NO: 3965797 - RNA, 19 nt, Human herpesvirus 4 (Epstein-Barr virus)
uuccugcccucccacuuuu

SEQ ID NO: 3965798 - RNA, 15 nt, Human herpesvirus 4 (Epstein-Barr virus)
uucugcccccugucu

SEQ ID NO: 3965799 - RNA, 16 nt, Human herpesvirus 4 (Epstein-Barr virus)
uucugccccucagccu

SEQ ID NO: 3965800 - RNA, 20 nt, Human herpesvirus 4 (Epstein-Barr virus)
uucuggccaaccugccucuc

SEQ ID NO: 3965801 - RNA, 19 nt, Human herpesvirus 4 (Epstein-Barr virus)
uugaaaccacgccugcuuc

SEQ ID NO: 3965802 - RNA, 19 nt, Human herpesvirus 4 (Epstein-Barr virus)
uugaucuuugacugacaca

SEQ ID NO: 3965803 - RNA, 16 nt, Human herpesvirus 4 (Epstein-Barr virus)
uugcgccgccuccccc

SEQ ID NO: 3965804 - RNA, 21 nt, Human herpesvirus 4 (Epstein-Barr virus)
uugcucuguguuuuuugccug

SEQ ID NO: 3965805 - RNA, 17 nt, Human herpesvirus 4 (Epstein-Barr virus)
uugucggacgaggagga

SEQ ID NO: 3965806 - RNA, 19 nt, Human herpesvirus 4 (Epstein-Barr virus)
uuuaacucuuaaaacuugc

SEQ ID NO: 3965807 - RNA, 17 nt, Human herpesvirus 4 (Epstein-Barr virus)
uuuaaggaaugaacacu

SEQ ID NO: 3965808 - RNA, 18 nt, Human herpesvirus 4 (Epstein-Barr virus)
uuuguacagacuuuuggc

SEQ ID NO: 3965809 - RNA, 20 nt, Human herpesvirus 4 (Epstein-Barr virus)
guuaucaccguaccaugagu

SEQ ID NO: 3965810 - RNA, 23 nt, Human herpesvirus 4 (Epstein-Barr virus)
guucaggaacagccuccgccgcc

SEQ ID NO: 3965811 - RNA, 22 nt, Human herpesvirus 4 (Epstein-Barr virus)
guugucacgucacucagcuccg

SEQ ID NO: 3965812 - RNA, 12 nt, Human herpesvirus 4 (Epstein-Barr virus)
guugucuuccca

SEQ ID NO: 3965813 - RNA, 12 nt, Human herpesvirus 4 (Epstein-Barr virus)
uaagaccaaggc

SEQ ID NO: 3965814 - RNA, 16 nt, Human herpesvirus 4 (Epstein-Barr virus)
uaaggcucugaagcaa

SEQ ID NO: 3965815 - RNA, 20 nt, Human herpesvirus 4 (Epstein-Barr virus)
uacaaacacgggccuggggc

SEQ ID NO: 3965816 - RNA, 22 nt, Human herpesvirus 4 (Epstein-Barr virus)
uacacucuggggucucaggccu

SEQ ID NO: 3965817 - RNA, 14 nt, Human herpesvirus 4 (Epstein-Barr virus)
uacagcaggauucc

SEQ ID NO: 3965818 - RNA, 14 nt, Human herpesvirus 4 (Epstein-Barr virus)
uaccugaugaguca

SEQ ID NO: 3965819 - RNA, 17 nt, Human herpesvirus 4 (Epstein-Barr virus)
uacgauggcggaaacaa

SEQ ID NO: 3965820 - RNA, 13 nt, Human herpesvirus 4 (Epstein-Barr virus)
uacgcgggccaca

SEQ ID NO: 3965821 - RNA, 15 nt, Human herpesvirus 4 (Epstein-Barr virus)
uacgcgggccacagg

SEQ ID NO: 3965822 - RNA, 17 nt, Human herpesvirus 4 (Epstein-Barr virus)
uacggcuuuccaguucc

SEQ ID NO: 3965823 - RNA, 23 nt, Human herpesvirus 4 (Epstein-Barr virus)
uacuggcuuucguccucuggcuc

SEQ ID NO: 3965824 - RNA, 14 nt, Human herpesvirus 4 (Epstein-Barr virus)
uagauauagaggcu

SEQ ID NO: 3965825 - RNA, 19 nt, Human herpesvirus 4 (Epstein-Barr virus)
uagccacccgucccgggua

SEQ ID NO: 3965826 - RNA, 15 nt, Human herpesvirus 4 (Epstein-Barr virus)
uagccggccaggcag

SEQ ID NO: 3965827 - RNA, 18 nt, Human herpesvirus 4 (Epstein-Barr virus)
uaggcaaaccuccaauca

SEQ ID NO: 3965828 - RNA, 17 nt, Human herpesvirus 4 (Epstein-Barr virus)
uaggcacaucuggaccu

SEQ ID NO: 3965829 - RNA, 23 nt, Human herpesvirus 4 (Epstein-Barr virus)
uauaaauuacuggcgugaauugu

SEQ ID NO: 3965830 - RNA, 17 nt, Human herpesvirus 4 (Epstein-Barr virus)
uaucacccauggccagg

SEQ ID NO: 3965831 - RNA, 15 nt, Human herpesvirus 4 (Epstein-Barr virus)
uauccaggaggagga

SEQ ID NO: 3965832 - RNA, 20 nt, Human herpesvirus 4 (Epstein-Barr virus)
uaugccuguggccccggcug

SEQ ID NO: 3965833 - RNA, 19 nt, Human herpesvirus 4 (Epstein-Barr virus)
uauggcagagcuuugcccc

SEQ ID NO: 3965834 - RNA, 21 nt, Human herpesvirus 4 (Epstein-Barr virus)
uauggugccggggcccacgug

SEQ ID NO: 3965835 - RNA, 15 nt, Human herpesvirus 4 (Epstein-Barr virus)
uauucucagaugcag

SEQ ID NO: 3965836 - RNA, 19 nt, Human herpesvirus 4 (Epstein-Barr virus)
ucaaagaacaaggccaaga

SEQ ID NO: 3965837 - RNA, 17 nt, Human herpesvirus 4 (Epstein-Barr virus)
ucaacuucagcuccagg

SEQ ID NO: 3965838 - RNA, 21 nt, Human herpesvirus 4 (Epstein-Barr virus)
ucaagagucucgccaucuacc

SEQ ID NO: 3965839 - RNA, 12 nt, Human herpesvirus 4 (Epstein-Barr virus)
ucaauuaaacaa

SEQ ID NO: 3965840 - RNA, 13 nt, Human herpesvirus 4 (Epstein-Barr virus)
ucacaggacaugu

SEQ ID NO: 3965841 - RNA, 16 nt, Human herpesvirus 4 (Epstein-Barr virus)
ucaccggcaccgccag

SEQ ID NO: 3965842 - RNA, 18 nt, Human herpesvirus 4 (Epstein-Barr virus)
ucacuuuguacagacuuu

SEQ ID NO: 3965843 - RNA, 18 nt, Human herpesvirus 4 (Epstein-Barr virus)
ucagcacuuugccagcaa

SEQ ID NO: 3965844 - RNA, 18 nt, Human herpesvirus 4 (Epstein-Barr virus)
ucagcucaaccgccaggg

SEQ ID NO: 3965845 - RNA, 12 nt, Human herpesvirus 4 (Epstein-Barr virus)
ucagcuccuugu

SEQ ID NO: 3965846 - RNA, 17 nt, Human herpesvirus 4 (Epstein-Barr virus)
ucaggaagcuggccagg

SEQ ID NO: 3965847 - RNA, 13 nt, Human herpesvirus 4 (Epstein-Barr virus)
uccaccagcuucu

SEQ ID NO: 3965848 - RNA, 20 nt, Human herpesvirus 4 (Epstein-Barr virus)
uccagagcugagugcccagg

SEQ ID NO: 3965849 - RNA, 14 nt, Human herpesvirus 4 (Epstein-Barr virus)
uccagccagugguc

SEQ ID NO: 3965850 - RNA, 17 nt, Human herpesvirus 4 (Epstein-Barr virus)
uccaggcccccgggugg

SEQ ID NO: 3965851 - RNA, 21 nt, Human herpesvirus 4 (Epstein-Barr virus)
uccccgagggugaggcccagc

SEQ ID NO: 3965852 - RNA, 18 nt, Human herpesvirus 4 (Epstein-Barr virus)
uccccgaggucagaaaga

SEQ ID NO: 3965853 - RNA, 11 nt, Human herpesvirus 4 (Epstein-Barr virus)
uccccucugcc

SEQ ID NO: 3965854 - RNA, 12 nt, Human herpesvirus 4 (Epstein-Barr virus)
ucccucugggag

SEQ ID NO: 3965855 - RNA, 18 nt, Human herpesvirus 4 (Epstein-Barr virus)
uccgcaccacagaaacua

SEQ ID NO: 3965856 - RNA, 21 nt, Human herpesvirus 4 (Epstein-Barr virus)
uccgcagccgcugaagccagg

SEQ ID NO: 3965857 - RNA, 20 nt, Human herpesvirus 4 (Epstein-Barr virus)
uccgcuuuaagaccaaggcc

SEQ ID NO: 3965858 - RNA, 17 nt, Human herpesvirus 4 (Epstein-Barr virus)
uccuagcacaaaccagu

SEQ ID NO: 3965859 - RNA, 19 nt, Human herpesvirus 4 (Epstein-Barr virus)
uccuagcacaaaccagucu

SEQ ID NO: 3965860 - RNA, 12 nt, Human herpesvirus 4 (Epstein-Barr virus)
uccuggccccca

SEQ ID NO: 3965861 - RNA, 20 nt, Human herpesvirus 4 (Epstein-Barr virus)
uccuggccggccgcccccug

SEQ ID NO: 3965862 - RNA, 13 nt, Human herpesvirus 4 (Epstein-Barr virus)
uccuucuuggccu

SEQ ID NO: 3965863 - RNA, 21 nt, Human herpesvirus 4 (Epstein-Barr virus)
uccuugggugaccuggccagg

SEQ ID NO: 3965864 - RNA, 13 nt, Human herpesvirus 4 (Epstein-Barr virus)
ucgcccccucugc

SEQ ID NO: 3965865 - RNA, 19 nt, Human herpesvirus 4 (Epstein-Barr virus)
ucgcgccccaucuuggccc

SEQ ID NO: 3965866 - RNA, 20 nt, Human herpesvirus 4 (Epstein-Barr virus)
ucgcugaaucuaguaugaag

SEQ ID NO: 3965867 - RNA, 14 nt, Human herpesvirus 4 (Epstein-Barr virus)
ucggagucuucaag

SEQ ID NO: 3965868 - RNA, 13 nt, Human herpesvirus 4 (Epstein-Barr virus)
ucggccuccuggc

SEQ ID NO: 3965869 - RNA, 14 nt, Human herpesvirus 4 (Epstein-Barr virus)
ucgucagagagguu

SEQ ID NO: 3965870 - RNA, 16 nt, Human herpesvirus 4 (Epstein-Barr virus)
ucuauaaaaauucaga

SEQ ID NO: 3965871 - RNA, 20 nt, Human herpesvirus 4 (Epstein-Barr virus)
ucucaaacggggaaggagga

SEQ ID NO: 3965872 - RNA, 10 nt, Human herpesvirus 4 (Epstein-Barr virus)
ucucaggccu

SEQ ID NO: 3965873 - RNA, 13 nt, Human herpesvirus 4 (Epstein-Barr virus)
ucucaucuccaaa

SEQ ID NO: 3965874 - RNA, 19 nt, Human herpesvirus 4 (Epstein-Barr virus)
ucucuagcaggugcaccag

SEQ ID NO: 3965875 - RNA, 15 nt, Human herpesvirus 4 (Epstein-Barr virus)
ccccgggagccacgg

SEQ ID NO: 3965876 - RNA, 19 nt, Human herpesvirus 4 (Epstein-Barr virus)
cccgagccccgccuggcgg

SEQ ID NO: 3965877 - RNA, 21 nt, Human herpesvirus 4 (Epstein-Barr virus)
cccgcuguaugaggaaggggc

SEQ ID NO: 3965878 - RNA, 13 nt, Human herpesvirus 4 (Epstein-Barr virus)
cccggcucucagg

SEQ ID NO: 3965879 - RNA, 23 nt, Human herpesvirus 4 (Epstein-Barr virus)
cccggggaaaagagagcugaugg

SEQ ID NO: 3965880 - RNA, 14 nt, Human herpesvirus 4 (Epstein-Barr virus)
cccgggggcgggag

SEQ ID NO: 3965881 - RNA, 17 nt, Human herpesvirus 4 (Epstein-Barr virus)
cccuaagcagcugaggg

SEQ ID NO: 3965882 - RNA, 15 nt, Human herpesvirus 4 (Epstein-Barr virus)
cccuccgcagccgcu

SEQ ID NO: 3965883 - RNA, 22 nt, Human herpesvirus 4 (Epstein-Barr virus)
cccuccucugggccgcccggcc

SEQ ID NO: 3965884 - RNA, 20 nt, Human herpesvirus 4 (Epstein-Barr virus)
cccucggugggccagauacu

SEQ ID NO: 3965885 - RNA, 15 nt, Human herpesvirus 4 (Epstein-Barr virus)
cccucugccuccggc

SEQ ID NO: 3965886 - RNA, 14 nt, Human herpesvirus 4 (Epstein-Barr virus)
cccugcaagccaag

SEQ ID NO: 3965887 - RNA, 12 nt, Human herpesvirus 4 (Epstein-Barr virus)
cccugggcucuc

SEQ ID NO: 3965888 - RNA, 23 nt, Human herpesvirus 4 (Epstein-Barr virus)
cccuggggcggcgaugucggggc

SEQ ID NO: 3965889 - RNA, 15 nt, Human herpesvirus 4 (Epstein-Barr virus)
ccgaagaagggaggg

SEQ ID NO: 3965890 - RNA, 24 nt, Human herpesvirus 4 (Epstein-Barr virus)
ccgcaccccccgccaccacggugc

SEQ ID NO: 3965891 - RNA, 15 nt, Human herpesvirus 4 (Epstein-Barr virus)
ccgccuagagcauuu

SEQ ID NO: 3965892 - RNA, 14 nt, Human herpesvirus 4 (Epstein-Barr virus)
ccgcgcccuccucu

SEQ ID NO: 3965893 - RNA, 17 nt, Human herpesvirus 4 (Epstein-Barr virus)
ccggcaccgccaggugg

SEQ ID NO: 3965894 - RNA, 15 nt, Human herpesvirus 4 (Epstein-Barr virus)
ccggcauccagugcg

SEQ ID NO: 3965895 - RNA, 15 nt, Human herpesvirus 4 (Epstein-Barr virus)
ccggccaugggggcu

SEQ ID NO: 3965896 - RNA, 12 nt, Human herpesvirus 4 (Epstein-Barr virus)
ccggccucgccu

SEQ ID NO: 3965897 - RNA, 13 nt, Human herpesvirus 4 (Epstein-Barr virus)
ccggcggcagugg

SEQ ID NO: 3965898 - RNA, 14 nt, Human herpesvirus 4 (Epstein-Barr virus)
ccggggaggccagg

SEQ ID NO: 3965899 - RNA, 17 nt, Human herpesvirus 4 (Epstein-Barr virus)
ccgguccccccagaagc

SEQ ID NO: 3965900 - RNA, 20 nt, Human herpesvirus 4 (Epstein-Barr virus)
ccgguccccccagaagcccc

SEQ ID NO: 3965901 - RNA, 19 nt, Human herpesvirus 4 (Epstein-Barr virus)
ccgucccggguacaagucc

SEQ ID NO: 3965902 - RNA, 15 nt, Human herpesvirus 4 (Epstein-Barr virus)
ccuacgcagaggcca

SEQ ID NO: 3965903 - RNA, 22 nt, Human herpesvirus 4 (Epstein-Barr virus)
ccuagagguuuugcuagggagg

SEQ ID NO: 3965904 - RNA, 19 nt, Human herpesvirus 4 (Epstein-Barr virus)
ccuagccaccguggccagg

SEQ ID NO: 3965905 - RNA, 23 nt, Human herpesvirus 4 (Epstein-Barr virus)
ccucacgcgaagggaaacguggg

SEQ ID NO: 3965906 - RNA, 17 nt, Human herpesvirus 4 (Epstein-Barr virus)
ccuccaacaggugcccg

SEQ ID NO: 3965907 - RNA, 22 nt, Human herpesvirus 4 (Epstein-Barr virus)
ccuccaagcggcacagauuaga

SEQ ID NO: 3965908 - RNA, 21 nt, Human herpesvirus 4 (Epstein-Barr virus)
ccuccaccgccgguuaacuuu

SEQ ID NO: 3965909 - RNA, 13 nt, Human herpesvirus 4 (Epstein-Barr virus)
ccuccuggccagc

SEQ ID NO: 3965910 - RNA, 23 nt, Human herpesvirus 4 (Epstein-Barr virus)
ccucgaguaggugccuccagagc

SEQ ID NO: 3965911 - RNA, 23 nt, Human herpesvirus 4 (Epstein-Barr virus)
ccucgcaggccccccgcaccagg

SEQ ID NO: 3965912 - RNA, 13 nt, Human herpesvirus 4 (Epstein-Barr virus)
ccucgguggccug

SEQ ID NO: 3965913 - RNA, 21 nt, Human herpesvirus 4 (Epstein-Barr virus)
ccucgugcaaccaggcccacu

SEQ ID NO: 3965914 - RNA, 15 nt, Human herpesvirus 4 (Epstein-Barr virus)
ccucugggguccagg

SEQ ID NO: 3965915 - RNA, 19 nt, Human herpesvirus 4 (Epstein-Barr virus)
ccugaagcuugcuggggcg

SEQ ID NO: 3965916 - RNA, 18 nt, Human herpesvirus 4 (Epstein-Barr virus)
ccugcaccaguggcugcc

SEQ ID NO: 3965917 - RNA, 17 nt, Human herpesvirus 4 (Epstein-Barr virus)
cucuguuccuucugcuc

SEQ ID NO: 3965918 - RNA, 22 nt, Human herpesvirus 4 (Epstein-Barr virus)
cucuugaagaucgugaggccug

SEQ ID NO: 3965919 - RNA, 23 nt, Human herpesvirus 4 (Epstein-Barr virus)
cugaacaucucauccccagaggg

SEQ ID NO: 3965920 - RNA, 13 nt, Human herpesvirus 4 (Epstein-Barr virus)
cugacauuucuca

SEQ ID NO: 3965921 - RNA, 18 nt, Human herpesvirus 4 (Epstein-Barr virus)
cugacuggcagaaaggcu

SEQ ID NO: 3965922 - RNA, 21 nt, Human herpesvirus 4 (Epstein-Barr virus)
cugagcauggcggccuggcag

SEQ ID NO: 3965923 - RNA, 15 nt, Human herpesvirus 4 (Epstein-Barr virus)
cugcaucuuccaggu

SEQ ID NO: 3965924 - RNA, 14 nt, Human herpesvirus 4 (Epstein-Barr virus)
cugccccucagccu

SEQ ID NO: 3965925 - RNA, 15 nt, Human herpesvirus 4 (Epstein-Barr virus)
cugccgcuacugcug

SEQ ID NO: 3965926 - RNA, 21 nt, Human herpesvirus 4 (Epstein-Barr virus)
cugccggaguuuucuccccca

SEQ ID NO: 3965927 - RNA, 17 nt, Human herpesvirus 4 (Epstein-Barr virus)
cugccuggaucugagcu

SEQ ID NO: 3965928 - RNA, 19 nt, Human herpesvirus 4 (Epstein-Barr virus)
cugcucuucaaccuuggca

SEQ ID NO: 3965929 - RNA, 21 nt, Human herpesvirus 4 (Epstein-Barr virus)
cuggaacggugggaagcucag

SEQ ID NO: 3965930 - RNA, 14 nt, Human herpesvirus 4 (Epstein-Barr virus)
cuggagcuggugca

SEQ ID NO: 3965931 - RNA, 15 nt, Human herpesvirus 4 (Epstein-Barr virus)
cuggaucuggggcug

SEQ ID NO: 3965932 - RNA, 12 nt, Human herpesvirus 4 (Epstein-Barr virus)
cuggcacacacu

SEQ ID NO: 3965933 - RNA, 17 nt, Human herpesvirus 4 (Epstein-Barr virus)
cuggcacacacucccuu

SEQ ID NO: 3965934 - RNA, 16 nt, Human herpesvirus 4 (Epstein-Barr virus)
cuggcauacucuucau

SEQ ID NO: 3965935 - RNA, 22 nt, Human herpesvirus 4 (Epstein-Barr virus)
cuggccaccacaucggacgggc

SEQ ID NO: 3965936 - RNA, 18 nt, Human herpesvirus 4 (Epstein-Barr virus)
cuggcggccgcugcgccc

SEQ ID NO: 3965937 - RNA, 12 nt, Human herpesvirus 4 (Epstein-Barr virus)
cuggcuccccau

SEQ ID NO: 3965938 - RNA, 14 nt, Human herpesvirus 4 (Epstein-Barr virus)
cugggcucucagga

SEQ ID NO: 3965939 - RNA, 16 nt, Human herpesvirus 4 (Epstein-Barr virus)
cuggucauggcggacu

SEQ ID NO: 3965940 - RNA, 21 nt, Human herpesvirus 4 (Epstein-Barr virus)
cuggugagaaguugguggugg

SEQ ID NO: 3965941 - RNA, 12 nt, Human herpesvirus 4 (Epstein-Barr virus)
cuguagccaccc

SEQ ID NO: 3965942 - RNA, 19 nt, Human herpesvirus 4 (Epstein-Barr virus)
cugucauugagguaaaaag

SEQ ID NO: 3965943 - RNA, 13 nt, Human herpesvirus 4 (Epstein-Barr virus)
cuguccugcugaa

SEQ ID NO: 3965944 - RNA, 13 nt, Human herpesvirus 4 (Epstein-Barr virus)
cugucucucuuug

SEQ ID NO: 3965945 - RNA, 21 nt, Human herpesvirus 4 (Epstein-Barr virus)
cugucucuuucuggccaaccu

SEQ ID NO: 3965946 - RNA, 16 nt, Human herpesvirus 4 (Epstein-Barr virus)
cuuaacuugacuacaa

SEQ ID NO: 3965947 - RNA, 15 nt, Human herpesvirus 4 (Epstein-Barr virus)
cuucauguccacuga

SEQ ID NO: 3965948 - RNA, 22 nt, Human herpesvirus 4 (Epstein-Barr virus)
cuuccacccccuggagccagcg

SEQ ID NO: 3965949 - RNA, 19 nt, Human herpesvirus 4 (Epstein-Barr virus)
cuucccagcuaguagcccu

SEQ ID NO: 3965950 - RNA, 14 nt, Human herpesvirus 4 (Epstein-Barr virus)
cuucguauaugugu

SEQ ID NO: 3965951 - RNA, 14 nt, Human herpesvirus 4 (Epstein-Barr virus)
cuucuggaacauuu

SEQ ID NO: 3965952 - RNA, 16 nt, Human herpesvirus 4 (Epstein-Barr virus)
cuugaccaguguguac

SEQ ID NO: 3965953 - RNA, 16 nt, Human herpesvirus 4 (Epstein-Barr virus)
cuugaccuugauguac

SEQ ID NO: 3965954 - RNA, 20 nt, Human herpesvirus 4 (Epstein-Barr virus)
cuugagcgccguggccaccu

SEQ ID NO: 3965955 - RNA, 16 nt, Human herpesvirus 4 (Epstein-Barr virus)
cuuggacccugcugcg

SEQ ID NO: 3965956 - RNA, 20 nt, Human herpesvirus 4 (Epstein-Barr virus)
cuuggggguggugggcuccu

SEQ ID NO: 3965957 - RNA, 15 nt, Human herpesvirus 4 (Epstein-Barr virus)
cuugguuucagccuc

SEQ ID NO: 3965958 - RNA, 17 nt, Human herpesvirus 4 (Epstein-Barr virus)
cuuucaguggucaccgg

SEQ ID NO: 3965959 - RNA, 19 nt, Human herpesvirus 4 (Epstein-Barr virus)
cuuucuggccaaccugccu

SEQ ID NO: 3965960 - RNA, 17 nt, Human herpesvirus 4 (Epstein-Barr virus)
cuuuuggccuucuuccu

SEQ ID NO: 3965961 - RNA, 15 nt, Human herpesvirus 4 (Epstein-Barr virus)
gaaaaacuggccaug

SEQ ID NO: 3965962 - RNA, 17 nt, Human herpesvirus 4 (Epstein-Barr virus)
gaaaccccacggagcag

SEQ ID NO: 3965963 - RNA, 14 nt, Human herpesvirus 4 (Epstein-Barr virus)
gaaacgucaggucu

SEQ ID NO: 3965964 - RNA, 15 nt, Human herpesvirus 4 (Epstein-Barr virus)
gaaacuugggggcag

SEQ ID NO: 3965965 - RNA, 15 nt, Human herpesvirus 4 (Epstein-Barr virus)
gaacauggaugugaa

SEQ ID NO: 3965966 - RNA, 15 nt, Human herpesvirus 4 (Epstein-Barr virus)
gaacugacgcuccag

SEQ ID NO: 3965967 - RNA, 16 nt, Human herpesvirus 4 (Epstein-Barr virus)
gaagacuccugccuga

SEQ ID NO: 3965968 - RNA, 15 nt, Human herpesvirus 4 (Epstein-Barr virus)
gaagcuggccaggcu

SEQ ID NO: 3965969 - RNA, 19 nt, Human herpesvirus 4 (Epstein-Barr virus)
gaaggaacggcggagagua

SEQ ID NO: 3965970 - RNA, 13 nt, Human herpesvirus 4 (Epstein-Barr virus)
gacaaggcaggcg

SEQ ID NO: 3965971 - RNA, 20 nt, Human herpesvirus 4 (Epstein-Barr virus)
gacacuuuagagcucuggag

SEQ ID NO: 3965972 - RNA, 14 nt, Human herpesvirus 4 (Epstein-Barr virus)
gacaugcagacucc

SEQ ID NO: 3965973 - RNA, 17 nt, Human herpesvirus 4 (Epstein-Barr virus)
gacauucuucugaagga

SEQ ID NO: 3965974 - RNA, 22 nt, Human herpesvirus 4 (Epstein-Barr virus)
gacauugguguuccacagccug

SEQ ID NO: 3965975 - RNA, 14 nt, Human herpesvirus 4 (Epstein-Barr virus)
gaccaccuggccag

SEQ ID NO: 3965976 - RNA, 19 nt, Human herpesvirus 4 (Epstein-Barr virus)
gacccgaucagagccccau

SEQ ID NO: 3965977 - RNA, 18 nt, Human herpesvirus 4 (Epstein-Barr virus)
gaccggcuacgcgggcca

SEQ ID NO: 3965978 - RNA, 17 nt, Human herpesvirus 4 (Epstein-Barr virus)
gaccucaaagaagaggg

SEQ ID NO: 3965979 - RNA, 16 nt, Human herpesvirus 4 (Epstein-Barr virus)
gaccucccgcccugag

SEQ ID NO: 3965980 - RNA, 16 nt, Human herpesvirus 4 (Epstein-Barr virus)
gacgcggagaggucca

SEQ ID NO: 3965981 - RNA, 16 nt, Human herpesvirus 4 (Epstein-Barr virus)
gacggugaccugacug

SEQ ID NO: 3965982 - RNA, 15 nt, Human herpesvirus 4 (Epstein-Barr virus)
gacugauccgcagaa

SEQ ID NO: 3965983 - RNA, 14 nt, Human herpesvirus 4 (Epstein-Barr virus)
gacugcaaacccug

SEQ ID NO: 3965984 - RNA, 23 nt, Human herpesvirus 4 (Epstein-Barr virus)
gacuggggugugaagggcagggc

SEQ ID NO: 3965985 - RNA, 23 nt, Human herpesvirus 4 (Epstein-Barr virus)
gacugggucgugguuuucugccc

SEQ ID NO: 3965986 - RNA, 15 nt, Human herpesvirus 4 (Epstein-Barr virus)
gagacacggcucugu

SEQ ID NO: 3965987 - RNA, 19 nt, Human herpesvirus 4 (Epstein-Barr virus)
gagaggccucuggggucca

SEQ ID NO: 3965988 - RNA, 13 nt, Human herpesvirus 4 (Epstein-Barr virus)
gagaucaggccaa

SEQ ID NO: 3965989 - RNA, 20 nt, Human herpesvirus 4 (Epstein-Barr virus)
gagaugugaauugggauggu

SEQ ID NO: 3965990 - RNA, 17 nt, Human herpesvirus 4 (Epstein-Barr virus)
gagcacauuccccccgc

SEQ ID NO: 3965991 - RNA, 21 nt, Human herpesvirus 4 (Epstein-Barr virus)
gagcagauuuccgucagccag

SEQ ID NO: 3965992 - RNA, 13 nt, Human herpesvirus 4 (Epstein-Barr virus)
gagcagggcccag

SEQ ID NO: 3965993 - RNA, 14 nt, Human herpesvirus 4 (Epstein-Barr virus)
gagcauggcggccu

SEQ ID NO: 3965994 - RNA, 18 nt, Human herpesvirus 4 (Epstein-Barr virus)
gagcauggcggccuggca

SEQ ID NO: 3965995 - RNA, 19 nt, Human herpesvirus 4 (Epstein-Barr virus)
gagcgcccaccgaccccau

SEQ ID NO: 3965996 - RNA, 14 nt, Human herpesvirus 4 (Epstein-Barr virus)
gagcggcaagggcu

SEQ ID NO: 3965997 - RNA, 20 nt, Human herpesvirus 4 (Epstein-Barr virus)
gagcgggaggggcaggagca

SEQ ID NO: 3965998 - RNA, 19 nt, Human herpesvirus 4 (Epstein-Barr virus)
gagcugagugcccagggca

SEQ ID NO: 3965999 - RNA, 15 nt, Human herpesvirus 4 (Epstein-Barr virus)
gagcuggacgagguc

SEQ ID NO: 3966000 - RNA, 19 nt, Human herpesvirus 4 (Epstein-Barr virus)
gaggcgggaauggccgcca

SEQ ID NO: 3966001 - RNA, 23 nt, Human herpesvirus 4 (Epstein-Barr virus)
gaggcguguggaaguacgagauc

SEQ ID NO: 3966002 - RNA, 21 nt, Human herpesvirus 4 (Epstein-Barr virus)
gagucacaccccacggccaug

SEQ ID NO: 3966003 - RNA, 22 nt, Human herpesvirus 4 (Epstein-Barr virus)
gauagcauggccgccagaguuc

SEQ ID NO: 3966004 - RNA, 20 nt, Human herpesvirus 4 (Epstein-Barr virus)
gauauagcucugcacaggcu

SEQ ID NO: 3966005 - RNA, 14 nt, Human herpesvirus 4 (Epstein-Barr virus)
ccugcauggccagg

SEQ ID NO: 3966006 - RNA, 18 nt, Human herpesvirus 4 (Epstein-Barr virus)
ccugccucucuuaugccu

SEQ ID NO: 3966007 - RNA, 16 nt, Human herpesvirus 4 (Epstein-Barr virus)
ccuggcggcccagccc

SEQ ID NO: 3966008 - RNA, 22 nt, Human herpesvirus 4 (Epstein-Barr virus)
ccugggcugccccgggcccacc

SEQ ID NO: 3966009 - RNA, 16 nt, Human herpesvirus 4 (Epstein-Barr virus)
ccugggggccuguguc

SEQ ID NO: 3966010 - RNA, 21 nt, Human herpesvirus 4 (Epstein-Barr virus)
ccugucucucuuugagggggc

SEQ ID NO: 3966011 - RNA, 21 nt, Human herpesvirus 4 (Epstein-Barr virus)
ccuuccagagcucuacaaccc

SEQ ID NO: 3966012 - RNA, 16 nt, Human herpesvirus 4 (Epstein-Barr virus)
ccuuccucugcccgcu

SEQ ID NO: 3966013 - RNA, 15 nt, Human herpesvirus 4 (Epstein-Barr virus)
ccuucucaugcuccu

SEQ ID NO: 3966014 - RNA, 14 nt, Human herpesvirus 4 (Epstein-Barr virus)
ccuucuccucagcc

SEQ ID NO: 3966015 - RNA, 19 nt, Human herpesvirus 4 (Epstein-Barr virus)
ccuugaggugccacagagc

SEQ ID NO: 3966016 - RNA, 20 nt, Human herpesvirus 4 (Epstein-Barr virus)
ccuuggauccccuuaaucua

SEQ ID NO: 3966017 - RNA, 21 nt, Human herpesvirus 4 (Epstein-Barr virus)
ccuugggugaccuggccaggc

SEQ ID NO: 3966018 - RNA, 18 nt, Human herpesvirus 4 (Epstein-Barr virus)
ccuugguuucagccucac

SEQ ID NO: 3966019 - RNA, 16 nt, Human herpesvirus 4 (Epstein-Barr virus)
ccuuuuaauucucuuc

SEQ ID NO: 3966020 - RNA, 15 nt, Human herpesvirus 4 (Epstein-Barr virus)
cgagaaaaugagcca

SEQ ID NO: 3966021 - RNA, 17 nt, Human herpesvirus 4 (Epstein-Barr virus)
cgagaagacguuguagg

SEQ ID NO: 3966022 - RNA, 18 nt, Human herpesvirus 4 (Epstein-Barr virus)
cgagagaagagagcggcg

SEQ ID NO: 3966023 - RNA, 19 nt, Human herpesvirus 4 (Epstein-Barr virus)
cgagcucuccagccacggc

SEQ ID NO: 3966024 - RNA, 23 nt, Human herpesvirus 4 (Epstein-Barr virus)
cgaggaggcggaagaccaggagc

SEQ ID NO: 3966025 - RNA, 19 nt, Human herpesvirus 4 (Epstein-Barr virus)
cgaucccaggccucagcgu

SEQ ID NO: 3966026 - RNA, 13 nt, Human herpesvirus 4 (Epstein-Barr virus)
cgcaccacagaaa

SEQ ID NO: 3966027 - RNA, 16 nt, Human herpesvirus 4 (Epstein-Barr virus)
cgcaccaccgcagcca

SEQ ID NO: 3966028 - RNA, 19 nt, Human herpesvirus 4 (Epstein-Barr virus)
cgcaccuguguccugggca

SEQ ID NO: 3966029 - RNA, 14 nt, Human herpesvirus 4 (Epstein-Barr virus)
cgccaugcucaggg

SEQ ID NO: 3966030 - RNA, 21 nt, Human herpesvirus 4 (Epstein-Barr virus)
cgcccacacagcgccagcagg

SEQ ID NO: 3966031 - RNA, 13 nt, Human herpesvirus 4 (Epstein-Barr virus)
cgccugcuucacg

SEQ ID NO: 3966032 - RNA, 16 nt, Human herpesvirus 4 (Epstein-Barr virus)
cgcgacucgugggaaa

SEQ ID NO: 3966033 - RNA, 16 nt, Human herpesvirus 4 (Epstein-Barr virus)
cgcgcagccuguucau

SEQ ID NO: 3966034 - RNA, 11 nt, Human herpesvirus 4 (Epstein-Barr virus)
cgcugcugcua

SEQ ID NO: 3966035 - RNA, 19 nt, Human herpesvirus 4 (Epstein-Barr virus)
cgcuggcucgccucauccu

SEQ ID NO: 3966036 - RNA, 16 nt, Human herpesvirus 4 (Epstein-Barr virus)
cgcuguuuugcagcug

SEQ ID NO: 3966037 - RNA, 14 nt, Human herpesvirus 4 (Epstein-Barr virus)
cggaagcccucugg

SEQ ID NO: 3966038 - RNA, 17 nt, Human herpesvirus 4 (Epstein-Barr virus)
cggaagggcaccguggg

SEQ ID NO: 3966039 - RNA, 16 nt, Human herpesvirus 4 (Epstein-Barr virus)
cggagagggaugggcu

SEQ ID NO: 3966040 - RNA, 18 nt, Human herpesvirus 4 (Epstein-Barr virus)
cggagguggagaggcccg

SEQ ID NO: 3966041 - RNA, 20 nt, Human herpesvirus 4 (Epstein-Barr virus)
cggcggggaacgugacaggc

SEQ ID NO: 3966042 - RNA, 16 nt, Human herpesvirus 4 (Epstein-Barr virus)
cggcgugccagaggcc

SEQ ID NO: 3966043 - RNA, 22 nt, Human herpesvirus 4 (Epstein-Barr virus)
cggcuagccugacuaaggguga

SEQ ID NO: 3966044 - RNA, 18 nt, Human herpesvirus 4 (Epstein-Barr virus)
cggcuggccgccguggcc

SEQ ID NO: 3966045 - RNA, 14 nt, Human herpesvirus 4 (Epstein-Barr virus)
cggcugugagcgca

SEQ ID NO: 3966046 - RNA, 14 nt, Human herpesvirus 4 (Epstein-Barr virus)
cgggccuggggcca

SEQ ID NO: 3966047 - RNA, 12 nt, Human herpesvirus 4 (Epstein-Barr virus)
cggggcugggga

SEQ ID NO: 3966048 - RNA, 22 nt, Human herpesvirus 4 (Epstein-Barr virus)
cgggggucaagcaaacggccug

SEQ ID NO: 3966049 - RNA, 16 nt, Human herpesvirus 4 (Epstein-Barr virus)
cggggguucuccaggc

SEQ ID NO: 3966050 - RNA, 14 nt, Human herpesvirus 4 (Epstein-Barr virus)
cgggucccgccucu

SEQ ID NO: 3966051 - RNA, 17 nt, Human herpesvirus 4 (Epstein-Barr virus)
cgguggugggcugcuga

SEQ ID NO: 3966052 - RNA, 21 nt, Human herpesvirus 4 (Epstein-Barr virus)
cggugucugugguugucuucc

SEQ ID NO: 3966053 - RNA, 13 nt, Human herpesvirus 4 (Epstein-Barr virus)
cguagaugagccu

SEQ ID NO: 3966054 - RNA, 18 nt, Human herpesvirus 4 (Epstein-Barr virus)
cgucacucggacuaucaa

SEQ ID NO: 3966055 - RNA, 15 nt, Human herpesvirus 4 (Epstein-Barr virus)
cgucagccaggguga

SEQ ID NO: 3966056 - RNA, 21 nt, Human herpesvirus 4 (Epstein-Barr virus)
cguccucgugagucugcugga

SEQ ID NO: 3966057 - RNA, 17 nt, Human herpesvirus 4 (Epstein-Barr virus)
cguccuuguccaggaga

SEQ ID NO: 3966058 - RNA, 19 nt, Human herpesvirus 4 (Epstein-Barr virus)
cgucugcaccccaguggac

SEQ ID NO: 3966059 - RNA, 16 nt, Human herpesvirus 4 (Epstein-Barr virus)
cgucuuacugcccagc

SEQ ID NO: 3966060 - RNA, 14 nt, Human herpesvirus 4 (Epstein-Barr virus)
cguggguccccucu

SEQ ID NO: 3966061 - RNA, 20 nt, Human herpesvirus 4 (Epstein-Barr virus)
cgugguggcauuaaugucca

SEQ ID NO: 3966062 - RNA, 17 nt, Human herpesvirus 4 (Epstein-Barr virus)
cgugguugggcagaacc

SEQ ID NO: 3966063 - RNA, 16 nt, Human herpesvirus 4 (Epstein-Barr virus)
cguguuccacaaugcc

SEQ ID NO: 3966064 - RNA, 20 nt, Human herpesvirus 4 (Epstein-Barr virus)
cuaaggcaguccaggggcca

SEQ ID NO: 3966065 - RNA, 17 nt, Human herpesvirus 4 (Epstein-Barr virus)
cuaaugccaugcagcgg

SEQ ID NO: 3966066 - RNA, 16 nt, Human herpesvirus 4 (Epstein-Barr virus)
cuacaccaccccacca

SEQ ID NO: 3966067 - RNA, 20 nt, Human herpesvirus 4 (Epstein-Barr virus)
cuacgagggccucuggcacg

SEQ ID NO: 3966068 - RNA, 14 nt, Human herpesvirus 4 (Epstein-Barr virus)
cuacgcagaggcca

SEQ ID NO: 3966069 - RNA, 21 nt, Human herpesvirus 4 (Epstein-Barr virus)
cuagcguacagaaggagaugg

SEQ ID NO: 3966070 - RNA, 15 nt, Human herpesvirus 4 (Epstein-Barr virus)
cuaguugguccaggg

SEQ ID NO: 3966071 - RNA, 16 nt, Human herpesvirus 4 (Epstein-Barr virus)
cuauagauccugggcc

SEQ ID NO: 3966072 - RNA, 14 nt, Human herpesvirus 4 (Epstein-Barr virus)
cuauggaggccccc

SEQ ID NO: 3966073 - RNA, 21 nt, Human herpesvirus 4 (Epstein-Barr virus)
cucacuucuacucuuggcagc

SEQ ID NO: 3966074 - RNA, 14 nt, Human herpesvirus 4 (Epstein-Barr virus)
cucagagagcauuu

SEQ ID NO: 3966075 - RNA, 18 nt, Human herpesvirus 4 (Epstein-Barr virus)
cucaggccucccagucua

SEQ ID NO: 3966076 - RNA, 19 nt, Human herpesvirus 4 (Epstein-Barr virus)
cuccaaucaccagccaccu

SEQ ID NO: 3966077 - RNA, 17 nt, Human herpesvirus 4 (Epstein-Barr virus)
cuccagccacggcgacc

SEQ ID NO: 3966078 - RNA, 16 nt, Human herpesvirus 4 (Epstein-Barr virus)
cuccaggcuccuggau

SEQ ID NO: 3966079 - RNA, 14 nt, Human herpesvirus 4 (Epstein-Barr virus)
cuccagugcgagga

SEQ ID NO: 3966080 - RNA, 22 nt, Human herpesvirus 4 (Epstein-Barr virus)
cuccauuuacugggaaugccuu

SEQ ID NO: 3966081 - RNA, 13 nt, Human herpesvirus 4 (Epstein-Barr virus)
cucccgcccugag

SEQ ID NO: 3966082 - RNA, 16 nt, Human herpesvirus 4 (Epstein-Barr virus)
cuccucagucuuugca

SEQ ID NO: 3966083 - RNA, 13 nt, Human herpesvirus 4 (Epstein-Barr virus)
cuccuccacccag

SEQ ID NO: 3966084 - RNA, 14 nt, Human herpesvirus 4 (Epstein-Barr virus)
cucgaguucucuag

SEQ ID NO: 3966085 - RNA, 16 nt, Human herpesvirus 4 (Epstein-Barr virus)
cucgcuggcucgccuc

SEQ ID NO: 3966086 - RNA, 15 nt, Human herpesvirus 4 (Epstein-Barr virus)
cucggccacacagug

SEQ ID NO: 3966087 - RNA, 23 nt, Human herpesvirus 4 (Epstein-Barr virus)
cucuacaauugccaaguacugaa

SEQ ID NO: 3966088 - RNA, 16 nt, Human herpesvirus 4 (Epstein-Barr virus)
cucucgcccaagcugc

SEQ ID NO: 3966089 - RNA, 20 nt, Human herpesvirus 4 (Epstein-Barr virus)
cucucuggcugugcugaccc

SEQ ID NO: 3966090 - RNA, 15 nt, Human herpesvirus 4 (Epstein-Barr virus)
cucugaccgacgggc

SEQ ID NO: 3966091 - RNA, 16 nt, Human herpesvirus 4 (Epstein-Barr virus)
cucuggcugugcugac

SEQ ID NO: 3966092 - RNA, 22 nt, Human herpesvirus 4 (Epstein-Barr virus)
cucugguaguaggcacaucugg

SEQ ID NO: 3966093 - RNA, 21 nt, Human herpesvirus 4 (Epstein-Barr virus)
uagaauuguuaguuuaaacag

SEQ ID NO: 3966094 - RNA, 16 nt, Human herpesvirus 4 (Epstein-Barr virus)
uagggagguggccaca

SEQ ID NO: 3966095 - RNA, 15 nt, Human herpesvirus 4 (Epstein-Barr virus)
uagggguaacccugu

SEQ ID NO: 3966096 - RNA, 17 nt, Human herpesvirus 4 (Epstein-Barr virus)
uauacuaacacgaaugc

SEQ ID NO: 3966097 - RNA, 16 nt, Human herpesvirus 4 (Epstein-Barr virus)
uaugcaaugcccaccc

SEQ ID NO: 3966098 - RNA, 20 nt, Human herpesvirus 4 (Epstein-Barr virus)
uauggacacuugguaaguuu

SEQ ID NO: 3966099 - RNA, 18 nt, Human herpesvirus 4 (Epstein-Barr virus)
uauggauagauagccacc

SEQ ID NO: 3966100 - RNA, 16 nt, Human herpesvirus 4 (Epstein-Barr virus)
uauugaugugacuugu

SEQ ID NO: 3966101 - RNA, 23 nt, Human herpesvirus 4 (Epstein-Barr virus)
ucaaaggccuugguuucagccuc

SEQ ID NO: 3966102 - RNA, 18 nt, Human herpesvirus 4 (Epstein-Barr virus)
ucaacuucagcuccaggg

SEQ ID NO: 3966103 - RNA, 15 nt, Human herpesvirus 4 (Epstein-Barr virus)
ucaaggcagucucca

SEQ ID NO: 3966104 - RNA, 22 nt, Human herpesvirus 4 (Epstein-Barr virus)
ucaaggggcacgagauggccca

SEQ ID NO: 3966105 - RNA, 21 nt, Human herpesvirus 4 (Epstein-Barr virus)
ucacaccccacggccaugcua

SEQ ID NO: 3966106 - RNA, 17 nt, Human herpesvirus 4 (Epstein-Barr virus)
ucaccugcacagaucug

SEQ ID NO: 3966107 - RNA, 13 nt, Human herpesvirus 4 (Epstein-Barr virus)
ucagaaaagugag

SEQ ID NO: 3966108 - RNA, 18 nt, Human herpesvirus 4 (Epstein-Barr virus)
ucagaagaauguccaaaa

SEQ ID NO: 3966109 - RNA, 17 nt, Human herpesvirus 4 (Epstein-Barr virus)
ucagauagccggaccuc

SEQ ID NO: 3966110 - RNA, 14 nt, Human herpesvirus 4 (Epstein-Barr virus)
ucagcaucacaggu

SEQ ID NO: 3966111 - RNA, 17 nt, Human herpesvirus 4 (Epstein-Barr virus)
ucagcgucaggagaggg

SEQ ID NO: 3966112 - RNA, 16 nt, Human herpesvirus 4 (Epstein-Barr virus)
ucaggccgccgcaucc

SEQ ID NO: 3966113 - RNA, 20 nt, Human herpesvirus 4 (Epstein-Barr virus)
ucauauguaugccuuggcau

SEQ ID NO: 3966114 - RNA, 16 nt, Human herpesvirus 4 (Epstein-Barr virus)
ucaucucaagggagga

SEQ ID NO: 3966115 - RNA, 13 nt, Human herpesvirus 4 (Epstein-Barr virus)
ucaucucgcuggc

SEQ ID NO: 3966116 - RNA, 15 nt, Human herpesvirus 4 (Epstein-Barr virus)
ucauggccgacgagg

SEQ ID NO: 3966117 - RNA, 22 nt, Human herpesvirus 4 (Epstein-Barr virus)
uccaacgagggcagacaccacc

SEQ ID NO: 3966118 - RNA, 19 nt, Human herpesvirus 4 (Epstein-Barr virus)
uccacagccccacucuugc

SEQ ID NO: 3966119 - RNA, 21 nt, Human herpesvirus 4 (Epstein-Barr virus)
uccaccuagaaagagccaugg

SEQ ID NO: 3966120 - RNA, 13 nt, Human herpesvirus 4 (Epstein-Barr virus)
uccagccaucaug

SEQ ID NO: 3966121 - RNA, 12 nt, Human herpesvirus 4 (Epstein-Barr virus)
uccagggcccug

SEQ ID NO: 3966122 - RNA, 21 nt, Human herpesvirus 4 (Epstein-Barr virus)
ucccacuuuuaccccaguccc

SEQ ID NO: 3966123 - RNA, 19 nt, Human herpesvirus 4 (Epstein-Barr virus)
uccccucugcagagagcca

SEQ ID NO: 3966124 - RNA, 17 nt, Human herpesvirus 4 (Epstein-Barr virus)
uccccugacgcuguggc

SEQ ID NO: 3966125 - RNA, 16 nt, Human herpesvirus 4 (Epstein-Barr virus)
ucccgcauugcgccgc

SEQ ID NO: 3966126 - RNA, 18 nt, Human herpesvirus 4 (Epstein-Barr virus)
uccggagacugaggccuu

SEQ ID NO: 3966127 - RNA, 15 nt, Human herpesvirus 4 (Epstein-Barr virus)
uccuagagggacagc

SEQ ID NO: 3966128 - RNA, 12 nt, Human herpesvirus 4 (Epstein-Barr virus)
uccuccaccgcc

SEQ ID NO: 3966129 - RNA, 16 nt, Human herpesvirus 4 (Epstein-Barr virus)
uccucugccuggccgg

SEQ ID NO: 3966130 - RNA, 22 nt, Human herpesvirus 4 (Epstein-Barr virus)
uccuggcauacuuuuugccacc

SEQ ID NO: 3966131 - RNA, 23 nt, Human herpesvirus 4 (Epstein-Barr virus)
uccuggccggccgcccccugacc

SEQ ID NO: 3966132 - RNA, 17 nt, Human herpesvirus 4 (Epstein-Barr virus)
ucuacgccccagaugaa

SEQ ID NO: 3966133 - RNA, 17 nt, Human herpesvirus 4 (Epstein-Barr virus)
ucuacucgaccagcacg

SEQ ID NO: 3966134 - RNA, 14 nt, Human herpesvirus 4 (Epstein-Barr virus)
ucugcugcugcugg

SEQ ID NO: 3966135 - RNA, 17 nt, Human herpesvirus 4 (Epstein-Barr virus)
ucuggaccuggacuggg

SEQ ID NO: 3966136 - RNA, 22 nt, Human herpesvirus 4 (Epstein-Barr virus)
ucugggccgcccggccucgccu

SEQ ID NO: 3966137 - RNA, 15 nt, Human herpesvirus 4 (Epstein-Barr virus)
ucuggucgcccccuc

SEQ ID NO: 3966138 - RNA, 22 nt, Human herpesvirus 4 (Epstein-Barr virus)
ucuuccgugccucgggccucaa

SEQ ID NO: 3966139 - RNA, 15 nt, Human herpesvirus 4 (Epstein-Barr virus)
ugaaaggggccgagg

SEQ ID NO: 3966140 - RNA, 13 nt, Human herpesvirus 4 (Epstein-Barr virus)
ugaagauggccuc

SEQ ID NO: 3966141 - RNA, 18 nt, Human herpesvirus 4 (Epstein-Barr virus)
ugaccaugauggugcaga

SEQ ID NO: 3966142 - RNA, 20 nt, Human herpesvirus 4 (Epstein-Barr virus)
ugaccucccgcccugagcug

SEQ ID NO: 3966143 - RNA, 19 nt, Human herpesvirus 4 (Epstein-Barr virus)
ugaccucuacacgcuugga

SEQ ID NO: 3966144 - RNA, 12 nt, Human herpesvirus 4 (Epstein-Barr virus)
ugacugagcgca

SEQ ID NO: 3966145 - RNA, 15 nt, Human herpesvirus 4 (Epstein-Barr virus)
ugaggccugagagcc

SEQ ID NO: 3966146 - RNA, 16 nt, Human herpesvirus 4 (Epstein-Barr virus)
ugaguccccuccuugg

SEQ ID NO: 3966147 - RNA, 13 nt, Human herpesvirus 4 (Epstein-Barr virus)
ugagucucucgag

SEQ ID NO: 3966148 - RNA, 14 nt, Human herpesvirus 4 (Epstein-Barr virus)
ugaucagggagaac

SEQ ID NO: 3966149 - RNA, 16 nt, Human herpesvirus 4 (Epstein-Barr virus)
ugcaaguuuggccgcu

SEQ ID NO: 3966150 - RNA, 18 nt, Human herpesvirus 4 (Epstein-Barr virus)
ugcacagacuagcgagga

SEQ ID NO: 3966151 - RNA, 15 nt, Human herpesvirus 4 (Epstein-Barr virus)
ugcaccagcuccagg

SEQ ID NO: 3966152 - RNA, 22 nt, Human herpesvirus 4 (Epstein-Barr virus)
ugcaccgauagcauggccgcca

SEQ ID NO: 3966153 - RNA, 22 nt, Human herpesvirus 4 (Epstein-Barr virus)
ugcagcgcccugucccuggagc

SEQ ID NO: 3966154 - RNA, 15 nt, Human herpesvirus 4 (Epstein-Barr virus)
ugcauccgcaccaca

SEQ ID NO: 3966155 - RNA, 17 nt, Human herpesvirus 4 (Epstein-Barr virus)
ugcauggagaagcugga

SEQ ID NO: 3966156 - RNA, 14 nt, Human herpesvirus 4 (Epstein-Barr virus)
ugcauggccaggcc

SEQ ID NO: 3966157 - RNA, 13 nt, Human herpesvirus 4 (Epstein-Barr virus)
ugccaaagcugaa

SEQ ID NO: 3966158 - RNA, 15 nt, Human herpesvirus 4 (Epstein-Barr virus)
ugccaucgggacaga

SEQ ID NO: 3966159 - RNA, 16 nt, Human herpesvirus 4 (Epstein-Barr virus)
ugccaugcacggcccu

SEQ ID NO: 3966160 - RNA, 22 nt, Human herpesvirus 4 (Epstein-Barr virus)
ugcccaccagagggugagccca

SEQ ID NO: 3966161 - RNA, 16 nt, Human herpesvirus 4 (Epstein-Barr virus)
ugcccccgccagcgcc

SEQ ID NO: 3966162 - RNA, 21 nt, Human herpesvirus 4 (Epstein-Barr virus)
ugcccucuccagcaaccaaug

SEQ ID NO: 3966163 - RNA, 18 nt, Human herpesvirus 4 (Epstein-Barr virus)
ugccgggcccgggacagc

SEQ ID NO: 3966164 - RNA, 16 nt, Human herpesvirus 4 (Epstein-Barr virus)
ugccuccagagccccu

SEQ ID NO: 3966165 - RNA, 19 nt, Human herpesvirus 4 (Epstein-Barr virus)
ugccuccggccgccccggg

SEQ ID NO: 3966166 - RNA, 22 nt, Human herpesvirus 4 (Epstein-Barr virus)
ugccuggaagaaucauggccua

SEQ ID NO: 3966167 - RNA, 17 nt, Human herpesvirus 4 (Epstein-Barr virus)
ugcucaaggcagucucc

SEQ ID NO: 3966168 - RNA, 12 nt, Human herpesvirus 4 (Epstein-Barr virus)
ugcugccugggg

SEQ ID NO: 3966169 - RNA, 20 nt, Human herpesvirus 4 (Epstein-Barr virus)
ugcuggagauuuucccacug

SEQ ID NO: 3966170 - RNA, 15 nt, Human herpesvirus 4 (Epstein-Barr virus)
ugcuguaguggccuu

SEQ ID NO: 3966171 - RNA, 12 nt, Human herpesvirus 4 (Epstein-Barr virus)
ugcuugugcucc

SEQ ID NO: 3966172 - RNA, 20 nt, Human herpesvirus 4 (Epstein-Barr virus)
uggaaacccucagucacggg

SEQ ID NO: 3966173 - RNA, 16 nt, Human herpesvirus 4 (Epstein-Barr virus)
uggacacccacccugc

SEQ ID NO: 3966174 - RNA, 21 nt, Human herpesvirus 4 (Epstein-Barr virus)
uggaccgugccauccucucgg

SEQ ID NO: 3966175 - RNA, 18 nt, Human herpesvirus 4 (Epstein-Barr virus)
uggacucggccacacagu

SEQ ID NO: 3966176 - RNA, 19 nt, Human herpesvirus 4 (Epstein-Barr virus)
uggagacggugaccugacu

SEQ ID NO: 3966177 - RNA, 15 nt, Human herpesvirus 4 (Epstein-Barr virus)
uggagcuggacggca

SEQ ID NO: 3966178 - RNA, 18 nt, Human herpesvirus 4 (Epstein-Barr virus)
uggagcuguaacuguggu

SEQ ID NO: 3966179 - RNA, 21 nt, Human herpesvirus 4 (Epstein-Barr virus)
uggaggcaauggucgccaggg

SEQ ID NO: 3966180 - RNA, 22 nt, Human herpesvirus 4 (Epstein-Barr virus)
uggagucugagaauaaggcucu

SEQ ID NO: 3966181 - RNA, 21 nt, Human herpesvirus 4 (Epstein-Barr virus)
cuacucaccuacaugucaacc

SEQ ID NO: 3966182 - RNA, 21 nt, Human herpesvirus 4 (Epstein-Barr virus)
cuacucguuuaagguccgcuc

SEQ ID NO: 3966183 - RNA, 16 nt, Human herpesvirus 4 (Epstein-Barr virus)
cuacucuuggcagcag

SEQ ID NO: 3966184 - RNA, 14 nt, Human herpesvirus 4 (Epstein-Barr virus)
cuagguacucuugg

SEQ ID NO: 3966185 - RNA, 22 nt, Human herpesvirus 4 (Epstein-Barr virus)
cuaguaugaaggcuggcaaaga

SEQ ID NO: 3966186 - RNA, 17 nt, Human herpesvirus 4 (Epstein-Barr virus)
cuaucacccauggccag

SEQ ID NO: 3966187 - RNA, 19 nt, Human herpesvirus 4 (Epstein-Barr virus)
cuaugcauuuccugcccuc

SEQ ID NO: 3966188 - RNA, 22 nt, Human herpesvirus 4 (Epstein-Barr virus)
cuauuagcagccuccgggccgc

SEQ ID NO: 3966189 - RNA, 13 nt, Human herpesvirus 4 (Epstein-Barr virus)
cucagagcuggga

SEQ ID NO: 3966190 - RNA, 17 nt, Human herpesvirus 4 (Epstein-Barr virus)
cucagguuucugggcau

SEQ ID NO: 3966191 - RNA, 13 nt, Human herpesvirus 4 (Epstein-Barr virus)
cucauccugcuca

SEQ ID NO: 3966192 - RNA, 16 nt, Human herpesvirus 4 (Epstein-Barr virus)
cucaugcgccagagcg

SEQ ID NO: 3966193 - RNA, 21 nt, Human herpesvirus 4 (Epstein-Barr virus)
cuccaggaucucccgcgccgc

SEQ ID NO: 3966194 - RNA, 19 nt, Human herpesvirus 4 (Epstein-Barr virus)
cucccauguaagccugccu

SEQ ID NO: 3966195 - RNA, 14 nt, Human herpesvirus 4 (Epstein-Barr virus)
cuccccucugcaga

SEQ ID NO: 3966196 - RNA, 18 nt, Human herpesvirus 4 (Epstein-Barr virus)
cuccgagagcuccgccac

SEQ ID NO: 3966197 - RNA, 22 nt, Human herpesvirus 4 (Epstein-Barr virus)
cuccgaugcccaccagccagcg

SEQ ID NO: 3966198 - RNA, 13 nt, Human herpesvirus 4 (Epstein-Barr virus)
cuccggcugcccg

SEQ ID NO: 3966199 - RNA, 22 nt, Human herpesvirus 4 (Epstein-Barr virus)
cucgcccacacagcgccagcag

SEQ ID NO: 3966200 - RNA, 22 nt, Human herpesvirus 4 (Epstein-Barr virus)
cucgguggugggcugcugaggg

SEQ ID NO: 3966201 - RNA, 18 nt, Human herpesvirus 4 (Epstein-Barr virus)
cucgugagucugcuggac

SEQ ID NO: 3966202 - RNA, 14 nt, Human herpesvirus 4 (Epstein-Barr virus)
cucucaggaacucc

SEQ ID NO: 3966203 - RNA, 22 nt, Human herpesvirus 4 (Epstein-Barr virus)
cucucgaggucugcgaugaggc

SEQ ID NO: 3966204 - RNA, 18 nt, Human herpesvirus 4 (Epstein-Barr virus)
cucucuggagaucuucuc

SEQ ID NO: 3966205 - RNA, 20 nt, Human herpesvirus 4 (Epstein-Barr virus)
cucuggcacgccguggcccu

SEQ ID NO: 3966206 - RNA, 22 nt, Human herpesvirus 4 (Epstein-Barr virus)
cucuggucgcccccucugccuc

SEQ ID NO: 3966207 - RNA, 17 nt, Human herpesvirus 4 (Epstein-Barr virus)
cugaagcaacagguccu

SEQ ID NO: 3966208 - RNA, 17 nt, Human herpesvirus 4 (Epstein-Barr virus)
cugacccuucugcugcu

SEQ ID NO: 3966209 - RNA, 19 nt, Human herpesvirus 4 (Epstein-Barr virus)
cugaccucccgcccugagc

SEQ ID NO: 3966210 - RNA, 23 nt, Human herpesvirus 4 (Epstein-Barr virus)
cugaccucccgcccugagcugga

SEQ ID NO: 3966211 - RNA, 14 nt, Human herpesvirus 4 (Epstein-Barr virus)
cugacgaggggcca

SEQ ID NO: 3966212 - RNA, 13 nt, Human herpesvirus 4 (Epstein-Barr virus)
cugacgcuccagg

SEQ ID NO: 3966213 - RNA, 21 nt, Human herpesvirus 4 (Epstein-Barr virus)
cugagaacugacgcuccagga

SEQ ID NO: 3966214 - RNA, 20 nt, Human herpesvirus 4 (Epstein-Barr virus)
cugagcaagauccuucuggc

SEQ ID NO: 3966215 - RNA, 21 nt, Human herpesvirus 4 (Epstein-Barr virus)
cugagcgugugcacccggcug

SEQ ID NO: 3966216 - RNA, 21 nt, Human herpesvirus 4 (Epstein-Barr virus)
cugauuuuccucauuggcuuu

SEQ ID NO: 3966217 - RNA, 16 nt, Human herpesvirus 4 (Epstein-Barr virus)
cugcaccggagccugc

SEQ ID NO: 3966218 - RNA, 12 nt, Human herpesvirus 4 (Epstein-Barr virus)
cugcauggccag

SEQ ID NO: 3966219 - RNA, 13 nt, Human herpesvirus 4 (Epstein-Barr virus)
cugccagccucag

SEQ ID NO: 3966220 - RNA, 23 nt, Human herpesvirus 4 (Epstein-Barr virus)
cugcccauccaucaacuucagcu

SEQ ID NO: 3966221 - RNA, 13 nt, Human herpesvirus 4 (Epstein-Barr virus)
cugccuggaucug

SEQ ID NO: 3966222 - RNA, 16 nt, Human herpesvirus 4 (Epstein-Barr virus)
cugccuggggaaaaug

SEQ ID NO: 3966223 - RNA, 20 nt, Human herpesvirus 4 (Epstein-Barr virus)
cugcgaugagggccuuccag

SEQ ID NO: 3966224 - RNA, 22 nt, Human herpesvirus 4 (Epstein-Barr virus)
cugcgccugagcugccugguga

SEQ ID NO: 3966225 - RNA, 16 nt, Human herpesvirus 4 (Epstein-Barr virus)
cugcggaguugagccc

SEQ ID NO: 3966226 - RNA, 22 nt, Human herpesvirus 4 (Epstein-Barr virus)
cugcgugagaugaacaccccca

SEQ ID NO: 3966227 - RNA, 19 nt, Human herpesvirus 4 (Epstein-Barr virus)
cugcguggcuggacggagg

SEQ ID NO: 3966228 - RNA, 14 nt, Human herpesvirus 4 (Epstein-Barr virus)
cugcuaagccagga

SEQ ID NO: 3966229 - RNA, 16 nt, Human herpesvirus 4 (Epstein-Barr virus)
cugcuagcgucacuga

SEQ ID NO: 3966230 - RNA, 23 nt, Human herpesvirus 4 (Epstein-Barr virus)
cugcuccaccgccuuaaggccga

SEQ ID NO: 3966231 - RNA, 17 nt, Human herpesvirus 4 (Epstein-Barr virus)
cugcugcugcuggucau

SEQ ID NO: 3966232 - RNA, 14 nt, Human herpesvirus 4 (Epstein-Barr virus)
cugcuucuccccga

SEQ ID NO: 3966233 - RNA, 18 nt, Human herpesvirus 4 (Epstein-Barr virus)
cuggaccagaaggcuccg

SEQ ID NO: 3966234 - RNA, 14 nt, Human herpesvirus 4 (Epstein-Barr virus)
cuggccgagcugga

SEQ ID NO: 3966235 - RNA, 21 nt, Human herpesvirus 4 (Epstein-Barr virus)
cuggcggccgcugcgcccugu

SEQ ID NO: 3966236 - RNA, 17 nt, Human herpesvirus 4 (Epstein-Barr virus)
cuggcuucugugacuuu

SEQ ID NO: 3966237 - RNA, 20 nt, Human herpesvirus 4 (Epstein-Barr virus)
cuggcuuucguccucuggcu

SEQ ID NO: 3966238 - RNA, 18 nt, Human herpesvirus 4 (Epstein-Barr virus)
cugggaggugcugaggcc

SEQ ID NO: 3966239 - RNA, 23 nt, Human herpesvirus 4 (Epstein-Barr virus)
cugguacguuggcuucugcugcu

SEQ ID NO: 3966240 - RNA, 15 nt, Human herpesvirus 4 (Epstein-Barr virus)
cuggucgcccccucu

SEQ ID NO: 3966241 - RNA, 23 nt, Human herpesvirus 4 (Epstein-Barr virus)
cuggugaugcuugugcuccugau

SEQ ID NO: 3966242 - RNA, 19 nt, Human herpesvirus 4 (Epstein-Barr virus)
cuggugccagacucucuuc

SEQ ID NO: 3966243 - RNA, 21 nt, Human herpesvirus 4 (Epstein-Barr virus)
cuguaccugaugagucacacc

SEQ ID NO: 3966244 - RNA, 17 nt, Human herpesvirus 4 (Epstein-Barr virus)
cuguacuuguccgggcu

SEQ ID NO: 3966245 - RNA, 18 nt, Human herpesvirus 4 (Epstein-Barr virus)
cuguagccacccgucccg

SEQ ID NO: 3966246 - RNA, 16 nt, Human herpesvirus 4 (Epstein-Barr virus)
cugucaccaggccugc

SEQ ID NO: 3966247 - RNA, 17 nt, Human herpesvirus 4 (Epstein-Barr virus)
cugucucggccuccugg

SEQ ID NO: 3966248 - RNA, 19 nt, Human herpesvirus 4 (Epstein-Barr virus)
cugugguugucuucccaga

SEQ ID NO: 3966249 - RNA, 16 nt, Human herpesvirus 4 (Epstein-Barr virus)
cuguguacgugccuca

SEQ ID NO: 3966250 - RNA, 20 nt, Human herpesvirus 4 (Epstein-Barr virus)
cuguguacgugccucagaua

SEQ ID NO: 3966251 - RNA, 17 nt, Human herpesvirus 4 (Epstein-Barr virus)
cuuacauucuuauugaa

SEQ ID NO: 3966252 - RNA, 14 nt, Human herpesvirus 4 (Epstein-Barr virus)
cuucagcuccaggg

SEQ ID NO: 3966253 - RNA, 23 nt, Human herpesvirus 4 (Epstein-Barr virus)
cuuccagacuaugcauacacuga

SEQ ID NO: 3966254 - RNA, 22 nt, Human herpesvirus 4 (Epstein-Barr virus)
cuucgcccccucuuuguggccu

SEQ ID NO: 3966255 - RNA, 18 nt, Human herpesvirus 4 (Epstein-Barr virus)
cuucugggaacaccccca

SEQ ID NO: 3966256 - RNA, 16 nt, Human herpesvirus 4 (Epstein-Barr virus)
cuucugucucggccuc

SEQ ID NO: 3966257 - RNA, 15 nt, Human herpesvirus 4 (Epstein-Barr virus)
cuugggggugguggg

SEQ ID NO: 3966258 - RNA, 18 nt, Human herpesvirus 4 (Epstein-Barr virus)
cuugugguucuccugauu

SEQ ID NO: 3966259 - RNA, 15 nt, Human herpesvirus 4 (Epstein-Barr virus)
cuuguuucucagaga

SEQ ID NO: 3966260 - RNA, 15 nt, Human herpesvirus 4 (Epstein-Barr virus)
cuuucaguggucacc

SEQ ID NO: 3966261 - RNA, 13 nt, Human herpesvirus 4 (Epstein-Barr virus)
cuuugccaaccug

SEQ ID NO: 3966262 - RNA, 21 nt, Human herpesvirus 4 (Epstein-Barr virus)
gaaaauaguuccaggugacag

SEQ ID NO: 3966263 - RNA, 12 nt, Human herpesvirus 4 (Epstein-Barr virus)
gaaaaugaugaa

SEQ ID NO: 3966264 - RNA, 16 nt, Human herpesvirus 4 (Epstein-Barr virus)
gaaacacagcucuggc

SEQ ID NO: 3966265 - RNA, 21 nt, Human herpesvirus 4 (Epstein-Barr virus)
gaaaccuugccuacgggcgca

SEQ ID NO: 3966266 - RNA, 13 nt, Human herpesvirus 4 (Epstein-Barr virus)
gaaccaucagcuc

SEQ ID NO: 3966267 - RNA, 17 nt, Human herpesvirus 4 (Epstein-Barr virus)
gaacucgagagaggccu

SEQ ID NO: 3966268 - RNA, 18 nt, Human herpesvirus 4 (Epstein-Barr virus)
gccccucagccugcuccu

SEQ ID NO: 3966269 - RNA, 20 nt, Human herpesvirus 4 (Epstein-Barr virus)
gcccgacccccgggcgcccc

SEQ ID NO: 3966270 - RNA, 22 nt, Human herpesvirus 4 (Epstein-Barr virus)
gcccgcuuuugcgaccccucug

SEQ ID NO: 3966271 - RNA, 16 nt, Human herpesvirus 4 (Epstein-Barr virus)
gcccuccgcagccgcu

SEQ ID NO: 3966272 - RNA, 16 nt, Human herpesvirus 4 (Epstein-Barr virus)
gcccucgagaacccca

SEQ ID NO: 3966273 - RNA, 19 nt, Human herpesvirus 4 (Epstein-Barr virus)
gcccucuuccgugccucgg

SEQ ID NO: 3966274 - RNA, 14 nt, Human herpesvirus 4 (Epstein-Barr virus)
gccgccgccagcag

SEQ ID NO: 3966275 - RNA, 14 nt, Human herpesvirus 4 (Epstein-Barr virus)
gccgcugccaggcc

SEQ ID NO: 3966276 - RNA, 16 nt, Human herpesvirus 4 (Epstein-Barr virus)
gccguagcccaguccg

SEQ ID NO: 3966277 - RNA, 16 nt, Human herpesvirus 4 (Epstein-Barr virus)
gccguccucgaaggcu

SEQ ID NO: 3966278 - RNA, 17 nt, Human herpesvirus 4 (Epstein-Barr virus)
gccuccaacaggugccc

SEQ ID NO: 3966279 - RNA, 20 nt, Human herpesvirus 4 (Epstein-Barr virus)
gccuccaacaggugcccgag

SEQ ID NO: 3966280 - RNA, 20 nt, Human herpesvirus 4 (Epstein-Barr virus)
gccuccagcucggccagcag

SEQ ID NO: 3966281 - RNA, 14 nt, Human herpesvirus 4 (Epstein-Barr virus)
gccuccgccugagc

SEQ ID NO: 3966282 - RNA, 13 nt, Human herpesvirus 4 (Epstein-Barr virus)
gccuccggccgcc

SEQ ID NO: 3966283 - RNA, 20 nt, Human herpesvirus 4 (Epstein-Barr virus)
gccucgcgacucgugggaaa

SEQ ID NO: 3966284 - RNA, 14 nt, Human herpesvirus 4 (Epstein-Barr virus)
gccucugcucuggu

SEQ ID NO: 3966285 - RNA, 20 nt, Human herpesvirus 4 (Epstein-Barr virus)
gccugaagcuugcuggggcg

SEQ ID NO: 3966286 - RNA, 19 nt, Human herpesvirus 4 (Epstein-Barr virus)
gccugagcugccuggugag

SEQ ID NO: 3966287 - RNA, 11 nt, Human herpesvirus 4 (Epstein-Barr virus)
gccugccaaag

SEQ ID NO: 3966288 - RNA, 14 nt, Human herpesvirus 4 (Epstein-Barr virus)
gccugccaaagagc

SEQ ID NO: 3966289 - RNA, 18 nt, Human herpesvirus 4 (Epstein-Barr virus)
gccuggugccagacucuc

SEQ ID NO: 3966290 - RNA, 15 nt, Human herpesvirus 4 (Epstein-Barr virus)
gccuguaauuguugc

SEQ ID NO: 3966291 - RNA, 22 nt, Human herpesvirus 4 (Epstein-Barr virus)
gccuguuuguccagcagggccu

SEQ ID NO: 3966292 - RNA, 14 nt, Human herpesvirus 4 (Epstein-Barr virus)
gccuuccagagcuc

SEQ ID NO: 3966293 - RNA, 21 nt, Human herpesvirus 4 (Epstein-Barr virus)
gccuucuccucagccuccaac

SEQ ID NO: 3966294 - RNA, 16 nt, Human herpesvirus 4 (Epstein-Barr virus)
gcgacauuuaccuggu

SEQ ID NO: 3966295 - RNA, 20 nt, Human herpesvirus 4 (Epstein-Barr virus)
gcgaggggcgccccagggca

SEQ ID NO: 3966296 - RNA, 20 nt, Human herpesvirus 4 (Epstein-Barr virus)
gcgagggggccuggugccag

SEQ ID NO: 3966297 - RNA, 15 nt, Human herpesvirus 4 (Epstein-Barr virus)
gcgcccuccucuggg

SEQ ID NO: 3966298 - RNA, 17 nt, Human herpesvirus 4 (Epstein-Barr virus)
gcgccgccucccccagc

SEQ ID NO: 3966299 - RNA, 21 nt, Human herpesvirus 4 (Epstein-Barr virus)
gcggcagcggacgguggggcu

SEQ ID NO: 3966300 - RNA, 16 nt, Human herpesvirus 4 (Epstein-Barr virus)
gcuaacaggacauguu

SEQ ID NO: 3966301 - RNA, 18 nt, Human herpesvirus 4 (Epstein-Barr virus)
gcucaggccaugcgcgcc

SEQ ID NO: 3966302 - RNA, 23 nt, Human herpesvirus 4 (Epstein-Barr virus)
gcucgcccacacagcgccagcag

SEQ ID NO: 3966303 - RNA, 16 nt, Human herpesvirus 4 (Epstein-Barr virus)
gcucucguugccaaaa

SEQ ID NO: 3966304 - RNA, 14 nt, Human herpesvirus 4 (Epstein-Barr virus)
gcugaacuggggcu

SEQ ID NO: 3966305 - RNA, 15 nt, Human herpesvirus 4 (Epstein-Barr virus)
gcugaacuggggcug

SEQ ID NO: 3966306 - RNA, 20 nt, Human herpesvirus 4 (Epstein-Barr virus)
gcugaagaugauggacccaa

SEQ ID NO: 3966307 - RNA, 14 nt, Human herpesvirus 4 (Epstein-Barr virus)
gcugagcgugugca

SEQ ID NO: 3966308 - RNA, 19 nt, Human herpesvirus 4 (Epstein-Barr virus)
gcugccagagccucugcca

SEQ ID NO: 3966309 - RNA, 13 nt, Human herpesvirus 4 (Epstein-Barr virus)
gcugccugggggc

SEQ ID NO: 3966310 - RNA, 13 nt, Human herpesvirus 4 (Epstein-Barr virus)
gcuggacgagguc

SEQ ID NO: 3966311 - RNA, 14 nt, Human herpesvirus 4 (Epstein-Barr virus)
gcuggccugccugg

SEQ ID NO: 3966312 - RNA, 23 nt, Human herpesvirus 4 (Epstein-Barr virus)
gcugucacccaugccuccccagc

SEQ ID NO: 3966313 - RNA, 17 nt, Human herpesvirus 4 (Epstein-Barr virus)
gcuucuuuuuggugaaa

SEQ ID NO: 3966314 - RNA, 20 nt, Human herpesvirus 4 (Epstein-Barr virus)
gcuuugagcuaaugccauag

SEQ ID NO: 3966315 - RNA, 20 nt, Human herpesvirus 4 (Epstein-Barr virus)
ggaaaaucucgcucagagcu

SEQ ID NO: 3966316 - RNA, 23 nt, Human herpesvirus 4 (Epstein-Barr virus)
ggaaaaucucgcucagagcuggg

SEQ ID NO: 3966317 - RNA, 15 nt, Human herpesvirus 4 (Epstein-Barr virus)
ggaacacccccaccc

SEQ ID NO: 3966318 - RNA, 15 nt, Human herpesvirus 4 (Epstein-Barr virus)
ggaacaccgggcagg

SEQ ID NO: 3966319 - RNA, 16 nt, Human herpesvirus 4 (Epstein-Barr virus)
ggaaugacgggcuccc

SEQ ID NO: 3966320 - RNA, 13 nt, Human herpesvirus 4 (Epstein-Barr virus)
ggacccugcugcg

SEQ ID NO: 3966321 - RNA, 14 nt, Human herpesvirus 4 (Epstein-Barr virus)
ggacgaggacgaga

SEQ ID NO: 3966322 - RNA, 18 nt, Human herpesvirus 4 (Epstein-Barr virus)
ggacgaggacggggaaga

SEQ ID NO: 3966323 - RNA, 13 nt, Human herpesvirus 4 (Epstein-Barr virus)
ggacgggcaggca

SEQ ID NO: 3966324 - RNA, 18 nt, Human herpesvirus 4 (Epstein-Barr virus)
ggagcaggaggaggggca

SEQ ID NO: 3966325 - RNA, 20 nt, Human herpesvirus 4 (Epstein-Barr virus)
ggagcaggaggggcaggagc

SEQ ID NO: 3966326 - RNA, 18 nt, Human herpesvirus 4 (Epstein-Barr virus)
ggagccagcgcugggggu

SEQ ID NO: 3966327 - RNA, 22 nt, Human herpesvirus 4 (Epstein-Barr virus)
ggagcggggguucuccaggcuc

SEQ ID NO: 3966328 - RNA, 15 nt, Human herpesvirus 4 (Epstein-Barr virus)
ggaggacgugaguga

SEQ ID NO: 3966329 - RNA, 14 nt, Human herpesvirus 4 (Epstein-Barr virus)
ggaggccagguagc

SEQ ID NO: 3966330 - RNA, 18 nt, Human herpesvirus 4 (Epstein-Barr virus)
ggaggggaccacuagguc

SEQ ID NO: 3966331 - RNA, 13 nt, Human herpesvirus 4 (Epstein-Barr virus)
ggaggggcggcag

SEQ ID NO: 3966332 - RNA, 16 nt, Human herpesvirus 4 (Epstein-Barr virus)
ggagucggugggcggu

SEQ ID NO: 3966333 - RNA, 21 nt, Human herpesvirus 4 (Epstein-Barr virus)
ggagucugagaauaaggcucu

SEQ ID NO: 3966334 - RNA, 12 nt, Human herpesvirus 4 (Epstein-Barr virus)
ggaugccuggcg

SEQ ID NO: 3966335 - RNA, 13 nt, Human herpesvirus 4 (Epstein-Barr virus)
ggcaaaccuccaa

SEQ ID NO: 3966336 - RNA, 17 nt, Human herpesvirus 4 (Epstein-Barr virus)
ggcaagggcucaccagg

SEQ ID NO: 3966337 - RNA, 18 nt, Human herpesvirus 4 (Epstein-Barr virus)
ggcacacacucccuuagc

SEQ ID NO: 3966338 - RNA, 20 nt, Human herpesvirus 4 (Epstein-Barr virus)
ggcacacacucccuuagcca

SEQ ID NO: 3966339 - RNA, 17 nt, Human herpesvirus 4 (Epstein-Barr virus)
ggcaccauagcauguca

SEQ ID NO: 3966340 - RNA, 18 nt, Human herpesvirus 4 (Epstein-Barr virus)
ggcaucauguuuuuggca

SEQ ID NO: 3966341 - RNA, 18 nt, Human herpesvirus 4 (Epstein-Barr virus)
ggccacggcgugccagag

SEQ ID NO: 3966342 - RNA, 16 nt, Human herpesvirus 4 (Epstein-Barr virus)
ggccagcaaaaccagc

SEQ ID NO: 3966343 - RNA, 16 nt, Human herpesvirus 4 (Epstein-Barr virus)
ggccagguagcccagc

SEQ ID NO: 3966344 - RNA, 17 nt, Human herpesvirus 4 (Epstein-Barr virus)
ggccaucauggccgacg

SEQ ID NO: 3966345 - RNA, 21 nt, Human herpesvirus 4 (Epstein-Barr virus)
ggcccgagguucucuucacua

SEQ ID NO: 3966346 - RNA, 14 nt, Human herpesvirus 4 (Epstein-Barr virus)
ggcccguuccaggc

SEQ ID NO: 3966347 - RNA, 19 nt, Human herpesvirus 4 (Epstein-Barr virus)
ggcccucagaauuucugcu

SEQ ID NO: 3966348 - RNA, 21 nt, Human herpesvirus 4 (Epstein-Barr virus)
ggccgagcagggacuggcggc

SEQ ID NO: 3966349 - RNA, 16 nt, Human herpesvirus 4 (Epstein-Barr virus)
ggccgcgcugcgaggc

SEQ ID NO: 3966350 - RNA, 19 nt, Human herpesvirus 4 (Epstein-Barr virus)
ggccucuacgccaggcucg

SEQ ID NO: 3966351 - RNA, 19 nt, Human herpesvirus 4 (Epstein-Barr virus)
ggcgacaguaacacagggu

SEQ ID NO: 3966352 - RNA, 16 nt, Human herpesvirus 4 (Epstein-Barr virus)
ggcgcgggucccccua

SEQ ID NO: 3966353 - RNA, 23 nt, Human herpesvirus 4 (Epstein-Barr virus)
ggcgguccuccacggggacacgc

SEQ ID NO: 3966354 - RNA, 19 nt, Human herpesvirus 4 (Epstein-Barr virus)
ggcggugggaucaugaagc

SEQ ID NO: 3966355 - RNA, 18 nt, Human herpesvirus 4 (Epstein-Barr virus)
ggcgucgggaaacacagc

SEQ ID NO: 3966356 - RNA, 21 nt, Human herpesvirus 4 (Epstein-Barr virus)
uggcacacauuacggugcugg

SEQ ID NO: 3966357 - RNA, 22 nt, Human herpesvirus 4 (Epstein-Barr virus)
uggccaccacaucggacgggca

SEQ ID NO: 3966358 - RNA, 10 nt, Human herpesvirus 4 (Epstein-Barr virus)
uggccgccgu

SEQ ID NO: 3966359 - RNA, 22 nt, Human herpesvirus 4 (Epstein-Barr virus)
uggccugggaggugcugaggcc

SEQ ID NO: 3966360 - RNA, 22 nt, Human herpesvirus 4 (Epstein-Barr virus)
uggccuucucugauggccugga

SEQ ID NO: 3966361 - RNA, 13 nt, Human herpesvirus 4 (Epstein-Barr virus)
uggcuauggucau

SEQ ID NO: 3966362 - RNA, 22 nt, Human herpesvirus 4 (Epstein-Barr virus)
uggcucagcuuggggccaccgg

SEQ ID NO: 3966363 - RNA, 17 nt, Human herpesvirus 4 (Epstein-Barr virus)
uggcuguacgccgccgc

SEQ ID NO: 3966364 - RNA, 17 nt, Human herpesvirus 4 (Epstein-Barr virus)
ugggaacugaguaggcu

SEQ ID NO: 3966365 - RNA, 13 nt, Human herpesvirus 4 (Epstein-Barr virus)
ugggaccggggcc

SEQ ID NO: 3966366 - RNA, 13 nt, Human herpesvirus 4 (Epstein-Barr virus)
ugggaucaugaag

SEQ ID NO: 3966367 - RNA, 14 nt, Human herpesvirus 4 (Epstein-Barr virus)
ugggcucccucugg

SEQ ID NO: 3966368 - RNA, 20 nt, Human herpesvirus 4 (Epstein-Barr virus)
uggggaguuagcauuggcgu

SEQ ID NO: 3966369 - RNA, 19 nt, Human herpesvirus 4 (Epstein-Barr virus)
ugggguauucucagaugca

SEQ ID NO: 3966370 - RNA, 22 nt, Human herpesvirus 4 (Epstein-Barr virus)
uggggugcgggugcgggugaug

SEQ ID NO: 3966371 - RNA, 20 nt, Human herpesvirus 4 (Epstein-Barr virus)
ugguagccggcgcugugugg

SEQ ID NO: 3966372 - RNA, 13 nt, Human herpesvirus 4 (Epstein-Barr virus)
uggucaagagcuu

SEQ ID NO: 3966373 - RNA, 15 nt, Human herpesvirus 4 (Epstein-Barr virus)
uggugaugcuugugc

SEQ ID NO: 3966374 - RNA, 13 nt, Human herpesvirus 4 (Epstein-Barr virus)
uggugggacugag

SEQ ID NO: 3966375 - RNA, 15 nt, Human herpesvirus 4 (Epstein-Barr virus)
uggugggaggcccag

SEQ ID NO: 3966376 - RNA, 14 nt, Human herpesvirus 4 (Epstein-Barr virus)
uguacugcgaugag

SEQ ID NO: 3966377 - RNA, 19 nt, Human herpesvirus 4 (Epstein-Barr virus)
uguacuugggauugcaaca

SEQ ID NO: 3966378 - RNA, 20 nt, Human herpesvirus 4 (Epstein-Barr virus)
uguagccacccgucccgggu

SEQ ID NO: 3966379 - RNA, 15 nt, Human herpesvirus 4 (Epstein-Barr virus)
uguccagcagggccu

SEQ ID NO: 3966380 - RNA, 19 nt, Human herpesvirus 4 (Epstein-Barr virus)
ugucggcuaaugccaugca

SEQ ID NO: 3966381 - RNA, 17 nt, Human herpesvirus 4 (Epstein-Barr virus)
ugucuaucucuauugcc

SEQ ID NO: 3966382 - RNA, 14 nt, Human herpesvirus 4 (Epstein-Barr virus)
ugucuccccucugc

SEQ ID NO: 3966383 - RNA, 17 nt, Human herpesvirus 4 (Epstein-Barr virus)
ugucucggccuccuggc

SEQ ID NO: 3966384 - RNA, 23 nt, Human herpesvirus 4 (Epstein-Barr virus)
ugucuucccagacucugcuuucu

SEQ ID NO: 3966385 - RNA, 13 nt, Human herpesvirus 4 (Epstein-Barr virus)
ugugagacaagcc

SEQ ID NO: 3966386 - RNA, 14 nt, Human herpesvirus 4 (Epstein-Barr virus)
ugugcugaagccca

SEQ ID NO: 3966387 - RNA, 16 nt, Human herpesvirus 4 (Epstein-Barr virus)
uguggcuguagccacc

SEQ ID NO: 3966388 - RNA, 22 nt, Human herpesvirus 4 (Epstein-Barr virus)
ugugucccccuccauuccaccc

SEQ ID NO: 3966389 - RNA, 13 nt, Human herpesvirus 4 (Epstein-Barr virus)
uguuauucccacc

SEQ ID NO: 3966390 - RNA, 14 nt, Human herpesvirus 4 (Epstein-Barr virus)
uguuuccagacacc

SEQ ID NO: 3966391 - RNA, 16 nt, Human herpesvirus 4 (Epstein-Barr virus)
uuaaggaaugaacacu

SEQ ID NO: 3966392 - RNA, 15 nt, Human herpesvirus 4 (Epstein-Barr virus)
uuacugggaaugccu

SEQ ID NO: 3966393 - RNA, 17 nt, Human herpesvirus 4 (Epstein-Barr virus)
uucccgacggcaugccu

SEQ ID NO: 3966394 - RNA, 20 nt, Human herpesvirus 4 (Epstein-Barr virus)
uucgggcaagauggagaggc

SEQ ID NO: 3966395 - RNA, 17 nt, Human herpesvirus 4 (Epstein-Barr virus)
uucucuaaucccucugg

SEQ ID NO: 3966396 - RNA, 16 nt, Human herpesvirus 4 (Epstein-Barr virus)
uugaggcaauggccac

SEQ ID NO: 3966397 - RNA, 14 nt, Human herpesvirus 4 (Epstein-Barr virus)
uugaugauauugaa

SEQ ID NO: 3966398 - RNA, 23 nt, Human herpesvirus 4 (Epstein-Barr virus)
uugcaaacaaacuucaagaguuu

SEQ ID NO: 3966399 - RNA, 23 nt, Human herpesvirus 4 (Epstein-Barr virus)
uugcuagucacacccguggaggu

SEQ ID NO: 3966400 - RNA, 12 nt, Human herpesvirus 4 (Epstein-Barr virus)
uuggcagacacc

SEQ ID NO: 3966401 - RNA, 13 nt, Human herpesvirus 4 (Epstein-Barr virus)
uuguaaaacuugg

SEQ ID NO: 3966402 - RNA, 17 nt, Human herpesvirus 4 (Epstein-Barr virus)
uuuauuaggcacaaacu

SEQ ID NO: 3966403 - RNA, 15 nt, Human herpesvirus 4 (Epstein-Barr virus)
uuucagcaucacagg

SEQ ID NO: 3966404 - RNA, 14 nt, Human herpesvirus 4 (Epstein-Barr virus)
uuugcaaacaaacu

SEQ ID NO: 3966405 - RNA, 12 nt, Human herpesvirus 4 (Epstein-Barr virus)
uuugccuggggc

SEQ ID NO: 3966406 - RNA, 17 nt, Human herpesvirus 4 (Epstein-Barr virus)
uuuucugccccucagcc

SEQ ID NO: 3966407 - RNA, 14 nt, Human herpesvirus 4 (Epstein-Barr virus)
gcuggugcaccugc

SEQ ID NO: 3966408 - RNA, 15 nt, Human herpesvirus 4 (Epstein-Barr virus)
gcuguugacaugagc

SEQ ID NO: 3966409 - RNA, 21 nt, Human herpesvirus 4 (Epstein-Barr virus)
gcuuacaagaauaacaugcca

SEQ ID NO: 3966410 - RNA, 18 nt, Human herpesvirus 4 (Epstein-Barr virus)
ggaaaauaguuccaggug

SEQ ID NO: 3966411 - RNA, 16 nt, Human herpesvirus 4 (Epstein-Barr virus)
ggaagacaacgaggua

SEQ ID NO: 3966412 - RNA, 14 nt, Human herpesvirus 4 (Epstein-Barr virus)
ggaccacauacauc

SEQ ID NO: 3966413 - RNA, 17 nt, Human herpesvirus 4 (Epstein-Barr virus)
ggaccuacaggacaaga

SEQ ID NO: 3966414 - RNA, 17 nt, Human herpesvirus 4 (Epstein-Barr virus)
ggacgauagcccaggca

SEQ ID NO: 3966415 - RNA, 18 nt, Human herpesvirus 4 (Epstein-Barr virus)
ggacgcuguccgccagga

SEQ ID NO: 3966416 - RNA, 24 nt, Human herpesvirus 4 (Epstein-Barr virus)
ggacguuggcgggacuggcacggu

SEQ ID NO: 3966417 - RNA, 13 nt, Human herpesvirus 4 (Epstein-Barr virus)
ggagacgcccuca

SEQ ID NO: 3966418 - RNA, 20 nt, Human herpesvirus 4 (Epstein-Barr virus)
ggagagauuucauccucaga

SEQ ID NO: 3966419 - RNA, 17 nt, Human herpesvirus 4 (Epstein-Barr virus)
ggagcaggagcaggagc

SEQ ID NO: 3966420 - RNA, 12 nt, Human herpesvirus 4 (Epstein-Barr virus)
ggagcaggaggg

SEQ ID NO: 3966421 - RNA, 14 nt, Human herpesvirus 4 (Epstein-Barr virus)
ggagccggcggccu

SEQ ID NO: 3966422 - RNA, 18 nt, Human herpesvirus 4 (Epstein-Barr virus)
ggaggaaaugaacccagg

SEQ ID NO: 3966423 - RNA, 22 nt, Human herpesvirus 4 (Epstein-Barr virus)
ggaggagcuccgugagcaggag

SEQ ID NO: 3966424 - RNA, 22 nt, Human herpesvirus 4 (Epstein-Barr virus)
ggaggaugaagauccaacuccg

SEQ ID NO: 3966425 - RNA, 17 nt, Human herpesvirus 4 (Epstein-Barr virus)
ggaggccucaggcaaca

SEQ ID NO: 3966426 - RNA, 16 nt, Human herpesvirus 4 (Epstein-Barr virus)
ggaggugcugaggccc

SEQ ID NO: 3966427 - RNA, 16 nt, Human herpesvirus 4 (Epstein-Barr virus)
ggagucgaagcucuug

SEQ ID NO: 3966428 - RNA, 14 nt, Human herpesvirus 4 (Epstein-Barr virus)
gagagaggccucug

SEQ ID NO: 3966429 - RNA, 19 nt, Human herpesvirus 4 (Epstein-Barr virus)
gagcaugaucaggacccug

SEQ ID NO: 3966430 - RNA, 13 nt, Human herpesvirus 4 (Epstein-Barr virus)
gagccgggggcau

SEQ ID NO: 3966431 - RNA, 12 nt, Human herpesvirus 4 (Epstein-Barr virus)
gagcgccguggc

SEQ ID NO: 3966432 - RNA, 13 nt, Human herpesvirus 4 (Epstein-Barr virus)
gagcuggaggcca

SEQ ID NO: 3966433 - RNA, 18 nt, Human herpesvirus 4 (Epstein-Barr virus)
gagcuguaacugugguuu

SEQ ID NO: 3966434 - RNA, 21 nt, Human herpesvirus 4 (Epstein-Barr virus)
gaggaacggugauuaggcacu

SEQ ID NO: 3966435 - RNA, 14 nt, Human herpesvirus 4 (Epstein-Barr virus)
gaggaggcggaaga

SEQ ID NO: 3966436 - RNA, 13 nt, Human herpesvirus 4 (Epstein-Barr virus)
gaggccucaggca

SEQ ID NO: 3966437 - RNA, 20 nt, Human herpesvirus 4 (Epstein-Barr virus)
gaggcggaagaccaggagcc

SEQ ID NO: 3966438 - RNA, 15 nt, Human herpesvirus 4 (Epstein-Barr virus)
gaggggcaggagcag

SEQ ID NO: 3966439 - RNA, 21 nt, Human herpesvirus 4 (Epstein-Barr virus)
gagugcccuggaggccucagg

SEQ ID NO: 3966440 - RNA, 16 nt, Human herpesvirus 4 (Epstein-Barr virus)
gauaaaguuguccugg

SEQ ID NO: 3966441 - RNA, 19 nt, Human herpesvirus 4 (Epstein-Barr virus)
gauaggggauuccugucca

SEQ ID NO: 3966442 - RNA, 22 nt, Human herpesvirus 4 (Epstein-Barr virus)
gaucagggccaagacauagaga

SEQ ID NO: 3966443 - RNA, 22 nt, Human herpesvirus 4 (Epstein-Barr virus)
gaucgauuggaaaagggcccag

SEQ ID NO: 3966444 - RNA, 14 nt, Human herpesvirus 4 (Epstein-Barr virus)
gaucuuugacugac

SEQ ID NO: 3966445 - RNA, 11 nt, Human herpesvirus 4 (Epstein-Barr virus)
gaugcccucau

SEQ ID NO: 3966446 - RNA, 18 nt, Human herpesvirus 4 (Epstein-Barr virus)
gcaacagacugcggggag

SEQ ID NO: 3966447 - RNA, 13 nt, Human herpesvirus 4 (Epstein-Barr virus)
gcaacugcguccu

SEQ ID NO: 3966448 - RNA, 16 nt, Human herpesvirus 4 (Epstein-Barr virus)
gcaagaauuggggcug

SEQ ID NO: 3966449 - RNA, 13 nt, Human herpesvirus 4 (Epstein-Barr virus)
gcacaaccuugga

SEQ ID NO: 3966450 - RNA, 14 nt, Human herpesvirus 4 (Epstein-Barr virus)
gcaccuagcccacu

SEQ ID NO: 3966451 - RNA, 22 nt, Human herpesvirus 4 (Epstein-Barr virus)
gcagauagccggccaggcagag

SEQ ID NO: 3966452 - RNA, 20 nt, Human herpesvirus 4 (Epstein-Barr virus)
cgaaggugcagcuggcccac

SEQ ID NO: 3966453 - RNA, 12 nt, Human herpesvirus 4 (Epstein-Barr virus)
cgacuucuggaa

SEQ ID NO: 3966454 - RNA, 22 nt, Human herpesvirus 4 (Epstein-Barr virus)
cgagacuuggaccaagggcagg

SEQ ID NO: 3966455 - RNA, 16 nt, Human herpesvirus 4 (Epstein-Barr virus)
cgagcggccuccgccg

SEQ ID NO: 3966456 - RNA, 17 nt, Human herpesvirus 4 (Epstein-Barr virus)
cgagcuccgugggccca

SEQ ID NO: 3966457 - RNA, 15 nt, Human herpesvirus 4 (Epstein-Barr virus)
cgaggauggaaaggg

SEQ ID NO: 3966458 - RNA, 17 nt, Human herpesvirus 4 (Epstein-Barr virus)
cgaggcccugcaagcca

SEQ ID NO: 3966459 - RNA, 19 nt, Human herpesvirus 4 (Epstein-Barr virus)
cgagggugaggcccagccc

SEQ ID NO: 3966460 - RNA, 20 nt, Human herpesvirus 4 (Epstein-Barr virus)
cgaugccucuacgccccaga

SEQ ID NO: 3966461 - RNA, 19 nt, Human herpesvirus 4 (Epstein-Barr virus)
cgauuggaaaagggcccag

SEQ ID NO: 3966462 - RNA, 20 nt, Human herpesvirus 4 (Epstein-Barr virus)
cgcccagggacauccccaga

SEQ ID NO: 3966463 - RNA, 15 nt, Human herpesvirus 4 (Epstein-Barr virus)
cgcccaguaugcagu

SEQ ID NO: 3966464 - RNA, 13 nt, Human herpesvirus 4 (Epstein-Barr virus)
cgcccccucugcc

SEQ ID NO: 3966465 - RNA, 14 nt, Human herpesvirus 4 (Epstein-Barr virus)
cgcccccugaccuc

SEQ ID NO: 3966466 - RNA, 21 nt, Human herpesvirus 4 (Epstein-Barr virus)
cgccccgaugcggaggacugc

SEQ ID NO: 3966467 - RNA, 23 nt, Human herpesvirus 4 (Epstein-Barr virus)
cgccgccccaggggucucuagac

SEQ ID NO: 3966468 - RNA, 17 nt, Human herpesvirus 4 (Epstein-Barr virus)
cgccuucuccucagccu

SEQ ID NO: 3966469 - RNA, 18 nt, Human herpesvirus 4 (Epstein-Barr virus)
cgcggcccaggucgagca

SEQ ID NO: 3966470 - RNA, 13 nt, Human herpesvirus 4 (Epstein-Barr virus)
cgcuacugcugcu

SEQ ID NO: 3966471 - RNA, 17 nt, Human herpesvirus 4 (Epstein-Barr virus)
cgcuccgcgcucggccu

SEQ ID NO: 3966472 - RNA, 22 nt, Human herpesvirus 4 (Epstein-Barr virus)
cgcucgcgggguuccccucccc

SEQ ID NO: 3966473 - RNA, 16 nt, Human herpesvirus 4 (Epstein-Barr virus)
cgcugcucgccccugg

SEQ ID NO: 3966474 - RNA, 16 nt, Human herpesvirus 4 (Epstein-Barr virus)
cgcugggaccggggcc

SEQ ID NO: 3966475 - RNA, 15 nt, Human herpesvirus 4 (Epstein-Barr virus)
cggcaccgucagcca

SEQ ID NO: 3966476 - RNA, 21 nt, Human herpesvirus 4 (Epstein-Barr virus)
cggcaucaugcgugaccaccu

SEQ ID NO: 3966477 - RNA, 16 nt, Human herpesvirus 4 (Epstein-Barr virus)
cggccacguccccggc

SEQ ID NO: 3966478 - RNA, 12 nt, Human herpesvirus 4 (Epstein-Barr virus)
cggcccucuucc

SEQ ID NO: 3966479 - RNA, 13 nt, Human herpesvirus 4 (Epstein-Barr virus)
cggccgaggccug

SEQ ID NO: 3966480 - RNA, 16 nt, Human herpesvirus 4 (Epstein-Barr virus)
cggccgaggccugcga

SEQ ID NO: 3966481 - RNA, 15 nt, Human herpesvirus 4 (Epstein-Barr virus)
cggcggaggccgagc

SEQ ID NO: 3966482 - RNA, 14 nt, Human herpesvirus 4 (Epstein-Barr virus)
cggcggcugcugcc

SEQ ID NO: 3966483 - RNA, 18 nt, Human herpesvirus 4 (Epstein-Barr virus)
cggcuagccugacuaagg

SEQ ID NO: 3966484 - RNA, 12 nt, Human herpesvirus 4 (Epstein-Barr virus)
cggcucucaggc

SEQ ID NO: 3966485 - RNA, 16 nt, Human herpesvirus 4 (Epstein-Barr virus)
cggcuuggcccucuca

SEQ ID NO: 3966486 - RNA, 16 nt, Human herpesvirus 4 (Epstein-Barr virus)
cgggagaggcagcccc

SEQ ID NO: 3966487 - RNA, 18 nt, Human herpesvirus 4 (Epstein-Barr virus)
cgggaggaaacaggagga

SEQ ID NO: 3966488 - RNA, 16 nt, Human herpesvirus 4 (Epstein-Barr virus)
cgggaugagcuggaga

SEQ ID NO: 3966489 - RNA, 17 nt, Human herpesvirus 4 (Epstein-Barr virus)
cgggcaaacagggcaga

SEQ ID NO: 3966490 - RNA, 19 nt, Human herpesvirus 4 (Epstein-Barr virus)
cgggccauucgugagucca

SEQ ID NO: 3966491 - RNA, 15 nt, Human herpesvirus 4 (Epstein-Barr virus)
cgggcccgggugccu

SEQ ID NO: 3966492 - RNA, 18 nt, Human herpesvirus 4 (Epstein-Barr virus)
cgggggcgacugccgccg

SEQ ID NO: 3966493 - RNA, 16 nt, Human herpesvirus 4 (Epstein-Barr virus)
cggggguggcagcccc

SEQ ID NO: 3966494 - RNA, 12 nt, Human herpesvirus 4 (Epstein-Barr virus)
cggguacaaguc

SEQ ID NO: 3966495 - RNA, 17 nt, Human herpesvirus 4 (Epstein-Barr virus)
cgguuagggaggacacu

SEQ ID NO: 3966496 - RNA, 19 nt, Human herpesvirus 4 (Epstein-Barr virus)
cgugcaugcagcgcccugu

SEQ ID NO: 3966497 - RNA, 15 nt, Human herpesvirus 4 (Epstein-Barr virus)
cgugcauggcagcag

SEQ ID NO: 3966498 - RNA, 17 nt, Human herpesvirus 4 (Epstein-Barr virus)
cguggccaggcccgagg

SEQ ID NO: 3966499 - RNA, 19 nt, Human herpesvirus 4 (Epstein-Barr virus)
cguggcuuccagagaggcg

SEQ ID NO: 3966500 - RNA, 21 nt, Human herpesvirus 4 (Epstein-Barr virus)
cguuccuggccauggccgaga

SEQ ID NO: 3966501 - RNA, 13 nt, Human herpesvirus 4 (Epstein-Barr virus)
cguuggcccauaa

SEQ ID NO: 3966502 - RNA, 15 nt, Human herpesvirus 4 (Epstein-Barr virus)
cuaauucagccaccu

SEQ ID NO: 3966503 - RNA, 14 nt, Human herpesvirus 4 (Epstein-Barr virus)
cuacaacucagccc

SEQ ID NO: 3966504 - RNA, 21 nt, Human herpesvirus 4 (Epstein-Barr virus)
cuacacucuggggucucaggc

SEQ ID NO: 3966505 - RNA, 16 nt, Human herpesvirus 4 (Epstein-Barr virus)
cuacgcgggccacagg

SEQ ID NO: 3966506 - RNA, 14 nt, Human herpesvirus 4 (Epstein-Barr virus)
cuacguguccaugu

SEQ ID NO: 3966507 - RNA, 14 nt, Human herpesvirus 4 (Epstein-Barr virus)
cuagagguuuugcu

SEQ ID NO: 3966508 - RNA, 14 nt, Human herpesvirus 4 (Epstein-Barr virus)
cuaggagagaaggg

SEQ ID NO: 3966509 - RNA, 17 nt, Human herpesvirus 4 (Epstein-Barr virus)
cuaggccugccacgugg

SEQ ID NO: 3966510 - RNA, 15 nt, Human herpesvirus 4 (Epstein-Barr virus)
cuaggcgggcgggcu

SEQ ID NO: 3966511 - RNA, 13 nt, Human herpesvirus 4 (Epstein-Barr virus)
cuaguuaccacag

SEQ ID NO: 3966512 - RNA, 18 nt, Human herpesvirus 4 (Epstein-Barr virus)
cuaugcaugagccacagg

SEQ ID NO: 3966513 - RNA, 14 nt, Human herpesvirus 4 (Epstein-Barr virus)
cucaaggcagucuc

SEQ ID NO: 3966514 - RNA, 15 nt, Human herpesvirus 4 (Epstein-Barr virus)
cucaaggcagucucc

SEQ ID NO: 3966515 - RNA, 15 nt, Human herpesvirus 4 (Epstein-Barr virus)
cucacaggacauguu

SEQ ID NO: 3966516 - RNA, 23 nt, Human herpesvirus 4 (Epstein-Barr virus)
cucagaugccggccaugcgcuuu

SEQ ID NO: 3966517 - RNA, 18 nt, Human herpesvirus 4 (Epstein-Barr virus)
cucaucuccaaaaaguug

SEQ ID NO: 3966518 - RNA, 17 nt, Human herpesvirus 4 (Epstein-Barr virus)
cucaugggggaaugagg

SEQ ID NO: 3966519 - RNA, 22 nt, Human herpesvirus 4 (Epstein-Barr virus)
cucauuucaguggcccucagaa

SEQ ID NO: 3966520 - RNA, 15 nt, Human herpesvirus 4 (Epstein-Barr virus)
cuccaggcuccugga

SEQ ID NO: 3966521 - RNA, 14 nt, Human herpesvirus 4 (Epstein-Barr virus)
cuccaucagggcca

SEQ ID NO: 3966522 - RNA, 17 nt, Human herpesvirus 4 (Epstein-Barr virus)
cucccauguaagccugc

SEQ ID NO: 3966523 - RNA, 13 nt, Human herpesvirus 4 (Epstein-Barr virus)
cuccguggccccg

SEQ ID NO: 3966524 - RNA, 23 nt, Human herpesvirus 4 (Epstein-Barr virus)
cuccucagaaaacucugcaugga

SEQ ID NO: 3966525 - RNA, 14 nt, Human herpesvirus 4 (Epstein-Barr virus)
cuccugacgccaau

SEQ ID NO: 3966526 - RNA, 19 nt, Human herpesvirus 4 (Epstein-Barr virus)
cucgaagcggucucagaca

SEQ ID NO: 3966527 - RNA, 18 nt, Human herpesvirus 4 (Epstein-Barr virus)
cucgcucagagcugggaa

SEQ ID NO: 3966528 - RNA, 12 nt, Human herpesvirus 4 (Epstein-Barr virus)
cucggcaccucc

SEQ ID NO: 3966529 - RNA, 21 nt, Human herpesvirus 4 (Epstein-Barr virus)
cucgugcaagcagcaccuguc

SEQ ID NO: 3966530 - RNA, 21 nt, Human herpesvirus 4 (Epstein-Barr virus)
cucucuggcugugcugacccu

SEQ ID NO: 3966531 - RNA, 22 nt, Human herpesvirus 4 (Epstein-Barr virus)
cucugccaacuuugagcugggc

SEQ ID NO: 3966532 - RNA, 17 nt, Human herpesvirus 4 (Epstein-Barr virus)
cucugcuuucugccguc

SEQ ID NO: 3966533 - RNA, 20 nt, Human herpesvirus 4 (Epstein-Barr virus)
cugaacaucucauccccaga

SEQ ID NO: 3966534 - RNA, 19 nt, Human herpesvirus 4 (Epstein-Barr virus)
cugagaccaugcucagugg

SEQ ID NO: 3966535 - RNA, 22 nt, Human herpesvirus 4 (Epstein-Barr virus)
cugagccacuccggacgcagag

SEQ ID NO: 3966536 - RNA, 14 nt, Human herpesvirus 4 (Epstein-Barr virus)
cugagccugagcca

SEQ ID NO: 3966537 - RNA, 20 nt, Human herpesvirus 4 (Epstein-Barr virus)
cugcacgagaccccugggcu

SEQ ID NO: 3966538 - RNA, 19 nt, Human herpesvirus 4 (Epstein-Barr virus)
cugcagugggccucucugg

SEQ ID NO: 3966539 - RNA, 21 nt, Human herpesvirus 4 (Epstein-Barr virus)
cugcagugggccucucuggcu

SEQ ID NO: 3966540 - RNA, 22 nt, Human herpesvirus 4 (Epstein-Barr virus)
caacugcuauucugagcaccaa

SEQ ID NO: 3966541 - RNA, 15 nt, Human herpesvirus 4 (Epstein-Barr virus)
caagaaucggguggc

SEQ ID NO: 3966542 - RNA, 16 nt, Human herpesvirus 4 (Epstein-Barr virus)
caagcagcucaccuau

SEQ ID NO: 3966543 - RNA, 13 nt, Human herpesvirus 4 (Epstein-Barr virus)
caagcucagcccc

SEQ ID NO: 3966544 - RNA, 20 nt, Human herpesvirus 4 (Epstein-Barr virus)
caaggacgggggugggcacc

SEQ ID NO: 3966545 - RNA, 16 nt, Human herpesvirus 4 (Epstein-Barr virus)
caaggaggggcggcag

SEQ ID NO: 3966546 - RNA, 22 nt, Human herpesvirus 4 (Epstein-Barr virus)
caagguucggaaaucuguugac

SEQ ID NO: 3966547 - RNA, 14 nt, Human herpesvirus 4 (Epstein-Barr virus)
caagugcuaugacc

SEQ ID NO: 3966548 - RNA, 18 nt, Human herpesvirus 4 (Epstein-Barr virus)
cacaagagccaucaccuc

SEQ ID NO: 3966549 - RNA, 20 nt, Human herpesvirus 4 (Epstein-Barr virus)
cacaccauccacagccccac

SEQ ID NO: 3966550 - RNA, 16 nt, Human herpesvirus 4 (Epstein-Barr virus)
cacacuuaacuugacu

SEQ ID NO: 3966551 - RNA, 18 nt, Human herpesvirus 4 (Epstein-Barr virus)
cacaucuggaccuggacu

SEQ ID NO: 3966552 - RNA, 21 nt, Human herpesvirus 4 (Epstein-Barr virus)
caccacccccaccacccccac

SEQ ID NO: 3966553 - RNA, 15 nt, Human herpesvirus 4 (Epstein-Barr virus)
caccaccccccccac

SEQ ID NO: 3966554 - RNA, 18 nt, Human herpesvirus 4 (Epstein-Barr virus)
caccacccccgcccccac

SEQ ID NO: 3966555 - RNA, 22 nt, Human herpesvirus 4 (Epstein-Barr virus)
caccauccacagccccacucuu

SEQ ID NO: 3966556 - RNA, 13 nt, Human herpesvirus 4 (Epstein-Barr virus)
caccaucuggcag

SEQ ID NO: 3966557 - RNA, 13 nt, Human herpesvirus 4 (Epstein-Barr virus)
cacccauggccag

SEQ ID NO: 3966558 - RNA, 22 nt, Human herpesvirus 4 (Epstein-Barr virus)
caccuguguccugggcaaggag

SEQ ID NO: 3966559 - RNA, 20 nt, Human herpesvirus 4 (Epstein-Barr virus)
cacgcuuuugucugccugga

SEQ ID NO: 3966560 - RNA, 18 nt, Human herpesvirus 4 (Epstein-Barr virus)
cacgguggaacaggagca

SEQ ID NO: 3966561 - RNA, 20 nt, Human herpesvirus 4 (Epstein-Barr virus)
cacucaggaagcuggccagg

SEQ ID NO: 3966562 - RNA, 19 nt, Human herpesvirus 4 (Epstein-Barr virus)
cacucguccgccuacuggu

SEQ ID NO: 3966563 - RNA, 11 nt, Human herpesvirus 4 (Epstein-Barr virus)
cacugacccau

SEQ ID NO: 3966564 - RNA, 17 nt, Human herpesvirus 4 (Epstein-Barr virus)
cacuguugcgcccggcc

SEQ ID NO: 3966565 - RNA, 15 nt, Human herpesvirus 4 (Epstein-Barr virus)
cacuuugccagcaac

SEQ ID NO: 3966566 - RNA, 17 nt, Human herpesvirus 4 (Epstein-Barr virus)
cagagccucugccacaa

SEQ ID NO: 3966567 - RNA, 20 nt, Human herpesvirus 4 (Epstein-Barr virus)
cagagccucugccacaaggc

SEQ ID NO: 3966568 - RNA, 16 nt, Human herpesvirus 4 (Epstein-Barr virus)
cagaggaggcuggugc

SEQ ID NO: 3966569 - RNA, 13 nt, Human herpesvirus 4 (Epstein-Barr virus)
cagaugaagacga

SEQ ID NO: 3966570 - RNA, 17 nt, Human herpesvirus 4 (Epstein-Barr virus)
cagcaccugucccuggg

SEQ ID NO: 3966571 - RNA, 17 nt, Human herpesvirus 4 (Epstein-Barr virus)
cagccagagccagccgg

SEQ ID NO: 3966572 - RNA, 18 nt, Human herpesvirus 4 (Epstein-Barr virus)
cagccagagccagccggg

SEQ ID NO: 3966573 - RNA, 21 nt, Human herpesvirus 4 (Epstein-Barr virus)
cagccagguguacgcccuggc

SEQ ID NO: 3966574 - RNA, 19 nt, Human herpesvirus 4 (Epstein-Barr virus)
cagcccggccgaggccugc

SEQ ID NO: 3966575 - RNA, 20 nt, Human herpesvirus 4 (Epstein-Barr virus)
cagcgaagaacacuccacag

SEQ ID NO: 3966576 - RNA, 20 nt, Human herpesvirus 4 (Epstein-Barr virus)
cagcgcggcagaggccucuc

SEQ ID NO: 3966577 - RNA, 14 nt, Human herpesvirus 4 (Epstein-Barr virus)
cagcuccagggcca

SEQ ID NO: 3966578 - RNA, 15 nt, Human herpesvirus 4 (Epstein-Barr virus)
cagcuccgcccucac

SEQ ID NO: 3966579 - RNA, 23 nt, Human herpesvirus 4 (Epstein-Barr virus)
caggaagcuggccaggcugguga

SEQ ID NO: 3966580 - RNA, 17 nt, Human herpesvirus 4 (Epstein-Barr virus)
caggagacguggguccc

SEQ ID NO: 3966581 - RNA, 15 nt, Human herpesvirus 4 (Epstein-Barr virus)
caggagcuugaggcc

SEQ ID NO: 3966582 - RNA, 21 nt, Human herpesvirus 4 (Epstein-Barr virus)
caggaggccaccgacgagcag

SEQ ID NO: 3966583 - RNA, 14 nt, Human herpesvirus 4 (Epstein-Barr virus)
caggaucagggcca

SEQ ID NO: 3966584 - RNA, 10 nt, Human herpesvirus 4 (Epstein-Barr virus)
caggccccca

SEQ ID NO: 3966585 - RNA, 12 nt, Human herpesvirus 4 (Epstein-Barr virus)
caggcuccugga

SEQ ID NO: 3966586 - RNA, 18 nt, Human herpesvirus 4 (Epstein-Barr virus)
cagggaaaaacuggccau

SEQ ID NO: 3966587 - RNA, 16 nt, Human herpesvirus 4 (Epstein-Barr virus)
cagggcaaagccacaa

SEQ ID NO: 3966588 - RNA, 16 nt, Human herpesvirus 4 (Epstein-Barr virus)
cagggcccguuccagg

SEQ ID NO: 3966589 - RNA, 14 nt, Human herpesvirus 4 (Epstein-Barr virus)
caggggagguggcu

SEQ ID NO: 3966590 - RNA, 11 nt, Human herpesvirus 4 (Epstein-Barr virus)
cagggguggca

SEQ ID NO: 3966591 - RNA, 17 nt, Human herpesvirus 4 (Epstein-Barr virus)
cagguagcaaggacccg

SEQ ID NO: 3966592 - RNA, 13 nt, Human herpesvirus 4 (Epstein-Barr virus)
caggugacagcag

SEQ ID NO: 3966593 - RNA, 14 nt, Human herpesvirus 4 (Epstein-Barr virus)
caguucuggugaug

SEQ ID NO: 3966594 - RNA, 23 nt, Human herpesvirus 4 (Epstein-Barr virus)
cauaaguccucauggcaggagag

SEQ ID NO: 3966595 - RNA, 16 nt, Human herpesvirus 4 (Epstein-Barr virus)
caucauaacugagcag

SEQ ID NO: 3966596 - RNA, 15 nt, Human herpesvirus 4 (Epstein-Barr virus)
cauccccagcccagc

SEQ ID NO: 3966597 - RNA, 17 nt, Human herpesvirus 4 (Epstein-Barr virus)
caucccggcccucuucc

SEQ ID NO: 3966598 - RNA, 16 nt, Human herpesvirus 4 (Epstein-Barr virus)
caucggacgggcaggc

SEQ ID NO: 3966599 - RNA, 13 nt, Human herpesvirus 4 (Epstein-Barr virus)
caucugcuucugg

SEQ ID NO: 3966600 - RNA, 14 nt, Human herpesvirus 4 (Epstein-Barr virus)
caugauggugcaga

SEQ ID NO: 3966601 - RNA, 15 nt, Human herpesvirus 4 (Epstein-Barr virus)
caugcaggccuggac

SEQ ID NO: 3966602 - RNA, 17 nt, Human herpesvirus 4 (Epstein-Barr virus)
caugcagggugcacaga

SEQ ID NO: 3966603 - RNA, 20 nt, Human herpesvirus 4 (Epstein-Barr virus)
caugccuccccagcaacaga

SEQ ID NO: 3966604 - RNA, 19 nt, Human herpesvirus 4 (Epstein-Barr virus)
caugcugcccggacggccu

SEQ ID NO: 3966605 - RNA, 16 nt, Human herpesvirus 4 (Epstein-Barr virus)
cauggacgaggacggg

SEQ ID NO: 3966606 - RNA, 21 nt, Human herpesvirus 4 (Epstein-Barr virus)
cauguguacuuguccucaucg

SEQ ID NO: 3966607 - RNA, 18 nt, Human herpesvirus 4 (Epstein-Barr virus)
cauuggcagcagcucugg

SEQ ID NO: 3966608 - RNA, 16 nt, Human herpesvirus 4 (Epstein-Barr virus)
cauuguccucaccaag

SEQ ID NO: 3966609 - RNA, 20 nt, Human herpesvirus 4 (Epstein-Barr virus)
ccaaaaugcacccggacaug

SEQ ID NO: 3966610 - RNA, 15 nt, Human herpesvirus 4 (Epstein-Barr virus)
ccaaagcuaacugua

SEQ ID NO: 3966611 - RNA, 17 nt, Human herpesvirus 4 (Epstein-Barr virus)
ccaacuuugagcugggc

SEQ ID NO: 3966612 - RNA, 17 nt, Human herpesvirus 4 (Epstein-Barr virus)
ccaaggcggcugcugag

SEQ ID NO: 3966613 - RNA, 14 nt, Human herpesvirus 4 (Epstein-Barr virus)
ccaaguugcauugg

SEQ ID NO: 3966614 - RNA, 17 nt, Human herpesvirus 4 (Epstein-Barr virus)
ccacacucccuccagaa

SEQ ID NO: 3966615 - RNA, 12 nt, Human herpesvirus 4 (Epstein-Barr virus)
ccaccuggccag

SEQ ID NO: 3966616 - RNA, 22 nt, Human herpesvirus 4 (Epstein-Barr virus)
ccacuaucacccauggccaggc

SEQ ID NO: 3966617 - RNA, 13 nt, Human herpesvirus 4 (Epstein-Barr virus)
ccacucagacucu

SEQ ID NO: 3966618 - RNA, 23 nt, Human herpesvirus 4 (Epstein-Barr virus)
ccacucuugccucggcgcuggga

SEQ ID NO: 3966619 - RNA, 17 nt, Human herpesvirus 4 (Epstein-Barr virus)
ccagaucgccugccacu

SEQ ID NO: 3966620 - RNA, 21 nt, Human herpesvirus 4 (Epstein-Barr virus)
ccagcaaccaauguaucccaa

SEQ ID NO: 3966621 - RNA, 13 nt, Human herpesvirus 4 (Epstein-Barr virus)
ccagcaggcucag

SEQ ID NO: 3966622 - RNA, 17 nt, Human herpesvirus 4 (Epstein-Barr virus)
ccagcuaacaggacaug

SEQ ID NO: 3966623 - RNA, 21 nt, Human herpesvirus 4 (Epstein-Barr virus)
ccaggaggaggacgugaguga

SEQ ID NO: 3966624 - RNA, 18 nt, Human herpesvirus 4 (Epstein-Barr virus)
ccaggcagccuugcgugg

SEQ ID NO: 3966625 - RNA, 20 nt, Human herpesvirus 4 (Epstein-Barr virus)
ccaggccugccaaagagcca

SEQ ID NO: 3966626 - RNA, 22 nt, Human herpesvirus 4 (Epstein-Barr virus)
ccaggccugccaaagagccaga

SEQ ID NO: 3966627 - RNA, 16 nt, Human herpesvirus 4 (Epstein-Barr virus)
ccaggccuuagcccag

SEQ ID NO: 3966628 - RNA, 16 nt, Human herpesvirus 4 (Epstein-Barr virus)
ccaggcgccgcagggg

SEQ ID NO: 3966629 - RNA, 13 nt, Human herpesvirus 4 (Epstein-Barr virus)
ccaggcuccugga

SEQ ID NO: 3966630 - RNA, 14 nt, Human herpesvirus 4 (Epstein-Barr virus)
ccagggccaggcga

SEQ ID NO: 3966631 - RNA, 15 nt, Human herpesvirus 4 (Epstein-Barr virus)
ccaggguccaggaga

SEQ ID NO: 3966632 - RNA, 12 nt, Human herpesvirus 4 (Epstein-Barr virus)
ccaggucacaga

SEQ ID NO: 3966633 - RNA, 13 nt, Human herpesvirus 4 (Epstein-Barr virus)
ccaggugguuaca

SEQ ID NO: 3966634 - RNA, 21 nt, Human herpesvirus 4 (Epstein-Barr virus)
ccaggugugcuucuuuuuggu

SEQ ID NO: 3966635 - RNA, 16 nt, Human herpesvirus 4 (Epstein-Barr virus)
ccauacaugucucaga

SEQ ID NO: 3966636 - RNA, 22 nt, Human herpesvirus 4 (Epstein-Barr virus)
ccauaccuacaccaccccacca

SEQ ID NO: 3966637 - RNA, 19 nt, Human herpesvirus 4 (Epstein-Barr virus)
ccaucaccuggguacccaa

SEQ ID NO: 3966638 - RNA, 18 nt, Human herpesvirus 4 (Epstein-Barr virus)
ccaucggauaaacagggg

SEQ ID NO: 3966639 - RNA, 21 nt, Human herpesvirus 4 (Epstein-Barr virus)
ccauggugccaagcucagccc

SEQ ID NO: 3966640 - RNA, 16 nt, Human herpesvirus 4 (Epstein-Barr virus)
cccaacagucuucagg

SEQ ID NO: 3966641 - RNA, 15 nt, Human herpesvirus 4 (Epstein-Barr virus)
cccaccaccaggcgg

SEQ ID NO: 3966642 - RNA, 21 nt, Human herpesvirus 4 (Epstein-Barr virus)
cccaccuuuuaauucucuucu

SEQ ID NO: 3966643 - RNA, 14 nt, Human herpesvirus 4 (Epstein-Barr virus)
cccacuccccucuc

SEQ ID NO: 3966644 - RNA, 22 nt, Human herpesvirus 4 (Epstein-Barr virus)
ccccaaaaguagaggcucaggc

SEQ ID NO: 3966645 - RNA, 23 nt, Human herpesvirus 4 (Epstein-Barr virus)
ccccaaaaguagaggcucaggcc

SEQ ID NO: 3966646 - RNA, 20 nt, Human herpesvirus 4 (Epstein-Barr virus)
ccccacggggugcucccccu

SEQ ID NO: 3966647 - RNA, 15 nt, Human herpesvirus 4 (Epstein-Barr virus)
ccccagagcagcccg

SEQ ID NO: 3966648 - RNA, 22 nt, Human herpesvirus 4 (Epstein-Barr virus)
ccccauacaugucucagaggcc

SEQ ID NO: 3966649 - RNA, 19 nt, Human herpesvirus 4 (Epstein-Barr virus)
ccccuggcggcccagcccg

SEQ ID NO: 3966650 - RNA, 22 nt, Human herpesvirus 4 (Epstein-Barr virus)
ccccugugcuucuaccaagacu

SEQ ID NO: 3966651 - RNA, 24 nt, Human herpesvirus 4 (Epstein-Barr virus)
cccggggaaaagagagcugaugga

SEQ ID NO: 3966652 - RNA, 15 nt, Human herpesvirus 4 (Epstein-Barr virus)
cccggguggugagga

SEQ ID NO: 3966653 - RNA, 16 nt, Human herpesvirus 4 (Epstein-Barr virus)
cccuagccaccguggc

SEQ ID NO: 3966654 - RNA, 15 nt, Human herpesvirus 4 (Epstein-Barr virus)
cccuccuccacccag

SEQ ID NO: 3966655 - RNA, 21 nt, Human herpesvirus 4 (Epstein-Barr virus)
cccucugcagagagccacauu

SEQ ID NO: 3966656 - RNA, 12 nt, Human herpesvirus 4 (Epstein-Barr virus)
cccucugggaga

SEQ ID NO: 3966657 - RNA, 22 nt, Human herpesvirus 4 (Epstein-Barr virus)
cccugaccggcgcgggagccgg

SEQ ID NO: 3966658 - RNA, 16 nt, Human herpesvirus 4 (Epstein-Barr virus)
cccugagcauggcggc

SEQ ID NO: 3966659 - RNA, 19 nt, Human herpesvirus 4 (Epstein-Barr virus)
cccugcucauaccuccacu

SEQ ID NO: 3966660 - RNA, 15 nt, Human herpesvirus 4 (Epstein-Barr virus)
cccuggaggccucag

SEQ ID NO: 3966661 - RNA, 14 nt, Human herpesvirus 4 (Epstein-Barr virus)
cccuggcggcccag

SEQ ID NO: 3966662 - RNA, 18 nt, Human herpesvirus 4 (Epstein-Barr virus)
ccgacaaugagcggggag

SEQ ID NO: 3966663 - RNA, 14 nt, Human herpesvirus 4 (Epstein-Barr virus)
ccgcagcuggcgga

SEQ ID NO: 3966664 - RNA, 19 nt, Human herpesvirus 4 (Epstein-Barr virus)
ccgcaggggugguggaugu

SEQ ID NO: 3966665 - RNA, 19 nt, Human herpesvirus 4 (Epstein-Barr virus)
ccgcagguggcugcugcca

SEQ ID NO: 3966666 - RNA, 18 nt, Human herpesvirus 4 (Epstein-Barr virus)
ccgccaacgcucagugcg

SEQ ID NO: 3966667 - RNA, 14 nt, Human herpesvirus 4 (Epstein-Barr virus)
ccgccgccgcagcc

SEQ ID NO: 3966668 - RNA, 17 nt, Human herpesvirus 4 (Epstein-Barr virus)
ccgccugguggugggug

SEQ ID NO: 3966669 - RNA, 20 nt, Human herpesvirus 4 (Epstein-Barr virus)
ccggaaccugagccugagcc

SEQ ID NO: 3966670 - RNA, 22 nt, Human herpesvirus 4 (Epstein-Barr virus)
ccggaccaaugccaaagcugaa

SEQ ID NO: 3966671 - RNA, 15 nt, Human herpesvirus 4 (Epstein-Barr virus)
ccggcgccaccugca

SEQ ID NO: 3966672 - RNA, 22 nt, Human herpesvirus 4 (Epstein-Barr virus)
ccgggaccgcgcccuccucugg

SEQ ID NO: 3966673 - RNA, 11 nt, Human herpesvirus 4 (Epstein-Barr virus)
ccggugguggg

SEQ ID NO: 3966674 - RNA, 16 nt, Human herpesvirus 4 (Epstein-Barr virus)
ccguaaucuguggugg

SEQ ID NO: 3966675 - RNA, 13 nt, Human herpesvirus 4 (Epstein-Barr virus)
ccgugcaccugcc

SEQ ID NO: 3966676 - RNA, 17 nt, Human herpesvirus 4 (Epstein-Barr virus)
ccgugguccugaggggc

SEQ ID NO: 3966677 - RNA, 17 nt, Human herpesvirus 4 (Epstein-Barr virus)
ccuagagguuuugcuag

SEQ ID NO: 3966678 - RNA, 19 nt, Human herpesvirus 4 (Epstein-Barr virus)
ccuaggccugccacguggg

SEQ ID NO: 3966679 - RNA, 16 nt, Human herpesvirus 4 (Epstein-Barr virus)
ccuagguacucuuggu

SEQ ID NO: 3966680 - RNA, 16 nt, Human herpesvirus 4 (Epstein-Barr virus)
ccuauagauccugggc

SEQ ID NO: 3966681 - RNA, 18 nt, Human herpesvirus 4 (Epstein-Barr virus)
ccucagaauuucugcuag

SEQ ID NO: 3966682 - RNA, 18 nt, Human herpesvirus 4 (Epstein-Barr virus)
ccucagcccccccugugc

SEQ ID NO: 3966683 - RNA, 16 nt, Human herpesvirus 4 (Epstein-Barr virus)
ccucgcgacucguggg

SEQ ID NO: 3966684 - RNA, 16 nt, Human herpesvirus 4 (Epstein-Barr virus)
agcuggcggacuacaa

SEQ ID NO: 3966685 - RNA, 22 nt, Human herpesvirus 4 (Epstein-Barr virus)
agcuguguuucccgacgccaau

SEQ ID NO: 3966686 - RNA, 12 nt, Human herpesvirus 4 (Epstein-Barr virus)
aggacaugugca

SEQ ID NO: 3966687 - RNA, 19 nt, Human herpesvirus 4 (Epstein-Barr virus)
aggaccauggaugugaaug

SEQ ID NO: 3966688 - RNA, 13 nt, Human herpesvirus 4 (Epstein-Barr virus)
aggacccugggcc

SEQ ID NO: 3966689 - RNA, 13 nt, Human herpesvirus 4 (Epstein-Barr virus)
aggaccuggaugc

SEQ ID NO: 3966690 - RNA, 24 nt, Human herpesvirus 4 (Epstein-Barr virus)
aggagaugauaaugaugaggagca

SEQ ID NO: 3966691 - RNA, 19 nt, Human herpesvirus 4 (Epstein-Barr virus)
aggagcaggaggaggggca

SEQ ID NO: 3966692 - RNA, 21 nt, Human herpesvirus 4 (Epstein-Barr virus)
aggagccucgccuugagggca

SEQ ID NO: 3966693 - RNA, 13 nt, Human herpesvirus 4 (Epstein-Barr virus)
aggagcuguuugg

SEQ ID NO: 3966694 - RNA, 22 nt, Human herpesvirus 4 (Epstein-Barr virus)
aggaggacaugugcauggccug

SEQ ID NO: 3966695 - RNA, 19 nt, Human herpesvirus 4 (Epstein-Barr virus)
aggcacacaaaaugaggaa

SEQ ID NO: 3966696 - RNA, 23 nt, Human herpesvirus 4 (Epstein-Barr virus)
aggcacggccucgugcaaccagg

SEQ ID NO: 3966697 - RNA, 20 nt, Human herpesvirus 4 (Epstein-Barr virus)
aggcagccccaaagcgggug

SEQ ID NO: 3966698 - RNA, 22 nt, Human herpesvirus 4 (Epstein-Barr virus)
aggccgagucaguuacacacac

SEQ ID NO: 3966699 - RNA, 17 nt, Human herpesvirus 4 (Epstein-Barr virus)
aggcgggaauggccgcc

SEQ ID NO: 3966700 - RNA, 18 nt, Human herpesvirus 4 (Epstein-Barr virus)
aggcguaacuugucuaca

SEQ ID NO: 3966701 - RNA, 18 nt, Human herpesvirus 4 (Epstein-Barr virus)
aggcucugcaugaggucc

SEQ ID NO: 3966702 - RNA, 17 nt, Human herpesvirus 4 (Epstein-Barr virus)
aggcugcuaagccagga

SEQ ID NO: 3966703 - RNA, 20 nt, Human herpesvirus 4 (Epstein-Barr virus)
agggagacguuugaguccaa

SEQ ID NO: 3966704 - RNA, 13 nt, Human herpesvirus 4 (Epstein-Barr virus)
aggggcaggagca

SEQ ID NO: 3966705 - RNA, 17 nt, Human herpesvirus 4 (Epstein-Barr virus)
aggggccucggccuggg

SEQ ID NO: 3966706 - RNA, 21 nt, Human herpesvirus 4 (Epstein-Barr virus)
aggggcggugggcgcgugcac

SEQ ID NO: 3966707 - RNA, 15 nt, Human herpesvirus 4 (Epstein-Barr virus)
aggucuccagagggc

SEQ ID NO: 3966708 - RNA, 22 nt, Human herpesvirus 4 (Epstein-Barr virus)
aggucuugccguggcgccuggg

SEQ ID NO: 3966709 - RNA, 14 nt, Human herpesvirus 4 (Epstein-Barr virus)
aggugcugaggccc

SEQ ID NO: 3966710 - RNA, 17 nt, Human herpesvirus 4 (Epstein-Barr virus)
agguggaggggggcggc

SEQ ID NO: 3966711 - RNA, 18 nt, Human herpesvirus 4 (Epstein-Barr virus)
agguguccagcgcucugg

SEQ ID NO: 3966712 - RNA, 18 nt, Human herpesvirus 4 (Epstein-Barr virus)
agguuaaaugugaagccc

SEQ ID NO: 3966713 - RNA, 19 nt, Human herpesvirus 4 (Epstein-Barr virus)
aguaaacccgauggccccg

SEQ ID NO: 3966714 - RNA, 21 nt, Human herpesvirus 4 (Epstein-Barr virus)
aguacgugcagaggacuuuug

SEQ ID NO: 3966715 - RNA, 20 nt, Human herpesvirus 4 (Epstein-Barr virus)
aguaggcacaucuggaccug

SEQ ID NO: 3966716 - RNA, 17 nt, Human herpesvirus 4 (Epstein-Barr virus)
aguccaggggccacaca

SEQ ID NO: 3966717 - RNA, 19 nt, Human herpesvirus 4 (Epstein-Barr virus)
agucgcguacucuguggag

SEQ ID NO: 3966718 - RNA, 21 nt, Human herpesvirus 4 (Epstein-Barr virus)
agugcauggauauagcucugc

SEQ ID NO: 3966719 - RNA, 18 nt, Human herpesvirus 4 (Epstein-Barr virus)
agugccuccgccugagcc

SEQ ID NO: 3966720 - RNA, 23 nt, Human herpesvirus 4 (Epstein-Barr virus)
aguggccgucuggcagggggccg

SEQ ID NO: 3966721 - RNA, 22 nt, Human herpesvirus 4 (Epstein-Barr virus)
aguuccucaacaaggagugccu

SEQ ID NO: 3966722 - RNA, 15 nt, Human herpesvirus 4 (Epstein-Barr virus)
aguuggcauuggcgu

SEQ ID NO: 3966723 - RNA, 18 nt, Human herpesvirus 4 (Epstein-Barr virus)
aguuguuauucccaccuc

SEQ ID NO: 3966724 - RNA, 21 nt, Human herpesvirus 4 (Epstein-Barr virus)
auaaaguugaugauauugaau

SEQ ID NO: 3966725 - RNA, 22 nt, Human herpesvirus 4 (Epstein-Barr virus)
auaacggggaaugugugacaug

SEQ ID NO: 3966726 - RNA, 16 nt, Human herpesvirus 4 (Epstein-Barr virus)
auaauacgcccgacaa

SEQ ID NO: 3966727 - RNA, 21 nt, Human herpesvirus 4 (Epstein-Barr virus)
auaucuggaggucuucucuga

SEQ ID NO: 3966728 - RNA, 15 nt, Human herpesvirus 4 (Epstein-Barr virus)
auauugaauuccaca

SEQ ID NO: 3966729 - RNA, 23 nt, Human herpesvirus 4 (Epstein-Barr virus)
aucaccgccguaaucuguggugg

SEQ ID NO: 3966730 - RNA, 12 nt, Human herpesvirus 4 (Epstein-Barr virus)
aucacuggcaaa

SEQ ID NO: 3966731 - RNA, 15 nt, Human herpesvirus 4 (Epstein-Barr virus)
aucagggccaagaca

SEQ ID NO: 3966732 - RNA, 14 nt, Human herpesvirus 4 (Epstein-Barr virus)
aucccaggccucag

SEQ ID NO: 3966733 - RNA, 21 nt, Human herpesvirus 4 (Epstein-Barr virus)
auccugcucauuauugcucuc

SEQ ID NO: 3966734 - RNA, 15 nt, Human herpesvirus 4 (Epstein-Barr virus)
aucucuauugccucu

SEQ ID NO: 3966735 - RNA, 18 nt, Human herpesvirus 4 (Epstein-Barr virus)
aucucugauuauagcucu

SEQ ID NO: 3966736 - RNA, 17 nt, Human herpesvirus 4 (Epstein-Barr virus)
aucugacacuuuagagc

SEQ ID NO: 3966737 - RNA, 15 nt, Human herpesvirus 4 (Epstein-Barr virus)
aucuggggcuggccu

SEQ ID NO: 3966738 - RNA, 13 nt, Human herpesvirus 4 (Epstein-Barr virus)
augaacccugggg

SEQ ID NO: 3966739 - RNA, 18 nt, Human herpesvirus 4 (Epstein-Barr virus)
augacgucaacuuuacuu

SEQ ID NO: 3966740 - RNA, 20 nt, Human herpesvirus 4 (Epstein-Barr virus)
augacucccucccgcacccu

SEQ ID NO: 3966741 - RNA, 13 nt, Human herpesvirus 4 (Epstein-Barr virus)
augagggaaaagg

SEQ ID NO: 3966742 - RNA, 20 nt, Human herpesvirus 4 (Epstein-Barr virus)
augcacggucauucugccgu

SEQ ID NO: 3966743 - RNA, 13 nt, Human herpesvirus 4 (Epstein-Barr virus)
augcaggccugga

SEQ ID NO: 3966744 - RNA, 16 nt, Human herpesvirus 4 (Epstein-Barr virus)
augcaggccuggacag

SEQ ID NO: 3966745 - RNA, 13 nt, Human herpesvirus 4 (Epstein-Barr virus)
augcaguggguga

SEQ ID NO: 3966746 - RNA, 22 nt, Human herpesvirus 4 (Epstein-Barr virus)
augcgugaccaccuggccaggg

SEQ ID NO: 3966747 - RNA, 22 nt, Human herpesvirus 4 (Epstein-Barr virus)
augcuguugaggcaaaagacua

SEQ ID NO: 3966748 - RNA, 14 nt, Human herpesvirus 4 (Epstein-Barr virus)
auggcauaauuucc

SEQ ID NO: 3966749 - RNA, 16 nt, Human herpesvirus 4 (Epstein-Barr virus)
augugcauggccuggg

SEQ ID NO: 3966750 - RNA, 17 nt, Human herpesvirus 4 (Epstein-Barr virus)
augugcccaagccugga

SEQ ID NO: 3966751 - RNA, 13 nt, Human herpesvirus 4 (Epstein-Barr virus)
auguuccuucuca

SEQ ID NO: 3966752 - RNA, 22 nt, Human herpesvirus 4 (Epstein-Barr virus)
auuaggcacuggacacacaugg

SEQ ID NO: 3966753 - RNA, 18 nt, Human herpesvirus 4 (Epstein-Barr virus)
auucucuaaucccucugg

SEQ ID NO: 3966754 - RNA, 20 nt, Human herpesvirus 4 (Epstein-Barr virus)
auugcugaacuggggcuggu

SEQ ID NO: 3966755 - RNA, 21 nt, Human herpesvirus 4 (Epstein-Barr virus)
auugcuugccuuuuugccaca

SEQ ID NO: 3966756 - RNA, 19 nt, Human herpesvirus 4 (Epstein-Barr virus)
auuggggugauccuguagc

SEQ ID NO: 3966757 - RNA, 14 nt, Human herpesvirus 4 (Epstein-Barr virus)
auuuagaaaccuug

SEQ ID NO: 3966758 - RNA, 17 nt, Human herpesvirus 4 (Epstein-Barr virus)
auuucaguggcccucag

SEQ ID NO: 3966759 - RNA, 14 nt, Human herpesvirus 4 (Epstein-Barr virus)
auuugcugacauau

SEQ ID NO: 3966760 - RNA, 17 nt, Human herpesvirus 4 (Epstein-Barr virus)
caaaacucacaggacau

SEQ ID NO: 3966761 - RNA, 21 nt, Human herpesvirus 4 (Epstein-Barr virus)
caaaacugguggacucuauug

SEQ ID NO: 3966762 - RNA, 19 nt, Human herpesvirus 4 (Epstein-Barr virus)
caacccccggcucucaggc

SEQ ID NO: 3966763 - RNA, 15 nt, Human herpesvirus 4 (Epstein-Barr virus)
caaccugauuccccc

SEQ ID NO: 3966764 - RNA, 19 nt, Human herpesvirus 4 (Epstein-Barr virus)
caacgccggccugcuggcc

SEQ ID NO: 3966765 - RNA, 22 nt, Human herpesvirus 4 (Epstein-Barr virus)
caacgcuuccacccccuggagc

SEQ ID NO: 3966766 - RNA, 11 nt, Human herpesvirus 4 (Epstein-Barr virus)
caacugcugca

SEQ ID NO: 3966767 - RNA, 20 nt, Human herpesvirus 4 (Epstein-Barr virus)
caagaggcagagagccagug

SEQ ID NO: 3966768 - RNA, 17 nt, Human herpesvirus 4 (Epstein-Barr virus)
caagcaaacggccuggc

SEQ ID NO: 3966769 - RNA, 13 nt, Human herpesvirus 4 (Epstein-Barr virus)
caagcggcacaga

SEQ ID NO: 3966770 - RNA, 23 nt, Human herpesvirus 4 (Epstein-Barr virus)
caagcugcuuugauuccugggau

SEQ ID NO: 3966771 - RNA, 22 nt, Human herpesvirus 4 (Epstein-Barr virus)
caagggaaaggaagggggcccu

SEQ ID NO: 3966772 - RNA, 12 nt, Human herpesvirus 4 (Epstein-Barr virus)
caagggaagagg

SEQ ID NO: 3966773 - RNA, 24 nt, Human herpesvirus 4 (Epstein-Barr virus)
caauaaaguugaugauauugaauu

SEQ ID NO: 3966774 - RNA, 13 nt, Human herpesvirus 4 (Epstein-Barr virus)
caaugccaaagcu

SEQ ID NO: 3966775 - RNA, 19 nt, Human herpesvirus 4 (Epstein-Barr virus)
cacaaccacggugacauuc

SEQ ID NO: 3966776 - RNA, 15 nt, Human herpesvirus 4 (Epstein-Barr virus)
cacaacuaccaggca

SEQ ID NO: 3966777 - RNA, 21 nt, Human herpesvirus 4 (Epstein-Barr virus)
cacacauuucagguaccccaa

SEQ ID NO: 3966778 - RNA, 17 nt, Human herpesvirus 4 (Epstein-Barr virus)
cacagaggugauguaga

SEQ ID NO: 3966779 - RNA, 19 nt, Human herpesvirus 4 (Epstein-Barr virus)
cacagguagcaaggacccg

SEQ ID NO: 3966780 - RNA, 18 nt, Human herpesvirus 4 (Epstein-Barr virus)
caccagggaggccuggga

SEQ ID NO: 3966781 - RNA, 16 nt, Human herpesvirus 4 (Epstein-Barr virus)
cacccaggcagccuug

SEQ ID NO: 3966782 - RNA, 11 nt, Human herpesvirus 4 (Epstein-Barr virus)
cacccccacca

SEQ ID NO: 3966783 - RNA, 15 nt, Human herpesvirus 4 (Epstein-Barr virus)
cacccucccccugcc

SEQ ID NO: 3966784 - RNA, 21 nt, Human herpesvirus 4 (Epstein-Barr virus)
caccggcuuggcccucucacu

SEQ ID NO: 3966785 - RNA, 15 nt, Human herpesvirus 4 (Epstein-Barr virus)
caccguggagccggg

SEQ ID NO: 3966786 - RNA, 16 nt, Human herpesvirus 4 (Epstein-Barr virus)
caccgugggaaaauag

SEQ ID NO: 3966787 - RNA, 15 nt, Human herpesvirus 4 (Epstein-Barr virus)
caccugcagggcuuc

SEQ ID NO: 3966788 - RNA, 20 nt, Human herpesvirus 4 (Epstein-Barr virus)
caccuggccagggcggagga

SEQ ID NO: 3966789 - RNA, 19 nt, Human herpesvirus 4 (Epstein-Barr virus)
caccugucccugggggccu

SEQ ID NO: 3966790 - RNA, 16 nt, Human herpesvirus 4 (Epstein-Barr virus)
caccuguguccugggc

SEQ ID NO: 3966791 - RNA, 17 nt, Human herpesvirus 4 (Epstein-Barr virus)
caccuguguccugggca

SEQ ID NO: 3966792 - RNA, 21 nt, Human herpesvirus 4 (Epstein-Barr virus)
caccuugaggugccacagagc

SEQ ID NO: 3966793 - RNA, 13 nt, Human herpesvirus 4 (Epstein-Barr virus)
cacgacuguuccu

SEQ ID NO: 3966794 - RNA, 20 nt, Human herpesvirus 4 (Epstein-Barr virus)
cacggcaccgucagccacac

SEQ ID NO: 3966795 - RNA, 23 nt, Human herpesvirus 4 (Epstein-Barr virus)
cacggcaccgucagccacacaau

SEQ ID NO: 3966796 - RNA, 19 nt, Human herpesvirus 4 (Epstein-Barr virus)
cacggcgucaaacagguga

SEQ ID NO: 3966797 - RNA, 17 nt, Human herpesvirus 4 (Epstein-Barr virus)
cacggggccgugcaccu

SEQ ID NO: 3966798 - RNA, 17 nt, Human herpesvirus 4 (Epstein-Barr virus)
cacggggugcucccccu

SEQ ID NO: 3966799 - RNA, 19 nt, Human herpesvirus 4 (Epstein-Barr virus)
cacuucuacucuuggcagc

SEQ ID NO: 3966800 - RNA, 14 nt, Human herpesvirus 4 (Epstein-Barr virus)
cagaagacuccugc

SEQ ID NO: 3966801 - RNA, 22 nt, Human herpesvirus 4 (Epstein-Barr virus)
cagacacauucgggugaaggcu

SEQ ID NO: 3966802 - RNA, 13 nt, Human herpesvirus 4 (Epstein-Barr virus)
cagacagccgcgg

SEQ ID NO: 3966803 - RNA, 13 nt, Human herpesvirus 4 (Epstein-Barr virus)
cagaccacccgga

SEQ ID NO: 3966804 - RNA, 20 nt, Human herpesvirus 4 (Epstein-Barr virus)
cagaguucccggcugcuccc

SEQ ID NO: 3966805 - RNA, 23 nt, Human herpesvirus 4 (Epstein-Barr virus)
cagauagccggccaggcagagga

SEQ ID NO: 3966806 - RNA, 15 nt, Human herpesvirus 4 (Epstein-Barr virus)
cagaugcagugggug

SEQ ID NO: 3966807 - RNA, 20 nt, Human herpesvirus 4 (Epstein-Barr virus)
cagcacgucgucagagaggu

SEQ ID NO: 3966808 - RNA, 20 nt, Human herpesvirus 4 (Epstein-Barr virus)
cagcagaagggucagcacag

SEQ ID NO: 3966809 - RNA, 17 nt, Human herpesvirus 4 (Epstein-Barr virus)
cagcagauccagggccc

SEQ ID NO: 3966810 - RNA, 19 nt, Human herpesvirus 4 (Epstein-Barr virus)
cagcagcucuggcacugcu

SEQ ID NO: 3966811 - RNA, 16 nt, Human herpesvirus 4 (Epstein-Barr virus)
cagcaguagcuuggga

SEQ ID NO: 3966812 - RNA, 15 nt, Human herpesvirus 4 (Epstein-Barr virus)
cagccagagccagcc

SEQ ID NO: 3966813 - RNA, 18 nt, Human herpesvirus 4 (Epstein-Barr virus)
cagccccgcccuccccau

SEQ ID NO: 3966814 - RNA, 18 nt, Human herpesvirus 4 (Epstein-Barr virus)
cagcgaccggcagauccc

SEQ ID NO: 3966815 - RNA, 22 nt, Human herpesvirus 4 (Epstein-Barr virus)
cagcgucaggaaguacagccgg

SEQ ID NO: 3966816 - RNA, 15 nt, Human herpesvirus 4 (Epstein-Barr virus)
cagcuaacaggacau

SEQ ID NO: 3966817 - RNA, 16 nt, Human herpesvirus 4 (Epstein-Barr virus)
cagcuccagggccagc

SEQ ID NO: 3966818 - RNA, 17 nt, Human herpesvirus 4 (Epstein-Barr virus)
cagcuccagggccagca

SEQ ID NO: 3966819 - RNA, 16 nt, Human herpesvirus 4 (Epstein-Barr virus)
cagcucuaacuuggca

SEQ ID NO: 3966820 - RNA, 15 nt, Human herpesvirus 4 (Epstein-Barr virus)
cauuaaagccuccuc

SEQ ID NO: 3966821 - RNA, 14 nt, Human herpesvirus 4 (Epstein-Barr virus)
cauuccacccacug

SEQ ID NO: 3966822 - RNA, 14 nt, Human herpesvirus 4 (Epstein-Barr virus)
cauugcaccuugcc

SEQ ID NO: 3966823 - RNA, 21 nt, Human herpesvirus 4 (Epstein-Barr virus)
cauugcaucgcucaccccugu

SEQ ID NO: 3966824 - RNA, 20 nt, Human herpesvirus 4 (Epstein-Barr virus)
cauuggcugcaaagggaccc

SEQ ID NO: 3966825 - RNA, 18 nt, Human herpesvirus 4 (Epstein-Barr virus)
cauugggcuaacgggagg

SEQ ID NO: 3966826 - RNA, 18 nt, Human herpesvirus 4 (Epstein-Barr virus)
cauuuuuagccccagccc

SEQ ID NO: 3966827 - RNA, 18 nt, Human herpesvirus 4 (Epstein-Barr virus)
ccaaacauaaaugcccca

SEQ ID NO: 3966828 - RNA, 16 nt, Human herpesvirus 4 (Epstein-Barr virus)
ccaaacuuuguccaga

SEQ ID NO: 3966829 - RNA, 16 nt, Human herpesvirus 4 (Epstein-Barr virus)
ccaagauagugaccaa

SEQ ID NO: 3966830 - RNA, 14 nt, Human herpesvirus 4 (Epstein-Barr virus)
ccaaucaccagcca

SEQ ID NO: 3966831 - RNA, 12 nt, Human herpesvirus 4 (Epstein-Barr virus)
ccaccacacagc

SEQ ID NO: 3966832 - RNA, 21 nt, Human herpesvirus 4 (Epstein-Barr virus)
ccaccgccuuaugaggaccca

SEQ ID NO: 3966833 - RNA, 18 nt, Human herpesvirus 4 (Epstein-Barr virus)
ccaccggggaggccaggu

SEQ ID NO: 3966834 - RNA, 14 nt, Human herpesvirus 4 (Epstein-Barr virus)
ccaccuccaccacc

SEQ ID NO: 3966835 - RNA, 14 nt, Human herpesvirus 4 (Epstein-Barr virus)
ccacuaggaaccca

SEQ ID NO: 3966836 - RNA, 13 nt, Human herpesvirus 4 (Epstein-Barr virus)
ccacucaggaagc

SEQ ID NO: 3966837 - RNA, 22 nt, Human herpesvirus 4 (Epstein-Barr virus)
ccacugagcaagauccuucugg

SEQ ID NO: 3966838 - RNA, 15 nt, Human herpesvirus 4 (Epstein-Barr virus)
ccagaagcagaugga

SEQ ID NO: 3966839 - RNA, 19 nt, Human herpesvirus 4 (Epstein-Barr virus)
ccagaguucccggcugcuc

SEQ ID NO: 3966840 - RNA, 16 nt, Human herpesvirus 4 (Epstein-Barr virus)
ccagcagauccagggc

SEQ ID NO: 3966841 - RNA, 17 nt, Human herpesvirus 4 (Epstein-Barr virus)
ccagcagggcacagagg

SEQ ID NO: 3966842 - RNA, 14 nt, Human herpesvirus 4 (Epstein-Barr virus)
ccagccaucaugcu

SEQ ID NO: 3966843 - RNA, 14 nt, Human herpesvirus 4 (Epstein-Barr virus)
ccagcgacugaucc

SEQ ID NO: 3966844 - RNA, 16 nt, Human herpesvirus 4 (Epstein-Barr virus)
ccagcucggccagcag

SEQ ID NO: 3966845 - RNA, 12 nt, Human herpesvirus 4 (Epstein-Barr virus)
ccagcugguggu

SEQ ID NO: 3966846 - RNA, 17 nt, Human herpesvirus 4 (Epstein-Barr virus)
ccaggcuuucuaugccu

SEQ ID NO: 3966847 - RNA, 18 nt, Human herpesvirus 4 (Epstein-Barr virus)
ccagggccggaaccugag

SEQ ID NO: 3966848 - RNA, 16 nt, Human herpesvirus 4 (Epstein-Barr virus)
ccaggucuugccgugg

SEQ ID NO: 3966849 - RNA, 14 nt, Human herpesvirus 4 (Epstein-Barr virus)
ccauaccaggugcc

SEQ ID NO: 3966850 - RNA, 18 nt, Human herpesvirus 4 (Epstein-Barr virus)
ccauaccuacaccacccc

SEQ ID NO: 3966851 - RNA, 21 nt, Human herpesvirus 4 (Epstein-Barr virus)
ccaucagcucgcccacacagc

SEQ ID NO: 3966852 - RNA, 20 nt, Human herpesvirus 4 (Epstein-Barr virus)
ccauccaucaacuucagcuc

SEQ ID NO: 3966853 - RNA, 15 nt, Human herpesvirus 4 (Epstein-Barr virus)
ccauguaagccugcc

SEQ ID NO: 3966854 - RNA, 20 nt, Human herpesvirus 4 (Epstein-Barr virus)
cccaauauccaucugcuucu

SEQ ID NO: 3966855 - RNA, 12 nt, Human herpesvirus 4 (Epstein-Barr virus)
cccacccccacc

SEQ ID NO: 3966856 - RNA, 18 nt, Human herpesvirus 4 (Epstein-Barr virus)
cccacggaagcccucugg

SEQ ID NO: 3966857 - RNA, 16 nt, Human herpesvirus 4 (Epstein-Barr virus)
cccacggaccccccuc

SEQ ID NO: 3966858 - RNA, 14 nt, Human herpesvirus 4 (Epstein-Barr virus)
cccagccacagcac

SEQ ID NO: 3966859 - RNA, 19 nt, Human herpesvirus 4 (Epstein-Barr virus)
cccagccuacucuccacuc

SEQ ID NO: 3966860 - RNA, 16 nt, Human herpesvirus 4 (Epstein-Barr virus)
cccagggacaucccca

SEQ ID NO: 3966861 - RNA, 18 nt, Human herpesvirus 4 (Epstein-Barr virus)
cccauccccagcccagcc

SEQ ID NO: 3966862 - RNA, 21 nt, Human herpesvirus 4 (Epstein-Barr virus)
cccauguugcgggugccggcc

SEQ ID NO: 3966863 - RNA, 17 nt, Human herpesvirus 4 (Epstein-Barr virus)
ccccagcuucugaggcg

SEQ ID NO: 3966864 - RNA, 17 nt, Human herpesvirus 4 (Epstein-Barr virus)
ccccaguggacaaggca

SEQ ID NO: 3966865 - RNA, 15 nt, Human herpesvirus 4 (Epstein-Barr virus)
ccccggccucccgcu

SEQ ID NO: 3966866 - RNA, 16 nt, Human herpesvirus 4 (Epstein-Barr virus)
gccacccgucccgggu

SEQ ID NO: 3966867 - RNA, 19 nt, Human herpesvirus 4 (Epstein-Barr virus)
gccagcaaaaccagcccgg

SEQ ID NO: 3966868 - RNA, 21 nt, Human herpesvirus 4 (Epstein-Barr virus)
gccaggaccuggaugcuguag

SEQ ID NO: 3966869 - RNA, 23 nt, Human herpesvirus 4 (Epstein-Barr virus)
gccagggugaccuggcucagguc

SEQ ID NO: 3966870 - RNA, 15 nt, Human herpesvirus 4 (Epstein-Barr virus)
gccaugcaggccugg

SEQ ID NO: 3966871 - RNA, 20 nt, Human herpesvirus 4 (Epstein-Barr virus)
gcccccaaaaguagaggcuc

SEQ ID NO: 3966872 - RNA, 19 nt, Human herpesvirus 4 (Epstein-Barr virus)
gcccccucugccuccggcc

SEQ ID NO: 3966873 - RNA, 23 nt, Human herpesvirus 4 (Epstein-Barr virus)
gccccgcccuccccauccccagc

SEQ ID NO: 3966874 - RNA, 21 nt, Human herpesvirus 4 (Epstein-Barr virus)
gccccggucaccccagaugcc

SEQ ID NO: 3966875 - RNA, 14 nt, Human herpesvirus 4 (Epstein-Barr virus)
gccccucagccugc

SEQ ID NO: 3966876 - RNA, 18 nt, Human herpesvirus 4 (Epstein-Barr virus)
gcccucaugcgccagagc

SEQ ID NO: 3966877 - RNA, 21 nt, Human herpesvirus 4 (Epstein-Barr virus)
gcccugaucugggagaugaga

SEQ ID NO: 3966878 - RNA, 14 nt, Human herpesvirus 4 (Epstein-Barr virus)
gccgccccgggccc

SEQ ID NO: 3966879 - RNA, 18 nt, Human herpesvirus 4 (Epstein-Barr virus)
gccgccgccuccgccgcc

SEQ ID NO: 3966880 - RNA, 16 nt, Human herpesvirus 4 (Epstein-Barr virus)
gccggaaccugagccu

SEQ ID NO: 3966881 - RNA, 20 nt, Human herpesvirus 4 (Epstein-Barr virus)
gccggcgcuguguggcugac

SEQ ID NO: 3966882 - RNA, 13 nt, Human herpesvirus 4 (Epstein-Barr virus)
gccguccucugga

SEQ ID NO: 3966883 - RNA, 14 nt, Human herpesvirus 4 (Epstein-Barr virus)
gccguggcgccugg

SEQ ID NO: 3966884 - RNA, 21 nt, Human herpesvirus 4 (Epstein-Barr virus)
gccuaaucaccguuccucauu

SEQ ID NO: 3966885 - RNA, 19 nt, Human herpesvirus 4 (Epstein-Barr virus)
gccuccauccaguggggcu

SEQ ID NO: 3966886 - RNA, 16 nt, Human herpesvirus 4 (Epstein-Barr virus)
gccuccucgcaggccc

SEQ ID NO: 3966887 - RNA, 20 nt, Human herpesvirus 4 (Epstein-Barr virus)
gccucgccuucuccucagcc

SEQ ID NO: 3966888 - RNA, 14 nt, Human herpesvirus 4 (Epstein-Barr virus)
gccugagacagagg

SEQ ID NO: 3966889 - RNA, 15 nt, Human herpesvirus 4 (Epstein-Barr virus)
gccugagcugccugg

SEQ ID NO: 3966890 - RNA, 16 nt, Human herpesvirus 4 (Epstein-Barr virus)
gccugccaaagagcca

SEQ ID NO: 3966891 - RNA, 16 nt, Human herpesvirus 4 (Epstein-Barr virus)
gccuggcucgccugga

SEQ ID NO: 3966892 - RNA, 19 nt, Human herpesvirus 4 (Epstein-Barr virus)
gccuguuuguccagcaggg

SEQ ID NO: 3966893 - RNA, 17 nt, Human herpesvirus 4 (Epstein-Barr virus)
gccuucuccucagccuc

SEQ ID NO: 3966894 - RNA, 17 nt, Human herpesvirus 4 (Epstein-Barr virus)
gccuucugcguccagac

SEQ ID NO: 3966895 - RNA, 17 nt, Human herpesvirus 4 (Epstein-Barr virus)
gccuugggggugguggg

SEQ ID NO: 3966896 - RNA, 22 nt, Human herpesvirus 4 (Epstein-Barr virus)
gcgccaucuagcgggagauguu

SEQ ID NO: 3966897 - RNA, 12 nt, Human herpesvirus 4 (Epstein-Barr virus)
gcgccggugggg

SEQ ID NO: 3966898 - RNA, 12 nt, Human herpesvirus 4 (Epstein-Barr virus)
gcgccugcucca

SEQ ID NO: 3966899 - RNA, 21 nt, Human herpesvirus 4 (Epstein-Barr virus)
gcggcagcggaugguggggcu

SEQ ID NO: 3966900 - RNA, 14 nt, Human herpesvirus 4 (Epstein-Barr virus)
gcggcguggagcug

SEQ ID NO: 3966901 - RNA, 12 nt, Human herpesvirus 4 (Epstein-Barr virus)
gcgugccaaacu

SEQ ID NO: 3966902 - RNA, 17 nt, Human herpesvirus 4 (Epstein-Barr virus)
gcguugccagacuccgc

SEQ ID NO: 3966903 - RNA, 21 nt, Human herpesvirus 4 (Epstein-Barr virus)
gcuacacucuggggucucagg

SEQ ID NO: 3966904 - RNA, 16 nt, Human herpesvirus 4 (Epstein-Barr virus)
gcucaccuauggucac

SEQ ID NO: 3966905 - RNA, 14 nt, Human herpesvirus 4 (Epstein-Barr virus)
gcucaguggccguc

SEQ ID NO: 3966906 - RNA, 16 nt, Human herpesvirus 4 (Epstein-Barr virus)
gcucccccuggacacu

SEQ ID NO: 3966907 - RNA, 23 nt, Human herpesvirus 4 (Epstein-Barr virus)
gcuccggauucaccggcaccgcc

SEQ ID NO: 3966908 - RNA, 21 nt, Human herpesvirus 4 (Epstein-Barr virus)
gcuccguccuuguccaggaga

SEQ ID NO: 3966909 - RNA, 18 nt, Human herpesvirus 4 (Epstein-Barr virus)
gcuccuggaucuggggcu

SEQ ID NO: 3966910 - RNA, 20 nt, Human herpesvirus 4 (Epstein-Barr virus)
gcucuucauguccacugagc

SEQ ID NO: 3966911 - RNA, 21 nt, Human herpesvirus 4 (Epstein-Barr virus)
gcugcaucuuaccccuggcuu

SEQ ID NO: 3966912 - RNA, 18 nt, Human herpesvirus 4 (Epstein-Barr virus)
gcugccgucccagggccg

SEQ ID NO: 3966913 - RNA, 18 nt, Human herpesvirus 4 (Epstein-Barr virus)
gcuggacgcgcagugcca

SEQ ID NO: 3966914 - RNA, 15 nt, Human herpesvirus 4 (Epstein-Barr virus)
gcugguuuggagaaa

SEQ ID NO: 3966915 - RNA, 22 nt, Human herpesvirus 4 (Epstein-Barr virus)
gcuucucguagagaucaggcca

SEQ ID NO: 3966916 - RNA, 13 nt, Human herpesvirus 4 (Epstein-Barr virus)
gcuucuggcucuu

SEQ ID NO: 3966917 - RNA, 16 nt, Human herpesvirus 4 (Epstein-Barr virus)
gcuugcgucugccccc

SEQ ID NO: 3966918 - RNA, 12 nt, Human herpesvirus 4 (Epstein-Barr virus)
gcuugcuggggc

SEQ ID NO: 3966919 - RNA, 16 nt, Human herpesvirus 4 (Epstein-Barr virus)
gcuuugcgaaaacgaa

SEQ ID NO: 3966920 - RNA, 12 nt, Human herpesvirus 4 (Epstein-Barr virus)
gcuuuucuccuc

SEQ ID NO: 3966921 - RNA, 16 nt, Human herpesvirus 4 (Epstein-Barr virus)
ggacagggggacucua

SEQ ID NO: 3966922 - RNA, 18 nt, Human herpesvirus 4 (Epstein-Barr virus)
ggacccacgguggaacag

SEQ ID NO: 3966923 - RNA, 16 nt, Human herpesvirus 4 (Epstein-Barr virus)
ggacgaggaggcggaa

SEQ ID NO: 3966924 - RNA, 14 nt, Human herpesvirus 4 (Epstein-Barr virus)
ggacucggggugau

SEQ ID NO: 3966925 - RNA, 16 nt, Human herpesvirus 4 (Epstein-Barr virus)
ggacuuccugggaggu

SEQ ID NO: 3966926 - RNA, 15 nt, Human herpesvirus 4 (Epstein-Barr virus)
ggagaggcagcccca

SEQ ID NO: 3966927 - RNA, 18 nt, Human herpesvirus 4 (Epstein-Barr virus)
ggccgccacccucccccu

SEQ ID NO: 3966928 - RNA, 16 nt, Human herpesvirus 4 (Epstein-Barr virus)
ggccgcugccaggccg

SEQ ID NO: 3966929 - RNA, 21 nt, Human herpesvirus 4 (Epstein-Barr virus)
ggccucuaaguacaggucgcg

SEQ ID NO: 3966930 - RNA, 16 nt, Human herpesvirus 4 (Epstein-Barr virus)
ggccucucuggcugug

SEQ ID NO: 3966931 - RNA, 17 nt, Human herpesvirus 4 (Epstein-Barr virus)
ggccugggaggugcuga

SEQ ID NO: 3966932 - RNA, 19 nt, Human herpesvirus 4 (Epstein-Barr virus)
ggccuuccucugccuggcc

SEQ ID NO: 3966933 - RNA, 16 nt, Human herpesvirus 4 (Epstein-Barr virus)
ggccuuuucccucauu

SEQ ID NO: 3966934 - RNA, 20 nt, Human herpesvirus 4 (Epstein-Barr virus)
ggcggaggagauccgccagg

SEQ ID NO: 3966935 - RNA, 13 nt, Human herpesvirus 4 (Epstein-Barr virus)
ggcggcaguggac

SEQ ID NO: 3966936 - RNA, 16 nt, Human herpesvirus 4 (Epstein-Barr virus)
ggcggcugcugagacc

SEQ ID NO: 3966937 - RNA, 14 nt, Human herpesvirus 4 (Epstein-Barr virus)
ggcgggcgggcuug

SEQ ID NO: 3966938 - RNA, 21 nt, Human herpesvirus 4 (Epstein-Barr virus)
ggcgucaggagacacggcucu

SEQ ID NO: 3966939 - RNA, 20 nt, Human herpesvirus 4 (Epstein-Barr virus)
ggcucgccucauccuggccc

SEQ ID NO: 3966940 - RNA, 13 nt, Human herpesvirus 4 (Epstein-Barr virus)
ggcucucaggccu

SEQ ID NO: 3966941 - RNA, 15 nt, Human herpesvirus 4 (Epstein-Barr virus)
ggcugcgguggugcg

SEQ ID NO: 3966942 - RNA, 18 nt, Human herpesvirus 4 (Epstein-Barr virus)
ggcugcucccgccucagg

SEQ ID NO: 3966943 - RNA, 19 nt, Human herpesvirus 4 (Epstein-Barr virus)
ggcugcugccgucccaggg

SEQ ID NO: 3966944 - RNA, 19 nt, Human herpesvirus 4 (Epstein-Barr virus)
gggaggcauaacgguggug

SEQ ID NO: 3966945 - RNA, 11 nt, Human herpesvirus 4 (Epstein-Barr virus)
gggcaccccac

SEQ ID NO: 3966946 - RNA, 11 nt, Human herpesvirus 4 (Epstein-Barr virus)
gggccaggcug

SEQ ID NO: 3966947 - RNA, 19 nt, Human herpesvirus 4 (Epstein-Barr virus)
gggccaggucacagaccag

SEQ ID NO: 3966948 - RNA, 21 nt, Human herpesvirus 4 (Epstein-Barr virus)
gggccauucgugaguccaggg

SEQ ID NO: 3966949 - RNA, 14 nt, Human herpesvirus 4 (Epstein-Barr virus)
gggcccgggugccu

SEQ ID NO: 3966950 - RNA, 14 nt, Human herpesvirus 4 (Epstein-Barr virus)
gggcgccccagggc

SEQ ID NO: 3966951 - RNA, 15 nt, Human herpesvirus 4 (Epstein-Barr virus)
gggcuggggagauga

SEQ ID NO: 3966952 - RNA, 16 nt, Human herpesvirus 4 (Epstein-Barr virus)
ggggcaggagcaggag

SEQ ID NO: 3966953 - RNA, 17 nt, Human herpesvirus 4 (Epstein-Barr virus)
ggggcggguauagagca

SEQ ID NO: 3966954 - RNA, 12 nt, Human herpesvirus 4 (Epstein-Barr virus)
ggggcuggccug

SEQ ID NO: 3966955 - RNA, 19 nt, Human herpesvirus 4 (Epstein-Barr virus)
gggggccaaaagggcucug

SEQ ID NO: 3966956 - RNA, 18 nt, Human herpesvirus 4 (Epstein-Barr virus)
ggguauguggugccaugu

SEQ ID NO: 3966957 - RNA, 19 nt, Human herpesvirus 4 (Epstein-Barr virus)
gguacucuuggugcagccc

SEQ ID NO: 3966958 - RNA, 18 nt, Human herpesvirus 4 (Epstein-Barr virus)
gguccaggguccaggaga

SEQ ID NO: 3966959 - RNA, 22 nt, Human herpesvirus 4 (Epstein-Barr virus)
ggucccccuccacgggagggcg

SEQ ID NO: 3966960 - RNA, 22 nt, Human herpesvirus 4 (Epstein-Barr virus)
gguccccgagggugaggcccag

SEQ ID NO: 3966961 - RNA, 12 nt, Human herpesvirus 4 (Epstein-Barr virus)
ggucgggggcac

SEQ ID NO: 3966962 - RNA, 16 nt, Human herpesvirus 4 (Epstein-Barr virus)
ggugccugagacagag

SEQ ID NO: 3966963 - RNA, 12 nt, Human herpesvirus 4 (Epstein-Barr virus)
ggugcucccccu

SEQ ID NO: 3966964 - RNA, 17 nt, Human herpesvirus 4 (Epstein-Barr virus)
ggugcucccccuggaca

SEQ ID NO: 3966965 - RNA, 20 nt, Human herpesvirus 4 (Epstein-Barr virus)
ggugcugccugggggcuuug

SEQ ID NO: 3966966 - RNA, 13 nt, Human herpesvirus 4 (Epstein-Barr virus)
gguggugggcugc

SEQ ID NO: 3966967 - RNA, 15 nt, Human herpesvirus 4 (Epstein-Barr virus)
gguggugggcugcug

SEQ ID NO: 3966968 - RNA, 20 nt, Human herpesvirus 4 (Epstein-Barr virus)
gguguucccagaagagccag

SEQ ID NO: 3966969 - RNA, 14 nt, Human herpesvirus 4 (Epstein-Barr virus)
gguuuggggcaggc

SEQ ID NO: 3966970 - RNA, 14 nt, Human herpesvirus 4 (Epstein-Barr virus)
gguuuucugccccu

SEQ ID NO: 3966971 - RNA, 22 nt, Human herpesvirus 4 (Epstein-Barr virus)
guacaacuaccugucugauugc

SEQ ID NO: 3966972 - RNA, 21 nt, Human herpesvirus 4 (Epstein-Barr virus)
guagaagugugucccccucca

SEQ ID NO: 3966973 - RNA, 23 nt, Human herpesvirus 4 (Epstein-Barr virus)
guagauggcgagacucuugaaga

SEQ ID NO: 3966974 - RNA, 20 nt, Human herpesvirus 4 (Epstein-Barr virus)
guagccgaauaucuggaggu

SEQ ID NO: 3966975 - RNA, 17 nt, Human herpesvirus 4 (Epstein-Barr virus)
guagccgggguggaggg

SEQ ID NO: 3966976 - RNA, 18 nt, Human herpesvirus 4 (Epstein-Barr virus)
guagccuugggggccugg

SEQ ID NO: 3966977 - RNA, 20 nt, Human herpesvirus 4 (Epstein-Barr virus)
guagucguuguucagggccg

SEQ ID NO: 3966978 - RNA, 13 nt, Human herpesvirus 4 (Epstein-Barr virus)
gucaccaggccug

SEQ ID NO: 3966979 - RNA, 23 nt, Human herpesvirus 4 (Epstein-Barr virus)
gucagcuguguacgugccucaga

SEQ ID NO: 3966980 - RNA, 13 nt, Human herpesvirus 4 (Epstein-Barr virus)
guccaaggcccaa

SEQ ID NO: 3966981 - RNA, 15 nt, Human herpesvirus 4 (Epstein-Barr virus)
guccauggcugcacc

SEQ ID NO: 3966982 - RNA, 18 nt, Human herpesvirus 4 (Epstein-Barr virus)
guccccguggaggaccgc

SEQ ID NO: 3966983 - RNA, 19 nt, Human herpesvirus 4 (Epstein-Barr virus)
guccgccggguucucaggg

SEQ ID NO: 3966984 - RNA, 19 nt, Human herpesvirus 4 (Epstein-Barr virus)
guccucuacugccuugucc

SEQ ID NO: 3966985 - RNA, 14 nt, Human herpesvirus 4 (Epstein-Barr virus)
guccugcugaaggg

SEQ ID NO: 3966986 - RNA, 20 nt, Human herpesvirus 4 (Epstein-Barr virus)
guccugggccucccaccacc

SEQ ID NO: 3966987 - RNA, 18 nt, Human herpesvirus 4 (Epstein-Barr virus)
guccuugugucucuauca

SEQ ID NO: 3966988 - RNA, 16 nt, Human herpesvirus 4 (Epstein-Barr virus)
gucgcuggcugguggg

SEQ ID NO: 3966989 - RNA, 10 nt, Human herpesvirus 4 (Epstein-Barr virus)
gucucagagg

SEQ ID NO: 3966990 - RNA, 19 nt, Human herpesvirus 4 (Epstein-Barr virus)
uccccagcaacagaucuug

SEQ ID NO: 3966991 - RNA, 14 nt, Human herpesvirus 4 (Epstein-Barr virus)
ucccccccagaccu

SEQ ID NO: 3966992 - RNA, 15 nt, Human herpesvirus 4 (Epstein-Barr virus)
ucccccccagaccug

SEQ ID NO: 3966993 - RNA, 15 nt, Human herpesvirus 4 (Epstein-Barr virus)
ucccccuccauucca

SEQ ID NO: 3966994 - RNA, 19 nt, Human herpesvirus 4 (Epstein-Barr virus)
uccccgagggugaggccca

SEQ ID NO: 3966995 - RNA, 13 nt, Human herpesvirus 4 (Epstein-Barr virus)
uccgaggcugaga

SEQ ID NO: 3966996 - RNA, 15 nt, Human herpesvirus 4 (Epstein-Barr virus)
uccgccaccuccggg

SEQ ID NO: 3966997 - RNA, 22 nt, Human herpesvirus 4 (Epstein-Barr virus)
uccgugagagccuacccaugac

SEQ ID NO: 3966998 - RNA, 20 nt, Human herpesvirus 4 (Epstein-Barr virus)
uccucuuacaccagaggcca

SEQ ID NO: 3966999 - RNA, 16 nt, Human herpesvirus 4 (Epstein-Barr virus)
ucgaagcggucucaga

SEQ ID NO: 3967000 - RNA, 23 nt, Human herpesvirus 4 (Epstein-Barr virus)
ucgaguaggugccuccagagccc

SEQ ID NO: 3967001 - RNA, 13 nt, Human herpesvirus 4 (Epstein-Barr virus)
ucgccgccccagg

SEQ ID NO: 3967002 - RNA, 14 nt, Human herpesvirus 4 (Epstein-Barr virus)
ucgccgccccaggg

SEQ ID NO: 3967003 - RNA, 13 nt, Human herpesvirus 4 (Epstein-Barr virus)
ucgcucagagcug

SEQ ID NO: 3967004 - RNA, 21 nt, Human herpesvirus 4 (Epstein-Barr virus)
ucuacaucccauaccuacacc

SEQ ID NO: 3967005 - RNA, 17 nt, Human herpesvirus 4 (Epstein-Barr virus)
ucuacgcggagcugcac

SEQ ID NO: 3967006 - RNA, 15 nt, Human herpesvirus 4 (Epstein-Barr virus)
ucuacucuuggcagc

SEQ ID NO: 3967007 - RNA, 23 nt, Human herpesvirus 4 (Epstein-Barr virus)
ucucagacaccaacacagacugc

SEQ ID NO: 3967008 - RNA, 18 nt, Human herpesvirus 4 (Epstein-Barr virus)
ucucauccccagagggcg

SEQ ID NO: 3967009 - RNA, 13 nt, Human herpesvirus 4 (Epstein-Barr virus)
ucuccagccacgg

SEQ ID NO: 3967010 - RNA, 12 nt, Human herpesvirus 4 (Epstein-Barr virus)
ucuccccucugc

SEQ ID NO: 3967011 - RNA, 20 nt, Human herpesvirus 4 (Epstein-Barr virus)
ucuccugugcuucagcagua

SEQ ID NO: 3967012 - RNA, 16 nt, Human herpesvirus 4 (Epstein-Barr virus)
ucuccuuguugaccuc

SEQ ID NO: 3967013 - RNA, 15 nt, Human herpesvirus 4 (Epstein-Barr virus)
ucucuuucuggccaa

SEQ ID NO: 3967014 - RNA, 15 nt, Human herpesvirus 4 (Epstein-Barr virus)
ucuggccaaccugcc

SEQ ID NO: 3967015 - RNA, 13 nt, Human herpesvirus 4 (Epstein-Barr virus)
ucuuaucagagag

SEQ ID NO: 3967016 - RNA, 14 nt, Human herpesvirus 4 (Epstein-Barr virus)
ucuucccagacucu

SEQ ID NO: 3967017 - RNA, 13 nt, Human herpesvirus 4 (Epstein-Barr virus)
ucuuuguggccuu

SEQ ID NO: 3967018 - RNA, 21 nt, Human herpesvirus 4 (Epstein-Barr virus)
ugaacuggggcugguggccug

SEQ ID NO: 3967019 - RNA, 16 nt, Human herpesvirus 4 (Epstein-Barr virus)
ugaagagcccccaccg

SEQ ID NO: 3967020 - RNA, 15 nt, Human herpesvirus 4 (Epstein-Barr virus)
ugacaucccaguucu

SEQ ID NO: 3967021 - RNA, 11 nt, Human herpesvirus 4 (Epstein-Barr virus)
ugaccaacaug

SEQ ID NO: 3967022 - RNA, 17 nt, Human herpesvirus 4 (Epstein-Barr virus)
ugaccacggcccacguc

SEQ ID NO: 3967023 - RNA, 14 nt, Human herpesvirus 4 (Epstein-Barr virus)
ugacccacuccagu

SEQ ID NO: 3967024 - RNA, 15 nt, Human herpesvirus 4 (Epstein-Barr virus)
ugacccacuccagug

SEQ ID NO: 3967025 - RNA, 13 nt, Human herpesvirus 4 (Epstein-Barr virus)
ugacgcuccagga

SEQ ID NO: 3967026 - RNA, 23 nt, Human herpesvirus 4 (Epstein-Barr virus)
ugacggugggcaugacacaggac

SEQ ID NO: 3967027 - RNA, 17 nt, Human herpesvirus 4 (Epstein-Barr virus)
ugagauuuaacccaccc

SEQ ID NO: 3967028 - RNA, 21 nt, Human herpesvirus 4 (Epstein-Barr virus)
ugagcccaccugucugacuug

SEQ ID NO: 3967029 - RNA, 19 nt, Human herpesvirus 4 (Epstein-Barr virus)
ugagccugagccacaccca

SEQ ID NO: 3967030 - RNA, 14 nt, Human herpesvirus 4 (Epstein-Barr virus)
ugaggaaggggccu

SEQ ID NO: 3967031 - RNA, 13 nt, Human herpesvirus 4 (Epstein-Barr virus)
ugaggagcgccca

SEQ ID NO: 3967032 - RNA, 16 nt, Human herpesvirus 4 (Epstein-Barr virus)
ugaucugggagaugag

SEQ ID NO: 3967033 - RNA, 13 nt, Human herpesvirus 4 (Epstein-Barr virus)
ugauggggacagg

SEQ ID NO: 3967034 - RNA, 21 nt, Human herpesvirus 4 (Epstein-Barr virus)
ugcaauaaauaaaaguacaga

SEQ ID NO: 3967035 - RNA, 20 nt, Human herpesvirus 4 (Epstein-Barr virus)
ugcagugggccucucuggcu

SEQ ID NO: 3967036 - RNA, 15 nt, Human herpesvirus 4 (Epstein-Barr virus)
ugcccaccagccagc

SEQ ID NO: 3967037 - RNA, 22 nt, Human herpesvirus 4 (Epstein-Barr virus)
ugccuaucauguuucaaccgcu

SEQ ID NO: 3967038 - RNA, 14 nt, Human herpesvirus 4 (Epstein-Barr virus)
ugccuccagagccc

SEQ ID NO: 3967039 - RNA, 20 nt, Human herpesvirus 4 (Epstein-Barr virus)
ugccuuucccccacccugga

SEQ ID NO: 3967040 - RNA, 11 nt, Human herpesvirus 4 (Epstein-Barr virus)
ugcgcgccgcc

SEQ ID NO: 3967041 - RNA, 18 nt, Human herpesvirus 4 (Epstein-Barr virus)
ugcuaugaccaugcccag

SEQ ID NO: 3967042 - RNA, 16 nt, Human herpesvirus 4 (Epstein-Barr virus)
ugcucaccaugguagc

SEQ ID NO: 3967043 - RNA, 17 nt, Human herpesvirus 4 (Epstein-Barr virus)
ugcucagaccccggguu

SEQ ID NO: 3967044 - RNA, 20 nt, Human herpesvirus 4 (Epstein-Barr virus)
ugcugcggcuaugcagccca

SEQ ID NO: 3967045 - RNA, 18 nt, Human herpesvirus 4 (Epstein-Barr virus)
ugcuucuaccaagacucc

SEQ ID NO: 3967046 - RNA, 21 nt, Human herpesvirus 4 (Epstein-Barr virus)
uggacacuuauguuucaagca

SEQ ID NO: 3967047 - RNA, 14 nt, Human herpesvirus 4 (Epstein-Barr virus)
uggagccgggggca

SEQ ID NO: 3967048 - RNA, 22 nt, Human herpesvirus 4 (Epstein-Barr virus)
uggaguccaugaccagggggca

SEQ ID NO: 3967049 - RNA, 14 nt, Human herpesvirus 4 (Epstein-Barr virus)
uggauuugaaagug

SEQ ID NO: 3967050 - RNA, 22 nt, Human herpesvirus 4 (Epstein-Barr virus)
uggcagaaucaccagagcccag

SEQ ID NO: 3967051 - RNA, 16 nt, Human herpesvirus 4 (Epstein-Barr virus)
uggcauucagauuucu

SEQ ID NO: 3967052 - RNA, 17 nt, Human herpesvirus 4 (Epstein-Barr virus)
uggccagguacgggcug

SEQ ID NO: 3967053 - RNA, 19 nt, Human herpesvirus 4 (Epstein-Barr virus)
uggccucgucaggagggca

SEQ ID NO: 3967054 - RNA, 14 nt, Human herpesvirus 4 (Epstein-Barr virus)
uggccuggagagca

SEQ ID NO: 3967055 - RNA, 14 nt, Human herpesvirus 4 (Epstein-Barr virus)
uggcggcccagccc

SEQ ID NO: 3967056 - RNA, 13 nt, Human herpesvirus 4 (Epstein-Barr virus)
uggcuagauuucc

SEQ ID NO: 3967057 - RNA, 16 nt, Human herpesvirus 4 (Epstein-Barr virus)
uggcuugggcuguggu

SEQ ID NO: 3967058 - RNA, 20 nt, Human herpesvirus 4 (Epstein-Barr virus)
ugggaauggagaggggagug

SEQ ID NO: 3967059 - RNA, 22 nt, Human herpesvirus 4 (Epstein-Barr virus)
ugggcugacacagacuuggccu

SEQ ID NO: 3967060 - RNA, 21 nt, Human herpesvirus 4 (Epstein-Barr virus)
uggggcuggcaguccuugugu

SEQ ID NO: 3967061 - RNA, 14 nt, Human herpesvirus 4 (Epstein-Barr virus)
uggguccccucugc

SEQ ID NO: 3967062 - RNA, 21 nt, Human herpesvirus 4 (Epstein-Barr virus)
ugggugaccacugagggagug

SEQ ID NO: 3967063 - RNA, 13 nt, Human herpesvirus 4 (Epstein-Barr virus)
uggugccggggcc

SEQ ID NO: 3967064 - RNA, 16 nt, Human herpesvirus 4 (Epstein-Barr virus)
uggugggcugcugagg

SEQ ID NO: 3967065 - RNA, 16 nt, Human herpesvirus 4 (Epstein-Barr virus)
ugguugugcggucugu

SEQ ID NO: 3967066 - RNA, 12 nt, Human herpesvirus 4 (Epstein-Barr virus)
uguccucccggg

SEQ ID NO: 3967067 - RNA, 20 nt, Human herpesvirus 4 (Epstein-Barr virus)
uguccucccuaaccgccugg

SEQ ID NO: 3967068 - RNA, 18 nt, Human herpesvirus 4 (Epstein-Barr virus)
ugucuccugacgccaaug

SEQ ID NO: 3967069 - RNA, 17 nt, Human herpesvirus 4 (Epstein-Barr virus)
gagggccucuggcacgc

SEQ ID NO: 3967070 - RNA, 17 nt, Human herpesvirus 4 (Epstein-Barr virus)
gagggccuuccagagcu

SEQ ID NO: 3967071 - RNA, 18 nt, Human herpesvirus 4 (Epstein-Barr virus)
gaggggcaggagcaggag

SEQ ID NO: 3967072 - RNA, 10 nt, Human herpesvirus 4 (Epstein-Barr virus)
gagggggcca

SEQ ID NO: 3967073 - RNA, 21 nt, Human herpesvirus 4 (Epstein-Barr virus)
gaguccaacauuaaagccucc

SEQ ID NO: 3967074 - RNA, 21 nt, Human herpesvirus 4 (Epstein-Barr virus)
gagugcugcagguaaaccuuc

SEQ ID NO: 3967075 - RNA, 16 nt, Human herpesvirus 4 (Epstein-Barr virus)
gauaaucugggcagcc

SEQ ID NO: 3967076 - RNA, 17 nt, Human herpesvirus 4 (Epstein-Barr virus)
gaucuggggcuggccug

SEQ ID NO: 3967077 - RNA, 20 nt, Human herpesvirus 4 (Epstein-Barr virus)
gaugcugccgcuacugcugc

SEQ ID NO: 3967078 - RNA, 13 nt, Human herpesvirus 4 (Epstein-Barr virus)
gauggcggggccu

SEQ ID NO: 3967079 - RNA, 19 nt, Human herpesvirus 4 (Epstein-Barr virus)
gauuggaaaagggcccagg

SEQ ID NO: 3967080 - RNA, 15 nt, Human herpesvirus 4 (Epstein-Barr virus)
gcaacauccggggca

SEQ ID NO: 3967081 - RNA, 20 nt, Human herpesvirus 4 (Epstein-Barr virus)
gcaaugggacgucuuguaaa

SEQ ID NO: 3967082 - RNA, 20 nt, Human herpesvirus 4 (Epstein-Barr virus)
gcacaaaggaaacugcugac

SEQ ID NO: 3967083 - RNA, 19 nt, Human herpesvirus 4 (Epstein-Barr virus)
gcacacuuaacuugacuac

SEQ ID NO: 3967084 - RNA, 20 nt, Human herpesvirus 4 (Epstein-Barr virus)
gcacaucuggcaccuguccu

SEQ ID NO: 3967085 - RNA, 15 nt, Human herpesvirus 4 (Epstein-Barr virus)
gcaccggagccacca

SEQ ID NO: 3967086 - RNA, 15 nt, Human herpesvirus 4 (Epstein-Barr virus)
gcaccuguguccugg

SEQ ID NO: 3967087 - RNA, 14 nt, Human herpesvirus 4 (Epstein-Barr virus)
gcacgggcagagga

SEQ ID NO: 3967088 - RNA, 17 nt, Human herpesvirus 4 (Epstein-Barr virus)
gcacugcguccaccugg

SEQ ID NO: 3967089 - RNA, 19 nt, Human herpesvirus 4 (Epstein-Barr virus)
gcagaggacuuuuggggug

SEQ ID NO: 3967090 - RNA, 16 nt, Human herpesvirus 4 (Epstein-Barr virus)
gcagaggccugcacca

SEQ ID NO: 3967091 - RNA, 14 nt, Human herpesvirus 4 (Epstein-Barr virus)
gcagccacguccag

SEQ ID NO: 3967092 - RNA, 17 nt, Human herpesvirus 4 (Epstein-Barr virus)
gcagccccaaagcgggu

SEQ ID NO: 3967093 - RNA, 15 nt, Human herpesvirus 4 (Epstein-Barr virus)
gcagcccccuccucc

SEQ ID NO: 3967094 - RNA, 19 nt, Human herpesvirus 4 (Epstein-Barr virus)
gcagccuugcguggugcug

SEQ ID NO: 3967095 - RNA, 22 nt, Human herpesvirus 4 (Epstein-Barr virus)
gcagcuaaguuuucuaagggca

SEQ ID NO: 3967096 - RNA, 14 nt, Human herpesvirus 4 (Epstein-Barr virus)
gcagcucuggcacu

SEQ ID NO: 3967097 - RNA, 22 nt, Human herpesvirus 4 (Epstein-Barr virus)
gcagcugaguccccuccuugga

SEQ ID NO: 3967098 - RNA, 17 nt, Human herpesvirus 4 (Epstein-Barr virus)
gcagcuggacgcgcagu

SEQ ID NO: 3967099 - RNA, 23 nt, Human herpesvirus 4 (Epstein-Barr virus)
gcaggacggggggcuggcgaaga

SEQ ID NO: 3967100 - RNA, 23 nt, Human herpesvirus 4 (Epstein-Barr virus)
gcaggccccccgcaccagggcca

SEQ ID NO: 3967101 - RNA, 14 nt, Human herpesvirus 4 (Epstein-Barr virus)
gcagggacgaggac

SEQ ID NO: 3967102 - RNA, 15 nt, Human herpesvirus 4 (Epstein-Barr virus)
gcaggucaggucccc

SEQ ID NO: 3967103 - RNA, 13 nt, Human herpesvirus 4 (Epstein-Barr virus)
gcaggugagggug

SEQ ID NO: 3967104 - RNA, 16 nt, Human herpesvirus 4 (Epstein-Barr virus)
gcauauuuucagaccc

SEQ ID NO: 3967105 - RNA, 14 nt, Human herpesvirus 4 (Epstein-Barr virus)
gcaugagccacagg

SEQ ID NO: 3967106 - RNA, 17 nt, Human herpesvirus 4 (Epstein-Barr virus)
gcaugagcuccucucca

SEQ ID NO: 3967107 - RNA, 20 nt, Human herpesvirus 4 (Epstein-Barr virus)
gcaugaucaggacccugggc

SEQ ID NO: 3967108 - RNA, 16 nt, Human herpesvirus 4 (Epstein-Barr virus)
gcauggauauagcucu

SEQ ID NO: 3967109 - RNA, 14 nt, Human herpesvirus 4 (Epstein-Barr virus)
gccacacagccuga

SEQ ID NO: 3967110 - RNA, 20 nt, Human herpesvirus 4 (Epstein-Barr virus)
gccaccgacgagcagaggac

SEQ ID NO: 3967111 - RNA, 21 nt, Human herpesvirus 4 (Epstein-Barr virus)
gccaccguggccaggcccgag

SEQ ID NO: 3967112 - RNA, 16 nt, Human herpesvirus 4 (Epstein-Barr virus)
gccacguccagacucc

SEQ ID NO: 3967113 - RNA, 16 nt, Human herpesvirus 4 (Epstein-Barr virus)
gccacugcaggcugga

SEQ ID NO: 3967114 - RNA, 22 nt, Human herpesvirus 4 (Epstein-Barr virus)
gccagaaucgguaaggaggggc

SEQ ID NO: 3967115 - RNA, 15 nt, Human herpesvirus 4 (Epstein-Barr virus)
gccagaucuaaggcc

SEQ ID NO: 3967116 - RNA, 21 nt, Human herpesvirus 4 (Epstein-Barr virus)
gccauaaguccucauggcagg

SEQ ID NO: 3967117 - RNA, 11 nt, Human herpesvirus 4 (Epstein-Barr virus)
gccauggccaa

SEQ ID NO: 3967118 - RNA, 15 nt, Human herpesvirus 4 (Epstein-Barr virus)
gccauggccgagaag

SEQ ID NO: 3967119 - RNA, 15 nt, Human herpesvirus 4 (Epstein-Barr virus)
gcccacgucaaggcc

SEQ ID NO: 3967120 - RNA, 19 nt, Human herpesvirus 4 (Epstein-Barr virus)
gcccagcagauccagggcc

SEQ ID NO: 3967121 - RNA, 10 nt, Human herpesvirus 4 (Epstein-Barr virus)
gcccccacca

SEQ ID NO: 3967122 - RNA, 18 nt, Human herpesvirus 4 (Epstein-Barr virus)
gcccccgccagcgccucc

SEQ ID NO: 3967123 - RNA, 19 nt, Human herpesvirus 4 (Epstein-Barr virus)
gcccgacccccgggcgccc

SEQ ID NO: 3967124 - RNA, 23 nt, Human herpesvirus 4 (Epstein-Barr virus)
gcccgcuuuugcgaccccucuga

SEQ ID NO: 3967125 - RNA, 16 nt, Human herpesvirus 4 (Epstein-Barr virus)
gcccugucccuggagc

SEQ ID NO: 3967126 - RNA, 13 nt, Human herpesvirus 4 (Epstein-Barr virus)
gccggcagccugg

SEQ ID NO: 3967127 - RNA, 21 nt, Human herpesvirus 4 (Epstein-Barr virus)
gccgucucaaacggggaagga

SEQ ID NO: 3967128 - RNA, 13 nt, Human herpesvirus 4 (Epstein-Barr virus)
gccuccuggccag

SEQ ID NO: 3967129 - RNA, 13 nt, Human herpesvirus 4 (Epstein-Barr virus)
gccucggccuggg

SEQ ID NO: 3967130 - RNA, 15 nt, Human herpesvirus 4 (Epstein-Barr virus)
gccucuaccuuccac

SEQ ID NO: 3967131 - RNA, 15 nt, Human herpesvirus 4 (Epstein-Barr virus)
ugugcacccggcugg

SEQ ID NO: 3967132 - RNA, 15 nt, Human herpesvirus 4 (Epstein-Barr virus)
uguggccccggcugg

SEQ ID NO: 3967133 - RNA, 13 nt, Human herpesvirus 4 (Epstein-Barr virus)
ugugugacaugcu

SEQ ID NO: 3967134 - RNA, 15 nt, Human herpesvirus 4 (Epstein-Barr virus)
uguuccacagccugc

SEQ ID NO: 3967135 - RNA, 22 nt, Human herpesvirus 4 (Epstein-Barr virus)
agcaggaggaggggcaggagca

SEQ ID NO: 3967136 - RNA, 21 nt, Human herpesvirus 4 (Epstein-Barr virus)
agcagugguguuugcuugccc

SEQ ID NO: 3967137 - RNA, 17 nt, Human herpesvirus 4 (Epstein-Barr virus)
agcccagaggaggcccc

SEQ ID NO: 3967138 - RNA, 19 nt, Human herpesvirus 4 (Epstein-Barr virus)
agccccacucuugccucgg

SEQ ID NO: 3967139 - RNA, 14 nt, Human herpesvirus 4 (Epstein-Barr virus)
agccccagccccuc

SEQ ID NO: 3967140 - RNA, 15 nt, Human herpesvirus 4 (Epstein-Barr virus)
agcccggccgaggcc

SEQ ID NO: 3967141 - RNA, 21 nt, Human herpesvirus 4 (Epstein-Barr virus)
agccucugccacaaggccagc

SEQ ID NO: 3967142 - RNA, 13 nt, Human herpesvirus 4 (Epstein-Barr virus)
agcgaagaacacu

SEQ ID NO: 3967143 - RNA, 17 nt, Human herpesvirus 4 (Epstein-Barr virus)
agcuacacucugggguc

SEQ ID NO: 3967144 - RNA, 17 nt, Human herpesvirus 4 (Epstein-Barr virus)
agcucggccagcaggcc

SEQ ID NO: 3967145 - RNA, 18 nt, Human herpesvirus 4 (Epstein-Barr virus)
agcugacggugggcauga

SEQ ID NO: 3967146 - RNA, 18 nt, Human herpesvirus 4 (Epstein-Barr virus)
agcugccucccugccccu

SEQ ID NO: 3967147 - RNA, 22 nt, Human herpesvirus 4 (Epstein-Barr virus)
aggaaggggccucggccugggg

SEQ ID NO: 3967148 - RNA, 13 nt, Human herpesvirus 4 (Epstein-Barr virus)
aggacgaggaggc

SEQ ID NO: 3967149 - RNA, 18 nt, Human herpesvirus 4 (Epstein-Barr virus)
aggagacguguguggcug

SEQ ID NO: 3967150 - RNA, 21 nt, Human herpesvirus 4 (Epstein-Barr virus)
aggagaugauaaugaugagga

SEQ ID NO: 3967151 - RNA, 22 nt, Human herpesvirus 4 (Epstein-Barr virus)
aggagcaggagcgggaggggca

SEQ ID NO: 3967152 - RNA, 14 nt, Human herpesvirus 4 (Epstein-Barr virus)
aggaggcuggugcc

SEQ ID NO: 3967153 - RNA, 14 nt, Human herpesvirus 4 (Epstein-Barr virus)
aggagucugcugcg

SEQ ID NO: 3967154 - RNA, 14 nt, Human herpesvirus 4 (Epstein-Barr virus)
aggaguuuaaccug

SEQ ID NO: 3967155 - RNA, 12 nt, Human herpesvirus 4 (Epstein-Barr virus)
aggaucagaauc

SEQ ID NO: 3967156 - RNA, 21 nt, Human herpesvirus 4 (Epstein-Barr virus)
aggcacuggacacacauggca

SEQ ID NO: 3967157 - RNA, 16 nt, Human herpesvirus 4 (Epstein-Barr virus)
aggcagccccaaagcg

SEQ ID NO: 3967158 - RNA, 17 nt, Human herpesvirus 4 (Epstein-Barr virus)
aggcccaggaccuuggc

SEQ ID NO: 3967159 - RNA, 12 nt, Human herpesvirus 4 (Epstein-Barr virus)
aggcccccggcu

SEQ ID NO: 3967160 - RNA, 18 nt, Human herpesvirus 4 (Epstein-Barr virus)
aggcccccgggugggcug

SEQ ID NO: 3967161 - RNA, 23 nt, Human herpesvirus 4 (Epstein-Barr virus)
aggcccucgagccauuugaggaa

SEQ ID NO: 3967162 - RNA, 16 nt, Human herpesvirus 4 (Epstein-Barr virus)
aggccgcugccaggcc

SEQ ID NO: 3967163 - RNA, 15 nt, Human herpesvirus 4 (Epstein-Barr virus)
aggccgggaggccuu

SEQ ID NO: 3967164 - RNA, 22 nt, Human herpesvirus 4 (Epstein-Barr virus)
aggccggggcgauaccuugggc

SEQ ID NO: 3967165 - RNA, 15 nt, Human herpesvirus 4 (Epstein-Barr virus)
aggcucggcccuccg

SEQ ID NO: 3967166 - RNA, 21 nt, Human herpesvirus 4 (Epstein-Barr virus)
agggcccguuccaggcucucc

SEQ ID NO: 3967167 - RNA, 23 nt, Human herpesvirus 4 (Epstein-Barr virus)
aggggccagguacaggaccugga

SEQ ID NO: 3967168 - RNA, 23 nt, Human herpesvirus 4 (Epstein-Barr virus)
agggguccccgagggugaggccc

SEQ ID NO: 3967169 - RNA, 20 nt, Human herpesvirus 4 (Epstein-Barr virus)
aggugcagcuggcccaccua

SEQ ID NO: 3967170 - RNA, 14 nt, Human herpesvirus 4 (Epstein-Barr virus)
agguggcugcugcc

SEQ ID NO: 3967171 - RNA, 23 nt, Human herpesvirus 4 (Epstein-Barr virus)
aguaagaugcauacgcugaguga

SEQ ID NO: 3967172 - RNA, 16 nt, Human herpesvirus 4 (Epstein-Barr virus)
aguaagcauggggcuc

SEQ ID NO: 3967173 - RNA, 19 nt, Human herpesvirus 4 (Epstein-Barr virus)
aguaaggccgcugccaggc

SEQ ID NO: 3967174 - RNA, 16 nt, Human herpesvirus 4 (Epstein-Barr virus)
aguaggugccuccaga

SEQ ID NO: 3967175 - RNA, 21 nt, Human herpesvirus 4 (Epstein-Barr virus)
aguccucauggcaggagaggc

SEQ ID NO: 3967176 - RNA, 12 nt, Human herpesvirus 4 (Epstein-Barr virus)
agucgaagcucu

SEQ ID NO: 3967177 - RNA, 17 nt, Human herpesvirus 4 (Epstein-Barr virus)
agucuauacggccacaa

SEQ ID NO: 3967178 - RNA, 21 nt, Human herpesvirus 4 (Epstein-Barr virus)
agugcaacaaucuggacucuc

SEQ ID NO: 3967179 - RNA, 22 nt, Human herpesvirus 4 (Epstein-Barr virus)
agugggccucucuggcugugcu

SEQ ID NO: 3967180 - RNA, 19 nt, Human herpesvirus 4 (Epstein-Barr virus)
aguguccagagaggaagac

SEQ ID NO: 3967181 - RNA, 19 nt, Human herpesvirus 4 (Epstein-Barr virus)
auacucaucugugagacaa

SEQ ID NO: 3967182 - RNA, 14 nt, Human herpesvirus 4 (Epstein-Barr virus)
auauguacaaugag

SEQ ID NO: 3967183 - RNA, 16 nt, Human herpesvirus 4 (Epstein-Barr virus)
aucaccagagcccaga

SEQ ID NO: 3967184 - RNA, 17 nt, Human herpesvirus 4 (Epstein-Barr virus)
aucagaauuagcaucag

SEQ ID NO: 3967185 - RNA, 14 nt, Human herpesvirus 4 (Epstein-Barr virus)
auccccagcccagc

SEQ ID NO: 3967186 - RNA, 18 nt, Human herpesvirus 4 (Epstein-Barr virus)
auccugcguggcuggacg

SEQ ID NO: 3967187 - RNA, 22 nt, Human herpesvirus 4 (Epstein-Barr virus)
aucucccgcuagauggcgcccu

SEQ ID NO: 3967188 - RNA, 14 nt, Human herpesvirus 4 (Epstein-Barr virus)
aucucgcucagagc

SEQ ID NO: 3967189 - RNA, 16 nt, Human herpesvirus 4 (Epstein-Barr virus)
aucuguacgggaacau

SEQ ID NO: 3967190 - RNA, 16 nt, Human herpesvirus 4 (Epstein-Barr virus)
aucuuugacugacaca

SEQ ID NO: 3967191 - RNA, 19 nt, Human herpesvirus 4 (Epstein-Barr virus)
augagcgauuuuaucacag

SEQ ID NO: 3967192 - RNA, 22 nt, Human herpesvirus 4 (Epstein-Barr virus)
augagggacguaucugggcacu

SEQ ID NO: 3967193 - RNA, 18 nt, Human herpesvirus 4 (Epstein-Barr virus)
augccaaagcugaagaac

SEQ ID NO: 3967194 - RNA, 17 nt, Human herpesvirus 4 (Epstein-Barr virus)
augcucagggccacggc

SEQ ID NO: 3967195 - RNA, 22 nt, Human herpesvirus 4 (Epstein-Barr virus)
auggagaugugcgcccugcucu

SEQ ID NO: 3967196 - RNA, 20 nt, Human herpesvirus 4 (Epstein-Barr virus)
auggauugaguaagcauggg

SEQ ID NO: 3967197 - RNA, 11 nt, Human herpesvirus 4 (Epstein-Barr virus)
auggccaggcu

SEQ ID NO: 3967198 - RNA, 19 nt, Human herpesvirus 4 (Epstein-Barr virus)
augugcagggauugggcuu

SEQ ID NO: 3967199 - RNA, 23 nt, Human herpesvirus 4 (Epstein-Barr virus)
auucacugggacaacugucacac

SEQ ID NO: 3967200 - RNA, 17 nt, Human herpesvirus 4 (Epstein-Barr virus)
auucagccaccuccccu

SEQ ID NO: 3967201 - RNA, 23 nt, Human herpesvirus 4 (Epstein-Barr virus)
auuccuaggagaaggagccucgc

SEQ ID NO: 3967202 - RNA, 19 nt, Human herpesvirus 4 (Epstein-Barr virus)
auuguaucucggucuuggc

SEQ ID NO: 3967203 - RNA, 15 nt, Human herpesvirus 4 (Epstein-Barr virus)
caaaagggcucugac

SEQ ID NO: 3967204 - RNA, 12 nt, Human herpesvirus 4 (Epstein-Barr virus)
caaacacuacaa

SEQ ID NO: 3967205 - RNA, 21 nt, Human herpesvirus 4 (Epstein-Barr virus)
caaaggccuugguuucagccu

SEQ ID NO: 3967206 - RNA, 18 nt, Human herpesvirus 4 (Epstein-Barr virus)
caaccaauguaucccaaa

SEQ ID NO: 3967207 - RNA, 20 nt, Human herpesvirus 4 (Epstein-Barr virus)
caaccgccgugucagcugug

SEQ ID NO: 3967208 - RNA, 21 nt, Human herpesvirus 4 (Epstein-Barr virus)
caaccuuuccaucacugaccc

SEQ ID NO: 3967209 - RNA, 14 nt, Human herpesvirus 4 (Epstein-Barr virus)
caacgcauccacca

SEQ ID NO: 3967210 - RNA, 15 nt, Human herpesvirus 4 (Epstein-Barr virus)
caagcuccggcugcc

SEQ ID NO: 3967211 - RNA, 17 nt, Human herpesvirus 4 (Epstein-Barr virus)
caaggauggaagagagg

SEQ ID NO: 3967212 - RNA, 14 nt, Human herpesvirus 4 (Epstein-Barr virus)
caaggcaguagagg

SEQ ID NO: 3967213 - RNA, 15 nt, Human herpesvirus 4 (Epstein-Barr virus)
caaggugucaauaau

SEQ ID NO: 3967214 - RNA, 17 nt, Human herpesvirus 4 (Epstein-Barr virus)
caaguaccagcuggugg

SEQ ID NO: 3967215 - RNA, 13 nt, Human herpesvirus 4 (Epstein-Barr virus)
caauacccaggau

SEQ ID NO: 3967216 - RNA, 13 nt, Human herpesvirus 4 (Epstein-Barr virus)
caauauccaucug

SEQ ID NO: 3967217 - RNA, 17 nt, Human herpesvirus 4 (Epstein-Barr virus)
caaugccaacuccccca

SEQ ID NO: 3967218 - RNA, 14 nt, Human herpesvirus 4 (Epstein-Barr virus)
cacacgcucagcuc

SEQ ID NO: 3967219 - RNA, 15 nt, Human herpesvirus 4 (Epstein-Barr virus)
cacacucccuccaga

SEQ ID NO: 3967220 - RNA, 16 nt, Human herpesvirus 4 (Epstein-Barr virus)
cacacucccuccagaa

SEQ ID NO: 3967221 - RNA, 19 nt, Human herpesvirus 4 (Epstein-Barr virus)
cacagugaugaacaccacc

SEQ ID NO: 3967222 - RNA, 23 nt, Human herpesvirus 4 (Epstein-Barr virus)
agauggacuugaggugggcugac

SEQ ID NO: 3967223 - RNA, 17 nt, Human herpesvirus 4 (Epstein-Barr virus)
agauuggugugaaagga

SEQ ID NO: 3967224 - RNA, 12 nt, Human herpesvirus 4 (Epstein-Barr virus)
agcaccaacaca

SEQ ID NO: 3967225 - RNA, 15 nt, Human herpesvirus 4 (Epstein-Barr virus)
agcaccacccagccc

SEQ ID NO: 3967226 - RNA, 22 nt, Human herpesvirus 4 (Epstein-Barr virus)
agcacgguagccuugggggccu

SEQ ID NO: 3967227 - RNA, 10 nt, Human herpesvirus 4 (Epstein-Barr virus)
agcaggaggg

SEQ ID NO: 3967228 - RNA, 14 nt, Human herpesvirus 4 (Epstein-Barr virus)
agcauggcagccgg

SEQ ID NO: 3967229 - RNA, 15 nt, Human herpesvirus 4 (Epstein-Barr virus)
agccacguccagacu

SEQ ID NO: 3967230 - RNA, 17 nt, Human herpesvirus 4 (Epstein-Barr virus)
agccacuacggccacgu

SEQ ID NO: 3967231 - RNA, 16 nt, Human herpesvirus 4 (Epstein-Barr virus)
agccagcgcacccggg

SEQ ID NO: 3967232 - RNA, 19 nt, Human herpesvirus 4 (Epstein-Barr virus)
agcccccucccgccccugu

SEQ ID NO: 3967233 - RNA, 16 nt, Human herpesvirus 4 (Epstein-Barr virus)
agccccuccauaggcc

SEQ ID NO: 3967234 - RNA, 12 nt, Human herpesvirus 4 (Epstein-Barr virus)
agccguggccuu

SEQ ID NO: 3967235 - RNA, 19 nt, Human herpesvirus 4 (Epstein-Barr virus)
agccugcuccugagaaugc

SEQ ID NO: 3967236 - RNA, 14 nt, Human herpesvirus 4 (Epstein-Barr virus)
agcgcggcagaggc

SEQ ID NO: 3967237 - RNA, 17 nt, Human herpesvirus 4 (Epstein-Barr virus)
agcggcauccucaaggg

SEQ ID NO: 3967238 - RNA, 17 nt, Human herpesvirus 4 (Epstein-Barr virus)
agcggggagagggugga

SEQ ID NO: 3967239 - RNA, 14 nt, Human herpesvirus 4 (Epstein-Barr virus)
agcuccgcccucac

SEQ ID NO: 3967240 - RNA, 17 nt, Human herpesvirus 4 (Epstein-Barr virus)
agcuccgugggcccaga

SEQ ID NO: 3967241 - RNA, 14 nt, Human herpesvirus 4 (Epstein-Barr virus)
agcuggacgagguc

SEQ ID NO: 3967242 - RNA, 13 nt, Human herpesvirus 4 (Epstein-Barr virus)
agcuggccaggcu

SEQ ID NO: 3967243 - RNA, 18 nt, Human herpesvirus 4 (Epstein-Barr virus)
agcugugugcgcgccgcc

SEQ ID NO: 3967244 - RNA, 20 nt, Human herpesvirus 4 (Epstein-Barr virus)
aggaagcuggccaggcuggu

SEQ ID NO: 3967245 - RNA, 21 nt, Human herpesvirus 4 (Epstein-Barr virus)
aggaauuauuuaccacacccc

SEQ ID NO: 3967246 - RNA, 15 nt, Human herpesvirus 4 (Epstein-Barr virus)
aggaauucuuccaga

SEQ ID NO: 3967247 - RNA, 22 nt, Human herpesvirus 4 (Epstein-Barr virus)
aggaccggaucgaaggagagcu

SEQ ID NO: 3967248 - RNA, 22 nt, Human herpesvirus 4 (Epstein-Barr virus)
aggagcguguccccguggagga

SEQ ID NO: 3967249 - RNA, 15 nt, Human herpesvirus 4 (Epstein-Barr virus)
aggagcuugaggcca

SEQ ID NO: 3967250 - RNA, 17 nt, Human herpesvirus 4 (Epstein-Barr virus)
aggccagguagcccagc

SEQ ID NO: 3967251 - RNA, 16 nt, Human herpesvirus 4 (Epstein-Barr virus)
aggcccccggcuggcc

SEQ ID NO: 3967252 - RNA, 19 nt, Human herpesvirus 4 (Epstein-Barr virus)
aggcccccggcuggccgcc

SEQ ID NO: 3967253 - RNA, 10 nt, Human herpesvirus 4 (Epstein-Barr virus)
aggccgccgc

SEQ ID NO: 3967254 - RNA, 19 nt, Human herpesvirus 4 (Epstein-Barr virus)
aggccgcugccaggccgcc

SEQ ID NO: 3967255 - RNA, 19 nt, Human herpesvirus 4 (Epstein-Barr virus)
aggccucagcgucaggaga

SEQ ID NO: 3967256 - RNA, 16 nt, Human herpesvirus 4 (Epstein-Barr virus)
aggccucuggggucca

SEQ ID NO: 3967257 - RNA, 19 nt, Human herpesvirus 4 (Epstein-Barr virus)
aggcggaagaccaggagcc

SEQ ID NO: 3967258 - RNA, 16 nt, Human herpesvirus 4 (Epstein-Barr virus)
aggggcaggaggggca

SEQ ID NO: 3967259 - RNA, 19 nt, Human herpesvirus 4 (Epstein-Barr virus)
agggggcgcggcuggaugc

SEQ ID NO: 3967260 - RNA, 15 nt, Human herpesvirus 4 (Epstein-Barr virus)
agggugaggcccagc

SEQ ID NO: 3967261 - RNA, 15 nt, Human herpesvirus 4 (Epstein-Barr virus)
aggucgccggagguc

SEQ ID NO: 3967262 - RNA, 12 nt, Human herpesvirus 4 (Epstein-Barr virus)
agguggccacac

SEQ ID NO: 3967263 - RNA, 17 nt, Human herpesvirus 4 (Epstein-Barr virus)
aggugggcugacacaga

SEQ ID NO: 3967264 - RNA, 20 nt, Human herpesvirus 4 (Epstein-Barr virus)
agguuuagcuauuccaccaa

SEQ ID NO: 3967265 - RNA, 21 nt, Human herpesvirus 4 (Epstein-Barr virus)
agguuucugggcauaaauucu

SEQ ID NO: 3967266 - RNA, 16 nt, Human herpesvirus 4 (Epstein-Barr virus)
aguaaaagcagaacag

SEQ ID NO: 3967267 - RNA, 13 nt, Human herpesvirus 4 (Epstein-Barr virus)
cagcagcccggcc

SEQ ID NO: 3967268 - RNA, 20 nt, Human herpesvirus 4 (Epstein-Barr virus)
cagcagcccggccgaggccu

SEQ ID NO: 3967269 - RNA, 17 nt, Human herpesvirus 4 (Epstein-Barr virus)
cagcaggcucaggccgc

SEQ ID NO: 3967270 - RNA, 16 nt, Human herpesvirus 4 (Epstein-Barr virus)
cagcauggcagccggg

SEQ ID NO: 3967271 - RNA, 21 nt, Human herpesvirus 4 (Epstein-Barr virus)
cagcccccucccgccccuguc

SEQ ID NO: 3967272 - RNA, 21 nt, Human herpesvirus 4 (Epstein-Barr virus)
cagccccucaucccugacccu

SEQ ID NO: 3967273 - RNA, 22 nt, Human herpesvirus 4 (Epstein-Barr virus)
cagcccuuuuaacauuggcagc

SEQ ID NO: 3967274 - RNA, 17 nt, Human herpesvirus 4 (Epstein-Barr virus)
cagcgccguccacggcc

SEQ ID NO: 3967275 - RNA, 18 nt, Human herpesvirus 4 (Epstein-Barr virus)
cagcucaaccgccagggc

SEQ ID NO: 3967276 - RNA, 21 nt, Human herpesvirus 4 (Epstein-Barr virus)
cagcucgcccacacagcgcca

SEQ ID NO: 3967277 - RNA, 16 nt, Human herpesvirus 4 (Epstein-Barr virus)
cagcucggccagcagg

SEQ ID NO: 3967278 - RNA, 21 nt, Human herpesvirus 4 (Epstein-Barr virus)
cagcucggccagcaggccggc

SEQ ID NO: 3967279 - RNA, 24 nt, Human herpesvirus 4 (Epstein-Barr virus)
cagcuucugaggcggcuguggccu

SEQ ID NO: 3967280 - RNA, 15 nt, Human herpesvirus 4 (Epstein-Barr virus)
cagcuuggggccacc

SEQ ID NO: 3967281 - RNA, 16 nt, Human herpesvirus 4 (Epstein-Barr virus)
caggcacggccgggcu

SEQ ID NO: 3967282 - RNA, 17 nt, Human herpesvirus 4 (Epstein-Barr virus)
caggcagaggaaggcca

SEQ ID NO: 3967283 - RNA, 15 nt, Human herpesvirus 4 (Epstein-Barr virus)
caggccuuagcccag

SEQ ID NO: 3967284 - RNA, 13 nt, Human herpesvirus 4 (Epstein-Barr virus)
caggcucuccagc

SEQ ID NO: 3967285 - RNA, 17 nt, Human herpesvirus 4 (Epstein-Barr virus)
cagggcccuggucaggg

SEQ ID NO: 3967286 - RNA, 15 nt, Human herpesvirus 4 (Epstein-Barr virus)
cagggcucuguucac

SEQ ID NO: 3967287 - RNA, 18 nt, Human herpesvirus 4 (Epstein-Barr virus)
caggggcgccgaaagcag

SEQ ID NO: 3967288 - RNA, 22 nt, Human herpesvirus 4 (Epstein-Barr virus)
cagggggcagucugagaaccug

SEQ ID NO: 3967289 - RNA, 17 nt, Human herpesvirus 4 (Epstein-Barr virus)
caggugcccgagccccg

SEQ ID NO: 3967290 - RNA, 19 nt, Human herpesvirus 4 (Epstein-Barr virus)
cagucaccuuccagacuau

SEQ ID NO: 3967291 - RNA, 23 nt, Human herpesvirus 4 (Epstein-Barr virus)
caguccgccaugaccagcagcag

SEQ ID NO: 3967292 - RNA, 20 nt, Human herpesvirus 4 (Epstein-Barr virus)
cagucuauccaggaggagga

SEQ ID NO: 3967293 - RNA, 18 nt, Human herpesvirus 4 (Epstein-Barr virus)
caguggccagcucauaug

SEQ ID NO: 3967294 - RNA, 19 nt, Human herpesvirus 4 (Epstein-Barr virus)
caguggccgucuggcaggg

SEQ ID NO: 3967295 - RNA, 16 nt, Human herpesvirus 4 (Epstein-Barr virus)
cagugggccucucugg

SEQ ID NO: 3967296 - RNA, 22 nt, Human herpesvirus 4 (Epstein-Barr virus)
cagugggccucucuggcugugc

SEQ ID NO: 3967297 - RNA, 16 nt, Human herpesvirus 4 (Epstein-Barr virus)
cauaccuacaccaccc

SEQ ID NO: 3967298 - RNA, 22 nt, Human herpesvirus 4 (Epstein-Barr virus)
cauacucaagagaucagcaacc

SEQ ID NO: 3967299 - RNA, 19 nt, Human herpesvirus 4 (Epstein-Barr virus)
caucaugcgugaccaccug

SEQ ID NO: 3967300 - RNA, 14 nt, Human herpesvirus 4 (Epstein-Barr virus)
caucauuagcccag

SEQ ID NO: 3967301 - RNA, 20 nt, Human herpesvirus 4 (Epstein-Barr virus)
caucucugauuauagcucug

SEQ ID NO: 3967302 - RNA, 14 nt, Human herpesvirus 4 (Epstein-Barr virus)
caucuggcucuccu

SEQ ID NO: 3967303 - RNA, 22 nt, Human herpesvirus 4 (Epstein-Barr virus)
caugacgcugcugcuacuggcu

SEQ ID NO: 3967304 - RNA, 23 nt, Human herpesvirus 4 (Epstein-Barr virus)
cauggugagacaccuggcccacu

SEQ ID NO: 3967305 - RNA, 18 nt, Human herpesvirus 4 (Epstein-Barr virus)
caugugcauggccugggc

SEQ ID NO: 3967306 - RNA, 15 nt, Human herpesvirus 4 (Epstein-Barr virus)
cauuccuaggagaag

SEQ ID NO: 3967307 - RNA, 19 nt, Human herpesvirus 4 (Epstein-Barr virus)
cauuuacguucuggugaug

SEQ ID NO: 3967308 - RNA, 15 nt, Human herpesvirus 4 (Epstein-Barr virus)
cauuucaguggcccu

SEQ ID NO: 3967309 - RNA, 21 nt, Human herpesvirus 4 (Epstein-Barr virus)
cauuuuuggugcugccugggg

SEQ ID NO: 3967310 - RNA, 20 nt, Human herpesvirus 4 (Epstein-Barr virus)
ccaaguugcauuggcugcaa

SEQ ID NO: 3967311 - RNA, 22 nt, Human herpesvirus 4 (Epstein-Barr virus)
ccaauguaucccaaauaaaugu

SEQ ID NO: 3967312 - RNA, 20 nt, Human herpesvirus 4 (Epstein-Barr virus)
ccacagagcaucagaugaga

SEQ ID NO: 3967313 - RNA, 21 nt, Human herpesvirus 4 (Epstein-Barr virus)
ccacagccccacucuugccuc

SEQ ID NO: 3967314 - RNA, 18 nt, Human herpesvirus 4 (Epstein-Barr virus)
ccaccacggugcagccua

SEQ ID NO: 3967315 - RNA, 14 nt, Human herpesvirus 4 (Epstein-Barr virus)
ccaccacucccacc

SEQ ID NO: 3967316 - RNA, 16 nt, Human herpesvirus 4 (Epstein-Barr virus)
ccaccuccccuguggc

SEQ ID NO: 3967317 - RNA, 12 nt, Human herpesvirus 4 (Epstein-Barr virus)
ccaccuggccac

SEQ ID NO: 3967318 - RNA, 19 nt, Human herpesvirus 4 (Epstein-Barr virus)
ccacggccguagcccaguc

SEQ ID NO: 3967319 - RNA, 22 nt, Human herpesvirus 4 (Epstein-Barr virus)
ccacggcgaccuguuccgcuuc

SEQ ID NO: 3967320 - RNA, 15 nt, Human herpesvirus 4 (Epstein-Barr virus)
ccacucuugccucgg

SEQ ID NO: 3967321 - RNA, 18 nt, Human herpesvirus 4 (Epstein-Barr virus)
ccacuuacaaccaagcca

SEQ ID NO: 3967322 - RNA, 13 nt, Human herpesvirus 4 (Epstein-Barr virus)
ccagcccuccuca

SEQ ID NO: 3967323 - RNA, 15 nt, Human herpesvirus 4 (Epstein-Barr virus)
ccaggagucugcugc

SEQ ID NO: 3967324 - RNA, 16 nt, Human herpesvirus 4 (Epstein-Barr virus)
ccaggcauacagcagc

SEQ ID NO: 3967325 - RNA, 13 nt, Human herpesvirus 4 (Epstein-Barr virus)
ccaggcuggugac

SEQ ID NO: 3967326 - RNA, 23 nt, Human herpesvirus 4 (Epstein-Barr virus)
ccaguguacugcgaugagggccu

SEQ ID NO: 3967327 - RNA, 14 nt, Human herpesvirus 4 (Epstein-Barr virus)
ccaucugcuucugg

SEQ ID NO: 3967328 - RNA, 17 nt, Human herpesvirus 4 (Epstein-Barr virus)
ccaucugcuucuggcuc

SEQ ID NO: 3967329 - RNA, 17 nt, Human herpesvirus 4 (Epstein-Barr virus)
ccaugacaucacagagg

SEQ ID NO: 3967330 - RNA, 19 nt, Human herpesvirus 4 (Epstein-Barr virus)
ccaugacgcugcugcuacu

SEQ ID NO: 3967331 - RNA, 14 nt, Human herpesvirus 4 (Epstein-Barr virus)
ccaugagugccaug

SEQ ID NO: 3967332 - RNA, 11 nt, Human herpesvirus 4 (Epstein-Barr virus)
ccauggccagg

SEQ ID NO: 3967333 - RNA, 18 nt, Human herpesvirus 4 (Epstein-Barr virus)
ccauggugccaagcucag

SEQ ID NO: 3967334 - RNA, 19 nt, Human herpesvirus 4 (Epstein-Barr virus)
cccaaaaguagaggcucag

SEQ ID NO: 3967335 - RNA, 21 nt, Human herpesvirus 4 (Epstein-Barr virus)
cccaccacccccaccaccucc

SEQ ID NO: 3967336 - RNA, 18 nt, Human herpesvirus 4 (Epstein-Barr virus)
cccaccaccccccccacc

SEQ ID NO: 3967337 - RNA, 18 nt, Human herpesvirus 4 (Epstein-Barr virus)
cccacuuuuaccccaguc

SEQ ID NO: 3967338 - RNA, 19 nt, Human herpesvirus 4 (Epstein-Barr virus)
cccagagggcgaaugggcu

SEQ ID NO: 3967339 - RNA, 23 nt, Human herpesvirus 4 (Epstein-Barr virus)
cccagagggcgaaugggcugcag

SEQ ID NO: 3967340 - RNA, 13 nt, Human herpesvirus 4 (Epstein-Barr virus)
cccagccacagca

SEQ ID NO: 3967341 - RNA, 22 nt, Human herpesvirus 4 (Epstein-Barr virus)
cccagcccccucucgcccaagc

SEQ ID NO: 3967342 - RNA, 18 nt, Human herpesvirus 4 (Epstein-Barr virus)
cccagcccuuaacacacc

SEQ ID NO: 3967343 - RNA, 18 nt, Human herpesvirus 4 (Epstein-Barr virus)
cccagccuacucuccacu

SEQ ID NO: 3967344 - RNA, 15 nt, Human herpesvirus 4 (Epstein-Barr virus)
cccaggggucucuag

SEQ ID NO: 3967345 - RNA, 18 nt, Human herpesvirus 4 (Epstein-Barr virus)
cccaucugagggcaguga

SEQ ID NO: 3967346 - RNA, 18 nt, Human herpesvirus 4 (Epstein-Barr virus)
ccccacacucccuccaga

SEQ ID NO: 3967347 - RNA, 13 nt, Human herpesvirus 4 (Epstein-Barr virus)
ccccagaagcccc

SEQ ID NO: 3967348 - RNA, 16 nt, Human herpesvirus 4 (Epstein-Barr virus)
ccccauagacucccau

SEQ ID NO: 3967349 - RNA, 17 nt, Human herpesvirus 4 (Epstein-Barr virus)
cccccuggcggcccagc

SEQ ID NO: 3967350 - RNA, 15 nt, Human herpesvirus 4 (Epstein-Barr virus)
ccccgcaccagggcc

SEQ ID NO: 3967351 - RNA, 15 nt, Human herpesvirus 4 (Epstein-Barr virus)
ccccggcucucaggc

SEQ ID NO: 3967352 - RNA, 14 nt, Human herpesvirus 4 (Epstein-Barr virus)
ccccuaccucggca

SEQ ID NO: 3967353 - RNA, 12 nt, Human herpesvirus 4 (Epstein-Barr virus)
ccccuggccacc

SEQ ID NO: 3967354 - RNA, 13 nt, Human herpesvirus 4 (Epstein-Barr virus)
ccccugugcuucu

SEQ ID NO: 3967355 - RNA, 15 nt, Human herpesvirus 4 (Epstein-Barr virus)
gccugacugacucuc

SEQ ID NO: 3967356 - RNA, 13 nt, Human herpesvirus 4 (Epstein-Barr virus)
gccugagagccgg

SEQ ID NO: 3967357 - RNA, 17 nt, Human herpesvirus 4 (Epstein-Barr virus)
gccugcggacucaggcc

SEQ ID NO: 3967358 - RNA, 18 nt, Human herpesvirus 4 (Epstein-Barr virus)
gccuggauguugacucca

SEQ ID NO: 3967359 - RNA, 22 nt, Human herpesvirus 4 (Epstein-Barr virus)
gccuggcucaaacgcugcuugg

SEQ ID NO: 3967360 - RNA, 11 nt, Human herpesvirus 4 (Epstein-Barr virus)
gccuggggcuc

SEQ ID NO: 3967361 - RNA, 20 nt, Human herpesvirus 4 (Epstein-Barr virus)
gcgaagggugggggugggug

SEQ ID NO: 3967362 - RNA, 21 nt, Human herpesvirus 4 (Epstein-Barr virus)
gcgacggcuuuagccuggccu

SEQ ID NO: 3967363 - RNA, 23 nt, Human herpesvirus 4 (Epstein-Barr virus)
gcgagcuccgugggcccagagug

SEQ ID NO: 3967364 - RNA, 13 nt, Human herpesvirus 4 (Epstein-Barr virus)
gcgccccagggca

SEQ ID NO: 3967365 - RNA, 13 nt, Human herpesvirus 4 (Epstein-Barr virus)
gcgcuguguggcu

SEQ ID NO: 3967366 - RNA, 22 nt, Human herpesvirus 4 (Epstein-Barr virus)
gcggcccagcagauccagggcc

SEQ ID NO: 3967367 - RNA, 22 nt, Human herpesvirus 4 (Epstein-Barr virus)
gcgggaguauggggccagaggc

SEQ ID NO: 3967368 - RNA, 23 nt, Human herpesvirus 4 (Epstein-Barr virus)
gcuacacucuggggucucaggcc

SEQ ID NO: 3967369 - RNA, 19 nt, Human herpesvirus 4 (Epstein-Barr virus)
gcuagaagugcugggaggu

SEQ ID NO: 3967370 - RNA, 21 nt, Human herpesvirus 4 (Epstein-Barr virus)
gcuagucacacccguggaggu

SEQ ID NO: 3967371 - RNA, 16 nt, Human herpesvirus 4 (Epstein-Barr virus)
gcuauagugagccagg

SEQ ID NO: 3967372 - RNA, 14 nt, Human herpesvirus 4 (Epstein-Barr virus)
gcucaaggaggggc

SEQ ID NO: 3967373 - RNA, 18 nt, Human herpesvirus 4 (Epstein-Barr virus)
gcucagcucaaccgccag

SEQ ID NO: 3967374 - RNA, 16 nt, Human herpesvirus 4 (Epstein-Barr virus)
gcucagugcggugcua

SEQ ID NO: 3967375 - RNA, 22 nt, Human herpesvirus 4 (Epstein-Barr virus)
gcuccagugccuccgccugagc

SEQ ID NO: 3967376 - RNA, 17 nt, Human herpesvirus 4 (Epstein-Barr virus)
gcuccgagagcuccgcc

SEQ ID NO: 3967377 - RNA, 17 nt, Human herpesvirus 4 (Epstein-Barr virus)
gcuccgugguccugagg

SEQ ID NO: 3967378 - RNA, 13 nt, Human herpesvirus 4 (Epstein-Barr virus)
gcuccuggaucug

SEQ ID NO: 3967379 - RNA, 17 nt, Human herpesvirus 4 (Epstein-Barr virus)
gcucggccagcaggccg

SEQ ID NO: 3967380 - RNA, 14 nt, Human herpesvirus 4 (Epstein-Barr virus)
gcugagugcccagg

SEQ ID NO: 3967381 - RNA, 20 nt, Human herpesvirus 4 (Epstein-Barr virus)
gcugcuggucauggcggacu

SEQ ID NO: 3967382 - RNA, 13 nt, Human herpesvirus 4 (Epstein-Barr virus)
gcuggccaggcug

SEQ ID NO: 3967383 - RNA, 17 nt, Human herpesvirus 4 (Epstein-Barr virus)
gcuggcucgccucaucc

SEQ ID NO: 3967384 - RNA, 14 nt, Human herpesvirus 4 (Epstein-Barr virus)
gcugguuggggcug

SEQ ID NO: 3967385 - RNA, 14 nt, Human herpesvirus 4 (Epstein-Barr virus)
gcuguaacuguggu

SEQ ID NO: 3967386 - RNA, 16 nt, Human herpesvirus 4 (Epstein-Barr virus)
gcuugugcuccugaua

SEQ ID NO: 3967387 - RNA, 17 nt, Human herpesvirus 4 (Epstein-Barr virus)
gcuuucguccucuggcu

SEQ ID NO: 3967388 - RNA, 16 nt, Human herpesvirus 4 (Epstein-Barr virus)
gcuuuugucugccugg

SEQ ID NO: 3967389 - RNA, 14 nt, Human herpesvirus 4 (Epstein-Barr virus)
ggaaacggcgagca

SEQ ID NO: 3967390 - RNA, 17 nt, Human herpesvirus 4 (Epstein-Barr virus)
ggaaaugagggaauuug

SEQ ID NO: 3967391 - RNA, 22 nt, Human herpesvirus 4 (Epstein-Barr virus)
ggaacaugagaaaauacuucuc

SEQ ID NO: 3967392 - RNA, 13 nt, Human herpesvirus 4 (Epstein-Barr virus)
ggaacauuugagg

SEQ ID NO: 3967393 - RNA, 22 nt, Human herpesvirus 4 (Epstein-Barr virus)
ggaagucuuuuauaaggcuccg

SEQ ID NO: 3967394 - RNA, 23 nt, Human herpesvirus 4 (Epstein-Barr virus)
ggaaugacgggcucccucccccu

SEQ ID NO: 3967395 - RNA, 14 nt, Human herpesvirus 4 (Epstein-Barr virus)
ggaaugccuuagcu

SEQ ID NO: 3967396 - RNA, 13 nt, Human herpesvirus 4 (Epstein-Barr virus)
ggacaagacaguc

SEQ ID NO: 3967397 - RNA, 18 nt, Human herpesvirus 4 (Epstein-Barr virus)
ggacacugccaagguuga

SEQ ID NO: 3967398 - RNA, 23 nt, Human herpesvirus 4 (Epstein-Barr virus)
ggaccagaaggcuccggcggcag

SEQ ID NO: 3967399 - RNA, 16 nt, Human herpesvirus 4 (Epstein-Barr virus)
ggacccuauggagggc

SEQ ID NO: 3967400 - RNA, 18 nt, Human herpesvirus 4 (Epstein-Barr virus)
ggagaugaccuccuacac

SEQ ID NO: 3967401 - RNA, 16 nt, Human herpesvirus 4 (Epstein-Barr virus)
ggagcaggagcaggag

SEQ ID NO: 3967402 - RNA, 12 nt, Human herpesvirus 4 (Epstein-Barr virus)
ggagcaggagga

SEQ ID NO: 3967403 - RNA, 21 nt, Human herpesvirus 4 (Epstein-Barr virus)
ggagcuccgagagcuccgcca

SEQ ID NO: 3967404 - RNA, 18 nt, Human herpesvirus 4 (Epstein-Barr virus)
ggaggaggacgugaguga

SEQ ID NO: 3967405 - RNA, 20 nt, Human herpesvirus 4 (Epstein-Barr virus)
ggaggcacacaaaaugagga

SEQ ID NO: 3967406 - RNA, 13 nt, Human herpesvirus 4 (Epstein-Barr virus)
ggaggccccggcc

SEQ ID NO: 3967407 - RNA, 18 nt, Human herpesvirus 4 (Epstein-Barr virus)
ggaugcaucuaaggucca

SEQ ID NO: 3967408 - RNA, 18 nt, Human herpesvirus 4 (Epstein-Barr virus)
ggauugcugaacuggggc

SEQ ID NO: 3967409 - RNA, 14 nt, Human herpesvirus 4 (Epstein-Barr virus)
ggcagacacccacg

SEQ ID NO: 3967410 - RNA, 14 nt, Human herpesvirus 4 (Epstein-Barr virus)
ggcagcagcucugg

SEQ ID NO: 3967411 - RNA, 22 nt, Human herpesvirus 4 (Epstein-Barr virus)
ggcaucguuugugauucccaga

SEQ ID NO: 3967412 - RNA, 20 nt, Human herpesvirus 4 (Epstein-Barr virus)
ggccaccggggaggccaggu

SEQ ID NO: 3967413 - RNA, 23 nt, Human herpesvirus 4 (Epstein-Barr virus)
ggccacgcugggaguccggcccu

SEQ ID NO: 3967414 - RNA, 17 nt, Human herpesvirus 4 (Epstein-Barr virus)
ggccaggcaccccaucu

SEQ ID NO: 3967415 - RNA, 18 nt, Human herpesvirus 4 (Epstein-Barr virus)
ggccauucgacaggccau

SEQ ID NO: 3967416 - RNA, 20 nt, Human herpesvirus 4 (Epstein-Barr virus)
ggcccacgccauaccugcac

SEQ ID NO: 3967417 - RNA, 19 nt, Human herpesvirus 4 (Epstein-Barr virus)
ggcccacgucuuuaccacc

SEQ ID NO: 3967418 - RNA, 17 nt, Human herpesvirus 4 (Epstein-Barr virus)
ggcccuuugccuggggc

SEQ ID NO: 3967419 - RNA, 14 nt, Human herpesvirus 4 (Epstein-Barr virus)
ggccgacgaggccc

SEQ ID NO: 3967420 - RNA, 15 nt, Human herpesvirus 4 (Epstein-Barr virus)
ggccucgguggcagu

SEQ ID NO: 3967421 - RNA, 23 nt, Human herpesvirus 4 (Epstein-Barr virus)
ggccugcuggccgagcuggaggc

SEQ ID NO: 3967422 - RNA, 22 nt, Human herpesvirus 4 (Epstein-Barr virus)
ggcgcccugcgaguccaagcug

SEQ ID NO: 3967423 - RNA, 13 nt, Human herpesvirus 4 (Epstein-Barr virus)
ggcgcgggagccg

SEQ ID NO: 3967424 - RNA, 21 nt, Human herpesvirus 4 (Epstein-Barr virus)
ggcggccucggaggugcccgg

SEQ ID NO: 3967425 - RNA, 21 nt, Human herpesvirus 4 (Epstein-Barr virus)
ggcgguuagggaggacacugc

SEQ ID NO: 3967426 - RNA, 15 nt, Human herpesvirus 4 (Epstein-Barr virus)
ggcguacaccuggcu

SEQ ID NO: 3967427 - RNA, 21 nt, Human herpesvirus 4 (Epstein-Barr virus)
ggcgucgggaaacacagcucu

SEQ ID NO: 3967428 - RNA, 13 nt, Human herpesvirus 4 (Epstein-Barr virus)
ggcguggguguca

SEQ ID NO: 3967429 - RNA, 16 nt, Human herpesvirus 4 (Epstein-Barr virus)
ggcucaggccaugcgc

SEQ ID NO: 3967430 - RNA, 16 nt, Human herpesvirus 4 (Epstein-Barr virus)
ggcuccccauagacuc

SEQ ID NO: 3967431 - RNA, 14 nt, Human herpesvirus 4 (Epstein-Barr virus)
ggcucccucccccu

SEQ ID NO: 3967432 - RNA, 19 nt, Human herpesvirus 4 (Epstein-Barr virus)
ggcuggaugcccucaugcg

SEQ ID NO: 3967433 - RNA, 22 nt, Human herpesvirus 4 (Epstein-Barr virus)
ggcugggugggagagcgcggcc

SEQ ID NO: 3967434 - RNA, 12 nt, Human herpesvirus 4 (Epstein-Barr virus)
ggcuuucguccu

SEQ ID NO: 3967435 - RNA, 14 nt, Human herpesvirus 4 (Epstein-Barr virus)
gggacauccccaga

SEQ ID NO: 3967436 - RNA, 17 nt, Human herpesvirus 4 (Epstein-Barr virus)
gggagccacggcgucaa

SEQ ID NO: 3967437 - RNA, 21 nt, Human herpesvirus 4 (Epstein-Barr virus)
gggcaggcccccagcuucuga

SEQ ID NO: 3967438 - RNA, 22 nt, Human herpesvirus 4 (Epstein-Barr virus)
gggcccuuagcaugggaggcgc

SEQ ID NO: 3967439 - RNA, 23 nt, Human herpesvirus 4 (Epstein-Barr virus)
gggccuagguacucuuggugcag

SEQ ID NO: 3967440 - RNA, 19 nt, Human herpesvirus 4 (Epstein-Barr virus)
gggccuggugccagacucu

SEQ ID NO: 3967441 - RNA, 18 nt, Human herpesvirus 4 (Epstein-Barr virus)
gggcgcccccaaacuuug

SEQ ID NO: 3967442 - RNA, 16 nt, Human herpesvirus 4 (Epstein-Barr virus)
gggcucccucccccuc

SEQ ID NO: 3967443 - RNA, 19 nt, Human herpesvirus 4 (Epstein-Barr virus)
aguacaggauuauugccaa

SEQ ID NO: 3967444 - RNA, 22 nt, Human herpesvirus 4 (Epstein-Barr virus)
aguagcacuggugguggaggag

SEQ ID NO: 3967445 - RNA, 15 nt, Human herpesvirus 4 (Epstein-Barr virus)
aguauuuugcaaaca

SEQ ID NO: 3967446 - RNA, 18 nt, Human herpesvirus 4 (Epstein-Barr virus)
aguccggagacugaggcc

SEQ ID NO: 3967447 - RNA, 20 nt, Human herpesvirus 4 (Epstein-Barr virus)
agugacacugaugagucuga

SEQ ID NO: 3967448 - RNA, 15 nt, Human herpesvirus 4 (Epstein-Barr virus)
aguggacaaggcagu

SEQ ID NO: 3967449 - RNA, 13 nt, Human herpesvirus 4 (Epstein-Barr virus)
aguggcugccccg

SEQ ID NO: 3967450 - RNA, 18 nt, Human herpesvirus 4 (Epstein-Barr virus)
agugggcuucgggggccu

SEQ ID NO: 3967451 - RNA, 15 nt, Human herpesvirus 4 (Epstein-Barr virus)
agugggugggcauug

SEQ ID NO: 3967452 - RNA, 21 nt, Human herpesvirus 4 (Epstein-Barr virus)
agugguuguauguucagagcu

SEQ ID NO: 3967453 - RNA, 13 nt, Human herpesvirus 4 (Epstein-Barr virus)
aguucccuucucc

SEQ ID NO: 3967454 - RNA, 18 nt, Human herpesvirus 4 (Epstein-Barr virus)
aguugggguccucaagga

SEQ ID NO: 3967455 - RNA, 20 nt, Human herpesvirus 4 (Epstein-Barr virus)
aguuguccugggcugccccg

SEQ ID NO: 3967456 - RNA, 14 nt, Human herpesvirus 4 (Epstein-Barr virus)
aguuuacuuucaag

SEQ ID NO: 3967457 - RNA, 15 nt, Human herpesvirus 4 (Epstein-Barr virus)
auaaaccuuaaaagu

SEQ ID NO: 3967458 - RNA, 16 nt, Human herpesvirus 4 (Epstein-Barr virus)
auaacugccagagcug

SEQ ID NO: 3967459 - RNA, 17 nt, Human herpesvirus 4 (Epstein-Barr virus)
auacaugucucagaggc

SEQ ID NO: 3967460 - RNA, 18 nt, Human herpesvirus 4 (Epstein-Barr virus)
auacccagagcaaaagca

SEQ ID NO: 3967461 - RNA, 15 nt, Human herpesvirus 4 (Epstein-Barr virus)
auaccgagauguaca

SEQ ID NO: 3967462 - RNA, 23 nt, Human herpesvirus 4 (Epstein-Barr virus)
auagauccugggccccccggagg

SEQ ID NO: 3967463 - RNA, 14 nt, Human herpesvirus 4 (Epstein-Barr virus)
auagccggccaggc

SEQ ID NO: 3967464 - RNA, 21 nt, Human herpesvirus 4 (Epstein-Barr virus)
auauggcuauacacaggagcc

SEQ ID NO: 3967465 - RNA, 14 nt, Human herpesvirus 4 (Epstein-Barr virus)
aucaccccgagucc

SEQ ID NO: 3967466 - RNA, 21 nt, Human herpesvirus 4 (Epstein-Barr virus)
aucaccuggguacccaaacca

SEQ ID NO: 3967467 - RNA, 16 nt, Human herpesvirus 4 (Epstein-Barr virus)
aucagacggggaggug

SEQ ID NO: 3967468 - RNA, 22 nt, Human herpesvirus 4 (Epstein-Barr virus)
auccaucaacuucagcuccagg

SEQ ID NO: 3967469 - RNA, 15 nt, Human herpesvirus 4 (Epstein-Barr virus)
aucccaaauaaaugu

SEQ ID NO: 3967470 - RNA, 17 nt, Human herpesvirus 4 (Epstein-Barr virus)
auccgccaggaccugga

SEQ ID NO: 3967471 - RNA, 15 nt, Human herpesvirus 4 (Epstein-Barr virus)
aucgaaggagagcug

SEQ ID NO: 3967472 - RNA, 15 nt, Human herpesvirus 4 (Epstein-Barr virus)
aucucccgcgccgca

SEQ ID NO: 3967473 - RNA, 22 nt, Human herpesvirus 4 (Epstein-Barr virus)
aucucugauuauagcucuggca

SEQ ID NO: 3967474 - RNA, 13 nt, Human herpesvirus 4 (Epstein-Barr virus)
aucuggcucuccu

SEQ ID NO: 3967475 - RNA, 19 nt, Human herpesvirus 4 (Epstein-Barr virus)
aucugggaguguagaggug

SEQ ID NO: 3967476 - RNA, 15 nt, Human herpesvirus 4 (Epstein-Barr virus)
augaacccuggggca

SEQ ID NO: 3967477 - RNA, 12 nt, Human herpesvirus 4 (Epstein-Barr virus)
augacucaucuc

SEQ ID NO: 3967478 - RNA, 22 nt, Human herpesvirus 4 (Epstein-Barr virus)
augcaacaauagaaguggaaac

SEQ ID NO: 3967479 - RNA, 20 nt, Human herpesvirus 4 (Epstein-Barr virus)
auggauagauagccacccgc

SEQ ID NO: 3967480 - RNA, 21 nt, Human herpesvirus 4 (Epstein-Barr virus)
augguguuaacuuucuccccu

SEQ ID NO: 3967481 - RNA, 14 nt, Human herpesvirus 4 (Epstein-Barr virus)
auguccuguggugu

SEQ ID NO: 3967482 - RNA, 13 nt, Human herpesvirus 4 (Epstein-Barr virus)
auguuacuucuuu

SEQ ID NO: 3967483 - RNA, 16 nt, Human herpesvirus 4 (Epstein-Barr virus)
auguuuucuggacaca

SEQ ID NO: 3967484 - RNA, 13 nt, Human herpesvirus 4 (Epstein-Barr virus)
auuauugauguga

SEQ ID NO: 3967485 - RNA, 18 nt, Human herpesvirus 4 (Epstein-Barr virus)
auugcuggccgcagcugg

SEQ ID NO: 3967486 - RNA, 20 nt, Human herpesvirus 4 (Epstein-Barr virus)
auuggucgucuucuuccccu

SEQ ID NO: 3967487 - RNA, 16 nt, Human herpesvirus 4 (Epstein-Barr virus)
auuuuauuuacagcca

SEQ ID NO: 3967488 - RNA, 23 nt, Human herpesvirus 4 (Epstein-Barr virus)
auuuucugcgugagaugaacacc

SEQ ID NO: 3967489 - RNA, 15 nt, Human herpesvirus 4 (Epstein-Barr virus)
caaacacgggccugg

SEQ ID NO: 3967490 - RNA, 16 nt, Human herpesvirus 4 (Epstein-Barr virus)
caaacagcagcagcag

SEQ ID NO: 3967491 - RNA, 20 nt, Human herpesvirus 4 (Epstein-Barr virus)
caaacucucucaucuccaaa

SEQ ID NO: 3967492 - RNA, 15 nt, Human herpesvirus 4 (Epstein-Barr virus)
caaagucaagggaaa

SEQ ID NO: 3967493 - RNA, 12 nt, Human herpesvirus 4 (Epstein-Barr virus)
caaauaaauguu

SEQ ID NO: 3967494 - RNA, 14 nt, Human herpesvirus 4 (Epstein-Barr virus)
caacacgaccaccu

SEQ ID NO: 3967495 - RNA, 19 nt, Human herpesvirus 4 (Epstein-Barr virus)
caacccuaacacucuuuuu

SEQ ID NO: 3967496 - RNA, 15 nt, Human herpesvirus 4 (Epstein-Barr virus)
caacugucacaccag

SEQ ID NO: 3967497 - RNA, 15 nt, Human herpesvirus 4 (Epstein-Barr virus)
caagauggagaggca

SEQ ID NO: 3967498 - RNA, 16 nt, Human herpesvirus 4 (Epstein-Barr virus)
caagauuguuccaggu

SEQ ID NO: 3967499 - RNA, 21 nt, Human herpesvirus 4 (Epstein-Barr virus)
caagcagcaccugucccuggg

SEQ ID NO: 3967500 - RNA, 21 nt, Human herpesvirus 4 (Epstein-Barr virus)
caaggacgggggugggcaccu

SEQ ID NO: 3967501 - RNA, 15 nt, Human herpesvirus 4 (Epstein-Barr virus)
caagguugaagagca

SEQ ID NO: 3967502 - RNA, 20 nt, Human herpesvirus 4 (Epstein-Barr virus)
caagugauuaggagcagggc

SEQ ID NO: 3967503 - RNA, 19 nt, Human herpesvirus 4 (Epstein-Barr virus)
caauaaaguugaugauauu

SEQ ID NO: 3967504 - RNA, 23 nt, Human herpesvirus 4 (Epstein-Barr virus)
caauguaucccaaauaaauguua

SEQ ID NO: 3967505 - RNA, 19 nt, Human herpesvirus 4 (Epstein-Barr virus)
cacaaccuuggacccugcu

SEQ ID NO: 3967506 - RNA, 15 nt, Human herpesvirus 4 (Epstein-Barr virus)
cacagccugcaccag

SEQ ID NO: 3967507 - RNA, 12 nt, Human herpesvirus 4 (Epstein-Barr virus)
cacagcugcugg

SEQ ID NO: 3967508 - RNA, 23 nt, Human herpesvirus 4 (Epstein-Barr virus)
cacaggcuuggaaacacccauuc

SEQ ID NO: 3967509 - RNA, 18 nt, Human herpesvirus 4 (Epstein-Barr virus)
cacaggguggggguggac

SEQ ID NO: 3967510 - RNA, 15 nt, Human herpesvirus 4 (Epstein-Barr virus)
cacaucuggaccugg

SEQ ID NO: 3967511 - RNA, 13 nt, Human herpesvirus 4 (Epstein-Barr virus)
caccacacaggua

SEQ ID NO: 3967512 - RNA, 20 nt, Human herpesvirus 4 (Epstein-Barr virus)
caccggagccaccacagcac

SEQ ID NO: 3967513 - RNA, 17 nt, Human herpesvirus 4 (Epstein-Barr virus)
caccggggaggccaggu

SEQ ID NO: 3967514 - RNA, 14 nt, Human herpesvirus 4 (Epstein-Barr virus)
caccguggagccgg

SEQ ID NO: 3967515 - RNA, 19 nt, Human herpesvirus 4 (Epstein-Barr virus)
caccguggagccgggcuuc

SEQ ID NO: 3967516 - RNA, 19 nt, Human herpesvirus 4 (Epstein-Barr virus)
caccuagaaagagccaugg

SEQ ID NO: 3967517 - RNA, 22 nt, Human herpesvirus 4 (Epstein-Barr virus)
caccuggcuguacgccgccgcc

SEQ ID NO: 3967518 - RNA, 20 nt, Human herpesvirus 4 (Epstein-Barr virus)
caccuuaacuggcacacacu

SEQ ID NO: 3967519 - RNA, 14 nt, Human herpesvirus 4 (Epstein-Barr virus)
cacggcccuccagc

SEQ ID NO: 3967520 - RNA, 19 nt, Human herpesvirus 4 (Epstein-Barr virus)
cacgggccuggggccauag

SEQ ID NO: 3967521 - RNA, 20 nt, Human herpesvirus 4 (Epstein-Barr virus)
cacggggugcucccccugga

SEQ ID NO: 3967522 - RNA, 21 nt, Human herpesvirus 4 (Epstein-Barr virus)
cacucaggaagcuggccaggc

SEQ ID NO: 3967523 - RNA, 20 nt, Human herpesvirus 4 (Epstein-Barr virus)
cacugauuuugggcacacuu

SEQ ID NO: 3967524 - RNA, 14 nt, Human herpesvirus 4 (Epstein-Barr virus)
cacugcaggcugga

SEQ ID NO: 3967525 - RNA, 19 nt, Human herpesvirus 4 (Epstein-Barr virus)
cagagcccagaggaggccc

SEQ ID NO: 3967526 - RNA, 14 nt, Human herpesvirus 4 (Epstein-Barr virus)
cagaggaggccccg

SEQ ID NO: 3967527 - RNA, 12 nt, Human herpesvirus 4 (Epstein-Barr virus)
cagaugcagugg

SEQ ID NO: 3967528 - RNA, 18 nt, Human herpesvirus 4 (Epstein-Barr virus)
cagcaaaaccagcccggg

SEQ ID NO: 3967529 - RNA, 21 nt, Human herpesvirus 4 (Epstein-Barr virus)
cagcaaccaauguaucccaaa

SEQ ID NO: 3967530 - RNA, 19 nt, Human herpesvirus 4 (Epstein-Barr virus)
cagcacagccagagaggcc

SEQ ID NO: 3967531 - RNA, 14 nt, Human herpesvirus 4 (Epstein-Barr virus)
cccgaguuggcauc

SEQ ID NO: 3967532 - RNA, 19 nt, Human herpesvirus 4 (Epstein-Barr virus)
cccgcaccagggccaggcg

SEQ ID NO: 3967533 - RNA, 16 nt, Human herpesvirus 4 (Epstein-Barr virus)
cccggcggcugcugcc

SEQ ID NO: 3967534 - RNA, 15 nt, Human herpesvirus 4 (Epstein-Barr virus)
cccggggguggcagc

SEQ ID NO: 3967535 - RNA, 20 nt, Human herpesvirus 4 (Epstein-Barr virus)
cccugaacaucucaucccca

SEQ ID NO: 3967536 - RNA, 13 nt, Human herpesvirus 4 (Epstein-Barr virus)
cccugucaccagg

SEQ ID NO: 3967537 - RNA, 14 nt, Human herpesvirus 4 (Epstein-Barr virus)
cccugucaccaggc

SEQ ID NO: 3967538 - RNA, 18 nt, Human herpesvirus 4 (Epstein-Barr virus)
cccugugcagggacgagg

SEQ ID NO: 3967539 - RNA, 19 nt, Human herpesvirus 4 (Epstein-Barr virus)
cccuucugcugcugcuggu

SEQ ID NO: 3967540 - RNA, 21 nt, Human herpesvirus 4 (Epstein-Barr virus)
cccuugagaagcagcucuucu

SEQ ID NO: 3967541 - RNA, 18 nt, Human herpesvirus 4 (Epstein-Barr virus)
ccgaagauuuggcgucua

SEQ ID NO: 3967542 - RNA, 15 nt, Human herpesvirus 4 (Epstein-Barr virus)
ccgaggccugcgacg

SEQ ID NO: 3967543 - RNA, 16 nt, Human herpesvirus 4 (Epstein-Barr virus)
ccgaggcugagggggc

SEQ ID NO: 3967544 - RNA, 22 nt, Human herpesvirus 4 (Epstein-Barr virus)
ccgagucaguuacacacacagu

SEQ ID NO: 3967545 - RNA, 17 nt, Human herpesvirus 4 (Epstein-Barr virus)
ccgaugauucuggccau

SEQ ID NO: 3967546 - RNA, 24 nt, Human herpesvirus 4 (Epstein-Barr virus)
ccgccauaacgccaucugcguggc

SEQ ID NO: 3967547 - RNA, 14 nt, Human herpesvirus 4 (Epstein-Barr virus)
ccgcccccaccacc

SEQ ID NO: 3967548 - RNA, 17 nt, Human herpesvirus 4 (Epstein-Barr virus)
ccgcgacuucgggggcg

SEQ ID NO: 3967549 - RNA, 14 nt, Human herpesvirus 4 (Epstein-Barr virus)
ccgcuacugcugcu

SEQ ID NO: 3967550 - RNA, 19 nt, Human herpesvirus 4 (Epstein-Barr virus)
ccgcuucagacagccgcgg

SEQ ID NO: 3967551 - RNA, 13 nt, Human herpesvirus 4 (Epstein-Barr virus)
ccggacggccuag

SEQ ID NO: 3967552 - RNA, 15 nt, Human herpesvirus 4 (Epstein-Barr virus)
ccggaggcagacacc

SEQ ID NO: 3967553 - RNA, 14 nt, Human herpesvirus 4 (Epstein-Barr virus)
ccggcaccgccagg

SEQ ID NO: 3967554 - RNA, 15 nt, Human herpesvirus 4 (Epstein-Barr virus)
ccggccgccccgggc

SEQ ID NO: 3967555 - RNA, 13 nt, Human herpesvirus 4 (Epstein-Barr virus)
ccggccugcuggc

SEQ ID NO: 3967556 - RNA, 18 nt, Human herpesvirus 4 (Epstein-Barr virus)
ccggcgccaccugcaggg

SEQ ID NO: 3967557 - RNA, 16 nt, Human herpesvirus 4 (Epstein-Barr virus)
ccggcucucaggccuc

SEQ ID NO: 3967558 - RNA, 12 nt, Human herpesvirus 4 (Epstein-Barr virus)
ccggcuggccau

SEQ ID NO: 3967559 - RNA, 13 nt, Human herpesvirus 4 (Epstein-Barr virus)
ccguccucuggac

SEQ ID NO: 3967560 - RNA, 17 nt, Human herpesvirus 4 (Epstein-Barr virus)
ccgugccauccucucgg

SEQ ID NO: 3967561 - RNA, 22 nt, Human herpesvirus 4 (Epstein-Barr virus)
ccguggccccgggagccacggc

SEQ ID NO: 3967562 - RNA, 19 nt, Human herpesvirus 4 (Epstein-Barr virus)
ccguuauugaaaccacgcc

SEQ ID NO: 3967563 - RNA, 22 nt, Human herpesvirus 4 (Epstein-Barr virus)
ggggaaugagggaaaaggcccu

SEQ ID NO: 3967564 - RNA, 17 nt, Human herpesvirus 4 (Epstein-Barr virus)
ggggaggagaagagagg

SEQ ID NO: 3967565 - RNA, 12 nt, Human herpesvirus 4 (Epstein-Barr virus)
ggggaggagaga

SEQ ID NO: 3967566 - RNA, 23 nt, Human herpesvirus 4 (Epstein-Barr virus)
ggggccuuguccgcugggccagg

SEQ ID NO: 3967567 - RNA, 13 nt, Human herpesvirus 4 (Epstein-Barr virus)
ggggcggcagcgg

SEQ ID NO: 3967568 - RNA, 19 nt, Human herpesvirus 4 (Epstein-Barr virus)
gggucaacagguggucgug

SEQ ID NO: 3967569 - RNA, 15 nt, Human herpesvirus 4 (Epstein-Barr virus)
gggucgccugacccu

SEQ ID NO: 3967570 - RNA, 14 nt, Human herpesvirus 4 (Epstein-Barr virus)
gguaccagaagagu

SEQ ID NO: 3967571 - RNA, 15 nt, Human herpesvirus 4 (Epstein-Barr virus)
gguccauggcugcac

SEQ ID NO: 3967572 - RNA, 18 nt, Human herpesvirus 4 (Epstein-Barr virus)
ggugaaacuggcuucugu

SEQ ID NO: 3967573 - RNA, 18 nt, Human herpesvirus 4 (Epstein-Barr virus)
ggugccaaugggcgcggg

SEQ ID NO: 3967574 - RNA, 19 nt, Human herpesvirus 4 (Epstein-Barr virus)
ggugccuccagagccccuu

SEQ ID NO: 3967575 - RNA, 16 nt, Human herpesvirus 4 (Epstein-Barr virus)
ggugggggugggugca

SEQ ID NO: 3967576 - RNA, 17 nt, Human herpesvirus 4 (Epstein-Barr virus)
ggugugaagggcagggc

SEQ ID NO: 3967577 - RNA, 15 nt, Human herpesvirus 4 (Epstein-Barr virus)
gguucuccaggcucc

SEQ ID NO: 3967578 - RNA, 19 nt, Human herpesvirus 4 (Epstein-Barr virus)
guaaaacuuggaggcugcu

SEQ ID NO: 3967579 - RNA, 22 nt, Human herpesvirus 4 (Epstein-Barr virus)
guaaagaucuaccccagcugca

SEQ ID NO: 3967580 - RNA, 14 nt, Human herpesvirus 4 (Epstein-Barr virus)
guaacaggugggac

SEQ ID NO: 3967581 - RNA, 18 nt, Human herpesvirus 4 (Epstein-Barr virus)
guacaggaccaugucggc

SEQ ID NO: 3967582 - RNA, 18 nt, Human herpesvirus 4 (Epstein-Barr virus)
guagccacccgucccggg

SEQ ID NO: 3967583 - RNA, 12 nt, Human herpesvirus 4 (Epstein-Barr virus)
guaugggggccc

SEQ ID NO: 3967584 - RNA, 13 nt, Human herpesvirus 4 (Epstein-Barr virus)
gucaagagcuucc

SEQ ID NO: 3967585 - RNA, 20 nt, Human herpesvirus 4 (Epstein-Barr virus)
gucaccagcuucgagagcca

SEQ ID NO: 3967586 - RNA, 14 nt, Human herpesvirus 4 (Epstein-Barr virus)
gucagaccugaaga

SEQ ID NO: 3967587 - RNA, 13 nt, Human herpesvirus 4 (Epstein-Barr virus)
gucaucuggcucu

SEQ ID NO: 3967588 - RNA, 21 nt, Human herpesvirus 4 (Epstein-Barr virus)
guccagcaggcucaggccgcc

SEQ ID NO: 3967589 - RNA, 14 nt, Human herpesvirus 4 (Epstein-Barr virus)
guccaggagaaggc

SEQ ID NO: 3967590 - RNA, 16 nt, Human herpesvirus 4 (Epstein-Barr virus)
guccaggggccacaca

SEQ ID NO: 3967591 - RNA, 13 nt, Human herpesvirus 4 (Epstein-Barr virus)
gucccccuagccc

SEQ ID NO: 3967592 - RNA, 15 nt, Human herpesvirus 4 (Epstein-Barr virus)
gucccuuuggaggac

SEQ ID NO: 3967593 - RNA, 14 nt, Human herpesvirus 4 (Epstein-Barr virus)
guccggucagguuu

SEQ ID NO: 3967594 - RNA, 15 nt, Human herpesvirus 4 (Epstein-Barr virus)
guccucauggcagga

SEQ ID NO: 3967595 - RNA, 16 nt, Human herpesvirus 4 (Epstein-Barr virus)
gucgcguacucugugg

SEQ ID NO: 3967596 - RNA, 15 nt, Human herpesvirus 4 (Epstein-Barr virus)
gucugcugccaugca

SEQ ID NO: 3967597 - RNA, 19 nt, Human herpesvirus 4 (Epstein-Barr virus)
gugaggccugagagccggg

SEQ ID NO: 3967598 - RNA, 17 nt, Human herpesvirus 4 (Epstein-Barr virus)
gugaguccagggcccug

SEQ ID NO: 3967599 - RNA, 18 nt, Human herpesvirus 4 (Epstein-Barr virus)
gugauggguggagaggcc

SEQ ID NO: 3967600 - RNA, 17 nt, Human herpesvirus 4 (Epstein-Barr virus)
gugcagggauugggcuu

SEQ ID NO: 3967601 - RNA, 13 nt, Human herpesvirus 4 (Epstein-Barr virus)
gugccuccagagc

SEQ ID NO: 3967602 - RNA, 13 nt, Human herpesvirus 4 (Epstein-Barr virus)
gugcguggucggg

SEQ ID NO: 3967603 - RNA, 19 nt, Human herpesvirus 4 (Epstein-Barr virus)
gugcugccugggggcuuug

SEQ ID NO: 3967604 - RNA, 21 nt, Human herpesvirus 4 (Epstein-Barr virus)
gugcugccugggggcuuuguu

SEQ ID NO: 3967605 - RNA, 21 nt, Human herpesvirus 4 (Epstein-Barr virus)
guggaaaaucucgcucagagc

SEQ ID NO: 3967606 - RNA, 17 nt, Human herpesvirus 4 (Epstein-Barr virus)
guggccgucuggcaggg

SEQ ID NO: 3967607 - RNA, 17 nt, Human herpesvirus 4 (Epstein-Barr virus)
guggccucuacgccagg

SEQ ID NO: 3967608 - RNA, 16 nt, Human herpesvirus 4 (Epstein-Barr virus)
gugggauggcggggcc

SEQ ID NO: 3967609 - RNA, 19 nt, Human herpesvirus 4 (Epstein-Barr virus)
gugggccucucuggcugug

SEQ ID NO: 3967610 - RNA, 21 nt, Human herpesvirus 4 (Epstein-Barr virus)
gugggcgcgugcacauauacc

SEQ ID NO: 3967611 - RNA, 22 nt, Human herpesvirus 4 (Epstein-Barr virus)
guggguuucugcccccugucuc

SEQ ID NO: 3967612 - RNA, 21 nt, Human herpesvirus 4 (Epstein-Barr virus)
gugguggcccucggugguggg

SEQ ID NO: 3967613 - RNA, 20 nt, Human herpesvirus 4 (Epstein-Barr virus)
gugguuuggggcaggccccc

SEQ ID NO: 3967614 - RNA, 14 nt, Human herpesvirus 4 (Epstein-Barr virus)
gugucaauaauuuc

SEQ ID NO: 3967615 - RNA, 13 nt, Human herpesvirus 4 (Epstein-Barr virus)
gugucuuggccag

SEQ ID NO: 3967616 - RNA, 21 nt, Human herpesvirus 4 (Epstein-Barr virus)
guugcauuggcugcaaaggga

SEQ ID NO: 3967617 - RNA, 14 nt, Human herpesvirus 4 (Epstein-Barr virus)
guuggauuggcugu

SEQ ID NO: 3967618 - RNA, 19 nt, Human herpesvirus 4 (Epstein-Barr virus)
guuuauggcauaaugggag

SEQ ID NO: 3967619 - RNA, 14 nt, Human herpesvirus 4 (Epstein-Barr virus)
guuucggacacacc

SEQ ID NO: 3967620 - RNA, 19 nt, Human herpesvirus 4 (Epstein-Barr virus)
guuucuguggcugccgaag

SEQ ID NO: 3967621 - RNA, 16 nt, Human herpesvirus 4 (Epstein-Barr virus)
guuuuaguguggcauu

SEQ ID NO: 3967622 - RNA, 16 nt, Human herpesvirus 4 (Epstein-Barr virus)
uaaauguuacuucuuu

SEQ ID NO: 3967623 - RNA, 23 nt, Human herpesvirus 4 (Epstein-Barr virus)
uaaauguuacuucuuuugcucuu

SEQ ID NO: 3967624 - RNA, 22 nt, Human herpesvirus 4 (Epstein-Barr virus)
uaacaagggaagagggaaaaga

SEQ ID NO: 3967625 - RNA, 13 nt, Human herpesvirus 4 (Epstein-Barr virus)
uaacaggacaugu

SEQ ID NO: 3967626 - RNA, 15 nt, Human herpesvirus 4 (Epstein-Barr virus)
uaacauuggcagcag

SEQ ID NO: 3967627 - RNA, 15 nt, Human herpesvirus 4 (Epstein-Barr virus)
uaaccuaugccugga

SEQ ID NO: 3967628 - RNA, 22 nt, Human herpesvirus 4 (Epstein-Barr virus)
uaacugugucccacuccaccug

SEQ ID NO: 3967629 - RNA, 17 nt, Human herpesvirus 4 (Epstein-Barr virus)
uaaggaacacggucugg

SEQ ID NO: 3967630 - RNA, 19 nt, Human herpesvirus 4 (Epstein-Barr virus)
uacaagaguucucugguga

SEQ ID NO: 3967631 - RNA, 19 nt, Human herpesvirus 4 (Epstein-Barr virus)
uacacugaauuuagccuga

SEQ ID NO: 3967632 - RNA, 23 nt, Human herpesvirus 4 (Epstein-Barr virus)
uacagcacaaccuuggacccugc

SEQ ID NO: 3967633 - RNA, 19 nt, Human herpesvirus 4 (Epstein-Barr virus)
uacccagaggaggacaugu

SEQ ID NO: 3967634 - RNA, 15 nt, Human herpesvirus 4 (Epstein-Barr virus)
uacccccuggccacc

SEQ ID NO: 3967635 - RNA, 17 nt, Human herpesvirus 4 (Epstein-Barr virus)
uacccucuuagggaggu

SEQ ID NO: 3967636 - RNA, 22 nt, Human herpesvirus 4 (Epstein-Barr virus)
uacuggcuuucguccucuggcu

SEQ ID NO: 3967637 - RNA, 18 nt, Human herpesvirus 4 (Epstein-Barr virus)
uagaaauuuugcauauuu

SEQ ID NO: 3967638 - RNA, 13 nt, Human herpesvirus 4 (Epstein-Barr virus)
uagcccccacgcu

SEQ ID NO: 3967639 - RNA, 19 nt, Human herpesvirus 4 (Epstein-Barr virus)
uagccguccuguccaagug

SEQ ID NO: 3967640 - RNA, 18 nt, Human herpesvirus 4 (Epstein-Barr virus)
uaggugccuccagagccc

SEQ ID NO: 3967641 - RNA, 10 nt, Human herpesvirus 4 (Epstein-Barr virus)
uaguuggagc

SEQ ID NO: 3967642 - RNA, 17 nt, Human herpesvirus 4 (Epstein-Barr virus)
uauaacugccagagcug

SEQ ID NO: 3967643 - RNA, 19 nt, Human herpesvirus 4 (Epstein-Barr virus)
uaugaaggcuggcaaagau

SEQ ID NO: 3967644 - RNA, 19 nt, Human herpesvirus 4 (Epstein-Barr virus)
uaugaugacgccgagaccu

SEQ ID NO: 3967645 - RNA, 15 nt, Human herpesvirus 4 (Epstein-Barr virus)
ucaaguaccagcugg

SEQ ID NO: 3967646 - RNA, 22 nt, Human herpesvirus 4 (Epstein-Barr virus)
ucaccugcacagaucugaccac

SEQ ID NO: 3967647 - RNA, 20 nt, Human herpesvirus 4 (Epstein-Barr virus)
ucacuuccucugcuuuucuc

SEQ ID NO: 3967648 - RNA, 12 nt, Human herpesvirus 4 (Epstein-Barr virus)
ucagcacuuugc

SEQ ID NO: 3967649 - RNA, 20 nt, Human herpesvirus 4 (Epstein-Barr virus)
ucagcaucaaugucaaggcu

SEQ ID NO: 3967650 - RNA, 19 nt, Human herpesvirus 4 (Epstein-Barr virus)
ucagccuugcccccgccag

SEQ ID NO: 3967651 - RNA, 19 nt, Human herpesvirus 4 (Epstein-Barr virus)
ucaucuauuagcagccucc

SEQ ID NO: 3967652 - RNA, 18 nt, Human herpesvirus 4 (Epstein-Barr virus)
ucaucuggcucuccugug

SEQ ID NO: 3967653 - RNA, 18 nt, Human herpesvirus 4 (Epstein-Barr virus)
ucaugcgugaccaccugg

SEQ ID NO: 3967654 - RNA, 21 nt, Human herpesvirus 4 (Epstein-Barr virus)
uccacagauggagagauuuca

SEQ ID NO: 3967655 - RNA, 15 nt, Human herpesvirus 4 (Epstein-Barr virus)
uccaccaccuucacc

SEQ ID NO: 3967656 - RNA, 19 nt, Human herpesvirus 4 (Epstein-Barr virus)
uccagacgcgauggcacac

SEQ ID NO: 3967657 - RNA, 21 nt, Human herpesvirus 4 (Epstein-Barr virus)
uccaggaucucccgcgccgca

SEQ ID NO: 3967658 - RNA, 20 nt, Human herpesvirus 4 (Epstein-Barr virus)
uccaugccaaugggggagga

SEQ ID NO: 3967659 - RNA, 13 nt, Human herpesvirus 4 (Epstein-Barr virus)
ucccaaguacaga

SEQ ID NO: 3967660 - RNA, 20 nt, Human herpesvirus 4 (Epstein-Barr virus)
ccguugugaccgccaccggc

SEQ ID NO: 3967661 - RNA, 17 nt, Human herpesvirus 4 (Epstein-Barr virus)
ccuaaugcauccgcacc

SEQ ID NO: 3967662 - RNA, 16 nt, Human herpesvirus 4 (Epstein-Barr virus)
ccuacucuccacggga

SEQ ID NO: 3967663 - RNA, 13 nt, Human herpesvirus 4 (Epstein-Barr virus)
ccuagccccgggc

SEQ ID NO: 3967664 - RNA, 17 nt, Human herpesvirus 4 (Epstein-Barr virus)
ccuaggagaaggagccu

SEQ ID NO: 3967665 - RNA, 13 nt, Human herpesvirus 4 (Epstein-Barr virus)
ccucaccaaggac

SEQ ID NO: 3967666 - RNA, 21 nt, Human herpesvirus 4 (Epstein-Barr virus)
ccucagagggggugccugugc

SEQ ID NO: 3967667 - RNA, 20 nt, Human herpesvirus 4 (Epstein-Barr virus)
ccucaucguucgguggggug

SEQ ID NO: 3967668 - RNA, 21 nt, Human herpesvirus 4 (Epstein-Barr virus)
ccuccacccagcagcagcccg

SEQ ID NO: 3967669 - RNA, 18 nt, Human herpesvirus 4 (Epstein-Barr virus)
ccuccgccgccgcagccg

SEQ ID NO: 3967670 - RNA, 16 nt, Human herpesvirus 4 (Epstein-Barr virus)
ccuccucugggccgcc

SEQ ID NO: 3967671 - RNA, 12 nt, Human herpesvirus 4 (Epstein-Barr virus)
ccuccuggccag

SEQ ID NO: 3967672 - RNA, 16 nt, Human herpesvirus 4 (Epstein-Barr virus)
ccucgcucagcccacu

SEQ ID NO: 3967673 - RNA, 19 nt, Human herpesvirus 4 (Epstein-Barr virus)
ccucggagaucaucccacu

SEQ ID NO: 3967674 - RNA, 13 nt, Human herpesvirus 4 (Epstein-Barr virus)
ccucggugguggg

SEQ ID NO: 3967675 - RNA, 12 nt, Human herpesvirus 4 (Epstein-Barr virus)
ccucugccuggc

SEQ ID NO: 3967676 - RNA, 17 nt, Human herpesvirus 4 (Epstein-Barr virus)
ccucuuccgugccucgg

SEQ ID NO: 3967677 - RNA, 20 nt, Human herpesvirus 4 (Epstein-Barr virus)
ccugaauccgcgcagccugu

SEQ ID NO: 3967678 - RNA, 21 nt, Human herpesvirus 4 (Epstein-Barr virus)
ccugacggugccgcuccuuug

SEQ ID NO: 3967679 - RNA, 15 nt, Human herpesvirus 4 (Epstein-Barr virus)
ccugcauggccaggc

SEQ ID NO: 3967680 - RNA, 15 nt, Human herpesvirus 4 (Epstein-Barr virus)
ccuggacgagggggc

SEQ ID NO: 3967681 - RNA, 21 nt, Human herpesvirus 4 (Epstein-Barr virus)
ccuggagagcaugcaggucag

SEQ ID NO: 3967682 - RNA, 15 nt, Human herpesvirus 4 (Epstein-Barr virus)
ccuggaucuggggcu

SEQ ID NO: 3967683 - RNA, 13 nt, Human herpesvirus 4 (Epstein-Barr virus)
ccuggccagggcg

SEQ ID NO: 3967684 - RNA, 13 nt, Human herpesvirus 4 (Epstein-Barr virus)
ccuggcgcuuugc

SEQ ID NO: 3967685 - RNA, 16 nt, Human herpesvirus 4 (Epstein-Barr virus)
ccuggcuccccauaga

SEQ ID NO: 3967686 - RNA, 19 nt, Human herpesvirus 4 (Epstein-Barr virus)
ccugggagggggcgagcag

SEQ ID NO: 3967687 - RNA, 21 nt, Human herpesvirus 4 (Epstein-Barr virus)
ccuggucaagagcuuccuggc

SEQ ID NO: 3967688 - RNA, 14 nt, Human herpesvirus 4 (Epstein-Barr virus)
ccugucggcccugc

SEQ ID NO: 3967689 - RNA, 21 nt, Human herpesvirus 4 (Epstein-Barr virus)
ccugucucuuucuggccaacc

SEQ ID NO: 3967690 - RNA, 19 nt, Human herpesvirus 4 (Epstein-Barr virus)
ccugucugacuuggccccu

SEQ ID NO: 3967691 - RNA, 22 nt, Human herpesvirus 4 (Epstein-Barr virus)
ccugugccucgucuaccucugu

SEQ ID NO: 3967692 - RNA, 14 nt, Human herpesvirus 4 (Epstein-Barr virus)
ccuguguccugggc

SEQ ID NO: 3967693 - RNA, 15 nt, Human herpesvirus 4 (Epstein-Barr virus)
ccuugagggcaaaga

SEQ ID NO: 3967694 - RNA, 20 nt, Human herpesvirus 4 (Epstein-Barr virus)
ccuuuaggcguaacuugucu

SEQ ID NO: 3967695 - RNA, 13 nt, Human herpesvirus 4 (Epstein-Barr virus)
ccuuugccugggg

SEQ ID NO: 3967696 - RNA, 15 nt, Human herpesvirus 4 (Epstein-Barr virus)
ccuuuggcuccuccu

SEQ ID NO: 3967697 - RNA, 19 nt, Human herpesvirus 4 (Epstein-Barr virus)
cgaagcagcuccgcccuca

SEQ ID NO: 3967698 - RNA, 19 nt, Human herpesvirus 4 (Epstein-Barr virus)
cgaagcucuuggucaaggu

SEQ ID NO: 3967699 - RNA, 15 nt, Human herpesvirus 4 (Epstein-Barr virus)
cgaaggugcagcugg

SEQ ID NO: 3967700 - RNA, 20 nt, Human herpesvirus 4 (Epstein-Barr virus)
cgacccccgggcgcccccaa

SEQ ID NO: 3967701 - RNA, 17 nt, Human herpesvirus 4 (Epstein-Barr virus)
cgaggacggggaagagg

SEQ ID NO: 3967702 - RNA, 14 nt, Human herpesvirus 4 (Epstein-Barr virus)
cgagggggccuggu

SEQ ID NO: 3967703 - RNA, 12 nt, Human herpesvirus 4 (Epstein-Barr virus)
cgaugcggagga

SEQ ID NO: 3967704 - RNA, 20 nt, Human herpesvirus 4 (Epstein-Barr virus)
cgcaccuguguccugggcaa

SEQ ID NO: 3967705 - RNA, 17 nt, Human herpesvirus 4 (Epstein-Barr virus)
cgcagccacguccagac

SEQ ID NO: 3967706 - RNA, 15 nt, Human herpesvirus 4 (Epstein-Barr virus)
cgcagguggcugcug

SEQ ID NO: 3967707 - RNA, 12 nt, Human herpesvirus 4 (Epstein-Barr virus)
cgccagccaccc

SEQ ID NO: 3967708 - RNA, 17 nt, Human herpesvirus 4 (Epstein-Barr virus)
cgccaugcucagggcca

SEQ ID NO: 3967709 - RNA, 11 nt, Human herpesvirus 4 (Epstein-Barr virus)
cgccccagggc

SEQ ID NO: 3967710 - RNA, 19 nt, Human herpesvirus 4 (Epstein-Barr virus)
cgcccugucaccaggccug

SEQ ID NO: 3967711 - RNA, 17 nt, Human herpesvirus 4 (Epstein-Barr virus)
cgcccugucccuggagc

SEQ ID NO: 3967712 - RNA, 19 nt, Human herpesvirus 4 (Epstein-Barr virus)
cgccugcggacucaggcca

SEQ ID NO: 3967713 - RNA, 17 nt, Human herpesvirus 4 (Epstein-Barr virus)
cgccugcuucacgccuc

SEQ ID NO: 3967714 - RNA, 11 nt, Human herpesvirus 4 (Epstein-Barr virus)
cgcgacugagg

SEQ ID NO: 3967715 - RNA, 14 nt, Human herpesvirus 4 (Epstein-Barr virus)
cgcggugguggccc

SEQ ID NO: 3967716 - RNA, 22 nt, Human herpesvirus 4 (Epstein-Barr virus)
cgcugauaaaguuguccugggc

SEQ ID NO: 3967717 - RNA, 11 nt, Human herpesvirus 4 (Epstein-Barr virus)
cgcugcaugca

SEQ ID NO: 3967718 - RNA, 18 nt, Human herpesvirus 4 (Epstein-Barr virus)
cggacuacguguccaugu

SEQ ID NO: 3967719 - RNA, 21 nt, Human herpesvirus 4 (Epstein-Barr virus)
cggaggacugcauccaacgcu

SEQ ID NO: 3967720 - RNA, 19 nt, Human herpesvirus 4 (Epstein-Barr virus)
cggcccuuugccuggggcu

SEQ ID NO: 3967721 - RNA, 22 nt, Human herpesvirus 4 (Epstein-Barr virus)
cggcgaugucggggcugcuggc

SEQ ID NO: 3967722 - RNA, 17 nt, Human herpesvirus 4 (Epstein-Barr virus)
cggcgcuugcgucugcc

SEQ ID NO: 3967723 - RNA, 13 nt, Human herpesvirus 4 (Epstein-Barr virus)
cggcggcugcugc

SEQ ID NO: 3967724 - RNA, 16 nt, Human herpesvirus 4 (Epstein-Barr virus)
cggcguggagcugggc

SEQ ID NO: 3967725 - RNA, 16 nt, Human herpesvirus 4 (Epstein-Barr virus)
cggcugcucccgccuc

SEQ ID NO: 3967726 - RNA, 16 nt, Human herpesvirus 4 (Epstein-Barr virus)
cgggaccgcgcccucc

SEQ ID NO: 3967727 - RNA, 22 nt, Human herpesvirus 4 (Epstein-Barr virus)
cgggcguugccagacuccgcca

SEQ ID NO: 3967728 - RNA, 16 nt, Human herpesvirus 4 (Epstein-Barr virus)
cggggagcggcaaggg

SEQ ID NO: 3967729 - RNA, 20 nt, Human herpesvirus 4 (Epstein-Barr virus)
cggggcuccccagccacagc

SEQ ID NO: 3967730 - RNA, 20 nt, Human herpesvirus 4 (Epstein-Barr virus)
cgggggcgacugccgccgcc

SEQ ID NO: 3967731 - RNA, 21 nt, Human herpesvirus 4 (Epstein-Barr virus)
cgggugcacacgcucagcuca

SEQ ID NO: 3967732 - RNA, 20 nt, Human herpesvirus 4 (Epstein-Barr virus)
cggugggaucaugaagcccc

SEQ ID NO: 3967733 - RNA, 12 nt, Human herpesvirus 4 (Epstein-Barr virus)
cgguguccaggu

SEQ ID NO: 3967734 - RNA, 12 nt, Human herpesvirus 4 (Epstein-Barr virus)
cgucaggagggc

SEQ ID NO: 3967735 - RNA, 19 nt, Human herpesvirus 4 (Epstein-Barr virus)
cgugaccaccuggccaggg

SEQ ID NO: 3967736 - RNA, 16 nt, Human herpesvirus 4 (Epstein-Barr virus)
cgugccauccucucgg

SEQ ID NO: 3967737 - RNA, 12 nt, Human herpesvirus 4 (Epstein-Barr virus)
cguggagcugga

SEQ ID NO: 3967738 - RNA, 14 nt, Human herpesvirus 4 (Epstein-Barr virus)
cguggcgccugggg

SEQ ID NO: 3967739 - RNA, 16 nt, Human herpesvirus 4 (Epstein-Barr virus)
cguggguccccucugc

SEQ ID NO: 3967740 - RNA, 18 nt, Human herpesvirus 4 (Epstein-Barr virus)
cgugguuuucugccccuc

SEQ ID NO: 3967741 - RNA, 14 nt, Human herpesvirus 4 (Epstein-Barr virus)
cguguggaagagga

SEQ ID NO: 3967742 - RNA, 16 nt, Human herpesvirus 4 (Epstein-Barr virus)
cguuaacauggacaug

SEQ ID NO: 3967743 - RNA, 15 nt, Human herpesvirus 4 (Epstein-Barr virus)
cuaacacgcaauaaa

SEQ ID NO: 3967744 - RNA, 16 nt, Human herpesvirus 4 (Epstein-Barr virus)
cuaaugccauagucac

SEQ ID NO: 3967745 - RNA, 17 nt, Human herpesvirus 4 (Epstein-Barr virus)
cuacaaccccuuccacg

SEQ ID NO: 3967746 - RNA, 21 nt, Human herpesvirus 4 (Epstein-Barr virus)
cuaccaggggcgagcagcgcg

SEQ ID NO: 3967747 - RNA, 15 nt, Human herpesvirus 4 (Epstein-Barr virus)
cuacgcgggccacag

SEQ ID NO: 3967748 - RNA, 21 nt, Human herpesvirus 4 (Epstein-Barr virus)
gaacugggaugaacccugggg

SEQ ID NO: 3967749 - RNA, 20 nt, Human herpesvirus 4 (Epstein-Barr virus)
gaagcagauagccggccagg

SEQ ID NO: 3967750 - RNA, 20 nt, Human herpesvirus 4 (Epstein-Barr virus)
gaagcuggccaggcugguga

SEQ ID NO: 3967751 - RNA, 20 nt, Human herpesvirus 4 (Epstein-Barr virus)
gaaggaggauggccuccagc

SEQ ID NO: 3967752 - RNA, 20 nt, Human herpesvirus 4 (Epstein-Barr virus)
gaaggcuccggcggcagugg

SEQ ID NO: 3967753 - RNA, 15 nt, Human herpesvirus 4 (Epstein-Barr virus)
gaaggcuugccaaaa

SEQ ID NO: 3967754 - RNA, 13 nt, Human herpesvirus 4 (Epstein-Barr virus)
gaagggcagggcu

SEQ ID NO: 3967755 - RNA, 12 nt, Human herpesvirus 4 (Epstein-Barr virus)
gaaucucugcca

SEQ ID NO: 3967756 - RNA, 21 nt, Human herpesvirus 4 (Epstein-Barr virus)
gacaaggcaguagaggacacc

SEQ ID NO: 3967757 - RNA, 20 nt, Human herpesvirus 4 (Epstein-Barr virus)
gacacccacccugcacacau

SEQ ID NO: 3967758 - RNA, 14 nt, Human herpesvirus 4 (Epstein-Barr virus)
gaccaaugccaaag

SEQ ID NO: 3967759 - RNA, 20 nt, Human herpesvirus 4 (Epstein-Barr virus)
gaccaccuacggcagccgcu

SEQ ID NO: 3967760 - RNA, 15 nt, Human herpesvirus 4 (Epstein-Barr virus)
gaccacggcccacgu

SEQ ID NO: 3967761 - RNA, 12 nt, Human herpesvirus 4 (Epstein-Barr virus)
gaccacugaggg

SEQ ID NO: 3967762 - RNA, 18 nt, Human herpesvirus 4 (Epstein-Barr virus)
gaccuguugucccugaga

SEQ ID NO: 3967763 - RNA, 21 nt, Human herpesvirus 4 (Epstein-Barr virus)
gacgcagaaugugcagggauu

SEQ ID NO: 3967764 - RNA, 19 nt, Human herpesvirus 4 (Epstein-Barr virus)
gacucccauguaagccugc

SEQ ID NO: 3967765 - RNA, 22 nt, Human herpesvirus 4 (Epstein-Barr virus)
gacugugguauccaccuagaaa

SEQ ID NO: 3967766 - RNA, 22 nt, Human herpesvirus 4 (Epstein-Barr virus)
gacuuuauacauaggucucggc

SEQ ID NO: 3967767 - RNA, 18 nt, Human herpesvirus 4 (Epstein-Barr virus)
gagacacaucuggaccag

SEQ ID NO: 3967768 - RNA, 21 nt, Human herpesvirus 4 (Epstein-Barr virus)
gagcaccggagccaccacagc

SEQ ID NO: 3967769 - RNA, 22 nt, Human herpesvirus 4 (Epstein-Barr virus)
gagcagauuuccgucagccagg

SEQ ID NO: 3967770 - RNA, 15 nt, Human herpesvirus 4 (Epstein-Barr virus)
gagcaugcaggucag

SEQ ID NO: 3967771 - RNA, 14 nt, Human herpesvirus 4 (Epstein-Barr virus)
gaggacgugaguga

SEQ ID NO: 3967772 - RNA, 14 nt, Human herpesvirus 4 (Epstein-Barr virus)
gaggccgagcaggg

SEQ ID NO: 3967773 - RNA, 16 nt, Human herpesvirus 4 (Epstein-Barr virus)
gagggcacggcaaggc

SEQ ID NO: 3967774 - RNA, 12 nt, Human herpesvirus 4 (Epstein-Barr virus)
gaggggcaggag

SEQ ID NO: 3967775 - RNA, 11 nt, Human herpesvirus 4 (Epstein-Barr virus)
gaggggggcag

SEQ ID NO: 3967776 - RNA, 21 nt, Human herpesvirus 4 (Epstein-Barr virus)
gagguccuggacgagggggcg

SEQ ID NO: 3967777 - RNA, 15 nt, Human herpesvirus 4 (Epstein-Barr virus)
gaguaauugcagugg

SEQ ID NO: 3967778 - RNA, 20 nt, Human herpesvirus 4 (Epstein-Barr virus)
gaguccccuccuuggagcug

SEQ ID NO: 3967779 - RNA, 17 nt, Human herpesvirus 4 (Epstein-Barr virus)
gagucugcuggacuccg

SEQ ID NO: 3967780 - RNA, 16 nt, Human herpesvirus 4 (Epstein-Barr virus)
gaguucucuagcaggu

SEQ ID NO: 3967781 - RNA, 14 nt, Human herpesvirus 4 (Epstein-Barr virus)
gauagauagccacc

SEQ ID NO: 3967782 - RNA, 16 nt, Human herpesvirus 4 (Epstein-Barr virus)
gauagcauggccgcca

SEQ ID NO: 3967783 - RNA, 18 nt, Human herpesvirus 4 (Epstein-Barr virus)
gauagugaacguggaggu

SEQ ID NO: 3967784 - RNA, 21 nt, Human herpesvirus 4 (Epstein-Barr virus)
gaucacuacuacaccgagcag

SEQ ID NO: 3967785 - RNA, 23 nt, Human herpesvirus 4 (Epstein-Barr virus)
gauccagggcccguuccaggcuc

SEQ ID NO: 3967786 - RNA, 17 nt, Human herpesvirus 4 (Epstein-Barr virus)
gaugacgccgagaccua

SEQ ID NO: 3967787 - RNA, 16 nt, Human herpesvirus 4 (Epstein-Barr virus)
gaugcaacagaggauu

SEQ ID NO: 3967788 - RNA, 15 nt, Human herpesvirus 4 (Epstein-Barr virus)
gaugcagcgcaucag

SEQ ID NO: 3967789 - RNA, 16 nt, Human herpesvirus 4 (Epstein-Barr virus)
gaugcaggaccuagaa

SEQ ID NO: 3967790 - RNA, 18 nt, Human herpesvirus 4 (Epstein-Barr virus)
gaugcauacgcugaguga

SEQ ID NO: 3967791 - RNA, 18 nt, Human herpesvirus 4 (Epstein-Barr virus)
gaugccucuacgccccag

SEQ ID NO: 3967792 - RNA, 16 nt, Human herpesvirus 4 (Epstein-Barr virus)
gauggaaagggcaugu

SEQ ID NO: 3967793 - RNA, 16 nt, Human herpesvirus 4 (Epstein-Barr virus)
gauggcaaagguccca

SEQ ID NO: 3967794 - RNA, 15 nt, Human herpesvirus 4 (Epstein-Barr virus)
gauggcccugaucug

SEQ ID NO: 3967795 - RNA, 13 nt, Human herpesvirus 4 (Epstein-Barr virus)
gcaaaagauggac

SEQ ID NO: 3967796 - RNA, 21 nt, Human herpesvirus 4 (Epstein-Barr virus)
gcaacccccggcucucaggcc

SEQ ID NO: 3967797 - RNA, 13 nt, Human herpesvirus 4 (Epstein-Barr virus)
gcaagcagcaccu

SEQ ID NO: 3967798 - RNA, 14 nt, Human herpesvirus 4 (Epstein-Barr virus)
gcacaggaugacag

SEQ ID NO: 3967799 - RNA, 22 nt, Human herpesvirus 4 (Epstein-Barr virus)
gcaccaacaacgaucccaggcc

SEQ ID NO: 3967800 - RNA, 20 nt, Human herpesvirus 4 (Epstein-Barr virus)
gcaccgauagcauggccgcc

SEQ ID NO: 3967801 - RNA, 15 nt, Human herpesvirus 4 (Epstein-Barr virus)
gcaccugucccuggg

SEQ ID NO: 3967802 - RNA, 17 nt, Human herpesvirus 4 (Epstein-Barr virus)
gcacgagaccccugggc

SEQ ID NO: 3967803 - RNA, 18 nt, Human herpesvirus 4 (Epstein-Barr virus)
gcacgagaccccugggcu

SEQ ID NO: 3967804 - RNA, 15 nt, Human herpesvirus 4 (Epstein-Barr virus)
gcacggcccuccagc

SEQ ID NO: 3967805 - RNA, 19 nt, Human herpesvirus 4 (Epstein-Barr virus)
gcacuuuauuaauaaacaa

SEQ ID NO: 3967806 - RNA, 18 nt, Human herpesvirus 4 (Epstein-Barr virus)
gcagaaaggcuggccgug

SEQ ID NO: 3967807 - RNA, 20 nt, Human herpesvirus 4 (Epstein-Barr virus)
gcagaaucaccagagcccag

SEQ ID NO: 3967808 - RNA, 15 nt, Human herpesvirus 4 (Epstein-Barr virus)
gcagaugaggccccu

SEQ ID NO: 3967809 - RNA, 23 nt, Human herpesvirus 4 (Epstein-Barr virus)
gcagcagacaaggacaggugcca

SEQ ID NO: 3967810 - RNA, 13 nt, Human herpesvirus 4 (Epstein-Barr virus)
gcagccagagcca

SEQ ID NO: 3967811 - RNA, 22 nt, Human herpesvirus 4 (Epstein-Barr virus)
gcagccgcggccaucaccuggg

SEQ ID NO: 3967812 - RNA, 17 nt, Human herpesvirus 4 (Epstein-Barr virus)
gcagcugaguccccucc

SEQ ID NO: 3967813 - RNA, 15 nt, Human herpesvirus 4 (Epstein-Barr virus)
gcagcuucuccagcg

SEQ ID NO: 3967814 - RNA, 20 nt, Human herpesvirus 4 (Epstein-Barr virus)
gcaggccccccgcaccaggg

SEQ ID NO: 3967815 - RNA, 15 nt, Human herpesvirus 4 (Epstein-Barr virus)
gcaguccaggggcca

SEQ ID NO: 3967816 - RNA, 12 nt, Human herpesvirus 4 (Epstein-Barr virus)
gcauccuaggca

SEQ ID NO: 3967817 - RNA, 20 nt, Human herpesvirus 4 (Epstein-Barr virus)
gcaugcuuagugccccccuu

SEQ ID NO: 3967818 - RNA, 12 nt, Human herpesvirus 4 (Epstein-Barr virus)
gcauggccuggg

SEQ ID NO: 3967819 - RNA, 14 nt, Human herpesvirus 4 (Epstein-Barr virus)
gcauggcggccugg

SEQ ID NO: 3967820 - RNA, 18 nt, Human herpesvirus 4 (Epstein-Barr virus)
gcauuacaccaucccaug

SEQ ID NO: 3967821 - RNA, 20 nt, Human herpesvirus 4 (Epstein-Barr virus)
gcauuuuuggugcugccugg

SEQ ID NO: 3967822 - RNA, 18 nt, Human herpesvirus 4 (Epstein-Barr virus)
gccaaccugcucucucug

SEQ ID NO: 3967823 - RNA, 20 nt, Human herpesvirus 4 (Epstein-Barr virus)
gccaaccugcucucucugga

SEQ ID NO: 3967824 - RNA, 21 nt, Human herpesvirus 4 (Epstein-Barr virus)
gccaaccugcucucucuggag

SEQ ID NO: 3967825 - RNA, 22 nt, Human herpesvirus 4 (Epstein-Barr virus)
gccaauccaugccaauggggga

SEQ ID NO: 3967826 - RNA, 20 nt, Human herpesvirus 4 (Epstein-Barr virus)
gccaauuggggugauccugu

SEQ ID NO: 3967827 - RNA, 16 nt, Human herpesvirus 4 (Epstein-Barr virus)
gccacagagcaucaga

SEQ ID NO: 3967828 - RNA, 13 nt, Human herpesvirus 4 (Epstein-Barr virus)
gccacauagcagg

SEQ ID NO: 3967829 - RNA, 17 nt, Human herpesvirus 4 (Epstein-Barr virus)
gccacgcaggauguuca

SEQ ID NO: 3967830 - RNA, 19 nt, Human herpesvirus 4 (Epstein-Barr virus)
gccacguccccggccuccc

SEQ ID NO: 3967831 - RNA, 16 nt, Human herpesvirus 4 (Epstein-Barr virus)
gccaggcuggugacaa

SEQ ID NO: 3967832 - RNA, 12 nt, Human herpesvirus 4 (Epstein-Barr virus)
gccauggccaau

SEQ ID NO: 3967833 - RNA, 22 nt, Human herpesvirus 4 (Epstein-Barr virus)
gccauggugccaagcucagccc

SEQ ID NO: 3967834 - RNA, 19 nt, Human herpesvirus 4 (Epstein-Barr virus)
gcccagccguucacucggc

SEQ ID NO: 3967835 - RNA, 17 nt, Human herpesvirus 4 (Epstein-Barr virus)
gccccgggcccagcccu

SEQ ID NO: 3967836 - RNA, 17 nt, Human herpesvirus 4 (Epstein-Barr virus)
ggcuacaacaggcugcu

SEQ ID NO: 3967837 - RNA, 18 nt, Human herpesvirus 4 (Epstein-Barr virus)
ggcucggggcuggggaga

SEQ ID NO: 3967838 - RNA, 13 nt, Human herpesvirus 4 (Epstein-Barr virus)
ggcugcuggcggc

SEQ ID NO: 3967839 - RNA, 11 nt, Human herpesvirus 4 (Epstein-Barr virus)
ggcuggccgug

SEQ ID NO: 3967840 - RNA, 19 nt, Human herpesvirus 4 (Epstein-Barr virus)
gggaacacccccaccccac

SEQ ID NO: 3967841 - RNA, 16 nt, Human herpesvirus 4 (Epstein-Barr virus)
gggaauaaucaaccug

SEQ ID NO: 3967842 - RNA, 20 nt, Human herpesvirus 4 (Epstein-Barr virus)
gggaucaugaagcccccagg

SEQ ID NO: 3967843 - RNA, 17 nt, Human herpesvirus 4 (Epstein-Barr virus)
gggcagagaggcgggaa

SEQ ID NO: 3967844 - RNA, 21 nt, Human herpesvirus 4 (Epstein-Barr virus)
gggcccagagugcuccggcug

SEQ ID NO: 3967845 - RNA, 18 nt, Human herpesvirus 4 (Epstein-Barr virus)
gggccugagacuggaccc

SEQ ID NO: 3967846 - RNA, 19 nt, Human herpesvirus 4 (Epstein-Barr virus)
gggcuccauguccuguggu

SEQ ID NO: 3967847 - RNA, 23 nt, Human herpesvirus 4 (Epstein-Barr virus)
ggggguggaggcugcgccugagc

SEQ ID NO: 3967848 - RNA, 20 nt, Human herpesvirus 4 (Epstein-Barr virus)
gggguccggucuugcaggga

SEQ ID NO: 3967849 - RNA, 13 nt, Human herpesvirus 4 (Epstein-Barr virus)
gggucucaggccu

SEQ ID NO: 3967850 - RNA, 18 nt, Human herpesvirus 4 (Epstein-Barr virus)
gggugaggcccagccccc

SEQ ID NO: 3967851 - RNA, 12 nt, Human herpesvirus 4 (Epstein-Barr virus)
gggugggugcaa

SEQ ID NO: 3967852 - RNA, 16 nt, Human herpesvirus 4 (Epstein-Barr virus)
gguagauggcgagacu

SEQ ID NO: 3967853 - RNA, 19 nt, Human herpesvirus 4 (Epstein-Barr virus)
ggucacagaccagccccuc

SEQ ID NO: 3967854 - RNA, 16 nt, Human herpesvirus 4 (Epstein-Barr virus)
ggucagacggccgcgc

SEQ ID NO: 3967855 - RNA, 19 nt, Human herpesvirus 4 (Epstein-Barr virus)
ggucagugauggaaagguu

SEQ ID NO: 3967856 - RNA, 21 nt, Human herpesvirus 4 (Epstein-Barr virus)
gguccuggacgagggggcgcg

SEQ ID NO: 3967857 - RNA, 17 nt, Human herpesvirus 4 (Epstein-Barr virus)
gguccuguuccggggcg

SEQ ID NO: 3967858 - RNA, 18 nt, Human herpesvirus 4 (Epstein-Barr virus)
ggucgucaucuggcucuc

SEQ ID NO: 3967859 - RNA, 16 nt, Human herpesvirus 4 (Epstein-Barr virus)
gguggcaguauuuugc

SEQ ID NO: 3967860 - RNA, 20 nt, Human herpesvirus 4 (Epstein-Barr virus)
gguggcauugcggguggaua

SEQ ID NO: 3967861 - RNA, 23 nt, Human herpesvirus 4 (Epstein-Barr virus)
ggugggaucaugaagcccccagg

SEQ ID NO: 3967862 - RNA, 20 nt, Human herpesvirus 4 (Epstein-Barr virus)
guaaggccgcugccaggccg

SEQ ID NO: 3967863 - RNA, 16 nt, Human herpesvirus 4 (Epstein-Barr virus)
guacaggaccuggaaa

SEQ ID NO: 3967864 - RNA, 13 nt, Human herpesvirus 4 (Epstein-Barr virus)
guaccagaagagu

SEQ ID NO: 3967865 - RNA, 15 nt, Human herpesvirus 4 (Epstein-Barr virus)
guaccagcugguggu

SEQ ID NO: 3967866 - RNA, 23 nt, Human herpesvirus 4 (Epstein-Barr virus)
guacugcagugggccucucuggc

SEQ ID NO: 3967867 - RNA, 16 nt, Human herpesvirus 4 (Epstein-Barr virus)
guagccccuaggccug

SEQ ID NO: 3967868 - RNA, 13 nt, Human herpesvirus 4 (Epstein-Barr virus)
guauugcagcugg

SEQ ID NO: 3967869 - RNA, 22 nt, Human herpesvirus 4 (Epstein-Barr virus)
gucaaacaggugagucagccuu

SEQ ID NO: 3967870 - RNA, 16 nt, Human herpesvirus 4 (Epstein-Barr virus)
gucaucagccgcugcg

SEQ ID NO: 3967871 - RNA, 17 nt, Human herpesvirus 4 (Epstein-Barr virus)
gucauccgaggcugaga

SEQ ID NO: 3967872 - RNA, 22 nt, Human herpesvirus 4 (Epstein-Barr virus)
gucaugacaauuuuagaugagg

SEQ ID NO: 3967873 - RNA, 17 nt, Human herpesvirus 4 (Epstein-Barr virus)
gucccaggccuuagccc

SEQ ID NO: 3967874 - RNA, 11 nt, Human herpesvirus 4 (Epstein-Barr virus)
guccccucugc

SEQ ID NO: 3967875 - RNA, 19 nt, Human herpesvirus 4 (Epstein-Barr virus)
guccgugagagccuaccca

SEQ ID NO: 3967876 - RNA, 11 nt, Human herpesvirus 4 (Epstein-Barr virus)
guccucuggac

SEQ ID NO: 3967877 - RNA, 14 nt, Human herpesvirus 4 (Epstein-Barr virus)
guccucuggcucuc

SEQ ID NO: 3967878 - RNA, 15 nt, Human herpesvirus 4 (Epstein-Barr virus)
gucgcguagcucugg

SEQ ID NO: 3967879 - RNA, 19 nt, Human herpesvirus 4 (Epstein-Barr virus)
gucuccccucugcagagag

SEQ ID NO: 3967880 - RNA, 23 nt, Human herpesvirus 4 (Epstein-Barr virus)
gucucgccgcuaguugguccagg

SEQ ID NO: 3967881 - RNA, 19 nt, Human herpesvirus 4 (Epstein-Barr virus)
gucucucuuugagggggcc

SEQ ID NO: 3967882 - RNA, 14 nt, Human herpesvirus 4 (Epstein-Barr virus)
gucuuugccaaccu

SEQ ID NO: 3967883 - RNA, 17 nt, Human herpesvirus 4 (Epstein-Barr virus)
gugaagggcagggcucg

SEQ ID NO: 3967884 - RNA, 14 nt, Human herpesvirus 4 (Epstein-Barr virus)
gugacauguccggg

SEQ ID NO: 3967885 - RNA, 18 nt, Human herpesvirus 4 (Epstein-Barr virus)
gugaccggacgggucuca

SEQ ID NO: 3967886 - RNA, 16 nt, Human herpesvirus 4 (Epstein-Barr virus)
gugagcccaccugucu

SEQ ID NO: 3967887 - RNA, 22 nt, Human herpesvirus 4 (Epstein-Barr virus)
gugaggacggugucugugguug

SEQ ID NO: 3967888 - RNA, 20 nt, Human herpesvirus 4 (Epstein-Barr virus)
gugaggcuauaacgcagguc

SEQ ID NO: 3967889 - RNA, 15 nt, Human herpesvirus 4 (Epstein-Barr virus)
gugaucauggaaacc

SEQ ID NO: 3967890 - RNA, 14 nt, Human herpesvirus 4 (Epstein-Barr virus)
gugcagggggcucg

SEQ ID NO: 3967891 - RNA, 13 nt, Human herpesvirus 4 (Epstein-Barr virus)
gugccagaggccc

SEQ ID NO: 3967892 - RNA, 17 nt, Human herpesvirus 4 (Epstein-Barr virus)
gugccagaugugccugg

SEQ ID NO: 3967893 - RNA, 12 nt, Human herpesvirus 4 (Epstein-Barr virus)
gugcccccacca

SEQ ID NO: 3967894 - RNA, 22 nt, Human herpesvirus 4 (Epstein-Barr virus)
gugccuaaacgugauggugcug

SEQ ID NO: 3967895 - RNA, 22 nt, Human herpesvirus 4 (Epstein-Barr virus)
guggacaaggcaguagaggaca

SEQ ID NO: 3967896 - RNA, 11 nt, Human herpesvirus 4 (Epstein-Barr virus)
guggccaggcc

SEQ ID NO: 3967897 - RNA, 20 nt, Human herpesvirus 4 (Epstein-Barr virus)
guggcuacuugcucagguuu

SEQ ID NO: 3967898 - RNA, 21 nt, Human herpesvirus 4 (Epstein-Barr virus)
gugggccucucuggcugugcu

SEQ ID NO: 3967899 - RNA, 18 nt, Human herpesvirus 4 (Epstein-Barr virus)
gugggcuucgggggccug

SEQ ID NO: 3967900 - RNA, 13 nt, Human herpesvirus 4 (Epstein-Barr virus)
guggugggcucug

SEQ ID NO: 3967901 - RNA, 14 nt, Human herpesvirus 4 (Epstein-Barr virus)
gugucuucugucuc

SEQ ID NO: 3967902 - RNA, 14 nt, Human herpesvirus 4 (Epstein-Barr virus)
gugugcgcgccgcc

SEQ ID NO: 3967903 - RNA, 12 nt, Human herpesvirus 4 (Epstein-Barr virus)
guucuccugauu

SEQ ID NO: 3967904 - RNA, 22 nt, Human herpesvirus 4 (Epstein-Barr virus)
guuguagguguccagcgcucug

SEQ ID NO: 3967905 - RNA, 16 nt, Human herpesvirus 4 (Epstein-Barr virus)
uaaagaaugcccacca

SEQ ID NO: 3967906 - RNA, 14 nt, Human herpesvirus 4 (Epstein-Barr virus)
uaaauaaacucauc

SEQ ID NO: 3967907 - RNA, 15 nt, Human herpesvirus 4 (Epstein-Barr virus)
uaaccauggacgagg

SEQ ID NO: 3967908 - RNA, 13 nt, Human herpesvirus 4 (Epstein-Barr virus)
uaaccugucuacu

SEQ ID NO: 3967909 - RNA, 15 nt, Human herpesvirus 4 (Epstein-Barr virus)
uaacucuuaaaacuu

SEQ ID NO: 3967910 - RNA, 15 nt, Human herpesvirus 4 (Epstein-Barr virus)
uaacugccagagcug

SEQ ID NO: 3967911 - RNA, 14 nt, Human herpesvirus 4 (Epstein-Barr virus)
uaacuugucuacau

SEQ ID NO: 3967912 - RNA, 13 nt, Human herpesvirus 4 (Epstein-Barr virus)
uaaggcuguugac

SEQ ID NO: 3967913 - RNA, 12 nt, Human herpesvirus 4 (Epstein-Barr virus)
uaaucuggaugu

SEQ ID NO: 3967914 - RNA, 20 nt, Human herpesvirus 4 (Epstein-Barr virus)
uacaccgucaacagauuucc

SEQ ID NO: 3967915 - RNA, 17 nt, Human herpesvirus 4 (Epstein-Barr virus)
uacaucccauaccuaca

SEQ ID NO: 3967916 - RNA, 19 nt, Human herpesvirus 4 (Epstein-Barr virus)
uacaucccauaccuacacc

SEQ ID NO: 3967917 - RNA, 19 nt, Human herpesvirus 4 (Epstein-Barr virus)
uaccgccacgcgucagcaa

SEQ ID NO: 3967918 - RNA, 20 nt, Human herpesvirus 4 (Epstein-Barr virus)
uacgaggcccuggcccaccg

SEQ ID NO: 3967919 - RNA, 23 nt, Human herpesvirus 4 (Epstein-Barr virus)
uacucuccgccguuccuucagaa

SEQ ID NO: 3967920 - RNA, 22 nt, Human herpesvirus 4 (Epstein-Barr virus)
uacucuuggcagcaguggccag

SEQ ID NO: 3967921 - RNA, 16 nt, Human herpesvirus 4 (Epstein-Barr virus)
uacuuucaagccacgc

SEQ ID NO: 3967922 - RNA, 22 nt, Human herpesvirus 4 (Epstein-Barr virus)
uagaaacuaugcaugagccaca

SEQ ID NO: 3967923 - RNA, 17 nt, Human herpesvirus 4 (Epstein-Barr virus)
uagaaugacagccuggu

SEQ ID NO: 3967924 - RNA, 17 nt, Human herpesvirus 4 (Epstein-Barr virus)
aacaucucauccccaga

SEQ ID NO: 3967925 - RNA, 22 nt, Human herpesvirus 4 (Epstein-Barr virus)
aacauguccuguuagcuggugc

SEQ ID NO: 3967926 - RNA, 16 nt, Human herpesvirus 4 (Epstein-Barr virus)
aaccaugccaucucug

SEQ ID NO: 3967927 - RNA, 12 nt, Human herpesvirus 4 (Epstein-Barr virus)
aacccccucccc

SEQ ID NO: 3967928 - RNA, 13 nt, Human herpesvirus 4 (Epstein-Barr virus)
aaccugcucucuc

SEQ ID NO: 3967929 - RNA, 19 nt, Human herpesvirus 4 (Epstein-Barr virus)
aacgaucccaggccucagc

SEQ ID NO: 3967930 - RNA, 22 nt, Human herpesvirus 4 (Epstein-Barr virus)
aacgcccagggacauccccaga

SEQ ID NO: 3967931 - RNA, 20 nt, Human herpesvirus 4 (Epstein-Barr virus)
aacuggccaugcaggccugg

SEQ ID NO: 3967932 - RNA, 21 nt, Human herpesvirus 4 (Epstein-Barr virus)
aacuggccaugcaggccugga

SEQ ID NO: 3967933 - RNA, 14 nt, Human herpesvirus 4 (Epstein-Barr virus)
aacuucagcuccag

SEQ ID NO: 3967934 - RNA, 15 nt, Human herpesvirus 4 (Epstein-Barr virus)
aacuuuguccagaug

SEQ ID NO: 3967935 - RNA, 19 nt, Human herpesvirus 4 (Epstein-Barr virus)
aagacuccugccugaauca

SEQ ID NO: 3967936 - RNA, 16 nt, Human herpesvirus 4 (Epstein-Barr virus)
aagagcuuccuggccg

SEQ ID NO: 3967937 - RNA, 18 nt, Human herpesvirus 4 (Epstein-Barr virus)
aagaucgugaggccugag

SEQ ID NO: 3967938 - RNA, 16 nt, Human herpesvirus 4 (Epstein-Barr virus)
aagcaaacggccuggc

SEQ ID NO: 3967939 - RNA, 15 nt, Human herpesvirus 4 (Epstein-Barr virus)
aagcuggccaggcug

SEQ ID NO: 3967940 - RNA, 15 nt, Human herpesvirus 4 (Epstein-Barr virus)
aaggcaguccagggg

SEQ ID NO: 3967941 - RNA, 21 nt, Human herpesvirus 4 (Epstein-Barr virus)
aaggcaguccaggggccacac

SEQ ID NO: 3967942 - RNA, 17 nt, Human herpesvirus 4 (Epstein-Barr virus)
aaggcuccggccccacg

SEQ ID NO: 3967943 - RNA, 22 nt, Human herpesvirus 4 (Epstein-Barr virus)
aaggcucuucgggcaagaugga

SEQ ID NO: 3967944 - RNA, 23 nt, Human herpesvirus 4 (Epstein-Barr virus)
aagucccgggggaggagaagaga

SEQ ID NO: 3967945 - RNA, 18 nt, Human herpesvirus 4 (Epstein-Barr virus)
aagucuauacggccacaa

SEQ ID NO: 3967946 - RNA, 12 nt, Human herpesvirus 4 (Epstein-Barr virus)
aauaaaguugau

SEQ ID NO: 3967947 - RNA, 15 nt, Human herpesvirus 4 (Epstein-Barr virus)
aaucucgcucagagc

SEQ ID NO: 3967948 - RNA, 22 nt, Human herpesvirus 4 (Epstein-Barr virus)
aaugggacgucuuguaaaacuu

SEQ ID NO: 3967949 - RNA, 13 nt, Human herpesvirus 4 (Epstein-Barr virus)
aauucagaccuga

SEQ ID NO: 3967950 - RNA, 23 nt, Human herpesvirus 4 (Epstein-Barr virus)
acaccagauguuuuacacgagga

SEQ ID NO: 3967951 - RNA, 20 nt, Human herpesvirus 4 (Epstein-Barr virus)
acacgggccuggggccauag

SEQ ID NO: 3967952 - RNA, 18 nt, Human herpesvirus 4 (Epstein-Barr virus)
acacgggggugcccccac

SEQ ID NO: 3967953 - RNA, 16 nt, Human herpesvirus 4 (Epstein-Barr virus)
acagcgccagcagggc

SEQ ID NO: 3967954 - RNA, 22 nt, Human herpesvirus 4 (Epstein-Barr virus)
acagcuagcagacauugguguu

SEQ ID NO: 3967955 - RNA, 16 nt, Human herpesvirus 4 (Epstein-Barr virus)
acaucugggaguguag

SEQ ID NO: 3967956 - RNA, 16 nt, Human herpesvirus 4 (Epstein-Barr virus)
acccccacccuucgcc

SEQ ID NO: 3967957 - RNA, 20 nt, Human herpesvirus 4 (Epstein-Barr virus)
acccuguacaccccgaccca

SEQ ID NO: 3967958 - RNA, 21 nt, Human herpesvirus 4 (Epstein-Barr virus)
acccuguagucaccugcacag

SEQ ID NO: 3967959 - RNA, 20 nt, Human herpesvirus 4 (Epstein-Barr virus)
accgccucuacccuccccau

SEQ ID NO: 3967960 - RNA, 16 nt, Human herpesvirus 4 (Epstein-Barr virus)
accggcgcgggagccg

SEQ ID NO: 3967961 - RNA, 16 nt, Human herpesvirus 4 (Epstein-Barr virus)
accggggaggccaggu

SEQ ID NO: 3967962 - RNA, 15 nt, Human herpesvirus 4 (Epstein-Barr virus)
accugcacagaucug

SEQ ID NO: 3967963 - RNA, 22 nt, Human herpesvirus 4 (Epstein-Barr virus)
accugucucucuuugagggggc

SEQ ID NO: 3967964 - RNA, 13 nt, Human herpesvirus 4 (Epstein-Barr virus)
acgagaaggagga

SEQ ID NO: 3967965 - RNA, 12 nt, Human herpesvirus 4 (Epstein-Barr virus)
acgaugacuccc

SEQ ID NO: 3967966 - RNA, 16 nt, Human herpesvirus 4 (Epstein-Barr virus)
acgcuuccacccccug

SEQ ID NO: 3967967 - RNA, 21 nt, Human herpesvirus 4 (Epstein-Barr virus)
acggccucaaaggccucggcg

SEQ ID NO: 3967968 - RNA, 16 nt, Human herpesvirus 4 (Epstein-Barr virus)
acggggugcucccccu

SEQ ID NO: 3967969 - RNA, 15 nt, Human herpesvirus 4 (Epstein-Barr virus)
acguccaccccaccc

SEQ ID NO: 3967970 - RNA, 15 nt, Human herpesvirus 4 (Epstein-Barr virus)
acgugcaaggaugga

SEQ ID NO: 3967971 - RNA, 13 nt, Human herpesvirus 4 (Epstein-Barr virus)
acucaggcacggu

SEQ ID NO: 3967972 - RNA, 15 nt, Human herpesvirus 4 (Epstein-Barr virus)
acucggccacacagu

SEQ ID NO: 3967973 - RNA, 23 nt, Human herpesvirus 4 (Epstein-Barr virus)
acucugcauggagaagcuggacg

SEQ ID NO: 3967974 - RNA, 14 nt, Human herpesvirus 4 (Epstein-Barr virus)
acucuuaaaacuug

SEQ ID NO: 3967975 - RNA, 13 nt, Human herpesvirus 4 (Epstein-Barr virus)
acugacacacagg

SEQ ID NO: 3967976 - RNA, 15 nt, Human herpesvirus 4 (Epstein-Barr virus)
acugcagugggccuc

SEQ ID NO: 3967977 - RNA, 17 nt, Human herpesvirus 4 (Epstein-Barr virus)
acugccuuguccacugg

SEQ ID NO: 3967978 - RNA, 13 nt, Human herpesvirus 4 (Epstein-Barr virus)
acugcgagggggc

SEQ ID NO: 3967979 - RNA, 15 nt, Human herpesvirus 4 (Epstein-Barr virus)
acugcgagggggccu

SEQ ID NO: 3967980 - RNA, 15 nt, Human herpesvirus 4 (Epstein-Barr virus)
acugcgaucuggacc

SEQ ID NO: 3967981 - RNA, 14 nt, Human herpesvirus 4 (Epstein-Barr virus)
acugcgaugagggc

SEQ ID NO: 3967982 - RNA, 18 nt, Human herpesvirus 4 (Epstein-Barr virus)
acugcguccaccuggcca

SEQ ID NO: 3967983 - RNA, 23 nt, Human herpesvirus 4 (Epstein-Barr virus)
acuggaugcaggaccuagaaugu

SEQ ID NO: 3967984 - RNA, 23 nt, Human herpesvirus 4 (Epstein-Barr virus)
acuggggugugaagggcagggcu

SEQ ID NO: 3967985 - RNA, 17 nt, Human herpesvirus 4 (Epstein-Barr virus)
acugugcacucucuccc

SEQ ID NO: 3967986 - RNA, 23 nt, Human herpesvirus 4 (Epstein-Barr virus)
acuucgggggcgacugccgccgc

SEQ ID NO: 3967987 - RNA, 20 nt, Human herpesvirus 4 (Epstein-Barr virus)
agaaaagagagcggcuguga

SEQ ID NO: 3967988 - RNA, 21 nt, Human herpesvirus 4 (Epstein-Barr virus)
agaagcaccucaaccuggaga

SEQ ID NO: 3967989 - RNA, 22 nt, Human herpesvirus 4 (Epstein-Barr virus)
agaagcggggcugggugggaga

SEQ ID NO: 3967990 - RNA, 14 nt, Human herpesvirus 4 (Epstein-Barr virus)
agacaccuggccca

SEQ ID NO: 3967991 - RNA, 22 nt, Human herpesvirus 4 (Epstein-Barr virus)
agacaccuggcccacuggaugc

SEQ ID NO: 3967992 - RNA, 16 nt, Human herpesvirus 4 (Epstein-Barr virus)
agaccaauacccagga

SEQ ID NO: 3967993 - RNA, 16 nt, Human herpesvirus 4 (Epstein-Barr virus)
agacccaucugagggc

SEQ ID NO: 3967994 - RNA, 21 nt, Human herpesvirus 4 (Epstein-Barr virus)
agacccaucugagggcaguga

SEQ ID NO: 3967995 - RNA, 12 nt, Human herpesvirus 4 (Epstein-Barr virus)
agacgcagcugu

SEQ ID NO: 3967996 - RNA, 14 nt, Human herpesvirus 4 (Epstein-Barr virus)
agacuaugcauaca

SEQ ID NO: 3967997 - RNA, 16 nt, Human herpesvirus 4 (Epstein-Barr virus)
agacugcaaacccugg

SEQ ID NO: 3967998 - RNA, 19 nt, Human herpesvirus 4 (Epstein-Barr virus)
agagagguugcgcugcuug

SEQ ID NO: 3967999 - RNA, 23 nt, Human herpesvirus 4 (Epstein-Barr virus)
agagccagccggguccgugcggc

SEQ ID NO: 3968000 - RNA, 17 nt, Human herpesvirus 4 (Epstein-Barr virus)
agagccccuuuugcccc

SEQ ID NO: 3968001 - RNA, 15 nt, Human herpesvirus 4 (Epstein-Barr virus)
agagccucugccaca

SEQ ID NO: 3968002 - RNA, 13 nt, Human herpesvirus 4 (Epstein-Barr virus)
agagcgacgagga

SEQ ID NO: 3968003 - RNA, 15 nt, Human herpesvirus 4 (Epstein-Barr virus)
agaggaggaggauga

SEQ ID NO: 3968004 - RNA, 14 nt, Human herpesvirus 4 (Epstein-Barr virus)
agaggaugauccug

SEQ ID NO: 3968005 - RNA, 22 nt, Human herpesvirus 4 (Epstein-Barr virus)
agaggucccauguacagcacaa

SEQ ID NO: 3968006 - RNA, 16 nt, Human herpesvirus 4 (Epstein-Barr virus)
agauagccggccaggc

SEQ ID NO: 3968007 - RNA, 19 nt, Human herpesvirus 4 (Epstein-Barr virus)
agauagccggccaggcaga

SEQ ID NO: 3968008 - RNA, 14 nt, Human herpesvirus 4 (Epstein-Barr virus)
agaucgugaggccu

SEQ ID NO: 3968009 - RNA, 14 nt, Human herpesvirus 4 (Epstein-Barr virus)
agauugccuucugu

SEQ ID NO: 3968010 - RNA, 15 nt, Human herpesvirus 4 (Epstein-Barr virus)
agcaggagcuugagg

SEQ ID NO: 3968011 - RNA, 10 nt, Human herpesvirus 4 (Epstein-Barr virus)
agcaggagga

SEQ ID NO: 3968012 - RNA, 18 nt, Human herpesvirus 4 (Epstein-Barr virus)
aaaacagaggcuggaugc

SEQ ID NO: 3968013 - RNA, 11 nt, Human herpesvirus 4 (Epstein-Barr virus)
aaaagagacug

SEQ ID NO: 3968014 - RNA, 12 nt, Human herpesvirus 4 (Epstein-Barr virus)
aaaaguccagcg

SEQ ID NO: 3968015 - RNA, 17 nt, Human herpesvirus 4 (Epstein-Barr virus)
aaacagaggcuggaugc

SEQ ID NO: 3968016 - RNA, 17 nt, Human herpesvirus 4 (Epstein-Barr virus)
aaacaggugagucagcc

SEQ ID NO: 3968017 - RNA, 14 nt, Human herpesvirus 4 (Epstein-Barr virus)
aaauuuacaccuga

SEQ ID NO: 3968018 - RNA, 15 nt, Human herpesvirus 4 (Epstein-Barr virus)
aacaaugugaaccuu

SEQ ID NO: 3968019 - RNA, 14 nt, Human herpesvirus 4 (Epstein-Barr virus)
aacaauuacagaua

SEQ ID NO: 3968020 - RNA, 19 nt, Human herpesvirus 4 (Epstein-Barr virus)
aacacggagaucucagaau

SEQ ID NO: 3968021 - RNA, 13 nt, Human herpesvirus 4 (Epstein-Barr virus)
aacacgggccugg

SEQ ID NO: 3968022 - RNA, 19 nt, Human herpesvirus 4 (Epstein-Barr virus)
aacccccggcucucaggcc

SEQ ID NO: 3968023 - RNA, 18 nt, Human herpesvirus 4 (Epstein-Barr virus)
aaccccuaccucggcauc

SEQ ID NO: 3968024 - RNA, 22 nt, Human herpesvirus 4 (Epstein-Barr virus)
aacgggggaaggaaaggccugc

SEQ ID NO: 3968025 - RNA, 21 nt, Human herpesvirus 4 (Epstein-Barr virus)
aacuaugcaugagccacaggc

SEQ ID NO: 3968026 - RNA, 19 nt, Human herpesvirus 4 (Epstein-Barr virus)
aacucccccaaacaugucc

SEQ ID NO: 3968027 - RNA, 18 nt, Human herpesvirus 4 (Epstein-Barr virus)
aacugacacacaggccug

SEQ ID NO: 3968028 - RNA, 18 nt, Human herpesvirus 4 (Epstein-Barr virus)
aacugcgagggggccugg

SEQ ID NO: 3968029 - RNA, 19 nt, Human herpesvirus 4 (Epstein-Barr virus)
aacugcgagggggccuggu

SEQ ID NO: 3968030 - RNA, 13 nt, Human herpesvirus 4 (Epstein-Barr virus)
aacuugacuacaa

SEQ ID NO: 3968031 - RNA, 23 nt, Human herpesvirus 4 (Epstein-Barr virus)
aacuuguuaggagacgcccucaa

SEQ ID NO: 3968032 - RNA, 13 nt, Human herpesvirus 4 (Epstein-Barr virus)
aagaccaaggccc

SEQ ID NO: 3968033 - RNA, 20 nt, Human herpesvirus 4 (Epstein-Barr virus)
aagagccgcuccguggcccc

SEQ ID NO: 3968034 - RNA, 18 nt, Human herpesvirus 4 (Epstein-Barr virus)
aagcggcccagcagaucc

SEQ ID NO: 3968035 - RNA, 21 nt, Human herpesvirus 4 (Epstein-Barr virus)
aagcuacaaacacgggccugg

SEQ ID NO: 3968036 - RNA, 14 nt, Human herpesvirus 4 (Epstein-Barr virus)
aaggagugccucug

SEQ ID NO: 3968037 - RNA, 16 nt, Human herpesvirus 4 (Epstein-Barr virus)
aaggcccuaauucagc

SEQ ID NO: 3968038 - RNA, 13 nt, Human herpesvirus 4 (Epstein-Barr virus)
aagggaggagugc

SEQ ID NO: 3968039 - RNA, 22 nt, Human herpesvirus 4 (Epstein-Barr virus)
aaguacugaaacgucaggucuu

SEQ ID NO: 3968040 - RNA, 21 nt, Human herpesvirus 4 (Epstein-Barr virus)
aauccuugggugaccuggcca

SEQ ID NO: 3968041 - RNA, 19 nt, Human herpesvirus 4 (Epstein-Barr virus)
aaucuucuucauagccuga

SEQ ID NO: 3968042 - RNA, 16 nt, Human herpesvirus 4 (Epstein-Barr virus)
aaugaccgugcaugca

SEQ ID NO: 3968043 - RNA, 19 nt, Human herpesvirus 4 (Epstein-Barr virus)
acaaacucucucaucucca

SEQ ID NO: 3968044 - RNA, 20 nt, Human herpesvirus 4 (Epstein-Barr virus)
acaacggcugugacuacacc

SEQ ID NO: 3968045 - RNA, 23 nt, Human herpesvirus 4 (Epstein-Barr virus)
acaagaaucggguggcuuccaga

SEQ ID NO: 3968046 - RNA, 15 nt, Human herpesvirus 4 (Epstein-Barr virus)
acacacaggccuggc

SEQ ID NO: 3968047 - RNA, 23 nt, Human herpesvirus 4 (Epstein-Barr virus)
acaccaccccaccauaugaugac

SEQ ID NO: 3968048 - RNA, 15 nt, Human herpesvirus 4 (Epstein-Barr virus)
acacgccagagacaa

SEQ ID NO: 3968049 - RNA, 22 nt, Human herpesvirus 4 (Epstein-Barr virus)
acacgccagagacaaggcaggc

SEQ ID NO: 3968050 - RNA, 13 nt, Human herpesvirus 4 (Epstein-Barr virus)
acacgggccuggg

SEQ ID NO: 3968051 - RNA, 17 nt, Human herpesvirus 4 (Epstein-Barr virus)
acagauugucuuccaca

SEQ ID NO: 3968052 - RNA, 16 nt, Human herpesvirus 4 (Epstein-Barr virus)
acagcaauggcacgga

SEQ ID NO: 3968053 - RNA, 23 nt, Human herpesvirus 4 (Epstein-Barr virus)
acaggcccucgagccauuugagg

SEQ ID NO: 3968054 - RNA, 14 nt, Human herpesvirus 4 (Epstein-Barr virus)
acaugucucagagg

SEQ ID NO: 3968055 - RNA, 11 nt, Human herpesvirus 4 (Epstein-Barr virus)
acauuggcagc

SEQ ID NO: 3968056 - RNA, 21 nt, Human herpesvirus 4 (Epstein-Barr virus)
acauuggcagcagcucuggca

SEQ ID NO: 3968057 - RNA, 21 nt, Human herpesvirus 4 (Epstein-Barr virus)
accacacagguagcaaggacc

SEQ ID NO: 3968058 - RNA, 15 nt, Human herpesvirus 4 (Epstein-Barr virus)
accacgaugacuccc

SEQ ID NO: 3968059 - RNA, 14 nt, Human herpesvirus 4 (Epstein-Barr virus)
accacugaccuggu

SEQ ID NO: 3968060 - RNA, 21 nt, Human herpesvirus 4 (Epstein-Barr virus)
accauggaugugaaugccccc

SEQ ID NO: 3968061 - RNA, 19 nt, Human herpesvirus 4 (Epstein-Barr virus)
accccacacucccuccaga

SEQ ID NO: 3968062 - RNA, 17 nt, Human herpesvirus 4 (Epstein-Barr virus)
accccagagcagcccgc

SEQ ID NO: 3968063 - RNA, 16 nt, Human herpesvirus 4 (Epstein-Barr virus)
acccccuggagccagc

SEQ ID NO: 3968064 - RNA, 17 nt, Human herpesvirus 4 (Epstein-Barr virus)
accccgaguccaaggcc

SEQ ID NO: 3968065 - RNA, 18 nt, Human herpesvirus 4 (Epstein-Barr virus)
acccgaggucaagucccg

SEQ ID NO: 3968066 - RNA, 20 nt, Human herpesvirus 4 (Epstein-Barr virus)
acccuugcccucuccagcaa

SEQ ID NO: 3968067 - RNA, 18 nt, Human herpesvirus 4 (Epstein-Barr virus)
accgauagcauggccgcc

SEQ ID NO: 3968068 - RNA, 14 nt, Human herpesvirus 4 (Epstein-Barr virus)
accguggccaggcc

SEQ ID NO: 3968069 - RNA, 18 nt, Human herpesvirus 4 (Epstein-Barr virus)
accuauagauccugggcc

SEQ ID NO: 3968070 - RNA, 17 nt, Human herpesvirus 4 (Epstein-Barr virus)
accugcucucucuggag

SEQ ID NO: 3968071 - RNA, 20 nt, Human herpesvirus 4 (Epstein-Barr virus)
accuuuccaucacugaccca

SEQ ID NO: 3968072 - RNA, 16 nt, Human herpesvirus 4 (Epstein-Barr virus)
acgaccuugaccacga

SEQ ID NO: 3968073 - RNA, 17 nt, Human herpesvirus 4 (Epstein-Barr virus)
acgacuauccaggucuu

SEQ ID NO: 3968074 - RNA, 15 nt, Human herpesvirus 4 (Epstein-Barr virus)
acgaggacgaggagg

SEQ ID NO: 3968075 - RNA, 16 nt, Human herpesvirus 4 (Epstein-Barr virus)
acgaggacgaggaggc

SEQ ID NO: 3968076 - RNA, 17 nt, Human herpesvirus 4 (Epstein-Barr virus)
acgccccgaaagcggcc

SEQ ID NO: 3968077 - RNA, 21 nt, Human herpesvirus 4 (Epstein-Barr virus)
acggcccacgucuuuaccacc

SEQ ID NO: 3968078 - RNA, 17 nt, Human herpesvirus 4 (Epstein-Barr virus)
acgguggaacaggagca

SEQ ID NO: 3968079 - RNA, 16 nt, Human herpesvirus 4 (Epstein-Barr virus)
acguccgugagagccu

SEQ ID NO: 3968080 - RNA, 16 nt, Human herpesvirus 4 (Epstein-Barr virus)
acgugaaccucccccc

SEQ ID NO: 3968081 - RNA, 18 nt, Human herpesvirus 4 (Epstein-Barr virus)
acgugcccagcuccgugg

SEQ ID NO: 3968082 - RNA, 19 nt, Human herpesvirus 4 (Epstein-Barr virus)
acguggguccccucugccg

SEQ ID NO: 3968083 - RNA, 19 nt, Human herpesvirus 4 (Epstein-Barr virus)
acuacgagggccucuggca

SEQ ID NO: 3968084 - RNA, 14 nt, Human herpesvirus 4 (Epstein-Barr virus)
acuauaccaaagcu

SEQ ID NO: 3968085 - RNA, 14 nt, Human herpesvirus 4 (Epstein-Barr virus)
acucaagagaucag

SEQ ID NO: 3968086 - RNA, 22 nt, Human herpesvirus 4 (Epstein-Barr virus)
acucgaagcggucucagacacc

SEQ ID NO: 3968087 - RNA, 19 nt, Human herpesvirus 4 (Epstein-Barr virus)
acucgagagaggccucugc

SEQ ID NO: 3968088 - RNA, 20 nt, Human herpesvirus 4 (Epstein-Barr virus)
acucggccacacagugggcu

SEQ ID NO: 3968089 - RNA, 22 nt, Human herpesvirus 4 (Epstein-Barr virus)
acugccccgguccccccagaag

SEQ ID NO: 3968090 - RNA, 14 nt, Human herpesvirus 4 (Epstein-Barr virus)
acugccgccgccuc

SEQ ID NO: 3968091 - RNA, 15 nt, Human herpesvirus 4 (Epstein-Barr virus)
acugcgggugucuca

SEQ ID NO: 3968092 - RNA, 20 nt, Human herpesvirus 4 (Epstein-Barr virus)
acugcguccaccuggccacc

SEQ ID NO: 3968093 - RNA, 21 nt, Human herpesvirus 4 (Epstein-Barr virus)
acuggcacgguggcuugggcu

SEQ ID NO: 3968094 - RNA, 22 nt, Human herpesvirus 4 (Epstein-Barr virus)
acuggccaugcaggccuggaca

SEQ ID NO: 3968095 - RNA, 21 nt, Human herpesvirus 4 (Epstein-Barr virus)
acugggaugaacccuggggca

SEQ ID NO: 3968096 - RNA, 17 nt, Human herpesvirus 4 (Epstein-Barr virus)
acugggggcaaagccag

SEQ ID NO: 3968097 - RNA, 14 nt, Human herpesvirus 4 (Epstein-Barr virus)
acugucacaccagu

SEQ ID NO: 3968098 - RNA, 18 nt, Human herpesvirus 4 (Epstein-Barr virus)
acuguuccuauaugcucu

SEQ ID NO: 3968099 - RNA, 15 nt, Human herpesvirus 4 (Epstein-Barr virus)
acuugaggugggcug

SEQ ID NO: 3968100 - RNA, 17 nt, Human herpesvirus 4 (Epstein-Barr virus)
acuuuuauuuauugcau

SEQ ID NO: 3968101 - RNA, 21 nt, Human herpesvirus 4 (Epstein-Barr virus)
agaaaacucugcauggagaag

SEQ ID NO: 3968102 - RNA, 20 nt, Human herpesvirus 4 (Epstein-Barr virus)
agaagacguuguaggugucc

SEQ ID NO: 3968103 - RNA, 14 nt, Human herpesvirus 4 (Epstein-Barr virus)
agaagagaggcuuc

SEQ ID NO: 3968104 - RNA, 16 nt, Human herpesvirus 4 (Epstein-Barr virus)
agaaguuggugguggg

SEQ ID NO: 3968105 - RNA, 20 nt, Human herpesvirus 4 (Epstein-Barr virus)
agaaucggguggcuuccaga

SEQ ID NO: 3968106 - RNA, 14 nt, Human herpesvirus 4 (Epstein-Barr virus)
agaccccugggcuc

SEQ ID NO: 3968107 - RNA, 20 nt, Human herpesvirus 4 (Epstein-Barr virus)
agacucccauguaagccugc

SEQ ID NO: 3968108 - RNA, 16 nt, Human herpesvirus 4 (Epstein-Barr virus)
agacugcacaggauga

SEQ ID NO: 3968109 - RNA, 22 nt, Human herpesvirus 4 (Epstein-Barr virus)
agacuucagguggucauguuuc

SEQ ID NO: 3968110 - RNA, 15 nt, Human herpesvirus 4 (Epstein-Barr virus)
agagaaugacagcaa

SEQ ID NO: 3968111 - RNA, 23 nt, Human herpesvirus 4 (Epstein-Barr virus)
agagaucagcaaccuugggggca

SEQ ID NO: 3968112 - RNA, 23 nt, Human herpesvirus 4 (Epstein-Barr virus)
agagcagauuuccgucagccagg

SEQ ID NO: 3968113 - RNA, 16 nt, Human herpesvirus 4 (Epstein-Barr virus)
agagccgcuccguggc

SEQ ID NO: 3968114 - RNA, 15 nt, Human herpesvirus 4 (Epstein-Barr virus)
agagcucuggaggac

SEQ ID NO: 3968115 - RNA, 13 nt, Human herpesvirus 4 (Epstein-Barr virus)
agaggauuggcug

SEQ ID NO: 3968116 - RNA, 20 nt, Human herpesvirus 4 (Epstein-Barr virus)
agaggcaaacauacaggagg

SEQ ID NO: 3968117 - RNA, 13 nt, Human herpesvirus 4 (Epstein-Barr virus)
agagggaaaagag

SEQ ID NO: 3968118 - RNA, 18 nt, Human herpesvirus 4 (Epstein-Barr virus)
agagugcccuggaggccu

SEQ ID NO: 3968119 - RNA, 21 nt, Human herpesvirus 4 (Epstein-Barr virus)
agauagccacccgcuguauga

SEQ ID NO: 3968120 - RNA, 13 nt, Human herpesvirus 4 (Epstein-Barr virus)
agaucgccugcca

SEQ ID NO: 3968121 - RNA, 21 nt, Human herpesvirus 4 (Epstein-Barr virus)
agaugaggccccuuacuucca

SEQ ID NO: 3968122 - RNA, 19 nt, Human herpesvirus 4 (Epstein-Barr virus)
agaugcauacgcugaguga

SEQ ID NO: 3968123 - RNA, 14 nt, Human herpesvirus 4 (Epstein-Barr virus)
agauggacuugagg

SEQ ID NO: 3968124 - RNA, 18 nt, Human herpesvirus 4 (Epstein-Barr virus)
ccguuccaggcucuccag

SEQ ID NO: 3968125 - RNA, 16 nt, Human herpesvirus 4 (Epstein-Barr virus)
ccuacaccaccccacc

SEQ ID NO: 3968126 - RNA, 22 nt, Human herpesvirus 4 (Epstein-Barr virus)
ccuaucacgggggucaagcaaa

SEQ ID NO: 3968127 - RNA, 16 nt, Human herpesvirus 4 (Epstein-Barr virus)
ccucaaaggccucggc

SEQ ID NO: 3968128 - RNA, 20 nt, Human herpesvirus 4 (Epstein-Barr virus)
ccucaacaaggagugccucu

SEQ ID NO: 3968129 - RNA, 15 nt, Human herpesvirus 4 (Epstein-Barr virus)
ccucagaggaggagg

SEQ ID NO: 3968130 - RNA, 16 nt, Human herpesvirus 4 (Epstein-Barr virus)
ccucagcccccccugu

SEQ ID NO: 3968131 - RNA, 18 nt, Human herpesvirus 4 (Epstein-Barr virus)
ccucauucccccaugaga

SEQ ID NO: 3968132 - RNA, 15 nt, Human herpesvirus 4 (Epstein-Barr virus)
ccucauuggcuuugc

SEQ ID NO: 3968133 - RNA, 19 nt, Human herpesvirus 4 (Epstein-Barr virus)
ccuccauuccacccacuga

SEQ ID NO: 3968134 - RNA, 13 nt, Human herpesvirus 4 (Epstein-Barr virus)
ccuccccuguggc

SEQ ID NO: 3968135 - RNA, 13 nt, Human herpesvirus 4 (Epstein-Barr virus)
ccucggccugggg

SEQ ID NO: 3968136 - RNA, 19 nt, Human herpesvirus 4 (Epstein-Barr virus)
ccucgguggccugcucacc

SEQ ID NO: 3968137 - RNA, 17 nt, Human herpesvirus 4 (Epstein-Barr virus)
ccucuagcaucugcuau

SEQ ID NO: 3968138 - RNA, 16 nt, Human herpesvirus 4 (Epstein-Barr virus)
ccucugccuggccggc

SEQ ID NO: 3968139 - RNA, 22 nt, Human herpesvirus 4 (Epstein-Barr virus)
ccucuugauagggauccgcuag

SEQ ID NO: 3968140 - RNA, 15 nt, Human herpesvirus 4 (Epstein-Barr virus)
ccucuuuguggccuu

SEQ ID NO: 3968141 - RNA, 15 nt, Human herpesvirus 4 (Epstein-Barr virus)
ccucuuuuggcuggc

SEQ ID NO: 3968142 - RNA, 23 nt, Human herpesvirus 4 (Epstein-Barr virus)
ccugaauccgcgcagccuguuca

SEQ ID NO: 3968143 - RNA, 15 nt, Human herpesvirus 4 (Epstein-Barr virus)
ccugacggugguggg

SEQ ID NO: 3968144 - RNA, 23 nt, Human herpesvirus 4 (Epstein-Barr virus)
ccugagcuggacgagguccugga

SEQ ID NO: 3968145 - RNA, 19 nt, Human herpesvirus 4 (Epstein-Barr virus)
ccugaucugggagaugaga

SEQ ID NO: 3968146 - RNA, 17 nt, Human herpesvirus 4 (Epstein-Barr virus)
ccugcacggcccuccag

SEQ ID NO: 3968147 - RNA, 14 nt, Human herpesvirus 4 (Epstein-Barr virus)
ccugcccucccacu

SEQ ID NO: 3968148 - RNA, 13 nt, Human herpesvirus 4 (Epstein-Barr virus)
ccugcggggaacu

SEQ ID NO: 3968149 - RNA, 21 nt, Human herpesvirus 4 (Epstein-Barr virus)
ccugcuggccgagcuggaggc

SEQ ID NO: 3968150 - RNA, 14 nt, Human herpesvirus 4 (Epstein-Barr virus)
ccugcuucacgccu

SEQ ID NO: 3968151 - RNA, 19 nt, Human herpesvirus 4 (Epstein-Barr virus)
ccuggaagaaucauggccu

SEQ ID NO: 3968152 - RNA, 17 nt, Human herpesvirus 4 (Epstein-Barr virus)
ccuggccgggcgccugc

SEQ ID NO: 3968153 - RNA, 14 nt, Human herpesvirus 4 (Epstein-Barr virus)
ccuggcggcccagc

SEQ ID NO: 3968154 - RNA, 18 nt, Human herpesvirus 4 (Epstein-Barr virus)
ccuggcggcccagcccga

SEQ ID NO: 3968155 - RNA, 14 nt, Human herpesvirus 4 (Epstein-Barr virus)
ccugggcugccccg

SEQ ID NO: 3968156 - RNA, 20 nt, Human herpesvirus 4 (Epstein-Barr virus)
ccuggggccauaguggcggc

SEQ ID NO: 3968157 - RNA, 16 nt, Human herpesvirus 4 (Epstein-Barr virus)
ccugguacaggaccau

SEQ ID NO: 3968158 - RNA, 22 nt, Human herpesvirus 4 (Epstein-Barr virus)
ccugucgauaucccugcugucu

SEQ ID NO: 3968159 - RNA, 18 nt, Human herpesvirus 4 (Epstein-Barr virus)
ccugucuccccucgagcg

SEQ ID NO: 3968160 - RNA, 19 nt, Human herpesvirus 4 (Epstein-Barr virus)
ccuguggagauuaggggua

SEQ ID NO: 3968161 - RNA, 15 nt, Human herpesvirus 4 (Epstein-Barr virus)
ccuuagccacacugu

SEQ ID NO: 3968162 - RNA, 16 nt, Human herpesvirus 4 (Epstein-Barr virus)
ccuugcucgcagcugg

SEQ ID NO: 3968163 - RNA, 22 nt, Human herpesvirus 4 (Epstein-Barr virus)
ccuuggcgggucauccgccacc

SEQ ID NO: 3968164 - RNA, 18 nt, Human herpesvirus 4 (Epstein-Barr virus)
ccuuuaggcguaacuugu

SEQ ID NO: 3968165 - RNA, 16 nt, Human herpesvirus 4 (Epstein-Barr virus)
cgaagcggucucagac

SEQ ID NO: 3968166 - RNA, 22 nt, Human herpesvirus 4 (Epstein-Barr virus)
cgacacgguuauggcagagcuu

SEQ ID NO: 3968167 - RNA, 18 nt, Human herpesvirus 4 (Epstein-Barr virus)
cgaggacggggaagagga

SEQ ID NO: 3968168 - RNA, 13 nt, Human herpesvirus 4 (Epstein-Barr virus)
cgagggccucugg

SEQ ID NO: 3968169 - RNA, 13 nt, Human herpesvirus 4 (Epstein-Barr virus)
cgagggugaggcc

SEQ ID NO: 3968170 - RNA, 16 nt, Human herpesvirus 4 (Epstein-Barr virus)
cgauggucgucaucug

SEQ ID NO: 3968171 - RNA, 20 nt, Human herpesvirus 4 (Epstein-Barr virus)
cgaugucggggcugcuggcg

SEQ ID NO: 3968172 - RNA, 21 nt, Human herpesvirus 4 (Epstein-Barr virus)
cgccagcgccuccucgcaggc

SEQ ID NO: 3968173 - RNA, 18 nt, Human herpesvirus 4 (Epstein-Barr virus)
cgccgccccaggggucuc

SEQ ID NO: 3968174 - RNA, 15 nt, Human herpesvirus 4 (Epstein-Barr virus)
cgccuccucgcaggc

SEQ ID NO: 3968175 - RNA, 18 nt, Human herpesvirus 4 (Epstein-Barr virus)
cgcggacuccgugaccaa

SEQ ID NO: 3968176 - RNA, 14 nt, Human herpesvirus 4 (Epstein-Barr virus)
cgcggugagggccg

SEQ ID NO: 3968177 - RNA, 20 nt, Human herpesvirus 4 (Epstein-Barr virus)
cgcucugcgccagccccgcc

SEQ ID NO: 3968178 - RNA, 23 nt, Human herpesvirus 4 (Epstein-Barr virus)
cgcucuggucgcccccucugccu

SEQ ID NO: 3968179 - RNA, 23 nt, Human herpesvirus 4 (Epstein-Barr virus)
cggccucgccuucuccucagccu

SEQ ID NO: 3968180 - RNA, 15 nt, Human herpesvirus 4 (Epstein-Barr virus)
cgggcacugcgucca

SEQ ID NO: 3968181 - RNA, 18 nt, Human herpesvirus 4 (Epstein-Barr virus)
cgggcaucuuaucagaga

SEQ ID NO: 3968182 - RNA, 20 nt, Human herpesvirus 4 (Epstein-Barr virus)
cgggcggcucaggaucaggg

SEQ ID NO: 3968183 - RNA, 18 nt, Human herpesvirus 4 (Epstein-Barr virus)
cggggguggaggcugcgc

SEQ ID NO: 3968184 - RNA, 17 nt, Human herpesvirus 4 (Epstein-Barr virus)
cggugcaaggacggggg

SEQ ID NO: 3968185 - RNA, 13 nt, Human herpesvirus 4 (Epstein-Barr virus)
cggugccugugga

SEQ ID NO: 3968186 - RNA, 21 nt, Human herpesvirus 4 (Epstein-Barr virus)
cggugcugaccggcucggcca

SEQ ID NO: 3968187 - RNA, 21 nt, Human herpesvirus 4 (Epstein-Barr virus)
cggugcugccagagccucugc

SEQ ID NO: 3968188 - RNA, 18 nt, Human herpesvirus 4 (Epstein-Barr virus)
cgguggccugcucaccau

SEQ ID NO: 3968189 - RNA, 16 nt, Human herpesvirus 4 (Epstein-Barr virus)
cgguuagugugccucu

SEQ ID NO: 3968190 - RNA, 21 nt, Human herpesvirus 4 (Epstein-Barr virus)
cguauauguguugagaugagu

SEQ ID NO: 3968191 - RNA, 20 nt, Human herpesvirus 4 (Epstein-Barr virus)
cgucagcaacugcguccucu

SEQ ID NO: 3968192 - RNA, 22 nt, Human herpesvirus 4 (Epstein-Barr virus)
cgucccagggccggaaccugag

SEQ ID NO: 3968193 - RNA, 16 nt, Human herpesvirus 4 (Epstein-Barr virus)
cgugaucaugagggcu

SEQ ID NO: 3968194 - RNA, 18 nt, Human herpesvirus 4 (Epstein-Barr virus)
cguuaacauggacaugcu

SEQ ID NO: 3968195 - RNA, 16 nt, Human herpesvirus 4 (Epstein-Barr virus)
cuaaaagcagccaccu

SEQ ID NO: 3968196 - RNA, 22 nt, Human herpesvirus 4 (Epstein-Barr virus)
cuaauggaauauuaauaaauau

SEQ ID NO: 3968197 - RNA, 21 nt, Human herpesvirus 4 (Epstein-Barr virus)
cuacaucaauggaacccuagc

SEQ ID NO: 3968198 - RNA, 18 nt, Human herpesvirus 4 (Epstein-Barr virus)
cuaccugucggcccugcg

SEQ ID NO: 3968199 - RNA, 17 nt, Human herpesvirus 4 (Epstein-Barr virus)
cuacugccuuacacugg

SEQ ID NO: 3968200 - RNA, 14 nt, Human herpesvirus 4 (Epstein-Barr virus)
cuagaagugcuggg

SEQ ID NO: 3968201 - RNA, 18 nt, Human herpesvirus 4 (Epstein-Barr virus)
cuagcucacuuucagugg

SEQ ID NO: 3968202 - RNA, 19 nt, Human herpesvirus 4 (Epstein-Barr virus)
cuaggagaaggagccucgc

SEQ ID NO: 3968203 - RNA, 12 nt, Human herpesvirus 4 (Epstein-Barr virus)
cuauaaaaauuc

SEQ ID NO: 3968204 - RNA, 13 nt, Human herpesvirus 4 (Epstein-Barr virus)
cucaaccgccagg

SEQ ID NO: 3968205 - RNA, 20 nt, Human herpesvirus 4 (Epstein-Barr virus)
cucaaggcagucuccaccuu

SEQ ID NO: 3968206 - RNA, 23 nt, Human herpesvirus 4 (Epstein-Barr virus)
cucagagggggugccugugccuc

SEQ ID NO: 3968207 - RNA, 13 nt, Human herpesvirus 4 (Epstein-Barr virus)
cucagccuccaac

SEQ ID NO: 3968208 - RNA, 17 nt, Human herpesvirus 4 (Epstein-Barr virus)
cucagcucaaccgccag

SEQ ID NO: 3968209 - RNA, 19 nt, Human herpesvirus 4 (Epstein-Barr virus)
cucagcuuggggccaccgg

SEQ ID NO: 3968210 - RNA, 22 nt, Human herpesvirus 4 (Epstein-Barr virus)
cucaggaagcuggccaggcugg

SEQ ID NO: 3968211 - RNA, 21 nt, Human herpesvirus 4 (Epstein-Barr virus)
cucaggcacggucgccccucc

SEQ ID NO: 3968212 - RNA, 20 nt, Human herpesvirus 4 (Epstein-Barr virus)
cucaggccucccagucuauc

SEQ ID NO: 3968213 - RNA, 18 nt, Human herpesvirus 4 (Epstein-Barr virus)
cucauggaggggcggcag

SEQ ID NO: 3968214 - RNA, 22 nt, Human herpesvirus 4 (Epstein-Barr virus)
cuccacuuacaaccaagccacu

SEQ ID NO: 3968215 - RNA, 22 nt, Human herpesvirus 4 (Epstein-Barr virus)
cucccgccccuguccacugccc

SEQ ID NO: 3968216 - RNA, 12 nt, Human herpesvirus 4 (Epstein-Barr virus)
cucccucccccu

SEQ ID NO: 3968217 - RNA, 16 nt, Human herpesvirus 4 (Epstein-Barr virus)
cuccgcaguccggaga

SEQ ID NO: 3968218 - RNA, 16 nt, Human herpesvirus 4 (Epstein-Barr virus)
cuccggauucaccggc

SEQ ID NO: 3968219 - RNA, 18 nt, Human herpesvirus 4 (Epstein-Barr virus)
cuccguccuuguccagga

SEQ ID NO: 3968220 - RNA, 20 nt, Human herpesvirus 4 (Epstein-Barr virus)
cuccuacacacaucagaccu

SEQ ID NO: 3968221 - RNA, 22 nt, Human herpesvirus 4 (Epstein-Barr virus)
cuccuacgcgcuaccuccuauc

SEQ ID NO: 3968222 - RNA, 17 nt, Human herpesvirus 4 (Epstein-Barr virus)
cucgaaggugcagcugg

SEQ ID NO: 3968223 - RNA, 22 nt, Human herpesvirus 4 (Epstein-Barr virus)
cucgccucauccuggcccccaa

SEQ ID NO: 3968224 - RNA, 16 nt, Human herpesvirus 4 (Epstein-Barr virus)
cucggccacacagugg

SEQ ID NO: 3968225 - RNA, 14 nt, Human herpesvirus 4 (Epstein-Barr virus)
cucggccuccuggc

SEQ ID NO: 3968226 - RNA, 19 nt, Human herpesvirus 4 (Epstein-Barr virus)
cucguccaucuugagcgcc

SEQ ID NO: 3968227 - RNA, 21 nt, Human herpesvirus 4 (Epstein-Barr virus)
cucucgaggucugcgaugagg

SEQ ID NO: 3968228 - RNA, 19 nt, Human herpesvirus 4 (Epstein-Barr virus)
cucugauuauagcucuggc

SEQ ID NO: 3968229 - RNA, 19 nt, Human herpesvirus 4 (Epstein-Barr virus)
cucuggcugugcugacccu

SEQ ID NO: 3968230 - RNA, 16 nt, Human herpesvirus 4 (Epstein-Barr virus)
cugaccacggcccacg

SEQ ID NO: 3968231 - RNA, 17 nt, Human herpesvirus 4 (Epstein-Barr virus)
cugacggaaaucugcuc

SEQ ID NO: 3968232 - RNA, 13 nt, Human herpesvirus 4 (Epstein-Barr virus)
cugacggugaugu

SEQ ID NO: 3968233 - RNA, 15 nt, Human herpesvirus 4 (Epstein-Barr virus)
cugauggccuggaga

SEQ ID NO: 3968234 - RNA, 17 nt, Human herpesvirus 4 (Epstein-Barr virus)
cugcacggcccuccagc

SEQ ID NO: 3968235 - RNA, 21 nt, Human herpesvirus 4 (Epstein-Barr virus)
cugccaacuuugagcugggca

SEQ ID NO: 3968236 - RNA, 17 nt, Human herpesvirus 4 (Epstein-Barr virus)
cugccagagccucugcc

SEQ ID NO: 3968237 - RNA, 14 nt, Human herpesvirus 4 (Epstein-Barr virus)
cugcccagccuacu

SEQ ID NO: 3968238 - RNA, 14 nt, Human herpesvirus 4 (Epstein-Barr virus)
cugcccuucagugu

SEQ ID NO: 3968239 - RNA, 18 nt, Human herpesvirus 4 (Epstein-Barr virus)
cugccgggaggugcuggg

SEQ ID NO: 3968240 - RNA, 15 nt, Human herpesvirus 4 (Epstein-Barr virus)
cugccuccggccgcc

SEQ ID NO: 3968241 - RNA, 14 nt, Human herpesvirus 4 (Epstein-Barr virus)
cugcguagaugagc

SEQ ID NO: 3968242 - RNA, 14 nt, Human herpesvirus 4 (Epstein-Barr virus)
cugcuacuggcuuu

SEQ ID NO: 3968243 - RNA, 19 nt, Human herpesvirus 4 (Epstein-Barr virus)
cugcuucuggaccgugcca

SEQ ID NO: 3968244 - RNA, 17 nt, Human herpesvirus 4 (Epstein-Barr virus)
cuggagauuuucccacu

SEQ ID NO: 3968245 - RNA, 11 nt, Human herpesvirus 4 (Epstein-Barr virus)
cuggagcuggu

SEQ ID NO: 3968246 - RNA, 13 nt, Human herpesvirus 4 (Epstein-Barr virus)
cuggccagcaccc

SEQ ID NO: 3968247 - RNA, 15 nt, Human herpesvirus 4 (Epstein-Barr virus)
cuggccgagcuggag

SEQ ID NO: 3968248 - RNA, 14 nt, Human herpesvirus 4 (Epstein-Barr virus)
cuggcucuucuggg

SEQ ID NO: 3968249 - RNA, 18 nt, Human herpesvirus 4 (Epstein-Barr virus)
cuggggcucagacuuagg

SEQ ID NO: 3968250 - RNA, 13 nt, Human herpesvirus 4 (Epstein-Barr virus)
cugggguccagga

SEQ ID NO: 3968251 - RNA, 18 nt, Human herpesvirus 4 (Epstein-Barr virus)
cuguaauucuaugggaau

SEQ ID NO: 3968252 - RNA, 13 nt, Human herpesvirus 4 (Epstein-Barr virus)
cugucuguaaacu

SEQ ID NO: 3968253 - RNA, 14 nt, Human herpesvirus 4 (Epstein-Barr virus)
cugugcugacccuu

SEQ ID NO: 3968254 - RNA, 17 nt, Human herpesvirus 4 (Epstein-Barr virus)
cuguguccgacgccugc

SEQ ID NO: 3968255 - RNA, 15 nt, Human herpesvirus 4 (Epstein-Barr virus)
cugugugcgcgccgc

SEQ ID NO: 3968256 - RNA, 17 nt, Human herpesvirus 4 (Epstein-Barr virus)
cuucagcaucaauguca

SEQ ID NO: 3968257 - RNA, 16 nt, Human herpesvirus 4 (Epstein-Barr virus)
cuucagggaaaaacug

SEQ ID NO: 3968258 - RNA, 16 nt, Human herpesvirus 4 (Epstein-Barr virus)
cuucaggggaaucucu

SEQ ID NO: 3968259 - RNA, 18 nt, Human herpesvirus 4 (Epstein-Barr virus)
cuuccagcgcaagcuugc

SEQ ID NO: 3968260 - RNA, 20 nt, Human herpesvirus 4 (Epstein-Barr virus)
cuucgaggucuccccugacg

SEQ ID NO: 3968261 - RNA, 14 nt, Human herpesvirus 4 (Epstein-Barr virus)
cuuggcaguguccu

SEQ ID NO: 3968262 - RNA, 20 nt, Human herpesvirus 4 (Epstein-Barr virus)
cuuggccagcggggagaggg

SEQ ID NO: 3968263 - RNA, 16 nt, Human herpesvirus 4 (Epstein-Barr virus)
cuugguauugcgcugg

SEQ ID NO: 3968264 - RNA, 22 nt, Human herpesvirus 4 (Epstein-Barr virus)
cuuuaggcguaacuugucuaca

SEQ ID NO: 3968265 - RNA, 16 nt, Human herpesvirus 4 (Epstein-Barr virus)
cuuucuggccaaccug

SEQ ID NO: 3968266 - RNA, 20 nt, Human herpesvirus 4 (Epstein-Barr virus)
cuuucuggccaaccugccuc

SEQ ID NO: 3968267 - RNA, 14 nt, Human herpesvirus 4 (Epstein-Barr virus)
cuuugccagcaacu

SEQ ID NO: 3968268 - RNA, 15 nt, Human herpesvirus 4 (Epstein-Barr virus)
gaaaauauauugcaa

SEQ ID NO: 3968269 - RNA, 17 nt, Human herpesvirus 4 (Epstein-Barr virus)
gaaaaucucgcucagag

SEQ ID NO: 3968270 - RNA, 14 nt, Human herpesvirus 4 (Epstein-Barr virus)
gaacccuagccacc

SEQ ID NO: 3968271 - RNA, 13 nt, Human herpesvirus 4 (Epstein-Barr virus)
gaagaggacgagg

SEQ ID NO: 3968272 - RNA, 14 nt, Human herpesvirus 4 (Epstein-Barr virus)
gaauaugaugagga

SEQ ID NO: 3968273 - RNA, 19 nt, Human herpesvirus 4 (Epstein-Barr virus)
gaaugacgggcucccuccc

SEQ ID NO: 3968274 - RNA, 18 nt, Human herpesvirus 4 (Epstein-Barr virus)
gaauuguuaguuuaaaca

SEQ ID NO: 3968275 - RNA, 22 nt, Human herpesvirus 4 (Epstein-Barr virus)
gacagcagcguccuggccccau

SEQ ID NO: 3968276 - RNA, 21 nt, Human herpesvirus 4 (Epstein-Barr virus)
gacauggccgcccgccuggcu

SEQ ID NO: 3968277 - RNA, 13 nt, Human herpesvirus 4 (Epstein-Barr virus)
gaccaagcuacca

SEQ ID NO: 3968278 - RNA, 22 nt, Human herpesvirus 4 (Epstein-Barr virus)
gacccuauggagggcagcgaag

SEQ ID NO: 3968279 - RNA, 13 nt, Human herpesvirus 4 (Epstein-Barr virus)
gacccuucugcug

SEQ ID NO: 3968280 - RNA, 18 nt, Human herpesvirus 4 (Epstein-Barr virus)
gaccucccgcccugagcu

SEQ ID NO: 3968281 - RNA, 11 nt, Human herpesvirus 4 (Epstein-Barr virus)
gaccugugugc

SEQ ID NO: 3968282 - RNA, 13 nt, Human herpesvirus 4 (Epstein-Barr virus)
gacgcuguuuugc

SEQ ID NO: 3968283 - RNA, 20 nt, Human herpesvirus 4 (Epstein-Barr virus)
gacguggguccccucugccg

SEQ ID NO: 3968284 - RNA, 14 nt, Human herpesvirus 4 (Epstein-Barr virus)
gacuggcaacuccu

SEQ ID NO: 3968285 - RNA, 16 nt, Human herpesvirus 4 (Epstein-Barr virus)
gagaaaaugagccaug

SEQ ID NO: 3968286 - RNA, 15 nt, Human herpesvirus 4 (Epstein-Barr virus)
gagagaagagagcgg

SEQ ID NO: 3968287 - RNA, 14 nt, Human herpesvirus 4 (Epstein-Barr virus)
gagagcauuucagg

SEQ ID NO: 3968288 - RNA, 13 nt, Human herpesvirus 4 (Epstein-Barr virus)
gagcggcugugag

SEQ ID NO: 3968289 - RNA, 13 nt, Human herpesvirus 4 (Epstein-Barr virus)
gagcuccgugggc

SEQ ID NO: 3968290 - RNA, 19 nt, Human herpesvirus 4 (Epstein-Barr virus)
gaggcacacaaaaugagga

SEQ ID NO: 3968291 - RNA, 18 nt, Human herpesvirus 4 (Epstein-Barr virus)
gaggcuauaacgcagguc

SEQ ID NO: 3968292 - RNA, 17 nt, Human herpesvirus 4 (Epstein-Barr virus)
gaggcugcgccugagcu

SEQ ID NO: 3968293 - RNA, 16 nt, Human herpesvirus 4 (Epstein-Barr virus)
gagggaaaaggcccua

SEQ ID NO: 3968294 - RNA, 12 nt, Human herpesvirus 4 (Epstein-Barr virus)
uguuccuucugc

SEQ ID NO: 3968295 - RNA, 15 nt, Human herpesvirus 4 (Epstein-Barr virus)
uuaccugguacauug

SEQ ID NO: 3968296 - RNA, 24 nt, Human herpesvirus 4 (Epstein-Barr virus)
uuacugcccagccuacucuccacu

SEQ ID NO: 3968297 - RNA, 15 nt, Human herpesvirus 4 (Epstein-Barr virus)
uuagccccagccccu

SEQ ID NO: 3968298 - RNA, 17 nt, Human herpesvirus 4 (Epstein-Barr virus)
uuccacagcaauggcac

SEQ ID NO: 3968299 - RNA, 11 nt, Human herpesvirus 4 (Epstein-Barr virus)
uuccagagagg

SEQ ID NO: 3968300 - RNA, 18 nt, Human herpesvirus 4 (Epstein-Barr virus)
uucccagacucugcuuuc

SEQ ID NO: 3968301 - RNA, 17 nt, Human herpesvirus 4 (Epstein-Barr virus)
uucccggacaauacacc

SEQ ID NO: 3968302 - RNA, 18 nt, Human herpesvirus 4 (Epstein-Barr virus)
uucccucgaaucccuacc

SEQ ID NO: 3968303 - RNA, 19 nt, Human herpesvirus 4 (Epstein-Barr virus)
uuccucauuggcuuugccc

SEQ ID NO: 3968304 - RNA, 11 nt, Human herpesvirus 4 (Epstein-Barr virus)
uucuccaggcu

SEQ ID NO: 3968305 - RNA, 21 nt, Human herpesvirus 4 (Epstein-Barr virus)
uucugaggcggcuguggccuc

SEQ ID NO: 3968306 - RNA, 15 nt, Human herpesvirus 4 (Epstein-Barr virus)
uucugccccucagcc

SEQ ID NO: 3968307 - RNA, 14 nt, Human herpesvirus 4 (Epstein-Barr virus)
uucugucucggccu

SEQ ID NO: 3968308 - RNA, 14 nt, Human herpesvirus 4 (Epstein-Barr virus)
uugcuauucaauca

SEQ ID NO: 3968309 - RNA, 22 nt, Human herpesvirus 4 (Epstein-Barr virus)
uuugccaaccugcucucucugg

SEQ ID NO: 3968310 - RNA, 19 nt, Human herpesvirus 4 (Epstein-Barr virus)
cagcuggugguccgcaugu

SEQ ID NO: 3968311 - RNA, 19 nt, Human herpesvirus 4 (Epstein-Barr virus)
cagcugugugcgcgccgcc

SEQ ID NO: 3968312 - RNA, 14 nt, Human herpesvirus 4 (Epstein-Barr virus)
caggacggggggcu

SEQ ID NO: 3968313 - RNA, 20 nt, Human herpesvirus 4 (Epstein-Barr virus)
caggacuaaccaugccaucu

SEQ ID NO: 3968314 - RNA, 16 nt, Human herpesvirus 4 (Epstein-Barr virus)
caggagcaggagcagg

SEQ ID NO: 3968315 - RNA, 14 nt, Human herpesvirus 4 (Epstein-Barr virus)
caggaggaaaggcu

SEQ ID NO: 3968316 - RNA, 19 nt, Human herpesvirus 4 (Epstein-Barr virus)
caggaggggcaggagcagg

SEQ ID NO: 3968317 - RNA, 15 nt, Human herpesvirus 4 (Epstein-Barr virus)
caggagucugcugcg

SEQ ID NO: 3968318 - RNA, 21 nt, Human herpesvirus 4 (Epstein-Barr virus)
caggauguucacgugggcccc

SEQ ID NO: 3968319 - RNA, 14 nt, Human herpesvirus 4 (Epstein-Barr virus)
caggauuccugauu

SEQ ID NO: 3968320 - RNA, 17 nt, Human herpesvirus 4 (Epstein-Barr virus)
caggcaccccaucuucc

SEQ ID NO: 3968321 - RNA, 20 nt, Human herpesvirus 4 (Epstein-Barr virus)
caggccaugcgcgcccuguc

SEQ ID NO: 3968322 - RNA, 14 nt, Human herpesvirus 4 (Epstein-Barr virus)
caggcccucauucc

SEQ ID NO: 3968323 - RNA, 22 nt, Human herpesvirus 4 (Epstein-Barr virus)
caggccgccaugcucagggcca

SEQ ID NO: 3968324 - RNA, 20 nt, Human herpesvirus 4 (Epstein-Barr virus)
caggccggcguugcgcacca

SEQ ID NO: 3968325 - RNA, 15 nt, Human herpesvirus 4 (Epstein-Barr virus)
cagggccaggcuguc

SEQ ID NO: 3968326 - RNA, 15 nt, Human herpesvirus 4 (Epstein-Barr virus)
cagggccuugagccc

SEQ ID NO: 3968327 - RNA, 19 nt, Human herpesvirus 4 (Epstein-Barr virus)
caggguccaggagaaggcu

SEQ ID NO: 3968328 - RNA, 20 nt, Human herpesvirus 4 (Epstein-Barr virus)
cagguuaaaugugaagcccg

SEQ ID NO: 3968329 - RNA, 20 nt, Human herpesvirus 4 (Epstein-Barr virus)
caguacuagcauggagaggu

SEQ ID NO: 3968330 - RNA, 14 nt, Human herpesvirus 4 (Epstein-Barr virus)
caguagaggacacc

SEQ ID NO: 3968331 - RNA, 22 nt, Human herpesvirus 4 (Epstein-Barr virus)
caguagccgaauaucuggaggu

SEQ ID NO: 3968332 - RNA, 18 nt, Human herpesvirus 4 (Epstein-Barr virus)
caguagcuugggaacacc

SEQ ID NO: 3968333 - RNA, 13 nt, Human herpesvirus 4 (Epstein-Barr virus)
caguccuccgcau

SEQ ID NO: 3968334 - RNA, 22 nt, Human herpesvirus 4 (Epstein-Barr virus)
cagucucaaucucucccacgga

SEQ ID NO: 3968335 - RNA, 20 nt, Human herpesvirus 4 (Epstein-Barr virus)
caguggaccucaaagaagag

SEQ ID NO: 3968336 - RNA, 19 nt, Human herpesvirus 4 (Epstein-Barr virus)
cagugucccugcugcccau

SEQ ID NO: 3968337 - RNA, 22 nt, Human herpesvirus 4 (Epstein-Barr virus)
caguuucuuuccgcgguggugg

SEQ ID NO: 3968338 - RNA, 16 nt, Human herpesvirus 4 (Epstein-Barr virus)
caucaagcagaaaggc

SEQ ID NO: 3968339 - RNA, 22 nt, Human herpesvirus 4 (Epstein-Barr virus)
caucggggcggacgccuccucc

SEQ ID NO: 3968340 - RNA, 15 nt, Human herpesvirus 4 (Epstein-Barr virus)
caucucaacacauau

SEQ ID NO: 3968341 - RNA, 23 nt, Human herpesvirus 4 (Epstein-Barr virus)
caucucgcuggcucgccucaucc

SEQ ID NO: 3968342 - RNA, 14 nt, Human herpesvirus 4 (Epstein-Barr virus)
caucugcccggcua

SEQ ID NO: 3968343 - RNA, 20 nt, Human herpesvirus 4 (Epstein-Barr virus)
caugacaauuuuagaugagg

SEQ ID NO: 3968344 - RNA, 20 nt, Human herpesvirus 4 (Epstein-Barr virus)
caugacagucccguuggugg

SEQ ID NO: 3968345 - RNA, 13 nt, Human herpesvirus 4 (Epstein-Barr virus)
caugagggcaccg

SEQ ID NO: 3968346 - RNA, 22 nt, Human herpesvirus 4 (Epstein-Barr virus)
caugcaggucaggucccccucc

SEQ ID NO: 3968347 - RNA, 15 nt, Human herpesvirus 4 (Epstein-Barr virus)
cauggccgagaagcu

SEQ ID NO: 3968348 - RNA, 14 nt, Human herpesvirus 4 (Epstein-Barr virus)
gucucaugggggaa

SEQ ID NO: 3968349 - RNA, 18 nt, Human herpesvirus 4 (Epstein-Barr virus)
gucucggcacccaggcag

SEQ ID NO: 3968350 - RNA, 21 nt, Human herpesvirus 4 (Epstein-Barr virus)
gucucugaaggauccaugcaa

SEQ ID NO: 3968351 - RNA, 23 nt, Human herpesvirus 4 (Epstein-Barr virus)
gucugagaauaaggcucugaagc

SEQ ID NO: 3968352 - RNA, 17 nt, Human herpesvirus 4 (Epstein-Barr virus)
gucuucccagacucugc

SEQ ID NO: 3968353 - RNA, 22 nt, Human herpesvirus 4 (Epstein-Barr virus)
gugaaauaaaagcuucugguug

SEQ ID NO: 3968354 - RNA, 11 nt, Human herpesvirus 4 (Epstein-Barr virus)
gugaaucaugu

SEQ ID NO: 3968355 - RNA, 14 nt, Human herpesvirus 4 (Epstein-Barr virus)
gugacacagugccc

SEQ ID NO: 3968356 - RNA, 13 nt, Human herpesvirus 4 (Epstein-Barr virus)
gugacgaggaugg

SEQ ID NO: 3968357 - RNA, 13 nt, Human herpesvirus 4 (Epstein-Barr virus)
gugagggggccug

SEQ ID NO: 3968358 - RNA, 21 nt, Human herpesvirus 4 (Epstein-Barr virus)
gugauuaggagcagggcccag

SEQ ID NO: 3968359 - RNA, 21 nt, Human herpesvirus 4 (Epstein-Barr virus)
gugccaaacugcgagggggcc

SEQ ID NO: 3968360 - RNA, 21 nt, Human herpesvirus 4 (Epstein-Barr virus)
gugccuaaacgugauggugcu

SEQ ID NO: 3968361 - RNA, 22 nt, Human herpesvirus 4 (Epstein-Barr virus)
gugcgcgccgccagcauggcag

SEQ ID NO: 3968362 - RNA, 16 nt, Human herpesvirus 4 (Epstein-Barr virus)
gugcgcggaaucagga

SEQ ID NO: 3968363 - RNA, 13 nt, Human herpesvirus 4 (Epstein-Barr virus)
gugcugccagagc

SEQ ID NO: 3968364 - RNA, 15 nt, Human herpesvirus 4 (Epstein-Barr virus)
guggaccucaaagaa

SEQ ID NO: 3968365 - RNA, 19 nt, Human herpesvirus 4 (Epstein-Barr virus)
guggccuuccucugccugg

SEQ ID NO: 3968366 - RNA, 12 nt, Human herpesvirus 4 (Epstein-Barr virus)
guggcugcugcc

SEQ ID NO: 3968367 - RNA, 13 nt, Human herpesvirus 4 (Epstein-Barr virus)
gugggcucccucu

SEQ ID NO: 3968368 - RNA, 15 nt, Human herpesvirus 4 (Epstein-Barr virus)
gugggcugacacaga

SEQ ID NO: 3968369 - RNA, 15 nt, Human herpesvirus 4 (Epstein-Barr virus)
guguacgugccucag

SEQ ID NO: 3968370 - RNA, 22 nt, Human herpesvirus 4 (Epstein-Barr virus)
ggagcaggaggaggggcaggag

SEQ ID NO: 3968371 - RNA, 15 nt, Human herpesvirus 4 (Epstein-Barr virus)
ggagcgggaggggca

SEQ ID NO: 3968372 - RNA, 19 nt, Human herpesvirus 4 (Epstein-Barr virus)
ggagcggggguucuccagg

SEQ ID NO: 3968373 - RNA, 16 nt, Human herpesvirus 4 (Epstein-Barr virus)
ggaggaaacaggagga

SEQ ID NO: 3968374 - RNA, 13 nt, Human herpesvirus 4 (Epstein-Barr virus)
ggaggaagauggc

SEQ ID NO: 3968375 - RNA, 18 nt, Human herpesvirus 4 (Epstein-Barr virus)
ggagguaauuagcacggu

SEQ ID NO: 3968376 - RNA, 22 nt, Human herpesvirus 4 (Epstein-Barr virus)
ggaguaaggccgcugccaggcc

SEQ ID NO: 3968377 - RNA, 12 nt, Human herpesvirus 4 (Epstein-Barr virus)
ggaguuucgcuu

SEQ ID NO: 3968378 - RNA, 19 nt, Human herpesvirus 4 (Epstein-Barr virus)
ggaucagucgcuggcuggu

SEQ ID NO: 3968379 - RNA, 20 nt, Human herpesvirus 4 (Epstein-Barr virus)
ggaucccauggaggagauga

SEQ ID NO: 3968380 - RNA, 21 nt, Human herpesvirus 4 (Epstein-Barr virus)
ggauggaagagaggggcaggg

SEQ ID NO: 3968381 - RNA, 16 nt, Human herpesvirus 4 (Epstein-Barr virus)
ggcaaaggucccaggc

SEQ ID NO: 3968382 - RNA, 18 nt, Human herpesvirus 4 (Epstein-Barr virus)
ggcacacauuacggugcu

SEQ ID NO: 3968383 - RNA, 10 nt, Human herpesvirus 4 (Epstein-Barr virus)
ggcacccagg

SEQ ID NO: 3968384 - RNA, 23 nt, Human herpesvirus 4 (Epstein-Barr virus)
ggcaccuguccuugucugcugcc

SEQ ID NO: 3968385 - RNA, 22 nt, Human herpesvirus 4 (Epstein-Barr virus)
ggcagaaccaucagcucgccca

SEQ ID NO: 3968386 - RNA, 19 nt, Human herpesvirus 4 (Epstein-Barr virus)
ggcagaggccucucucgag

SEQ ID NO: 3968387 - RNA, 19 nt, Human herpesvirus 4 (Epstein-Barr virus)
ggcagccuugcguggugcu

SEQ ID NO: 3968388 - RNA, 23 nt, Human herpesvirus 4 (Epstein-Barr virus)
ggcagcgaagaacacuccacaga

SEQ ID NO: 3968389 - RNA, 18 nt, Human herpesvirus 4 (Epstein-Barr virus)
ggcauguguacuuguccu

SEQ ID NO: 3968390 - RNA, 23 nt, Human herpesvirus 4 (Epstein-Barr virus)
ggccaccacaucggacgggcagg

SEQ ID NO: 3968391 - RNA, 17 nt, Human herpesvirus 4 (Epstein-Barr virus)
ggccaucgcaagcuccu

SEQ ID NO: 3968392 - RNA, 17 nt, Human herpesvirus 4 (Epstein-Barr virus)
ggcccacgucuuuacca

SEQ ID NO: 3968393 - RNA, 18 nt, Human herpesvirus 4 (Epstein-Barr virus)
ggcccagcccuccucaga

SEQ ID NO: 3968394 - RNA, 19 nt, Human herpesvirus 4 (Epstein-Barr virus)
ggcccccagcuucugaggc

SEQ ID NO: 3968395 - RNA, 17 nt, Human herpesvirus 4 [Epstein-Barr virus]
cccagacucugcuuucu

SEQ ID NO: 3968396 - RNA, 13 nt, Human herpesvirus 4 [Epstein-Barr virus]
cccagcagcagcc

SEQ ID NO: 3968397 - RNA, 14 nt, Human herpesvirus 4 [Epstein-Barr virus]
cccagccccuccuc

SEQ ID NO: 3968398 - RNA, 19 nt, Human herpesvirus 4 [Epstein-Barr virus]
cccagcccgccagccaccc

SEQ ID NO: 3968399 - RNA, 23 nt, Human herpesvirus 4 [Epstein-Barr virus]
cccagccuacucuccacucccag

SEQ ID NO: 3968400 - RNA, 20 nt, Human herpesvirus 4 [Epstein-Barr virus]
cccagcuaguagcccuugga

SEQ ID NO: 3968401 - RNA, 15 nt, Human herpesvirus 4 [Epstein-Barr virus]
cccagcuucugaggc

SEQ ID NO: 3968402 - RNA, 19 nt, Human herpesvirus 4 [Epstein-Barr virus]
cccagggcagacugcacag

SEQ ID NO: 3968403 - RNA, 16 nt, Human herpesvirus 4 [Epstein-Barr virus]
cccagggguggcagug

SEQ ID NO: 3968404 - RNA, 23 nt, Human herpesvirus 4 [Epstein-Barr virus]
cccaguugacggacgugcccagc

SEQ ID NO: 3968405 - RNA, 18 nt, Human herpesvirus 4 [Epstein-Barr virus]
cccaucugagggcaguga

SEQ ID NO: 3968406 - RNA, 16 nt, Human herpesvirus 4 [Epstein-Barr virus]
cccaugccuccccagc

SEQ ID NO: 3968407 - RNA, 20 nt, Human herpesvirus 4 [Epstein-Barr virus]
ccccacaaacaccagugucc

SEQ ID NO: 3968408 - RNA, 13 nt, Human herpesvirus 4 [Epstein-Barr virus]
ccccaccaccccc

SEQ ID NO: 3968409 - RNA, 19 nt, Human herpesvirus 4 [Epstein-Barr virus]
ccccaccaccuccaccacc

SEQ ID NO: 3968410 - RNA, 16 nt, Human herpesvirus 4 [Epstein-Barr virus]
ccccagaagcccccaa

SEQ ID NO: 3968411 - RNA, 16 nt, Human herpesvirus 4 [Epstein-Barr virus]
ccccagacucaccccc

SEQ ID NO: 3968412 - RNA, 17 nt, Human herpesvirus 4 [Epstein-Barr virus]
cccccuccauuccaccc

SEQ ID NO: 3968413 - RNA, 24 nt, Human herpesvirus 4 [Epstein-Barr virus]
cccccugcaggacacgugacaugu

SEQ ID NO: 3968414 - RNA, 13 nt, Human herpesvirus 4 [Epstein-Barr virus]
ccccgccaccacg

SEQ ID NO: 3968415 - RNA, 20 nt, Human herpesvirus 4 [Epstein-Barr virus]
ccccggagcccugcccuccu

SEQ ID NO: 3968416 - RNA, 22 nt, Human herpesvirus 4 [Epstein-Barr virus]
ccccuccauuccacccacugau

SEQ ID NO: 3968417 - RNA, 16 nt, Human herpesvirus 4 [Epstein-Barr virus]
ccccucccgccccugu

SEQ ID NO: 3968418 - RNA, 16 nt, Human herpesvirus 4 [Epstein-Barr virus]
ccccugccugcaugcu

SEQ ID NO: 3968419 - RNA, 16 nt, Human herpesvirus 4 [Epstein-Barr virus]
ccccuggcggcccagc

SEQ ID NO: 3968420 - RNA, 20 nt, Human herpesvirus 4 [Epstein-Barr virus]
cccgaaagcggcccagcaga

SEQ ID NO: 3968421 - RNA, 23 nt, Human herpesvirus 4 [Epstein-Barr virus]
cccgacuuauggcuagauuuccu

SEQ ID NO: 3968422 - RNA, 17 nt, Human herpesvirus 4 [Epstein-Barr virus]
cccgagaccggcuccgg

SEQ ID NO: 3968423 - RNA, 18 nt, Human herpesvirus 4 [Epstein-Barr virus]
cccgccagcgccuccucg

SEQ ID NO: 3968424 - RNA, 23 nt, Human herpesvirus 4 [Epstein-Barr virus]
cccgccgugaacucugcccuuca

SEQ ID NO: 3968425 - RNA, 16 nt, Human herpesvirus 4 [Epstein-Barr virus]
cccggccgaggccugc

SEQ ID NO: 3968426 - RNA, 14 nt, Human herpesvirus 4 [Epstein-Barr virus]
cccggccucccgcu

SEQ ID NO: 3968427 - RNA, 13 nt, Human herpesvirus 4 [Epstein-Barr virus]
cccggcgccaccu

SEQ ID NO: 3968428 - RNA, 22 nt, Human herpesvirus 4 [Epstein-Barr virus]
cccgggaccgcgcccuccucug

SEQ ID NO: 3968429 - RNA, 19 nt, Human herpesvirus 4 [Epstein-Barr virus]
cccgggggaggagaagaga

SEQ ID NO: 3968430 - RNA, 18 nt, Human herpesvirus 4 [Epstein-Barr virus]
cccggggguggaggcugc

SEQ ID NO: 3968431 - RNA, 20 nt, Human herpesvirus 4 [Epstein-Barr virus]
cccggguacccuuucuacca

SEQ ID NO: 3968432 - RNA, 17 nt, Human herpesvirus 4 [Epstein-Barr virus]
cccuacucuccacggga

SEQ ID NO: 3968433 - RNA, 16 nt, Human herpesvirus 4 [Epstein-Barr virus]
cccucccgcacccuca

SEQ ID NO: 3968434 - RNA, 19 nt, Human herpesvirus 4 [Epstein-Barr virus]
cccucguggcauccuucag

SEQ ID NO: 3968435 - RNA, 21 nt, Human herpesvirus 4 [Epstein-Barr virus]
cccugaacaucucauccccag

SEQ ID NO: 3968436 - RNA, 14 nt, Human herpesvirus 4 [Epstein-Barr virus]
cccugacgcugugg

SEQ ID NO: 3968437 - RNA, 15 nt, Human herpesvirus 4 [Epstein-Barr virus]
cccugagcuggacga

SEQ ID NO: 3968438 - RNA, 17 nt, Human herpesvirus 4 [Epstein-Barr virus]
cccugcauggccaggcc

SEQ ID NO: 3968439 - RNA, 20 nt, Human herpesvirus 4 [Epstein-Barr virus]
cccugccccucggugggcca

SEQ ID NO: 3968440 - RNA, 14 nt, Human herpesvirus 4 [Epstein-Barr virus]
cccugcugucucug

SEQ ID NO: 3968441 - RNA, 13 nt, Human herpesvirus 4 [Epstein-Barr virus]
cccugucuccccu

SEQ ID NO: 3968442 - RNA, 14 nt, Human herpesvirus 4 [Epstein-Barr virus]
cccugugcuucuac

SEQ ID NO: 3968443 - RNA, 15 nt, Human herpesvirus 4 [Epstein-Barr virus]
cccuuuuaacauugg

SEQ ID NO: 3968444 - RNA, 17 nt, Human herpesvirus 4 [Epstein-Barr virus]
ccgacgagcagaggacu

SEQ ID NO: 3968445 - RNA, 20 nt, Human herpesvirus 4 [Epstein-Barr virus]
ccgagaccaaggcggcugcu

SEQ ID NO: 3968446 - RNA, 20 nt, Human herpesvirus 4 [Epstein-Barr virus]
ccgagggugaggcccagccc

SEQ ID NO: 3968447 - RNA, 18 nt, Human herpesvirus 4 [Epstein-Barr virus]
ccgaggucagaaagaggc

SEQ ID NO: 3968448 - RNA, 15 nt, Human herpesvirus 4 [Epstein-Barr virus]
ccgaucagagcccca

SEQ ID NO: 3968449 - RNA, 22 nt, Human herpesvirus 4 [Epstein-Barr virus]
ccgaugcccaccagccagcgac

SEQ ID NO: 3968450 - RNA, 20 nt, Human herpesvirus 4 [Epstein-Barr virus]
ccgcauccuaggcacggccu

SEQ ID NO: 3968451 - RNA, 14 nt, Human herpesvirus 4 [Epstein-Barr virus]
ccgccagcagcccc

SEQ ID NO: 3968452 - RNA, 14 nt, Human herpesvirus 4 [Epstein-Barr virus]
ccgccagcgccucc

SEQ ID NO: 3968453 - RNA, 16 nt, Human herpesvirus 4 [Epstein-Barr virus]
ccgccagcgccuccuc

SEQ ID NO: 3968454 - RNA, 15 nt, Human herpesvirus 4 [Epstein-Barr virus]
ccgcccgccuggcuc

SEQ ID NO: 3968455 - RNA, 23 nt, Human herpesvirus 4 [Epstein-Barr virus]
ccgccgcagaagagccgcuccgu

SEQ ID NO: 3968456 - RNA, 16 nt, Human herpesvirus 4 [Epstein-Barr virus]
ccgcggugguggcccu

SEQ ID NO: 3968457 - RNA, 22 nt, Human herpesvirus 4 [Epstein-Barr virus]
ccgcucggguaagugcuuuuuc

SEQ ID NO: 3968458 - RNA, 16 nt, Human herpesvirus 4 [Epstein-Barr virus]
ccgggaggugcugggu

SEQ ID NO: 3968459 - RNA, 13 nt, Human herpesvirus 4 [Epstein-Barr virus]
ccgggcccagccc

SEQ ID NO: 3968460 - RNA, 17 nt, Human herpesvirus 4 [Epstein-Barr virus]
ccgggcccagcccuccu

SEQ ID NO: 3968461 - RNA, 18 nt, Human herpesvirus 4 [Epstein-Barr virus]
cugacaccggugacagug

SEQ ID NO: 3968462 - RNA, 16 nt, Human herpesvirus 4 [Epstein-Barr virus]
cugacauauguacaau

SEQ ID NO: 3968463 - RNA, 13 nt, Human herpesvirus 4 [Epstein-Barr virus]
cugaccaggacau

SEQ ID NO: 3968464 - RNA, 15 nt, Human herpesvirus 4 [Epstein-Barr virus]
cugaccaucacaugg

SEQ ID NO: 3968465 - RNA, 19 nt, Human herpesvirus 4 [Epstein-Barr virus]
cugagaauaaggcucugaa

SEQ ID NO: 3968466 - RNA, 16 nt, Human herpesvirus 4 [Epstein-Barr virus]
cugagacagaggugcu

SEQ ID NO: 3968467 - RNA, 20 nt, Human herpesvirus 4 [Epstein-Barr virus]
cugagaccucuguguccaag

SEQ ID NO: 3968468 - RNA, 23 nt, Human herpesvirus 4 [Epstein-Barr virus]
cugagcuggacgagguccuggac

SEQ ID NO: 3968469 - RNA, 19 nt, Human herpesvirus 4 [Epstein-Barr virus]
cugaggcccguccccugac

SEQ ID NO: 3968470 - RNA, 18 nt, Human herpesvirus 4 [Epstein-Barr virus]
cugagugcccagggcaga

SEQ ID NO: 3968471 - RNA, 20 nt, Human herpesvirus 4 [Epstein-Barr virus]
cugauaaaguuguccugggc

SEQ ID NO: 3968472 - RNA, 18 nt, Human herpesvirus 4 [Epstein-Barr virus]
cugaucugggagaugaga

SEQ ID NO: 3968473 - RNA, 14 nt, Human herpesvirus 4 [Epstein-Barr virus]
cugaugugcugccc

SEQ ID NO: 3968474 - RNA, 18 nt, Human herpesvirus 4 [Epstein-Barr virus]
cugcagcuaugggguccc

SEQ ID NO: 3968475 - RNA, 19 nt, Human herpesvirus 4 [Epstein-Barr virus]
cugcagugggccucucugg

SEQ ID NO: 3968476 - RNA, 19 nt, Human herpesvirus 4 [Epstein-Barr virus]
cugccaacuuugagcuggg

SEQ ID NO: 3968477 - RNA, 12 nt, Human herpesvirus 4 [Epstein-Barr virus]
cugcccauccau

SEQ ID NO: 3968478 - RNA, 16 nt, Human herpesvirus 4 [Epstein-Barr virus]
cugccccguugcaccg

SEQ ID NO: 3968479 - RNA, 21 nt, Human herpesvirus 4 [Epstein-Barr virus]
cugcccggacggccuagccau

SEQ ID NO: 3968480 - RNA, 13 nt, Human herpesvirus 4 [Epstein-Barr virus]
cugcccuccucca

SEQ ID NO: 3968481 - RNA, 22 nt, Human herpesvirus 4 [Epstein-Barr virus]
cugcccuccuccacccagcagc

SEQ ID NO: 3968482 - RNA, 22 nt, Human herpesvirus 4 [Epstein-Barr virus]
cugccucccugccccucggugg

SEQ ID NO: 3968483 - RNA, 22 nt, Human herpesvirus 4 [Epstein-Barr virus]
cugccuccggccgccccgggcc

SEQ ID NO: 3968484 - RNA, 17 nt, Human herpesvirus 4 [Epstein-Barr virus]
cugccuuacacuggaaa

SEQ ID NO: 3968485 - RNA, 20 nt, Human herpesvirus 4 [Epstein-Barr virus]
cugcgagggggccuggugcc

SEQ ID NO: 3968486 - RNA, 21 nt, Human herpesvirus 4 [Epstein-Barr virus]
cugcgagggggccuggugcca

SEQ ID NO: 3968487 - RNA, 22 nt, Human herpesvirus 4 [Epstein-Barr virus]
cugcgaugagggccuuccagag

SEQ ID NO: 3968488 - RNA, 12 nt, Human herpesvirus 4 [Epstein-Barr virus]
cugcgccuccug

SEQ ID NO: 3968489 - RNA, 14 nt, Human herpesvirus 4 [Epstein-Barr virus]
cugcggggaaacca

SEQ ID NO: 3968490 - RNA, 16 nt, Human herpesvirus 4 [Epstein-Barr virus]
cugcguccucuaccug

SEQ ID NO: 3968491 - RNA, 16 nt, Human herpesvirus 4 [Epstein-Barr virus]
cugcuagcgucacuga

SEQ ID NO: 3968492 - RNA, 19 nt, Human herpesvirus 4 [Epstein-Barr virus]
cugcucuucaaccuuggca

SEQ ID NO: 3968493 - RNA, 17 nt, Human herpesvirus 4 [Epstein-Barr virus]
cugcugcugcuggucau

SEQ ID NO: 3968494 - RNA, 15 nt, Human herpesvirus 4 [Epstein-Barr virus]
cugcuucuggcucuu

SEQ ID NO: 3968495 - RNA, 13 nt, Human herpesvirus 4 [Epstein-Barr virus]
cugcuuucugccg

SEQ ID NO: 3968496 - RNA, 14 nt, Human herpesvirus 4 [Epstein-Barr virus]
cuggagcuggugca

SEQ ID NO: 3968497 - RNA, 18 nt, Human herpesvirus 4 [Epstein-Barr virus]
cuggagcuggugcaccug

SEQ ID NO: 3968498 - RNA, 23 nt, Human herpesvirus 4 [Epstein-Barr virus]
cuggaggacggucuggcacugga

SEQ ID NO: 3968499 - RNA, 23 nt, Human herpesvirus 4 [Epstein-Barr virus]
cuggaggcaauggucgccagggu

SEQ ID NO: 3968500 - RNA, 12 nt, Human herpesvirus 4 [Epstein-Barr virus]
cuggaggccuca

SEQ ID NO: 3968501 - RNA, 15 nt, Human herpesvirus 4 [Epstein-Barr virus]
cuggcagaaaggcug

SEQ ID NO: 3968502 - RNA, 18 nt, Human herpesvirus 4 [Epstein-Barr virus]
cuggcagaaaggcuggcc

SEQ ID NO: 3968503 - RNA, 17 nt, Human herpesvirus 4 [Epstein-Barr virus]
cuggccaaccugccucu

SEQ ID NO: 3968504 - RNA, 23 nt, Human herpesvirus 4 [Epstein-Barr virus]
cuggccaccacaucggacgggca

SEQ ID NO: 3968505 - RNA, 15 nt, Human herpesvirus 4 [Epstein-Barr virus]
gagcaggagcaggag

SEQ ID NO: 3968506 - RNA, 19 nt, Human herpesvirus 4 [Epstein-Barr virus]
gagcaggaggaggggcagg

SEQ ID NO: 3968507 - RNA, 22 nt, Human herpesvirus 4 [Epstein-Barr virus]
gagccagaucuaaggccgggag

SEQ ID NO: 3968508 - RNA, 19 nt, Human herpesvirus 4 [Epstein-Barr virus]
gagcugcaccggagccugc

SEQ ID NO: 3968509 - RNA, 15 nt, Human herpesvirus 4 [Epstein-Barr virus]
gagcuggacgagguc

SEQ ID NO: 3968510 - RNA, 14 nt, Human herpesvirus 4 [Epstein-Barr virus]
gagcuguuuggcuc

SEQ ID NO: 3968511 - RNA, 12 nt, Human herpesvirus 4 [Epstein-Barr virus]
gaggaaacagga

SEQ ID NO: 3968512 - RNA, 14 nt, Human herpesvirus 4 [Epstein-Barr virus]
gaggacgugaguga

SEQ ID NO: 3968513 - RNA, 14 nt, Human herpesvirus 4 [Epstein-Barr virus]
gaggagauccgcca

SEQ ID NO: 3968514 - RNA, 15 nt, Human herpesvirus 4 [Epstein-Barr virus]
gaggaggaccuggug

SEQ ID NO: 3968515 - RNA, 21 nt, Human herpesvirus 4 [Epstein-Barr virus]
gaggaggcuggugccuuggcu

SEQ ID NO: 3968516 - RNA, 12 nt, Human herpesvirus 4 [Epstein-Barr virus]
gaggcgcagccc

SEQ ID NO: 3968517 - RNA, 21 nt, Human herpesvirus 4 [Epstein-Barr virus]
gaggcggaagaccaggagccc

SEQ ID NO: 3968518 - RNA, 16 nt, Human herpesvirus 4 [Epstein-Barr virus]
gaggcguccgccccga

SEQ ID NO: 3968519 - RNA, 15 nt, Human herpesvirus 4 [Epstein-Barr virus]
gaggcuucccgccua

SEQ ID NO: 3968520 - RNA, 23 nt, Human herpesvirus 4 [Epstein-Barr virus]
gagggggccugagacuggacccu

SEQ ID NO: 3968521 - RNA, 13 nt, Human herpesvirus 4 [Epstein-Barr virus]
gagggggccuggu

SEQ ID NO: 3968522 - RNA, 23 nt, Human herpesvirus 4 [Epstein-Barr virus]
gagguaaugauuacgcaggccac

SEQ ID NO: 3968523 - RNA, 21 nt, Human herpesvirus 4 [Epstein-Barr virus]
gagguacaugggccacugcag

SEQ ID NO: 3968524 - RNA, 15 nt, Human herpesvirus 4 [Epstein-Barr virus]
gaggugauguagagg

SEQ ID NO: 3968525 - RNA, 15 nt, Human herpesvirus 4 [Epstein-Barr virus]
gagguugggccacgc

SEQ ID NO: 3968526 - RNA, 20 nt, Human herpesvirus 4 [Epstein-Barr virus]
gaguaaggccgcugccaggc

SEQ ID NO: 3968527 - RNA, 15 nt, Human herpesvirus 4 [Epstein-Barr virus]
gaguaauugcagugg

SEQ ID NO: 3968528 - RNA, 19 nt, Human herpesvirus 4 [Epstein-Barr virus]
gagucaguuacacacacag

SEQ ID NO: 3968529 - RNA, 23 nt, Human herpesvirus 4 [Epstein-Barr virus]
gaguccaaacagcuaauuucuac

SEQ ID NO: 3968530 - RNA, 15 nt, Human herpesvirus 4 [Epstein-Barr virus]
gagucugcuggacuc

SEQ ID NO: 3968531 - RNA, 14 nt, Human herpesvirus 4 [Epstein-Barr virus]
gaguguagaggugg

SEQ ID NO: 3968532 - RNA, 15 nt, Human herpesvirus 4 [Epstein-Barr virus]
gaguucccggcugcu

SEQ ID NO: 3968533 - RNA, 17 nt, Human herpesvirus 4 [Epstein-Barr virus]
gaguucuacaaugccag

SEQ ID NO: 3968534 - RNA, 20 nt, Human herpesvirus 4 [Epstein-Barr virus]
gaguuggcaucuuccuccuu

SEQ ID NO: 3968535 - RNA, 20 nt, Human herpesvirus 4 [Epstein-Barr virus]
gauauagcucugcacaggcu

SEQ ID NO: 3968536 - RNA, 23 nt, Human herpesvirus 4 [Epstein-Barr virus]
gauaucacacccucggagaucau

SEQ ID NO: 3968537 - RNA, 13 nt, Human herpesvirus 4 [Epstein-Barr virus]
gauccccagugga

SEQ ID NO: 3968538 - RNA, 14 nt, Human herpesvirus 4 [Epstein-Barr virus]
gaucgauuggaaaa

SEQ ID NO: 3968539 - RNA, 15 nt, Human herpesvirus 4 [Epstein-Barr virus]
gaucuggggcuggcc

SEQ ID NO: 3968540 - RNA, 18 nt, Human herpesvirus 4 [Epstein-Barr virus]
gaugacugagcgcacggc

SEQ ID NO: 3968541 - RNA, 14 nt, Human herpesvirus 4 [Epstein-Barr virus]
gaugagcuggagac

SEQ ID NO: 3968542 - RNA, 24 nt, Human herpesvirus 4 [Epstein-Barr virus]
gaugaggcugaugauggccacgac

SEQ ID NO: 3968543 - RNA, 18 nt, Human herpesvirus 4 [Epstein-Barr virus]
gaugcauacgcugaguga

SEQ ID NO: 3968544 - RNA, 20 nt, Human herpesvirus 4 [Epstein-Barr virus]
gaugcccaccagccagcgac

SEQ ID NO: 3968545 - RNA, 21 nt, Human herpesvirus 4 [Epstein-Barr virus]
gaugcugccgcuacugcugcu

SEQ ID NO: 3968546 - RNA, 21 nt, Human herpesvirus 4 [Epstein-Barr virus]
gauggggcgcgcuucagcucc

SEQ ID NO: 3968547 - RNA, 15 nt, Human herpesvirus 4 [Epstein-Barr virus]
gauggugcuggucuc

SEQ ID NO: 3968548 - RNA, 22 nt, Human herpesvirus 4 [Epstein-Barr virus]
gauguacuuuccuagaaacugu

SEQ ID NO: 3968549 - RNA, 15 nt, Human herpesvirus 4 [Epstein-Barr virus]
gauugaggcaauggc

SEQ ID NO: 3968550 - RNA, 19 nt, Human herpesvirus 4 [Epstein-Barr virus]
gauuggaaaagggcccagg

SEQ ID NO: 3968551 - RNA, 19 nt, Human herpesvirus 4 [Epstein-Barr virus]
gauuucuaguuaccacagg

SEQ ID NO: 3968552 - RNA, 17 nt, Human herpesvirus 4 [Epstein-Barr virus]
gcaaacugacacacagg

SEQ ID NO: 3968553 - RNA, 13 nt, Human herpesvirus 4 [Epstein-Barr virus]
gcaaccuuggggg

SEQ ID NO: 3968554 - RNA, 16 nt, Human herpesvirus 4 [Epstein-Barr virus]
gcaaccuugggggcaa

SEQ ID NO: 3968555 - RNA, 14 nt, Human herpesvirus 4 [Epstein-Barr virus]
gcaaggacgggggu

SEQ ID NO: 3968556 - RNA, 14 nt, Human herpesvirus 4 [Epstein-Barr virus]
gcaaggauggaaga

SEQ ID NO: 3968557 - RNA, 14 nt, Human herpesvirus 4 [Epstein-Barr virus]
gcacagccagagag

SEQ ID NO: 3968558 - RNA, 18 nt, Human herpesvirus 4 [Epstein-Barr virus]
gcacaggaugacagcugu

SEQ ID NO: 3968559 - RNA, 17 nt, Human herpesvirus 4 [Epstein-Barr virus]
gcacccggcuggacccc

SEQ ID NO: 3968560 - RNA, 18 nt, Human herpesvirus 4 [Epstein-Barr virus]
gcaccgaacauggguaau

SEQ ID NO: 3968561 - RNA, 13 nt, Human herpesvirus 4 [Epstein-Barr virus]
gcaccggagccac

SEQ ID NO: 3968562 - RNA, 16 nt, Human herpesvirus 4 [Epstein-Barr virus]
gcaccggagccaccac

SEQ ID NO: 3968563 - RNA, 15 nt, Human herpesvirus 4 [Epstein-Barr virus]
gcaccugucccuggg

SEQ ID NO: 3968564 - RNA, 15 nt, Human herpesvirus 4 [Epstein-Barr virus]
gcaccuguguccugg

SEQ ID NO: 3968565 - RNA, 17 nt, Human herpesvirus 4 [Epstein-Barr virus]
gcacggucgccccuccg

SEQ ID NO: 3968566 - RNA, 20 nt, Human herpesvirus 4 [Epstein-Barr virus]
gcacugcguccaccuggcca

SEQ ID NO: 3968567 - RNA, 22 nt, Human herpesvirus 4 [Epstein-Barr virus]
gcagacaccuuuacccagcccu

SEQ ID NO: 3968568 - RNA, 18 nt, Human herpesvirus 4 [Epstein-Barr virus]
gcagaccccagagcagcc

SEQ ID NO: 3968569 - RNA, 17 nt, Human herpesvirus 4 [Epstein-Barr virus]
gcagaggccaucauggc

SEQ ID NO: 3968570 - RNA, 12 nt, Human herpesvirus 4 [Epstein-Barr virus]
gcagaggccugc

SEQ ID NO: 3968571 - RNA, 19 nt, Human herpesvirus 4 [Epstein-Barr virus]
gcagaggccugcaccaguu

SEQ ID NO: 3968572 - RNA, 21 nt, Human herpesvirus 4 [Epstein-Barr virus]
gcagauagccggccaggcaga

SEQ ID NO: 3968573 - RNA, 22 nt, Human herpesvirus 4 [Epstein-Barr virus]
gcagauuuccgucagccagggu

SEQ ID NO: 3968574 - RNA, 14 nt, Human herpesvirus 4 [Epstein-Barr virus]
gcagcagcucuggc

SEQ ID NO: 3968575 - RNA, 19 nt, Human herpesvirus 4 [Epstein-Barr virus]
gcagcaguggccagcucau

SEQ ID NO: 3968576 - RNA, 19 nt, Human herpesvirus 4 [Epstein-Barr virus]
gcagcagugugugaagauu

SEQ ID NO: 3968577 - RNA, 13 nt, Human herpesvirus 4 [Epstein-Barr virus]
gcagcauuuacaa

SEQ ID NO: 3968578 - RNA, 18 nt, Human herpesvirus 4 [Epstein-Barr virus]
gcagccuguucauagaga

SEQ ID NO: 3968579 - RNA, 23 nt, Human herpesvirus 4 [Epstein-Barr virus]
ugcuucuggaccgugccauccuc

SEQ ID NO: 3968580 - RNA, 21 nt, Human herpesvirus 4 [Epstein-Barr virus]
ugcuuuuugccaggccuguca

SEQ ID NO: 3968581 - RNA, 14 nt, Human herpesvirus 4 [Epstein-Barr virus]
uggaaacccucagu

SEQ ID NO: 3968582 - RNA, 15 nt, Human herpesvirus 4 [Epstein-Barr virus]
uggaacaggagcagg

SEQ ID NO: 3968583 - RNA, 15 nt, Human herpesvirus 4 [Epstein-Barr virus]
uggaacccuagccac

SEQ ID NO: 3968584 - RNA, 14 nt, Human herpesvirus 4 [Epstein-Barr virus]
uggacacccacccu

SEQ ID NO: 3968585 - RNA, 12 nt, Human herpesvirus 4 [Epstein-Barr virus]
uggacaugcuga

SEQ ID NO: 3968586 - RNA, 13 nt, Human herpesvirus 4 [Epstein-Barr virus]
uggacugugguau

SEQ ID NO: 3968587 - RNA, 20 nt, Human herpesvirus 4 [Epstein-Barr virus]
uggagagauuucauccucag

SEQ ID NO: 3968588 - RNA, 21 nt, Human herpesvirus 4 [Epstein-Barr virus]
uggagaugauucaugggcugg

SEQ ID NO: 3968589 - RNA, 13 nt, Human herpesvirus 4 [Epstein-Barr virus]
uggagaugcucug

SEQ ID NO: 3968590 - RNA, 18 nt, Human herpesvirus 4 [Epstein-Barr virus]
uggaggcugcgccugagc

SEQ ID NO: 3968591 - RNA, 21 nt, Human herpesvirus 4 [Epstein-Barr virus]
uggaggggggcggcguggagc

SEQ ID NO: 3968592 - RNA, 14 nt, Human herpesvirus 4 [Epstein-Barr virus]
uggcaaagggcaug

SEQ ID NO: 3968593 - RNA, 16 nt, Human herpesvirus 4 [Epstein-Barr virus]
uggcacgggcagagga

SEQ ID NO: 3968594 - RNA, 15 nt, Human herpesvirus 4 [Epstein-Barr virus]
uggcacgguccagaa

SEQ ID NO: 3968595 - RNA, 13 nt, Human herpesvirus 4 [Epstein-Barr virus]
uggcagcaguggc

SEQ ID NO: 3968596 - RNA, 14 nt, Human herpesvirus 4 [Epstein-Barr virus]
uggcaggagaggcg

SEQ ID NO: 3968597 - RNA, 19 nt, Human herpesvirus 4 [Epstein-Barr virus]
uggcaguauuuugcaaaca

SEQ ID NO: 3968598 - RNA, 17 nt, Human herpesvirus 4 [Epstein-Barr virus]
uggccagguacgggcug

SEQ ID NO: 3968599 - RNA, 19 nt, Human herpesvirus 4 [Epstein-Barr virus]
uggcccugcaaacugacac

SEQ ID NO: 3968600 - RNA, 16 nt, Human herpesvirus 4 [Epstein-Barr virus]
uggccggugcugccag

SEQ ID NO: 3968601 - RNA, 15 nt, Human herpesvirus 4 [Epstein-Barr virus]
uggccguccucugga

SEQ ID NO: 3968602 - RNA, 18 nt, Human herpesvirus 4 [Epstein-Barr virus]
uggccuccagcucggcca

SEQ ID NO: 3968603 - RNA, 22 nt, Human herpesvirus 4 [Epstein-Barr virus]
uggccuccagcucggccagcag

SEQ ID NO: 3968604 - RNA, 16 nt, Human herpesvirus 4 [Epstein-Barr virus]
uggcgucucaggcuau

SEQ ID NO: 3968605 - RNA, 14 nt, Human herpesvirus 4 [Epstein-Barr virus]
uggcucgccucauc

SEQ ID NO: 3968606 - RNA, 19 nt, Human herpesvirus 4 [Epstein-Barr virus]
uggcucgccucauccuggc

SEQ ID NO: 3968607 - RNA, 15 nt, Human herpesvirus 4 [Epstein-Barr virus]
uggcucucuucgcca

SEQ ID NO: 3968608 - RNA, 13 nt, Human herpesvirus 4 [Epstein-Barr virus]
uggcugccccggc

SEQ ID NO: 3968609 - RNA, 14 nt, Human herpesvirus 4 [Epstein-Barr virus]
uggcugugcugacc

SEQ ID NO: 3968610 - RNA, 16 nt, Human herpesvirus 4 [Epstein-Barr virus]
uggcuugcuccaccag

SEQ ID NO: 3968611 - RNA, 18 nt, Human herpesvirus 4 [Epstein-Barr virus]
ugggaauaacaagggaag

SEQ ID NO: 3968612 - RNA, 16 nt, Human herpesvirus 4 [Epstein-Barr virus]
ugggaccuacaggaca

SEQ ID NO: 3968613 - RNA, 20 nt, Human herpesvirus 4 [Epstein-Barr virus]
ugggagcaaccagcugguca

SEQ ID NO: 3968614 - RNA, 18 nt, Human herpesvirus 4 [Epstein-Barr virus]
ugggcaugacacaggaca

SEQ ID NO: 3968615 - RNA, 16 nt, Human herpesvirus 4 [Epstein-Barr virus]
ugggcugcuauaguga

SEQ ID NO: 3968616 - RNA, 18 nt, Human herpesvirus 4 [Epstein-Barr virus]
uggggccagaggcgacgc

SEQ ID NO: 3968617 - RNA, 19 nt, Human herpesvirus 4 [Epstein-Barr virus]
uggggcugagaccaugcuc

SEQ ID NO: 3968618 - RNA, 18 nt, Human herpesvirus 4 [Epstein-Barr virus]
ugggucagugauggaaag

SEQ ID NO: 3968619 - RNA, 17 nt, Human herpesvirus 4 [Epstein-Barr virus]
ugggugcacagguggcc

SEQ ID NO: 3968620 - RNA, 13 nt, Human herpesvirus 4 [Epstein-Barr virus]
ugggugggcauug

SEQ ID NO: 3968621 - RNA, 17 nt, Human herpesvirus 4 [Epstein-Barr virus]
ugguccaggguccagga

SEQ ID NO: 3968622 - RNA, 18 nt, Human herpesvirus 4 [Epstein-Barr virus]
ugguccaggguccaggag

SEQ ID NO: 3968623 - RNA, 13 nt, Human herpesvirus 4 [Epstein-Barr virus]
ugguccugagggg

SEQ ID NO: 3968624 - RNA, 18 nt, Human herpesvirus 4 [Epstein-Barr virus]
uggucgcccccucugccu

SEQ ID NO: 3968625 - RNA, 22 nt, Human herpesvirus 4 [Epstein-Barr virus]
uggucgucaucuggcucuccug

SEQ ID NO: 3968626 - RNA, 22 nt, Human herpesvirus 4 [Epstein-Barr virus]
uggucuccuucuuuaucuccau

SEQ ID NO: 3968627 - RNA, 16 nt, Human herpesvirus 4 [Epstein-Barr virus]
uggucuuuuaugagcc

SEQ ID NO: 3968628 - RNA, 21 nt, Human herpesvirus 4 [Epstein-Barr virus]
uggugcgguuauaacugccag

SEQ ID NO: 3968629 - RNA, 21 nt, Human herpesvirus 4 [Epstein-Barr virus]
uggugcuguccugcugaaggg

SEQ ID NO: 3968630 - RNA, 12 nt, Human herpesvirus 4 [Epstein-Barr virus]
ugguggcagcag

SEQ ID NO: 3968631 - RNA, 21 nt, Human herpesvirus 4 [Epstein-Barr virus]
ugguggcauuaauguccagug

SEQ ID NO: 3968632 - RNA, 23 nt, Human herpesvirus 4 [Epstein-Barr virus]
ugguggcccagcaacuaagagcc

SEQ ID NO: 3968633 - RNA, 15 nt, Human herpesvirus 4 [Epstein-Barr virus]
ugguucaguggacac

SEQ ID NO: 3968634 - RNA, 15 nt, Human herpesvirus 4 [Epstein-Barr virus]
ugguugucuucccag

SEQ ID NO: 3968635 - RNA, 16 nt, Human herpesvirus 4 [Epstein-Barr virus]
uguaaucgcagcucua

SEQ ID NO: 3968636 - RNA, 16 nt, Human herpesvirus 4 [Epstein-Barr virus]
uguagccacccguccc

SEQ ID NO: 3968637 - RNA, 21 nt, Human herpesvirus 4 [Epstein-Barr virus]
uguagccccuaggccugccac

SEQ ID NO: 3968638 - RNA, 20 nt, Human herpesvirus 4 [Epstein-Barr virus]
uguagcgccgcgguuucagc

SEQ ID NO: 3968639 - RNA, 19 nt, Human herpesvirus 4 [Epstein-Barr virus]
uguauugggacuugaaggu

SEQ ID NO: 3968640 - RNA, 22 nt, Human herpesvirus 4 [Epstein-Barr virus]
ugucaccaggccugccaaagag

SEQ ID NO: 3968641 - RNA, 15 nt, Human herpesvirus 4 [Epstein-Barr virus]
ugucacguguccugc

SEQ ID NO: 3968642 - RNA, 21 nt, Human herpesvirus 4 [Epstein-Barr virus]
ugucauaaccuggagucugca

SEQ ID NO: 3968643 - RNA, 15 nt, Human herpesvirus 4 [Epstein-Barr virus]
uguccagauguccag

SEQ ID NO: 3968644 - RNA, 13 nt, Human herpesvirus 4 [Epstein-Barr virus]
uguccggucaggu

SEQ ID NO: 3968645 - RNA, 15 nt, Human herpesvirus 4 [Epstein-Barr virus]
ugucuucccagacuc

SEQ ID NO: 3968646 - RNA, 19 nt, Human herpesvirus 4 [Epstein-Barr virus]
ugugccucgucuaccucug

SEQ ID NO: 3968647 - RNA, 14 nt, Human herpesvirus 4 [Epstein-Barr virus]
ugugcgcccugcuc

SEQ ID NO: 3968648 - RNA, 21 nt, Human herpesvirus 4 [Epstein-Barr virus]
ugugcugaagcccaagaagaa

SEQ ID NO: 3968649 - RNA, 18 nt, Human herpesvirus 4 [Epstein-Barr virus]
uguggccgacuucuggaa

SEQ ID NO: 3968650 - RNA, 13 nt, Human herpesvirus 4 [Epstein-Barr virus]
ugugguucuccug

SEQ ID NO: 3968651 - RNA, 15 nt, Human herpesvirus 4 [Epstein-Barr virus]
uguguacauuccagu

SEQ ID NO: 3968652 - RNA, 13 nt, Human herpesvirus 4 [Epstein-Barr virus]
uguuacuucuuuu

SEQ ID NO: 3968653 - RNA, 18 nt, Human herpesvirus 4 [Epstein-Barr virus]
uguugaagcagaugugcc

SEQ ID NO: 3968654 - RNA, 11 nt, Human herpesvirus 4 [Epstein-Barr virus]
uguugggugaa

SEQ ID NO: 3968655 - RNA, 14 nt, Human herpesvirus 4 [Epstein-Barr virus]
uguuucaagcagcu

SEQ ID NO: 3968656 - RNA, 23 nt, Human herpesvirus 4 [Epstein-Barr virus]
uguuucucagagagcauuucagg

SEQ ID NO: 3968657 - RNA, 14 nt, Human herpesvirus 4 [Epstein-Barr virus]
uguuucuggaaugc

SEQ ID NO: 3968658 - RNA, 20 nt, Human herpesvirus 4 [Epstein-Barr virus]
uuaaaaggggcagcaaucuc

SEQ ID NO: 3968659 - RNA, 14 nt, Human herpesvirus 4 [Epstein-Barr virus]
uuaaagccuccucg

SEQ ID NO: 3968660 - RNA, 19 nt, Human herpesvirus 4 [Epstein-Barr virus]
uuaacccacccaaaaugca

SEQ ID NO: 3968661 - RNA, 15 nt, Human herpesvirus 4 [Epstein-Barr virus]
uuaccagugugccag

SEQ ID NO: 3968662 - RNA, 14 nt, Human herpesvirus 4 [Epstein-Barr virus]
uuaggcacuggaca

SEQ ID NO: 3968663 - RNA, 16 nt, Human herpesvirus 4 [Epstein-Barr virus]
uuauggcagagcuuug

SEQ ID NO: 3968664 - RNA, 13 nt, Human herpesvirus 4 [Epstein-Barr virus]
uucacuuccucug

SEQ ID NO: 3968665 - RNA, 19 nt, Human herpesvirus 4 [Epstein-Barr virus]
uucaggggaaucucugcca

SEQ ID NO: 3968666 - RNA, 19 nt, Human herpesvirus 4 [Epstein-Barr virus]
uucauccucagaggaggag

SEQ ID NO: 3968667 - RNA, 12 nt, Human herpesvirus 4 [Epstein-Barr virus]
ugcaguccuccg

SEQ ID NO: 3968668 - RNA, 15 nt, Human herpesvirus 4 [Epstein-Barr virus]
ugcagucgcugcugc

SEQ ID NO: 3968669 - RNA, 15 nt, Human herpesvirus 4 [Epstein-Barr virus]
ugcauacacugaauu

SEQ ID NO: 3968670 - RNA, 17 nt, Human herpesvirus 4 [Epstein-Barr virus]
ugcauacgcugagugag

SEQ ID NO: 3968671 - RNA, 15 nt, Human herpesvirus 4 [Epstein-Barr virus]
ugcaugagccacagg

SEQ ID NO: 3968672 - RNA, 11 nt, Human herpesvirus 4 [Epstein-Barr virus]
ugcauggccag

SEQ ID NO: 3968673 - RNA, 15 nt, Human herpesvirus 4 [Epstein-Barr virus]
ugccaauccaugcca

SEQ ID NO: 3968674 - RNA, 17 nt, Human herpesvirus 4 [Epstein-Barr virus]
ugccaugcacggcccug

SEQ ID NO: 3968675 - RNA, 20 nt, Human herpesvirus 4 [Epstein-Barr virus]
ugcccagcuccgugguccug

SEQ ID NO: 3968676 - RNA, 21 nt, Human herpesvirus 4 [Epstein-Barr virus]
ugccccccuggcggcccagcc

SEQ ID NO: 3968677 - RNA, 20 nt, Human herpesvirus 4 [Epstein-Barr virus]
ugccccgguccccccagaag

SEQ ID NO: 3968678 - RNA, 19 nt, Human herpesvirus 4 [Epstein-Barr virus]
ugcccucaugcgccagagc

SEQ ID NO: 3968679 - RNA, 23 nt, Human herpesvirus 4 [Epstein-Barr virus]
ugcccuccuccacccagcagcag

SEQ ID NO: 3968680 - RNA, 22 nt, Human herpesvirus 4 [Epstein-Barr virus]
ugcccuggaggccucaggcaac

SEQ ID NO: 3968681 - RNA, 13 nt, Human herpesvirus 4 [Epstein-Barr virus]
ugccgucccaggg

SEQ ID NO: 3968682 - RNA, 16 nt, Human herpesvirus 4 [Epstein-Barr virus]
ugccuccagagccccu

SEQ ID NO: 3968683 - RNA, 15 nt, Human herpesvirus 4 [Epstein-Barr virus]
ugccugccuguaauu

SEQ ID NO: 3968684 - RNA, 15 nt, Human herpesvirus 4 [Epstein-Barr virus]
ugccugugccucguc

SEQ ID NO: 3968685 - RNA, 21 nt, Human herpesvirus 4 [Epstein-Barr virus]
ugccuguggccccggcuggcc

SEQ ID NO: 3968686 - RNA, 14 nt, Human herpesvirus 4 [Epstein-Barr virus]
ugcgagggggccug

SEQ ID NO: 3968687 - RNA, 22 nt, Human herpesvirus 4 [Epstein-Barr virus]
ugcgcgcccugucaccaggccu

SEQ ID NO: 3968688 - RNA, 21 nt, Human herpesvirus 4 [Epstein-Barr virus]
ugcggaucagucgcuggcugg

SEQ ID NO: 3968689 - RNA, 22 nt, Human herpesvirus 4 [Epstein-Barr virus]
ugcggcagaaauugaaagugcu

SEQ ID NO: 3968690 - RNA, 20 nt, Human herpesvirus 4 [Epstein-Barr virus]
ugcugccgcuacugcugcua

SEQ ID NO: 3968691 - RNA, 12 nt, Human herpesvirus 4 [Epstein-Barr virus]
gucccccuccau

SEQ ID NO: 3968692 - RNA, 20 nt, Human herpesvirus 4 [Epstein-Barr virus]
gucccccuccauuccaccca

SEQ ID NO: 3968693 - RNA, 15 nt, Human herpesvirus 4 [Epstein-Barr virus]
gucccugcugcccau

SEQ ID NO: 3968694 - RNA, 16 nt, Human herpesvirus 4 [Epstein-Barr virus]
guccgacgccugcgga

SEQ ID NO: 3968695 - RNA, 18 nt, Human herpesvirus 4 [Epstein-Barr virus]
cuaccucuuuuggcuggc

SEQ ID NO: 3968696 - RNA, 15 nt, Human herpesvirus 4 [Epstein-Barr virus]
cuacgaaacugacca

SEQ ID NO: 3968697 - RNA, 12 nt, Human herpesvirus 4 [Epstein-Barr virus]
cuacugcugcua

SEQ ID NO: 3968698 - RNA, 16 nt, Human herpesvirus 4 [Epstein-Barr virus]
cuagagguuuugcuag

SEQ ID NO: 3968699 - RNA, 18 nt, Human herpesvirus 4 [Epstein-Barr virus]
cuagccguccuguccaag

SEQ ID NO: 3968700 - RNA, 19 nt, Human herpesvirus 4 [Epstein-Barr virus]
cuagcgucacugauuuugg

SEQ ID NO: 3968701 - RNA, 21 nt, Human herpesvirus 4 [Epstein-Barr virus]
cuagcuauaaaagaggccggg

SEQ ID NO: 3968702 - RNA, 18 nt, Human herpesvirus 4 [Epstein-Barr virus]
cuaguaugaaggcuggca

SEQ ID NO: 3968703 - RNA, 17 nt, Human herpesvirus 4 [Epstein-Barr virus]
cuauagugagccaggcu

SEQ ID NO: 3968704 - RNA, 17 nt, Human herpesvirus 4 [Epstein-Barr virus]
cuaucacagggacaucu

SEQ ID NO: 3968705 - RNA, 19 nt, Human herpesvirus 4 [Epstein-Barr virus]
cucaaacggggaaggagga

SEQ ID NO: 3968706 - RNA, 13 nt, Human herpesvirus 4 [Epstein-Barr virus]
cucaccaugguag

SEQ ID NO: 3968707 - RNA, 20 nt, Human herpesvirus 4 [Epstein-Barr virus]
cucacuucuacucuuggcag

SEQ ID NO: 3968708 - RNA, 21 nt, Human herpesvirus 4 [Epstein-Barr virus]
cucacuucuacucuuggcagc

SEQ ID NO: 3968709 - RNA, 19 nt, Human herpesvirus 4 [Epstein-Barr virus]
cucagaaaacucugcaugg

SEQ ID NO: 3968710 - RNA, 15 nt, Human herpesvirus 4 [Epstein-Barr virus]
cucagaggaggagga

SEQ ID NO: 3968711 - RNA, 18 nt, Human herpesvirus 4 [Epstein-Barr virus]
cucagaggaggaggauga

SEQ ID NO: 3968712 - RNA, 22 nt, Human herpesvirus 4 [Epstein-Barr virus]
cucagagucuacucgaccagca

SEQ ID NO: 3968713 - RNA, 23 nt, Human herpesvirus 4 [Epstein-Barr virus]
cucagaugccggccaugcgcuuu

SEQ ID NO: 3968714 - RNA, 17 nt, Human herpesvirus 4 [Epstein-Barr virus]
cucagcacuuugccagc

SEQ ID NO: 3968715 - RNA, 19 nt, Human herpesvirus 4 [Epstein-Barr virus]
cucagcgucaggagagggc

SEQ ID NO: 3968716 - RNA, 17 nt, Human herpesvirus 4 [Epstein-Barr virus]
cucagcuccgcgcucaa

SEQ ID NO: 3968717 - RNA, 16 nt, Human herpesvirus 4 [Epstein-Barr virus]
cucaggcggaggcacu

SEQ ID NO: 3968718 - RNA, 16 nt, Human herpesvirus 4 [Epstein-Barr virus]
cucagguuucugggca

SEQ ID NO: 3968719 - RNA, 17 nt, Human herpesvirus 4 [Epstein-Barr virus]
cucagguuucugggcau

SEQ ID NO: 3968720 - RNA, 14 nt, Human herpesvirus 4 [Epstein-Barr virus]
cucauaauggugcc

SEQ ID NO: 3968721 - RNA, 22 nt, Human herpesvirus 4 [Epstein-Barr virus]
cucauggaggggcggcagcgga

SEQ ID NO: 3968722 - RNA, 14 nt, Human herpesvirus 4 [Epstein-Barr virus]
cuccaaaaaguugg

SEQ ID NO: 3968723 - RNA, 23 nt, Human herpesvirus 4 [Epstein-Barr virus]
cuccacagaguacgcgacugagg

SEQ ID NO: 3968724 - RNA, 11 nt, Human herpesvirus 4 [Epstein-Barr virus]
cuccaccaccu

SEQ ID NO: 3968725 - RNA, 15 nt, Human herpesvirus 4 [Epstein-Barr virus]
cuccacccagcagca

SEQ ID NO: 3968726 - RNA, 21 nt, Human herpesvirus 4 [Epstein-Barr virus]
cuccaccgccgguuaacuuua

SEQ ID NO: 3968727 - RNA, 15 nt, Human herpesvirus 4 [Epstein-Barr virus]
cuccagagagggagu

SEQ ID NO: 3968728 - RNA, 17 nt, Human herpesvirus 4 [Epstein-Barr virus]
cuccagcggcuaccugu

SEQ ID NO: 3968729 - RNA, 11 nt, Human herpesvirus 4 [Epstein-Barr virus]
cuccaggcucc

SEQ ID NO: 3968730 - RNA, 15 nt, Human herpesvirus 4 [Epstein-Barr virus]
cuccaggcuccugga

SEQ ID NO: 3968731 - RNA, 14 nt, Human herpesvirus 4 [Epstein-Barr virus]
cuccaucagggcca

SEQ ID NO: 3968732 - RNA, 16 nt, Human herpesvirus 4 [Epstein-Barr virus]
cuccauuccacccacu

SEQ ID NO: 3968733 - RNA, 19 nt, Human herpesvirus 4 [Epstein-Barr virus]
cucccaauauccaucugcu

SEQ ID NO: 3968734 - RNA, 21 nt, Human herpesvirus 4 [Epstein-Barr virus]
cucccacuuuuaccccagucc

SEQ ID NO: 3968735 - RNA, 15 nt, Human herpesvirus 4 [Epstein-Barr virus]
cucccauguaagccu

SEQ ID NO: 3968736 - RNA, 20 nt, Human herpesvirus 4 [Epstein-Barr virus]
cucccauguaagccugccuc

SEQ ID NO: 3968737 - RNA, 13 nt, Human herpesvirus 4 [Epstein-Barr virus]
cuccccagccaca

SEQ ID NO: 3968738 - RNA, 19 nt, Human herpesvirus 4 [Epstein-Barr virus]
cuccccugacgcuguggcc

SEQ ID NO: 3968739 - RNA, 17 nt, Human herpesvirus 4 [Epstein-Barr virus]
cucccgcccugagcugg

SEQ ID NO: 3968740 - RNA, 15 nt, Human herpesvirus 4 [Epstein-Barr virus]
cucccgccucaggga

SEQ ID NO: 3968741 - RNA, 22 nt, Human herpesvirus 4 [Epstein-Barr virus]
cuccgaugcccaccagccagcg

SEQ ID NO: 3968742 - RNA, 23 nt, Human herpesvirus 4 [Epstein-Barr virus]
cuccgccgccugcggcccacuga

SEQ ID NO: 3968743 - RNA, 19 nt, Human herpesvirus 4 [Epstein-Barr virus]
cuccggcugcccgucucgg

SEQ ID NO: 3968744 - RNA, 19 nt, Human herpesvirus 4 [Epstein-Barr virus]
cuccguccuuguccaggag

SEQ ID NO: 3968745 - RNA, 15 nt, Human herpesvirus 4 [Epstein-Barr virus]
auggcggacugcgcc

SEQ ID NO: 3968746 - RNA, 22 nt, Human herpesvirus 4 [Epstein-Barr virus]
augggaauaacaagggaagagg

SEQ ID NO: 3968747 - RNA, 17 nt, Human herpesvirus 4 [Epstein-Barr virus]
augggaccucuuuccca

SEQ ID NO: 3968748 - RNA, 17 nt, Human herpesvirus 4 [Epstein-Barr virus]
auggucgaugaacaagu

SEQ ID NO: 3968749 - RNA, 14 nt, Human herpesvirus 4 [Epstein-Barr virus]
auggugcuggucuc

SEQ ID NO: 3968750 - RNA, 19 nt, Human herpesvirus 4 [Epstein-Barr virus]
auguaagccugccucgagu

SEQ ID NO: 3968751 - RNA, 14 nt, Human herpesvirus 4 [Epstein-Barr virus]
augucacguguccu

SEQ ID NO: 3968752 - RNA, 13 nt, Human herpesvirus 4 [Epstein-Barr virus]
auguccuguggug

SEQ ID NO: 3968753 - RNA, 19 nt, Human herpesvirus 4 [Epstein-Barr virus]
auguggugccauguggcau

SEQ ID NO: 3968754 - RNA, 16 nt, Human herpesvirus 4 [Epstein-Barr virus]
auguuacuucuuuugc

SEQ ID NO: 3968755 - RNA, 23 nt, Human herpesvirus 4 [Epstein-Barr virus]
auuaaaggccaauuggcacucac

SEQ ID NO: 3968756 - RNA, 21 nt, Human herpesvirus 4 [Epstein-Barr virus]
auuagauucacguuccucauc

SEQ ID NO: 3968757 - RNA, 16 nt, Human herpesvirus 4 [Epstein-Barr virus]
auuccaggugugcuuc

SEQ ID NO: 3968758 - RNA, 21 nt, Human herpesvirus 4 [Epstein-Barr virus]
auuccccggggacaccugcac

SEQ ID NO: 3968759 - RNA, 18 nt, Human herpesvirus 4 [Epstein-Barr virus]
auuccuaggagaaggagc

SEQ ID NO: 3968760 - RNA, 13 nt, Human herpesvirus 4 [Epstein-Barr virus]
auucuccugccug

SEQ ID NO: 3968761 - RNA, 14 nt, Human herpesvirus 4 [Epstein-Barr virus]
auucucuucuguuu

SEQ ID NO: 3968762 - RNA, 18 nt, Human herpesvirus 4 [Epstein-Barr virus]
auugaaaccacgccugcu

SEQ ID NO: 3968763 - RNA, 16 nt, Human herpesvirus 4 [Epstein-Barr virus]
auugccauguccaagu

SEQ ID NO: 3968764 - RNA, 21 nt, Human herpesvirus 4 [Epstein-Barr virus]
auugcugagaaccugcugcua

SEQ ID NO: 3968765 - RNA, 18 nt, Human herpesvirus 4 [Epstein-Barr virus]
auuggacacccacccugc

SEQ ID NO: 3968766 - RNA, 21 nt, Human herpesvirus 4 [Epstein-Barr virus]
auuugcacuuucuuugcuuca

SEQ ID NO: 3968767 - RNA, 18 nt, Human herpesvirus 4 [Epstein-Barr virus]
auuugccuaacauggagg

SEQ ID NO: 3968768 - RNA, 16 nt, Human herpesvirus 4 [Epstein-Barr virus]
auuuugggagcuccag

SEQ ID NO: 3968769 - RNA, 20 nt, Human herpesvirus 4 [Epstein-Barr virus]
caaacugacacacaggccug

SEQ ID NO: 3968770 - RNA, 20 nt, Human herpesvirus 4 [Epstein-Barr virus]
caaagacgccggaugccugc

SEQ ID NO: 3968771 - RNA, 19 nt, Human herpesvirus 4 [Epstein-Barr virus]
caacacaaccacggugaca

SEQ ID NO: 3968772 - RNA, 20 nt, Human herpesvirus 4 [Epstein-Barr virus]
caacacaacuaccaggcaga

SEQ ID NO: 3968773 - RNA, 14 nt, Human herpesvirus 4 [Epstein-Barr virus]
caaccaauguaucc

SEQ ID NO: 3968774 - RNA, 14 nt, Human herpesvirus 4 [Epstein-Barr virus]
caaccaggcccacu

SEQ ID NO: 3968775 - RNA, 13 nt, Human herpesvirus 4 [Epstein-Barr virus]
caacccaaaacca

SEQ ID NO: 3968776 - RNA, 16 nt, Human herpesvirus 4 [Epstein-Barr virus]
caacuucagcuccagg

SEQ ID NO: 3968777 - RNA, 18 nt, Human herpesvirus 4 [Epstein-Barr virus]
caagagccaucaccucuu

SEQ ID NO: 3968778 - RNA, 15 nt, Human herpesvirus 4 [Epstein-Barr virus]
caagaggcagagagc

SEQ ID NO: 3968779 - RNA, 21 nt, Human herpesvirus 4 [Epstein-Barr virus]
caagaguuuaagcagcacuga

SEQ ID NO: 3968780 - RNA, 21 nt, Human herpesvirus 4 [Epstein-Barr virus]
caagccgggggagaagcaccu

SEQ ID NO: 3968781 - RNA, 14 nt, Human herpesvirus 4 [Epstein-Barr virus]
caagcugacagaag

SEQ ID NO: 3968782 - RNA, 18 nt, Human herpesvirus 4 [Epstein-Barr virus]
caagcuuaugcagcaccu

SEQ ID NO: 3968783 - RNA, 17 nt, Human herpesvirus 4 [Epstein-Barr virus]
caaggcaguagaggaca

SEQ ID NO: 3968784 - RNA, 18 nt, Human herpesvirus 4 [Epstein-Barr virus]
caaggcaguagaggacac

SEQ ID NO: 3968785 - RNA, 13 nt, Human herpesvirus 4 [Epstein-Barr virus]
caaggcccuagcc

SEQ ID NO: 3968786 - RNA, 19 nt, Human herpesvirus 4 [Epstein-Barr virus]
caaggugucaauaauuuca

SEQ ID NO: 3968787 - RNA, 18 nt, Human herpesvirus 4 [Epstein-Barr virus]
caagucccggguggugag

SEQ ID NO: 3968788 - RNA, 13 nt, Human herpesvirus 4 [Epstein-Barr virus]
caauaauuucagu

SEQ ID NO: 3968789 - RNA, 16 nt, Human herpesvirus 4 [Epstein-Barr virus]
caaucaccagccaccu

SEQ ID NO: 3968790 - RNA, 12 nt, Human herpesvirus 4 [Epstein-Barr virus]
caaucucuccca

SEQ ID NO: 3968791 - RNA, 18 nt, Human herpesvirus 4 [Epstein-Barr virus]
caaugggagcacauuccc

SEQ ID NO: 3968792 - RNA, 17 nt, Human herpesvirus 4 [Epstein-Barr virus]
cacaacggcugugacua

SEQ ID NO: 3968793 - RNA, 17 nt, Human herpesvirus 4 [Epstein-Barr virus]
cacacacucccuuagcc

SEQ ID NO: 3968794 - RNA, 20 nt, Human herpesvirus 4 [Epstein-Barr virus]
cacacgccagagacaaggca

SEQ ID NO: 3968795 - RNA, 21 nt, Human herpesvirus 4 [Epstein-Barr virus]
cacacggaaaccacaacagcc

SEQ ID NO: 3968796 - RNA, 16 nt, Human herpesvirus 4 [Epstein-Barr virus]
cacagcgccagcaggg

SEQ ID NO: 3968797 - RNA, 12 nt, Human herpesvirus 4 [Epstein-Barr virus]
cacaggacaugu

SEQ ID NO: 3968798 - RNA, 17 nt, Human herpesvirus 4 [Epstein-Barr virus]
cacauacaucccugucu

SEQ ID NO: 3968799 - RNA, 16 nt, Human herpesvirus 4 [Epstein-Barr virus]
cacauauacuggagau

SEQ ID NO: 3968800 - RNA, 18 nt, Human herpesvirus 4 [Epstein-Barr virus]
caccacccccaccacccc

SEQ ID NO: 3968801 - RNA, 17 nt, Human herpesvirus 4 [Epstein-Barr virus]
caccacccccaccaccu

SEQ ID NO: 3968802 - RNA, 18 nt, Human herpesvirus 4 [Epstein-Barr virus]
caccacccccaccaccuc

SEQ ID NO: 3968803 - RNA, 14 nt, Human herpesvirus 4 [Epstein-Barr virus]
caccagcuccaggg

SEQ ID NO: 3968804 - RNA, 22 nt, Human herpesvirus 4 [Epstein-Barr virus]
caccaggccugccaaagagcca

SEQ ID NO: 3968805 - RNA, 17 nt, Human herpesvirus 4 [Epstein-Barr virus]
cacccauggccaggcuc

SEQ ID NO: 3968806 - RNA, 14 nt, Human herpesvirus 4 [Epstein-Barr virus]
cacccccaccaccc

SEQ ID NO: 3968807 - RNA, 14 nt, Human herpesvirus 4 [Epstein-Barr virus]
cacccccaccaccu

SEQ ID NO: 3968808 - RNA, 18 nt, Human herpesvirus 4 [Epstein-Barr virus]
caccccccccaccaccac

SEQ ID NO: 3968809 - RNA, 17 nt, Human herpesvirus 4 [Epstein-Barr virus]
cacccggacccggacca

SEQ ID NO: 3968810 - RNA, 12 nt, Human herpesvirus 4 [Epstein-Barr virus]
cacccgucccgg

SEQ ID NO: 3968811 - RNA, 23 nt, Human herpesvirus 4 [Epstein-Barr virus]
cacccgucccggguacaaguccc

SEQ ID NO: 3968812 - RNA, 20 nt, Human herpesvirus 4 [Epstein-Barr virus]
cacccucccccugccccguu

SEQ ID NO: 3968813 - RNA, 15 nt, Human herpesvirus 4 [Epstein-Barr virus]
caccgcagccacguc

SEQ ID NO: 3968814 - RNA, 19 nt, Human herpesvirus 4 [Epstein-Barr virus]
caccgucuacccagaggag

SEQ ID NO: 3968815 - RNA, 14 nt, Human herpesvirus 4 [Epstein-Barr virus]
caccguggccaggc

SEQ ID NO: 3968816 - RNA, 16 nt, Human herpesvirus 4 [Epstein-Barr virus]
caccuccaccaccuuc

SEQ ID NO: 3968817 - RNA, 14 nt, Human herpesvirus 4 [Epstein-Barr virus]
cgcguggagcugga

SEQ ID NO: 3968818 - RNA, 16 nt, Human herpesvirus 4 [Epstein-Barr virus]
cgcuaguugguccagg

SEQ ID NO: 3968819 - RNA, 14 nt, Human herpesvirus 4 [Epstein-Barr virus]
cgcucagagcuggg

SEQ ID NO: 3968820 - RNA, 15 nt, Human herpesvirus 4 [Epstein-Barr virus]
cgcuccgcgcucggc

SEQ ID NO: 3968821 - RNA, 22 nt, Human herpesvirus 4 [Epstein-Barr virus]
cgcucuguuugaaacacaguuu

SEQ ID NO: 3968822 - RNA, 17 nt, Human herpesvirus 4 [Epstein-Barr virus]
cgcuuccacccccugga

SEQ ID NO: 3968823 - RNA, 15 nt, Human herpesvirus 4 [Epstein-Barr virus]
cggaaaucugcucuu

SEQ ID NO: 3968824 - RNA, 15 nt, Human herpesvirus 4 [Epstein-Barr virus]
cggaagacaacgagg

SEQ ID NO: 3968825 - RNA, 11 nt, Human herpesvirus 4 [Epstein-Barr virus]
cggacacaccg

SEQ ID NO: 3968826 - RNA, 15 nt, Human herpesvirus 4 [Epstein-Barr virus]
cggacgugcccagcu

SEQ ID NO: 3968827 - RNA, 13 nt, Human herpesvirus 4 [Epstein-Barr virus]
cggacugcgccuu

SEQ ID NO: 3968828 - RNA, 23 nt, Human herpesvirus 4 [Epstein-Barr virus]
cggagagugcccuggaggccuca

SEQ ID NO: 3968829 - RNA, 14 nt, Human herpesvirus 4 [Epstein-Barr virus]
cggaguugagcccg

SEQ ID NO: 3968830 - RNA, 19 nt, Human herpesvirus 4 [Epstein-Barr virus]
cggaucgaaggagagcugg

SEQ ID NO: 3968831 - RNA, 20 nt, Human herpesvirus 4 [Epstein-Barr virus]
cggcaucaccguggagccgg

SEQ ID NO: 3968832 - RNA, 20 nt, Human herpesvirus 4 [Epstein-Barr virus]
cggcauuccuaggagaagga

SEQ ID NO: 3968833 - RNA, 19 nt, Human herpesvirus 4 [Epstein-Barr virus]
cggcccgucuuacugccca

SEQ ID NO: 3968834 - RNA, 19 nt, Human herpesvirus 4 [Epstein-Barr virus]
cggcccuuugccuggggcu

SEQ ID NO: 3968835 - RNA, 16 nt, Human herpesvirus 4 [Epstein-Barr virus]
cggccgcugcgcccug

SEQ ID NO: 3968836 - RNA, 12 nt, Human herpesvirus 4 [Epstein-Barr virus]
cggccucaaagg

SEQ ID NO: 3968837 - RNA, 12 nt, Human herpesvirus 4 [Epstein-Barr virus]
cggccugcuggc

SEQ ID NO: 3968838 - RNA, 20 nt, Human herpesvirus 4 [Epstein-Barr virus]
cggccugcuggccgagcugg

SEQ ID NO: 3968839 - RNA, 21 nt, Human herpesvirus 4 [Epstein-Barr virus]
cggccugcuggccgagcugga

SEQ ID NO: 3968840 - RNA, 20 nt, Human herpesvirus 4 [Epstein-Barr virus]
cggcgcuugcgucugccccc

SEQ ID NO: 3968841 - RNA, 21 nt, Human herpesvirus 4 [Epstein-Barr virus]
cggcggacccgaucagagccc

SEQ ID NO: 3968842 - RNA, 18 nt, Human herpesvirus 4 [Epstein-Barr virus]
cggcggccucggaggugc

SEQ ID NO: 3968843 - RNA, 14 nt, Human herpesvirus 4 [Epstein-Barr virus]
cggcggcugcugcc

SEQ ID NO: 3968844 - RNA, 17 nt, Human herpesvirus 4 [Epstein-Barr virus]
cggcguggagcugggcc

SEQ ID NO: 3968845 - RNA, 14 nt, Human herpesvirus 4 [Epstein-Barr virus]
cggcucggccacgc

SEQ ID NO: 3968846 - RNA, 17 nt, Human herpesvirus 4 [Epstein-Barr virus]
cggcugugagcgcacgu

SEQ ID NO: 3968847 - RNA, 15 nt, Human herpesvirus 4 [Epstein-Barr virus]
cgggagccggcggcc

SEQ ID NO: 3968848 - RNA, 13 nt, Human herpesvirus 4 [Epstein-Barr virus]
cgggaggcggugc

SEQ ID NO: 3968849 - RNA, 14 nt, Human herpesvirus 4 [Epstein-Barr virus]
cgggaggggcagga

SEQ ID NO: 3968850 - RNA, 22 nt, Human herpesvirus 4 [Epstein-Barr virus]
cgggcagaggacacgcuggucu

SEQ ID NO: 3968851 - RNA, 21 nt, Human herpesvirus 4 [Epstein-Barr virus]
cgggcaggcauuuuuggugcu

SEQ ID NO: 3968852 - RNA, 13 nt, Human herpesvirus 4 [Epstein-Barr virus]
cgggccaucuccg

SEQ ID NO: 3968853 - RNA, 14 nt, Human herpesvirus 4 [Epstein-Barr virus]
cgggcuccaugucc

SEQ ID NO: 3968854 - RNA, 17 nt, Human herpesvirus 4 [Epstein-Barr virus]
cggggagaacgguggcc

SEQ ID NO: 3968855 - RNA, 19 nt, Human herpesvirus 4 [Epstein-Barr virus]
cggggagcggcaagggcuc

SEQ ID NO: 3968856 - RNA, 21 nt, Human herpesvirus 4 [Epstein-Barr virus]
cggggccuuggcaucaucagc

SEQ ID NO: 3968857 - RNA, 16 nt, Human herpesvirus 4 [Epstein-Barr virus]
cggggguggaggcugc

SEQ ID NO: 3968858 - RNA, 16 nt, Human herpesvirus 4 [Epstein-Barr virus]
cgggggugggcaccuc

SEQ ID NO: 3968859 - RNA, 15 nt, Human herpesvirus 4 [Epstein-Barr virus]
cgggucccccuagcc

SEQ ID NO: 3968860 - RNA, 13 nt, Human herpesvirus 4 [Epstein-Barr virus]
cgggucucgccgc

SEQ ID NO: 3968861 - RNA, 20 nt, Human herpesvirus 4 [Epstein-Barr virus]
uuccagacuaugcauacacu

SEQ ID NO: 3968862 - RNA, 18 nt, Human herpesvirus 4 [Epstein-Barr virus]
uucccagcuaguagcccu

SEQ ID NO: 3968863 - RNA, 22 nt, Human herpesvirus 4 [Epstein-Barr virus]
uucccgccuagagcauuugcaa

SEQ ID NO: 3968864 - RNA, 15 nt, Human herpesvirus 4 [Epstein-Barr virus]
uucccgccuccccuc

SEQ ID NO: 3968865 - RNA, 22 nt, Human herpesvirus 4 [Epstein-Barr virus]
uucccggcugcucccgccucag

SEQ ID NO: 3968866 - RNA, 15 nt, Human herpesvirus 4 [Epstein-Barr virus]
uuccuauaugcucuc

SEQ ID NO: 3968867 - RNA, 13 nt, Human herpesvirus 4 [Epstein-Barr virus]
uuccuggccaugg

SEQ ID NO: 3968868 - RNA, 23 nt, Human herpesvirus 4 [Epstein-Barr virus]
uucggucaaguaccagcuggugg

SEQ ID NO: 3968869 - RNA, 15 nt, Human herpesvirus 4 [Epstein-Barr virus]
uucucaaacaguccc

SEQ ID NO: 3968870 - RNA, 19 nt, Human herpesvirus 4 [Epstein-Barr virus]
uucuguacaauggggccag

SEQ ID NO: 3968871 - RNA, 19 nt, Human herpesvirus 4 [Epstein-Barr virus]
uugaagguggaggggggcg

SEQ ID NO: 3968872 - RNA, 15 nt, Human herpesvirus 4 [Epstein-Barr virus]
uugauuuggaggaag

SEQ ID NO: 3968873 - RNA, 22 nt, Human herpesvirus 4 [Epstein-Barr virus]
uugccucuuguguucuugccgc

SEQ ID NO: 3968874 - RNA, 12 nt, Human herpesvirus 4 [Epstein-Barr virus]
uugccuggggcu

SEQ ID NO: 3968875 - RNA, 19 nt, Human herpesvirus 4 [Epstein-Barr virus]
uuggagaaaacgggggugg

SEQ ID NO: 3968876 - RNA, 15 nt, Human herpesvirus 4 [Epstein-Barr virus]
uugguaaaacaaggg

SEQ ID NO: 3968877 - RNA, 20 nt, Human herpesvirus 4 [Epstein-Barr virus]
uugguccaggguccaggaga

SEQ ID NO: 3968878 - RNA, 14 nt, Human herpesvirus 4 [Epstein-Barr virus]
uuguccgcugggcc

SEQ ID NO: 3968879 - RNA, 16 nt, Human herpesvirus 4 [Epstein-Barr virus]
uugucggagguggaga

SEQ ID NO: 3968880 - RNA, 17 nt, Human herpesvirus 4 [Epstein-Barr virus]
uugugcggucuguuuuc

SEQ ID NO: 3968881 - RNA, 13 nt, Human herpesvirus 4 [Epstein-Barr virus]
uuguucuuuggag

SEQ ID NO: 3968882 - RNA, 16 nt, Human herpesvirus 4 [Epstein-Barr virus]
uuuccaugacaguccc

SEQ ID NO: 3968883 - RNA, 21 nt, Human herpesvirus 4 [Epstein-Barr virus]
uuuccugcccucccacuuuua

SEQ ID NO: 3968884 - RNA, 20 nt, Human herpesvirus 4 [Epstein-Barr virus]
uuugacugacacauaaacau

SEQ ID NO: 3968885 - RNA, 15 nt, Human herpesvirus 4 [Epstein-Barr virus]
uuugauaaaccuuaa

SEQ ID NO: 3968886 - RNA, 14 nt, Human herpesvirus 4 [Epstein-Barr virus]
uuugcuagggagga

SEQ ID NO: 3968887 - RNA, 20 nt, Human herpesvirus 4 [Epstein-Barr virus]
uuuggcauguguacuugucc

SEQ ID NO: 3968888 - RNA, 13 nt, Human herpesvirus 4 [Epstein-Barr virus]
uuuggugcugccu

SEQ ID NO: 3968889 - RNA, 16 nt, Human herpesvirus 4 [Epstein-Barr virus]
uuuuugccacauguuu

SEQ ID NO: 3968890 - RNA, 15 nt, Human herpesvirus 4 [Epstein-Barr virus]
aaaaaaugcaacaau

SEQ ID NO: 3968891 - RNA, 21 nt, Human herpesvirus 4 [Epstein-Barr virus]
aaaaucaacuacaagcagcua

SEQ ID NO: 3968892 - RNA, 14 nt, Human herpesvirus 4 [Epstein-Barr virus]
aaaaucagaccacc

SEQ ID NO: 3968893 - RNA, 19 nt, Human herpesvirus 4 [Epstein-Barr virus]
aaagaucuaccccagcugc

SEQ ID NO: 3968894 - RNA, 16 nt, Human herpesvirus 4 [Epstein-Barr virus]
aaagcggcccagcaga

SEQ ID NO: 3968895 - RNA, 20 nt, Human herpesvirus 4 [Epstein-Barr virus]
aaagcuaacuguacauacug

SEQ ID NO: 3968896 - RNA, 13 nt, Human herpesvirus 4 [Epstein-Barr virus]
aaagcugaagaac

SEQ ID NO: 3968897 - RNA, 13 nt, Human herpesvirus 4 [Epstein-Barr virus]
aaaggaagggggc

SEQ ID NO: 3968898 - RNA, 16 nt, Human herpesvirus 4 [Epstein-Barr virus]
aaagucccgagcggcc

SEQ ID NO: 3968899 - RNA, 15 nt, Human herpesvirus 4 [Epstein-Barr virus]
aaaucugacacuuua

SEQ ID NO: 3968900 - RNA, 18 nt, Human herpesvirus 4 [Epstein-Barr virus]
aaauuuagcacgucccaa

SEQ ID NO: 3968901 - RNA, 17 nt, Human herpesvirus 4 [Epstein-Barr virus]
aacaaggagugccucug

SEQ ID NO: 3968902 - RNA, 21 nt, Human herpesvirus 4 [Epstein-Barr virus]
aacaguagaagaacugcaaga

SEQ ID NO: 3968903 - RNA, 18 nt, Human herpesvirus 4 [Epstein-Barr virus]
aacauaaaugccccaucu

SEQ ID NO: 3968904 - RNA, 23 nt, Human herpesvirus 4 [Epstein-Barr virus]
aacauuugaggaggcacacaaaa

SEQ ID NO: 3968905 - RNA, 17 nt, Human herpesvirus 4 [Epstein-Barr virus]
aacccaauucccgccuc

SEQ ID NO: 3968906 - RNA, 15 nt, Human herpesvirus 4 [Epstein-Barr virus]
aaccccuauauccua

SEQ ID NO: 3968907 - RNA, 15 nt, Human herpesvirus 4 [Epstein-Barr virus]
aacccuguagucacc

SEQ ID NO: 3968908 - RNA, 24 nt, Human herpesvirus 4 [Epstein-Barr virus]
aacccuugcccucuccagcaacca

SEQ ID NO: 3968909 - RNA, 15 nt, Human herpesvirus 4 [Epstein-Barr virus]
aacucagccccaucu

SEQ ID NO: 3968910 - RNA, 17 nt, Human herpesvirus 4 [Epstein-Barr virus]
aacugacacacaggccu

SEQ ID NO: 3968911 - RNA, 14 nt, Human herpesvirus 4 [Epstein-Barr virus]
aacugccagagcug

SEQ ID NO: 3968912 - RNA, 20 nt, Human herpesvirus 4 [Epstein-Barr virus]
aacuuccaacgcauccacca

SEQ ID NO: 3968913 - RNA, 16 nt, Human herpesvirus 4 [Epstein-Barr virus]
aacuugggggcaggcu

SEQ ID NO: 3968914 - RNA, 14 nt, Human herpesvirus 4 [Epstein-Barr virus]
aagcaacugcugca

SEQ ID NO: 3968915 - RNA, 13 nt, Human herpesvirus 4 [Epstein-Barr virus]
aagcauggggcuc

SEQ ID NO: 3968916 - RNA, 22 nt, Human herpesvirus 4 [Epstein-Barr virus]
aagccgggggagaagcaccuca

SEQ ID NO: 3968917 - RNA, 21 nt, Human herpesvirus 4 [Epstein-Barr virus]
aagccuucuccuggacccugg

SEQ ID NO: 3968918 - RNA, 10 nt, Human herpesvirus 4 [Epstein-Barr virus]
aagcucagca

SEQ ID NO: 3968919 - RNA, 22 nt, Human herpesvirus 4 [Epstein-Barr virus]
aagcuuaugcagcaccucagcu

SEQ ID NO: 3968920 - RNA, 14 nt, Human herpesvirus 4 [Epstein-Barr virus]
aaggaggggcggca

SEQ ID NO: 3968921 - RNA, 17 nt, Human herpesvirus 4 [Epstein-Barr virus]
aaggccgcugccaggcc

SEQ ID NO: 3968922 - RNA, 16 nt, Human herpesvirus 4 [Epstein-Barr virus]
aaggccugcugucauc

SEQ ID NO: 3968923 - RNA, 16 nt, Human herpesvirus 4 [Epstein-Barr virus]
aaggcucugcacagga

SEQ ID NO: 3968924 - RNA, 22 nt, Human herpesvirus 4 [Epstein-Barr virus]
aaggugucaauaauuucaguga

SEQ ID NO: 3968925 - RNA, 19 nt, Human herpesvirus 4 [Epstein-Barr virus]
aaguugaugauauugaauu

SEQ ID NO: 3968926 - RNA, 16 nt, Human herpesvirus 4 [Epstein-Barr virus]
aauaaauaucuuccug

SEQ ID NO: 3968927 - RNA, 16 nt, Human herpesvirus 4 [Epstein-Barr virus]
aauaccgagauguaca

SEQ ID NO: 3968928 - RNA, 16 nt, Human herpesvirus 4 [Epstein-Barr virus]
aauauuaauaaauauc

SEQ ID NO: 3968929 - RNA, 20 nt, Human herpesvirus 4 [Epstein-Barr virus]
aaucucgcucagagcuggga

SEQ ID NO: 3968930 - RNA, 22 nt, Human herpesvirus 4 [Epstein-Barr virus]
aaucucucccacggaccccccu

SEQ ID NO: 3968931 - RNA, 19 nt, Human herpesvirus 4 [Epstein-Barr virus]
aaugaacacucauggugug

SEQ ID NO: 3968932 - RNA, 17 nt, Human herpesvirus 4 [Epstein-Barr virus]
aauggggguuggagaaa

SEQ ID NO: 3968933 - RNA, 20 nt, Human herpesvirus 4 [Epstein-Barr virus]
aauguuccagaagucggcca

SEQ ID NO: 3968934 - RNA, 13 nt, Human herpesvirus 4 [Epstein-Barr virus]
aauucccgccucc

SEQ ID NO: 3968935 - RNA, 16 nt, Human herpesvirus 4 [Epstein-Barr virus]
acaaaaccacugaccu

SEQ ID NO: 3968936 - RNA, 20 nt, Human herpesvirus 4 [Epstein-Barr virus]
acaaaauggggguuggagaa

SEQ ID NO: 3968937 - RNA, 18 nt, Human herpesvirus 4 [Epstein-Barr virus]
acaaaggaaacugcugac

SEQ ID NO: 3968938 - RNA, 21 nt, Human herpesvirus 4 [Epstein-Barr virus]
acaaccuuggacccugcugcg

SEQ ID NO: 3968939 - RNA, 18 nt, Human herpesvirus 4 [Epstein-Barr virus]
acaagguucggaaaucug

SEQ ID NO: 3968940 - RNA, 16 nt, Human herpesvirus 4 [Epstein-Barr virus]
acaaguaccagcccuu

SEQ ID NO: 3968941 - RNA, 16 nt, Human herpesvirus 4 [Epstein-Barr virus]
acaauagaaguggaaa

SEQ ID NO: 3968942 - RNA, 22 nt, Human herpesvirus 4 [Epstein-Barr virus]
acaaucuugugaaccagaaaga

SEQ ID NO: 3968943 - RNA, 17 nt, Human herpesvirus 4 [Epstein-Barr virus]
acacacauggcacucau

SEQ ID NO: 3968944 - RNA, 13 nt, Human herpesvirus 4 [Epstein-Barr virus]
acacagugggcuu

SEQ ID NO: 3968945 - RNA, 14 nt, Human herpesvirus 4 [Epstein-Barr virus]
acaccauggccucg

SEQ ID NO: 3968946 - RNA, 15 nt, Human herpesvirus 4 [Epstein-Barr virus]
acaccgggcaggucc

SEQ ID NO: 3968947 - RNA, 22 nt, Human herpesvirus 4 [Epstein-Barr virus]
acacuuauguuucaagcagcuc

SEQ ID NO: 3968948 - RNA, 13 nt, Human herpesvirus 4 [Epstein-Barr virus]
acagacccugggc

SEQ ID NO: 3968949 - RNA, 18 nt, Human herpesvirus 4 [Epstein-Barr virus]
acagacuuggccuugggg

SEQ ID NO: 3968950 - RNA, 23 nt, Human herpesvirus 4 [Epstein-Barr virus]
acagcaauggcacggaugccugg

SEQ ID NO: 3968951 - RNA, 12 nt, Human herpesvirus 4 [Epstein-Barr virus]
acaggacauguu

SEQ ID NO: 3968952 - RNA, 15 nt, Human herpesvirus 4 [Epstein-Barr virus]
acaggacuaaccaug

SEQ ID NO: 3968953 - RNA, 12 nt, Human herpesvirus 4 [Epstein-Barr virus]
acaggagcagga

SEQ ID NO: 3968954 - RNA, 18 nt, Human herpesvirus 4 [Epstein-Barr virus]
acagggguauguggugcc

SEQ ID NO: 3968955 - RNA, 17 nt, Human herpesvirus 4 [Epstein-Barr virus]
acagguacuaacacgca

SEQ ID NO: 3968956 - RNA, 12 nt, Human herpesvirus 4 [Epstein-Barr virus]
acauaaaugccc

SEQ ID NO: 3968957 - RNA, 16 nt, Human herpesvirus 4 [Epstein-Barr virus]
acauauccagagcuga

SEQ ID NO: 3968958 - RNA, 12 nt, Human herpesvirus 4 [Epstein-Barr virus]
acauauguacaa

SEQ ID NO: 3968959 - RNA, 20 nt, Human herpesvirus 4 [Epstein-Barr virus]
acaugagaaaauacuucucu

SEQ ID NO: 3968960 - RNA, 21 nt, Human herpesvirus 4 [Epstein-Barr virus]
acaugucacguguccugcagg

SEQ ID NO: 3968961 - RNA, 23 nt, Human herpesvirus 4 [Epstein-Barr virus]
acauuaaccucaaccacaaaaug

SEQ ID NO: 3968962 - RNA, 13 nt, Human herpesvirus 4 [Epstein-Barr virus]
acauuggcagcag

SEQ ID NO: 3968963 - RNA, 19 nt, Human herpesvirus 4 [Epstein-Barr virus]
accaaggcggcugcugaga

SEQ ID NO: 3968964 - RNA, 15 nt, Human herpesvirus 4 [Epstein-Barr virus]
accaagggcagggca

SEQ ID NO: 3968965 - RNA, 15 nt, Human herpesvirus 4 [Epstein-Barr virus]
accacaacagccaga

SEQ ID NO: 3968966 - RNA, 17 nt, Human herpesvirus 4 [Epstein-Barr virus]
accacucccaccacccc

SEQ ID NO: 3968967 - RNA, 16 nt, Human herpesvirus 4 [Epstein-Barr virus]
accaggcccacugcaa

SEQ ID NO: 3968968 - RNA, 18 nt, Human herpesvirus 4 [Epstein-Barr virus]
accaggccugccaaagag

SEQ ID NO: 3968969 - RNA, 13 nt, Human herpesvirus 4 [Epstein-Barr virus]
accauccacagcc

SEQ ID NO: 3968970 - RNA, 16 nt, Human herpesvirus 4 [Epstein-Barr virus]
accauccacagcccca

SEQ ID NO: 3968971 - RNA, 12 nt, Human herpesvirus 4 [Epstein-Barr virus]
acccaacaaagc

SEQ ID NO: 3968972 - RNA, 15 nt, Human herpesvirus 4 [Epstein-Barr virus]
acccaaugugcaugg

SEQ ID NO: 3968973 - RNA, 17 nt, Human herpesvirus 4 [Epstein-Barr virus]
acccaccgcaaccgcug

SEQ ID NO: 3968974 - RNA, 15 nt, Human herpesvirus 4 [Epstein-Barr virus]
acccagcagcagccc

SEQ ID NO: 3968975 - RNA, 19 nt, Human herpesvirus 4 [Epstein-Barr virus]
acccauaccaggugccuuu

SEQ ID NO: 3968976 - RNA, 15 nt, Human herpesvirus 4 [Epstein-Barr virus]
accccuaccucggca

SEQ ID NO: 3968977 - RNA, 15 nt, Human herpesvirus 4 [Epstein-Barr virus]
accccugggcucuca

SEQ ID NO: 3968978 - RNA, 16 nt, Human herpesvirus 4 [Epstein-Barr virus]
acccgucccggguaca

SEQ ID NO: 3968979 - RNA, 12 nt, Human herpesvirus 4 [Epstein-Barr virus]
acccucccccug

SEQ ID NO: 3968980 - RNA, 16 nt, Human herpesvirus 4 [Epstein-Barr virus]
acccugguacaggacc

SEQ ID NO: 3968981 - RNA, 15 nt, Human herpesvirus 4 [Epstein-Barr virus]
acccuucugcugcug

SEQ ID NO: 3968982 - RNA, 19 nt, Human herpesvirus 4 [Epstein-Barr virus]
acccuugguauugcgcugg

SEQ ID NO: 3968983 - RNA, 15 nt, Human herpesvirus 4 [Epstein-Barr virus]
accgcgcccuccucu

SEQ ID NO: 3968984 - RNA, 22 nt, Human herpesvirus 4 [Epstein-Barr virus]
accggugacagugcuuacugcg

SEQ ID NO: 3968985 - RNA, 12 nt, Human herpesvirus 4 [Epstein-Barr virus]
accuacaccacc

SEQ ID NO: 3968986 - RNA, 20 nt, Human herpesvirus 4 [Epstein-Barr virus]
accuccaaucaccagccacc

SEQ ID NO: 3968987 - RNA, 10 nt, Human herpesvirus 4 [Epstein-Barr virus]
accuccacca

SEQ ID NO: 3968988 - RNA, 20 nt, Human herpesvirus 4 [Epstein-Barr virus]
accuguccuugucugcugcc

SEQ ID NO: 3968989 - RNA, 19 nt, Human herpesvirus 4 [Epstein-Barr virus]
acgaacuccuccagcagug

SEQ ID NO: 3968990 - RNA, 13 nt, Human herpesvirus 4 [Epstein-Barr virus]
acgacuguuccua

SEQ ID NO: 3968991 - RNA, 15 nt, Human herpesvirus 4 [Epstein-Barr virus]
acgaggaggaagaga

SEQ ID NO: 3968992 - RNA, 12 nt, Human herpesvirus 4 [Epstein-Barr virus]
acgccaaugcca

SEQ ID NO: 3968993 - RNA, 15 nt, Human herpesvirus 4 [Epstein-Barr virus]
acgccaaugccaacu

SEQ ID NO: 3968994 - RNA, 18 nt, Human herpesvirus 4 [Epstein-Barr virus]
acgccgccgccagcagcc

SEQ ID NO: 3968995 - RNA, 14 nt, Human herpesvirus 4 [Epstein-Barr virus]
acgccugcuucacg

SEQ ID NO: 3968996 - RNA, 19 nt, Human herpesvirus 4 [Epstein-Barr virus]
acgccugcuucacgccucg

SEQ ID NO: 3968997 - RNA, 22 nt, Human herpesvirus 4 [Epstein-Barr virus]
acgccugcuucacgccucguuu

SEQ ID NO: 3968998 - RNA, 18 nt, Human herpesvirus 4 [Epstein-Barr virus]
acgcucagugcggugcua

SEQ ID NO: 3968999 - RNA, 15 nt, Human herpesvirus 4 [Epstein-Barr virus]
acgcuccuucuuggc

SEQ ID NO: 3969000 - RNA, 22 nt, Human herpesvirus 4 [Epstein-Barr virus]
acgcuguccgccaggacggaga

SEQ ID NO: 3969001 - RNA, 15 nt, Human herpesvirus 4 [Epstein-Barr virus]
acggaaaucugcucu

SEQ ID NO: 3969002 - RNA, 15 nt, Human herpesvirus 4 [Epstein-Barr virus]
acggaugcugcagag

SEQ ID NO: 3969003 - RNA, 15 nt, Human herpesvirus 4 [Epstein-Barr virus]
acggcaugccuaaug

SEQ ID NO: 3969004 - RNA, 20 nt, Human herpesvirus 4 [Epstein-Barr virus]
acgggcaucuuaucagagag

SEQ ID NO: 3969005 - RNA, 20 nt, Human herpesvirus 4 [Epstein-Barr virus]
acggggccgugcaccugcca

SEQ ID NO: 3969006 - RNA, 20 nt, Human herpesvirus 4 [Epstein-Barr virus]
acgggucucacgagggucug

SEQ ID NO: 3969007 - RNA, 16 nt, Human herpesvirus 4 [Epstein-Barr virus]
acgguggaacaggagc

SEQ ID NO: 3969008 - RNA, 21 nt, Human herpesvirus 4 [Epstein-Barr virus]
acgguggcuugggcuguggua

SEQ ID NO: 3969009 - RNA, 19 nt, Human herpesvirus 4 [Epstein-Barr virus]
acguacccauaacugggca

SEQ ID NO: 3969010 - RNA, 17 nt, Human herpesvirus 4 [Epstein-Barr virus]
acgugagugacacugau

SEQ ID NO: 3969011 - RNA, 13 nt, Human herpesvirus 4 [Epstein-Barr virus]
acgugcccagcuc

SEQ ID NO: 3969012 - RNA, 21 nt, Human herpesvirus 4 [Epstein-Barr virus]
acuaauguucucuaacugugu

SEQ ID NO: 3969013 - RNA, 15 nt, Human herpesvirus 4 [Epstein-Barr virus]
acuacaauguuccuu

SEQ ID NO: 3969014 - RNA, 22 nt, Human herpesvirus 4 [Epstein-Barr virus]
acuagcggcgagacccgaggca

SEQ ID NO: 3969015 - RNA, 14 nt, Human herpesvirus 4 [Epstein-Barr virus]
acuauguucucuac

SEQ ID NO: 3969016 - RNA, 19 nt, Human herpesvirus 4 [Epstein-Barr virus]
acucaccaagauuguucca

SEQ ID NO: 3969017 - RNA, 19 nt, Human herpesvirus 4 [Epstein-Barr virus]
acucauuacuuguucuuuu

SEQ ID NO: 3969018 - RNA, 18 nt, Human herpesvirus 4 [Epstein-Barr virus]
acuccaggcccccgggug

SEQ ID NO: 3969019 - RNA, 15 nt, Human herpesvirus 4 [Epstein-Barr virus]
acucccgaggcacuu

SEQ ID NO: 3969020 - RNA, 12 nt, Human herpesvirus 4 [Epstein-Barr virus]
acuccgccacca

SEQ ID NO: 3969021 - RNA, 16 nt, Human herpesvirus 4 [Epstein-Barr virus]
acucgaaacuauggca

SEQ ID NO: 3969022 - RNA, 21 nt, Human herpesvirus 4 [Epstein-Barr virus]
acucuaaaaaucaaaacuuua

SEQ ID NO: 3969023 - RNA, 17 nt, Human herpesvirus 4 [Epstein-Barr virus]
acucucucccccgggcg

SEQ ID NO: 3969024 - RNA, 14 nt, Human herpesvirus 4 [Epstein-Barr virus]
acucugaccaggac

SEQ ID NO: 3969025 - RNA, 16 nt, Human herpesvirus 4 [Epstein-Barr virus]
acucuuggugcagccc

SEQ ID NO: 3969026 - RNA, 14 nt, Human herpesvirus 4 [Epstein-Barr virus]
acugcaaacccugg

SEQ ID NO: 3969027 - RNA, 19 nt, Human herpesvirus 4 [Epstein-Barr virus]
acugcgagggggccuggug

SEQ ID NO: 3969028 - RNA, 19 nt, Human herpesvirus 4 [Epstein-Barr virus]
acugcgggugucucaagcu

SEQ ID NO: 3969029 - RNA, 20 nt, Human herpesvirus 4 [Epstein-Barr virus]
acugcgguugucacuuucuu

SEQ ID NO: 3969030 - RNA, 18 nt, Human herpesvirus 4 [Epstein-Barr virus]
acugcguccaccuggcca

SEQ ID NO: 3969031 - RNA, 17 nt, Human herpesvirus 4 [Epstein-Barr virus]
acuggcaacuccucuua

SEQ ID NO: 3969032 - RNA, 17 nt, Human herpesvirus 4 [Epstein-Barr virus]
acuggcacacacucccu

SEQ ID NO: 3969033 - RNA, 12 nt, Human herpesvirus 4 [Epstein-Barr virus]
acuguccagaca

SEQ ID NO: 3969034 - RNA, 18 nt, Human herpesvirus 4 [Epstein-Barr virus]
acuguucaaacagcagca

SEQ ID NO: 3969035 - RNA, 17 nt, Human herpesvirus 4 [Epstein-Barr virus]
acuguuccuauaugcuc

SEQ ID NO: 3969036 - RNA, 14 nt, Human herpesvirus 4 [Epstein-Barr virus]
acuguucucugcuc

SEQ ID NO: 3969037 - RNA, 21 nt, Human herpesvirus 4 [Epstein-Barr virus]
acuugcucagguuucugggca

SEQ ID NO: 3969038 - RNA, 17 nt, Human herpesvirus 4 [Epstein-Barr virus]
acuuuuauuucaguucu

SEQ ID NO: 3969039 - RNA, 16 nt, Human herpesvirus 4 [Epstein-Barr virus]
agaacugacgcuccag

SEQ ID NO: 3969040 - RNA, 15 nt, Human herpesvirus 4 [Epstein-Barr virus]
agaagacuccugccu

SEQ ID NO: 3969041 - RNA, 22 nt, Human herpesvirus 4 [Epstein-Barr virus]
agaagcuacaaacacgggccug

SEQ ID NO: 3969042 - RNA, 17 nt, Human herpesvirus 4 [Epstein-Barr virus]
agaagugugucccccuc

SEQ ID NO: 3969043 - RNA, 19 nt, Human herpesvirus 4 [Epstein-Barr virus]
agaagugugucccccucca

SEQ ID NO: 3969044 - RNA, 23 nt, Human herpesvirus 4 [Epstein-Barr virus]
agaaucaccagagcccagaggag

SEQ ID NO: 3969045 - RNA, 16 nt, Human herpesvirus 4 [Epstein-Barr virus]
agacacaucuggacca

SEQ ID NO: 3969046 - RNA, 13 nt, Human herpesvirus 4 [Epstein-Barr virus]
ccagguagcccag

SEQ ID NO: 3969047 - RNA, 22 nt, Human herpesvirus 4 [Epstein-Barr virus]
ccagugacgaagacccaucuga

SEQ ID NO: 3969048 - RNA, 20 nt, Human herpesvirus 4 [Epstein-Barr virus]
ccagugccuccgccugagcc

SEQ ID NO: 3969049 - RNA, 21 nt, Human herpesvirus 4 [Epstein-Barr virus]
ccaguggccggggccguggag

SEQ ID NO: 3969050 - RNA, 23 nt, Human herpesvirus 4 [Epstein-Barr virus]
ccauccaucaacuucagcuccag

SEQ ID NO: 3969051 - RNA, 15 nt, Human herpesvirus 4 [Epstein-Barr virus]
ccauccccagcccag

SEQ ID NO: 3969052 - RNA, 15 nt, Human herpesvirus 4 [Epstein-Barr virus]
ccaugacgcugcugc

SEQ ID NO: 3969053 - RNA, 18 nt, Human herpesvirus 4 [Epstein-Barr virus]
ccauggugagacaccugg

SEQ ID NO: 3969054 - RNA, 14 nt, Human herpesvirus 4 [Epstein-Barr virus]
ccauucucguccau

SEQ ID NO: 3969055 - RNA, 15 nt, Human herpesvirus 4 [Epstein-Barr virus]
cccaagccuggaugu

SEQ ID NO: 3969056 - RNA, 13 nt, Human herpesvirus 4 [Epstein-Barr virus]
cccaaugugcaug

SEQ ID NO: 3969057 - RNA, 14 nt, Human herpesvirus 4 [Epstein-Barr virus]
cccaaugugcaugg

SEQ ID NO: 3969058 - RNA, 15 nt, Human herpesvirus 4 [Epstein-Barr virus]
cccaauucacaucuc

SEQ ID NO: 3969059 - RNA, 20 nt, Human herpesvirus 4 [Epstein-Barr virus]
cccaccacccccaccaccuc

SEQ ID NO: 3969060 - RNA, 22 nt, Human herpesvirus 4 [Epstein-Barr virus]
cccacgugaacauccugcgugg

SEQ ID NO: 3969061 - RNA, 21 nt, Human herpesvirus 4 [Epstein-Barr virus]
cccacugucacugugcacucu

SEQ ID NO: 3969062 - RNA, 18 nt, Human herpesvirus 4 [Epstein-Barr virus]
cuggccaggcuggugaca

SEQ ID NO: 3969063 - RNA, 14 nt, Human herpesvirus 4 [Epstein-Barr virus]
cuggcccccaaccc

SEQ ID NO: 3969064 - RNA, 14 nt, Human herpesvirus 4 [Epstein-Barr virus]
cuggccgcagcugg

SEQ ID NO: 3969065 - RNA, 15 nt, Human herpesvirus 4 [Epstein-Barr virus]
cuggccgcagcuggc

SEQ ID NO: 3969066 - RNA, 17 nt, Human herpesvirus 4 [Epstein-Barr virus]
cuggccgccggauggcc

SEQ ID NO: 3969067 - RNA, 21 nt, Human herpesvirus 4 [Epstein-Barr virus]
cuggccuccuuaaauucaccu

SEQ ID NO: 3969068 - RNA, 14 nt, Human herpesvirus 4 [Epstein-Barr virus]
cuggcggcccagcc

SEQ ID NO: 3969069 - RNA, 22 nt, Human herpesvirus 4 [Epstein-Barr virus]
cuggcuccccauagacucccau

SEQ ID NO: 3969070 - RNA, 21 nt, Human herpesvirus 4 [Epstein-Barr virus]
cuggcucuucugggaacaccc

SEQ ID NO: 3969071 - RNA, 12 nt, Human herpesvirus 4 [Epstein-Barr virus]
cuggcugugcug

SEQ ID NO: 3969072 - RNA, 22 nt, Human herpesvirus 4 [Epstein-Barr virus]
cuggcuuucguccucuggcucu

SEQ ID NO: 3969073 - RNA, 23 nt, Human herpesvirus 4 [Epstein-Barr virus]
cuggcuuucguccucuggcucuc

SEQ ID NO: 3969074 - RNA, 22 nt, Human herpesvirus 4 [Epstein-Barr virus]
cugggaggugauguagguugua

SEQ ID NO: 3969075 - RNA, 14 nt, Human herpesvirus 4 [Epstein-Barr virus]
cugguacaggacca

SEQ ID NO: 3969076 - RNA, 16 nt, Human herpesvirus 4 [Epstein-Barr virus]
cuggugagccacguag

SEQ ID NO: 3969077 - RNA, 19 nt, Human herpesvirus 4 [Epstein-Barr virus]
cuguacaaacccaacaaug

SEQ ID NO: 3969078 - RNA, 15 nt, Human herpesvirus 4 [Epstein-Barr virus]
cuguccacugccccg

SEQ ID NO: 3969079 - RNA, 19 nt, Human herpesvirus 4 [Epstein-Barr virus]
cugucuacuucgccaugcu

SEQ ID NO: 3969080 - RNA, 18 nt, Human herpesvirus 4 [Epstein-Barr virus]
cugucucugaaggaucca

SEQ ID NO: 3969081 - RNA, 17 nt, Human herpesvirus 4 [Epstein-Barr virus]
cugucucuuucuggcca

SEQ ID NO: 3969082 - RNA, 17 nt, Human herpesvirus 4 [Epstein-Barr virus]
cugugcuucagcaguag

SEQ ID NO: 3969083 - RNA, 19 nt, Human herpesvirus 4 [Epstein-Barr virus]
cuguggccccggcuggcca

SEQ ID NO: 3969084 - RNA, 15 nt, Human herpesvirus 4 [Epstein-Barr virus]
cuguguccugggcaa

SEQ ID NO: 3969085 - RNA, 23 nt, Human herpesvirus 4 [Epstein-Barr virus]
cugugugcgcgccgccagcaugg

SEQ ID NO: 3969086 - RNA, 19 nt, Human herpesvirus 4 [Epstein-Barr virus]
cuuaaaaaugugcagcuuc

SEQ ID NO: 3969087 - RNA, 22 nt, Human herpesvirus 4 [Epstein-Barr virus]
cuuaaaaaugugcagcuucucc

SEQ ID NO: 3969088 - RNA, 15 nt, Human herpesvirus 4 [Epstein-Barr virus]
cuuaugcuaacauuu

SEQ ID NO: 3969089 - RNA, 12 nt, Human herpesvirus 4 [Epstein-Barr virus]
cuucaccaccac

SEQ ID NO: 3969090 - RNA, 19 nt, Human herpesvirus 4 [Epstein-Barr virus]
cuucacuaaggcaguccag

SEQ ID NO: 3969091 - RNA, 13 nt, Human herpesvirus 4 [Epstein-Barr virus]
cuucagugucugg

SEQ ID NO: 3969092 - RNA, 14 nt, Human herpesvirus 4 [Epstein-Barr virus]
cuuccacagcaaug

SEQ ID NO: 3969093 - RNA, 22 nt, Human herpesvirus 4 [Epstein-Barr virus]
cuuccacccccuggagccagcg

SEQ ID NO: 3969094 - RNA, 22 nt, Human herpesvirus 4 [Epstein-Barr virus]
cuuccagagaggcgcagcccag

SEQ ID NO: 3969095 - RNA, 14 nt, Human herpesvirus 4 [Epstein-Barr virus]
cuuccagagcucua

SEQ ID NO: 3969096 - RNA, 13 nt, Human herpesvirus 4 [Epstein-Barr virus]
cuuccaugucuac

SEQ ID NO: 3969097 - RNA, 19 nt, Human herpesvirus 4 [Epstein-Barr virus]
cuucccagacucugcuuuc

SEQ ID NO: 3969098 - RNA, 17 nt, Human herpesvirus 4 [Epstein-Barr virus]
cuucucaaaggccuugg

SEQ ID NO: 3969099 - RNA, 19 nt, Human herpesvirus 4 [Epstein-Barr virus]
cuucucauuagucaggagg

SEQ ID NO: 3969100 - RNA, 17 nt, Human herpesvirus 4 [Epstein-Barr virus]
cuucuccucagccucca

SEQ ID NO: 3969101 - RNA, 16 nt, Human herpesvirus 4 [Epstein-Barr virus]
cuugcccucuccagca

SEQ ID NO: 3969102 - RNA, 22 nt, Human herpesvirus 4 [Epstein-Barr virus]
cuugcuccaccagcuucucaaa

SEQ ID NO: 3969103 - RNA, 12 nt, Human herpesvirus 4 [Epstein-Barr virus]
cuugcuggggcg

SEQ ID NO: 3969104 - RNA, 21 nt, Human herpesvirus 4 [Epstein-Barr virus]
cuuggaggcugcuaagccagg

SEQ ID NO: 3969105 - RNA, 15 nt, Human herpesvirus 4 [Epstein-Barr virus]
cuuggcagcaguggc

SEQ ID NO: 3969106 - RNA, 17 nt, Human herpesvirus 4 [Epstein-Barr virus]
cuuggcuauggucaugg

SEQ ID NO: 3969107 - RNA, 19 nt, Human herpesvirus 4 [Epstein-Barr virus]
cuugggauugcaacacgac

SEQ ID NO: 3969108 - RNA, 16 nt, Human herpesvirus 4 [Epstein-Barr virus]
cuuguccgcuauuuuu

SEQ ID NO: 3969109 - RNA, 18 nt, Human herpesvirus 4 [Epstein-Barr virus]
cuuguccuuggugugcac

SEQ ID NO: 3969110 - RNA, 13 nt, Human herpesvirus 4 [Epstein-Barr virus]
cuugugcuccuga

SEQ ID NO: 3969111 - RNA, 10 nt, Human herpesvirus 4 [Epstein-Barr virus]
cuuguuucaa

SEQ ID NO: 3969112 - RNA, 20 nt, Human herpesvirus 4 [Epstein-Barr virus]
cuuuacccagcccuuaacac

SEQ ID NO: 3969113 - RNA, 19 nt, Human herpesvirus 4 [Epstein-Barr virus]
cuuuaggcguaacuugucu

SEQ ID NO: 3969114 - RNA, 16 nt, Human herpesvirus 4 [Epstein-Barr virus]
cuuucgacugucauuu

SEQ ID NO: 3969115 - RNA, 15 nt, Human herpesvirus 4 [Epstein-Barr virus]
cuuucuaccaggggc

SEQ ID NO: 3969116 - RNA, 13 nt, Human herpesvirus 4 [Epstein-Barr virus]
cuuucuccuucaa

SEQ ID NO: 3969117 - RNA, 15 nt, Human herpesvirus 4 [Epstein-Barr virus]
cuuugaugaggcuga

SEQ ID NO: 3969118 - RNA, 23 nt, Human herpesvirus 4 [Epstein-Barr virus]
cuuuguggugggacugagauuua

SEQ ID NO: 3969119 - RNA, 12 nt, Human herpesvirus 4 [Epstein-Barr virus]
gaaaagccacau

SEQ ID NO: 3969120 - RNA, 20 nt, Human herpesvirus 4 [Epstein-Barr virus]
gaaaauaguuccaggugaca

SEQ ID NO: 3969121 - RNA, 22 nt, Human herpesvirus 4 [Epstein-Barr virus]
gaaaauaguuccaggugacagc

SEQ ID NO: 3969122 - RNA, 21 nt, Human herpesvirus 4 [Epstein-Barr virus]
gaaaccugcgaaacuuggggg

SEQ ID NO: 3969123 - RNA, 14 nt, Human herpesvirus 4 [Epstein-Barr virus]
gaaacuacacggcc

SEQ ID NO: 3969124 - RNA, 23 nt, Human herpesvirus 4 [Epstein-Barr virus]
gaacacggcaccgucagccacac

SEQ ID NO: 3969125 - RNA, 19 nt, Human herpesvirus 4 [Epstein-Barr virus]
gaacacucauggugugaga

SEQ ID NO: 3969126 - RNA, 17 nt, Human herpesvirus 4 [Epstein-Barr virus]
gaacaucuggcuggggc

SEQ ID NO: 3969127 - RNA, 12 nt, Human herpesvirus 4 [Epstein-Barr virus]
gaacgcccagua

SEQ ID NO: 3969128 - RNA, 22 nt, Human herpesvirus 4 [Epstein-Barr virus]
gaacuggggcugguggccuggg

SEQ ID NO: 3969129 - RNA, 23 nt, Human herpesvirus 4 [Epstein-Barr virus]
gaacuguacuaaauuugcugaca

SEQ ID NO: 3969130 - RNA, 13 nt, Human herpesvirus 4 [Epstein-Barr virus]
gaagaccaggagc

SEQ ID NO: 3969131 - RNA, 23 nt, Human herpesvirus 4 [Epstein-Barr virus]
gaagacccaucugagggcaguga

SEQ ID NO: 3969132 - RNA, 14 nt, Human herpesvirus 4 [Epstein-Barr virus]
gaagauugaagaca

SEQ ID NO: 3969133 - RNA, 22 nt, Human herpesvirus 4 [Epstein-Barr virus]
gaagcccaagaagaagcccacc

SEQ ID NO: 3969134 - RNA, 23 nt, Human herpesvirus 4 [Epstein-Barr virus]
gaagcccccaaaaguagaggcuc

SEQ ID NO: 3969135 - RNA, 14 nt, Human herpesvirus 4 [Epstein-Barr virus]
gaagcgaagcagcu

SEQ ID NO: 3969136 - RNA, 14 nt, Human herpesvirus 4 [Epstein-Barr virus]
gaaggaaaggccug

SEQ ID NO: 3969137 - RNA, 15 nt, Human herpesvirus 4 [Epstein-Barr virus]
gaaggacagggggac

SEQ ID NO: 3969138 - RNA, 21 nt, Human herpesvirus 4 [Epstein-Barr virus]
gaaggcgugggugucagaccu

SEQ ID NO: 3969139 - RNA, 20 nt, Human herpesvirus 4 [Epstein-Barr virus]
gaaggcuagacgcagcugug

SEQ ID NO: 3969140 - RNA, 15 nt, Human herpesvirus 4 [Epstein-Barr virus]
gaagucgguguccag

SEQ ID NO: 3969141 - RNA, 20 nt, Human herpesvirus 4 [Epstein-Barr virus]
gaaguuuuaacaccugacca

SEQ ID NO: 3969142 - RNA, 18 nt, Human herpesvirus 4 [Epstein-Barr virus]
gaaucaccagagcccaga

SEQ ID NO: 3969143 - RNA, 19 nt, Human herpesvirus 4 [Epstein-Barr virus]
gaaucuugauaaaacaggu

SEQ ID NO: 3969144 - RNA, 16 nt, Human herpesvirus 4 [Epstein-Barr virus]
gaaugacgggcucccu

SEQ ID NO: 3969145 - RNA, 20 nt, Human herpesvirus 4 [Epstein-Barr virus]
gaauuccccugccugcaugc

SEQ ID NO: 3969146 - RNA, 12 nt, Human herpesvirus 4 [Epstein-Barr virus]
gaauuggggcug

SEQ ID NO: 3969147 - RNA, 13 nt, Human herpesvirus 4 [Epstein-Barr virus]
gacaagaggcaga

SEQ ID NO: 3969148 - RNA, 22 nt, Human herpesvirus 4 [Epstein-Barr virus]
gacaauacacccaucuggaguu

SEQ ID NO: 3969149 - RNA, 14 nt, Human herpesvirus 4 [Epstein-Barr virus]
gacaccagauguuu

SEQ ID NO: 3969150 - RNA, 13 nt, Human herpesvirus 4 [Epstein-Barr virus]
ggacacaccgcca

SEQ ID NO: 3969151 - RNA, 18 nt, Human herpesvirus 4 [Epstein-Barr virus]
ggacagcacaacaagaaa

SEQ ID NO: 3969152 - RNA, 19 nt, Human herpesvirus 4 [Epstein-Barr virus]
ggacaugcugaugugcugc

SEQ ID NO: 3969153 - RNA, 20 nt, Human herpesvirus 4 [Epstein-Barr virus]
ggacaugucacguguccugc

SEQ ID NO: 3969154 - RNA, 17 nt, Human herpesvirus 4 [Epstein-Barr virus]
ggacccggaccaaugcc

SEQ ID NO: 3969155 - RNA, 19 nt, Human herpesvirus 4 [Epstein-Barr virus]
ggacccuauggagggcagc

SEQ ID NO: 3969156 - RNA, 14 nt, Human herpesvirus 4 [Epstein-Barr virus]
ggacccugcugcga

SEQ ID NO: 3969157 - RNA, 20 nt, Human herpesvirus 4 [Epstein-Barr virus]
ggacccuugucuuuggugga

SEQ ID NO: 3969158 - RNA, 20 nt, Human herpesvirus 4 [Epstein-Barr virus]
ggaccggaucgaaggagagc

SEQ ID NO: 3969159 - RNA, 15 nt, Human herpesvirus 4 [Epstein-Barr virus]
ggaccuguugcuuca

SEQ ID NO: 3969160 - RNA, 12 nt, Human herpesvirus 4 [Epstein-Barr virus]
ggacgcugcugu

SEQ ID NO: 3969161 - RNA, 19 nt, Human herpesvirus 4 [Epstein-Barr virus]
ggagacacaucuggaccag

SEQ ID NO: 3969162 - RNA, 12 nt, Human herpesvirus 4 [Epstein-Barr virus]
ggagaggggagu

SEQ ID NO: 3969163 - RNA, 21 nt, Human herpesvirus 4 [Epstein-Barr virus]
ggagauugauuuggaggaaga

SEQ ID NO: 3969164 - RNA, 23 nt, Human herpesvirus 4 [Epstein-Barr virus]
ggagauugauuuggaggaagagu

SEQ ID NO: 3969165 - RNA, 19 nt, Human herpesvirus 4 [Epstein-Barr virus]
ggagcacauuccccccgcc

SEQ ID NO: 3969166 - RNA, 18 nt, Human herpesvirus 4 [Epstein-Barr virus]
ggagccaccacagcacaa

SEQ ID NO: 3969167 - RNA, 18 nt, Human herpesvirus 4 [Epstein-Barr virus]
ggagcuccgagagcuccg

SEQ ID NO: 3969168 - RNA, 17 nt, Human herpesvirus 4 [Epstein-Barr virus]
ggagcuggugcaccugc

SEQ ID NO: 3969169 - RNA, 21 nt, Human herpesvirus 4 [Epstein-Barr virus]
ggaggaagagacuucacagag

SEQ ID NO: 3969170 - RNA, 18 nt, Human herpesvirus 4 [Epstein-Barr virus]
ggaggagacguguguggc

SEQ ID NO: 3969171 - RNA, 17 nt, Human herpesvirus 4 [Epstein-Barr virus]
ggaggagcuccgugagc

SEQ ID NO: 3969172 - RNA, 14 nt, Human herpesvirus 4 [Epstein-Barr virus]
ggaggaggggcagg

SEQ ID NO: 3969173 - RNA, 12 nt, Human herpesvirus 4 [Epstein-Barr virus]
ggaggcagacac

SEQ ID NO: 3969174 - RNA, 22 nt, Human herpesvirus 4 [Epstein-Barr virus]
ggaggccagguagcccagcguc

SEQ ID NO: 3969175 - RNA, 15 nt, Human herpesvirus 4 [Epstein-Barr virus]
ggaggggcggcagcg

SEQ ID NO: 3969176 - RNA, 14 nt, Human herpesvirus 4 [Epstein-Barr virus]
ggauauagcucugc

SEQ ID NO: 3969177 - RNA, 16 nt, Human herpesvirus 4 [Epstein-Barr virus]
ggauccuccaccgccg

SEQ ID NO: 3969178 - RNA, 19 nt, Human herpesvirus 4 [Epstein-Barr virus]
ggaugaggcugaugauggc

SEQ ID NO: 3969179 - RNA, 21 nt, Human herpesvirus 4 [Epstein-Barr virus]
ggaugagguuagcguggacag

SEQ ID NO: 3969180 - RNA, 22 nt, Human herpesvirus 4 [Epstein-Barr virus]
ggaugccucacgcgaagggaaa

SEQ ID NO: 3969181 - RNA, 18 nt, Human herpesvirus 4 [Epstein-Barr virus]
ggcacaucuggaccugga

SEQ ID NO: 3969182 - RNA, 21 nt, Human herpesvirus 4 [Epstein-Barr virus]
ggcacugcguccaccuggcca

SEQ ID NO: 3969183 - RNA, 20 nt, Human herpesvirus 4 [Epstein-Barr virus]
ggcagaaugaccgugcaugc

SEQ ID NO: 3969184 - RNA, 12 nt, Human herpesvirus 4 [Epstein-Barr virus]
ggcagaggccuc

SEQ ID NO: 3969185 - RNA, 19 nt, Human herpesvirus 4 [Epstein-Barr virus]
ggcagcagcucuggcacug

SEQ ID NO: 3969186 - RNA, 15 nt, Human herpesvirus 4 [Epstein-Barr virus]
ggcagccuugcgugg

SEQ ID NO: 3969187 - RNA, 14 nt, Human herpesvirus 4 [Epstein-Barr virus]
ggcagucuccaccu

SEQ ID NO: 3969188 - RNA, 21 nt, Human herpesvirus 4 [Epstein-Barr virus]
ggcauaaauucuccugccugc

SEQ ID NO: 3969189 - RNA, 17 nt, Human herpesvirus 4 [Epstein-Barr virus]
ggccacaaagagggggc

SEQ ID NO: 3969190 - RNA, 21 nt, Human herpesvirus 4 [Epstein-Barr virus]
ggccaccuucuccaucuccau

SEQ ID NO: 3969191 - RNA, 19 nt, Human herpesvirus 4 [Epstein-Barr virus]
ggccagcaaaaccagcccg

SEQ ID NO: 3969192 - RNA, 17 nt, Human herpesvirus 4 [Epstein-Barr virus]
ggccaggacgcugcugu

SEQ ID NO: 3969193 - RNA, 23 nt, Human herpesvirus 4 [Epstein-Barr virus]
ggccagggcggaggagauccgcc

SEQ ID NO: 3969194 - RNA, 20 nt, Human herpesvirus 4 [Epstein-Barr virus]
ggccagguacaggaccugga

SEQ ID NO: 3969195 - RNA, 17 nt, Human herpesvirus 4 [Epstein-Barr virus]
ggccauaguggcggcag

SEQ ID NO: 3969196 - RNA, 19 nt, Human herpesvirus 4 [Epstein-Barr virus]
ggcccguuccaggcucucc

SEQ ID NO: 3969197 - RNA, 14 nt, Human herpesvirus 4 [Epstein-Barr virus]
ggcccuggcccacc

SEQ ID NO: 3969198 - RNA, 21 nt, Human herpesvirus 4 [Epstein-Barr virus]
ggcccuguacacuacacucua

SEQ ID NO: 3969199 - RNA, 18 nt, Human herpesvirus 4 [Epstein-Barr virus]
ggcccuuugccuggggcu

SEQ ID NO: 3969200 - RNA, 18 nt, Human herpesvirus 4 [Epstein-Barr virus]
ggccgccuauggggccug

SEQ ID NO: 3969201 - RNA, 14 nt, Human herpesvirus 4 [Epstein-Barr virus]
ggccgcugccaggc

SEQ ID NO: 3969202 - RNA, 20 nt, Human herpesvirus 4 [Epstein-Barr virus]
ggccuccauccaguggggcu

SEQ ID NO: 3969203 - RNA, 18 nt, Human herpesvirus 4 [Epstein-Barr virus]
ggccuccuggccagcacc

SEQ ID NO: 3969204 - RNA, 22 nt, Human herpesvirus 4 [Epstein-Barr virus]
ggccucgucaggagggcagaga

SEQ ID NO: 3969205 - RNA, 14 nt, Human herpesvirus 4 [Epstein-Barr virus]
ggccugagagccgg

SEQ ID NO: 3969206 - RNA, 18 nt, Human herpesvirus 4 [Epstein-Barr virus]
ggccugugucuucugucu

SEQ ID NO: 3969207 - RNA, 13 nt, Human herpesvirus 4 [Epstein-Barr virus]
ggccuuagcccag

SEQ ID NO: 3969208 - RNA, 14 nt, Human herpesvirus 4 [Epstein-Barr virus]
ggcgaaggcggaga

SEQ ID NO: 3969209 - RNA, 13 nt, Human herpesvirus 4 [Epstein-Barr virus]
ggcgaaggguggg

SEQ ID NO: 3969210 - RNA, 19 nt, Human herpesvirus 4 [Epstein-Barr virus]
ggcgacaguaacacagggu

SEQ ID NO: 3969211 - RNA, 15 nt, Human herpesvirus 4 [Epstein-Barr virus]
ggcgacugggggcaa

SEQ ID NO: 3969212 - RNA, 18 nt, Human herpesvirus 4 [Epstein-Barr virus]
ggcgagacuuggaccaag

SEQ ID NO: 3969213 - RNA, 16 nt, Human herpesvirus 4 [Epstein-Barr virus]
ggcgcuguuauggcca

SEQ ID NO: 3969214 - RNA, 22 nt, Human herpesvirus 4 [Epstein-Barr virus]
acugccuggggaaaauguaccc

SEQ ID NO: 3969215 - RNA, 16 nt, Human herpesvirus 4 [Epstein-Barr virus]
acugcgagggggccug

SEQ ID NO: 3969216 - RNA, 18 nt, Human herpesvirus 4 [Epstein-Barr virus]
acugcuagcgucacugau

SEQ ID NO: 3969217 - RNA, 20 nt, Human herpesvirus 4 [Epstein-Barr virus]
acugcuagcgucacugauuu

SEQ ID NO: 3969218 - RNA, 16 nt, Human herpesvirus 4 [Epstein-Barr virus]
acuggaugcaggaccu

SEQ ID NO: 3969219 - RNA, 22 nt, Human herpesvirus 4 [Epstein-Barr virus]
acuggucaccagcuucgagagc

SEQ ID NO: 3969220 - RNA, 15 nt, Human herpesvirus 4 [Epstein-Barr virus]
acugucacugugcac

SEQ ID NO: 3969221 - RNA, 21 nt, Human herpesvirus 4 [Epstein-Barr virus]
acuucaagaguuuaagcagca

SEQ ID NO: 3969222 - RNA, 14 nt, Human herpesvirus 4 [Epstein-Barr virus]
acuucagcuccagg

SEQ ID NO: 3969223 - RNA, 18 nt, Human herpesvirus 4 [Epstein-Barr virus]
acuuccacagcaauggca

SEQ ID NO: 3969224 - RNA, 16 nt, Human herpesvirus 4 [Epstein-Barr virus]
acuucuacucuuggca

SEQ ID NO: 3969225 - RNA, 13 nt, Human herpesvirus 4 [Epstein-Barr virus]
acuuggaggcugc

SEQ ID NO: 3969226 - RNA, 21 nt, Human herpesvirus 4 [Epstein-Barr virus]
acuugucuacaucccauaccu

SEQ ID NO: 3969227 - RNA, 15 nt, Human herpesvirus 4 [Epstein-Barr virus]
acuuuuugccaccca

SEQ ID NO: 3969228 - RNA, 13 nt, Human herpesvirus 4 [Epstein-Barr virus]
agaaccccagcaa

SEQ ID NO: 3969229 - RNA, 19 nt, Human herpesvirus 4 [Epstein-Barr virus]
agaacugcaagauaucaca

SEQ ID NO: 3969230 - RNA, 16 nt, Human herpesvirus 4 [Epstein-Barr virus]
agaagauugaagacaa

SEQ ID NO: 3969231 - RNA, 13 nt, Human herpesvirus 4 [Epstein-Barr virus]
agaagcuggacgu

SEQ ID NO: 3969232 - RNA, 15 nt, Human herpesvirus 4 [Epstein-Barr virus]
agaaugcccaccaga

SEQ ID NO: 3969233 - RNA, 17 nt, Human herpesvirus 4 [Epstein-Barr virus]
agacacggcucugucag

SEQ ID NO: 3969234 - RNA, 13 nt, Human herpesvirus 4 [Epstein-Barr virus]
agacccaucugag

SEQ ID NO: 3969235 - RNA, 14 nt, Human herpesvirus 4 [Epstein-Barr virus]
agaccuauguauaa

SEQ ID NO: 3969236 - RNA, 19 nt, Human herpesvirus 4 [Epstein-Barr virus]
agaccucgaguccggggag

SEQ ID NO: 3969237 - RNA, 14 nt, Human herpesvirus 4 [Epstein-Barr virus]
agacggggagguga

SEQ ID NO: 3969238 - RNA, 16 nt, Human herpesvirus 4 [Epstein-Barr virus]
agacguggguccccuc

SEQ ID NO: 3969239 - RNA, 14 nt, Human herpesvirus 4 [Epstein-Barr virus]
agacucaggcccuc

SEQ ID NO: 3969240 - RNA, 14 nt, Human herpesvirus 4 [Epstein-Barr virus]
agacucuccgcuuu

SEQ ID NO: 3969241 - RNA, 14 nt, Human herpesvirus 4 [Epstein-Barr virus]
agagaggccucugg

SEQ ID NO: 3969242 - RNA, 22 nt, Human herpesvirus 4 [Epstein-Barr virus]
agagcugagugcccagggcaga

SEQ ID NO: 3969243 - RNA, 14 nt, Human herpesvirus 4 [Epstein-Barr virus]
agaggaugaggcug

SEQ ID NO: 3969244 - RNA, 15 nt, Human herpesvirus 4 [Epstein-Barr virus]
agagguucagggacu

SEQ ID NO: 3969245 - RNA, 18 nt, Human herpesvirus 4 [Epstein-Barr virus]
agagguuuugcuagggag

SEQ ID NO: 3969246 - RNA, 23 nt, Human herpesvirus 4 [Epstein-Barr virus]
agagguuuugcuagggaggagac

SEQ ID NO: 3969247 - RNA, 20 nt, Human herpesvirus 4 [Epstein-Barr virus]
agaucacggcugucuagacg

SEQ ID NO: 3969248 - RNA, 23 nt, Human herpesvirus 4 [Epstein-Barr virus]
agaucagaaaauaaaaagaaugu

SEQ ID NO: 3969249 - RNA, 14 nt, Human herpesvirus 4 [Epstein-Barr virus]
agauccugggcccc

SEQ ID NO: 3969250 - RNA, 18 nt, Human herpesvirus 4 [Epstein-Barr virus]
agaugaagacgaggagau

SEQ ID NO: 3969251 - RNA, 19 nt, Human herpesvirus 4 [Epstein-Barr virus]
agaugagccucucaaaggc

SEQ ID NO: 3969252 - RNA, 22 nt, Human herpesvirus 4 [Epstein-Barr virus]
agauuguuccaggucagaccua

SEQ ID NO: 3969253 - RNA, 21 nt, Human herpesvirus 4 [Epstein-Barr virus]
agcaacccccggcucucaggc

SEQ ID NO: 3969254 - RNA, 16 nt, Human herpesvirus 4 [Epstein-Barr virus]
agcaccucaaccugga

SEQ ID NO: 3969255 - RNA, 17 nt, Human herpesvirus 4 [Epstein-Barr virus]
agcaccucaaccuggag

SEQ ID NO: 3969256 - RNA, 23 nt, Human herpesvirus 4 [Epstein-Barr virus]
agcacgguagccuugggggccug

SEQ ID NO: 3969257 - RNA, 17 nt, Human herpesvirus 4 [Epstein-Barr virus]
agcacuuugaaagaugu

SEQ ID NO: 3969258 - RNA, 19 nt, Human herpesvirus 4 [Epstein-Barr virus]
agcagacaaggacaggugc

SEQ ID NO: 3969259 - RNA, 19 nt, Human herpesvirus 4 [Epstein-Barr virus]
agcagauagccggccaggc

SEQ ID NO: 3969260 - RNA, 22 nt, Human herpesvirus 4 [Epstein-Barr virus]
agcagauuuccgucagccaggg

SEQ ID NO: 3969261 - RNA, 14 nt, Human herpesvirus 4 [Epstein-Barr virus]
agcagcaguggugu

SEQ ID NO: 3969262 - RNA, 14 nt, Human herpesvirus 4 [Epstein-Barr virus]
agcagcuacacucu

SEQ ID NO: 3969263 - RNA, 22 nt, Human herpesvirus 4 [Epstein-Barr virus]
agcaggaggaggggcaggagca

SEQ ID NO: 3969264 - RNA, 21 nt, Human herpesvirus 4 [Epstein-Barr virus]
agcaggaggaggggcaggagg

SEQ ID NO: 3969265 - RNA, 15 nt, Human herpesvirus 4 [Epstein-Barr virus]
agcaggugagggugc

SEQ ID NO: 3969266 - RNA, 14 nt, Human herpesvirus 4 [Epstein-Barr virus]
agcagguggcacac

SEQ ID NO: 3969267 - RNA, 17 nt, Human herpesvirus 4 [Epstein-Barr virus]
agcauggcggccuggca

SEQ ID NO: 3969268 - RNA, 21 nt, Human herpesvirus 4 [Epstein-Barr virus]
agccacacaaucagccgggag

SEQ ID NO: 3969269 - RNA, 22 nt, Human herpesvirus 4 [Epstein-Barr virus]
agccacacaaucagccgggagg

SEQ ID NO: 3969270 - RNA, 15 nt, Human herpesvirus 4 [Epstein-Barr virus]
agccaccacagcaca

SEQ ID NO: 3969271 - RNA, 19 nt, Human herpesvirus 4 [Epstein-Barr virus]
agccaccccagacaggaga

SEQ ID NO: 3969272 - RNA, 18 nt, Human herpesvirus 4 [Epstein-Barr virus]
agccacggcgucaaacag

SEQ ID NO: 3969273 - RNA, 22 nt, Human herpesvirus 4 [Epstein-Barr virus]
agccaggcuuucuaugccugaa

SEQ ID NO: 3969274 - RNA, 14 nt, Human herpesvirus 4 [Epstein-Barr virus]
agcccacuccccuc

SEQ ID NO: 3969275 - RNA, 23 nt, Human herpesvirus 4 [Epstein-Barr virus]
agccccaauucuugcacccaccc

SEQ ID NO: 3969276 - RNA, 17 nt, Human herpesvirus 4 [Epstein-Barr virus]
agccgucgauaccgggu

SEQ ID NO: 3969277 - RNA, 20 nt, Human herpesvirus 4 [Epstein-Barr virus]
agccuacucuccacucccag

SEQ ID NO: 3969278 - RNA, 14 nt, Human herpesvirus 4 [Epstein-Barr virus]
agccucugccacaa

SEQ ID NO: 3969279 - RNA, 21 nt, Human herpesvirus 4 [Epstein-Barr virus]
agccugcaccaguggcugccc

SEQ ID NO: 3969280 - RNA, 21 nt, Human herpesvirus 4 [Epstein-Barr virus]
agcgaagcuagugcagggggc

SEQ ID NO: 3969281 - RNA, 15 nt, Human herpesvirus 4 [Epstein-Barr virus]
agcgacgaggaugaa

SEQ ID NO: 3969282 - RNA, 20 nt, Human herpesvirus 4 [Epstein-Barr virus]
agcgccgcgguuucagcauc

SEQ ID NO: 3969283 - RNA, 14 nt, Human herpesvirus 4 [Epstein-Barr virus]
agcgccguggccac

SEQ ID NO: 3969284 - RNA, 12 nt, Human herpesvirus 4 [Epstein-Barr virus]
agcgccuccucg

SEQ ID NO: 3969285 - RNA, 18 nt, Human herpesvirus 4 [Epstein-Barr virus]
agcgccuccucgcaggcc

SEQ ID NO: 3969286 - RNA, 19 nt, Human herpesvirus 4 [Epstein-Barr virus]
agcggcauccucaaggggc

SEQ ID NO: 3969287 - RNA, 19 nt, Human herpesvirus 4 [Epstein-Barr virus]
agcgggaggggcaggagca

SEQ ID NO: 3969288 - RNA, 21 nt, Human herpesvirus 4 [Epstein-Barr virus]
agcguggucgugcugcuagcc

SEQ ID NO: 3969289 - RNA, 17 nt, Human herpesvirus 4 [Epstein-Barr virus]
agcgugugcacccggcu

SEQ ID NO: 3969290 - RNA, 17 nt, Human herpesvirus 4 [Epstein-Barr virus]
agcucacuuucagugga

SEQ ID NO: 3969291 - RNA, 14 nt, Human herpesvirus 4 [Epstein-Barr virus]
agcuccagggccag

SEQ ID NO: 3969292 - RNA, 19 nt, Human herpesvirus 4 [Epstein-Barr virus]
agcuccgagagcuccgcca

SEQ ID NO: 3969293 - RNA, 23 nt, Human herpesvirus 4 [Epstein-Barr virus]
agcuccgugagcaggagcuugag

SEQ ID NO: 3969294 - RNA, 19 nt, Human herpesvirus 4 [Epstein-Barr virus]
agcucugguaguaggcaca

SEQ ID NO: 3969295 - RNA, 18 nt, Human herpesvirus 4 [Epstein-Barr virus]
agcugccgcgauguaccc

SEQ ID NO: 3969296 - RNA, 15 nt, Human herpesvirus 4 [Epstein-Barr virus]
agcuggccaggcugg

SEQ ID NO: 3969297 - RNA, 22 nt, Human herpesvirus 4 [Epstein-Barr virus]
agcugggccucuaaguacaggu

SEQ ID NO: 3969298 - RNA, 23 nt, Human herpesvirus 4 [Epstein-Barr virus]
agcuucagggaaaaacuggccau

SEQ ID NO: 3969299 - RNA, 14 nt, Human herpesvirus 4 [Epstein-Barr virus]
agcuuuugaccaag

SEQ ID NO: 3969300 - RNA, 21 nt, Human herpesvirus 4 [Epstein-Barr virus]
aggaacacggucuggucacua

SEQ ID NO: 3969301 - RNA, 14 nt, Human herpesvirus 4 [Epstein-Barr virus]
caccacggugcagc

SEQ ID NO: 3969302 - RNA, 22 nt, Human herpesvirus 4 [Epstein-Barr virus]
caccacuaagguuacugcacag

SEQ ID NO: 3969303 - RNA, 21 nt, Human herpesvirus 4 [Epstein-Barr virus]
caccagagggugagcccaccu

SEQ ID NO: 3969304 - RNA, 17 nt, Human herpesvirus 4 [Epstein-Barr virus]
caccagcuaacaggaca

SEQ ID NO: 3969305 - RNA, 20 nt, Human herpesvirus 4 [Epstein-Barr virus]
caccagcuaacaggacaugu

SEQ ID NO: 3969306 - RNA, 15 nt, Human herpesvirus 4 [Epstein-Barr virus]
caccagcuccaggga

SEQ ID NO: 3969307 - RNA, 16 nt, Human herpesvirus 4 [Epstein-Barr virus]
caccagggaggccugg

SEQ ID NO: 3969308 - RNA, 22 nt, Human herpesvirus 4 [Epstein-Barr virus]
caccaguguccagagaggaaga

SEQ ID NO: 3969309 - RNA, 19 nt, Human herpesvirus 4 [Epstein-Barr virus]
caccauagcaugucacaca

SEQ ID NO: 3969310 - RNA, 16 nt, Human herpesvirus 4 [Epstein-Barr virus]
caccaugguagccggc

SEQ ID NO: 3969311 - RNA, 15 nt, Human herpesvirus 4 [Epstein-Barr virus]
caccccacacucccu

SEQ ID NO: 3969312 - RNA, 15 nt, Human herpesvirus 4 [Epstein-Barr virus]
caccccaccauauga

SEQ ID NO: 3969313 - RNA, 23 nt, Human herpesvirus 4 [Epstein-Barr virus]
caccccaguggacaaggcaguag

SEQ ID NO: 3969314 - RNA, 16 nt, Human herpesvirus 4 [Epstein-Barr virus]
caccccggcgccaccu

SEQ ID NO: 3969315 - RNA, 23 nt, Human herpesvirus 4 [Epstein-Barr virus]
cacccggacccggaccaaugcca

SEQ ID NO: 3969316 - RNA, 21 nt, Human herpesvirus 4 [Epstein-Barr virus]
cacccggggaaccggccccgu

SEQ ID NO: 3969317 - RNA, 15 nt, Human herpesvirus 4 [Epstein-Barr virus]
caccgagcagaaggc

SEQ ID NO: 3969318 - RNA, 18 nt, Human herpesvirus 4 [Epstein-Barr virus]
caccgagcagaaggccau

SEQ ID NO: 3969319 - RNA, 17 nt, Human herpesvirus 4 [Epstein-Barr virus]
caccggcuuggcccucu

SEQ ID NO: 3969320 - RNA, 16 nt, Human herpesvirus 4 [Epstein-Barr virus]
caccggugacagugcu

SEQ ID NO: 3969321 - RNA, 11 nt, Human herpesvirus 4 [Epstein-Barr virus]
caccuccacca

SEQ ID NO: 3969322 - RNA, 11 nt, Human herpesvirus 4 [Epstein-Barr virus]
caccugccauc

SEQ ID NO: 3969323 - RNA, 14 nt, Human herpesvirus 4 [Epstein-Barr virus]
caccugcuagagaa

SEQ ID NO: 3969324 - RNA, 13 nt, Human herpesvirus 4 [Epstein-Barr virus]
caccuggccaggg

SEQ ID NO: 3969325 - RNA, 20 nt, Human herpesvirus 4 [Epstein-Barr virus]
caccuguccuugucugcugc

SEQ ID NO: 3969326 - RNA, 21 nt, Human herpesvirus 4 [Epstein-Barr virus]
caccuuaacuggcacacacuc

SEQ ID NO: 3969327 - RNA, 21 nt, Human herpesvirus 4 [Epstein-Barr virus]
caccuugacuguaaucacugg

SEQ ID NO: 3969328 - RNA, 21 nt, Human herpesvirus 4 [Epstein-Barr virus]
caccuugaggugccacagagc

SEQ ID NO: 3969329 - RNA, 14 nt, Human herpesvirus 4 [Epstein-Barr virus]
cacgaaugcccagg

SEQ ID NO: 3969330 - RNA, 16 nt, Human herpesvirus 4 [Epstein-Barr virus]
cacgagauggcccagu

SEQ ID NO: 3969331 - RNA, 15 nt, Human herpesvirus 4 [Epstein-Barr virus]
cacgccguggcccug

SEQ ID NO: 3969332 - RNA, 17 nt, Human herpesvirus 4 [Epstein-Barr virus]
cacgcuuuugucugccu

SEQ ID NO: 3969333 - RNA, 16 nt, Human herpesvirus 4 [Epstein-Barr virus]
cacgggccuggggcca

SEQ ID NO: 3969334 - RNA, 17 nt, Human herpesvirus 4 [Epstein-Barr virus]
cacguagccuauuugca

SEQ ID NO: 3969335 - RNA, 21 nt, Human herpesvirus 4 [Epstein-Barr virus]
cacgugaacauccugcguggc

SEQ ID NO: 3969336 - RNA, 12 nt, Human herpesvirus 4 [Epstein-Barr virus]
cacucagcuccg

SEQ ID NO: 3969337 - RNA, 20 nt, Human herpesvirus 4 [Epstein-Barr virus]
cacucaggaagcuggccagg

SEQ ID NO: 3969338 - RNA, 19 nt, Human herpesvirus 4 [Epstein-Barr virus]
cacucaugguacggugaua

SEQ ID NO: 3969339 - RNA, 22 nt, Human herpesvirus 4 [Epstein-Barr virus]
cacuccuaugcauuuccugccc

SEQ ID NO: 3969340 - RNA, 16 nt, Human herpesvirus 4 [Epstein-Barr virus]
cacucugaccaggaca

SEQ ID NO: 3969341 - RNA, 22 nt, Human herpesvirus 4 [Epstein-Barr virus]
cacugccaagguugaagagcag

SEQ ID NO: 3969342 - RNA, 24 nt, Human herpesvirus 4 [Epstein-Barr virus]
cacugccaagguugaagagcagau

SEQ ID NO: 3969343 - RNA, 16 nt, Human herpesvirus 4 [Epstein-Barr virus]
cacugucacugugcac

SEQ ID NO: 3969344 - RNA, 18 nt, Human herpesvirus 4 [Epstein-Barr virus]
cacuuccacagcaauggc

SEQ ID NO: 3969345 - RNA, 20 nt, Human herpesvirus 4 [Epstein-Barr virus]
cacuuccacagcaauggcac

SEQ ID NO: 3969346 - RNA, 16 nt, Human herpesvirus 4 [Epstein-Barr virus]
cacuuuguacagacuu

SEQ ID NO: 3969347 - RNA, 14 nt, Human herpesvirus 4 [Epstein-Barr virus]
cagaaaagugagcc

SEQ ID NO: 3969348 - RNA, 21 nt, Human herpesvirus 4 [Epstein-Barr virus]
cagaaaaucgcagcagggucc

SEQ ID NO: 3969349 - RNA, 12 nt, Human herpesvirus 4 [Epstein-Barr virus]
cagaacaucacu

SEQ ID NO: 3969350 - RNA, 20 nt, Human herpesvirus 4 [Epstein-Barr virus]
cagaagcuacaaacacgggc

SEQ ID NO: 3969351 - RNA, 17 nt, Human herpesvirus 4 [Epstein-Barr virus]
cagaaugaccgugcaug

SEQ ID NO: 3969352 - RNA, 15 nt, Human herpesvirus 4 [Epstein-Barr virus]
cagaauugucacuga

SEQ ID NO: 3969353 - RNA, 23 nt, Human herpesvirus 4 [Epstein-Barr virus]
cagacaugguguagacagauccc

SEQ ID NO: 3969354 - RNA, 16 nt, Human herpesvirus 4 [Epstein-Barr virus]
cagaccccagagcagc

SEQ ID NO: 3969355 - RNA, 21 nt, Human herpesvirus 4 [Epstein-Barr virus]
cagaccucugcacaacacaac

SEQ ID NO: 3969356 - RNA, 15 nt, Human herpesvirus 4 [Epstein-Barr virus]
cagaccugugugcug

SEQ ID NO: 3969357 - RNA, 22 nt, Human herpesvirus 4 [Epstein-Barr virus]
cagacggcgcuugcgucugccc

SEQ ID NO: 3969358 - RNA, 20 nt, Human herpesvirus 4 [Epstein-Barr virus]
cagacuccgaauauccccaa

SEQ ID NO: 3969359 - RNA, 15 nt, Human herpesvirus 4 [Epstein-Barr virus]
cagacucugcuuucu

SEQ ID NO: 3969360 - RNA, 22 nt, Human herpesvirus 4 [Epstein-Barr virus]
cagacuuagggccggggccgag

SEQ ID NO: 3969361 - RNA, 12 nt, Human herpesvirus 4 [Epstein-Barr virus]
cagagcaaaagc

SEQ ID NO: 3969362 - RNA, 13 nt, Human herpesvirus 4 [Epstein-Barr virus]
cagagccucugcc

SEQ ID NO: 3969363 - RNA, 15 nt, Human herpesvirus 4 [Epstein-Barr virus]
cagagcggcauccuc

SEQ ID NO: 3969364 - RNA, 12 nt, Human herpesvirus 4 [Epstein-Barr virus]
cagagcugagug

SEQ ID NO: 3969365 - RNA, 17 nt, Human herpesvirus 4 [Epstein-Barr virus]
cagagcugagugcccag

SEQ ID NO: 3969366 - RNA, 13 nt, Human herpesvirus 4 [Epstein-Barr virus]
cagaggaaggcca

SEQ ID NO: 3969367 - RNA, 22 nt, Human herpesvirus 4 [Epstein-Barr virus]
cagaggacuaauguucucuaac

SEQ ID NO: 3969368 - RNA, 18 nt, Human herpesvirus 4 [Epstein-Barr virus]
cagaggacuguucucugc

SEQ ID NO: 3969369 - RNA, 19 nt, Human herpesvirus 4 [Epstein-Barr virus]
cagaggccaucauggccga

SEQ ID NO: 3969370 - RNA, 14 nt, Human herpesvirus 4 [Epstein-Barr virus]
cagagggugagccc

SEQ ID NO: 3969371 - RNA, 17 nt, Human herpesvirus 4 [Epstein-Barr virus]
cagagucuacucgacca

SEQ ID NO: 3969372 - RNA, 18 nt, Human herpesvirus 4 [Epstein-Barr virus]
cagaguucccggcugcuc

SEQ ID NO: 3969373 - RNA, 15 nt, Human herpesvirus 4 [Epstein-Barr virus]
cagauguccaggggu

SEQ ID NO: 3969374 - RNA, 23 nt, Human herpesvirus 4 [Epstein-Barr virus]
cagauuuccgucagccaggguga

SEQ ID NO: 3969375 - RNA, 12 nt, Human herpesvirus 4 [Epstein-Barr virus]
cagccaccuccc

SEQ ID NO: 3969376 - RNA, 15 nt, Human herpesvirus 4 [Epstein-Barr virus]
cagccacggcgaccu

SEQ ID NO: 3969377 - RNA, 16 nt, Human herpesvirus 4 [Epstein-Barr virus]
cagcccccuccuccag

SEQ ID NO: 3969378 - RNA, 14 nt, Human herpesvirus 4 [Epstein-Barr virus]
cagcccgcaccccc

SEQ ID NO: 3969379 - RNA, 14 nt, Human herpesvirus 4 [Epstein-Barr virus]
cagcccuuaacaca

SEQ ID NO: 3969380 - RNA, 16 nt, Human herpesvirus 4 [Epstein-Barr virus]
cagccgggucgugaaa

SEQ ID NO: 3969381 - RNA, 21 nt, Human herpesvirus 4 [Epstein-Barr virus]
cagccuacucuccacucccag

SEQ ID NO: 3969382 - RNA, 22 nt, Human herpesvirus 4 [Epstein-Barr virus]
cagccugcaccaguggcugccc

SEQ ID NO: 3969383 - RNA, 21 nt, Human herpesvirus 4 [Epstein-Barr virus]
cagccuugcguggugcugucc

SEQ ID NO: 3969384 - RNA, 23 nt, Human herpesvirus 4 [Epstein-Barr virus]
cagcgaccggcagaucccgcauu

SEQ ID NO: 3969385 - RNA, 21 nt, Human herpesvirus 4 [Epstein-Barr virus]
cagcgcucuggucgcccccuc

SEQ ID NO: 3969386 - RNA, 15 nt, Human herpesvirus 4 [Epstein-Barr virus]
cagcgcuggcuccag

SEQ ID NO: 3969387 - RNA, 16 nt, Human herpesvirus 4 [Epstein-Barr virus]
cagcgucaggagaggg

SEQ ID NO: 3969388 - RNA, 22 nt, Human herpesvirus 4 [Epstein-Barr virus]
ccuuuggcuccuccuguuucug

SEQ ID NO: 3969389 - RNA, 21 nt, Human herpesvirus 4 [Epstein-Barr virus]
cgaaagcacuuugaaagaugu

SEQ ID NO: 3969390 - RNA, 19 nt, Human herpesvirus 4 [Epstein-Barr virus]
cgaacgaugaggaacguga

SEQ ID NO: 3969391 - RNA, 17 nt, Human herpesvirus 4 [Epstein-Barr virus]
cgaacuccuccagcagu

SEQ ID NO: 3969392 - RNA, 15 nt, Human herpesvirus 4 [Epstein-Barr virus]
cgaagcgagacagua

SEQ ID NO: 3969393 - RNA, 17 nt, Human herpesvirus 4 [Epstein-Barr virus]
cgaaggcguggguguca

SEQ ID NO: 3969394 - RNA, 17 nt, Human herpesvirus 4 [Epstein-Barr virus]
cgacaauaaaguugaug

SEQ ID NO: 3969395 - RNA, 20 nt, Human herpesvirus 4 [Epstein-Barr virus]
cgacgaggcccugcaagcca

SEQ ID NO: 3969396 - RNA, 20 nt, Human herpesvirus 4 [Epstein-Barr virus]
cgacgcuguuuugcagcuga

SEQ ID NO: 3969397 - RNA, 14 nt, Human herpesvirus 4 [Epstein-Barr virus]
cgagaauuggcaga

SEQ ID NO: 3969398 - RNA, 16 nt, Human herpesvirus 4 [Epstein-Barr virus]
cgagaccggcuccgga

SEQ ID NO: 3969399 - RNA, 13 nt, Human herpesvirus 4 [Epstein-Barr virus]
cgagcaugagcuc

SEQ ID NO: 3969400 - RNA, 21 nt, Human herpesvirus 4 [Epstein-Barr virus]
cgagccugucgauaucccugc

SEQ ID NO: 3969401 - RNA, 21 nt, Human herpesvirus 4 [Epstein-Barr virus]
cgaggaggaagagacuucaca

SEQ ID NO: 3969402 - RNA, 21 nt, Human herpesvirus 4 [Epstein-Barr virus]
cgaggcagacaaggccccgcc

SEQ ID NO: 3969403 - RNA, 15 nt, Human herpesvirus 4 [Epstein-Barr virus]
cgagggcagacacca

SEQ ID NO: 3969404 - RNA, 22 nt, Human herpesvirus 4 [Epstein-Barr virus]
cgaguaggugccuccagagccc

SEQ ID NO: 3969405 - RNA, 19 nt, Human herpesvirus 4 [Epstein-Barr virus]
cgauuggaaaagggcccag

SEQ ID NO: 3969406 - RNA, 22 nt, Human herpesvirus 4 [Epstein-Barr virus]
cgcagcugugugcgcgccgcca

SEQ ID NO: 3969407 - RNA, 17 nt, Human herpesvirus 4 [Epstein-Barr virus]
cgcaguccgccaugacc

SEQ ID NO: 3969408 - RNA, 15 nt, Human herpesvirus 4 [Epstein-Barr virus]
cgccaaugccaacuc

SEQ ID NO: 3969409 - RNA, 13 nt, Human herpesvirus 4 [Epstein-Barr virus]
cgccaccuccggg

SEQ ID NO: 3969410 - RNA, 14 nt, Human herpesvirus 4 [Epstein-Barr virus]
cgccagcagggcac

SEQ ID NO: 3969411 - RNA, 14 nt, Human herpesvirus 4 [Epstein-Barr virus]
cgcccccaccaccc

SEQ ID NO: 3969412 - RNA, 13 nt, Human herpesvirus 4 [Epstein-Barr virus]
cgccccgggcccg

SEQ ID NO: 3969413 - RNA, 21 nt, Human herpesvirus 4 [Epstein-Barr virus]
cgcccgccuggcucgccugga

SEQ ID NO: 3969414 - RNA, 17 nt, Human herpesvirus 4 [Epstein-Barr virus]
cgcccugagcuggacga

SEQ ID NO: 3969415 - RNA, 19 nt, Human herpesvirus 4 [Epstein-Barr virus]
cgcccugucaccaggccug

SEQ ID NO: 3969416 - RNA, 19 nt, Human herpesvirus 4 [Epstein-Barr virus]
cgcccugucccuggagcug

SEQ ID NO: 3969417 - RNA, 17 nt, Human herpesvirus 4 [Epstein-Barr virus]
cgccgcagaagagccgc

SEQ ID NO: 3969418 - RNA, 16 nt, Human herpesvirus 4 [Epstein-Barr virus]
cgccugacccucuugc

SEQ ID NO: 3969419 - RNA, 19 nt, Human herpesvirus 4 [Epstein-Barr virus]
cgccugcggacucaggcca

SEQ ID NO: 3969420 - RNA, 21 nt, Human herpesvirus 4 [Epstein-Barr virus]
cgcgacauguuucuggugagc

SEQ ID NO: 3969421 - RNA, 16 nt, Human herpesvirus 4 [Epstein-Barr virus]
cgcggaaucaggacca

SEQ ID NO: 3969422 - RNA, 13 nt, Human herpesvirus 4 [Epstein-Barr virus]
cgcggcuggaugc

SEQ ID NO: 3969423 - RNA, 13 nt, Human herpesvirus 4 [Epstein-Barr virus]
cgcuacugcugcu

SEQ ID NO: 3969424 - RNA, 22 nt, Human herpesvirus 4 [Epstein-Barr virus]
cgcucagcucaaccgccagggc

SEQ ID NO: 3969425 - RNA, 16 nt, Human herpesvirus 4 [Epstein-Barr virus]
cgcugcugcuacuggc

SEQ ID NO: 3969426 - RNA, 15 nt, Human herpesvirus 4 [Epstein-Barr virus]
cgcuguaacgugucg

SEQ ID NO: 3969427 - RNA, 16 nt, Human herpesvirus 4 [Epstein-Barr virus]
cggaaaccacaacagc

SEQ ID NO: 3969428 - RNA, 20 nt, Human herpesvirus 4 [Epstein-Barr virus]
cggacccugguacaggacca

SEQ ID NO: 3969429 - RNA, 16 nt, Human herpesvirus 4 [Epstein-Barr virus]
cggagaggcgggaccc

SEQ ID NO: 3969430 - RNA, 14 nt, Human herpesvirus 4 [Epstein-Barr virus]
cggcaccgccaggu

SEQ ID NO: 3969431 - RNA, 15 nt, Human herpesvirus 4 [Epstein-Barr virus]
cggcaccuagcccac

SEQ ID NO: 3969432 - RNA, 21 nt, Human herpesvirus 4 [Epstein-Barr virus]
cggcaucaccguggagccggg

SEQ ID NO: 3969433 - RNA, 11 nt, Human herpesvirus 4 [Epstein-Barr virus]
cggcccagccc

SEQ ID NO: 3969434 - RNA, 20 nt, Human herpesvirus 4 [Epstein-Barr virus]
cggccucgccuucuccucag

SEQ ID NO: 3969435 - RNA, 22 nt, Human herpesvirus 4 [Epstein-Barr virus]
cggcgccgcccgggggccaguc

SEQ ID NO: 3969436 - RNA, 12 nt, Human herpesvirus 4 [Epstein-Barr virus]
cggcguggagcu

SEQ ID NO: 3969437 - RNA, 15 nt, Human herpesvirus 4 [Epstein-Barr virus]
cggcguggagcuggg

SEQ ID NO: 3969438 - RNA, 19 nt, Human herpesvirus 4 [Epstein-Barr virus]
cggcucaggaucagggcca

SEQ ID NO: 3969439 - RNA, 20 nt, Human herpesvirus 4 [Epstein-Barr virus]
cggcucaggaucagggccaa

SEQ ID NO: 3969440 - RNA, 16 nt, Human herpesvirus 4 [Epstein-Barr virus]
cggcucucaggccuca

SEQ ID NO: 3969441 - RNA, 12 nt, Human herpesvirus 4 [Epstein-Barr virus]
cggcugcucccg

SEQ ID NO: 3969442 - RNA, 23 nt, Human herpesvirus 4 [Epstein-Barr virus]
cggcuguggccucuacgccaggc

SEQ ID NO: 3969443 - RNA, 18 nt, Human herpesvirus 4 [Epstein-Barr virus]
cgggagggacgggccucu

SEQ ID NO: 3969444 - RNA, 22 nt, Human herpesvirus 4 [Epstein-Barr virus]
cgggagggcgcucugcgccagc

SEQ ID NO: 3969445 - RNA, 21 nt, Human herpesvirus 4 [Epstein-Barr virus]
cgggaguauggggccagaggc

SEQ ID NO: 3969446 - RNA, 19 nt, Human herpesvirus 4 [Epstein-Barr virus]
cgggcaaacagggcagaga

SEQ ID NO: 3969447 - RNA, 15 nt, Human herpesvirus 4 [Epstein-Barr virus]
cgggcaagauggaga

SEQ ID NO: 3969448 - RNA, 18 nt, Human herpesvirus 4 [Epstein-Barr virus]
cgggcgccugcuccaccg

SEQ ID NO: 3969449 - RNA, 14 nt, Human herpesvirus 4 [Epstein-Barr virus]
cgggcuugugcuug

SEQ ID NO: 3969450 - RNA, 13 nt, Human herpesvirus 4 [Epstein-Barr virus]
cggggaagaggac

SEQ ID NO: 3969451 - RNA, 14 nt, Human herpesvirus 4 [Epstein-Barr virus]
cggggaggccaggu

SEQ ID NO: 3969452 - RNA, 14 nt, Human herpesvirus 4 [Epstein-Barr virus]
cggggcaugcugcc

SEQ ID NO: 3969453 - RNA, 13 nt, Human herpesvirus 4 [Epstein-Barr virus]
cggggggcuggcg

SEQ ID NO: 3969454 - RNA, 16 nt, Human herpesvirus 4 [Epstein-Barr virus]
cgggggugggcgguga

SEQ ID NO: 3969455 - RNA, 21 nt, Human herpesvirus 4 [Epstein-Barr virus]
cggggugccuuagagucccug

SEQ ID NO: 3969456 - RNA, 22 nt, Human herpesvirus 4 [Epstein-Barr virus]
cgggucaggucgcggaccaggg

SEQ ID NO: 3969457 - RNA, 23 nt, Human herpesvirus 4 [Epstein-Barr virus]
cgguagccuugggggccuggacu

SEQ ID NO: 3969458 - RNA, 14 nt, Human herpesvirus 4 [Epstein-Barr virus]
cggucaaguaccag

SEQ ID NO: 3969459 - RNA, 19 nt, Human herpesvirus 4 [Epstein-Barr virus]
cggugccgcuccuuugcgg

SEQ ID NO: 3969460 - RNA, 19 nt, Human herpesvirus 4 [Epstein-Barr virus]
cgguggguggaacgcucca

SEQ ID NO: 3969461 - RNA, 19 nt, Human herpesvirus 4 [Epstein-Barr virus]
cguacccauaacugggcau

SEQ ID NO: 3969462 - RNA, 23 nt, Human herpesvirus 4 [Epstein-Barr virus]
cgucacucggacuaucaaccacu

SEQ ID NO: 3969463 - RNA, 15 nt, Human herpesvirus 4 [Epstein-Barr virus]
cgucaucuggcucuc

SEQ ID NO: 3969464 - RNA, 17 nt, Human herpesvirus 4 [Epstein-Barr virus]
cgucaucuggcucuccu

SEQ ID NO: 3969465 - RNA, 20 nt, Human herpesvirus 4 [Epstein-Barr virus]
cgucauggcauccgccgcga

SEQ ID NO: 3969466 - RNA, 11 nt, Human herpesvirus 4 [Epstein-Barr virus]
cguccuggccc

SEQ ID NO: 3969467 - RNA, 19 nt, Human herpesvirus 4 [Epstein-Barr virus]
cgucuuguaaaacuuggag

SEQ ID NO: 3969468 - RNA, 14 nt, Human herpesvirus 4 [Epstein-Barr virus]
cgugaacucugccc

SEQ ID NO: 3969469 - RNA, 16 nt, Human herpesvirus 4 [Epstein-Barr virus]
cgugccagaggcccuc

SEQ ID NO: 3969470 - RNA, 23 nt, Human herpesvirus 4 [Epstein-Barr virus]
cgugccucagauagccggaccuc

SEQ ID NO: 3969471 - RNA, 22 nt, Human herpesvirus 4 [Epstein-Barr virus]
cguggacaguuugauacucacc

SEQ ID NO: 3969472 - RNA, 23 nt, Human herpesvirus 4 [Epstein-Barr virus]
cguggaguccaugaccagggggc

SEQ ID NO: 3969473 - RNA, 15 nt, Human herpesvirus 4 [Epstein-Barr virus]
cguggucgugcugcu

SEQ ID NO: 3969474 - RNA, 19 nt, Human herpesvirus 4 [Epstein-Barr virus]
cguggugcuguccugcuga

SEQ ID NO: 3969475 - RNA, 15 nt, Human herpesvirus 4 [Epstein-Barr virus]
ugcauggccugggcc

SEQ ID NO: 3969476 - RNA, 16 nt, Human herpesvirus 4 [Epstein-Barr virus]
ugcauggccugggccc

SEQ ID NO: 3969477 - RNA, 19 nt, Human herpesvirus 4 [Epstein-Barr virus]
ugcauuuccugcccuccca

SEQ ID NO: 3969478 - RNA, 15 nt, Human herpesvirus 4 [Epstein-Barr virus]
ugccaagagcugccu

SEQ ID NO: 3969479 - RNA, 21 nt, Human herpesvirus 4 [Epstein-Barr virus]
ugccauggccauucgacaggc

SEQ ID NO: 3969480 - RNA, 18 nt, Human herpesvirus 4 [Epstein-Barr virus]
ugccauguguguccagug

SEQ ID NO: 3969481 - RNA, 13 nt, Human herpesvirus 4 [Epstein-Barr virus]
ugcccgagccccg

SEQ ID NO: 3969482 - RNA, 15 nt, Human herpesvirus 4 [Epstein-Barr virus]
ugcccgccgugaacu

SEQ ID NO: 3969483 - RNA, 21 nt, Human herpesvirus 4 [Epstein-Barr virus]
ugcccgcuuccuccgcagucc

SEQ ID NO: 3969484 - RNA, 20 nt, Human herpesvirus 4 [Epstein-Barr virus]
ugcccuagagguuuugcuag

SEQ ID NO: 3969485 - RNA, 15 nt, Human herpesvirus 4 [Epstein-Barr virus]
ugcccucuccagcaa

SEQ ID NO: 3969486 - RNA, 19 nt, Human herpesvirus 4 [Epstein-Barr virus]
ugccgcguguuugcugcuc

SEQ ID NO: 3969487 - RNA, 19 nt, Human herpesvirus 4 [Epstein-Barr virus]
ugccgucuucggucaagua

SEQ ID NO: 3969488 - RNA, 18 nt, Human herpesvirus 4 [Epstein-Barr virus]
ugccuaauggccguccuc

SEQ ID NO: 3969489 - RNA, 21 nt, Human herpesvirus 4 [Epstein-Barr virus]
ugccuacgggcgcaccugugu

SEQ ID NO: 3969490 - RNA, 19 nt, Human herpesvirus 4 [Epstein-Barr virus]
ugccuccggccgccccggg

SEQ ID NO: 3969491 - RNA, 22 nt, Human herpesvirus 4 [Epstein-Barr virus]
ugccucuacgccccagaugaaa

SEQ ID NO: 3969492 - RNA, 15 nt, Human herpesvirus 4 [Epstein-Barr virus]
ugccucugggugcug

SEQ ID NO: 3969493 - RNA, 19 nt, Human herpesvirus 4 [Epstein-Barr virus]
ugccugaagcuugcugggg

SEQ ID NO: 3969494 - RNA, 16 nt, Human herpesvirus 4 [Epstein-Barr virus]
ugccuguggccccggc

SEQ ID NO: 3969495 - RNA, 15 nt, Human herpesvirus 4 [Epstein-Barr virus]
ugccuuuuugccaca

SEQ ID NO: 3969496 - RNA, 20 nt, Human herpesvirus 4 [Epstein-Barr virus]
ugcgccagagcggcauccuc

SEQ ID NO: 3969497 - RNA, 18 nt, Human herpesvirus 4 [Epstein-Barr virus]
ugcgcggaaucaggacca

SEQ ID NO: 3969498 - RNA, 14 nt, Human herpesvirus 4 [Epstein-Barr virus]
ugcggagggucaga

SEQ ID NO: 3969499 - RNA, 13 nt, Human herpesvirus 4 [Epstein-Barr virus]
ugcguggcuggac

SEQ ID NO: 3969500 - RNA, 16 nt, Human herpesvirus 4 [Epstein-Barr virus]
ugcguugaacccaccc

SEQ ID NO: 3969501 - RNA, 21 nt, Human herpesvirus 4 [Epstein-Barr virus]
ugcucaaggcagucuccaccu

SEQ ID NO: 3969502 - RNA, 16 nt, Human herpesvirus 4 [Epstein-Barr virus]
ugcucucguugccaaa

SEQ ID NO: 3969503 - RNA, 14 nt, Human herpesvirus 4 [Epstein-Barr virus]
ugcucucucuggag

SEQ ID NO: 3969504 - RNA, 14 nt, Human herpesvirus 4 [Epstein-Barr virus]
ugcugaugugcugc

SEQ ID NO: 3969505 - RNA, 17 nt, Human herpesvirus 4 [Epstein-Barr virus]
ugcugccagagccucug

SEQ ID NO: 3969506 - RNA, 20 nt, Human herpesvirus 4 [Epstein-Barr virus]
ugcugccagagccucugcca

SEQ ID NO: 3969507 - RNA, 13 nt, Human herpesvirus 4 [Epstein-Barr virus]
ugcugccuggggg

SEQ ID NO: 3969508 - RNA, 16 nt, Human herpesvirus 4 [Epstein-Barr virus]
ugcugcugcuggucau

SEQ ID NO: 3969509 - RNA, 20 nt, Human herpesvirus 4 [Epstein-Barr virus]
ugcuggacuccgaggaccag

SEQ ID NO: 3969510 - RNA, 22 nt, Human herpesvirus 4 [Epstein-Barr virus]
ugcuggagauuuucccacugug

SEQ ID NO: 3969511 - RNA, 18 nt, Human herpesvirus 4 [Epstein-Barr virus]
ugcugggucgccugaccc

SEQ ID NO: 3969512 - RNA, 13 nt, Human herpesvirus 4 [Epstein-Barr virus]
ugcuugccccggg

SEQ ID NO: 3969513 - RNA, 22 nt, Human herpesvirus 4 [Epstein-Barr virus]
uggacacuugugguucuccuga

SEQ ID NO: 3969514 - RNA, 20 nt, Human herpesvirus 4 [Epstein-Barr virus]
uggacauucuucugaaggaa

SEQ ID NO: 3969515 - RNA, 21 nt, Human herpesvirus 4 [Epstein-Barr virus]
uggacccuauggagggcagcg

SEQ ID NO: 3969516 - RNA, 19 nt, Human herpesvirus 4 [Epstein-Barr virus]
uggacuggggugugaaggg

SEQ ID NO: 3969517 - RNA, 18 nt, Human herpesvirus 4 [Epstein-Barr virus]
uggagagaggcaaauguc

SEQ ID NO: 3969518 - RNA, 19 nt, Human herpesvirus 4 [Epstein-Barr virus]
uggagagauuucauccuca

SEQ ID NO: 3969519 - RNA, 23 nt, Human herpesvirus 4 [Epstein-Barr virus]
uggagagauuucauccucagagg

SEQ ID NO: 3969520 - RNA, 12 nt, Human herpesvirus 4 [Epstein-Barr virus]
uggagaggccac

SEQ ID NO: 3969521 - RNA, 23 nt, Human herpesvirus 4 [Epstein-Barr virus]
uggagauuuucccacugugccua

SEQ ID NO: 3969522 - RNA, 23 nt, Human herpesvirus 4 [Epstein-Barr virus]
uggaggagaugaccuccuacacg

SEQ ID NO: 3969523 - RNA, 19 nt, Human herpesvirus 4 [Epstein-Barr virus]
uggaggcccccggcuggcc

SEQ ID NO: 3969524 - RNA, 21 nt, Human herpesvirus 4 [Epstein-Barr virus]
uggaggcugcgccugagcugc

SEQ ID NO: 3969525 - RNA, 23 nt, Human herpesvirus 4 [Epstein-Barr virus]
uggauugcugaacuggggcuggu

SEQ ID NO: 3969526 - RNA, 14 nt, Human herpesvirus 4 [Epstein-Barr virus]
uggcacgacuguuc

SEQ ID NO: 3969527 - RNA, 13 nt, Human herpesvirus 4 [Epstein-Barr virus]
uggcagcagcucu

SEQ ID NO: 3969528 - RNA, 14 nt, Human herpesvirus 4 [Epstein-Barr virus]
uggcagcagcucug

SEQ ID NO: 3969529 - RNA, 12 nt, Human herpesvirus 4 [Epstein-Barr virus]
uggcagcagugg

SEQ ID NO: 3969530 - RNA, 19 nt, Human herpesvirus 4 [Epstein-Barr virus]
uggcagcccccuccuccag

SEQ ID NO: 3969531 - RNA, 20 nt, Human herpesvirus 4 [Epstein-Barr virus]
uggcagggggccgggcgcgc

SEQ ID NO: 3969532 - RNA, 15 nt, Human herpesvirus 4 [Epstein-Barr virus]
uggccaggcugguga

SEQ ID NO: 3969533 - RNA, 14 nt, Human herpesvirus 4 [Epstein-Barr virus]
uggccggggccgug

SEQ ID NO: 3969534 - RNA, 19 nt, Human herpesvirus 4 [Epstein-Barr virus]
uggccgguggauccuccac

SEQ ID NO: 3969535 - RNA, 20 nt, Human herpesvirus 4 [Epstein-Barr virus]
uggccuuccucugccuggcc

SEQ ID NO: 3969536 - RNA, 13 nt, Human herpesvirus 4 [Epstein-Barr virus]
uggcggccuggca

SEQ ID NO: 3969537 - RNA, 17 nt, Human herpesvirus 4 [Epstein-Barr virus]
uggcggggccuugucug

SEQ ID NO: 3969538 - RNA, 15 nt, Human herpesvirus 4 [Epstein-Barr virus]
uggcuacuugcucag

SEQ ID NO: 3969539 - RNA, 19 nt, Human herpesvirus 4 [Epstein-Barr virus]
uggcuucuuagaugaggag

SEQ ID NO: 3969540 - RNA, 18 nt, Human herpesvirus 4 [Epstein-Barr virus]
ugggaggcccaggaccuu

SEQ ID NO: 3969541 - RNA, 21 nt, Human herpesvirus 4 [Epstein-Barr virus]
ugggcaauauaaauuacuggc

SEQ ID NO: 3969542 - RNA, 21 nt, Human herpesvirus 4 [Epstein-Barr virus]
ugggcgcgggucccccuagcc

SEQ ID NO: 3969543 - RNA, 16 nt, Human herpesvirus 4 [Epstein-Barr virus]
ugggcgcgugcacaua

SEQ ID NO: 3969544 - RNA, 10 nt, Human herpesvirus 4 [Epstein-Barr virus]
uggggagcua

SEQ ID NO: 3969545 - RNA, 20 nt, Human herpesvirus 4 [Epstein-Barr virus]
uggggauuacccgacccagc

SEQ ID NO: 3969546 - RNA, 20 nt, Human herpesvirus 4 [Epstein-Barr virus]
uggggccugugacuggugcu

SEQ ID NO: 3969547 - RNA, 14 nt, Human herpesvirus 4 [Epstein-Barr virus]
uggggcugagacca

SEQ ID NO: 3969548 - RNA, 12 nt, Human herpesvirus 4 [Epstein-Barr virus]
uggggggggugg

SEQ ID NO: 3969549 - RNA, 21 nt, Human herpesvirus 4 [Epstein-Barr virus]
ugggguccaggagucugcugc

SEQ ID NO: 3969550 - RNA, 16 nt, Human herpesvirus 4 [Epstein-Barr virus]
uggguccccucugccg

SEQ ID NO: 3969551 - RNA, 22 nt, Human herpesvirus 4 [Epstein-Barr virus]
ugguaguaggcacaucuggacc

SEQ ID NO: 3969552 - RNA, 20 nt, Human herpesvirus 4 [Epstein-Barr virus]
uggucauggccagcuuugag

SEQ ID NO: 3969553 - RNA, 24 nt, Human herpesvirus 4 [Epstein-Barr virus]
uggucgggagaacgaaggcguggg

SEQ ID NO: 3969554 - RNA, 17 nt, Human herpesvirus 4 [Epstein-Barr virus]
uggugcuguccugcuga

SEQ ID NO: 3969555 - RNA, 14 nt, Human herpesvirus 4 [Epstein-Barr virus]
ugguggucagcagc

SEQ ID NO: 3969556 - RNA, 13 nt, Human herpesvirus 4 [Epstein-Barr virus]
ugguuucagccuc

SEQ ID NO: 3969557 - RNA, 19 nt, Human herpesvirus 4 [Epstein-Barr virus]
uguaacugugguuuccaug

SEQ ID NO: 3969558 - RNA, 22 nt, Human herpesvirus 4 [Epstein-Barr virus]
uguagccacccgucccggguac

SEQ ID NO: 3969559 - RNA, 19 nt, Human herpesvirus 4 [Epstein-Barr virus]
ugucaaggcucugcacagg

SEQ ID NO: 3969560 - RNA, 18 nt, Human herpesvirus 4 [Epstein-Barr virus]
ugucaauaauuucaguga

SEQ ID NO: 3969561 - RNA, 13 nt, Human herpesvirus 4 [Epstein-Barr virus]
ugucagaccugaa

SEQ ID NO: 3969562 - RNA, 13 nt, Human herpesvirus 4 [Epstein-Barr virus]
aaggaggggcggc

SEQ ID NO: 3969563 - RNA, 22 nt, Human herpesvirus 4 [Epstein-Barr virus]
aaggagugccucugggugcuga

SEQ ID NO: 3969564 - RNA, 18 nt, Human herpesvirus 4 [Epstein-Barr virus]
aaggauggcacgggcaga

SEQ ID NO: 3969565 - RNA, 20 nt, Human herpesvirus 4 [Epstein-Barr virus]
aaggcuccggcggcagugga

SEQ ID NO: 3969566 - RNA, 13 nt, Human herpesvirus 4 [Epstein-Barr virus]
aagguccaucccg

SEQ ID NO: 3969567 - RNA, 18 nt, Human herpesvirus 4 [Epstein-Barr virus]
aagguggaggggggcggc

SEQ ID NO: 3969568 - RNA, 18 nt, Human herpesvirus 4 [Epstein-Barr virus]
aaguaccagcuggugguc

SEQ ID NO: 3969569 - RNA, 12 nt, Human herpesvirus 4 [Epstein-Barr virus]
aauaaaaacagc

SEQ ID NO: 3969570 - RNA, 16 nt, Human herpesvirus 4 [Epstein-Barr virus]
aauacaagaguucucu

SEQ ID NO: 3969571 - RNA, 16 nt, Human herpesvirus 4 [Epstein-Barr virus]
aaucccucugggagaa

SEQ ID NO: 3969572 - RNA, 15 nt, Human herpesvirus 4 [Epstein-Barr virus]
aaugcgauucugaac

SEQ ID NO: 3969573 - RNA, 18 nt, Human herpesvirus 4 [Epstein-Barr virus]
aauggccguccucuggac

SEQ ID NO: 3969574 - RNA, 13 nt, Human herpesvirus 4 [Epstein-Barr virus]
aauguaucccaaa

SEQ ID NO: 3969575 - RNA, 13 nt, Human herpesvirus 4 [Epstein-Barr virus]
aaugucaccacua

SEQ ID NO: 3969576 - RNA, 21 nt, Human herpesvirus 4 [Epstein-Barr virus]
aauguuccuucucaugcuccu

SEQ ID NO: 3969577 - RNA, 11 nt, Human herpesvirus 4 [Epstein-Barr virus]
acaccauccca

SEQ ID NO: 3969578 - RNA, 17 nt, Human herpesvirus 4 [Epstein-Barr virus]
acacccccacuuuucca

SEQ ID NO: 3969579 - RNA, 18 nt, Human herpesvirus 4 [Epstein-Barr virus]
acacgcuggucuugaauu

SEQ ID NO: 3969580 - RNA, 19 nt, Human herpesvirus 4 [Epstein-Barr virus]
acacgcuuuugucugccug

SEQ ID NO: 3969581 - RNA, 20 nt, Human herpesvirus 4 [Epstein-Barr virus]
acacgggggugcccccacca

SEQ ID NO: 3969582 - RNA, 18 nt, Human herpesvirus 4 [Epstein-Barr virus]
acacgguuauggcagagc

SEQ ID NO: 3969583 - RNA, 17 nt, Human herpesvirus 4 [Epstein-Barr virus]
acacuccauuaauucca

SEQ ID NO: 3969584 - RNA, 20 nt, Human herpesvirus 4 [Epstein-Barr virus]
acagagccgugucuccugac

SEQ ID NO: 3969585 - RNA, 16 nt, Human herpesvirus 4 [Epstein-Barr virus]
acagcaaggacggucc

SEQ ID NO: 3969586 - RNA, 14 nt, Human herpesvirus 4 [Epstein-Barr virus]
acagcgccagcagg

SEQ ID NO: 3969587 - RNA, 18 nt, Human herpesvirus 4 [Epstein-Barr virus]
acagcgccagcagggcac

SEQ ID NO: 3969588 - RNA, 22 nt, Human herpesvirus 4 [Epstein-Barr virus]
acaggagacguggguccccucu

SEQ ID NO: 3969589 - RNA, 15 nt, Human herpesvirus 4 [Epstein-Barr virus]
acagguagcaaggac

SEQ ID NO: 3969590 - RNA, 13 nt, Human herpesvirus 4 [Epstein-Barr virus]
acauacaucccug

SEQ ID NO: 3969591 - RNA, 13 nt, Human herpesvirus 4 [Epstein-Barr virus]
acaucucagggac

SEQ ID NO: 3969592 - RNA, 18 nt, Human herpesvirus 4 [Epstein-Barr virus]
acaucuggaccuggacug

SEQ ID NO: 3969593 - RNA, 19 nt, Human herpesvirus 4 [Epstein-Barr virus]
acaucuggcuggggcauua

SEQ ID NO: 3969594 - RNA, 15 nt, Human herpesvirus 4 [Epstein-Barr virus]
acauugguguuccac

SEQ ID NO: 3969595 - RNA, 22 nt, Human herpesvirus 4 [Epstein-Barr virus]
accaagaccaauacccaggauc

SEQ ID NO: 3969596 - RNA, 12 nt, Human herpesvirus 4 [Epstein-Barr virus]
accacugaggga

SEQ ID NO: 3969597 - RNA, 13 nt, Human herpesvirus 4 [Epstein-Barr virus]
accagcugguggu

SEQ ID NO: 3969598 - RNA, 20 nt, Human herpesvirus 4 [Epstein-Barr virus]
accagcuucgagagccacga

SEQ ID NO: 3969599 - RNA, 20 nt, Human herpesvirus 4 [Epstein-Barr virus]
accagggggcagucugagaa

SEQ ID NO: 3969600 - RNA, 15 nt, Human herpesvirus 4 [Epstein-Barr virus]
accaugccaucucug

SEQ ID NO: 3969601 - RNA, 14 nt, Human herpesvirus 4 [Epstein-Barr virus]
acccagcagcagcc

SEQ ID NO: 3969602 - RNA, 13 nt, Human herpesvirus 4 [Epstein-Barr virus]
accccacggagca

SEQ ID NO: 3969603 - RNA, 17 nt, Human herpesvirus 4 [Epstein-Barr virus]
accccuccuaugcgccc

SEQ ID NO: 3969604 - RNA, 19 nt, Human herpesvirus 4 [Epstein-Barr virus]
acccgaggucaagucccgg

SEQ ID NO: 3969605 - RNA, 18 nt, Human herpesvirus 4 [Epstein-Barr virus]
acccggaccaaugccaaa

SEQ ID NO: 3969606 - RNA, 19 nt, Human herpesvirus 4 [Epstein-Barr virus]
acccuccccaugggauggc

SEQ ID NO: 3969607 - RNA, 11 nt, Human herpesvirus 4 [Epstein-Barr virus]
acccuggggca

SEQ ID NO: 3969608 - RNA, 18 nt, Human herpesvirus 4 [Epstein-Barr virus]
accgaauggggcagugga

SEQ ID NO: 3969609 - RNA, 14 nt, Human herpesvirus 4 [Epstein-Barr virus]
accgcgcccuccuc

SEQ ID NO: 3969610 - RNA, 15 nt, Human herpesvirus 4 [Epstein-Barr virus]
accguggccaggccc

SEQ ID NO: 3969611 - RNA, 14 nt, Human herpesvirus 4 [Epstein-Barr virus]
accuacaccacccc

SEQ ID NO: 3969612 - RNA, 15 nt, Human herpesvirus 4 [Epstein-Barr virus]
accucuguuccuucu

SEQ ID NO: 3969613 - RNA, 22 nt, Human herpesvirus 4 [Epstein-Barr virus]
accugcacgagaccccugggcu

SEQ ID NO: 3969614 - RNA, 19 nt, Human herpesvirus 4 [Epstein-Barr virus]
accugcuaaccagauguga

SEQ ID NO: 3969615 - RNA, 23 nt, Human herpesvirus 4 [Epstein-Barr virus]
accuggaaauggccuaggagaga

SEQ ID NO: 3969616 - RNA, 17 nt, Human herpesvirus 4 [Epstein-Barr virus]
accuguguccugggcaa

SEQ ID NO: 3969617 - RNA, 22 nt, Human herpesvirus 4 [Epstein-Barr virus]
accuuaacuggcacacacuccc

SEQ ID NO: 3969618 - RNA, 17 nt, Human herpesvirus 4 [Epstein-Barr virus]
accuuccagacuaugca

SEQ ID NO: 3969619 - RNA, 14 nt, Human herpesvirus 4 [Epstein-Barr virus]
accuuuugucuccc

SEQ ID NO: 3969620 - RNA, 17 nt, Human herpesvirus 4 [Epstein-Barr virus]
acgaggacgagaaggag

SEQ ID NO: 3969621 - RNA, 16 nt, Human herpesvirus 4 [Epstein-Barr virus]
acgaggacgaggaggc

SEQ ID NO: 3969622 - RNA, 23 nt, Human herpesvirus 4 [Epstein-Barr virus]
acgaggaggcggaagaccaggag

SEQ ID NO: 3969623 - RNA, 23 nt, Human herpesvirus 4 [Epstein-Barr virus]
acgaggggccagguacaggaccu

SEQ ID NO: 3969624 - RNA, 15 nt, Human herpesvirus 4 [Epstein-Barr virus]
acgcagaaugugcag

SEQ ID NO: 3969625 - RNA, 22 nt, Human herpesvirus 4 [Epstein-Barr virus]
acgcaggauguucacgugggcc

SEQ ID NO: 3969626 - RNA, 23 nt, Human herpesvirus 4 [Epstein-Barr virus]
acgcucccgggcaaacagggcag

SEQ ID NO: 3969627 - RNA, 13 nt, Human herpesvirus 4 [Epstein-Barr virus]
acgcuccuggguu

SEQ ID NO: 3969628 - RNA, 21 nt, Human herpesvirus 4 [Epstein-Barr virus]
acggccucaaaggccucggcg

SEQ ID NO: 3969629 - RNA, 22 nt, Human herpesvirus 4 [Epstein-Barr virus]
acggccucgugcaaccaggccc

SEQ ID NO: 3969630 - RNA, 11 nt, Human herpesvirus 4 [Epstein-Barr virus]
acggccuggca

SEQ ID NO: 3969631 - RNA, 18 nt, Human herpesvirus 4 [Epstein-Barr virus]
acggcgucaaacagguga

SEQ ID NO: 3969632 - RNA, 15 nt, Human herpesvirus 4 [Epstein-Barr virus]
acgggcuggugggcu

SEQ ID NO: 3969633 - RNA, 17 nt, Human herpesvirus 4 [Epstein-Barr virus]
acgggguggugccuggu

SEQ ID NO: 3969634 - RNA, 17 nt, Human herpesvirus 4 [Epstein-Barr virus]
acgguggaacaggagca

SEQ ID NO: 3969635 - RNA, 22 nt, Human herpesvirus 4 [Epstein-Barr virus]
acgugccucagauagccggacc

SEQ ID NO: 3969636 - RNA, 22 nt, Human herpesvirus 4 [Epstein-Barr virus]
acuaggaaacggcgagcagggu

SEQ ID NO: 3969637 - RNA, 12 nt, Human herpesvirus 4 [Epstein-Barr virus]
acucacaggaca

SEQ ID NO: 3969638 - RNA, 21 nt, Human herpesvirus 4 [Epstein-Barr virus]
acucaccaagauuguuccagg

SEQ ID NO: 3969639 - RNA, 18 nt, Human herpesvirus 4 [Epstein-Barr virus]
acucaggaagcuggccag

SEQ ID NO: 3969640 - RNA, 14 nt, Human herpesvirus 4 [Epstein-Barr virus]
acuccaccugccgg

SEQ ID NO: 3969641 - RNA, 18 nt, Human herpesvirus 4 [Epstein-Barr virus]
acucccauguaagccugc

SEQ ID NO: 3969642 - RNA, 14 nt, Human herpesvirus 4 [Epstein-Barr virus]
acuccccucuccau

SEQ ID NO: 3969643 - RNA, 17 nt, Human herpesvirus 4 [Epstein-Barr virus]
acuccuggcauacuuuu

SEQ ID NO: 3969644 - RNA, 22 nt, Human herpesvirus 4 [Epstein-Barr virus]
acucgaccagcacguggguuuc

SEQ ID NO: 3969645 - RNA, 18 nt, Human herpesvirus 4 [Epstein-Barr virus]
acucuuguugcuagccuc

SEQ ID NO: 3969646 - RNA, 19 nt, Human herpesvirus 4 [Epstein-Barr virus]
acugaauuuauacccagug

SEQ ID NO: 3969647 - RNA, 13 nt, Human herpesvirus 4 [Epstein-Barr virus]
acugaccacucag

SEQ ID NO: 3969648 - RNA, 14 nt, Human herpesvirus 4 [Epstein-Barr virus]
acugccagagcugu

SEQ ID NO: 3969649 - RNA, 15 nt, Human herpesvirus 4 [Epstein-Barr virus]
acugccgccgccucc

SEQ ID NO: 3969650 - RNA, 17 nt, Human herpesvirus 4 [Epstein-Barr virus]
cuugugaaccagaaaga

SEQ ID NO: 3969651 - RNA, 19 nt, Human herpesvirus 4 [Epstein-Barr virus]
cuugugaacuuuaacauug

SEQ ID NO: 3969652 - RNA, 16 nt, Human herpesvirus 4 [Epstein-Barr virus]
cuuguuggaauggggc

SEQ ID NO: 3969653 - RNA, 13 nt, Human herpesvirus 4 [Epstein-Barr virus]
cuuucuaccaggg

SEQ ID NO: 3969654 - RNA, 19 nt, Human herpesvirus 4 [Epstein-Barr virus]
cuuucuggccaaccugccu

SEQ ID NO: 3969655 - RNA, 18 nt, Human herpesvirus 4 [Epstein-Barr virus]
cuuugaugaggcugaaau

SEQ ID NO: 3969656 - RNA, 18 nt, Human herpesvirus 4 [Epstein-Barr virus]
cuuugccaaccugcucuc

SEQ ID NO: 3969657 - RNA, 22 nt, Human herpesvirus 4 [Epstein-Barr virus]
cuuugcugaagaugauggaccc

SEQ ID NO: 3969658 - RNA, 19 nt, Human herpesvirus 4 [Epstein-Barr virus]
cuuuuauuuauugcaucac

SEQ ID NO: 3969659 - RNA, 19 nt, Human herpesvirus 4 [Epstein-Barr virus]
cuuuugcaacgccuuuuuc

SEQ ID NO: 3969660 - RNA, 19 nt, Human herpesvirus 4 [Epstein-Barr virus]
gaaaaccggcgagacuugg

SEQ ID NO: 3969661 - RNA, 19 nt, Human herpesvirus 4 [Epstein-Barr virus]
gaaaauguacccaucccgg

SEQ ID NO: 3969662 - RNA, 21 nt, Human herpesvirus 4 [Epstein-Barr virus]
gaaacaggagauuggugugaa

SEQ ID NO: 3969663 - RNA, 15 nt, Human herpesvirus 4 [Epstein-Barr virus]
gaaacuggcuucugu

SEQ ID NO: 3969664 - RNA, 15 nt, Human herpesvirus 4 [Epstein-Barr virus]
gaaagcggcccagca

SEQ ID NO: 3969665 - RNA, 20 nt, Human herpesvirus 4 [Epstein-Barr virus]
gaaagucuauacggccacaa

SEQ ID NO: 3969666 - RNA, 20 nt, Human herpesvirus 4 [Epstein-Barr virus]
gaacacccccaccccaccga

SEQ ID NO: 3969667 - RNA, 16 nt, Human herpesvirus 4 [Epstein-Barr virus]
gaacaucuggcugggg

SEQ ID NO: 3969668 - RNA, 14 nt, Human herpesvirus 4 [Epstein-Barr virus]
gaacccuagccacc

SEQ ID NO: 3969669 - RNA, 13 nt, Human herpesvirus 4 [Epstein-Barr virus]
gaacugauggcaa

SEQ ID NO: 3969670 - RNA, 14 nt, Human herpesvirus 4 [Epstein-Barr virus]
gaagaagcccaccu

SEQ ID NO: 3969671 - RNA, 23 nt, Human herpesvirus 4 [Epstein-Barr virus]
gaagaagcccaccuaugugaccg

SEQ ID NO: 3969672 - RNA, 14 nt, Human herpesvirus 4 [Epstein-Barr virus]
gaagaucgugaggc

SEQ ID NO: 3969673 - RNA, 20 nt, Human herpesvirus 4 [Epstein-Barr virus]
gaagauugucacagcugcug

SEQ ID NO: 3969674 - RNA, 16 nt, Human herpesvirus 4 [Epstein-Barr virus]
gaagcagaugugccca

SEQ ID NO: 3969675 - RNA, 16 nt, Human herpesvirus 4 [Epstein-Barr virus]
gaagcaugggggaaac

SEQ ID NO: 3969676 - RNA, 19 nt, Human herpesvirus 4 [Epstein-Barr virus]
gaaggggccucggccuggg

SEQ ID NO: 3969677 - RNA, 12 nt, Human herpesvirus 4 [Epstein-Barr virus]
gaagugggaccu

SEQ ID NO: 3969678 - RNA, 22 nt, Human herpesvirus 4 [Epstein-Barr virus]
gaauacccugcauggccaggcc

SEQ ID NO: 3969679 - RNA, 16 nt, Human herpesvirus 4 [Epstein-Barr virus]
gaauauuaauaaauau

SEQ ID NO: 3969680 - RNA, 21 nt, Human herpesvirus 4 [Epstein-Barr virus]
gaaucaaaaucagaccacccg

SEQ ID NO: 3969681 - RNA, 21 nt, Human herpesvirus 4 [Epstein-Barr virus]
gaaucuaguaugaaggcuggc

SEQ ID NO: 3969682 - RNA, 22 nt, Human herpesvirus 4 [Epstein-Barr virus]
gaaucuccugugcuucagcagu

SEQ ID NO: 3969683 - RNA, 17 nt, Human herpesvirus 4 [Epstein-Barr virus]
gaaugcccaggcggcua

SEQ ID NO: 3969684 - RNA, 16 nt, Human herpesvirus 4 [Epstein-Barr virus]
gacaagacagucacau

SEQ ID NO: 3969685 - RNA, 16 nt, Human herpesvirus 4 [Epstein-Barr virus]
gacacaucuggaccag

SEQ ID NO: 3969686 - RNA, 18 nt, Human herpesvirus 4 [Epstein-Barr virus]
gacaccggugacagugcu

SEQ ID NO: 3969687 - RNA, 15 nt, Human herpesvirus 4 [Epstein-Barr virus]
gacaccugcacgaga

SEQ ID NO: 3969688 - RNA, 19 nt, Human herpesvirus 4 [Epstein-Barr virus]
gacaugagcauggaagaca

SEQ ID NO: 3969689 - RNA, 17 nt, Human herpesvirus 4 [Epstein-Barr virus]
gacauguuucuggugag

SEQ ID NO: 3969690 - RNA, 16 nt, Human herpesvirus 4 [Epstein-Barr virus]
gaccaaggcccuagcc

SEQ ID NO: 3969691 - RNA, 11 nt, Human herpesvirus 4 [Epstein-Barr virus]
gaccacccgga

SEQ ID NO: 3969692 - RNA, 16 nt, Human herpesvirus 4 [Epstein-Barr virus]
gaccaucacauggggc

SEQ ID NO: 3969693 - RNA, 20 nt, Human herpesvirus 4 [Epstein-Barr virus]
gacccccgggcgcccccaaa

SEQ ID NO: 3969694 - RNA, 14 nt, Human herpesvirus 4 [Epstein-Barr virus]
gacccugguacagg

SEQ ID NO: 3969695 - RNA, 18 nt, Human herpesvirus 4 [Epstein-Barr virus]
gaccgggagccucagugu

SEQ ID NO: 3969696 - RNA, 17 nt, Human herpesvirus 4 [Epstein-Barr virus]
gaccucauccugcucau

SEQ ID NO: 3969697 - RNA, 14 nt, Human herpesvirus 4 [Epstein-Barr virus]
gaccuggcucaggu

SEQ ID NO: 3969698 - RNA, 17 nt, Human herpesvirus 4 [Epstein-Barr virus]
gaccugugugcuguauu

SEQ ID NO: 3969699 - RNA, 23 nt, Human herpesvirus 4 [Epstein-Barr virus]
gacgaagacccaucugagggcag

SEQ ID NO: 3969700 - RNA, 16 nt, Human herpesvirus 4 [Epstein-Barr virus]
gacgagaaggaggaga

SEQ ID NO: 3969701 - RNA, 17 nt, Human herpesvirus 4 [Epstein-Barr virus]
gacgccgagaccuaugu

SEQ ID NO: 3969702 - RNA, 20 nt, Human herpesvirus 4 [Epstein-Barr virus]
gacggcgcuugcgucugccc

SEQ ID NO: 3969703 - RNA, 19 nt, Human herpesvirus 4 [Epstein-Barr virus]
gacgggcucccucccccuc

SEQ ID NO: 3969704 - RNA, 16 nt, Human herpesvirus 4 [Epstein-Barr virus]
gacgggguggugccug

SEQ ID NO: 3969705 - RNA, 16 nt, Human herpesvirus 4 [Epstein-Barr virus]
gacggugucugugguu

SEQ ID NO: 3969706 - RNA, 13 nt, Human herpesvirus 4 [Epstein-Barr virus]
gacguggcugcgg

SEQ ID NO: 3969707 - RNA, 21 nt, Human herpesvirus 4 [Epstein-Barr virus]
gacguuugaguccaaacagcu

SEQ ID NO: 3969708 - RNA, 14 nt, Human herpesvirus 4 [Epstein-Barr virus]
gacucaauuuccaa

SEQ ID NO: 3969709 - RNA, 19 nt, Human herpesvirus 4 [Epstein-Barr virus]
gacuccgaauauccccaaa

SEQ ID NO: 3969710 - RNA, 13 nt, Human herpesvirus 4 [Epstein-Barr virus]
gacucugcuuucu

SEQ ID NO: 3969711 - RNA, 20 nt, Human herpesvirus 4 [Epstein-Barr virus]
gacuuuguuuagggacagac

SEQ ID NO: 3969712 - RNA, 17 nt, Human herpesvirus 4 [Epstein-Barr virus]
gacuuuuggcaauggga

SEQ ID NO: 3969713 - RNA, 20 nt, Human herpesvirus 4 [Epstein-Barr virus]
gacuuuuggcaaugggagca

SEQ ID NO: 3969714 - RNA, 17 nt, Human herpesvirus 4 [Epstein-Barr virus]
gagaagggagacacauc

SEQ ID NO: 3969715 - RNA, 12 nt, Human herpesvirus 4 [Epstein-Barr virus]
gagaaugacagc

SEQ ID NO: 3969716 - RNA, 16 nt, Human herpesvirus 4 [Epstein-Barr virus]
gagaccaaggcggcug

SEQ ID NO: 3969717 - RNA, 20 nt, Human herpesvirus 4 [Epstein-Barr virus]
gagaggccucugccgcgcug

SEQ ID NO: 3969718 - RNA, 22 nt, Human herpesvirus 4 [Epstein-Barr virus]
gagaggcgggaauggccgccac

SEQ ID NO: 3969719 - RNA, 13 nt, Human herpesvirus 4 [Epstein-Barr virus]
gagaucaggccaa

SEQ ID NO: 3969720 - RNA, 12 nt, Human herpesvirus 4 [Epstein-Barr virus]
gagcaaccagcu

SEQ ID NO: 3969721 - RNA, 20 nt, Human herpesvirus 4 [Epstein-Barr virus]
gagcaggaggggcaggagca

SEQ ID NO: 3969722 - RNA, 21 nt, Human herpesvirus 4 [Epstein-Barr virus]
gagcaggaggggcaggagcag

SEQ ID NO: 3969723 - RNA, 19 nt, Human herpesvirus 4 [Epstein-Barr virus]
gagcagucgcauggcggga

SEQ ID NO: 3969724 - RNA, 13 nt, Human herpesvirus 4 [Epstein-Barr virus]
gagcccccaccgc

SEQ ID NO: 3969725 - RNA, 22 nt, Human herpesvirus 4 [Epstein-Barr virus]
gagccgugucuccugacgccaa

SEQ ID NO: 3969726 - RNA, 13 nt, Human herpesvirus 4 [Epstein-Barr virus]
gagcggcugugag

SEQ ID NO: 3969727 - RNA, 18 nt, Human herpesvirus 4 [Epstein-Barr virus]
gagcgggaggggcaggag

SEQ ID NO: 3969728 - RNA, 17 nt, Human herpesvirus 4 [Epstein-Barr virus]
gagcuugaggccagaga

SEQ ID NO: 3969729 - RNA, 13 nt, Human herpesvirus 4 [Epstein-Barr virus]
gaggaaggggccu

SEQ ID NO: 3969730 - RNA, 15 nt, Human herpesvirus 4 [Epstein-Barr virus]
gaggacggugucugu

SEQ ID NO: 3969731 - RNA, 17 nt, Human herpesvirus 4 [Epstein-Barr virus]
gaggagaagagaggcuu

SEQ ID NO: 3969732 - RNA, 15 nt, Human herpesvirus 4 [Epstein-Barr virus]
gaggaggggcaggag

SEQ ID NO: 3969733 - RNA, 16 nt, Human herpesvirus 4 [Epstein-Barr virus]
gaggcagagagccagu

SEQ ID NO: 3969734 - RNA, 14 nt, Human herpesvirus 4 [Epstein-Barr virus]
gaggcccacugcag

SEQ ID NO: 3969735 - RNA, 20 nt, Human herpesvirus 4 [Epstein-Barr virus]
gaggccugggagggggcgag

SEQ ID NO: 3969736 - RNA, 19 nt, Human herpesvirus 4 [Epstein-Barr virus]
gaggcggaagaccaggagc

SEQ ID NO: 3969737 - RNA, 23 nt, Human herpesvirus 4 [Epstein-Barr virus]
gaggcugagaacugacgcuccag

SEQ ID NO: 3969738 - RNA, 16 nt, Human herpesvirus 4 [Epstein-Barr virus]
gccaccguggccaggc

SEQ ID NO: 3969739 - RNA, 23 nt, Human herpesvirus 4 [Epstein-Barr virus]
gccacgcgucagcaaaccagcuu

SEQ ID NO: 3969740 - RNA, 18 nt, Human herpesvirus 4 [Epstein-Barr virus]
gccacggcgugccagagg

SEQ ID NO: 3969741 - RNA, 13 nt, Human herpesvirus 4 [Epstein-Barr virus]
gccacguccccgg

SEQ ID NO: 3969742 - RNA, 16 nt, Human herpesvirus 4 [Epstein-Barr virus]
gccagagccucugcca

SEQ ID NO: 3969743 - RNA, 18 nt, Human herpesvirus 4 [Epstein-Barr virus]
gccagcaaaaccagcccg

SEQ ID NO: 3969744 - RNA, 14 nt, Human herpesvirus 4 [Epstein-Barr virus]
gccagccaccccag

SEQ ID NO: 3969745 - RNA, 22 nt, Human herpesvirus 4 [Epstein-Barr virus]
gccagcgccuccucgcaggccc

SEQ ID NO: 3969746 - RNA, 16 nt, Human herpesvirus 4 [Epstein-Barr virus]
gccaggacgcugcugu

SEQ ID NO: 3969747 - RNA, 16 nt, Human herpesvirus 4 [Epstein-Barr virus]
gccaggauaaucaggc

SEQ ID NO: 3969748 - RNA, 20 nt, Human herpesvirus 4 [Epstein-Barr virus]
gccaggccgccaugcucagg

SEQ ID NO: 3969749 - RNA, 14 nt, Human herpesvirus 4 [Epstein-Barr virus]
gccagguagcccag

SEQ ID NO: 3969750 - RNA, 15 nt, Human herpesvirus 4 [Epstein-Barr virus]
gccagguagcccagc

SEQ ID NO: 3969751 - RNA, 13 nt, Human herpesvirus 4 [Epstein-Barr virus]
gccauccuccuuc

SEQ ID NO: 3969752 - RNA, 17 nt, Human herpesvirus 4 [Epstein-Barr virus]
gccauucgacaggccau

SEQ ID NO: 3969753 - RNA, 16 nt, Human herpesvirus 4 [Epstein-Barr virus]
gcccacacagcgccag

SEQ ID NO: 3969754 - RNA, 18 nt, Human herpesvirus 4 [Epstein-Barr virus]
gcccacacagcgccagca

SEQ ID NO: 3969755 - RNA, 14 nt, Human herpesvirus 4 [Epstein-Barr virus]
gcccaccagccagc

SEQ ID NO: 3969756 - RNA, 19 nt, Human herpesvirus 4 [Epstein-Barr virus]
gcccagaggaggccccggc

SEQ ID NO: 3969757 - RNA, 22 nt, Human herpesvirus 4 [Epstein-Barr virus]
gcccagcagauccagggcccgu

SEQ ID NO: 3969758 - RNA, 12 nt, Human herpesvirus 4 [Epstein-Barr virus]
gcccagcccccu

SEQ ID NO: 3969759 - RNA, 16 nt, Human herpesvirus 4 [Epstein-Barr virus]
gcccagcccccucccg

SEQ ID NO: 3969760 - RNA, 18 nt, Human herpesvirus 4 [Epstein-Barr virus]
gcccagcccgacccccgg

SEQ ID NO: 3969761 - RNA, 23 nt, Human herpesvirus 4 [Epstein-Barr virus]
gcccagcccuccucagaaaacuc

SEQ ID NO: 3969762 - RNA, 16 nt, Human herpesvirus 4 [Epstein-Barr virus]
gccccaauaugccaac

SEQ ID NO: 3969763 - RNA, 13 nt, Human herpesvirus 4 [Epstein-Barr virus]
gccccagccccuc

SEQ ID NO: 3969764 - RNA, 12 nt, Human herpesvirus 4 [Epstein-Barr virus]
gcccccaccacc

SEQ ID NO: 3969765 - RNA, 18 nt, Human herpesvirus 4 [Epstein-Barr virus]
gcccccaccacucccacc

SEQ ID NO: 3969766 - RNA, 14 nt, Human herpesvirus 4 [Epstein-Barr virus]
gcccccgccagcgc

SEQ ID NO: 3969767 - RNA, 22 nt, Human herpesvirus 4 [Epstein-Barr virus]
gcccccugucucuuucuggcca

SEQ ID NO: 3969768 - RNA, 20 nt, Human herpesvirus 4 [Epstein-Barr virus]
gccccgaugcggaggacugc

SEQ ID NO: 3969769 - RNA, 17 nt, Human herpesvirus 4 [Epstein-Barr virus]
gccccggucaccccaga

SEQ ID NO: 3969770 - RNA, 16 nt, Human herpesvirus 4 [Epstein-Barr virus]
gccccuguccacugcc

SEQ ID NO: 3969771 - RNA, 18 nt, Human herpesvirus 4 [Epstein-Barr virus]
gcccgacaauaaaguuga

SEQ ID NO: 3969772 - RNA, 23 nt, Human herpesvirus 4 [Epstein-Barr virus]
gcccgacccccgggcgcccccaa

SEQ ID NO: 3969773 - RNA, 20 nt, Human herpesvirus 4 [Epstein-Barr virus]
gcccgcaccccccgccacca

SEQ ID NO: 3969774 - RNA, 16 nt, Human herpesvirus 4 [Epstein-Barr virus]
gcccgucuuacugccc

SEQ ID NO: 3969775 - RNA, 22 nt, Human herpesvirus 4 [Epstein-Barr virus]
gcccguuccaggcucuccagcc

SEQ ID NO: 3969776 - RNA, 16 nt, Human herpesvirus 4 [Epstein-Barr virus]
gcccuccucugggccg

SEQ ID NO: 3969777 - RNA, 21 nt, Human herpesvirus 4 [Epstein-Barr virus]
gcccugagcuggacgaggucc

SEQ ID NO: 3969778 - RNA, 12 nt, Human herpesvirus 4 [Epstein-Barr virus]
gcccuggucagg

SEQ ID NO: 3969779 - RNA, 13 nt, Human herpesvirus 4 [Epstein-Barr virus]
gcccuuugccugg

SEQ ID NO: 3969780 - RNA, 17 nt, Human herpesvirus 4 [Epstein-Barr virus]
gccgcaccacgggaggc

SEQ ID NO: 3969781 - RNA, 13 nt, Human herpesvirus 4 [Epstein-Barr virus]
gccgccgccagca

SEQ ID NO: 3969782 - RNA, 13 nt, Human herpesvirus 4 [Epstein-Barr virus]
gccgcggcccagg

SEQ ID NO: 3969783 - RNA, 14 nt, Human herpesvirus 4 [Epstein-Barr virus]
gccgcuccguggcc

SEQ ID NO: 3969784 - RNA, 18 nt, Human herpesvirus 4 [Epstein-Barr virus]
gccgcuuacagccagaga

SEQ ID NO: 3969785 - RNA, 13 nt, Human herpesvirus 4 [Epstein-Barr virus]
gccggggcccacg

SEQ ID NO: 3969786 - RNA, 23 nt, Human herpesvirus 4 [Epstein-Barr virus]
gccgguuuugcagucgcugcugc

SEQ ID NO: 3969787 - RNA, 20 nt, Human herpesvirus 4 [Epstein-Barr virus]
gccuacugauggccaucuuu

SEQ ID NO: 3969788 - RNA, 22 nt, Human herpesvirus 4 [Epstein-Barr virus]
gccuagccaucggggcacguuu

SEQ ID NO: 3969789 - RNA, 19 nt, Human herpesvirus 4 [Epstein-Barr virus]
gccucaaaguccugcacua

SEQ ID NO: 3969790 - RNA, 13 nt, Human herpesvirus 4 [Epstein-Barr virus]
gccucagcccccc

SEQ ID NO: 3969791 - RNA, 15 nt, Human herpesvirus 4 [Epstein-Barr virus]
gccuccaacaggugc

SEQ ID NO: 3969792 - RNA, 22 nt, Human herpesvirus 4 [Epstein-Barr virus]
gccuccaacaggugcccgagcc

SEQ ID NO: 3969793 - RNA, 15 nt, Human herpesvirus 4 [Epstein-Barr virus]
gccuccagcucggcc

SEQ ID NO: 3969794 - RNA, 14 nt, Human herpesvirus 4 [Epstein-Barr virus]
gccucuacccuccc

SEQ ID NO: 3969795 - RNA, 17 nt, Human herpesvirus 4 [Epstein-Barr virus]
gccucucuggcugugcu

SEQ ID NO: 3969796 - RNA, 21 nt, Human herpesvirus 4 [Epstein-Barr virus]
gccucucuggcugugcugacc

SEQ ID NO: 3969797 - RNA, 19 nt, Human herpesvirus 4 [Epstein-Barr virus]
gccucugccgcgcugcucg

SEQ ID NO: 3969798 - RNA, 16 nt, Human herpesvirus 4 [Epstein-Barr virus]
gccugaagcuugcugg

SEQ ID NO: 3969799 - RNA, 22 nt, Human herpesvirus 4 [Epstein-Barr virus]
gccugagacagaggugcucaag

SEQ ID NO: 3969800 - RNA, 16 nt, Human herpesvirus 4 [Epstein-Barr virus]
gccugccaaagagcca

SEQ ID NO: 3969801 - RNA, 12 nt, Human herpesvirus 4 [Epstein-Barr virus]
gccugccucugc

SEQ ID NO: 3969802 - RNA, 16 nt, Human herpesvirus 4 [Epstein-Barr virus]
gccugccucugcucug

SEQ ID NO: 3969803 - RNA, 23 nt, Human herpesvirus 4 [Epstein-Barr virus]
gccuggccggcuaucugcuucug

SEQ ID NO: 3969804 - RNA, 14 nt, Human herpesvirus 4 [Epstein-Barr virus]
gccuucgcccccuc

SEQ ID NO: 3969805 - RNA, 15 nt, Human herpesvirus 4 [Epstein-Barr virus]
gccuucuccucagcc

SEQ ID NO: 3969806 - RNA, 15 nt, Human herpesvirus 4 [Epstein-Barr virus]
gccuugcguggugcu

SEQ ID NO: 3969807 - RNA, 13 nt, Human herpesvirus 4 [Epstein-Barr virus]
gcgacacuugggu

SEQ ID NO: 3969808 - RNA, 18 nt, Human herpesvirus 4 [Epstein-Barr virus]
gcgagcuccgugggccca

SEQ ID NO: 3969809 - RNA, 17 nt, Human herpesvirus 4 [Epstein-Barr virus]
gcgcaacgccggccugc

SEQ ID NO: 3969810 - RNA, 13 nt, Human herpesvirus 4 [Epstein-Barr virus]
gcgcccugcgagu

SEQ ID NO: 3969811 - RNA, 17 nt, Human herpesvirus 4 [Epstein-Barr virus]
gcgccgguggggaaggc

SEQ ID NO: 3969812 - RNA, 15 nt, Human herpesvirus 4 [Epstein-Barr virus]
gcggagagggauggg

SEQ ID NO: 3969813 - RNA, 21 nt, Human herpesvirus 4 [Epstein-Barr virus]
gcggcaagggcucaccaggga

SEQ ID NO: 3969814 - RNA, 20 nt, Human herpesvirus 4 [Epstein-Barr virus]
gcggcucaggaucagggcca

SEQ ID NO: 3969815 - RNA, 13 nt, Human herpesvirus 4 [Epstein-Barr virus]
gcgggaggggcag

SEQ ID NO: 3969816 - RNA, 19 nt, Human herpesvirus 4 [Epstein-Barr virus]
gcggggcuccccagccaca

SEQ ID NO: 3969817 - RNA, 19 nt, Human herpesvirus 4 [Epstein-Barr virus]
gcgucaggagagggccaga

SEQ ID NO: 3969818 - RNA, 15 nt, Human herpesvirus 4 [Epstein-Barr virus]
gcgucauuucuucca

SEQ ID NO: 3969819 - RNA, 22 nt, Human herpesvirus 4 [Epstein-Barr virus]
gcguccucuaccuggucaagag

SEQ ID NO: 3969820 - RNA, 20 nt, Human herpesvirus 4 [Epstein-Barr virus]
gcguugcgcaccaccgcagc

SEQ ID NO: 3969821 - RNA, 14 nt, Human herpesvirus 4 [Epstein-Barr virus]
gcuacucuccgccg

SEQ ID NO: 3969822 - RNA, 18 nt, Human herpesvirus 4 [Epstein-Barr virus]
gcuaucuuugcugaagau

SEQ ID NO: 3969823 - RNA, 19 nt, Human herpesvirus 4 [Epstein-Barr virus]
gcuaucuuugcugaagaug

SEQ ID NO: 3969824 - RNA, 23 nt, Human herpesvirus 4 [Epstein-Barr virus]
gcuaugaagaagauugaagacaa

SEQ ID NO: 3969825 - RNA, 21 nt, Human herpesvirus 4 [Epstein-Barr virus]
gcuaugaccaugcccagacuc

SEQ ID NO: 3969826 - RNA, 17 nt, Human herpesvirus 4 [Epstein-Barr virus]
guccgccaugaccagca

SEQ ID NO: 3969827 - RNA, 13 nt, Human herpesvirus 4 [Epstein-Barr virus]
guccgcugggcca

SEQ ID NO: 3969828 - RNA, 21 nt, Human herpesvirus 4 [Epstein-Barr virus]
gucgcuggcauacucuucauu

SEQ ID NO: 3969829 - RNA, 20 nt, Human herpesvirus 4 [Epstein-Barr virus]
gucggacgaggaggaagaga

SEQ ID NO: 3969830 - RNA, 15 nt, Human herpesvirus 4 [Epstein-Barr virus]
gucuacuucgccaug

SEQ ID NO: 3969831 - RNA, 17 nt, Human herpesvirus 4 [Epstein-Barr virus]
gucuccagcggcuaccu

SEQ ID NO: 3969832 - RNA, 21 nt, Human herpesvirus 4 [Epstein-Barr virus]
gucucuuucuggccaaccugc

SEQ ID NO: 3969833 - RNA, 22 nt, Human herpesvirus 4 [Epstein-Barr virus]
gucugacgaggggccagguaca

SEQ ID NO: 3969834 - RNA, 14 nt, Human herpesvirus 4 [Epstein-Barr virus]
gucugacuuggccc

SEQ ID NO: 3969835 - RNA, 16 nt, Human herpesvirus 4 [Epstein-Barr virus]
gucugcaccccagugg

SEQ ID NO: 3969836 - RNA, 21 nt, Human herpesvirus 4 [Epstein-Barr virus]
gucuucggucaaguaccagcu

SEQ ID NO: 3969837 - RNA, 23 nt, Human herpesvirus 4 [Epstein-Barr virus]
gucuucugucucggccuccuggc

SEQ ID NO: 3969838 - RNA, 13 nt, Human herpesvirus 4 [Epstein-Barr virus]
gugaaugcacgcc

SEQ ID NO: 3969839 - RNA, 16 nt, Human herpesvirus 4 [Epstein-Barr virus]
gugaccacugagggag

SEQ ID NO: 3969840 - RNA, 12 nt, Human herpesvirus 4 [Epstein-Barr virus]
gugagcccaccu

SEQ ID NO: 3969841 - RNA, 16 nt, Human herpesvirus 4 [Epstein-Barr virus]
gugaggagcgcccacc

SEQ ID NO: 3969842 - RNA, 13 nt, Human herpesvirus 4 [Epstein-Barr virus]
gugaggccugaga

SEQ ID NO: 3969843 - RNA, 15 nt, Human herpesvirus 4 [Epstein-Barr virus]
gugaggcggugccug

SEQ ID NO: 3969844 - RNA, 14 nt, Human herpesvirus 4 [Epstein-Barr virus]
gugcaccugcuaga

SEQ ID NO: 3969845 - RNA, 15 nt, Human herpesvirus 4 [Epstein-Barr virus]
gugcagacgagcaug

SEQ ID NO: 3969846 - RNA, 17 nt, Human herpesvirus 4 [Epstein-Barr virus]
gugcagccuaccgccac

SEQ ID NO: 3969847 - RNA, 17 nt, Human herpesvirus 4 [Epstein-Barr virus]
gugcccuggaggccuca

SEQ ID NO: 3969848 - RNA, 13 nt, Human herpesvirus 4 [Epstein-Barr virus]
gugccuccagagc

SEQ ID NO: 3969849 - RNA, 18 nt, Human herpesvirus 4 [Epstein-Barr virus]
gugcuggagauuuuccca

SEQ ID NO: 3969850 - RNA, 15 nt, Human herpesvirus 4 [Epstein-Barr virus]
gugcuguugggccuu

SEQ ID NO: 3969851 - RNA, 17 nt, Human herpesvirus 4 [Epstein-Barr virus]
gugcuuuccaccggugg

SEQ ID NO: 3969852 - RNA, 19 nt, Human herpesvirus 4 [Epstein-Barr virus]
guggacucggccacacagu

SEQ ID NO: 3969853 - RNA, 13 nt, Human herpesvirus 4 [Epstein-Barr virus]
guggagaggcccg

SEQ ID NO: 3969854 - RNA, 11 nt, Human herpesvirus 4 [Epstein-Barr virus]
guggaggcucg

SEQ ID NO: 3969855 - RNA, 12 nt, Human herpesvirus 4 [Epstein-Barr virus]
guggagggccga

SEQ ID NO: 3969856 - RNA, 18 nt, Human herpesvirus 4 [Epstein-Barr virus]
guggaggggggcggcgug

SEQ ID NO: 3969857 - RNA, 21 nt, Human herpesvirus 4 [Epstein-Barr virus]
guggccucuacgccaggcucg

SEQ ID NO: 3969858 - RNA, 12 nt, Human herpesvirus 4 [Epstein-Barr virus]
guggcugcugcc

SEQ ID NO: 3969859 - RNA, 19 nt, Human herpesvirus 4 [Epstein-Barr virus]
gugggauggcggggccuug

SEQ ID NO: 3969860 - RNA, 22 nt, Human herpesvirus 4 [Epstein-Barr virus]
gugggccucucuggcugugcug

SEQ ID NO: 3969861 - RNA, 20 nt, Human herpesvirus 4 [Epstein-Barr virus]
gugguaacaggugggacaaa

SEQ ID NO: 3969862 - RNA, 14 nt, Human herpesvirus 4 [Epstein-Barr virus]
guggucuccuucuu

SEQ ID NO: 3969863 - RNA, 14 nt, Human herpesvirus 4 [Epstein-Barr virus]
gugguucuccugau

SEQ ID NO: 3969864 - RNA, 22 nt, Human herpesvirus 4 [Epstein-Barr virus]
guguauugcucucguugccaaa

SEQ ID NO: 3969865 - RNA, 15 nt, Human herpesvirus 4 [Epstein-Barr virus]
guguauuucuggcca

SEQ ID NO: 3969866 - RNA, 20 nt, Human herpesvirus 4 [Epstein-Barr virus]
guguauuucuggccaucugu

SEQ ID NO: 3969867 - RNA, 18 nt, Human herpesvirus 4 [Epstein-Barr virus]
guguccagguguggaaaa

SEQ ID NO: 3969868 - RNA, 16 nt, Human herpesvirus 4 [Epstein-Barr virus]
gugucgcguagcucug

SEQ ID NO: 3969869 - RNA, 13 nt, Human herpesvirus 4 [Epstein-Barr virus]
guguuccacagcc

SEQ ID NO: 3969870 - RNA, 16 nt, Human herpesvirus 4 [Epstein-Barr virus]
guguuccacagccugc

SEQ ID NO: 3969871 - RNA, 13 nt, Human herpesvirus 4 [Epstein-Barr virus]
guguuugcuugcc

SEQ ID NO: 3969872 - RNA, 13 nt, Human herpesvirus 4 [Epstein-Barr virus]
guuagugugccuc

SEQ ID NO: 3969873 - RNA, 16 nt, Human herpesvirus 4 [Epstein-Barr virus]
guuauaacugccagag

SEQ ID NO: 3969874 - RNA, 22 nt, Human herpesvirus 4 [Epstein-Barr virus]
guuauuacugauugucgcuggc

SEQ ID NO: 3969875 - RNA, 15 nt, Human herpesvirus 4 [Epstein-Barr virus]
guucccggcacacca

SEQ ID NO: 3969876 - RNA, 22 nt, Human herpesvirus 4 [Epstein-Barr virus]
guugccgugguugggcagaacc

SEQ ID NO: 3969877 - RNA, 13 nt, Human herpesvirus 4 [Epstein-Barr virus]
guugguggcacug

SEQ ID NO: 3969878 - RNA, 18 nt, Human herpesvirus 4 [Epstein-Barr virus]
guuucuggaaugcuucua

SEQ ID NO: 3969879 - RNA, 15 nt, Human herpesvirus 4 [Epstein-Barr virus]
uaaaaaugugcagcu

SEQ ID NO: 3969880 - RNA, 21 nt, Human herpesvirus 4 [Epstein-Barr virus]
uaaacauugcaccuugccggc

SEQ ID NO: 3969881 - RNA, 18 nt, Human herpesvirus 4 [Epstein-Barr virus]
uaaaguuggucaggcuga

SEQ ID NO: 3969882 - RNA, 18 nt, Human herpesvirus 4 [Epstein-Barr virus]
uaacacgaaugcccaggc

SEQ ID NO: 3969883 - RNA, 21 nt, Human herpesvirus 4 [Epstein-Barr virus]
uaacacuacuuguuucuggaa

SEQ ID NO: 3969884 - RNA, 13 nt, Human herpesvirus 4 [Epstein-Barr virus]
uaacauccgagac

SEQ ID NO: 3969885 - RNA, 14 nt, Human herpesvirus 4 [Epstein-Barr virus]
uaacauugaugaac

SEQ ID NO: 3969886 - RNA, 13 nt, Human herpesvirus 4 [Epstein-Barr virus]
uaaccuaugccug

SEQ ID NO: 3969887 - RNA, 15 nt, Human herpesvirus 4 [Epstein-Barr virus]
uaacgggaagugugu

SEQ ID NO: 3969888 - RNA, 23 nt, Human herpesvirus 4 [Epstein-Barr virus]
uaacgggggaaggaaaggccugc

SEQ ID NO: 3969889 - RNA, 16 nt, Human herpesvirus 4 [Epstein-Barr virus]
uaacugugucccacuc

SEQ ID NO: 3969890 - RNA, 15 nt, Human herpesvirus 4 [Epstein-Barr virus]
uaacuugacuacaau

SEQ ID NO: 3969891 - RNA, 12 nt, Human herpesvirus 4 [Epstein-Barr virus]
uaagccugccuc

SEQ ID NO: 3969892 - RNA, 19 nt, Human herpesvirus 4 [Epstein-Barr virus]
uaaguaauuuguugccguu

SEQ ID NO: 3969893 - RNA, 18 nt, Human herpesvirus 4 [Epstein-Barr virus]
uacaacucagccccaucu

SEQ ID NO: 3969894 - RNA, 20 nt, Human herpesvirus 4 [Epstein-Barr virus]
uacagcagcuggauguacag

SEQ ID NO: 3969895 - RNA, 20 nt, Human herpesvirus 4 [Epstein-Barr virus]
uacagccgggcuaugcucua

SEQ ID NO: 3969896 - RNA, 12 nt, Human herpesvirus 4 [Epstein-Barr virus]
uacaggaggaaa

SEQ ID NO: 3969897 - RNA, 23 nt, Human herpesvirus 4 [Epstein-Barr virus]
uacauguuuuucguuaacaugga

SEQ ID NO: 3969898 - RNA, 17 nt, Human herpesvirus 4 [Epstein-Barr virus]
uacccggucgcauggug

SEQ ID NO: 3969899 - RNA, 23 nt, Human herpesvirus 4 [Epstein-Barr virus]
uaccgccacgcgucagcaaacca

SEQ ID NO: 3969900 - RNA, 20 nt, Human herpesvirus 4 [Epstein-Barr virus]
uacgcccgacaauaaaguug

SEQ ID NO: 3969901 - RNA, 14 nt, Human herpesvirus 4 [Epstein-Barr virus]
uacggcuuuccagu

SEQ ID NO: 3969902 - RNA, 18 nt, Human herpesvirus 4 [Epstein-Barr virus]
uacguuggcuucugcugc

SEQ ID NO: 3969903 - RNA, 13 nt, Human herpesvirus 4 [Epstein-Barr virus]
uacucggggucuc

SEQ ID NO: 3969904 - RNA, 19 nt, Human herpesvirus 4 [Epstein-Barr virus]
uacucuucauucuugcuau

SEQ ID NO: 3969905 - RNA, 17 nt, Human herpesvirus 4 [Epstein-Barr virus]
uacugauugucgcuggc

SEQ ID NO: 3969906 - RNA, 19 nt, Human herpesvirus 4 [Epstein-Barr virus]
uagaauccagccagugguc

SEQ ID NO: 3969907 - RNA, 15 nt, Human herpesvirus 4 [Epstein-Barr virus]
uagaggcucaggcca

SEQ ID NO: 3969908 - RNA, 17 nt, Human herpesvirus 4 [Epstein-Barr virus]
uagcauggccgccagag

SEQ ID NO: 3969909 - RNA, 17 nt, Human herpesvirus 4 [Epstein-Barr virus]
uagccuauuugcacguu

SEQ ID NO: 3969910 - RNA, 12 nt, Human herpesvirus 4 [Epstein-Barr virus]
uaggaauuauuu

SEQ ID NO: 3969911 - RNA, 17 nt, Human herpesvirus 4 [Epstein-Barr virus]
uaggagcagggcccagu

SEQ ID NO: 3969912 - RNA, 16 nt, Human herpesvirus 4 [Epstein-Barr virus]
uaggcacaucuggacc

SEQ ID NO: 3969913 - RNA, 18 nt, Human herpesvirus 4 [Epstein-Barr virus]
uaggugccuccagagccc

SEQ ID NO: 3969914 - RNA, 13 nt, Human herpesvirus 4 [Epstein-Barr virus]
gccuggacugugg

SEQ ID NO: 3969915 - RNA, 22 nt, Human herpesvirus 4 [Epstein-Barr virus]
gccuggggauaagaaacacgcu

SEQ ID NO: 3969916 - RNA, 14 nt, Human herpesvirus 4 [Epstein-Barr virus]
gccuggggcucaga

SEQ ID NO: 3969917 - RNA, 19 nt, Human herpesvirus 4 [Epstein-Barr virus]
gccuguuuguccagcaggg

SEQ ID NO: 3969918 - RNA, 22 nt, Human herpesvirus 4 [Epstein-Barr virus]
gccuguuuguccagcagggccu

SEQ ID NO: 3969919 - RNA, 13 nt, Human herpesvirus 4 [Epstein-Barr virus]
gccuuacacugga

SEQ ID NO: 3969920 - RNA, 12 nt, Human herpesvirus 4 [Epstein-Barr virus]
gccuuccucugc

SEQ ID NO: 3969921 - RNA, 16 nt, Human herpesvirus 4 [Epstein-Barr virus]
gccuugcguggugcug

SEQ ID NO: 3969922 - RNA, 18 nt, Human herpesvirus 4 [Epstein-Barr virus]
gccuugguuucagccuca

SEQ ID NO: 3969923 - RNA, 21 nt, Human herpesvirus 4 [Epstein-Barr virus]
gccuugguuucagccucacug

SEQ ID NO: 3969924 - RNA, 19 nt, Human herpesvirus 4 [Epstein-Barr virus]
gccuuguucuuugaccuuu

SEQ ID NO: 3969925 - RNA, 21 nt, Human herpesvirus 4 [Epstein-Barr virus]
gcgacauguuucuggugagcc

SEQ ID NO: 3969926 - RNA, 14 nt, Human herpesvirus 4 [Epstein-Barr virus]
gcgacgcucccggg

SEQ ID NO: 3969927 - RNA, 17 nt, Human herpesvirus 4 [Epstein-Barr virus]
gcgagcucuccagccac

SEQ ID NO: 3969928 - RNA, 21 nt, Human herpesvirus 4 [Epstein-Barr virus]
gcgaugucggggcugcuggcg

SEQ ID NO: 3969929 - RNA, 23 nt, Human herpesvirus 4 [Epstein-Barr virus]
gcgcaacgccggccugcuggccg

SEQ ID NO: 3969930 - RNA, 20 nt, Human herpesvirus 4 [Epstein-Barr virus]
gcgcaggggagggggcagga

SEQ ID NO: 3969931 - RNA, 18 nt, Human herpesvirus 4 [Epstein-Barr virus]
gcgccagcagggcacaga

SEQ ID NO: 3969932 - RNA, 18 nt, Human herpesvirus 4 [Epstein-Barr virus]
gcgcccugucaccaggcc

SEQ ID NO: 3969933 - RNA, 13 nt, Human herpesvirus 4 [Epstein-Barr virus]
gcgccgccagcau

SEQ ID NO: 3969934 - RNA, 14 nt, Human herpesvirus 4 [Epstein-Barr virus]
gcgccguggccacc

SEQ ID NO: 3969935 - RNA, 15 nt, Human herpesvirus 4 [Epstein-Barr virus]
gcgcucgucguucag

SEQ ID NO: 3969936 - RNA, 19 nt, Human herpesvirus 4 [Epstein-Barr virus]
gcgcuguggagagaggcaa

SEQ ID NO: 3969937 - RNA, 20 nt, Human herpesvirus 4 [Epstein-Barr virus]
gcggacccgaucagagcccc

SEQ ID NO: 3969938 - RNA, 15 nt, Human herpesvirus 4 [Epstein-Barr virus]
gcggcccacugaaaa

SEQ ID NO: 3969939 - RNA, 22 nt, Human herpesvirus 4 [Epstein-Barr virus]
gcggcccagcagauccagggcc

SEQ ID NO: 3969940 - RNA, 23 nt, Human herpesvirus 4 [Epstein-Barr virus]
gcggcccagcagauccagggccc

SEQ ID NO: 3969941 - RNA, 19 nt, Human herpesvirus 4 [Epstein-Barr virus]
gcgggggaccacauacauc

SEQ ID NO: 3969942 - RNA, 22 nt, Human herpesvirus 4 [Epstein-Barr virus]
gcgucccaaacauaaaugcccc

SEQ ID NO: 3969943 - RNA, 18 nt, Human herpesvirus 4 [Epstein-Barr virus]
gcgucgggaaacacagcu

SEQ ID NO: 3969944 - RNA, 20 nt, Human herpesvirus 4 [Epstein-Barr virus]
gcgucuguuuguguagugag

SEQ ID NO: 3969945 - RNA, 15 nt, Human herpesvirus 4 [Epstein-Barr virus]
gcgugaauugugccc

SEQ ID NO: 3969946 - RNA, 14 nt, Human herpesvirus 4 [Epstein-Barr virus]
gcguggugcugucc

SEQ ID NO: 3969947 - RNA, 15 nt, Human herpesvirus 4 [Epstein-Barr virus]
gcguguuugcugcuc

SEQ ID NO: 3969948 - RNA, 13 nt, Human herpesvirus 4 [Epstein-Barr virus]
gcguugccagacu

SEQ ID NO: 3969949 - RNA, 13 nt, Human herpesvirus 4 [Epstein-Barr virus]
gcuaaccagaugu

SEQ ID NO: 3969950 - RNA, 13 nt, Human herpesvirus 4 [Epstein-Barr virus]
gcuagggaggaga

SEQ ID NO: 3969951 - RNA, 15 nt, Human herpesvirus 4 [Epstein-Barr virus]
gcuagggaggagacg

SEQ ID NO: 3969952 - RNA, 22 nt, Human herpesvirus 4 [Epstein-Barr virus]
gcuaguggcgcugcguggcacc

SEQ ID NO: 3969953 - RNA, 22 nt, Human herpesvirus 4 [Epstein-Barr virus]
gcucccgggcaaacagggcaga

SEQ ID NO: 3969954 - RNA, 17 nt, Human herpesvirus 4 [Epstein-Barr virus]
gcuccgagagcuccgcc

SEQ ID NO: 3969955 - RNA, 16 nt, Human herpesvirus 4 [Epstein-Barr virus]
gcuccggcugccgcac

SEQ ID NO: 3969956 - RNA, 20 nt, Human herpesvirus 4 [Epstein-Barr virus]
gcucgcccacacagcgccag

SEQ ID NO: 3969957 - RNA, 22 nt, Human herpesvirus 4 [Epstein-Barr virus]
gcucgccuggagucugagaaua

SEQ ID NO: 3969958 - RNA, 19 nt, Human herpesvirus 4 [Epstein-Barr virus]
gcucgucguucaggaacag

SEQ ID NO: 3969959 - RNA, 20 nt, Human herpesvirus 4 [Epstein-Barr virus]
gcucuucgugcucuucaugu

SEQ ID NO: 3969960 - RNA, 15 nt, Human herpesvirus 4 [Epstein-Barr virus]
gcucuucugggaaca

SEQ ID NO: 3969961 - RNA, 16 nt, Human herpesvirus 4 [Epstein-Barr virus]
gcugaccggcucggcc

SEQ ID NO: 3969962 - RNA, 21 nt, Human herpesvirus 4 [Epstein-Barr virus]
gcugagaacugacgcuccagg

SEQ ID NO: 3969963 - RNA, 16 nt, Human herpesvirus 4 [Epstein-Barr virus]
gcugaugugcugcccc

SEQ ID NO: 3969964 - RNA, 13 nt, Human herpesvirus 4 [Epstein-Barr virus]
gcugccaggccgc

SEQ ID NO: 3969965 - RNA, 18 nt, Human herpesvirus 4 [Epstein-Barr virus]
gcugccgaagcagauggc

SEQ ID NO: 3969966 - RNA, 13 nt, Human herpesvirus 4 [Epstein-Barr virus]
gcugcgccuccug

SEQ ID NO: 3969967 - RNA, 15 nt, Human herpesvirus 4 [Epstein-Barr virus]
gcugcgguggugcgc

SEQ ID NO: 3969968 - RNA, 16 nt, Human herpesvirus 4 [Epstein-Barr virus]
gcugcucgccccuggu

SEQ ID NO: 3969969 - RNA, 22 nt, Human herpesvirus 4 [Epstein-Barr virus]
gcuggacgugaaccuccccccc

SEQ ID NO: 3969970 - RNA, 19 nt, Human herpesvirus 4 [Epstein-Barr virus]
gcuggacuccgaggaccag

SEQ ID NO: 3969971 - RNA, 13 nt, Human herpesvirus 4 [Epstein-Barr virus]
gcuggccgagcug

SEQ ID NO: 3969972 - RNA, 20 nt, Human herpesvirus 4 [Epstein-Barr virus]
gcuggcucgccucauccugg

SEQ ID NO: 3969973 - RNA, 18 nt, Human herpesvirus 4 [Epstein-Barr virus]
gcuguccuucugucacaa

SEQ ID NO: 3969974 - RNA, 20 nt, Human herpesvirus 4 [Epstein-Barr virus]
gcuguggccggugcugccag

SEQ ID NO: 3969975 - RNA, 20 nt, Human herpesvirus 4 [Epstein-Barr virus]
gcuucuuagaugaggagcag

SEQ ID NO: 3969976 - RNA, 23 nt, Human herpesvirus 4 [Epstein-Barr virus]
gcuucuucguauauguguugaga

SEQ ID NO: 3969977 - RNA, 20 nt, Human herpesvirus 4 [Epstein-Barr virus]
gcuuuguugggucugauguu

SEQ ID NO: 3969978 - RNA, 16 nt, Human herpesvirus 4 [Epstein-Barr virus]
ggaaaagagagcugau

SEQ ID NO: 3969979 - RNA, 17 nt, Human herpesvirus 4 [Epstein-Barr virus]
ggaaaagagagcugaug

SEQ ID NO: 3969980 - RNA, 21 nt, Human herpesvirus 4 [Epstein-Barr virus]
ggaaagaggucccauguacag

SEQ ID NO: 3969981 - RNA, 18 nt, Human herpesvirus 4 [Epstein-Barr virus]
ggaacaaacaugggcugc

SEQ ID NO: 3969982 - RNA, 15 nt, Human herpesvirus 4 [Epstein-Barr virus]
ggaacacccccaccc

SEQ ID NO: 3969983 - RNA, 21 nt, Human herpesvirus 4 [Epstein-Barr virus]
ggaacacccccaccccaccga

SEQ ID NO: 3969984 - RNA, 23 nt, Human herpesvirus 4 [Epstein-Barr virus]
ggaacacggcaccgucagccaca

SEQ ID NO: 3969985 - RNA, 23 nt, Human herpesvirus 4 [Epstein-Barr virus]
ggaacccuagccaccguggccag

SEQ ID NO: 3969986 - RNA, 22 nt, Human herpesvirus 4 [Epstein-Barr virus]
ggaagagacuucacagagcagc

SEQ ID NO: 3969987 - RNA, 16 nt, Human herpesvirus 4 [Epstein-Barr virus]
ggaagcucagcaguug

SEQ ID NO: 3969988 - RNA, 16 nt, Human herpesvirus 4 [Epstein-Barr virus]
ggaaggaaaggccugc

SEQ ID NO: 3969989 - RNA, 13 nt, Human herpesvirus 4 [Epstein-Barr virus]
ggaaugaacacuc

SEQ ID NO: 3969990 - RNA, 14 nt, Human herpesvirus 4 [Epstein-Barr virus]
ggaaugugugacau

SEQ ID NO: 3969991 - RNA, 22 nt, Human herpesvirus 4 [Epstein-Barr virus]
ggaauuugugguuuggggcagg

SEQ ID NO: 3969992 - RNA, 17 nt, Human herpesvirus 4 [Epstein-Barr virus]
ggacacacauggcacuc

SEQ ID NO: 3969993 - RNA, 18 nt, Human herpesvirus 4 [Epstein-Barr virus]
ggacagacccugggccuu

SEQ ID NO: 3969994 - RNA, 18 nt, Human herpesvirus 4 [Epstein-Barr virus]
ggacagcagcguccuggc

SEQ ID NO: 3969995 - RNA, 17 nt, Human herpesvirus 4 [Epstein-Barr virus]
ggacaggugccagaugu

SEQ ID NO: 3969996 - RNA, 21 nt, Human herpesvirus 4 [Epstein-Barr virus]
ggacaugcugaugugcugccc

SEQ ID NO: 3969997 - RNA, 11 nt, Human herpesvirus 4 [Epstein-Barr virus]
ggacaugucac

SEQ ID NO: 3969998 - RNA, 20 nt, Human herpesvirus 4 [Epstein-Barr virus]
gauguccuggccgggcgccu

SEQ ID NO: 3969999 - RNA, 19 nt, Human herpesvirus 4 [Epstein-Barr virus]
gauuaggcacuggacacac

SEQ ID NO: 3970000 - RNA, 17 nt, Human herpesvirus 4 [Epstein-Barr virus]
gauucaccggcaccgcc

SEQ ID NO: 3970001 - RNA, 20 nt, Human herpesvirus 4 [Epstein-Barr virus]
gauucucuaaucccucuggg

SEQ ID NO: 3970002 - RNA, 18 nt, Human herpesvirus 4 [Epstein-Barr virus]
gauugucacagcugcugg

SEQ ID NO: 3970003 - RNA, 20 nt, Human herpesvirus 4 [Epstein-Barr virus]
gauuugcucuucgugcucuu

SEQ ID NO: 3970004 - RNA, 14 nt, Human herpesvirus 4 [Epstein-Barr virus]
gcaaaacucacagg

SEQ ID NO: 3970005 - RNA, 16 nt, Human herpesvirus 4 [Epstein-Barr virus]
gcaacauugcagggcu

SEQ ID NO: 3970006 - RNA, 13 nt, Human herpesvirus 4 [Epstein-Barr virus]
gcaaccagcacgu

SEQ ID NO: 3970007 - RNA, 24 nt, Human herpesvirus 4 [Epstein-Barr virus]
gcaaccagcacgucgucagagagg

SEQ ID NO: 3970008 - RNA, 12 nt, Human herpesvirus 4 [Epstein-Barr virus]
gcaacugcugca

SEQ ID NO: 3970009 - RNA, 20 nt, Human herpesvirus 4 [Epstein-Barr virus]
gcaauaaauaaaaguacaga

SEQ ID NO: 3970010 - RNA, 16 nt, Human herpesvirus 4 [Epstein-Barr virus]
gcaaugcccacccacu

SEQ ID NO: 3970011 - RNA, 16 nt, Human herpesvirus 4 [Epstein-Barr virus]
gcaauugggcauaccc

SEQ ID NO: 3970012 - RNA, 17 nt, Human herpesvirus 4 [Epstein-Barr virus]
gcaauugggcauaccca

SEQ ID NO: 3970013 - RNA, 23 nt, Human herpesvirus 4 [Epstein-Barr virus]
gcacaacaagaaaucccaguugu

SEQ ID NO: 3970014 - RNA, 22 nt, Human herpesvirus 4 [Epstein-Barr virus]
gcacacacucccuuagccacac

SEQ ID NO: 3970015 - RNA, 18 nt, Human herpesvirus 4 [Epstein-Barr virus]
gcacagaucugaccacgg

SEQ ID NO: 3970016 - RNA, 18 nt, Human herpesvirus 4 [Epstein-Barr virus]
gcacauauaccgcucggc

SEQ ID NO: 3970017 - RNA, 19 nt, Human herpesvirus 4 [Epstein-Barr virus]
gcaccgggaugagcuggag

SEQ ID NO: 3970018 - RNA, 15 nt, Human herpesvirus 4 [Epstein-Barr virus]
gcacgagauggccca

SEQ ID NO: 3970019 - RNA, 15 nt, Human herpesvirus 4 [Epstein-Barr virus]
gcacggcacccuccc

SEQ ID NO: 3970020 - RNA, 19 nt, Human herpesvirus 4 [Epstein-Barr virus]
gcacgguggcuugggcugu

SEQ ID NO: 3970021 - RNA, 16 nt, Human herpesvirus 4 [Epstein-Barr virus]
gcacucugaccaggac

SEQ ID NO: 3970022 - RNA, 14 nt, Human herpesvirus 4 [Epstein-Barr virus]
gcacuguugcgccc

SEQ ID NO: 3970023 - RNA, 18 nt, Human herpesvirus 4 [Epstein-Barr virus]
gcacuuucuuugcuucac

SEQ ID NO: 3970024 - RNA, 14 nt, Human herpesvirus 4 [Epstein-Barr virus]
gcagagagccacau

SEQ ID NO: 3970025 - RNA, 18 nt, Human herpesvirus 4 [Epstein-Barr virus]
gcagcaacgcccagggac

SEQ ID NO: 3970026 - RNA, 21 nt, Human herpesvirus 4 [Epstein-Barr virus]
gcagcccgcaccccccgccac

SEQ ID NO: 3970027 - RNA, 19 nt, Human herpesvirus 4 [Epstein-Barr virus]
gcagcccggccgaggccug

SEQ ID NO: 3970028 - RNA, 21 nt, Human herpesvirus 4 [Epstein-Barr virus]
gcagcugaggggcaaccugaa

SEQ ID NO: 3970029 - RNA, 13 nt, Human herpesvirus 4 [Epstein-Barr virus]
gcaggagcaggag

SEQ ID NO: 3970030 - RNA, 17 nt, Human herpesvirus 4 [Epstein-Barr virus]
gcaggagcaggagcggg

SEQ ID NO: 3970031 - RNA, 22 nt, Human herpesvirus 4 [Epstein-Barr virus]
gcaggagcaggaggaggggcag

SEQ ID NO: 3970032 - RNA, 18 nt, Human herpesvirus 4 [Epstein-Barr virus]
gcaggaggaggggcagga

SEQ ID NO: 3970033 - RNA, 13 nt, Human herpesvirus 4 [Epstein-Barr virus]
gcaggaggggcag

SEQ ID NO: 3970034 - RNA, 23 nt, Human herpesvirus 4 [Epstein-Barr virus]
gcaggccccccgcaccagggcca

SEQ ID NO: 3970035 - RNA, 16 nt, Human herpesvirus 4 [Epstein-Barr virus]
gcaggugcaccagcuc

SEQ ID NO: 3970036 - RNA, 15 nt, Human herpesvirus 4 [Epstein-Barr virus]
gcaguccaggggcca

SEQ ID NO: 3970037 - RNA, 15 nt, Human herpesvirus 4 [Epstein-Barr virus]
gcauacggcuuucca

SEQ ID NO: 3970038 - RNA, 14 nt, Human herpesvirus 4 [Epstein-Barr virus]
gcaucagaugagac

SEQ ID NO: 3970039 - RNA, 13 nt, Human herpesvirus 4 [Epstein-Barr virus]
gcaucucuuuuac

SEQ ID NO: 3970040 - RNA, 22 nt, Human herpesvirus 4 [Epstein-Barr virus]
gcauggcagcagacaaggacag

SEQ ID NO: 3970041 - RNA, 23 nt, Human herpesvirus 4 [Epstein-Barr virus]
gcauggcgggaguauggggccag

SEQ ID NO: 3970042 - RNA, 21 nt, Human herpesvirus 4 [Epstein-Barr virus]
gcauuggcugcaaagggaccc

SEQ ID NO: 3970043 - RNA, 19 nt, Human herpesvirus 4 [Epstein-Barr virus]
gcauuuuuggugcugccug

SEQ ID NO: 3970044 - RNA, 14 nt, Human herpesvirus 4 [Epstein-Barr virus]
gccaacucccccaa

SEQ ID NO: 3970045 - RNA, 22 nt, Human herpesvirus 4 [Epstein-Barr virus]
gccaaugacccacuccagugcg

SEQ ID NO: 3970046 - RNA, 17 nt, Human herpesvirus 4 [Epstein-Barr virus]
gccaaugggggaggaga

SEQ ID NO: 3970047 - RNA, 20 nt, Human herpesvirus 4 [Epstein-Barr virus]
gccaaugggggaggagagac

SEQ ID NO: 3970048 - RNA, 23 nt, Human herpesvirus 4 [Epstein-Barr virus]
gccacaaccgccgugucagcugu

SEQ ID NO: 3970049 - RNA, 12 nt, Human herpesvirus 4 [Epstein-Barr virus]
gccacacugggg

SEQ ID NO: 3970050 - RNA, 15 nt, Human herpesvirus 4 [Epstein-Barr virus]
gccacccgucccggg

SEQ ID NO: 3970051 - RNA, 17 nt, Human herpesvirus 4 [Epstein-Barr virus]
gccacggcgucaaacag

SEQ ID NO: 3970052 - RNA, 15 nt, Human herpesvirus 4 [Epstein-Barr virus]
ucaagagaucagcaa

SEQ ID NO: 3970053 - RNA, 22 nt, Human herpesvirus 4 [Epstein-Barr virus]
ucaagcuuaugcagcaccucag

SEQ ID NO: 3970054 - RNA, 17 nt, Human herpesvirus 4 [Epstein-Barr virus]
ucaaucuucuucauagc

SEQ ID NO: 3970055 - RNA, 17 nt, Human herpesvirus 4 [Epstein-Barr virus]
ucacauugcaucgcuca

SEQ ID NO: 3970056 - RNA, 11 nt, Human herpesvirus 4 [Epstein-Barr virus]
ucaccagagcc

SEQ ID NO: 3970057 - RNA, 16 nt, Human herpesvirus 4 [Epstein-Barr virus]
ucacccauggccaggc

SEQ ID NO: 3970058 - RNA, 15 nt, Human herpesvirus 4 [Epstein-Barr virus]
ucaccuacaugucaa

SEQ ID NO: 3970059 - RNA, 18 nt, Human herpesvirus 4 [Epstein-Barr virus]
ucacucucaguaauuccc

SEQ ID NO: 3970060 - RNA, 18 nt, Human herpesvirus 4 [Epstein-Barr virus]
ucacugagaaucuccugu

SEQ ID NO: 3970061 - RNA, 21 nt, Human herpesvirus 4 [Epstein-Barr virus]
ucagaagcuacaaacacgggc

SEQ ID NO: 3970062 - RNA, 18 nt, Human herpesvirus 4 [Epstein-Barr virus]
ucagaccugaucagggaa

SEQ ID NO: 3970063 - RNA, 15 nt, Human herpesvirus 4 [Epstein-Barr virus]
ucagcacagccagag

SEQ ID NO: 3970064 - RNA, 17 nt, Human herpesvirus 4 [Epstein-Barr virus]
ucagccacacaaucagc

SEQ ID NO: 3970065 - RNA, 11 nt, Human herpesvirus 4 [Epstein-Barr virus]
ucagccaccuc

SEQ ID NO: 3970066 - RNA, 15 nt, Human herpesvirus 4 [Epstein-Barr virus]
ucagccuccaacagg

SEQ ID NO: 3970067 - RNA, 19 nt, Human herpesvirus 4 [Epstein-Barr virus]
ucagcucaaccgccagggc

SEQ ID NO: 3970068 - RNA, 10 nt, Human herpesvirus 4 [Epstein-Barr virus]
ucagcuccag

SEQ ID NO: 3970069 - RNA, 18 nt, Human herpesvirus 4 [Epstein-Barr virus]
ucagcuccagggccagca

SEQ ID NO: 3970070 - RNA, 20 nt, Human herpesvirus 4 [Epstein-Barr virus]
ucaggagguacaugggccac

SEQ ID NO: 3970071 - RNA, 18 nt, Human herpesvirus 4 [Epstein-Barr virus]
ucaggaucagggccaaga

SEQ ID NO: 3970072 - RNA, 15 nt, Human herpesvirus 4 [Epstein-Barr virus]
ucaggcggaggcacu

SEQ ID NO: 3970073 - RNA, 16 nt, Human herpesvirus 4 [Epstein-Barr virus]
ucauaaccccuaccuc

SEQ ID NO: 3970074 - RNA, 17 nt, Human herpesvirus 4 [Epstein-Barr virus]
ucauccgaggcugagaa

SEQ ID NO: 3970075 - RNA, 18 nt, Human herpesvirus 4 [Epstein-Barr virus]
ucauuuuuagccccagcc

SEQ ID NO: 3970076 - RNA, 23 nt, Human herpesvirus 4 [Epstein-Barr virus]
uccacaccauccacagccccacu

SEQ ID NO: 3970077 - RNA, 22 nt, Human herpesvirus 4 [Epstein-Barr virus]
uccacagccccacucuugccuc

SEQ ID NO: 3970078 - RNA, 22 nt, Human herpesvirus 4 [Epstein-Barr virus]
uccacccccuggagccagcgcu

SEQ ID NO: 3970079 - RNA, 14 nt, Human herpesvirus 4 [Epstein-Barr virus]
uccagaaaaugccg

SEQ ID NO: 3970080 - RNA, 13 nt, Human herpesvirus 4 [Epstein-Barr virus]
uccagagccccuu

SEQ ID NO: 3970081 - RNA, 22 nt, Human herpesvirus 4 [Epstein-Barr virus]
uccagcaaccaauguaucccaa

SEQ ID NO: 3970082 - RNA, 20 nt, Human herpesvirus 4 [Epstein-Barr virus]
uccagcccuugcgccgccuc

SEQ ID NO: 3970083 - RNA, 16 nt, Human herpesvirus 4 [Epstein-Barr virus]
uccagccgggugcaca

SEQ ID NO: 3970084 - RNA, 22 nt, Human herpesvirus 4 [Epstein-Barr virus]
uccagcucggccagcaggccgg

SEQ ID NO: 3970085 - RNA, 19 nt, Human herpesvirus 4 [Epstein-Barr virus]
uccaguuuuuaugugccuc

SEQ ID NO: 3970086 - RNA, 16 nt, Human herpesvirus 4 [Epstein-Barr virus]
uccauuccacccacug

SEQ ID NO: 3970087 - RNA, 13 nt, Human herpesvirus 4 [Epstein-Barr virus]
uccauuucauugc

SEQ ID NO: 3970088 - RNA, 13 nt, Human herpesvirus 4 [Epstein-Barr virus]
ucccaaguacaga

SEQ ID NO: 3970089 - RNA, 19 nt, Human herpesvirus 4 [Epstein-Barr virus]
ucccauguaagccugccuc

SEQ ID NO: 3970090 - RNA, 16 nt, Human herpesvirus 4 [Epstein-Barr virus]
ucccauguuuguaacu

SEQ ID NO: 3970091 - RNA, 11 nt, Human herpesvirus 4 [Epstein-Barr virus]
uccccauggga

SEQ ID NO: 3970092 - RNA, 18 nt, Human herpesvirus 4 [Epstein-Barr virus]
uccccccagaagccccca

SEQ ID NO: 3970093 - RNA, 22 nt, Human herpesvirus 4 [Epstein-Barr virus]
uccccgagggugaggcccagcc

SEQ ID NO: 3970094 - RNA, 13 nt, Human herpesvirus 4 [Epstein-Barr virus]
uccccggccuccc

SEQ ID NO: 3970095 - RNA, 22 nt, Human herpesvirus 4 [Epstein-Barr virus]
uccccugccugcaugcuuagug

SEQ ID NO: 3970096 - RNA, 17 nt, Human herpesvirus 4 [Epstein-Barr virus]
ucccgccccuguccacu

SEQ ID NO: 3970097 - RNA, 20 nt, Human herpesvirus 4 [Epstein-Barr virus]
ucccgugcuuuuugccaggc

SEQ ID NO: 3970098 - RNA, 12 nt, Human herpesvirus 4 [Epstein-Barr virus]
ucccucugggag

SEQ ID NO: 3970099 - RNA, 21 nt, Human herpesvirus 4 [Epstein-Barr virus]
ucccugggggccugugucuuc

SEQ ID NO: 3970100 - RNA, 11 nt, Human herpesvirus 4 [Epstein-Barr virus]
ucccuuccuuu

SEQ ID NO: 3970101 - RNA, 19 nt, Human herpesvirus 4 [Epstein-Barr virus]
uccguccuuguccaggaga

SEQ ID NO: 3970102 - RNA, 18 nt, Human herpesvirus 4 [Epstein-Barr virus]
gagcuccgugagcaggag

SEQ ID NO: 3970103 - RNA, 14 nt, Human herpesvirus 4 [Epstein-Barr virus]
gagcuggagacccg

SEQ ID NO: 3970104 - RNA, 20 nt, Human herpesvirus 4 [Epstein-Barr virus]
gagcugggcaaagauuuucu

SEQ ID NO: 3970105 - RNA, 17 nt, Human herpesvirus 4 [Epstein-Barr virus]
gagcuuccuggccggcc

SEQ ID NO: 3970106 - RNA, 17 nt, Human herpesvirus 4 [Epstein-Barr virus]
gaggacacgcuggucuu

SEQ ID NO: 3970107 - RNA, 19 nt, Human herpesvirus 4 [Epstein-Barr virus]
gaggacggugucugugguu

SEQ ID NO: 3970108 - RNA, 18 nt, Human herpesvirus 4 [Epstein-Barr virus]
gaggagcaccggagccac

SEQ ID NO: 3970109 - RNA, 12 nt, Human herpesvirus 4 [Epstein-Barr virus]
gaggaggcacac

SEQ ID NO: 3970110 - RNA, 18 nt, Human herpesvirus 4 [Epstein-Barr virus]
gaggauaaucugggcagc

SEQ ID NO: 3970111 - RNA, 24 nt, Human herpesvirus 4 [Epstein-Barr virus]
gaggauggcacgguccagaagcag

SEQ ID NO: 3970112 - RNA, 14 nt, Human herpesvirus 4 [Epstein-Barr virus]
gaggccguguuucu

SEQ ID NO: 3970113 - RNA, 12 nt, Human herpesvirus 4 [Epstein-Barr virus]
gaggccugagag

SEQ ID NO: 3970114 - RNA, 17 nt, Human herpesvirus 4 [Epstein-Barr virus]
gaggcggaagaccagga

SEQ ID NO: 3970115 - RNA, 18 nt, Human herpesvirus 4 [Epstein-Barr virus]
gagggcagcgaagaacac

SEQ ID NO: 3970116 - RNA, 18 nt, Human herpesvirus 4 [Epstein-Barr virus]
gaggggcaggagcaggag

SEQ ID NO: 3970117 - RNA, 11 nt, Human herpesvirus 4 [Epstein-Barr virus]
gagggggacaa

SEQ ID NO: 3970118 - RNA, 21 nt, Human herpesvirus 4 [Epstein-Barr virus]
gaggggggcggcguggagcug

SEQ ID NO: 3970119 - RNA, 21 nt, Human herpesvirus 4 [Epstein-Barr virus]
gagucagccuugcccccgcca

SEQ ID NO: 3970120 - RNA, 14 nt, Human herpesvirus 4 [Epstein-Barr virus]
gagucccuccucac

SEQ ID NO: 3970121 - RNA, 21 nt, Human herpesvirus 4 [Epstein-Barr virus]
gagugcccuggaggccucagg

SEQ ID NO: 3970122 - RNA, 21 nt, Human herpesvirus 4 [Epstein-Barr virus]
gaguuggcaucuuccuccuug

SEQ ID NO: 3970123 - RNA, 18 nt, Human herpesvirus 4 [Epstein-Barr virus]
gauacucaucugugagac

SEQ ID NO: 3970124 - RNA, 12 nt, Human herpesvirus 4 [Epstein-Barr virus]
gauccgccagga

SEQ ID NO: 3970125 - RNA, 15 nt, Human herpesvirus 4 [Epstein-Barr virus]
gaucuccuuuggcuc

SEQ ID NO: 3970126 - RNA, 18 nt, Human herpesvirus 4 [Epstein-Barr virus]
gaugcccaguuaugggua

SEQ ID NO: 3970127 - RNA, 13 nt, Human herpesvirus 4 [Epstein-Barr virus]
gauggcacgggca

SEQ ID NO: 3970128 - RNA, 19 nt, Human herpesvirus 4 [Epstein-Barr virus]
gauggccuccagcucggcc

SEQ ID NO: 3970129 - RNA, 22 nt, Human herpesvirus 4 [Epstein-Barr virus]
gauggcgacuuuguuuagggac

SEQ ID NO: 3970130 - RNA, 12 nt, Human herpesvirus 4 [Epstein-Barr virus]
gauggguggaga

SEQ ID NO: 3970131 - RNA, 13 nt, Human herpesvirus 4 [Epstein-Barr virus]
gauguagacaagu

SEQ ID NO: 3970132 - RNA, 21 nt, Human herpesvirus 4 [Epstein-Barr virus]
cugccccucagccugcuccug

SEQ ID NO: 3970133 - RNA, 17 nt, Human herpesvirus 4 [Epstein-Barr virus]
cugcccuccuccaccca

SEQ ID NO: 3970134 - RNA, 21 nt, Human herpesvirus 4 [Epstein-Barr virus]
cugccuggaucugagcuaugu

SEQ ID NO: 3970135 - RNA, 14 nt, Human herpesvirus 4 [Epstein-Barr virus]
cugccuggauucuu

SEQ ID NO: 3970136 - RNA, 23 nt, Human herpesvirus 4 [Epstein-Barr virus]
cugccuggauucuuacagcagga

SEQ ID NO: 3970137 - RNA, 22 nt, Human herpesvirus 4 [Epstein-Barr virus]
cugcgccugagcugccugguga

SEQ ID NO: 3970138 - RNA, 13 nt, Human herpesvirus 4 [Epstein-Barr virus]
cugcgccuuuagg

SEQ ID NO: 3970139 - RNA, 17 nt, Human herpesvirus 4 [Epstein-Barr virus]
cugcguccaccuggcca

SEQ ID NO: 3970140 - RNA, 14 nt, Human herpesvirus 4 [Epstein-Barr virus]
cugcguggcaccaa

SEQ ID NO: 3970141 - RNA, 15 nt, Human herpesvirus 4 [Epstein-Barr virus]
cugcuacuacugccu

SEQ ID NO: 3970142 - RNA, 17 nt, Human herpesvirus 4 [Epstein-Barr virus]
cugcucccgccucaggg

SEQ ID NO: 3970143 - RNA, 18 nt, Human herpesvirus 4 [Epstein-Barr virus]
cugcucccgccucaggga

SEQ ID NO: 3970144 - RNA, 19 nt, Human herpesvirus 4 [Epstein-Barr virus]
cugcuccgcguggagcugg

SEQ ID NO: 3970145 - RNA, 14 nt, Human herpesvirus 4 [Epstein-Barr virus]
cugcucgccccugg

SEQ ID NO: 3970146 - RNA, 16 nt, Human herpesvirus 4 [Epstein-Barr virus]
cugcugccgucccagg

SEQ ID NO: 3970147 - RNA, 22 nt, Human herpesvirus 4 [Epstein-Barr virus]
cugcuucuggcucuucugggaa

SEQ ID NO: 3970148 - RNA, 22 nt, Human herpesvirus 4 [Epstein-Barr virus]
cugcuugugaucauggaaacca

SEQ ID NO: 3970149 - RNA, 22 nt, Human herpesvirus 4 [Epstein-Barr virus]
cuggacgcgcagugccaagagc

SEQ ID NO: 3970150 - RNA, 16 nt, Human herpesvirus 4 [Epstein-Barr virus]
cuggauucuuacagca

SEQ ID NO: 3970151 - RNA, 15 nt, Human herpesvirus 4 [Epstein-Barr virus]
cuggcaacuccucuu

SEQ ID NO: 3970152 - RNA, 14 nt, Human herpesvirus 4 [Epstein-Barr virus]
cuggcacacacucc

SEQ ID NO: 3970153 - RNA, 15 nt, Human herpesvirus 4 [Epstein-Barr virus]
cuggcaccuguccuu

SEQ ID NO: 3970154 - RNA, 13 nt, Human herpesvirus 4 [Epstein-Barr virus]
auggaggggcggc

SEQ ID NO: 3970155 - RNA, 16 nt, Human herpesvirus 4 [Epstein-Barr virus]
auggcacgggcagagg

SEQ ID NO: 3970156 - RNA, 18 nt, Human herpesvirus 4 [Epstein-Barr virus]
auggccacgacuauccag

SEQ ID NO: 3970157 - RNA, 17 nt, Human herpesvirus 4 [Epstein-Barr virus]
auggccgccacccuccc

SEQ ID NO: 3970158 - RNA, 19 nt, Human herpesvirus 4 [Epstein-Barr virus]
augggggaaugagggaaaa

SEQ ID NO: 3970159 - RNA, 19 nt, Human herpesvirus 4 [Epstein-Barr virus]
auggucgucaucuggcucu

SEQ ID NO: 3970160 - RNA, 18 nt, Human herpesvirus 4 [Epstein-Barr virus]
auguagcuauacuuucuu

SEQ ID NO: 3970161 - RNA, 14 nt, Human herpesvirus 4 [Epstein-Barr virus]
auguauugggacuu

SEQ ID NO: 3970162 - RNA, 14 nt, Human herpesvirus 4 [Epstein-Barr virus]
auguccacugagca

SEQ ID NO: 3970163 - RNA, 14 nt, Human herpesvirus 4 [Epstein-Barr virus]
augucggggcugcu

SEQ ID NO: 3970164 - RNA, 15 nt, Human herpesvirus 4 [Epstein-Barr virus]
auguggugggggcua

SEQ ID NO: 3970165 - RNA, 22 nt, Human herpesvirus 4 [Epstein-Barr virus]
auguucccggcacaccagacau

SEQ ID NO: 3970166 - RNA, 17 nt, Human herpesvirus 4 [Epstein-Barr virus]
auguuuuccccauguug

SEQ ID NO: 3970167 - RNA, 21 nt, Human herpesvirus 4 [Epstein-Barr virus]
auguuuuuggcauguguacuu

SEQ ID NO: 3970168 - RNA, 13 nt, Human herpesvirus 4 [Epstein-Barr virus]
auuagcagccucc

SEQ ID NO: 3970169 - RNA, 13 nt, Human herpesvirus 4 [Epstein-Barr virus]
auucacaucucag

SEQ ID NO: 3970170 - RNA, 14 nt, Human herpesvirus 4 [Epstein-Barr virus]
auucaucagaagcu

SEQ ID NO: 3970171 - RNA, 12 nt, Human herpesvirus 4 [Epstein-Barr virus]
auuccacccacu

SEQ ID NO: 3970172 - RNA, 21 nt, Human herpesvirus 4 [Epstein-Barr virus]
auucuaugggaauaacaaggg

SEQ ID NO: 3970173 - RNA, 16 nt, Human herpesvirus 4 [Epstein-Barr virus]
auugaggacccaccuu

SEQ ID NO: 3970174 - RNA, 19 nt, Human herpesvirus 4 [Epstein-Barr virus]
auugcugagaaccugcugc

SEQ ID NO: 3970175 - RNA, 13 nt, Human herpesvirus 4 [Epstein-Barr virus]
auuguacagagcu

SEQ ID NO: 3970176 - RNA, 13 nt, Human herpesvirus 4 [Epstein-Barr virus]
auuguugcgcccu

SEQ ID NO: 3970177 - RNA, 22 nt, Human herpesvirus 4 [Epstein-Barr virus]
auuuacgguuagugugccucug

SEQ ID NO: 3970178 - RNA, 14 nt, Human herpesvirus 4 [Epstein-Barr virus]
auuuugccugaagc

SEQ ID NO: 3970179 - RNA, 20 nt, Human herpesvirus 4 [Epstein-Barr virus]
auuuugggcacacuuaacuu

SEQ ID NO: 3970180 - RNA, 16 nt, Human herpesvirus 4 [Epstein-Barr virus]
caaaaguagaggcuca

SEQ ID NO: 3970181 - RNA, 21 nt, Human herpesvirus 4 [Epstein-Barr virus]
caaaaucaaaguaguuggagc

SEQ ID NO: 3970182 - RNA, 14 nt, Human herpesvirus 4 [Epstein-Barr virus]
caaacauguccugu

SEQ ID NO: 3970183 - RNA, 22 nt, Human herpesvirus 4 [Epstein-Barr virus]
caaacugacacacaggccuggc

SEQ ID NO: 3970184 - RNA, 23 nt, Human herpesvirus 4 [Epstein-Barr virus]
caaagcugaagaacggacugcgg

SEQ ID NO: 3970185 - RNA, 23 nt, Human herpesvirus 4 [Epstein-Barr virus]
caaagguguagaagugugucccc

SEQ ID NO: 3970186 - RNA, 22 nt, Human herpesvirus 4 [Epstein-Barr virus]
caaagucaagggaaaggaaggg

SEQ ID NO: 3970187 - RNA, 13 nt, Human herpesvirus 4 [Epstein-Barr virus]
caaauaaauguua

SEQ ID NO: 3970188 - RNA, 19 nt, Human herpesvirus 4 [Epstein-Barr virus]
caacaaggagugccucugg

SEQ ID NO: 3970189 - RNA, 19 nt, Human herpesvirus 4 [Epstein-Barr virus]
caacagacugcggggagga

SEQ ID NO: 3970190 - RNA, 13 nt, Human herpesvirus 4 [Epstein-Barr virus]
caacagccagaau

SEQ ID NO: 3970191 - RNA, 20 nt, Human herpesvirus 4 [Epstein-Barr virus]
caacaggugcccgagccccg

SEQ ID NO: 3970192 - RNA, 18 nt, Human herpesvirus 4 [Epstein-Barr virus]
caacauuaaagccuccuc

SEQ ID NO: 3970193 - RNA, 15 nt, Human herpesvirus 4 [Epstein-Barr virus]
caaccaagccacuac

SEQ ID NO: 3970194 - RNA, 14 nt, Human herpesvirus 4 [Epstein-Barr virus]
caaccuggagacaa

SEQ ID NO: 3970195 - RNA, 16 nt, Human herpesvirus 4 [Epstein-Barr virus]
caacgaucccaggccu

SEQ ID NO: 3970196 - RNA, 18 nt, Human herpesvirus 4 [Epstein-Barr virus]
caacgccggccugcuggc

SEQ ID NO: 3970197 - RNA, 22 nt, Human herpesvirus 4 [Epstein-Barr virus]
caacgccuuuuuccuagcuuau

SEQ ID NO: 3970198 - RNA, 16 nt, Human herpesvirus 4 [Epstein-Barr virus]
caacuacaagcagcua

SEQ ID NO: 3970199 - RNA, 21 nt, Human herpesvirus 4 [Epstein-Barr virus]
caagaacccccugcaggacac

SEQ ID NO: 3970200 - RNA, 12 nt, Human herpesvirus 4 [Epstein-Barr virus]
caagcagcaccu

SEQ ID NO: 3970201 - RNA, 13 nt, Human herpesvirus 4 [Epstein-Barr virus]
caagcagcuagag

SEQ ID NO: 3970202 - RNA, 20 nt, Human herpesvirus 4 [Epstein-Barr virus]
caagcagguauugcagcugg

SEQ ID NO: 3970203 - RNA, 20 nt, Human herpesvirus 4 [Epstein-Barr virus]
caagcuuaugcagcaccuca

SEQ ID NO: 3970204 - RNA, 21 nt, Human herpesvirus 4 [Epstein-Barr virus]
caaggaaacaaaaccacugac

SEQ ID NO: 3970205 - RNA, 15 nt, Human herpesvirus 4 [Epstein-Barr virus]
caaggacaacagcua

SEQ ID NO: 3970206 - RNA, 17 nt, Human herpesvirus 4 [Epstein-Barr virus]
caaggcagucuccaccu

SEQ ID NO: 3970207 - RNA, 22 nt, Human herpesvirus 4 [Epstein-Barr virus]
caagggaggagugcugcaggua

SEQ ID NO: 3970208 - RNA, 23 nt, Human herpesvirus 4 [Epstein-Barr virus]
caauuggcacucacccccgagga

SEQ ID NO: 3970209 - RNA, 12 nt, Human herpesvirus 4 [Epstein-Barr virus]
cacaacagccag

SEQ ID NO: 3970210 - RNA, 16 nt, Human herpesvirus 4 [Epstein-Barr virus]
cacaacagccagaauc

SEQ ID NO: 3970211 - RNA, 18 nt, Human herpesvirus 4 [Epstein-Barr virus]
cacaccaucccaauucac

SEQ ID NO: 3970212 - RNA, 19 nt, Human herpesvirus 4 [Epstein-Barr virus]
cacagaaacuacacggccu

SEQ ID NO: 3970213 - RNA, 16 nt, Human herpesvirus 4 [Epstein-Barr virus]
cacagaggaggcuggu

SEQ ID NO: 3970214 - RNA, 22 nt, Human herpesvirus 4 [Epstein-Barr virus]
cacagaggugauguagaggcgc

SEQ ID NO: 3970215 - RNA, 18 nt, Human herpesvirus 4 [Epstein-Barr virus]
cacagccugcaccagugg

SEQ ID NO: 3970216 - RNA, 13 nt, Human herpesvirus 4 [Epstein-Barr virus]
cacagcugcuggu

SEQ ID NO: 3970217 - RNA, 13 nt, Human herpesvirus 4 [Epstein-Barr virus]
cacaucucaggga

SEQ ID NO: 3970218 - RNA, 15 nt, Human herpesvirus 4 [Epstein-Barr virus]
cacaucuggcaccug

SEQ ID NO: 3970219 - RNA, 13 nt, Human herpesvirus 4 [Epstein-Barr virus]
cacauucggguga

SEQ ID NO: 3970220 - RNA, 14 nt, Human herpesvirus 4 [Epstein-Barr virus]
caccaacacaacca

SEQ ID NO: 3970221 - RNA, 19 nt, Human herpesvirus 4 [Epstein-Barr virus]
caccacccccaccaccucc

SEQ ID NO: 3970222 - RNA, 18 nt, Human herpesvirus 4 [Epstein-Barr virus]
caccacucccaccacccc

SEQ ID NO: 3970223 - RNA, 18 nt, Human herpesvirus 4 [Epstein-Barr virus]
caccagcuucgagagcca

SEQ ID NO: 3970224 - RNA, 18 nt, Human herpesvirus 4 [Epstein-Barr virus]
caccagggaggccuggga

SEQ ID NO: 3970225 - RNA, 14 nt, Human herpesvirus 4 [Epstein-Barr virus]
caccagggccaggc

SEQ ID NO: 3970226 - RNA, 18 nt, Human herpesvirus 4 [Epstein-Barr virus]
caccaucuggcagcuuuu

SEQ ID NO: 3970227 - RNA, 15 nt, Human herpesvirus 4 [Epstein-Barr virus]
cacccaccuaugcca

SEQ ID NO: 3970228 - RNA, 20 nt, Human herpesvirus 4 [Epstein-Barr virus]
cacccacugauaauacgccc

SEQ ID NO: 3970229 - RNA, 17 nt, Human herpesvirus 4 [Epstein-Barr virus]
caccccacggccaugcu

SEQ ID NO: 3970230 - RNA, 18 nt, Human herpesvirus 4 [Epstein-Barr virus]
cacccccuggagccagcg

SEQ ID NO: 3970231 - RNA, 17 nt, Human herpesvirus 4 [Epstein-Barr virus]
caccccuccuacacaca

SEQ ID NO: 3970232 - RNA, 15 nt, Human herpesvirus 4 [Epstein-Barr virus]
cacccgucccgggua

SEQ ID NO: 3970233 - RNA, 21 nt, Human herpesvirus 4 [Epstein-Barr virus]
cacccuggccgugcuggauga

SEQ ID NO: 3970234 - RNA, 17 nt, Human herpesvirus 4 [Epstein-Barr virus]
caccggagccaccacag

SEQ ID NO: 3970235 - RNA, 15 nt, Human herpesvirus 4 [Epstein-Barr virus]
caccggggaggccag

SEQ ID NO: 3970236 - RNA, 20 nt, Human herpesvirus 4 [Epstein-Barr virus]
caccgucagccacacaauca

SEQ ID NO: 3970237 - RNA, 15 nt, Human herpesvirus 4 [Epstein-Barr virus]
caccgugggaaaaua

SEQ ID NO: 3970238 - RNA, 17 nt, Human herpesvirus 4 [Epstein-Barr virus]
caccuagaaagagccau

SEQ ID NO: 3970239 - RNA, 17 nt, Human herpesvirus 4 [Epstein-Barr virus]
caccucaaccuggagac

SEQ ID NO: 3970240 - RNA, 22 nt, Human herpesvirus 4 [Epstein-Barr virus]
caccugucugacuuggccccug

SEQ ID NO: 3970241 - RNA, 17 nt, Human herpesvirus 4 [Epstein-Barr virus]
caccuugccggccaccu

SEQ ID NO: 3970242 - RNA, 22 nt, Human herpesvirus 4 [Epstein-Barr virus]
cuaucaggaccugggagggcca

SEQ ID NO: 3970243 - RNA, 12 nt, Human herpesvirus 4 [Epstein-Barr virus]
cuaugacaccua

SEQ ID NO: 3970244 - RNA, 17 nt, Human herpesvirus 4 [Epstein-Barr virus]
cuaugcaugagccacag

SEQ ID NO: 3970245 - RNA, 13 nt, Human herpesvirus 4 [Epstein-Barr virus]
cucacaggacaug

SEQ ID NO: 3970246 - RNA, 16 nt, Human herpesvirus 4 [Epstein-Barr virus]
cucaccguggcagaca

SEQ ID NO: 3970247 - RNA, 18 nt, Human herpesvirus 4 [Epstein-Barr virus]
cucacuucuacucuuggc

SEQ ID NO: 3970248 - RNA, 19 nt, Human herpesvirus 4 [Epstein-Barr virus]
cucagaauuucugcuagcu

SEQ ID NO: 3970249 - RNA, 17 nt, Human herpesvirus 4 [Epstein-Barr virus]
cucagagggggugccug

SEQ ID NO: 3970250 - RNA, 20 nt, Human herpesvirus 4 [Epstein-Barr virus]
cucagcuguucccagucucc

SEQ ID NO: 3970251 - RNA, 16 nt, Human herpesvirus 4 [Epstein-Barr virus]
cucaggaagcuggcca

SEQ ID NO: 3970252 - RNA, 23 nt, Human herpesvirus 4 [Epstein-Barr virus]
cucaggcacggucgccccuccga

SEQ ID NO: 3970253 - RNA, 14 nt, Human herpesvirus 4 [Epstein-Barr virus]
cucaggccgccgca

SEQ ID NO: 3970254 - RNA, 23 nt, Human herpesvirus 4 [Epstein-Barr virus]
cucagggccacggcgugccagag

SEQ ID NO: 3970255 - RNA, 16 nt, Human herpesvirus 4 [Epstein-Barr virus]
cucauaccuccacuua

SEQ ID NO: 3970256 - RNA, 16 nt, Human herpesvirus 4 [Epstein-Barr virus]
cucaucgcacgggggu

SEQ ID NO: 3970257 - RNA, 21 nt, Human herpesvirus 4 [Epstein-Barr virus]
cuccaacgaggaucccgcagg

SEQ ID NO: 3970258 - RNA, 20 nt, Human herpesvirus 4 [Epstein-Barr virus]
cuccaccagcuucucaaagg

SEQ ID NO: 3970259 - RNA, 17 nt, Human herpesvirus 4 [Epstein-Barr virus]
cuccagcucggccagca

SEQ ID NO: 3970260 - RNA, 14 nt, Human herpesvirus 4 [Epstein-Barr virus]
auggcggccuggca

SEQ ID NO: 3970261 - RNA, 21 nt, Human herpesvirus 4 [Epstein-Barr virus]
augggggaaugagggaaaagg

SEQ ID NO: 3970262 - RNA, 13 nt, Human herpesvirus 4 [Epstein-Barr virus]
auggguccucaua

SEQ ID NO: 3970263 - RNA, 12 nt, Human herpesvirus 4 [Epstein-Barr virus]
augggugcauuu

SEQ ID NO: 3970264 - RNA, 12 nt, Human herpesvirus 4 [Epstein-Barr virus]
auguacccaucc

SEQ ID NO: 3970265 - RNA, 20 nt, Human herpesvirus 4 [Epstein-Barr virus]
auguacccaucccggcccuc

SEQ ID NO: 3970266 - RNA, 21 nt, Human herpesvirus 4 [Epstein-Barr virus]
augucaaggcucugcacagga

SEQ ID NO: 3970267 - RNA, 13 nt, Human herpesvirus 4 [Epstein-Barr virus]
augucagcuccac

SEQ ID NO: 3970268 - RNA, 23 nt, Human herpesvirus 4 [Epstein-Barr virus]
auguccaaaaggucaaagaacaa

SEQ ID NO: 3970269 - RNA, 17 nt, Human herpesvirus 4 [Epstein-Barr virus]
augucggcuaaugccau

SEQ ID NO: 3970270 - RNA, 18 nt, Human herpesvirus 4 [Epstein-Barr virus]
augucugacgaggggcca

SEQ ID NO: 3970271 - RNA, 20 nt, Human herpesvirus 4 [Epstein-Barr virus]
auguuuggguuauugacauc

SEQ ID NO: 3970272 - RNA, 19 nt, Human herpesvirus 4 [Epstein-Barr virus]
auuaagagucccuccucac

SEQ ID NO: 3970273 - RNA, 17 nt, Human herpesvirus 4 [Epstein-Barr virus]
auuacggugcuggagau

SEQ ID NO: 3970274 - RNA, 16 nt, Human herpesvirus 4 [Epstein-Barr virus]
auuacuggcgugaauu

SEQ ID NO: 3970275 - RNA, 19 nt, Human herpesvirus 4 [Epstein-Barr virus]
auuagcacgguagccuugg

SEQ ID NO: 3970276 - RNA, 16 nt, Human herpesvirus 4 [Epstein-Barr virus]
auuauauuguaagaca

SEQ ID NO: 3970277 - RNA, 13 nt, Human herpesvirus 4 [Epstein-Barr virus]
auuccacccacug

SEQ ID NO: 3970278 - RNA, 13 nt, Human herpesvirus 4 [Epstein-Barr virus]
auuccccugccug

SEQ ID NO: 3970279 - RNA, 20 nt, Human herpesvirus 4 [Epstein-Barr virus]
auucccucgaaucccuacca

SEQ ID NO: 3970280 - RNA, 23 nt, Human herpesvirus 4 [Epstein-Barr virus]
auucuccugccugccucugcucu

SEQ ID NO: 3970281 - RNA, 21 nt, Human herpesvirus 4 [Epstein-Barr virus]
auugaaaccacgccugcuuca

SEQ ID NO: 3970282 - RNA, 21 nt, Human herpesvirus 4 [Epstein-Barr virus]
auuggacgucccuuuggagga

SEQ ID NO: 3970283 - RNA, 17 nt, Human herpesvirus 4 [Epstein-Barr virus]
auugggugaccacugag

SEQ ID NO: 3970284 - RNA, 14 nt, Human herpesvirus 4 [Epstein-Barr virus]
auuuacaaacacua

SEQ ID NO: 3970285 - RNA, 13 nt, Human herpesvirus 4 [Epstein-Barr virus]
auuucauccucag

SEQ ID NO: 3970286 - RNA, 17 nt, Human herpesvirus 4 [Epstein-Barr virus]
auuucugcuagcuucag

SEQ ID NO: 3970287 - RNA, 22 nt, Human herpesvirus 4 [Epstein-Barr virus]
auuugaggaggcacacaaaaug

SEQ ID NO: 3970288 - RNA, 14 nt, Human herpesvirus 4 [Epstein-Barr virus]
auuuugggccagga

SEQ ID NO: 3970289 - RNA, 17 nt, Human herpesvirus 4 [Epstein-Barr virus]
caaacagcagcagcagu

SEQ ID NO: 3970290 - RNA, 15 nt, Human herpesvirus 4 [Epstein-Barr virus]
caaacauaaaugccc

SEQ ID NO: 3970291 - RNA, 12 nt, Human herpesvirus 4 [Epstein-Barr virus]
caaacaugggcu

SEQ ID NO: 3970292 - RNA, 17 nt, Human herpesvirus 4 [Epstein-Barr virus]
caaacugacacacaggc

SEQ ID NO: 3970293 - RNA, 21 nt, Human herpesvirus 4 [Epstein-Barr virus]
caacagcgaccggcagauccc

SEQ ID NO: 3970294 - RNA, 22 nt, Human herpesvirus 4 [Epstein-Barr virus]
caaccaauguaucccaaauaaa

SEQ ID NO: 3970295 - RNA, 17 nt, Human herpesvirus 4 [Epstein-Barr virus]
caacccuaacacucuuu

SEQ ID NO: 3970296 - RNA, 12 nt, Human herpesvirus 4 [Epstein-Barr virus]
caacgccccugc

SEQ ID NO: 3970297 - RNA, 18 nt, Human herpesvirus 4 [Epstein-Barr virus]
caacguccgugagagccu

SEQ ID NO: 3970298 - RNA, 14 nt, Human herpesvirus 4 [Epstein-Barr virus]
caacugucacacca

SEQ ID NO: 3970299 - RNA, 14 nt, Human herpesvirus 4 [Epstein-Barr virus]
caagaguucucugg

SEQ ID NO: 3970300 - RNA, 17 nt, Human herpesvirus 4 [Epstein-Barr virus]
caagcaaacggccuggc

SEQ ID NO: 3970301 - RNA, 12 nt, Human herpesvirus 4 [Epstein-Barr virus]
caagcagcucac

SEQ ID NO: 3970302 - RNA, 15 nt, Human herpesvirus 4 [Epstein-Barr virus]
caagcuaccagaguc

SEQ ID NO: 3970303 - RNA, 19 nt, Human herpesvirus 4 [Epstein-Barr virus]
caaggauggaagagagggg

SEQ ID NO: 3970304 - RNA, 22 nt, Human herpesvirus 4 [Epstein-Barr virus]
caaggauggcacgggcagagga

SEQ ID NO: 3970305 - RNA, 18 nt, Human herpesvirus 4 [Epstein-Barr virus]
caaggcggcugcugagac

SEQ ID NO: 3970306 - RNA, 23 nt, Human herpesvirus 4 [Epstein-Barr virus]
caaggucuggaggacggucuggc

SEQ ID NO: 3970307 - RNA, 22 nt, Human herpesvirus 4 [Epstein-Barr virus]
caaggugucaauaauuucagug

SEQ ID NO: 3970308 - RNA, 16 nt, Human herpesvirus 4 [Epstein-Barr virus]
caagguugaagagcag

SEQ ID NO: 3970309 - RNA, 17 nt, Human herpesvirus 4 [Epstein-Barr virus]
caaguguuuccagacac

SEQ ID NO: 3970310 - RNA, 21 nt, Human herpesvirus 4 [Epstein-Barr virus]
caaguuuaagcaacugcugca

SEQ ID NO: 3970311 - RNA, 22 nt, Human herpesvirus 4 [Epstein-Barr virus]
caauaaaguugaugauauugaa

SEQ ID NO: 3970312 - RNA, 19 nt, Human herpesvirus 4 [Epstein-Barr virus]
caauaaauaaaaguacaga

SEQ ID NO: 3970313 - RNA, 19 nt, Human herpesvirus 4 [Epstein-Barr virus]
caauauccaucugcuucug

SEQ ID NO: 3970314 - RNA, 15 nt, Human herpesvirus 4 [Epstein-Barr virus]
caaucaccagccacc

SEQ ID NO: 3970315 - RNA, 15 nt, Human herpesvirus 4 [Epstein-Barr virus]
caaugagagggacuu

SEQ ID NO: 3970316 - RNA, 17 nt, Human herpesvirus 4 [Epstein-Barr virus]
caaugccaacuccccca

SEQ ID NO: 3970317 - RNA, 15 nt, Human herpesvirus 4 [Epstein-Barr virus]
caauggucgccaggg

SEQ ID NO: 3970318 - RNA, 16 nt, Human herpesvirus 4 [Epstein-Barr virus]
caauggucgccagggu

SEQ ID NO: 3970319 - RNA, 19 nt, Human herpesvirus 4 [Epstein-Barr virus]
caauuaggcuaaaagcagc

SEQ ID NO: 3970320 - RNA, 23 nt, Human herpesvirus 4 [Epstein-Barr virus]
cacaaaaugaggaacggugauua

SEQ ID NO: 3970321 - RNA, 22 nt, Human herpesvirus 4 [Epstein-Barr virus]
cacaaccacggugacauucacu

SEQ ID NO: 3970322 - RNA, 12 nt, Human herpesvirus 4 [Epstein-Barr virus]
cacaccauccca

SEQ ID NO: 3970323 - RNA, 15 nt, Human herpesvirus 4 [Epstein-Barr virus]
cacaccuuggcgggu

SEQ ID NO: 3970324 - RNA, 15 nt, Human herpesvirus 4 [Epstein-Barr virus]
cacacucccuccaga

SEQ ID NO: 3970325 - RNA, 16 nt, Human herpesvirus 4 [Epstein-Barr virus]
cacagaccagccccuc

SEQ ID NO: 3970326 - RNA, 15 nt, Human herpesvirus 4 [Epstein-Barr virus]
cacagcgccagcagg

SEQ ID NO: 3970327 - RNA, 23 nt, Human herpesvirus 4 [Epstein-Barr virus]
cacaggacaacggcauucccgug

SEQ ID NO: 3970328 - RNA, 15 nt, Human herpesvirus 4 [Epstein-Barr virus]
cacaggcauugcuaa

SEQ ID NO: 3970329 - RNA, 20 nt, Human herpesvirus 4 [Epstein-Barr virus]
cacauuggacacccacccug

SEQ ID NO: 3970330 - RNA, 12 nt, Human herpesvirus 4 [Epstein-Barr virus]
caccaccacccc

SEQ ID NO: 3970331 - RNA, 13 nt, Human herpesvirus 4 [Epstein-Barr virus]
caccagaucgccu

SEQ ID NO: 3970332 - RNA, 13 nt, Human herpesvirus 4 [Epstein-Barr virus]
caccagcuccagg

SEQ ID NO: 3970333 - RNA, 20 nt, Human herpesvirus 4 [Epstein-Barr virus]
caccagcuccagggacaggg

SEQ ID NO: 3970334 - RNA, 12 nt, Human herpesvirus 4 [Epstein-Barr virus]
caccauccacag

SEQ ID NO: 3970335 - RNA, 14 nt, Human herpesvirus 4 [Epstein-Barr virus]
cacccacuacaccc

SEQ ID NO: 3970336 - RNA, 18 nt, Human herpesvirus 4 [Epstein-Barr virus]
cacccacugauaauacgc

SEQ ID NO: 3970337 - RNA, 22 nt, Human herpesvirus 4 [Epstein-Barr virus]
cacccucggagaucaucccacu

SEQ ID NO: 3970338 - RNA, 15 nt, Human herpesvirus 4 [Epstein-Barr virus]
cacccuguacacccc

SEQ ID NO: 3970339 - RNA, 15 nt, Human herpesvirus 4 [Epstein-Barr virus]
caccgggaugagcug

SEQ ID NO: 3970340 - RNA, 20 nt, Human herpesvirus 4 [Epstein-Barr virus]
caccggggaggccagguagc

SEQ ID NO: 3970341 - RNA, 15 nt, Human herpesvirus 4 [Epstein-Barr virus]
caccgucagccacac

SEQ ID NO: 3970342 - RNA, 16 nt, Human herpesvirus 4 [Epstein-Barr virus]
caccgucagccacaca

SEQ ID NO: 3970343 - RNA, 15 nt, Human herpesvirus 4 [Epstein-Barr virus]
caccuagcccacucc

SEQ ID NO: 3970344 - RNA, 15 nt, Human herpesvirus 4 [Epstein-Barr virus]
caccugcacagaucu

SEQ ID NO: 3970345 - RNA, 21 nt, Human herpesvirus 4 [Epstein-Barr virus]
caccuguccuugucugcugcc

SEQ ID NO: 3970346 - RNA, 20 nt, Human herpesvirus 4 [Epstein-Barr virus]
cacgacuacgagggccucug

SEQ ID NO: 3970347 - RNA, 22 nt, Human herpesvirus 4 [Epstein-Barr virus]
cacgacuguuccuauaugcucu

SEQ ID NO: 3970348 - RNA, 21 nt, Human herpesvirus 4 [Epstein-Barr virus]
agacacgucguucaugagagg

SEQ ID NO: 3970349 - RNA, 11 nt, Human herpesvirus 4 [Epstein-Barr virus]
agaccaaggcc

SEQ ID NO: 3970350 - RNA, 14 nt, Human herpesvirus 4 [Epstein-Barr virus]
agaccaaggcccua

SEQ ID NO: 3970351 - RNA, 22 nt, Human herpesvirus 4 [Epstein-Barr virus]
agaccccggguugguggcacug

SEQ ID NO: 3970352 - RNA, 21 nt, Human herpesvirus 4 [Epstein-Barr virus]
agaccccugggcucucaggaa

SEQ ID NO: 3970353 - RNA, 16 nt, Human herpesvirus 4 [Epstein-Barr virus]
agaccucgaguccggg

SEQ ID NO: 3970354 - RNA, 21 nt, Human herpesvirus 4 [Epstein-Barr virus]
agacguguguggcuguagcca

SEQ ID NO: 3970355 - RNA, 14 nt, Human herpesvirus 4 [Epstein-Barr virus]
agacuccugccuga

SEQ ID NO: 3970356 - RNA, 23 nt, Human herpesvirus 4 [Epstein-Barr virus]
agacuucagguggucauguuucc

SEQ ID NO: 3970357 - RNA, 21 nt, Human herpesvirus 4 [Epstein-Barr virus]
agagaggcgggaauggccgcc

SEQ ID NO: 3970358 - RNA, 13 nt, Human herpesvirus 4 [Epstein-Barr virus]
agagcuccgccac

SEQ ID NO: 3970359 - RNA, 20 nt, Human herpesvirus 4 [Epstein-Barr virus]
agaggccguguuucucccac

SEQ ID NO: 3970360 - RNA, 22 nt, Human herpesvirus 4 [Epstein-Barr virus]
agaggcgggggguaugugcugc

SEQ ID NO: 3970361 - RNA, 13 nt, Human herpesvirus 4 [Epstein-Barr virus]
agagguuuugcua

SEQ ID NO: 3970362 - RNA, 17 nt, Human herpesvirus 4 [Epstein-Barr virus]
agaguacgugcagagga

SEQ ID NO: 3970363 - RNA, 20 nt, Human herpesvirus 4 [Epstein-Barr virus]
agauagggaccagaggacua

SEQ ID NO: 3970364 - RNA, 11 nt, Human herpesvirus 4 [Epstein-Barr virus]
agaucuucuca

SEQ ID NO: 3970365 - RNA, 20 nt, Human herpesvirus 4 [Epstein-Barr virus]
agaugagauagaggaccgga

SEQ ID NO: 3970366 - RNA, 16 nt, Human herpesvirus 4 [Epstein-Barr virus]
agcaacgcccagggac

SEQ ID NO: 3970367 - RNA, 20 nt, Human herpesvirus 4 [Epstein-Barr virus]
agcaagauccuucuggcacg

SEQ ID NO: 3970368 - RNA, 22 nt, Human herpesvirus 4 [Epstein-Barr virus]
agcacaagugauuaggagcagg

SEQ ID NO: 3970369 - RNA, 21 nt, Human herpesvirus 4 [Epstein-Barr virus]
agcaccggagccaccacagca

SEQ ID NO: 3970370 - RNA, 15 nt, Human herpesvirus 4 [Epstein-Barr virus]
agcacgguagccuug

SEQ ID NO: 3970371 - RNA, 16 nt, Human herpesvirus 4 [Epstein-Barr virus]
agcacuuugccagcaa

SEQ ID NO: 3970372 - RNA, 22 nt, Human herpesvirus 4 [Epstein-Barr virus]
agcagaugugcccaagccugga

SEQ ID NO: 3970373 - RNA, 20 nt, Human herpesvirus 4 [Epstein-Barr virus]
agcagcguccuggccccauu

SEQ ID NO: 3970374 - RNA, 14 nt, Human herpesvirus 4 [Epstein-Barr virus]
agcagcucaccuau

SEQ ID NO: 3970375 - RNA, 16 nt, Human herpesvirus 4 [Epstein-Barr virus]
agcagcucuggcacug

SEQ ID NO: 3970376 - RNA, 17 nt, Human herpesvirus 4 [Epstein-Barr virus]
agcagcuggauguacag

SEQ ID NO: 3970377 - RNA, 14 nt, Human herpesvirus 4 [Epstein-Barr virus]
agcaguagcuuggg

SEQ ID NO: 3970378 - RNA, 20 nt, Human herpesvirus 4 [Epstein-Barr virus]
agcauggccgccagaguucc

SEQ ID NO: 3970379 - RNA, 22 nt, Human herpesvirus 4 [Epstein-Barr virus]
agccacacccaccuaugccaau

SEQ ID NO: 3970380 - RNA, 12 nt, Human herpesvirus 4 [Epstein-Barr virus]
agccacauucau

SEQ ID NO: 3970381 - RNA, 17 nt, Human herpesvirus 4 [Epstein-Barr virus]
agccacuacggccacgu

SEQ ID NO: 3970382 - RNA, 22 nt, Human herpesvirus 4 [Epstein-Barr virus]
agccagggugaccuggcucagg

SEQ ID NO: 3970383 - RNA, 21 nt, Human herpesvirus 4 [Epstein-Barr virus]
agccagguguacgcccuggcg

SEQ ID NO: 3970384 - RNA, 23 nt, Human herpesvirus 4 [Epstein-Barr virus]
agcccauucucguccaucucgau

SEQ ID NO: 3970385 - RNA, 14 nt, Human herpesvirus 4 [Epstein-Barr virus]
agccccacucuugc

SEQ ID NO: 3970386 - RNA, 17 nt, Human herpesvirus 4 [Epstein-Barr virus]
agccccauggugugaga

SEQ ID NO: 3970387 - RNA, 18 nt, Human herpesvirus 4 [Epstein-Barr virus]
agcccccucccgccccug

SEQ ID NO: 3970388 - RNA, 18 nt, Human herpesvirus 4 [Epstein-Barr virus]
agccccuuuugccccccu

SEQ ID NO: 3970389 - RNA, 17 nt, Human herpesvirus 4 [Epstein-Barr virus]
agcccggccgaggccug

SEQ ID NO: 3970390 - RNA, 21 nt, Human herpesvirus 4 [Epstein-Barr virus]
agcccuccucagaaaacucug

SEQ ID NO: 3970391 - RNA, 17 nt, Human herpesvirus 4 [Epstein-Barr virus]
agccggcggccucggag

SEQ ID NO: 3970392 - RNA, 16 nt, Human herpesvirus 4 [Epstein-Barr virus]
agccuccaacaggugc

SEQ ID NO: 3970393 - RNA, 13 nt, Human herpesvirus 4 [Epstein-Barr virus]
agccugaggaaca

SEQ ID NO: 3970394 - RNA, 15 nt, Human herpesvirus 4 [Epstein-Barr virus]
agcgagacaguacuc

SEQ ID NO: 3970395 - RNA, 18 nt, Human herpesvirus 4 [Epstein-Barr virus]
agcgcacgugacagauuu

SEQ ID NO: 3970396 - RNA, 19 nt, Human herpesvirus 4 [Epstein-Barr virus]
agcgcucuggucgcccccu

SEQ ID NO: 3970397 - RNA, 21 nt, Human herpesvirus 4 [Epstein-Barr virus]
agcgcucuggucgcccccucu

SEQ ID NO: 3970398 - RNA, 23 nt, Human herpesvirus 4 [Epstein-Barr virus]
agcggcccagcagauccagggcc

SEQ ID NO: 3970399 - RNA, 13 nt, Human herpesvirus 4 [Epstein-Barr virus]
agcggcugugagc

SEQ ID NO: 3970400 - RNA, 13 nt, Human herpesvirus 4 [Epstein-Barr virus]
agcgggugcagua

SEQ ID NO: 3970401 - RNA, 22 nt, Human herpesvirus 4 [Epstein-Barr virus]
agcuacacucuggggucucagg

SEQ ID NO: 3970402 - RNA, 16 nt, Human herpesvirus 4 [Epstein-Barr virus]
agcuagugcagggggc

SEQ ID NO: 3970403 - RNA, 12 nt, Human herpesvirus 4 [Epstein-Barr virus]
agcuccagggac

SEQ ID NO: 3970404 - RNA, 15 nt, Human herpesvirus 4 [Epstein-Barr virus]
agcuccagggccagc

SEQ ID NO: 3970405 - RNA, 23 nt, Human herpesvirus 4 [Epstein-Barr virus]
agcuccgcgcucaacaccuucuc

SEQ ID NO: 3970406 - RNA, 14 nt, Human herpesvirus 4 [Epstein-Barr virus]
agcuccggcugccc

SEQ ID NO: 3970407 - RNA, 14 nt, Human herpesvirus 4 [Epstein-Barr virus]
agcuccucuccaaa

SEQ ID NO: 3970408 - RNA, 20 nt, Human herpesvirus 4 [Epstein-Barr virus]
agcucgcccacacagcgcca

SEQ ID NO: 3970409 - RNA, 16 nt, Human herpesvirus 4 [Epstein-Barr virus]
agcucggccagcaggc

SEQ ID NO: 3970410 - RNA, 17 nt, Human herpesvirus 4 [Epstein-Barr virus]
agcucggccagcaggcc

SEQ ID NO: 3970411 - RNA, 13 nt, Human herpesvirus 4 [Epstein-Barr virus]
agcucuggcacug

SEQ ID NO: 3970412 - RNA, 11 nt, Human herpesvirus 4 [Epstein-Barr virus]
agcugcugguu

SEQ ID NO: 3970413 - RNA, 15 nt, Human herpesvirus 4 [Epstein-Barr virus]
aggaaacugcugaca

SEQ ID NO: 3970414 - RNA, 23 nt, Human herpesvirus 4 [Epstein-Barr virus]
aggaacuccgcccaggucuugcc

SEQ ID NO: 3970415 - RNA, 20 nt, Human herpesvirus 4 [Epstein-Barr virus]
aggacacgcuggucuugaau

SEQ ID NO: 3970416 - RNA, 12 nt, Human herpesvirus 4 [Epstein-Barr virus]
aggacauguuug

SEQ ID NO: 3970417 - RNA, 16 nt, Human herpesvirus 4 [Epstein-Barr virus]
aggacgcugcugucca

SEQ ID NO: 3970418 - RNA, 22 nt, Human herpesvirus 4 [Epstein-Barr virus]
aggagaaaaucugcuucucccc

SEQ ID NO: 3970419 - RNA, 18 nt, Human herpesvirus 4 [Epstein-Barr virus]
aggagacuggcaacuccu

SEQ ID NO: 3970420 - RNA, 16 nt, Human herpesvirus 4 [Epstein-Barr virus]
aggagagcuggauggu

SEQ ID NO: 3970421 - RNA, 18 nt, Human herpesvirus 4 [Epstein-Barr virus]
aggagcaggaggaggggc

SEQ ID NO: 3970422 - RNA, 13 nt, Human herpesvirus 4 [Epstein-Barr virus]
aggagcaggaggg

SEQ ID NO: 3970423 - RNA, 15 nt, Human herpesvirus 4 [Epstein-Barr virus]
aggagcuccgugagc

SEQ ID NO: 3970424 - RNA, 17 nt, Human herpesvirus 4 [Epstein-Barr virus]
aggaggcggaagaccag

SEQ ID NO: 3970425 - RNA, 19 nt, Human herpesvirus 4 [Epstein-Barr virus]
aggaggggcaggagcagga

SEQ ID NO: 3970426 - RNA, 15 nt, Human herpesvirus 4 [Epstein-Barr virus]
aggagugcugcaggu

SEQ ID NO: 3970427 - RNA, 15 nt, Human herpesvirus 4 [Epstein-Barr virus]
aggauaaucaggcga

SEQ ID NO: 3970428 - RNA, 13 nt, Human herpesvirus 4 [Epstein-Barr virus]
aggaugagaccag

SEQ ID NO: 3970429 - RNA, 20 nt, Human herpesvirus 4 [Epstein-Barr virus]
aggcaauggccaccgcagag

SEQ ID NO: 3970430 - RNA, 17 nt, Human herpesvirus 4 [Epstein-Barr virus]
aggcacggucgccccuc

SEQ ID NO: 3970431 - RNA, 21 nt, Human herpesvirus 4 [Epstein-Barr virus]
aggcacggucgccccuccgag

SEQ ID NO: 3970432 - RNA, 17 nt, Human herpesvirus 4 [Epstein-Barr virus]
aggcagaggaaggccac

SEQ ID NO: 3970433 - RNA, 16 nt, Human herpesvirus 4 [Epstein-Barr virus]
aggcaguagaggacac

SEQ ID NO: 3970434 - RNA, 18 nt, Human herpesvirus 4 [Epstein-Barr virus]
aggccaaauggagacugc

SEQ ID NO: 3970435 - RNA, 16 nt, Human herpesvirus 4 [Epstein-Barr virus]
aggccaccgucuaccc

SEQ ID NO: 3970436 - RNA, 17 nt, Human herpesvirus 4 [Epstein-Barr virus]
aggccaccguggcccgc

SEQ ID NO: 3970437 - RNA, 22 nt, Human herpesvirus 4 [Epstein-Barr virus]
aggccaugcgcgcccugucacc

SEQ ID NO: 3970438 - RNA, 18 nt, Human herpesvirus 4 [Epstein-Barr virus]
aggcccuaauucagccac

SEQ ID NO: 3970439 - RNA, 22 nt, Human herpesvirus 4 [Epstein-Barr virus]
aggccgccaugcucagggccac

SEQ ID NO: 3970440 - RNA, 16 nt, Human herpesvirus 4 [Epstein-Barr virus]
aggcgacgcuccuggg

SEQ ID NO: 3970441 - RNA, 22 nt, Human herpesvirus 4 [Epstein-Barr virus]
aggcucggcccuccgcauccua

SEQ ID NO: 3970442 - RNA, 13 nt, Human herpesvirus 4 [Epstein-Barr virus]
aggcugagaacug

SEQ ID NO: 3970443 - RNA, 21 nt, Human herpesvirus 4 [Epstein-Barr virus]
agggcagacugcacaggauga

SEQ ID NO: 3970444 - RNA, 15 nt, Human herpesvirus 4 [Epstein-Barr virus]
agggcagcgaagaac

SEQ ID NO: 3970445 - RNA, 12 nt, Human herpesvirus 4 [Epstein-Barr virus]
agggccaagaca

SEQ ID NO: 3970446 - RNA, 14 nt, Human herpesvirus 4 [Epstein-Barr virus]
agggcccuggucag

SEQ ID NO: 3970447 - RNA, 14 nt, Human herpesvirus 4 [Epstein-Barr virus]
agggcgccaucuag

SEQ ID NO: 3970448 - RNA, 15 nt, Human herpesvirus 4 [Epstein-Barr virus]
aggggcaggagcagg

SEQ ID NO: 3970449 - RNA, 21 nt, Human herpesvirus 4 [Epstein-Barr virus]
aggggcaggagcaggaggagg

SEQ ID NO: 3970450 - RNA, 14 nt, Human herpesvirus 4 [Epstein-Barr virus]
aggggcgagcagcg

SEQ ID NO: 3970451 - RNA, 23 nt, Human herpesvirus 4 [Epstein-Barr virus]
aggggcgagcagcgcggcagagg

SEQ ID NO: 3970452 - RNA, 20 nt, Human herpesvirus 4 [Epstein-Barr virus]
aggggcuuguucuuggcgga

SEQ ID NO: 3970453 - RNA, 18 nt, Human herpesvirus 4 [Epstein-Barr virus]
agggggccuggugccaga

SEQ ID NO: 3970454 - RNA, 15 nt, Human herpesvirus 4 [Epstein-Barr virus]
aggggggaccuuaac

SEQ ID NO: 3970455 - RNA, 15 nt, Human herpesvirus 4 [Epstein-Barr virus]
agggugaggcccagc

SEQ ID NO: 3970456 - RNA, 17 nt, Human herpesvirus 4 [Epstein-Barr virus]
agggugaggcccagccc

SEQ ID NO: 3970457 - RNA, 21 nt, Human herpesvirus 4 [Epstein-Barr virus]
aggguggacagcagcguccug

SEQ ID NO: 3970458 - RNA, 17 nt, Human herpesvirus 4 [Epstein-Barr virus]
aggucgaccaccucaac

SEQ ID NO: 3970459 - RNA, 19 nt, Human herpesvirus 4 [Epstein-Barr virus]
aggucgacccuccugucac

SEQ ID NO: 3970460 - RNA, 17 nt, Human herpesvirus 4 [Epstein-Barr virus]
aggugauguagaggcgc

SEQ ID NO: 3970461 - RNA, 16 nt, Human herpesvirus 4 [Epstein-Barr virus]
agguggcugcugccaa

SEQ ID NO: 3970462 - RNA, 20 nt, Human herpesvirus 4 [Epstein-Barr virus]
aggugucaauaauuucagug

SEQ ID NO: 3970463 - RNA, 18 nt, Human herpesvirus 4 [Epstein-Barr virus]
agguguuguguccuguau

SEQ ID NO: 3970464 - RNA, 17 nt, Human herpesvirus 4 [Epstein-Barr virus]
aguaccguugugaccgc

SEQ ID NO: 3970465 - RNA, 18 nt, Human herpesvirus 4 [Epstein-Barr virus]
aguacuagcauggagagg

SEQ ID NO: 3970466 - RNA, 21 nt, Human herpesvirus 4 [Epstein-Barr virus]
aguacugcagugggccucucu

SEQ ID NO: 3970467 - RNA, 18 nt, Human herpesvirus 4 [Epstein-Barr virus]
aguagcacugguggugga

SEQ ID NO: 3970468 - RNA, 14 nt, Human herpesvirus 4 [Epstein-Barr virus]
agucaccugcacag

SEQ ID NO: 3970469 - RNA, 23 nt, Human herpesvirus 4 [Epstein-Barr virus]
aguccugucucuuuguguucuug

SEQ ID NO: 3970470 - RNA, 19 nt, Human herpesvirus 4 [Epstein-Barr virus]
agucuacucgaccagcacg

SEQ ID NO: 3970471 - RNA, 17 nt, Human herpesvirus 4 [Epstein-Barr virus]
agugccaagagcugccu

SEQ ID NO: 3970472 - RNA, 19 nt, Human herpesvirus 4 [Epstein-Barr virus]
agugccaagagcugccucc

SEQ ID NO: 3970473 - RNA, 23 nt, Human herpesvirus 4 [Epstein-Barr virus]
aguggaccucaaagaagaggggg

SEQ ID NO: 3970474 - RNA, 22 nt, Human herpesvirus 4 [Epstein-Barr virus]
aguggaugcaucuaagguccau

SEQ ID NO: 3970475 - RNA, 12 nt, Human herpesvirus 4 [Epstein-Barr virus]
aguggcggugga

SEQ ID NO: 3970476 - RNA, 15 nt, Human herpesvirus 4 [Epstein-Barr virus]
agugguucuccugau

SEQ ID NO: 3970477 - RNA, 22 nt, Human herpesvirus 4 [Epstein-Barr virus]
aguugguccaggguccaggaga

SEQ ID NO: 3970478 - RNA, 15 nt, Human herpesvirus 4 [Epstein-Barr virus]
auaaaagaggccggg

SEQ ID NO: 3970479 - RNA, 22 nt, Human herpesvirus 4 [Epstein-Barr virus]
auaaagcuguccuucugucaca

SEQ ID NO: 3970480 - RNA, 15 nt, Human herpesvirus 4 [Epstein-Barr virus]
auaagaaacacgcug

SEQ ID NO: 3970481 - RNA, 20 nt, Human herpesvirus 4 [Epstein-Barr virus]
auaauggugccugagggagg

SEQ ID NO: 3970482 - RNA, 14 nt, Human herpesvirus 4 [Epstein-Barr virus]
auaccugcacggcc

SEQ ID NO: 3970483 - RNA, 17 nt, Human herpesvirus 4 [Epstein-Barr virus]
auaccuugggcaucaug

SEQ ID NO: 3970484 - RNA, 16 nt, Human herpesvirus 4 [Epstein-Barr virus]
auacucaucugugaga

SEQ ID NO: 3970485 - RNA, 18 nt, Human herpesvirus 4 [Epstein-Barr virus]
auagaggggagcagaggu

SEQ ID NO: 3970486 - RNA, 18 nt, Human herpesvirus 4 [Epstein-Barr virus]
auagcagaagacuccugc

SEQ ID NO: 3970487 - RNA, 14 nt, Human herpesvirus 4 [Epstein-Barr virus]
auagcauggccgcc

SEQ ID NO: 3970488 - RNA, 23 nt, Human herpesvirus 4 [Epstein-Barr virus]
auagcucugcacaggcuuggaaa

SEQ ID NO: 3970489 - RNA, 20 nt, Human herpesvirus 4 [Epstein-Barr virus]
auaugcucucgcacucuugu

SEQ ID NO: 3970490 - RNA, 21 nt, Human herpesvirus 4 [Epstein-Barr virus]
auauggcuauacacaggagcc

SEQ ID NO: 3970491 - RNA, 21 nt, Human herpesvirus 4 [Epstein-Barr virus]
aucaaccugauucccccugcu

SEQ ID NO: 3970492 - RNA, 18 nt, Human herpesvirus 4 [Epstein-Barr virus]
aucaaccuguauaaugac

SEQ ID NO: 3970493 - RNA, 18 nt, Human herpesvirus 4 [Epstein-Barr virus]
aucacaucaagcagaaag

SEQ ID NO: 3970494 - RNA, 22 nt, Human herpesvirus 4 [Epstein-Barr virus]
aucccaguuguuauucccaccu

SEQ ID NO: 3970495 - RNA, 12 nt, Human herpesvirus 4 [Epstein-Barr virus]
auccccagccca

SEQ ID NO: 3970496 - RNA, 18 nt, Human herpesvirus 4 [Epstein-Barr virus]
aucccugucucccaccca

SEQ ID NO: 3970497 - RNA, 17 nt, Human herpesvirus 4 [Epstein-Barr virus]
auccgccaggaccugga

SEQ ID NO: 3970498 - RNA, 21 nt, Human herpesvirus 4 [Epstein-Barr virus]
auccuagagggacagcugacg

SEQ ID NO: 3970499 - RNA, 12 nt, Human herpesvirus 4 [Epstein-Barr virus]
auccuggccccc

SEQ ID NO: 3970500 - RNA, 20 nt, Human herpesvirus 4 [Epstein-Barr virus]
aucgggcuuuguugggucug

SEQ ID NO: 3970501 - RNA, 22 nt, Human herpesvirus 4 [Epstein-Barr virus]
aucggguggcuuccagaaaaug

SEQ ID NO: 3970502 - RNA, 17 nt, Human herpesvirus 4 [Epstein-Barr virus]
aucuaguaugaaggcug

SEQ ID NO: 3970503 - RNA, 12 nt, Human herpesvirus 4 [Epstein-Barr virus]
aucuccuaggcu

SEQ ID NO: 3970504 - RNA, 19 nt, Human herpesvirus 4 [Epstein-Barr virus]
aucuguugacgguguaacu

SEQ ID NO: 3970505 - RNA, 18 nt, Human herpesvirus 4 [Epstein-Barr virus]
aucuuaccccuggcuucc

SEQ ID NO: 3970506 - RNA, 21 nt, Human herpesvirus 4 [Epstein-Barr virus]
aucuuccugucggcucucuuu

SEQ ID NO: 3970507 - RNA, 15 nt, Human herpesvirus 4 [Epstein-Barr virus]
augaacccuggggca

SEQ ID NO: 3970508 - RNA, 14 nt, Human herpesvirus 4 [Epstein-Barr virus]
augacgcugcugcu

SEQ ID NO: 3970509 - RNA, 18 nt, Human herpesvirus 4 [Epstein-Barr virus]
augacgcugcugcuacug

SEQ ID NO: 3970510 - RNA, 13 nt, Human herpesvirus 4 [Epstein-Barr virus]
augaggaaggggc

SEQ ID NO: 3970511 - RNA, 14 nt, Human herpesvirus 4 [Epstein-Barr virus]
augauauugaauuc

SEQ ID NO: 3970512 - RNA, 13 nt, Human herpesvirus 4 [Epstein-Barr virus]
augcaaugcccac

SEQ ID NO: 3970513 - RNA, 14 nt, Human herpesvirus 4 [Epstein-Barr virus]
augcacgccaacag

SEQ ID NO: 3970514 - RNA, 16 nt, Human herpesvirus 4 [Epstein-Barr virus]
augcaggccuggacag

SEQ ID NO: 3970515 - RNA, 21 nt, Human herpesvirus 4 [Epstein-Barr virus]
augcauuuccugcccucccac

SEQ ID NO: 3970516 - RNA, 19 nt, Human herpesvirus 4 [Epstein-Barr virus]
augccaagagccccuccau

SEQ ID NO: 3970517 - RNA, 17 nt, Human herpesvirus 4 [Epstein-Barr virus]
augcuugugcuccugau

SEQ ID NO: 3970518 - RNA, 20 nt, Human herpesvirus 4 [Epstein-Barr virus]
auggaagagaggggcaggga

SEQ ID NO: 3970519 - RNA, 15 nt, Human herpesvirus 4 [Epstein-Barr virus]
auggcaaagguccca

SEQ ID NO: 3970520 - RNA, 21 nt, Human herpesvirus 4 [Epstein-Barr virus]
auggcauaaugggagggagcc

SEQ ID NO: 3970521 - RNA, 19 nt, Human herpesvirus 4 [Epstein-Barr virus]
auggcccugaucugggaga

SEQ ID NO: 3970522 - RNA, 13 nt, Human herpesvirus 4 [Epstein-Barr virus]
auggccugggccc

SEQ ID NO: 3970523 - RNA, 14 nt, Human herpesvirus 4 [Epstein-Barr virus]
auggcgaccgucac

SEQ ID NO: 3970524 - RNA, 21 nt, Human herpesvirus 4 [Epstein-Barr virus]
aggaacggugauuaggcacug

SEQ ID NO: 3970525 - RNA, 17 nt, Human herpesvirus 4 [Epstein-Barr virus]
aggacaacagcuagcag

SEQ ID NO: 3970526 - RNA, 19 nt, Human herpesvirus 4 [Epstein-Barr virus]
aggacacccaccaccaggc

SEQ ID NO: 3970527 - RNA, 16 nt, Human herpesvirus 4 [Epstein-Barr virus]
aggacgauagcccagg

SEQ ID NO: 3970528 - RNA, 20 nt, Human herpesvirus 4 [Epstein-Barr virus]
aggagaagagaggcuucccg

SEQ ID NO: 3970529 - RNA, 14 nt, Human herpesvirus 4 [Epstein-Barr virus]
aggagaaggagccu

SEQ ID NO: 3970530 - RNA, 19 nt, Human herpesvirus 4 [Epstein-Barr virus]
aggagauccgccaggaccu

SEQ ID NO: 3970531 - RNA, 16 nt, Human herpesvirus 4 [Epstein-Barr virus]
aggauaaucugggcag

SEQ ID NO: 3970532 - RNA, 20 nt, Human herpesvirus 4 [Epstein-Barr virus]
aggauauuaggcaaggguga

SEQ ID NO: 3970533 - RNA, 18 nt, Human herpesvirus 4 [Epstein-Barr virus]
aggauggaagagaggggc

SEQ ID NO: 3970534 - RNA, 15 nt, Human herpesvirus 4 [Epstein-Barr virus]
aggcagccuugcgug

SEQ ID NO: 3970535 - RNA, 20 nt, Human herpesvirus 4 [Epstein-Barr virus]
aggccauacgucuagccaca

SEQ ID NO: 3970536 - RNA, 18 nt, Human herpesvirus 4 [Epstein-Barr virus]
aggccaugcgcgcccugu

SEQ ID NO: 3970537 - RNA, 16 nt, Human herpesvirus 4 [Epstein-Barr virus]
aggcccagcccccucu

SEQ ID NO: 3970538 - RNA, 20 nt, Human herpesvirus 4 [Epstein-Barr virus]
aggccccccgcaccagggcc

SEQ ID NO: 3970539 - RNA, 21 nt, Human herpesvirus 4 [Epstein-Barr virus]
aggcccuaauucagccaccuc

SEQ ID NO: 3970540 - RNA, 16 nt, Human herpesvirus 4 [Epstein-Barr virus]
aggccgcugccaggcc

SEQ ID NO: 3970541 - RNA, 18 nt, Human herpesvirus 4 [Epstein-Barr virus]
aggccgggagaggcagcc

SEQ ID NO: 3970542 - RNA, 16 nt, Human herpesvirus 4 [Epstein-Barr virus]
aggccgguuuugcagu

SEQ ID NO: 3970543 - RNA, 16 nt, Human herpesvirus 4 [Epstein-Barr virus]
aggcuccuggaucugg

SEQ ID NO: 3970544 - RNA, 20 nt, Human herpesvirus 4 [Epstein-Barr virus]
aggcuccuggaucuggggcu

SEQ ID NO: 3970545 - RNA, 23 nt, Human herpesvirus 4 [Epstein-Barr virus]
aggcuguugacaugagcauggaa

SEQ ID NO: 3970546 - RNA, 23 nt, Human herpesvirus 4 [Epstein-Barr virus]
aggcuugccugacugacucuccc

SEQ ID NO: 3970547 - RNA, 17 nt, Human herpesvirus 4 [Epstein-Barr virus]
aggcuuucuaugccuga

SEQ ID NO: 3970548 - RNA, 16 nt, Human herpesvirus 4 [Epstein-Barr virus]
agggaaaggaaggggg

SEQ ID NO: 3970549 - RNA, 17 nt, Human herpesvirus 4 [Epstein-Barr virus]
agggaaaggaagggggc

SEQ ID NO: 3970550 - RNA, 23 nt, Human herpesvirus 4 [Epstein-Barr virus]
agggaagagggaaaagagacugc

SEQ ID NO: 3970551 - RNA, 18 nt, Human herpesvirus 4 [Epstein-Barr virus]
agggaagcguucuucacu

SEQ ID NO: 3970552 - RNA, 21 nt, Human herpesvirus 4 [Epstein-Barr virus]
agggagacacaucuggaccag

SEQ ID NO: 3970553 - RNA, 22 nt, Human herpesvirus 4 [Epstein-Barr virus]
agggagacacaucuggaccaga

SEQ ID NO: 3970554 - RNA, 11 nt, Human herpesvirus 4 [Epstein-Barr virus]
agggaggagac

SEQ ID NO: 3970555 - RNA, 21 nt, Human herpesvirus 4 [Epstein-Barr virus]
agggaguguuccacaguaaug

SEQ ID NO: 3970556 - RNA, 21 nt, Human herpesvirus 4 [Epstein-Barr virus]
agggcagacaccaccugcucg

SEQ ID NO: 3970557 - RNA, 16 nt, Human herpesvirus 4 [Epstein-Barr virus]
agggcagacugcacag

SEQ ID NO: 3970558 - RNA, 18 nt, Human herpesvirus 4 [Epstein-Barr virus]
agggccacggcgugccag

SEQ ID NO: 3970559 - RNA, 17 nt, Human herpesvirus 4 [Epstein-Barr virus]
agggccuuccagagcuc

SEQ ID NO: 3970560 - RNA, 15 nt, Human herpesvirus 4 [Epstein-Barr virus]
agguaaucucuggua

SEQ ID NO: 3970561 - RNA, 19 nt, Human herpesvirus 4 [Epstein-Barr virus]
agguacuaacacgcaauaa

SEQ ID NO: 3970562 - RNA, 15 nt, Human herpesvirus 4 [Epstein-Barr virus]
agguagacgaggcac

SEQ ID NO: 3970563 - RNA, 13 nt, Human herpesvirus 4 [Epstein-Barr virus]
aggucuaugggga

SEQ ID NO: 3970564 - RNA, 22 nt, Human herpesvirus 4 [Epstein-Barr virus]
aggucugcgaugaggcgguggg

SEQ ID NO: 3970565 - RNA, 17 nt, Human herpesvirus 4 [Epstein-Barr virus]
aggucuucucugacaaa

SEQ ID NO: 3970566 - RNA, 17 nt, Human herpesvirus 4 [Epstein-Barr virus]
aggugcaccagcuccag

SEQ ID NO: 3970567 - RNA, 15 nt, Human herpesvirus 4 [Epstein-Barr virus]
agguggcugcugcca

SEQ ID NO: 3970568 - RNA, 17 nt, Human herpesvirus 4 [Epstein-Barr virus]
agguggcugcugccaaa

SEQ ID NO: 3970569 - RNA, 22 nt, Human herpesvirus 4 [Epstein-Barr virus]
aggugggacaaaauggggucug

SEQ ID NO: 3970570 - RNA, 13 nt, Human herpesvirus 4 [Epstein-Barr virus]
agguugggccacg

SEQ ID NO: 3970571 - RNA, 14 nt, Human herpesvirus 4 [Epstein-Barr virus]
aguacagacuuuga

SEQ ID NO: 3970572 - RNA, 19 nt, Human herpesvirus 4 [Epstein-Barr virus]
aguaccagcccuuuuucca

SEQ ID NO: 3970573 - RNA, 13 nt, Human herpesvirus 4 [Epstein-Barr virus]
aguaccagcuggu

SEQ ID NO: 3970574 - RNA, 16 nt, Human herpesvirus 4 [Epstein-Barr virus]
aguagcccuuggaacu

SEQ ID NO: 3970575 - RNA, 13 nt, Human herpesvirus 4 [Epstein-Barr virus]
agucaccugcaca

SEQ ID NO: 3970576 - RNA, 19 nt, Human herpesvirus 4 [Epstein-Barr virus]
aguccagggcccuggucag

SEQ ID NO: 3970577 - RNA, 14 nt, Human herpesvirus 4 [Epstein-Barr virus]
agucuccgggucag

SEQ ID NO: 3970578 - RNA, 13 nt, Human herpesvirus 4 [Epstein-Barr virus]
agugaccagucac

SEQ ID NO: 3970579 - RNA, 18 nt, Human herpesvirus 4 [Epstein-Barr virus]
agugcaacaaucuggacu

SEQ ID NO: 3970580 - RNA, 12 nt, Human herpesvirus 4 [Epstein-Barr virus]
agugcagggggc

SEQ ID NO: 3970581 - RNA, 14 nt, Human herpesvirus 4 [Epstein-Barr virus]
agugccucugggug

SEQ ID NO: 3970582 - RNA, 17 nt, Human herpesvirus 4 [Epstein-Barr virus]
agugcuaugaccaugcc

SEQ ID NO: 3970583 - RNA, 21 nt, Human herpesvirus 4 [Epstein-Barr virus]
aguggcagaaucaccagagcc

SEQ ID NO: 3970584 - RNA, 12 nt, Human herpesvirus 4 [Epstein-Barr virus]
aguuaccuucuu

SEQ ID NO: 3970585 - RNA, 17 nt, Human herpesvirus 4 [Epstein-Barr virus]
aguuccaauagaggagc

SEQ ID NO: 3970586 - RNA, 19 nt, Human herpesvirus 4 [Epstein-Barr virus]
aguuggcaucuuccuccuu

SEQ ID NO: 3970587 - RNA, 16 nt, Human herpesvirus 4 [Epstein-Barr virus]
aguugguccagggucc

SEQ ID NO: 3970588 - RNA, 21 nt, Human herpesvirus 4 [Epstein-Barr virus]
aguugguccaggguccaggag

SEQ ID NO: 3970589 - RNA, 15 nt, Human herpesvirus 4 [Epstein-Barr virus]
aguuuuaacaccuga

SEQ ID NO: 3970590 - RNA, 22 nt, Human herpesvirus 4 [Epstein-Barr virus]
auaaauuaagagucccuccuca

SEQ ID NO: 3970591 - RNA, 19 nt, Human herpesvirus 4 [Epstein-Barr virus]
auaauacgcccgacaauaa

SEQ ID NO: 3970592 - RNA, 17 nt, Human herpesvirus 4 [Epstein-Barr virus]
auaaugucuucaauaga

SEQ ID NO: 3970593 - RNA, 20 nt, Human herpesvirus 4 [Epstein-Barr virus]
auacucaucugugagacaag

SEQ ID NO: 3970594 - RNA, 18 nt, Human herpesvirus 4 [Epstein-Barr virus]
auaugguuccccccaucu

SEQ ID NO: 3970595 - RNA, 17 nt, Human herpesvirus 4 [Epstein-Barr virus]
aucaacuucagcuccag

SEQ ID NO: 3970596 - RNA, 23 nt, Human herpesvirus 4 [Epstein-Barr virus]
aucaaggaaacaaaaccacugac

SEQ ID NO: 3970597 - RNA, 17 nt, Human herpesvirus 4 [Epstein-Barr virus]
aucacagaggaggcugg

SEQ ID NO: 3970598 - RNA, 15 nt, Human herpesvirus 4 [Epstein-Barr virus]
aucaccagagcccag

SEQ ID NO: 3970599 - RNA, 16 nt, Human herpesvirus 4 [Epstein-Barr virus]
aucagacggggaggug

SEQ ID NO: 3970600 - RNA, 12 nt, Human herpesvirus 4 [Epstein-Barr virus]
aucaucugaaaa

SEQ ID NO: 3970601 - RNA, 11 nt, Human herpesvirus 4 [Epstein-Barr virus]
auccagggccc

SEQ ID NO: 3970602 - RNA, 21 nt, Human herpesvirus 4 [Epstein-Barr virus]
auccaucugcuucuggcucuu

SEQ ID NO: 3970603 - RNA, 23 nt, Human herpesvirus 4 [Epstein-Barr virus]
aucccaguuguuauucccaccuc

SEQ ID NO: 3970604 - RNA, 14 nt, Human herpesvirus 4 [Epstein-Barr virus]
aucccauaccuaca

SEQ ID NO: 3970605 - RNA, 13 nt, Human herpesvirus 4 [Epstein-Barr virus]
auccuggccccca

SEQ ID NO: 3970606 - RNA, 13 nt, Human herpesvirus 4 [Epstein-Barr virus]
aucgccugccacu

SEQ ID NO: 3970607 - RNA, 15 nt, Human herpesvirus 4 [Epstein-Barr virus]
aucggacgggcaggc

SEQ ID NO: 3970608 - RNA, 19 nt, Human herpesvirus 4 [Epstein-Barr virus]
aucuacaacaaaacuggug

SEQ ID NO: 3970609 - RNA, 20 nt, Human herpesvirus 4 [Epstein-Barr virus]
aucucagaauugucacugag

SEQ ID NO: 3970610 - RNA, 16 nt, Human herpesvirus 4 [Epstein-Barr virus]
aucuccaucagggcca

SEQ ID NO: 3970611 - RNA, 16 nt, Human herpesvirus 4 [Epstein-Barr virus]
aucugagggcagugau

SEQ ID NO: 3970612 - RNA, 11 nt, Human herpesvirus 4 [Epstein-Barr virus]
cagcucaccua

SEQ ID NO: 3970613 - RNA, 15 nt, Human herpesvirus 4 [Epstein-Barr virus]
cagcuccagggacag

SEQ ID NO: 3970614 - RNA, 13 nt, Human herpesvirus 4 [Epstein-Barr virus]
cagcucggccagc

SEQ ID NO: 3970615 - RNA, 20 nt, Human herpesvirus 4 [Epstein-Barr virus]
cagcuggacgcgcagugcca

SEQ ID NO: 3970616 - RNA, 22 nt, Human herpesvirus 4 [Epstein-Barr virus]
cagcuggcccaccuaaagagag

SEQ ID NO: 3970617 - RNA, 17 nt, Human herpesvirus 4 [Epstein-Barr virus]
cagcuggugguccgcau

SEQ ID NO: 3970618 - RNA, 20 nt, Human herpesvirus 4 [Epstein-Barr virus]
cagcuuaacgggaagagaag

SEQ ID NO: 3970619 - RNA, 16 nt, Human herpesvirus 4 [Epstein-Barr virus]
caggacauguuugggg

SEQ ID NO: 3970620 - RNA, 14 nt, Human herpesvirus 4 [Epstein-Barr virus]
caggacggagaagc

SEQ ID NO: 3970621 - RNA, 16 nt, Human herpesvirus 4 [Epstein-Barr virus]
caggacggagaagcgg

SEQ ID NO: 3970622 - RNA, 14 nt, Human herpesvirus 4 [Epstein-Barr virus]
caggagagggccag

SEQ ID NO: 3970623 - RNA, 17 nt, Human herpesvirus 4 [Epstein-Barr virus]
caggaggaggggcagga

SEQ ID NO: 3970624 - RNA, 15 nt, Human herpesvirus 4 [Epstein-Barr virus]
caggagucugcugcg

SEQ ID NO: 3970625 - RNA, 15 nt, Human herpesvirus 4 [Epstein-Barr virus]
caggaucagaaucaa

SEQ ID NO: 3970626 - RNA, 19 nt, Human herpesvirus 4 [Epstein-Barr virus]
caggcacaucuggcaccug

SEQ ID NO: 3970627 - RNA, 19 nt, Human herpesvirus 4 [Epstein-Barr virus]
caggcacggucgccccucc

SEQ ID NO: 3970628 - RNA, 16 nt, Human herpesvirus 4 [Epstein-Barr virus]
caggcagccuugcgug

SEQ ID NO: 3970629 - RNA, 21 nt, Human herpesvirus 4 [Epstein-Barr virus]
caggcagccuugcguggugcu

SEQ ID NO: 3970630 - RNA, 21 nt, Human herpesvirus 4 [Epstein-Barr virus]
caggcauuuuuggugcugccu

SEQ ID NO: 3970631 - RNA, 16 nt, Human herpesvirus 4 [Epstein-Barr virus]
caggcccgaccugcca

SEQ ID NO: 3970632 - RNA, 19 nt, Human herpesvirus 4 [Epstein-Barr virus]
caggccgccaugcucaggg

SEQ ID NO: 3970633 - RNA, 15 nt, Human herpesvirus 4 [Epstein-Barr virus]
caggccucccagucu

SEQ ID NO: 3970634 - RNA, 13 nt, Human herpesvirus 4 [Epstein-Barr virus]
caggcuaugaaga

SEQ ID NO: 3970635 - RNA, 14 nt, Human herpesvirus 4 [Epstein-Barr virus]
caggcuccuggauc

SEQ ID NO: 3970636 - RNA, 17 nt, Human herpesvirus 4 [Epstein-Barr virus]
caggcuuggaaacaccc

SEQ ID NO: 3970637 - RNA, 12 nt, Human herpesvirus 4 [Epstein-Barr virus]
cagggcaacacc

SEQ ID NO: 3970638 - RNA, 12 nt, Human herpesvirus 4 [Epstein-Barr virus]
cagggcaauggg

SEQ ID NO: 3970639 - RNA, 19 nt, Human herpesvirus 4 [Epstein-Barr virus]
cagggccaagacauagaga

SEQ ID NO: 3970640 - RNA, 19 nt, Human herpesvirus 4 [Epstein-Barr virus]
cagggcccguuccaggcuc

SEQ ID NO: 3970641 - RNA, 21 nt, Human herpesvirus 4 [Epstein-Barr virus]
cagggcccguuccaggcucuc

SEQ ID NO: 3970642 - RNA, 23 nt, Human herpesvirus 4 [Epstein-Barr virus]
cagggcucuguucacgcgauggu

SEQ ID NO: 3970643 - RNA, 15 nt, Human herpesvirus 4 [Epstein-Barr virus]
cagggcuucacuaga

SEQ ID NO: 3970644 - RNA, 20 nt, Human herpesvirus 4 [Epstein-Barr virus]
caggggaaucucugccaacu

SEQ ID NO: 3970645 - RNA, 14 nt, Human herpesvirus 4 [Epstein-Barr virus]
caggggcgagcagc

SEQ ID NO: 3970646 - RNA, 14 nt, Human herpesvirus 4 [Epstein-Barr virus]
caggucaggucccc

SEQ ID NO: 3970647 - RNA, 21 nt, Human herpesvirus 4 [Epstein-Barr virus]
caggugcccgagccccgccug

SEQ ID NO: 3970648 - RNA, 23 nt, Human herpesvirus 4 [Epstein-Barr virus]
caggugccuuuuguacaagcuuu

SEQ ID NO: 3970649 - RNA, 12 nt, Human herpesvirus 4 [Epstein-Barr virus]
cagguggcugcu

SEQ ID NO: 3970650 - RNA, 17 nt, Human herpesvirus 4 [Epstein-Barr virus]
caguaaacacugccaua

SEQ ID NO: 3970651 - RNA, 14 nt, Human herpesvirus 4 [Epstein-Barr virus]
cagucgcugcugca

SEQ ID NO: 3970652 - RNA, 15 nt, Human herpesvirus 4 [Epstein-Barr virus]
cagucgcuggcuggu

SEQ ID NO: 3970653 - RNA, 13 nt, Human herpesvirus 4 [Epstein-Barr virus]
cagucuccggguc

SEQ ID NO: 3970654 - RNA, 18 nt, Human herpesvirus 4 [Epstein-Barr virus]
cagugccuccgccugagc

SEQ ID NO: 3970655 - RNA, 20 nt, Human herpesvirus 4 [Epstein-Barr virus]
caguggaccucaaagaagag

SEQ ID NO: 3970656 - RNA, 15 nt, Human herpesvirus 4 [Epstein-Barr virus]
caguggcccucagaa

SEQ ID NO: 3970657 - RNA, 20 nt, Human herpesvirus 4 [Epstein-Barr virus]
cagugggccucucuggcugu

SEQ ID NO: 3970658 - RNA, 15 nt, Human herpesvirus 4 [Epstein-Barr virus]
cauacucuucauucu

SEQ ID NO: 3970659 - RNA, 22 nt, Human herpesvirus 4 [Epstein-Barr virus]
cauccaucaacuucagcuccag

SEQ ID NO: 3970660 - RNA, 14 nt, Human herpesvirus 4 [Epstein-Barr virus]
caucccaauucaca

SEQ ID NO: 3970661 - RNA, 17 nt, Human herpesvirus 4 [Epstein-Barr virus]
cauccgccacccccguc

SEQ ID NO: 3970662 - RNA, 21 nt, Human herpesvirus 4 [Epstein-Barr virus]
caucgacacacgagccauaga

SEQ ID NO: 3970663 - RNA, 18 nt, Human herpesvirus 4 [Epstein-Barr virus]
caucgccgccccaggggu

SEQ ID NO: 3970664 - RNA, 16 nt, Human herpesvirus 4 [Epstein-Barr virus]
caucggagucgguggg

SEQ ID NO: 3970665 - RNA, 17 nt, Human herpesvirus 4 [Epstein-Barr virus]
caucuacgcggagcugc

SEQ ID NO: 3970666 - RNA, 18 nt, Human herpesvirus 4 [Epstein-Barr virus]
caucuauuagcagccucc

SEQ ID NO: 3970667 - RNA, 12 nt, Human herpesvirus 4 [Epstein-Barr virus]
caucuggaccug

SEQ ID NO: 3970668 - RNA, 14 nt, Human herpesvirus 4 [Epstein-Barr virus]
caugacacaggaca

SEQ ID NO: 3970669 - RNA, 21 nt, Human herpesvirus 4 [Epstein-Barr virus]
caugacagucccguugguggu

SEQ ID NO: 3970670 - RNA, 14 nt, Human herpesvirus 4 [Epstein-Barr virus]
caugacgcugcugc

SEQ ID NO: 3970671 - RNA, 16 nt, Human herpesvirus 4 [Epstein-Barr virus]
caugacgcugcugcua

SEQ ID NO: 3970672 - RNA, 21 nt, Human herpesvirus 4 [Epstein-Barr virus]
caugacgcugcugcuacuggc

SEQ ID NO: 3970673 - RNA, 17 nt, Human herpesvirus 4 [Epstein-Barr virus]
caugcaggucagguccc

SEQ ID NO: 3970674 - RNA, 15 nt, Human herpesvirus 4 [Epstein-Barr virus]
caugccuccccagca

SEQ ID NO: 3970675 - RNA, 23 nt, Human herpesvirus 4 [Epstein-Barr virus]
caugcuccuauggacacuuggua

SEQ ID NO: 3970676 - RNA, 18 nt, Human herpesvirus 4 [Epstein-Barr virus]
caugcucuuugaugggga

SEQ ID NO: 3970677 - RNA, 13 nt, Human herpesvirus 4 [Epstein-Barr virus]
cauggcagcagac

SEQ ID NO: 3970678 - RNA, 14 nt, Human herpesvirus 4 [Epstein-Barr virus]
cauggccgagaagc

SEQ ID NO: 3970679 - RNA, 16 nt, Human herpesvirus 4 [Epstein-Barr virus]
cauggcggacugcgcc

SEQ ID NO: 3970680 - RNA, 16 nt, Human herpesvirus 4 [Epstein-Barr virus]
cauguaacaagaacug

SEQ ID NO: 3970681 - RNA, 13 nt, Human herpesvirus 4 [Epstein-Barr virus]
caugucagcucca

SEQ ID NO: 3970682 - RNA, 13 nt, Human herpesvirus 4 [Epstein-Barr virus]
cauguccacugag

SEQ ID NO: 3970683 - RNA, 13 nt, Human herpesvirus 4 [Epstein-Barr virus]
caugucucagagg

SEQ ID NO: 3970684 - RNA, 19 nt, Human herpesvirus 4 [Epstein-Barr virus]
caugucugacgaggggcca

SEQ ID NO: 3970685 - RNA, 20 nt, Human herpesvirus 4 [Epstein-Barr virus]
cauuagcccagccgcaaaua

SEQ ID NO: 3970686 - RNA, 16 nt, Human herpesvirus 4 [Epstein-Barr virus]
cauucccuugcucgca

SEQ ID NO: 3970687 - RNA, 15 nt, Human herpesvirus 4 [Epstein-Barr virus]
cauucuaucagcuua

SEQ ID NO: 3970688 - RNA, 23 nt, Human herpesvirus 4 [Epstein-Barr virus]
cauucucaucuacaauggcuggu

SEQ ID NO: 3970689 - RNA, 18 nt, Human herpesvirus 4 [Epstein-Barr virus]
cauucugccgucucaaac

SEQ ID NO: 3970690 - RNA, 16 nt, Human herpesvirus 4 [Epstein-Barr virus]
cauuggcgucaggaga

SEQ ID NO: 3970691 - RNA, 18 nt, Human herpesvirus 4 [Epstein-Barr virus]
cauuuuauuuacagccau

SEQ ID NO: 3970692 - RNA, 20 nt, Human herpesvirus 4 [Epstein-Barr virus]
ccaacaggugcccgagcccc

SEQ ID NO: 3970693 - RNA, 14 nt, Human herpesvirus 4 [Epstein-Barr virus]
ccaacgcucagugc

SEQ ID NO: 3970694 - RNA, 14 nt, Human herpesvirus 4 [Epstein-Barr virus]
ccaagacucccuga

SEQ ID NO: 3970695 - RNA, 16 nt, Human herpesvirus 4 [Epstein-Barr virus]
ccaagauagugaccaa

SEQ ID NO: 3970696 - RNA, 16 nt, Human herpesvirus 4 [Epstein-Barr virus]
ccaagcaccacccagc

SEQ ID NO: 3970697 - RNA, 21 nt, Human herpesvirus 4 [Epstein-Barr virus]
ccaagccacuacggccacguc

SEQ ID NO: 3970698 - RNA, 19 nt, Human herpesvirus 4 [Epstein-Barr virus]
ccaaugacccacuccagug

SEQ ID NO: 3970699 - RNA, 13 nt, Human herpesvirus 4 [Epstein-Barr virus]
ccacacagcgcca

SEQ ID NO: 3970700 - RNA, 21 nt, Human herpesvirus 4 [Epstein-Barr virus]
gugugacaugcuauggugccg

SEQ ID NO: 3970701 - RNA, 12 nt, Human herpesvirus 4 [Epstein-Barr virus]
gugugcuguauu

SEQ ID NO: 3970702 - RNA, 22 nt, Human herpesvirus 4 [Epstein-Barr virus]
gugugucccccuccauuccacc

SEQ ID NO: 3970703 - RNA, 20 nt, Human herpesvirus 4 [Epstein-Barr virus]
guuaaacugaaucuccaccu

SEQ ID NO: 3970704 - RNA, 14 nt, Human herpesvirus 4 [Epstein-Barr virus]
guuaacauggacau

SEQ ID NO: 3970705 - RNA, 16 nt, Human herpesvirus 4 [Epstein-Barr virus]
guuaacuuucuccccu

SEQ ID NO: 3970706 - RNA, 20 nt, Human herpesvirus 4 [Epstein-Barr virus]
guuaagcugcaccuggacau

SEQ ID NO: 3970707 - RNA, 17 nt, Human herpesvirus 4 [Epstein-Barr virus]
guuauguuuuccccaug

SEQ ID NO: 3970708 - RNA, 13 nt, Human herpesvirus 4 [Epstein-Barr virus]
guuccacagccug

SEQ ID NO: 3970709 - RNA, 15 nt, Human herpesvirus 4 [Epstein-Barr virus]
guuccccccagccug

SEQ ID NO: 3970710 - RNA, 19 nt, Human herpesvirus 4 [Epstein-Barr virus]
guuccucaacaaggagugc

SEQ ID NO: 3970711 - RNA, 18 nt, Human herpesvirus 4 [Epstein-Barr virus]
guucuccaggcuccugga

SEQ ID NO: 3970712 - RNA, 14 nt, Human herpesvirus 4 [Epstein-Barr virus]
guuggcgggacugg

SEQ ID NO: 3970713 - RNA, 15 nt, Human herpesvirus 4 [Epstein-Barr virus]
guuuacaucugcccg

SEQ ID NO: 3970714 - RNA, 15 nt, Human herpesvirus 4 [Epstein-Barr virus]
guuugcuugccccgg

SEQ ID NO: 3970715 - RNA, 14 nt, Human herpesvirus 4 [Epstein-Barr virus]
uaaaacuccacaga

SEQ ID NO: 3970716 - RNA, 17 nt, Human herpesvirus 4 [Epstein-Barr virus]
uaaaauuuacaccugac

SEQ ID NO: 3970717 - RNA, 18 nt, Human herpesvirus 4 [Epstein-Barr virus]
uaaacauugcaccuugcc

SEQ ID NO: 3970718 - RNA, 21 nt, Human herpesvirus 4 [Epstein-Barr virus]
uaaagagacucaggcccucau

SEQ ID NO: 3970719 - RNA, 19 nt, Human herpesvirus 4 [Epstein-Barr virus]
uaaagaucuaccccagcug

SEQ ID NO: 3970720 - RNA, 16 nt, Human herpesvirus 4 [Epstein-Barr virus]
uaaaugcaccuugacu

SEQ ID NO: 3970721 - RNA, 15 nt, Human herpesvirus 4 [Epstein-Barr virus]
uaacacaccacacag

SEQ ID NO: 3970722 - RNA, 16 nt, Human herpesvirus 4 [Epstein-Barr virus]
uaaccuaugccuggaa

SEQ ID NO: 3970723 - RNA, 19 nt, Human herpesvirus 4 [Epstein-Barr virus]
uaacggggaaugugugaca

SEQ ID NO: 3970724 - RNA, 14 nt, Human herpesvirus 4 [Epstein-Barr virus]
uaacuggcacacac

SEQ ID NO: 3970725 - RNA, 18 nt, Human herpesvirus 4 [Epstein-Barr virus]
uaagaaugggagcaacca

SEQ ID NO: 3970726 - RNA, 16 nt, Human herpesvirus 4 [Epstein-Barr virus]
uaagagucccuccuca

SEQ ID NO: 3970727 - RNA, 14 nt, Human herpesvirus 4 [Epstein-Barr virus]
uaagcuuaugagcg

SEQ ID NO: 3970728 - RNA, 22 nt, Human herpesvirus 4 [Epstein-Barr virus]
uaaggccgggagaggcagcccc

SEQ ID NO: 3970729 - RNA, 15 nt, Human herpesvirus 4 [Epstein-Barr virus]
uaauguacagacuac

SEQ ID NO: 3970730 - RNA, 15 nt, Human herpesvirus 4 [Epstein-Barr virus]
uacaaccccuuccac

SEQ ID NO: 3970731 - RNA, 19 nt, Human herpesvirus 4 [Epstein-Barr virus]
uacacacaucagaccucug

SEQ ID NO: 3970732 - RNA, 24 nt, Human herpesvirus 4 [Epstein-Barr virus]
uaccagcccuuuuuccaguggcau

SEQ ID NO: 3970733 - RNA, 23 nt, Human herpesvirus 4 [Epstein-Barr virus]
uaccaggggcgagcagcgcggca

SEQ ID NO: 3970734 - RNA, 12 nt, Human herpesvirus 4 [Epstein-Barr virus]
uacccaucacac

SEQ ID NO: 3970735 - RNA, 13 nt, Human herpesvirus 4 [Epstein-Barr virus]
uacccaucccggc

SEQ ID NO: 3970736 - RNA, 22 nt, Human herpesvirus 4 [Epstein-Barr virus]
uaccggcgagcaugaucaggac

SEQ ID NO: 3970737 - RNA, 15 nt, Human herpesvirus 4 [Epstein-Barr virus]
uaccuccacuuacaa

SEQ ID NO: 3970738 - RNA, 15 nt, Human herpesvirus 4 [Epstein-Barr virus]
uaccuuccucugccc

SEQ ID NO: 3970739 - RNA, 22 nt, Human herpesvirus 4 [Epstein-Barr virus]
uaccuugggcaucaugcagggu

SEQ ID NO: 3970740 - RNA, 13 nt, Human herpesvirus 4 [Epstein-Barr virus]
uagaaugugguaa

SEQ ID NO: 3970741 - RNA, 19 nt, Human herpesvirus 4 [Epstein-Barr virus]
uagacagaaauugggugac

SEQ ID NO: 3970742 - RNA, 12 nt, Human herpesvirus 4 [Epstein-Barr virus]
uagagcauuugc

SEQ ID NO: 3970743 - RNA, 17 nt, Human herpesvirus 4 [Epstein-Barr virus]
uagauggcgcgggugag

SEQ ID NO: 3970744 - RNA, 18 nt, Human herpesvirus 4 [Epstein-Barr virus]
uagcauggccgccagagu

SEQ ID NO: 3970745 - RNA, 13 nt, Human herpesvirus 4 [Epstein-Barr virus]
uagccccagcccc

SEQ ID NO: 3970746 - RNA, 13 nt, Human herpesvirus 4 [Epstein-Barr virus]
uagccggccaggc

SEQ ID NO: 3970747 - RNA, 18 nt, Human herpesvirus 4 [Epstein-Barr virus]
uagcgccccuauaaccac

SEQ ID NO: 3970748 - RNA, 20 nt, Human herpesvirus 4 [Epstein-Barr virus]
uagcgucccaaacauaaaug

SEQ ID NO: 3970749 - RNA, 17 nt, Human herpesvirus 4 [Epstein-Barr virus]
uaggagcccgggccagc

SEQ ID NO: 3970750 - RNA, 16 nt, Human herpesvirus 4 [Epstein-Barr virus]
uaggcguaacuugucu

SEQ ID NO: 3970751 - RNA, 23 nt, Human herpesvirus 4 [Epstein-Barr virus]
uagguaucuggaucuacuuauug

SEQ ID NO: 3970752 - RNA, 22 nt, Human herpesvirus 4 [Epstein-Barr virus]
uaggugccgacaccggggugcc

SEQ ID NO: 3970753 - RNA, 18 nt, Human herpesvirus 4 [Epstein-Barr virus]
uagguguccagcgcucug

SEQ ID NO: 3970754 - RNA, 22 nt, Human herpesvirus 4 [Epstein-Barr virus]
uagugcgcgugaguucuuuagg

SEQ ID NO: 3970755 - RNA, 20 nt, Human herpesvirus 4 [Epstein-Barr virus]
uauggcugcggaguugagcc

SEQ ID NO: 3970756 - RNA, 16 nt, Human herpesvirus 4 [Epstein-Barr virus]
uauucaaucaaccuga

SEQ ID NO: 3970757 - RNA, 12 nt, Human herpesvirus 4 [Epstein-Barr virus]
ucaaacagcagc

SEQ ID NO: 3970758 - RNA, 14 nt, Human herpesvirus 4 [Epstein-Barr virus]
ucacauauccagag

SEQ ID NO: 3970759 - RNA, 17 nt, Human herpesvirus 4 [Epstein-Barr virus]
ucaccagggaggccugg

SEQ ID NO: 3970760 - RNA, 19 nt, Human herpesvirus 4 [Epstein-Barr virus]
ucacuaaaguuggucaggc

SEQ ID NO: 3970761 - RNA, 16 nt, Human herpesvirus 4 [Epstein-Barr virus]
ucacuuucuuugcaau

SEQ ID NO: 3970762 - RNA, 14 nt, Human herpesvirus 4 [Epstein-Barr virus]
ucagagaggccucu

SEQ ID NO: 3970763 - RNA, 19 nt, Human herpesvirus 4 [Epstein-Barr virus]
ucagagcugggaagaaugg

SEQ ID NO: 3970764 - RNA, 16 nt, Human herpesvirus 4 [Epstein-Barr virus]
ucagcaucacagguua

SEQ ID NO: 3970765 - RNA, 15 nt, Human herpesvirus 4 [Epstein-Barr virus]
ucagccugcuccuga

SEQ ID NO: 3970766 - RNA, 20 nt, Human herpesvirus 4 [Epstein-Barr virus]
ucagcucgcccacacagcgc

SEQ ID NO: 3970767 - RNA, 18 nt, Human herpesvirus 4 [Epstein-Barr virus]
ucagggaaaaacuggcca

SEQ ID NO: 3970768 - RNA, 16 nt, Human herpesvirus 4 [Epstein-Barr virus]
ucagguuucugggcau

SEQ ID NO: 3970769 - RNA, 15 nt, Human herpesvirus 4 [Epstein-Barr virus]
ucagugcggugcuac

SEQ ID NO: 3970770 - RNA, 18 nt, Human herpesvirus 4 [Epstein-Barr virus]
ucaucauaacugagcagg

SEQ ID NO: 3970771 - RNA, 17 nt, Human herpesvirus 4 [Epstein-Barr virus]
ucaucaucgggaaaggc

SEQ ID NO: 3970772 - RNA, 13 nt, Human herpesvirus 4 [Epstein-Barr virus]
ucaucccugaccc

SEQ ID NO: 3970773 - RNA, 19 nt, Human herpesvirus 4 [Epstein-Barr virus]
ucaucucgcuggcucgccu

SEQ ID NO: 3970774 - RNA, 17 nt, Human herpesvirus 4 [Epstein-Barr virus]
ucaucuggcucuccugu

SEQ ID NO: 3970775 - RNA, 19 nt, Human herpesvirus 4 [Epstein-Barr virus]
uccaagaaaccccacggag

SEQ ID NO: 3970776 - RNA, 14 nt, Human herpesvirus 4 [Epstein-Barr virus]
uccaaggcccaaca

SEQ ID NO: 3970777 - RNA, 15 nt, Human herpesvirus 4 [Epstein-Barr virus]
uccaagugcaacaau

SEQ ID NO: 3970778 - RNA, 23 nt, Human herpesvirus 4 [Epstein-Barr virus]
uccaaguugcauuggcugcaaag

SEQ ID NO: 3970779 - RNA, 17 nt, Human herpesvirus 4 [Epstein-Barr virus]
uccacaccauccacagc

SEQ ID NO: 3970780 - RNA, 19 nt, Human herpesvirus 4 [Epstein-Barr virus]
uccaggcucuccagcccca

SEQ ID NO: 3970781 - RNA, 19 nt, Human herpesvirus 4 [Epstein-Barr virus]
uccagggcccguuccaggc

SEQ ID NO: 3970782 - RNA, 16 nt, Human herpesvirus 4 [Epstein-Barr virus]
uccaggggccacacag

SEQ ID NO: 3970783 - RNA, 16 nt, Human herpesvirus 4 [Epstein-Barr virus]
uccaguaugccugccu

SEQ ID NO: 3970784 - RNA, 20 nt, Human herpesvirus 4 [Epstein-Barr virus]
uccaugacgcugcugcuacu

SEQ ID NO: 3970785 - RNA, 15 nt, Human herpesvirus 4 [Epstein-Barr virus]
ucccaaauaaauguu

SEQ ID NO: 3970786 - RNA, 19 nt, Human herpesvirus 4 [Epstein-Barr virus]
ucccacugggacggggugg

SEQ ID NO: 3970787 - RNA, 21 nt, Human herpesvirus 4 [Epstein-Barr virus]
ucccagaaagaagugggaccu

SEQ ID NO: 3970788 - RNA, 21 nt, Human herpesvirus 4 [Epstein-Barr virus]
uguccacuggggugcagacga

SEQ ID NO: 3970789 - RNA, 13 nt, Human herpesvirus 4 [Epstein-Barr virus]
ugucccacuccac

SEQ ID NO: 3970790 - RNA, 22 nt, Human herpesvirus 4 [Epstein-Barr virus]
uguccucccgggguccagaguu

SEQ ID NO: 3970791 - RNA, 20 nt, Human herpesvirus 4 [Epstein-Barr virus]
ugucggcuaaugccaugcag

SEQ ID NO: 3970792 - RNA, 22 nt, Human herpesvirus 4 [Epstein-Barr virus]
ugucuaacacgcuuuugucugc

SEQ ID NO: 3970793 - RNA, 15 nt, Human herpesvirus 4 [Epstein-Barr virus]
ugucucggccuccug

SEQ ID NO: 3970794 - RNA, 20 nt, Human herpesvirus 4 [Epstein-Barr virus]
ugucugugguugucuuccca

SEQ ID NO: 3970795 - RNA, 14 nt, Human herpesvirus 4 [Epstein-Barr virus]
ugucuuccacacca

SEQ ID NO: 3970796 - RNA, 16 nt, Human herpesvirus 4 [Epstein-Barr virus]
ugugaaccagaaagau

SEQ ID NO: 3970797 - RNA, 15 nt, Human herpesvirus 4 [Epstein-Barr virus]
ugugaccgucuacau

SEQ ID NO: 3970798 - RNA, 15 nt, Human herpesvirus 4 [Epstein-Barr virus]
ugugaucauggaaac

SEQ ID NO: 3970799 - RNA, 17 nt, Human herpesvirus 4 [Epstein-Barr virus]
uguggaagaggaaacag

SEQ ID NO: 3970800 - RNA, 17 nt, Human herpesvirus 4 [Epstein-Barr virus]
uguggccggugcugcca

SEQ ID NO: 3970801 - RNA, 22 nt, Human herpesvirus 4 [Epstein-Barr virus]
ugugucccccuccauuccaccc

SEQ ID NO: 3970802 - RNA, 14 nt, Human herpesvirus 4 [Epstein-Barr virus]
ugugucuucugucu

SEQ ID NO: 3970803 - RNA, 17 nt, Human herpesvirus 4 [Epstein-Barr virus]
uguguuccuaaaaaaug

SEQ ID NO: 3970804 - RNA, 22 nt, Human herpesvirus 4 [Epstein-Barr virus]
uguucccuaagcagcugagggg

SEQ ID NO: 3970805 - RNA, 22 nt, Human herpesvirus 4 [Epstein-Barr virus]
uguucucgugcaagcagcaccu

SEQ ID NO: 3970806 - RNA, 19 nt, Human herpesvirus 4 [Epstein-Barr virus]
uguucuuggcggacaucau

SEQ ID NO: 3970807 - RNA, 18 nt, Human herpesvirus 4 [Epstein-Barr virus]
uguuggauuggcugucau

SEQ ID NO: 3970808 - RNA, 18 nt, Human herpesvirus 4 [Epstein-Barr virus]
uguuuacaucugcccggc

SEQ ID NO: 3970809 - RNA, 16 nt, Human herpesvirus 4 [Epstein-Barr virus]
uguuucccgacgccaa

SEQ ID NO: 3970810 - RNA, 17 nt, Human herpesvirus 4 [Epstein-Barr virus]
uguuugcugcucggggc

SEQ ID NO: 3970811 - RNA, 14 nt, Human herpesvirus 4 [Epstein-Barr virus]
uguuuguacuucuu

SEQ ID NO: 3970812 - RNA, 22 nt, Human herpesvirus 4 [Epstein-Barr virus]
uguuuguggcggcaucauguuu

SEQ ID NO: 3970813 - RNA, 14 nt, Human herpesvirus 4 [Epstein-Barr virus]
uuaacaccugcagc

SEQ ID NO: 3970814 - RNA, 17 nt, Human herpesvirus 4 [Epstein-Barr virus]
uuaagagucccuccuca

SEQ ID NO: 3970815 - RNA, 17 nt, Human herpesvirus 4 [Epstein-Barr virus]
uuacaaccaagccacua

SEQ ID NO: 3970816 - RNA, 16 nt, Human herpesvirus 4 [Epstein-Barr virus]
uuagccccagccccuc

SEQ ID NO: 3970817 - RNA, 21 nt, Human herpesvirus 4 [Epstein-Barr virus]
uuaucagagaggccucugggg

SEQ ID NO: 3970818 - RNA, 16 nt, Human herpesvirus 4 [Epstein-Barr virus]
uuauugaaaccacgcc

SEQ ID NO: 3970819 - RNA, 17 nt, Human herpesvirus 4 [Epstein-Barr virus]
uucaacacgaccaccua

SEQ ID NO: 3970820 - RNA, 12 nt, Human herpesvirus 4 [Epstein-Barr virus]
uucaaccuaauu

SEQ ID NO: 3970821 - RNA, 22 nt, Human herpesvirus 4 [Epstein-Barr virus]
uucacggggccgugcaccugcc

SEQ ID NO: 3970822 - RNA, 20 nt, Human herpesvirus 4 [Epstein-Barr virus]
uuccaugacgcugcugcuac

SEQ ID NO: 3970823 - RNA, 14 nt, Human herpesvirus 4 [Epstein-Barr virus]
uucccagacucugc

SEQ ID NO: 3970824 - RNA, 22 nt, Human herpesvirus 4 [Epstein-Barr virus]
uucccagccccaauucuugcac

SEQ ID NO: 3970825 - RNA, 17 nt, Human herpesvirus 4 [Epstein-Barr virus]
uuccuacaacucagccc

SEQ ID NO: 3970826 - RNA, 21 nt, Human herpesvirus 4 [Epstein-Barr virus]
uuccuacaacucagccccauc

SEQ ID NO: 3970827 - RNA, 23 nt, Human herpesvirus 4 [Epstein-Barr virus]
uuccucaucguucgguggggugg

SEQ ID NO: 3970828 - RNA, 19 nt, Human herpesvirus 4 [Epstein-Barr virus]
uuccucauuggcuuugccc

SEQ ID NO: 3970829 - RNA, 21 nt, Human herpesvirus 4 [Epstein-Barr virus]
uuccugucggcucucuuugaa

SEQ ID NO: 3970830 - RNA, 13 nt, Human herpesvirus 4 [Epstein-Barr virus]
uuccuugccaucu

SEQ ID NO: 3970831 - RNA, 22 nt, Human herpesvirus 4 [Epstein-Barr virus]
uucuaugggaauaacaagggaa

SEQ ID NO: 3970832 - RNA, 18 nt, Human herpesvirus 4 [Epstein-Barr virus]
uucugaggcggcuguggc

SEQ ID NO: 3970833 - RNA, 16 nt, Human herpesvirus 4 [Epstein-Barr virus]
uucugcugcugcuggu

SEQ ID NO: 3970834 - RNA, 17 nt, Human herpesvirus 4 [Epstein-Barr virus]
uucuggccaaccugccu

SEQ ID NO: 3970835 - RNA, 18 nt, Human herpesvirus 4 [Epstein-Barr virus]
uucuuagaugaggagcag

SEQ ID NO: 3970836 - RNA, 20 nt, Human herpesvirus 4 [Epstein-Barr virus]
uugagcgccguggccaccuu

SEQ ID NO: 3970837 - RNA, 11 nt, Human herpesvirus 4 [Epstein-Barr virus]
uugaggaccca

SEQ ID NO: 3970838 - RNA, 11 nt, Human herpesvirus 4 [Epstein-Barr virus]
uugcagcugga

SEQ ID NO: 3970839 - RNA, 14 nt, Human herpesvirus 4 [Epstein-Barr virus]
uugcccguggggau

SEQ ID NO: 3970840 - RNA, 15 nt, Human herpesvirus 4 [Epstein-Barr virus]
uugcucucguugcca

SEQ ID NO: 3970841 - RNA, 19 nt, Human herpesvirus 4 [Epstein-Barr virus]
uuggcaacgagagcaauac

SEQ ID NO: 3970842 - RNA, 14 nt, Human herpesvirus 4 [Epstein-Barr virus]
uuggcgucucaggc

SEQ ID NO: 3970843 - RNA, 23 nt, Human herpesvirus 4 [Epstein-Barr virus]
uugguggauugcugaacuggggc

SEQ ID NO: 3970844 - RNA, 19 nt, Human herpesvirus 4 [Epstein-Barr virus]
uugugaagguaaacaagcu

SEQ ID NO: 3970845 - RNA, 17 nt, Human herpesvirus 4 [Epstein-Barr virus]
uuuaaacgagagaagag

SEQ ID NO: 3970846 - RNA, 15 nt, Human herpesvirus 4 [Epstein-Barr virus]
uuuaaggaaugaaca

SEQ ID NO: 3970847 - RNA, 14 nt, Human herpesvirus 4 [Epstein-Barr virus]
uuuacaucugcccg

SEQ ID NO: 3970848 - RNA, 17 nt, Human herpesvirus 4 [Epstein-Barr virus]
uuucccccacccuggaa

SEQ ID NO: 3970849 - RNA, 15 nt, Human herpesvirus 4 [Epstein-Barr virus]
uuuccgucagccagg

SEQ ID NO: 3970850 - RNA, 16 nt, Human herpesvirus 4 [Epstein-Barr virus]
uuuccgucagccaggg

SEQ ID NO: 3970851 - RNA, 16 nt, Human herpesvirus 4 [Epstein-Barr virus]
uuuccuucuugaccuu

SEQ ID NO: 3970852 - RNA, 14 nt, Human herpesvirus 4 [Epstein-Barr virus]
uuucuaugccugaa

SEQ ID NO: 3970853 - RNA, 10 nt, Human herpesvirus 4 [Epstein-Barr virus]
uuucugcccc

SEQ ID NO: 3970854 - RNA, 17 nt, Human herpesvirus 4 [Epstein-Barr virus]
uuugccagcaacuuaua

SEQ ID NO: 3970855 - RNA, 13 nt, Human herpesvirus 4 [Epstein-Barr virus]
uuugcgaccccuc

SEQ ID NO: 3970856 - RNA, 14 nt, Human herpesvirus 4 [Epstein-Barr virus]
uuuggcuugcucca

SEQ ID NO: 3970857 - RNA, 16 nt, Human herpesvirus 4 [Epstein-Barr virus]
uuugggagcuccagag

SEQ ID NO: 3970858 - RNA, 18 nt, Human herpesvirus 4 [Epstein-Barr virus]
cacgccugcuucacgccu

SEQ ID NO: 3970859 - RNA, 19 nt, Human herpesvirus 4 [Epstein-Barr virus]
cacgcuccgcgcucggccu

SEQ ID NO: 3970860 - RNA, 14 nt, Human herpesvirus 4 [Epstein-Barr virus]
cacggaugccuggc

SEQ ID NO: 3970861 - RNA, 15 nt, Human herpesvirus 4 [Epstein-Barr virus]
cacggcccuccagcg

SEQ ID NO: 3970862 - RNA, 16 nt, Human herpesvirus 4 [Epstein-Barr virus]
cacggcgucaaacagg

SEQ ID NO: 3970863 - RNA, 23 nt, Human herpesvirus 4 [Epstein-Barr virus]
cacggggccgugcaccugccauc

SEQ ID NO: 3970864 - RNA, 19 nt, Human herpesvirus 4 [Epstein-Barr virus]
cacuacuacaccgagcaga

SEQ ID NO: 3970865 - RNA, 15 nt, Human herpesvirus 4 [Epstein-Barr virus]
cacuacuuguuucug

SEQ ID NO: 3970866 - RNA, 21 nt, Human herpesvirus 4 [Epstein-Barr virus]
cacuaucacccauggccaggc

SEQ ID NO: 3970867 - RNA, 19 nt, Human herpesvirus 4 [Epstein-Barr virus]
cacucaggaagcuggccag

SEQ ID NO: 3970868 - RNA, 22 nt, Human herpesvirus 4 [Epstein-Barr virus]
cacucauggugugagacuggaa

SEQ ID NO: 3970869 - RNA, 16 nt, Human herpesvirus 4 [Epstein-Barr virus]
cacucccgaggcacuu

SEQ ID NO: 3970870 - RNA, 23 nt, Human herpesvirus 4 [Epstein-Barr virus]
cacuccuaugcauuuccugcccu

SEQ ID NO: 3970871 - RNA, 14 nt, Human herpesvirus 4 [Epstein-Barr virus]
cacucugaccagga

SEQ ID NO: 3970872 - RNA, 14 nt, Human herpesvirus 4 [Epstein-Barr virus]
cacucuuaccuucc

SEQ ID NO: 3970873 - RNA, 23 nt, Human herpesvirus 4 [Epstein-Barr virus]
cacucuuuuuucaacgcagucuu

SEQ ID NO: 3970874 - RNA, 19 nt, Human herpesvirus 4 [Epstein-Barr virus]
cacuggugguggaggagga

SEQ ID NO: 3970875 - RNA, 19 nt, Human herpesvirus 4 [Epstein-Barr virus]
cacuugggcacggagagug

SEQ ID NO: 3970876 - RNA, 21 nt, Human herpesvirus 4 [Epstein-Barr virus]
cacuugguaaguuuucccuuc

SEQ ID NO: 3970877 - RNA, 18 nt, Human herpesvirus 4 [Epstein-Barr virus]
cacuugugguucuccuga

SEQ ID NO: 3970878 - RNA, 16 nt, Human herpesvirus 4 [Epstein-Barr virus]
cacuuuagagcucugg

SEQ ID NO: 3970879 - RNA, 15 nt, Human herpesvirus 4 [Epstein-Barr virus]
cacuuucuuugcaau

SEQ ID NO: 3970880 - RNA, 21 nt, Human herpesvirus 4 [Epstein-Barr virus]
cacuuucuuugcaauuugccu

SEQ ID NO: 3970881 - RNA, 20 nt, Human herpesvirus 4 [Epstein-Barr virus]
cagaaaacucugcauggaga

SEQ ID NO: 3970882 - RNA, 18 nt, Human herpesvirus 4 [Epstein-Barr virus]
cagacuuuuggcaauggg

SEQ ID NO: 3970883 - RNA, 18 nt, Human herpesvirus 4 [Epstein-Barr virus]
cagagccucugccacaag

SEQ ID NO: 3970884 - RNA, 15 nt, Human herpesvirus 4 [Epstein-Barr virus]
cagaggaaggccaca

SEQ ID NO: 3970885 - RNA, 17 nt, Human herpesvirus 4 [Epstein-Barr virus]
cagaggacuaauguucu

SEQ ID NO: 3970886 - RNA, 20 nt, Human herpesvirus 4 [Epstein-Barr virus]
cagaggcgacgcuccugggu

SEQ ID NO: 3970887 - RNA, 23 nt, Human herpesvirus 4 [Epstein-Barr virus]
cagagggcgaaugggcugcagca

SEQ ID NO: 3970888 - RNA, 17 nt, Human herpesvirus 4 [Epstein-Barr virus]
cagauagccggccaggc

SEQ ID NO: 3970889 - RNA, 19 nt, Human herpesvirus 4 [Epstein-Barr virus]
cagauagccggccaggcag

SEQ ID NO: 3970890 - RNA, 18 nt, Human herpesvirus 4 [Epstein-Barr virus]
cagaucccauuuuucacu

SEQ ID NO: 3970891 - RNA, 16 nt, Human herpesvirus 4 [Epstein-Barr virus]
cagaugcaguggguga

SEQ ID NO: 3970892 - RNA, 19 nt, Human herpesvirus 4 [Epstein-Barr virus]
cagcagauagugaacgugg

SEQ ID NO: 3970893 - RNA, 18 nt, Human herpesvirus 4 [Epstein-Barr virus]
cagcagauccagggcccg

SEQ ID NO: 3970894 - RNA, 20 nt, Human herpesvirus 4 [Epstein-Barr virus]
cagcagggcacagaggugau

SEQ ID NO: 3970895 - RNA, 21 nt, Human herpesvirus 4 [Epstein-Barr virus]
cagcagugguguuugcuugcc

SEQ ID NO: 3970896 - RNA, 13 nt, Human herpesvirus 4 [Epstein-Barr virus]
cagccacgcagga

SEQ ID NO: 3970897 - RNA, 20 nt, Human herpesvirus 4 [Epstein-Barr virus]
cagcccuuaacacaccacac

SEQ ID NO: 3970898 - RNA, 14 nt, Human herpesvirus 4 [Epstein-Barr virus]
cagcgccagcaggg

SEQ ID NO: 3970899 - RNA, 14 nt, Human herpesvirus 4 [Epstein-Barr virus]
cagcgcuggcucca

SEQ ID NO: 3970900 - RNA, 18 nt, Human herpesvirus 4 [Epstein-Barr virus]
cagcucaaccgccagggc

SEQ ID NO: 3970901 - RNA, 16 nt, Human herpesvirus 4 [Epstein-Barr virus]
cagcuccagggccagc

SEQ ID NO: 3970902 - RNA, 17 nt, Human herpesvirus 4 [Epstein-Barr virus]
cagcuccagggccagca

SEQ ID NO: 3970903 - RNA, 16 nt, Human herpesvirus 4 [Epstein-Barr virus]
cagcucuaacuuggca

SEQ ID NO: 3970904 - RNA, 22 nt, Human herpesvirus 4 [Epstein-Barr virus]
cagcucuaacuuggcaucucuu

SEQ ID NO: 3970905 - RNA, 13 nt, Human herpesvirus 4 [Epstein-Barr virus]
caggaacagccuc

SEQ ID NO: 3970906 - RNA, 14 nt, Human herpesvirus 4 [Epstein-Barr virus]
caggaccuagaaug

SEQ ID NO: 3970907 - RNA, 15 nt, Human herpesvirus 4 [Epstein-Barr virus]
caggacgcugcuguc

SEQ ID NO: 3970908 - RNA, 17 nt, Human herpesvirus 4 [Epstein-Barr virus]
caggagcuugaggccag

SEQ ID NO: 3970909 - RNA, 15 nt, Human herpesvirus 4 [Epstein-Barr virus]
caggaggaggggcag

SEQ ID NO: 3970910 - RNA, 18 nt, Human herpesvirus 4 [Epstein-Barr virus]
caggagggcagagagggg

SEQ ID NO: 3970911 - RNA, 18 nt, Human herpesvirus 4 [Epstein-Barr virus]
caggcacaucuggcaccu

SEQ ID NO: 3970912 - RNA, 18 nt, Human herpesvirus 4 [Epstein-Barr virus]
caggcagaggaaggccac

SEQ ID NO: 3970913 - RNA, 20 nt, Human herpesvirus 4 [Epstein-Barr virus]
caggcagaugaggccccuua

SEQ ID NO: 3970914 - RNA, 17 nt, Human herpesvirus 4 [Epstein-Barr virus]
caggcauuuuuggugcu

SEQ ID NO: 3970915 - RNA, 20 nt, Human herpesvirus 4 [Epstein-Barr virus]
caggccaccgucuacccaga

SEQ ID NO: 3970916 - RNA, 16 nt, Human herpesvirus 4 [Epstein-Barr virus]
caggcccccagcuucu

SEQ ID NO: 3970917 - RNA, 20 nt, Human herpesvirus 4 [Epstein-Barr virus]
caggccgccuauggggccug

SEQ ID NO: 3970918 - RNA, 15 nt, Human herpesvirus 4 [Epstein-Barr virus]
caggcucuccagccc

SEQ ID NO: 3970919 - RNA, 14 nt, Human herpesvirus 4 [Epstein-Barr virus]
caggcugcgccucc

SEQ ID NO: 3970920 - RNA, 22 nt, Human herpesvirus 4 [Epstein-Barr virus]
cagggaaaaacuggccaugcag

SEQ ID NO: 3970921 - RNA, 16 nt, Human herpesvirus 4 [Epstein-Barr virus]
cagggcaaagccacaa

SEQ ID NO: 3970922 - RNA, 14 nt, Human herpesvirus 4 [Epstein-Barr virus]
cagggccgugcaug

SEQ ID NO: 3970923 - RNA, 15 nt, Human herpesvirus 4 [Epstein-Barr virus]
cagggccgugcaugg

SEQ ID NO: 3970924 - RNA, 14 nt, Human herpesvirus 4 [Epstein-Barr virus]
caggggucucuaga

SEQ ID NO: 3970925 - RNA, 15 nt, Human herpesvirus 4 [Epstein-Barr virus]
caggguccaggagaa

SEQ ID NO: 3970926 - RNA, 23 nt, Human herpesvirus 4 [Epstein-Barr virus]
cagggugaacacuugggcacgga

SEQ ID NO: 3970927 - RNA, 23 nt, Human herpesvirus 4 [Epstein-Barr virus]
caggguggcuacuugcucagguu

SEQ ID NO: 3970928 - RNA, 14 nt, Human herpesvirus 4 [Epstein-Barr virus]
cagguacaggaccu

SEQ ID NO: 3970929 - RNA, 18 nt, Human herpesvirus 4 [Epstein-Barr virus]
caggucccccuccacggg

SEQ ID NO: 3970930 - RNA, 21 nt, Human herpesvirus 4 [Epstein-Barr virus]
caggugcaccagcuccaggga

SEQ ID NO: 3970931 - RNA, 15 nt, Human herpesvirus 4 [Epstein-Barr virus]
caggugcacgcuccc

SEQ ID NO: 3970932 - RNA, 21 nt, Human herpesvirus 4 [Epstein-Barr virus]
caggugccugacggugccgcu

SEQ ID NO: 3970933 - RNA, 16 nt, Human herpesvirus 4 [Epstein-Barr virus]
caguaacacagggugg

SEQ ID NO: 3970934 - RNA, 20 nt, Human herpesvirus 4 [Epstein-Barr virus]
caguagccgaauaucuggag

SEQ ID NO: 3970935 - RNA, 22 nt, Human herpesvirus 4 [Epstein-Barr virus]
caguaugcucgaagcauugggc

SEQ ID NO: 3970936 - RNA, 12 nt, Human herpesvirus 4 [Epstein-Barr virus]
caguauguacag

SEQ ID NO: 3970937 - RNA, 17 nt, Human herpesvirus 4 [Epstein-Barr virus]
cagucccaccacaaagg

SEQ ID NO: 3970938 - RNA, 13 nt, Human herpesvirus 4 [Epstein-Barr virus]
caguccuccgcau

SEQ ID NO: 3970939 - RNA, 14 nt, Human herpesvirus 4 [Epstein-Barr virus]
cagucgcuggcugg

SEQ ID NO: 3970940 - RNA, 21 nt, Human herpesvirus 4 [Epstein-Barr virus]
cagugacgaagacccaucuga

SEQ ID NO: 3970941 - RNA, 16 nt, Human herpesvirus 4 [Epstein-Barr virus]
caguggacacccacca

SEQ ID NO: 3970942 - RNA, 13 nt, Human herpesvirus 4 [Epstein-Barr virus]
caguggcccucag

SEQ ID NO: 3970943 - RNA, 14 nt, Human herpesvirus 4 [Epstein-Barr virus]
caguggcugccccg

SEQ ID NO: 3970944 - RNA, 17 nt, Human herpesvirus 4 [Epstein-Barr virus]
cagugucccugcugccc

SEQ ID NO: 3970945 - RNA, 21 nt, Human herpesvirus 4 [Epstein-Barr virus]
caguugaaauaucuagcacgg

SEQ ID NO: 3970946 - RNA, 22 nt, Human herpesvirus 4 [Epstein-Barr virus]
cauaacaaucuugugaaccaga

SEQ ID NO: 3970947 - RNA, 12 nt, Human herpesvirus 4 [Epstein-Barr virus]
cauacagcagcu

SEQ ID NO: 3970948 - RNA, 22 nt, Human herpesvirus 4 [Epstein-Barr virus]
cauacgucuagccacauagcag

SEQ ID NO: 3970949 - RNA, 21 nt, Human herpesvirus 4 [Epstein-Barr virus]
cauaggcuugccugacugacu

SEQ ID NO: 3970950 - RNA, 14 nt, Human herpesvirus 4 [Epstein-Barr virus]
cauaucgcaacacu

SEQ ID NO: 3970951 - RNA, 15 nt, Human herpesvirus 4 [Epstein-Barr virus]
caucagcucgcccac

SEQ ID NO: 3970952 - RNA, 20 nt, Human herpesvirus 4 [Epstein-Barr virus]
caucaggcgaaggcggagaa

SEQ ID NO: 3970953 - RNA, 21 nt, Human herpesvirus 4 [Epstein-Barr virus]
cauccaucaacuucagcucca

SEQ ID NO: 3970954 - RNA, 21 nt, Human herpesvirus 4 [Epstein-Barr virus]
caucccauaccuacaccaccc

SEQ ID NO: 3970955 - RNA, 14 nt, Human herpesvirus 4 [Epstein-Barr virus]
cauccgaggcugag

SEQ ID NO: 3970956 - RNA, 17 nt, Human herpesvirus 4 [Epstein-Barr virus]
caucuacaauggcuggu

SEQ ID NO: 3970957 - RNA, 21 nt, Human herpesvirus 4 [Epstein-Barr virus]
caucugaaaaugacaggcugc

SEQ ID NO: 3970958 - RNA, 22 nt, Human herpesvirus 4 [Epstein-Barr virus]
caugcccagacucaucucaagg

SEQ ID NO: 3970959 - RNA, 15 nt, Human herpesvirus 4 [Epstein-Barr virus]
caugcucagggccac

SEQ ID NO: 3970960 - RNA, 16 nt, Human herpesvirus 4 [Epstein-Barr virus]
caugcuugggcaugcu

SEQ ID NO: 3970961 - RNA, 17 nt, Human herpesvirus 4 [Epstein-Barr virus]
cauggaaaccacucaga

SEQ ID NO: 3970962 - RNA, 21 nt, Human herpesvirus 4 [Epstein-Barr virus]
cauggagaacguccacgggga

SEQ ID NO: 3970963 - RNA, 13 nt, Human herpesvirus 4 [Epstein-Barr virus]
cauggccaggcuc

SEQ ID NO: 3970964 - RNA, 14 nt, Human herpesvirus 4 [Epstein-Barr virus]
cauggccugggccc

SEQ ID NO: 3970965 - RNA, 22 nt, Human herpesvirus 4 [Epstein-Barr virus]
cauggugagacaccuggcccac

SEQ ID NO: 3970966 - RNA, 14 nt, Human herpesvirus 4 [Epstein-Barr virus]
caugguguagacag

SEQ ID NO: 3970967 - RNA, 19 nt, Human herpesvirus 4 [Epstein-Barr virus]
cauuccccccgccuuuggg

SEQ ID NO: 3970968 - RNA, 16 nt, Human herpesvirus 4 [Epstein-Barr virus]
cauuccuaggagaagg

SEQ ID NO: 3970969 - RNA, 15 nt, Human herpesvirus 4 [Epstein-Barr virus]
cauugcagggcucug

SEQ ID NO: 3970970 - RNA, 18 nt, Human herpesvirus 4 [Epstein-Barr virus]
cauuggcagcagcucugg

SEQ ID NO: 3970971 - RNA, 19 nt, Human herpesvirus 4 [Epstein-Barr virus]
ccaaaacuauaccaaagcu

SEQ ID NO: 3970972 - RNA, 22 nt, Human herpesvirus 4 [Epstein-Barr virus]
ccaaaaguagaggcucaggcca

SEQ ID NO: 3970973 - RNA, 17 nt, Human herpesvirus 4 [Epstein-Barr virus]
ccaaagcgggugcagua

SEQ ID NO: 3970974 - RNA, 21 nt, Human herpesvirus 4 [Epstein-Barr virus]
ccaacaggugcccgagccccg

SEQ ID NO: 3970975 - RNA, 16 nt, Human herpesvirus 4 [Epstein-Barr virus]
ccaagcggcacagauu

SEQ ID NO: 3970976 - RNA, 11 nt, Human herpesvirus 4 [Epstein-Barr virus]
ccaaguacaga

SEQ ID NO: 3970977 - RNA, 20 nt, Human herpesvirus 4 [Epstein-Barr virus]
ccaaguguuuccagacacca

SEQ ID NO: 3970978 - RNA, 14 nt, Human herpesvirus 4 [Epstein-Barr virus]
ccacaaaaaaugca

SEQ ID NO: 3970979 - RNA, 22 nt, Human herpesvirus 4 [Epstein-Barr virus]
ccacaaacaccaguguccagag

SEQ ID NO: 3970980 - RNA, 23 nt, Human herpesvirus 4 [Epstein-Barr virus]
ccacaacugcuauucugagcacc

SEQ ID NO: 3970981 - RNA, 15 nt, Human herpesvirus 4 [Epstein-Barr virus]
ccaccaccuccacca

SEQ ID NO: 3970982 - RNA, 16 nt, Human herpesvirus 4 [Epstein-Barr virus]
ccaccacgaugacucc

SEQ ID NO: 3970983 - RNA, 15 nt, Human herpesvirus 4 [Epstein-Barr virus]
ccaccacucccacca

SEQ ID NO: 3970984 - RNA, 15 nt, Human herpesvirus 4 [Epstein-Barr virus]
ccaccagcuucucaa

SEQ ID NO: 3970985 - RNA, 22 nt, Human herpesvirus 4 [Epstein-Barr virus]
ccaccauaugaugacgccgaga

SEQ ID NO: 3970986 - RNA, 15 nt, Human herpesvirus 4 [Epstein-Barr virus]
ccacccccaccaccu

SEQ ID NO: 3970987 - RNA, 16 nt, Human herpesvirus 4 [Epstein-Barr virus]
ccaccgaccccauauc

SEQ ID NO: 3970988 - RNA, 19 nt, Human herpesvirus 4 [Epstein-Barr virus]
ccaccggcuuggcccucuc

SEQ ID NO: 3970989 - RNA, 18 nt, Human herpesvirus 4 [Epstein-Barr virus]
ccaccggggaggccaggu

SEQ ID NO: 3970990 - RNA, 21 nt, Human herpesvirus 4 [Epstein-Barr virus]
ccaccuagaaagagccauggu

SEQ ID NO: 3970991 - RNA, 13 nt, Human herpesvirus 4 [Epstein-Barr virus]
ccaccuccccugu

SEQ ID NO: 3970992 - RNA, 21 nt, Human herpesvirus 4 [Epstein-Barr virus]
ccaccuguguaaccucacugu

SEQ ID NO: 3970993 - RNA, 18 nt, Human herpesvirus 4 [Epstein-Barr virus]
ccacgguggaacaggagc

SEQ ID NO: 3970994 - RNA, 17 nt, Human herpesvirus 4 [Epstein-Barr virus]
ccacgucaaggcccgga

SEQ ID NO: 3970995 - RNA, 13 nt, Human herpesvirus 4 [Epstein-Barr virus]
ccacguccagacu

SEQ ID NO: 3970996 - RNA, 22 nt, Human herpesvirus 4 [Epstein-Barr virus]
ccacuaucacccauggccaggc

SEQ ID NO: 3970997 - RNA, 19 nt, Human herpesvirus 4 [Epstein-Barr virus]
ccacugugccuaaacguga

SEQ ID NO: 3970998 - RNA, 20 nt, Human herpesvirus 4 [Epstein-Barr virus]
ccacuuacaaccaagccacu

SEQ ID NO: 3970999 - RNA, 19 nt, Human herpesvirus 4 [Epstein-Barr virus]
ccagagcagcccgcacccc

SEQ ID NO: 3971000 - RNA, 17 nt, Human herpesvirus 4 [Epstein-Barr virus]
ccagaugacugagcgca

SEQ ID NO: 3971001 - RNA, 17 nt, Human herpesvirus 4 [Epstein-Barr virus]
ccagcaaccaauguauc

SEQ ID NO: 3971002 - RNA, 16 nt, Human herpesvirus 4 [Epstein-Barr virus]
ccagcagauccagggc

SEQ ID NO: 3971003 - RNA, 12 nt, Human herpesvirus 4 [Epstein-Barr virus]
ccagcagcagcc

SEQ ID NO: 3971004 - RNA, 12 nt, Human herpesvirus 4 [Epstein-Barr virus]
ccagcaggcuca

SEQ ID NO: 3971005 - RNA, 14 nt, Human herpesvirus 4 [Epstein-Barr virus]
ccagcagggcacag

SEQ ID NO: 3971006 - RNA, 20 nt, Human herpesvirus 4 [Epstein-Barr virus]
ccagcagggccuugagccca

SEQ ID NO: 3971007 - RNA, 16 nt, Human herpesvirus 4 [Epstein-Barr virus]
ccagcauggcagccgg

SEQ ID NO: 3971008 - RNA, 13 nt, Human herpesvirus 4 [Epstein-Barr virus]
ccagccacagcac

SEQ ID NO: 3971009 - RNA, 22 nt, Human herpesvirus 4 [Epstein-Barr virus]
ccagccccaauucuugcaccca

SEQ ID NO: 3971010 - RNA, 23 nt, Human herpesvirus 4 [Epstein-Barr virus]
ccagcuaguagcccuuggaacug

SEQ ID NO: 3971011 - RNA, 15 nt, Human herpesvirus 4 [Epstein-Barr virus]
ccagcucggccagca

SEQ ID NO: 3971012 - RNA, 15 nt, Human herpesvirus 4 [Epstein-Barr virus]
ccaggaccuggaugc

SEQ ID NO: 3971013 - RNA, 21 nt, Human herpesvirus 4 [Epstein-Barr virus]
ccaggaggaggacgugaguga

SEQ ID NO: 3971014 - RNA, 21 nt, Human herpesvirus 4 [Epstein-Barr virus]
ccagggacauccccagacuca

SEQ ID NO: 3971015 - RNA, 13 nt, Human herpesvirus 4 [Epstein-Barr virus]
ccagggaggccug

SEQ ID NO: 3971016 - RNA, 17 nt, Human herpesvirus 4 [Epstein-Barr virus]
ccagggcguacaccugg

SEQ ID NO: 3971017 - RNA, 20 nt, Human herpesvirus 4 [Epstein-Barr virus]
ccagguacaggaccuggaaa

SEQ ID NO: 3971018 - RNA, 22 nt, Human herpesvirus 4 [Epstein-Barr virus]
ccucggcgcugggacugccugg

SEQ ID NO: 3971019 - RNA, 18 nt, Human herpesvirus 4 [Epstein-Barr virus]
ccucgggucucgccgcua

SEQ ID NO: 3971020 - RNA, 15 nt, Human herpesvirus 4 [Epstein-Barr virus]
ccucguuuacuaaug

SEQ ID NO: 3971021 - RNA, 13 nt, Human herpesvirus 4 [Epstein-Barr virus]
ccucuacgcccca

SEQ ID NO: 3971022 - RNA, 19 nt, Human herpesvirus 4 [Epstein-Barr virus]
ccucucuggcugugcugac

SEQ ID NO: 3971023 - RNA, 13 nt, Human herpesvirus 4 [Epstein-Barr virus]
ccugagccacacc

SEQ ID NO: 3971024 - RNA, 18 nt, Human herpesvirus 4 [Epstein-Barr virus]
ccugagccugagccacac

SEQ ID NO: 3971025 - RNA, 14 nt, Human herpesvirus 4 [Epstein-Barr virus]
ccugagcugccugg

SEQ ID NO: 3971026 - RNA, 21 nt, Human herpesvirus 4 [Epstein-Barr virus]
ccugauauugucccccuagcc

SEQ ID NO: 3971027 - RNA, 22 nt, Human herpesvirus 4 [Epstein-Barr virus]
ccugauuuuuguccgcaggugg

SEQ ID NO: 3971028 - RNA, 22 nt, Human herpesvirus 4 [Epstein-Barr virus]
ccugcaaacugacacacaggcc

SEQ ID NO: 3971029 - RNA, 17 nt, Human herpesvirus 4 [Epstein-Barr virus]
ccugcacggcccuccag

SEQ ID NO: 3971030 - RNA, 15 nt, Human herpesvirus 4 [Epstein-Barr virus]
ccugcauggccaggc

SEQ ID NO: 3971031 - RNA, 23 nt, Human herpesvirus 4 [Epstein-Barr virus]
ccugccacuuccacagcaauggc

SEQ ID NO: 3971032 - RNA, 21 nt, Human herpesvirus 4 [Epstein-Barr virus]
ccugccucucuuaugccugug

SEQ ID NO: 3971033 - RNA, 22 nt, Human herpesvirus 4 [Epstein-Barr virus]
ccugcgacgcggugcugaccgg

SEQ ID NO: 3971034 - RNA, 17 nt, Human herpesvirus 4 [Epstein-Barr virus]
ccugcggacucaggcca

SEQ ID NO: 3971035 - RNA, 23 nt, Human herpesvirus 4 [Epstein-Barr virus]
ccugcguugaacccaccccuccu

SEQ ID NO: 3971036 - RNA, 14 nt, Human herpesvirus 4 [Epstein-Barr virus]
ccuggaagcaggag

SEQ ID NO: 3971037 - RNA, 22 nt, Human herpesvirus 4 [Epstein-Barr virus]
ccuggacacaagagccaucacc

SEQ ID NO: 3971038 - RNA, 13 nt, Human herpesvirus 4 [Epstein-Barr virus]
ccuggagccagcg

SEQ ID NO: 3971039 - RNA, 14 nt, Human herpesvirus 4 [Epstein-Barr virus]
ccuggaucugagcu

SEQ ID NO: 3971040 - RNA, 14 nt, Human herpesvirus 4 [Epstein-Barr virus]
ccuggcccacugga

SEQ ID NO: 3971041 - RNA, 21 nt, Human herpesvirus 4 [Epstein-Barr virus]
ccuggcuguacgccgccgcca

SEQ ID NO: 3971042 - RNA, 17 nt, Human herpesvirus 4 [Epstein-Barr virus]
ccugggcaaggagcugu

SEQ ID NO: 3971043 - RNA, 16 nt, Human herpesvirus 4 [Epstein-Barr virus]
ccugguacaggaccau

SEQ ID NO: 3971044 - RNA, 14 nt, Human herpesvirus 4 [Epstein-Barr virus]
ccugugccauacca

SEQ ID NO: 3971045 - RNA, 24 nt, Human herpesvirus 4 [Epstein-Barr virus]
ccuucgauuuuacgaugaaggagg

SEQ ID NO: 3971046 - RNA, 16 nt, Human herpesvirus 4 [Epstein-Barr virus]
ccuucuccaucuccau

SEQ ID NO: 3971047 - RNA, 20 nt, Human herpesvirus 4 [Epstein-Barr virus]
ccuucucugauggccuggag

SEQ ID NO: 3971048 - RNA, 23 nt, Human herpesvirus 4 [Epstein-Barr virus]
ccuucugcugcugcuggucaugg

SEQ ID NO: 3971049 - RNA, 17 nt, Human herpesvirus 4 [Epstein-Barr virus]
ccuuggggguggugggc

SEQ ID NO: 3971050 - RNA, 15 nt, Human herpesvirus 4 [Epstein-Barr virus]
cgaaacuauggcaga

SEQ ID NO: 3971051 - RNA, 14 nt, Human herpesvirus 4 [Epstein-Barr virus]
cgaaagcggcccag

SEQ ID NO: 3971052 - RNA, 18 nt, Human herpesvirus 4 [Epstein-Barr virus]
cgaagaacacuccacaga

SEQ ID NO: 3971053 - RNA, 15 nt, Human herpesvirus 4 [Epstein-Barr virus]
cgaaggagagcugga

SEQ ID NO: 3971054 - RNA, 14 nt, Human herpesvirus 4 [Epstein-Barr virus]
cgacaucgccgccc

SEQ ID NO: 3971055 - RNA, 21 nt, Human herpesvirus 4 [Epstein-Barr virus]
cgaccccauaucgcaacacug

SEQ ID NO: 3971056 - RNA, 13 nt, Human herpesvirus 4 [Epstein-Barr virus]
cgaccugccaaag

SEQ ID NO: 3971057 - RNA, 15 nt, Human herpesvirus 4 [Epstein-Barr virus]
cgacgagcagaggac

SEQ ID NO: 3971058 - RNA, 13 nt, Human herpesvirus 4 [Epstein-Barr virus]
cgacgcucccggg

SEQ ID NO: 3971059 - RNA, 20 nt, Human herpesvirus 4 [Epstein-Barr virus]
cgacuacgagggccucuggc

SEQ ID NO: 3971060 - RNA, 17 nt, Human herpesvirus 4 [Epstein-Barr virus]
cgagcagcgcggcagag

SEQ ID NO: 3971061 - RNA, 19 nt, Human herpesvirus 4 [Epstein-Barr virus]
cgagcagcgcggcagaggc

SEQ ID NO: 3971062 - RNA, 22 nt, Human herpesvirus 4 [Epstein-Barr virus]
cgagcagcgcggcagaggccuc

SEQ ID NO: 3971063 - RNA, 17 nt, Human herpesvirus 4 [Epstein-Barr virus]
cgagccccgccuggcgg

SEQ ID NO: 3971064 - RNA, 15 nt, Human herpesvirus 4 [Epstein-Barr virus]
cgagcucuccagcca

SEQ ID NO: 3971065 - RNA, 17 nt, Human herpesvirus 4 [Epstein-Barr virus]
cgaggaacuggcucagc

SEQ ID NO: 3971066 - RNA, 18 nt, Human herpesvirus 4 [Epstein-Barr virus]
cgaggaacuggcucagcu

SEQ ID NO: 3971067 - RNA, 18 nt, Human herpesvirus 4 [Epstein-Barr virus]
cgaggauaaucugggcag

SEQ ID NO: 3971068 - RNA, 23 nt, Human herpesvirus 4 [Epstein-Barr virus]
cgaggcugagaacugacgcucca

SEQ ID NO: 3971069 - RNA, 12 nt, Human herpesvirus 4 [Epstein-Barr virus]
cgaggggccagg

SEQ ID NO: 3971070 - RNA, 13 nt, Human herpesvirus 4 [Epstein-Barr virus]
cgaggggccaggu

SEQ ID NO: 3971071 - RNA, 24 nt, Human herpesvirus 4 [Epstein-Barr virus]
cgaugaacgccuacgcagaggcca

SEQ ID NO: 3971072 - RNA, 20 nt, Human herpesvirus 4 [Epstein-Barr virus]
cgaugccucuacgccccaga

SEQ ID NO: 3971073 - RNA, 19 nt, Human herpesvirus 4 [Epstein-Barr virus]
cgcaacgccggccugcugg

SEQ ID NO: 3971074 - RNA, 13 nt, Human herpesvirus 4 [Epstein-Barr virus]
cgcaccagggcca

SEQ ID NO: 3971075 - RNA, 19 nt, Human herpesvirus 4 [Epstein-Barr virus]
cgcaccuguguccugggca

SEQ ID NO: 3971076 - RNA, 17 nt, Human herpesvirus 4 [Epstein-Barr virus]
cgcagaggccugcacca

SEQ ID NO: 3971077 - RNA, 17 nt, Human herpesvirus 4 [Epstein-Barr virus]
cgcagccacguccagac

SEQ ID NO: 3971078 - RNA, 15 nt, Human herpesvirus 4 [Epstein-Barr virus]
cgccaccggcuuggc

SEQ ID NO: 3971079 - RNA, 22 nt, Human herpesvirus 4 [Epstein-Barr virus]
ugauucaucagaagcuacaaac

SEQ ID NO: 3971080 - RNA, 18 nt, Human herpesvirus 4 [Epstein-Barr virus]
ugcaacaaucuggacucu

SEQ ID NO: 3971081 - RNA, 23 nt, Human herpesvirus 4 [Epstein-Barr virus]
ugcaagauaucacacccucggag

SEQ ID NO: 3971082 - RNA, 16 nt, Human herpesvirus 4 [Epstein-Barr virus]
ugcacaggaugacagc

SEQ ID NO: 3971083 - RNA, 13 nt, Human herpesvirus 4 [Epstein-Barr virus]
ugcaccagcucca

SEQ ID NO: 3971084 - RNA, 14 nt, Human herpesvirus 4 [Epstein-Barr virus]
ugcaccagcuccag

SEQ ID NO: 3971085 - RNA, 17 nt, Human herpesvirus 4 [Epstein-Barr virus]
ugcacuauauucuccag

SEQ ID NO: 3971086 - RNA, 16 nt, Human herpesvirus 4 [Epstein-Barr virus]
ugcaggccuggacagc

SEQ ID NO: 3971087 - RNA, 20 nt, Human herpesvirus 4 [Epstein-Barr virus]
ugcagugggccucucuggcu

SEQ ID NO: 3971088 - RNA, 13 nt, Human herpesvirus 4 [Epstein-Barr virus]
ugcauggccaggc

SEQ ID NO: 3971089 - RNA, 14 nt, Human herpesvirus 4 [Epstein-Barr virus]
ugcauggccaggcc

SEQ ID NO: 3971090 - RNA, 19 nt, Human herpesvirus 4 [Epstein-Barr virus]
ugccagaugugccugggcu

SEQ ID NO: 3971091 - RNA, 15 nt, Human herpesvirus 4 [Epstein-Barr virus]
ugccaugugugucca

SEQ ID NO: 3971092 - RNA, 16 nt, Human herpesvirus 4 [Epstein-Barr virus]
ugccauguguguccag

SEQ ID NO: 3971093 - RNA, 19 nt, Human herpesvirus 4 [Epstein-Barr virus]
ugcccaccagccagcgacu

SEQ ID NO: 3971094 - RNA, 17 nt, Human herpesvirus 4 [Epstein-Barr virus]
ugcccagacucaucuca

SEQ ID NO: 3971095 - RNA, 21 nt, Human herpesvirus 4 [Epstein-Barr virus]
ugcccagacucaucucaaggg

SEQ ID NO: 3971096 - RNA, 14 nt, Human herpesvirus 4 [Epstein-Barr virus]
ugccccucagccug

SEQ ID NO: 3971097 - RNA, 17 nt, Human herpesvirus 4 [Epstein-Barr virus]
ugccccucagccugcuc

SEQ ID NO: 3971098 - RNA, 22 nt, Human herpesvirus 4 [Epstein-Barr virus]
ugccggcccuuacaacagguuu

SEQ ID NO: 3971099 - RNA, 15 nt, Human herpesvirus 4 [Epstein-Barr virus]
ugccgugaaugcacg

SEQ ID NO: 3971100 - RNA, 22 nt, Human herpesvirus 4 [Epstein-Barr virus]
ugccuaaacgugauggugcugg

SEQ ID NO: 3971101 - RNA, 16 nt, Human herpesvirus 4 [Epstein-Barr virus]
ugccucccugccccuc

SEQ ID NO: 3971102 - RNA, 19 nt, Human herpesvirus 4 [Epstein-Barr virus]
ugccuccucaaauguucca

SEQ ID NO: 3971103 - RNA, 21 nt, Human herpesvirus 4 [Epstein-Barr virus]
ugccucgaguaggugccucca

SEQ ID NO: 3971104 - RNA, 17 nt, Human herpesvirus 4 [Epstein-Barr virus]
ugccucugggugcugag

SEQ ID NO: 3971105 - RNA, 17 nt, Human herpesvirus 4 [Epstein-Barr virus]
ugccuggauucuuacag

SEQ ID NO: 3971106 - RNA, 19 nt, Human herpesvirus 4 [Epstein-Barr virus]
ugccuugcucucagcacuu

SEQ ID NO: 3971107 - RNA, 21 nt, Human herpesvirus 4 [Epstein-Barr virus]
ugccuuucccccacccuggaa

SEQ ID NO: 3971108 - RNA, 22 nt, Human herpesvirus 4 [Epstein-Barr virus]
ugcgaaaacgaaagugcuugaa

SEQ ID NO: 3971109 - RNA, 21 nt, Human herpesvirus 4 [Epstein-Barr virus]
ugcgagaauuggcagacaccu

SEQ ID NO: 3971110 - RNA, 19 nt, Human herpesvirus 4 [Epstein-Barr virus]
ugcgaugagggccuuccag

SEQ ID NO: 3971111 - RNA, 12 nt, Human herpesvirus 4 [Epstein-Barr virus]
ugcggggaacug

SEQ ID NO: 3971112 - RNA, 21 nt, Human herpesvirus 4 [Epstein-Barr virus]
ugcgucagcaacugcguccuc

SEQ ID NO: 3971113 - RNA, 16 nt, Human herpesvirus 4 [Epstein-Barr virus]
ugcguccucuaccugg

SEQ ID NO: 3971114 - RNA, 17 nt, Human herpesvirus 4 [Epstein-Barr virus]
ugcuagcgucacugauu

SEQ ID NO: 3971115 - RNA, 16 nt, Human herpesvirus 4 [Epstein-Barr virus]
ugcuagcuucagggaa

SEQ ID NO: 3971116 - RNA, 12 nt, Human herpesvirus 4 [Epstein-Barr virus]
ugcucaaggcag

SEQ ID NO: 3971117 - RNA, 17 nt, Human herpesvirus 4 [Epstein-Barr virus]
ugcuccagugccuccgc

SEQ ID NO: 3971118 - RNA, 16 nt, Human herpesvirus 4 [Epstein-Barr virus]
ugcugaugugcugccc

SEQ ID NO: 3971119 - RNA, 13 nt, Human herpesvirus 4 [Epstein-Barr virus]
ugcugcccaugga

SEQ ID NO: 3971120 - RNA, 20 nt, Human herpesvirus 4 [Epstein-Barr virus]
ugcugcucggggcaugcugc

SEQ ID NO: 3971121 - RNA, 15 nt, Human herpesvirus 4 [Epstein-Barr virus]
ugcuggccgagcugg

SEQ ID NO: 3971122 - RNA, 16 nt, Human herpesvirus 4 [Epstein-Barr virus]
uggaaaagggcccagg

SEQ ID NO: 3971123 - RNA, 15 nt, Human herpesvirus 4 [Epstein-Barr virus]
uggaccaagggcagg

SEQ ID NO: 3971124 - RNA, 14 nt, Human herpesvirus 4 [Epstein-Barr virus]
uggacccugcugcg

SEQ ID NO: 3971125 - RNA, 18 nt, Human herpesvirus 4 [Epstein-Barr virus]
uggaugcaucuaaggucc

SEQ ID NO: 3971126 - RNA, 15 nt, Human herpesvirus 4 [Epstein-Barr virus]
uggcaaagggcaugc

SEQ ID NO: 3971127 - RNA, 20 nt, Human herpesvirus 4 [Epstein-Barr virus]
uggcagaaucaccagagccc

SEQ ID NO: 3971128 - RNA, 14 nt, Human herpesvirus 4 [Epstein-Barr virus]
uggcauccuucaga

SEQ ID NO: 3971129 - RNA, 14 nt, Human herpesvirus 4 [Epstein-Barr virus]
uggcauucagauuu

SEQ ID NO: 3971130 - RNA, 22 nt, Human herpesvirus 4 [Epstein-Barr virus]
uggcauugcggguggauagccu

SEQ ID NO: 3971131 - RNA, 15 nt, Human herpesvirus 4 [Epstein-Barr virus]
uggccgccggauggc

SEQ ID NO: 3971132 - RNA, 17 nt, Human herpesvirus 4 [Epstein-Barr virus]
uggccgccguggccaac

SEQ ID NO: 3971133 - RNA, 21 nt, Human herpesvirus 4 [Epstein-Barr virus]
uggccgugcuggaugagguua

SEQ ID NO: 3971134 - RNA, 12 nt, Human herpesvirus 4 [Epstein-Barr virus]
uggccucaaagu

SEQ ID NO: 3971135 - RNA, 12 nt, Human herpesvirus 4 [Epstein-Barr virus]
uggccuggagag

SEQ ID NO: 3971136 - RNA, 12 nt, Human herpesvirus 4 [Epstein-Barr virus]
uggcggcccagc

SEQ ID NO: 3971137 - RNA, 23 nt, Human herpesvirus 4 [Epstein-Barr virus]
uggcuguacgccgccgccagcag

SEQ ID NO: 3971138 - RNA, 15 nt, Human herpesvirus 4 [Epstein-Barr virus]
uggcuguagccaccc

SEQ ID NO: 3971139 - RNA, 20 nt, Human herpesvirus 4 [Epstein-Barr virus]
ugggaacacggagaucucag

SEQ ID NO: 3971140 - RNA, 19 nt, Human herpesvirus 4 [Epstein-Barr virus]
ugggaagcucagcaguugu

SEQ ID NO: 3971141 - RNA, 15 nt, Human herpesvirus 4 [Epstein-Barr virus]
ugggagggagccugc

SEQ ID NO: 3971142 - RNA, 20 nt, Human herpesvirus 4 [Epstein-Barr virus]
ugggcaaaacucacaggaca

SEQ ID NO: 3971143 - RNA, 15 nt, Human herpesvirus 4 [Epstein-Barr virus]
ugggcgguccuccac

SEQ ID NO: 3971144 - RNA, 15 nt, Human herpesvirus 4 [Epstein-Barr virus]
uggggcaauggcgac

SEQ ID NO: 3971145 - RNA, 15 nt, Human herpesvirus 4 [Epstein-Barr virus]
uggggccauaguggc

SEQ ID NO: 3971146 - RNA, 17 nt, Human herpesvirus 4 [Epstein-Barr virus]
uggggucucaggccucc

SEQ ID NO: 3971147 - RNA, 19 nt, Human herpesvirus 4 [Epstein-Barr virus]
ugggucgccugacccucuu

SEQ ID NO: 3971148 - RNA, 22 nt, Human herpesvirus 4 [Epstein-Barr virus]
ugggugcaagaauuggggcugg

SEQ ID NO: 3971149 - RNA, 15 nt, Human herpesvirus 4 [Epstein-Barr virus]
ugguggcagcaggcg

SEQ ID NO: 3971150 - RNA, 15 nt, Human herpesvirus 4 [Epstein-Barr virus]
uggugggcuccuuag

SEQ ID NO: 3971151 - RNA, 19 nt, Human herpesvirus 4 [Epstein-Barr virus]
ugguggguguccucuacug

SEQ ID NO: 3971152 - RNA, 15 nt, Human herpesvirus 4 [Epstein-Barr virus]
ugguggguguggagc

SEQ ID NO: 3971153 - RNA, 19 nt, Human herpesvirus 4 [Epstein-Barr virus]
ugguuauuuugggccagga

SEQ ID NO: 3971154 - RNA, 21 nt, Human herpesvirus 4 [Epstein-Barr virus]
ugguuccccccaucuuugagg

SEQ ID NO: 3971155 - RNA, 12 nt, Human herpesvirus 4 [Epstein-Barr virus]
ugguugucuucc

SEQ ID NO: 3971156 - RNA, 22 nt, Human herpesvirus 4 [Epstein-Barr virus]
uguaacacuacuuguuucugga

SEQ ID NO: 3971157 - RNA, 19 nt, Human herpesvirus 4 [Epstein-Barr virus]
uguagccacccgucccggg

SEQ ID NO: 3971158 - RNA, 20 nt, Human herpesvirus 4 [Epstein-Barr virus]
uguaucccaaauaaauguua

SEQ ID NO: 3971159 - RNA, 22 nt, Human herpesvirus 4 [Epstein-Barr virus]
uguaucccaaauaaauguuacu

SEQ ID NO: 3971160 - RNA, 13 nt, Human herpesvirus 4 [Epstein-Barr virus]
uguccagaugucc

SEQ ID NO: 3971161 - RNA, 18 nt, Human herpesvirus 4 [Epstein-Barr virus]
ugucccccuagccccggg

SEQ ID NO: 3971162 - RNA, 17 nt, Human herpesvirus 4 [Epstein-Barr virus]
ugucccuuucagugguc

SEQ ID NO: 3971163 - RNA, 12 nt, Human herpesvirus 4 [Epstein-Barr virus]
uguccucccggg

SEQ ID NO: 3971164 - RNA, 16 nt, Human herpesvirus 4 [Epstein-Barr virus]
ugucggggcugcuggc

SEQ ID NO: 3971165 - RNA, 16 nt, Human herpesvirus 4 [Epstein-Barr virus]
ugucuccugacgccaa

SEQ ID NO: 3971166 - RNA, 19 nt, Human herpesvirus 4 [Epstein-Barr virus]
ugucuuccacaccauccac

SEQ ID NO: 3971167 - RNA, 22 nt, Human herpesvirus 4 [Epstein-Barr virus]
uguggaaaaucucgcucagagc

SEQ ID NO: 3971168 - RNA, 19 nt, Human herpesvirus 4 [Epstein-Barr virus]
uguggccuuccucugccug

SEQ ID NO: 3971169 - RNA, 12 nt, Human herpesvirus 4 [Epstein-Barr virus]
uguguacauaau

SEQ ID NO: 3971170 - RNA, 14 nt, Human herpesvirus 4 [Epstein-Barr virus]
ugugugcuguauuu

SEQ ID NO: 3971171 - RNA, 22 nt, Human herpesvirus 4 [Epstein-Barr virus]
uguucagggccgugcauggcag

SEQ ID NO: 3971172 - RNA, 13 nt, Human herpesvirus 4 [Epstein-Barr virus]
uguucuccgagag

SEQ ID NO: 3971173 - RNA, 16 nt, Human herpesvirus 4 [Epstein-Barr virus]
uguuucucagagagca

SEQ ID NO: 3971174 - RNA, 13 nt, Human herpesvirus 4 [Epstein-Barr virus]
uguuuuuggcaug

SEQ ID NO: 3971175 - RNA, 22 nt, Human herpesvirus 4 [Epstein-Barr virus]
uuaaaacaguagaagaacugca

SEQ ID NO: 3971176 - RNA, 23 nt, Human herpesvirus 4 [Epstein-Barr virus]
uuaacgggaagagaaguggggag

SEQ ID NO: 3971177 - RNA, 18 nt, Human herpesvirus 4 [Epstein-Barr virus]
uuaaggugguuauuuugg

SEQ ID NO: 3971178 - RNA, 14 nt, Human herpesvirus 4 [Epstein-Barr virus]
uuacaauaaaauga

SEQ ID NO: 3971179 - RNA, 17 nt, Human herpesvirus 4 [Epstein-Barr virus]
uuacccucauugugcug

SEQ ID NO: 3971180 - RNA, 16 nt, Human herpesvirus 4 [Epstein-Barr virus]
uuacuucuuuugcucu

SEQ ID NO: 3971181 - RNA, 16 nt, Human herpesvirus 4 [Epstein-Barr virus]
uuagacagguaacuca

SEQ ID NO: 3971182 - RNA, 15 nt, Human herpesvirus 4 [Epstein-Barr virus]
uuaggcacuggacac

SEQ ID NO: 3971183 - RNA, 18 nt, Human herpesvirus 4 [Epstein-Barr virus]
uucacuuccucugcuuuu

SEQ ID NO: 3971184 - RNA, 15 nt, Human herpesvirus 4 [Epstein-Barr virus]
uuccacccacugaua

SEQ ID NO: 3971185 - RNA, 17 nt, Human herpesvirus 4 [Epstein-Barr virus]
uuccgugccucgggccu

SEQ ID NO: 3971186 - RNA, 22 nt, Human herpesvirus 4 [Epstein-Barr virus]
uuccuagaaacugugccauggu

SEQ ID NO: 3971187 - RNA, 15 nt, Human herpesvirus 4 [Epstein-Barr virus]
uuccuucucaugcuc

SEQ ID NO: 3971188 - RNA, 14 nt, Human herpesvirus 4 [Epstein-Barr virus]
uuccuuuucaucau

SEQ ID NO: 3971189 - RNA, 13 nt, Human herpesvirus 4 [Epstein-Barr virus]
uucugaaggaacg

SEQ ID NO: 3971190 - RNA, 16 nt, Human herpesvirus 4 [Epstein-Barr virus]
uucugccccucagccu

SEQ ID NO: 3971191 - RNA, 22 nt, Human herpesvirus 4 [Epstein-Barr virus]
uucugcuccagugccuccgccu

SEQ ID NO: 3971192 - RNA, 13 nt, Human herpesvirus 4 [Epstein-Barr virus]
uucugucuguaaa

SEQ ID NO: 3971193 - RNA, 16 nt, Human herpesvirus 4 [Epstein-Barr virus]
uugaugugacuuguga

SEQ ID NO: 3971194 - RNA, 18 nt, Human herpesvirus 4 [Epstein-Barr virus]
uugcaaucccaaguacag

SEQ ID NO: 3971195 - RNA, 19 nt, Human herpesvirus 4 [Epstein-Barr virus]
uugccggccaccuuugcua

SEQ ID NO: 3971196 - RNA, 22 nt, Human herpesvirus 4 [Epstein-Barr virus]
uugccugaagcuugcuggggcg

SEQ ID NO: 3971197 - RNA, 19 nt, Human herpesvirus 4 [Epstein-Barr virus]
uugcgccgccuaaugcauc

SEQ ID NO: 3971198 - RNA, 20 nt, Human herpesvirus 4 [Epstein-Barr virus]
uugcucucagcacuuugcca

SEQ ID NO: 3971199 - RNA, 23 nt, Human herpesvirus 4 [Epstein-Barr virus]
uugggccugcggggaacugagcc

SEQ ID NO: 3971200 - RNA, 20 nt, Human herpesvirus 4 [Epstein-Barr virus]
uuggggguggugggcuccuu

SEQ ID NO: 3971201 - RNA, 11 nt, Human herpesvirus 4 [Epstein-Barr virus]
uugggguccuc

SEQ ID NO: 3971202 - RNA, 18 nt, Human herpesvirus 4 [Epstein-Barr virus]
uuggugcugccugggggc

SEQ ID NO: 3971203 - RNA, 17 nt, Human herpesvirus 4 [Epstein-Barr virus]
uugucacuuucuuugca

SEQ ID NO: 3971204 - RNA, 21 nt, Human herpesvirus 4 [Epstein-Barr virus]
uugucuucccagacucugcuu

SEQ ID NO: 3971205 - RNA, 14 nt, Human herpesvirus 4 [Epstein-Barr virus]
uugugcuccugaua

SEQ ID NO: 3971206 - RNA, 15 nt, Human herpesvirus 4 [Epstein-Barr virus]
uugugcuuguacuga

SEQ ID NO: 3971207 - RNA, 16 nt, Human herpesvirus 4 [Epstein-Barr virus]
uuguuggggaaaacac

SEQ ID NO: 3971208 - RNA, 15 nt, Human herpesvirus 4 [Epstein-Barr virus]
uuucagcaucacagg

SEQ ID NO: 3971209 - RNA, 18 nt, Human herpesvirus 4 [Epstein-Barr virus]
uuuccgauagaauagcug

SEQ ID NO: 3971210 - RNA, 13 nt, Human herpesvirus 4 [Epstein-Barr virus]
uuugacuguuugu

SEQ ID NO: 3971211 - RNA, 22 nt, Human herpesvirus 4 [Epstein-Barr virus]
uuugaucuuugacugacacaua

SEQ ID NO: 3971212 - RNA, 20 nt, Human herpesvirus 4 [Epstein-Barr virus]
uuugccaaccugcucucucu

SEQ ID NO: 3971213 - RNA, 20 nt, Human herpesvirus 4 [Epstein-Barr virus]
uuuuggugaaauaaaaacag

SEQ ID NO: 3971214 - RNA, 18 nt, Human herpesvirus 4 [Epstein-Barr virus]
gacacgcuccuucuuggc

SEQ ID NO: 3971215 - RNA, 18 nt, Human herpesvirus 4 [Epstein-Barr virus]
gacacuuuagagcucugg

SEQ ID NO: 3971216 - RNA, 20 nt, Human herpesvirus 4 [Epstein-Barr virus]
gacacuuuagagcucuggag

SEQ ID NO: 3971217 - RNA, 16 nt, Human herpesvirus 4 [Epstein-Barr virus]
gacaugcuauggugcc

SEQ ID NO: 3971218 - RNA, 19 nt, Human herpesvirus 4 [Epstein-Barr virus]
gacaugugcauggccuggg

SEQ ID NO: 3971219 - RNA, 18 nt, Human herpesvirus 4 [Epstein-Barr virus]
gacauuucucauaauggu

SEQ ID NO: 3971220 - RNA, 20 nt, Human herpesvirus 4 [Epstein-Barr virus]
gaccacauacaucccugucu

SEQ ID NO: 3971221 - RNA, 21 nt, Human herpesvirus 4 [Epstein-Barr virus]
gaccauggaugugaaugcccc

SEQ ID NO: 3971222 - RNA, 13 nt, Human herpesvirus 4 [Epstein-Barr virus]
gacccccccaagc

SEQ ID NO: 3971223 - RNA, 12 nt, Human herpesvirus 4 [Epstein-Barr virus]
gacccuucugcu

SEQ ID NO: 3971224 - RNA, 14 nt, Human herpesvirus 4 [Epstein-Barr virus]
gaccgcgcccuccu

SEQ ID NO: 3971225 - RNA, 14 nt, Human herpesvirus 4 [Epstein-Barr virus]
gaccucgggaggga

SEQ ID NO: 3971226 - RNA, 16 nt, Human herpesvirus 4 [Epstein-Barr virus]
gacgaggacggggaag

SEQ ID NO: 3971227 - RNA, 14 nt, Human herpesvirus 4 [Epstein-Barr virus]
gacgaggggccagg

SEQ ID NO: 3971228 - RNA, 20 nt, Human herpesvirus 4 [Epstein-Barr virus]
gacgcagaaugugcagggau

SEQ ID NO: 3971229 - RNA, 19 nt, Human herpesvirus 4 [Epstein-Barr virus]
gacgcgcagugccaagagc

SEQ ID NO: 3971230 - RNA, 14 nt, Human herpesvirus 4 [Epstein-Barr virus]
gacgcuccaggauc

SEQ ID NO: 3971231 - RNA, 13 nt, Human herpesvirus 4 [Epstein-Barr virus]
gacgcugcugcua

SEQ ID NO: 3971232 - RNA, 14 nt, Human herpesvirus 4 [Epstein-Barr virus]
gacguguguggcug

SEQ ID NO: 3971233 - RNA, 17 nt, Human herpesvirus 4 [Epstein-Barr virus]
gacguguguggcuguag

SEQ ID NO: 3971234 - RNA, 17 nt, Human herpesvirus 4 [Epstein-Barr virus]
gacuacaauguuccuuc

SEQ ID NO: 3971235 - RNA, 18 nt, Human herpesvirus 4 [Epstein-Barr virus]
gacuaucaaccacuagga

SEQ ID NO: 3971236 - RNA, 21 nt, Human herpesvirus 4 [Epstein-Barr virus]
gacugaggggguacggagagg

SEQ ID NO: 3971237 - RNA, 17 nt, Human herpesvirus 4 [Epstein-Barr virus]
gacugcgaucuggaccc

SEQ ID NO: 3971238 - RNA, 17 nt, Human herpesvirus 4 [Epstein-Barr virus]
gacuggcacgguggcuu

SEQ ID NO: 3971239 - RNA, 14 nt, Human herpesvirus 4 [Epstein-Barr virus]
gacuggcggcacug

SEQ ID NO: 3971240 - RNA, 18 nt, Human herpesvirus 4 [Epstein-Barr virus]
gacugggggcaaagccag

SEQ ID NO: 3971241 - RNA, 23 nt, Human herpesvirus 4 [Epstein-Barr virus]
gacuguuuguggcggcaucaugu

SEQ ID NO: 3971242 - RNA, 19 nt, Human herpesvirus 4 [Epstein-Barr virus]
gacuucauauguaugccuu

SEQ ID NO: 3971243 - RNA, 15 nt, Human herpesvirus 4 [Epstein-Barr virus]
gacuucugaagaugu

SEQ ID NO: 3971244 - RNA, 23 nt, Human herpesvirus 4 [Epstein-Barr virus]
gacuugaggugggcugacacaga

SEQ ID NO: 3971245 - RNA, 18 nt, Human herpesvirus 4 [Epstein-Barr virus]
gagaaccugaugugggac

SEQ ID NO: 3971246 - RNA, 16 nt, Human herpesvirus 4 [Epstein-Barr virus]
gagaagagaggcuucc

SEQ ID NO: 3971247 - RNA, 17 nt, Human herpesvirus 4 [Epstein-Barr virus]
gagacgagcugcgacag

SEQ ID NO: 3971248 - RNA, 18 nt, Human herpesvirus 4 [Epstein-Barr virus]
gucaauaauuucagugaa

SEQ ID NO: 3971249 - RNA, 18 nt, Human herpesvirus 4 [Epstein-Barr virus]
gucacauauccagagcug

SEQ ID NO: 3971250 - RNA, 17 nt, Human herpesvirus 4 [Epstein-Barr virus]
gucaggagggcagagag

SEQ ID NO: 3971251 - RNA, 16 nt, Human herpesvirus 4 [Epstein-Barr virus]
gucauggcggacugcg

SEQ ID NO: 3971252 - RNA, 15 nt, Human herpesvirus 4 [Epstein-Barr virus]
guccagauguccagg

SEQ ID NO: 3971253 - RNA, 16 nt, Human herpesvirus 4 [Epstein-Barr virus]
guccagcggggccgca

SEQ ID NO: 3971254 - RNA, 18 nt, Human herpesvirus 4 [Epstein-Barr virus]
guccaggagucugcugcg

SEQ ID NO: 3971255 - RNA, 11 nt, Human herpesvirus 4 [Epstein-Barr virus]
guccagugggg

SEQ ID NO: 3971256 - RNA, 22 nt, Human herpesvirus 4 [Epstein-Barr virus]
guccaguuuuuaugugccucgg

SEQ ID NO: 3971257 - RNA, 22 nt, Human herpesvirus 4 [Epstein-Barr virus]
gucccccuccauuccacccacu

SEQ ID NO: 3971258 - RNA, 23 nt, Human herpesvirus 4 [Epstein-Barr virus]
guccccguggaggaccgcccacc

SEQ ID NO: 3971259 - RNA, 14 nt, Human herpesvirus 4 [Epstein-Barr virus]
gucccggguacaag

SEQ ID NO: 3971260 - RNA, 12 nt, Human herpesvirus 4 [Epstein-Barr virus]
gucccuccucac

SEQ ID NO: 3971261 - RNA, 13 nt, Human herpesvirus 4 [Epstein-Barr virus]
gucccugcugccc

SEQ ID NO: 3971262 - RNA, 16 nt, Human herpesvirus 4 [Epstein-Barr virus]
guccgcuccuacacca

SEQ ID NO: 3971263 - RNA, 17 nt, Human herpesvirus 4 [Epstein-Barr virus]
guccuaggugggauaua

SEQ ID NO: 3971264 - RNA, 22 nt, Human herpesvirus 4 [Epstein-Barr virus]
guccucaaggauggcacgggca

SEQ ID NO: 3971265 - RNA, 19 nt, Human herpesvirus 4 [Epstein-Barr virus]
gucggacgaggaggaagag

SEQ ID NO: 3971266 - RNA, 18 nt, Human herpesvirus 4 [Epstein-Barr virus]
gucucacgagggucugcc

SEQ ID NO: 3971267 - RNA, 17 nt, Human herpesvirus 4 [Epstein-Barr virus]
gucuccccucgagcgcc

SEQ ID NO: 3971268 - RNA, 19 nt, Human herpesvirus 4 [Epstein-Barr virus]
gucuccccucugcagagag

SEQ ID NO: 3971269 - RNA, 21 nt, Human herpesvirus 4 [Epstein-Barr virus]
gucuccccucugcagagagcc

SEQ ID NO: 3971270 - RNA, 16 nt, Human herpesvirus 4 [Epstein-Barr virus]
gucucggccuccuggc

SEQ ID NO: 3971271 - RNA, 19 nt, Human herpesvirus 4 [Epstein-Barr virus]
gucugcaccccaguggaca

SEQ ID NO: 3971272 - RNA, 12 nt, Human herpesvirus 4 [Epstein-Barr virus]
gucugcugccau

SEQ ID NO: 3971273 - RNA, 23 nt, Human herpesvirus 4 [Epstein-Barr virus]
gucuuacugcccagccuacucuc

SEQ ID NO: 3971274 - RNA, 22 nt, Human herpesvirus 4 [Epstein-Barr virus]
gucuucggucaaguaccagcug

SEQ ID NO: 3971275 - RNA, 14 nt, Human herpesvirus 4 [Epstein-Barr virus]
gucuuguaaaacuu

SEQ ID NO: 3971276 - RNA, 13 nt, Human herpesvirus 4 [Epstein-Barr virus]
gugaggcccagcc

SEQ ID NO: 3971277 - RNA, 22 nt, Human herpesvirus 4 [Epstein-Barr virus]
gugagguggugcuugugaaggu

SEQ ID NO: 3971278 - RNA, 12 nt, Human herpesvirus 4 [Epstein-Barr virus]
gugagucagccu

SEQ ID NO: 3971279 - RNA, 18 nt, Human herpesvirus 4 [Epstein-Barr virus]
gugaguccagggcccugg

SEQ ID NO: 3971280 - RNA, 19 nt, Human herpesvirus 4 [Epstein-Barr virus]
gugaugguacggaugauca

SEQ ID NO: 3971281 - RNA, 13 nt, Human herpesvirus 4 [Epstein-Barr virus]
gugcacucucucc

SEQ ID NO: 3971282 - RNA, 22 nt, Human herpesvirus 4 [Epstein-Barr virus]
gugccagacucucuucagugac

SEQ ID NO: 3971283 - RNA, 21 nt, Human herpesvirus 4 [Epstein-Barr virus]
gugccagaugugccugggcua

SEQ ID NO: 3971284 - RNA, 18 nt, Human herpesvirus 4 [Epstein-Barr virus]
gugcccgagccccgccug

SEQ ID NO: 3971285 - RNA, 21 nt, Human herpesvirus 4 [Epstein-Barr virus]
gugccuaaacgugauggugcu

SEQ ID NO: 3971286 - RNA, 12 nt, Human herpesvirus 4 [Epstein-Barr virus]
gugccucagaua

SEQ ID NO: 3971287 - RNA, 15 nt, Human herpesvirus 4 [Epstein-Barr virus]
gugccucugggugcu

SEQ ID NO: 3971288 - RNA, 18 nt, Human herpesvirus 4 [Epstein-Barr virus]
gugccugacggugccgcu

SEQ ID NO: 3971289 - RNA, 18 nt, Human herpesvirus 4 [Epstein-Barr virus]
gugcgcaacgccggccug

SEQ ID NO: 3971290 - RNA, 12 nt, Human herpesvirus 4 [Epstein-Barr virus]
gugcucuucaug

SEQ ID NO: 3971291 - RNA, 21 nt, Human herpesvirus 4 [Epstein-Barr virus]
guggagguugucaaaaucaaa

SEQ ID NO: 3971292 - RNA, 16 nt, Human herpesvirus 4 [Epstein-Barr virus]
guggcagcaggcgcug

SEQ ID NO: 3971293 - RNA, 17 nt, Human herpesvirus 4 [Epstein-Barr virus]
guggcagccgcggccau

SEQ ID NO: 3971294 - RNA, 11 nt, Human herpesvirus 4 [Epstein-Barr virus]
guggcauugcg

SEQ ID NO: 3971295 - RNA, 15 nt, Human herpesvirus 4 [Epstein-Barr virus]
guggcauugcgggug

SEQ ID NO: 3971296 - RNA, 22 nt, Human herpesvirus 4 [Epstein-Barr virus]
guggcccucgguggugggcugc

SEQ ID NO: 3971297 - RNA, 14 nt, Human herpesvirus 4 [Epstein-Barr virus]
guggccugcucacc

SEQ ID NO: 3971298 - RNA, 12 nt, Human herpesvirus 4 [Epstein-Barr virus]
guggccugggag

SEQ ID NO: 3971299 - RNA, 21 nt, Human herpesvirus 4 [Epstein-Barr virus]
guggccuuccucugccuggcc

SEQ ID NO: 3971300 - RNA, 17 nt, Human herpesvirus 4 [Epstein-Barr virus]
gugggccucucuggcug

SEQ ID NO: 3971301 - RNA, 20 nt, Human herpesvirus 4 [Epstein-Barr virus]
gugggccucucuggcugugc

SEQ ID NO: 3971302 - RNA, 15 nt, Human herpesvirus 4 [Epstein-Barr virus]
guggggcugagacca

SEQ ID NO: 3971303 - RNA, 17 nt, Human herpesvirus 4 [Epstein-Barr virus]
guggguccccucugccg

SEQ ID NO: 3971304 - RNA, 17 nt, Human herpesvirus 4 [Epstein-Barr virus]
guggucaccgcgaccaa

SEQ ID NO: 3971305 - RNA, 18 nt, Human herpesvirus 4 [Epstein-Barr virus]
guggucuuagggcgccag

SEQ ID NO: 3971306 - RNA, 14 nt, Human herpesvirus 4 [Epstein-Barr virus]
guggugggcuccuu

SEQ ID NO: 3971307 - RNA, 22 nt, Human herpesvirus 4 [Epstein-Barr virus]
guggugggcuccuuagacugag

SEQ ID NO: 3971308 - RNA, 22 nt, Human herpesvirus 4 [Epstein-Barr virus]
gugguugucuucccagacucug

SEQ ID NO: 3971309 - RNA, 16 nt, Human herpesvirus 4 [Epstein-Barr virus]
gugguuucggacacac

SEQ ID NO: 3971310 - RNA, 15 nt, Human herpesvirus 4 [Epstein-Barr virus]
gugucauuuagaaac

SEQ ID NO: 3971311 - RNA, 17 nt, Human herpesvirus 4 [Epstein-Barr virus]
guguccagguguggaaa

SEQ ID NO: 3971312 - RNA, 13 nt, Human herpesvirus 4 [Epstein-Barr virus]
guguccugggcaa

SEQ ID NO: 3971313 - RNA, 19 nt, Human herpesvirus 4 [Epstein-Barr virus]
guguggcuguagccacccg

SEQ ID NO: 3971314 - RNA, 16 nt, Human herpesvirus 4 [Epstein-Barr virus]
guguguggcuguagcc

SEQ ID NO: 3971315 - RNA, 16 nt, Human herpesvirus 4 [Epstein-Barr virus]
guuaacauggacaugc

SEQ ID NO: 3971316 - RNA, 20 nt, Human herpesvirus 4 [Epstein-Barr virus]
guuaucaccguaccaugagu

SEQ ID NO: 3971317 - RNA, 22 nt, Human herpesvirus 4 [Epstein-Barr virus]
guucaguggacacccaccacac

SEQ ID NO: 3971318 - RNA, 19 nt, Human herpesvirus 4 [Epstein-Barr virus]
guucccuucucccacccug

SEQ ID NO: 3971319 - RNA, 21 nt, Human herpesvirus 4 [Epstein-Barr virus]
guucuccccacgggaaaaaga

SEQ ID NO: 3971320 - RNA, 15 nt, Human herpesvirus 4 [Epstein-Barr virus]
guucuggugaugcuu

SEQ ID NO: 3971321 - RNA, 15 nt, Human herpesvirus 4 [Epstein-Barr virus]
guugcaguauguaca

SEQ ID NO: 3971322 - RNA, 23 nt, Human herpesvirus 4 [Epstein-Barr virus]
guuggagagauucgagaggauga

SEQ ID NO: 3971323 - RNA, 13 nt, Human herpesvirus 4 [Epstein-Barr virus]
guuuaaggaauga

SEQ ID NO: 3971324 - RNA, 16 nt, Human herpesvirus 4 [Epstein-Barr virus]
uaaaaggggcagcaau

SEQ ID NO: 3971325 - RNA, 12 nt, Human herpesvirus 4 [Epstein-Barr virus]
uaaacaagcuga

SEQ ID NO: 3971326 - RNA, 24 nt, Human herpesvirus 4 [Epstein-Barr virus]
uaaacgccugauuuuuguccgcag

SEQ ID NO: 3971327 - RNA, 15 nt, Human herpesvirus 4 [Epstein-Barr virus]
uaaauaucuuccugu

SEQ ID NO: 3971328 - RNA, 18 nt, Human herpesvirus 4 [Epstein-Barr virus]
uaacccaauucccgccuc

SEQ ID NO: 3971329 - RNA, 22 nt, Human herpesvirus 4 [Epstein-Barr virus]
uaaggugguuauuuugggccag

SEQ ID NO: 3971330 - RNA, 14 nt, Human herpesvirus 4 [Epstein-Barr virus]
uaauaaauaucuuc

SEQ ID NO: 3971331 - RNA, 16 nt, Human herpesvirus 4 [Epstein-Barr virus]
uaauguccaguggggu

SEQ ID NO: 3971332 - RNA, 18 nt, Human herpesvirus 4 [Epstein-Barr virus]
uaauucucuucuguuugc

SEQ ID NO: 3971333 - RNA, 15 nt, Human herpesvirus 4 [Epstein-Barr virus]
uacaaacacuacaau

SEQ ID NO: 3971334 - RNA, 15 nt, Human herpesvirus 4 [Epstein-Barr virus]
uacaaacccaacaau

SEQ ID NO: 3971335 - RNA, 21 nt, Human herpesvirus 4 [Epstein-Barr virus]
uacacucuggggucucaggcc

SEQ ID NO: 3971336 - RNA, 22 nt, Human herpesvirus 4 [Epstein-Barr virus]
ggcggcagcggacgguggggcu

SEQ ID NO: 3971337 - RNA, 12 nt, Human herpesvirus 4 [Epstein-Barr virus]
ggcggcccagcc

SEQ ID NO: 3971338 - RNA, 12 nt, Human herpesvirus 4 [Epstein-Barr virus]
ggcggcugcugc

SEQ ID NO: 3971339 - RNA, 22 nt, Human herpesvirus 4 [Epstein-Barr virus]
ggcggguggagauagggaccag

SEQ ID NO: 3971340 - RNA, 14 nt, Human herpesvirus 4 [Epstein-Barr virus]
ggcucaccagggag

SEQ ID NO: 3971341 - RNA, 20 nt, Human herpesvirus 4 [Epstein-Barr virus]
ggcucaccagggaggccugg

SEQ ID NO: 3971342 - RNA, 16 nt, Human herpesvirus 4 [Epstein-Barr virus]
ggcucaggccgccgca

SEQ ID NO: 3971343 - RNA, 13 nt, Human herpesvirus 4 [Epstein-Barr virus]
ggcucauggaggg

SEQ ID NO: 3971344 - RNA, 12 nt, Human herpesvirus 4 [Epstein-Barr virus]
ggcucucuuuga

SEQ ID NO: 3971345 - RNA, 16 nt, Human herpesvirus 4 [Epstein-Barr virus]
ggcugcaaagggaccc

SEQ ID NO: 3971346 - RNA, 15 nt, Human herpesvirus 4 [Epstein-Barr virus]
ggcugcgguggugcg

SEQ ID NO: 3971347 - RNA, 23 nt, Human herpesvirus 4 [Epstein-Barr virus]
ggcuggacgucuuguccuuggug

SEQ ID NO: 3971348 - RNA, 23 nt, Human herpesvirus 4 [Epstein-Barr virus]
ggcugugagcgcacgugacagau

SEQ ID NO: 3971349 - RNA, 21 nt, Human herpesvirus 4 [Epstein-Barr virus]
ggcuuccagagaggcgcagcc

SEQ ID NO: 3971350 - RNA, 20 nt, Human herpesvirus 4 [Epstein-Barr virus]
gggaaagaggucccauguac

SEQ ID NO: 3971351 - RNA, 12 nt, Human herpesvirus 4 [Epstein-Barr virus]
gggacaccugca

SEQ ID NO: 3971352 - RNA, 13 nt, Human herpesvirus 4 [Epstein-Barr virus]
gggacaccugcac

SEQ ID NO: 3971353 - RNA, 16 nt, Human herpesvirus 4 [Epstein-Barr virus]
gggacaguaccacaag

SEQ ID NO: 3971354 - RNA, 18 nt, Human herpesvirus 4 [Epstein-Barr virus]
gggacgcagaaugugcag

SEQ ID NO: 3971355 - RNA, 22 nt, Human herpesvirus 4 [Epstein-Barr virus]
gggagcacauuccccccgccuu

SEQ ID NO: 3971356 - RNA, 16 nt, Human herpesvirus 4 [Epstein-Barr virus]
gggaggcccaggaccu

SEQ ID NO: 3971357 - RNA, 14 nt, Human herpesvirus 4 [Epstein-Barr virus]
gggagggagccugc

SEQ ID NO: 3971358 - RNA, 14 nt, Human herpesvirus 4 [Epstein-Barr virus]
gggaggggcaggag

SEQ ID NO: 3971359 - RNA, 14 nt, Human herpesvirus 4 [Epstein-Barr virus]
gggaguaaggccgc

SEQ ID NO: 3971360 - RNA, 23 nt, Human herpesvirus 4 [Epstein-Barr virus]
gggaguaaggccgcugccaggcc

SEQ ID NO: 3971361 - RNA, 15 nt, Human herpesvirus 4 [Epstein-Barr virus]
gggaugaacccuggg

SEQ ID NO: 3971362 - RNA, 21 nt, Human herpesvirus 4 [Epstein-Barr virus]
gggcacucucgagggugccug

SEQ ID NO: 3971363 - RNA, 14 nt, Human herpesvirus 4 [Epstein-Barr virus]
gggcaggagcagga

SEQ ID NO: 3971364 - RNA, 15 nt, Human herpesvirus 4 [Epstein-Barr virus]
gggcaggagcaggag

SEQ ID NO: 3971365 - RNA, 16 nt, Human herpesvirus 4 [Epstein-Barr virus]
gggcaugcuugggcau

SEQ ID NO: 3971366 - RNA, 20 nt, Human herpesvirus 4 [Epstein-Barr virus]
gggccagguacaggaccugg

SEQ ID NO: 3971367 - RNA, 19 nt, Human herpesvirus 4 [Epstein-Barr virus]
gggccgucacuccagccau

SEQ ID NO: 3971368 - RNA, 16 nt, Human herpesvirus 4 [Epstein-Barr virus]
gggccuuccagagcuc

SEQ ID NO: 3971369 - RNA, 14 nt, Human herpesvirus 4 [Epstein-Barr virus]
gggcgaaggguggg

SEQ ID NO: 3971370 - RNA, 18 nt, Human herpesvirus 4 [Epstein-Barr virus]
gggcugccccgggcccac

SEQ ID NO: 3971371 - RNA, 15 nt, Human herpesvirus 4 [Epstein-Barr virus]
gggcugguggccugg

SEQ ID NO: 3971372 - RNA, 16 nt, Human herpesvirus 4 [Epstein-Barr virus]
gggcugguggccuggg

SEQ ID NO: 3971373 - RNA, 18 nt, Human herpesvirus 4 [Epstein-Barr virus]
gggcugguggccugggag

SEQ ID NO: 3971374 - RNA, 21 nt, Human herpesvirus 4 [Epstein-Barr virus]
gggcugguuggggagcuacag

SEQ ID NO: 3971375 - RNA, 15 nt, Human herpesvirus 4 [Epstein-Barr virus]
ggggagagaaagaga

SEQ ID NO: 3971376 - RNA, 22 nt, Human herpesvirus 4 [Epstein-Barr virus]
ggggcacucucgagggugccug

SEQ ID NO: 3971377 - RNA, 19 nt, Human herpesvirus 4 [Epstein-Barr virus]
ggggccagguacaggaccu

SEQ ID NO: 3971378 - RNA, 15 nt, Human herpesvirus 4 [Epstein-Barr virus]
ggggcugguggccug

SEQ ID NO: 3971379 - RNA, 20 nt, Human herpesvirus 4 [Epstein-Barr virus]
gggguccggucuugcaggga

SEQ ID NO: 3971380 - RNA, 21 nt, Human herpesvirus 4 [Epstein-Barr virus]
gggguucuccaggcuccugga

SEQ ID NO: 3971381 - RNA, 13 nt, Human herpesvirus 4 [Epstein-Barr virus]
ggguaagaggagg

SEQ ID NO: 3971382 - RNA, 20 nt, Human herpesvirus 4 [Epstein-Barr virus]
gggucaagcaaacggccugg

SEQ ID NO: 3971383 - RNA, 20 nt, Human herpesvirus 4 [Epstein-Barr virus]
ggguccaagguugugcugua

SEQ ID NO: 3971384 - RNA, 20 nt, Human herpesvirus 4 [Epstein-Barr virus]
gggugaaagcuacuaucucc

SEQ ID NO: 3971385 - RNA, 14 nt, Human herpesvirus 4 [Epstein-Barr virus]
gggugcucccccug

SEQ ID NO: 3971386 - RNA, 23 nt, Human herpesvirus 4 [Epstein-Barr virus]
ggguggcagcccccuccuccagg

SEQ ID NO: 3971387 - RNA, 21 nt, Human herpesvirus 4 [Epstein-Barr virus]
gguacucuuggugcagcccuu

SEQ ID NO: 3971388 - RNA, 18 nt, Human herpesvirus 4 [Epstein-Barr virus]
gguagauagguggucgca

SEQ ID NO: 3971389 - RNA, 20 nt, Human herpesvirus 4 [Epstein-Barr virus]
gguauucucagaugcagugg

SEQ ID NO: 3971390 - RNA, 19 nt, Human herpesvirus 4 [Epstein-Barr virus]
ggucaaguaccagcuggug

SEQ ID NO: 3971391 - RNA, 20 nt, Human herpesvirus 4 [Epstein-Barr virus]
ggucccuagaaauggugcca

SEQ ID NO: 3971392 - RNA, 18 nt, Human herpesvirus 4 [Epstein-Barr virus]
gguccuccacggggacac

SEQ ID NO: 3971393 - RNA, 23 nt, Human herpesvirus 4 [Epstein-Barr virus]
gguccuccacggggacacgcucc

SEQ ID NO: 3971394 - RNA, 16 nt, Human herpesvirus 4 [Epstein-Barr virus]
ggucgcccccucugcc

SEQ ID NO: 3971395 - RNA, 20 nt, Human herpesvirus 4 [Epstein-Barr virus]
ggucgcccccucugccuccg

SEQ ID NO: 3971396 - RNA, 14 nt, Human herpesvirus 4 [Epstein-Barr virus]
ggucgggggcacuc

SEQ ID NO: 3971397 - RNA, 16 nt, Human herpesvirus 4 [Epstein-Barr virus]
ggugaccuggccaggc

SEQ ID NO: 3971398 - RNA, 13 nt, Human herpesvirus 4 [Epstein-Barr virus]
ggugaggcccagc

SEQ ID NO: 3971399 - RNA, 18 nt, Human herpesvirus 4 [Epstein-Barr virus]
ggugccuguggagauuag

SEQ ID NO: 3971400 - RNA, 10 nt, Human herpesvirus 4 [Epstein-Barr virus]
ggugcucccc

SEQ ID NO: 3971401 - RNA, 14 nt, Human herpesvirus 4 [Epstein-Barr virus]
ggugcuugugaagg

SEQ ID NO: 3971402 - RNA, 19 nt, Human herpesvirus 4 [Epstein-Barr virus]
gguggaacaggagcaggag

SEQ ID NO: 3971403 - RNA, 18 nt, Human herpesvirus 4 [Epstein-Barr virus]
gguggcccucgguggugg

SEQ ID NO: 3971404 - RNA, 17 nt, Human herpesvirus 4 [Epstein-Barr virus]
gguggccgcggcccagg

SEQ ID NO: 3971405 - RNA, 11 nt, Human herpesvirus 4 [Epstein-Barr virus]
ggugggcuggu

SEQ ID NO: 3971406 - RNA, 17 nt, Human herpesvirus 4 [Epstein-Barr virus]
gguguagccggggugga

SEQ ID NO: 3971407 - RNA, 16 nt, Human herpesvirus 4 [Epstein-Barr virus]
gguuagcguggacagu

SEQ ID NO: 3971408 - RNA, 24 nt, Human herpesvirus 4 [Epstein-Barr virus]
gguuggcaugguauuggucgucuu

SEQ ID NO: 3971409 - RNA, 23 nt, Human herpesvirus 4 [Epstein-Barr virus]
gguuucaauuuugggagcuccag

SEQ ID NO: 3971410 - RNA, 16 nt, Human herpesvirus 4 [Epstein-Barr virus]
guaaccuaugccugga

SEQ ID NO: 3971411 - RNA, 17 nt, Human herpesvirus 4 [Epstein-Barr virus]
guaauuguugcgcccua

SEQ ID NO: 3971412 - RNA, 12 nt, Human herpesvirus 4 [Epstein-Barr virus]
guaccagcuggu

SEQ ID NO: 3971413 - RNA, 23 nt, Human herpesvirus 4 [Epstein-Barr virus]
guacccuuucuaccaggggcgag

SEQ ID NO: 3971414 - RNA, 13 nt, Human herpesvirus 4 [Epstein-Barr virus]
guacgugccucag

SEQ ID NO: 3971415 - RNA, 16 nt, Human herpesvirus 4 [Epstein-Barr virus]
guagagaucaggccaa

SEQ ID NO: 3971416 - RNA, 17 nt, Human herpesvirus 4 [Epstein-Barr virus]
guagaggcucaggccau

SEQ ID NO: 3971417 - RNA, 19 nt, Human herpesvirus 4 [Epstein-Barr virus]
guaggcuugauagcaguga

SEQ ID NO: 3971418 - RNA, 19 nt, Human herpesvirus 4 [Epstein-Barr virus]
guaugaggaaggggccucg

SEQ ID NO: 3971419 - RNA, 20 nt, Human herpesvirus 4 [Epstein-Barr virus]
guauuccucaagcccuucuu

SEQ ID NO: 3971420 - RNA, 14 nt, Human herpesvirus 4 [Epstein-Barr virus]
gucaagcaaacggc

SEQ ID NO: 3971421 - RNA, 22 nt, Human herpesvirus 4 [Epstein-Barr virus]
gucaaggccaacucagaccccg

SEQ ID NO: 3971422 - RNA, 14 nt, Human herpesvirus 4 [Epstein-Barr virus]
gucaaguaccagcu

SEQ ID NO: 3971423 - RNA, 16 nt, Human herpesvirus 4 [Epstein-Barr virus]
gucaaguaccagcugg

SEQ ID NO: 3971424 - RNA, 15 nt, Human herpesvirus 4 [Epstein-Barr virus]
cuccauuccacccac

SEQ ID NO: 3971425 - RNA, 18 nt, Human herpesvirus 4 [Epstein-Barr virus]
cuccauuccacccacuga

SEQ ID NO: 3971426 - RNA, 12 nt, Human herpesvirus 4 [Epstein-Barr virus]
cucccaccaccc

SEQ ID NO: 3971427 - RNA, 12 nt, Human herpesvirus 4 [Epstein-Barr virus]
cucccacuguca

SEQ ID NO: 3971428 - RNA, 15 nt, Human herpesvirus 4 [Epstein-Barr virus]
cuccccagccacagc

SEQ ID NO: 3971429 - RNA, 13 nt, Human herpesvirus 4 [Epstein-Barr virus]
cucccccuggaca

SEQ ID NO: 3971430 - RNA, 19 nt, Human herpesvirus 4 [Epstein-Barr virus]
cucccgggcaaacagggca

SEQ ID NO: 3971431 - RNA, 16 nt, Human herpesvirus 4 [Epstein-Barr virus]
cuccgccaccuccggg

SEQ ID NO: 3971432 - RNA, 16 nt, Human herpesvirus 4 [Epstein-Barr virus]
cuccgccguccacucu

SEQ ID NO: 3971433 - RNA, 20 nt, Human herpesvirus 4 [Epstein-Barr virus]
cuccggacgcagaggccugc

SEQ ID NO: 3971434 - RNA, 21 nt, Human herpesvirus 4 [Epstein-Barr virus]
cuccggcggcaguggaccuca

SEQ ID NO: 3971435 - RNA, 12 nt, Human herpesvirus 4 [Epstein-Barr virus]
cuccggcugccc

SEQ ID NO: 3971436 - RNA, 19 nt, Human herpesvirus 4 [Epstein-Barr virus]
cuccggggguccagccggg

SEQ ID NO: 3971437 - RNA, 19 nt, Human herpesvirus 4 [Epstein-Barr virus]
cuccugccugccucugcuc

SEQ ID NO: 3971438 - RNA, 17 nt, Human herpesvirus 4 [Epstein-Barr virus]
cuccuggaucuggggcu

SEQ ID NO: 3971439 - RNA, 13 nt, Human herpesvirus 4 [Epstein-Barr virus]
cuccuugugcagc

SEQ ID NO: 3971440 - RNA, 13 nt, Human herpesvirus 4 [Epstein-Barr virus]
cucgaccagcacg

SEQ ID NO: 3971441 - RNA, 14 nt, Human herpesvirus 4 [Epstein-Barr virus]
cucgagagaggccu

SEQ ID NO: 3971442 - RNA, 16 nt, Human herpesvirus 4 [Epstein-Barr virus]
cucgagagaggccucu

SEQ ID NO: 3971443 - RNA, 21 nt, Human herpesvirus 4 [Epstein-Barr virus]
cucgaguaggugccuccagag

SEQ ID NO: 3971444 - RNA, 15 nt, Human herpesvirus 4 [Epstein-Barr virus]
cucgcagcuggagga

SEQ ID NO: 3971445 - RNA, 19 nt, Human herpesvirus 4 [Epstein-Barr virus]
cucgccuucuccucagccu

SEQ ID NO: 3971446 - RNA, 18 nt, Human herpesvirus 4 [Epstein-Barr virus]
cucgcggaagagcccaaa

SEQ ID NO: 3971447 - RNA, 12 nt, Human herpesvirus 4 [Epstein-Barr virus]
cucgcucagagc

SEQ ID NO: 3971448 - RNA, 17 nt, Human herpesvirus 4 [Epstein-Barr virus]
cucgcucagagcuggga

SEQ ID NO: 3971449 - RNA, 12 nt, Human herpesvirus 4 [Epstein-Barr virus]
cucggaggugcc

SEQ ID NO: 3971450 - RNA, 18 nt, Human herpesvirus 4 [Epstein-Barr virus]
cucguagagaucaggcca

SEQ ID NO: 3971451 - RNA, 22 nt, Human herpesvirus 4 [Epstein-Barr virus]
cucgugcaaccaggcccacugc

SEQ ID NO: 3971452 - RNA, 14 nt, Human herpesvirus 4 [Epstein-Barr virus]
cucuaaucccucug

SEQ ID NO: 3971453 - RNA, 16 nt, Human herpesvirus 4 [Epstein-Barr virus]
cucuaaucccucuggg

SEQ ID NO: 3971454 - RNA, 11 nt, Human herpesvirus 4 [Epstein-Barr virus]
cucucaggccu

SEQ ID NO: 3971455 - RNA, 19 nt, Human herpesvirus 4 [Epstein-Barr virus]
cucugauggccuggagagc

SEQ ID NO: 3971456 - RNA, 24 nt, Human herpesvirus 4 [Epstein-Barr virus]
cucugaugguggccggcagccugg

SEQ ID NO: 3971457 - RNA, 15 nt, Human herpesvirus 4 [Epstein-Barr virus]
cucuggacuuccaug

SEQ ID NO: 3971458 - RNA, 15 nt, Human herpesvirus 4 [Epstein-Barr virus]
cucuggcacugcuag

SEQ ID NO: 3971459 - RNA, 16 nt, Human herpesvirus 4 [Epstein-Barr virus]
cucugggguccaggag

SEQ ID NO: 3971460 - RNA, 18 nt, Human herpesvirus 4 [Epstein-Barr virus]
cucuggggucucaggccu

SEQ ID NO: 3971461 - RNA, 22 nt, Human herpesvirus 4 [Epstein-Barr virus]
cucuggucgcccccucugccuc

SEQ ID NO: 3971462 - RNA, 23 nt, Human herpesvirus 4 [Epstein-Barr virus]
cucuggucgcccccucugccucc

SEQ ID NO: 3971463 - RNA, 22 nt, Human herpesvirus 4 [Epstein-Barr virus]
cucuucauuagauucacguucc

SEQ ID NO: 3971464 - RNA, 16 nt, Human herpesvirus 4 [Epstein-Barr virus]
cucuucugggaacacc

SEQ ID NO: 3971465 - RNA, 16 nt, Human herpesvirus 4 [Epstein-Barr virus]
cucuuggcagcagugg

SEQ ID NO: 3971466 - RNA, 19 nt, Human herpesvirus 4 [Epstein-Barr virus]
cugaacaucucauccccag

SEQ ID NO: 3971467 - RNA, 14 nt, Human herpesvirus 4 [Epstein-Barr virus]
cugaaucuccaccu

SEQ ID NO: 3971468 - RNA, 19 nt, Human herpesvirus 4 [Epstein-Barr virus]
ccgggcccagcccuccuca

SEQ ID NO: 3971469 - RNA, 17 nt, Human herpesvirus 4 [Epstein-Barr virus]
ccggggguggaggcugc

SEQ ID NO: 3971470 - RNA, 21 nt, Human herpesvirus 4 [Epstein-Barr virus]
ccgggucaggucgcggaccag

SEQ ID NO: 3971471 - RNA, 14 nt, Human herpesvirus 4 [Epstein-Barr virus]
ccggguggugagga

SEQ ID NO: 3971472 - RNA, 21 nt, Human herpesvirus 4 [Epstein-Barr virus]
ccggugcugccagagccucug

SEQ ID NO: 3971473 - RNA, 23 nt, Human herpesvirus 4 [Epstein-Barr virus]
ccguaccaugagugccaugugug

SEQ ID NO: 3971474 - RNA, 22 nt, Human herpesvirus 4 [Epstein-Barr virus]
ccguccccugaccggcgcggga

SEQ ID NO: 3971475 - RNA, 22 nt, Human herpesvirus 4 [Epstein-Barr virus]
ccgucucggugcgcagacccca

SEQ ID NO: 3971476 - RNA, 19 nt, Human herpesvirus 4 [Epstein-Barr virus]
ccguguuucucccacuguc

SEQ ID NO: 3971477 - RNA, 23 nt, Human herpesvirus 4 [Epstein-Barr virus]
ccuaaacgugauggugcuggucu

SEQ ID NO: 3971478 - RNA, 13 nt, Human herpesvirus 4 [Epstein-Barr virus]
ccuaagcagcuga

SEQ ID NO: 3971479 - RNA, 22 nt, Human herpesvirus 4 [Epstein-Barr virus]
ccuagugguuucggacacaccg

SEQ ID NO: 3971480 - RNA, 15 nt, Human herpesvirus 4 [Epstein-Barr virus]
ccuaucauguuucaa

SEQ ID NO: 3971481 - RNA, 14 nt, Human herpesvirus 4 [Epstein-Barr virus]
ccuaugccuggaag

SEQ ID NO: 3971482 - RNA, 16 nt, Human herpesvirus 4 [Epstein-Barr virus]
ccuaugccuggaagaa

SEQ ID NO: 3971483 - RNA, 15 nt, Human herpesvirus 4 [Epstein-Barr virus]
ccucacgaccugugu

SEQ ID NO: 3971484 - RNA, 13 nt, Human herpesvirus 4 [Epstein-Barr virus]
ccucauccugcuc

SEQ ID NO: 3971485 - RNA, 21 nt, Human herpesvirus 4 [Epstein-Barr virus]
ccuccacuuacaaccaagcca

SEQ ID NO: 3971486 - RNA, 22 nt, Human herpesvirus 4 [Epstein-Barr virus]
ccuccccaauggggcuggcagu

SEQ ID NO: 3971487 - RNA, 13 nt, Human herpesvirus 4 [Epstein-Barr virus]
ccucccccugccc

SEQ ID NO: 3971488 - RNA, 13 nt, Human herpesvirus 4 [Epstein-Barr virus]
ccuccgccgccug

SEQ ID NO: 3971489 - RNA, 22 nt, Human herpesvirus 4 [Epstein-Barr virus]
ccucgaguaggugccuccagag

SEQ ID NO: 3971490 - RNA, 14 nt, Human herpesvirus 4 [Epstein-Barr virus]
cacuggaugcagga

SEQ ID NO: 3971491 - RNA, 15 nt, Human herpesvirus 4 [Epstein-Barr virus]
cacuggugguggagg

SEQ ID NO: 3971492 - RNA, 19 nt, Human herpesvirus 4 [Epstein-Barr virus]
cacuguauaaagaaugccc

SEQ ID NO: 3971493 - RNA, 24 nt, Human herpesvirus 4 [Epstein-Barr virus]
cacuuuguacagacuuuuggcaau

SEQ ID NO: 3971494 - RNA, 17 nt, Human herpesvirus 4 [Epstein-Barr virus]
cagaaaaucgcagcagg

SEQ ID NO: 3971495 - RNA, 15 nt, Human herpesvirus 4 [Epstein-Barr virus]
cagaaagaggcucug

SEQ ID NO: 3971496 - RNA, 13 nt, Human herpesvirus 4 [Epstein-Barr virus]
cagaaccaucagc

SEQ ID NO: 3971497 - RNA, 20 nt, Human herpesvirus 4 [Epstein-Barr virus]
cagaagacuccugccugaau

SEQ ID NO: 3971498 - RNA, 19 nt, Human herpesvirus 4 [Epstein-Barr virus]
cagaaucaccagagcccag

SEQ ID NO: 3971499 - RNA, 21 nt, Human herpesvirus 4 [Epstein-Barr virus]
cagagccccuuuugccccccu

SEQ ID NO: 3971500 - RNA, 22 nt, Human herpesvirus 4 [Epstein-Barr virus]
cagaggaaggccacaaagaggg

SEQ ID NO: 3971501 - RNA, 20 nt, Human herpesvirus 4 [Epstein-Barr virus]
cagaggccguguuucuccca

SEQ ID NO: 3971502 - RNA, 22 nt, Human herpesvirus 4 [Epstein-Barr virus]
cagagucuacucgaccagcacg

SEQ ID NO: 3971503 - RNA, 21 nt, Human herpesvirus 4 [Epstein-Barr virus]
cagaucccuacuacugcagca

SEQ ID NO: 3971504 - RNA, 22 nt, Human herpesvirus 4 [Epstein-Barr virus]
cagaugcaccgggaugagcugg

SEQ ID NO: 3971505 - RNA, 23 nt, Human herpesvirus 4 [Epstein-Barr virus]
cagauuuccgaaccuugucuuca

SEQ ID NO: 3971506 - RNA, 21 nt, Human herpesvirus 4 [Epstein-Barr virus]
cagcaaccaauguaucccaaa

SEQ ID NO: 3971507 - RNA, 15 nt, Human herpesvirus 4 [Epstein-Barr virus]
cagcaccugucccug

SEQ ID NO: 3971508 - RNA, 15 nt, Human herpesvirus 4 [Epstein-Barr virus]
cagcagacaaggaca

SEQ ID NO: 3971509 - RNA, 13 nt, Human herpesvirus 4 [Epstein-Barr virus]
cagcagcaguggu

SEQ ID NO: 3971510 - RNA, 18 nt, Human herpesvirus 4 [Epstein-Barr virus]
cagcagcccggccgaggc

SEQ ID NO: 3971511 - RNA, 14 nt, Human herpesvirus 4 [Epstein-Barr virus]
cagcagggcacaga

SEQ ID NO: 3971512 - RNA, 16 nt, Human herpesvirus 4 [Epstein-Barr virus]
cagccaccuccccugu

SEQ ID NO: 3971513 - RNA, 23 nt, Human herpesvirus 4 [Epstein-Barr virus]
cagccagguguacgcccuggcgg

SEQ ID NO: 3971514 - RNA, 10 nt, Human herpesvirus 4 [Epstein-Barr virus]
cagcccagcc

SEQ ID NO: 3971515 - RNA, 13 nt, Human herpesvirus 4 [Epstein-Barr virus]
cagcccccccugu

SEQ ID NO: 3971516 - RNA, 17 nt, Human herpesvirus 4 [Epstein-Barr virus]
cagccccgcccucccca

SEQ ID NO: 3971517 - RNA, 14 nt, Human herpesvirus 4 [Epstein-Barr virus]
cagccccucauccc

SEQ ID NO: 3971518 - RNA, 16 nt, Human herpesvirus 4 [Epstein-Barr virus]
cagccccucaucccug

SEQ ID NO: 3971519 - RNA, 12 nt, Human herpesvirus 4 [Epstein-Barr virus]
cagcccuccuca

SEQ ID NO: 3971520 - RNA, 13 nt, Human herpesvirus 4 [Epstein-Barr virus]
cagcccuccucag

SEQ ID NO: 3971521 - RNA, 21 nt, Human herpesvirus 4 [Epstein-Barr virus]
cagcccucgagaaccccagca

SEQ ID NO: 3971522 - RNA, 16 nt, Human herpesvirus 4 [Epstein-Barr virus]
cagcccuuaacacacc

SEQ ID NO: 3971523 - RNA, 21 nt, Human herpesvirus 4 [Epstein-Barr virus]
cagcccuuuuaacauuggcag

SEQ ID NO: 3971524 - RNA, 16 nt, Human herpesvirus 4 [Epstein-Barr virus]
cagccgcugaagccag

SEQ ID NO: 3971525 - RNA, 19 nt, Human herpesvirus 4 [Epstein-Barr virus]
cagccgcuucagacagccg

SEQ ID NO: 3971526 - RNA, 15 nt, Human herpesvirus 4 [Epstein-Barr virus]
cagccgggaggaaga

SEQ ID NO: 3971527 - RNA, 18 nt, Human herpesvirus 4 [Epstein-Barr virus]
cagccugcaccaguggcu

SEQ ID NO: 3971528 - RNA, 15 nt, Human herpesvirus 4 [Epstein-Barr virus]
cagcgccagcagggc

SEQ ID NO: 3971529 - RNA, 13 nt, Human herpesvirus 4 [Epstein-Barr virus]
cagcgccuccucg

SEQ ID NO: 3971530 - RNA, 15 nt, Human herpesvirus 4 [Epstein-Barr virus]
cagcgcggcagaggc

SEQ ID NO: 3971531 - RNA, 13 nt, Human herpesvirus 4 [Epstein-Barr virus]
cagcgcuggcucc

SEQ ID NO: 3971532 - RNA, 15 nt, Human herpesvirus 4 [Epstein-Barr virus]
cagcggacggugggg

SEQ ID NO: 3971533 - RNA, 15 nt, Human herpesvirus 4 [Epstein-Barr virus]
cagcggauggugggg

SEQ ID NO: 3971534 - RNA, 23 nt, Human herpesvirus 4 [Epstein-Barr virus]
cagcgucaggagagggccagaga

SEQ ID NO: 3971535 - RNA, 15 nt, Human herpesvirus 4 [Epstein-Barr virus]
cagcuaacaggacau

SEQ ID NO: 3971536 - RNA, 19 nt, Human herpesvirus 4 [Epstein-Barr virus]
cagcugacggugggcauga

SEQ ID NO: 3971537 - RNA, 17 nt, Human herpesvirus 4 [Epstein-Barr virus]
cagcugaguccccuccu

SEQ ID NO: 3971538 - RNA, 18 nt, Human herpesvirus 4 [Epstein-Barr virus]
cagcuguucccagucucc

SEQ ID NO: 3971539 - RNA, 17 nt, Human herpesvirus 4 [Epstein-Barr virus]
cagcuuuuggccuucuu

SEQ ID NO: 3971540 - RNA, 16 nt, Human herpesvirus 4 [Epstein-Barr virus]
caggaaguacagccgg

SEQ ID NO: 3971541 - RNA, 14 nt, Human herpesvirus 4 [Epstein-Barr virus]
caggacacgugaca

SEQ ID NO: 3971542 - RNA, 22 nt, Human herpesvirus 4 [Epstein-Barr virus]
caggagacacacguggcuucca

SEQ ID NO: 3971543 - RNA, 23 nt, Human herpesvirus 4 [Epstein-Barr virus]
caggagccccgggcggcucagga

SEQ ID NO: 3971544 - RNA, 18 nt, Human herpesvirus 4 [Epstein-Barr virus]
caggagcgggaggggcag

SEQ ID NO: 3971545 - RNA, 23 nt, Human herpesvirus 4 [Epstein-Barr virus]
caggagcgggaggggcaggagca

SEQ ID NO: 3971546 - RNA, 22 nt, Human herpesvirus 4 [Epstein-Barr virus]
caggaggaggggcaggagcagg

SEQ ID NO: 3971547 - RNA, 16 nt, Human herpesvirus 4 [Epstein-Barr virus]
caggaggggcaggagc

SEQ ID NO: 3971548 - RNA, 17 nt, Human herpesvirus 4 [Epstein-Barr virus]
caggaggggcaggagca

SEQ ID NO: 3971549 - RNA, 21 nt, Human herpesvirus 4 [Epstein-Barr virus]
caggaggggcaggaggggcag

SEQ ID NO: 3971550 - RNA, 16 nt, Human herpesvirus 4 [Epstein-Barr virus]
caggcacaucuggcac

SEQ ID NO: 3971551 - RNA, 13 nt, Human herpesvirus 4 [Epstein-Barr virus]
caggcagaggaag

SEQ ID NO: 3971552 - RNA, 13 nt, Human herpesvirus 4 [Epstein-Barr virus]
caggcagccuugc

SEQ ID NO: 3971553 - RNA, 13 nt, Human herpesvirus 4 [Epstein-Barr virus]
caggcccccagcu

SEQ ID NO: 3971554 - RNA, 14 nt, Human herpesvirus 4 [Epstein-Barr virus]
caggccgccaugcu

SEQ ID NO: 3971555 - RNA, 23 nt, Human herpesvirus 4 [Epstein-Barr virus]
caggccgccaugcucagggccac

SEQ ID NO: 3971556 - RNA, 19 nt, Human herpesvirus 4 [Epstein-Barr virus]
caggccucacgaucuucaa

SEQ ID NO: 3971557 - RNA, 11 nt, Human herpesvirus 4 [Epstein-Barr virus]
caggcuccugg

SEQ ID NO: 3971558 - RNA, 14 nt, Human herpesvirus 4 [Epstein-Barr virus]
caggcucggcaccu

SEQ ID NO: 3971559 - RNA, 23 nt, Human herpesvirus 4 [Epstein-Barr virus]
gacuacaaggcauuuacguucug

SEQ ID NO: 3971560 - RNA, 19 nt, Human herpesvirus 4 [Epstein-Barr virus]
gacuccggggguccagccg

SEQ ID NO: 3971561 - RNA, 22 nt, Human herpesvirus 4 [Epstein-Barr virus]
gacuccgugaccaaccggcacg

SEQ ID NO: 3971562 - RNA, 13 nt, Human herpesvirus 4 [Epstein-Barr virus]
gacucuugaagau

SEQ ID NO: 3971563 - RNA, 23 nt, Human herpesvirus 4 [Epstein-Barr virus]
gacugcaaacccuggccgccgga

SEQ ID NO: 3971564 - RNA, 15 nt, Human herpesvirus 4 [Epstein-Barr virus]
gacuggggugugaag

SEQ ID NO: 3971565 - RNA, 16 nt, Human herpesvirus 4 [Epstein-Barr virus]
gagacguguguggcug

SEQ ID NO: 3971566 - RNA, 14 nt, Human herpesvirus 4 [Epstein-Barr virus]
gagagcuccgccac

SEQ ID NO: 3971567 - RNA, 12 nt, Human herpesvirus 4 [Epstein-Barr virus]
gagaggccucug

SEQ ID NO: 3971568 - RNA, 20 nt, Human herpesvirus 4 [Epstein-Barr virus]
gagaugugcgcccugcucuc

SEQ ID NO: 3971569 - RNA, 13 nt, Human herpesvirus 4 [Epstein-Barr virus]
gagauuaggggua

SEQ ID NO: 3971570 - RNA, 14 nt, Human herpesvirus 4 [Epstein-Barr virus]
gagcagaaggccau

SEQ ID NO: 3971571 - RNA, 21 nt, Human herpesvirus 4 [Epstein-Barr virus]
gagcagaaggccauggagaac

SEQ ID NO: 3971572 - RNA, 12 nt, Human herpesvirus 4 [Epstein-Barr virus]
gagcaggagcag

SEQ ID NO: 3971573 - RNA, 15 nt, Human herpesvirus 4 [Epstein-Barr virus]
ccugggagggccauc

SEQ ID NO: 3971574 - RNA, 14 nt, Human herpesvirus 4 [Epstein-Barr virus]
ccugucggcucucu

SEQ ID NO: 3971575 - RNA, 18 nt, Human herpesvirus 4 [Epstein-Barr virus]
ccugucucuuucuggcca

SEQ ID NO: 3971576 - RNA, 13 nt, Human herpesvirus 4 [Epstein-Barr virus]
ccuuaacacacca

SEQ ID NO: 3971577 - RNA, 21 nt, Human herpesvirus 4 [Epstein-Barr virus]
ccuucggacccugguacagga

SEQ ID NO: 3971578 - RNA, 21 nt, Human herpesvirus 4 [Epstein-Barr virus]
ccuugaucuucuucucccuca

SEQ ID NO: 3971579 - RNA, 18 nt, Human herpesvirus 4 [Epstein-Barr virus]
ccuugcccccgccagcgc

SEQ ID NO: 3971580 - RNA, 17 nt, Human herpesvirus 4 [Epstein-Barr virus]
ccuugcccucuccagca

SEQ ID NO: 3971581 - RNA, 17 nt, Human herpesvirus 4 [Epstein-Barr virus]
ccuugcguggugcuguc

SEQ ID NO: 3971582 - RNA, 19 nt, Human herpesvirus 4 [Epstein-Barr virus]
ccuuggcaucaucagcgcc

SEQ ID NO: 3971583 - RNA, 17 nt, Human herpesvirus 4 [Epstein-Barr virus]
ccuuguccgcugggcca

SEQ ID NO: 3971584 - RNA, 15 nt, Human herpesvirus 4 [Epstein-Barr virus]
cgacaauaaaguuga

SEQ ID NO: 3971585 - RNA, 16 nt, Human herpesvirus 4 [Epstein-Barr virus]
cgacaucgccgcccca

SEQ ID NO: 3971586 - RNA, 18 nt, Human herpesvirus 4 [Epstein-Barr virus]
cgacauguuucuggugag

SEQ ID NO: 3971587 - RNA, 23 nt, Human herpesvirus 4 [Epstein-Barr virus]
cgaccagucaugucgagcaugag

SEQ ID NO: 3971588 - RNA, 16 nt, Human herpesvirus 4 [Epstein-Barr virus]
cgacgcggugcugacc

SEQ ID NO: 3971589 - RNA, 17 nt, Human herpesvirus 4 [Epstein-Barr virus]
cgacugccgccgccucc

SEQ ID NO: 3971590 - RNA, 19 nt, Human herpesvirus 4 [Epstein-Barr virus]
cgacugggggcaaagccag

SEQ ID NO: 3971591 - RNA, 13 nt, Human herpesvirus 4 [Epstein-Barr virus]
cgagaaggaggag

SEQ ID NO: 3971592 - RNA, 20 nt, Human herpesvirus 4 [Epstein-Barr virus]
cgagaauuggcagacaccuu

SEQ ID NO: 3971593 - RNA, 20 nt, Human herpesvirus 4 [Epstein-Barr virus]
cgagcagcgcggcagaggcc

SEQ ID NO: 3971594 - RNA, 22 nt, Human herpesvirus 4 [Epstein-Barr virus]
cgagcuccgugggcccagagug

SEQ ID NO: 3971595 - RNA, 18 nt, Human herpesvirus 4 [Epstein-Barr virus]
cgagggccucuggcacgc

SEQ ID NO: 3971596 - RNA, 17 nt, Human herpesvirus 4 [Epstein-Barr virus]
cgagggugaggcccagc

SEQ ID NO: 3971597 - RNA, 19 nt, Human herpesvirus 4 [Epstein-Barr virus]
cgaguaggugccuccagag

SEQ ID NO: 3971598 - RNA, 14 nt, Human herpesvirus 4 [Epstein-Barr virus]
cgaguggcagaauc

SEQ ID NO: 3971599 - RNA, 15 nt, Human herpesvirus 4 [Epstein-Barr virus]
cgaucccaggccuca

SEQ ID NO: 3971600 - RNA, 19 nt, Human herpesvirus 4 [Epstein-Barr virus]
cgaugauugagaaugccaa

SEQ ID NO: 3971601 - RNA, 13 nt, Human herpesvirus 4 [Epstein-Barr virus]
cgcaccaccgcag

SEQ ID NO: 3971602 - RNA, 12 nt, Human herpesvirus 4 [Epstein-Barr virus]
cgccaccugcag

SEQ ID NO: 3971603 - RNA, 16 nt, Human herpesvirus 4 [Epstein-Barr virus]
cgccagcagggcacag

SEQ ID NO: 3971604 - RNA, 19 nt, Human herpesvirus 4 [Epstein-Barr virus]
cgccagccaccccagacag

SEQ ID NO: 3971605 - RNA, 14 nt, Human herpesvirus 4 [Epstein-Barr virus]
cgccaggaccugga

SEQ ID NO: 3971606 - RNA, 20 nt, Human herpesvirus 4 [Epstein-Barr virus]
cgccaggugguuacaggaga

SEQ ID NO: 3971607 - RNA, 20 nt, Human herpesvirus 4 [Epstein-Barr virus]
cgccaucuacccaacagucu

SEQ ID NO: 3971608 - RNA, 19 nt, Human herpesvirus 4 [Epstein-Barr virus]
cgcccccucugccuccggc

SEQ ID NO: 3971609 - RNA, 14 nt, Human herpesvirus 4 [Epstein-Barr virus]
cgcccgggggccag

SEQ ID NO: 3971610 - RNA, 14 nt, Human herpesvirus 4 [Epstein-Barr virus]
cgccguccacucua

SEQ ID NO: 3971611 - RNA, 12 nt, Human herpesvirus 4 [Epstein-Barr virus]
cgccuagagcau

SEQ ID NO: 3971612 - RNA, 15 nt, Human herpesvirus 4 [Epstein-Barr virus]
cgccucguguuucac

SEQ ID NO: 3971613 - RNA, 15 nt, Human herpesvirus 4 [Epstein-Barr virus]
cgccugagcugccug

SEQ ID NO: 3971614 - RNA, 17 nt, Human herpesvirus 4 [Epstein-Barr virus]
cgccugcuucacgccuc

SEQ ID NO: 3971615 - RNA, 21 nt, Human herpesvirus 4 [Epstein-Barr virus]
cgcgcugcucgccccugguag

SEQ ID NO: 3971616 - RNA, 18 nt, Human herpesvirus 4 [Epstein-Barr virus]
cgcggacuccgugaccaa

SEQ ID NO: 3971617 - RNA, 19 nt, Human herpesvirus 4 [Epstein-Barr virus]
cuucuucaggggaaucucu

SEQ ID NO: 3971618 - RNA, 19 nt, Human herpesvirus 4 [Epstein-Barr virus]
cuugaagguggaggggggc

SEQ ID NO: 3971619 - RNA, 19 nt, Human herpesvirus 4 [Epstein-Barr virus]
cuugacuguaaucacuggc

SEQ ID NO: 3971620 - RNA, 15 nt, Human herpesvirus 4 [Epstein-Barr virus]
cuugcccucuccagc

SEQ ID NO: 3971621 - RNA, 11 nt, Human herpesvirus 4 [Epstein-Barr virus]
cuuggaccaag

SEQ ID NO: 3971622 - RNA, 18 nt, Human herpesvirus 4 [Epstein-Barr virus]
cuuggaccaagggcaggg

SEQ ID NO: 3971623 - RNA, 22 nt, Human herpesvirus 4 [Epstein-Barr virus]
cuuggaggcugcuaagccagga

SEQ ID NO: 3971624 - RNA, 23 nt, Human herpesvirus 4 [Epstein-Barr virus]
cuuggcagcaguggccagcucau

SEQ ID NO: 3971625 - RNA, 17 nt, Human herpesvirus 4 [Epstein-Barr virus]
cuuggccccuguguaca

SEQ ID NO: 3971626 - RNA, 18 nt, Human herpesvirus 4 [Epstein-Barr virus]
cuuggcccucucacuucu

SEQ ID NO: 3971627 - RNA, 19 nt, Human herpesvirus 4 [Epstein-Barr virus]
cuugggcaugcuguaccug

SEQ ID NO: 3971628 - RNA, 13 nt, Human herpesvirus 4 [Epstein-Barr virus]
cuuguuucucaga

SEQ ID NO: 3971629 - RNA, 23 nt, Human herpesvirus 4 [Epstein-Barr virus]
cuuguuucucagagagcauuuca

SEQ ID NO: 3971630 - RNA, 15 nt, Human herpesvirus 4 [Epstein-Barr virus]
cuuuaaaggggagau

SEQ ID NO: 3971631 - RNA, 20 nt, Human herpesvirus 4 [Epstein-Barr virus]
cuuuaggcguaacuugucua

SEQ ID NO: 3971632 - RNA, 23 nt, Human herpesvirus 4 [Epstein-Barr virus]
cuuuccuagaaacugugccaugg

SEQ ID NO: 3971633 - RNA, 13 nt, Human herpesvirus 4 [Epstein-Barr virus]
cuuucuaugccug

SEQ ID NO: 3971634 - RNA, 22 nt, Human herpesvirus 4 [Epstein-Barr virus]
cuuuuacagugguucuccugau

SEQ ID NO: 3971635 - RNA, 11 nt, Human herpesvirus 4 [Epstein-Barr virus]
gaaaaaccaga

SEQ ID NO: 3971636 - RNA, 13 nt, Human herpesvirus 4 [Epstein-Barr virus]
gaaaccccacgga

SEQ ID NO: 3971637 - RNA, 14 nt, Human herpesvirus 4 [Epstein-Barr virus]
gaaacccucaguca

SEQ ID NO: 3971638 - RNA, 16 nt, Human herpesvirus 4 [Epstein-Barr virus]
gaaagaggcucugcau

SEQ ID NO: 3971639 - RNA, 23 nt, Human herpesvirus 4 [Epstein-Barr virus]
gaaaggguuggcaguguggcccg

SEQ ID NO: 3971640 - RNA, 21 nt, Human herpesvirus 4 [Epstein-Barr virus]
gaacacggagaucucagaauu

SEQ ID NO: 3971641 - RNA, 20 nt, Human herpesvirus 4 [Epstein-Barr virus]
gaacauccugcguggcugga

SEQ ID NO: 3971642 - RNA, 13 nt, Human herpesvirus 4 [Epstein-Barr virus]
gaaccagaaagau

SEQ ID NO: 3971643 - RNA, 21 nt, Human herpesvirus 4 [Epstein-Barr virus]
gaaccugagccugagccacac

SEQ ID NO: 3971644 - RNA, 13 nt, Human herpesvirus 4 [Epstein-Barr virus]
gaacgguggccag

SEQ ID NO: 3971645 - RNA, 16 nt, Human herpesvirus 4 [Epstein-Barr virus]
gaagaggacgaggacg

SEQ ID NO: 3971646 - RNA, 18 nt, Human herpesvirus 4 [Epstein-Barr virus]
gaagaucgugaggccuga

SEQ ID NO: 3971647 - RNA, 15 nt, Human herpesvirus 4 [Epstein-Barr virus]
gaagauugucacagc

SEQ ID NO: 3971648 - RNA, 18 nt, Human herpesvirus 4 [Epstein-Barr virus]
gaagcccaagaagaagcc

SEQ ID NO: 3971649 - RNA, 21 nt, Human herpesvirus 4 [Epstein-Barr virus]
gaagcccaagaagaagcccac

SEQ ID NO: 3971650 - RNA, 20 nt, Human herpesvirus 4 [Epstein-Barr virus]
gaagcuggccaggcugguga

SEQ ID NO: 3971651 - RNA, 13 nt, Human herpesvirus 4 [Epstein-Barr virus]
gaagggcagggcu

SEQ ID NO: 3971652 - RNA, 12 nt, Human herpesvirus 4 [Epstein-Barr virus]
gaauaugaugag

SEQ ID NO: 3971653 - RNA, 20 nt, Human herpesvirus 4 [Epstein-Barr virus]
gaaucgguaaggaggggcuc

SEQ ID NO: 3971654 - RNA, 15 nt, Human herpesvirus 4 [Epstein-Barr virus]
gaaucugggcuggga

SEQ ID NO: 3971655 - RNA, 13 nt, Human herpesvirus 4 [Epstein-Barr virus]
gaaugugguaaca

SEQ ID NO: 3971656 - RNA, 23 nt, Human herpesvirus 4 [Epstein-Barr virus]
gacacaggacuaaccaugccauc

SEQ ID NO: 3971657 - RNA, 16 nt, Human herpesvirus 4 [Epstein-Barr virus]
gacagaaauuggguga

SEQ ID NO: 3971658 - RNA, 13 nt, Human herpesvirus 4 [Epstein-Barr virus]
gacaggcugcgcc

SEQ ID NO: 3971659 - RNA, 14 nt, Human herpesvirus 4 [Epstein-Barr virus]
gacaguaacacagg

SEQ ID NO: 3971660 - RNA, 14 nt, Human herpesvirus 4 [Epstein-Barr virus]
gacaguaccacaag

SEQ ID NO: 3971661 - RNA, 22 nt, Human herpesvirus 4 [Epstein-Barr virus]
gacauccccagacucaccccca

SEQ ID NO: 3971662 - RNA, 21 nt, Human herpesvirus 4 [Epstein-Barr virus]
gacauuucucauaauggugcc

SEQ ID NO: 3971663 - RNA, 15 nt, Human herpesvirus 4 [Epstein-Barr virus]
gaccaauacccagga

SEQ ID NO: 3971664 - RNA, 17 nt, Human herpesvirus 4 [Epstein-Barr virus]
gaccaaugccaaagcug

SEQ ID NO: 3971665 - RNA, 23 nt, Human herpesvirus 4 [Epstein-Barr virus]
gaccaaugccaaagcugaagaac

SEQ ID NO: 3971666 - RNA, 16 nt, Human herpesvirus 4 [Epstein-Barr virus]
gaccagcguguuucau

SEQ ID NO: 3971667 - RNA, 19 nt, Human herpesvirus 4 [Epstein-Barr virus]
gaccaggucgaccaccuca

SEQ ID NO: 3971668 - RNA, 18 nt, Human herpesvirus 4 [Epstein-Barr virus]
gacccaucugagggcagu

SEQ ID NO: 3971669 - RNA, 23 nt, Human herpesvirus 4 [Epstein-Barr virus]
gacccaucugagggcagugauag

SEQ ID NO: 3971670 - RNA, 14 nt, Human herpesvirus 4 [Epstein-Barr virus]
gaccggcgcgggag

SEQ ID NO: 3971671 - RNA, 16 nt, Human herpesvirus 4 [Epstein-Barr virus]
gaccuggcucaggucc

SEQ ID NO: 3971672 - RNA, 18 nt, Human herpesvirus 4 [Epstein-Barr virus]
gacgaagacccaucugag

SEQ ID NO: 3971673 - RNA, 19 nt, Human herpesvirus 4 [Epstein-Barr virus]
gacgcacacggaaaccaca

SEQ ID NO: 3971674 - RNA, 14 nt, Human herpesvirus 4 [Epstein-Barr virus]
gacgcagaggccug

SEQ ID NO: 3971675 - RNA, 18 nt, Human herpesvirus 4 [Epstein-Barr virus]
gacgccaaugccaacucc

SEQ ID NO: 3971676 - RNA, 21 nt, Human herpesvirus 4 [Epstein-Barr virus]
gacgccugcggacucaggcca

SEQ ID NO: 3971677 - RNA, 17 nt, Human herpesvirus 4 [Epstein-Barr virus]
gacggaaaucugcucuu

SEQ ID NO: 3971678 - RNA, 14 nt, Human herpesvirus 4 [Epstein-Barr virus]
gacgggguggugcc

SEQ ID NO: 3971679 - RNA, 18 nt, Human herpesvirus 4 [Epstein-Barr virus]
gacgggguggugccuggu

SEQ ID NO: 3971680 - RNA, 20 nt, Human herpesvirus 4 [Epstein-Barr virus]
gacggugggcaugacacagg

SEQ ID NO: 3971681 - RNA, 13 nt, Human herpesvirus 4 [Epstein-Barr virus]
gacguguguggcu

SEQ ID NO: 3971682 - RNA, 20 nt, Human herpesvirus 4 [Epstein-Barr virus]
gacguguguggcuguagcca

SEQ ID NO: 3971683 - RNA, 14 nt, Human herpesvirus 4 [Epstein-Barr virus]
gcagcggccuuacu

SEQ ID NO: 3971684 - RNA, 20 nt, Human herpesvirus 4 [Epstein-Barr virus]
gcagcucaccuauggucacu

SEQ ID NO: 3971685 - RNA, 18 nt, Human herpesvirus 4 [Epstein-Barr virus]
gcagcugaguccccuccu

SEQ ID NO: 3971686 - RNA, 22 nt, Human herpesvirus 4 [Epstein-Barr virus]
gcagcugugugcgcgccgccag

SEQ ID NO: 3971687 - RNA, 18 nt, Human herpesvirus 4 [Epstein-Barr virus]
gcaggaccuagaaugugg

SEQ ID NO: 3971688 - RNA, 19 nt, Human herpesvirus 4 [Epstein-Barr virus]
gcaggagcgggaggggcag

SEQ ID NO: 3971689 - RNA, 16 nt, Human herpesvirus 4 [Epstein-Barr virus]
gcaggaggaggggcag

SEQ ID NO: 3971690 - RNA, 18 nt, Human herpesvirus 4 [Epstein-Barr virus]
gcaggaggggcaggagca

SEQ ID NO: 3971691 - RNA, 18 nt, Human herpesvirus 4 [Epstein-Barr virus]
gcaggcauuuuuggugcu

SEQ ID NO: 3971692 - RNA, 19 nt, Human herpesvirus 4 [Epstein-Barr virus]
ucguccgccuacugguugu

SEQ ID NO: 3971693 - RNA, 15 nt, Human herpesvirus 4 [Epstein-Barr virus]
ucgugaguccagggc

SEQ ID NO: 3971694 - RNA, 18 nt, Human herpesvirus 4 [Epstein-Barr virus]
ucgugcaaccaggcccac

SEQ ID NO: 3971695 - RNA, 22 nt, Human herpesvirus 4 [Epstein-Barr virus]
ucuaacacgcuuuugucugccu

SEQ ID NO: 3971696 - RNA, 23 nt, Human herpesvirus 4 [Epstein-Barr virus]
ucuaacacgcuuuugucugccug

SEQ ID NO: 3971697 - RNA, 20 nt, Human herpesvirus 4 [Epstein-Barr virus]
ucuacaaccccuuccacgug

SEQ ID NO: 3971698 - RNA, 13 nt, Human herpesvirus 4 [Epstein-Barr virus]
ucuacuuuaaaaa

SEQ ID NO: 3971699 - RNA, 19 nt, Human herpesvirus 4 [Epstein-Barr virus]
ucuaggacgcuguccgcca

SEQ ID NO: 3971700 - RNA, 15 nt, Human herpesvirus 4 [Epstein-Barr virus]
ucuauccaggaggag

SEQ ID NO: 3971701 - RNA, 11 nt, Human herpesvirus 4 [Epstein-Barr virus]
ucucagggaca

SEQ ID NO: 3971702 - RNA, 14 nt, Human herpesvirus 4 [Epstein-Barr virus]
ucuccagcaaccaa

SEQ ID NO: 3971703 - RNA, 20 nt, Human herpesvirus 4 [Epstein-Barr virus]
ucuccugccugccucugcuc

SEQ ID NO: 3971704 - RNA, 16 nt, Human herpesvirus 4 [Epstein-Barr virus]
ucuccugugugacccc

SEQ ID NO: 3971705 - RNA, 15 nt, Human herpesvirus 4 [Epstein-Barr virus]
ucucgcccaagcugc

SEQ ID NO: 3971706 - RNA, 21 nt, Human herpesvirus 4 [Epstein-Barr virus]
ucucgccuuguuucucagaga

SEQ ID NO: 3971707 - RNA, 16 nt, Human herpesvirus 4 [Epstein-Barr virus]
ucucggccuacgaggc

SEQ ID NO: 3971708 - RNA, 17 nt, Human herpesvirus 4 [Epstein-Barr virus]
ucucuagagccaggcua

SEQ ID NO: 3971709 - RNA, 21 nt, Human herpesvirus 4 [Epstein-Barr virus]
ucugaggaccuguugcuucag

SEQ ID NO: 3971710 - RNA, 14 nt, Human herpesvirus 4 [Epstein-Barr virus]
ucugauuauagcuc

SEQ ID NO: 3971711 - RNA, 16 nt, Human herpesvirus 4 [Epstein-Barr virus]
ucuggcugugcugacc

SEQ ID NO: 3971712 - RNA, 18 nt, Human herpesvirus 4 [Epstein-Barr virus]
ucugggccgcccggccuc

SEQ ID NO: 3971713 - RNA, 22 nt, Human herpesvirus 4 [Epstein-Barr virus]
ucuggggcuggccugccuggau

SEQ ID NO: 3971714 - RNA, 21 nt, Human herpesvirus 4 [Epstein-Barr virus]
ucuguacaauggggccaggac

SEQ ID NO: 3971715 - RNA, 11 nt, Human herpesvirus 4 [Epstein-Barr virus]
ucuguggcagu

SEQ ID NO: 3971716 - RNA, 20 nt, Human herpesvirus 4 [Epstein-Barr virus]
ucuguuaaggcuguugacau

SEQ ID NO: 3971717 - RNA, 20 nt, Human herpesvirus 4 [Epstein-Barr virus]
ucuuacaccagaggccacaa

SEQ ID NO: 3971718 - RNA, 17 nt, Human herpesvirus 4 [Epstein-Barr virus]
ucuucaagauugggugg

SEQ ID NO: 3971719 - RNA, 13 nt, Human herpesvirus 4 [Epstein-Barr virus]
ucuucucugcucg

SEQ ID NO: 3971720 - RNA, 18 nt, Human herpesvirus 4 [Epstein-Barr virus]
ucuugauaaaacagguua

SEQ ID NO: 3971721 - RNA, 14 nt, Human herpesvirus 4 [Epstein-Barr virus]
ucuuugcaauuugc

SEQ ID NO: 3971722 - RNA, 18 nt, Human herpesvirus 4 [Epstein-Barr virus]
ucuuuugcucuuaaccau

SEQ ID NO: 3971723 - RNA, 14 nt, Human herpesvirus 4 [Epstein-Barr virus]
ugaaaagccacauu

SEQ ID NO: 3971724 - RNA, 14 nt, Human herpesvirus 4 [Epstein-Barr virus]
ugacauauguacaa

SEQ ID NO: 3971725 - RNA, 15 nt, Human herpesvirus 4 [Epstein-Barr virus]
ugaccaagcuaccag

SEQ ID NO: 3971726 - RNA, 21 nt, Human herpesvirus 4 [Epstein-Barr virus]
ugaccuccuacacguuugccc

SEQ ID NO: 3971727 - RNA, 18 nt, Human herpesvirus 4 [Epstein-Barr virus]
ugacggucgccauugccc

SEQ ID NO: 3971728 - RNA, 12 nt, Human herpesvirus 4 [Epstein-Barr virus]
ugacgguggugg

SEQ ID NO: 3971729 - RNA, 17 nt, Human herpesvirus 4 [Epstein-Barr virus]
ugacuacaauguuccuu

SEQ ID NO: 3971730 - RNA, 14 nt, Human herpesvirus 4 [Epstein-Barr virus]
ugacugacucuccc

SEQ ID NO: 3971731 - RNA, 21 nt, Human herpesvirus 4 [Epstein-Barr virus]
ugacuggcagaaaggcuggcc

SEQ ID NO: 3971732 - RNA, 21 nt, Human herpesvirus 4 [Epstein-Barr virus]
ugacuguaaucacuggcaaag

SEQ ID NO: 3971733 - RNA, 22 nt, Human herpesvirus 4 [Epstein-Barr virus]
ugagccaggcuuucuaugccug

SEQ ID NO: 3971734 - RNA, 20 nt, Human herpesvirus 4 [Epstein-Barr virus]
ugaggacggugucugugguu

SEQ ID NO: 3971735 - RNA, 15 nt, Human herpesvirus 4 [Epstein-Barr virus]
ugaggcaauggccac

SEQ ID NO: 3971736 - RNA, 22 nt, Human herpesvirus 4 [Epstein-Barr virus]
ugaggguugguguccucccggg

SEQ ID NO: 3971737 - RNA, 19 nt, Human herpesvirus 4 [Epstein-Barr virus]
ugagucaucccguggagag

SEQ ID NO: 3971738 - RNA, 15 nt, Human herpesvirus 4 [Epstein-Barr virus]
ugaguccagggcccu

SEQ ID NO: 3971739 - RNA, 14 nt, Human herpesvirus 4 [Epstein-Barr virus]
ugagugcccagggc

SEQ ID NO: 3971740 - RNA, 22 nt, Human herpesvirus 4 [Epstein-Barr virus]
ugauacucaccaagauuguucc

SEQ ID NO: 3971741 - RNA, 13 nt, Human herpesvirus 4 [Epstein-Barr virus]
ugaucagggagaa

SEQ ID NO: 3971742 - RNA, 14 nt, Human herpesvirus 4 [Epstein-Barr virus]
ugauccuguacaaa

SEQ ID NO: 3971743 - RNA, 17 nt, Human herpesvirus 4 [Epstein-Barr virus]
ugaugcuugugcuccug

SEQ ID NO: 3971744 - RNA, 15 nt, Human herpesvirus 4 [Epstein-Barr virus]
ugauggcaaaggucc

SEQ ID NO: 3971745 - RNA, 13 nt, Human herpesvirus 4 [Epstein-Barr virus]
ugauggugcagag

SEQ ID NO: 3971746 - RNA, 22 nt, Human herpesvirus 4 [Epstein-Barr virus]
ugauuaggcacuggacacacau

SEQ ID NO: 3971747 - RNA, 20 nt, Human herpesvirus 4 [Epstein-Barr virus]
ugcaagucaggauucucuaa

SEQ ID NO: 3971748 - RNA, 16 nt, Human herpesvirus 4 [Epstein-Barr virus]
ugcaaugcccacccac

SEQ ID NO: 3971749 - RNA, 14 nt, Human herpesvirus 4 [Epstein-Barr virus]
ugcaccggagccug

SEQ ID NO: 3971750 - RNA, 18 nt, Human herpesvirus 4 [Epstein-Barr virus]
ugcacgccaacagcgacc

SEQ ID NO: 3971751 - RNA, 15 nt, Human herpesvirus 4 [Epstein-Barr virus]
ugcacggcccuccag

SEQ ID NO: 3971752 - RNA, 14 nt, Human herpesvirus 4 [Epstein-Barr virus]
ugcacucucucccc

SEQ ID NO: 3971753 - RNA, 20 nt, Human herpesvirus 4 [Epstein-Barr virus]
ugcaggccuggacagcacaa

SEQ ID NO: 3971754 - RNA, 15 nt, Human herpesvirus 4 [Epstein-Barr virus]
ugcagggugcacaga

SEQ ID NO: 3971755 - RNA, 21 nt, Human herpesvirus 4 [Epstein-Barr virus]
ugcagguaaaccuucugucug

SEQ ID NO: 3971756 - RNA, 16 nt, Human herpesvirus 4 [Epstein-Barr virus]
gggacuggcggcacug

SEQ ID NO: 3971757 - RNA, 20 nt, Human herpesvirus 4 [Epstein-Barr virus]
gggcaaaacucacaggacau

SEQ ID NO: 3971758 - RNA, 19 nt, Human herpesvirus 4 [Epstein-Barr virus]
gggcacgagauggcccagu

SEQ ID NO: 3971759 - RNA, 22 nt, Human herpesvirus 4 [Epstein-Barr virus]
gggcagaaccaucagcucgccc

SEQ ID NO: 3971760 - RNA, 16 nt, Human herpesvirus 4 [Epstein-Barr virus]
gggcagccagagccag

SEQ ID NO: 3971761 - RNA, 18 nt, Human herpesvirus 4 [Epstein-Barr virus]
gggcaggaggggcaggag

SEQ ID NO: 3971762 - RNA, 20 nt, Human herpesvirus 4 [Epstein-Barr virus]
gggcaucuuaucagagaggc

SEQ ID NO: 3971763 - RNA, 18 nt, Human herpesvirus 4 [Epstein-Barr virus]
gggccacugcaggcugga

SEQ ID NO: 3971764 - RNA, 20 nt, Human herpesvirus 4 [Epstein-Barr virus]
gggccaggcugucgccagcc

SEQ ID NO: 3971765 - RNA, 20 nt, Human herpesvirus 4 [Epstein-Barr virus]
gggcgcaccuguguccuggg

SEQ ID NO: 3971766 - RNA, 22 nt, Human herpesvirus 4 [Epstein-Barr virus]
gggcggcucaggaucagggcca

SEQ ID NO: 3971767 - RNA, 21 nt, Human herpesvirus 4 [Epstein-Barr virus]
gggcuggugggcucccucugg

SEQ ID NO: 3971768 - RNA, 22 nt, Human herpesvirus 4 [Epstein-Barr virus]
gggcugguuggggagcuacaga

SEQ ID NO: 3971769 - RNA, 21 nt, Human herpesvirus 4 [Epstein-Barr virus]
ggggaguaaggccgcugccag

SEQ ID NO: 3971770 - RNA, 23 nt, Human herpesvirus 4 [Epstein-Barr virus]
ggggcaaagccagcgcacccggg

SEQ ID NO: 3971771 - RNA, 16 nt, Human herpesvirus 4 [Epstein-Barr virus]
ggggcaggaggggcag

SEQ ID NO: 3971772 - RNA, 17 nt, Human herpesvirus 4 [Epstein-Barr virus]
ggggcaggaggggcagg

SEQ ID NO: 3971773 - RNA, 21 nt, Human herpesvirus 4 [Epstein-Barr virus]
ggggccaaaagggcucugacc

SEQ ID NO: 3971774 - RNA, 22 nt, Human herpesvirus 4 [Epstein-Barr virus]
ggggcuaaccaaggacaacagc

SEQ ID NO: 3971775 - RNA, 19 nt, Human herpesvirus 4 [Epstein-Barr virus]
ggggcucaaggaggggcgg

SEQ ID NO: 3971776 - RNA, 19 nt, Human herpesvirus 4 [Epstein-Barr virus]
ggggcucauggaggggcgg

SEQ ID NO: 3971777 - RNA, 14 nt, Human herpesvirus 4 [Epstein-Barr virus]
ggggcuggccugcc

SEQ ID NO: 3971778 - RNA, 13 nt, Human herpesvirus 4 [Epstein-Barr virus]
gggguggaggcug

SEQ ID NO: 3971779 - RNA, 15 nt, Human herpesvirus 4 [Epstein-Barr virus]
ggguacaagucccgg

SEQ ID NO: 3971780 - RNA, 18 nt, Human herpesvirus 4 [Epstein-Barr virus]
ggguauucucagaugcag

SEQ ID NO: 3971781 - RNA, 15 nt, Human herpesvirus 4 [Epstein-Barr virus]
gggugacacagugcc

SEQ ID NO: 3971782 - RNA, 16 nt, Human herpesvirus 4 [Epstein-Barr virus]
gggugaccuggcucag

SEQ ID NO: 3971783 - RNA, 16 nt, Human herpesvirus 4 [Epstein-Barr virus]
gggugaggcggugccu

SEQ ID NO: 3971784 - RNA, 22 nt, Human herpesvirus 4 [Epstein-Barr virus]
gguaaguuuucccuuccuuuaa

SEQ ID NO: 3971785 - RNA, 22 nt, Human herpesvirus 4 [Epstein-Barr virus]
gguacaugggccacugcaggcu

SEQ ID NO: 3971786 - RNA, 19 nt, Human herpesvirus 4 [Epstein-Barr virus]
gguagccuugggggccugg

SEQ ID NO: 3971787 - RNA, 18 nt, Human herpesvirus 4 [Epstein-Barr virus]
gguagugauuuggacccg

SEQ ID NO: 3971788 - RNA, 17 nt, Human herpesvirus 4 [Epstein-Barr virus]
gguauucucagaugcag

SEQ ID NO: 3971789 - RNA, 13 nt, Human herpesvirus 4 [Epstein-Barr virus]
gguauuuggacga

SEQ ID NO: 3971790 - RNA, 18 nt, Human herpesvirus 4 [Epstein-Barr virus]
ggucaaguaccagcuggu

SEQ ID NO: 3971791 - RNA, 16 nt, Human herpesvirus 4 [Epstein-Barr virus]
ggucauuagaugcugc

SEQ ID NO: 3971792 - RNA, 22 nt, Human herpesvirus 4 [Epstein-Barr virus]
gguccagaagcagauagccggc

SEQ ID NO: 3971793 - RNA, 13 nt, Human herpesvirus 4 [Epstein-Barr virus]
gguccgugcggcu

SEQ ID NO: 3971794 - RNA, 18 nt, Human herpesvirus 4 [Epstein-Barr virus]
ggugaacacuugggcacg

SEQ ID NO: 3971795 - RNA, 15 nt, Human herpesvirus 4 [Epstein-Barr virus]
ggugaaggcucgacg

SEQ ID NO: 3971796 - RNA, 19 nt, Human herpesvirus 4 [Epstein-Barr virus]
ggugagaaguugguggugg

SEQ ID NO: 3971797 - RNA, 16 nt, Human herpesvirus 4 [Epstein-Barr virus]
ggugcaccagcuccag

SEQ ID NO: 3971798 - RNA, 20 nt, Human herpesvirus 4 [Epstein-Barr virus]
ggugccauuguuuaccgcca

SEQ ID NO: 3971799 - RNA, 19 nt, Human herpesvirus 4 [Epstein-Barr virus]
ggugccgacaccggggugc

SEQ ID NO: 3971800 - RNA, 16 nt, Human herpesvirus 4 [Epstein-Barr virus]
ggugcguggucgggag

SEQ ID NO: 3971801 - RNA, 14 nt, Human herpesvirus 4 [Epstein-Barr virus]
gguggaggcugcgc

SEQ ID NO: 3971802 - RNA, 12 nt, Human herpesvirus 4 [Epstein-Barr virus]
ggugggcugcug

SEQ ID NO: 3971803 - RNA, 13 nt, Human herpesvirus 4 [Epstein-Barr virus]
ggugggcugcuga

SEQ ID NO: 3971804 - RNA, 14 nt, Human herpesvirus 4 [Epstein-Barr virus]
ggugggguggugua

SEQ ID NO: 3971805 - RNA, 14 nt, Human herpesvirus 4 [Epstein-Barr virus]
ggugguggcagcag

SEQ ID NO: 3971806 - RNA, 17 nt, Human herpesvirus 4 [Epstein-Barr virus]
gguguagugggugggca

SEQ ID NO: 3971807 - RNA, 13 nt, Human herpesvirus 4 [Epstein-Barr virus]
gguguccagcgcu

SEQ ID NO: 3971808 - RNA, 16 nt, Human herpesvirus 4 [Epstein-Barr virus]
gguuauggcagagcuu

SEQ ID NO: 3971809 - RNA, 23 nt, Human herpesvirus 4 [Epstein-Barr virus]
gguugucuucccagacucugcuu

SEQ ID NO: 3971810 - RNA, 22 nt, Human herpesvirus 4 [Epstein-Barr virus]
gguuucaauuuugggagcucca

SEQ ID NO: 3971811 - RNA, 21 nt, Human herpesvirus 4 [Epstein-Barr virus]
guaacccuguagucaccugca

SEQ ID NO: 3971812 - RNA, 14 nt, Human herpesvirus 4 [Epstein-Barr virus]
guaagcauggggcu

SEQ ID NO: 3971813 - RNA, 21 nt, Human herpesvirus 4 [Epstein-Barr virus]
guaauccuugggugaccuggc

SEQ ID NO: 3971814 - RNA, 22 nt, Human herpesvirus 4 [Epstein-Barr virus]
guaccagcccuuuuuccagugg

SEQ ID NO: 3971815 - RNA, 14 nt, Human herpesvirus 4 [Epstein-Barr virus]
guaccagcuggugg

SEQ ID NO: 3971816 - RNA, 22 nt, Human herpesvirus 4 [Epstein-Barr virus]
guaccagcuggugguccgcaug

SEQ ID NO: 3971817 - RNA, 16 nt, Human herpesvirus 4 [Epstein-Barr virus]
guacccgccaagcacg

SEQ ID NO: 3971818 - RNA, 18 nt, Human herpesvirus 4 [Epstein-Barr virus]
guacccgggucccgccuc

SEQ ID NO: 3971819 - RNA, 13 nt, Human herpesvirus 4 [Epstein-Barr virus]
guacuaacacgca

SEQ ID NO: 3971820 - RNA, 12 nt, Human herpesvirus 4 [Epstein-Barr virus]
guagaugagccu

SEQ ID NO: 3971821 - RNA, 19 nt, Human herpesvirus 4 [Epstein-Barr virus]
guagccgaauaucuggagg

SEQ ID NO: 3971822 - RNA, 23 nt, Human herpesvirus 4 [Epstein-Barr virus]
guaguaggcacaucuggaccugg

SEQ ID NO: 3971823 - RNA, 21 nt, Human herpesvirus 4 [Epstein-Barr virus]
guauugcgcuggccgagccug

SEQ ID NO: 3971824 - RNA, 12 nt, Human herpesvirus 4 [Epstein-Barr virus]
gucaaggccucg

SEQ ID NO: 3971825 - RNA, 18 nt, Human herpesvirus 4 [Epstein-Barr virus]
gucaaggcucugcacagg

SEQ ID NO: 3971826 - RNA, 14 nt, Human herpesvirus 4 [Epstein-Barr virus]
gucaaggugucaau

SEQ ID NO: 3971827 - RNA, 20 nt, Human herpesvirus 4 [Epstein-Barr virus]
gucacaaccucacugucauu

SEQ ID NO: 3971828 - RNA, 15 nt, Human herpesvirus 4 [Epstein-Barr virus]
gucacggaugcugca

SEQ ID NO: 3971829 - RNA, 23 nt, Human herpesvirus 4 [Epstein-Barr virus]
gucacgugaccuuuuccgccggc

SEQ ID NO: 3971830 - RNA, 13 nt, Human herpesvirus 4 [Epstein-Barr virus]
gucacuccagcca

SEQ ID NO: 3971831 - RNA, 23 nt, Human herpesvirus 4 [Epstein-Barr virus]
gucacugagaaucuccugugcuu

SEQ ID NO: 3971832 - RNA, 13 nt, Human herpesvirus 4 [Epstein-Barr virus]
gucacugauuuug

SEQ ID NO: 3971833 - RNA, 16 nt, Human herpesvirus 4 [Epstein-Barr virus]
gucagcacagccagag

SEQ ID NO: 3971834 - RNA, 23 nt, Human herpesvirus 4 [Epstein-Barr virus]
gucagccuugcccccgccagcgc

SEQ ID NO: 3971835 - RNA, 20 nt, Human herpesvirus 4 [Epstein-Barr virus]
gucagcuguguacgugccuc

SEQ ID NO: 3971836 - RNA, 21 nt, Human herpesvirus 4 [Epstein-Barr virus]
gucaggucgcggaccaggguc

SEQ ID NO: 3971837 - RNA, 13 nt, Human herpesvirus 4 [Epstein-Barr virus]
guccaucccggag

SEQ ID NO: 3971838 - RNA, 20 nt, Human herpesvirus 4 [Epstein-Barr virus]
gucccaaacauaaaugcccc

SEQ ID NO: 3971839 - RNA, 20 nt, Human herpesvirus 4 [Epstein-Barr virus]
agagauuucauccucagagg

SEQ ID NO: 3971840 - RNA, 18 nt, Human herpesvirus 4 [Epstein-Barr virus]
agagcauaugccgguggc

SEQ ID NO: 3971841 - RNA, 19 nt, Human herpesvirus 4 [Epstein-Barr virus]
agagccccuuuugcccccc

SEQ ID NO: 3971842 - RNA, 12 nt, Human herpesvirus 4 [Epstein-Barr virus]
agagcucuggag

SEQ ID NO: 3971843 - RNA, 22 nt, Human herpesvirus 4 [Epstein-Barr virus]
agagcuggaugguguuggagac

SEQ ID NO: 3971844 - RNA, 18 nt, Human herpesvirus 4 [Epstein-Barr virus]
agaggacacgcuggucuu

SEQ ID NO: 3971845 - RNA, 23 nt, Human herpesvirus 4 [Epstein-Barr virus]
agaggcgggaauggccgccaccc

SEQ ID NO: 3971846 - RNA, 21 nt, Human herpesvirus 4 [Epstein-Barr virus]
agagggcagacguuaguaaca

SEQ ID NO: 3971847 - RNA, 22 nt, Human herpesvirus 4 [Epstein-Barr virus]
agagucuaucaggaccugggag

SEQ ID NO: 3971848 - RNA, 12 nt, Human herpesvirus 4 [Epstein-Barr virus]
agauagggacca

SEQ ID NO: 3971849 - RNA, 19 nt, Human herpesvirus 4 [Epstein-Barr virus]
agaucaucccacugggacg

SEQ ID NO: 3971850 - RNA, 15 nt, Human herpesvirus 4 [Epstein-Barr virus]
agaucgugaggccug

SEQ ID NO: 3971851 - RNA, 18 nt, Human herpesvirus 4 [Epstein-Barr virus]
agaucgugaggccugaga

SEQ ID NO: 3971852 - RNA, 21 nt, Human herpesvirus 4 [Epstein-Barr virus]
agaugaccaugauggugcaga

SEQ ID NO: 3971853 - RNA, 17 nt, Human herpesvirus 4 [Epstein-Barr virus]
agauucagacgagucug

SEQ ID NO: 3971854 - RNA, 19 nt, Human herpesvirus 4 [Epstein-Barr virus]
agauuuucccacugugccu

SEQ ID NO: 3971855 - RNA, 20 nt, Human herpesvirus 4 [Epstein-Barr virus]
agcaacccccggcucucagg

SEQ ID NO: 3971856 - RNA, 16 nt, Human herpesvirus 4 [Epstein-Barr virus]
agcaccggagccacca

SEQ ID NO: 3971857 - RNA, 14 nt, Human herpesvirus 4 [Epstein-Barr virus]
agcacuuugaaaga

SEQ ID NO: 3971858 - RNA, 16 nt, Human herpesvirus 4 [Epstein-Barr virus]
agcagaugugcccaag

SEQ ID NO: 3971859 - RNA, 14 nt, Human herpesvirus 4 [Epstein-Barr virus]
agcagcagcccggc

SEQ ID NO: 3971860 - RNA, 20 nt, Human herpesvirus 4 [Epstein-Barr virus]
agcagcccggccgaggccug

SEQ ID NO: 3971861 - RNA, 16 nt, Human herpesvirus 4 [Epstein-Barr virus]
agcagcgcggcagagg

SEQ ID NO: 3971862 - RNA, 22 nt, Human herpesvirus 4 [Epstein-Barr virus]
agcaguagcuugggaacaccgg

SEQ ID NO: 3971863 - RNA, 15 nt, Human herpesvirus 4 [Epstein-Barr virus]
agcauaugccggugg

SEQ ID NO: 3971864 - RNA, 14 nt, Human herpesvirus 4 [Epstein-Barr virus]
agccaccccagaca

SEQ ID NO: 3971865 - RNA, 21 nt, Human herpesvirus 4 [Epstein-Barr virus]
agcccaagaagaagcccaccu

SEQ ID NO: 3971866 - RNA, 16 nt, Human herpesvirus 4 [Epstein-Barr virus]
agccccagccccuccu

SEQ ID NO: 3971867 - RNA, 17 nt, Human herpesvirus 4 [Epstein-Barr virus]
agccccuaggccugcca

SEQ ID NO: 3971868 - RNA, 22 nt, Human herpesvirus 4 [Epstein-Barr virus]
agccccuuuugccccccuggcg

SEQ ID NO: 3971869 - RNA, 16 nt, Human herpesvirus 4 [Epstein-Barr virus]
agcccgccagccaccc

SEQ ID NO: 3971870 - RNA, 22 nt, Human herpesvirus 4 [Epstein-Barr virus]
agcccuucuucguuaugcacuc

SEQ ID NO: 3971871 - RNA, 14 nt, Human herpesvirus 4 [Epstein-Barr virus]
agccggggguugcu

SEQ ID NO: 3971872 - RNA, 16 nt, Human herpesvirus 4 [Epstein-Barr virus]
agccuacccaugacca

SEQ ID NO: 3971873 - RNA, 14 nt, Human herpesvirus 4 [Epstein-Barr virus]
agccuccgggccgc

SEQ ID NO: 3971874 - RNA, 17 nt, Human herpesvirus 4 [Epstein-Barr virus]
agccugacucucaugua

SEQ ID NO: 3971875 - RNA, 23 nt, Human herpesvirus 4 [Epstein-Barr virus]
agccuguucauagagaaagggaa

SEQ ID NO: 3971876 - RNA, 21 nt, Human herpesvirus 4 [Epstein-Barr virus]
agccuugcguggugcuguccu

SEQ ID NO: 3971877 - RNA, 17 nt, Human herpesvirus 4 [Epstein-Barr virus]
agcgaagaacacuccac

SEQ ID NO: 3971878 - RNA, 17 nt, Human herpesvirus 4 [Epstein-Barr virus]
agcgccuccucgcaggc

SEQ ID NO: 3971879 - RNA, 17 nt, Human herpesvirus 4 [Epstein-Barr virus]
agcgcggcagaggccuc

SEQ ID NO: 3971880 - RNA, 15 nt, Human herpesvirus 4 [Epstein-Barr virus]
agcggggcugggugg

SEQ ID NO: 3971881 - RNA, 18 nt, Human herpesvirus 4 [Epstein-Barr virus]
agcucaaccgccagggcg

SEQ ID NO: 3971882 - RNA, 16 nt, Human herpesvirus 4 [Epstein-Barr virus]
agcuccgccaccuccg

SEQ ID NO: 3971883 - RNA, 14 nt, Human herpesvirus 4 [Epstein-Barr virus]
agcuccgugggccc

SEQ ID NO: 3971884 - RNA, 14 nt, Human herpesvirus 4 [Epstein-Barr virus]
agcuccuugugcag

SEQ ID NO: 3971885 - RNA, 20 nt, Human herpesvirus 4 [Epstein-Barr virus]
agcuggaggccauccuccuu

SEQ ID NO: 3971886 - RNA, 20 nt, Human herpesvirus 4 [Epstein-Barr virus]
agcuuaaagagacucaggcc

SEQ ID NO: 3971887 - RNA, 12 nt, Human herpesvirus 4 [Epstein-Barr virus]
agcuucaaguua

SEQ ID NO: 3971888 - RNA, 18 nt, Human herpesvirus 4 [Epstein-Barr virus]
agcuuugaugaggcugaa

SEQ ID NO: 3971889 - RNA, 21 nt, Human herpesvirus 4 [Epstein-Barr virus]
aggaagaguaccccagugacg

SEQ ID NO: 3971890 - RNA, 15 nt, Human herpesvirus 4 [Epstein-Barr virus]
aggaaggggccucgg

SEQ ID NO: 3971891 - RNA, 18 nt, Human herpesvirus 4 [Epstein-Barr virus]
aggacauguuugggggag

SEQ ID NO: 3971892 - RNA, 16 nt, Human herpesvirus 4 [Epstein-Barr virus]
aggacccauauugggg

SEQ ID NO: 3971893 - RNA, 19 nt, Human herpesvirus 4 [Epstein-Barr virus]
aggacccccgcgucacugu

SEQ ID NO: 3971894 - RNA, 13 nt, Human herpesvirus 4 [Epstein-Barr virus]
aggacccugggcc

SEQ ID NO: 3971895 - RNA, 13 nt, Human herpesvirus 4 [Epstein-Barr virus]
aggacgcuguccg

SEQ ID NO: 3971896 - RNA, 16 nt, Human herpesvirus 4 [Epstein-Barr virus]
aggagaauagagggga

SEQ ID NO: 3971897 - RNA, 18 nt, Human herpesvirus 4 [Epstein-Barr virus]
aggagacacggcucuguc

SEQ ID NO: 3971898 - RNA, 16 nt, Human herpesvirus 4 [Epstein-Barr virus]
aggagauccgccagga

SEQ ID NO: 3971899 - RNA, 12 nt, Human herpesvirus 4 [Epstein-Barr virus]
aggagcaggagc

SEQ ID NO: 3971900 - RNA, 21 nt, Human herpesvirus 4 [Epstein-Barr virus]
aggagcaggagcgggaggggc

SEQ ID NO: 3971901 - RNA, 18 nt, Human herpesvirus 4 [Epstein-Barr virus]
aggagcuccgagagcucc

SEQ ID NO: 3971902 - RNA, 19 nt, Human herpesvirus 4 [Epstein-Barr virus]
aggaggauggccuccagcu

SEQ ID NO: 3971903 - RNA, 15 nt, Human herpesvirus 4 [Epstein-Barr virus]
aggaggggcaggagc

SEQ ID NO: 3971904 - RNA, 16 nt, Human herpesvirus 4 [Epstein-Barr virus]
aggaggggcaggaggg

SEQ ID NO: 3971905 - RNA, 19 nt, Human herpesvirus 4 [Epstein-Barr virus]
aggagugccucugggugcu

SEQ ID NO: 3971906 - RNA, 20 nt, Human herpesvirus 4 [Epstein-Barr virus]
aggagugccucugggugcug

SEQ ID NO: 3971907 - RNA, 18 nt, Human herpesvirus 4 [Epstein-Barr virus]
aggaugagaccaguggca

SEQ ID NO: 3971908 - RNA, 13 nt, Human herpesvirus 4 [Epstein-Barr virus]
aggaugaggcuga

SEQ ID NO: 3971909 - RNA, 20 nt, Human herpesvirus 4 [Epstein-Barr virus]
aggauggaagagaggggcag

SEQ ID NO: 3971910 - RNA, 17 nt, Human herpesvirus 4 [Epstein-Barr virus]
aggcauuaccaugucau

SEQ ID NO: 3971911 - RNA, 23 nt, Human herpesvirus 4 [Epstein-Barr virus]
aggcauuuuuggugcugccuggg

SEQ ID NO: 3971912 - RNA, 16 nt, Human herpesvirus 4 [Epstein-Barr virus]
aggccaauuggcacuc

SEQ ID NO: 3971913 - RNA, 17 nt, Human herpesvirus 4 [Epstein-Barr virus]
aggccagguagcccagc

SEQ ID NO: 3971914 - RNA, 16 nt, Human herpesvirus 4 [Epstein-Barr virus]
aggcccaacagcaccg

SEQ ID NO: 3971915 - RNA, 13 nt, Human herpesvirus 4 [Epstein-Barr virus]
aggcccaggaccu

SEQ ID NO: 3971916 - RNA, 21 nt, Human herpesvirus 4 [Epstein-Barr virus]
aggcccccgggugggcugguu

SEQ ID NO: 3971917 - RNA, 23 nt, Human herpesvirus 4 [Epstein-Barr virus]
aggcccuaauucagccaccuccc

SEQ ID NO: 3971918 - RNA, 15 nt, Human herpesvirus 4 [Epstein-Barr virus]
aggccgcugccaggc

SEQ ID NO: 3971919 - RNA, 16 nt, Human herpesvirus 4 [Epstein-Barr virus]
aggccggcugacaugg

SEQ ID NO: 3971920 - RNA, 23 nt, Human herpesvirus 4 [Epstein-Barr virus]
aggccucucucgaguucucuagc

SEQ ID NO: 3971921 - RNA, 14 nt, Human herpesvirus 4 [Epstein-Barr virus]
uccgugggcccaga

SEQ ID NO: 3971922 - RNA, 17 nt, Human herpesvirus 4 [Epstein-Barr virus]
uccuacaacucagcccc

SEQ ID NO: 3971923 - RNA, 17 nt, Human herpesvirus 4 [Epstein-Barr virus]
uccuagaaacugugcca

SEQ ID NO: 3971924 - RNA, 19 nt, Human herpesvirus 4 [Epstein-Barr virus]
uccuaggcacggccucgug

SEQ ID NO: 3971925 - RNA, 14 nt, Human herpesvirus 4 [Epstein-Barr virus]
uccucaaggauggc

SEQ ID NO: 3971926 - RNA, 14 nt, Human herpesvirus 4 [Epstein-Barr virus]
uccuccuguuucug

SEQ ID NO: 3971927 - RNA, 20 nt, Human herpesvirus 4 [Epstein-Barr virus]
uccucguuaguccaagagaa

SEQ ID NO: 3971928 - RNA, 17 nt, Human herpesvirus 4 [Epstein-Barr virus]
uccucugccuggccggc

SEQ ID NO: 3971929 - RNA, 20 nt, Human herpesvirus 4 [Epstein-Barr virus]
uccucuuacaccagaggcca

SEQ ID NO: 3971930 - RNA, 16 nt, Human herpesvirus 4 [Epstein-Barr virus]
uccugcacuauauucu

SEQ ID NO: 3971931 - RNA, 21 nt, Human herpesvirus 4 [Epstein-Barr virus]
uccugcaggggguucuugcua

SEQ ID NO: 3971932 - RNA, 23 nt, Human herpesvirus 4 [Epstein-Barr virus]
uccugugugaccccucacuuugu

SEQ ID NO: 3971933 - RNA, 14 nt, Human herpesvirus 4 [Epstein-Barr virus]
uccuugucugcugc

SEQ ID NO: 3971934 - RNA, 14 nt, Human herpesvirus 4 [Epstein-Barr virus]
ucgacgcuguuuug

SEQ ID NO: 3971935 - RNA, 18 nt, Human herpesvirus 4 [Epstein-Barr virus]
ucgacuuuaugccccccg

SEQ ID NO: 3971936 - RNA, 15 nt, Human herpesvirus 4 [Epstein-Barr virus]
ucgcaacacuguaua

SEQ ID NO: 3971937 - RNA, 19 nt, Human herpesvirus 4 [Epstein-Barr virus]
ucgcuggcauacucuucau

SEQ ID NO: 3971938 - RNA, 14 nt, Human herpesvirus 4 [Epstein-Barr virus]
ucguccgccuacug

SEQ ID NO: 3971939 - RNA, 22 nt, Human herpesvirus 4 [Epstein-Barr virus]
ucgucguucaggaacagccucc

SEQ ID NO: 3971940 - RNA, 17 nt, Human herpesvirus 4 [Epstein-Barr virus]
ucgugcuaagcguccug

SEQ ID NO: 3971941 - RNA, 19 nt, Human herpesvirus 4 [Epstein-Barr virus]
ucgugcucuucauguccac

SEQ ID NO: 3971942 - RNA, 14 nt, Human herpesvirus 4 [Epstein-Barr virus]
ucguucaggaacag

SEQ ID NO: 3971943 - RNA, 12 nt, Human herpesvirus 4 [Epstein-Barr virus]
ucuaaugauguc

SEQ ID NO: 3971944 - RNA, 16 nt, Human herpesvirus 4 [Epstein-Barr virus]
ucuacaaugccagggg

SEQ ID NO: 3971945 - RNA, 16 nt, Human herpesvirus 4 [Epstein-Barr virus]
ucuacucgaccagcac

SEQ ID NO: 3971946 - RNA, 20 nt, Human herpesvirus 4 [Epstein-Barr virus]
ucucaggccucccagucuau

SEQ ID NO: 3971947 - RNA, 15 nt, Human herpesvirus 4 [Epstein-Barr virus]
ucuccaccuguguaa

SEQ ID NO: 3971948 - RNA, 18 nt, Human herpesvirus 4 [Epstein-Barr virus]
ucucccacccuguacacc

SEQ ID NO: 3971949 - RNA, 21 nt, Human herpesvirus 4 [Epstein-Barr virus]
ucucggcacccaggcagccuu

SEQ ID NO: 3971950 - RNA, 23 nt, Human herpesvirus 4 [Epstein-Barr virus]
ucucuaaucccucugggagaagg

SEQ ID NO: 3971951 - RNA, 21 nt, Human herpesvirus 4 [Epstein-Barr virus]
ucucucccccgggcgcugccu

SEQ ID NO: 3971952 - RNA, 12 nt, Human herpesvirus 4 [Epstein-Barr virus]
ucucuggcugug

SEQ ID NO: 3971953 - RNA, 17 nt, Human herpesvirus 4 [Epstein-Barr virus]
ucucuggcugugcugac

SEQ ID NO: 3971954 - RNA, 18 nt, Human herpesvirus 4 [Epstein-Barr virus]
ucugaaaacugccuccuc

SEQ ID NO: 3971955 - RNA, 14 nt, Human herpesvirus 4 [Epstein-Barr virus]
ucugaggcggcugu

SEQ ID NO: 3971956 - RNA, 19 nt, Human herpesvirus 4 [Epstein-Barr virus]
gaauaaggcucugaagcaa

SEQ ID NO: 3971957 - RNA, 23 nt, Human herpesvirus 4 [Epstein-Barr virus]
gaaucaugucugacgaggggcca

SEQ ID NO: 3971958 - RNA, 15 nt, Human herpesvirus 4 [Epstein-Barr virus]
gaaucucugccaacu

SEQ ID NO: 3971959 - RNA, 19 nt, Human herpesvirus 4 [Epstein-Barr virus]
gaaugccaagagccccucc

SEQ ID NO: 3971960 - RNA, 13 nt, Human herpesvirus 4 [Epstein-Barr virus]
gaauuauuuacca

SEQ ID NO: 3971961 - RNA, 19 nt, Human herpesvirus 4 [Epstein-Barr virus]
gacaaaauggggucugugg

SEQ ID NO: 3971962 - RNA, 23 nt, Human herpesvirus 4 [Epstein-Barr virus]
gacaaaauggggucuguggcagu

SEQ ID NO: 3971963 - RNA, 23 nt, Human herpesvirus 4 [Epstein-Barr virus]
gacacaccgccaacgcucagugc

SEQ ID NO: 3971964 - RNA, 17 nt, Human herpesvirus 4 [Epstein-Barr virus]
gacacagacuuggccuu

SEQ ID NO: 3971965 - RNA, 20 nt, Human herpesvirus 4 [Epstein-Barr virus]
gacacccacggaagcccucu

SEQ ID NO: 3971966 - RNA, 21 nt, Human herpesvirus 4 [Epstein-Barr virus]
gacaggcacaacggcugugac

SEQ ID NO: 3971967 - RNA, 19 nt, Human herpesvirus 4 [Epstein-Barr virus]
gacaugcugaugugcugcc

SEQ ID NO: 3971968 - RNA, 22 nt, Human herpesvirus 4 [Epstein-Barr virus]
gacauuucucauaauggugccu

SEQ ID NO: 3971969 - RNA, 16 nt, Human herpesvirus 4 [Epstein-Barr virus]
gaccaauacccaggau

SEQ ID NO: 3971970 - RNA, 16 nt, Human herpesvirus 4 [Epstein-Barr virus]
gaccaaugccaaagcu

SEQ ID NO: 3971971 - RNA, 14 nt, Human herpesvirus 4 [Epstein-Barr virus]
gaccacucaggaag

SEQ ID NO: 3971972 - RNA, 18 nt, Human herpesvirus 4 [Epstein-Barr virus]
gaccaucacauggggcau

SEQ ID NO: 3971973 - RNA, 18 nt, Human herpesvirus 4 [Epstein-Barr virus]
gacccaaagugagggggc

SEQ ID NO: 3971974 - RNA, 18 nt, Human herpesvirus 4 [Epstein-Barr virus]
gacccccgggcgccccca

SEQ ID NO: 3971975 - RNA, 21 nt, Human herpesvirus 4 [Epstein-Barr virus]
gacccuccugucaccaccucc

SEQ ID NO: 3971976 - RNA, 20 nt, Human herpesvirus 4 [Epstein-Barr virus]
gacccuucugcugcugcugg

SEQ ID NO: 3971977 - RNA, 13 nt, Human herpesvirus 4 [Epstein-Barr virus]
gaccgcccaccga

SEQ ID NO: 3971978 - RNA, 21 nt, Human herpesvirus 4 [Epstein-Barr virus]
gaccggaucgaaggagagcug

SEQ ID NO: 3971979 - RNA, 14 nt, Human herpesvirus 4 [Epstein-Barr virus]
gaccgugccauccu

SEQ ID NO: 3971980 - RNA, 15 nt, Human herpesvirus 4 [Epstein-Barr virus]
gaccuacgcugcccu

SEQ ID NO: 3971981 - RNA, 14 nt, Human herpesvirus 4 [Epstein-Barr virus]
gaccucuacacgcu

SEQ ID NO: 3971982 - RNA, 11 nt, Human herpesvirus 4 [Epstein-Barr virus]
gaccuggaaau

SEQ ID NO: 3971983 - RNA, 13 nt, Human herpesvirus 4 [Epstein-Barr virus]
gaccugugucugu

SEQ ID NO: 3971984 - RNA, 15 nt, Human herpesvirus 4 [Epstein-Barr virus]
gaccuguugcuucag

SEQ ID NO: 3971985 - RNA, 13 nt, Human herpesvirus 4 [Epstein-Barr virus]
gacgaggaggaag

SEQ ID NO: 3971986 - RNA, 15 nt, Human herpesvirus 4 [Epstein-Barr virus]
gacgcggugcugacc

SEQ ID NO: 3971987 - RNA, 18 nt, Human herpesvirus 4 [Epstein-Barr virus]
gacgcuguccgccaggac

SEQ ID NO: 3971988 - RNA, 21 nt, Human herpesvirus 4 [Epstein-Barr virus]
gacgggcaucuuaucagagag

SEQ ID NO: 3971989 - RNA, 23 nt, Human herpesvirus 4 [Epstein-Barr virus]
gacgggcaucuuaucagagaggc

SEQ ID NO: 3971990 - RNA, 17 nt, Human herpesvirus 4 [Epstein-Barr virus]
gacggugggcaugacac

SEQ ID NO: 3971991 - RNA, 12 nt, Human herpesvirus 4 [Epstein-Barr virus]
gacggugucugu

SEQ ID NO: 3971992 - RNA, 20 nt, Human herpesvirus 4 [Epstein-Barr virus]
gacucccauguaagccugcc

SEQ ID NO: 3971993 - RNA, 22 nt, Human herpesvirus 4 [Epstein-Barr virus]
gacucccauguaagccugccuc

SEQ ID NO: 3971994 - RNA, 15 nt, Human herpesvirus 4 [Epstein-Barr virus]
gacuggcggcacugu

SEQ ID NO: 3971995 - RNA, 17 nt, Human herpesvirus 4 [Epstein-Barr virus]
gagaaugacagcaagga

SEQ ID NO: 3971996 - RNA, 19 nt, Human herpesvirus 4 [Epstein-Barr virus]
gagacacaucuggaccaga

SEQ ID NO: 3971997 - RNA, 22 nt, Human herpesvirus 4 [Epstein-Barr virus]
gagacguguguggcuguagcca

SEQ ID NO: 3971998 - RNA, 17 nt, Human herpesvirus 4 [Epstein-Barr virus]
gagacuggcaacuccuc

SEQ ID NO: 3971999 - RNA, 21 nt, Human herpesvirus 4 [Epstein-Barr virus]
gagaucucuugcgcccaggca

SEQ ID NO: 3972000 - RNA, 19 nt, Human herpesvirus 4 [Epstein-Barr virus]
gagcagagguugggccacg

SEQ ID NO: 3972001 - RNA, 20 nt, Human herpesvirus 4 [Epstein-Barr virus]
gagcaggagcgggaggggca

SEQ ID NO: 3972002 - RNA, 22 nt, Human herpesvirus 4 [Epstein-Barr virus]
gagcaggagcgggaggggcagg

SEQ ID NO: 3972003 - RNA, 17 nt, Human herpesvirus 4 [Epstein-Barr virus]
gagcaggaggaggggca

SEQ ID NO: 3972004 - RNA, 16 nt, Human herpesvirus 4 [Epstein-Barr virus]
gagcaggaggggcagg

SEQ ID NO: 3972005 - RNA, 15 nt, Human herpesvirus 4 [Epstein-Barr virus]
gagccggcggccucg

SEQ ID NO: 3972006 - RNA, 19 nt, Human herpesvirus 4 [Epstein-Barr virus]
gagccggggguugcuucau

SEQ ID NO: 3972007 - RNA, 18 nt, Human herpesvirus 4 [Epstein-Barr virus]
gagccugagccacaccca

SEQ ID NO: 3972008 - RNA, 22 nt, Human herpesvirus 4 [Epstein-Barr virus]
gagccugccggaguuuucuccc

SEQ ID NO: 3972009 - RNA, 16 nt, Human herpesvirus 4 [Epstein-Barr virus]
gagcgcacgugacaga

SEQ ID NO: 3972010 - RNA, 13 nt, Human herpesvirus 4 [Epstein-Barr virus]
gagcggcaagggc

SEQ ID NO: 3972011 - RNA, 16 nt, Human herpesvirus 4 [Epstein-Barr virus]
gagcgggaggggcagg

SEQ ID NO: 3972012 - RNA, 22 nt, Human herpesvirus 4 [Epstein-Barr virus]
gagcggggagauaauguacaga

SEQ ID NO: 3972013 - RNA, 20 nt, Human herpesvirus 4 [Epstein-Barr virus]
gagcuccgagagcuccgcca

SEQ ID NO: 3972014 - RNA, 15 nt, Human herpesvirus 4 [Epstein-Barr virus]
gugaguccagggccc

SEQ ID NO: 3972015 - RNA, 17 nt, Human herpesvirus 4 [Epstein-Barr virus]
gugaugcuugugcuccu

SEQ ID NO: 3972016 - RNA, 14 nt, Human herpesvirus 4 [Epstein-Barr virus]
gugauuaggagcag

SEQ ID NO: 3972017 - RNA, 17 nt, Human herpesvirus 4 [Epstein-Barr virus]
gugcaaggauggaagag

SEQ ID NO: 3972018 - RNA, 15 nt, Human herpesvirus 4 [Epstein-Barr virus]
gugcacccggcugga

SEQ ID NO: 3972019 - RNA, 13 nt, Human herpesvirus 4 [Epstein-Barr virus]
gugcagcuucucc

SEQ ID NO: 3972020 - RNA, 14 nt, Human herpesvirus 4 [Epstein-Barr virus]
gugccauggugcca

SEQ ID NO: 3972021 - RNA, 13 nt, Human herpesvirus 4 [Epstein-Barr virus]
gugcccaagccug

SEQ ID NO: 3972022 - RNA, 17 nt, Human herpesvirus 4 [Epstein-Barr virus]
gugcccaccagagggug

SEQ ID NO: 3972023 - RNA, 12 nt, Human herpesvirus 4 [Epstein-Barr virus]
gugcccagggca

SEQ ID NO: 3972024 - RNA, 15 nt, Human herpesvirus 4 [Epstein-Barr virus]
gugccucagauagcc

SEQ ID NO: 3972025 - RNA, 16 nt, Human herpesvirus 4 [Epstein-Barr virus]
gugccucgguggccug

SEQ ID NO: 3972026 - RNA, 19 nt, Human herpesvirus 4 [Epstein-Barr virus]
gugcgguuauaacugccag

SEQ ID NO: 3972027 - RNA, 16 nt, Human herpesvirus 4 [Epstein-Barr virus]
guggacucggccacac

SEQ ID NO: 3972028 - RNA, 18 nt, Human herpesvirus 4 [Epstein-Barr virus]
guggauggggucauuuau

SEQ ID NO: 3972029 - RNA, 20 nt, Human herpesvirus 4 [Epstein-Barr virus]
guggcacacauuacggugcu

SEQ ID NO: 3972030 - RNA, 13 nt, Human herpesvirus 4 [Epstein-Barr virus]
guggccaggcccg

SEQ ID NO: 3972031 - RNA, 21 nt, Human herpesvirus 4 [Epstein-Barr virus]
guggccggugcugccagagcc

SEQ ID NO: 3972032 - RNA, 13 nt, Human herpesvirus 4 [Epstein-Barr virus]
gugggguggugua

SEQ ID NO: 3972033 - RNA, 14 nt, Human herpesvirus 4 [Epstein-Barr virus]
guggucgugcugcu

SEQ ID NO: 3972034 - RNA, 23 nt, Human herpesvirus 4 [Epstein-Barr virus]
gugguuuccaugacgcugcugcu

SEQ ID NO: 3972035 - RNA, 21 nt, Human herpesvirus 4 [Epstein-Barr virus]
gugucugugguugucuuccca

SEQ ID NO: 3972036 - RNA, 23 nt, Human herpesvirus 4 [Epstein-Barr virus]
gugugaagauugucacagcugcu

SEQ ID NO: 3972037 - RNA, 16 nt, Human herpesvirus 4 [Epstein-Barr virus]
gugugaagggcagggc

SEQ ID NO: 3972038 - RNA, 17 nt, Human herpesvirus 4 [Epstein-Barr virus]
gugugcucuuucuucau

SEQ ID NO: 3972039 - RNA, 23 nt, Human herpesvirus 4 [Epstein-Barr virus]
guuaugcacucugaccaggacau

SEQ ID NO: 3972040 - RNA, 15 nt, Human herpesvirus 4 [Epstein-Barr virus]
guuauugaaaccacg

SEQ ID NO: 3972041 - RNA, 21 nt, Human herpesvirus 4 [Epstein-Barr virus]
guucaaaccggaggaugcccc

SEQ ID NO: 3972042 - RNA, 15 nt, Human herpesvirus 4 [Epstein-Barr virus]
guuccaggcucucca

SEQ ID NO: 3972043 - RNA, 23 nt, Human herpesvirus 4 [Epstein-Barr virus]
guuccccccagccugaggaacau

SEQ ID NO: 3972044 - RNA, 16 nt, Human herpesvirus 4 [Epstein-Barr virus]
guucccuaagcagcug

SEQ ID NO: 3972045 - RNA, 19 nt, Human herpesvirus 4 [Epstein-Barr virus]
guugccgugguugggcaga

SEQ ID NO: 3972046 - RNA, 13 nt, Human herpesvirus 4 [Epstein-Barr virus]
guugggguccuca

SEQ ID NO: 3972047 - RNA, 17 nt, Human herpesvirus 4 [Epstein-Barr virus]
guugggguccucaagga

SEQ ID NO: 3972048 - RNA, 23 nt, Human herpesvirus 4 [Epstein-Barr virus]
guugucacgucacucagcuccgc

SEQ ID NO: 3972049 - RNA, 19 nt, Human herpesvirus 4 [Epstein-Barr virus]
guuugagaaucugggcugg

SEQ ID NO: 3972050 - RNA, 18 nt, Human herpesvirus 4 [Epstein-Barr virus]
guuuguacuucuucucug

SEQ ID NO: 3972051 - RNA, 18 nt, Human herpesvirus 4 [Epstein-Barr virus]
guuuguccagcagggccu

SEQ ID NO: 3972052 - RNA, 14 nt, Human herpesvirus 4 [Epstein-Barr virus]
uaaaauucuggauc

SEQ ID NO: 3972053 - RNA, 15 nt, Human herpesvirus 4 [Epstein-Barr virus]
uaaaccuucugucug

SEQ ID NO: 3972054 - RNA, 20 nt, Human herpesvirus 4 [Epstein-Barr virus]
uaaauucuccugccugccuc

SEQ ID NO: 3972055 - RNA, 16 nt, Human herpesvirus 4 [Epstein-Barr virus]
uaacacgaaugcccag

SEQ ID NO: 3972056 - RNA, 22 nt, Human herpesvirus 4 [Epstein-Barr virus]
uaacacuacuuguuucuggaau

SEQ ID NO: 3972057 - RNA, 24 nt, Human herpesvirus 4 [Epstein-Barr virus]
uaauacgcccgacaauaaaguuga

SEQ ID NO: 3972058 - RNA, 12 nt, Human herpesvirus 4 [Epstein-Barr virus]
uacaaccaagcc

SEQ ID NO: 3972059 - RNA, 14 nt, Human herpesvirus 4 [Epstein-Barr virus]
uacaccuggcugua

SEQ ID NO: 3972060 - RNA, 20 nt, Human herpesvirus 4 [Epstein-Barr virus]
cacgcuuuugucugccugga

SEQ ID NO: 3972061 - RNA, 22 nt, Human herpesvirus 4 [Epstein-Barr virus]
cacggagcagggcaacauugca

SEQ ID NO: 3972062 - RNA, 20 nt, Human herpesvirus 4 [Epstein-Barr virus]
cacggcgucaaacaggugag

SEQ ID NO: 3972063 - RNA, 19 nt, Human herpesvirus 4 [Epstein-Barr virus]
cacggcgugccagaggccc

SEQ ID NO: 3972064 - RNA, 16 nt, Human herpesvirus 4 [Epstein-Barr virus]
cacggucauucugccg

SEQ ID NO: 3972065 - RNA, 14 nt, Human herpesvirus 4 [Epstein-Barr virus]
cacgucgucagaga

SEQ ID NO: 3972066 - RNA, 21 nt, Human herpesvirus 4 [Epstein-Barr virus]
cacgucguucaugagaggcgu

SEQ ID NO: 3972067 - RNA, 16 nt, Human herpesvirus 4 [Epstein-Barr virus]
cacucacccccgagga

SEQ ID NO: 3972068 - RNA, 17 nt, Human herpesvirus 4 [Epstein-Barr virus]
cacucccuuagccacac

SEQ ID NO: 3972069 - RNA, 22 nt, Human herpesvirus 4 [Epstein-Barr virus]
cacugaauuuauacccagugag

SEQ ID NO: 3972070 - RNA, 21 nt, Human herpesvirus 4 [Epstein-Barr virus]
cacugaccugguuaacagacu

SEQ ID NO: 3972071 - RNA, 18 nt, Human herpesvirus 4 [Epstein-Barr virus]
cacugauaauacgcccga

SEQ ID NO: 3972072 - RNA, 17 nt, Human herpesvirus 4 [Epstein-Barr virus]
cacuggcuuaugcgugg

SEQ ID NO: 3972073 - RNA, 18 nt, Human herpesvirus 4 [Epstein-Barr virus]
cacuguugcgcccggccc

SEQ ID NO: 3972074 - RNA, 21 nt, Human herpesvirus 4 [Epstein-Barr virus]
cacuuuguacagacuuuuggc

SEQ ID NO: 3972075 - RNA, 15 nt, Human herpesvirus 4 [Epstein-Barr virus]
cagaaaaucgcagca

SEQ ID NO: 3972076 - RNA, 16 nt, Human herpesvirus 4 [Epstein-Barr virus]
cagaacaucacugcca

SEQ ID NO: 3972077 - RNA, 12 nt, Human herpesvirus 4 [Epstein-Barr virus]
cagaagccccca

SEQ ID NO: 3972078 - RNA, 17 nt, Human herpesvirus 4 [Epstein-Barr virus]
cagacaugguguagaca

SEQ ID NO: 3972079 - RNA, 21 nt, Human herpesvirus 4 [Epstein-Barr virus]
cagaccagccccucaucccug

SEQ ID NO: 3972080 - RNA, 23 nt, Human herpesvirus 4 [Epstein-Barr virus]
cagaccccggguugguggcacug

SEQ ID NO: 3972081 - RNA, 17 nt, Human herpesvirus 4 [Epstein-Barr virus]
cagaccugaucagggaa

SEQ ID NO: 3972082 - RNA, 22 nt, Human herpesvirus 4 [Epstein-Barr virus]
cagacgcgauggcacacgccag

SEQ ID NO: 3972083 - RNA, 18 nt, Human herpesvirus 4 [Epstein-Barr virus]
cagacuccggggguccag

SEQ ID NO: 3972084 - RNA, 16 nt, Human herpesvirus 4 [Epstein-Barr virus]
cagacucucuucagug

SEQ ID NO: 3972085 - RNA, 18 nt, Human herpesvirus 4 [Epstein-Barr virus]
cagagcaaaagcaauaaa

SEQ ID NO: 3972086 - RNA, 21 nt, Human herpesvirus 4 [Epstein-Barr virus]
cagagcccagaggaggccccg

SEQ ID NO: 3972087 - RNA, 23 nt, Human herpesvirus 4 [Epstein-Barr virus]
cagagcugagugcccagggcaga

SEQ ID NO: 3972088 - RNA, 17 nt, Human herpesvirus 4 [Epstein-Barr virus]
cagagcuguguuucccg

SEQ ID NO: 3972089 - RNA, 22 nt, Human herpesvirus 4 [Epstein-Barr virus]
cagaggaggacaugugcauggc

SEQ ID NO: 3972090 - RNA, 13 nt, Human herpesvirus 4 [Epstein-Barr virus]
cagagggugagcc

SEQ ID NO: 3972091 - RNA, 20 nt, Human herpesvirus 4 [Epstein-Barr virus]
cagauagccggccaggcaga

SEQ ID NO: 3972092 - RNA, 20 nt, Human herpesvirus 4 [Epstein-Barr virus]
cagauagugaacguggaggu

SEQ ID NO: 3972093 - RNA, 12 nt, Human herpesvirus 4 [Epstein-Barr virus]
cagaugugccug

SEQ ID NO: 3972094 - RNA, 13 nt, Human herpesvirus 4 [Epstein-Barr virus]
cagauugccuucu

SEQ ID NO: 3972095 - RNA, 21 nt, Human herpesvirus 4 [Epstein-Barr virus]
cagauuucuaguuaccacagg

SEQ ID NO: 3972096 - RNA, 17 nt, Human herpesvirus 4 [Epstein-Barr virus]
cagcaacgcccagggac

SEQ ID NO: 3972097 - RNA, 15 nt, Human herpesvirus 4 [Epstein-Barr virus]
cagcagcagcagugg

SEQ ID NO: 3972098 - RNA, 21 nt, Human herpesvirus 4 [Epstein-Barr virus]
cagcagcagcccggccgaggc

SEQ ID NO: 3972099 - RNA, 11 nt, Human herpesvirus 4 [Epstein-Barr virus]
cagccauggcc

SEQ ID NO: 3972100 - RNA, 16 nt, Human herpesvirus 4 [Epstein-Barr virus]
cagcccggccgaggcc

SEQ ID NO: 3972101 - RNA, 16 nt, Human herpesvirus 4 [Epstein-Barr virus]
cagccgcggccaucac

SEQ ID NO: 3972102 - RNA, 19 nt, Human herpesvirus 4 [Epstein-Barr virus]
cagccggguccgugcggcu

SEQ ID NO: 3972103 - RNA, 17 nt, Human herpesvirus 4 [Epstein-Barr virus]
cagccugcuccugagaa

SEQ ID NO: 3972104 - RNA, 22 nt, Human herpesvirus 4 [Epstein-Barr virus]
cagcgaagaacacuccacagau

SEQ ID NO: 3972105 - RNA, 23 nt, Human herpesvirus 4 [Epstein-Barr virus]
cagcgagagcgacgaggaugaag

SEQ ID NO: 3972106 - RNA, 18 nt, Human herpesvirus 4 [Epstein-Barr virus]
cagcgggggaccacauac

SEQ ID NO: 3972107 - RNA, 17 nt, Human herpesvirus 4 [Epstein-Barr virus]
cagcucaaccgccaggg

SEQ ID NO: 3972108 - RNA, 22 nt, Human herpesvirus 4 [Epstein-Barr virus]
cagcuccagggccagcaaaacc

SEQ ID NO: 3972109 - RNA, 15 nt, Human herpesvirus 4 [Epstein-Barr virus]
cagcucggccagcag

SEQ ID NO: 3972110 - RNA, 18 nt, Human herpesvirus 4 [Epstein-Barr virus]
cagcuggcggacuacaag

SEQ ID NO: 3972111 - RNA, 17 nt, Human herpesvirus 4 [Epstein-Barr virus]
caggaagcuggccaggc

SEQ ID NO: 3972112 - RNA, 10 nt, Human herpesvirus 4 [Epstein-Barr virus]
caggagcagg

SEQ ID NO: 3972113 - RNA, 19 nt, Human herpesvirus 4 [Epstein-Barr virus]
caggagcaggagcaggagc

SEQ ID NO: 3972114 - RNA, 22 nt, Human herpesvirus 4 [Epstein-Barr virus]
caggagcgggaggggcaggagc

SEQ ID NO: 3972115 - RNA, 21 nt, Human herpesvirus 4 [Epstein-Barr virus]
caggaggaggggcaggagcag

SEQ ID NO: 3972116 - RNA, 14 nt, Human herpesvirus 4 [Epstein-Barr virus]
caggaggggcagga

SEQ ID NO: 3972117 - RNA, 21 nt, Human herpesvirus 4 [Epstein-Barr virus]
caggauuucugcguccuggua

SEQ ID NO: 3972118 - RNA, 23 nt, Human herpesvirus 4 [Epstein-Barr virus]
caggcacccccucugaggaccug

SEQ ID NO: 3972119 - RNA, 20 nt, Human herpesvirus 4 [Epstein-Barr virus]
caggcauuuuuggugcugcc

SEQ ID NO: 3972120 - RNA, 20 nt, Human herpesvirus 4 [Epstein-Barr virus]
caggccccccgcaccagggc

SEQ ID NO: 3972121 - RNA, 15 nt, Human herpesvirus 4 [Epstein-Barr virus]
caggcggaggcacug

SEQ ID NO: 3972122 - RNA, 19 nt, Human herpesvirus 4 [Epstein-Barr virus]
caggcuacaacaggcugcu

SEQ ID NO: 3972123 - RNA, 15 nt, Human herpesvirus 4 [Epstein-Barr virus]
cagggacauccccag

SEQ ID NO: 3972124 - RNA, 20 nt, Human herpesvirus 4 [Epstein-Barr virus]
cagggcaacauugcagggcu

SEQ ID NO: 3972125 - RNA, 14 nt, Human herpesvirus 4 [Epstein-Barr virus]
cagggcagagaggc

SEQ ID NO: 3972126 - RNA, 16 nt, Human herpesvirus 4 [Epstein-Barr virus]
cagggcagagaggcgg

SEQ ID NO: 3972127 - RNA, 23 nt, Human herpesvirus 4 [Epstein-Barr virus]
cagggccaagacauagagauggu

SEQ ID NO: 3972128 - RNA, 18 nt, Human herpesvirus 4 [Epstein-Barr virus]
cagggccaggcgacgcuc

SEQ ID NO: 3972129 - RNA, 13 nt, Human herpesvirus 4 [Epstein-Barr virus]
cagggggccgggc

SEQ ID NO: 3972130 - RNA, 15 nt, Human herpesvirus 4 [Epstein-Barr virus]
caggucgaccaccuc

SEQ ID NO: 3972131 - RNA, 15 nt, Human herpesvirus 4 [Epstein-Barr virus]
cagguggcugcugcc

SEQ ID NO: 3972132 - RNA, 19 nt, Human herpesvirus 4 [Epstein-Barr virus]
caguacucggcuagccuga

SEQ ID NO: 3972133 - RNA, 14 nt, Human herpesvirus 4 [Epstein-Barr virus]
caguagaggacacc

SEQ ID NO: 3972134 - RNA, 22 nt, Human herpesvirus 4 [Epstein-Barr virus]
caguagcuugggaacaccgggc

SEQ ID NO: 3972135 - RNA, 20 nt, Human herpesvirus 4 [Epstein-Barr virus]
caguaugcucgaagcauugg

SEQ ID NO: 3972136 - RNA, 16 nt, Human herpesvirus 4 [Epstein-Barr virus]
cagucaccuuccagac

SEQ ID NO: 3972137 - RNA, 22 nt, Human herpesvirus 4 [Epstein-Barr virus]
caguccaggggccacacagccu

SEQ ID NO: 3972138 - RNA, 19 nt, Human herpesvirus 4 [Epstein-Barr virus]
caguccuugugucucuauc

SEQ ID NO: 3972139 - RNA, 18 nt, Human herpesvirus 4 [Epstein-Barr virus]
cagugaugaacaccacca

SEQ ID NO: 3972140 - RNA, 23 nt, Human herpesvirus 4 [Epstein-Barr virus]
cauaacgguggugggaggcccag

SEQ ID NO: 3972141 - RNA, 17 nt, Human herpesvirus 4 [Epstein-Barr virus]
cauaaguccucauggca

SEQ ID NO: 3972142 - RNA, 19 nt, Human herpesvirus 4 [Epstein-Barr virus]
cauaaguccucauggcagg

SEQ ID NO: 3972143 - RNA, 21 nt, Human herpesvirus 4 [Epstein-Barr virus]
cauauucuauuucaaaacaag

SEQ ID NO: 3972144 - RNA, 19 nt, Human herpesvirus 4 [Epstein-Barr virus]
aggcggaagaccaggagcc

SEQ ID NO: 3972145 - RNA, 12 nt, Human herpesvirus 4 [Epstein-Barr virus]
aggcggaggcac

SEQ ID NO: 3972146 - RNA, 21 nt, Human herpesvirus 4 [Epstein-Barr virus]
aggcuacaacaggcugcugaa

SEQ ID NO: 3972147 - RNA, 14 nt, Human herpesvirus 4 [Epstein-Barr virus]
ugccuccagagccc

SEQ ID NO: 3972148 - RNA, 14 nt, Human herpesvirus 4 [Epstein-Barr virus]
ugccucugggugcu

SEQ ID NO: 3972149 - RNA, 16 nt, Human herpesvirus 4 [Epstein-Barr virus]
ugccugccucugcucu

SEQ ID NO: 3972150 - RNA, 17 nt, Human herpesvirus 4 [Epstein-Barr virus]
ugccugccucugcucug

SEQ ID NO: 3972151 - RNA, 17 nt, Human herpesvirus 4 [Epstein-Barr virus]
ugccuggcgcuuugcua

SEQ ID NO: 3972152 - RNA, 18 nt, Human herpesvirus 4 [Epstein-Barr virus]
ugccuggcgcuuugcuau

SEQ ID NO: 3972153 - RNA, 19 nt, Human herpesvirus 4 [Epstein-Barr virus]
ugcgaaacuugggggcagg

SEQ ID NO: 3972154 - RNA, 22 nt, Human herpesvirus 4 [Epstein-Barr virus]
ugcgacggcuuuagccuggccu

SEQ ID NO: 3972155 - RNA, 22 nt, Human herpesvirus 4 [Epstein-Barr virus]
ugcucucagcacuuugccagca

SEQ ID NO: 3972156 - RNA, 15 nt, Human herpesvirus 4 [Epstein-Barr virus]
ugcucucgcacucuu

SEQ ID NO: 3972157 - RNA, 21 nt, Human herpesvirus 4 [Epstein-Barr virus]
ugcugaauauugccagcgccu

SEQ ID NO: 3972158 - RNA, 20 nt, Human herpesvirus 4 [Epstein-Barr virus]
ugcugaggcccguccccuga

SEQ ID NO: 3972159 - RNA, 13 nt, Human herpesvirus 4 [Epstein-Barr virus]
ugcugcagcacua

SEQ ID NO: 3972160 - RNA, 21 nt, Human herpesvirus 4 [Epstein-Barr virus]
ugcugcagguaaaccuucugu

SEQ ID NO: 3972161 - RNA, 21 nt, Human herpesvirus 4 [Epstein-Barr virus]
ugcugccagagccucugccac

SEQ ID NO: 3972162 - RNA, 19 nt, Human herpesvirus 4 [Epstein-Barr virus]
ugcugcuagccgcccuggc

SEQ ID NO: 3972163 - RNA, 16 nt, Human herpesvirus 4 [Epstein-Barr virus]
ugcugcuggucauggc

SEQ ID NO: 3972164 - RNA, 17 nt, Human herpesvirus 4 [Epstein-Barr virus]
ugcuggccgcagcuggc

SEQ ID NO: 3972165 - RNA, 20 nt, Human herpesvirus 4 [Epstein-Barr virus]
ugcuggucauggcggacugc

SEQ ID NO: 3972166 - RNA, 21 nt, Human herpesvirus 4 [Epstein-Barr virus]
ugcuucgcauuacaccauccc

SEQ ID NO: 3972167 - RNA, 21 nt, Human herpesvirus 4 [Epstein-Barr virus]
ugcuuuuaacucuuaaaacuu

SEQ ID NO: 3972168 - RNA, 18 nt, Human herpesvirus 4 [Epstein-Barr virus]
uggaagagaggggcaggg

SEQ ID NO: 3972169 - RNA, 24 nt, Human herpesvirus 4 [Epstein-Barr virus]
uggaccgaacugauggcaaagguc

SEQ ID NO: 3972170 - RNA, 13 nt, Human herpesvirus 4 [Epstein-Barr virus]
uggaucuggggcu

SEQ ID NO: 3972171 - RNA, 15 nt, Human herpesvirus 4 [Epstein-Barr virus]
uggaucuggggcugg

SEQ ID NO: 3972172 - RNA, 16 nt, Human herpesvirus 4 [Epstein-Barr virus]
uggaucuggggcuggc

SEQ ID NO: 3972173 - RNA, 17 nt, Human herpesvirus 4 [Epstein-Barr virus]
uggcacgacuguuccua

SEQ ID NO: 3972174 - RNA, 16 nt, Human herpesvirus 4 [Epstein-Barr virus]
uggcacgguccagaag

SEQ ID NO: 3972175 - RNA, 17 nt, Human herpesvirus 4 [Epstein-Barr virus]
uggcagaaaggcuggcc

SEQ ID NO: 3972176 - RNA, 20 nt, Human herpesvirus 4 [Epstein-Barr virus]
uggcagcagcucuggcacug

SEQ ID NO: 3972177 - RNA, 17 nt, Human herpesvirus 4 [Epstein-Barr virus]
uggcagcaguggccagc

SEQ ID NO: 3972178 - RNA, 13 nt, Human herpesvirus 4 [Epstein-Barr virus]
cuccagggccagc

SEQ ID NO: 3972179 - RNA, 22 nt, Human herpesvirus 4 [Epstein-Barr virus]
cucccagucuauccaggaggag

SEQ ID NO: 3972180 - RNA, 15 nt, Human herpesvirus 4 [Epstein-Barr virus]
cucccgcacccucaa

SEQ ID NO: 3972181 - RNA, 14 nt, Human herpesvirus 4 [Epstein-Barr virus]
cucccguacccacc

SEQ ID NO: 3972182 - RNA, 16 nt, Human herpesvirus 4 [Epstein-Barr virus]
cuccggcugcccgucu

SEQ ID NO: 3972183 - RNA, 12 nt, Human herpesvirus 4 [Epstein-Barr virus]
cuccucagccuc

SEQ ID NO: 3972184 - RNA, 16 nt, Human herpesvirus 4 [Epstein-Barr virus]
cuccugccugccucug

SEQ ID NO: 3972185 - RNA, 15 nt, Human herpesvirus 4 [Epstein-Barr virus]
cuccuuagacugagc

SEQ ID NO: 3972186 - RNA, 18 nt, Human herpesvirus 4 [Epstein-Barr virus]
cucgacgcgggcccgggu

SEQ ID NO: 3972187 - RNA, 18 nt, Human herpesvirus 4 [Epstein-Barr virus]
cucgcccacacagcgcca

SEQ ID NO: 3972188 - RNA, 22 nt, Human herpesvirus 4 [Epstein-Barr virus]
cucgccgcuaguugguccaggg

SEQ ID NO: 3972189 - RNA, 14 nt, Human herpesvirus 4 [Epstein-Barr virus]
cucggcacccaggc

SEQ ID NO: 3972190 - RNA, 16 nt, Human herpesvirus 4 [Epstein-Barr virus]
cucggggcuggggaga

SEQ ID NO: 3972191 - RNA, 17 nt, Human herpesvirus 4 [Epstein-Barr virus]
cucgguggugggcugcu

SEQ ID NO: 3972192 - RNA, 17 nt, Human herpesvirus 4 [Epstein-Barr virus]
cucguaaaaguccagcg

SEQ ID NO: 3972193 - RNA, 17 nt, Human herpesvirus 4 [Epstein-Barr virus]
cucgucguucaggaaca

SEQ ID NO: 3972194 - RNA, 23 nt, Human herpesvirus 4 [Epstein-Barr virus]
cucuaaaaaucaaaacuuuagag

SEQ ID NO: 3972195 - RNA, 20 nt, Human herpesvirus 4 [Epstein-Barr virus]
cucuaagacccgucgggcca

SEQ ID NO: 3972196 - RNA, 16 nt, Human herpesvirus 4 [Epstein-Barr virus]
cucuaccuuccacgac

SEQ ID NO: 3972197 - RNA, 15 nt, Human herpesvirus 4 [Epstein-Barr virus]
cucuaucaaggaaac

SEQ ID NO: 3972198 - RNA, 15 nt, Human herpesvirus 4 [Epstein-Barr virus]
cucuccagccacggc

SEQ ID NO: 3972199 - RNA, 12 nt, Human herpesvirus 4 [Epstein-Barr virus]
cucuccagcccc

SEQ ID NO: 3972200 - RNA, 17 nt, Human herpesvirus 4 [Epstein-Barr virus]
cucugauggccuggaga

SEQ ID NO: 3972201 - RNA, 21 nt, Human herpesvirus 4 [Epstein-Barr virus]
cucugcuuucgcgcagagccc

SEQ ID NO: 3972202 - RNA, 22 nt, Human herpesvirus 4 [Epstein-Barr virus]
cucuggcugugcugacccuucu

SEQ ID NO: 3972203 - RNA, 20 nt, Human herpesvirus 4 [Epstein-Barr virus]
cucuggggucucaggccucc

SEQ ID NO: 3972204 - RNA, 14 nt, Human herpesvirus 4 [Epstein-Barr virus]
cucugggugcugag

SEQ ID NO: 3972205 - RNA, 21 nt, Human herpesvirus 4 [Epstein-Barr virus]
cucuggucgcccccucugccu

SEQ ID NO: 3972206 - RNA, 17 nt, Human herpesvirus 4 [Epstein-Barr virus]
cucuucauguccacuga

SEQ ID NO: 3972207 - RNA, 19 nt, Human herpesvirus 4 [Epstein-Barr virus]
cugaaaaugacaggcugcg

SEQ ID NO: 3972208 - RNA, 18 nt, Human herpesvirus 4 [Epstein-Barr virus]
cugacacagacuuggccu

SEQ ID NO: 3972209 - RNA, 11 nt, Human herpesvirus 4 [Epstein-Barr virus]
cugacagagcc

SEQ ID NO: 3972210 - RNA, 21 nt, Human herpesvirus 4 [Epstein-Barr virus]
cugacagagccgugucuccug

SEQ ID NO: 3972211 - RNA, 14 nt, Human herpesvirus 4 [Epstein-Barr virus]
cugaccacggccca

SEQ ID NO: 3972212 - RNA, 13 nt, Human herpesvirus 4 [Epstein-Barr virus]
cugaccacucagg

SEQ ID NO: 3972213 - RNA, 20 nt, Human herpesvirus 4 [Epstein-Barr virus]
cugacccucgcgccccaucu

SEQ ID NO: 3972214 - RNA, 15 nt, Human herpesvirus 4 [Epstein-Barr virus]
cugacccuucugcug

SEQ ID NO: 3972215 - RNA, 17 nt, Human herpesvirus 4 [Epstein-Barr virus]
cugacccuucugcugcu

SEQ ID NO: 3972216 - RNA, 22 nt, Human herpesvirus 4 [Epstein-Barr virus]
cugacccuucugcugcugcugg

SEQ ID NO: 3972217 - RNA, 20 nt, Human herpesvirus 4 [Epstein-Barr virus]
cugaccgaauggggcagugg

SEQ ID NO: 3972218 - RNA, 21 nt, Human herpesvirus 4 [Epstein-Barr virus]
cugaccggcucggccacgcug

SEQ ID NO: 3972219 - RNA, 13 nt, Human herpesvirus 4 [Epstein-Barr virus]
cugacgcuccagg

SEQ ID NO: 3972220 - RNA, 17 nt, Human herpesvirus 4 [Epstein-Barr virus]
cugagccugagccacac

SEQ ID NO: 3972221 - RNA, 19 nt, Human herpesvirus 4 [Epstein-Barr virus]
cugaggaccuguugcuuca

SEQ ID NO: 3972222 - RNA, 13 nt, Human herpesvirus 4 [Epstein-Barr virus]
cugaguaggcuug

SEQ ID NO: 3972223 - RNA, 13 nt, Human herpesvirus 4 [Epstein-Barr virus]
cugaguucuacaa

SEQ ID NO: 3972224 - RNA, 21 nt, Human herpesvirus 4 [Epstein-Barr virus]
cugauaaaguuguccugggcu

SEQ ID NO: 3972225 - RNA, 15 nt, Human herpesvirus 4 [Epstein-Barr virus]
cugauaauacgcccg

SEQ ID NO: 3972226 - RNA, 23 nt, Human herpesvirus 4 [Epstein-Barr virus]
cugauaauacgcccgacaauaaa

SEQ ID NO: 3972227 - RNA, 15 nt, Human herpesvirus 4 [Epstein-Barr virus]
cugauaaugucuuca

SEQ ID NO: 3972228 - RNA, 22 nt, Human herpesvirus 4 [Epstein-Barr virus]
cugauaaugucuucaauagaca

SEQ ID NO: 3972229 - RNA, 12 nt, Human herpesvirus 4 [Epstein-Barr virus]
cugaucagggaa

SEQ ID NO: 3972230 - RNA, 17 nt, Human herpesvirus 4 [Epstein-Barr virus]
cugaucugggagaugag

SEQ ID NO: 3972231 - RNA, 14 nt, Human herpesvirus 4 [Epstein-Barr virus]
cugcacaacacaac

SEQ ID NO: 3972232 - RNA, 16 nt, Human herpesvirus 4 [Epstein-Barr virus]
cugcacagaacaucac

SEQ ID NO: 3972233 - RNA, 16 nt, Human herpesvirus 4 [Epstein-Barr virus]
cugcaccaguggcugc

SEQ ID NO: 3972234 - RNA, 16 nt, Human herpesvirus 4 [Epstein-Barr virus]
cugcaccccaguggac

SEQ ID NO: 3972235 - RNA, 15 nt, Human herpesvirus 4 [Epstein-Barr virus]
cugcacggcccucca

SEQ ID NO: 3972236 - RNA, 11 nt, Human herpesvirus 4 [Epstein-Barr virus]
cugcaggacac

SEQ ID NO: 3972237 - RNA, 14 nt, Human herpesvirus 4 [Epstein-Barr virus]
cugcagguaaaccu

SEQ ID NO: 3972238 - RNA, 23 nt, Human herpesvirus 4 [Epstein-Barr virus]
cugcagugggccucucuggcugu

SEQ ID NO: 3972239 - RNA, 20 nt, Human herpesvirus 4 [Epstein-Barr virus]
cugccacgugggucucaugg

SEQ ID NO: 3972240 - RNA, 21 nt, Human herpesvirus 4 [Epstein-Barr virus]
cugccacuuccacagcaaugg

SEQ ID NO: 3972241 - RNA, 21 nt, Human herpesvirus 4 [Epstein-Barr virus]
cugccaggccgccaugcucag

SEQ ID NO: 3972242 - RNA, 16 nt, Human herpesvirus 4 [Epstein-Barr virus]
cugccaucgggacaga

SEQ ID NO: 3972243 - RNA, 17 nt, Human herpesvirus 4 [Epstein-Barr virus]
cugcccccggagcccug

SEQ ID NO: 3972244 - RNA, 18 nt, Human herpesvirus 4 [Epstein-Barr virus]
aaaacucugcauggagaa

SEQ ID NO: 3972245 - RNA, 22 nt, Human herpesvirus 4 [Epstein-Barr virus]
aaaacucugcauggagaagcug

SEQ ID NO: 3972246 - RNA, 11 nt, Human herpesvirus 4 [Epstein-Barr virus]
aaaauaugcaa

SEQ ID NO: 3972247 - RNA, 20 nt, Human herpesvirus 4 [Epstein-Barr virus]
aaaaugucauaaccuggagu

SEQ ID NO: 3972248 - RNA, 17 nt, Human herpesvirus 4 [Epstein-Barr virus]
aaacaaggggaaaggag

SEQ ID NO: 3972249 - RNA, 16 nt, Human herpesvirus 4 [Epstein-Barr virus]
aaaccacgccugcuuc

SEQ ID NO: 3972250 - RNA, 21 nt, Human herpesvirus 4 [Epstein-Barr virus]
aaaccaguagugcgcgugagu

SEQ ID NO: 3972251 - RNA, 12 nt, Human herpesvirus 4 [Epstein-Barr virus]
aaacggccuggc

SEQ ID NO: 3972252 - RNA, 23 nt, Human herpesvirus 4 [Epstein-Barr virus]
aaagcggcccagcagauccaggg

SEQ ID NO: 3972253 - RNA, 14 nt, Human herpesvirus 4 [Epstein-Barr virus]
aaauaaauguuacu

SEQ ID NO: 3972254 - RNA, 23 nt, Human herpesvirus 4 [Epstein-Barr virus]
aaauccucacgaccugugucugu

SEQ ID NO: 3972255 - RNA, 20 nt, Human herpesvirus 4 [Epstein-Barr virus]
aaauguuacuucuuuugcuc

SEQ ID NO: 3972256 - RNA, 14 nt, Human herpesvirus 4 [Epstein-Barr virus]
aacacagcucuggc

SEQ ID NO: 3972257 - RNA, 22 nt, Human herpesvirus 4 [Epstein-Barr virus]
aacacgacgggaaugacgggcu

SEQ ID NO: 3972258 - RNA, 16 nt, Human herpesvirus 4 [Epstein-Barr virus]
aacacuccacagaugg

SEQ ID NO: 3972259 - RNA, 14 nt, Human herpesvirus 4 [Epstein-Barr virus]
aacagucuucaggu

SEQ ID NO: 3972260 - RNA, 13 nt, Human herpesvirus 4 [Epstein-Barr virus]
aacauaaaugccc

SEQ ID NO: 3972261 - RNA, 14 nt, Human herpesvirus 4 [Epstein-Barr virus]
aaccacugaccugg

SEQ ID NO: 3972262 - RNA, 14 nt, Human herpesvirus 4 [Epstein-Barr virus]
aacccccugcagga

SEQ ID NO: 3972263 - RNA, 23 nt, Human herpesvirus 4 [Epstein-Barr virus]
aaccugagccugagccacaccca

SEQ ID NO: 3972264 - RNA, 18 nt, Human herpesvirus 4 [Epstein-Barr virus]
aacggugauuaggcacug

SEQ ID NO: 3972265 - RNA, 19 nt, Human herpesvirus 4 [Epstein-Barr virus]
aacucccccaaacaugucc

SEQ ID NO: 3972266 - RNA, 15 nt, Human herpesvirus 4 [Epstein-Barr virus]
aacuccuccagcagu

SEQ ID NO: 3972267 - RNA, 22 nt, Human herpesvirus 4 [Epstein-Barr virus]
aacucucucaucuccaaaaagu

SEQ ID NO: 3972268 - RNA, 14 nt, Human herpesvirus 4 [Epstein-Barr virus]
aacugacagagccg

SEQ ID NO: 3972269 - RNA, 16 nt, Human herpesvirus 4 [Epstein-Barr virus]
aacuggucaccagcuu

SEQ ID NO: 3972270 - RNA, 17 nt, Human herpesvirus 4 [Epstein-Barr virus]
aacuugucuacauccca

SEQ ID NO: 3972271 - RNA, 21 nt, Human herpesvirus 4 [Epstein-Barr virus]
aagaggaggagggcggguggc

SEQ ID NO: 3972272 - RNA, 15 nt, Human herpesvirus 4 [Epstein-Barr virus]
aagauacccagagca

SEQ ID NO: 3972273 - RNA, 19 nt, Human herpesvirus 4 [Epstein-Barr virus]
aagauacccagagcaaaag

SEQ ID NO: 3972274 - RNA, 16 nt, Human herpesvirus 4 [Epstein-Barr virus]
aagauguaaagaucua

SEQ ID NO: 3972275 - RNA, 20 nt, Human herpesvirus 4 [Epstein-Barr virus]
aagcaacccccggcucucag

SEQ ID NO: 3972276 - RNA, 11 nt, Human herpesvirus 4 [Epstein-Barr virus]
aagcccaccua

SEQ ID NO: 3972277 - RNA, 14 nt, Human herpesvirus 4 [Epstein-Barr virus]
aagcuacaaacacg

SEQ ID NO: 3972278 - RNA, 14 nt, Human herpesvirus 4 [Epstein-Barr virus]
aagcuccggcugcc

SEQ ID NO: 3972279 - RNA, 13 nt, Human herpesvirus 4 [Epstein-Barr virus]
aaggagggcuggu

SEQ ID NO: 3972280 - RNA, 15 nt, Human herpesvirus 4 [Epstein-Barr virus]
aaggagggcugguug

SEQ ID NO: 3972281 - RNA, 12 nt, Human herpesvirus 4 [Epstein-Barr virus]
cguuaacaugga

SEQ ID NO: 3972282 - RNA, 20 nt, Human herpesvirus 4 [Epstein-Barr virus]
cguuauugaaaccacgccug

SEQ ID NO: 3972283 - RNA, 15 nt, Human herpesvirus 4 [Epstein-Barr virus]
cuaacacgcaauaaa

SEQ ID NO: 3972284 - RNA, 22 nt, Human herpesvirus 4 [Epstein-Barr virus]
cuaagcuaauagcggccgaaga

SEQ ID NO: 3972285 - RNA, 18 nt, Human herpesvirus 4 [Epstein-Barr virus]
cuaauguucucuaacugu

SEQ ID NO: 3972286 - RNA, 14 nt, Human herpesvirus 4 [Epstein-Barr virus]
cuaauucagccacc

SEQ ID NO: 3972287 - RNA, 10 nt, Human herpesvirus 4 [Epstein-Barr virus]
cuacaggaca

SEQ ID NO: 3972288 - RNA, 15 nt, Human herpesvirus 4 [Epstein-Barr virus]
cuacccggucgcaug

SEQ ID NO: 3972289 - RNA, 19 nt, Human herpesvirus 4 [Epstein-Barr virus]
cuaccuccuaucacaggga

SEQ ID NO: 3972290 - RNA, 23 nt, Human herpesvirus 4 [Epstein-Barr virus]
cuacgggcgcaccuguguccugg

SEQ ID NO: 3972291 - RNA, 14 nt, Human herpesvirus 4 [Epstein-Barr virus]
cuacucuccacggg

SEQ ID NO: 3972292 - RNA, 18 nt, Human herpesvirus 4 [Epstein-Barr virus]
cuacugccuuacacugga

SEQ ID NO: 3972293 - RNA, 18 nt, Human herpesvirus 4 [Epstein-Barr virus]
cuacugccuuguccacug

SEQ ID NO: 3972294 - RNA, 11 nt, Human herpesvirus 4 [Epstein-Barr virus]
cuacugcugcu

SEQ ID NO: 3972295 - RNA, 23 nt, Human herpesvirus 4 [Epstein-Barr virus]
cuagauuuccuacaacucagccc

SEQ ID NO: 3972296 - RNA, 16 nt, Human herpesvirus 4 [Epstein-Barr virus]
cuagccguccugucca

SEQ ID NO: 3972297 - RNA, 16 nt, Human herpesvirus 4 [Epstein-Barr virus]
cuagcgaggauaaucu

SEQ ID NO: 3972298 - RNA, 22 nt, Human herpesvirus 4 [Epstein-Barr virus]
cuagcggcgagacccgaggcag

SEQ ID NO: 3972299 - RNA, 14 nt, Human herpesvirus 4 [Epstein-Barr virus]
cuagcuucagggaa

SEQ ID NO: 3972300 - RNA, 19 nt, Human herpesvirus 4 [Epstein-Barr virus]
cuaggcaaaccuccaauca

SEQ ID NO: 3972301 - RNA, 14 nt, Human herpesvirus 4 [Epstein-Barr virus]
cuaguuaccacagg

SEQ ID NO: 3972302 - RNA, 12 nt, Human herpesvirus 4 [Epstein-Barr virus]
cuauacggccac

SEQ ID NO: 3972303 - RNA, 17 nt, Human herpesvirus 4 [Epstein-Barr virus]
cuauagauccugggccc

SEQ ID NO: 3972304 - RNA, 23 nt, Human herpesvirus 4 [Epstein-Barr virus]
cuauuggguuaacggguggaagc

SEQ ID NO: 3972305 - RNA, 16 nt, Human herpesvirus 4 [Epstein-Barr virus]
cucaaacagucccgag

SEQ ID NO: 3972306 - RNA, 22 nt, Human herpesvirus 4 [Epstein-Barr virus]
cucaacaaggagugccucuggg

SEQ ID NO: 3972307 - RNA, 19 nt, Human herpesvirus 4 [Epstein-Barr virus]
cucaaggauggcacgggca

SEQ ID NO: 3972308 - RNA, 21 nt, Human herpesvirus 4 [Epstein-Barr virus]
cucaauccauuaucuuggcac

SEQ ID NO: 3972309 - RNA, 11 nt, Human herpesvirus 4 [Epstein-Barr virus]
cucacaggaca

SEQ ID NO: 3972310 - RNA, 19 nt, Human herpesvirus 4 [Epstein-Barr virus]
cucagaauugucacugaga

SEQ ID NO: 3972311 - RNA, 14 nt, Human herpesvirus 4 [Epstein-Barr virus]
cucagccugcuccu

SEQ ID NO: 3972312 - RNA, 20 nt, Human herpesvirus 4 [Epstein-Barr virus]
cucaggaucagggccaagac

SEQ ID NO: 3972313 - RNA, 21 nt, Human herpesvirus 4 [Epstein-Barr virus]
cucaggccaccgucuacccag

SEQ ID NO: 3972314 - RNA, 19 nt, Human herpesvirus 4 [Epstein-Barr virus]
cucaucguucgguggggug

SEQ ID NO: 3972315 - RNA, 14 nt, Human herpesvirus 4 [Epstein-Barr virus]
cucaucucaaggga

SEQ ID NO: 3972316 - RNA, 19 nt, Human herpesvirus 4 [Epstein-Barr virus]
cucaucugugagacaagcc

SEQ ID NO: 3972317 - RNA, 14 nt, Human herpesvirus 4 [Epstein-Barr virus]
cucaugcgccagag

SEQ ID NO: 3972318 - RNA, 21 nt, Human herpesvirus 4 [Epstein-Barr virus]
cucauggaggggcggcagcgg

SEQ ID NO: 3972319 - RNA, 11 nt, Human herpesvirus 4 [Epstein-Barr virus]
cucauuucagu

SEQ ID NO: 3972320 - RNA, 17 nt, Human herpesvirus 4 [Epstein-Barr virus]
cuccaagugcaacaauc

SEQ ID NO: 3972321 - RNA, 13 nt, Human herpesvirus 4 [Epstein-Barr virus]
cuccaucagggcc

SEQ ID NO: 3972322 - RNA, 11 nt, Human herpesvirus 4 [Epstein-Barr virus]
cuccauuccac

SEQ ID NO: 3972323 - RNA, 14 nt, Human herpesvirus 4 [Epstein-Barr virus]
cuccauuccaccca

SEQ ID NO: 3972324 - RNA, 20 nt, Human herpesvirus 4 [Epstein-Barr virus]
cucccaccaccguuaugccu

SEQ ID NO: 3972325 - RNA, 17 nt, Human herpesvirus 4 [Epstein-Barr virus]
cucccauguaagccugc

SEQ ID NO: 3972326 - RNA, 19 nt, Human herpesvirus 4 [Epstein-Barr virus]
cuccccaauggggcuggca

SEQ ID NO: 3972327 - RNA, 17 nt, Human herpesvirus 4 [Epstein-Barr virus]
cuccccugacgcugugg

SEQ ID NO: 3972328 - RNA, 15 nt, Human herpesvirus 4 [Epstein-Barr virus]
cucccgccccugucc

SEQ ID NO: 3972329 - RNA, 16 nt, Human herpesvirus 4 [Epstein-Barr virus]
cucccgggguccagag

SEQ ID NO: 3972330 - RNA, 15 nt, Human herpesvirus 4 [Epstein-Barr virus]
cucccuuagccacac

SEQ ID NO: 3972331 - RNA, 20 nt, Human herpesvirus 4 [Epstein-Barr virus]
cucccuuagccacacugucu

SEQ ID NO: 3972332 - RNA, 16 nt, Human herpesvirus 4 [Epstein-Barr virus]
cuccgcauccuaggca

SEQ ID NO: 3972333 - RNA, 21 nt, Human herpesvirus 4 [Epstein-Barr virus]
cuccgcuuuaagaccaaggcc

SEQ ID NO: 3972334 - RNA, 22 nt, Human herpesvirus 4 [Epstein-Barr virus]
cuccggauucaccggcaccgcc

SEQ ID NO: 3972335 - RNA, 14 nt, Human herpesvirus 4 [Epstein-Barr virus]
cuccgggggcacug

SEQ ID NO: 3972336 - RNA, 17 nt, Human herpesvirus 4 [Epstein-Barr virus]
cuccucaaauguuccag

SEQ ID NO: 3972337 - RNA, 14 nt, Human herpesvirus 4 [Epstein-Barr virus]
cuccucgcaggccc

SEQ ID NO: 3972338 - RNA, 14 nt, Human herpesvirus 4 [Epstein-Barr virus]
cuccucgugcaccu

SEQ ID NO: 3972339 - RNA, 22 nt, Human herpesvirus 4 [Epstein-Barr virus]
cuccuggaucuggggcuggccu

SEQ ID NO: 3972340 - RNA, 14 nt, Human herpesvirus 4 [Epstein-Barr virus]
cuccuggccagcac

SEQ ID NO: 3972341 - RNA, 19 nt, Human herpesvirus 4 [Epstein-Barr virus]
cucgaagcggucucagaca

SEQ ID NO: 3972342 - RNA, 20 nt, Human herpesvirus 4 [Epstein-Barr virus]
cucgccgcuaguugguccag

SEQ ID NO: 3972343 - RNA, 20 nt, Human herpesvirus 4 [Epstein-Barr virus]
cucgcgccccaucuuggccc

SEQ ID NO: 3972344 - RNA, 17 nt, Human herpesvirus 4 [Epstein-Barr virus]
cucggaggugcccgggu

SEQ ID NO: 3972345 - RNA, 16 nt, Human herpesvirus 4 [Epstein-Barr virus]
cucggccuccuggcca

SEQ ID NO: 3972346 - RNA, 20 nt, Human herpesvirus 4 [Epstein-Barr virus]
cucggcucaccgggaacgcc

SEQ ID NO: 3972347 - RNA, 17 nt, Human herpesvirus 4 [Epstein-Barr virus]
cucggggcaugcugccc

SEQ ID NO: 3972348 - RNA, 18 nt, Human herpesvirus 4 [Epstein-Barr virus]
cucggggcuggggagaug

SEQ ID NO: 3972349 - RNA, 15 nt, Human herpesvirus 4 [Epstein-Barr virus]
cucgugcaagcagca

SEQ ID NO: 3972350 - RNA, 18 nt, Human herpesvirus 4 [Epstein-Barr virus]
cucuaacuuggcaucucu

SEQ ID NO: 3972351 - RNA, 17 nt, Human herpesvirus 4 [Epstein-Barr virus]
cucuacaaccccuucca

SEQ ID NO: 3972352 - RNA, 16 nt, Human herpesvirus 4 [Epstein-Barr virus]
cucuacgccaggcucg

SEQ ID NO: 3972353 - RNA, 13 nt, Human herpesvirus 4 [Epstein-Barr virus]
cucucaggccuca

SEQ ID NO: 3972354 - RNA, 17 nt, Human herpesvirus 4 [Epstein-Barr virus]
cucuccagcaaccaaug

SEQ ID NO: 3972355 - RNA, 19 nt, Human herpesvirus 4 [Epstein-Barr virus]
cucuccagcaaccaaugua

SEQ ID NO: 3972356 - RNA, 13 nt, Human herpesvirus 4 [Epstein-Barr virus]
cucucccacggac

SEQ ID NO: 3972357 - RNA, 12 nt, Human herpesvirus 4 [Epstein-Barr virus]
cucucgcacucu

SEQ ID NO: 3972358 - RNA, 18 nt, Human herpesvirus 4 [Epstein-Barr virus]
cucucuauguugucacau

SEQ ID NO: 3972359 - RNA, 14 nt, Human herpesvirus 4 [Epstein-Barr virus]
cucugaccaggaca

SEQ ID NO: 3972360 - RNA, 19 nt, Human herpesvirus 4 [Epstein-Barr virus]
cucugcauggagaagcugg

SEQ ID NO: 3972361 - RNA, 20 nt, Human herpesvirus 4 [Epstein-Barr virus]
cucugcauggagaagcugga

SEQ ID NO: 3972362 - RNA, 20 nt, Human herpesvirus 4 [Epstein-Barr virus]
cucugccaacuuugagcugg

SEQ ID NO: 3972363 - RNA, 20 nt, Human herpesvirus 4 [Epstein-Barr virus]
cucugcccuucagugucugg

SEQ ID NO: 3972364 - RNA, 20 nt, Human herpesvirus 4 [Epstein-Barr virus]
cucuucagugaccggacggg

SEQ ID NO: 3972365 - RNA, 22 nt, Human herpesvirus 4 [Epstein-Barr virus]
cucuugucggacgaggaggaag

SEQ ID NO: 3972366 - RNA, 20 nt, Human herpesvirus 4 [Epstein-Barr virus]
cugaacaucucauccccaga

SEQ ID NO: 3972367 - RNA, 16 nt, Human herpesvirus 4 [Epstein-Barr virus]
cugacccuucugcugc

SEQ ID NO: 3972368 - RNA, 14 nt, Human herpesvirus 4 [Epstein-Barr virus]
cugacgaggggcca

SEQ ID NO: 3972369 - RNA, 18 nt, Human herpesvirus 4 [Epstein-Barr virus]
gaggcugaugauggccac

SEQ ID NO: 3972370 - RNA, 20 nt, Human herpesvirus 4 [Epstein-Barr virus]
gagggacaguaccacaagcu

SEQ ID NO: 3972371 - RNA, 13 nt, Human herpesvirus 4 [Epstein-Barr virus]
gagggccucuggc

SEQ ID NO: 3972372 - RNA, 21 nt, Human herpesvirus 4 [Epstein-Barr virus]
gaggggcaggaggggcaggag

SEQ ID NO: 3972373 - RNA, 20 nt, Human herpesvirus 4 [Epstein-Barr virus]
gaggggcucgaauaugauga

SEQ ID NO: 3972374 - RNA, 13 nt, Human herpesvirus 4 [Epstein-Barr virus]
gagguagauaggu

SEQ ID NO: 3972375 - RNA, 15 nt, Human herpesvirus 4 [Epstein-Barr virus]
gaguccagggcccug

SEQ ID NO: 3972376 - RNA, 15 nt, Human herpesvirus 4 [Epstein-Barr virus]
gagucgaagcucuug

SEQ ID NO: 3972377 - RNA, 22 nt, Human herpesvirus 4 [Epstein-Barr virus]
gagucugacuacucagaugaag

SEQ ID NO: 3972378 - RNA, 21 nt, Human herpesvirus 4 [Epstein-Barr virus]
gagugccgggcccgggacagc

SEQ ID NO: 3972379 - RNA, 16 nt, Human herpesvirus 4 [Epstein-Barr virus]
gauacucaucugugag

SEQ ID NO: 3972380 - RNA, 16 nt, Human herpesvirus 4 [Epstein-Barr virus]
gauauugaauuccaca

SEQ ID NO: 3972381 - RNA, 14 nt, Human herpesvirus 4 [Epstein-Barr virus]
gauccgcaggggcg

SEQ ID NO: 3972382 - RNA, 23 nt, Human herpesvirus 4 [Epstein-Barr virus]
gaucgauuggaaaagggcccagg

SEQ ID NO: 3972383 - RNA, 16 nt, Human herpesvirus 4 [Epstein-Barr virus]
gaucuucuucucccuc

SEQ ID NO: 3972384 - RNA, 16 nt, Human herpesvirus 4 [Epstein-Barr virus]
gaugagcacgugugga

SEQ ID NO: 3972385 - RNA, 22 nt, Human herpesvirus 4 [Epstein-Barr virus]
gaugcugcagagguucagggac

SEQ ID NO: 3972386 - RNA, 22 nt, Human herpesvirus 4 [Epstein-Barr virus]
gauggcacgguccagaagcaga

SEQ ID NO: 3972387 - RNA, 21 nt, Human herpesvirus 4 [Epstein-Barr virus]
gauggcccugaucugggagau

SEQ ID NO: 3972388 - RNA, 13 nt, Human herpesvirus 4 [Epstein-Barr virus]
gaugguggggcuu

SEQ ID NO: 3972389 - RNA, 12 nt, Human herpesvirus 4 [Epstein-Barr virus]
gauguauuacca

SEQ ID NO: 3972390 - RNA, 21 nt, Human herpesvirus 4 [Epstein-Barr virus]
gaugugaauauggcugcggag

SEQ ID NO: 3972391 - RNA, 21 nt, Human herpesvirus 4 [Epstein-Barr virus]
gauuaggagcagggcccagug

SEQ ID NO: 3972392 - RNA, 20 nt, Human herpesvirus 4 [Epstein-Barr virus]
gauuccugauuuuccucauu

SEQ ID NO: 3972393 - RNA, 15 nt, Human herpesvirus 4 [Epstein-Barr virus]
gauugggugguggca

SEQ ID NO: 3972394 - RNA, 15 nt, Human herpesvirus 4 [Epstein-Barr virus]
gauugucacagcugc

SEQ ID NO: 3972395 - RNA, 20 nt, Human herpesvirus 4 [Epstein-Barr virus]
gauuuccuacaacucagccc

SEQ ID NO: 3972396 - RNA, 17 nt, Human herpesvirus 4 [Epstein-Barr virus]
gcaaacagggcagagag

SEQ ID NO: 3972397 - RNA, 14 nt, Human herpesvirus 4 [Epstein-Barr virus]
gcaaacccuggccg

SEQ ID NO: 3972398 - RNA, 14 nt, Human herpesvirus 4 [Epstein-Barr virus]
gcaaagggacccac

SEQ ID NO: 3972399 - RNA, 19 nt, Human herpesvirus 4 [Epstein-Barr virus]
gcaacgccggccugcuggc

SEQ ID NO: 3972400 - RNA, 13 nt, Human herpesvirus 4 [Epstein-Barr virus]
gcaacugcugcag

SEQ ID NO: 3972401 - RNA, 15 nt, Human herpesvirus 4 [Epstein-Barr virus]
gcaagaauuggggcu

SEQ ID NO: 3972402 - RNA, 18 nt, Human herpesvirus 4 [Epstein-Barr virus]
gcaagaauuggggcuggg

SEQ ID NO: 3972403 - RNA, 19 nt, Human herpesvirus 4 [Epstein-Barr virus]
gcaagauccuucuggcacg

SEQ ID NO: 3972404 - RNA, 14 nt, Human herpesvirus 4 [Epstein-Barr virus]
gcaagcaugggcga

SEQ ID NO: 3972405 - RNA, 14 nt, Human herpesvirus 4 [Epstein-Barr virus]
gcaaguuuugcccg

SEQ ID NO: 3972406 - RNA, 17 nt, Human herpesvirus 4 [Epstein-Barr virus]
gcacacauuacggugcu

SEQ ID NO: 3972407 - RNA, 16 nt, Human herpesvirus 4 [Epstein-Barr virus]
gcacacgcucagcuca

SEQ ID NO: 3972408 - RNA, 17 nt, Human herpesvirus 4 [Epstein-Barr virus]
gcacacgcucagcucaa

SEQ ID NO: 3972409 - RNA, 19 nt, Human herpesvirus 4 [Epstein-Barr virus]
gcacagaacaucacugcca

SEQ ID NO: 3972410 - RNA, 22 nt, Human herpesvirus 4 [Epstein-Barr virus]
gcacaucuggaccuggacuggg

SEQ ID NO: 3972411 - RNA, 15 nt, Human herpesvirus 4 [Epstein-Barr virus]
gcaccaccgcagcca

SEQ ID NO: 3972412 - RNA, 18 nt, Human herpesvirus 4 [Epstein-Barr virus]
gcaccagcuaacaggaca

SEQ ID NO: 3972413 - RNA, 18 nt, Human herpesvirus 4 [Epstein-Barr virus]
gcaccagcuccagggaca

SEQ ID NO: 3972414 - RNA, 15 nt, Human herpesvirus 4 [Epstein-Barr virus]
gcaccagggccaggc

SEQ ID NO: 3972415 - RNA, 18 nt, Human herpesvirus 4 [Epstein-Barr virus]
gcaccggagccaccacag

SEQ ID NO: 3972416 - RNA, 22 nt, Human herpesvirus 4 [Epstein-Barr virus]
gcaccuguccuugucugcugcc

SEQ ID NO: 3972417 - RNA, 18 nt, Human herpesvirus 4 [Epstein-Barr virus]
gcaccuguguccugggca

SEQ ID NO: 3972418 - RNA, 23 nt, Human herpesvirus 4 [Epstein-Barr virus]
gcaccuguguccugggcaaggag

SEQ ID NO: 3972419 - RNA, 15 nt, Human herpesvirus 4 [Epstein-Barr virus]
gcacggaugccuggc

SEQ ID NO: 3972420 - RNA, 19 nt, Human herpesvirus 4 [Epstein-Barr virus]
gcacguggguuucugcccc

SEQ ID NO: 3972421 - RNA, 20 nt, Human herpesvirus 4 [Epstein-Barr virus]
gcacguuuaccagugugcca

SEQ ID NO: 3972422 - RNA, 20 nt, Human herpesvirus 4 [Epstein-Barr virus]
gcacucucgagggugccugu

SEQ ID NO: 3972423 - RNA, 15 nt, Human herpesvirus 4 [Epstein-Barr virus]
gcacugcguccaccu

SEQ ID NO: 3972424 - RNA, 18 nt, Human herpesvirus 4 [Epstein-Barr virus]
gcacuggugguggaggag

SEQ ID NO: 3972425 - RNA, 17 nt, Human herpesvirus 4 [Epstein-Barr virus]
gcacugugggggucggg

SEQ ID NO: 3972426 - RNA, 13 nt, Human herpesvirus 4 [Epstein-Barr virus]
gcagaaggggccc

SEQ ID NO: 3972427 - RNA, 22 nt, Human herpesvirus 4 [Epstein-Barr virus]
gcagaggaugagaccaguggca

SEQ ID NO: 3972428 - RNA, 14 nt, Human herpesvirus 4 [Epstein-Barr virus]
gcagcaccucagcu

SEQ ID NO: 3972429 - RNA, 18 nt, Human herpesvirus 4 [Epstein-Barr virus]
gcagcaguggccagcuca

SEQ ID NO: 3972430 - RNA, 12 nt, Human herpesvirus 4 [Epstein-Barr virus]
gcagccuggcuc

SEQ ID NO: 3972431 - RNA, 19 nt, Human herpesvirus 4 [Epstein-Barr virus]
gcagcggacgguggggcuc

SEQ ID NO: 3972432 - RNA, 19 nt, Human herpesvirus 4 [Epstein-Barr virus]
gcaggagcaggaggagggg

SEQ ID NO: 3972433 - RNA, 16 nt, Human herpesvirus 4 [Epstein-Barr virus]
gcaggagcaggagggg

SEQ ID NO: 3972434 - RNA, 15 nt, Human herpesvirus 4 [Epstein-Barr virus]
gcaggaggggcagga

SEQ ID NO: 3972435 - RNA, 22 nt, Human herpesvirus 4 [Epstein-Barr virus]
gcaggcauuuuuggugcugccu

SEQ ID NO: 3972436 - RNA, 14 nt, Human herpesvirus 4 [Epstein-Barr virus]
gcagggugcacaga

SEQ ID NO: 3972437 - RNA, 14 nt, Human herpesvirus 4 [Epstein-Barr virus]
gcagguggcugcug

SEQ ID NO: 3972438 - RNA, 16 nt, Human herpesvirus 4 [Epstein-Barr virus]
gcagguggcugcugcc

SEQ ID NO: 3972439 - RNA, 18 nt, Human herpesvirus 4 [Epstein-Barr virus]
gcaguagcuugggaacac

SEQ ID NO: 3972440 - RNA, 15 nt, Human herpesvirus 4 [Epstein-Barr virus]
gcagucgcugcugca

SEQ ID NO: 3972441 - RNA, 20 nt, Human herpesvirus 4 [Epstein-Barr virus]
gcagugguguuugcuugccc

SEQ ID NO: 3972442 - RNA, 15 nt, Human herpesvirus 4 [Epstein-Barr virus]
gcauacgcugaguga

SEQ ID NO: 3972443 - RNA, 17 nt, Human herpesvirus 4 [Epstein-Barr virus]
gcaucacaagucacauc

SEQ ID NO: 3972444 - RNA, 21 nt, Human herpesvirus 4 [Epstein-Barr virus]
gcauccaacgcuuccaccccc

SEQ ID NO: 3972445 - RNA, 16 nt, Human herpesvirus 4 [Epstein-Barr virus]
gcauccgcaccacaga

SEQ ID NO: 3972446 - RNA, 16 nt, Human herpesvirus 4 [Epstein-Barr virus]
gcauccuaggcacggc

SEQ ID NO: 3972447 - RNA, 18 nt, Human herpesvirus 4 [Epstein-Barr virus]
gcauccucaaggggcacg

SEQ ID NO: 3972448 - RNA, 22 nt, Human herpesvirus 4 [Epstein-Barr virus]
gcaucggggcggacgccuccuc

SEQ ID NO: 3972449 - RNA, 14 nt, Human herpesvirus 4 [Epstein-Barr virus]
gcaugacacaggac

SEQ ID NO: 3972450 - RNA, 18 nt, Human herpesvirus 4 [Epstein-Barr virus]
gcauucagauuucuaguu

SEQ ID NO: 3972451 - RNA, 20 nt, Human herpesvirus 4 [Epstein-Barr virus]
gccaaccugcucucucugga

SEQ ID NO: 3972452 - RNA, 19 nt, Human herpesvirus 4 [Epstein-Barr virus]
gccaaccuuuccaucacug

SEQ ID NO: 3972453 - RNA, 15 nt, Human herpesvirus 4 [Epstein-Barr virus]
gccaacgcucagugc

SEQ ID NO: 3972454 - RNA, 20 nt, Human herpesvirus 4 [Epstein-Barr virus]
gccaaugacccacuccagug

SEQ ID NO: 3972455 - RNA, 17 nt, Human herpesvirus 4 [Epstein-Barr virus]
gccaccacggugcagcc

SEQ ID NO: 3972456 - RNA, 22 nt, Human herpesvirus 4 [Epstein-Barr virus]
gccaccggggaggccagguagc

SEQ ID NO: 3972457 - RNA, 19 nt, Human herpesvirus 4 [Epstein-Barr virus]
ggccgccacccucccccug

SEQ ID NO: 3972458 - RNA, 21 nt, Human herpesvirus 4 [Epstein-Barr virus]
ggccuccagcucggccagcag

SEQ ID NO: 3972459 - RNA, 22 nt, Human herpesvirus 4 [Epstein-Barr virus]
ggccucgccuucuccucagccu

SEQ ID NO: 3972460 - RNA, 17 nt, Human herpesvirus 4 [Epstein-Barr virus]
ggccucgugcaaccagg

SEQ ID NO: 3972461 - RNA, 21 nt, Human herpesvirus 4 [Epstein-Barr virus]
ggccugccuggaucugagcua

SEQ ID NO: 3972462 - RNA, 13 nt, Human herpesvirus 4 [Epstein-Barr virus]
ggccugcugucau

SEQ ID NO: 3972463 - RNA, 14 nt, Human herpesvirus 4 [Epstein-Barr virus]
ggccugcugucauc

SEQ ID NO: 3972464 - RNA, 11 nt, Human herpesvirus 4 [Epstein-Barr virus]
ggccuggggcc

SEQ ID NO: 3972465 - RNA, 21 nt, Human herpesvirus 4 [Epstein-Barr virus]
ggccuuggggguggugggcuc

SEQ ID NO: 3972466 - RNA, 16 nt, Human herpesvirus 4 [Epstein-Barr virus]
ggcgaaugggcugcag

SEQ ID NO: 3972467 - RNA, 14 nt, Human herpesvirus 4 [Epstein-Barr virus]
ggcgacugccgccg

SEQ ID NO: 3972468 - RNA, 21 nt, Human herpesvirus 4 [Epstein-Barr virus]
ggcgacuuggugccaccaucu

SEQ ID NO: 3972469 - RNA, 19 nt, Human herpesvirus 4 [Epstein-Barr virus]
ggcgagacuuggaccaagg

SEQ ID NO: 3972470 - RNA, 13 nt, Human herpesvirus 4 [Epstein-Barr virus]
ggcgccuggggau

SEQ ID NO: 3972471 - RNA, 12 nt, Human herpesvirus 4 [Epstein-Barr virus]
ggcgcggcugga

SEQ ID NO: 3972472 - RNA, 17 nt, Human herpesvirus 4 [Epstein-Barr virus]
ggcgcucugcgccagcc

SEQ ID NO: 3972473 - RNA, 23 nt, Human herpesvirus 4 [Epstein-Barr virus]
ggcgcucugcgccagccccgccc

SEQ ID NO: 3972474 - RNA, 23 nt, Human herpesvirus 4 [Epstein-Barr virus]
ggcggacugcgccuuuaggcgua

SEQ ID NO: 3972475 - RNA, 15 nt, Human herpesvirus 4 [Epstein-Barr virus]
ggcggaggcacugga

SEQ ID NO: 3972476 - RNA, 22 nt, Human herpesvirus 4 [Epstein-Barr virus]
ggcggcagcggaugguggggcu

SEQ ID NO: 3972477 - RNA, 18 nt, Human herpesvirus 4 [Epstein-Barr virus]
ggcggcgaugucggggcu

SEQ ID NO: 3972478 - RNA, 13 nt, Human herpesvirus 4 [Epstein-Barr virus]
ggcgggcgggcuu

SEQ ID NO: 3972479 - RNA, 12 nt, Human herpesvirus 4 [Epstein-Barr virus]
ggcggugccugu

SEQ ID NO: 3972480 - RNA, 17 nt, Human herpesvirus 4 [Epstein-Barr virus]
ggcguggagcugggccu

SEQ ID NO: 3972481 - RNA, 18 nt, Human herpesvirus 4 [Epstein-Barr virus]
ggcuacaacaggcugcug

SEQ ID NO: 3972482 - RNA, 24 nt, Human herpesvirus 4 [Epstein-Barr virus]
ggcuccauguccuguggugugcuu

SEQ ID NO: 3972483 - RNA, 19 nt, Human herpesvirus 4 [Epstein-Barr virus]
ggcuccggauucaccggca

SEQ ID NO: 3972484 - RNA, 19 nt, Human herpesvirus 4 [Epstein-Barr virus]
ggcuccuuagacugagcca

SEQ ID NO: 3972485 - RNA, 15 nt, Human herpesvirus 4 [Epstein-Barr virus]
ggcucucaggccuca

SEQ ID NO: 3972486 - RNA, 20 nt, Human herpesvirus 4 [Epstein-Barr virus]
ggcugacguccaccccaccc

SEQ ID NO: 3972487 - RNA, 19 nt, Human herpesvirus 4 [Epstein-Barr virus]
ggcugcgccugagcugccu

SEQ ID NO: 3972488 - RNA, 20 nt, Human herpesvirus 4 [Epstein-Barr virus]
ggcuggugacaaacucucuc

SEQ ID NO: 3972489 - RNA, 21 nt, Human herpesvirus 4 [Epstein-Barr virus]
ggcugugguaaccggugggcu

SEQ ID NO: 3972490 - RNA, 14 nt, Human herpesvirus 4 [Epstein-Barr virus]
ggcuucugcugcug

SEQ ID NO: 3972491 - RNA, 19 nt, Human herpesvirus 4 [Epstein-Barr virus]
gggaacgaggggaggcggg

SEQ ID NO: 3972492 - RNA, 19 nt, Human herpesvirus 4 [Epstein-Barr virus]
gggaaugacgggcucccuc

SEQ ID NO: 3972493 - RNA, 22 nt, Human herpesvirus 4 [Epstein-Barr virus]
gggaccggcuacgcgggccaca

SEQ ID NO: 3972494 - RNA, 17 nt, Human herpesvirus 4 [Epstein-Barr virus]
gggacgaggacgagaag

SEQ ID NO: 3972495 - RNA, 21 nt, Human herpesvirus 4 [Epstein-Barr virus]
gggacgcagaaugugcaggga

SEQ ID NO: 3972496 - RNA, 21 nt, Human herpesvirus 4 [Epstein-Barr virus]
gggagacacaucuggaccaga

SEQ ID NO: 3972497 - RNA, 11 nt, Human herpesvirus 4 [Epstein-Barr virus]
gggaggacacu

SEQ ID NO: 3972498 - RNA, 15 nt, Human herpesvirus 4 [Epstein-Barr virus]
gggagguggccacac

SEQ ID NO: 3972499 - RNA, 12 nt, Human herpesvirus 4 [Epstein-Barr virus]
gggaugagcugg

SEQ ID NO: 3972500 - RNA, 20 nt, Human herpesvirus 4 [Epstein-Barr virus]
gggcagacaccaccugcucg

SEQ ID NO: 3972501 - RNA, 22 nt, Human herpesvirus 4 [Epstein-Barr virus]
gggcaucaugcagggugcacag

SEQ ID NO: 3972502 - RNA, 23 nt, Human herpesvirus 4 [Epstein-Barr virus]
gggcauuaacuaagcuuaugagc

SEQ ID NO: 3972503 - RNA, 20 nt, Human herpesvirus 4 [Epstein-Barr virus]
gggccacugcaggcuggacg

SEQ ID NO: 3972504 - RNA, 11 nt, Human herpesvirus 4 [Epstein-Barr virus]
gggccaggacc

SEQ ID NO: 3972505 - RNA, 23 nt, Human herpesvirus 4 [Epstein-Barr virus]
gggccucucuggcugugcugacc

SEQ ID NO: 3972506 - RNA, 12 nt, Human herpesvirus 4 [Epstein-Barr virus]
gggccuggggcc

SEQ ID NO: 3972507 - RNA, 23 nt, Human herpesvirus 4 [Epstein-Barr virus]
gggccuggugccagacucucuuc

SEQ ID NO: 3972508 - RNA, 19 nt, Human herpesvirus 4 [Epstein-Barr virus]
gggccugugacuggugcuu

SEQ ID NO: 3972509 - RNA, 13 nt, Human herpesvirus 4 [Epstein-Barr virus]
gggcggcggugga

SEQ ID NO: 3972510 - RNA, 17 nt, Human herpesvirus 4 [Epstein-Barr virus]
gggcggcguggagcugg

SEQ ID NO: 3972511 - RNA, 15 nt, Human herpesvirus 4 [Epstein-Barr virus]
gggcguacaccuggc

SEQ ID NO: 3972512 - RNA, 11 nt, Human herpesvirus 4 [Epstein-Barr virus]
gggcugccccg

SEQ ID NO: 3972513 - RNA, 17 nt, Human herpesvirus 4 [Epstein-Barr virus]
gggcuggccugccugga

SEQ ID NO: 3972514 - RNA, 23 nt, Human herpesvirus 4 [Epstein-Barr virus]
ggggauuacccgacccagccacu

SEQ ID NO: 3972515 - RNA, 15 nt, Human herpesvirus 4 [Epstein-Barr virus]
ggggcaggagcagga

SEQ ID NO: 3972516 - RNA, 22 nt, Human herpesvirus 4 [Epstein-Barr virus]
ggggcaggagcaggaggggcag

SEQ ID NO: 3972517 - RNA, 19 nt, Human herpesvirus 4 [Epstein-Barr virus]
ggggcuaugguaguggcug

SEQ ID NO: 3972518 - RNA, 14 nt, Human herpesvirus 4 [Epstein-Barr virus]
ggggcuguagaagg

SEQ ID NO: 3972519 - RNA, 13 nt, Human herpesvirus 4 [Epstein-Barr virus]
gggggaggagaga

SEQ ID NO: 3972520 - RNA, 22 nt, Human herpesvirus 4 [Epstein-Barr virus]
ggguaacauuguacagagcugu

SEQ ID NO: 3972521 - RNA, 12 nt, Human herpesvirus 4 [Epstein-Barr virus]
ggguacuggcau

SEQ ID NO: 3972522 - RNA, 18 nt, Human herpesvirus 4 [Epstein-Barr virus]
gggugaccacugagggag

SEQ ID NO: 3972523 - RNA, 13 nt, Human herpesvirus 4 [Epstein-Barr virus]
ggguggacaugag

SEQ ID NO: 3972524 - RNA, 13 nt, Human herpesvirus 4 [Epstein-Barr virus]
gguaaaugcaccu

SEQ ID NO: 3972525 - RNA, 14 nt, Human herpesvirus 4 [Epstein-Barr virus]
gguagccggcgcug

SEQ ID NO: 3972526 - RNA, 22 nt, Human herpesvirus 4 [Epstein-Barr virus]
gguagccggcgcuguguggcug

SEQ ID NO: 3972527 - RNA, 11 nt, Human herpesvirus 4 [Epstein-Barr virus]
gguauuccuca

SEQ ID NO: 3972528 - RNA, 13 nt, Human herpesvirus 4 [Epstein-Barr virus]
gguauugcagcug

SEQ ID NO: 3972529 - RNA, 18 nt, Human herpesvirus 4 [Epstein-Barr virus]
ggucaagcaaacggccug

SEQ ID NO: 3972530 - RNA, 18 nt, Human herpesvirus 4 [Epstein-Barr virus]
ggucauuagaugcugccg

SEQ ID NO: 3972531 - RNA, 21 nt, Human herpesvirus 4 [Epstein-Barr virus]
gguccaagaguaaaagcagaa

SEQ ID NO: 3972532 - RNA, 21 nt, Human herpesvirus 4 [Epstein-Barr virus]
ggucccaggccuuagcccaga

SEQ ID NO: 3972533 - RNA, 13 nt, Human herpesvirus 4 [Epstein-Barr virus]
gguccccucugcc

SEQ ID NO: 3972534 - RNA, 20 nt, Human herpesvirus 4 [Epstein-Barr virus]
gguccuccacggggacacgc

SEQ ID NO: 3972535 - RNA, 20 nt, Human herpesvirus 4 [Epstein-Barr virus]
ggucgugguuuucugccccu

SEQ ID NO: 3972536 - RNA, 22 nt, Human herpesvirus 4 [Epstein-Barr virus]
ggugaccacugagggaguguuc

SEQ ID NO: 3972537 - RNA, 17 nt, Human herpesvirus 4 [Epstein-Barr virus]
ggugaggacggugucug

SEQ ID NO: 3972538 - RNA, 15 nt, Human herpesvirus 4 [Epstein-Barr virus]
ggugaucgacuccag

SEQ ID NO: 3972539 - RNA, 23 nt, Human herpesvirus 4 [Epstein-Barr virus]
ggugccugguaugcagaaggggc

SEQ ID NO: 3972540 - RNA, 15 nt, Human herpesvirus 4 [Epstein-Barr virus]
gguggagauagggac

SEQ ID NO: 3972541 - RNA, 16 nt, Human herpesvirus 4 [Epstein-Barr virus]
ggugggggugggugca

SEQ ID NO: 3972542 - RNA, 14 nt, Human herpesvirus 4 [Epstein-Barr virus]
gguggugggugugg

SEQ ID NO: 3972543 - RNA, 20 nt, Human herpesvirus 4 [Epstein-Barr virus]
gguuauaacugccagagcug

SEQ ID NO: 3972544 - RNA, 23 nt, Human herpesvirus 4 [Epstein-Barr virus]
agaggagaauagaggggagcaga

SEQ ID NO: 3972545 - RNA, 20 nt, Human herpesvirus 4 [Epstein-Barr virus]
agaggaggaggaugaagauc

SEQ ID NO: 3972546 - RNA, 18 nt, Human herpesvirus 4 [Epstein-Barr virus]
agaggagggggauccgga

SEQ ID NO: 3972547 - RNA, 19 nt, Human herpesvirus 4 [Epstein-Barr virus]
agaggccucugggguccag

SEQ ID NO: 3972548 - RNA, 12 nt, Human herpesvirus 4 [Epstein-Barr virus]
agagggaugggc

SEQ ID NO: 3972549 - RNA, 18 nt, Human herpesvirus 4 [Epstein-Barr virus]
agagggugagcccaccug

SEQ ID NO: 3972550 - RNA, 22 nt, Human herpesvirus 4 [Epstein-Barr virus]
agagggugagcccaccugucug

SEQ ID NO: 3972551 - RNA, 21 nt, Human herpesvirus 4 [Epstein-Barr virus]
agagguagacgaggcacaggc

SEQ ID NO: 3972552 - RNA, 19 nt, Human herpesvirus 4 [Epstein-Barr virus]
agagguugcgcugcuugcc

SEQ ID NO: 3972553 - RNA, 21 nt, Human herpesvirus 4 [Epstein-Barr virus]
agagugccgggcccgggacag

SEQ ID NO: 3972554 - RNA, 13 nt, Human herpesvirus 4 [Epstein-Barr virus]
agauccaacuccg

SEQ ID NO: 3972555 - RNA, 20 nt, Human herpesvirus 4 [Epstein-Barr virus]
agaugccgugaaugcacgcc

SEQ ID NO: 3972556 - RNA, 14 nt, Human herpesvirus 4 [Epstein-Barr virus]
agaugcucuggcga

SEQ ID NO: 3972557 - RNA, 16 nt, Human herpesvirus 4 [Epstein-Barr virus]
agaugucaaacauggu

SEQ ID NO: 3972558 - RNA, 17 nt, Human herpesvirus 4 [Epstein-Barr virus]
agauuagaagaugaugc

SEQ ID NO: 3972559 - RNA, 12 nt, Human herpesvirus 4 [Epstein-Barr virus]
agcaauggcacg

SEQ ID NO: 3972560 - RNA, 18 nt, Human herpesvirus 4 [Epstein-Barr virus]
agcaccggagccaccaca

SEQ ID NO: 3972561 - RNA, 21 nt, Human herpesvirus 4 [Epstein-Barr virus]
agcagagguugggccacgcug

SEQ ID NO: 3972562 - RNA, 15 nt, Human herpesvirus 4 [Epstein-Barr virus]
agcagauccagggcc

SEQ ID NO: 3972563 - RNA, 13 nt, Human herpesvirus 4 [Epstein-Barr virus]
agcagggcccagu

SEQ ID NO: 3972564 - RNA, 17 nt, Human herpesvirus 4 [Epstein-Barr virus]
agcaggugcaccagcuc

SEQ ID NO: 3972565 - RNA, 15 nt, Human herpesvirus 4 [Epstein-Barr virus]
agcaucagaugagac

SEQ ID NO: 3972566 - RNA, 19 nt, Human herpesvirus 4 [Epstein-Barr virus]
agcaugucacacauucccc

SEQ ID NO: 3972567 - RNA, 12 nt, Human herpesvirus 4 [Epstein-Barr virus]
agcauuugcaag

SEQ ID NO: 3972568 - RNA, 22 nt, Human herpesvirus 4 [Epstein-Barr virus]
agccacggcgucaaacagguga

SEQ ID NO: 3972569 - RNA, 17 nt, Human herpesvirus 4 [Epstein-Barr virus]
agccaggcucgcggaag

SEQ ID NO: 3972570 - RNA, 14 nt, Human herpesvirus 4 [Epstein-Barr virus]
agccauuggcaugg

SEQ ID NO: 3972571 - RNA, 22 nt, Human herpesvirus 4 [Epstein-Barr virus]
agcccaagaagaagcccaccua

SEQ ID NO: 3972572 - RNA, 19 nt, Human herpesvirus 4 [Epstein-Barr virus]
agcccccucccgccccugu

SEQ ID NO: 3972573 - RNA, 22 nt, Human herpesvirus 4 [Epstein-Barr virus]
agcccccucccgccccugucca

SEQ ID NO: 3972574 - RNA, 18 nt, Human herpesvirus 4 [Epstein-Barr virus]
agcccccuccuccagguc

SEQ ID NO: 3972575 - RNA, 18 nt, Human herpesvirus 4 [Epstein-Barr virus]
agccccgcccuccccauc

SEQ ID NO: 3972576 - RNA, 21 nt, Human herpesvirus 4 [Epstein-Barr virus]
agccccgggcccagcccuccu

SEQ ID NO: 3972577 - RNA, 18 nt, Human herpesvirus 4 [Epstein-Barr virus]
agccccuaggccugccac

SEQ ID NO: 3972578 - RNA, 20 nt, Human herpesvirus 4 [Epstein-Barr virus]
agcccggggaaaagagagcu

SEQ ID NO: 3972579 - RNA, 12 nt, Human herpesvirus 4 [Epstein-Barr virus]
agcccuccucag

SEQ ID NO: 3972580 - RNA, 21 nt, Human herpesvirus 4 [Epstein-Barr virus]
agccugagccacacccaccua

SEQ ID NO: 3972581 - RNA, 20 nt, Human herpesvirus 4 [Epstein-Barr virus]
agccugauauugucccccua

SEQ ID NO: 3972582 - RNA, 19 nt, Human herpesvirus 4 [Epstein-Barr virus]
agccugcaccaguggcugc

SEQ ID NO: 3972583 - RNA, 20 nt, Human herpesvirus 4 [Epstein-Barr virus]
agccugucgauaucccugcu

SEQ ID NO: 3972584 - RNA, 22 nt, Human herpesvirus 4 [Epstein-Barr virus]
agccuugcguggugcuguccug

SEQ ID NO: 3972585 - RNA, 20 nt, Human herpesvirus 4 [Epstein-Barr virus]
agcgcccugucccuggagcu

SEQ ID NO: 3972586 - RNA, 22 nt, Human herpesvirus 4 [Epstein-Barr virus]
agcggcgugucuuggccagcgg

SEQ ID NO: 3972587 - RNA, 16 nt, Human herpesvirus 4 [Epstein-Barr virus]
agcgucaggagagggc

SEQ ID NO: 3972588 - RNA, 13 nt, Human herpesvirus 4 [Epstein-Barr virus]
agcuaacaggaca

SEQ ID NO: 3972589 - RNA, 21 nt, Human herpesvirus 4 [Epstein-Barr virus]
agcuacgaaacugaccagaug

SEQ ID NO: 3972590 - RNA, 16 nt, Human herpesvirus 4 [Epstein-Barr virus]
agcucaccuaugguca

SEQ ID NO: 3972591 - RNA, 23 nt, Human herpesvirus 4 [Epstein-Barr virus]
agcuccagggacagggcgcugca

SEQ ID NO: 3972592 - RNA, 16 nt, Human herpesvirus 4 [Epstein-Barr virus]
agcuccgugggcccag

SEQ ID NO: 3972593 - RNA, 23 nt, Human herpesvirus 4 [Epstein-Barr virus]
agcucuaacuuggcaucucuuuu

SEQ ID NO: 3972594 - RNA, 20 nt, Human herpesvirus 4 [Epstein-Barr virus]
agcucugcacaggcuuggaa

SEQ ID NO: 3972595 - RNA, 15 nt, Human herpesvirus 4 [Epstein-Barr virus]
agcugagugcccagg

SEQ ID NO: 3972596 - RNA, 13 nt, Human herpesvirus 4 [Epstein-Barr virus]
agcuuggggccac

SEQ ID NO: 3972597 - RNA, 23 nt, Human herpesvirus 4 [Epstein-Barr virus]
agcuuugccccaaucgcgugcca

SEQ ID NO: 3972598 - RNA, 12 nt, Human herpesvirus 4 [Epstein-Barr virus]
aggaacagccuc

SEQ ID NO: 3972599 - RNA, 17 nt, Human herpesvirus 4 [Epstein-Barr virus]
aggacauguuuggggag

SEQ ID NO: 3972600 - RNA, 19 nt, Human herpesvirus 4 [Epstein-Barr virus]
aggaccugggagggccauc

SEQ ID NO: 3972601 - RNA, 14 nt, Human herpesvirus 4 [Epstein-Barr virus]
aggacggagaagcg

SEQ ID NO: 3972602 - RNA, 15 nt, Human herpesvirus 4 [Epstein-Barr virus]
aggagcaggaggggc

SEQ ID NO: 3972603 - RNA, 17 nt, Human herpesvirus 4 [Epstein-Barr virus]
aggagggcugguugggg

SEQ ID NO: 3972604 - RNA, 23 nt, Human herpesvirus 4 [Epstein-Barr virus]
aggagucugcugcggcuaugcag

SEQ ID NO: 3972605 - RNA, 13 nt, Human herpesvirus 4 [Epstein-Barr virus]
aggaucagggcca

SEQ ID NO: 3972606 - RNA, 16 nt, Human herpesvirus 4 [Epstein-Barr virus]
aggauggaaagggcau

SEQ ID NO: 3972607 - RNA, 15 nt, Human herpesvirus 4 [Epstein-Barr virus]
aggauggcacggucc

SEQ ID NO: 3972608 - RNA, 18 nt, Human herpesvirus 4 [Epstein-Barr virus]
aggcaauggucgccaggg

SEQ ID NO: 3972609 - RNA, 22 nt, Human herpesvirus 4 [Epstein-Barr virus]
aggcacaucuggaccuggacug

SEQ ID NO: 3972610 - RNA, 22 nt, Human herpesvirus 4 [Epstein-Barr virus]
aggcacaucuggcaccuguccu

SEQ ID NO: 3972611 - RNA, 12 nt, Human herpesvirus 4 [Epstein-Barr virus]
aggcaccccauc

SEQ ID NO: 3972612 - RNA, 18 nt, Human herpesvirus 4 [Epstein-Barr virus]
aggcagacaaggccccgc

SEQ ID NO: 3972613 - RNA, 20 nt, Human herpesvirus 4 [Epstein-Barr virus]
aggcauuuuuggugcugccu

SEQ ID NO: 3972614 - RNA, 15 nt, Human herpesvirus 4 [Epstein-Barr virus]
aggccaauuggcacu

SEQ ID NO: 3972615 - RNA, 16 nt, Human herpesvirus 4 [Epstein-Barr virus]
aggccagguagcccag

SEQ ID NO: 3972616 - RNA, 17 nt, Human herpesvirus 4 [Epstein-Barr virus]
aggccaugcgcgcccug

SEQ ID NO: 3972617 - RNA, 15 nt, Human herpesvirus 4 [Epstein-Barr virus]
aggcccagcccccuc

SEQ ID NO: 3972618 - RNA, 17 nt, Human herpesvirus 4 [Epstein-Barr virus]
aggcccagcccccuccc

SEQ ID NO: 3972619 - RNA, 19 nt, Human herpesvirus 4 [Epstein-Barr virus]
aggccccccgcaccagggc

SEQ ID NO: 3972620 - RNA, 18 nt, Human herpesvirus 4 [Epstein-Barr virus]
aggccccuuacuuccaca

SEQ ID NO: 3972621 - RNA, 17 nt, Human herpesvirus 4 [Epstein-Barr virus]
aggccgcugccaggccg

SEQ ID NO: 3972622 - RNA, 13 nt, Human herpesvirus 4 [Epstein-Barr virus]
aggccucuggggu

SEQ ID NO: 3972623 - RNA, 20 nt, Human herpesvirus 4 [Epstein-Barr virus]
aggccugccaaagagccaga

SEQ ID NO: 3972624 - RNA, 15 nt, Human herpesvirus 4 [Epstein-Barr virus]
aggcgcgggucuggg

SEQ ID NO: 3972625 - RNA, 19 nt, Human herpesvirus 4 [Epstein-Barr virus]
aggcgcuguggagagaggc

SEQ ID NO: 3972626 - RNA, 18 nt, Human herpesvirus 4 [Epstein-Barr virus]
aggcggaagaccaggagc

SEQ ID NO: 3972627 - RNA, 19 nt, Human herpesvirus 4 [Epstein-Barr virus]
aggcgggaauggccgccac

SEQ ID NO: 3972628 - RNA, 19 nt, Human herpesvirus 4 [Epstein-Barr virus]
aggcgguuagggaggacac

SEQ ID NO: 3972629 - RNA, 14 nt, Human herpesvirus 4 [Epstein-Barr virus]
aggcguccgccccg

SEQ ID NO: 3972630 - RNA, 17 nt, Human herpesvirus 4 [Epstein-Barr virus]
aggcuacaacaggcugc

SEQ ID NO: 3972631 - RNA, 21 nt, Human herpesvirus 4 [Epstein-Barr virus]
aaaaagcgggccugaguccaa

SEQ ID NO: 3972632 - RNA, 13 nt, Human herpesvirus 4 [Epstein-Barr virus]
aaaaauucagacc

SEQ ID NO: 3972633 - RNA, 17 nt, Human herpesvirus 4 [Epstein-Barr virus]
aaaauauauugcaaaau

SEQ ID NO: 3972634 - RNA, 15 nt, Human herpesvirus 4 [Epstein-Barr virus]
aaaaucaaaacuuua

SEQ ID NO: 3972635 - RNA, 11 nt, Human herpesvirus 4 [Epstein-Barr virus]
aaaaugagcca

SEQ ID NO: 3972636 - RNA, 15 nt, Human herpesvirus 4 [Epstein-Barr virus]
aaacaggagauuggu

SEQ ID NO: 3972637 - RNA, 15 nt, Human herpesvirus 4 [Epstein-Barr virus]
aaacaugggcugcua

SEQ ID NO: 3972638 - RNA, 13 nt, Human herpesvirus 4 [Epstein-Barr virus]
aaacaugguguau

SEQ ID NO: 3972639 - RNA, 17 nt, Human herpesvirus 4 [Epstein-Barr virus]
aaacauggugucuguaa

SEQ ID NO: 3972640 - RNA, 18 nt, Human herpesvirus 4 [Epstein-Barr virus]
aaacauggugucuguaau

SEQ ID NO: 3972641 - RNA, 12 nt, Human herpesvirus 4 [Epstein-Barr virus]
aaacgugauggu

SEQ ID NO: 3972642 - RNA, 15 nt, Human herpesvirus 4 [Epstein-Barr virus]
aaacugaaucuccac

SEQ ID NO: 3972643 - RNA, 18 nt, Human herpesvirus 4 [Epstein-Barr virus]
aaagagacucaggcccuc

SEQ ID NO: 3972644 - RNA, 19 nt, Human herpesvirus 4 [Epstein-Barr virus]
cgccagagacaaggcaggc

SEQ ID NO: 3972645 - RNA, 17 nt, Human herpesvirus 4 [Epstein-Barr virus]
cgccaggcucgcuuuuc

SEQ ID NO: 3972646 - RNA, 16 nt, Human herpesvirus 4 [Epstein-Barr virus]
cgccaugcucagggcc

SEQ ID NO: 3972647 - RNA, 17 nt, Human herpesvirus 4 [Epstein-Barr virus]
cgccaugcucagggcca

SEQ ID NO: 3972648 - RNA, 22 nt, Human herpesvirus 4 [Epstein-Barr virus]
cgcccuaccucuuuuggcuggc

SEQ ID NO: 3972649 - RNA, 19 nt, Human herpesvirus 4 [Epstein-Barr virus]
cgcccuggcgguugagcug

SEQ ID NO: 3972650 - RNA, 14 nt, Human herpesvirus 4 [Epstein-Barr virus]
cgccgcaagcaugg

SEQ ID NO: 3972651 - RNA, 15 nt, Human herpesvirus 4 [Epstein-Barr virus]
cgccgccagcagccc

SEQ ID NO: 3972652 - RNA, 18 nt, Human herpesvirus 4 [Epstein-Barr virus]
cgccuacgcagaggccau

SEQ ID NO: 3972653 - RNA, 21 nt, Human herpesvirus 4 [Epstein-Barr virus]
cgccucagggaucguggacuc

SEQ ID NO: 3972654 - RNA, 17 nt, Human herpesvirus 4 [Epstein-Barr virus]
cgccugacccucuugca

SEQ ID NO: 3972655 - RNA, 20 nt, Human herpesvirus 4 [Epstein-Barr virus]
cgccugagcugccuggugag

SEQ ID NO: 3972656 - RNA, 17 nt, Human herpesvirus 4 [Epstein-Barr virus]
cgccuggggauaagaaa

SEQ ID NO: 3972657 - RNA, 17 nt, Human herpesvirus 4 [Epstein-Barr virus]
cgccuuguuucucagag

SEQ ID NO: 3972658 - RNA, 15 nt, Human herpesvirus 4 [Epstein-Barr virus]
cgcgacauguuucug

SEQ ID NO: 3972659 - RNA, 20 nt, Human herpesvirus 4 [Epstein-Barr virus]
cgcgagcuccgugggcccag

SEQ ID NO: 3972660 - RNA, 13 nt, Human herpesvirus 4 [Epstein-Barr virus]
cgcgcccuccucu

SEQ ID NO: 3972661 - RNA, 23 nt, Human herpesvirus 4 [Epstein-Barr virus]
cgcgcuaccuccuaucacaggga

SEQ ID NO: 3972662 - RNA, 23 nt, Human herpesvirus 4 [Epstein-Barr virus]
cgcgcugcucgccccugguagaa

SEQ ID NO: 3972663 - RNA, 14 nt, Human herpesvirus 4 [Epstein-Barr virus]
cgcggcagaggccu

SEQ ID NO: 3972664 - RNA, 15 nt, Human herpesvirus 4 [Epstein-Barr virus]
cgcggcgacgagcgg

SEQ ID NO: 3972665 - RNA, 16 nt, Human herpesvirus 4 [Epstein-Barr virus]
cgcguagcucugguag

SEQ ID NO: 3972666 - RNA, 14 nt, Human herpesvirus 4 [Epstein-Barr virus]
cgcucuggucgccc

SEQ ID NO: 3972667 - RNA, 15 nt, Human herpesvirus 4 [Epstein-Barr virus]
cgcugggacugccug

SEQ ID NO: 3972668 - RNA, 13 nt, Human herpesvirus 4 [Epstein-Barr virus]
cgcugggccaggu

SEQ ID NO: 3972669 - RNA, 15 nt, Human herpesvirus 4 [Epstein-Barr virus]
cgcuguccgccagga

SEQ ID NO: 3972670 - RNA, 16 nt, Human herpesvirus 4 [Epstein-Barr virus]
cgcuuacagccagaga

SEQ ID NO: 3972671 - RNA, 17 nt, Human herpesvirus 4 [Epstein-Barr virus]
uaccagaagagucauac

SEQ ID NO: 3972672 - RNA, 19 nt, Human herpesvirus 4 [Epstein-Barr virus]
uacccgaaacaagagacga

SEQ ID NO: 3972673 - RNA, 19 nt, Human herpesvirus 4 [Epstein-Barr virus]
uacccuuucuaccaggggc

SEQ ID NO: 3972674 - RNA, 21 nt, Human herpesvirus 4 [Epstein-Barr virus]
uaccucuguuccuucugcucc

SEQ ID NO: 3972675 - RNA, 19 nt, Human herpesvirus 4 [Epstein-Barr virus]
uaccugguauuucugacau

SEQ ID NO: 3972676 - RNA, 19 nt, Human herpesvirus 4 [Epstein-Barr virus]
uaccuucuuucuccuucaa

SEQ ID NO: 3972677 - RNA, 22 nt, Human herpesvirus 4 [Epstein-Barr virus]
uacggugauaacugacagagcc

SEQ ID NO: 3972678 - RNA, 17 nt, Human herpesvirus 4 [Epstein-Barr virus]
uacuaaagaaauaacug

SEQ ID NO: 3972679 - RNA, 16 nt, Human herpesvirus 4 [Epstein-Barr virus]
uacuaacacgcaauaa

SEQ ID NO: 3972680 - RNA, 19 nt, Human herpesvirus 4 [Epstein-Barr virus]
uacuuauuggagaugcucu

SEQ ID NO: 3972681 - RNA, 22 nt, Human herpesvirus 4 [Epstein-Barr virus]
uacuugcucagguuucugggca

SEQ ID NO: 3972682 - RNA, 15 nt, Human herpesvirus 4 [Epstein-Barr virus]
uacuuugggguauuc

SEQ ID NO: 3972683 - RNA, 18 nt, Human herpesvirus 4 [Epstein-Barr virus]
uagaagugugucccccuc

SEQ ID NO: 3972684 - RNA, 13 nt, Human herpesvirus 4 [Epstein-Barr virus]
uagacgaggcaca

SEQ ID NO: 3972685 - RNA, 16 nt, Human herpesvirus 4 [Epstein-Barr virus]
uagagguuuugcuagg

SEQ ID NO: 3972686 - RNA, 15 nt, Human herpesvirus 4 [Epstein-Barr virus]
uagauauagaggcuc

SEQ ID NO: 3972687 - RNA, 20 nt, Human herpesvirus 4 [Epstein-Barr virus]
uagcagaagacuccugccug

SEQ ID NO: 3972688 - RNA, 18 nt, Human herpesvirus 4 [Epstein-Barr virus]
uagccaccguggccaggc

SEQ ID NO: 3972689 - RNA, 22 nt, Human herpesvirus 4 [Epstein-Barr virus]
uagcccaggcacaucuggcacc

SEQ ID NO: 3972690 - RNA, 17 nt, Human herpesvirus 4 [Epstein-Barr virus]
uagccccgggcccagcc

SEQ ID NO: 3972691 - RNA, 17 nt, Human herpesvirus 4 [Epstein-Barr virus]
uagccggccaggcagag

SEQ ID NO: 3972692 - RNA, 20 nt, Human herpesvirus 4 [Epstein-Barr virus]
uagccggcgcuguguggcug

SEQ ID NO: 3972693 - RNA, 18 nt, Human herpesvirus 4 [Epstein-Barr virus]
uagcuauuugaucuuuga

SEQ ID NO: 3972694 - RNA, 19 nt, Human herpesvirus 4 [Epstein-Barr virus]
uaggcacuggacacacaug

SEQ ID NO: 3972695 - RNA, 16 nt, Human herpesvirus 4 [Epstein-Barr virus]
uaguaugaaggcuggc

SEQ ID NO: 3972696 - RNA, 23 nt, Human herpesvirus 4 [Epstein-Barr virus]
uauaauuuaaccaaacagugguc

SEQ ID NO: 3972697 - RNA, 16 nt, Human herpesvirus 4 [Epstein-Barr virus]
uauagcucugcacagg

SEQ ID NO: 3972698 - RNA, 17 nt, Human herpesvirus 4 [Epstein-Barr virus]
uaucagagaggccucug

SEQ ID NO: 3972699 - RNA, 15 nt, Human herpesvirus 4 [Epstein-Barr virus]
uaugccauggccauu

SEQ ID NO: 3972700 - RNA, 13 nt, Human herpesvirus 4 [Epstein-Barr virus]
uauuuugggccag

SEQ ID NO: 3972701 - RNA, 18 nt, Human herpesvirus 4 [Epstein-Barr virus]
ucaacuucagcuccaggg

SEQ ID NO: 3972702 - RNA, 12 nt, Human herpesvirus 4 [Epstein-Barr virus]
ucaagagcuucc

SEQ ID NO: 3972703 - RNA, 22 nt, Human herpesvirus 4 [Epstein-Barr virus]
ucaagauugggugguggcagca

SEQ ID NO: 3972704 - RNA, 15 nt, Human herpesvirus 4 [Epstein-Barr virus]
ucacagaccagcccc

SEQ ID NO: 3972705 - RNA, 17 nt, Human herpesvirus 4 [Epstein-Barr virus]
ucacagaccagccccuc

SEQ ID NO: 3972706 - RNA, 11 nt, Human herpesvirus 4 [Epstein-Barr virus]
ucacagcugcu

SEQ ID NO: 3972707 - RNA, 15 nt, Human herpesvirus 4 [Epstein-Barr virus]
ucaccaggccugcca

SEQ ID NO: 3972708 - RNA, 16 nt, Human herpesvirus 4 [Epstein-Barr virus]
ucacgucacucagcuc

SEQ ID NO: 3972709 - RNA, 18 nt, Human herpesvirus 4 [Epstein-Barr virus]
ucacgucacucagcuccg

SEQ ID NO: 3972710 - RNA, 13 nt, Human herpesvirus 4 [Epstein-Barr virus]
ucagauugccuuc

SEQ ID NO: 3972711 - RNA, 16 nt, Human herpesvirus 4 [Epstein-Barr virus]
ucagauugccuucugu

SEQ ID NO: 3972712 - RNA, 14 nt, Human herpesvirus 4 [Epstein-Barr virus]
ucagcacagccaga

SEQ ID NO: 3972713 - RNA, 17 nt, Human herpesvirus 4 [Epstein-Barr virus]
ucagcuccagggccagc

SEQ ID NO: 3972714 - RNA, 13 nt, Human herpesvirus 4 [Epstein-Barr virus]
ucagcuguguacg

SEQ ID NO: 3972715 - RNA, 22 nt, Human herpesvirus 4 [Epstein-Barr virus]
ucagcuguguacgugccucaga

SEQ ID NO: 3972716 - RNA, 22 nt, Human herpesvirus 4 [Epstein-Barr virus]
ucagcuucgaggucuccccuga

SEQ ID NO: 3972717 - RNA, 18 nt, Human herpesvirus 4 [Epstein-Barr virus]
ucaggaagcuggccaggc

SEQ ID NO: 3972718 - RNA, 15 nt, Human herpesvirus 4 [Epstein-Barr virus]
ucaggaucagggcca

SEQ ID NO: 3972719 - RNA, 15 nt, Human herpesvirus 4 [Epstein-Barr virus]
ucaggccucccaguc

SEQ ID NO: 3972720 - RNA, 22 nt, Human herpesvirus 4 [Epstein-Barr virus]
ucaggcgacaguaacacagggu

SEQ ID NO: 3972721 - RNA, 16 nt, Human herpesvirus 4 [Epstein-Barr virus]
ucaggcuaugaagaag

SEQ ID NO: 3972722 - RNA, 16 nt, Human herpesvirus 4 [Epstein-Barr virus]
ucaguggcccucagaa

SEQ ID NO: 3972723 - RNA, 15 nt, Human herpesvirus 4 [Epstein-Barr virus]
ucauauguaugccuu

SEQ ID NO: 3972724 - RNA, 19 nt, Human herpesvirus 4 [Epstein-Barr virus]
ucaucaguaaaucugucuc

SEQ ID NO: 3972725 - RNA, 14 nt, Human herpesvirus 4 [Epstein-Barr virus]
ucauccgccacccc

SEQ ID NO: 3972726 - RNA, 19 nt, Human herpesvirus 4 [Epstein-Barr virus]
ucaucugaaaaugacaggc

SEQ ID NO: 3972727 - RNA, 14 nt, Human herpesvirus 4 [Epstein-Barr virus]
ucaugcgugaccac

SEQ ID NO: 3972728 - RNA, 20 nt, Human herpesvirus 4 [Epstein-Barr virus]
uccaacauuaaagccuccuc

SEQ ID NO: 3972729 - RNA, 15 nt, Human herpesvirus 4 [Epstein-Barr virus]
uccaagcggcacaga

SEQ ID NO: 3972730 - RNA, 22 nt, Human herpesvirus 4 [Epstein-Barr virus]
uccaauagaggagcuccgagag

SEQ ID NO: 3972731 - RNA, 12 nt, Human herpesvirus 4 [Epstein-Barr virus]
uccacagcccca

SEQ ID NO: 3972732 - RNA, 22 nt, Human herpesvirus 4 [Epstein-Barr virus]
uccacggggagacuuaugcuaa

SEQ ID NO: 3972733 - RNA, 22 nt, Human herpesvirus 4 [Epstein-Barr virus]
uccacugccccgguccccccag

SEQ ID NO: 3972734 - RNA, 17 nt, Human herpesvirus 4 [Epstein-Barr virus]
uccagaaaaugccgggc

SEQ ID NO: 3972735 - RNA, 23 nt, Human herpesvirus 4 [Epstein-Barr virus]
uccagacuccggggguccagccg

SEQ ID NO: 3972736 - RNA, 23 nt, Human herpesvirus 4 [Epstein-Barr virus]
uccagcgcucuggucgcccccuc

SEQ ID NO: 3972737 - RNA, 16 nt, Human herpesvirus 4 [Epstein-Barr virus]
uccaggagucugcugc

SEQ ID NO: 3972738 - RNA, 14 nt, Human herpesvirus 4 [Epstein-Barr virus]
uccaggguccagga

SEQ ID NO: 3972739 - RNA, 16 nt, Human herpesvirus 4 [Epstein-Barr virus]
uccaggguccaggaga

SEQ ID NO: 3972740 - RNA, 18 nt, Human herpesvirus 4 [Epstein-Barr virus]
uccaguuuuuaugugccu

SEQ ID NO: 3972741 - RNA, 13 nt, Human herpesvirus 4 [Epstein-Barr virus]
uccaucauguguu

SEQ ID NO: 3972742 - RNA, 18 nt, Human herpesvirus 4 [Epstein-Barr virus]
uccaugacgcugcugcua

SEQ ID NO: 3972743 - RNA, 23 nt, Human herpesvirus 4 [Epstein-Barr virus]
ucccagggccggaaccugagccu

SEQ ID NO: 3972744 - RNA, 22 nt, Human herpesvirus 4 [Epstein-Barr virus]
ucccaguuguuauucccaccuc

SEQ ID NO: 3972745 - RNA, 18 nt, Human herpesvirus 4 [Epstein-Barr virus]
ucccauaccuacaccacc

SEQ ID NO: 3972746 - RNA, 23 nt, Human herpesvirus 4 [Epstein-Barr virus]
uccccccgccuuugggcacccca

SEQ ID NO: 3972747 - RNA, 12 nt, Human herpesvirus 4 [Epstein-Barr virus]
ucccccuagccc

SEQ ID NO: 3972748 - RNA, 19 nt, Human herpesvirus 4 [Epstein-Barr virus]
uccccgagggugaggccca

SEQ ID NO: 3972749 - RNA, 14 nt, Human herpesvirus 4 [Epstein-Barr virus]
uccccggccucccg

SEQ ID NO: 3972750 - RNA, 18 nt, Human herpesvirus 4 [Epstein-Barr virus]
uccccggggacaccugca

SEQ ID NO: 3972751 - RNA, 23 nt, Human herpesvirus 4 [Epstein-Barr virus]
ucccgagcggccuccgccgucca

SEQ ID NO: 3972752 - RNA, 15 nt, Human herpesvirus 4 [Epstein-Barr virus]
ucccgggcaaacagg

SEQ ID NO: 3972753 - RNA, 21 nt, Human herpesvirus 4 [Epstein-Barr virus]
ucccgggcaaacagggcagag

SEQ ID NO: 3972754 - RNA, 24 nt, Human herpesvirus 4 [Epstein-Barr virus]
uccgacgccugcggacucaggcca

SEQ ID NO: 3972755 - RNA, 14 nt, Human herpesvirus 4 [Epstein-Barr virus]
uccgagaggauggc

SEQ ID NO: 3972756 - RNA, 12 nt, Human herpesvirus 4 [Epstein-Barr virus]
uccgccaccucc

SEQ ID NO: 3972757 - RNA, 16 nt, Human herpesvirus 4 [Epstein-Barr virus]
uccggcugcccgucuc

SEQ ID NO: 3972758 - RNA, 14 nt, Human herpesvirus 4 [Epstein-Barr virus]
uccgucagccaggg

SEQ ID NO: 3972759 - RNA, 20 nt, Human herpesvirus 4 [Epstein-Barr virus]
gaugguggggcuuguuucaa

SEQ ID NO: 3972760 - RNA, 18 nt, Human herpesvirus 4 [Epstein-Barr virus]
gaugguguuggagacggu

SEQ ID NO: 3972761 - RNA, 17 nt, Human herpesvirus 4 [Epstein-Barr virus]
gaugucggggcugcugg

SEQ ID NO: 3972762 - RNA, 16 nt, Human herpesvirus 4 [Epstein-Barr virus]
gaugugcccaagccug

SEQ ID NO: 3972763 - RNA, 16 nt, Human herpesvirus 4 [Epstein-Barr virus]
gauuuccgucagccag

SEQ ID NO: 3972764 - RNA, 21 nt, Human herpesvirus 4 [Epstein-Barr virus]
gcaacugcguccucuaccugg

SEQ ID NO: 3972765 - RNA, 12 nt, Human herpesvirus 4 [Epstein-Barr virus]
gcaagauggaga

SEQ ID NO: 3972766 - RNA, 20 nt, Human herpesvirus 4 [Epstein-Barr virus]
gcaagcagcaccugucccug

SEQ ID NO: 3972767 - RNA, 15 nt, Human herpesvirus 4 [Epstein-Barr virus]
gcaagucaggauucu

SEQ ID NO: 3972768 - RNA, 21 nt, Human herpesvirus 4 [Epstein-Barr virus]
gcaauggcacggaugccuggc

SEQ ID NO: 3972769 - RNA, 19 nt, Human herpesvirus 4 [Epstein-Barr virus]
gcacacacucccuuagcca

SEQ ID NO: 3972770 - RNA, 14 nt, Human herpesvirus 4 [Epstein-Barr virus]
gcaccagggccagg

SEQ ID NO: 3972771 - RNA, 14 nt, Human herpesvirus 4 [Epstein-Barr virus]
gcacccggggaacc

SEQ ID NO: 3972772 - RNA, 22 nt, Human herpesvirus 4 [Epstein-Barr virus]
gcaccgauagcauggccgccag

SEQ ID NO: 3972773 - RNA, 19 nt, Human herpesvirus 4 [Epstein-Barr virus]
gcaccggagccaccacagc

SEQ ID NO: 3972774 - RNA, 22 nt, Human herpesvirus 4 [Epstein-Barr virus]
gcaccuccucgaaggugcagcu

SEQ ID NO: 3972775 - RNA, 23 nt, Human herpesvirus 4 [Epstein-Barr virus]
gcaccuguccuugucugcugcca

SEQ ID NO: 3972776 - RNA, 17 nt, Human herpesvirus 4 [Epstein-Barr virus]
gcaccuugccggccacc

SEQ ID NO: 3972777 - RNA, 17 nt, Human herpesvirus 4 [Epstein-Barr virus]
gcacgguccagaagcag

SEQ ID NO: 3972778 - RNA, 23 nt, Human herpesvirus 4 [Epstein-Barr virus]
gcacuccaagugcaacaaucugg

SEQ ID NO: 3972779 - RNA, 22 nt, Human herpesvirus 4 [Epstein-Barr virus]
gcacucuuaccuuccucugccc

SEQ ID NO: 3972780 - RNA, 22 nt, Human herpesvirus 4 [Epstein-Barr virus]
gcacugcguccaccuggccacc

SEQ ID NO: 3972781 - RNA, 24 nt, Human herpesvirus 4 [Epstein-Barr virus]
gcagaagagccgcuccguggcccc

SEQ ID NO: 3972782 - RNA, 22 nt, Human herpesvirus 4 [Epstein-Barr virus]
gcagacuccgaauauccccaaa

SEQ ID NO: 3972783 - RNA, 17 nt, Human herpesvirus 4 [Epstein-Barr virus]
gcagagguugggccacg

SEQ ID NO: 3972784 - RNA, 18 nt, Human herpesvirus 4 [Epstein-Barr virus]
gcagaguaauugcagugg

SEQ ID NO: 3972785 - RNA, 23 nt, Human herpesvirus 4 [Epstein-Barr virus]
gcagauagccggccaggcagagg

SEQ ID NO: 3972786 - RNA, 20 nt, Human herpesvirus 4 [Epstein-Barr virus]
gcagauuuccgucagccagg

SEQ ID NO: 3972787 - RNA, 18 nt, Human herpesvirus 4 [Epstein-Barr virus]
gcagcagacaaggacagg

SEQ ID NO: 3972788 - RNA, 22 nt, Human herpesvirus 4 [Epstein-Barr virus]
gcagccacguccagacuccggg

SEQ ID NO: 3972789 - RNA, 20 nt, Human herpesvirus 4 [Epstein-Barr virus]
gcagcccggccgaggccugc

SEQ ID NO: 3972790 - RNA, 22 nt, Human herpesvirus 4 [Epstein-Barr virus]
gcagcuagagcggguggaggag

SEQ ID NO: 3972791 - RNA, 10 nt, Human herpesvirus 4 [Epstein-Barr virus]
gcagcuccgc

SEQ ID NO: 3972792 - RNA, 11 nt, Human herpesvirus 4 [Epstein-Barr virus]
gcagcuccgcc

SEQ ID NO: 3972793 - RNA, 23 nt, Human herpesvirus 4 [Epstein-Barr virus]
gcagcuuuuggccuucuuccuag

SEQ ID NO: 3972794 - RNA, 21 nt, Human herpesvirus 4 [Epstein-Barr virus]
gcaggagcgggaggggcagga

SEQ ID NO: 3972795 - RNA, 15 nt, Human herpesvirus 4 [Epstein-Barr virus]
gcaggccccccgcac

SEQ ID NO: 3972796 - RNA, 22 nt, Human herpesvirus 4 [Epstein-Barr virus]
gcaggccccccgcaccagggcc

SEQ ID NO: 3972797 - RNA, 14 nt, Human herpesvirus 4 [Epstein-Barr virus]
gcaggccuggacag

SEQ ID NO: 3972798 - RNA, 16 nt, Human herpesvirus 4 [Epstein-Barr virus]
gcaggcuacaacaggc

SEQ ID NO: 3972799 - RNA, 16 nt, Human herpesvirus 4 [Epstein-Barr virus]
gcagggcaaagccaca

SEQ ID NO: 3972800 - RNA, 12 nt, Human herpesvirus 4 [Epstein-Barr virus]
gcaggggcgccg

SEQ ID NO: 3972801 - RNA, 15 nt, Human herpesvirus 4 [Epstein-Barr virus]
gcagguaauaaagcu

SEQ ID NO: 3972802 - RNA, 18 nt, Human herpesvirus 4 [Epstein-Barr virus]
gcagguggcugcugccaa

SEQ ID NO: 3972803 - RNA, 15 nt, Human herpesvirus 4 [Epstein-Barr virus]
gcaguccuugugucu

SEQ ID NO: 3972804 - RNA, 23 nt, Human herpesvirus 4 [Epstein-Barr virus]
gcagucucaaucucucccacgga

SEQ ID NO: 3972805 - RNA, 18 nt, Human herpesvirus 4 [Epstein-Barr virus]
gcagugggccucucuggc

SEQ ID NO: 3972806 - RNA, 17 nt, Human herpesvirus 4 [Epstein-Barr virus]
gcagugucccugcugcc

SEQ ID NO: 3972807 - RNA, 13 nt, Human herpesvirus 4 [Epstein-Barr virus]
gcauaaugggagg

SEQ ID NO: 3972808 - RNA, 16 nt, Human herpesvirus 4 [Epstein-Barr virus]
gcaucaugcgugacca

SEQ ID NO: 3972809 - RNA, 21 nt, Human herpesvirus 4 [Epstein-Barr virus]
gcaugagccacaggcauugcu

SEQ ID NO: 3972810 - RNA, 20 nt, Human herpesvirus 4 [Epstein-Barr virus]
gcaugagcuccucuccaaau

SEQ ID NO: 3972811 - RNA, 14 nt, Human herpesvirus 4 [Epstein-Barr virus]
gcaugcaggucagg

SEQ ID NO: 3972812 - RNA, 17 nt, Human herpesvirus 4 [Epstein-Barr virus]
gcaugguggcuucuuag

SEQ ID NO: 3972813 - RNA, 19 nt, Human herpesvirus 4 [Epstein-Barr virus]
gcauuaauguccagugggg

SEQ ID NO: 3972814 - RNA, 17 nt, Human herpesvirus 4 [Epstein-Barr virus]
gcauucuacuaggaaac

SEQ ID NO: 3972815 - RNA, 17 nt, Human herpesvirus 4 [Epstein-Barr virus]
gcauuggcugcaaaggg

SEQ ID NO: 3972816 - RNA, 20 nt, Human herpesvirus 4 [Epstein-Barr virus]
gcauuuuuggugcugccugg

SEQ ID NO: 3972817 - RNA, 23 nt, Human herpesvirus 4 [Epstein-Barr virus]
gccaaaauuggugccuugcucuc

SEQ ID NO: 3972818 - RNA, 19 nt, Human herpesvirus 4 [Epstein-Barr virus]
gccaaccugccucucuuau

SEQ ID NO: 3972819 - RNA, 17 nt, Human herpesvirus 4 [Epstein-Barr virus]
gccaaccugcucucucu

SEQ ID NO: 3972820 - RNA, 15 nt, Human herpesvirus 4 [Epstein-Barr virus]
gccaagacauagaga

SEQ ID NO: 3972821 - RNA, 16 nt, Human herpesvirus 4 [Epstein-Barr virus]
gccacaaagagggggc

SEQ ID NO: 3972822 - RNA, 16 nt, Human herpesvirus 4 [Epstein-Barr virus]
gccacacugucugucu

SEQ ID NO: 3972823 - RNA, 18 nt, Human herpesvirus 4 [Epstein-Barr virus]
gccaccggggaggccagg

SEQ ID NO: 3972824 - RNA, 17 nt, Human herpesvirus 4 [Epstein-Barr virus]
gccaccguggccaggcc

SEQ ID NO: 3972825 - RNA, 19 nt, Human herpesvirus 4 [Epstein-Barr virus]
gccacggcgucaaacaggu

SEQ ID NO: 3972826 - RNA, 19 nt, Human herpesvirus 4 [Epstein-Barr virus]
gccagagaggcccacugca

SEQ ID NO: 3972827 - RNA, 17 nt, Human herpesvirus 4 [Epstein-Barr virus]
gccagcgccuccucgca

SEQ ID NO: 3972828 - RNA, 14 nt, Human herpesvirus 4 [Epstein-Barr virus]
gccagcgccuugau

SEQ ID NO: 3972829 - RNA, 22 nt, Human herpesvirus 4 [Epstein-Barr virus]
gccaggcucgcggaagagccca

SEQ ID NO: 3972830 - RNA, 15 nt, Human herpesvirus 4 [Epstein-Barr virus]
gccaguaggauauua

SEQ ID NO: 3972831 - RNA, 15 nt, Human herpesvirus 4 [Epstein-Barr virus]
gccaucgggacagau

SEQ ID NO: 3972832 - RNA, 16 nt, Human herpesvirus 4 [Epstein-Barr virus]
gccaucucugauuaua

SEQ ID NO: 3972833 - RNA, 16 nt, Human herpesvirus 4 [Epstein-Barr virus]
gccaugaccagcagca

SEQ ID NO: 3972834 - RNA, 19 nt, Human herpesvirus 4 [Epstein-Barr virus]
gcccacgucuuuaccaccu

SEQ ID NO: 3972835 - RNA, 18 nt, Human herpesvirus 4 [Epstein-Barr virus]
gcccagcagauccagggc

SEQ ID NO: 3972836 - RNA, 22 nt, Human herpesvirus 4 [Epstein-Barr virus]
gcccaggcacaucuggcaccug

SEQ ID NO: 3972837 - RNA, 18 nt, Human herpesvirus 4 [Epstein-Barr virus]
gcccagggacauccccag

SEQ ID NO: 3972838 - RNA, 15 nt, Human herpesvirus 4 [Epstein-Barr virus]
gcccagugcacccag

SEQ ID NO: 3972839 - RNA, 20 nt, Human herpesvirus 4 [Epstein-Barr virus]
gcccccaaaaguagaggcuc

SEQ ID NO: 3972840 - RNA, 19 nt, Human herpesvirus 4 [Epstein-Barr virus]
gcccccgccagcgccuccu

SEQ ID NO: 3972841 - RNA, 22 nt, Human herpesvirus 4 [Epstein-Barr virus]
gcccccucuuuguggccuuccu

SEQ ID NO: 3972842 - RNA, 14 nt, Human herpesvirus 4 [Epstein-Barr virus]
gccccggcuggcca

SEQ ID NO: 3972843 - RNA, 20 nt, Human herpesvirus 4 [Epstein-Barr virus]
gccccuguccacugccccgg

SEQ ID NO: 3972844 - RNA, 19 nt, Human herpesvirus 4 [Epstein-Barr virus]
gcccgacgaacuccuccag

SEQ ID NO: 3972845 - RNA, 17 nt, Human herpesvirus 4 [Epstein-Barr virus]
gcccggccucgccuucu

SEQ ID NO: 3972846 - RNA, 19 nt, Human herpesvirus 4 [Epstein-Barr virus]
uccuacacacaucagaccu

SEQ ID NO: 3972847 - RNA, 16 nt, Human herpesvirus 4 [Epstein-Barr virus]
uccuacgcgcuaccuc

SEQ ID NO: 3972848 - RNA, 13 nt, Human herpesvirus 4 [Epstein-Barr virus]
uccucagccucca

SEQ ID NO: 3972849 - RNA, 19 nt, Human herpesvirus 4 [Epstein-Barr virus]
uccucauuggcuuugcccu

SEQ ID NO: 3972850 - RNA, 18 nt, Human herpesvirus 4 [Epstein-Barr virus]
uccucugggccgcccggc

SEQ ID NO: 3972851 - RNA, 22 nt, Human herpesvirus 4 [Epstein-Barr virus]
uccugauacuagcguacagaag

SEQ ID NO: 3972852 - RNA, 15 nt, Human herpesvirus 4 [Epstein-Barr virus]
uccugccugccucug

SEQ ID NO: 3972853 - RNA, 19 nt, Human herpesvirus 4 [Epstein-Barr virus]
uccugcucauuauugcucu

SEQ ID NO: 3972854 - RNA, 23 nt, Human herpesvirus 4 [Epstein-Barr virus]
uccuguacaaacccaacaaugug

SEQ ID NO: 3972855 - RNA, 16 nt, Human herpesvirus 4 [Epstein-Barr virus]
uccuugucugcugcca

SEQ ID NO: 3972856 - RNA, 15 nt, Human herpesvirus 4 [Epstein-Barr virus]
uccuugugcagcuua

SEQ ID NO: 3972857 - RNA, 17 nt, Human herpesvirus 4 [Epstein-Barr virus]
uccuuugcggcaucacc

SEQ ID NO: 3972858 - RNA, 23 nt, Human herpesvirus 4 [Epstein-Barr virus]
ucgaugauugagaaugccaagag

SEQ ID NO: 3972859 - RNA, 22 nt, Human herpesvirus 4 [Epstein-Barr virus]
ucgcccacacagcgccagcagg

SEQ ID NO: 3972860 - RNA, 18 nt, Human herpesvirus 4 [Epstein-Barr virus]
ucgcccccucugccuccg

SEQ ID NO: 3972861 - RNA, 16 nt, Human herpesvirus 4 [Epstein-Barr virus]
ucgccuucuccucagc

SEQ ID NO: 3972862 - RNA, 15 nt, Human herpesvirus 4 [Epstein-Barr virus]
ucgcugcugcagcua

SEQ ID NO: 3972863 - RNA, 16 nt, Human herpesvirus 4 [Epstein-Barr virus]
ucggacgaggaggaag

SEQ ID NO: 3972864 - RNA, 14 nt, Human herpesvirus 4 [Epstein-Barr virus]
ucggcccuccgcau

SEQ ID NO: 3972865 - RNA, 22 nt, Human herpesvirus 4 [Epstein-Barr virus]
ucgggauccgcaggggcgccga

SEQ ID NO: 3972866 - RNA, 18 nt, Human herpesvirus 4 [Epstein-Barr virus]
ucgggcaagauggagagg

SEQ ID NO: 3972867 - RNA, 16 nt, Human herpesvirus 4 [Epstein-Barr virus]
ucggggcaugcugccc

SEQ ID NO: 3972868 - RNA, 14 nt, Human herpesvirus 4 [Epstein-Barr virus]
ucgggggccugugu

SEQ ID NO: 3972869 - RNA, 17 nt, Human herpesvirus 4 [Epstein-Barr virus]
ucggucaaguaccagcu

SEQ ID NO: 3972870 - RNA, 15 nt, Human herpesvirus 4 [Epstein-Barr virus]
ucggugcgcagaccc

SEQ ID NO: 3972871 - RNA, 15 nt, Human herpesvirus 4 [Epstein-Barr virus]
ucguagagaucaggc

SEQ ID NO: 3972872 - RNA, 20 nt, Human herpesvirus 4 [Epstein-Barr virus]
ucguagucauccgaggcuga

SEQ ID NO: 3972873 - RNA, 20 nt, Human herpesvirus 4 [Epstein-Barr virus]
ucgucaggagggcagagagg

SEQ ID NO: 3972874 - RNA, 13 nt, Human herpesvirus 4 [Epstein-Barr virus]
ucgugcucuucau

SEQ ID NO: 3972875 - RNA, 20 nt, Human herpesvirus 4 [Epstein-Barr virus]
ucguguuggauuggcuguca

SEQ ID NO: 3972876 - RNA, 18 nt, Human herpesvirus 4 [Epstein-Barr virus]
ucuaacugugucccacuc

SEQ ID NO: 3972877 - RNA, 16 nt, Human herpesvirus 4 [Epstein-Barr virus]
ucuagcaggugcacca

SEQ ID NO: 3972878 - RNA, 19 nt, Human herpesvirus 4 [Epstein-Barr virus]
ucuagcaggugcaccagcu

SEQ ID NO: 3972879 - RNA, 14 nt, Human herpesvirus 4 [Epstein-Barr virus]
ucuagcaucugcua

SEQ ID NO: 3972880 - RNA, 14 nt, Human herpesvirus 4 [Epstein-Barr virus]
ucucagaugcagug

SEQ ID NO: 3972881 - RNA, 19 nt, Human herpesvirus 4 [Epstein-Barr virus]
ucucagggacaacagguca

SEQ ID NO: 3972882 - RNA, 21 nt, Human herpesvirus 4 [Epstein-Barr virus]
ucucaugggggaaugagggaa

SEQ ID NO: 3972883 - RNA, 22 nt, Human herpesvirus 4 [Epstein-Barr virus]
ucucaugggggaaugagggaaa

SEQ ID NO: 3972884 - RNA, 14 nt, Human herpesvirus 4 [Epstein-Barr virus]
ucuccaggcuccug

SEQ ID NO: 3972885 - RNA, 15 nt, Human herpesvirus 4 [Epstein-Barr virus]
ucuccaucagggcca

SEQ ID NO: 3972886 - RNA, 15 nt, Human herpesvirus 4 [Epstein-Barr virus]
ucuccauucccagcc

SEQ ID NO: 3972887 - RNA, 15 nt, Human herpesvirus 4 [Epstein-Barr virus]
ucucccucagagucu

SEQ ID NO: 3972888 - RNA, 15 nt, Human herpesvirus 4 [Epstein-Barr virus]
ucuccugccugccuc

SEQ ID NO: 3972889 - RNA, 22 nt, Human herpesvirus 4 [Epstein-Barr virus]
ucuccugccugccucugcucug

SEQ ID NO: 3972890 - RNA, 17 nt, Human herpesvirus 4 [Epstein-Barr virus]
ucucggcuguuuguacu

SEQ ID NO: 3972891 - RNA, 15 nt, Human herpesvirus 4 [Epstein-Barr virus]
ucugacgaggggcca

SEQ ID NO: 3972892 - RNA, 20 nt, Human herpesvirus 4 [Epstein-Barr virus]
ucugcccccugucucuuucu

SEQ ID NO: 3972893 - RNA, 22 nt, Human herpesvirus 4 [Epstein-Barr virus]
ucugccccucagccugcuccug

SEQ ID NO: 3972894 - RNA, 19 nt, Human herpesvirus 4 [Epstein-Barr virus]
ucugcggaucagucgcugg

SEQ ID NO: 3972895 - RNA, 13 nt, Human herpesvirus 4 [Epstein-Barr virus]
ucugcuggacucc

SEQ ID NO: 3972896 - RNA, 14 nt, Human herpesvirus 4 [Epstein-Barr virus]
ucugcuucuggacc

SEQ ID NO: 3972897 - RNA, 23 nt, Human herpesvirus 4 [Epstein-Barr virus]
ucuggaacauuugaggaggcaca

SEQ ID NO: 3972898 - RNA, 20 nt, Human herpesvirus 4 [Epstein-Barr virus]
ucuggccgguggauccucca

SEQ ID NO: 3972899 - RNA, 13 nt, Human herpesvirus 4 [Epstein-Barr virus]
ucuggcugugcug

SEQ ID NO: 3972900 - RNA, 14 nt, Human herpesvirus 4 [Epstein-Barr virus]
ucuggcugugcuga

SEQ ID NO: 3972901 - RNA, 15 nt, Human herpesvirus 4 [Epstein-Barr virus]
ucuggucgcccccuc

SEQ ID NO: 3972902 - RNA, 12 nt, Human herpesvirus 4 [Epstein-Barr virus]
ucuguuuucccc

SEQ ID NO: 3972903 - RNA, 22 nt, Human herpesvirus 4 [Epstein-Barr virus]
ucuucauucuugcuauccugac

SEQ ID NO: 3972904 - RNA, 21 nt, Human herpesvirus 4 [Epstein-Barr virus]
ucuuccugucggcucucuuug

SEQ ID NO: 3972905 - RNA, 13 nt, Human herpesvirus 4 [Epstein-Barr virus]
ucuucuucucccu

SEQ ID NO: 3972906 - RNA, 20 nt, Human herpesvirus 4 [Epstein-Barr virus]
ucuugucggacgaggaggaa

SEQ ID NO: 3972907 - RNA, 19 nt, Human herpesvirus 4 [Epstein-Barr virus]
ucuuuugcucuuaaccauu

SEQ ID NO: 3972908 - RNA, 16 nt, Human herpesvirus 4 [Epstein-Barr virus]
ugaaaacugccuccuc

SEQ ID NO: 3972909 - RNA, 20 nt, Human herpesvirus 4 [Epstein-Barr virus]
ugaaaccacgccugcuucac

SEQ ID NO: 3972910 - RNA, 12 nt, Human herpesvirus 4 [Epstein-Barr virus]
ugaacaccacca

SEQ ID NO: 3972911 - RNA, 21 nt, Human herpesvirus 4 [Epstein-Barr virus]
ugaagcagaugugcccaagcc

SEQ ID NO: 3972912 - RNA, 13 nt, Human herpesvirus 4 [Epstein-Barr virus]
ugaaucuccaccu

SEQ ID NO: 3972913 - RNA, 16 nt, Human herpesvirus 4 [Epstein-Barr virus]
ugaaugcacgccaaca

SEQ ID NO: 3972914 - RNA, 21 nt, Human herpesvirus 4 [Epstein-Barr virus]
ugacagcuacgaaacugacca

SEQ ID NO: 3972915 - RNA, 21 nt, Human herpesvirus 4 [Epstein-Barr virus]
ugaccacucaggaagcuggcc

SEQ ID NO: 3972916 - RNA, 13 nt, Human herpesvirus 4 [Epstein-Barr virus]
ugaccaugcccag

SEQ ID NO: 3972917 - RNA, 22 nt, Human herpesvirus 4 [Epstein-Barr virus]
ugacgcuccaggaucucccgcg

SEQ ID NO: 3972918 - RNA, 16 nt, Human herpesvirus 4 [Epstein-Barr virus]
ugacuaggcaccacuu

SEQ ID NO: 3972919 - RNA, 13 nt, Human herpesvirus 4 [Epstein-Barr virus]
ugacuaugaggag

SEQ ID NO: 3972920 - RNA, 23 nt, Human herpesvirus 4 [Epstein-Barr virus]
ugacuguuuguggcggcaucaug

SEQ ID NO: 3972921 - RNA, 16 nt, Human herpesvirus 4 [Epstein-Barr virus]
ugacuuggccccugug

SEQ ID NO: 3972922 - RNA, 14 nt, Human herpesvirus 4 [Epstein-Barr virus]
ugagagccuaccca

SEQ ID NO: 3972923 - RNA, 20 nt, Human herpesvirus 4 [Epstein-Barr virus]
ugagcagggcuucguccagg

SEQ ID NO: 3972924 - RNA, 14 nt, Human herpesvirus 4 [Epstein-Barr virus]
ugagccacacccac

SEQ ID NO: 3972925 - RNA, 20 nt, Human herpesvirus 4 [Epstein-Barr virus]
ugagggcuuugccugccuaa

SEQ ID NO: 3972926 - RNA, 14 nt, Human herpesvirus 4 [Epstein-Barr virus]
ugaggugccacaga

SEQ ID NO: 3972927 - RNA, 12 nt, Human herpesvirus 4 [Epstein-Barr virus]
ugagucagccuu

SEQ ID NO: 3972928 - RNA, 16 nt, Human herpesvirus 4 [Epstein-Barr virus]
ugagucugcuggacuc

SEQ ID NO: 3972929 - RNA, 23 nt, Human herpesvirus 4 [Epstein-Barr virus]
ugagucugcuggacuccgaggac

SEQ ID NO: 3972930 - RNA, 15 nt, Human herpesvirus 4 [Epstein-Barr virus]
ugagugcccagggca

SEQ ID NO: 3972931 - RNA, 14 nt, Human herpesvirus 4 [Epstein-Barr virus]
ugauaaaccuuaaa

SEQ ID NO: 3972932 - RNA, 13 nt, Human herpesvirus 4 [Epstein-Barr virus]
ugauaaugaugag

SEQ ID NO: 3972933 - RNA, 15 nt, Human herpesvirus 4 [Epstein-Barr virus]
ugaugacgccgagac

SEQ ID NO: 3972934 - RNA, 23 nt, Human herpesvirus 4 [Epstein-Barr virus]
gcccggggaaaagagagcugaug

SEQ ID NO: 3972935 - RNA, 16 nt, Human herpesvirus 4 [Epstein-Barr virus]
gcccguccccugaccg

SEQ ID NO: 3972936 - RNA, 14 nt, Human herpesvirus 4 [Epstein-Barr virus]
gcccuccucugggc

SEQ ID NO: 3972937 - RNA, 21 nt, Human herpesvirus 4 [Epstein-Barr virus]
gcccugucaccaggccugcca

SEQ ID NO: 3972938 - RNA, 23 nt, Human herpesvirus 4 [Epstein-Barr virus]
gcccuuggaacugacgggcacug

SEQ ID NO: 3972939 - RNA, 22 nt, Human herpesvirus 4 [Epstein-Barr virus]
gcccuuuuaacauuggcagcag

SEQ ID NO: 3972940 - RNA, 15 nt, Human herpesvirus 4 [Epstein-Barr virus]
gccgaagaagggagg

SEQ ID NO: 3972941 - RNA, 15 nt, Human herpesvirus 4 [Epstein-Barr virus]
gccgagaccuaugua

SEQ ID NO: 3972942 - RNA, 23 nt, Human herpesvirus 4 [Epstein-Barr virus]
gccgagaucucuugcgcccaggc

SEQ ID NO: 3972943 - RNA, 13 nt, Human herpesvirus 4 [Epstein-Barr virus]
gccgaguggcaga

SEQ ID NO: 3972944 - RNA, 16 nt, Human herpesvirus 4 [Epstein-Barr virus]
gccgccaugcucaggg

SEQ ID NO: 3972945 - RNA, 21 nt, Human herpesvirus 4 [Epstein-Barr virus]
gccgccggauggccuaugggu

SEQ ID NO: 3972946 - RNA, 18 nt, Human herpesvirus 4 [Epstein-Barr virus]
gccgcuccguggccccgg

SEQ ID NO: 3972947 - RNA, 14 nt, Human herpesvirus 4 [Epstein-Barr virus]
gccgcuucagacag

SEQ ID NO: 3972948 - RNA, 13 nt, Human herpesvirus 4 [Epstein-Barr virus]
gccggagggacag

SEQ ID NO: 3972949 - RNA, 14 nt, Human herpesvirus 4 [Epstein-Barr virus]
gccggccaggcaga

SEQ ID NO: 3972950 - RNA, 15 nt, Human herpesvirus 4 [Epstein-Barr virus]
gccggccugcuggcc

SEQ ID NO: 3972951 - RNA, 18 nt, Human herpesvirus 4 [Epstein-Barr virus]
gccggcgcuguguggcug

SEQ ID NO: 3972952 - RNA, 13 nt, Human herpesvirus 4 [Epstein-Barr virus]
gccggugcugcca

SEQ ID NO: 3972953 - RNA, 12 nt, Human herpesvirus 4 [Epstein-Barr virus]
gccgucauucca

SEQ ID NO: 3972954 - RNA, 13 nt, Human herpesvirus 4 [Epstein-Barr virus]
gccguccucugga

SEQ ID NO: 3972955 - RNA, 14 nt, Human herpesvirus 4 [Epstein-Barr virus]
gccgucuggcaggg

SEQ ID NO: 3972956 - RNA, 17 nt, Human herpesvirus 4 [Epstein-Barr virus]
gccguggcgccugggga

SEQ ID NO: 3972957 - RNA, 17 nt, Human herpesvirus 4 [Epstein-Barr virus]
gccuacgaggcccuggc

SEQ ID NO: 3972958 - RNA, 18 nt, Human herpesvirus 4 [Epstein-Barr virus]
gccuccagcucggccagc

SEQ ID NO: 3972959 - RNA, 20 nt, Human herpesvirus 4 [Epstein-Barr virus]
gccuccagcucggccagcag

SEQ ID NO: 3972960 - RNA, 15 nt, Human herpesvirus 4 [Epstein-Barr virus]
gccuccucccaacgc

SEQ ID NO: 3972961 - RNA, 21 nt, Human herpesvirus 4 [Epstein-Barr virus]
gccucgaguaggugccuccag

SEQ ID NO: 3972962 - RNA, 22 nt, Human herpesvirus 4 [Epstein-Barr virus]
gccucgccuucuccucagccuc

SEQ ID NO: 3972963 - RNA, 23 nt, Human herpesvirus 4 [Epstein-Barr virus]
gccucuacgccaggcucgcuuuu

SEQ ID NO: 3972964 - RNA, 20 nt, Human herpesvirus 4 [Epstein-Barr virus]
gccucucuuaugccuguggc

SEQ ID NO: 3972965 - RNA, 21 nt, Human herpesvirus 4 [Epstein-Barr virus]
gccucugccgggaggugcugg

SEQ ID NO: 3972966 - RNA, 19 nt, Human herpesvirus 4 [Epstein-Barr virus]
gccucuuguguucuugccg

SEQ ID NO: 3972967 - RNA, 18 nt, Human herpesvirus 4 [Epstein-Barr virus]
gccugaauuccccugccu

SEQ ID NO: 3972968 - RNA, 15 nt, Human herpesvirus 4 [Epstein-Barr virus]
gccugagcugccugg

SEQ ID NO: 3972969 - RNA, 16 nt, Human herpesvirus 4 [Epstein-Barr virus]
gccuggcggguggaga

SEQ ID NO: 3972970 - RNA, 14 nt, Human herpesvirus 4 [Epstein-Barr virus]
gccugggaggugcu

SEQ ID NO: 3972971 - RNA, 13 nt, Human herpesvirus 4 [Epstein-Barr virus]
gccuucuuccuag

SEQ ID NO: 3972972 - RNA, 17 nt, Human herpesvirus 4 [Epstein-Barr virus]
gccuugagggcaaagac

SEQ ID NO: 3972973 - RNA, 13 nt, Human herpesvirus 4 [Epstein-Barr virus]
gccuugcccccgc

SEQ ID NO: 3972974 - RNA, 16 nt, Human herpesvirus 4 [Epstein-Barr virus]
gccuugggggccugga

SEQ ID NO: 3972975 - RNA, 19 nt, Human herpesvirus 4 [Epstein-Barr virus]
gcgaacauuuauucauuau

SEQ ID NO: 3972976 - RNA, 14 nt, Human herpesvirus 4 [Epstein-Barr virus]
gcgaccccucgugg

SEQ ID NO: 3972977 - RNA, 14 nt, Human herpesvirus 4 [Epstein-Barr virus]
gcgagaauuggcag

SEQ ID NO: 3972978 - RNA, 18 nt, Human herpesvirus 4 [Epstein-Barr virus]
gcgagaauuggcagacac

SEQ ID NO: 3972979 - RNA, 20 nt, Human herpesvirus 4 [Epstein-Barr virus]
gcgagcagcgcggcagaggc

SEQ ID NO: 3972980 - RNA, 20 nt, Human herpesvirus 4 [Epstein-Barr virus]
gcgcaacgccggccugcugg

SEQ ID NO: 3972981 - RNA, 19 nt, Human herpesvirus 4 [Epstein-Barr virus]
gcgcagugccaagagcugc

SEQ ID NO: 3972982 - RNA, 13 nt, Human herpesvirus 4 [Epstein-Barr virus]
gcgccaccugcag

SEQ ID NO: 3972983 - RNA, 14 nt, Human herpesvirus 4 [Epstein-Barr virus]
gcgccagcagggca

SEQ ID NO: 3972984 - RNA, 16 nt, Human herpesvirus 4 [Epstein-Barr virus]
gcgccagcagggcaca

SEQ ID NO: 3972985 - RNA, 16 nt, Human herpesvirus 4 [Epstein-Barr virus]
gcgcccuccucugggc

SEQ ID NO: 3972986 - RNA, 20 nt, Human herpesvirus 4 [Epstein-Barr virus]
gcgcccuccucugggccgcc

SEQ ID NO: 3972987 - RNA, 14 nt, Human herpesvirus 4 [Epstein-Barr virus]
gcgcgccgccagca

SEQ ID NO: 3972988 - RNA, 12 nt, Human herpesvirus 4 [Epstein-Barr virus]
gcgcugggacug

SEQ ID NO: 3972989 - RNA, 18 nt, Human herpesvirus 4 [Epstein-Barr virus]
gcgcugggacugccuggg

SEQ ID NO: 3972990 - RNA, 22 nt, Human herpesvirus 4 [Epstein-Barr virus]
gcggaggccgagcagggacugg

SEQ ID NO: 3972991 - RNA, 18 nt, Human herpesvirus 4 [Epstein-Barr virus]
gcggcccagcagauccag

SEQ ID NO: 3972992 - RNA, 20 nt, Human herpesvirus 4 [Epstein-Barr virus]
gcggggcuccccagccacag

SEQ ID NO: 3972993 - RNA, 14 nt, Human herpesvirus 4 [Epstein-Barr virus]
gcgggugaggccac

SEQ ID NO: 3972994 - RNA, 18 nt, Human herpesvirus 4 [Epstein-Barr virus]
gcgguuauaacugccaga

SEQ ID NO: 3972995 - RNA, 18 nt, Human herpesvirus 4 [Epstein-Barr virus]
gcgucaggagacacggcu

SEQ ID NO: 3972996 - RNA, 17 nt, Human herpesvirus 4 [Epstein-Barr virus]
gcguccucuaccugguc

SEQ ID NO: 3972997 - RNA, 16 nt, Human herpesvirus 4 [Epstein-Barr virus]
gcguccuuugggaaca

SEQ ID NO: 3972998 - RNA, 17 nt, Human herpesvirus 4 [Epstein-Barr virus]
gcgugaccaccuggcca

SEQ ID NO: 3972999 - RNA, 21 nt, Human herpesvirus 4 [Epstein-Barr virus]
gcuaauagcuuucuguugcug

SEQ ID NO: 3973000 - RNA, 19 nt, Human herpesvirus 4 [Epstein-Barr virus]
gcuacaaacacgggccugg

SEQ ID NO: 3973001 - RNA, 17 nt, Human herpesvirus 4 [Epstein-Barr virus]
gcuacgcgggccacagg

SEQ ID NO: 3973002 - RNA, 18 nt, Human herpesvirus 4 [Epstein-Barr virus]
gcuacuacugccuuacac

SEQ ID NO: 3973003 - RNA, 23 nt, Human herpesvirus 4 [Epstein-Barr virus]
gcuacucuccgccguuccuucag

SEQ ID NO: 3973004 - RNA, 13 nt, Human herpesvirus 4 [Epstein-Barr virus]
gcuagcgucacug

SEQ ID NO: 3973005 - RNA, 15 nt, Human herpesvirus 4 [Epstein-Barr virus]
gcucaaccgccaggg

SEQ ID NO: 3973006 - RNA, 21 nt, Human herpesvirus 4 [Epstein-Barr virus]
gcucaccagggaggccuggga

SEQ ID NO: 3973007 - RNA, 15 nt, Human herpesvirus 4 [Epstein-Barr virus]
gcucauaccuccacu

SEQ ID NO: 3973008 - RNA, 16 nt, Human herpesvirus 4 [Epstein-Barr virus]
gcucccgggcaaacag

SEQ ID NO: 3973009 - RNA, 20 nt, Human herpesvirus 4 [Epstein-Barr virus]
gcucccgggcaaacagggca

SEQ ID NO: 3973010 - RNA, 12 nt, Human herpesvirus 4 [Epstein-Barr virus]
gcucccucuggg

SEQ ID NO: 3973011 - RNA, 18 nt, Human herpesvirus 4 [Epstein-Barr virus]
gcuccggauucaccggca

SEQ ID NO: 3973012 - RNA, 15 nt, Human herpesvirus 4 [Epstein-Barr virus]
gcuccggcugcccgu

SEQ ID NO: 3973013 - RNA, 16 nt, Human herpesvirus 4 [Epstein-Barr virus]
gcucuccagccacggc

SEQ ID NO: 3973014 - RNA, 14 nt, Human herpesvirus 4 [Epstein-Barr virus]
gcucucgcacucuu

SEQ ID NO: 3973015 - RNA, 12 nt, Human herpesvirus 4 [Epstein-Barr virus]
gcucuggcacug

SEQ ID NO: 3973016 - RNA, 14 nt, Human herpesvirus 4 [Epstein-Barr virus]
gcucuggcaguuau

SEQ ID NO: 3973017 - RNA, 19 nt, Human herpesvirus 4 [Epstein-Barr virus]
gcucugguacguuggcuuc

SEQ ID NO: 3973018 - RNA, 23 nt, Human herpesvirus 4 [Epstein-Barr virus]
gcucuucguuaaaauaacacaag

SEQ ID NO: 3973019 - RNA, 14 nt, Human herpesvirus 4 [Epstein-Barr virus]
gcugaacuggggcu

SEQ ID NO: 3973020 - RNA, 16 nt, Human herpesvirus 4 [Epstein-Barr virus]
gcugacauauguacaa

SEQ ID NO: 3973021 - RNA, 14 nt, Human herpesvirus 4 [Epstein-Barr virus]
gcugagcgugugca

SEQ ID NO: 3973022 - RNA, 14 nt, Human herpesvirus 4 [Epstein-Barr virus]
gcugcaccuggaca

SEQ ID NO: 3973023 - RNA, 18 nt, Human herpesvirus 4 [Epstein-Barr virus]
gcugcagguaaaccuucu

SEQ ID NO: 3973024 - RNA, 21 nt, Human herpesvirus 4 [Epstein-Barr virus]
gcugcccggacggccuagcca

SEQ ID NO: 3973025 - RNA, 19 nt, Human herpesvirus 4 [Epstein-Barr virus]
gcugcgacaggcccucgag

SEQ ID NO: 3973026 - RNA, 14 nt, Human herpesvirus 4 [Epstein-Barr virus]
gcugcgguggugcg

SEQ ID NO: 3973027 - RNA, 22 nt, Human herpesvirus 4 [Epstein-Barr virus]
gcugcucggggcaugcugcccg

SEQ ID NO: 3973028 - RNA, 17 nt, Human herpesvirus 4 [Epstein-Barr virus]
gcugcugcuacuggcuu

SEQ ID NO: 3973029 - RNA, 15 nt, Human herpesvirus 4 [Epstein-Barr virus]
gcugcugcuggucau

SEQ ID NO: 3973030 - RNA, 13 nt, Human herpesvirus 4 [Epstein-Barr virus]
gcugcuggucaug

SEQ ID NO: 3973031 - RNA, 23 nt, Human herpesvirus 4 [Epstein-Barr virus]
gcuggaggcaauggucgccaggg

SEQ ID NO: 3973032 - RNA, 13 nt, Human herpesvirus 4 [Epstein-Barr virus]
gcuggccaggcug

SEQ ID NO: 3973033 - RNA, 17 nt, Human herpesvirus 4 [Epstein-Barr virus]
gcugggaauggagaggg

SEQ ID NO: 3973034 - RNA, 16 nt, Human herpesvirus 4 [Epstein-Barr virus]
gcugguggccugggag

SEQ ID NO: 3973035 - RNA, 12 nt, Human herpesvirus 4 [Epstein-Barr virus]
gcuuaaaaaugu

SEQ ID NO: 3973036 - RNA, 20 nt, Human herpesvirus 4 [Epstein-Barr virus]
gcuuaacgggaagagaagug

SEQ ID NO: 3973037 - RNA, 18 nt, Human herpesvirus 4 [Epstein-Barr virus]
gcuucccgccuagagcau

SEQ ID NO: 3973038 - RNA, 20 nt, Human herpesvirus 4 [Epstein-Barr virus]
gcuucgaggucuccccugac

SEQ ID NO: 3973039 - RNA, 21 nt, Human herpesvirus 4 [Epstein-Barr virus]
gcuugaggccagagacgagcu

SEQ ID NO: 3973040 - RNA, 15 nt, Human herpesvirus 4 [Epstein-Barr virus]
gcuugccaaaauugg

SEQ ID NO: 3973041 - RNA, 13 nt, Human herpesvirus 4 [Epstein-Barr virus]
ggaaaaggcccua

SEQ ID NO: 3973042 - RNA, 21 nt, Human herpesvirus 4 [Epstein-Barr virus]
ggaaaaucucgcucagagcug

SEQ ID NO: 3973043 - RNA, 21 nt, Human herpesvirus 4 [Epstein-Barr virus]
ggaaccugagccugagccaca

SEQ ID NO: 3973044 - RNA, 19 nt, Human herpesvirus 4 [Epstein-Barr virus]
ggaauauuaauaaauaucu

SEQ ID NO: 3973045 - RNA, 23 nt, Human herpesvirus 4 [Epstein-Barr virus]
ggaaucuuguuggaauggggcgu

SEQ ID NO: 3973046 - RNA, 23 nt, Human herpesvirus 4 [Epstein-Barr virus]
cgcuucagcuccuugugcagcuu

SEQ ID NO: 3973047 - RNA, 15 nt, Human herpesvirus 4 [Epstein-Barr virus]
cgcuugcgucugccc

SEQ ID NO: 3973048 - RNA, 17 nt, Human herpesvirus 4 [Epstein-Barr virus]
cggaagaccaggagccc

SEQ ID NO: 3973049 - RNA, 13 nt, Human herpesvirus 4 [Epstein-Barr virus]
cggaccaggguca

SEQ ID NO: 3973050 - RNA, 20 nt, Human herpesvirus 4 [Epstein-Barr virus]
cggaggacgauagcccaggc

SEQ ID NO: 3973051 - RNA, 20 nt, Human herpesvirus 4 [Epstein-Barr virus]
cggaggcacuggagcagaag

SEQ ID NO: 3973052 - RNA, 22 nt, Human herpesvirus 4 [Epstein-Barr virus]
cggcaagggcucaccagggagg

SEQ ID NO: 3973053 - RNA, 12 nt, Human herpesvirus 4 [Epstein-Barr virus]
cggcacccaggc

SEQ ID NO: 3973054 - RNA, 23 nt, Human herpesvirus 4 [Epstein-Barr virus]
cggcauccucaaggggcacgaga

SEQ ID NO: 3973055 - RNA, 19 nt, Human herpesvirus 4 [Epstein-Barr virus]
cggcaucggguccuagcac

SEQ ID NO: 3973056 - RNA, 21 nt, Human herpesvirus 4 [Epstein-Barr virus]
cggccaggcagaggaaggcca

SEQ ID NO: 3973057 - RNA, 17 nt, Human herpesvirus 4 [Epstein-Barr virus]
cggccaugcgcuuuguc

SEQ ID NO: 3973058 - RNA, 14 nt, Human herpesvirus 4 [Epstein-Barr virus]
cggcccguggccug

SEQ ID NO: 3973059 - RNA, 18 nt, Human herpesvirus 4 [Epstein-Barr virus]
cggccgccccgggcccgg

SEQ ID NO: 3973060 - RNA, 19 nt, Human herpesvirus 4 [Epstein-Barr virus]
cggccguagcccaguccgc

SEQ ID NO: 3973061 - RNA, 18 nt, Human herpesvirus 4 [Epstein-Barr virus]
cggccugaauuccccugc

SEQ ID NO: 3973062 - RNA, 15 nt, Human herpesvirus 4 [Epstein-Barr virus]
cggcgccucuugucg

SEQ ID NO: 3973063 - RNA, 16 nt, Human herpesvirus 4 [Epstein-Barr virus]
cggcguggagcugggc

SEQ ID NO: 3973064 - RNA, 12 nt, Human herpesvirus 4 [Epstein-Barr virus]
cggcuguggccu

SEQ ID NO: 3973065 - RNA, 20 nt, Human herpesvirus 4 [Epstein-Barr virus]
cgggaaugacgggcucccuc

SEQ ID NO: 3973066 - RNA, 11 nt, Human herpesvirus 4 [Epstein-Barr virus]
cgggagccacg

SEQ ID NO: 3973067 - RNA, 18 nt, Human herpesvirus 4 [Epstein-Barr virus]
cgggaggggcaggagcag

SEQ ID NO: 3973068 - RNA, 23 nt, Human herpesvirus 4 [Epstein-Barr virus]
cgggcacgccuucgcccccucuu

SEQ ID NO: 3973069 - RNA, 18 nt, Human herpesvirus 4 [Epstein-Barr virus]
cgggcacugcguccaccu

SEQ ID NO: 3973070 - RNA, 22 nt, Human herpesvirus 4 [Epstein-Barr virus]
cgggccaaguuuaagcaacugc

SEQ ID NO: 3973071 - RNA, 18 nt, Human herpesvirus 4 [Epstein-Barr virus]
cgggcccagcccuccuca

SEQ ID NO: 3973072 - RNA, 19 nt, Human herpesvirus 4 [Epstein-Barr virus]
cgggcccagcccuccucag

SEQ ID NO: 3973073 - RNA, 19 nt, Human herpesvirus 4 [Epstein-Barr virus]
cgggcggcucaggaucagg

SEQ ID NO: 3973074 - RNA, 13 nt, Human herpesvirus 4 [Epstein-Barr virus]
cgggcucccuccc

SEQ ID NO: 3973075 - RNA, 18 nt, Human herpesvirus 4 [Epstein-Barr virus]
cggggaaggaggauggcc

SEQ ID NO: 3973076 - RNA, 17 nt, Human herpesvirus 4 [Epstein-Barr virus]
cggggcagcgccggugg

SEQ ID NO: 3973077 - RNA, 23 nt, Human herpesvirus 4 [Epstein-Barr virus]
cggggcuaaccaaggacaacagc

SEQ ID NO: 3973078 - RNA, 19 nt, Human herpesvirus 4 [Epstein-Barr virus]
cgggucaggucgcggacca

SEQ ID NO: 3973079 - RNA, 20 nt, Human herpesvirus 4 [Epstein-Barr virus]
cgggucaggucgcggaccag

SEQ ID NO: 3973080 - RNA, 21 nt, Human herpesvirus 4 [Epstein-Barr virus]
cggguggagauagggaccaga

SEQ ID NO: 3973081 - RNA, 14 nt, Human herpesvirus 4 [Epstein-Barr virus]
cgguggaacaggag

SEQ ID NO: 3973082 - RNA, 14 nt, Human herpesvirus 4 [Epstein-Barr virus]
cgguguccaggugu

SEQ ID NO: 3973083 - RNA, 19 nt, Human herpesvirus 4 [Epstein-Barr virus]
cguaggucuauggggaccc

SEQ ID NO: 3973084 - RNA, 14 nt, Human herpesvirus 4 [Epstein-Barr virus]
cgucacucagcucc

SEQ ID NO: 3973085 - RNA, 15 nt, Human herpesvirus 4 [Epstein-Barr virus]
cguccaccuggccac

SEQ ID NO: 3973086 - RNA, 19 nt, Human herpesvirus 4 [Epstein-Barr virus]
cguccacucuaucccgcug

SEQ ID NO: 3973087 - RNA, 20 nt, Human herpesvirus 4 [Epstein-Barr virus]
cgucccugaguucuacaaug

SEQ ID NO: 3973088 - RNA, 16 nt, Human herpesvirus 4 [Epstein-Barr virus]
cguccuuguccaggag

SEQ ID NO: 3973089 - RNA, 15 nt, Human herpesvirus 4 [Epstein-Barr virus]
cguccuuugggaaca

SEQ ID NO: 3973090 - RNA, 16 nt, Human herpesvirus 4 [Epstein-Barr virus]
cgugaccaccuggcca

SEQ ID NO: 3973091 - RNA, 16 nt, Human herpesvirus 4 [Epstein-Barr virus]
cgugagucugcuggac

SEQ ID NO: 3973092 - RNA, 16 nt, Human herpesvirus 4 [Epstein-Barr virus]
cgugcaaccaggccca

SEQ ID NO: 3973093 - RNA, 17 nt, Human herpesvirus 4 [Epstein-Barr virus]
cgugcaaccaggcccac

SEQ ID NO: 3973094 - RNA, 16 nt, Human herpesvirus 4 [Epstein-Barr virus]
cgugcaagcagcaccu

SEQ ID NO: 3973095 - RNA, 17 nt, Human herpesvirus 4 [Epstein-Barr virus]
cgugcaaggauggaaga

SEQ ID NO: 3973096 - RNA, 17 nt, Human herpesvirus 4 [Epstein-Barr virus]
cguguuucucccacugu

SEQ ID NO: 3973097 - RNA, 15 nt, Human herpesvirus 4 [Epstein-Barr virus]
cguuggaugcagucc

SEQ ID NO: 3973098 - RNA, 16 nt, Human herpesvirus 4 [Epstein-Barr virus]
cguuggcauucuacua

SEQ ID NO: 3973099 - RNA, 16 nt, Human herpesvirus 4 [Epstein-Barr virus]
cguuggcuucugcugc

SEQ ID NO: 3973100 - RNA, 17 nt, Human herpesvirus 4 [Epstein-Barr virus]
cuaacacgaaugcccag

SEQ ID NO: 3973101 - RNA, 18 nt, Human herpesvirus 4 [Epstein-Barr virus]
cuaacaggacauguuugg

SEQ ID NO: 3973102 - RNA, 14 nt, Human herpesvirus 4 [Epstein-Barr virus]
cuaaccaaggacaa

SEQ ID NO: 3973103 - RNA, 16 nt, Human herpesvirus 4 [Epstein-Barr virus]
cuaagcagcugagggg

SEQ ID NO: 3973104 - RNA, 13 nt, Human herpesvirus 4 [Epstein-Barr virus]
cuacaacaggcug

SEQ ID NO: 3973105 - RNA, 18 nt, Human herpesvirus 4 [Epstein-Barr virus]
cuacaccggccaguggcc

SEQ ID NO: 3973106 - RNA, 14 nt, Human herpesvirus 4 [Epstein-Barr virus]
cuacaggcccgggc

SEQ ID NO: 3973107 - RNA, 12 nt, Human herpesvirus 4 [Epstein-Barr virus]
cuaccgccacgc

SEQ ID NO: 3973108 - RNA, 14 nt, Human herpesvirus 4 [Epstein-Barr virus]
cuaccucuuuuggc

SEQ ID NO: 3973109 - RNA, 22 nt, Human herpesvirus 4 [Epstein-Barr virus]
cuaccugucggcccugcgcuac

SEQ ID NO: 3973110 - RNA, 16 nt, Human herpesvirus 4 [Epstein-Barr virus]
cuacgcgggccacagg

SEQ ID NO: 3973111 - RNA, 15 nt, Human herpesvirus 4 [Epstein-Barr virus]
cuacucgaccagcac

SEQ ID NO: 3973112 - RNA, 16 nt, Human herpesvirus 4 [Epstein-Barr virus]
cuacucuuggcagcag

SEQ ID NO: 3973113 - RNA, 18 nt, Human herpesvirus 4 [Epstein-Barr virus]
cuagagcauuugcaaguc

SEQ ID NO: 3973114 - RNA, 12 nt, Human herpesvirus 4 [Epstein-Barr virus]
cuagagggacag

SEQ ID NO: 3973115 - RNA, 19 nt, Human herpesvirus 4 [Epstein-Barr virus]
cuaggcuuuccugcaaggc

SEQ ID NO: 3973116 - RNA, 15 nt, Human herpesvirus 4 [Epstein-Barr virus]
cucaagcccuucuuc

SEQ ID NO: 3973117 - RNA, 23 nt, Human herpesvirus 4 [Epstein-Barr virus]
cucaagcuacucaaugagaggga

SEQ ID NO: 3973118 - RNA, 11 nt, Human herpesvirus 4 [Epstein-Barr virus]
cucaaggaggg

SEQ ID NO: 3973119 - RNA, 21 nt, Human herpesvirus 4 [Epstein-Barr virus]
cucaccagggaggccugggag

SEQ ID NO: 3973120 - RNA, 20 nt, Human herpesvirus 4 [Epstein-Barr virus]
cucaccgggaacgcccagua

SEQ ID NO: 3973121 - RNA, 20 nt, Human herpesvirus 4 [Epstein-Barr virus]
cucagaauugucacugagaa

SEQ ID NO: 3973122 - RNA, 19 nt, Human herpesvirus 4 [Epstein-Barr virus]
cucagagagcauuucaggc

SEQ ID NO: 3973123 - RNA, 23 nt, Human herpesvirus 4 [Epstein-Barr virus]
cucagagggggugccugugccuc

SEQ ID NO: 3973124 - RNA, 14 nt, Human herpesvirus 4 [Epstein-Barr virus]
cucagaugcagugg

SEQ ID NO: 3973125 - RNA, 19 nt, Human herpesvirus 4 [Epstein-Barr virus]
cucagccugcuccugagaa

SEQ ID NO: 3973126 - RNA, 16 nt, Human herpesvirus 4 [Epstein-Barr virus]
cucaggaucagggcca

SEQ ID NO: 3973127 - RNA, 23 nt, Human herpesvirus 4 [Epstein-Barr virus]
cucaggccaugcgcgcccuguca

SEQ ID NO: 3973128 - RNA, 13 nt, Human herpesvirus 4 [Epstein-Barr virus]
cucagguuucugg

SEQ ID NO: 3973129 - RNA, 22 nt, Human herpesvirus 4 [Epstein-Barr virus]
cucagucuuugcaauuugccua

SEQ ID NO: 3973130 - RNA, 16 nt, Human herpesvirus 4 [Epstein-Barr virus]
cuccaacaggugcccg

SEQ ID NO: 3973131 - RNA, 17 nt, Human herpesvirus 4 [Epstein-Barr virus]
cuccacaccaaauaaac

SEQ ID NO: 3973132 - RNA, 17 nt, Human herpesvirus 4 [Epstein-Barr virus]
cuccauaggccucugcc

SEQ ID NO: 3973133 - RNA, 16 nt, Human herpesvirus 4 [Epstein-Barr virus]
cuccaucagggccagg

SEQ ID NO: 3973134 - RNA, 22 nt, Human herpesvirus 4 [Epstein-Barr virus]
gagacggugaccugacuggcag

SEQ ID NO: 3973135 - RNA, 14 nt, Human herpesvirus 4 [Epstein-Barr virus]
gagacguggguccc

SEQ ID NO: 3973136 - RNA, 18 nt, Human herpesvirus 4 [Epstein-Barr virus]
gagaggcccgggggccuu

SEQ ID NO: 3973137 - RNA, 23 nt, Human herpesvirus 4 [Epstein-Barr virus]
gagaggcuucccgccuagagcau

SEQ ID NO: 3973138 - RNA, 18 nt, Human herpesvirus 4 [Epstein-Barr virus]
gagcagaaggaacagagg

SEQ ID NO: 3973139 - RNA, 14 nt, Human herpesvirus 4 [Epstein-Barr virus]
gagcaggaggggca

SEQ ID NO: 3973140 - RNA, 19 nt, Human herpesvirus 4 [Epstein-Barr virus]
gagcagggcaaagccacaa

SEQ ID NO: 3973141 - RNA, 21 nt, Human herpesvirus 4 [Epstein-Barr virus]
gagcaugaucaggacccuggg

SEQ ID NO: 3973142 - RNA, 17 nt, Human herpesvirus 4 [Epstein-Barr virus]
gagccagaucuaaggcc

SEQ ID NO: 3973143 - RNA, 21 nt, Human herpesvirus 4 [Epstein-Barr virus]
gagccauuggcaugggcggga

SEQ ID NO: 3973144 - RNA, 22 nt, Human herpesvirus 4 [Epstein-Barr virus]
gagcccauucucguccaucucg

SEQ ID NO: 3973145 - RNA, 13 nt, Human herpesvirus 4 [Epstein-Barr virus]
gagccguggccuu

SEQ ID NO: 3973146 - RNA, 15 nt, Human herpesvirus 4 [Epstein-Barr virus]
gagcgcacgugacag

SEQ ID NO: 3973147 - RNA, 13 nt, Human herpesvirus 4 [Epstein-Barr virus]
gagcgcccaccga

SEQ ID NO: 3973148 - RNA, 24 nt, Human herpesvirus 4 [Epstein-Barr virus]
gagcggcauccucaaggggcacga

SEQ ID NO: 3973149 - RNA, 14 nt, Human herpesvirus 4 [Epstein-Barr virus]
gagcuauguggaaa

SEQ ID NO: 3973150 - RNA, 18 nt, Human herpesvirus 4 [Epstein-Barr virus]
gaggacggugucuguggu

SEQ ID NO: 3973151 - RNA, 15 nt, Human herpesvirus 4 [Epstein-Barr virus]
gaggacuaauguucu

SEQ ID NO: 3973152 - RNA, 13 nt, Human herpesvirus 4 [Epstein-Barr virus]
gaggagacgugug

SEQ ID NO: 3973153 - RNA, 19 nt, Human herpesvirus 4 [Epstein-Barr virus]
gaggagcuccgugagcagg

SEQ ID NO: 3973154 - RNA, 21 nt, Human herpesvirus 4 [Epstein-Barr virus]
gaggagcuccgugagcaggag

SEQ ID NO: 3973155 - RNA, 18 nt, Human herpesvirus 4 [Epstein-Barr virus]
gaggaggacaugugcaug

SEQ ID NO: 3973156 - RNA, 20 nt, Human herpesvirus 4 [Epstein-Barr virus]
gaggauccaaacccccuccc

SEQ ID NO: 3973157 - RNA, 15 nt, Human herpesvirus 4 [Epstein-Barr virus]
gaggcauaacggugg

SEQ ID NO: 3973158 - RNA, 17 nt, Human herpesvirus 4 [Epstein-Barr virus]
gaggccagguagcccag

SEQ ID NO: 3973159 - RNA, 18 nt, Human herpesvirus 4 [Epstein-Barr virus]
gaggccucugggguccag

SEQ ID NO: 3973160 - RNA, 13 nt, Human herpesvirus 4 [Epstein-Barr virus]
gaggccugcacca

SEQ ID NO: 3973161 - RNA, 13 nt, Human herpesvirus 4 [Epstein-Barr virus]
gaggcggugccug

SEQ ID NO: 3973162 - RNA, 17 nt, Human herpesvirus 4 [Epstein-Barr virus]
gagggcagacaccaccu

SEQ ID NO: 3973163 - RNA, 14 nt, Human herpesvirus 4 [Epstein-Barr virus]
gagggccucuggca

SEQ ID NO: 3973164 - RNA, 17 nt, Human herpesvirus 4 [Epstein-Barr virus]
gagggcgcucugcgcca

SEQ ID NO: 3973165 - RNA, 12 nt, Human herpesvirus 4 [Epstein-Barr virus]
gaggggcaggag

SEQ ID NO: 3973166 - RNA, 12 nt, Human herpesvirus 4 [Epstein-Barr virus]
gaggggccaggu

SEQ ID NO: 3973167 - RNA, 16 nt, Human herpesvirus 4 [Epstein-Barr virus]
gaggugcugaggcccg

SEQ ID NO: 3973168 - RNA, 16 nt, Human herpesvirus 4 [Epstein-Barr virus]
gagucccuccucacca

SEQ ID NO: 3973169 - RNA, 12 nt, Human herpesvirus 4 [Epstein-Barr virus]
gagucugcugcg

SEQ ID NO: 3973170 - RNA, 17 nt, Human herpesvirus 4 [Epstein-Barr virus]
gagugggcagcagagag

SEQ ID NO: 3973171 - RNA, 20 nt, Human herpesvirus 4 [Epstein-Barr virus]
gauacaaaaacuugagucuc

SEQ ID NO: 3973172 - RNA, 14 nt, Human herpesvirus 4 [Epstein-Barr virus]
gauagaauagcugc

SEQ ID NO: 3973173 - RNA, 14 nt, Human herpesvirus 4 [Epstein-Barr virus]
gauagccggccagg

SEQ ID NO: 3973174 - RNA, 14 nt, Human herpesvirus 4 [Epstein-Barr virus]
gaucccaggccuca

SEQ ID NO: 3973175 - RNA, 16 nt, Human herpesvirus 4 [Epstein-Barr virus]
gaucccaggccucagc

SEQ ID NO: 3973176 - RNA, 22 nt, Human herpesvirus 4 [Epstein-Barr virus]
gaucccauuuuucacuacggga

SEQ ID NO: 3973177 - RNA, 17 nt, Human herpesvirus 4 [Epstein-Barr virus]
gaugaacccuggggcaa

SEQ ID NO: 3973178 - RNA, 15 nt, Human herpesvirus 4 [Epstein-Barr virus]
gaugacaccauggcc

SEQ ID NO: 3973179 - RNA, 21 nt, Human herpesvirus 4 [Epstein-Barr virus]
gaugaccaugauggugcagag

SEQ ID NO: 3973180 - RNA, 13 nt, Human herpesvirus 4 [Epstein-Barr virus]
gaugaggcugaug

SEQ ID NO: 3973181 - RNA, 22 nt, Human herpesvirus 4 [Epstein-Barr virus]
gaugaggcugaugauggccacg

SEQ ID NO: 3973182 - RNA, 18 nt, Human herpesvirus 4 [Epstein-Barr virus]
gaugauauugaauuccac

SEQ ID NO: 3973183 - RNA, 13 nt, Human herpesvirus 4 [Epstein-Barr virus]
gaugcaacagagg

SEQ ID NO: 3973184 - RNA, 15 nt, Human herpesvirus 4 [Epstein-Barr virus]
gaugcaacagaggau

SEQ ID NO: 3973185 - RNA, 14 nt, Human herpesvirus 4 [Epstein-Barr virus]
gaugcugcagaggu

SEQ ID NO: 3973186 - RNA, 13 nt, Human herpesvirus 4 [Epstein-Barr virus]
gauggccuggaga

SEQ ID NO: 3973187 - RNA, 12 nt, Human herpesvirus 4 [Epstein-Barr virus]
gauggugcuggu

SEQ ID NO: 3973188 - RNA, 14 nt, Human herpesvirus 4 [Epstein-Barr virus]
ggacaugugcaugg

SEQ ID NO: 3973189 - RNA, 14 nt, Human herpesvirus 4 [Epstein-Barr virus]
ggacauucuucuga

SEQ ID NO: 3973190 - RNA, 15 nt, Human herpesvirus 4 [Epstein-Barr virus]
ggacgaggaggcgga

SEQ ID NO: 3973191 - RNA, 17 nt, Human herpesvirus 4 [Epstein-Barr virus]
ggacucucuguuucugu

SEQ ID NO: 3973192 - RNA, 17 nt, Human herpesvirus 4 [Epstein-Barr virus]
ggagacguguguggcug

SEQ ID NO: 3973193 - RNA, 16 nt, Human herpesvirus 4 [Epstein-Barr virus]
ggagaugggugcauuu

SEQ ID NO: 3973194 - RNA, 21 nt, Human herpesvirus 4 [Epstein-Barr virus]
ggagauuuucccacugugccu

SEQ ID NO: 3973195 - RNA, 12 nt, Human herpesvirus 4 [Epstein-Barr virus]
ggagcaggagca

SEQ ID NO: 3973196 - RNA, 15 nt, Human herpesvirus 4 [Epstein-Barr virus]
ggagcaggagcggga

SEQ ID NO: 3973197 - RNA, 14 nt, Human herpesvirus 4 [Epstein-Barr virus]
ggagccgggcuuca

SEQ ID NO: 3973198 - RNA, 19 nt, Human herpesvirus 4 [Epstein-Barr virus]
ggagcuccgugagcaggag

SEQ ID NO: 3973199 - RNA, 18 nt, Human herpesvirus 4 [Epstein-Barr virus]
ggagcuguaacugugguu

SEQ ID NO: 3973200 - RNA, 12 nt, Human herpesvirus 4 [Epstein-Barr virus]
ggaggaagaugg

SEQ ID NO: 3973201 - RNA, 15 nt, Human herpesvirus 4 [Epstein-Barr virus]
ggaggacgugaguga

SEQ ID NO: 3973202 - RNA, 15 nt, Human herpesvirus 4 [Epstein-Barr virus]
ggaggaggggcagga

SEQ ID NO: 3973203 - RNA, 18 nt, Human herpesvirus 4 [Epstein-Barr virus]
ggaggcaauggucgccag

SEQ ID NO: 3973204 - RNA, 23 nt, Human herpesvirus 4 [Epstein-Barr virus]
ggaggccaccgacgagcagagga

SEQ ID NO: 3973205 - RNA, 18 nt, Human herpesvirus 4 [Epstein-Barr virus]
ggagggcacucgcccacu

SEQ ID NO: 3973206 - RNA, 23 nt, Human herpesvirus 4 [Epstein-Barr virus]
ggauagccucgcgacucguggga

SEQ ID NO: 3973207 - RNA, 14 nt, Human herpesvirus 4 [Epstein-Barr virus]
ggaugcuguagugg

SEQ ID NO: 3973208 - RNA, 15 nt, Human herpesvirus 4 [Epstein-Barr virus]
ggauggccuccagcu

SEQ ID NO: 3973209 - RNA, 17 nt, Human herpesvirus 4 [Epstein-Barr virus]
ggcaaacagggcagaga

SEQ ID NO: 3973210 - RNA, 21 nt, Human herpesvirus 4 [Epstein-Barr virus]
ggcaccuguccuugucugcug

SEQ ID NO: 3973211 - RNA, 17 nt, Human herpesvirus 4 [Epstein-Barr virus]
ggcacgccguggcccug

SEQ ID NO: 3973212 - RNA, 14 nt, Human herpesvirus 4 [Epstein-Barr virus]
ggcagaaaggcugg

SEQ ID NO: 3973213 - RNA, 17 nt, Human herpesvirus 4 [Epstein-Barr virus]
ggcagcgaagaacacuc

SEQ ID NO: 3973214 - RNA, 19 nt, Human herpesvirus 4 [Epstein-Barr virus]
ggcagcggaugguggggcu

SEQ ID NO: 3973215 - RNA, 15 nt, Human herpesvirus 4 [Epstein-Barr virus]
ggcaggaggggcagg

SEQ ID NO: 3973216 - RNA, 16 nt, Human herpesvirus 4 [Epstein-Barr virus]
ggcaggaggggcagga

SEQ ID NO: 3973217 - RNA, 21 nt, Human herpesvirus 4 [Epstein-Barr virus]
ggcaggcauuuuuggugcugc

SEQ ID NO: 3973218 - RNA, 18 nt, Human herpesvirus 4 [Epstein-Barr virus]
ggcaggcuacaacaggcu

SEQ ID NO: 3973219 - RNA, 16 nt, Human herpesvirus 4 [Epstein-Barr virus]
ggcaguagaggacacc

SEQ ID NO: 3973220 - RNA, 13 nt, Human herpesvirus 4 [Epstein-Barr virus]
ggcauccuucaga

SEQ ID NO: 3973221 - RNA, 13 nt, Human herpesvirus 4 [Epstein-Barr virus]
ggccaccaacguc

SEQ ID NO: 3973222 - RNA, 17 nt, Human herpesvirus 4 [Epstein-Barr virus]
ggccaccgacgagcaga

SEQ ID NO: 3973223 - RNA, 16 nt, Human herpesvirus 4 [Epstein-Barr virus]
ggccaccggggaggcc

SEQ ID NO: 3973224 - RNA, 17 nt, Human herpesvirus 4 [Epstein-Barr virus]
ggccacugcaggcugga

SEQ ID NO: 3973225 - RNA, 24 nt, Human herpesvirus 4 [Epstein-Barr virus]
ggccagacggcgcuugcgucugcc

SEQ ID NO: 3973226 - RNA, 21 nt, Human herpesvirus 4 [Epstein-Barr virus]
ggccagcucauaugccgcugc

SEQ ID NO: 3973227 - RNA, 14 nt, Human herpesvirus 4 [Epstein-Barr virus]
ggccaggcagagga

SEQ ID NO: 3973228 - RNA, 18 nt, Human herpesvirus 4 [Epstein-Barr virus]
ggccaggcagaggaaggc

SEQ ID NO: 3973229 - RNA, 18 nt, Human herpesvirus 4 [Epstein-Barr virus]
ggccaggcgacgcucccg

SEQ ID NO: 3973230 - RNA, 17 nt, Human herpesvirus 4 [Epstein-Barr virus]
ggccaugcgcgcccugu

SEQ ID NO: 3973231 - RNA, 15 nt, Human herpesvirus 4 [Epstein-Barr virus]
ggccaugcgcuuugu

SEQ ID NO: 3973232 - RNA, 18 nt, Human herpesvirus 4 [Epstein-Barr virus]
ggcccacuggaugcagga

SEQ ID NO: 3973233 - RNA, 19 nt, Human herpesvirus 4 [Epstein-Barr virus]
ggcccagcccuccucagaa

SEQ ID NO: 3973234 - RNA, 19 nt, Human herpesvirus 4 [Epstein-Barr virus]
ggcccagggucacuggcuu

SEQ ID NO: 3973235 - RNA, 16 nt, Human herpesvirus 4 [Epstein-Barr virus]
ggcccccagcuucuga

SEQ ID NO: 3973236 - RNA, 18 nt, Human herpesvirus 4 [Epstein-Barr virus]
ggcccggggguggcagcc

SEQ ID NO: 3973237 - RNA, 14 nt, Human herpesvirus 4 [Epstein-Barr virus]
ggcccgucccucuu

SEQ ID NO: 3973238 - RNA, 21 nt, Human herpesvirus 4 [Epstein-Barr virus]
ggcccucgguggugggcugcu

SEQ ID NO: 3973239 - RNA, 18 nt, Human herpesvirus 4 [Epstein-Barr virus]
ggccgagcagggacuggc

SEQ ID NO: 3973240 - RNA, 20 nt, Human herpesvirus 4 [Epstein-Barr virus]
ggccgcccgccuggcucgcc

SEQ ID NO: 3973241 - RNA, 13 nt, Human herpesvirus 4 [Epstein-Barr virus]
ggccgcugccagg

SEQ ID NO: 3973242 - RNA, 20 nt, Human herpesvirus 4 [Epstein-Barr virus]
ggccgggagaggcagcccca

SEQ ID NO: 3973243 - RNA, 14 nt, Human herpesvirus 4 [Epstein-Barr virus]
ggccggugcugcca

SEQ ID NO: 3973244 - RNA, 15 nt, Human herpesvirus 4 [Epstein-Barr virus]
ggccggugcugccag

SEQ ID NO: 3973245 - RNA, 16 nt, Human herpesvirus 4 [Epstein-Barr virus]
ggccucaaaggccucg

SEQ ID NO: 3973246 - RNA, 16 nt, Human herpesvirus 4 [Epstein-Barr virus]
ggccucaaaguccugc

SEQ ID NO: 3973247 - RNA, 11 nt, Human herpesvirus 4 [Epstein-Barr virus]
ggccuccuggc

SEQ ID NO: 3973248 - RNA, 16 nt, Human herpesvirus 4 [Epstein-Barr virus]
ggccucggccuggggu

SEQ ID NO: 3973249 - RNA, 19 nt, Human herpesvirus 4 [Epstein-Barr virus]
ggccucucuggcugugcug

SEQ ID NO: 3973250 - RNA, 13 nt, Human herpesvirus 4 [Epstein-Barr virus]
ggccucugggguc

SEQ ID NO: 3973251 - RNA, 13 nt, Human herpesvirus 4 [Epstein-Barr virus]
ggcgaagcuggcu

SEQ ID NO: 3973252 - RNA, 13 nt, Human herpesvirus 4 [Epstein-Barr virus]
ggcgaaggcgugc

SEQ ID NO: 3973253 - RNA, 17 nt, Human herpesvirus 4 [Epstein-Barr virus]
ggcgacaguaacacagg

SEQ ID NO: 3973254 - RNA, 19 nt, Human herpesvirus 4 [Epstein-Barr virus]
ggcgaccuguuccgcuucu

SEQ ID NO: 3973255 - RNA, 21 nt, Human herpesvirus 4 [Epstein-Barr virus]
ggcgacuuuguuuagggacag

SEQ ID NO: 3973256 - RNA, 13 nt, Human herpesvirus 4 [Epstein-Barr virus]
ggcgcaggggagg

SEQ ID NO: 3973257 - RNA, 19 nt, Human herpesvirus 4 [Epstein-Barr virus]
ggcgccgaaagcaggaaug

SEQ ID NO: 3973258 - RNA, 21 nt, Human herpesvirus 4 [Epstein-Barr virus]
ggcgccgcccgggggccaguc

SEQ ID NO: 3973259 - RNA, 14 nt, Human herpesvirus 4 [Epstein-Barr virus]
ggcgcucugcgcca

SEQ ID NO: 3973260 - RNA, 22 nt, Human herpesvirus 4 [Epstein-Barr virus]
ggcgcucugcgccagccccgcc

SEQ ID NO: 3973261 - RNA, 18 nt, Human herpesvirus 4 [Epstein-Barr virus]
ggcggcgguggauagaga

SEQ ID NO: 3973262 - RNA, 20 nt, Human herpesvirus 4 [Epstein-Barr virus]
ggcgggaguauggggccaga

SEQ ID NO: 3973263 - RNA, 15 nt, Human herpesvirus 4 [Epstein-Barr virus]
ggcgguuagggagga

SEQ ID NO: 3973264 - RNA, 21 nt, Human herpesvirus 4 [Epstein-Barr virus]
ggcguaguugaaucaccgccg

SEQ ID NO: 3973265 - RNA, 20 nt, Human herpesvirus 4 [Epstein-Barr virus]
ggcgugcccgaacccggguu

SEQ ID NO: 3973266 - RNA, 16 nt, Human herpesvirus 4 [Epstein-Barr virus]
ggcucaggccaugcgc

SEQ ID NO: 3973267 - RNA, 22 nt, Human herpesvirus 4 [Epstein-Barr virus]
ggcucaggcggaggcacuggag

SEQ ID NO: 3973268 - RNA, 15 nt, Human herpesvirus 4 [Epstein-Barr virus]
ggcugagaacugacg

SEQ ID NO: 3973269 - RNA, 13 nt, Human herpesvirus 4 [Epstein-Barr virus]
ggcugaugauggc

SEQ ID NO: 3973270 - RNA, 15 nt, Human herpesvirus 4 [Epstein-Barr virus]
ggcugccagccucag

SEQ ID NO: 3973271 - RNA, 16 nt, Human herpesvirus 4 [Epstein-Barr virus]
ggcugcuaagccagga

SEQ ID NO: 3973272 - RNA, 18 nt, Human herpesvirus 4 [Epstein-Barr virus]
ggcugcuauagugagcca

SEQ ID NO: 3973273 - RNA, 18 nt, Human herpesvirus 4 [Epstein-Barr virus]
ggcugcugccgucccagg

SEQ ID NO: 3973274 - RNA, 11 nt, Human herpesvirus 4 [Epstein-Barr virus]
uagucagucug

SEQ ID NO: 3973275 - RNA, 16 nt, Human herpesvirus 4 [Epstein-Barr virus]
uagugagccaggcuuu

SEQ ID NO: 3973276 - RNA, 13 nt, Human herpesvirus 4 [Epstein-Barr virus]
uauagaggcucuc

SEQ ID NO: 3973277 - RNA, 13 nt, Human herpesvirus 4 [Epstein-Barr virus]
uauagcucuggca

SEQ ID NO: 3973278 - RNA, 20 nt, Human herpesvirus 4 [Epstein-Barr virus]
uauccagagcugagugccca

SEQ ID NO: 3973279 - RNA, 23 nt, Human herpesvirus 4 [Epstein-Barr virus]
uauccagagcugagugcccaggg

SEQ ID NO: 3973280 - RNA, 18 nt, Human herpesvirus 4 [Epstein-Barr virus]
uauccaggucuugccgug

SEQ ID NO: 3973281 - RNA, 14 nt, Human herpesvirus 4 [Epstein-Barr virus]
uaugaaaaugugua

SEQ ID NO: 3973282 - RNA, 18 nt, Human herpesvirus 4 [Epstein-Barr virus]
uaugcauacacugaauuu

SEQ ID NO: 3973283 - RNA, 21 nt, Human herpesvirus 4 [Epstein-Barr virus]
uauuaauaaauaucuuccugu

SEQ ID NO: 3973284 - RNA, 17 nt, Human herpesvirus 4 [Epstein-Barr virus]
uauugaaaccacgccug

SEQ ID NO: 3973285 - RNA, 13 nt, Human herpesvirus 4 [Epstein-Barr virus]
uauugaauuccac

SEQ ID NO: 3973286 - RNA, 15 nt, Human herpesvirus 4 [Epstein-Barr virus]
ucaagagcuuccugg

SEQ ID NO: 3973287 - RNA, 23 nt, Human herpesvirus 4 [Epstein-Barr virus]
ucaagcagcucaccuauggucac

SEQ ID NO: 3973288 - RNA, 13 nt, Human herpesvirus 4 [Epstein-Barr virus]
ucaaggauggcac

SEQ ID NO: 3973289 - RNA, 14 nt, Human herpesvirus 4 [Epstein-Barr virus]
ucaaggccucggag

SEQ ID NO: 3973290 - RNA, 18 nt, Human herpesvirus 4 [Epstein-Barr virus]
ucaaguaccagcuggugg

SEQ ID NO: 3973291 - RNA, 16 nt, Human herpesvirus 4 [Epstein-Barr virus]
ucaauuuugggagcuc

SEQ ID NO: 3973292 - RNA, 13 nt, Human herpesvirus 4 [Epstein-Barr virus]
ucacagcugcugg

SEQ ID NO: 3973293 - RNA, 17 nt, Human herpesvirus 4 [Epstein-Barr virus]
ucacaggacauguuugg

SEQ ID NO: 3973294 - RNA, 19 nt, Human herpesvirus 4 [Epstein-Barr virus]
ucacauauccagagcugag

SEQ ID NO: 3973295 - RNA, 13 nt, Human herpesvirus 4 [Epstein-Barr virus]
ucaccagccaccu

SEQ ID NO: 3973296 - RNA, 13 nt, Human herpesvirus 4 [Epstein-Barr virus]
ucaccaggccugc

SEQ ID NO: 3973297 - RNA, 14 nt, Human herpesvirus 4 [Epstein-Barr virus]
ucacccauggccag

SEQ ID NO: 3973298 - RNA, 19 nt, Human herpesvirus 4 [Epstein-Barr virus]
ucaccccgaguccaaggcc

SEQ ID NO: 3973299 - RNA, 15 nt, Human herpesvirus 4 [Epstein-Barr virus]
ucacuggcaaagggc

SEQ ID NO: 3973300 - RNA, 13 nt, Human herpesvirus 4 [Epstein-Barr virus]
ucacuguccagac

SEQ ID NO: 3973301 - RNA, 23 nt, Human herpesvirus 4 [Epstein-Barr virus]
ucagaccucugcacaacacaacu

SEQ ID NO: 3973302 - RNA, 17 nt, Human herpesvirus 4 [Epstein-Barr virus]
ucagagaggccucuggg

SEQ ID NO: 3973303 - RNA, 23 nt, Human herpesvirus 4 [Epstein-Barr virus]
ucagccagggugaccuggcucag

SEQ ID NO: 3973304 - RNA, 15 nt, Human herpesvirus 4 [Epstein-Barr virus]
ucagccgggaggaag

SEQ ID NO: 3973305 - RNA, 23 nt, Human herpesvirus 4 [Epstein-Barr virus]
ucagccuccaacaggugcccgag

SEQ ID NO: 3973306 - RNA, 16 nt, Human herpesvirus 4 [Epstein-Barr virus]
ucaggacccugggccg

SEQ ID NO: 3973307 - RNA, 23 nt, Human herpesvirus 4 [Epstein-Barr virus]
ucagggccacggcgugccagagg

SEQ ID NO: 3973308 - RNA, 23 nt, Human herpesvirus 4 [Epstein-Barr virus]
ucagggguguagugggugggcau

SEQ ID NO: 3973309 - RNA, 16 nt, Human herpesvirus 4 [Epstein-Barr virus]
ucaucccacugggacg

SEQ ID NO: 3973310 - RNA, 18 nt, Human herpesvirus 4 [Epstein-Barr virus]
ucaugcagggugcacaga

SEQ ID NO: 3973311 - RNA, 18 nt, Human herpesvirus 4 [Epstein-Barr virus]
ucaugcuccuauggacac

SEQ ID NO: 3973312 - RNA, 19 nt, Human herpesvirus 4 [Epstein-Barr virus]
uccaacauuaaagccuccu

SEQ ID NO: 3973313 - RNA, 19 nt, Human herpesvirus 4 [Epstein-Barr virus]
uccaaucaccagccaccuu

SEQ ID NO: 3973314 - RNA, 17 nt, Human herpesvirus 4 [Epstein-Barr virus]
uccacagauggagagau

SEQ ID NO: 3973315 - RNA, 19 nt, Human herpesvirus 4 [Epstein-Barr virus]
uccaccagcuucucaaagg

SEQ ID NO: 3973316 - RNA, 20 nt, Human herpesvirus 4 [Epstein-Barr virus]
uccacccccuggagccagcg

SEQ ID NO: 3973317 - RNA, 20 nt, Human herpesvirus 4 [Epstein-Barr virus]
uccacgggaugacucaucuc

SEQ ID NO: 3973318 - RNA, 17 nt, Human herpesvirus 4 [Epstein-Barr virus]
uccagccaguggucuac

SEQ ID NO: 3973319 - RNA, 18 nt, Human herpesvirus 4 [Epstein-Barr virus]
uccagcucggccagcagg

SEQ ID NO: 3973320 - RNA, 23 nt, Human herpesvirus 4 [Epstein-Barr virus]
uccagcucggccagcaggccggc

SEQ ID NO: 3973321 - RNA, 15 nt, Human herpesvirus 4 [Epstein-Barr virus]
uccaggggccacaca

SEQ ID NO: 3973322 - RNA, 17 nt, Human herpesvirus 4 [Epstein-Barr virus]
uccaguuccccccagcc

SEQ ID NO: 3973323 - RNA, 14 nt, Human herpesvirus 4 [Epstein-Barr virus]
uccaucugcuucug

SEQ ID NO: 3973324 - RNA, 13 nt, Human herpesvirus 4 [Epstein-Barr virus]
uccauuccaccca

SEQ ID NO: 3973325 - RNA, 16 nt, Human herpesvirus 4 [Epstein-Barr virus]
uccauucccagcccca

SEQ ID NO: 3973326 - RNA, 12 nt, Human herpesvirus 4 [Epstein-Barr virus]
ucccaacauggg

SEQ ID NO: 3973327 - RNA, 14 nt, Human herpesvirus 4 [Epstein-Barr virus]
ucccacugugccua

SEQ ID NO: 3973328 - RNA, 20 nt, Human herpesvirus 4 [Epstein-Barr virus]
ucccaggccuuagcccagag

SEQ ID NO: 3973329 - RNA, 23 nt, Human herpesvirus 4 [Epstein-Barr virus]
uccccaaagucaagggaaaggaa

SEQ ID NO: 3973330 - RNA, 17 nt, Human herpesvirus 4 [Epstein-Barr virus]
uccccucguucccccga

SEQ ID NO: 3973331 - RNA, 20 nt, Human herpesvirus 4 [Epstein-Barr virus]
ucccggcgcucgucguucag

SEQ ID NO: 3973332 - RNA, 22 nt, Human herpesvirus 4 [Epstein-Barr virus]
ucccgggcaaacagggcagaga

SEQ ID NO: 3973333 - RNA, 15 nt, Human herpesvirus 4 [Epstein-Barr virus]
ucccggguggugagg

SEQ ID NO: 3973334 - RNA, 22 nt, Human herpesvirus 4 [Epstein-Barr virus]
ucccgugcuuuuugccaggccu

SEQ ID NO: 3973335 - RNA, 20 nt, Human herpesvirus 4 [Epstein-Barr virus]
ucccguggagaguagggagg

SEQ ID NO: 3973336 - RNA, 20 nt, Human herpesvirus 4 [Epstein-Barr virus]
uccgagagcuccgccaccuc

SEQ ID NO: 3973337 - RNA, 20 nt, Human herpesvirus 4 [Epstein-Barr virus]
uccgcagguggcugcugcca

SEQ ID NO: 3973338 - RNA, 16 nt, Human herpesvirus 4 [Epstein-Barr virus]
uccgccaugaccagca

SEQ ID NO: 3973339 - RNA, 18 nt, Human herpesvirus 4 [Epstein-Barr virus]
uccgcgcuaaucgcuggu

SEQ ID NO: 3973340 - RNA, 15 nt, Human herpesvirus 4 [Epstein-Barr virus]
uccgcuccuacacca

SEQ ID NO: 3973341 - RNA, 13 nt, Human herpesvirus 4 [Epstein-Barr virus]
uccgcugggccag

SEQ ID NO: 3973342 - RNA, 16 nt, Human herpesvirus 4 [Epstein-Barr virus]
uccggcccuuugccug

SEQ ID NO: 3973343 - RNA, 15 nt, Human herpesvirus 4 [Epstein-Barr virus]
uccuaggagaaggag

SEQ ID NO: 3973344 - RNA, 23 nt, Human herpesvirus 4 [Epstein-Barr virus]
uccuauggacacuugugguucuc

SEQ ID NO: 3973345 - RNA, 16 nt, Human herpesvirus 4 [Epstein-Barr virus]
uccucaccacucgaaa

SEQ ID NO: 3973346 - RNA, 20 nt, Human herpesvirus 4 [Epstein-Barr virus]
uccugaagcgaagcagcucc

SEQ ID NO: 3973347 - RNA, 21 nt, Human herpesvirus 4 [Epstein-Barr virus]
uccugaagcgaagcagcuccg

SEQ ID NO: 3973348 - RNA, 14 nt, Human herpesvirus 4 [Epstein-Barr virus]
uccugcccucccac

SEQ ID NO: 3973349 - RNA, 23 nt, Human herpesvirus 4 [Epstein-Barr virus]
uccuggccgggcgccugcuccac

SEQ ID NO: 3973350 - RNA, 13 nt, Human herpesvirus 4 [Epstein-Barr virus]
uccuuagacugag

SEQ ID NO: 3973351 - RNA, 17 nt, Human herpesvirus 4 [Epstein-Barr virus]
uccuuggagcuguaacu

SEQ ID NO: 3973352 - RNA, 15 nt, Human herpesvirus 4 [Epstein-Barr virus]
ucgacuucugaagau

SEQ ID NO: 3973353 - RNA, 22 nt, Human herpesvirus 4 [Epstein-Barr virus]
ucgagauuguuuacaucugccc

SEQ ID NO: 3973354 - RNA, 13 nt, Human herpesvirus 4 [Epstein-Barr virus]
ucgaguucucuag

SEQ ID NO: 3973355 - RNA, 19 nt, Human herpesvirus 4 [Epstein-Barr virus]
ucgauuggaaaagggccca

SEQ ID NO: 3973356 - RNA, 17 nt, Human herpesvirus 4 [Epstein-Barr virus]
ucgcccccucugccucc

SEQ ID NO: 3973357 - RNA, 18 nt, Human herpesvirus 4 [Epstein-Barr virus]
ucgccgcuaguuggucca

SEQ ID NO: 3973358 - RNA, 15 nt, Human herpesvirus 4 [Epstein-Barr virus]
ucgccugccacuucc

SEQ ID NO: 3973359 - RNA, 21 nt, Human herpesvirus 4 [Epstein-Barr virus]
ucggguccuagcacaaaccag

SEQ ID NO: 3973360 - RNA, 12 nt, Human herpesvirus 4 [Epstein-Barr virus]
ucggugggccag

SEQ ID NO: 3973361 - RNA, 21 nt, Human herpesvirus 4 [Epstein-Barr virus]
ucguagcuuugaugaggcuga

SEQ ID NO: 3973362 - RNA, 20 nt, Human herpesvirus 4 [Epstein-Barr virus]
cuccguccuuguccaggaga

SEQ ID NO: 3973363 - RNA, 15 nt, Human herpesvirus 4 [Epstein-Barr virus]
cuccgugguccugag

SEQ ID NO: 3973364 - RNA, 15 nt, Human herpesvirus 4 [Epstein-Barr virus]
cuccuaucacaggga

SEQ ID NO: 3973365 - RNA, 21 nt, Human herpesvirus 4 [Epstein-Barr virus]
cuccucgcaggccccccgcac

SEQ ID NO: 3973366 - RNA, 17 nt, Human herpesvirus 4 [Epstein-Barr virus]
cuccugauuugcucuuc

SEQ ID NO: 3973367 - RNA, 15 nt, Human herpesvirus 4 [Epstein-Barr virus]
cuccugccugccucu

SEQ ID NO: 3973368 - RNA, 22 nt, Human herpesvirus 4 [Epstein-Barr virus]
cuccugccugccucugcucugg

SEQ ID NO: 3973369 - RNA, 14 nt, Human herpesvirus 4 [Epstein-Barr virus]
cuccuucuuggccu

SEQ ID NO: 3973370 - RNA, 22 nt, Human herpesvirus 4 [Epstein-Barr virus]
cuccuuggagcuguaacugugg

SEQ ID NO: 3973371 - RNA, 21 nt, Human herpesvirus 4 [Epstein-Barr virus]
cucgccgcuaguugguccagg

SEQ ID NO: 3973372 - RNA, 19 nt, Human herpesvirus 4 [Epstein-Barr virus]
cucggccuccuggccagca

SEQ ID NO: 3973373 - RNA, 23 nt, Human herpesvirus 4 [Epstein-Barr virus]
cucggcggggaacgugacaggca

SEQ ID NO: 3973374 - RNA, 17 nt, Human herpesvirus 4 [Epstein-Barr virus]
cucuccacucccagucc

SEQ ID NO: 3973375 - RNA, 16 nt, Human herpesvirus 4 [Epstein-Barr virus]
cucucuggcugugcug

SEQ ID NO: 3973376 - RNA, 13 nt, Human herpesvirus 4 [Epstein-Barr virus]
cucugcauggaga

SEQ ID NO: 3973377 - RNA, 14 nt, Human herpesvirus 4 [Epstein-Barr virus]
cucugcauggagaa

SEQ ID NO: 3973378 - RNA, 15 nt, Human herpesvirus 4 [Epstein-Barr virus]
cucugccgcgcugcu

SEQ ID NO: 3973379 - RNA, 18 nt, Human herpesvirus 4 [Epstein-Barr virus]
cucuggucgcccccucug

SEQ ID NO: 3973380 - RNA, 12 nt, Human herpesvirus 4 [Epstein-Barr virus]
cucuguuccuuc

SEQ ID NO: 3973381 - RNA, 15 nt, Human herpesvirus 4 [Epstein-Barr virus]
cucuucaaccuuggc

SEQ ID NO: 3973382 - RNA, 18 nt, Human herpesvirus 4 [Epstein-Barr virus]
cucuucauguccacugag

SEQ ID NO: 3973383 - RNA, 22 nt, Human herpesvirus 4 [Epstein-Barr virus]
cucuucgggcaagauggagagg

SEQ ID NO: 3973384 - RNA, 18 nt, Human herpesvirus 4 [Epstein-Barr virus]
cucuuggugcagcccuuu

SEQ ID NO: 3973385 - RNA, 18 nt, Human herpesvirus 4 [Epstein-Barr virus]
cucuuucuggccaaccug
